United States Patent Application Publication US 2005/0255487 A1 - sequence listing, part 69

SEQ ID NO: 1893996 - RNA, 19 nt, Homo sapiens
  misc_RNA (1)...(19): siRNA sense strand
agacaagucaagaauccuu

SEQ ID NO: 1893997 - RNA, 19 nt, Homo sapiens
  misc_RNA (1)...(19): siRNA sense strand
ugauggcugugugaaguau

SEQ ID NO: 1893998 - RNA, 19 nt, Homo sapiens
  misc_RNA (1)...(19): siRNA sense strand
gugauggcugugugaagua

SEQ ID NO: 1893999 - RNA, 19 nt, Homo sapiens
  misc_RNA (1)...(19): siRNA sense strand
ucugguaacgcuuuaugaa

SEQ ID NO: 1894000 - RNA, 19 nt, Homo sapiens
  misc_RNA (1)...(19): siRNA sense strand
gaagaaaucccuuuaccua

SEQ ID NO: 1894001 - RNA, 19 nt, Homo sapiens
  misc_RNA (1)...(19): siRNA sense strand
gcagagacaugguuugauu

SEQ ID NO: 1894002 - RNA, 19 nt, Homo sapiens
  misc_RNA (1)...(19): siRNA sense strand
ggaaacauguucaaccaaa

SEQ ID NO: 1894003 - RNA, 19 nt, Homo sapiens
  misc_RNA (1)...(19): siRNA sense strand
gaaaccaacuauacaagaa

SEQ ID NO: 1894004 - RNA, 19 nt, Homo sapiens
  misc_RNA (1)...(19): siRNA sense strand
caaguuggcugaauuugga

SEQ ID NO: 1894005 - RNA, 19 nt, Homo sapiens
  misc_RNA (1)...(19): siRNA sense strand
gccauuggauucagaagua

SEQ ID NO: 1894006 - RNA, 19 nt, Homo sapiens
  misc_RNA (1)...(19): siRNA sense strand
cuacuuaucugggaaauga

SEQ ID NO: 1894007 - RNA, 19 nt, Homo sapiens
  misc_RNA (1)...(19): siRNA sense strand
gaaaucccuuuaccuauca

SEQ ID NO: 1894008 - RNA, 19 nt, Homo sapiens
  misc_RNA (1)...(19): siRNA sense strand
cuacgacuguuccaaauuu

SEQ ID NO: 1894009 - RNA, 19 nt, Homo sapiens
  misc_RNA (1)...(19): siRNA sense strand
gauguucacuggaaggaaa

SEQ ID NO: 1894010 - RNA, 19 nt, Homo sapiens
  misc_RNA (1)...(19): siRNA sense strand
ggagggugaugaugacauu

SEQ ID NO: 1894011 - RNA, 19 nt, Homo sapiens
  misc_RNA (1)...(19): siRNA sense strand
gaaacauguucaaccaaau

SEQ ID NO: 1894012 - RNA, 19 nt, Homo sapiens
  misc_RNA (1)...(19): siRNA sense strand
gcaacuauaucaggaaaca

SEQ ID NO: 1894013 - RNA, 19 nt, Homo sapiens
  misc_RNA (1)...(19): siRNA sense strand
agacaugguuugauuccua

SEQ ID NO: 1894014 - RNA, 19 nt, Homo sapiens
  misc_RNA (1)...(19): siRNA sense strand
ggcaagaacuacacaaugg

SEQ ID NO: 1894015 - RNA, 19 nt, Homo sapiens
  misc_RNA (1)...(19): siRNA sense strand
uugagucucuugcaaauuu

SEQ ID NO: 1894016 - RNA, 19 nt, Homo sapiens
  misc_RNA (1)...(19): siRNA sense strand
gacauuaguucaaguagca

SEQ ID NO: 1894017 - RNA, 19 nt, Homo sapiens
  misc_RNA (1)...(19): siRNA sense strand
uaacaaguuggcugaauuu

SEQ ID NO: 1894018 - RNA, 19 nt, Homo sapiens
  misc_RNA (1)...(19): siRNA sense strand
ggauucagaaguacauuaa

SEQ ID NO: 1894019 - RNA, 19 nt, Homo sapiens
  misc_RNA (1)...(19): siRNA sense strand
ucaaguagcaacuauauca

SEQ ID NO: 1894020 - RNA, 19 nt, Homo sapiens
  misc_RNA (1)...(19): siRNA sense strand
gaauuucuguugagucucu

SEQ ID NO: 1894021 - RNA, 19 nt, Homo sapiens
  misc_RNA (1)...(19): siRNA sense strand
agaaaucccuuuaccuauc

SEQ ID NO: 1894022 - RNA, 19 nt, Homo sapiens
  misc_RNA (1)...(19): siRNA sense strand
gaaacaggacaaugaaaca

SEQ ID NO: 1894023 - RNA, 19 nt, Homo sapiens
  misc_RNA (1)...(19): siRNA sense strand
aacacucucugguuuauaa

SEQ ID NO: 1894024 - RNA, 19 nt, Homo sapiens
  misc_RNA (1)...(19): siRNA sense strand
uuaacaaguuggcugaauu

SEQ ID NO: 1894025 - RNA, 19 nt, Homo sapiens
  misc_RNA (1)...(19): siRNA sense strand
gaugaugacauugaaguuu

SEQ ID NO: 1894026 - RNA, 19 nt, Homo sapiens
  misc_RNA (1)...(19): siRNA sense strand
ucaagaacauagaaaccaa

SEQ ID NO: 1894027 - RNA, 19 nt, Homo sapiens
  misc_RNA (1)...(19): siRNA sense strand
ggacaaugaaacaggaauu

SEQ ID NO: 1894028 - RNA, 19 nt, Homo sapiens
  misc_RNA (1)...(19): siRNA sense strand
ccuaugaaauucccuuuua

SEQ ID NO: 1894029 - RNA, 19 nt, Homo sapiens
  misc_RNA (1)...(19): siRNA sense strand
ucgagaggcuccggaagua

SEQ ID NO: 1894030 - RNA, 19 nt, Homo sapiens
  misc_RNA (1)...(19): siRNA sense strand
aaaccacauuugccaacua

SEQ ID NO: 1894031 - RNA, 19 nt, Homo sapiens
  misc_RNA (1)...(19): siRNA sense strand
gcucaccuaucccaguuau

SEQ ID NO: 1894032 - RNA, 19 nt, Homo sapiens
  misc_RNA (1)...(19): siRNA sense strand
uagcaacuauaucaggaaa

SEQ ID NO: 1894033 - RNA, 19 nt, Homo sapiens
  misc_RNA (1)...(19): siRNA sense strand
ugagggaauugaugauguu

SEQ ID NO: 1894034 - RNA, 19 nt, Homo sapiens
  misc_RNA (1)...(19): siRNA sense strand
ggaaugguaugaacuuuuc

SEQ ID NO: 1894035 - RNA, 19 nt, Homo sapiens
  misc_RNA (1)...(19): siRNA sense strand
gacaaugaaacaggaauuu

SEQ ID NO: 1894036 - RNA, 19 nt, Homo sapiens
  misc_RNA (1)...(19): siRNA sense strand
caggaaacauguucaacca

SEQ ID NO: 1894037 - RNA, 19 nt, Homo sapiens
  misc_RNA (1)...(19): siRNA sense strand
caagaacuacacaauggaa

SEQ ID NO: 1894038 - RNA, 19 nt, Homo sapiens
  misc_RNA (1)...(19): siRNA sense strand
aaccacauuugccaacuaa

SEQ ID NO: 1894039 - RNA, 19 nt, Homo sapiens
  misc_RNA (1)...(19): siRNA sense strand
gggugaaacaggacaauga

SEQ ID NO: 1894040 - RNA, 19 nt, Homo sapiens
  misc_RNA (1)...(19): siRNA sense strand
ucaaccaaauggcaaagug

SEQ ID NO: 1894041 - RNA, 19 nt, Homo sapiens
  misc_RNA (1)...(19): siRNA sense strand
ccaacuggcucaccuaucc

SEQ ID NO: 1894042 - RNA, 19 nt, Homo sapiens
  misc_RNA (1)...(19): siRNA sense strand
guggagaaccuacuuaucu

SEQ ID NO: 1894043 - RNA, 19 nt, Homo sapiens
  misc_RNA (1)...(19): siRNA sense strand
gggcagagacaugguuuga

SEQ ID NO: 1894044 - RNA, 19 nt, Homo sapiens
  misc_RNA (1)...(19): siRNA sense strand
guucaaguagcaacuauau

SEQ ID NO: 1894045 - RNA, 19 nt, Homo sapiens
  misc_RNA (1)...(19): siRNA sense strand
gcaagaacuacacaaugga

SEQ ID NO: 1894046 - RNA, 19 nt, Homo sapiens
  misc_RNA (1)...(19): siRNA sense strand
gauccuuauugucaagcua

SEQ ID NO: 1894047 - RNA, 19 nt, Homo sapiens
  misc_RNA (1)...(19): siRNA sense strand
uacauuaacuggcaagaac

SEQ ID NO: 1894048 - RNA, 19 nt, Homo sapiens
  misc_RNA (1)...(19): siRNA sense strand
ggugaaacaggacaaugaa

SEQ ID NO: 1894049 - RNA, 19 nt, Homo sapiens
  misc_RNA (1)...(19): siRNA sense strand
gaacuacacaauggaaugg

SEQ ID NO: 1894050 - RNA, 19 nt, Homo sapiens
  misc_RNA (1)...(19): siRNA sense strand
caacuuggcaacuguacau

SEQ ID NO: 1894051 - RNA, 19 nt, Homo sapiens
  misc_RNA (1)...(19): siRNA sense strand
uugaugauguucacuggaa

SEQ ID NO: 1894052 - RNA, 19 nt, Homo sapiens
  misc_RNA (1)...(19): siRNA sense strand
cugggacacuugaaaauua

SEQ ID NO: 1894053 - RNA, 19 nt, Homo sapiens
  misc_RNA (1)...(19): siRNA sense strand
aaacauguucaaccaaaug

SEQ ID NO: 1894054 - RNA, 19 nt, Homo sapiens
  misc_RNA (1)...(19): siRNA sense strand
guacauuaacuggcaagaa

SEQ ID NO: 1894055 - RNA, 19 nt, Homo sapiens
  misc_RNA (1)...(19): siRNA sense strand
gggugaugaugacauugaa

SEQ ID NO: 1894056 - RNA, 19 nt, Homo sapiens
  misc_RNA (1)...(19): siRNA sense strand
caacaggaaacaagacucu

SEQ ID NO: 1894057 - RNA, 19 nt, Homo sapiens
  misc_RNA (1)...(19): siRNA sense strand
cuacaagcgcuuugacuuc

SEQ ID NO: 1894058 - RNA, 19 nt, Homo sapiens
  misc_RNA (1)...(19): siRNA sense strand
cauaugaagaaaucccuuu

SEQ ID NO: 1894059 - RNA, 19 nt, Homo sapiens
  misc_RNA (1)...(19): siRNA sense strand
gacucuugguuuagccaua

SEQ ID NO: 1894060 - RNA, 19 nt, Homo sapiens
  misc_RNA (1)...(19): siRNA sense strand
guccaaaaccugauccuua

SEQ ID NO: 1894061 - RNA, 19 nt, Homo sapiens
  misc_RNA (1)...(19): siRNA sense strand
acuacacaauggaauggua

SEQ ID NO: 1894062 - RNA, 19 nt, Homo sapiens
  misc_RNA (1)...(19): siRNA sense strand
ccacauuugccaacuaaag

SEQ ID NO: 1894063 - RNA, 19 nt, Homo sapiens
  misc_RNA (1)...(19): siRNA sense strand
agaaaccaacuauacaaga

SEQ ID NO: 1894064 - RNA, 19 nt, Homo sapiens
  misc_RNA (1)...(19): siRNA sense strand
ucuccgaccugaaauggau

SEQ ID NO: 1894065 - RNA, 19 nt, Homo sapiens
  misc_RNA (1)...(19): siRNA sense strand
cuuggcaacuguacauuuc

SEQ ID NO: 1894066 - RNA, 19 nt, Homo sapiens
  misc_RNA (1)...(19): siRNA sense strand
acaauggaaugguaugaac

SEQ ID NO: 1894067 - RNA, 19 nt, Homo sapiens
  misc_RNA (1)...(19): siRNA sense strand
gguaugaacuuuuccaacu

SEQ ID NO: 1894068 - RNA, 19 nt, Homo sapiens
  misc_RNA (1)...(19): siRNA sense strand
acucuugguuuagccauaa

SEQ ID NO: 1894069 - RNA, 19 nt, Homo sapiens
  misc_RNA (1)...(19): siRNA sense strand
uggagaaccuacuuaucug

SEQ ID NO: 1894070 - RNA, 19 nt, Homo sapiens
  misc_RNA (1)...(19): siRNA sense strand
guuccaaauuuguguuaag

SEQ ID NO: 1894071 - RNA, 19 nt, Homo sapiens
  misc_RNA (1)...(19): siRNA sense strand
aaccugauccuuauuguca

SEQ ID NO: 1894072 - RNA, 19 nt, Homo sapiens
  misc_RNA (1)...(19): siRNA sense strand
gggaauugaugauguucac

SEQ ID NO: 1894073 - RNA, 19 nt, Homo sapiens
  misc_RNA (1)...(19): siRNA sense strand
uggcucaccuaucccaguu

SEQ ID NO: 1894074 - RNA, 19 nt, Homo sapiens
  misc_RNA (1)...(19): siRNA sense strand
guaaaagccagcccagaaa

SEQ ID NO: 1894075 - RNA, 19 nt, Homo sapiens
  misc_RNA (1)...(19): siRNA sense strand
cacauuugccaacuaaaga

SEQ ID NO: 1894076 - RNA, 19 nt, Homo sapiens
  misc_RNA (1)...(19): siRNA sense strand
ugaaacaggacaaugaaac

SEQ ID NO: 1894077 - RNA, 19 nt, Homo sapiens
  misc_RNA (1)...(19): siRNA sense strand
aagaaaucccuuuaccuau

SEQ ID NO: 1894078 - RNA, 19 nt, Homo sapiens
  misc_RNA (1)...(19): siRNA sense strand
ucugggaaaugaaacaucu

SEQ ID NO: 1894079 - RNA, 19 nt, Homo sapiens
  misc_RNA (1)...(19): siRNA sense strand
uauacuuucuguccaacug

SEQ ID NO: 1894080 - RNA, 19 nt, Homo sapiens
  misc_RNA (1)...(19): siRNA sense strand
uggauucagaaguacauua

SEQ ID NO: 1894081 - RNA, 19 nt, Homo sapiens
  misc_RNA (1)...(19): siRNA sense strand
uguugagucucuugcaaau

SEQ ID NO: 1894082 - RNA, 19 nt, Homo sapiens
  misc_RNA (1)...(19): siRNA sense strand
gugaaacaggacaaugaaa

SEQ ID NO: 1894083 - RNA, 19 nt, Homo sapiens
  misc_RNA (1)...(19): siRNA sense strand
cauuaacuggcaagaacua

SEQ ID NO: 1894084 - RNA, 19 nt, Homo sapiens
  misc_RNA (1)...(19): siRNA sense strand
ucaccuaucccaguuaugg

SEQ ID NO: 1894085 - RNA, 19 nt, Homo sapiens
  misc_RNA (1)...(19): siRNA sense strand
gggccaacaggaaacaaga

SEQ ID NO: 1894086 - RNA, 19 nt, Homo sapiens
  misc_RNA (1)...(19): siRNA sense strand
acaguggagaaccuacuua

SEQ ID NO: 1894087 - RNA, 19 nt, Homo sapiens
  misc_RNA (1)...(19): siRNA sense strand
gaauuuggagcagaguuca

SEQ ID NO: 1894088 - RNA, 19 nt, Homo sapiens
  misc_RNA (1)...(19): siRNA sense strand
ccuacaagcgcuuugacuu

SEQ ID NO: 1894089 - RNA, 19 nt, Homo sapiens
  misc_RNA (1)...(19): siRNA sense strand
uggcaagaacuacacaaug

SEQ ID NO: 1894090 - RNA, 19 nt, Homo sapiens
  misc_RNA (1)...(19): siRNA sense strand
uuauggagggugaugauga

SEQ ID NO: 1894091 - RNA, 19 nt, Homo sapiens
  misc_RNA (1)...(19): siRNA sense strand
caaaaccugauccuuauug

SEQ ID NO: 1894092 - RNA, 19 nt, Homo sapiens
  misc_RNA (1)...(19): siRNA sense strand
uugagggaauugaugaugu

SEQ ID NO: 1894093 - RNA, 19 nt, Homo sapiens
  misc_RNA (1)...(19): siRNA sense strand
guagcaacuauaucaggaa

SEQ ID NO: 1894094 - RNA, 19 nt, Homo sapiens
  misc_RNA (1)...(19): siRNA sense strand
uccaaaaccugauccuuau

SEQ ID NO: 1894095 - RNA, 19 nt, Homo sapiens
  misc_RNA (1)...(19): siRNA sense strand
cgacuguuccaaauuugug

SEQ ID NO: 1894096 - RNA, 19 nt, Homo sapiens
  misc_RNA (1)...(19): siRNA sense strand
guaugaacuuuuccaacuu

SEQ ID NO: 1894097 - RNA, 19 nt, Homo sapiens
  misc_RNA (1)...(19): siRNA sense strand
ugaauuuggagcagaguuc

SEQ ID NO: 1894098 - RNA, 19 nt, Homo sapiens
  misc_RNA (1)...(19): siRNA sense strand
gagaggcuccggaaguacu

SEQ ID NO: 1894099 - RNA, 19 nt, Homo sapiens
  misc_RNA (1)...(19): siRNA sense strand
uaucaggaaacauguucaa

SEQ ID NO: 1894100 - RNA, 19 nt, Homo sapiens
  misc_RNA (1)...(19): siRNA sense strand
ggucaacauuggacgauua

SEQ ID NO: 1894101 - RNA, 19 nt, Homo sapiens
  misc_RNA (1)...(19): siRNA sense strand
gcaaucaagcccaacagua

SEQ ID NO: 1894102 - RNA, 19 nt, Homo sapiens
  misc_RNA (1)...(19): siRNA sense strand
caaucaagcccaacaguau

SEQ ID NO: 1894103 - RNA, 19 nt, Homo sapiens
  misc_RNA (1)...(19): siRNA sense strand
gaacagugaauacgauuuu

SEQ ID NO: 1894104 - RNA, 19 nt, Homo sapiens
  misc_RNA (1)...(19): siRNA sense strand
cugaggagauucugauuca

SEQ ID NO: 1894105 - RNA, 19 nt, Homo sapiens
  misc_RNA (1)...(19): siRNA sense strand
gaggagauucugauucaug

SEQ ID NO: 1894106 - RNA, 19 nt, Homo sapiens
  misc_RNA (1)...(19): siRNA sense strand
caacgagagguucgacgua

SEQ ID NO: 1894107 - RNA, 19 nt, Homo sapiens
  misc_RNA (1)...(19): siRNA sense strand
gaccauggccauuguccaa

SEQ ID NO: 1894108 - RNA, 19 nt, Homo sapiens
  misc_RNA (1)...(19): siRNA sense strand
agacugagcggaagaagca

SEQ ID NO: 1894109 - RNA, 19 nt, Homo sapiens
  misc_RNA (1)...(19): siRNA sense strand
caacauuggacgauuagag

SEQ ID NO: 1894110 - RNA, 19 nt, Homo sapiens
  misc_RNA (1)...(19): siRNA sense strand
uuucuccucuuccuugauu

SEQ ID NO: 1894111 - RNA, 19 nt, Homo sapiens
  misc_RNA (1)...(19): siRNA sense strand
ucaggacacucccuugaac

SEQ ID NO: 1894112 - RNA, 19 nt, Homo sapiens
  misc_RNA (1)...(19): siRNA sense strand
aaucaagcccaacaguauu

SEQ ID NO: 1894113 - RNA, 19 nt, Homo sapiens
  misc_RNA (1)...(19): siRNA sense strand
aaucaggacacucccuuga

SEQ ID NO: 1894114 - RNA, 19 nt, Homo sapiens
  misc_RNA (1)...(19): siRNA sense strand
gcacggucaacgagagguu

SEQ ID NO: 1894115 - RNA, 19 nt, Homo sapiens
  misc_RNA (1)...(19): siRNA sense strand
caacaguauucggggauaa

SEQ ID NO: 1894116 - RNA, 19 nt, Homo sapiens
  misc_RNA (1)...(19): siRNA sense strand
cuugaacagugaauacgau

SEQ ID NO: 1894117 - RNA, 19 nt, Homo sapiens
  misc_RNA (1)...(19): siRNA sense strand
ggcagcuccuccagcaguu

SEQ ID NO: 1894118 - RNA, 19 nt, Homo sapiens
  misc_RNA (1)...(19): siRNA sense strand
ugaacagugaauacgauuu

SEQ ID NO: 1894119 - RNA, 19 nt, Homo sapiens
  misc_RNA (1)...(19): siRNA sense strand
cggaagacugggagacuga

SEQ ID NO: 1894120 - RNA, 19 nt, Homo sapiens
  misc_RNA (1)...(19): siRNA sense strand
guggauggcaguggaauca

SEQ ID NO: 1894121 - RNA, 19 nt, Homo sapiens
  misc_RNA (1)...(19): siRNA sense strand
ggacacucccuugaacagu

SEQ ID NO: 1894122 - RNA, 19 nt, Homo sapiens
  misc_RNA (1)...(19): siRNA sense strand
ggucaacauuggacgauua

SEQ ID NO: 1894123 - RNA, 19 nt, Homo sapiens
  misc_RNA (1)...(19): siRNA sense strand
ggacugggauuuacguuau

SEQ ID NO: 1894124 - RNA, 19 nt, Homo sapiens
  misc_RNA (1)...(19): siRNA sense strand
ccagaacacuguccagauu

SEQ ID NO: 1894125 - RNA, 19 nt, Homo sapiens
  misc_RNA (1)...(19): siRNA sense strand
gcaaucaagcccaacagua

SEQ ID NO: 1894126 - RNA, 19 nt, Homo sapiens
  misc_RNA (1)...(19): siRNA sense strand
ggauuuacguuauagcaau

SEQ ID NO: 1894127 - RNA, 19 nt, Homo sapiens
  misc_RNA (1)...(19): siRNA sense strand
gaccugcuaucuccucuga

SEQ ID NO: 1894128 - RNA, 19 nt, Homo sapiens
  misc_RNA (1)...(19): siRNA sense strand
uuauagcaaugcacagaua

SEQ ID NO: 1894129 - RNA, 19 nt, Homo sapiens
  misc_RNA (1)...(19): siRNA sense strand
caaucaagcccaacaguau

SEQ ID NO: 1894130 - RNA, 19 nt, Homo sapiens
  misc_RNA (1)...(19): siRNA sense strand
ccacauaccauucucaauc

SEQ ID NO: 1894131 - RNA, 19 nt, Homo sapiens
  misc_RNA (1)...(19): siRNA sense strand
gaggaucacuccaagaaaa

SEQ ID NO: 1894132 - RNA, 19 nt, Homo sapiens
  misc_RNA (1)...(19): siRNA sense strand
ccugcuaucuccucugaaa

SEQ ID NO: 1894133 - RNA, 19 nt, Homo sapiens
  misc_RNA (1)...(19): siRNA sense strand
gaacagugaauacgauuuu

SEQ ID NO: 1894134 - RNA, 19 nt, Homo sapiens
  misc_RNA (1)...(19): siRNA sense strand
ugaaauugcuggcauucuc

SEQ ID NO: 1894135 - RNA, 19 nt, Homo sapiens
  misc_RNA (1)...(19): siRNA sense strand
gcacagauacuacaauucc

SEQ ID NO: 1894136 - RNA, 19 nt, Homo sapiens
  misc_RNA (1)...(19): siRNA sense strand
cugaggagauucugauuca

SEQ ID NO: 1894137 - RNA, 19 nt, Homo sapiens
  misc_RNA (1)...(19): siRNA sense strand
gaggagauucugauucaug

SEQ ID NO: 1894138 - RNA, 19 nt, Homo sapiens
  misc_RNA (1)...(19): siRNA sense strand
gaaaagagauccacauacc

SEQ ID NO: 1894139 - RNA, 19 nt, Homo sapiens
  misc_RNA (1)...(19): siRNA sense strand
gacugggauuuacguuaua

SEQ ID NO: 1894140 - RNA, 19 nt, Homo sapiens
  misc_RNA (1)...(19): siRNA sense strand
caacgagagguucgacgua

SEQ ID NO: 1894141 - RNA, 19 nt, Homo sapiens
  misc_RNA (1)...(19): siRNA sense strand
gaaauugcuggcauucuca

SEQ ID NO: 1894142 - RNA, 19 nt, Homo sapiens
  misc_RNA (1)...(19): siRNA sense strand
guuaaacuccuauacacaa

SEQ ID NO: 1894143 - RNA, 19 nt, Homo sapiens
  misc_RNA (1)...(19): siRNA sense strand
uaucccaucuucaggaguu

SEQ ID NO: 1894144 - RNA, 19 nt, Homo sapiens
  misc_RNA (1)...(19): siRNA sense strand
gggacugggauuuacguua

SEQ ID NO: 1894145 - RNA, 19 nt, Homo sapiens
  misc_RNA (1)...(19): siRNA sense strand
gcaaugcacagauacuaca

SEQ ID NO: 1894146 - RNA, 19 nt, Homo sapiens
  misc_RNA (1)...(19): siRNA sense strand
gauuuacguuauagcaaug

SEQ ID NO: 1894147 - RNA, 19 nt, Homo sapiens
  misc_RNA (1)...(19): siRNA sense strand
gaccauggccauuguccaa

SEQ ID NO: 1894148 - RNA, 19 nt, Homo sapiens
  misc_RNA (1)...(19): siRNA sense strand
acccuuaccuuccugagaa

SEQ ID NO: 1894149 - RNA, 19 nt, Homo sapiens
  misc_RNA (1)...(19): siRNA sense strand
augcacagauacuacaauu

SEQ ID NO: 1894150 - RNA, 19 nt, Homo sapiens
  misc_RNA (1)...(19): siRNA sense strand
agacugagcggaagaagca

SEQ ID NO: 1894151 - RNA, 19 nt, Homo sapiens
  misc_RNA (1)...(19): siRNA sense strand
caacauuggacgauuagag

SEQ ID NO: 1894152 - RNA, 19 nt, Homo sapiens
  misc_RNA (1)...(19): siRNA sense strand
uuucuccucuuccuugauu

SEQ ID NO: 1894153 - RNA, 19 nt, Homo sapiens
  misc_RNA (1)...(19): siRNA sense strand
aaagagauccacauaccau

SEQ ID NO: 1894154 - RNA, 19 nt, Homo sapiens
  misc_RNA (1)...(19): siRNA sense strand
ucaggacacucccuugaac

SEQ ID NO: 1894155 - RNA, 19 nt, Homo sapiens
  misc_RNA (1)...(19): siRNA sense strand
aaacuccuauacacaaguc

SEQ ID NO: 1894156 - RNA, 19 nt, Homo sapiens
  misc_RNA (1)...(19): siRNA sense strand
ugucugggacugggauuua

SEQ ID NO: 1894157 - RNA, 19 nt, Homo sapiens
  misc_RNA (1)...(19): siRNA sense strand
uagcaaugcacagauacua

SEQ ID NO: 1894158 - RNA, 19 nt, Homo sapiens
  misc_RNA (1)...(19): siRNA sense strand
aaucaagcccaacaguauu

SEQ ID NO: 1894159 - RNA, 19 nt, Homo sapiens
  misc_RNA (1)...(19): siRNA sense strand
cugaggaucacuccaagaa

SEQ ID NO: 1894160 - RNA, 19 nt, Homo sapiens
  misc_RNA (1)...(19): siRNA sense strand
ucucaaucccacugaaauu

SEQ ID NO: 1894161 - RNA, 19 nt, Homo sapiens
  misc_RNA (1)...(19): siRNA sense strand
uuggggagcuugcccuuua

SEQ ID NO: 1894162 - RNA, 19 nt, Homo sapiens
  misc_RNA (1)...(19): siRNA sense strand
gcacggucaacgagagguu

SEQ ID NO: 1894163 - RNA, 19 nt, Homo sapiens
  misc_RNA (1)...(19): siRNA sense strand
aaucaggacacucccuuga

SEQ ID NO: 1894164 - RNA, 19 nt, Homo sapiens
  misc_RNA (1)...(19): siRNA sense strand
gggauuuacguuauagcaa

SEQ ID NO: 1894165 - RNA, 19 nt, Homo sapiens
  misc_RNA (1)...(19): siRNA sense strand
caacaguauucggggauaa

SEQ ID NO: 1894166 - RNA, 19 nt, Homo sapiens
  misc_RNA (1)...(19): siRNA sense strand
gagauccacauaccauucu

SEQ ID NO: 1894167 - RNA, 19 nt, Homo sapiens
  misc_RNA (1)...(19): siRNA sense strand
uuaaacuccuauacacaag

SEQ ID NO: 1894168 - RNA, 19 nt, Homo sapiens
  misc_RNA (1)...(19): siRNA sense strand
ggcagcuccuccagcaguu

SEQ ID NO: 1894169 - RNA, 19 nt, Homo sapiens
  misc_RNA (1)...(19): siRNA sense strand
ugaacagugaauacgauuu

SEQ ID NO: 1894170 - RNA, 19 nt, Homo sapiens
  misc_RNA (1)...(19): siRNA sense strand
cuugaacagugaauacgau

SEQ ID NO: 1894171 - RNA, 19 nt, Homo sapiens
  misc_RNA (1)...(19): siRNA sense strand
guggauggcaguggaauca

SEQ ID NO: 1894172 - RNA, 19 nt, Homo sapiens
  misc_RNA (1)...(19): siRNA sense strand
cacugaaauugcuggcauu

SEQ ID NO: 1894173 - RNA, 19 nt, Homo sapiens
  misc_RNA (1)...(19): siRNA sense strand
ggacacucccuugaacagu

SEQ ID NO: 1894174 - RNA, 19 nt, Homo sapiens
  misc_RNA (1)...(19): siRNA sense strand
cggaagacugggagacuga

SEQ ID NO: 1894175 - RNA, 19 nt, Homo sapiens
  misc_RNA (1)...(19): siRNA sense strand
ugaggaucacuccaagaaa

SEQ ID NO: 1894176 - RNA, 19 nt, Homo sapiens
  misc_RNA (1)...(19): siRNA sense strand
cacauaccauucucaaucc

SEQ ID NO: 1894177 - RNA, 19 nt, Homo sapiens
  misc_RNA (1)...(19): siRNA sense strand
ccaaggagaucuauacuca

SEQ ID NO: 1894178 - RNA, 19 nt, Homo sapiens
  misc_RNA (1)...(19): siRNA sense strand
gaugaucgaccgcaacuua

SEQ ID NO: 1894179 - RNA, 19 nt, Homo sapiens
  misc_RNA (1)...(19): siRNA sense strand
gggaauaucagcucaauga

SEQ ID NO: 1894180 - RNA, 19 nt, Homo sapiens
  misc_RNA (1)...(19): siRNA sense strand
ucaaagaccuauacuucaa

SEQ ID NO: 1894181 - RNA, 19 nt, Homo sapiens
  misc_RNA (1)...(19): siRNA sense strand
gaauaucccagucuaacua

SEQ ID NO: 1894182 - RNA, 19 nt, Homo sapiens
  misc_RNA (1)...(19): siRNA sense strand
gaggaugaauguaaacaau

SEQ ID NO: 1894183 - RNA, 19 nt, Homo sapiens
  misc_RNA (1)...(19): siRNA sense strand
gaacuagcaggagugauua

SEQ ID NO: 1894184 - RNA, 19 nt, Homo sapiens
  misc_RNA (1)...(19): siRNA sense strand
cgaagaaugugcaguuugu

SEQ ID NO: 1894185 - RNA, 19 nt, Homo sapiens
  misc_RNA (1)...(19): siRNA sense strand
gaauacacagguuccaaua

SEQ ID NO: 1894186 - RNA, 19 nt, Homo sapiens
  misc_RNA (1)...(19): siRNA sense strand
ggagaucuauacucacuuc

SEQ ID NO: 1894187 - RNA, 19 nt, Homo sapiens
  misc_RNA (1)...(19): siRNA sense strand
gaagaccacaggcauugua

SEQ ID NO: 1894188 - RNA, 19 nt, Homo sapiens
  misc_RNA (1)...(19): siRNA sense strand
ccacagacacgaagaaugu

SEQ ID NO: 1894189 - RNA, 19 nt, Homo sapiens
  misc_RNA (1)...(19): siRNA sense strand
ugauguagguggccaaaga

SEQ ID NO: 1894190 - RNA, 19 nt, Homo sapiens
  misc_RNA (1)...(19): siRNA sense strand
ggccaaagaucagaacgaa

SEQ ID NO: 1894191 - RNA, 19 nt, Homo sapiens
  misc_RNA (1)...(19): siRNA sense strand
guccaucauugcaaucaua

SEQ ID NO: 1894192 - RNA, 19 nt, Homo sapiens
  misc_RNA (1)...(19): siRNA sense strand
gcucaaugauucugcuuca

SEQ ID NO: 1894193 - RNA, 19 nt, Homo sapiens
  misc_RNA (1)...(19): siRNA sense strand
ggaauguggacuuuauuga

SEQ ID NO: 1894194 - RNA, 19 nt, Homo sapiens
  misc_RNA (1)...(19): siRNA sense strand
gcagcugccuauauucaau

SEQ ID NO: 1894195 - RNA, 19 nt, Homo sapiens
  misc_RNA (1)...(19): siRNA sense strand
acagaaacuucaaucauuc

SEQ ID NO: 1894196 - RNA, 19 nt, Homo sapiens
  misc_RNA (1)...(19): siRNA sense strand
gaccuauacuucaagaugu

SEQ ID NO: 1894197 - RNA, 19 nt, Homo sapiens
  misc_RNA (1)...(19): siRNA sense strand
aaacacauuucaccuucaa

SEQ ID NO: 1894198 - RNA, 19 nt, Homo sapiens
  misc_RNA (1)...(19): siRNA sense strand
caagauguuugauguaggu

SEQ ID NO: 1894199 - RNA, 19 nt, Homo sapiens
  misc_RNA (1)...(19): siRNA sense strand
caaucauucucuuccuuaa

SEQ ID NO: 1894200 - RNA, 19 nt, Homo sapiens
  misc_RNA (1)...(19): siRNA sense strand
gcaauacuauacaguccau

SEQ ID NO: 1894201 - RNA, 19 nt, Homo sapiens
  misc_RNA (1)...(19): siRNA sense strand
cuaacuacauuccaacuca

SEQ ID NO: 1894202 - RNA, 19 nt, Homo sapiens
  misc_RNA (1)...(19): siRNA sense strand
gcagauccagggaauauca

SEQ ID NO: 1894203 - RNA, 19 nt, Homo sapiens
  misc_RNA (1)...(19): siRNA sense strand
gacagcauuuguaauaaca

SEQ ID NO: 1894204 - RNA, 19 nt, Homo sapiens
  misc_RNA (1)...(19): siRNA sense strand
ugacagcaauuaucuucug

SEQ ID NO: 1894205 - RNA, 19 nt, Homo sapiens
  misc_RNA (1)...(19): siRNA sense strand
ucaaucauucucuuccuua

SEQ ID NO: 1894206 - RNA, 19 nt, Homo sapiens
  misc_RNA (1)...(19): siRNA sense strand
uauauucaaugccaguuug

SEQ ID NO: 1894207 - RNA, 19 nt, Homo sapiens
  misc_RNA (1)...(19): siRNA sense strand
gcuacucggugcuggagaa

SEQ ID NO: 1894208 - RNA, 19 nt, Homo sapiens
  misc_RNA (1)...(19): siRNA sense strand
ccacaggcauuguagaaac

SEQ ID NO: 1894209 - RNA, 19 nt, Homo sapiens
  misc_RNA (1)...(19): siRNA sense strand
gaccacaggcauuguagaa

SEQ ID NO: 1894210 - RNA, 19 nt, Homo sapiens
  misc_RNA (1)...(19): siRNA sense strand
acacagguuccaauacaua

SEQ ID NO: 1894211 - RNA, 19 nt, Homo sapiens
  misc_RNA (1)...(19): siRNA sense strand
auacacagguuccaauaca

SEQ ID NO: 1894212 - RNA, 19 nt, Homo sapiens
  misc_RNA (1)...(19): siRNA sense strand
uggcagugcugaagaagga

SEQ ID NO: 1894213 - RNA, 19 nt, Homo sapiens
  misc_RNA (1)...(19): siRNA sense strand
cagcaauuaucuucugugu

SEQ ID NO: 1894214 - RNA, 19 nt, Homo sapiens
  misc_RNA (1)...(19): siRNA sense strand
agaacuagcaggagugauu

SEQ ID NO: 1894215 - RNA, 19 nt, Homo sapiens
  misc_RNA (1)...(19): siRNA sense strand
gaaaagauaccaaggagau

SEQ ID NO: 1894216 - RNA, 19 nt, Homo sapiens
  misc_RNA (1)...(19): siRNA sense strand
auaaagaggaguccguuaa

SEQ ID NO: 1894217 - RNA, 19 nt, Homo sapiens
  misc_RNA (1)...(19): siRNA sense strand
gguaaaagcaccauuguga

SEQ ID NO: 1894218 - RNA, 19 nt, Homo sapiens
  misc_RNA (1)...(19): siRNA sense strand
ggauggcuauucagaggau

SEQ ID NO: 1894219 - RNA, 19 nt, Homo sapiens
  misc_RNA (1)...(19): siRNA sense strand
ggagugacagcaauuaucu

SEQ ID NO: 1894220 - RNA, 19 nt, Homo sapiens
  misc_RNA (1)...(19): siRNA sense strand
gcaccauugugaaacagau

SEQ ID NO: 1894221 - RNA, 19 nt, Homo sapiens
  misc_RNA (1)...(19): siRNA sense strand
guguggcccucagugauua

SEQ ID NO: 1894222 - RNA, 19 nt, Homo sapiens
  misc_RNA (1)...(19): siRNA sense strand
ucaugaggauggcuauuca

SEQ ID NO: 1894223 - RNA, 19 nt, Homo sapiens
  misc_RNA (1)...(19): siRNA sense strand
gagggagugacagcaauua

SEQ ID NO: 1894224 - RNA, 19 nt, Homo sapiens
  misc_RNA (1)...(19): siRNA sense strand
aaagaccuauacuucaaga

SEQ ID NO: 1894225 - RNA, 19 nt, Homo sapiens
  misc_RNA (1)...(19): siRNA sense strand
cuucaaagaccuauacuuc

SEQ ID NO: 1894226 - RNA, 19 nt, Homo sapiens
  misc_RNA (1)...(19): siRNA sense strand
cagcagauccagggaauau

SEQ ID NO: 1894227 - RNA, 19 nt, Homo sapiens
  misc_RNA (1)...(19): siRNA sense strand
caucauugcaaucauaaga

SEQ ID NO: 1894228 - RNA, 19 nt, Homo sapiens
  misc_RNA (1)...(19): siRNA sense strand
ccaaagaucagaacgaaaa

SEQ ID NO: 1894229 - RNA, 19 nt, Homo sapiens
  misc_RNA (1)...(19): siRNA sense strand
aaacgguuauggcgagaug

SEQ ID NO: 1894230 - RNA, 19 nt, Homo sapiens
  misc_RNA (1)...(19): siRNA sense strand
gcaguggagcgaagcaaga

SEQ ID NO: 1894231 - RNA, 19 nt, Homo sapiens
  misc_RNA (1)...(19): siRNA sense strand
ugacagcauuuguaauaac

SEQ ID NO: 1894232 - RNA, 19 nt, Homo sapiens
  misc_RNA (1)...(19): siRNA sense strand
ccucagugauuaugaccuu

SEQ ID NO: 1894233 - RNA, 19 nt, Homo sapiens
  misc_RNA (1)...(19): siRNA sense strand
acuauacaguccaucauug

SEQ ID NO: 1894234 - RNA, 19 nt, Homo sapiens
  misc_RNA (1)...(19): siRNA sense strand
cacgaagaaugugcaguuu

SEQ ID NO: 1894235 - RNA, 19 nt, Homo sapiens
  misc_RNA (1)...(19): siRNA sense strand
gaagaaaagauaccaagga

SEQ ID NO: 1894236 - RNA, 19 nt, Homo sapiens
  misc_RNA (1)...(19): siRNA sense strand
ugggacggcuaaagauuga

SEQ ID NO: 1894237 - RNA, 19 nt, Homo sapiens
  misc_RNA (1)...(19): siRNA sense strand
aaagcaccauugugaaaca

SEQ ID NO: 1894238 - RNA, 19 nt, Homo sapiens
  misc_RNA (1)...(19): siRNA sense strand
acacgaagaaugugcaguu

SEQ ID NO: 1894239 - RNA, 19 nt, Homo sapiens
  misc_RNA (1)...(19): siRNA sense strand
aagaggaguccguuaacua

SEQ ID NO: 1894240 - RNA, 19 nt, Homo sapiens
  misc_RNA (1)...(19): siRNA sense strand
ggagaugaaccgaaugcau

SEQ ID NO: 1894241 - RNA, 19 nt, Homo sapiens
  misc_RNA (1)...(19): siRNA sense strand
gccaugggacggcuaaaga

SEQ ID NO: 1894242 - RNA, 19 nt, Homo sapiens
  misc_RNA (1)...(19): siRNA sense strand
aagaaugugcaguuuguuu

SEQ ID NO: 1894243 - RNA, 19 nt, Homo sapiens
  misc_RNA (1)...(19): siRNA sense strand
acgaggagaugaaccgaau

SEQ ID NO: 1894244 - RNA, 19 nt, Homo sapiens
  misc_RNA (1)...(19): siRNA sense strand
cagggaauaucagcucaau

SEQ ID NO: 1894245 - RNA, 19 nt, Homo sapiens
  misc_RNA (1)...(19): siRNA sense strand
gcacguugagcgccgaaga

SEQ ID NO: 1894246 - RNA, 19 nt, Homo sapiens
  misc_RNA (1)...(19): siRNA sense strand
uaaaagcaccauugugaaa

SEQ ID NO: 1894247 - RNA, 19 nt, Homo sapiens
  misc_RNA (1)...(19): siRNA sense strand
agaggaguccguuaacuau

SEQ ID NO: 1894248 - RNA, 19 nt, Homo sapiens
  misc_RNA (1)...(19): siRNA sense strand
gugaagaccacaggcauug

SEQ ID NO: 1894249 - RNA, 19 nt, Homo sapiens
  misc_RNA (1)...(19): siRNA sense strand
cuacagcaauacuauacag

SEQ ID NO: 1894250 - RNA, 19 nt, Homo sapiens
  misc_RNA (1)...(19): siRNA sense strand
uagcaggagugauuaaacg

SEQ ID NO: 1894251 - RNA, 19 nt, Homo sapiens
  misc_RNA (1)...(19): siRNA sense strand
gaagaaugugcaguuuguu

SEQ ID NO: 1894252 - RNA, 19 nt, Homo sapiens
  misc_RNA (1)...(19): siRNA sense strand
aaggagaucuauacucacu

SEQ ID NO: 1894253 - RNA, 19 nt, Homo sapiens
  misc_RNA (1)...(19): siRNA sense strand
aggagugauuaaacgguua

SEQ ID NO: 1894254 - RNA, 19 nt, Homo sapiens
  misc_RNA (1)...(19): siRNA sense strand
gauaccaaggagaucuaua

SEQ ID NO: 1894255 - RNA, 19 nt, Homo sapiens
  misc_RNA (1)...(19): siRNA sense strand
cagguuccaauacauauga

SEQ ID NO: 1894256 - RNA, 19 nt, Homo sapiens
  misc_RNA (1)...(19): siRNA sense strand
agaccuauacuucaagaug

SEQ ID NO: 1894257 - RNA, 19 nt, Homo sapiens
  misc_RNA (1)...(19): siRNA sense strand
caacucagcaagauguucu

SEQ ID NO: 1894258 - RNA, 19 nt, Homo sapiens
  misc_RNA (1)...(19): siRNA sense strand
cagucuaacuacauuccaa

SEQ ID NO: 1894259 - RNA, 19 nt, Homo sapiens
  misc_RNA (1)...(19): siRNA sense strand
ggaguccguuaacuaucug

SEQ ID NO: 1894260 - RNA, 19 nt, Homo sapiens
  misc_RNA (1)...(19): siRNA sense strand
ggagugauuaaacgguuau

SEQ ID NO: 1894261 - RNA, 19 nt, Homo sapiens
  misc_RNA (1)...(19): siRNA sense strand
guggagcgaagcaagauga

SEQ ID NO: 1894262 - RNA, 19 nt, Homo sapiens
  misc_RNA (1)...(19): siRNA sense strand
aauaaagaggaguccguua

SEQ ID NO: 1894263 - RNA, 19 nt, Homo sapiens
  misc_RNA (1)...(19): siRNA sense strand
gggagugacagcaauuauc

SEQ ID NO: 1894264 - RNA, 19 nt, Homo sapiens
  misc_RNA (1)...(19): siRNA sense strand
cacaggcauuguagaaaca

SEQ ID NO: 1894265 - RNA, 19 nt, Homo sapiens
  misc_RNA (1)...(19): siRNA sense strand
guucuucggacgagaguga

SEQ ID NO: 1894266 - RNA, 19 nt, Homo sapiens
  misc_RNA (1)...(19): siRNA sense strand
cuaaaugaucuggauagaa

SEQ ID NO: 1894267 - RNA, 19 nt, Homo sapiens
  misc_RNA (1)...(19): siRNA sense strand
aaagaggaguccguuaacu

SEQ ID NO: 1894268 - RNA, 19 nt, Homo sapiens
  misc_RNA (1)...(19): siRNA sense strand
caugggacggcuaaagauu

SEQ ID NO: 1894269 - RNA, 19 nt, Homo sapiens
  misc_RNA (1)...(19): siRNA sense strand
guugagcgccgaagacaag

SEQ ID NO: 1894270 - RNA, 19 nt, Homo sapiens
  misc_RNA (1)...(19): siRNA sense strand
gaaccgaaugcaugaaagc

SEQ ID NO: 1894271 - RNA, 19 nt, Homo sapiens
  misc_RNA (1)...(19): siRNA sense strand
gaaacuucaaucauucucu

SEQ ID NO: 1894272 - RNA, 19 nt, Homo sapiens
  misc_RNA (1)...(19): siRNA sense strand
gauucugcuucauauuauc

SEQ ID NO: 1894273 - RNA, 19 nt, Homo sapiens
  misc_RNA (1)...(19): siRNA sense strand
uauccagaauacacagguu

SEQ ID NO: 1894274 - RNA, 19 nt, Homo sapiens
  misc_RNA (1)...(19): siRNA sense strand
uacaguccaucauugcaau

SEQ ID NO: 1894275 - RNA, 19 nt, Homo sapiens
  misc_RNA (1)...(19): siRNA sense strand
gcauuguagaaacacauuu

SEQ ID NO: 1894276 - RNA, 19 nt, Homo sapiens
  misc_RNA (1)...(19): siRNA sense strand
uaaagaggaguccguuaac

SEQ ID NO: 1894277 - RNA, 19 nt, Homo sapiens
  misc_RNA (1)...(19): siRNA sense strand
caucugagcuccacaauga

SEQ ID NO: 1894278 - RNA, 19 nt, Homo sapiens
  misc_RNA (1)...(19): siRNA sense strand
ugacaaagaugcaguagga

SEQ ID NO: 1894279 - RNA, 19 nt, Homo sapiens
  misc_RNA (1)...(19): siRNA sense strand
ggagccugcuugacuuaua

SEQ ID NO: 1894280 - RNA, 19 nt, Homo sapiens
  misc_RNA (1)...(19): siRNA sense strand
gaaagaggaggagucauuu

SEQ ID NO: 1894281 - RNA, 19 nt, Homo sapiens
  misc_RNA (1)...(19): siRNA sense strand
gaggaggagucauuuaaca

SEQ ID NO: 1894282 - RNA, 19 nt, Homo sapiens
  misc_RNA (1)...(19): siRNA sense strand
guggagaccuagaagauga

SEQ ID NO: 1894283 - RNA, 19 nt, Homo sapiens
  misc_RNA (1)...(19): siRNA sense strand
ggaagaggaggaugacaaa

SEQ ID NO: 1894284 - RNA, 19 nt, Homo sapiens
  misc_RNA (1)...(19): siRNA sense strand
ggacuuggccuccagugaa

SEQ ID NO: 1894285 - RNA, 19 nt, Homo sapiens
  misc_RNA (1)...(19): siRNA sense strand
ccaaguuacugucacaaug

SEQ ID NO: 1894286 - RNA, 19 nt, Homo sapiens
  misc_RNA (1)...(19): siRNA sense strand
ugaaagaggaggagucauu

SEQ ID NO: 1894287 - RNA, 19 nt, Homo sapiens
  misc_RNA (1)...(19): siRNA sense strand
caucagauaucauugacau

SEQ ID NO: 1894288 - RNA, 19 nt, Homo sapiens
  misc_RNA (1)...(19): siRNA sense strand
agagcugacuuacccauuu

SEQ ID NO: 1894289 - RNA, 19 nt, Homo sapiens
  misc_RNA (1)...(19): siRNA sense strand
gagcccagcuucugaacuc

SEQ ID NO: 1894290 - RNA, 19 nt, Homo sapiens
  misc_RNA (1)...(19): siRNA sense strand
gagcugacuuacccauuuc

SEQ ID NO: 1894291 - RNA, 19 nt, Homo sapiens
  misc_RNA (1)...(19): siRNA sense strand
cgagggcucucacccaaau

SEQ ID NO: 1894292 - RNA, 19 nt, Homo sapiens
  misc_RNA (1)...(19): siRNA sense strand
ugacuuauacgaugauuuc

SEQ ID NO: 1894293 - RNA, 19 nt, Homo sapiens
  misc_RNA (1)...(19): siRNA sense strand
gaacugucuucagaauaau

SEQ ID NO: 1894294 - RNA, 19 nt, Homo sapiens
  misc_RNA (1)...(19): siRNA sense strand
gacuuggccuccagugaaa

SEQ ID NO: 1894295 - RNA, 19 nt, Homo sapiens
  misc_RNA (1)...(19): siRNA sense strand
ucauugacaucgacuacuu

SEQ ID NO: 1894296 - RNA, 19 nt, Homo sapiens
  misc_RNA (1)...(19): siRNA sense strand
ugaccaggcugacuuggau

SEQ ID NO: 1894297 - RNA, 19 nt, Homo sapiens
  misc_RNA (1)...(19): siRNA sense strand
gcuccacaaugauaacuuc

SEQ ID NO: 1894298 - RNA, 19 nt, Homo sapiens
  misc_RNA (1)...(19): siRNA sense strand
caaccggcaucagauauca

SEQ ID NO: 1894299 - RNA, 19 nt, Homo sapiens
  misc_RNA (1)...(19): siRNA sense strand
ugacuuggaugugaacugu

SEQ ID NO: 1894300 - RNA, 19 nt, Homo sapiens
  misc_RNA (1)...(19): siRNA sense strand
agaggaggaugacaaagau

SEQ ID NO: 1894301 - RNA, 19 nt, Homo sapiens
  misc_RNA (1)...(19): siRNA sense strand
aagaggaggagucauuuaa

SEQ ID NO: 1894302 - RNA, 19 nt, Homo sapiens
  misc_RNA (1)...(19): siRNA sense strand
aaagaggaggagucauuua

SEQ ID NO: 1894303 - RNA, 19 nt, Homo sapiens
  misc_RNA (1)...(19): siRNA sense strand
gcucucacccaaaugauga

SEQ ID NO: 1894304 - RNA, 19 nt, Homo sapiens
  misc_RNA (1)...(19): siRNA sense strand
ggaggagucauuuaacauc

SEQ ID NO: 1894305 - RNA, 19 nt, Homo sapiens
  misc_RNA (1)...(19): siRNA sense strand
ggaugacaaagaugcagua

SEQ ID NO: 1894306 - RNA, 19 nt, Homo sapiens
  misc_RNA (1)...(19): siRNA sense strand
gcaacacgcaggacuacau

SEQ ID NO: 1894307 - RNA, 19 nt, Homo sapiens
  misc_RNA (1)...(19): siRNA sense strand
gagccugcuugacuuauac

SEQ ID NO: 1894308 - RNA, 19 nt, Homo sapiens
  misc_RNA (1)...(19): siRNA sense strand
ucucaaguccugccugaaa

SEQ ID NO: 1894309 - RNA, 19 nt, Homo sapiens
  misc_RNA (1)...(19): siRNA sense strand
ccaugucgcccaaacuuga

SEQ ID NO: 1894310 - RNA, 19 nt, Homo sapiens
  misc_RNA (1)...(19): siRNA sense strand
caacgacacgcgggaagaa

SEQ ID NO: 1894311 - RNA, 19 nt, Homo sapiens
  misc_RNA (1)...(19): siRNA sense strand
aagaggaggaugacaaaga

SEQ ID NO: 1894312 - RNA, 19 nt, Homo sapiens
  misc_RNA (1)...(19): siRNA sense strand
agaaccacccugauacuga

SEQ ID NO: 1894313 - RNA, 19 nt, Homo sapiens
  misc_RNA (1)...(19): siRNA sense strand
ucugagcuccacaaugaua

SEQ ID NO: 1894314 - RNA, 19 nt, Homo sapiens
  misc_RNA (1)...(19): siRNA sense strand
gcgaccucuucccaaguua

SEQ ID NO: 1894315 - RNA, 19 nt, Homo sapiens
  misc_RNA (1)...(19): siRNA sense strand
uaugaugacuuggaugaag

SEQ ID NO: 1894316 - RNA, 19 nt, Homo sapiens
  misc_RNA (1)...(19): siRNA sense strand
caugaugacgguguucuuu

SEQ ID NO: 1894317 - RNA, 19 nt, Homo sapiens
  misc_RNA (1)...(19): siRNA sense strand
gcguaggaccaacaaauuc

SEQ ID NO: 1894318 - RNA, 19 nt, Homo sapiens
  misc_RNA (1)...(19): siRNA sense strand
caaguuacugucacaaugg

SEQ ID NO: 1894319 - RNA, 19 nt, Homo sapiens
  misc_RNA (1)...(19): siRNA sense strand
caggcugacuuggauguga

SEQ ID NO: 1894320 - RNA, 19 nt, Homo sapiens
  misc_RNA (1)...(19): siRNA sense strand
cauuuaacauccagaacuc

SEQ ID NO: 1894321 - RNA, 19 nt, Homo sapiens
  misc_RNA (1)...(19): siRNA sense strand
uccaggagguucucaaguc

SEQ ID NO: 1894322 - RNA, 19 nt, Homo sapiens
  misc_RNA (1)...(19): siRNA sense strand
ggaugaagaggaggaggaa

SEQ ID NO: 1894323 - RNA, 19 nt, Homo sapiens
  misc_RNA (1)...(19): siRNA sense strand
cggcaucagauaucauuga

SEQ ID NO: 1894324 - RNA, 19 nt, Homo sapiens
  misc_RNA (1)...(19): siRNA sense strand
ccuggagccugcuugacuu

SEQ ID NO: 1894325 - RNA, 19 nt, Homo sapiens
  misc_RNA (1)...(19): siRNA sense strand
cagauaucauugacaucga

SEQ ID NO: 1894326 - RNA, 19 nt, Homo sapiens
  misc_RNA (1)...(19): siRNA sense strand
ucaagacggagaauaccaa

SEQ ID NO: 1894327 - RNA, 19 nt, Homo sapiens
  misc_RNA (1)...(19): siRNA sense strand
gagaaccacccugauacug

SEQ ID NO: 1894328 - RNA, 19 nt, Homo sapiens
  misc_RNA (1)...(19): siRNA sense strand
cagagaaccacccugauac

SEQ ID NO: 1894329 - RNA, 19 nt, Homo sapiens
  misc_RNA (1)...(19): siRNA sense strand
agugcuaccugguggagaa

SEQ ID NO: 1894330 - RNA, 19 nt, Homo sapiens
  misc_RNA (1)...(19): siRNA sense strand
ugcgaccucuucccaaguu

SEQ ID NO: 1894331 - RNA, 19 nt, Homo sapiens
  misc_RNA (1)...(19): siRNA sense strand
caaacuugaggguggcaaa

SEQ ID NO: 1894332 - RNA, 19 nt, Homo sapiens
  misc_RNA (1)...(19): siRNA sense strand
caacacgcaggacuacauc

SEQ ID NO: 1894333 - RNA, 19 nt, Homo sapiens
  misc_RNA (1)...(19): siRNA sense strand
cagcacacccgacccucaa

SEQ ID NO: 1894334 - RNA, 19 nt, Homo sapiens
  misc_RNA (1)...(19): siRNA sense strand
ggugcaacacgcaggacua

SEQ ID NO: 1894335 - RNA, 19 nt, Homo sapiens
  misc_RNA (1)...(19): siRNA sense strand
caccaggaaccucagagaa

SEQ ID NO: 1894336 - RNA, 19 nt, Homo sapiens
  misc_RNA (1)...(19): siRNA sense strand
ugaugacgguguucuuugc

SEQ ID NO: 1894337 - RNA, 19 nt, Homo sapiens
  misc_RNA (1)...(19): siRNA sense strand
gcgcagaucuggggagcuu

SEQ ID NO: 1894338 - RNA, 19 nt, Homo sapiens
  misc_RNA (1)...(19): siRNA sense strand
augaugacuuggaugaaga

SEQ ID NO: 1894339 - RNA, 19 nt, Homo sapiens
  misc_RNA (1)...(19): siRNA sense strand
gcacacccgacccucaagu

SEQ ID NO: 1894340 - RNA, 19 nt, Homo sapiens
  misc_RNA (1)...(19): siRNA sense strand
ggcaucagauaucauugac

SEQ ID NO: 1894341 - RNA, 19 nt, Homo sapiens
  misc_RNA (1)...(19): siRNA sense strand
ccaaaugaugauccuagug

SEQ ID NO: 1894342 - RNA, 19 nt, Homo sapiens
  misc_RNA (1)...(19): siRNA sense strand
gguggagaccuagaagaug

SEQ ID NO: 1894343 - RNA, 19 nt, Homo sapiens
  misc_RNA (1)...(19): siRNA sense strand
aggcugacuuggaugugaa

SEQ ID NO: 1894344 - RNA, 19 nt, Homo sapiens
  misc_RNA (1)...(19): siRNA sense strand
ucaaguccugccugaaaga

SEQ ID NO: 1894345 - RNA, 19 nt, Homo sapiens
  misc_RNA (1)...(19): siRNA sense strand
gggacuuggccuccaguga

SEQ ID NO: 1894346 - RNA, 19 nt, Homo sapiens
  misc_RNA (1)...(19): siRNA sense strand
ggagaccuagaagaugaaa

SEQ ID NO: 1894347 - RNA, 19 nt, Homo sapiens
  misc_RNA (1)...(19): siRNA sense strand
gaaaggagagaaagacuua

SEQ ID NO: 1894348 - RNA, 19 nt, Homo sapiens
  misc_RNA (1)...(19): siRNA sense strand
gaaagcagcauuccuauau

SEQ ID NO: 1894349 - RNA, 19 nt, Homo sapiens
  misc_RNA (1)...(19): siRNA sense strand
gagaaagacuuaccagaga

SEQ ID NO: 1894350 - RNA, 19 nt, Homo sapiens
  misc_RNA (1)...(19): siRNA sense strand
gaaagugguugguaauaug

SEQ ID NO: 1894351 - RNA, 19 nt, Homo sapiens
  misc_RNA (1)...(19): siRNA sense strand
gaugaagacugaaguaaug

SEQ ID NO: 1894352 - RNA, 19 nt, Homo sapiens
  misc_RNA (1)...(19): siRNA sense strand
ggaaucaccuuaacacaca

SEQ ID NO: 1894353 - RNA, 19 nt, Homo sapiens
  misc_RNA (1)...(19): siRNA sense strand
aaagaaagaugcgcucuaa

SEQ ID NO: 1894354 - RNA, 19 nt, Homo sapiens
  misc_RNA (1)...(19): siRNA sense strand
gggcaaagauguagaugug

SEQ ID NO: 1894355 - RNA, 19 nt, Homo sapiens
  misc_RNA (1)...(19): siRNA sense strand
caacagcaguguacagaug

SEQ ID NO: 1894356 - RNA, 19 nt, Homo sapiens
  misc_RNA (1)...(19): siRNA sense strand
ggaggagccugccguagaa

SEQ ID NO: 1894357 - RNA, 19 nt, Homo sapiens
  misc_RNA (1)...(19): siRNA sense strand
gagaugauccucagcauga

SEQ ID NO: 1894358 - RNA, 19 nt, Homo sapiens
  misc_RNA (1)...(19): siRNA sense strand
gaagaugccugccacuuac

SEQ ID NO: 1894359 - RNA, 19 nt, Homo sapiens
  misc_RNA (1)...(19): siRNA sense strand
gaaagaugcgcucuaagaa

SEQ ID NO: 1894360 - RNA, 19 nt, Homo sapiens
  misc_RNA (1)...(19): siRNA sense strand
gagaaacgaagaagaguaa

SEQ ID NO: 1894361 - RNA, 19 nt, Homo sapiens
  misc_RNA (1)...(19): siRNA sense strand
gaacagcccauaaacauag

SEQ ID NO: 1894362 - RNA, 19 nt, Homo sapiens
  misc_RNA (1)...(19): siRNA sense strand
gacgauacccagauuauaa

SEQ ID NO: 1894363 - RNA, 19 nt, Homo sapiens
  misc_RNA (1)...(19): siRNA sense strand
ggaaaagccuuaugaaugu

SEQ ID NO: 1894364 - RNA, 19 nt, Homo sapiens
  misc_RNA (1)...(19): siRNA sense strand
aaagaaagguguaaagaag

SEQ ID NO: 1894365 - RNA, 19 nt, Homo sapiens
  misc_RNA (1)...(19): siRNA sense strand
gaaagugaacccaugauau

SEQ ID NO: 1894366 - RNA, 19 nt, Homo sapiens
  misc_RNA (1)...(19): siRNA sense strand
ggaaagugaacccaugaua

SEQ ID NO: 1894367 - RNA, 19 nt, Homo sapiens
  misc_RNA (1)...(19): siRNA sense strand
caucagaagucacacaaga

SEQ ID NO: 1894368 - RNA, 19 nt, Homo sapiens
  misc_RNA (1)...(19): siRNA sense strand
ggaaggugaugcagucgaa

SEQ ID NO: 1894369 - RNA, 19 nt, Homo sapiens
  misc_RNA (1)...(19): siRNA sense strand
gagaagccauucaaguguu

SEQ ID NO: 1894370 - RNA, 19 nt, Homo sapiens
  misc_RNA (1)...(19): siRNA sense strand
gaaaugccguuacugugau

SEQ ID NO: 1894371 - RNA, 19 nt, Homo sapiens
  misc_RNA (1)...(19): siRNA sense strand
guagaagucagcaaauuaa

SEQ ID NO: 1894372 - RNA, 19 nt, Homo sapiens
  misc_RNA (1)...(19): siRNA sense strand
caagacaugcugauaauug

SEQ ID NO: 1894373 - RNA, 19 nt, Homo sapiens
  misc_RNA (1)...(19): siRNA sense strand
gaauacaggugcaauugag

SEQ ID NO: 1894374 - RNA, 19 nt, Homo sapiens
  misc_RNA (1)...(19): siRNA sense strand
ggaacagcccauaaacaua

SEQ ID NO: 1894375 - RNA, 19 nt, Homo sapiens
  misc_RNA (1)...(19): siRNA sense strand
ggaauaccauggcaagaca

SEQ ID NO: 1894376 - RNA, 19 nt, Homo sapiens
  misc_RNA (1)...(19): siRNA sense strand
agugugagcuuugcaguua

SEQ ID NO: 1894377 - RNA, 19 nt, Homo sapiens
  misc_RNA (1)...(19): siRNA sense strand
ggcaagacaugcugauaau

SEQ ID NO: 1894378 - RNA, 19 nt, Homo sapiens
  misc_RNA (1)...(19): siRNA sense strand
gagaaagugguugguaaua

SEQ ID NO: 1894379 - RNA, 19 nt, Homo sapiens
  misc_RNA (1)...(19): siRNA sense strand
gaaccaaccagcccaaaca

SEQ ID NO: 1894380 - RNA, 19 nt, Homo sapiens
  misc_RNA (1)...(19): siRNA sense strand
ggagaaacgaagaagagua

SEQ ID NO: 1894381 - RNA, 19 nt, Homo sapiens
  misc_RNA (1)...(19): siRNA sense strand
ggacgauacccagauuaua

SEQ ID NO: 1894382 - RNA, 19 nt, Homo sapiens
  misc_RNA (1)...(19): siRNA sense strand
agaagaugccugccacuua

SEQ ID NO: 1894383 - RNA, 19 nt, Homo sapiens
  misc_RNA (1)...(19): siRNA sense strand
cggagaaagugguugguaa

SEQ ID NO: 1894384 - RNA, 19 nt, Homo sapiens
  misc_RNA (1)...(19): siRNA sense strand
caagaaaugccguuacugu

SEQ ID NO: 1894385 - RNA, 19 nt, Homo sapiens
  misc_RNA (1)...(19): siRNA sense strand
gcaaacugcguuauacaga

SEQ ID NO: 1894386 - RNA, 19 nt, Homo sapiens
  misc_RNA (1)...(19): siRNA sense strand
uuacugugaugcuguguuu

SEQ ID NO: 1894387 - RNA, 19 nt, Homo sapiens
  misc_RNA (1)...(19): siRNA sense strand
uaggagaacuucagcuugu

SEQ ID NO: 1894388 - RNA, 19 nt, Homo sapiens
  misc_RNA (1)...(19): siRNA sense strand
gugaugcuguguuucauga

SEQ ID NO: 1894389 - RNA, 19 nt, Homo sapiens
  misc_RNA (1)...(19): siRNA sense strand
agaaagugguugguaauau

SEQ ID NO: 1894390 - RNA, 19 nt, Homo sapiens
  misc_RNA (1)...(19): siRNA sense strand
agaaagaugcgcucuaaga

SEQ ID NO: 1894391 - RNA, 19 nt, Homo sapiens
  misc_RNA (1)...(19): siRNA sense strand
cagaaaauguggccaaauu

SEQ ID NO: 1894392 - RNA, 19 nt, Homo sapiens
  misc_RNA (1)...(19): siRNA sense strand
gaugagagaccacacaagu

SEQ ID NO: 1894393 - RNA, 19 nt, Homo sapiens
  misc_RNA (1)...(19): siRNA sense strand
aagcagcauuccuauauug

SEQ ID NO: 1894394 - RNA, 19 nt, Homo sapiens
  misc_RNA (1)...(19): siRNA sense strand
uguagaagucagcaaauua

SEQ ID NO: 1894395 - RNA, 19 nt, Homo sapiens
  misc_RNA (1)...(19): siRNA sense strand
aaagugaacccaugauaug

SEQ ID NO: 1894396 - RNA, 19 nt, Homo sapiens
  misc_RNA (1)...(19): siRNA sense strand
ccacacaagugccaucucu

SEQ ID NO: 1894397 - RNA, 19 nt, Homo sapiens
  misc_RNA (1)...(19): siRNA sense strand
cacauucgcucucauacug

SEQ ID NO: 1894398 - RNA, 19 nt, Homo sapiens
  misc_RNA (1)...(19): siRNA sense strand
aaauuuggaucgucacaug

SEQ ID NO: 1894399 - RNA, 19 nt, Homo sapiens
  misc_RNA (1)...(19): siRNA sense strand
cgaaagcagcauuccuaua

SEQ ID NO: 1894400 - RNA, 19 nt, Homo sapiens
  misc_RNA (1)...(19): siRNA sense strand
ugauuuggguguccacuug

SEQ ID NO: 1894401 - RNA, 19 nt, Homo sapiens
  misc_RNA (1)...(19): siRNA sense strand
agaaagaagauuccucuga

SEQ ID NO: 1894402 - RNA, 19 nt, Homo sapiens
  misc_RNA (1)...(19): siRNA sense strand
ggaaaggagagaaagacuu

SEQ ID NO: 1894403 - RNA, 19 nt, Homo sapiens
  misc_RNA (1)...(19): siRNA sense strand
aaagcagcauuccuauauu

SEQ ID NO: 1894404 - RNA, 19 nt, Homo sapiens
  misc_RNA (1)...(19): siRNA sense strand
gaagauccuaguuggcaaa

SEQ ID NO: 1894405 - RNA, 19 nt, Homo sapiens
  misc_RNA (1)...(19): siRNA sense strand
aagaugcgcucuaagaaag

SEQ ID NO: 1894406 - RNA, 19 nt, Homo sapiens
  misc_RNA (1)...(19): siRNA sense strand
agaagucacacaagaauga

SEQ ID NO: 1894407 - RNA, 19 nt, Homo sapiens
  misc_RNA (1)...(19): siRNA sense strand
agaaaugccguuacuguga

SEQ ID NO: 1894408 - RNA, 19 nt, Homo sapiens
  misc_RNA (1)...(19): siRNA sense strand
ggacacauacaagcugaaa

SEQ ID NO: 1894409 - RNA, 19 nt, Homo sapiens
  misc_RNA (1)...(19): siRNA sense strand
guguagaagucagcaaauu

SEQ ID NO: 1894410 - RNA, 19 nt, Homo sapiens
  misc_RNA (1)...(19): siRNA sense strand
ggagaaagugguugguaau

SEQ ID NO: 1894411 - RNA, 19 nt, Homo sapiens
  misc_RNA (1)...(19): siRNA sense strand
agaagacauuccaguguga

SEQ ID NO: 1894412 - RNA, 19 nt, Homo sapiens
  misc_RNA (1)...(19): siRNA sense strand
gcaauugagaacauuauag

SEQ ID NO: 1894413 - RNA, 19 nt, Homo sapiens
  misc_RNA (1)...(19): siRNA sense strand
ccaaccagcccaaacagaa

SEQ ID NO: 1894414 - RNA, 19 nt, Homo sapiens
  misc_RNA (1)...(19): siRNA sense strand
aaagaugcgcucuaagaaa

SEQ ID NO: 1894415 - RNA, 19 nt, Homo sapiens
  misc_RNA (1)...(19): siRNA sense strand
ccaugaagaugcacauuuu

SEQ ID NO: 1894416 - RNA, 19 nt, Homo sapiens
  misc_RNA (1)...(19): siRNA sense strand
gggaaaagccuuaugaaug

SEQ ID NO: 1894417 - RNA, 19 nt, Homo sapiens
  misc_RNA (1)...(19): siRNA sense strand
gaguaaacguggaagaaaa

SEQ ID NO: 1894418 - RNA, 19 nt, Homo sapiens
  misc_RNA (1)...(19): siRNA sense strand
gguuucaggugguuaaagu

SEQ ID NO: 1894419 - RNA, 19 nt, Homo sapiens
  misc_RNA (1)...(19): siRNA sense strand
gaagaguaaacguggaaga

SEQ ID NO: 1894420 - RNA, 19 nt, Homo sapiens
  misc_RNA (1)...(19): siRNA sense strand
ccacggcguucaaauuugg

SEQ ID NO: 1894421 - RNA, 19 nt, Homo sapiens
  misc_RNA (1)...(19): siRNA sense strand
cacaguggcuccagaagca

SEQ ID NO: 1894422 - RNA, 19 nt, Homo sapiens
  misc_RNA (1)...(19): siRNA sense strand
gaggagaaacgaagaagag

SEQ ID NO: 1894423 - RNA, 19 nt, Homo sapiens
  misc_RNA (1)...(19): siRNA sense strand
guccacggcguucaaauuu

SEQ ID NO: 1894424 - RNA, 19 nt, Homo sapiens
  misc_RNA (1)...(19): siRNA sense strand
ccaaagugguaccaugaag

SEQ ID NO: 1894425 - RNA, 19 nt, Homo sapiens
  misc_RNA (1)...(19): siRNA sense strand
ggagccugccguagaaauu

SEQ ID NO: 1894426 - RNA, 19 nt, Homo sapiens
  misc_RNA (1)...(19): siRNA sense strand
gaggaacagcccauaaaca

SEQ ID NO: 1894427 - RNA, 19 nt, Homo sapiens
  misc_RNA (1)...(19): siRNA sense strand
aaagaagauuccucugaca

SEQ ID NO: 1894428 - RNA, 19 nt, Homo sapiens
  misc_RNA (1)...(19): siRNA sense strand
gcucuaagaaagaagauuc

SEQ ID NO: 1894429 - RNA, 19 nt, Homo sapiens
  misc_RNA (1)...(19): siRNA sense strand
gaugcgcucuaagaaagaa

SEQ ID NO: 1894430 - RNA, 19 nt, Homo sapiens
  misc_RNA (1)...(19): siRNA sense strand
uuacagaagcacacagaaa

SEQ ID NO: 1894431 - RNA, 19 nt, Homo sapiens
  misc_RNA (1)...(19): siRNA sense strand
caaagugguaccaugaaga

SEQ ID NO: 1894432 - RNA, 19 nt, Homo sapiens
  misc_RNA (1)...(19): siRNA sense strand
guacucguccucacaagug

SEQ ID NO: 1894433 - RNA, 19 nt, Homo sapiens
  misc_RNA (1)...(19): siRNA sense strand
cagaauacaggugcaauug

SEQ ID NO: 1894434 - RNA, 19 nt, Homo sapiens
  misc_RNA (1)...(19): siRNA sense strand
gcaagacaugcugauaauu

SEQ ID NO: 1894435 - RNA, 19 nt, Homo sapiens
  misc_RNA (1)...(19): siRNA sense strand
uggcaagacaugcugauaa

SEQ ID NO: 1894436 - RNA, 19 nt, Homo sapiens
  misc_RNA (1)...(19): siRNA sense strand
acauuuacacgucggaaua

SEQ ID NO: 1894437 - RNA, 19 nt, Homo sapiens
  misc_RNA (1)...(19): siRNA sense strand
agaaugagaagcgcuuuaa

SEQ ID NO: 1894438 - RNA, 19 nt, Homo sapiens
  misc_RNA (1)...(19): siRNA sense strand
gcacaugagaacccauuca

SEQ ID NO: 1894439 - RNA, 19 nt, Homo sapiens
  misc_RNA (1)...(19): siRNA sense strand
ccauucaaguguuccaugu

SEQ ID NO: 1894440 - RNA, 19 nt, Homo sapiens
  misc_RNA (1)...(19): siRNA sense strand
cagcuaucauucagguuga

SEQ ID NO: 1894441 - RNA, 19 nt, Homo sapiens
  misc_RNA (1)...(19): siRNA sense strand
caugcucgguuuacccaaa

SEQ ID NO: 1894442 - RNA, 19 nt, Homo sapiens
  misc_RNA (1)...(19): siRNA sense strand
gagcaaacugcguuauaca

SEQ ID NO: 1894443 - RNA, 19 nt, Homo sapiens
  misc_RNA (1)...(19): siRNA sense strand
gccaacagcuaucauucag

SEQ ID NO: 1894444 - RNA, 19 nt, Homo sapiens
  misc_RNA (1)...(19): siRNA sense strand
ggacgacaaugaggaugag

SEQ ID NO: 1894445 - RNA, 19 nt, Homo sapiens
  misc_RNA (1)...(19): siRNA sense strand
aaagaagacauuccagugu

SEQ ID NO: 1894446 - RNA, 19 nt, Homo sapiens
  misc_RNA (1)...(19): siRNA sense strand
ccagaauacaggugcaauu

SEQ ID NO: 1894447 - RNA, 19 nt, Homo sapiens
  misc_RNA (1)...(19): siRNA sense strand
gaagaacaaugcaguggaa

SEQ ID NO: 1894448 - RNA, 19 nt, Homo sapiens
  misc_RNA (1)...(19): siRNA sense strand
gcaaugcaguuacagaauu

SEQ ID NO: 1894449 - RNA, 19 nt, Homo sapiens
  misc_RNA (1)...(19): siRNA sense strand
gagccgagguugugcauuu

SEQ ID NO: 1894450 - RNA, 19 nt, Homo sapiens
  misc_RNA (1)...(19): siRNA sense strand
gagccaaccuguucaucua

SEQ ID NO: 1894451 - RNA, 19 nt, Homo sapiens
  misc_RNA (1)...(19): siRNA sense strand
gaugaaaccugcugacagu

SEQ ID NO: 1894452 - RNA, 19 nt, Homo sapiens
  misc_RNA (1)...(19): siRNA sense strand
ccguaaagcugcauuagaa

SEQ ID NO: 1894453 - RNA, 19 nt, Homo sapiens
  misc_RNA (1)...(19): siRNA sense strand
gcaguggccuuuccaaugg

SEQ ID NO: 1894454 - RNA, 19 nt, Homo sapiens
  misc_RNA (1)...(19): siRNA sense strand
caaugcaguuacagaauuu

SEQ ID NO: 1894455 - RNA, 19 nt, Homo sapiens
  misc_RNA (1)...(19): siRNA sense strand
gaauuuggcugcacuagcu

SEQ ID NO: 1894456 - RNA, 19 nt, Homo sapiens
  misc_RNA (1)...(19): siRNA sense strand
aggaauggcugcuuuaaau

SEQ ID NO: 1894457 - RNA, 19 nt, Homo sapiens
  misc_RNA (1)...(19): siRNA sense strand
ggacaaagaacagaagaga

SEQ ID NO: 1894458 - RNA, 19 nt, Homo sapiens
  misc_RNA (1)...(19): siRNA sense strand
ccaaugcucucacuacauc

SEQ ID NO: 1894459 - RNA, 19 nt, Homo sapiens
  misc_RNA (1)...(19): siRNA sense strand
agacaaaccugagcaagug

SEQ ID NO: 1894460 - RNA, 19 nt, Homo sapiens
  misc_RNA (1)...(19): siRNA sense strand
aaaccuugcuggucuaaau

SEQ ID NO: 1894461 - RNA, 19 nt, Homo sapiens
  misc_RNA (1)...(19): siRNA sense strand
gcucaaacguucgaagaau

SEQ ID NO: 1894462 - RNA, 19 nt, Homo sapiens
  misc_RNA (1)...(19): siRNA sense strand
aaccagaucuugaugcuau

SEQ ID NO: 1894463 - RNA, 19 nt, Homo sapiens
  misc_RNA (1)...(19): siRNA sense strand
ggaagcuguuuauugguau

SEQ ID NO: 1894464 - RNA, 19 nt, Homo sapiens
  misc_RNA (1)...(19): siRNA sense strand
aaagggugcuguuuuguua

SEQ ID NO: 1894465 - RNA, 19 nt, Homo sapiens
  misc_RNA (1)...(19): siRNA sense strand
gagcaaguguuuugguuuu

SEQ ID NO: 1894466 - RNA, 19 nt, Homo sapiens
  misc_RNA (1)...(19): siRNA sense strand
gcucagaacacaccaagug

SEQ ID NO: 1894467 - RNA, 19 nt, Homo sapiens
  misc_RNA (1)...(19): siRNA sense strand
gaagaaugccggauauugc

SEQ ID NO: 1894468 - RNA, 19 nt, Homo sapiens
  misc_RNA (1)...(19): siRNA sense strand
aggaagcuguuuauuggua

SEQ ID NO: 1894469 - RNA, 19 nt, Homo sapiens
  misc_RNA (1)...(19): siRNA sense strand
gguaugauuuccaagaagu

SEQ ID NO: 1894470 - RNA, 19 nt, Homo sapiens
  misc_RNA (1)...(19): siRNA sense strand
agaaugcucuucacaacau

SEQ ID NO: 1894471 - RNA, 19 nt, Homo sapiens
  misc_RNA (1)...(19): siRNA sense strand
acaaagaacagaagagaau

SEQ ID NO: 1894472 - RNA, 19 nt, Homo sapiens
  misc_RNA (1)...(19): siRNA sense strand
uccaagaagugcacugaaa

SEQ ID NO: 1894473 - RNA, 19 nt, Homo sapiens
  misc_RNA (1)...(19): siRNA sense strand
gauugaagaaugccggaua

SEQ ID NO: 1894474 - RNA, 19 nt, Homo sapiens
  misc_RNA (1)...(19): siRNA sense strand
gcagauguuuaugcccuuu

SEQ ID NO: 1894475 - RNA, 19 nt, Homo sapiens
  misc_RNA (1)...(19): siRNA sense strand
gggaaaccuugcuggucua

SEQ ID NO: 1894476 - RNA, 19 nt, Homo sapiens
  misc_RNA (1)...(19): siRNA sense strand
gcaaaucagcgcagcaucu

SEQ ID NO: 1894477 - RNA, 19 nt, Homo sapiens
  misc_RNA (1)...(19): siRNA sense strand
guugugcauuugugacuuu

SEQ ID NO: 1894478 - RNA, 19 nt, Homo sapiens
  misc_RNA (1)...(19): siRNA sense strand
ggaauggcugcuuuaaaug

SEQ ID NO: 1894479 - RNA, 19 nt, Homo sapiens
  misc_RNA (1)...(19): siRNA sense strand
ucagaaugcucuucacaac

SEQ ID NO: 1894480 - RNA, 19 nt, Homo sapiens
  misc_RNA (1)...(19): siRNA sense strand
cauggaggguugcucauca

SEQ ID NO: 1894481 - RNA, 19 nt, Homo sapiens
  misc_RNA (1)...(19): siRNA sense strand
ugaagaaugccggauauug

SEQ ID NO: 1894482 - RNA, 19 nt, Homo sapiens
  misc_RNA (1)...(19): siRNA sense strand
acucggguauccagcaaua

SEQ ID NO: 1894483 - RNA, 19 nt, Homo sapiens
  misc_RNA (1)...(19): siRNA sense strand
gaauggcugcuuuaaaugg

SEQ ID NO: 1894484 - RNA, 19 nt, Homo sapiens
  misc_RNA (1)...(19): siRNA sense strand
gaagcuguuuauugguaug

SEQ ID NO: 1894485 - RNA, 19 nt, Homo sapiens
  misc_RNA (1)...(19): siRNA sense strand
gggaacucuucgaacagua

SEQ ID NO: 1894486 - RNA, 19 nt, Homo sapiens
  misc_RNA (1)...(19): siRNA sense strand
cagcagaugcagcaaauca

SEQ ID NO: 1894487 - RNA, 19 nt, Homo sapiens
  misc_RNA (1)...(19): siRNA sense strand
ggaacucuucgaacaguau

SEQ ID NO: 1894488 - RNA, 19 nt, Homo sapiens
  misc_RNA (1)...(19): siRNA sense strand
ucaaacguucgaagaauga

SEQ ID NO: 1894489 - RNA, 19 nt, Homo sapiens
  misc_RNA (1)...(19): siRNA sense strand
ugucgugucugccaagguu

SEQ ID NO: 1894490 - RNA, 19 nt, Homo sapiens
  misc_RNA (1)...(19): siRNA sense strand
guauggugcuguguaugaa

SEQ ID NO: 1894491 - RNA, 19 nt, Homo sapiens
  misc_RNA (1)...(19): siRNA sense strand
gcuguuuauugguaugauu

SEQ ID NO: 1894492 - RNA, 19 nt, Homo sapiens
  misc_RNA (1)...(19): siRNA sense strand
ggacuugcgggaacucuuc

SEQ ID NO: 1894493 - RNA, 19 nt, Homo sapiens
  misc_RNA (1)...(19): siRNA sense strand
gcaaugcaccaagcacaga

SEQ ID NO: 1894494 - RNA, 19 nt, Homo sapiens
  misc_RNA (1)...(19): siRNA sense strand
gacaaagaacagaagagaa

SEQ ID NO: 1894495 - RNA, 19 nt, Homo sapiens
  misc_RNA (1)...(19): siRNA sense strand
ugaaaccugcugacaguga

SEQ ID NO: 1894496 - RNA, 19 nt, Homo sapiens
  misc_RNA (1)...(19): siRNA sense strand
ucagcgugcucacuaguuc

SEQ ID NO: 1894497 - RNA, 19 nt, Homo sapiens
  misc_RNA (1)...(19): siRNA sense strand
gaaggacaaagaacagaag

SEQ ID NO: 1894498 - RNA, 19 nt, Homo sapiens
  misc_RNA (1)...(19): siRNA sense strand
gaacaaugcaguggaagac

SEQ ID NO: 1894499 - RNA, 19 nt, Homo sapiens
  misc_RNA (1)...(19): siRNA sense strand
uuggacagauugaagaaug

SEQ ID NO: 1894500 - RNA, 19 nt, Homo sapiens
  misc_RNA (1)...(19): siRNA sense strand
ugacagcaagcccuacuga

SEQ ID NO: 1894501 - RNA, 19 nt, Homo sapiens
  misc_RNA (1)...(19): siRNA sense strand
ccaaugggaggguugaaug

SEQ ID NO: 1894502 - RNA, 19 nt, Homo sapiens
  misc_RNA (1)...(19): siRNA sense strand
gucauguucucuucguuug

SEQ ID NO: 1894503 - RNA, 19 nt, Homo sapiens
  misc_RNA (1)...(19): siRNA sense strand
ucauagacaagcagacaaa

SEQ ID NO: 1894504 - RNA, 19 nt, Homo sapiens
  misc_RNA (1)...(19): siRNA sense strand
ccucaauguuggcucuuug

SEQ ID NO: 1894505 - RNA, 19 nt, Homo sapiens
  misc_RNA (1)...(19): siRNA sense strand
caacggcuggccucaaugu

SEQ ID NO: 1894506 - RNA, 19 nt, Homo sapiens
  misc_RNA (1)...(19): siRNA sense strand
uuggagcccugcagacauu

SEQ ID NO: 1894507 - RNA, 19 nt, Homo sapiens
  misc_RNA (1)...(19): siRNA sense strand
auacacagaaggacaaaga

SEQ ID NO: 1894508 - RNA, 19 nt, Homo sapiens
  misc_RNA (1)...(19): siRNA sense strand
gaaugcucuucacaacaug

SEQ ID NO: 1894509 - RNA, 19 nt, Homo sapiens
  misc_RNA (1)...(19): siRNA sense strand
caggaauggcugcuuuaaa

SEQ ID NO: 1894510 - RNA, 19 nt, Homo sapiens
  misc_RNA (1)...(19): siRNA sense strand
uaccaaugcucucacuaca

SEQ ID NO: 1894511 - RNA, 19 nt, Homo sapiens
  misc_RNA (1)...(19): siRNA sense strand
ggaaaccuugcuggucuaa

SEQ ID NO: 1894512 - RNA, 19 nt, Homo sapiens
  misc_RNA (1)...(19): siRNA sense strand
agacggcuaucaaggcaau

SEQ ID NO: 1894513 - RNA, 19 nt, Homo sapiens
  misc_RNA (1)...(19): siRNA sense strand
cauguucucuucguuugga

SEQ ID NO: 1894514 - RNA, 19 nt, Homo sapiens
  misc_RNA (1)...(19): siRNA sense strand
gagcagccuccacccaaug

SEQ ID NO: 1894515 - RNA, 19 nt, Homo sapiens
  misc_RNA (1)...(19): siRNA sense strand
gaugcuaucaagauguuug

SEQ ID NO: 1894516 - RNA, 19 nt, Homo sapiens
  misc_RNA (1)...(19): siRNA sense strand
gguaaaauuugcugauaca

SEQ ID NO: 1894517 - RNA, 19 nt, Homo sapiens
  misc_RNA (1)...(19): siRNA sense strand
ugaaaucaacguccuaagg

SEQ ID NO: 1894518 - RNA, 19 nt, Homo sapiens
  misc_RNA (1)...(19): siRNA sense strand
guaccaaugcucucacuac

SEQ ID NO: 1894519 - RNA, 19 nt, Homo sapiens
  misc_RNA (1)...(19): siRNA sense strand
gaagugcacugaaaaugac

SEQ ID NO: 1894520 - RNA, 19 nt, Homo sapiens
  misc_RNA (1)...(19): siRNA sense strand
agagggagccaaccuguuc

SEQ ID NO: 1894521 - RNA, 19 nt, Homo sapiens
  misc_RNA (1)...(19): siRNA sense strand
guucgaagaaugacagcaa

SEQ ID NO: 1894522 - RNA, 19 nt, Homo sapiens
  misc_RNA (1)...(19): siRNA sense strand
ggagccaaccuguucaucu

SEQ ID NO: 1894523 - RNA, 19 nt, Homo sapiens
  misc_RNA (1)...(19): siRNA sense strand
caaagaacagaagagaaug

SEQ ID NO: 1894524 - RNA, 19 nt, Homo sapiens
  misc_RNA (1)...(19): siRNA sense strand
ccaaccagaucuugaugcu

SEQ ID NO: 1894525 - RNA, 19 nt, Homo sapiens
  misc_RNA (1)...(19): siRNA sense strand
cagcaguaauucugucaac

SEQ ID NO: 1894526 - RNA, 19 nt, Homo sapiens
  misc_RNA (1)...(19): siRNA sense strand
cucaaacguucgaagaaug

SEQ ID NO: 1894527 - RNA, 19 nt, Homo sapiens
  misc_RNA (1)...(19): siRNA sense strand
cagcucaaacguucgaaga

SEQ ID NO: 1894528 - RNA, 19 nt, Homo sapiens
  misc_RNA (1)...(19): siRNA sense strand
cagacaaaccugagcaagu

SEQ ID NO: 1894529 - RNA, 19 nt, Homo sapiens
  misc_RNA (1)...(19): siRNA sense strand
ggaugcaucacccuauaca

SEQ ID NO: 1894530 - RNA, 19 nt, Homo sapiens
  misc_RNA (1)...(19): siRNA sense strand
aaagugcagcucaaacguu

SEQ ID NO: 1894531 - RNA, 19 nt, Homo sapiens
  misc_RNA (1)...(19): siRNA sense strand
gcucagaaugcucuucaca

SEQ ID NO: 1894532 - RNA, 19 nt, Homo sapiens
  misc_RNA (1)...(19): siRNA sense strand
gaacucuucgaacaguaug

SEQ ID NO: 1894533 - RNA, 19 nt, Homo sapiens
  misc_RNA (1)...(19): siRNA sense strand
gugguaaaauuugcugaua

SEQ ID NO: 1894534 - RNA, 19 nt, Homo sapiens
  misc_RNA (1)...(19): siRNA sense strand
ugagcagccuccacccaau

SEQ ID NO: 1894535 - RNA, 19 nt, Homo sapiens
  misc_RNA (1)...(19): siRNA sense strand
caaaucagcgcagcaucug

SEQ ID NO: 1894536 - RNA, 19 nt, Homo sapiens
  misc_RNA (1)...(19): siRNA sense strand
aaacccgccucagagcaaa

SEQ ID NO: 1894537 - RNA, 19 nt, Homo sapiens
  misc_RNA (1)...(19): siRNA sense strand
uaugaaaucaacguccuaa

SEQ ID NO: 1894538 - RNA, 19 nt, Homo sapiens
  misc_RNA (1)...(19): siRNA sense strand
ugacacagcagaguauugg

SEQ ID NO: 1894539 - RNA, 19 nt, Homo sapiens
  misc_RNA (1)...(19): siRNA sense strand
cuacucggguauccagcaa

SEQ ID NO: 1894540 - RNA, 19 nt, Homo sapiens
  misc_RNA (1)...(19): siRNA sense strand
cgagucauguucucuucgu

SEQ ID NO: 1894541 - RNA, 19 nt, Homo sapiens
  misc_RNA (1)...(19): siRNA sense strand
caaguguuuugguuuugua

SEQ ID NO: 1894542 - RNA, 19 nt, Homo sapiens
  misc_RNA (1)...(19): siRNA sense strand
gccucaauguuggcucuuu

SEQ ID NO: 1894543 - RNA, 19 nt, Homo sapiens
  misc_RNA (1)...(19): siRNA sense strand
cagcagcagaugcagcaaa

SEQ ID NO: 1894544 - RNA, 19 nt, Homo sapiens
  misc_RNA (1)...(19): siRNA sense strand
guaugaaaucaacguccua

SEQ ID NO: 1894545 - RNA, 19 nt, Homo sapiens
  misc_RNA (1)...(19): siRNA sense strand
gagucauguucucuucguu

SEQ ID NO: 1894546 - RNA, 19 nt, Homo sapiens
  misc_RNA (1)...(19): siRNA sense strand
agcaacggcuggccucaau

SEQ ID NO: 1894547 - RNA, 19 nt, Homo sapiens
  misc_RNA (1)...(19): siRNA sense strand
gaagaacaaugcaguggaa

SEQ ID NO: 1894548 - RNA, 19 nt, Homo sapiens
  misc_RNA (1)...(19): siRNA sense strand
gcaaugcaguuacagaauu

SEQ ID NO: 1894549 - RNA, 19 nt, Homo sapiens
  misc_RNA (1)...(19): siRNA sense strand
gagccgagguugugcauuu

SEQ ID NO: 1894550 - RNA, 19 nt, Homo sapiens
  misc_RNA (1)...(19): siRNA sense strand
gagccaaccuguucaucua

SEQ ID NO: 1894551 - RNA, 19 nt, Homo sapiens
  misc_RNA (1)...(19): siRNA sense strand
gaugaaaccugcugacagu

SEQ ID NO: 1894552 - RNA, 19 nt, Homo sapiens
  misc_RNA (1)...(19): siRNA sense strand
ccguaaagcugcauuagaa

SEQ ID NO: 1894553 - RNA, 19 nt, Homo sapiens
  misc_RNA (1)...(19): siRNA sense strand
gcaguggccuuuccaaugg

SEQ ID NO: 1894554 - RNA, 19 nt, Homo sapiens
  misc_RNA (1)...(19): siRNA sense strand
caaugcaguuacagaauuu

SEQ ID NO: 1894555 - RNA, 19 nt, Homo sapiens
  misc_RNA (1)...(19): siRNA sense strand
gaauuuggcugcacuagcu

SEQ ID NO: 1894556 - RNA, 19 nt, Homo sapiens
  misc_RNA (1)...(19): siRNA sense strand
aggaauggcugcuuuaaau

SEQ ID NO: 1894557 - RNA, 19 nt, Homo sapiens
  misc_RNA (1)...(19): siRNA sense strand
ggacaaagaacagaagaga

SEQ ID NO: 1894558 - RNA, 19 nt, Homo sapiens
  misc_RNA (1)...(19): siRNA sense strand
ccaaugcucucacuacauc

SEQ ID NO: 1894559 - RNA, 19 nt, Homo sapiens
  misc_RNA (1)...(19): siRNA sense strand
agacaaaccugagcaagug

SEQ ID NO: 1894560 - RNA, 19 nt, Homo sapiens
  misc_RNA (1)...(19): siRNA sense strand
aaaccuugcuggucuaaau

SEQ ID NO: 1894561 - RNA, 19 nt, Homo sapiens
  misc_RNA (1)...(19): siRNA sense strand
gcucaaacguucgaagaau

SEQ ID NO: 1894562 - RNA, 19 nt, Homo sapiens
  misc_RNA (1)...(19): siRNA sense strand
aaccagaucuugaugcuau

SEQ ID NO: 1894563 - RNA, 19 nt, Homo sapiens
  misc_RNA (1)...(19): siRNA sense strand
ggaagcuguuuauugguau

SEQ ID NO: 1894564 - RNA, 19 nt, Homo sapiens
  misc_RNA (1)...(19): siRNA sense strand
aaagggugcuguuuuguua

SEQ ID NO: 1894565 - RNA, 19 nt, Homo sapiens
  misc_RNA (1)...(19): siRNA sense strand
gagcaaguguuuugguuuu

SEQ ID NO: 1894566 - RNA, 19 nt, Homo sapiens
  misc_RNA (1)...(19): siRNA sense strand
gcucagaacacaccaagug

SEQ ID NO: 1894567 - RNA, 19 nt, Homo sapiens
  misc_RNA (1)...(19): siRNA sense strand
gaagaaugccggauauugc

SEQ ID NO: 1894568 - RNA, 19 nt, Homo sapiens
  misc_RNA (1)...(19): siRNA sense strand
aggaagcuguuuauuggua

SEQ ID NO: 1894569 - RNA, 19 nt, Homo sapiens
  misc_RNA (1)...(19): siRNA sense strand
gguaugauuuccaagaagu

SEQ ID NO: 1894570 - RNA, 19 nt, Homo sapiens
  misc_RNA (1)...(19): siRNA sense strand
agaaugcucuucacaacau

SEQ ID NO: 1894571 - RNA, 19 nt, Homo sapiens
  misc_RNA (1)...(19): siRNA sense strand
acaaagaacagaagagaau

SEQ ID NO: 1894572 - RNA, 19 nt, Homo sapiens
  misc_RNA (1)...(19): siRNA sense strand
uccaagaagugcacugaaa

SEQ ID NO: 1894573 - RNA, 19 nt, Homo sapiens
  misc_RNA (1)...(19): siRNA sense strand
gauugaagaaugccggaua

SEQ ID NO: 1894574 - RNA, 19 nt, Homo sapiens
  misc_RNA (1)...(19): siRNA sense strand
gcagauguuuaugcccuuu

SEQ ID NO: 1894575 - RNA, 19 nt, Homo sapiens
  misc_RNA (1)...(19): siRNA sense strand
gggaaaccuugcuggucua

SEQ ID NO: 1894576 - RNA, 19 nt, Homo sapiens
  misc_RNA (1)...(19): siRNA sense strand
gcaaaucagcgcagcaucu

SEQ ID NO: 1894577 - RNA, 19 nt, Homo sapiens
  misc_RNA (1)...(19): siRNA sense strand
guugugcauuugugacuuu

SEQ ID NO: 1894578 - RNA, 19 nt, Homo sapiens
  misc_RNA (1)...(19): siRNA sense strand
ggaauggcugcuuuaaaug

SEQ ID NO: 1894579 - RNA, 19 nt, Homo sapiens
  misc_RNA (1)...(19): siRNA sense strand
ucagaaugcucuucacaac

SEQ ID NO: 1894580 - RNA, 19 nt, Homo sapiens
  misc_RNA (1)...(19): siRNA sense strand
cauggaggguugcucauca

SEQ ID NO: 1894581 - RNA, 19 nt, Homo sapiens
  misc_RNA (1)...(19): siRNA sense strand
ugaagaaugccggauauug

SEQ ID NO: 1894582 - RNA, 19 nt, Homo sapiens
  misc_RNA (1)...(19): siRNA sense strand
acucggguauccagcaaua

SEQ ID NO: 1894583 - RNA, 19 nt, Homo sapiens
  misc_RNA (1)...(19): siRNA sense strand
gaauggcugcuuuaaaugg

SEQ ID NO: 1894584 - RNA, 19 nt, Homo sapiens
  misc_RNA (1)...(19): siRNA sense strand
gaagcuguuuauugguaug

SEQ ID NO: 1894585 - RNA, 19 nt, Homo sapiens
  misc_RNA (1)...(19): siRNA sense strand
gggaacucuucgaacagua

SEQ ID NO: 1894586 - RNA, 19 nt, Homo sapiens
  misc_RNA (1)...(19): siRNA sense strand
cagcagaugcagcaaauca

SEQ ID NO: 1894587 - RNA, 19 nt, Homo sapiens
  misc_RNA (1)...(19): siRNA sense strand
ggaacucuucgaacaguau

SEQ ID NO: 1894588 - RNA, 19 nt, Homo sapiens
  misc_RNA (1)...(19): siRNA sense strand
ucaaacguucgaagaauga

SEQ ID NO: 1894589 - RNA, 19 nt, Homo sapiens
  misc_RNA (1)...(19): siRNA sense strand
ugucgugucugccaagguu

SEQ ID NO: 1894590 - RNA, 19 nt, Homo sapiens
  misc_RNA (1)...(19): siRNA sense strand
guauggugcuguguaugaa

SEQ ID NO: 1894591 - RNA, 19 nt, Homo sapiens
  misc_RNA (1)...(19): siRNA sense strand
gcuguuuauugguaugauu

SEQ ID NO: 1894592 - RNA, 19 nt, Homo sapiens
  misc_RNA (1)...(19): siRNA sense strand
ggacuugcgggaacucuuc

SEQ ID NO: 1894593 - RNA, 19 nt, Homo sapiens
  misc_RNA (1)...(19): siRNA sense strand
gcaaugcaccaagcacaga

SEQ ID NO: 1894594 - RNA, 19 nt, Homo sapiens
  misc_RNA (1)...(19): siRNA sense strand
gacaaagaacagaagagaa

SEQ ID NO: 1894595 - RNA, 19 nt, Homo sapiens
  misc_RNA (1)...(19): siRNA sense strand
ugaaaccugcugacaguga

SEQ ID NO: 1894596 - RNA, 19 nt, Homo sapiens
  misc_RNA (1)...(19): siRNA sense strand
ucagcgugcucacuaguuc

SEQ ID NO: 1894597 - RNA, 19 nt, Homo sapiens
  misc_RNA (1)...(19): siRNA sense strand
gaaggacaaagaacagaag

SEQ ID NO: 1894598 - RNA, 19 nt, Homo sapiens
  misc_RNA (1)...(19): siRNA sense strand
gaacaaugcaguggaagac

SEQ ID NO: 1894599 - RNA, 19 nt, Homo sapiens
  misc_RNA (1)...(19): siRNA sense strand
uuggacagauugaagaaug

SEQ ID NO: 1894600 - RNA, 19 nt, Homo sapiens
  misc_RNA (1)...(19): siRNA sense strand
ugacagcaagcccuacuga

SEQ ID NO: 1894601 - RNA, 19 nt, Homo sapiens
  misc_RNA (1)...(19): siRNA sense strand
ccaaugggaggguugaaug

SEQ ID NO: 1894602 - RNA, 19 nt, Homo sapiens
  misc_RNA (1)...(19): siRNA sense strand
gucauguucucuucguuug

SEQ ID NO: 1894603 - RNA, 19 nt, Homo sapiens
  misc_RNA (1)...(19): siRNA sense strand
ucauagacaagcagacaaa

SEQ ID NO: 1894604 - RNA, 19 nt, Homo sapiens
  misc_RNA (1)...(19): siRNA sense strand
ccucaauguuggcucuuug

SEQ ID NO: 1894605 - RNA, 19 nt, Homo sapiens
  misc_RNA (1)...(19): siRNA sense strand
caacggcuggccucaaugu

SEQ ID NO: 1894606 - RNA, 19 nt, Homo sapiens
  misc_RNA (1)...(19): siRNA sense strand
uuggagcccugcagacauu

SEQ ID NO: 1894607 - RNA, 19 nt, Homo sapiens
  misc_RNA (1)...(19): siRNA sense strand
auacacagaaggacaaaga

SEQ ID NO: 1894608 - RNA, 19 nt, Homo sapiens
  misc_RNA (1)...(19): siRNA sense strand
gaaugcucuucacaacaug

SEQ ID NO: 1894609 - RNA, 19 nt, Homo sapiens
  misc_RNA (1)...(19): siRNA sense strand
caggaauggcugcuuuaaa

SEQ ID NO: 1894610 - RNA, 19 nt, Homo sapiens
  misc_RNA (1)...(19): siRNA sense strand
uaccaaugcucucacuaca

SEQ ID NO: 1894611 - RNA, 19 nt, Homo sapiens
  misc_RNA (1)...(19): siRNA sense strand
ggaaaccuugcuggucuaa

SEQ ID NO: 1894612 - RNA, 19 nt, Homo sapiens
  misc_RNA (1)...(19): siRNA sense strand
agacggcuaucaaggcaau

SEQ ID NO: 1894613 - RNA, 19 nt, Homo sapiens
  misc_RNA (1)...(19): siRNA sense strand
cauguucucuucguuugga

SEQ ID NO: 1894614 - RNA, 19 nt, Homo sapiens
  misc_RNA (1)...(19): siRNA sense strand
gagcagccuccacccaaug

SEQ ID NO: 1894615 - RNA, 19 nt, Homo sapiens
  misc_RNA (1)...(19): siRNA sense strand
gaugcuaucaagauguuug

SEQ ID NO: 1894616 - RNA, 19 nt, Homo sapiens
  misc_RNA (1)...(19): siRNA sense strand
gguaaaauuugcugauaca

SEQ ID NO: 1894617 - RNA, 19 nt, Homo sapiens
  misc_RNA (1)...(19): siRNA sense strand
ugaaaucaacguccuaagg

SEQ ID NO: 1894618 - RNA, 19 nt, Homo sapiens
  misc_RNA (1)...(19): siRNA sense strand
guaccaaugcucucacuac

SEQ ID NO: 1894619 - RNA, 19 nt, Homo sapiens
  misc_RNA (1)...(19): siRNA sense strand
gaagugcacugaaaaugac

SEQ ID NO: 1894620 - RNA, 19 nt, Homo sapiens
  misc_RNA (1)...(19): siRNA sense strand
agagggagccaaccuguuc

SEQ ID NO: 1894621 - RNA, 19 nt, Homo sapiens
  misc_RNA (1)...(19): siRNA sense strand
guucgaagaaugacagcaa

SEQ ID NO: 1894622 - RNA, 19 nt, Homo sapiens
  misc_RNA (1)...(19): siRNA sense strand
ggagccaaccuguucaucu

SEQ ID NO: 1894623 - RNA, 19 nt, Homo sapiens
  misc_RNA (1)...(19): siRNA sense strand
caaagaacagaagagaaug

SEQ ID NO: 1894624 - RNA, 19 nt, Homo sapiens
  misc_RNA (1)...(19): siRNA sense strand
ccaaccagaucuugaugcu

SEQ ID NO: 1894625 - RNA, 19 nt, Homo sapiens
  misc_RNA (1)...(19): siRNA sense strand
cagcaguaauucugucaac

SEQ ID NO: 1894626 - RNA, 19 nt, Homo sapiens
  misc_RNA (1)...(19): siRNA sense strand
cucaaacguucgaagaaug

SEQ ID NO: 1894627 - RNA, 19 nt, Homo sapiens
  misc_RNA (1)...(19): siRNA sense strand
cagcucaaacguucgaaga

SEQ ID NO: 1894628 - RNA, 19 nt, Homo sapiens
  misc_RNA (1)...(19): siRNA sense strand
cagacaaaccugagcaagu

SEQ ID NO: 1894629 - RNA, 19 nt, Homo sapiens
  misc_RNA (1)...(19): siRNA sense strand
ggaugcaucacccuauaca

SEQ ID NO: 1894630 - RNA, 19 nt, Homo sapiens
  misc_RNA (1)...(19): siRNA sense strand
aaagugcagcucaaacguu

SEQ ID NO: 1894631 - RNA, 19 nt, Homo sapiens
  misc_RNA (1)...(19): siRNA sense strand
gcucagaaugcucuucaca

SEQ ID NO: 1894632 - RNA, 19 nt, Homo sapiens
  misc_RNA (1)...(19): siRNA sense strand
gaacucuucgaacaguaug

SEQ ID NO: 1894633 - RNA, 19 nt, Homo sapiens
  misc_RNA (1)...(19): siRNA sense strand
gugguaaaauuugcugaua

SEQ ID NO: 1894634 - RNA, 19 nt, Homo sapiens
  misc_RNA (1)...(19): siRNA sense strand
ugagcagccuccacccaau

SEQ ID NO: 1894635 - RNA, 19 nt, Homo sapiens
  misc_RNA (1)...(19): siRNA sense strand
caaaucagcgcagcaucug

SEQ ID NO: 1894636 - RNA, 19 nt, Homo sapiens
  misc_RNA (1)...(19): siRNA sense strand
aaacccgccucagagcaaa

SEQ ID NO: 1894637 - RNA, 19 nt, Homo sapiens
  misc_RNA (1)...(19): siRNA sense strand
uaugaaaucaacguccuaa

SEQ ID NO: 1894638 - RNA, 19 nt, Homo sapiens
  misc_RNA (1)...(19): siRNA sense strand
ugacacagcagaguauugg

SEQ ID NO: 1894639 - RNA, 19 nt, Homo sapiens
  misc_RNA (1)...(19): siRNA sense strand
cuacucggguauccagcaa

SEQ ID NO: 1894640 - RNA, 19 nt, Homo sapiens
  misc_RNA (1)...(19): siRNA sense strand
cgagucauguucucuucgu

SEQ ID NO: 1894641 - RNA, 19 nt, Homo sapiens
  misc_RNA (1)...(19): siRNA sense strand
caaguguuuugguuuugua

SEQ ID NO: 1894642 - RNA, 19 nt, Homo sapiens
  misc_RNA (1)...(19): siRNA sense strand
gccucaauguuggcucuuu

SEQ ID NO: 1894643 - RNA, 19 nt, Homo sapiens
  misc_RNA (1)...(19): siRNA sense strand
cagcagcagaugcagcaaa

SEQ ID NO: 1894644 - RNA, 19 nt, Homo sapiens
  misc_RNA (1)...(19): siRNA sense strand
guaugaaaucaacguccua

SEQ ID NO: 1894645 - RNA, 19 nt, Homo sapiens
  misc_RNA (1)...(19): siRNA sense strand
gagucauguucucuucguu

SEQ ID NO: 1894646 - RNA, 19 nt, Homo sapiens
  misc_RNA (1)...(19): siRNA sense strand
agcaacggcuggccucaau

SEQ ID NO: 1894647 - RNA, 19 nt, Homo sapiens
  misc_RNA (1)...(19): siRNA sense strand
gaagagaucuauuuacaga

SEQ ID NO: 1894648 - RNA, 19 nt, Homo sapiens
  misc_RNA (1)...(19): siRNA sense strand
gagaagagaucuauuuaca

SEQ ID NO: 1894649 - RNA, 19 nt, Homo sapiens
  misc_RNA (1)...(19): siRNA sense strand
ucaaauagccacauuguuu

SEQ ID NO: 1894650 - RNA, 19 nt, Homo sapiens
  misc_RNA (1)...(19): siRNA sense strand
gagagaagagaucuauuua

SEQ ID NO: 1894651 - RNA, 19 nt, Homo sapiens
  misc_RNA (1)...(19): siRNA sense strand
uaacacagguggagugguu

SEQ ID NO: 1894652 - RNA, 19 nt, Homo sapiens
  misc_RNA (1)...(19): siRNA sense strand
gaagaggugcuuuggcaua

SEQ ID NO: 1894653 - RNA, 19 nt, Homo sapiens
  misc_RNA (1)...(19): siRNA sense strand
auacagagcucuaugugaa

SEQ ID NO: 1894654 - RNA, 19 nt, Homo sapiens
  misc_RNA (1)...(19): siRNA sense strand
gcagaaauuucaccuccaa

SEQ ID NO: 1894655 - RNA, 19 nt, Homo sapiens
  misc_RNA (1)...(19): siRNA sense strand
uaaccaauauacccucuuu

SEQ ID NO: 1894656 - RNA, 19 nt, Homo sapiens
  misc_RNA (1)...(19): siRNA sense strand
gaccaaagacuagaguuua

SEQ ID NO: 1894657 - RNA, 19 nt, Homo sapiens
  misc_RNA (1)...(19): siRNA sense strand
caagagaggauauuuaugu

SEQ ID NO: 1894658 - RNA, 19 nt, Homo sapiens
  misc_RNA (1)...(19): siRNA sense strand
gagaggauauuuaugucaa

SEQ ID NO: 1894659 - RNA, 19 nt, Homo sapiens
  misc_RNA (1)...(19): siRNA sense strand
agaucgaccucuuaacuua

SEQ ID NO: 1894660 - RNA, 19 nt, Homo sapiens
  misc_RNA (1)...(19): siRNA sense strand
caacgauggcuuccaauaa

SEQ ID NO: 1894661 - RNA, 19 nt, Homo sapiens
  misc_RNA (1)...(19): siRNA sense strand
gugaugagauugacuguag

SEQ ID NO: 1894662 - RNA, 19 nt, Homo sapiens
  misc_RNA (1)...(19): siRNA sense strand
gaaauuucaccuccaaguu

SEQ ID NO: 1894663 - RNA, 19 nt, Homo sapiens
  misc_RNA (1)...(19): siRNA sense strand
gaaggcacccaauaacuau

SEQ ID NO: 1894664 - RNA, 19 nt, Homo sapiens
  misc_RNA (1)...(19): siRNA sense strand
ccugcucucuuuacacuua

SEQ ID NO: 1894665 - RNA, 19 nt, Homo sapiens
  misc_RNA (1)...(19): siRNA sense strand
caaguucccaagacaaaua

SEQ ID NO: 1894666 - RNA, 19 nt, Homo sapiens
  misc_RNA (1)...(19): siRNA sense strand
gcagcugugccaucaaaua

SEQ ID NO: 1894667 - RNA, 19 nt, Homo sapiens
  misc_RNA (1)...(19): siRNA sense strand
ggaaagaaugucacacuca

SEQ ID NO: 1894668 - RNA, 19 nt, Homo sapiens
  misc_RNA (1)...(19): siRNA sense strand
gcauacaucaguucccuuu

SEQ ID NO: 1894669 - RNA, 19 nt, Homo sapiens
  misc_RNA (1)...(19): siRNA sense strand
caagacaaauagugagcaa

SEQ ID NO: 1894670 - RNA, 19 nt, Homo sapiens
  misc_RNA (1)...(19): siRNA sense strand
gaacuuggcagaaggugau

SEQ ID NO: 1894671 - RNA, 19 nt, Homo sapiens
  misc_RNA (1)...(19): siRNA sense strand
gaaugccucugaagaugau

SEQ ID NO: 1894672 - RNA, 19 nt, Homo sapiens
  misc_RNA (1)...(19): siRNA sense strand
agagagaagagaucuauuu

SEQ ID NO: 1894673 - RNA, 19 nt, Homo sapiens
  misc_RNA (1)...(19): siRNA sense strand
ccaauaacaugacucuuuu

SEQ ID NO: 1894674 - RNA, 19 nt, Homo sapiens
  misc_RNA (1)...(19): siRNA sense strand
acacagaaggcacccaaua

SEQ ID NO: 1894675 - RNA, 19 nt, Homo sapiens
  misc_RNA (1)...(19): siRNA sense strand
ggaaugccucugaagauga

SEQ ID NO: 1894676 - RNA, 19 nt, Homo sapiens
  misc_RNA (1)...(19): siRNA sense strand
gaauguguguauccaucaa

SEQ ID NO: 1894677 - RNA, 19 nt, Homo sapiens
  misc_RNA (1)...(19): siRNA sense strand
agaaggcacccaauaacua

SEQ ID NO: 1894678 - RNA, 19 nt, Homo sapiens
  misc_RNA (1)...(19): siRNA sense strand
gauacaagagaggauauuu

SEQ ID NO: 1894679 - RNA, 19 nt, Homo sapiens
  misc_RNA (1)...(19): siRNA sense strand
caaauagccacauuguuuc

SEQ ID NO: 1894680 - RNA, 19 nt, Homo sapiens
  misc_RNA (1)...(19): siRNA sense strand
accaaagacuagaguuuaa

SEQ ID NO: 1894681 - RNA, 19 nt, Homo sapiens
  misc_RNA (1)...(19): siRNA sense strand
gaugauacaagagaggaua

SEQ ID NO: 1894682 - RNA, 19 nt, Homo sapiens
  misc_RNA (1)...(19): siRNA sense strand
cccaauaacuauagaaguc

SEQ ID NO: 1894683 - RNA, 19 nt, Homo sapiens
  misc_RNA (1)...(19): siRNA sense strand
cacagaaggcacccaauaa

SEQ ID NO: 1894684 - RNA, 19 nt, Homo sapiens
  misc_RNA (1)...(19): siRNA sense strand
aagaugauguuggcuacua

SEQ ID NO: 1894685 - RNA, 19 nt, Homo sapiens
  misc_RNA (1)...(19): siRNA sense strand
uccaauaacaugacucuuu

SEQ ID NO: 1894686 - RNA, 19 nt, Homo sapiens
  misc_RNA (1)...(19): siRNA sense strand
ucaacgauggcuuccaaua

SEQ ID NO: 1894687 - RNA, 19 nt, Homo sapiens
  misc_RNA (1)...(19): siRNA sense strand
agagaucuauuuacagagu

SEQ ID NO: 1894688 - RNA, 19 nt, Homo sapiens
  misc_RNA (1)...(19): siRNA sense strand
gcagugaggugggaaaaga

SEQ ID NO: 1894689 - RNA, 19 nt, Homo sapiens
  misc_RNA (1)...(19): siRNA sense strand
gaaccuggaaagaauguca

SEQ ID NO: 1894690 - RNA, 19 nt, Homo sapiens
  misc_RNA (1)...(19): siRNA sense strand
gccaucaaauagccacauu

SEQ ID NO: 1894691 - RNA, 19 nt, Homo sapiens
  misc_RNA (1)...(19): siRNA sense strand
caaugggcaucuuaacaca

SEQ ID NO: 1894692 - RNA, 19 nt, Homo sapiens
  misc_RNA (1)...(19): siRNA sense strand
aaaccuucgugaugagauu

SEQ ID NO: 1894693 - RNA, 19 nt, Homo sapiens
  misc_RNA (1)...(19): siRNA sense strand
cggaaugccucugaagaug

SEQ ID NO: 1894694 - RNA, 19 nt, Homo sapiens
  misc_RNA (1)...(19): siRNA sense strand
caucaaauagccacauugu

SEQ ID NO: 1894695 - RNA, 19 nt, Homo sapiens
  misc_RNA (1)...(19): siRNA sense strand
uacuauuccugcucucuuu

SEQ ID NO: 1894696 - RNA, 19 nt, Homo sapiens
  misc_RNA (1)...(19): siRNA sense strand
cgucagaucgaccucuuaa

SEQ ID NO: 1894697 - RNA, 19 nt, Homo sapiens
  misc_RNA (1)...(19): siRNA sense strand
gaaugucacacucacuugu

SEQ ID NO: 1894698 - RNA, 19 nt, Homo sapiens
  misc_RNA (1)...(19): siRNA sense strand
cagguggagugguucaaga

SEQ ID NO: 1894699 - RNA, 19 nt, Homo sapiens
  misc_RNA (1)...(19): siRNA sense strand
cuauagaagucccaucucu

SEQ ID NO: 1894700 - RNA, 19 nt, Homo sapiens
  misc_RNA (1)...(19): siRNA sense strand
guaaaaccgauaaccaaua

SEQ ID NO: 1894701 - RNA, 19 nt, Homo sapiens
  misc_RNA (1)...(19): siRNA sense strand
uggcucuucuucauguaua

SEQ ID NO: 1894702 - RNA, 19 nt, Homo sapiens
  misc_RNA (1)...(19): siRNA sense strand
agaaggagaaggagagaga

SEQ ID NO: 1894703 - RNA, 19 nt, Homo sapiens
  misc_RNA (1)...(19): siRNA sense strand
acagagcucuaugugaaga

SEQ ID NO: 1894704 - RNA, 19 nt, Homo sapiens
  misc_RNA (1)...(19): siRNA sense strand
agaccaaagacuagaguuu

SEQ ID NO: 1894705 - RNA, 19 nt, Homo sapiens
  misc_RNA (1)...(19): siRNA sense strand
gcaggauuccauagccauu

SEQ ID NO: 1894706 - RNA, 19 nt, Homo sapiens
  misc_RNA (1)...(19): siRNA sense strand
gaggugcuuuggcauacau

SEQ ID NO: 1894707 - RNA, 19 nt, Homo sapiens
  misc_RNA (1)...(19): siRNA sense strand
guuguuguuuguuaucuca

SEQ ID NO: 1894708 - RNA, 19 nt, Homo sapiens
  misc_RNA (1)...(19): siRNA sense strand
guccauggcagaaauuuca

SEQ ID NO: 1894709 - RNA, 19 nt, Homo sapiens
  misc_RNA (1)...(19): siRNA sense strand
gauguuggcuacuauuccu

SEQ ID NO: 1894710 - RNA, 19 nt, Homo sapiens
  misc_RNA (1)...(19): siRNA sense strand
ccaauauacccucuuugug

SEQ ID NO: 1894711 - RNA, 19 nt, Homo sapiens
  misc_RNA (1)...(19): siRNA sense strand
aaauuucaccuccaaguuc

SEQ ID NO: 1894712 - RNA, 19 nt, Homo sapiens
  misc_RNA (1)...(19): siRNA sense strand
ggacccagcaggauuccau

SEQ ID NO: 1894713 - RNA, 19 nt, Homo sapiens
  misc_RNA (1)...(19): siRNA sense strand
gaaggagagagagaagaga

SEQ ID NO: 1894714 - RNA, 19 nt, Homo sapiens
  misc_RNA (1)...(19): siRNA sense strand
ggagaaggagagagagaag

SEQ ID NO: 1894715 - RNA, 19 nt, Homo sapiens
  misc_RNA (1)...(19): siRNA sense strand
cagaucgaccucuuaacuu

SEQ ID NO: 1894716 - RNA, 19 nt, Homo sapiens
  misc_RNA (1)...(19): siRNA sense strand
gaugauguuggcuacuauu

SEQ ID NO: 1894717 - RNA, 19 nt, Homo sapiens
  misc_RNA (1)...(19): siRNA sense strand
acagggaacuuggcagaag

SEQ ID NO: 1894718 - RNA, 19 nt, Homo sapiens
  misc_RNA (1)...(19): siRNA sense strand
gagagagaagagaucuauu

SEQ ID NO: 1894719 - RNA, 19 nt, Homo sapiens
  misc_RNA (1)...(19): siRNA sense strand
agagagagaagagaucuau

SEQ ID NO: 1894720 - RNA, 19 nt, Homo sapiens
  misc_RNA (1)...(19): siRNA sense strand
gagagagagaagagaucua

SEQ ID NO: 1894721 - RNA, 19 nt, Homo sapiens
  misc_RNA (1)...(19): siRNA sense strand
gacaaauagugagcaacug

SEQ ID NO: 1894722 - RNA, 19 nt, Homo sapiens
  misc_RNA (1)...(19): siRNA sense strand
ucagaucgaccucuuaacu

SEQ ID NO: 1894723 - RNA, 19 nt, Homo sapiens
  misc_RNA (1)...(19): siRNA sense strand
gugguucagucagauaguu

SEQ ID NO: 1894724 - RNA, 19 nt, Homo sapiens
  misc_RNA (1)...(19): siRNA sense strand
auucaacgauggcuuccaa

SEQ ID NO: 1894725 - RNA, 19 nt, Homo sapiens
  misc_RNA (1)...(19): siRNA sense strand
gaggauauuuaugucaacu

SEQ ID NO: 1894726 - RNA, 19 nt, Homo sapiens
  misc_RNA (1)...(19): siRNA sense strand
gagaaggagagagagaaga

SEQ ID NO: 1894727 - RNA, 19 nt, Homo sapiens
  misc_RNA (1)...(19): siRNA sense strand
gagggacaguuuuauuguu

SEQ ID NO: 1894728 - RNA, 19 nt, Homo sapiens
  misc_RNA (1)...(19): siRNA sense strand
aaaccgauaaccaauauac

SEQ ID NO: 1894729 - RNA, 19 nt, Homo sapiens
  misc_RNA (1)...(19): siRNA sense strand
guauacagagcucuaugug

SEQ ID NO: 1894730 - RNA, 19 nt, Homo sapiens
  misc_RNA (1)...(19): siRNA sense strand
cagcugugccaucaaauag

SEQ ID NO: 1894731 - RNA, 19 nt, Homo sapiens
  misc_RNA (1)...(19): siRNA sense strand
gcuuuggcauacaucaguu

SEQ ID NO: 1894732 - RNA, 19 nt, Homo sapiens
  misc_RNA (1)...(19): siRNA sense strand
aacgauggcuuccaauaac

SEQ ID NO: 1894733 - RNA, 19 nt, Homo sapiens
  misc_RNA (1)...(19): siRNA sense strand
uacaggugguucagucaga

SEQ ID NO: 1894734 - RNA, 19 nt, Homo sapiens
  misc_RNA (1)...(19): siRNA sense strand
aagagaggauauuuauguc

SEQ ID NO: 1894735 - RNA, 19 nt, Homo sapiens
  misc_RNA (1)...(19): siRNA sense strand
gcacccaauaacuauagaa

SEQ ID NO: 1894736 - RNA, 19 nt, Homo sapiens
  misc_RNA (1)...(19): siRNA sense strand
ggagagagagaagagaucu

SEQ ID NO: 1894737 - RNA, 19 nt, Homo sapiens
  misc_RNA (1)...(19): siRNA sense strand
gacuguagccgaggguaaa

SEQ ID NO: 1894738 - RNA, 19 nt, Homo sapiens
  misc_RNA (1)...(19): siRNA sense strand
ccuccaaguucccaagaca

SEQ ID NO: 1894739 - RNA, 19 nt, Homo sapiens
  misc_RNA (1)...(19): siRNA sense strand
auacaucaguucccuuugc

SEQ ID NO: 1894740 - RNA, 19 nt, Homo sapiens
  misc_RNA (1)...(19): siRNA sense strand
ggacaguuuuauuguuguu

SEQ ID NO: 1894741 - RNA, 19 nt, Homo sapiens
  misc_RNA (1)...(19): siRNA sense strand
ucucgcagaccaaagacua

SEQ ID NO: 1894742 - RNA, 19 nt, Homo sapiens
  misc_RNA (1)...(19): siRNA sense strand
uauacagagcucuauguga

SEQ ID NO: 1894743 - RNA, 19 nt, Homo sapiens
  misc_RNA (1)...(19): siRNA sense strand
ccauggaugauacaagaga

SEQ ID NO: 1894744 - RNA, 19 nt, Homo sapiens
  misc_RNA (1)...(19): siRNA sense strand
ccggucaaccuaccaauca

SEQ ID NO: 1894745 - RNA, 19 nt, Homo sapiens
  misc_RNA (1)...(19): siRNA sense strand
uuuacagaguccugggaua

SEQ ID NO: 1894746 - RNA, 19 nt, Homo sapiens
  misc_RNA (1)...(19): siRNA sense strand
gaaaccuucgugaugagau

SEQ ID NO: 1894747 - RNA, 19 nt, Homo sapiens
  misc_RNA (1)...(19): siRNA sense strand
ggcaagagcuacaccaaga

SEQ ID NO: 1894748 - RNA, 19 nt, Homo sapiens
  misc_RNA (1)...(19): siRNA sense strand
ggacacacaggaugacuuc

SEQ ID NO: 1894749 - RNA, 19 nt, Homo sapiens
  misc_RNA (1)...(19): siRNA sense strand
caccuggccuugcacauga

SEQ ID NO: 1894750 - RNA, 19 nt, Homo sapiens
  misc_RNA (1)...(19): siRNA sense strand
caagagcucccaccugaag

SEQ ID NO: 1894751 - RNA, 19 nt, Homo sapiens
  misc_RNA (1)...(19): siRNA sense strand
gcacaugaagcgccaccuu

SEQ ID NO: 1894752 - RNA, 19 nt, Homo sapiens
  misc_RNA (1)...(19): siRNA sense strand
gggaggaagaggacgauga

SEQ ID NO: 1894753 - RNA, 19 nt, Homo sapiens
  misc_RNA (1)...(19): siRNA sense strand
ccgagacucugggcgcaua

SEQ ID NO: 1894754 - RNA, 19 nt, Homo sapiens
  misc_RNA (1)...(19): siRNA sense strand
ggaggaagaggacgaugag

SEQ ID NO: 1894755 - RNA, 19 nt, Homo sapiens
  misc_RNA (1)...(19): siRNA sense strand
gcagaggauccagguguga

SEQ ID NO: 1894756 - RNA, 19 nt, Homo sapiens
  misc_RNA (1)...(19): siRNA sense strand
caugaagcgccaccuuuga

SEQ ID NO: 1894757 - RNA, 19 nt, Homo sapiens
  misc_RNA (1)...(19): siRNA sense strand
cacaugaagcgccaccuuu

SEQ ID NO: 1894758 - RNA, 19 nt, Homo sapiens
  misc_RNA (1)...(19): siRNA sense strand
cgaagaggcgcaggacaug

SEQ ID NO: 1894759 - RNA, 19 nt, Homo sapiens
  misc_RNA (1)...(19): siRNA sense strand
ccuccuuccugaguuguuu

SEQ ID NO: 1894760 - RNA, 19 nt, Homo sapiens
  misc_RNA (1)...(19): siRNA sense strand
acaugaagcgccaccuuug

SEQ ID NO: 1894761 - RNA, 19 nt, Homo sapiens
  misc_RNA (1)...(19): siRNA sense strand
ccaccuggccuugcacaug

SEQ ID NO: 1894762 - RNA, 19 nt, Homo sapiens
  misc_RNA (1)...(19): siRNA sense strand
agaggauccaggugugaua

SEQ ID NO: 1894763 - RNA, 19 nt, Homo sapiens
  misc_RNA (1)...(19): siRNA sense strand
gaaggcugcggcuggagau

SEQ ID NO: 1894764 - RNA, 19 nt, Homo sapiens
  misc_RNA (1)...(19): siRNA sense strand
gaucuccuccucaccaacu

SEQ ID NO: 1894765 - RNA, 19 nt, Homo sapiens
  misc_RNA (1)...(19): siRNA sense strand
gcaagagcuacaccaagag

SEQ ID NO: 1894766 - RNA, 19 nt, Homo sapiens
  misc_RNA (1)...(19): siRNA sense strand
ccgaagaggcgcaggacau

SEQ ID NO: 1894767 - RNA, 19 nt, Homo sapiens
  misc_RNA (1)...(19): siRNA sense strand
cggcuaccgugcucaagga

SEQ ID NO: 1894768 - RNA, 19 nt, Homo sapiens
  misc_RNA (1)...(19): siRNA sense strand
cccuaggccuggucaaguu

SEQ ID NO: 1894769 - RNA, 19 nt, Homo sapiens
  misc_RNA (1)...(19): siRNA sense strand
uggaagaucccggcuggaa

SEQ ID NO: 1894770 - RNA, 19 nt, Homo sapiens
  misc_RNA (1)...(19): siRNA sense strand
ggagacgccugacuacuug

SEQ ID NO: 1894771 - RNA, 19 nt, Homo sapiens
  misc_RNA (1)...(19): siRNA sense strand
gcaagaagguucaguuucg

SEQ ID NO: 1894772 - RNA, 19 nt, Homo sapiens
  misc_RNA (1)...(19): siRNA sense strand
gcagcaagcccaagaagaa

SEQ ID NO: 1894773 - RNA, 19 nt, Homo sapiens
  misc_RNA (1)...(19): siRNA sense strand
gaagugccauugucaucaa

SEQ ID NO: 1894774 - RNA, 19 nt, Homo sapiens
  misc_RNA (1)...(19): siRNA sense strand
gcgaguaccugcacagcaa

SEQ ID NO: 1894775 - RNA, 19 nt, Homo sapiens
  misc_RNA (1)...(19): siRNA sense strand
gcagcaaggugucgguguu

SEQ ID NO: 1894776 - RNA, 19 nt, Homo sapiens
  misc_RNA (1)...(19): siRNA sense strand
gaggccaucuauccgauuu

SEQ ID NO: 1894777 - RNA, 19 nt, Homo sapiens
  misc_RNA (1)...(19): siRNA sense strand
ccaagaagaaguccaagaa

SEQ ID NO: 1894778 - RNA, 19 nt, Homo sapiens
  misc_RNA (1)...(19): siRNA sense strand
ccaagaagcacaaagacaa

SEQ ID NO: 1894779 - RNA, 19 nt, Homo sapiens
  misc_RNA (1)...(19): siRNA sense strand
acaaggaugugcagaagga

SEQ ID NO: 1894780 - RNA, 19 nt, Homo sapiens
  misc_RNA (1)...(19): siRNA sense strand
guacaaggaugugcagaag

SEQ ID NO: 1894781 - RNA, 19 nt, Homo sapiens
  misc_RNA (1)...(19): siRNA sense strand
ggauaucgcacuucacuca

SEQ ID NO: 1894782 - RNA, 19 nt, Homo sapiens
  misc_RNA (1)...(19): siRNA sense strand
caguaugucuccagucaug

SEQ ID NO: 1894783 - RNA, 19 nt, Homo sapiens
  misc_RNA (1)...(19): siRNA sense strand
gggcaagaagguucaguuu

SEQ ID NO: 1894784 - RNA, 19 nt, Homo sapiens
  misc_RNA (1)...(19): siRNA sense strand
gcuaaggacggcacgugua

SEQ ID NO: 1894785 - RNA, 19 nt, Homo sapiens
  misc_RNA (1)...(19): siRNA sense strand
cgacuucaaugccgaguac

SEQ ID NO: 1894786 - RNA, 19 nt, Homo sapiens
  misc_RNA (1)...(19): siRNA sense strand
gagccgaagugccauuguc

SEQ ID NO: 1894787 - RNA, 19 nt, Homo sapiens
  misc_RNA (1)...(19): siRNA sense strand
gagcucagccugccgucaa

SEQ ID NO: 1894788 - RNA, 19 nt, Homo sapiens
  misc_RNA (1)...(19): siRNA sense strand
gcugcagccuccugauuuc

SEQ ID NO: 1894789 - RNA, 19 nt, Homo sapiens
  misc_RNA (1)...(19): siRNA sense strand
gcagguggccaacaugagu

SEQ ID NO: 1894790 - RNA, 19 nt, Homo sapiens
  misc_RNA (1)...(19): siRNA sense strand
ucuauccgauuucaaggaa

SEQ ID NO: 1894791 - RNA, 19 nt, Homo sapiens
  misc_RNA (1)...(19): siRNA sense strand
ggacaaggacgcgcuggau

SEQ ID NO: 1894792 - RNA, 19 nt, Homo sapiens
  misc_RNA (1)...(19): siRNA sense strand
cuacaagaacgacuucaau

SEQ ID NO: 1894793 - RNA, 19 nt, Homo sapiens
  misc_RNA (1)...(19): siRNA sense strand
gagcagcgccagagcuaca

SEQ ID NO: 1894794 - RNA, 19 nt, Homo sapiens
  misc_RNA (1)...(19): siRNA sense strand
gcgcggacguucuccuucu

SEQ ID NO: 1894795 - RNA, 19 nt, Homo sapiens
  misc_RNA (1)...(19): siRNA sense strand
ggccaucuauccgauuuca

SEQ ID NO: 1894796 - RNA, 19 nt, Homo sapiens
  misc_RNA (1)...(19): siRNA sense strand
cgacgacuccuaccagaag

SEQ ID NO: 1894797 - RNA, 19 nt, Homo sapiens
  misc_RNA (1)...(19): siRNA sense strand
cggagacgccugacuacuu

SEQ ID NO: 1894798 - RNA, 19 nt, Homo sapiens
  misc_RNA (1)...(19): siRNA sense strand
gcagccuccugauuucauc

SEQ ID NO: 1894799 - RNA, 19 nt, Homo sapiens
  misc_RNA (1)...(19): siRNA sense strand
gcgagugccaucaggaaga

SEQ ID NO: 1894800 - RNA, 19 nt, Homo sapiens
  misc_RNA (1)...(19): siRNA sense strand
caagcuggcccacaucaag

SEQ ID NO: 1894801 - RNA, 19 nt, Homo sapiens
  misc_RNA (1)...(19): siRNA sense strand
ugacgcaggcggacaagga

SEQ ID NO: 1894802 - RNA, 19 nt, Homo sapiens
  misc_RNA (1)...(19): siRNA sense strand
cagcauacaggacaagauc

SEQ ID NO: 1894803 - RNA, 19 nt, Homo sapiens
  misc_RNA (1)...(19): siRNA sense strand
gcuacaagaacgacuucaa

SEQ ID NO: 1894804 - RNA, 19 nt, Homo sapiens
  misc_RNA (1)...(19): siRNA sense strand
caagaagaaguccaagaag

SEQ ID NO: 1894805 - RNA, 19 nt, Homo sapiens
  misc_RNA (1)...(19): siRNA sense strand
ugagggccuucgagagcua

SEQ ID NO: 1894806 - RNA, 19 nt, Homo sapiens
  misc_RNA (1)...(19): siRNA sense strand
gccgcuaccugggcaagaa

SEQ ID NO: 1894807 - RNA, 19 nt, Homo sapiens
  misc_RNA (1)...(19): siRNA sense strand
ugaaggaggauaggagcua

SEQ ID NO: 1894808 - RNA, 19 nt, Homo sapiens
  misc_RNA (1)...(19): siRNA sense strand
cagcagguggccaacauga

SEQ ID NO: 1894809 - RNA, 19 nt, Homo sapiens
  misc_RNA (1)...(19): siRNA sense strand
gcagacaccccagguuuaa

SEQ ID NO: 1894810 - RNA, 19 nt, Homo sapiens
  misc_RNA (1)...(19): siRNA sense strand
agaagaaguccaagaagca

SEQ ID NO: 1894811 - RNA, 19 nt, Homo sapiens
  misc_RNA (1)...(19): siRNA sense strand
uggccgaugucagcaauga

SEQ ID NO: 1894812 - RNA, 19 nt, Homo sapiens
  misc_RNA (1)...(19): siRNA sense strand
caagaagcacaaagacaag

SEQ ID NO: 1894813 - RNA, 19 nt, Homo sapiens
  misc_RNA (1)...(19): siRNA sense strand
ggcaagaagguucaguuuc

SEQ ID NO: 1894814 - RNA, 19 nt, Homo sapiens
  misc_RNA (1)...(19): siRNA sense strand
ccaacuacagccaggagaa

SEQ ID NO: 1894815 - RNA, 19 nt, Homo sapiens
  misc_RNA (1)...(19): siRNA sense strand
uacaagaacgacuucaaug

SEQ ID NO: 1894816 - RNA, 19 nt, Homo sapiens
  misc_RNA (1)...(19): siRNA sense strand
acgcagccaucuccucuuc

SEQ ID NO: 1894817 - RNA, 19 nt, Homo sapiens
  misc_RNA (1)...(19): siRNA sense strand
ucacugaggccaucuaucc

SEQ ID NO: 1894818 - RNA, 19 nt, Homo sapiens
  misc_RNA (1)...(19): siRNA sense strand
gcaagcuggcccacaucaa

SEQ ID NO: 1894819 - RNA, 19 nt, Homo sapiens
  misc_RNA (1)...(19): siRNA sense strand
uggccaacaugagugcuaa

SEQ ID NO: 1894820 - RNA, 19 nt, Homo sapiens
  misc_RNA (1)...(19): siRNA sense strand
cugcagcguuuccaguguu

SEQ ID NO: 1894821 - RNA, 19 nt, Homo sapiens
  misc_RNA (1)...(19): siRNA sense strand
caacaagaaaccccggaua

SEQ ID NO: 1894822 - RNA, 19 nt, Homo sapiens
  misc_RNA (1)...(19): siRNA sense strand
ggacugcauguacaaggau

SEQ ID NO: 1894823 - RNA, 19 nt, Homo sapiens
  misc_RNA (1)...(19): siRNA sense strand
cgaagugccauugucauca

SEQ ID NO: 1894824 - RNA, 19 nt, Homo sapiens
  misc_RNA (1)...(19): siRNA sense strand
gagcuacaagaacgacuuc

SEQ ID NO: 1894825 - RNA, 19 nt, Homo sapiens
  misc_RNA (1)...(19): siRNA sense strand
agcaguaugucuccaguca

SEQ ID NO: 1894826 - RNA, 19 nt, Homo sapiens
  misc_RNA (1)...(19): siRNA sense strand
gcaagcccaagaagaaguc

SEQ ID NO: 1894827 - RNA, 19 nt, Homo sapiens
  misc_RNA (1)...(19): siRNA sense strand
gaagcaccgcugcgaguac

SEQ ID NO: 1894828 - RNA, 19 nt, Homo sapiens
  misc_RNA (1)...(19): siRNA sense strand
ccaucuauccgauuucaag

SEQ ID NO: 1894829 - RNA, 19 nt, Homo sapiens
  misc_RNA (1)...(19): siRNA sense strand
gggcagauuuugcaggaau

SEQ ID NO: 1894830 - RNA, 19 nt, Homo sapiens
  misc_RNA (1)...(19): siRNA sense strand
ggacaagaucacggugugu

SEQ ID NO: 1894831 - RNA, 19 nt, Homo sapiens
  misc_RNA (1)...(19): siRNA sense strand
gccaagggcacaucuccau

SEQ ID NO: 1894832 - RNA, 19 nt, Homo sapiens
  misc_RNA (1)...(19): siRNA sense strand
ccuucuaccucuccaacau

SEQ ID NO: 1894833 - RNA, 19 nt, Homo sapiens
  misc_RNA (1)...(19): siRNA sense strand
gaaguccaagaagcacaaa

SEQ ID NO: 1894834 - RNA, 19 nt, Homo sapiens
  misc_RNA (1)...(19): siRNA sense strand
gcagcauacaggacaagau

SEQ ID NO: 1894835 - RNA, 19 nt, Homo sapiens
  misc_RNA (1)...(19): siRNA sense strand
gcacaaccaauuugcauua

SEQ ID NO: 1894836 - RNA, 19 nt, Homo sapiens
  misc_RNA (1)...(19): siRNA sense strand
gaagugaaaccuugugauu

SEQ ID NO: 1894837 - RNA, 19 nt, Homo sapiens
  misc_RNA (1)...(19): siRNA sense strand
gggaaggcauaguggaaua

SEQ ID NO: 1894838 - RNA, 19 nt, Homo sapiens
  misc_RNA (1)...(19): siRNA sense strand
gcgaauacaucaguucuau

SEQ ID NO: 1894839 - RNA, 19 nt, Homo sapiens
  misc_RNA (1)...(19): siRNA sense strand
gaauacaucaguucuauca

SEQ ID NO: 1894840 - RNA, 19 nt, Homo sapiens
  misc_RNA (1)...(19): siRNA sense strand
caacauggaggucuauauu

SEQ ID NO: 1894841 - RNA, 19 nt, Homo sapiens
  misc_RNA (1)...(19): siRNA sense strand
gggauaccauugaauuuau

SEQ ID NO: 1894842 - RNA, 19 nt, Homo sapiens
  misc_RNA (1)...(19): siRNA sense strand
gauaugaaaucaguuaugg

SEQ ID NO: 1894843 - RNA, 19 nt, Homo sapiens
  misc_RNA (1)...(19): siRNA sense strand
guaauggcaugcgguuuaa

SEQ ID NO: 1894844 - RNA, 19 nt, Homo sapiens
  misc_RNA (1)...(19): siRNA sense strand
gaaaucaguuauggaaaca

SEQ ID NO: 1894845 - RNA, 19 nt, Homo sapiens
  misc_RNA (1)...(19): siRNA sense strand
gauggaaauucuucagguu

SEQ ID NO: 1894846 - RNA, 19 nt, Homo sapiens
  misc_RNA (1)...(19): siRNA sense strand
cagguucaauuacauguuu

SEQ ID NO: 1894847 - RNA, 19 nt, Homo sapiens
  misc_RNA (1)...(19): siRNA sense strand
ggacaaucuuauuccuauu

SEQ ID NO: 1894848 - RNA, 19 nt, Homo sapiens
  misc_RNA (1)...(19): siRNA sense strand
acauggaggucuauauuau

SEQ ID NO: 1894849 - RNA, 19 nt, Homo sapiens
  misc_RNA (1)...(19): siRNA sense strand
gauauaaugcgaauacauc

SEQ ID NO: 1894850 - RNA, 19 nt, Homo sapiens
  misc_RNA (1)...(19): siRNA sense strand
gauaccaccuccuuucuac

SEQ ID NO: 1894851 - RNA, 19 nt, Homo sapiens
  misc_RNA (1)...(19): siRNA sense strand
ggaaguuacugggauuaca

SEQ ID NO: 1894852 - RNA, 19 nt, Homo sapiens
  misc_RNA (1)...(19): siRNA sense strand
caucaguucuaucauuuca

SEQ ID NO: 1894853 - RNA, 19 nt, Homo sapiens
  misc_RNA (1)...(19): siRNA sense strand
ggauaccauugaauuuaug

SEQ ID NO: 1894854 - RNA, 19 nt, Homo sapiens
  misc_RNA (1)...(19): siRNA sense strand
caccacagguuccauagug

SEQ ID NO: 1894855 - RNA, 19 nt, Homo sapiens
  misc_RNA (1)...(19): siRNA sense strand
uaagcuccaugacacauug

SEQ ID NO: 1894856 - RNA, 19 nt, Homo sapiens
  misc_RNA (1)...(19): siRNA sense strand
ucaggguucuaauuaugua

SEQ ID NO: 1894857 - RNA, 19 nt, Homo sapiens
  misc_RNA (1)...(19): siRNA sense strand
ugaaaucaguuauggaaac

SEQ ID NO: 1894858 - RNA, 19 nt, Homo sapiens
  misc_RNA (1)...(19): siRNA sense strand
ggacaagaagugaaaccuu

SEQ ID NO: 1894859 - RNA, 19 nt, Homo sapiens
  misc_RNA (1)...(19): siRNA sense strand
uauaagaguuugcguagac

SEQ ID NO: 1894860 - RNA, 19 nt, Homo sapiens
  misc_RNA (1)...(19): siRNA sense strand
aaacaccacagguuccaua

SEQ ID NO: 1894861 - RNA, 19 nt, Homo sapiens
  misc_RNA (1)...(19): siRNA sense strand
aguaauggcaugcgguuua

SEQ ID NO: 1894862 - RNA, 19 nt, Homo sapiens
  misc_RNA (1)...(19): siRNA sense strand
ggaaccaccaagaugcaua

SEQ ID NO: 1894863 - RNA, 19 nt, Homo sapiens
  misc_RNA (1)...(19): siRNA sense strand
cauaguguguggugaagau

SEQ ID NO: 1894864 - RNA, 19 nt, Homo sapiens
  misc_RNA (1)...(19): siRNA sense strand
auucugaccuuguggguuu

SEQ ID NO: 1894865 - RNA, 19 nt, Homo sapiens
  misc_RNA (1)...(19): siRNA sense strand
ucaggaaguuacugggauu

SEQ ID NO: 1894866 - RNA, 19 nt, Homo sapiens
  misc_RNA (1)...(19): siRNA sense strand
cgauggauaugaaaucagu

SEQ ID NO: 1894867 - RNA, 19 nt, Homo sapiens
  misc_RNA (1)...(19): siRNA sense strand
ggaaauucuucagguucaa

SEQ ID NO: 1894868 - RNA, 19 nt, Homo sapiens
  misc_RNA (1)...(19): siRNA sense strand
cgaaugcuacgauggauau

SEQ ID NO: 1894869 - RNA, 19 nt, Homo sapiens
  misc_RNA (1)...(19): siRNA sense strand
cacaaccaauuugcauuaa

SEQ ID NO: 1894870 - RNA, 19 nt, Homo sapiens
  misc_RNA (1)...(19): siRNA sense strand
ggacuacgaaugcuacgau

SEQ ID NO: 1894871 - RNA, 19 nt, Homo sapiens
  misc_RNA (1)...(19): siRNA sense strand
ggauaugaaaucaguuaug

SEQ ID NO: 1894872 - RNA, 19 nt, Homo sapiens
  misc_RNA (1)...(19): siRNA sense strand
gaaguuacugggauuacau

SEQ ID NO: 1894873 - RNA, 19 nt, Homo sapiens
  misc_RNA (1)...(19): siRNA sense strand
ucaguucuaucauuucaag

SEQ ID NO: 1894874 - RNA, 19 nt, Homo sapiens
  misc_RNA (1)...(19): siRNA sense strand
cuucaggguucuaauuaug

SEQ ID NO: 1894875 - RNA, 19 nt, Homo sapiens
  misc_RNA (1)...(19): siRNA sense strand
ccaccuccuuucuacuaaa

SEQ ID NO: 1894876 - RNA, 19 nt, Homo sapiens
  misc_RNA (1)...(19): siRNA sense strand
ggucagcacaaccaauuug

SEQ ID NO: 1894877 - RNA, 19 nt, Homo sapiens
  misc_RNA (1)...(19): siRNA sense strand
cugaaucuuccucuauuua

SEQ ID NO: 1894878 - RNA, 19 nt, Homo sapiens
  misc_RNA (1)...(19): siRNA sense strand
ggucggaaccaccaagaug

SEQ ID NO: 1894879 - RNA, 19 nt, Homo sapiens
  misc_RNA (1)...(19): siRNA sense strand
ccuauuagcaauggugaua

SEQ ID NO: 1894880 - RNA, 19 nt, Homo sapiens
  misc_RNA (1)...(19): siRNA sense strand
gggccuccuccaccuauua

SEQ ID NO: 1894881 - RNA, 19 nt, Homo sapiens
  misc_RNA (1)...(19): siRNA sense strand
caacagcagauggaaauuc

SEQ ID NO: 1894882 - RNA, 19 nt, Homo sapiens
  misc_RNA (1)...(19): siRNA sense strand
ucugaaucuuccucuauuu

SEQ ID NO: 1894883 - RNA, 19 nt, Homo sapiens
  misc_RNA (1)...(19): siRNA sense strand
gcuaauggacaagaaguga

SEQ ID NO: 1894884 - RNA, 19 nt, Homo sapiens
  misc_RNA (1)...(19): siRNA sense strand
agugaaaccuugugauuuu

SEQ ID NO: 1894885 - RNA, 19 nt, Homo sapiens
  misc_RNA (1)...(19): siRNA sense strand
uaauggacaagaagugaaa

SEQ ID NO: 1894886 - RNA, 19 nt, Homo sapiens
  misc_RNA (1)...(19): siRNA sense strand
uggaaauucuucagguuca

SEQ ID NO: 1894887 - RNA, 19 nt, Homo sapiens
  misc_RNA (1)...(19): siRNA sense strand
aacauggaggucuauauua

SEQ ID NO: 1894888 - RNA, 19 nt, Homo sapiens
  misc_RNA (1)...(19): siRNA sense strand
gcacacaagaugggugguu

SEQ ID NO: 1894889 - RNA, 19 nt, Homo sapiens
  misc_RNA (1)...(19): siRNA sense strand
uacauucacugcacacaag

SEQ ID NO: 1894890 - RNA, 19 nt, Homo sapiens
  misc_RNA (1)...(19): siRNA sense strand
ggauauaaugcgaauacau

SEQ ID NO: 1894891 - RNA, 19 nt, Homo sapiens
  misc_RNA (1)...(19): siRNA sense strand
cagcugcaggacaaucuua

SEQ ID NO: 1894892 - RNA, 19 nt, Homo sapiens
  misc_RNA (1)...(19): siRNA sense strand
gaaauucuucagguucaau

SEQ ID NO: 1894893 - RNA, 19 nt, Homo sapiens
  misc_RNA (1)...(19): siRNA sense strand
uguaacauguaguaaugga

SEQ ID NO: 1894894 - RNA, 19 nt, Homo sapiens
  misc_RNA (1)...(19): siRNA sense strand
ccaaugccaguccuacuau

SEQ ID NO: 1894895 - RNA, 19 nt, Homo sapiens
  misc_RNA (1)...(19): siRNA sense strand
uaccaccuccuuucuacua

SEQ ID NO: 1894896 - RNA, 19 nt, Homo sapiens
  misc_RNA (1)...(19): siRNA sense strand
gaguuugcguagacuauac

SEQ ID NO: 1894897 - RNA, 19 nt, Homo sapiens
  misc_RNA (1)...(19): siRNA sense strand
gaaccaccaagaugcauac

SEQ ID NO: 1894898 - RNA, 19 nt, Homo sapiens
  misc_RNA (1)...(19): siRNA sense strand
ggggauaccauugaauuua

SEQ ID NO: 1894899 - RNA, 19 nt, Homo sapiens
  misc_RNA (1)...(19): siRNA sense strand
cagcagauggaaauucuuc

SEQ ID NO: 1894900 - RNA, 19 nt, Homo sapiens
  misc_RNA (1)...(19): siRNA sense strand
cuacgaaugcuacgaugga

SEQ ID NO: 1894901 - RNA, 19 nt, Homo sapiens
  misc_RNA (1)...(19): siRNA sense strand
augcuacgauggauaugaa

SEQ ID NO: 1894902 - RNA, 19 nt, Homo sapiens
  misc_RNA (1)...(19): siRNA sense strand
caaugccaguccuacuaug

SEQ ID NO: 1894903 - RNA, 19 nt, Homo sapiens
  misc_RNA (1)...(19): siRNA sense strand
uacgauggauaugaaauca

SEQ ID NO: 1894904 - RNA, 19 nt, Homo sapiens
  misc_RNA (1)...(19): siRNA sense strand
uaaugcgaauacaucaguu

SEQ ID NO: 1894905 - RNA, 19 nt, Homo sapiens
  misc_RNA (1)...(19): siRNA sense strand
gagaauuccagagccaaga

SEQ ID NO: 1894906 - RNA, 19 nt, Homo sapiens
  misc_RNA (1)...(19): siRNA sense strand
guaaauugggauauaaugc

SEQ ID NO: 1894907 - RNA, 19 nt, Homo sapiens
  misc_RNA (1)...(19): siRNA sense strand
ugauaccaccuccuuucua

SEQ ID NO: 1894908 - RNA, 19 nt, Homo sapiens
  misc_RNA (1)...(19): siRNA sense strand
uauggaaacaccacagguu

SEQ ID NO: 1894909 - RNA, 19 nt, Homo sapiens
  misc_RNA (1)...(19): siRNA sense strand
gaacaugcucaaaaucaga

SEQ ID NO: 1894910 - RNA, 19 nt, Homo sapiens
  misc_RNA (1)...(19): siRNA sense strand
aacuucaggguucuaauua

SEQ ID NO: 1894911 - RNA, 19 nt, Homo sapiens
  misc_RNA (1)...(19): siRNA sense strand
uaaaccaggauaugcaaca

SEQ ID NO: 1894912 - RNA, 19 nt, Homo sapiens
  misc_RNA (1)...(19): siRNA sense strand
gcaacagcagauggaaauu

SEQ ID NO: 1894913 - RNA, 19 nt, Homo sapiens
  misc_RNA (1)...(19): siRNA sense strand
aagugaaaccuugugauuu

SEQ ID NO: 1894914 - RNA, 19 nt, Homo sapiens
  misc_RNA (1)...(19): siRNA sense strand
ugacacauuggacuacgaa

SEQ ID NO: 1894915 - RNA, 19 nt, Homo sapiens
  misc_RNA (1)...(19): siRNA sense strand
aacagcagauggaaauucu

SEQ ID NO: 1894916 - RNA, 19 nt, Homo sapiens
  misc_RNA (1)...(19): siRNA sense strand
caagagucgaguaccaaug

SEQ ID NO: 1894917 - RNA, 19 nt, Homo sapiens
  misc_RNA (1)...(19): siRNA sense strand
gggauauaaugcgaauaca

SEQ ID NO: 1894918 - RNA, 19 nt, Homo sapiens
  misc_RNA (1)...(19): siRNA sense strand
acagucccaugccucagaa

SEQ ID NO: 1894919 - RNA, 19 nt, Homo sapiens
  misc_RNA (1)...(19): siRNA sense strand
ucaacauggaggucuauau

SEQ ID NO: 1894920 - RNA, 19 nt, Homo sapiens
  misc_RNA (1)...(19): siRNA sense strand
gcugcaggacaaucuuauu

SEQ ID NO: 1894921 - RNA, 19 nt, Homo sapiens
  misc_RNA (1)...(19): siRNA sense strand
uuacugggauuacauucac

SEQ ID NO: 1894922 - RNA, 19 nt, Homo sapiens
  misc_RNA (1)...(19): siRNA sense strand
uagggaaggcauaguggaa

SEQ ID NO: 1894923 - RNA, 19 nt, Homo sapiens
  misc_RNA (1)...(19): siRNA sense strand
caggaaguuacugggauua

SEQ ID NO: 1894924 - RNA, 19 nt, Homo sapiens
  misc_RNA (1)...(19): siRNA sense strand
cagcacaaccaauuugcau

SEQ ID NO: 1894925 - RNA, 19 nt, Homo sapiens
  misc_RNA (1)...(19): siRNA sense strand
uucugaaucuuccucuauu

SEQ ID NO: 1894926 - RNA, 19 nt, Homo sapiens
  misc_RNA (1)...(19): siRNA sense strand
ccaguccuacuaugaacuu

SEQ ID NO: 1894927 - RNA, 19 nt, Homo sapiens
  misc_RNA (1)...(19): siRNA sense strand
gcagauggaaauucuucag

SEQ ID NO: 1894928 - RNA, 19 nt, Homo sapiens
  misc_RNA (1)...(19): siRNA sense strand
ugcaacagcagauggaaau

SEQ ID NO: 1894929 - RNA, 19 nt, Homo sapiens
  misc_RNA (1)...(19): siRNA sense strand
aaacaggggauaccauuga

SEQ ID NO: 1894930 - RNA, 19 nt, Homo sapiens
  misc_RNA (1)...(19): siRNA sense strand
ggguucuaauuauguaaca

SEQ ID NO: 1894931 - RNA, 19 nt, Homo sapiens
  misc_RNA (1)...(19): siRNA sense strand
caauggaucucaagaauuu

SEQ ID NO: 1894932 - RNA, 19 nt, Homo sapiens
  misc_RNA (1)...(19): siRNA sense strand
gacaacaaauugcuaagaa

SEQ ID NO: 1894933 - RNA, 19 nt, Homo sapiens
  misc_RNA (1)...(19): siRNA sense strand
gcaagaaucagacccaauu

SEQ ID NO: 1894934 - RNA, 19 nt, Homo sapiens
  misc_RNA (1)...(19): siRNA sense strand
ggacauuaguuucgggauu

SEQ ID NO: 1894935 - RNA, 19 nt, Homo sapiens
  misc_RNA (1)...(19): siRNA sense strand
gcacuaaacauuacaauac

SEQ ID NO: 1894936 - RNA, 19 nt, Homo sapiens
  misc_RNA (1)...(19): siRNA sense strand
gaaaugaggaaggucuuua

SEQ ID NO: 1894937 - RNA, 19 nt, Homo sapiens
  misc_RNA (1)...(19): siRNA sense strand
gacauuaguuucgggauuu

SEQ ID NO: 1894938 - RNA, 19 nt, Homo sapiens
  misc_RNA (1)...(19): siRNA sense strand
uaaaggcccuccaguuaau

SEQ ID NO: 1894939 - RNA, 19 nt, Homo sapiens
  misc_RNA (1)...(19): siRNA sense strand
gauacugcacuaaacauua

SEQ ID NO: 1894940 - RNA, 19 nt, Homo sapiens
  misc_RNA (1)...(19): siRNA sense strand
caggaaaguuuacguguau

SEQ ID NO: 1894941 - RNA, 19 nt, Homo sapiens
  misc_RNA (1)...(19): siRNA sense strand
gaaaccugauuuguucuuu

SEQ ID NO: 1894942 - RNA, 19 nt, Homo sapiens
  misc_RNA (1)...(19): siRNA sense strand
ccaagaagauugauaccau

SEQ ID NO: 1894943 - RNA, 19 nt, Homo sapiens
  misc_RNA (1)...(19): siRNA sense strand
gaccaugucuacaagcaaa

SEQ ID NO: 1894944 - RNA, 19 nt, Homo sapiens
  misc_RNA (1)...(19): siRNA sense strand
ucucagauauggaugauga

SEQ ID NO: 1894945 - RNA, 19 nt, Homo sapiens
  misc_RNA (1)...(19): siRNA sense strand
gacgaaagagaaagaauaa

SEQ ID NO: 1894946 - RNA, 19 nt, Homo sapiens
  misc_RNA (1)...(19): siRNA sense strand
cgacgaaagagaaagaaua

SEQ ID NO: 1894947 - RNA, 19 nt, Homo sapiens
  misc_RNA (1)...(19): siRNA sense strand
cgaaagagaaagaauaaga

SEQ ID NO: 1894948 - RNA, 19 nt, Homo sapiens
  misc_RNA (1)...(19): siRNA sense strand
ggaaacagacagugcaaga

SEQ ID NO: 1894949 - RNA, 19 nt, Homo sapiens
  misc_RNA (1)...(19): siRNA sense strand
cagagacgaccauggauua

SEQ ID NO: 1894950 - RNA, 19 nt, Homo sapiens
  misc_RNA (1)...(19): siRNA sense strand
agauauggaugaugaggua

SEQ ID NO: 1894951 - RNA, 19 nt, Homo sapiens
  misc_RNA (1)...(19): siRNA sense strand
caaugucaccuucugauuu

SEQ ID NO: 1894952 - RNA, 19 nt, Homo sapiens
  misc_RNA (1)...(19): siRNA sense strand
uuuaaaggcccuccaguua

SEQ ID NO: 1894953 - RNA, 19 nt, Homo sapiens
  misc_RNA (1)...(19): siRNA sense strand
gagacacuuucggacauua

SEQ ID NO: 1894954 - RNA, 19 nt, Homo sapiens
  misc_RNA (1)...(19): siRNA sense strand
gagaaagaauaagacagaa

SEQ ID NO: 1894955 - RNA, 19 nt, Homo sapiens
  misc_RNA (1)...(19): siRNA sense strand
guuauucuauccuggguuu

SEQ ID NO: 1894956 - RNA, 19 nt, Homo sapiens
  misc_RNA (1)...(19): siRNA sense strand
acaggaaaguuuacgugua

SEQ ID NO: 1894957 - RNA, 19 nt, Homo sapiens
  misc_RNA (1)...(19): siRNA sense strand
uuucagcacuucuggagua

SEQ ID NO: 1894958 - RNA, 19 nt, Homo sapiens
  misc_RNA (1)...(19): siRNA sense strand
guaugcagcuguaaauuuu

SEQ ID NO: 1894959 - RNA, 19 nt, Homo sapiens
  misc_RNA (1)...(19): siRNA sense strand
cgucagaaauggaaugauc

SEQ ID NO: 1894960 - RNA, 19 nt, Homo sapiens
  misc_RNA (1)...(19): siRNA sense strand
gauuuacgauacugcacua

SEQ ID NO: 1894961 - RNA, 19 nt, Homo sapiens
  misc_RNA (1)...(19): siRNA sense strand
gcagagacgaccauggauu

SEQ ID NO: 1894962 - RNA, 19 nt, Homo sapiens
  misc_RNA (1)...(19): siRNA sense strand
ugaggaaggucuuuaucga

SEQ ID NO: 1894963 - RNA, 19 nt, Homo sapiens
  misc_RNA (1)...(19): siRNA sense strand
uaaugcaacuggaaagcuu

SEQ ID NO: 1894964 - RNA, 19 nt, Homo sapiens
  misc_RNA (1)...(19): siRNA sense strand
agaauaagacagaagcuuu

SEQ ID NO: 1894965 - RNA, 19 nt, Homo sapiens
  misc_RNA (1)...(19): siRNA sense strand
ggaaagcuuuggguacaca

SEQ ID NO: 1894966 - RNA, 19 nt, Homo sapiens
  misc_RNA (1)...(19): siRNA sense strand
ggaguaugcagcuguaaau

SEQ ID NO: 1894967 - RNA, 19 nt, Homo sapiens
  misc_RNA (1)...(19): siRNA sense strand
uuggaaaccugauuuguuc

SEQ ID NO: 1894968 - RNA, 19 nt, Homo sapiens
  misc_RNA (1)...(19): siRNA sense strand
ucgaagugcuccaauguca

SEQ ID NO: 1894969 - RNA, 19 nt, Homo sapiens
  misc_RNA (1)...(19): siRNA sense strand
gggcaggacaucaggauau

SEQ ID NO: 1894970 - RNA, 19 nt, Homo sapiens
  misc_RNA (1)...(19): siRNA sense strand
agagaaagaauaagacaga

SEQ ID NO: 1894971 - RNA, 19 nt, Homo sapiens
  misc_RNA (1)...(19): siRNA sense strand
cccagucuccugauuguua

SEQ ID NO: 1894972 - RNA, 19 nt, Homo sapiens
  misc_RNA (1)...(19): siRNA sense strand
caacauauucaucaacagu

SEQ ID NO: 1894973 - RNA, 19 nt, Homo sapiens
  misc_RNA (1)...(19): siRNA sense strand
gaaagagaaagaauaagac

SEQ ID NO: 1894974 - RNA, 19 nt, Homo sapiens
  misc_RNA (1)...(19): siRNA sense strand
gaaaguuuacguguauaga

SEQ ID NO: 1894975 - RNA, 19 nt, Homo sapiens
  misc_RNA (1)...(19): siRNA sense strand
ucacuacagacaacaaauu

SEQ ID NO: 1894976 - RNA, 19 nt, Homo sapiens
  misc_RNA (1)...(19): siRNA sense strand
cugggaagcagcacuguua

SEQ ID NO: 1894977 - RNA, 19 nt, Homo sapiens
  misc_RNA (1)...(19): siRNA sense strand
aaaccugauuuguucuuug

SEQ ID NO: 1894978 - RNA, 19 nt, Homo sapiens
  misc_RNA (1)...(19): siRNA sense strand
gaagcagcacuguuacuca

SEQ ID NO: 1894979 - RNA, 19 nt, Homo sapiens
  misc_RNA (1)...(19): siRNA sense strand
gcagaaggacucacuuugc

SEQ ID NO: 1894980 - RNA, 19 nt, Homo sapiens
  misc_RNA (1)...(19): siRNA sense strand
caagaaucagacccaauuu

SEQ ID NO: 1894981 - RNA, 19 nt, Homo sapiens
  misc_RNA (1)...(19): siRNA sense strand
ccaauggaucucaagaauu

SEQ ID NO: 1894982 - RNA, 19 nt, Homo sapiens
  misc_RNA (1)...(19): siRNA sense strand
ugaauauccugacgacucu

SEQ ID NO: 1894983 - RNA, 19 nt, Homo sapiens
  misc_RNA (1)...(19): siRNA sense strand
ggaaaguuuacguguauag

SEQ ID NO: 1894984 - RNA, 19 nt, Homo sapiens
  misc_RNA (1)...(19): siRNA sense strand
ucccauggauguacaaaca

SEQ ID NO: 1894985 - RNA, 19 nt, Homo sapiens
  misc_RNA (1)...(19): siRNA sense strand
acacuuuccuguccaaugg

SEQ ID NO: 1894986 - RNA, 19 nt, Homo sapiens
  misc_RNA (1)...(19): siRNA sense strand
ggaaaccugauuuguucuu

SEQ ID NO: 1894987 - RNA, 19 nt, Homo sapiens
  misc_RNA (1)...(19): siRNA sense strand
aaacagacagugcaagauc

SEQ ID NO: 1894988 - RNA, 19 nt, Homo sapiens
  misc_RNA (1)...(19): siRNA sense strand
gaugaugagguaagggaaa

SEQ ID NO: 1894989 - RNA, 19 nt, Homo sapiens
  misc_RNA (1)...(19): siRNA sense strand
cagagugaauaucuuucuu

SEQ ID NO: 1894990 - RNA, 19 nt, Homo sapiens
  misc_RNA (1)...(19): siRNA sense strand
gaauaagacagaagcuuuu

SEQ ID NO: 1894991 - RNA, 19 nt, Homo sapiens
  misc_RNA (1)...(19): siRNA sense strand
uaaccaccgugcuaacgau

SEQ ID NO: 1894992 - RNA, 19 nt, Homo sapiens
  misc_RNA (1)...(19): siRNA sense strand
gggauaaccaccgugcuaa

SEQ ID NO: 1894993 - RNA, 19 nt, Homo sapiens
  misc_RNA (1)...(19): siRNA sense strand
gaaacagacagugcaagau

SEQ ID NO: 1894994 - RNA, 19 nt, Homo sapiens
  misc_RNA (1)...(19): siRNA sense strand
gguacacaaugaaugaucu

SEQ ID NO: 1894995 - RNA, 19 nt, Homo sapiens
  misc_RNA (1)...(19): siRNA sense strand
gauuacagagugaauaucu

SEQ ID NO: 1894996 - RNA, 19 nt, Homo sapiens
  misc_RNA (1)...(19): siRNA sense strand
cuucacagccuauggaaug

SEQ ID NO: 1894997 - RNA, 19 nt, Homo sapiens
  misc_RNA (1)...(19): siRNA sense strand
uaucaagacaacacaaaga

SEQ ID NO: 1894998 - RNA, 19 nt, Homo sapiens
  misc_RNA (1)...(19): siRNA sense strand
ccagucuccugauuguuau

SEQ ID NO: 1894999 - RNA, 19 nt, Homo sapiens
  misc_RNA (1)...(19): siRNA sense strand
ugaagucacuacagacaac

SEQ ID NO: 1895000 - RNA, 19 nt, Homo sapiens
  misc_RNA (1)...(19): siRNA sense strand
ggugccaacuuucaugaag

SEQ ID NO: 1895001 - RNA, 19 nt, Homo sapiens
  misc_RNA (1)...(19): siRNA sense strand
gugagacacuuucggacau

SEQ ID NO: 1895002 - RNA, 19 nt, Homo sapiens
  misc_RNA (1)...(19): siRNA sense strand
gcuccaaugucaccuucug

SEQ ID NO: 1895003 - RNA, 19 nt, Homo sapiens
  misc_RNA (1)...(19): siRNA sense strand
agaaucagacccaauuuua

SEQ ID NO: 1895004 - RNA, 19 nt, Homo sapiens
  misc_RNA (1)...(19): siRNA sense strand
ugagacacuuucggacauu

SEQ ID NO: 1895005 - RNA, 19 nt, Homo sapiens
  misc_RNA (1)...(19): siRNA sense strand
gaaucagacccaauuuuaa

SEQ ID NO: 1895006 - RNA, 19 nt, Homo sapiens
  misc_RNA (1)...(19): siRNA sense strand
ggcaggacaucaggauaug

SEQ ID NO: 1895007 - RNA, 19 nt, Homo sapiens
  misc_RNA (1)...(19): siRNA sense strand
gauuuguucuuugccaaug

SEQ ID NO: 1895008 - RNA, 19 nt, Homo sapiens
  misc_RNA (1)...(19): siRNA sense strand
caucaucagcagcaagauu

SEQ ID NO: 1895009 - RNA, 19 nt, Homo sapiens
  misc_RNA (1)...(19): siRNA sense strand
ccaaugucaccuucugauu

SEQ ID NO: 1895010 - RNA, 19 nt, Homo sapiens
  misc_RNA (1)...(19): siRNA sense strand
caagacaacacaaagaacu

SEQ ID NO: 1895011 - RNA, 19 nt, Homo sapiens
  misc_RNA (1)...(19): siRNA sense strand
aguaugcagcuguaaauuu

SEQ ID NO: 1895012 - RNA, 19 nt, Homo sapiens
  misc_RNA (1)...(19): siRNA sense strand
acagacaacaaauugcuaa

SEQ ID NO: 1895013 - RNA, 19 nt, Homo sapiens
  misc_RNA (1)...(19): siRNA sense strand
ccaaaaguuucauauguca

SEQ ID NO: 1895014 - RNA, 19 nt, Homo sapiens
  misc_RNA (1)...(19): siRNA sense strand
uuacgauacugcacuaaac

SEQ ID NO: 1895015 - RNA, 19 nt, Homo sapiens
  misc_RNA (1)...(19): siRNA sense strand
gggaccaugucuacaagca

SEQ ID NO: 1895016 - RNA, 19 nt, Homo sapiens
  misc_RNA (1)...(19): siRNA sense strand
ggaagcagcacuguuacuc

SEQ ID NO: 1895017 - RNA, 19 nt, Homo sapiens
  misc_RNA (1)...(19): siRNA sense strand
ggcagaaggacucacuuug

SEQ ID NO: 1895018 - RNA, 19 nt, Homo sapiens
  misc_RNA (1)...(19): siRNA sense strand
auacugcacuaaacauuac

SEQ ID NO: 1895019 - RNA, 19 nt, Homo sapiens
  misc_RNA (1)...(19): siRNA sense strand
caugcaacauauucaucaa

SEQ ID NO: 1895020 - RNA, 19 nt, Homo sapiens
  misc_RNA (1)...(19): siRNA sense strand
caggauaugaugcaagaau

SEQ ID NO: 1895021 - RNA, 19 nt, Homo sapiens
  misc_RNA (1)...(19): siRNA sense strand
guaagggaaagccgauuca

SEQ ID NO: 1895022 - RNA, 19 nt, Homo sapiens
  misc_RNA (1)...(19): siRNA sense strand
cagcacuucuggaguaugc

SEQ ID NO: 1895023 - RNA, 19 nt, Homo sapiens
  misc_RNA (1)...(19): siRNA sense strand
ugcaacauauucaucaaca

SEQ ID NO: 1895024 - RNA, 19 nt, Homo sapiens
  misc_RNA (1)...(19): siRNA sense strand
gcaacauauucaucaacag

SEQ ID NO: 1895025 - RNA, 19 nt, Homo sapiens
  misc_RNA (1)...(19): siRNA sense strand
gguaagggaaagccgauuc

SEQ ID NO: 1895026 - RNA, 19 nt, Homo sapiens
  misc_RNA (1)...(19): siRNA sense strand
caggguagcucuggggaua

SEQ ID NO: 1895027 - RNA, 19 nt, Homo sapiens
  misc_RNA (1)...(19): siRNA sense strand
cuggaaagcuuuggguaca

SEQ ID NO: 1895028 - RNA, 19 nt, Homo sapiens
  misc_RNA (1)...(19): siRNA sense strand
ggagaaguuuuaccguuuc

SEQ ID NO: 1895029 - RNA, 19 nt, Homo sapiens
  misc_RNA (1)...(19): siRNA sense strand
gaguaugcagcuguaaauu

SEQ ID NO: 1895030 - RNA, 19 nt, Homo sapiens
  misc_RNA (1)...(19): siRNA sense strand
cgauacugcacuaaacauu

SEQ ID NO: 1895031 - RNA, 19 nt, Homo sapiens
  misc_RNA (1)...(19): siRNA sense strand
gaauugagcaucuguauaa

SEQ ID NO: 1895032 - RNA, 19 nt, Homo sapiens
  misc_RNA (1)...(19): siRNA sense strand
gacaguaccugccuuguga

SEQ ID NO: 1895033 - RNA, 19 nt, Homo sapiens
  misc_RNA (1)...(19): siRNA sense strand
gaacggcauucucuucaau

SEQ ID NO: 1895034 - RNA, 19 nt, Homo sapiens
  misc_RNA (1)...(19): siRNA sense strand
gaaguaaagcccacagaga

SEQ ID NO: 1895035 - RNA, 19 nt, Homo sapiens
  misc_RNA (1)...(19): siRNA sense strand
gcuaugagguccauggaau

SEQ ID NO: 1895036 - RNA, 19 nt, Homo sapiens
  misc_RNA (1)...(19): siRNA sense strand
uauaaucucuuugcaguga

SEQ ID NO: 1895037 - RNA, 19 nt, Homo sapiens
  misc_RNA (1)...(19): siRNA sense strand
gaacuuccgugaggcguau

SEQ ID NO: 1895038 - RNA, 19 nt, Homo sapiens
  misc_RNA (1)...(19): siRNA sense strand
gaagugggcagauguaaag

SEQ ID NO: 1895039 - RNA, 19 nt, Homo sapiens
  misc_RNA (1)...(19): siRNA sense strand
ggucaguagcuaagauuua

SEQ ID NO: 1895040 - RNA, 19 nt, Homo sapiens
  misc_RNA (1)...(19): siRNA sense strand
aagaggagcuaauuucguu

SEQ ID NO: 1895041 - RNA, 19 nt, Homo sapiens
  misc_RNA (1)...(19): siRNA sense strand
gagcaucuguauaagaauc

SEQ ID NO: 1895042 - RNA, 19 nt, Homo sapiens
  misc_RNA (1)...(19): siRNA sense strand
uaaagagaccggcaaaguu

SEQ ID NO: 1895043 - RNA, 19 nt, Homo sapiens
  misc_RNA (1)...(19): siRNA sense strand
guaccugccuugugaagau

SEQ ID NO: 1895044 - RNA, 19 nt, Homo sapiens
  misc_RNA (1)...(19): siRNA sense strand
aacagaagcugaacuggaa

SEQ ID NO: 1895045 - RNA, 19 nt, Homo sapiens
  misc_RNA (1)...(19): siRNA sense strand
ggcauucucuucaaucaug

SEQ ID NO: 1895046 - RNA, 19 nt, Homo sapiens
  misc_RNA (1)...(19): siRNA sense strand
ccacagagaucuacaaccu

SEQ ID NO: 1895047 - RNA, 19 nt, Homo sapiens
  misc_RNA (1)...(19): siRNA sense strand
ugagguccauggaauugua

SEQ ID NO: 1895048 - RNA, 19 nt, Homo sapiens
  misc_RNA (1)...(19): siRNA sense strand
gcaccaaagcgaaacagaa

SEQ ID NO: 1895049 - RNA, 19 nt, Homo sapiens
  misc_RNA (1)...(19): siRNA sense strand
uagaugcaguuaagacuug

SEQ ID NO: 1895050 - RNA, 19 nt, Homo sapiens
  misc_RNA (1)...(19): siRNA sense strand
gaaaucauucuugcacauu

SEQ ID NO: 1895051 - RNA, 19 nt, Homo sapiens
  misc_RNA (1)...(19): siRNA sense strand
guuccuaccuggcugaguu

SEQ ID NO: 1895052 - RNA, 19 nt, Homo sapiens
  misc_RNA (1)...(19): siRNA sense strand
guaaagagaccggcaaagu

SEQ ID NO: 1895053 - RNA, 19 nt, Homo sapiens
  misc_RNA (1)...(19): siRNA sense strand
gaggcuaugugguugaugu

SEQ ID NO: 1895054 - RNA, 19 nt, Homo sapiens
  misc_RNA (1)...(19): siRNA sense strand
uuggacaacuggaauguuu

SEQ ID NO: 1895055 - RNA, 19 nt, Homo sapiens
  misc_RNA (1)...(19): siRNA sense strand
ccuuugaccucgcugagua

SEQ ID NO: 1895056 - RNA, 19 nt, Homo sapiens
  misc_RNA (1)...(19): siRNA sense strand
gaaacaugaaguugcacua

SEQ ID NO: 1895057 - RNA, 19 nt, Homo sapiens
  misc_RNA (1)...(19): siRNA sense strand
uaccaagccucaacaagug

SEQ ID NO: 1895058 - RNA, 19 nt, Homo sapiens
  misc_RNA (1)...(19): siRNA sense strand
gaaaggcuaugagguccau

SEQ ID NO: 1895059 - RNA, 19 nt, Homo sapiens
  misc_RNA (1)...(19): siRNA sense strand
uugagcaucuguauaagaa

SEQ ID NO: 1895060 - RNA, 19 nt, Homo sapiens
  misc_RNA (1)...(19): siRNA sense strand
gcaaaguucacgugacugu

SEQ ID NO: 1895061 - RNA, 19 nt, Homo sapiens
  misc_RNA (1)...(19): siRNA sense strand
cagaagaggagcuaauuuc

SEQ ID NO: 1895062 - RNA, 19 nt, Homo sapiens
  misc_RNA (1)...(19): siRNA sense strand
guacggcgguccaguucau

SEQ ID NO: 1895063 - RNA, 19 nt, Homo sapiens
  misc_RNA (1)...(19): siRNA sense strand
aaagagaccggcaaaguuc

SEQ ID NO: 1895064 - RNA, 19 nt, Homo sapiens
  misc_RNA (1)...(19): siRNA sense strand
ccuauuggauuguggugaa

SEQ ID NO: 1895065 - RNA, 19 nt, Homo sapiens
  misc_RNA (1)...(19): siRNA sense strand
gugggcagauguaaagaga

SEQ ID NO: 1895066 - RNA, 19 nt, Homo sapiens
  misc_RNA (1)...(19): siRNA sense strand
cgaauugagcaucuguaua

SEQ ID NO: 1895067 - RNA, 19 nt, Homo sapiens
  misc_RNA (1)...(19): siRNA sense strand
cuguggaucucaaguacua

SEQ ID NO: 1895068 - RNA, 19 nt, Homo sapiens
  misc_RNA (1)...(19): siRNA sense strand
ggacaacuggaauguuuca

SEQ ID NO: 1895069 - RNA, 19 nt, Homo sapiens
  misc_RNA (1)...(19): siRNA sense strand
gcagugaacggcauucucu

SEQ ID NO: 1895070 - RNA, 19 nt, Homo sapiens
  misc_RNA (1)...(19): siRNA sense strand
gcucaucaccgguaucaca

SEQ ID NO: 1895071 - RNA, 19 nt, Homo sapiens
  misc_RNA (1)...(19): siRNA sense strand
gcaaaacucuaugccuauu

SEQ ID NO: 1895072 - RNA, 19 nt, Homo sapiens
  misc_RNA (1)...(19): siRNA sense strand
ccagaagaggagcuaauuu

SEQ ID NO: 1895073 - RNA, 19 nt, Homo sapiens
  misc_RNA (1)...(19): siRNA sense strand
ugaggcguauaaucucuuu

SEQ ID NO: 1895074 - RNA, 19 nt, Homo sapiens
  misc_RNA (1)...(19): siRNA sense strand
gguugauguugcagaauga

SEQ ID NO: 1895075 - RNA, 19 nt, Homo sapiens
  misc_RNA (1)...(19): siRNA sense strand
gaagaggagcuaauuucgu

SEQ ID NO: 1895076 - RNA, 19 nt, Homo sapiens
  misc_RNA (1)...(19): siRNA sense strand
cgguccaguucauuuaaua

SEQ ID NO: 1895077 - RNA, 19 nt, Homo sapiens
  misc_RNA (1)...(19): siRNA sense strand
gccggaggacuucguuaua

SEQ ID NO: 1895078 - RNA, 19 nt, Homo sapiens
  misc_RNA (1)...(19): siRNA sense strand
cgaaacagaagcugaacug

SEQ ID NO: 1895079 - RNA, 19 nt, Homo sapiens
  misc_RNA (1)...(19): siRNA sense strand
ugacuguggaucucaagua

SEQ ID NO: 1895080 - RNA, 19 nt, Homo sapiens
  misc_RNA (1)...(19): siRNA sense strand
aaaucauucuugcacauug

SEQ ID NO: 1895081 - RNA, 19 nt, Homo sapiens
  misc_RNA (1)...(19): siRNA sense strand
ccgggaauuugucgagaaa

SEQ ID NO: 1895082 - RNA, 19 nt, Homo sapiens
  misc_RNA (1)...(19): siRNA sense strand
ggacuucguuauagcuacu

SEQ ID NO: 1895083 - RNA, 19 nt, Homo sapiens
  misc_RNA (1)...(19): siRNA sense strand
cuaccaagccucaacaagu

SEQ ID NO: 1895084 - RNA, 19 nt, Homo sapiens
  misc_RNA (1)...(19): siRNA sense strand
cgacugcaccaaagcgaaa

SEQ ID NO: 1895085 - RNA, 19 nt, Homo sapiens
  misc_RNA (1)...(19): siRNA sense strand
gcauucucuucaaucauga

SEQ ID NO: 1895086 - RNA, 19 nt, Homo sapiens
  misc_RNA (1)...(19): siRNA sense strand
acaugaaguugcacuaugg

SEQ ID NO: 1895087 - RNA, 19 nt, Homo sapiens
  misc_RNA (1)...(19): siRNA sense strand
ccggaggacuucguuauag

SEQ ID NO: 1895088 - RNA, 19 nt, Homo sapiens
  misc_RNA (1)...(19): siRNA sense strand
ugaguacacugcggacguu

SEQ ID NO: 1895089 - RNA, 19 nt, Homo sapiens
  misc_RNA (1)...(19): siRNA sense strand
aaggaaacaugaaguugca

SEQ ID NO: 1895090 - RNA, 19 nt, Homo sapiens
  misc_RNA (1)...(19): siRNA sense strand
cggcaaaguucacgugacu

SEQ ID NO: 1895091 - RNA, 19 nt, Homo sapiens
  misc_RNA (1)...(19): siRNA sense strand
ggccuuaucaacucuguga

SEQ ID NO: 1895092 - RNA, 19 nt, Homo sapiens
  misc_RNA (1)...(19): siRNA sense strand
gcgguccaguucauuuaau

SEQ ID NO: 1895093 - RNA, 19 nt, Homo sapiens
  misc_RNA (1)...(19): siRNA sense strand
gucaguagcuaagauuuac

SEQ ID NO: 1895094 - RNA, 19 nt, Homo sapiens
  misc_RNA (1)...(19): siRNA sense strand
ucacauugaaggaaacaug

SEQ ID NO: 1895095 - RNA, 19 nt, Homo sapiens
  misc_RNA (1)...(19): siRNA sense strand
gacuguggaucucaaguac

SEQ ID NO: 1895096 - RNA, 19 nt, Homo sapiens
  misc_RNA (1)...(19): siRNA sense strand
ugaagugggcagauguaaa

SEQ ID NO: 1895097 - RNA, 19 nt, Homo sapiens
  misc_RNA (1)...(19): siRNA sense strand
uaauacgggucgaauugag

SEQ ID NO: 1895098 - RNA, 19 nt, Homo sapiens
  misc_RNA (1)...(19): siRNA sense strand
aaaauuagccggucaguag

SEQ ID NO: 1895099 - RNA, 19 nt, Homo sapiens
  misc_RNA (1)...(19): siRNA sense strand
ucaugagagucccagaaga

SEQ ID NO: 1895100 - RNA, 19 nt, Homo sapiens
  misc_RNA (1)...(19): siRNA sense strand
cgacuucuagaugcaguua

SEQ ID NO: 1895101 - RNA, 19 nt, Homo sapiens
  misc_RNA (1)...(19): siRNA sense strand
aacaugaaguugcacuaug

SEQ ID NO: 1895102 - RNA, 19 nt, Homo sapiens
  misc_RNA (1)...(19): siRNA sense strand
aaacaugaaguugcacuau

SEQ ID NO: 1895103 - RNA, 19 nt, Homo sapiens
  misc_RNA (1)...(19): siRNA sense strand
uuuaauacgggucgaauug

SEQ ID NO: 1895104 - RNA, 19 nt, Homo sapiens
  misc_RNA (1)...(19): siRNA sense strand
cauaguguccgggaauuug

SEQ ID NO: 1895105 - RNA, 19 nt, Homo sapiens
  misc_RNA (1)...(19): siRNA sense strand
gaggacuucguuauagcua

SEQ ID NO: 1895106 - RNA, 19 nt, Homo sapiens
  misc_RNA (1)...(19): siRNA sense strand
gauuuaccuuggacaacug

SEQ ID NO: 1895107 - RNA, 19 nt, Homo sapiens
  misc_RNA (1)...(19): siRNA sense strand
ugaaggaaacaugaaguug

SEQ ID NO: 1895108 - RNA, 19 nt, Homo sapiens
  misc_RNA (1)...(19): siRNA sense strand
aaaucuggaugccaaacga

SEQ ID NO: 1895109 - RNA, 19 nt, Homo sapiens
  misc_RNA (1)...(19): siRNA sense strand
aggcucacauugaaggaaa

SEQ ID NO: 1895110 - RNA, 19 nt, Homo sapiens
  misc_RNA (1)...(19): siRNA sense strand
uaagauuuaccuuggacaa

SEQ ID NO: 1895111 - RNA, 19 nt, Homo sapiens
  misc_RNA (1)...(19): siRNA sense strand
ggagcuaauuucguuacuc

SEQ ID NO: 1895112 - RNA, 19 nt, Homo sapiens
  misc_RNA (1)...(19): siRNA sense strand
cggcgguccaguucauuua

SEQ ID NO: 1895113 - RNA, 19 nt, Homo sapiens
  misc_RNA (1)...(19): siRNA sense strand
gcacuauggcgaucucacu

SEQ ID NO: 1895114 - RNA, 19 nt, Homo sapiens
  misc_RNA (1)...(19): siRNA sense strand
caccaaagcgaaacagaag

SEQ ID NO: 1895115 - RNA, 19 nt, Homo sapiens
  misc_RNA (1)...(19): siRNA sense strand
aaguaaagcccacagagau

SEQ ID NO: 1895116 - RNA, 19 nt, Homo sapiens
  misc_RNA (1)...(19): siRNA sense strand
ugacaguaccugccuugug

SEQ ID NO: 1895117 - RNA, 19 nt, Homo sapiens
  misc_RNA (1)...(19): siRNA sense strand
ugggaaagugcaggaaaua

SEQ ID NO: 1895118 - RNA, 19 nt, Homo sapiens
  misc_RNA (1)...(19): siRNA sense strand
gagccggaggacuucguua

SEQ ID NO: 1895119 - RNA, 19 nt, Homo sapiens
  misc_RNA (1)...(19): siRNA sense strand
ugguugauguugcagaaug

SEQ ID NO: 1895120 - RNA, 19 nt, Homo sapiens
  misc_RNA (1)...(19): siRNA sense strand
ggaaagugcaggaaauacc

SEQ ID NO: 1895121 - RNA, 19 nt, Homo sapiens
  misc_RNA (1)...(19): siRNA sense strand
guaaagcccacagagaucu

SEQ ID NO: 1895122 - RNA, 19 nt, Homo sapiens
  misc_RNA (1)...(19): siRNA sense strand
ccaggaacguggcgcucau

SEQ ID NO: 1895123 - RNA, 19 nt, Homo sapiens
  misc_RNA (1)...(19): siRNA sense strand
ugauguugcagaaugauga

SEQ ID NO: 1895124 - RNA, 19 nt, Homo sapiens
  misc_RNA (1)...(19): siRNA sense strand
uaaagcccacagagaucua

SEQ ID NO: 1895125 - RNA, 19 nt, Homo sapiens
  misc_RNA (1)...(19): siRNA sense strand
ccgggucgcuuucgaugag

SEQ ID NO: 1895126 - RNA, 19 nt, Homo sapiens
  misc_RNA (1)...(19): siRNA sense strand
guacuaccggccaacugaa

SEQ ID NO: 1895127 - RNA, 19 nt, Homo sapiens
  misc_RNA (1)...(19): siRNA sense strand
cugaguuccugcuggagaa

SEQ ID NO: 1895128 - RNA, 19 nt, Homo sapiens
  misc_RNA (1)...(19): siRNA sense strand
ugugguugauguugcagaa

SEQ ID NO: 1895129 - RNA, 19 nt, Homo sapiens
  misc_RNA (1)...(19): siRNA sense strand
caugagagucccagaagag

SEQ ID NO: 1895130 - RNA, 19 nt, Homo sapiens
  misc_RNA (1)...(19): siRNA sense strand
aagcgaaacagaagcugaa

SEQ ID NO: 1895131 - RNA, 19 nt, Homo sapiens
  misc_RNA (1)...(19): siRNA sense strand
gaaagccgguucucaguuc

SEQ ID NO: 1895132 - RNA, 19 nt, Homo sapiens
  misc_RNA (1)...(19): siRNA sense strand
agaaacagcugcucaaauc

SEQ ID NO: 1895133 - RNA, 19 nt, Homo sapiens
  misc_RNA (1)...(19): siRNA sense strand
aaacagaggugcuggugaa

SEQ ID NO: 1895134 - RNA, 19 nt, Homo sapiens
  misc_RNA (1)...(19): siRNA sense strand
gacaggaccucaauaguuc

SEQ ID NO: 1895135 - RNA, 19 nt, Homo sapiens
  misc_RNA (1)...(19): siRNA sense strand
guucugauguccacaguuu

SEQ ID NO: 1895136 - RNA, 19 nt, Homo sapiens
  misc_RNA (1)...(19): siRNA sense strand
guucagauguucauguuug

SEQ ID NO: 1895137 - RNA, 19 nt, Homo sapiens
  misc_RNA (1)...(19): siRNA sense strand
ggacgggaauggagaguuc

SEQ ID NO: 1895138 - RNA, 19 nt, Homo sapiens
  misc_RNA (1)...(19): siRNA sense strand
gaccagaacuacacgaauc

SEQ ID NO: 1895139 - RNA, 19 nt, Homo sapiens
  misc_RNA (1)...(19): siRNA sense strand
aggcugaccuugugaagua

SEQ ID NO: 1895140 - RNA, 19 nt, Homo sapiens
  misc_RNA (1)...(19): siRNA sense strand
gaagucaaguccgcaguga

SEQ ID NO: 1895141 - RNA, 19 nt, Homo sapiens
  misc_RNA (1)...(19): siRNA sense strand
ccagggagaucaaggugaa

SEQ ID NO: 1895142 - RNA, 19 nt, Homo sapiens
  misc_RNA (1)...(19): siRNA sense strand
guaugugggugccaucuug

SEQ ID NO: 1895143 - RNA, 19 nt, Homo sapiens
  misc_RNA (1)...(19): siRNA sense strand
gaacagugccagccuucuu

SEQ ID NO: 1895144 - RNA, 19 nt, Homo sapiens
  misc_RNA (1)...(19): siRNA sense strand
gugauucucuuaaugaaca

SEQ ID NO: 1895145 - RNA, 19 nt, Homo sapiens
  misc_RNA (1)...(19): siRNA sense strand
gcagacaggaccucaauag

SEQ ID NO: 1895146 - RNA, 19 nt, Homo sapiens
  misc_RNA (1)...(19): siRNA sense strand
agacaggaccucaauaguu

SEQ ID NO: 1895147 - RNA, 19 nt, Homo sapiens
  misc_RNA (1)...(19): siRNA sense strand
gcagcgagguuauggaaac

SEQ ID NO: 1895148 - RNA, 19 nt, Homo sapiens
  misc_RNA (1)...(19): siRNA sense strand
gagaggaacuggguaucug

SEQ ID NO: 1895149 - RNA, 19 nt, Homo sapiens
  misc_RNA (1)...(19): siRNA sense strand
gaaggaggaguaaggaugu

SEQ ID NO: 1895150 - RNA, 19 nt, Homo sapiens
  misc_RNA (1)...(19): siRNA sense strand
gcuagugccugcaggaaca

SEQ ID NO: 1895151 - RNA, 19 nt, Homo sapiens
  misc_RNA (1)...(19): siRNA sense strand
ggaaagccgguucucaguu

SEQ ID NO: 1895152 - RNA, 19 nt, Homo sapiens
  misc_RNA (1)...(19): siRNA sense strand
agaacuacacgaauccuua

SEQ ID NO: 1895153 - RNA, 19 nt, Homo sapiens
  misc_RNA (1)...(19): siRNA sense strand
cuacacgaauccuuacgaa

SEQ ID NO: 1895154 - RNA, 19 nt, Homo sapiens
  misc_RNA (1)...(19): siRNA sense strand
gaauuacacccuccuggau

SEQ ID NO: 1895155 - RNA, 19 nt, Homo sapiens
  misc_RNA (1)...(19): siRNA sense strand
gagaguucauugucaggau

SEQ ID NO: 1895156 - RNA, 19 nt, Homo sapiens
  misc_RNA (1)...(19): siRNA sense strand
caguucagauguucauguu

SEQ ID NO: 1895157 - RNA, 19 nt, Homo sapiens
  misc_RNA (1)...(19): siRNA sense strand
gaaggcacucccuggugua

SEQ ID NO: 1895158 - RNA, 19 nt, Homo sapiens
  misc_RNA (1)...(19): siRNA sense strand
gaaacagcugcucaaauca

SEQ ID NO: 1895159 - RNA, 19 nt, Homo sapiens
  misc_RNA (1)...(19): siRNA sense strand
gagacaccauccucaacau

SEQ ID NO: 1895160 - RNA, 19 nt, Homo sapiens
  misc_RNA (1)...(19): siRNA sense strand
ggacauuaugaccuaguuu

SEQ ID NO: 1895161 - RNA, 19 nt, Homo sapiens
  misc_RNA (1)...(19): siRNA sense strand
gaacuacacgaauccuuac

SEQ ID NO: 1895162 - RNA, 19 nt, Homo sapiens
  misc_RNA (1)...(19): siRNA sense strand
ccacuggacaugaaaguca

SEQ ID NO: 1895163 - RNA, 19 nt, Homo sapiens
  misc_RNA (1)...(19): siRNA sense strand
gaaagucagccuccaagcu

SEQ ID NO: 1895164 - RNA, 19 nt, Homo sapiens
  misc_RNA (1)...(19): siRNA sense strand
gcucccauguggcugaaug

SEQ ID NO: 1895165 - RNA, 19 nt, Homo sapiens
  misc_RNA (1)...(19): siRNA sense strand
ucaaguccgcagugaagua

SEQ ID NO: 1895166 - RNA, 19 nt, Homo sapiens
  misc_RNA (1)...(19): siRNA sense strand
ucuccuuggucaaugauuu

SEQ ID NO: 1895167 - RNA, 19 nt, Homo sapiens
  misc_RNA (1)...(19): siRNA sense strand
ucaaacccaugccaucuac

SEQ ID NO: 1895168 - RNA, 19 nt, Homo sapiens
  misc_RNA (1)...(19): siRNA sense strand
ugaagguggacaaauguuu

SEQ ID NO: 1895169 - RNA, 19 nt, Homo sapiens
  misc_RNA (1)...(19): siRNA sense strand
ggaccucaauaguucugau

SEQ ID NO: 1895170 - RNA, 19 nt, Homo sapiens
  misc_RNA (1)...(19): siRNA sense strand
ggcacucccugguguaauc

SEQ ID NO: 1895171 - RNA, 19 nt, Homo sapiens
  misc_RNA (1)...(19): siRNA sense strand
gaggagaggaacuggguau

SEQ ID NO: 1895172 - RNA, 19 nt, Homo sapiens
  misc_RNA (1)...(19): siRNA sense strand
caggauggcccucuuccaa

SEQ ID NO: 1895173 - RNA, 19 nt, Homo sapiens
  misc_RNA (1)...(19): siRNA sense strand
cagaaacagcugcucaaau

SEQ ID NO: 1895174 - RNA, 19 nt, Homo sapiens
  misc_RNA (1)...(19): siRNA sense strand
aggugaagguggacaaaug

SEQ ID NO: 1895175 - RNA, 19 nt, Homo sapiens
  misc_RNA (1)...(19): siRNA sense strand
ucggagaggugcacagucu

SEQ ID NO: 1895176 - RNA, 19 nt, Homo sapiens
  misc_RNA (1)...(19): siRNA sense strand
ucucugugauucucuuaau

SEQ ID NO: 1895177 - RNA, 19 nt, Homo sapiens
  misc_RNA (1)...(19): siRNA sense strand
cgaaggggaugcaguugaa

SEQ ID NO: 1895178 - RNA, 19 nt, Homo sapiens
  misc_RNA (1)...(19): siRNA sense strand
gacaccauccucaacauca

SEQ ID NO: 1895179 - RNA, 19 nt, Homo sapiens
  misc_RNA (1)...(19): siRNA sense strand
ggaguggcaacugcuguuu

SEQ ID NO: 1895180 - RNA, 19 nt, Homo sapiens
  misc_RNA (1)...(19): siRNA sense strand
guucucaguucagauguuc

SEQ ID NO: 1895181 - RNA, 19 nt, Homo sapiens
  misc_RNA (1)...(19): siRNA sense strand
gaaguauuucaucaucaga

SEQ ID NO: 1895182 - RNA, 19 nt, Homo sapiens
  misc_RNA (1)...(19): siRNA sense strand
gccuuggucuccugcauuc

SEQ ID NO: 1895183 - RNA, 19 nt, Homo sapiens
  misc_RNA (1)...(19): siRNA sense strand
gugcagcgagguuauggaa

SEQ ID NO: 1895184 - RNA, 19 nt, Homo sapiens
  misc_RNA (1)...(19): siRNA sense strand
gcagcaucuugcagacaga

SEQ ID NO: 1895185 - RNA, 19 nt, Homo sapiens
  misc_RNA (1)...(19): siRNA sense strand
agacagacgcucccaugug

SEQ ID NO: 1895186 - RNA, 19 nt, Homo sapiens
  misc_RNA (1)...(19): siRNA sense strand
ggagaggaacuggguaucu

SEQ ID NO: 1895187 - RNA, 19 nt, Homo sapiens
  misc_RNA (1)...(19): siRNA sense strand
cauugaagccaguucguau

SEQ ID NO: 1895188 - RNA, 19 nt, Homo sapiens
  misc_RNA (1)...(19): siRNA sense strand
ggugaagguggacaaaugu

SEQ ID NO: 1895189 - RNA, 19 nt, Homo sapiens
  misc_RNA (1)...(19): siRNA sense strand
ggagugccuugcccucaac

SEQ ID NO: 1895190 - RNA, 19 nt, Homo sapiens
  misc_RNA (1)...(19): siRNA sense strand
ucugugauucucuuaauga

SEQ ID NO: 1895191 - RNA, 19 nt, Homo sapiens
  misc_RNA (1)...(19): siRNA sense strand
ucagaaacagcugcucaaa

SEQ ID NO: 1895192 - RNA, 19 nt, Homo sapiens
  misc_RNA (1)...(19): siRNA sense strand
acaccauccucaacaucaa

SEQ ID NO: 1895193 - RNA, 19 nt, Homo sapiens
  misc_RNA (1)...(19): siRNA sense strand
ucagagacaccauccucaa

SEQ ID NO: 1895194 - RNA, 19 nt, Homo sapiens
  misc_RNA (1)...(19): siRNA sense strand
gguucucaguucagauguu

SEQ ID NO: 1895195 - RNA, 19 nt, Homo sapiens
  misc_RNA (1)...(19): siRNA sense strand
gcaacugcuguuucuggaa

SEQ ID NO: 1895196 - RNA, 19 nt, Homo sapiens
  misc_RNA (1)...(19): siRNA sense strand
ccuacccacuggacaugaa

SEQ ID NO: 1895197 - RNA, 19 nt, Homo sapiens
  misc_RNA (1)...(19): siRNA sense strand
ccauugaagccaguucgua

SEQ ID NO: 1895198 - RNA, 19 nt, Homo sapiens
  misc_RNA (1)...(19): siRNA sense strand
ccaggcggguaccaugugu

SEQ ID NO: 1895199 - RNA, 19 nt, Homo sapiens
  misc_RNA (1)...(19): siRNA sense strand
ccuccuggcuuggcuguuc

SEQ ID NO: 1895200 - RNA, 19 nt, Homo sapiens
  misc_RNA (1)...(19): siRNA sense strand
aaacccaugccaucuacaa

SEQ ID NO: 1895201 - RNA, 19 nt, Homo sapiens
  misc_RNA (1)...(19): siRNA sense strand
ggaugucggagaccugugu

SEQ ID NO: 1895202 - RNA, 19 nt, Homo sapiens
  misc_RNA (1)...(19): siRNA sense strand
caggaacauucuggagaga

SEQ ID NO: 1895203 - RNA, 19 nt, Homo sapiens
  misc_RNA (1)...(19): siRNA sense strand
gauuucaucaucagagaca

SEQ ID NO: 1895204 - RNA, 19 nt, Homo sapiens
  misc_RNA (1)...(19): siRNA sense strand
ggaggacaagugugagaag

SEQ ID NO: 1895205 - RNA, 19 nt, Homo sapiens
  misc_RNA (1)...(19): siRNA sense strand
cggcugguaccgcuuugua

SEQ ID NO: 1895206 - RNA, 19 nt, Homo sapiens
  misc_RNA (1)...(19): siRNA sense strand
auuacacccuccuggauga

SEQ ID NO: 1895207 - RNA, 19 nt, Homo sapiens
  misc_RNA (1)...(19): siRNA sense strand
gcagugcagcgagguuaug

SEQ ID NO: 1895208 - RNA, 19 nt, Homo sapiens
  misc_RNA (1)...(19): siRNA sense strand
aaugggcaguccucggaaa

SEQ ID NO: 1895209 - RNA, 19 nt, Homo sapiens
  misc_RNA (1)...(19): siRNA sense strand
ggacaccucccgguuuaac

SEQ ID NO: 1895210 - RNA, 19 nt, Homo sapiens
  misc_RNA (1)...(19): siRNA sense strand
uugaguccgugcuguaugu

SEQ ID NO: 1895211 - RNA, 19 nt, Homo sapiens
  misc_RNA (1)...(19): siRNA sense strand
ccucaauaguucugauguc

SEQ ID NO: 1895212 - RNA, 19 nt, Homo sapiens
  misc_RNA (1)...(19): siRNA sense strand
caaggugaagguggacaaa

SEQ ID NO: 1895213 - RNA, 19 nt, Homo sapiens
  misc_RNA (1)...(19): siRNA sense strand
uuuccugcauugugagauu

SEQ ID NO: 1895214 - RNA, 19 nt, Homo sapiens
  misc_RNA (1)...(19): siRNA sense strand
caugaaagucagccuccaa

SEQ ID NO: 1895215 - RNA, 19 nt, Homo sapiens
  misc_RNA (1)...(19): siRNA sense strand
uggacauuaugaccuaguu

SEQ ID NO: 1895216 - RNA, 19 nt, Homo sapiens
  misc_RNA (1)...(19): siRNA sense strand
guugaacugucuguugagu

SEQ ID NO: 1895217 - RNA, 19 nt, Homo sapiens
  misc_RNA (1)...(19): siRNA sense strand
cugaccuugugaaguauuu

SEQ ID NO: 1895218 - RNA, 19 nt, Homo sapiens
  misc_RNA (1)...(19): siRNA sense strand
cuaugguccuccugacugu

SEQ ID NO: 1895219 - RNA, 19 nt, Homo sapiens
  misc_RNA (1)...(19): siRNA sense strand
ugcuggacauuaugaccua

SEQ ID NO: 1895220 - RNA, 19 nt, Homo sapiens
  misc_RNA (1)...(19): siRNA sense strand
gcacagagaagccagguua

SEQ ID NO: 1895221 - RNA, 19 nt, Homo sapiens
  misc_RNA (1)...(19): siRNA sense strand
gaagccagguuacaaacua

SEQ ID NO: 1895222 - RNA, 19 nt, Homo sapiens
  misc_RNA (1)...(19): siRNA sense strand
ggacgaaccuugacaggau

SEQ ID NO: 1895223 - RNA, 19 nt, Homo sapiens
  misc_RNA (1)...(19): siRNA sense strand
ggucaauuaucaaagacua

SEQ ID NO: 1895224 - RNA, 19 nt, Homo sapiens
  misc_RNA (1)...(19): siRNA sense strand
gcguacaggucaauuauca

SEQ ID NO: 1895225 - RNA, 19 nt, Homo sapiens
  misc_RNA (1)...(19): siRNA sense strand
gcaggauggacuaucauua

SEQ ID NO: 1895226 - RNA, 19 nt, Homo sapiens
  misc_RNA (1)...(19): siRNA sense strand
ggacugcccugucucuucu

SEQ ID NO: 1895227 - RNA, 19 nt, Homo sapiens
  misc_RNA (1)...(19): siRNA sense strand
cacaauggcugaugagcuu

SEQ ID NO: 1895228 - RNA, 19 nt, Homo sapiens
  misc_RNA (1)...(19): siRNA sense strand
guacaggucaauuaucaaa

SEQ ID NO: 1895229 - RNA, 19 nt, Homo sapiens
  misc_RNA (1)...(19): siRNA sense strand
cgagacauccugauaguug

SEQ ID NO: 1895230 - RNA, 19 nt, Homo sapiens
  misc_RNA (1)...(19): siRNA sense strand
gaagacagacacaaauugg

SEQ ID NO: 1895231 - RNA, 19 nt, Homo sapiens
  misc_RNA (1)...(19): siRNA sense strand
acaggucaauuaucaaaga

SEQ ID NO: 1895232 - RNA, 19 nt, Homo sapiens
  misc_RNA (1)...(19): siRNA sense strand
ggaggaggcuuccauugcu

SEQ ID NO: 1895233 - RNA, 19 nt, Homo sapiens
  misc_RNA (1)...(19): siRNA sense strand
aaagcaggauggacuauca

SEQ ID NO: 1895234 - RNA, 19 nt, Homo sapiens
  misc_RNA (1)...(19): siRNA sense strand
gagcguacaggucaauuau

SEQ ID NO: 1895235 - RNA, 19 nt, Homo sapiens
  misc_RNA (1)...(19): siRNA sense strand
gcaaggagggcauuauuuu

SEQ ID NO: 1895236 - RNA, 19 nt, Homo sapiens
  misc_RNA (1)...(19): siRNA sense strand
cugaugagcuuuauaacca

SEQ ID NO: 1895237 - RNA, 19 nt, Homo sapiens
  misc_RNA (1)...(19): siRNA sense strand
ggugaaggccaacacauau

SEQ ID NO: 1895238 - RNA, 19 nt, Homo sapiens
  misc_RNA (1)...(19): siRNA sense strand
guucacgcuucuuugagua

SEQ ID NO: 1895239 - RNA, 19 nt, Homo sapiens
  misc_RNA (1)...(19): siRNA sense strand
guagaagacagacacaaau

SEQ ID NO: 1895240 - RNA, 19 nt, Homo sapiens
  misc_RNA (1)...(19): siRNA sense strand
gaccugguauugugcuuuc

SEQ ID NO: 1895241 - RNA, 19 nt, Homo sapiens
  misc_RNA (1)...(19): siRNA sense strand
uaucauuacuccuccaaca

SEQ ID NO: 1895242 - RNA, 19 nt, Homo sapiens
  misc_RNA (1)...(19): siRNA sense strand
gagacauccugauaguugu

SEQ ID NO: 1895243 - RNA, 19 nt, Homo sapiens
  misc_RNA (1)...(19): siRNA sense strand
uaugguggaugccaaugaa

SEQ ID NO: 1895244 - RNA, 19 nt, Homo sapiens
  misc_RNA (1)...(19): siRNA sense strand
cauuggaccugguauugug

SEQ ID NO: 1895245 - RNA, 19 nt, Homo sapiens
  misc_RNA (1)...(19): siRNA sense strand
gaggcacccuacaguccua

SEQ ID NO: 1895246 - RNA, 19 nt, Homo sapiens
  misc_RNA (1)...(19): siRNA sense strand
caacacauaugaaaaguac

SEQ ID NO: 1895247 - RNA, 19 nt, Homo sapiens
  misc_RNA (1)...(19): siRNA sense strand
uagaagacagacacaaauu

SEQ ID NO: 1895248 - RNA, 19 nt, Homo sapiens
  misc_RNA (1)...(19): siRNA sense strand
caucggaucucggcuugga

SEQ ID NO: 1895249 - RNA, 19 nt, Homo sapiens
  misc_RNA (1)...(19): siRNA sense strand
gaagcaaggagggcauuau

SEQ ID NO: 1895250 - RNA, 19 nt, Homo sapiens
  misc_RNA (1)...(19): siRNA sense strand
gauagugggcagagcagaa

SEQ ID NO: 1895251 - RNA, 19 nt, Homo sapiens
  misc_RNA (1)...(19): siRNA sense strand
uggcugaugagcuuuauaa

SEQ ID NO: 1895252 - RNA, 19 nt, Homo sapiens
  misc_RNA (1)...(19): siRNA sense strand
cgagcguacaggucaauua

SEQ ID NO: 1895253 - RNA, 19 nt, Homo sapiens
  misc_RNA (1)...(19): siRNA sense strand
aaaggcuguugcugaaauu

SEQ ID NO: 1895254 - RNA, 19 nt, Homo sapiens
  misc_RNA (1)...(19): siRNA sense strand
ugaaggccaacacauauga

SEQ ID NO: 1895255 - RNA, 19 nt, Homo sapiens
  misc_RNA (1)...(19): siRNA sense strand
gcaucuugcuccagacuac

SEQ ID NO: 1895256 - RNA, 19 nt, Homo sapiens
  misc_RNA (1)...(19): siRNA sense strand
cauucgagcuggaagagau

SEQ ID NO: 1895257 - RNA, 19 nt, Homo sapiens
  misc_RNA (1)...(19): siRNA sense strand
ugaugcugcugacuucauu

SEQ ID NO: 1895258 - RNA, 19 nt, Homo sapiens
  misc_RNA (1)...(19): siRNA sense strand
caauggcugaugagcuuua

SEQ ID NO: 1895259 - RNA, 19 nt, Homo sapiens
  misc_RNA (1)...(19): siRNA sense strand
gacuggucauugaaguaua

SEQ ID NO: 1895260 - RNA, 19 nt, Homo sapiens
  misc_RNA (1)...(19): siRNA sense strand
gaaaagcuggguaucacua

SEQ ID NO: 1895261 - RNA, 19 nt, Homo sapiens
  misc_RNA (1)...(19): siRNA sense strand
acuggucauugaaguauaa

SEQ ID NO: 1895262 - RNA, 19 nt, Homo sapiens
  misc_RNA (1)...(19): siRNA sense strand
ggcuguugcugaaauugaa

SEQ ID NO: 1895263 - RNA, 19 nt, Homo sapiens
  misc_RNA (1)...(19): siRNA sense strand
agagaagccagguuacaaa

SEQ ID NO: 1895264 - RNA, 19 nt, Homo sapiens
  misc_RNA (1)...(19): siRNA sense strand
gaaggccaacacauaugaa

SEQ ID NO: 1895265 - RNA, 19 nt, Homo sapiens
  misc_RNA (1)...(19): siRNA sense strand
uguagaagacagacacaaa

SEQ ID NO: 1895266 - RNA, 19 nt, Homo sapiens
  misc_RNA (1)...(19): siRNA sense strand
agaagacagacacaaauug

SEQ ID NO: 1895267 - RNA, 19 nt, Homo sapiens
  misc_RNA (1)...(19): siRNA sense strand
cagagaagccagguuacaa

SEQ ID NO: 1895268 - RNA, 19 nt, Homo sapiens
  misc_RNA (1)...(19): siRNA sense strand
gccaaugaaguuccaauuc

SEQ ID NO: 1895269 - RNA, 19 nt, Homo sapiens
  misc_RNA (1)...(19): siRNA sense strand
uuccaugaaugucuuaaug

SEQ ID NO: 1895270 - RNA, 19 nt, Homo sapiens
  misc_RNA (1)...(19): siRNA sense strand
cugugcagcugacgacaaa

SEQ ID NO: 1895271 - RNA, 19 nt, Homo sapiens
  misc_RNA (1)...(19): siRNA sense strand
gcagaaaacgccuguguuc

SEQ ID NO: 1895272 - RNA, 19 nt, Homo sapiens
  misc_RNA (1)...(19): siRNA sense strand
gaaagcaggauggacuauc

SEQ ID NO: 1895273 - RNA, 19 nt, Homo sapiens
  misc_RNA (1)...(19): siRNA sense strand
caacgaaugggaccccuua

SEQ ID NO: 1895274 - RNA, 19 nt, Homo sapiens
  misc_RNA (1)...(19): siRNA sense strand
aagcaaggagggcauuauu

SEQ ID NO: 1895275 - RNA, 19 nt, Homo sapiens
  misc_RNA (1)...(19): siRNA sense strand
ggaaggagugacaguaagg

SEQ ID NO: 1895276 - RNA, 19 nt, Homo sapiens
  misc_RNA (1)...(19): siRNA sense strand
gaaggagugacaguaagga

SEQ ID NO: 1895277 - RNA, 19 nt, Homo sapiens
  misc_RNA (1)...(19): siRNA sense strand
gguggaugccaaugaaguu

SEQ ID NO: 1895278 - RNA, 19 nt, Homo sapiens
  misc_RNA (1)...(19): siRNA sense strand
cauccacucuguagaagac

SEQ ID NO: 1895279 - RNA, 19 nt, Homo sapiens
  misc_RNA (1)...(19): siRNA sense strand
ugauaguugugggcaauga

SEQ ID NO: 1895280 - RNA, 19 nt, Homo sapiens
  misc_RNA (1)...(19): siRNA sense strand
ugcaaugccucgagacauc

SEQ ID NO: 1895281 - RNA, 19 nt, Homo sapiens
  misc_RNA (1)...(19): siRNA sense strand
guugugggcaaugagauua

SEQ ID NO: 1895282 - RNA, 19 nt, Homo sapiens
  misc_RNA (1)...(19): siRNA sense strand
gaaguuccaauucaaaaga

SEQ ID NO: 1895283 - RNA, 19 nt, Homo sapiens
  misc_RNA (1)...(19): siRNA sense strand
gaugggugcagcgaacuuu

SEQ ID NO: 1895284 - RNA, 19 nt, Homo sapiens
  misc_RNA (1)...(19): siRNA sense strand
caggauggacuaucauuac

SEQ ID NO: 1895285 - RNA, 19 nt, Homo sapiens
  misc_RNA (1)...(19): siRNA sense strand
caugaaugucuuaaugcua

SEQ ID NO: 1895286 - RNA, 19 nt, Homo sapiens
  misc_RNA (1)...(19): siRNA sense strand
ccaugaaugucuuaaugcu

SEQ ID NO: 1895287 - RNA, 19 nt, Homo sapiens
  misc_RNA (1)...(19): siRNA sense strand
ugucucuucuuacaacgaa

SEQ ID NO: 1895288 - RNA, 19 nt, Homo sapiens
  misc_RNA (1)...(19): siRNA sense strand
gggaggaggcuuccauugc

SEQ ID NO: 1895289 - RNA, 19 nt, Homo sapiens
  misc_RNA (1)...(19): siRNA sense strand
ccgaggcggugcacuacau

SEQ ID NO: 1895290 - RNA, 19 nt, Homo sapiens
  misc_RNA (1)...(19): siRNA sense strand
cgagcuggaagagauauuu

SEQ ID NO: 1895291 - RNA, 19 nt, Homo sapiens
  misc_RNA (1)...(19): siRNA sense strand
ggcauuauuuucccaaaga

SEQ ID NO: 1895292 - RNA, 19 nt, Homo sapiens
  misc_RNA (1)...(19): siRNA sense strand
cggaaggagugacaguaag

SEQ ID NO: 1895293 - RNA, 19 nt, Homo sapiens
  misc_RNA (1)...(19): siRNA sense strand
ggaccugguauugugcuuu

SEQ ID NO: 1895294 - RNA, 19 nt, Homo sapiens
  misc_RNA (1)...(19): siRNA sense strand
cccaaggacugcccugucu

SEQ ID NO: 1895295 - RNA, 19 nt, Homo sapiens
  misc_RNA (1)...(19): siRNA sense strand
gcuccuaagcccacaaugg

SEQ ID NO: 1895296 - RNA, 19 nt, Homo sapiens
  misc_RNA (1)...(19): siRNA sense strand
gagaagccagguuacaaac

SEQ ID NO: 1895297 - RNA, 19 nt, Homo sapiens
  misc_RNA (1)...(19): siRNA sense strand
ccugauaguugugggcaau

SEQ ID NO: 1895298 - RNA, 19 nt, Homo sapiens
  misc_RNA (1)...(19): siRNA sense strand
aggugaaggccaacacaua

SEQ ID NO: 1895299 - RNA, 19 nt, Homo sapiens
  misc_RNA (1)...(19): siRNA sense strand
gaguuugagccaugcuuug

SEQ ID NO: 1895300 - RNA, 19 nt, Homo sapiens
  misc_RNA (1)...(19): siRNA sense strand
aaaaggcuguugcugaaau

SEQ ID NO: 1895301 - RNA, 19 nt, Homo sapiens
  misc_RNA (1)...(19): siRNA sense strand
uuugagccaugcuuugaug

SEQ ID NO: 1895302 - RNA, 19 nt, Homo sapiens
  misc_RNA (1)...(19): siRNA sense strand
cggcuuggacgaaccuuga

SEQ ID NO: 1895303 - RNA, 19 nt, Homo sapiens
  misc_RNA (1)...(19): siRNA sense strand
gugaaggccaacacauaug

SEQ ID NO: 1895304 - RNA, 19 nt, Homo sapiens
  misc_RNA (1)...(19): siRNA sense strand
acugcccugucucuucuua

SEQ ID NO: 1895305 - RNA, 19 nt, Homo sapiens
  misc_RNA (1)...(19): siRNA sense strand
ggaugccaaugaaguucca

SEQ ID NO: 1895306 - RNA, 19 nt, Homo sapiens
  misc_RNA (1)...(19): siRNA sense strand
ugaaugucuuaaugcuaga

SEQ ID NO: 1895307 - RNA, 19 nt, Homo sapiens
  misc_RNA (1)...(19): siRNA sense strand
aagaaagcaggauggacua

SEQ ID NO: 1895308 - RNA, 19 nt, Homo sapiens
  misc_RNA (1)...(19): siRNA sense strand
ugaguuugagccaugcuuu

SEQ ID NO: 1895309 - RNA, 19 nt, Homo sapiens
  misc_RNA (1)...(19): siRNA sense strand
acggaaggagugacaguaa

SEQ ID NO: 1895310 - RNA, 19 nt, Homo sapiens
  misc_RNA (1)...(19): siRNA sense strand
cguucacgcuucuuugagu

SEQ ID NO: 1895311 - RNA, 19 nt, Homo sapiens
  misc_RNA (1)...(19): siRNA sense strand
cugagccucugcccaagga

SEQ ID NO: 1895312 - RNA, 19 nt, Homo sapiens
  misc_RNA (1)...(19): siRNA sense strand
gcauggcgcucaccucuac

SEQ ID NO: 1895313 - RNA, 19 nt, Homo sapiens
  misc_RNA (1)...(19): siRNA sense strand
ggaaagacgagucaaaggu

SEQ ID NO: 1895314 - RNA, 19 nt, Homo sapiens
  misc_RNA (1)...(19): siRNA sense strand
ggagagcgauguggacuac

SEQ ID NO: 1895315 - RNA, 19 nt, Homo sapiens
  misc_RNA (1)...(19): siRNA sense strand
agaaggaguuccacugcaa

SEQ ID NO: 1895316 - RNA, 19 nt, Homo sapiens
  misc_RNA (1)...(19): siRNA sense strand
uagcaccgccuucagcaua

SEQ ID NO: 1895317 - RNA, 19 nt, Homo sapiens
  misc_RNA (1)...(19): siRNA sense strand
gaaggaguuccacugcaaa

SEQ ID NO: 1895318 - RNA, 19 nt, Homo sapiens
  misc_RNA (1)...(19): siRNA sense strand
gcaagggaaagacgaguca

SEQ ID NO: 1895319 - RNA, 19 nt, Homo sapiens
  misc_RNA (1)...(19): siRNA sense strand
ucagcgaggugcaggugaa

SEQ ID NO: 1895320 - RNA, 19 nt, Homo sapiens
  misc_RNA (1)...(19): siRNA sense strand
cagguucgcuaucagaagu

SEQ ID NO: 1895321 - RNA, 19 nt, Homo sapiens
  misc_RNA (1)...(19): siRNA sense strand
gacuacagcucggaugaca

SEQ ID NO: 1895322 - RNA, 19 nt, Homo sapiens
  misc_RNA (1)...(19): siRNA sense strand
ggaagacgacccgaagcaa

SEQ ID NO: 1895323 - RNA, 19 nt, Homo sapiens
  misc_RNA (1)...(19): siRNA sense strand
cuacagcucggaugacaau

SEQ ID NO: 1895324 - RNA, 19 nt, Homo sapiens
  misc_RNA (1)...(19): siRNA sense strand
gcucaccucuacgcucaug

SEQ ID NO: 1895325 - RNA, 19 nt, Homo sapiens
  misc_RNA (1)...(19): siRNA sense strand
gcaccgccuucagcauaga

SEQ ID NO: 1895326 - RNA, 19 nt, Homo sapiens
  misc_RNA (1)...(19): siRNA sense strand
cgccgucgcugaugaugau

SEQ ID NO: 1895327 - RNA, 19 nt, Homo sapiens
  misc_RNA (1)...(19): siRNA sense strand
caaugccaauuccaagaca

SEQ ID NO: 1895328 - RNA, 19 nt, Homo sapiens
  misc_RNA (1)...(19): siRNA sense strand
gaucgcccacgcccucaaa

SEQ ID NO: 1895329 - RNA, 19 nt, Homo sapiens
  misc_RNA (1)...(19): siRNA sense strand
gucagcagguucgcuauca

SEQ ID NO: 1895330 - RNA, 19 nt, Homo sapiens
  misc_RNA (1)...(19): siRNA sense strand
cagcucggaugacaaucug

SEQ ID NO: 1895331 - RNA, 19 nt, Homo sapiens
  misc_RNA (1)...(19): siRNA sense strand
gcaaugccaauuccaagac

SEQ ID NO: 1895332 - RNA, 19 nt, Homo sapiens
  misc_RNA (1)...(19): siRNA sense strand
ccacgucuacgggcaagaa

SEQ ID NO: 1895333 - RNA, 19 nt, Homo sapiens
  misc_RNA (1)...(19): siRNA sense strand
gggaguagcaccgccuuca

SEQ ID NO: 1895334 - RNA, 19 nt, Homo sapiens
  misc_RNA (1)...(19): siRNA sense strand
cagcagguucgcuaucaga

SEQ ID NO: 1895335 - RNA, 19 nt, Homo sapiens
  misc_RNA (1)...(19): siRNA sense strand
gcccacgcccucaaacuca

SEQ ID NO: 1895336 - RNA, 19 nt, Homo sapiens
  misc_RNA (1)...(19): siRNA sense strand
gggaaagacgagucaaagg

SEQ ID NO: 1895337 - RNA, 19 nt, Homo sapiens
  misc_RNA (1)...(19): siRNA sense strand
uaucagaagucagcaucag

SEQ ID NO: 1895338 - RNA, 19 nt, Homo sapiens
  misc_RNA (1)...(19): siRNA sense strand
ugcuggagcuagagaagga

SEQ ID NO: 1895339 - RNA, 19 nt, Homo sapiens
  misc_RNA (1)...(19): siRNA sense strand
aaaaguaccucuccuugac

SEQ ID NO: 1895340 - RNA, 19 nt, Homo sapiens
  misc_RNA (1)...(19): siRNA sense strand
caaaggcuuccuggccaaa

SEQ ID NO: 1895341 - RNA, 19 nt, Homo sapiens
  misc_RNA (1)...(19): siRNA sense strand
gcgaggagcugccagugua

SEQ ID NO: 1895342 - RNA, 19 nt, Homo sapiens
  misc_RNA (1)...(19): siRNA sense strand
gcaagucccugcccuggaa

SEQ ID NO: 1895343 - RNA, 19 nt, Homo sapiens
  misc_RNA (1)...(19): siRNA sense strand
guuaagcgcugggauauga

SEQ ID NO: 1895344 - RNA, 19 nt, Homo sapiens
  misc_RNA (1)...(19): siRNA sense strand
ugaaggagauucuaaaguc

SEQ ID NO: 1895345 - RNA, 19 nt, Homo sapiens
  misc_RNA (1)...(19): siRNA sense strand
cuaaaguccucucugguaa

SEQ ID NO: 1895346 - RNA, 19 nt, Homo sapiens
  misc_RNA (1)...(19): siRNA sense strand
agugaacgcuguaaaugua

SEQ ID NO: 1895347 - RNA, 19 nt, Homo sapiens
  misc_RNA (1)...(19): siRNA sense strand
ggaaggaucgacucgguaa

SEQ ID NO: 1895348 - RNA, 19 nt, Homo sapiens
  misc_RNA (1)...(19): siRNA sense strand
cuacacagaagaccuauuu

SEQ ID NO: 1895349 - RNA, 19 nt, Homo sapiens
  misc_RNA (1)...(19): siRNA sense strand
ggcuaaaguuaaagagaua

SEQ ID NO: 1895350 - RNA, 19 nt, Homo sapiens
  misc_RNA (1)...(19): siRNA sense strand
gggcuaaaguuaaagagau

SEQ ID NO: 1895351 - RNA, 19 nt, Homo sapiens
  misc_RNA (1)...(19): siRNA sense strand
ugacuaagaugcccaacca

SEQ ID NO: 1895352 - RNA, 19 nt, Homo sapiens
  misc_RNA (1)...(19): siRNA sense strand
gcgcccaucugcaccauug

SEQ ID NO: 1895353 - RNA, 19 nt, Homo sapiens
  misc_RNA (1)...(19): siRNA sense strand
ugaggaauauaucaucaug

SEQ ID NO: 1895354 - RNA, 19 nt, Homo sapiens
  misc_RNA (1)...(19): siRNA sense strand
gcagugaacgcuguaaaug

SEQ ID NO: 1895355 - RNA, 19 nt, Homo sapiens
  misc_RNA (1)...(19): siRNA sense strand
gagcuacacagaagaccua

SEQ ID NO: 1895356 - RNA, 19 nt, Homo sapiens
  misc_RNA (1)...(19): siRNA sense strand
aaaguuaagcgcugggaua

SEQ ID NO: 1895357 - RNA, 19 nt, Homo sapiens
  misc_RNA (1)...(19): siRNA sense strand
ccggaacaauuacaacuau

SEQ ID NO: 1895358 - RNA, 19 nt, Homo sapiens
  misc_RNA (1)...(19): siRNA sense strand
ccuauuuccggaacaauua

SEQ ID NO: 1895359 - RNA, 19 nt, Homo sapiens
  misc_RNA (1)...(19): siRNA sense strand
ggaacaauuacaacuaugu

SEQ ID NO: 1895360 - RNA, 19 nt, Homo sapiens
  misc_RNA (1)...(19): siRNA sense strand
guaaauguaagccuauuag

SEQ ID NO: 1895361 - RNA, 19 nt, Homo sapiens
  misc_RNA (1)...(19): siRNA sense strand
ucuaaaguccucucuggua

SEQ ID NO: 1895362 - RNA, 19 nt, Homo sapiens
  misc_RNA (1)...(19): siRNA sense strand
uauuagagcuacacagaag

SEQ ID NO: 1895363 - RNA, 19 nt, Homo sapiens
  misc_RNA (1)...(19): siRNA sense strand
gaggugaaggagauucuaa

SEQ ID NO: 1895364 - RNA, 19 nt, Homo sapiens
  misc_RNA (1)...(19): siRNA sense strand
gaagcuucgucaucuugga

SEQ ID NO: 1895365 - RNA, 19 nt, Homo sapiens
  misc_RNA (1)...(19): siRNA sense strand
ugaugugacugcaguagug

SEQ ID NO: 1895366 - RNA, 19 nt, Homo sapiens
  misc_RNA (1)...(19): siRNA sense strand
gaacaauuacaacuauguc

SEQ ID NO: 1895367 - RNA, 19 nt, Homo sapiens
  misc_RNA (1)...(19): siRNA sense strand
gaacguuccagauuacucu

SEQ ID NO: 1895368 - RNA, 19 nt, Homo sapiens
  misc_RNA (1)...(19): siRNA sense strand
ccucugcccuccacuuaau

SEQ ID NO: 1895369 - RNA, 19 nt, Homo sapiens
  misc_RNA (1)...(19): siRNA sense strand
gucauucgggcuaaaguua

SEQ ID NO: 1895370 - RNA, 19 nt, Homo sapiens
  misc_RNA (1)...(19): siRNA sense strand
cauucgggcuaaaguuaaa

SEQ ID NO: 1895371 - RNA, 19 nt, Homo sapiens
  misc_RNA (1)...(19): siRNA sense strand
gauucuagcaauagugauu

SEQ ID NO: 1895372 - RNA, 19 nt, Homo sapiens
  misc_RNA (1)...(19): siRNA sense strand
ccuggaacaugacuaagau

SEQ ID NO: 1895373 - RNA, 19 nt, Homo sapiens
  misc_RNA (1)...(19): siRNA sense strand
aagacuaagugccaugaug

SEQ ID NO: 1895374 - RNA, 19 nt, Homo sapiens
  misc_RNA (1)...(19): siRNA sense strand
ggacggagcugauuuuccu

SEQ ID NO: 1895375 - RNA, 19 nt, Homo sapiens
  misc_RNA (1)...(19): siRNA sense strand
uaaaguccucucugguaaa

SEQ ID NO: 1895376 - RNA, 19 nt, Homo sapiens
  misc_RNA (1)...(19): siRNA sense strand
gcaagcagugaacgcugua

SEQ ID NO: 1895377 - RNA, 19 nt, Homo sapiens
  misc_RNA (1)...(19): siRNA sense strand
ucuaguaacggaaacugua

SEQ ID NO: 1895378 - RNA, 19 nt, Homo sapiens
  misc_RNA (1)...(19): siRNA sense strand
caucaagcccuguaagucu

SEQ ID NO: 1895379 - RNA, 19 nt, Homo sapiens
  misc_RNA (1)...(19): siRNA sense strand
ccuauuagagcuacacaga

SEQ ID NO: 1895380 - RNA, 19 nt, Homo sapiens
  misc_RNA (1)...(19): siRNA sense strand
ucccugcccuggaacauga

SEQ ID NO: 1895381 - RNA, 19 nt, Homo sapiens
  misc_RNA (1)...(19): siRNA sense strand
uaagugccaugaugugacu

SEQ ID NO: 1895382 - RNA, 19 nt, Homo sapiens
  misc_RNA (1)...(19): siRNA sense strand
gaaggaucgacucgguaaa

SEQ ID NO: 1895383 - RNA, 19 nt, Homo sapiens
  misc_RNA (1)...(19): siRNA sense strand
uaguggaggugaaggagau

SEQ ID NO: 1895384 - RNA, 19 nt, Homo sapiens
  misc_RNA (1)...(19): siRNA sense strand
ccggcaagcacgcaacuaa

SEQ ID NO: 1895385 - RNA, 19 nt, Homo sapiens
  misc_RNA (1)...(19): siRNA sense strand
gagcugauuuuccuaugga

SEQ ID NO: 1895386 - RNA, 19 nt, Homo sapiens
  misc_RNA (1)...(19): siRNA sense strand
gugauucuagcaauaguga

SEQ ID NO: 1895387 - RNA, 19 nt, Homo sapiens
  misc_RNA (1)...(19): siRNA sense strand
uaaagacuaagugccauga

SEQ ID NO: 1895388 - RNA, 19 nt, Homo sapiens
  misc_RNA (1)...(19): siRNA sense strand
caucugcaccauugacuuc

SEQ ID NO: 1895389 - RNA, 19 nt, Homo sapiens
  misc_RNA (1)...(19): siRNA sense strand
gcgcugggauaugaagcuu

SEQ ID NO: 1895390 - RNA, 19 nt, Homo sapiens
  misc_RNA (1)...(19): siRNA sense strand
cggaacaauuacaacuaug

SEQ ID NO: 1895391 - RNA, 19 nt, Homo sapiens
  misc_RNA (1)...(19): siRNA sense strand
agacuaagugccaugaugu

SEQ ID NO: 1895392 - RNA, 19 nt, Homo sapiens
  misc_RNA (1)...(19): siRNA sense strand
cagugaacgcuguaaaugu

SEQ ID NO: 1895393 - RNA, 19 nt, Homo sapiens
  misc_RNA (1)...(19): siRNA sense strand
caucuuggacucaguaaaa

SEQ ID NO: 1895394 - RNA, 19 nt, Homo sapiens
  misc_RNA (1)...(19): siRNA sense strand
ggaggugaaggagauucua

SEQ ID NO: 1895395 - RNA, 19 nt, Homo sapiens
  misc_RNA (1)...(19): siRNA sense strand
gugaacgcuguaaauguaa

SEQ ID NO: 1895396 - RNA, 19 nt, Homo sapiens
  misc_RNA (1)...(19): siRNA sense strand
gugaaggagauucuaaagu

SEQ ID NO: 1895397 - RNA, 19 nt, Homo sapiens
  misc_RNA (1)...(19): siRNA sense strand
ggugaaggagauucuaaag

SEQ ID NO: 1895398 - RNA, 19 nt, Homo sapiens
  misc_RNA (1)...(19): siRNA sense strand
ucauucgggcuaaaguuaa

SEQ ID NO: 1895399 - RNA, 19 nt, Homo sapiens
  misc_RNA (1)...(19): siRNA sense strand
aaauguaagccuauuagag

SEQ ID NO: 1895400 - RNA, 19 nt, Homo sapiens
  misc_RNA (1)...(19): siRNA sense strand
aaagugauucuagcaauag

SEQ ID NO: 1895401 - RNA, 19 nt, Homo sapiens
  misc_RNA (1)...(19): siRNA sense strand
gguggaaggcucuauagcu

SEQ ID NO: 1895402 - RNA, 19 nt, Homo sapiens
  misc_RNA (1)...(19): siRNA sense strand
gggcuaugaagaugaggaa

SEQ ID NO: 1895403 - RNA, 19 nt, Homo sapiens
  misc_RNA (1)...(19): siRNA sense strand
agaccuauuuccggaacaa

SEQ ID NO: 1895404 - RNA, 19 nt, Homo sapiens
  misc_RNA (1)...(19): siRNA sense strand
gagcccauacucaucaagu

SEQ ID NO: 1895405 - RNA, 19 nt, Homo sapiens
  misc_RNA (1)...(19): siRNA sense strand
gcucuauagcugagaagug

SEQ ID NO: 1895406 - RNA, 19 nt, Homo sapiens
  misc_RNA (1)...(19): siRNA sense strand
aaaguccucucugguaaac

SEQ ID NO: 1895407 - RNA, 19 nt, Homo sapiens
  misc_RNA (1)...(19): siRNA sense strand
gcuguaaauguaagccuau

SEQ ID NO: 1895408 - RNA, 19 nt, Homo sapiens
  misc_RNA (1)...(19): siRNA sense strand
gagcccaucaagcccugua

SEQ ID NO: 1895409 - RNA, 19 nt, Homo sapiens
  misc_RNA (1)...(19): siRNA sense strand
caugggcuaugaagaugag

SEQ ID NO: 1895410 - RNA, 19 nt, Homo sapiens
  misc_RNA (1)...(19): siRNA sense strand
cgucaucuuggacucagua

SEQ ID NO: 1895411 - RNA, 19 nt, Homo sapiens
  misc_RNA (1)...(19): siRNA sense strand
ggagagaucuaugaugaua

SEQ ID NO: 1895412 - RNA, 19 nt, Homo sapiens
  misc_RNA (1)...(19): siRNA sense strand
aaacucaucuucaggaaua

SEQ ID NO: 1895413 - RNA, 19 nt, Homo sapiens
  misc_RNA (1)...(19): siRNA sense strand
gagaugaaguuuacgauga

SEQ ID NO: 1895414 - RNA, 19 nt, Homo sapiens
  misc_RNA (1)...(19): siRNA sense strand
gaagauagaugcugcuaag

SEQ ID NO: 1895415 - RNA, 19 nt, Homo sapiens
  misc_RNA (1)...(19): siRNA sense strand
gcaaaggccagacgucuua

SEQ ID NO: 1895416 - RNA, 19 nt, Homo sapiens
  misc_RNA (1)...(19): siRNA sense strand
gaggaugucucagucaaua

SEQ ID NO: 1895417 - RNA, 19 nt, Homo sapiens
  misc_RNA (1)...(19): siRNA sense strand
gaaauaugguuauguccuu

SEQ ID NO: 1895418 - RNA, 19 nt, Homo sapiens
  misc_RNA (1)...(19): siRNA sense strand
caacuuccauaacuucuaa

SEQ ID NO: 1895419 - RNA, 19 nt, Homo sapiens
  misc_RNA (1)...(19): siRNA sense strand
gaacagaaagagaaagaaa

SEQ ID NO: 1895420 - RNA, 19 nt, Homo sapiens
  misc_RNA (1)...(19): siRNA sense strand
aaaccaagaccaugacuua

SEQ ID NO: 1895421 - RNA, 19 nt, Homo sapiens
  misc_RNA (1)...(19): siRNA sense strand
gaacucccaugaagacgaa

SEQ ID NO: 1895422 - RNA, 19 nt, Homo sapiens
  misc_RNA (1)...(19): siRNA sense strand
ccagagaucuacagguaaa

SEQ ID NO: 1895423 - RNA, 19 nt, Homo sapiens
  misc_RNA (1)...(19): siRNA sense strand
gaaaugaagaagggaaaua

SEQ ID NO: 1895424 - RNA, 19 nt, Homo sapiens
  misc_RNA (1)...(19): siRNA sense strand
ggacaaugauggagagauc

SEQ ID NO: 1895425 - RNA, 19 nt, Homo sapiens
  misc_RNA (1)...(19): siRNA sense strand
caagaccuauugaagauga

SEQ ID NO: 1895426 - RNA, 19 nt, Homo sapiens
  misc_RNA (1)...(19): siRNA sense strand
gaagauaggaagauagaug

SEQ ID NO: 1895427 - RNA, 19 nt, Homo sapiens
  misc_RNA (1)...(19): siRNA sense strand
ggacaugggagaugaaguu

SEQ ID NO: 1895428 - RNA, 19 nt, Homo sapiens
  misc_RNA (1)...(19): siRNA sense strand
gcaaggagagcaaauugaa

SEQ ID NO: 1895429 - RNA, 19 nt, Homo sapiens
  misc_RNA (1)...(19): siRNA sense strand
gaaacaagccaucucuuca

SEQ ID NO: 1895430 - RNA, 19 nt, Homo sapiens
  misc_RNA (1)...(19): siRNA sense strand
ggaguuaccuagcggacaa

SEQ ID NO: 1895431 - RNA, 19 nt, Homo sapiens
  misc_RNA (1)...(19): siRNA sense strand
gcaagcguuucccaaauug

SEQ ID NO: 1895432 - RNA, 19 nt, Homo sapiens
  misc_RNA (1)...(19): siRNA sense strand
gaagcaagcguuucccaaa

SEQ ID NO: 1895433 - RNA, 19 nt, Homo sapiens
  misc_RNA (1)...(19): siRNA sense strand
aaaggaagauaggaagaua

SEQ ID NO: 1895434 - RNA, 19 nt, Homo sapiens
  misc_RNA (1)...(19): siRNA sense strand
aaccagagaucuacaggua

SEQ ID NO: 1895435 - RNA, 19 nt, Homo sapiens
  misc_RNA (1)...(19): siRNA sense strand
caacugcuguagagauuga

SEQ ID NO: 1895436 - RNA, 19 nt, Homo sapiens
  misc_RNA (1)...(19): siRNA sense strand
gccauugccucccuuguuu

SEQ ID NO: 1895437 - RNA, 19 nt, Homo sapiens
  misc_RNA (1)...(19): siRNA sense strand
caaagaagauuccaaaccu

SEQ ID NO: 1895438 - RNA, 19 nt, Homo sapiens
  misc_RNA (1)...(19): siRNA sense strand
ggaagaugcugaugauggu

SEQ ID NO: 1895439 - RNA, 19 nt, Homo sapiens
  misc_RNA (1)...(19): siRNA sense strand
gaagggaaauaugguuaug

SEQ ID NO: 1895440 - RNA, 19 nt, Homo sapiens
  misc_RNA (1)...(19): siRNA sense strand
ggaaaagccugacaaggaa

SEQ ID NO: 1895441 - RNA, 19 nt, Homo sapiens
  misc_RNA (1)...(19): siRNA sense strand
gaguggaaguggagggaua

SEQ ID NO: 1895442 - RNA, 19 nt, Homo sapiens
  misc_RNA (1)...(19): siRNA sense strand
cauagaagcauccaaagaa

SEQ ID NO: 1895443 - RNA, 19 nt, Homo sapiens
  misc_RNA (1)...(19): siRNA sense strand
ggaaacaagccaucucuuc

SEQ ID NO: 1895444 - RNA, 19 nt, Homo sapiens
  misc_RNA (1)...(19): siRNA sense strand
gaaugugucuucaucaaaa

SEQ ID NO: 1895445 - RNA, 19 nt, Homo sapiens
  misc_RNA (1)...(19): siRNA sense strand
ggaauacaagcaagaaaga

SEQ ID NO: 1895446 - RNA, 19 nt, Homo sapiens
  misc_RNA (1)...(19): siRNA sense strand
cuguagagauugacuauga

SEQ ID NO: 1895447 - RNA, 19 nt, Homo sapiens
  misc_RNA (1)...(19): siRNA sense strand
gaagaagggaaauaugguu

SEQ ID NO: 1895448 - RNA, 19 nt, Homo sapiens
  misc_RNA (1)...(19): siRNA sense strand
gugaaucucuagaaguuau

SEQ ID NO: 1895449 - RNA, 19 nt, Homo sapiens
  misc_RNA (1)...(19): siRNA sense strand
gaagaugaccaagaaguau

SEQ ID NO: 1895450 - RNA, 19 nt, Homo sapiens
  misc_RNA (1)...(19): siRNA sense strand
uauugaagaugaccaagaa

SEQ ID NO: 1895451 - RNA, 19 nt, Homo sapiens
  misc_RNA (1)...(19): siRNA sense strand
aaagaagauuccaaaccua

SEQ ID NO: 1895452 - RNA, 19 nt, Homo sapiens
  misc_RNA (1)...(19): siRNA sense strand
caccagaugaugacauuua

SEQ ID NO: 1895453 - RNA, 19 nt, Homo sapiens
  misc_RNA (1)...(19): siRNA sense strand
ggagaaacauaugaagaca

SEQ ID NO: 1895454 - RNA, 19 nt, Homo sapiens
  misc_RNA (1)...(19): siRNA sense strand
gauagaugcugcuaagaac

SEQ ID NO: 1895455 - RNA, 19 nt, Homo sapiens
  misc_RNA (1)...(19): siRNA sense strand
ccaagaccaugacuuaaag

SEQ ID NO: 1895456 - RNA, 19 nt, Homo sapiens
  misc_RNA (1)...(19): siRNA sense strand
gaacuuauucaacaaccaa

SEQ ID NO: 1895457 - RNA, 19 nt, Homo sapiens
  misc_RNA (1)...(19): siRNA sense strand
guuauguccuucggaguua

SEQ ID NO: 1895458 - RNA, 19 nt, Homo sapiens
  misc_RNA (1)...(19): siRNA sense strand
gcagagaugagucaaggaa

SEQ ID NO: 1895459 - RNA, 19 nt, Homo sapiens
  misc_RNA (1)...(19): siRNA sense strand
ugacauuuaugaugggauu

SEQ ID NO: 1895460 - RNA, 19 nt, Homo sapiens
  misc_RNA (1)...(19): siRNA sense strand
gcagagcaggaugauauua

SEQ ID NO: 1895461 - RNA, 19 nt, Homo sapiens
  misc_RNA (1)...(19): siRNA sense strand
gaugaugacauuuaugaug

SEQ ID NO: 1895462 - RNA, 19 nt, Homo sapiens
  misc_RNA (1)...(19): siRNA sense strand
ggaacaagacagugaagga

SEQ ID NO: 1895463 - RNA, 19 nt, Homo sapiens
  misc_RNA (1)...(19): siRNA sense strand
gauugacuaugauucuuug

SEQ ID NO: 1895464 - RNA, 19 nt, Homo sapiens
  misc_RNA (1)...(19): siRNA sense strand
gagagcaaauugaaaucau

SEQ ID NO: 1895465 - RNA, 19 nt, Homo sapiens
  misc_RNA (1)...(19): siRNA sense strand
cagaugaugacauuuauga

SEQ ID NO: 1895466 - RNA, 19 nt, Homo sapiens
  misc_RNA (1)...(19): siRNA sense strand
ccaaagaaagagagaagaa

SEQ ID NO: 1895467 - RNA, 19 nt, Homo sapiens
  misc_RNA (1)...(19): siRNA sense strand
gcaagaaagaacuuauuca

SEQ ID NO: 1895468 - RNA, 19 nt, Homo sapiens
  misc_RNA (1)...(19): siRNA sense strand
ugaagaugaccaagaagua

SEQ ID NO: 1895469 - RNA, 19 nt, Homo sapiens
  misc_RNA (1)...(19): siRNA sense strand
gaaagaaugaacugagcuu

SEQ ID NO: 1895470 - RNA, 19 nt, Homo sapiens
  misc_RNA (1)...(19): siRNA sense strand
uaacaggcccuauucaagu

SEQ ID NO: 1895471 - RNA, 19 nt, Homo sapiens
  misc_RNA (1)...(19): siRNA sense strand
ccagacgucuuacucaaca

SEQ ID NO: 1895472 - RNA, 19 nt, Homo sapiens
  misc_RNA (1)...(19): siRNA sense strand
gguaaaaccuggugaaucu

SEQ ID NO: 1895473 - RNA, 19 nt, Homo sapiens
  misc_RNA (1)...(19): siRNA sense strand
caugggagaugaaguuuac

SEQ ID NO: 1895474 - RNA, 19 nt, Homo sapiens
  misc_RNA (1)...(19): siRNA sense strand
caagaaguauaugaugaug

SEQ ID NO: 1895475 - RNA, 19 nt, Homo sapiens
  misc_RNA (1)...(19): siRNA sense strand
gagauugacuaugauucuu

SEQ ID NO: 1895476 - RNA, 19 nt, Homo sapiens
  misc_RNA (1)...(19): siRNA sense strand
agacauagaagcauccaaa

SEQ ID NO: 1895477 - RNA, 19 nt, Homo sapiens
  misc_RNA (1)...(19): siRNA sense strand
auagaagcauccaaagaaa

SEQ ID NO: 1895478 - RNA, 19 nt, Homo sapiens
  misc_RNA (1)...(19): siRNA sense strand
caaagaaagagagaagaaa

SEQ ID NO: 1895479 - RNA, 19 nt, Homo sapiens
  misc_RNA (1)...(19): siRNA sense strand
caaaccuucuucugaggaa

SEQ ID NO: 1895480 - RNA, 19 nt, Homo sapiens
  misc_RNA (1)...(19): siRNA sense strand
auggagagaucuaugauga

SEQ ID NO: 1895481 - RNA, 19 nt, Homo sapiens
  misc_RNA (1)...(19): siRNA sense strand
ccagcaauguaccuaaguu

SEQ ID NO: 1895482 - RNA, 19 nt, Homo sapiens
  misc_RNA (1)...(19): siRNA sense strand
acaagacagugaaggagaa

SEQ ID NO: 1895483 - RNA, 19 nt, Homo sapiens
  misc_RNA (1)...(19): siRNA sense strand
gccagcaucucacccauca

SEQ ID NO: 1895484 - RNA, 19 nt, Homo sapiens
  misc_RNA (1)...(19): siRNA sense strand
gaacagaagcaagcguuuc

SEQ ID NO: 1895485 - RNA, 19 nt, Homo sapiens
  misc_RNA (1)...(19): siRNA sense strand
caagccaucucuucacagu

SEQ ID NO: 1895486 - RNA, 19 nt, Homo sapiens
  misc_RNA (1)...(19): siRNA sense strand
gcccaaagaagauuccaaa

SEQ ID NO: 1895487 - RNA, 19 nt, Homo sapiens
  misc_RNA (1)...(19): siRNA sense strand
uggugaaucucuagaaguu

SEQ ID NO: 1895488 - RNA, 19 nt, Homo sapiens
  misc_RNA (1)...(19): siRNA sense strand
agaggaagaugcugaugau

SEQ ID NO: 1895489 - RNA, 19 nt, Homo sapiens
  misc_RNA (1)...(19): siRNA sense strand
ccaaacucaucuucaggaa

SEQ ID NO: 1895490 - RNA, 19 nt, Homo sapiens
  misc_RNA (1)...(19): siRNA sense strand
guaccgagaacucccauga

SEQ ID NO: 1895491 - RNA, 19 nt, Homo sapiens
  misc_RNA (1)...(19): siRNA sense strand
caacuugcccaaagaagau

SEQ ID NO: 1895492 - RNA, 19 nt, Homo sapiens
  misc_RNA (1)...(19): siRNA sense strand
uaaacuaacaggcccuauu

SEQ ID NO: 1895493 - RNA, 19 nt, Homo sapiens
  misc_RNA (1)...(19): siRNA sense strand
ugauggugcuggaaaucua

SEQ ID NO: 1895494 - RNA, 19 nt, Homo sapiens
  misc_RNA (1)...(19): siRNA sense strand
cuaccucccagaaacauua

SEQ ID NO: 1895495 - RNA, 19 nt, Homo sapiens
  misc_RNA (1)...(19): siRNA sense strand
ggccagacgucuuacucaa

SEQ ID NO: 1895496 - RNA, 19 nt, Homo sapiens
  misc_RNA (1)...(19): siRNA sense strand
ggaaacaguacuagcaaag

SEQ ID NO: 1895497 - RNA, 19 nt, Homo sapiens
  misc_RNA (1)...(19): siRNA sense strand
gcaauguaccuaaguuugg

SEQ ID NO: 1895498 - RNA, 19 nt, Homo sapiens
  misc_RNA (1)...(19): siRNA sense strand
caaauugacugggguuaaa

SEQ ID NO: 1895499 - RNA, 19 nt, Homo sapiens
  misc_RNA (1)...(19): siRNA sense strand
gcaaaagcuuguugugaug

SEQ ID NO: 1895500 - RNA, 19 nt, Homo sapiens
  misc_RNA (1)...(19): siRNA sense strand
aaacuaacaggcccuauuc

SEQ ID NO: 1895501 - RNA, 19 nt, Homo sapiens
  misc_RNA (1)...(19): siRNA sense strand
cagaggaugucucagucaa

SEQ ID NO: 1895502 - RNA, 19 nt, Homo sapiens
  misc_RNA (1)...(19): siRNA sense strand
caggggagauuucaaguuu

SEQ ID NO: 1895503 - RNA, 19 nt, Homo sapiens
  misc_RNA (1)...(19): siRNA sense strand
gauuucaaguuugcccuuu

SEQ ID NO: 1895504 - RNA, 19 nt, Homo sapiens
  misc_RNA (1)...(19): siRNA sense strand
gaauacaagcaagaaagaa

SEQ ID NO: 1895505 - RNA, 19 nt, Homo sapiens
  misc_RNA (1)...(19): siRNA sense strand
uaaaacaacugcuguagag

SEQ ID NO: 1895506 - RNA, 19 nt, Homo sapiens
  misc_RNA (1)...(19): siRNA sense strand
ggaagauagaugcugcuaa

SEQ ID NO: 1895507 - RNA, 19 nt, Homo sapiens
  misc_RNA (1)...(19): siRNA sense strand
caaugaagacaaucaagau

SEQ ID NO: 1895508 - RNA, 19 nt, Homo sapiens
  misc_RNA (1)...(19): siRNA sense strand
gaucuaugaugauauugcu

SEQ ID NO: 1895509 - RNA, 19 nt, Homo sapiens
  misc_RNA (1)...(19): siRNA sense strand
gagaugagucaaggaacua

SEQ ID NO: 1895510 - RNA, 19 nt, Homo sapiens
  misc_RNA (1)...(19): siRNA sense strand
aacaacugcuguagagauu

SEQ ID NO: 1895511 - RNA, 19 nt, Homo sapiens
  misc_RNA (1)...(19): siRNA sense strand
ggagaaaucuggaugcauu

SEQ ID NO: 1895512 - RNA, 19 nt, Homo sapiens
  misc_RNA (1)...(19): siRNA sense strand
gaaaucagcugcauugaca

SEQ ID NO: 1895513 - RNA, 19 nt, Homo sapiens
  misc_RNA (1)...(19): siRNA sense strand
ggaagaagauccagcagaa

SEQ ID NO: 1895514 - RNA, 19 nt, Homo sapiens
  misc_RNA (1)...(19): siRNA sense strand
ccaaggaccuggauugaaa

SEQ ID NO: 1895515 - RNA, 19 nt, Homo sapiens
  misc_RNA (1)...(19): siRNA sense strand
gaaguggucugaaggcaaa

SEQ ID NO: 1895516 - RNA, 19 nt, Homo sapiens
  misc_RNA (1)...(19): siRNA sense strand
gaaugaagauggaaccuau

SEQ ID NO: 1895517 - RNA, 19 nt, Homo sapiens
  misc_RNA (1)...(19): siRNA sense strand
ggucaucacuccugaagaa

SEQ ID NO: 1895518 - RNA, 19 nt, Homo sapiens
  misc_RNA (1)...(19): siRNA sense strand
caauaaagauggcacguau

SEQ ID NO: 1895519 - RNA, 19 nt, Homo sapiens
  misc_RNA (1)...(19): siRNA sense strand
gaaggcccauccaagguua

SEQ ID NO: 1895520 - RNA, 19 nt, Homo sapiens
  misc_RNA (1)...(19): siRNA sense strand
ggaaucgccuccacuguga

SEQ ID NO: 1895521 - RNA, 19 nt, Homo sapiens
  misc_RNA (1)...(19): siRNA sense strand
caaggagccuggcgaauau

SEQ ID NO: 1895522 - RNA, 19 nt, Homo sapiens
  misc_RNA (1)...(19): siRNA sense strand
gaccacagauuucaagguu

SEQ ID NO: 1895523 - RNA, 19 nt, Homo sapiens
  misc_RNA (1)...(19): siRNA sense strand
ugacuuaccugucccaguu

SEQ ID NO: 1895524 - RNA, 19 nt, Homo sapiens
  misc_RNA (1)...(19): siRNA sense strand
ggagagaaguggucugaag

SEQ ID NO: 1895525 - RNA, 19 nt, Homo sapiens
  misc_RNA (1)...(19): siRNA sense strand
ucacauacgucgucaagga

SEQ ID NO: 1895526 - RNA, 19 nt, Homo sapiens
  misc_RNA (1)...(19): siRNA sense strand
gaugggacaugcacaguga

SEQ ID NO: 1895527 - RNA, 19 nt, Homo sapiens
  misc_RNA (1)...(19): siRNA sense strand
caagguggcugucacugaa

SEQ ID NO: 1895528 - RNA, 19 nt, Homo sapiens
  misc_RNA (1)...(19): siRNA sense strand
ccaauaagcccaccuacuu

SEQ ID NO: 1895529 - RNA, 19 nt, Homo sapiens
  misc_RNA (1)...(19): siRNA sense strand
ugaagaggcugcccaacaa

SEQ ID NO: 1895530 - RNA, 19 nt, Homo sapiens
  misc_RNA (1)...(19): siRNA sense strand
gcgaugcagugaaggauuu

SEQ ID NO: 1895531 - RNA, 19 nt, Homo sapiens
  misc_RNA (1)...(19): siRNA sense strand
caaaugaaccuacacacuu

SEQ ID NO: 1895532 - RNA, 19 nt, Homo sapiens
  misc_RNA (1)...(19): siRNA sense strand
ccagggagaugccaguaaa

SEQ ID NO: 1895533 - RNA, 19 nt, Homo sapiens
  misc_RNA (1)...(19): siRNA sense strand
ucaaauaacggaccaagaa

SEQ ID NO: 1895534 - RNA, 19 nt, Homo sapiens
  misc_RNA (1)...(19): siRNA sense strand
uaaauaugcugaugaagag

SEQ ID NO: 1895535 - RNA, 19 nt, Homo sapiens
  misc_RNA (1)...(19): siRNA sense strand
ccaaggagccuggcgaaua

SEQ ID NO: 1895536 - RNA, 19 nt, Homo sapiens
  misc_RNA (1)...(19): siRNA sense strand
uagggaacaucgccaauaa

SEQ ID NO: 1895537 - RNA, 19 nt, Homo sapiens
  misc_RNA (1)...(19): siRNA sense strand
gcagaagccuguggauaau

SEQ ID NO: 1895538 - RNA, 19 nt, Homo sapiens
  misc_RNA (1)...(19): siRNA sense strand
cagccaagaucacagauga

SEQ ID NO: 1895539 - RNA, 19 nt, Homo sapiens
  misc_RNA (1)...(19): siRNA sense strand
gcacguaugcugucaccua

SEQ ID NO: 1895540 - RNA, 19 nt, Homo sapiens
  misc_RNA (1)...(19): siRNA sense strand
gacgagcacucaguuauga

SEQ ID NO: 1895541 - RNA, 19 nt, Homo sapiens
  misc_RNA (1)...(19): siRNA sense strand
aaagagccauuguccauga

SEQ ID NO: 1895542 - RNA, 19 nt, Homo sapiens
  misc_RNA (1)...(19): siRNA sense strand
ucucuuaccuucccacaaa

SEQ ID NO: 1895543 - RNA, 19 nt, Homo sapiens
  misc_RNA (1)...(19): siRNA sense strand
gaucgugugaugucaaaua

SEQ ID NO: 1895544 - RNA, 19 nt, Homo sapiens
  misc_RNA (1)...(19): siRNA sense strand
gaagaacaccguggaguug

SEQ ID NO: 1895545 - RNA, 19 nt, Homo sapiens
  misc_RNA (1)...(19): siRNA sense strand
ggaaggugaugucaguguu

SEQ ID NO: 1895546 - RNA, 19 nt, Homo sapiens
  misc_RNA (1)...(19): siRNA sense strand
caccaaagcugcaggaagu

SEQ ID NO: 1895547 - RNA, 19 nt, Homo sapiens
  misc_RNA (1)...(19): siRNA sense strand
gaagaaagccagggccuau

SEQ ID NO: 1895548 - RNA, 19 nt, Homo sapiens
  misc_RNA (1)...(19): siRNA sense strand
ggucuggacuuggcuauug

SEQ ID NO: 1895549 - RNA, 19 nt, Homo sapiens
  misc_RNA (1)...(19): siRNA sense strand
gaaccuaugacaucuucua

SEQ ID NO: 1895550 - RNA, 19 nt, Homo sapiens
  misc_RNA (1)...(19): siRNA sense strand
cgaauaugcuguucacauc

SEQ ID NO: 1895551 - RNA, 19 nt, Homo sapiens
  misc_RNA (1)...(19): siRNA sense strand
ggacagcacaucuccaaga

SEQ ID NO: 1895552 - RNA, 19 nt, Homo sapiens
  misc_RNA (1)...(19): siRNA sense strand
gaaucgagcccacuggaaa

SEQ ID NO: 1895553 - RNA, 19 nt, Homo sapiens
  misc_RNA (1)...(19): siRNA sense strand
gaacaaagaggaggcacaa

SEQ ID NO: 1895554 - RNA, 19 nt, Homo sapiens
  misc_RNA (1)...(19): siRNA sense strand
gaacaucuggucagcauca

SEQ ID NO: 1895555 - RNA, 19 nt, Homo sapiens
  misc_RNA (1)...(19): siRNA sense strand
gaaggcaaaugaaccuaca

SEQ ID NO: 1895556 - RNA, 19 nt, Homo sapiens
  misc_RNA (1)...(19): siRNA sense strand
ggacaccacauuccaaaga

SEQ ID NO: 1895557 - RNA, 19 nt, Homo sapiens
  misc_RNA (1)...(19): siRNA sense strand
ggaagaacaccguggaguu

SEQ ID NO: 1895558 - RNA, 19 nt, Homo sapiens
  misc_RNA (1)...(19): siRNA sense strand
aggcaaagauugaguacaa

SEQ ID NO: 1895559 - RNA, 19 nt, Homo sapiens
  misc_RNA (1)...(19): siRNA sense strand
gaagauggcaccugcaaag

SEQ ID NO: 1895560 - RNA, 19 nt, Homo sapiens
  misc_RNA (1)...(19): siRNA sense strand
ucaacaaccuggccgaguu

SEQ ID NO: 1895561 - RNA, 19 nt, Homo sapiens
  misc_RNA (1)...(19): siRNA sense strand
cagucggaauucuuuauua

SEQ ID NO: 1895562 - RNA, 19 nt, Homo sapiens
  misc_RNA (1)...(19): siRNA sense strand
gcacggucacuguuagaua

SEQ ID NO: 1895563 - RNA, 19 nt, Homo sapiens
  misc_RNA (1)...(19): siRNA sense strand
caucagagucgaagauaaa

SEQ ID NO: 1895564 - RNA, 19 nt, Homo sapiens
  misc_RNA (1)...(19): siRNA sense strand
uaguggaggugacauauga

SEQ ID NO: 1895565 - RNA, 19 nt, Homo sapiens
  misc_RNA (1)...(19): siRNA sense strand
gaagcuaccaccgacuuua

SEQ ID NO: 1895566 - RNA, 19 nt, Homo sapiens
  misc_RNA (1)...(19): siRNA sense strand
gcaacgagcaccucaagug

SEQ ID NO: 1895567 - RNA, 19 nt, Homo sapiens
  misc_RNA (1)...(19): siRNA sense strand
ggacgcugauccuccacua

SEQ ID NO: 1895568 - RNA, 19 nt, Homo sapiens
  misc_RNA (1)...(19): siRNA sense strand
guggaaguguuucugcaua

SEQ ID NO: 1895569 - RNA, 19 nt, Homo sapiens
  misc_RNA (1)...(19): siRNA sense strand
aaagcucccuuaaagauau

SEQ ID NO: 1895570 - RNA, 19 nt, Homo sapiens
  misc_RNA (1)...(19): siRNA sense strand
ccaagaagcagacgccaaa

SEQ ID NO: 1895571 - RNA, 19 nt, Homo sapiens
  misc_RNA (1)...(19): siRNA sense strand
caucaugugugacgacgaa

SEQ ID NO: 1895572 - RNA, 19 nt, Homo sapiens
  misc_RNA (1)...(19): siRNA sense strand
gaagauggaaccuaugaca

SEQ ID NO: 1895573 - RNA, 19 nt, Homo sapiens
  misc_RNA (1)...(19): siRNA sense strand
gaauagaagggaaagaugu

SEQ ID NO: 1895574 - RNA, 19 nt, Homo sapiens
  misc_RNA (1)...(19): siRNA sense strand
caagguagccauccucaga

SEQ ID NO: 1895575 - RNA, 19 nt, Homo sapiens
  misc_RNA (1)...(19): siRNA sense strand
gcgacaagaacaagacaua

SEQ ID NO: 1895576 - RNA, 19 nt, Homo sapiens
  misc_RNA (1)...(19): siRNA sense strand
ccaagagccugguaacuac

SEQ ID NO: 1895577 - RNA, 19 nt, Homo sapiens
  misc_RNA (1)...(19): siRNA sense strand
ccugcuugcuguucaaaua

SEQ ID NO: 1895578 - RNA, 19 nt, Homo sapiens
  misc_RNA (1)...(19): siRNA sense strand
gcacacacacaguaaccua

SEQ ID NO: 1895579 - RNA, 19 nt, Homo sapiens
  misc_RNA (1)...(19): siRNA sense strand
gaacaugguggacaaugga

SEQ ID NO: 1895580 - RNA, 19 nt, Homo sapiens
  misc_RNA (1)...(19): siRNA sense strand
caacaagcccaaugucuuc

SEQ ID NO: 1895581 - RNA, 19 nt, Homo sapiens
  misc_RNA (1)...(19): siRNA sense strand
gaauacacacccuuugaga

SEQ ID NO: 1895582 - RNA, 19 nt, Homo sapiens
  misc_RNA (1)...(19): siRNA sense strand
cagcaaagcagguguggaa

SEQ ID NO: 1895583 - RNA, 19 nt, Homo sapiens
  misc_RNA (1)...(19): siRNA sense strand
ggagaugccaguaaaguca

SEQ ID NO: 1895584 - RNA, 19 nt, Homo sapiens
  misc_RNA (1)...(19): siRNA sense strand
caccaucgaugucaaguuc

SEQ ID NO: 1895585 - RNA, 19 nt, Homo sapiens
  misc_RNA (1)...(19): siRNA sense strand
uacauucgaugaccauaaa

SEQ ID NO: 1895586 - RNA, 19 nt, Homo sapiens
  misc_RNA (1)...(19): siRNA sense strand
gagcauacgggccagguuu

SEQ ID NO: 1895587 - RNA, 19 nt, Homo sapiens
  misc_RNA (1)...(19): siRNA sense strand
gcaucaagcucguguccau

SEQ ID NO: 1895588 - RNA, 19 nt, Homo sapiens
  misc_RNA (1)...(19): siRNA sense strand
ccaccuacuuugacaucua

SEQ ID NO: 1895589 - RNA, 19 nt, Homo sapiens
  misc_RNA (1)...(19): siRNA sense strand
caauaagcccaccuacuuu

SEQ ID NO: 1895590 - RNA, 19 nt, Homo sapiens
  misc_RNA (1)...(19): siRNA sense strand
gcgaacaucuggucagcau

SEQ ID NO: 1895591 - RNA, 19 nt, Homo sapiens
  misc_RNA (1)...(19): siRNA sense strand
cgacaagacugggcgcuau

SEQ ID NO: 1895592 - RNA, 19 nt, Homo sapiens
  misc_RNA (1)...(19): siRNA sense strand
gaaaagcucccuuaaagau

SEQ ID NO: 1895593 - RNA, 19 nt, Homo sapiens
  misc_RNA (1)...(19): siRNA sense strand
uaaaauggauugccaggaa

SEQ ID NO: 1895594 - RNA, 19 nt, Homo sapiens
  misc_RNA (1)...(19): siRNA sense strand
ggacaugcacagugaccua

SEQ ID NO: 1895595 - RNA, 19 nt, Homo sapiens
  misc_RNA (1)...(19): siRNA sense strand
gaaguaugguggcgaacuc

SEQ ID NO: 1895596 - RNA, 19 nt, Homo sapiens
  misc_RNA (1)...(19): siRNA sense strand
ggaccugcuccgucucuua

SEQ ID NO: 1895597 - RNA, 19 nt, Homo sapiens
  misc_RNA (1)...(19): siRNA sense strand
aaagauauuugcucaggau

SEQ ID NO: 1895598 - RNA, 19 nt, Homo sapiens
  misc_RNA (1)...(19): siRNA sense strand
cgcagaagccuguggauaa

SEQ ID NO: 1895599 - RNA, 19 nt, Homo sapiens
  misc_RNA (1)...(19): siRNA sense strand
acacaagggaugcagguua

SEQ ID NO: 1895600 - RNA, 19 nt, Homo sapiens
  misc_RNA (1)...(19): siRNA sense strand
gcagugaaggauuuggaua

SEQ ID NO: 1895601 - RNA, 19 nt, Homo sapiens
  misc_RNA (1)...(19): siRNA sense strand
aaaugaaccuacacacuuc

SEQ ID NO: 1895602 - RNA, 19 nt, Homo sapiens
  misc_RNA (1)...(19): siRNA sense strand
gaacuggcaagacggcaaa

SEQ ID NO: 1895603 - RNA, 19 nt, Homo sapiens
  misc_RNA (1)...(19): siRNA sense strand
gauggcaccugcaaagucu

SEQ ID NO: 1895604 - RNA, 19 nt, Homo sapiens
  misc_RNA (1)...(19): siRNA sense strand
cacaagggaugcagguuau

SEQ ID NO: 1895605 - RNA, 19 nt, Homo sapiens
  misc_RNA (1)...(19): siRNA sense strand
ugaacggccugggauuuaa

SEQ ID NO: 1895606 - RNA, 19 nt, Homo sapiens
  misc_RNA (1)...(19): siRNA sense strand
gggcuuggcauaacuguug

SEQ ID NO: 1895607 - RNA, 19 nt, Homo sapiens
  misc_RNA (1)...(19): siRNA sense strand
gggugaagcuggccuccuu

SEQ ID NO: 1895608 - RNA, 19 nt, Homo sapiens
  misc_RNA (1)...(19): siRNA sense strand
gaaccugaagcucaucuug

SEQ ID NO: 1895609 - RNA, 19 nt, Homo sapiens
  misc_RNA (1)...(19): siRNA sense strand
ccaccgacuuuacaguuga

SEQ ID NO: 1895610 - RNA, 19 nt, Homo sapiens
  misc_RNA (1)...(19): siRNA sense strand
agaaaggucuccauguagu

SEQ ID NO: 1895611 - RNA, 19 nt, Homo sapiens
  misc_RNA (1)...(19): siRNA sense strand
gaacacggagauacacuuu

SEQ ID NO: 1895612 - RNA, 19 nt, Homo sapiens
  misc_RNA (1)...(19): siRNA sense strand
acacggagauacacuuugu

SEQ ID NO: 1895613 - RNA, 19 nt, Homo sapiens
  misc_RNA (1)...(19): siRNA sense strand
cgacuucgcugucaaaauc

SEQ ID NO: 1895614 - RNA, 19 nt, Homo sapiens
  misc_RNA (1)...(19): siRNA sense strand
gccuggagcugcaguguca

SEQ ID NO: 1895615 - RNA, 19 nt, Homo sapiens
  misc_RNA (1)...(19): siRNA sense strand
uccgugagcugucugacua

SEQ ID NO: 1895616 - RNA, 19 nt, Homo sapiens
  misc_RNA (1)...(19): siRNA sense strand
acuaccugcuucaagauua

SEQ ID NO: 1895617 - RNA, 19 nt, Homo sapiens
  misc_RNA (1)...(19): siRNA sense strand
cugacuaccugcuucaaga

SEQ ID NO: 1895618 - RNA, 19 nt, Homo sapiens
  misc_RNA (1)...(19): siRNA sense strand
gcgcugaagcccuggauca

SEQ ID NO: 1895619 - RNA, 19 nt, Homo sapiens
  misc_RNA (1)...(19): siRNA sense strand
ggacugcuccuuccaacac

SEQ ID NO: 1895620 - RNA, 19 nt, Homo sapiens
  misc_RNA (1)...(19): siRNA sense strand
caccaaaugugccuuucag

SEQ ID NO: 1895621 - RNA, 19 nt, Homo sapiens
  misc_RNA (1)...(19): siRNA sense strand
agauacacuuugucaccaa

SEQ ID NO: 1895622 - RNA, 19 nt, Homo sapiens
  misc_RNA (1)...(19): siRNA sense strand
ggaucacucgccagaacuu

SEQ ID NO: 1895623 - RNA, 19 nt, Homo sapiens
  misc_RNA (1)...(19): siRNA sense strand
gacuaccugcuucaagauu

SEQ ID NO: 1895624 - RNA, 19 nt, Homo sapiens
  misc_RNA (1)...(19): siRNA sense strand
gaacaggucuuagauaaag

SEQ ID NO: 1895625 - RNA, 19 nt, Homo sapiens
  misc_RNA (1)...(19): siRNA sense strand
gcaguaacuucuacauuaa

SEQ ID NO: 1895626 - RNA, 19 nt, Homo sapiens
  misc_RNA (1)...(19): siRNA sense strand
aaacagagaugguaacaau

SEQ ID NO: 1895627 - RNA, 19 nt, Homo sapiens
  misc_RNA (1)...(19): siRNA sense strand
ggacagaaaucuccaccaa

SEQ ID NO: 1895628 - RNA, 19 nt, Homo sapiens
  misc_RNA (1)...(19): siRNA sense strand
cagaagaaaugaaugguaa

SEQ ID NO: 1895629 - RNA, 19 nt, Homo sapiens
  misc_RNA (1)...(19): siRNA sense strand
ggaaagcccugagcagaaa

SEQ ID NO: 1895630 - RNA, 19 nt, Homo sapiens
  misc_RNA (1)...(19): siRNA sense strand
cgcaguaacuucuacauua

SEQ ID NO: 1895631 - RNA, 19 nt, Homo sapiens
  misc_RNA (1)...(19): siRNA sense strand
gaaauaaagagacaacuga

SEQ ID NO: 1895632 - RNA, 19 nt, Homo sapiens
  misc_RNA (1)...(19): siRNA sense strand
gaugcagccuacugaauua

SEQ ID NO: 1895633 - RNA, 19 nt, Homo sapiens
  misc_RNA (1)...(19): siRNA sense strand
gaagagccacagaaaguua

SEQ ID NO: 1895634 - RNA, 19 nt, Homo sapiens
  misc_RNA (1)...(19): siRNA sense strand
ggacaaguguuauuugaca

SEQ ID NO: 1895635 - RNA, 19 nt, Homo sapiens
  misc_RNA (1)...(19): siRNA sense strand
cuaaggagcuggaagagaa

SEQ ID NO: 1895636 - RNA, 19 nt, Homo sapiens
  misc_RNA (1)...(19): siRNA sense strand
gaagugagaagcccaacua

SEQ ID NO: 1895637 - RNA, 19 nt, Homo sapiens
  misc_RNA (1)...(19): siRNA sense strand
ggagaggugucccauguug

SEQ ID NO: 1895638 - RNA, 19 nt, Homo sapiens
  misc_RNA (1)...(19): siRNA sense strand
agaaauggcucagaagaaa

SEQ ID NO: 1895639 - RNA, 19 nt, Homo sapiens
  misc_RNA (1)...(19): siRNA sense strand
cggcagagcuggaacaguu

SEQ ID NO: 1895640 - RNA, 19 nt, Homo sapiens
  misc_RNA (1)...(19): siRNA sense strand
gaacagaugcaaccaagga

SEQ ID NO: 1895641 - RNA, 19 nt, Homo sapiens
  misc_RNA (1)...(19): siRNA sense strand
caagggaguucacaugaga

SEQ ID NO: 1895642 - RNA, 19 nt, Homo sapiens
  misc_RNA (1)...(19): siRNA sense strand
cgaaggcgcucuuaagcaa

SEQ ID NO: 1895643 - RNA, 19 nt, Homo sapiens
  misc_RNA (1)...(19): siRNA sense strand
gggcagagguugggaaaga

SEQ ID NO: 1895644 - RNA, 19 nt, Homo sapiens
  misc_RNA (1)...(19): siRNA sense strand
gaagaaauggcucagaaga

SEQ ID NO: 1895645 - RNA, 19 nt, Homo sapiens
  misc_RNA (1)...(19): siRNA sense strand
ggaccaaagucuuaugaag

SEQ ID NO: 1895646 - RNA, 19 nt, Homo sapiens
  misc_RNA (1)...(19): siRNA sense strand
gaaaugaaugguaaagaga

SEQ ID NO: 1895647 - RNA, 19 nt, Homo sapiens
  misc_RNA (1)...(19): siRNA sense strand
cacaggagauggagauauu

SEQ ID NO: 1895648 - RNA, 19 nt, Homo sapiens
  misc_RNA (1)...(19): siRNA sense strand
aaacaucaggcuagcauua

SEQ ID NO: 1895649 - RNA, 19 nt, Homo sapiens
  misc_RNA (1)...(19): siRNA sense strand
gcugugaccuggagaaaca

SEQ ID NO: 1895650 - RNA, 19 nt, Homo sapiens
  misc_RNA (1)...(19): siRNA sense strand
aagaagagguggaggaaga

SEQ ID NO: 1895651 - RNA, 19 nt, Homo sapiens
  misc_RNA (1)...(19): siRNA sense strand
ucaauugacugaagauauc

SEQ ID NO: 1895652 - RNA, 19 nt, Homo sapiens
  misc_RNA (1)...(19): siRNA sense strand
gcaaaagucauauaccuua

SEQ ID NO: 1895653 - RNA, 19 nt, Homo sapiens
  misc_RNA (1)...(19): siRNA sense strand
ccaccucccugucuucuga

SEQ ID NO: 1895654 - RNA, 19 nt, Homo sapiens
  misc_RNA (1)...(19): siRNA sense strand
gaacucaagcgcaauuuua

SEQ ID NO: 1895655 - RNA, 19 nt, Homo sapiens
  misc_RNA (1)...(19): siRNA sense strand
ggagagagaagagaaggua

SEQ ID NO: 1895656 - RNA, 19 nt, Homo sapiens
  misc_RNA (1)...(19): siRNA sense strand
gcacaaaccaucacaucug

SEQ ID NO: 1895657 - RNA, 19 nt, Homo sapiens
  misc_RNA (1)...(19): siRNA sense strand
ggccaaagauggaggagau

SEQ ID NO: 1895658 - RNA, 19 nt, Homo sapiens
  misc_RNA (1)...(19): siRNA sense strand
gggaggaacaggaguauga

SEQ ID NO: 1895659 - RNA, 19 nt, Homo sapiens
  misc_RNA (1)...(19): siRNA sense strand
ccaaggaagugcagaccaa

SEQ ID NO: 1895660 - RNA, 19 nt, Homo sapiens
  misc_RNA (1)...(19): siRNA sense strand
uaagggugaugcugaagaa

SEQ ID NO: 1895661 - RNA, 19 nt, Homo sapiens
  misc_RNA (1)...(19): siRNA sense strand
gaacaggaguaugaagaag

SEQ ID NO: 1895662 - RNA, 19 nt, Homo sapiens
  misc_RNA (1)...(19): siRNA sense strand
gcaucgaccucagugaauu

SEQ ID NO: 1895663 - RNA, 19 nt, Homo sapiens
  misc_RNA (1)...(19): siRNA sense strand
gaaagacgaaagaguaauc

SEQ ID NO: 1895664 - RNA, 19 nt, Homo sapiens
  misc_RNA (1)...(19): siRNA sense strand
caagaguggugguacacaa

SEQ ID NO: 1895665 - RNA, 19 nt, Homo sapiens
  misc_RNA (1)...(19): siRNA sense strand
cacaaaccaucacaucuga

SEQ ID NO: 1895666 - RNA, 19 nt, Homo sapiens
  misc_RNA (1)...(19): siRNA sense strand
cagaagaaacaagagauua

SEQ ID NO: 1895667 - RNA, 19 nt, Homo sapiens
  misc_RNA (1)...(19): siRNA sense strand
ccaaaaccaucacauauga

SEQ ID NO: 1895668 - RNA, 19 nt, Homo sapiens
  misc_RNA (1)...(19): siRNA sense strand
acagagaugguaacaauuu

SEQ ID NO: 1895669 - RNA, 19 nt, Homo sapiens
  misc_RNA (1)...(19): siRNA sense strand
gcagaccaaugagcugaaa

SEQ ID NO: 1895670 - RNA, 19 nt, Homo sapiens
  misc_RNA (1)...(19): siRNA sense strand
ggaacaggaguaugaagaa

SEQ ID NO: 1895671 - RNA, 19 nt, Homo sapiens
  misc_RNA (1)...(19): siRNA sense strand
acaagcaggugccagugua

SEQ ID NO: 1895672 - RNA, 19 nt, Homo sapiens
  misc_RNA (1)...(19): siRNA sense strand
uacccaagcuguuguugaa

SEQ ID NO: 1895673 - RNA, 19 nt, Homo sapiens
  misc_RNA (1)...(19): siRNA sense strand
gggaaagacgaaagaguaa

SEQ ID NO: 1895674 - RNA, 19 nt, Homo sapiens
  misc_RNA (1)...(19): siRNA sense strand
ucacaugagacucugaaua

SEQ ID NO: 1895675 - RNA, 19 nt, Homo sapiens
  misc_RNA (1)...(19): siRNA sense strand
aaacacaggaagacaaauu

SEQ ID NO: 1895676 - RNA, 19 nt, Homo sapiens
  misc_RNA (1)...(19): siRNA sense strand
gagaagaagcagaggaaga

SEQ ID NO: 1895677 - RNA, 19 nt, Homo sapiens
  misc_RNA (1)...(19): siRNA sense strand
cacaugagacucugaauau

SEQ ID NO: 1895678 - RNA, 19 nt, Homo sapiens
  misc_RNA (1)...(19): siRNA sense strand
gcauugccgugguacaaga

SEQ ID NO: 1895679 - RNA, 19 nt, Homo sapiens
  misc_RNA (1)...(19): siRNA sense strand
uaaagugacccucuuagau

SEQ ID NO: 1895680 - RNA, 19 nt, Homo sapiens
  misc_RNA (1)...(19): siRNA sense strand
gaacagagacaggcuaagg

SEQ ID NO: 1895681 - RNA, 19 nt, Homo sapiens
  misc_RNA (1)...(19): siRNA sense strand
agaaaugaaugguaaagag

SEQ ID NO: 1895682 - RNA, 19 nt, Homo sapiens
  misc_RNA (1)...(19): siRNA sense strand
gcguggagcaucauacuuu

SEQ ID NO: 1895683 - RNA, 19 nt, Homo sapiens
  misc_RNA (1)...(19): siRNA sense strand
ggacuucucauuuacaaag

SEQ ID NO: 1895684 - RNA, 19 nt, Homo sapiens
  misc_RNA (1)...(19): siRNA sense strand
gugaacaccucaaucucuu

SEQ ID NO: 1895685 - RNA, 19 nt, Homo sapiens
  misc_RNA (1)...(19): siRNA sense strand
ggaagacaaauuagaagga

SEQ ID NO: 1895686 - RNA, 19 nt, Homo sapiens
  misc_RNA (1)...(19): siRNA sense strand
gggugaugcugaagaaaug

SEQ ID NO: 1895687 - RNA, 19 nt, Homo sapiens
  misc_RNA (1)...(19): siRNA sense strand
gagaaacgcauugugauca

SEQ ID NO: 1895688 - RNA, 19 nt, Homo sapiens
  misc_RNA (1)...(19): siRNA sense strand
aaacaagaauugagaaacg

SEQ ID NO: 1895689 - RNA, 19 nt, Homo sapiens
  misc_RNA (1)...(19): siRNA sense strand
aaagaguaaucacagaaga

SEQ ID NO: 1895690 - RNA, 19 nt, Homo sapiens
  misc_RNA (1)...(19): siRNA sense strand
gugagaagcccaacuaaag

SEQ ID NO: 1895691 - RNA, 19 nt, Homo sapiens
  misc_RNA (1)...(19): siRNA sense strand
gccagcacccucauagaua

SEQ ID NO: 1895692 - RNA, 19 nt, Homo sapiens
  misc_RNA (1)...(19): siRNA sense strand
aaagacagacugcgaauca

SEQ ID NO: 1895693 - RNA, 19 nt, Homo sapiens
  misc_RNA (1)...(19): siRNA sense strand
caagggacaaguguuauuu

SEQ ID NO: 1895694 - RNA, 19 nt, Homo sapiens
  misc_RNA (1)...(19): siRNA sense strand
guaaagugacccucuuaga

SEQ ID NO: 1895695 - RNA, 19 nt, Homo sapiens
  misc_RNA (1)...(19): siRNA sense strand
gaagagagagaaggaaaca

SEQ ID NO: 1895696 - RNA, 19 nt, Homo sapiens
  misc_RNA (1)...(19): siRNA sense strand
aaagugacccucuuagaug

SEQ ID NO: 1895697 - RNA, 19 nt, Homo sapiens
  misc_RNA (1)...(19): siRNA sense strand
ggguauuucucgguucaua

SEQ ID NO: 1895698 - RNA, 19 nt, Homo sapiens
  misc_RNA (1)...(19): siRNA sense strand
gaagagaagguaaaagaaa

SEQ ID NO: 1895699 - RNA, 19 nt, Homo sapiens
  misc_RNA (1)...(19): siRNA sense strand
uuccauggcuauucacuuu

SEQ ID NO: 1895700 - RNA, 19 nt, Homo sapiens
  misc_RNA (1)...(19): siRNA sense strand
agagaagaguguacacgaa

SEQ ID NO: 1895701 - RNA, 19 nt, Homo sapiens
  misc_RNA (1)...(19): siRNA sense strand
gaaagaguaaucacagaag

SEQ ID NO: 1895702 - RNA, 19 nt, Homo sapiens
  misc_RNA (1)...(19): siRNA sense strand
acaugagacucugaauaua

SEQ ID NO: 1895703 - RNA, 19 nt, Homo sapiens
  misc_RNA (1)...(19): siRNA sense strand
gcugaaagccaaaguaguc

SEQ ID NO: 1895704 - RNA, 19 nt, Homo sapiens
  misc_RNA (1)...(19): siRNA sense strand
cagaagguguggacaucaa

SEQ ID NO: 1895705 - RNA, 19 nt, Homo sapiens
  misc_RNA (1)...(19): siRNA sense strand
guaaggagagagaagagaa

SEQ ID NO: 1895706 - RNA, 19 nt, Homo sapiens
  misc_RNA (1)...(19): siRNA sense strand
ggaagagccacagaaaguu

SEQ ID NO: 1895707 - RNA, 19 nt, Homo sapiens
  misc_RNA (1)...(19): siRNA sense strand
gaagaagcgggcagagguu

SEQ ID NO: 1895708 - RNA, 19 nt, Homo sapiens
  misc_RNA (1)...(19): siRNA sense strand
uaaagagacaacugagaaa

SEQ ID NO: 1895709 - RNA, 19 nt, Homo sapiens
  misc_RNA (1)...(19): siRNA sense strand
caaagauggaggagauaaa

SEQ ID NO: 1895710 - RNA, 19 nt, Homo sapiens
  misc_RNA (1)...(19): siRNA sense strand
acacaaagaaacagaguug

SEQ ID NO: 1895711 - RNA, 19 nt, Homo sapiens
  misc_RNA (1)...(19): siRNA sense strand
gaaacagugauccaggaaa

SEQ ID NO: 1895712 - RNA, 19 nt, Homo sapiens
  misc_RNA (1)...(19): siRNA sense strand
ugggaaagacgaaagagua

SEQ ID NO: 1895713 - RNA, 19 nt, Homo sapiens
  misc_RNA (1)...(19): siRNA sense strand
ugucugaagugaagaagga

SEQ ID NO: 1895714 - RNA, 19 nt, Homo sapiens
  misc_RNA (1)...(19): siRNA sense strand
ugagcgcacuucuaguaaa

SEQ ID NO: 1895715 - RNA, 19 nt, Homo sapiens
  misc_RNA (1)...(19): siRNA sense strand
gaguaccauuggauucaaa

SEQ ID NO: 1895716 - RNA, 19 nt, Homo sapiens
  misc_RNA (1)...(19): siRNA sense strand
ccaagcuguuguugaagaa

SEQ ID NO: 1895717 - RNA, 19 nt, Homo sapiens
  misc_RNA (1)...(19): siRNA sense strand
ccacacacaucaccaagac

SEQ ID NO: 1895718 - RNA, 19 nt, Homo sapiens
  misc_RNA (1)...(19): siRNA sense strand
caacaacgacaaccacaca

SEQ ID NO: 1895719 - RNA, 19 nt, Homo sapiens
  misc_RNA (1)...(19): siRNA sense strand
ugaauauaguggaggagaa

SEQ ID NO: 1895720 - RNA, 19 nt, Homo sapiens
  misc_RNA (1)...(19): siRNA sense strand
cgacguaucacaccucugu

SEQ ID NO: 1895721 - RNA, 19 nt, Homo sapiens
  misc_RNA (1)...(19): siRNA sense strand
ucugaugccucacaaagga

SEQ ID NO: 1895722 - RNA, 19 nt, Homo sapiens
  misc_RNA (1)...(19): siRNA sense strand
aaagauacccggagagaag

SEQ ID NO: 1895723 - RNA, 19 nt, Homo sapiens
  misc_RNA (1)...(19): siRNA sense strand
cgaaagaguaaucacagaa

SEQ ID NO: 1895724 - RNA, 19 nt, Homo sapiens
  misc_RNA (1)...(19): siRNA sense strand
aaacaaagaucgacacauu

SEQ ID NO: 1895725 - RNA, 19 nt, Homo sapiens
  misc_RNA (1)...(19): siRNA sense strand
ucaggaaacuguaugauga

SEQ ID NO: 1895726 - RNA, 19 nt, Homo sapiens
  misc_RNA (1)...(19): siRNA sense strand
gaagaccaguccaaauuag

SEQ ID NO: 1895727 - RNA, 19 nt, Homo sapiens
  misc_RNA (1)...(19): siRNA sense strand
augaagcgcugcaggauua

SEQ ID NO: 1895728 - RNA, 19 nt, Homo sapiens
  misc_RNA (1)...(19): siRNA sense strand
gcagagugcuuggauggaa

SEQ ID NO: 1895729 - RNA, 19 nt, Homo sapiens
  misc_RNA (1)...(19): siRNA sense strand
ccaaggccgugcagcauuu

SEQ ID NO: 1895730 - RNA, 19 nt, Homo sapiens
  misc_RNA (1)...(19): siRNA sense strand
gaccaagugugaauacaug

SEQ ID NO: 1895731 - RNA, 19 nt, Homo sapiens
  misc_RNA (1)...(19): siRNA sense strand
cgaagaccaguccaaauua

SEQ ID NO: 1895732 - RNA, 19 nt, Homo sapiens
  misc_RNA (1)...(19): siRNA sense strand
caaauuagcaggccuucuu

SEQ ID NO: 1895733 - RNA, 19 nt, Homo sapiens
  misc_RNA (1)...(19): siRNA sense strand
gcaagaugcugaugacacu

SEQ ID NO: 1895734 - RNA, 19 nt, Homo sapiens
  misc_RNA (1)...(19): siRNA sense strand
gaaguacaagcgcaggaua

SEQ ID NO: 1895735 - RNA, 19 nt, Homo sapiens
  misc_RNA (1)...(19): siRNA sense strand
ucacaaagcgcagacguaa

SEQ ID NO: 1895736 - RNA, 19 nt, Homo sapiens
  misc_RNA (1)...(19): siRNA sense strand
gaccgagaguuggugguua

SEQ ID NO: 1895737 - RNA, 19 nt, Homo sapiens
  misc_RNA (1)...(19): siRNA sense strand
gagacuguguuuagugugu

SEQ ID NO: 1895738 - RNA, 19 nt, Homo sapiens
  misc_RNA (1)...(19): siRNA sense strand
gaacagcccauaccugaac

SEQ ID NO: 1895739 - RNA, 19 nt, Homo sapiens
  misc_RNA (1)...(19): siRNA sense strand
caucaaagcccucacuaca

SEQ ID NO: 1895740 - RNA, 19 nt, Homo sapiens
  misc_RNA (1)...(19): siRNA sense strand
gugaauacaugcucaacuc

SEQ ID NO: 1895741 - RNA, 19 nt, Homo sapiens
  misc_RNA (1)...(19): siRNA sense strand
gaagcuucaggaugucuua

SEQ ID NO: 1895742 - RNA, 19 nt, Homo sapiens
  misc_RNA (1)...(19): siRNA sense strand
ucaaagcccucacuacacu

SEQ ID NO: 1895743 - RNA, 19 nt, Homo sapiens
  misc_RNA (1)...(19): siRNA sense strand
aagauugucucacauuugu

SEQ ID NO: 1895744 - RNA, 19 nt, Homo sapiens
  misc_RNA (1)...(19): siRNA sense strand
acaaagcgcagacguaaau

SEQ ID NO: 1895745 - RNA, 19 nt, Homo sapiens
  misc_RNA (1)...(19): siRNA sense strand
cagcauuucuacaacauca

SEQ ID NO: 1895746 - RNA, 19 nt, Homo sapiens
  misc_RNA (1)...(19): siRNA sense strand
acaaagaucgacacauuga

SEQ ID NO: 1895747 - RNA, 19 nt, Homo sapiens
  misc_RNA (1)...(19): siRNA sense strand
aaagaucgacacauugauu

SEQ ID NO: 1895748 - RNA, 19 nt, Homo sapiens
  misc_RNA (1)...(19): siRNA sense strand
uagcaggccuucuugaucu

SEQ ID NO: 1895749 - RNA, 19 nt, Homo sapiens
  misc_RNA (1)...(19): siRNA sense strand
ccaagagacuguguuuagu

SEQ ID NO: 1895750 - RNA, 19 nt, Homo sapiens
  misc_RNA (1)...(19): siRNA sense strand
caagauugucucacauuug

SEQ ID NO: 1895751 - RNA, 19 nt, Homo sapiens
  misc_RNA (1)...(19): siRNA sense strand
gagaguuggugguuaucau

SEQ ID NO: 1895752 - RNA, 19 nt, Homo sapiens
  misc_RNA (1)...(19): siRNA sense strand
gcaaagucccaaugcacaa

SEQ ID NO: 1895753 - RNA, 19 nt, Homo sapiens
  misc_RNA (1)...(19): siRNA sense strand
auaccggucucuuucguuu

SEQ ID NO: 1895754 - RNA, 19 nt, Homo sapiens
  misc_RNA (1)...(19): siRNA sense strand
ggaugaacuugucuaugca

SEQ ID NO: 1895755 - RNA, 19 nt, Homo sapiens
  misc_RNA (1)...(19): siRNA sense strand
cuaugcagacgauuauaua

SEQ ID NO: 1895756 - RNA, 19 nt, Homo sapiens
  misc_RNA (1)...(19): siRNA sense strand
caagagacuguguuuagug

SEQ ID NO: 1895757 - RNA, 19 nt, Homo sapiens
  misc_RNA (1)...(19): siRNA sense strand
caaacuagaaggcaaaguc

SEQ ID NO: 1895758 - RNA, 19 nt, Homo sapiens
  misc_RNA (1)...(19): siRNA sense strand
acgaagaccaguccaaauu

SEQ ID NO: 1895759 - RNA, 19 nt, Homo sapiens
  misc_RNA (1)...(19): siRNA sense strand
uucagaagcuucaggaugu

SEQ ID NO: 1895760 - RNA, 19 nt, Homo sapiens
  misc_RNA (1)...(19): siRNA sense strand
gcauuucuacaacaucaaa

SEQ ID NO: 1895761 - RNA, 19 nt, Homo sapiens
  misc_RNA (1)...(19): siRNA sense strand
ccagcaccauuguugaaga

SEQ ID NO: 1895762 - RNA, 19 nt, Homo sapiens
  misc_RNA (1)...(19): siRNA sense strand
aggaugaacuugucuaugc

SEQ ID NO: 1895763 - RNA, 19 nt, Homo sapiens
  misc_RNA (1)...(19): siRNA sense strand
gugcuuggauggaaauuuu

SEQ ID NO: 1895764 - RNA, 19 nt, Homo sapiens
  misc_RNA (1)...(19): siRNA sense strand
gauugucucacauuuguug

SEQ ID NO: 1895765 - RNA, 19 nt, Homo sapiens
  misc_RNA (1)...(19): siRNA sense strand
cagcugcccugccacgaau

SEQ ID NO: 1895766 - RNA, 19 nt, Homo sapiens
  misc_RNA (1)...(19): siRNA sense strand
gaaauacaagagcaugaag

SEQ ID NO: 1895767 - RNA, 19 nt, Homo sapiens
  misc_RNA (1)...(19): siRNA sense strand
cagagugcuuggauggaaa

SEQ ID NO: 1895768 - RNA, 19 nt, Homo sapiens
  misc_RNA (1)...(19): siRNA sense strand
guggaggucggcagaagua

SEQ ID NO: 1895769 - RNA, 19 nt, Homo sapiens
  misc_RNA (1)...(19): siRNA sense strand
ggagguagugggccuguca

SEQ ID NO: 1895770 - RNA, 19 nt, Homo sapiens
  misc_RNA (1)...(19): siRNA sense strand
gugcagcauuucuacaaca

SEQ ID NO: 1895771 - RNA, 19 nt, Homo sapiens
  misc_RNA (1)...(19): siRNA sense strand
cagacuccaugcacauaga

SEQ ID NO: 1895772 - RNA, 19 nt, Homo sapiens
  misc_RNA (1)...(19): siRNA sense strand
aagagacuguguuuagugu

SEQ ID NO: 1895773 - RNA, 19 nt, Homo sapiens
  misc_RNA (1)...(19): siRNA sense strand
ucaacucgaugcccaagag

SEQ ID NO: 1895774 - RNA, 19 nt, Homo sapiens
  misc_RNA (1)...(19): siRNA sense strand
cagcaccauuguugaagau

SEQ ID NO: 1895775 - RNA, 19 nt, Homo sapiens
  misc_RNA (1)...(19): siRNA sense strand
caucaaacuagaaggcaaa

SEQ ID NO: 1895776 - RNA, 19 nt, Homo sapiens
  misc_RNA (1)...(19): siRNA sense strand
acgaaugaaugugaaauca

SEQ ID NO: 1895777 - RNA, 19 nt, Homo sapiens
  misc_RNA (1)...(19): siRNA sense strand
caaagucccaaugcacaaa

SEQ ID NO: 1895778 - RNA, 19 nt, Homo sapiens
  misc_RNA (1)...(19): siRNA sense strand
cccaagagacuguguuuag

SEQ ID NO: 1895779 - RNA, 19 nt, Homo sapiens
  misc_RNA (1)...(19): siRNA sense strand
ggauagaugcggagaacag

SEQ ID NO: 1895780 - RNA, 19 nt, Homo sapiens
  misc_RNA (1)...(19): siRNA sense strand
gaggucggcagaaguacaa

SEQ ID NO: 1895781 - RNA, 19 nt, Homo sapiens
  misc_RNA (1)...(19): siRNA sense strand
caggauagaugcggagaac

SEQ ID NO: 1895782 - RNA, 19 nt, Homo sapiens
  misc_RNA (1)...(19): siRNA sense strand
gaaggcaaagucccaaugc

SEQ ID NO: 1895783 - RNA, 19 nt, Homo sapiens
  misc_RNA (1)...(19): siRNA sense strand
cuacaacaucaaacuagaa

SEQ ID NO: 1895784 - RNA, 19 nt, Homo sapiens
  misc_RNA (1)...(19): siRNA sense strand
uccugcagcugguaaagaa

SEQ ID NO: 1895785 - RNA, 19 nt, Homo sapiens
  misc_RNA (1)...(19): siRNA sense strand
agugggagcuacaguucaa

SEQ ID NO: 1895786 - RNA, 19 nt, Homo sapiens
  misc_RNA (1)...(19): siRNA sense strand
uacaagcgcaggauagaug

SEQ ID NO: 1895787 - RNA, 19 nt, Homo sapiens
  misc_RNA (1)...(19): siRNA sense strand
gacgaagaccaguccaaau

SEQ ID NO: 1895788 - RNA, 19 nt, Homo sapiens
  misc_RNA (1)...(19): siRNA sense strand
caucagaacggacuugacu

SEQ ID NO: 1895789 - RNA, 19 nt, Homo sapiens
  misc_RNA (1)...(19): siRNA sense strand
gacaucaaagcccucacua

SEQ ID NO: 1895790 - RNA, 19 nt, Homo sapiens
  misc_RNA (1)...(19): siRNA sense strand
ggaggccaaggucugcuaa

SEQ ID NO: 1895791 - RNA, 19 nt, Homo sapiens
  misc_RNA (1)...(19): siRNA sense strand
agaaauacaagagcaugaa

SEQ ID NO: 1895792 - RNA, 19 nt, Homo sapiens
  misc_RNA (1)...(19): siRNA sense strand
aauacaugcucaacucgau

SEQ ID NO: 1895793 - RNA, 19 nt, Homo sapiens
  misc_RNA (1)...(19): siRNA sense strand
ucgucgagcuggcaagaug

SEQ ID NO: 1895794 - RNA, 19 nt, Homo sapiens
  misc_RNA (1)...(19): siRNA sense strand
ugcagcugguaaagaaaua

SEQ ID NO: 1895795 - RNA, 19 nt, Homo sapiens
  misc_RNA (1)...(19): siRNA sense strand
gcccaagagacuguguuua

SEQ ID NO: 1895796 - RNA, 19 nt, Homo sapiens
  misc_RNA (1)...(19): siRNA sense strand
ggccuucuugaucuaaaua

SEQ ID NO: 1895797 - RNA, 19 nt, Homo sapiens
  misc_RNA (1)...(19): siRNA sense strand
gaguuggugguuaucauug

SEQ ID NO: 1895798 - RNA, 19 nt, Homo sapiens
  misc_RNA (1)...(19): siRNA sense strand
uggcugaaccggagaagau

SEQ ID NO: 1895799 - RNA, 19 nt, Homo sapiens
  misc_RNA (1)...(19): siRNA sense strand
gucaggaaacuguaugaug

SEQ ID NO: 1895800 - RNA, 19 nt, Homo sapiens
  misc_RNA (1)...(19): siRNA sense strand
caugaaguguuuaaaagug

SEQ ID NO: 1895801 - RNA, 19 nt, Homo sapiens
  misc_RNA (1)...(19): siRNA sense strand
gcugcaggauuaugaagcu

SEQ ID NO: 1895802 - RNA, 19 nt, Homo sapiens
  misc_RNA (1)...(19): siRNA sense strand
gcaggccuucuugaucuaa

SEQ ID NO: 1895803 - RNA, 19 nt, Homo sapiens
  misc_RNA (1)...(19): siRNA sense strand
accggucucuuucguuuga

SEQ ID NO: 1895804 - RNA, 19 nt, Homo sapiens
  misc_RNA (1)...(19): siRNA sense strand
guauaccggucucuuucgu

SEQ ID NO: 1895805 - RNA, 19 nt, Homo sapiens
  misc_RNA (1)...(19): siRNA sense strand
gaugagccuucugcagagu

SEQ ID NO: 1895806 - RNA, 19 nt, Homo sapiens
  misc_RNA (1)...(19): siRNA sense strand
aaagugggcaugcugaaag

SEQ ID NO: 1895807 - RNA, 19 nt, Homo sapiens
  misc_RNA (1)...(19): siRNA sense strand
gaaccggagaagaucuaug

SEQ ID NO: 1895808 - RNA, 19 nt, Homo sapiens
  misc_RNA (1)...(19): siRNA sense strand
caugaagcgcugcaggauu

SEQ ID NO: 1895809 - RNA, 19 nt, Homo sapiens
  misc_RNA (1)...(19): siRNA sense strand
ccagugggagcuacaguuc

SEQ ID NO: 1895810 - RNA, 19 nt, Homo sapiens
  misc_RNA (1)...(19): siRNA sense strand
gaggaugaacuugucuaug

SEQ ID NO: 1895811 - RNA, 19 nt, Homo sapiens
  misc_RNA (1)...(19): siRNA sense strand
cacauugauuccagcuguu

SEQ ID NO: 1895812 - RNA, 19 nt, Homo sapiens
  misc_RNA (1)...(19): siRNA sense strand
aagugggcaugcugaaaga

SEQ ID NO: 1895813 - RNA, 19 nt, Homo sapiens
  misc_RNA (1)...(19): siRNA sense strand
gcuccagcaccauuguuga

SEQ ID NO: 1895814 - RNA, 19 nt, Homo sapiens
  misc_RNA (1)...(19): siRNA sense strand
gcuggcaagaugcugauga

SEQ ID NO: 1895815 - RNA, 19 nt, Homo sapiens
  misc_RNA (1)...(19): siRNA sense strand
aagaauuugucacccucaa

SEQ ID NO: 1895816 - RNA, 19 nt, Homo sapiens
  misc_RNA (1)...(19): siRNA sense strand
guuugaggaugaacuuguc

SEQ ID NO: 1895817 - RNA, 19 nt, Homo sapiens
  misc_RNA (1)...(19): siRNA sense strand
ggaggucggcagaaguaca

SEQ ID NO: 1895818 - RNA, 19 nt, Homo sapiens
  misc_RNA (1)...(19): siRNA sense strand
ggugcgucuugacagagua

SEQ ID NO: 1895819 - RNA, 19 nt, Homo sapiens
  misc_RNA (1)...(19): siRNA sense strand
guacaagcgcaggauagau

SEQ ID NO: 1895820 - RNA, 19 nt, Homo sapiens
  misc_RNA (1)...(19): siRNA sense strand
ucuaugcagacgauuauau

SEQ ID NO: 1895821 - RNA, 19 nt, Homo sapiens
  misc_RNA (1)...(19): siRNA sense strand
guuggugguuaucauugga

SEQ ID NO: 1895822 - RNA, 19 nt, Homo sapiens
  misc_RNA (1)...(19): siRNA sense strand
accgagaguuggugguuau

SEQ ID NO: 1895823 - RNA, 19 nt, Homo sapiens
  misc_RNA (1)...(19): siRNA sense strand
gcaggauagaugcggagaa

SEQ ID NO: 1895824 - RNA, 19 nt, Homo sapiens
  misc_RNA (1)...(19): siRNA sense strand
gcggaagucuuacucaaua

SEQ ID NO: 1895825 - RNA, 19 nt, Homo sapiens
  misc_RNA (1)...(19): siRNA sense strand
ccagugaccugaucuuuga

SEQ ID NO: 1895826 - RNA, 19 nt, Homo sapiens
  misc_RNA (1)...(19): siRNA sense strand
gcaacgggauggaugauga

SEQ ID NO: 1895827 - RNA, 19 nt, Homo sapiens
  misc_RNA (1)...(19): siRNA sense strand
cgaaguaccucaccuguca

SEQ ID NO: 1895828 - RNA, 19 nt, Homo sapiens
  misc_RNA (1)...(19): siRNA sense strand
caagaagacugggaaauca

SEQ ID NO: 1895829 - RNA, 19 nt, Homo sapiens
  misc_RNA (1)...(19): siRNA sense strand
gacgggaccuugugcauga

SEQ ID NO: 1895830 - RNA, 19 nt, Homo sapiens
  misc_RNA (1)...(19): siRNA sense strand
ugagggagcuccugagaga

SEQ ID NO: 1895831 - RNA, 19 nt, Homo sapiens
  misc_RNA (1)...(19): siRNA sense strand
gaaaucaaaggauggcaaa

SEQ ID NO: 1895832 - RNA, 19 nt, Homo sapiens
  misc_RNA (1)...(19): siRNA sense strand
uuaaggagaugcccaagga

SEQ ID NO: 1895833 - RNA, 19 nt, Homo sapiens
  misc_RNA (1)...(19): siRNA sense strand
cuacuucccucauuaagau

SEQ ID NO: 1895834 - RNA, 19 nt, Homo sapiens
  misc_RNA (1)...(19): siRNA sense strand
ggaaaucaaagaagagaau

SEQ ID NO: 1895835 - RNA, 19 nt, Homo sapiens
  misc_RNA (1)...(19): siRNA sense strand
aaacaagccugacaugaac

SEQ ID NO: 1895836 - RNA, 19 nt, Homo sapiens
  misc_RNA (1)...(19): siRNA sense strand
gcaaaggcagcaccaucua

SEQ ID NO: 1895837 - RNA, 19 nt, Homo sapiens
  misc_RNA (1)...(19): siRNA sense strand
ccacggugcugaccaaugg

SEQ ID NO: 1895838 - RNA, 19 nt, Homo sapiens
  misc_RNA (1)...(19): siRNA sense strand
agaaacaccugucccaagu

SEQ ID NO: 1895839 - RNA, 19 nt, Homo sapiens
  misc_RNA (1)...(19): siRNA sense strand
gagaggaaagugccaagaa

SEQ ID NO: 1895840 - RNA, 19 nt, Homo sapiens
  misc_RNA (1)...(19): siRNA sense strand
acaauggcaucauaacaga

SEQ ID NO: 1895841 - RNA, 19 nt, Homo sapiens
  misc_RNA (1)...(19): siRNA sense strand
gaaacaccugucccaagua

SEQ ID NO: 1895842 - RNA, 19 nt, Homo sapiens
  misc_RNA (1)...(19): siRNA sense strand
gaacgccaguuuccaagac

SEQ ID NO: 1895843 - RNA, 19 nt, Homo sapiens
  misc_RNA (1)...(19): siRNA sense strand
caacccuacuucccucauu

SEQ ID NO: 1895844 - RNA, 19 nt, Homo sapiens
  misc_RNA (1)...(19): siRNA sense strand
gacaugaacuaugagacaa

SEQ ID NO: 1895845 - RNA, 19 nt, Homo sapiens
  misc_RNA (1)...(19): siRNA sense strand
guaccucaccugucacuga

SEQ ID NO: 1895846 - RNA, 19 nt, Homo sapiens
  misc_RNA (1)...(19): siRNA sense strand
gaaaggcaucuucaaacug

SEQ ID NO: 1895847 - RNA, 19 nt, Homo sapiens
  misc_RNA (1)...(19): siRNA sense strand
gagaaaggcaucuucaaac

SEQ ID NO: 1895848 - RNA, 19 nt, Homo sapiens
  misc_RNA (1)...(19): siRNA sense strand
agagaaaggcaucuucaaa

SEQ ID NO: 1895849 - RNA, 19 nt, Homo sapiens
  misc_RNA (1)...(19): siRNA sense strand
gcugacagaugacaaugag

SEQ ID NO: 1895850 - RNA, 19 nt, Homo sapiens
  misc_RNA (1)...(19): siRNA sense strand
gaggaaagugccaagaaga

SEQ ID NO: 1895851 - RNA, 19 nt, Homo sapiens
  misc_RNA (1)...(19): siRNA sense strand
gucaaccgcggaagucuua

SEQ ID NO: 1895852 - RNA, 19 nt, Homo sapiens
  misc_RNA (1)...(19): siRNA sense strand
cuaagauacuacuaccaaa

SEQ ID NO: 1895853 - RNA, 19 nt, Homo sapiens
  misc_RNA (1)...(19): siRNA sense strand
agaaaggcaucuucaaacu

SEQ ID NO: 1895854 - RNA, 19 nt, Homo sapiens
  misc_RNA (1)...(19): siRNA sense strand
agccugacaugaacuauga

SEQ ID NO: 1895855 - RNA, 19 nt, Homo sapiens
  misc_RNA (1)...(19): siRNA sense strand
ucacuuugcaggccucuuu

SEQ ID NO: 1895856 - RNA, 19 nt, Homo sapiens
  misc_RNA (1)...(19): siRNA sense strand
ccaagaagacugggaaauc

SEQ ID NO: 1895857 - RNA, 19 nt, Homo sapiens
  misc_RNA (1)...(19): siRNA sense strand
aacccuacuucccucauua

SEQ ID NO: 1895858 - RNA, 19 nt, Homo sapiens
  misc_RNA (1)...(19): siRNA sense strand
ccagcggccucuacuuuca

SEQ ID NO: 1895859 - RNA, 19 nt, Homo sapiens
  misc_RNA (1)...(19): siRNA sense strand
gagagaaaggcaucuucaa

SEQ ID NO: 1895860 - RNA, 19 nt, Homo sapiens
  misc_RNA (1)...(19): siRNA sense strand
ugucauugcugccuucauc

SEQ ID NO: 1895861 - RNA, 19 nt, Homo sapiens
  misc_RNA (1)...(19): siRNA sense strand
ggaagucuuacucaauaug

SEQ ID NO: 1895862 - RNA, 19 nt, Homo sapiens
  misc_RNA (1)...(19): siRNA sense strand
aaacaccugucccaaguac

SEQ ID NO: 1895863 - RNA, 19 nt, Homo sapiens
  misc_RNA (1)...(19): siRNA sense strand
cgggauggaugaugauauc

SEQ ID NO: 1895864 - RNA, 19 nt, Homo sapiens
  misc_RNA (1)...(19): siRNA sense strand
aagcagaucuucaguaccu

SEQ ID NO: 1895865 - RNA, 19 nt, Homo sapiens
  misc_RNA (1)...(19): siRNA sense strand
uaacagacgggaccuugug

SEQ ID NO: 1895866 - RNA, 19 nt, Homo sapiens
  misc_RNA (1)...(19): siRNA sense strand
caugaacuaugagacaaug

SEQ ID NO: 1895867 - RNA, 19 nt, Homo sapiens
  misc_RNA (1)...(19): siRNA sense strand
caaaggcagcaccaucuau

SEQ ID NO: 1895868 - RNA, 19 nt, Homo sapiens
  misc_RNA (1)...(19): siRNA sense strand
caucuucagugcccagcaa

SEQ ID NO: 1895869 - RNA, 19 nt, Homo sapiens
  misc_RNA (1)...(19): siRNA sense strand
guacuacugcucccacuca

SEQ ID NO: 1895870 - RNA, 19 nt, Homo sapiens
  misc_RNA (1)...(19): siRNA sense strand
cugauuuacugcaucugua

SEQ ID NO: 1895871 - RNA, 19 nt, Homo sapiens
  misc_RNA (1)...(19): siRNA sense strand
ugaccacggugcugaccaa

SEQ ID NO: 1895872 - RNA, 19 nt, Homo sapiens
  misc_RNA (1)...(19): siRNA sense strand
ugacaugaacuaugagaca

SEQ ID NO: 1895873 - RNA, 19 nt, Homo sapiens
  misc_RNA (1)...(19): siRNA sense strand
ccuccuggcucuucugcaa

SEQ ID NO: 1895874 - RNA, 19 nt, Homo sapiens
  misc_RNA (1)...(19): siRNA sense strand
aagaagagaauccggaaga

SEQ ID NO: 1895875 - RNA, 19 nt, Homo sapiens
  misc_RNA (1)...(19): siRNA sense strand
agaggaaagugccaagaag

SEQ ID NO: 1895876 - RNA, 19 nt, Homo sapiens
  misc_RNA (1)...(19): siRNA sense strand
ccuccuauguucaggguau

SEQ ID NO: 1895877 - RNA, 19 nt, Homo sapiens
  misc_RNA (1)...(19): siRNA sense strand
gaggcauacuggccaaagu

SEQ ID NO: 1895878 - RNA, 19 nt, Homo sapiens
  misc_RNA (1)...(19): siRNA sense strand
ccaucuaucugugggaguu

SEQ ID NO: 1895879 - RNA, 19 nt, Homo sapiens
  misc_RNA (1)...(19): siRNA sense strand
ccauuaggaagaaaucaaa

SEQ ID NO: 1895880 - RNA, 19 nt, Homo sapiens
  misc_RNA (1)...(19): siRNA sense strand
guucacaauggcaucauaa

SEQ ID NO: 1895881 - RNA, 19 nt, Homo sapiens
  misc_RNA (1)...(19): siRNA sense strand
caucugcgagucuggaauu

SEQ ID NO: 1895882 - RNA, 19 nt, Homo sapiens
  misc_RNA (1)...(19): siRNA sense strand
caagcaacgggauggauga

SEQ ID NO: 1895883 - RNA, 19 nt, Homo sapiens
  misc_RNA (1)...(19): siRNA sense strand
acugggaaaucaaagaaga

SEQ ID NO: 1895884 - RNA, 19 nt, Homo sapiens
  misc_RNA (1)...(19): siRNA sense strand
gaagucuuacucaauaugg

SEQ ID NO: 1895885 - RNA, 19 nt, Homo sapiens
  misc_RNA (1)...(19): siRNA sense strand
ggagccccaugacauauaa

SEQ ID NO: 1895886 - RNA, 19 nt, Homo sapiens
  misc_RNA (1)...(19): siRNA sense strand
ccgcggaagucuuacucaa

SEQ ID NO: 1895887 - RNA, 19 nt, Homo sapiens
  misc_RNA (1)...(19): siRNA sense strand
ggagccuucugacaagauc

SEQ ID NO: 1895888 - RNA, 19 nt, Homo sapiens
  misc_RNA (1)...(19): siRNA sense strand
cgagagaaaggcaucuuca

SEQ ID NO: 1895889 - RNA, 19 nt, Homo sapiens
  misc_RNA (1)...(19): siRNA sense strand
cggaagucuuacucaauau

SEQ ID NO: 1895890 - RNA, 19 nt, Homo sapiens
  misc_RNA (1)...(19): siRNA sense strand
aagauacuacuaccaaaga

SEQ ID NO: 1895891 - RNA, 19 nt, Homo sapiens
  misc_RNA (1)...(19): siRNA sense strand
cguucacaauggcaucaua

SEQ ID NO: 1895892 - RNA, 19 nt, Homo sapiens
  misc_RNA (1)...(19): siRNA sense strand
gaaaucaaagaagagaauc

SEQ ID NO: 1895893 - RNA, 19 nt, Homo sapiens
  misc_RNA (1)...(19): siRNA sense strand
agaagacugggaaaucaaa

SEQ ID NO: 1895894 - RNA, 19 nt, Homo sapiens
  misc_RNA (1)...(19): siRNA sense strand
ggcaagggcagcucuucuu

SEQ ID NO: 1895895 - RNA, 19 nt, Homo sapiens
  misc_RNA (1)...(19): siRNA sense strand
uaagauacuacuaccaaag

SEQ ID NO: 1895896 - RNA, 19 nt, Homo sapiens
  misc_RNA (1)...(19): siRNA sense strand
ucacaauggcaucauaaca

SEQ ID NO: 1895897 - RNA, 19 nt, Homo sapiens
  misc_RNA (1)...(19): siRNA sense strand
aaaacaagccugacaugaa

SEQ ID NO: 1895898 - RNA, 19 nt, Homo sapiens
  misc_RNA (1)...(19): siRNA sense strand
cauacuggccaaaguggaa

SEQ ID NO: 1895899 - RNA, 19 nt, Homo sapiens
  misc_RNA (1)...(19): siRNA sense strand
agacugggaaaucaaagaa

SEQ ID NO: 1895900 - RNA, 19 nt, Homo sapiens
  misc_RNA (1)...(19): siRNA sense strand
ggaagaccccucuguguuc

SEQ ID NO: 1895901 - RNA, 19 nt, Homo sapiens
  misc_RNA (1)...(19): siRNA sense strand
acuaagauacuacuaccaa

SEQ ID NO: 1895902 - RNA, 19 nt, Homo sapiens
  misc_RNA (1)...(19): siRNA sense strand
ggaaagugccaagaagacu

SEQ ID NO: 1895903 - RNA, 19 nt, Homo sapiens
  misc_RNA (1)...(19): siRNA sense strand
ucugggagccuucugacaa

SEQ ID NO: 1895904 - RNA, 19 nt, Homo sapiens
  misc_RNA (1)...(19): siRNA sense strand
cccaguggcugaacuugag

SEQ ID NO: 1895905 - RNA, 19 nt, Homo sapiens
  misc_RNA (1)...(19): siRNA sense strand
gcccagugaccugaucuuu

SEQ ID NO: 1895906 - RNA, 19 nt, Homo sapiens
  misc_RNA (1)...(19): siRNA sense strand
uggacgacguucacaaugg

SEQ ID NO: 1895907 - RNA, 19 nt, Homo sapiens
  misc_RNA (1)...(19): siRNA sense strand
ggacccagcgagagaaagg

SEQ ID NO: 1895908 - RNA, 19 nt, Homo sapiens
  misc_RNA (1)...(19): siRNA sense strand
ggcaaaggcagcaccaucu

SEQ ID NO: 1895909 - RNA, 19 nt, Homo sapiens
  misc_RNA (1)...(19): siRNA sense strand
cagcagagggccaggucaa

SEQ ID NO: 1895910 - RNA, 19 nt, Homo sapiens
  misc_RNA (1)...(19): siRNA sense strand
cagcaacauccaccuagga

SEQ ID NO: 1895911 - RNA, 19 nt, Homo sapiens
  misc_RNA (1)...(19): siRNA sense strand
gaccaagggcaaccgaagu

SEQ ID NO: 1895912 - RNA, 19 nt, Homo sapiens
  misc_RNA (1)...(19): siRNA sense strand
gcaugacccaggaucagau

SEQ ID NO: 1895913 - RNA, 19 nt, Homo sapiens
  misc_RNA (1)...(19): siRNA sense strand
gaagacugggaaaucaaag

SEQ ID NO: 1895914 - RNA, 19 nt, Homo sapiens
  misc_RNA (1)...(19): siRNA sense strand
gugaccugaucuuugaguu

SEQ ID NO: 1895915 - RNA, 19 nt, Homo sapiens
  misc_RNA (1)...(19): siRNA sense strand
gcgagagaaaggcaucuuc

SEQ ID NO: 1895916 - RNA, 19 nt, Homo sapiens
  misc_RNA (1)...(19): siRNA sense strand
cacaauggcaucauaacag

SEQ ID NO: 1895917 - RNA, 19 nt, Homo sapiens
  misc_RNA (1)...(19): siRNA sense strand
cuucaguaccuccgaaaug

SEQ ID NO: 1895918 - RNA, 19 nt, Homo sapiens
  misc_RNA (1)...(19): siRNA sense strand
caucuucagccacuuccaa

SEQ ID NO: 1895919 - RNA, 19 nt, Homo sapiens
  misc_RNA (1)...(19): siRNA sense strand
gggagcuccugagagauca

SEQ ID NO: 1895920 - RNA, 19 nt, Homo sapiens
  misc_RNA (1)...(19): siRNA sense strand
cuacuaccaaagaggcaua

SEQ ID NO: 1895921 - RNA, 19 nt, Homo sapiens
  misc_RNA (1)...(19): siRNA sense strand
aaaggcagcaccaucuauc

SEQ ID NO: 1895922 - RNA, 19 nt, Homo sapiens
  misc_RNA (1)...(19): siRNA sense strand
uuaggaagaaaucaaagga

SEQ ID NO: 1895923 - RNA, 19 nt, Homo sapiens
  misc_RNA (1)...(19): siRNA sense strand
gaccccagcauccccauua

SEQ ID NO: 1895924 - RNA, 19 nt, Homo sapiens
  misc_RNA (1)...(19): siRNA sense strand
ucacagaacugauugguua

SEQ ID NO: 1895925 - RNA, 19 nt, Homo sapiens
  misc_RNA (1)...(19): siRNA sense strand
gcaaagacauguccacaga

SEQ ID NO: 1895926 - RNA, 19 nt, Homo sapiens
  misc_RNA (1)...(19): siRNA sense strand
gcaaauguacccaaugaua

SEQ ID NO: 1895927 - RNA, 19 nt, Homo sapiens
  misc_RNA (1)...(19): siRNA sense strand
gagcgggacuucuucauga

SEQ ID NO: 1895928 - RNA, 19 nt, Homo sapiens
  misc_RNA (1)...(19): siRNA sense strand
agacggagguguucuauga

SEQ ID NO: 1895929 - RNA, 19 nt, Homo sapiens
  misc_RNA (1)...(19): siRNA sense strand
gcgcaaauguacccaauga

SEQ ID NO: 1895930 - RNA, 19 nt, Homo sapiens
  misc_RNA (1)...(19): siRNA sense strand
ggacaaggccuccaucaug

SEQ ID NO: 1895931 - RNA, 19 nt, Homo sapiens
  misc_RNA (1)...(19): siRNA sense strand
ugagugagauugagaagaa

SEQ ID NO: 1895932 - RNA, 19 nt, Homo sapiens
  misc_RNA (1)...(19): siRNA sense strand
ggugggagcugcccuuuga

SEQ ID NO: 1895933 - RNA, 19 nt, Homo sapiens
  misc_RNA (1)...(19): siRNA sense strand
ucaaugagcuggacuugga

SEQ ID NO: 1895934 - RNA, 19 nt, Homo sapiens
  misc_RNA (1)...(19): siRNA sense strand
caacugcccuccucacaau

SEQ ID NO: 1895935 - RNA, 19 nt, Homo sapiens
  misc_RNA (1)...(19): siRNA sense strand
caaauguacccaaugauaa

SEQ ID NO: 1895936 - RNA, 19 nt, Homo sapiens
  misc_RNA (1)...(19): siRNA sense strand
ucuaugagcuggcccauga

SEQ ID NO: 1895937 - RNA, 19 nt, Homo sapiens
  misc_RNA (1)...(19): siRNA sense strand
gagcuaacaggacauagua

SEQ ID NO: 1895938 - RNA, 19 nt, Homo sapiens
  misc_RNA (1)...(19): siRNA sense strand
aagaguaacuuccuauuca

SEQ ID NO: 1895939 - RNA, 19 nt, Homo sapiens
  misc_RNA (1)...(19): siRNA sense strand
gauaacgaccugaagauug

SEQ ID NO: 1895940 - RNA, 19 nt, Homo sapiens
  misc_RNA (1)...(19): siRNA sense strand
gcaaggagacggagguguu

SEQ ID NO: 1895941 - RNA, 19 nt, Homo sapiens
  misc_RNA (1)...(19): siRNA sense strand
ggcagcaccucacauuuga

SEQ ID NO: 1895942 - RNA, 19 nt, Homo sapiens
  misc_RNA (1)...(19): siRNA sense strand
ucaacuacguccugaguga

SEQ ID NO: 1895943 - RNA, 19 nt, Homo sapiens
  misc_RNA (1)...(19): siRNA sense strand
auaacgaccugaagauuga

SEQ ID NO: 1895944 - RNA, 19 nt, Homo sapiens
  misc_RNA (1)...(19): siRNA sense strand
gaacugaccagauaugacu

SEQ ID NO: 1895945 - RNA, 19 nt, Homo sapiens
  misc_RNA (1)...(19): siRNA sense strand
gcaguacccagacggauuu

SEQ ID NO: 1895946 - RNA, 19 nt, Homo sapiens
  misc_RNA (1)...(19): siRNA sense strand
ugaaagccuuggaggguuu

SEQ ID NO: 1895947 - RNA, 19 nt, Homo sapiens
  misc_RNA (1)...(19): siRNA sense strand
gacccaagauggcgacaug

SEQ ID NO: 1895948 - RNA, 19 nt, Homo sapiens
  misc_RNA (1)...(19): siRNA sense strand
gccaucaucucucuggauu

SEQ ID NO: 1895949 - RNA, 19 nt, Homo sapiens
  misc_RNA (1)...(19): siRNA sense strand
cauaguaucuuugacuuca

SEQ ID NO: 1895950 - RNA, 19 nt, Homo sapiens
  misc_RNA (1)...(19): siRNA sense strand
gacauaguaucuuugacuu

SEQ ID NO: 1895951 - RNA, 19 nt, Homo sapiens
  misc_RNA (1)...(19): siRNA sense strand
aaugauaaguucacccaaa

SEQ ID NO: 1895952 - RNA, 19 nt, Homo sapiens
  misc_RNA (1)...(19): siRNA sense strand
caucaucucucuggauuuc

SEQ ID NO: 1895953 - RNA, 19 nt, Homo sapiens
  misc_RNA (1)...(19): siRNA sense strand
caccaagggucagguagua

SEQ ID NO: 1895954 - RNA, 19 nt, Homo sapiens
  misc_RNA (1)...(19): siRNA sense strand
ccacagagcgggacuucuu

SEQ ID NO: 1895955 - RNA, 19 nt, Homo sapiens
  misc_RNA (1)...(19): siRNA sense strand
ccaauagcccugaagacua

SEQ ID NO: 1895956 - RNA, 19 nt, Homo sapiens
  misc_RNA (1)...(19): siRNA sense strand
ggaaacggaugaagaaccu

SEQ ID NO: 1895957 - RNA, 19 nt, Homo sapiens
  misc_RNA (1)...(19): siRNA sense strand
gagcgcaaauguacccaau

SEQ ID NO: 1895958 - RNA, 19 nt, Homo sapiens
  misc_RNA (1)...(19): siRNA sense strand
caucaugugugaaccaauc

SEQ ID NO: 1895959 - RNA, 19 nt, Homo sapiens
  misc_RNA (1)...(19): siRNA sense strand
gguaguaaguggccaguac

SEQ ID NO: 1895960 - RNA, 19 nt, Homo sapiens
  misc_RNA (1)...(19): siRNA sense strand
ggacauaguaucuuugacu

SEQ ID NO: 1895961 - RNA, 19 nt, Homo sapiens
  misc_RNA (1)...(19): siRNA sense strand
aagcuccucuccucaguuu

SEQ ID NO: 1895962 - RNA, 19 nt, Homo sapiens
  misc_RNA (1)...(19): siRNA sense strand
caucaugugugucaacuac

SEQ ID NO: 1895963 - RNA, 19 nt, Homo sapiens
  misc_RNA (1)...(19): siRNA sense strand
ugaagacuauuacacaucu

SEQ ID NO: 1895964 - RNA, 19 nt, Homo sapiens
  misc_RNA (1)...(19): siRNA sense strand
ugcccgaacugaccagaua

SEQ ID NO: 1895965 - RNA, 19 nt, Homo sapiens
  misc_RNA (1)...(19): siRNA sense strand
ccacugagcgcaaauguac

SEQ ID NO: 1895966 - RNA, 19 nt, Homo sapiens
  misc_RNA (1)...(19): siRNA sense strand
agcgacagcuggaguauga

SEQ ID NO: 1895967 - RNA, 19 nt, Homo sapiens
  misc_RNA (1)...(19): siRNA sense strand
ccagauccaccauuacauu

SEQ ID NO: 1895968 - RNA, 19 nt, Homo sapiens
  misc_RNA (1)...(19): siRNA sense strand
ggauaacgaccugaagauu

SEQ ID NO: 1895969 - RNA, 19 nt, Homo sapiens
  misc_RNA (1)...(19): siRNA sense strand
aacaggacauaguaucuuu

SEQ ID NO: 1895970 - RNA, 19 nt, Homo sapiens
  misc_RNA (1)...(19): siRNA sense strand
agauugaagugauugagaa

SEQ ID NO: 1895971 - RNA, 19 nt, Homo sapiens
  misc_RNA (1)...(19): siRNA sense strand
gaagaaugacgugguguuc

SEQ ID NO: 1895972 - RNA, 19 nt, Homo sapiens
  misc_RNA (1)...(19): siRNA sense strand
ccgcucagccuaugaauuc

SEQ ID NO: 1895973 - RNA, 19 nt, Homo sapiens
  misc_RNA (1)...(19): siRNA sense strand
acacaucuuuggauaacga

SEQ ID NO: 1895974 - RNA, 19 nt, Homo sapiens
  misc_RNA (1)...(19): siRNA sense strand
ugaacagcaucuuugauag

SEQ ID NO: 1895975 - RNA, 19 nt, Homo sapiens
  misc_RNA (1)...(19): siRNA sense strand
gcacgggccaggugaaagu

SEQ ID NO: 1895976 - RNA, 19 nt, Homo sapiens
  misc_RNA (1)...(19): siRNA sense strand
gccaaggaccaaugcagua

SEQ ID NO: 1895977 - RNA, 19 nt, Homo sapiens
  misc_RNA (1)...(19): siRNA sense strand
ccugaagauugaagugauu

SEQ ID NO: 1895978 - RNA, 19 nt, Homo sapiens
  misc_RNA (1)...(19): siRNA sense strand
gacagaaucacagaacuga

SEQ ID NO: 1895979 - RNA, 19 nt, Homo sapiens
  misc_RNA (1)...(19): siRNA sense strand
augaacagcaucuuugaua

SEQ ID NO: 1895980 - RNA, 19 nt, Homo sapiens
  misc_RNA (1)...(19): siRNA sense strand
gggaucagcgcacagaguu

SEQ ID NO: 1895981 - RNA, 19 nt, Homo sapiens
  misc_RNA (1)...(19): siRNA sense strand
gaccaagagucaccagaac

SEQ ID NO: 1895982 - RNA, 19 nt, Homo sapiens
  misc_RNA (1)...(19): siRNA sense strand
gcuggaguaugaagagcaa

SEQ ID NO: 1895983 - RNA, 19 nt, Homo sapiens
  misc_RNA (1)...(19): siRNA sense strand
guaacuuccuauucaccaa

SEQ ID NO: 1895984 - RNA, 19 nt, Homo sapiens
  misc_RNA (1)...(19): siRNA sense strand
gaaaacaucagcaaguuca

SEQ ID NO: 1895985 - RNA, 19 nt, Homo sapiens
  misc_RNA (1)...(19): siRNA sense strand
ccagacggauuucaaugag

SEQ ID NO: 1895986 - RNA, 19 nt, Homo sapiens
  misc_RNA (1)...(19): siRNA sense strand
gaacagcaucuuugauagc

SEQ ID NO: 1895987 - RNA, 19 nt, Homo sapiens
  misc_RNA (1)...(19): siRNA sense strand
ccaagagucaccagaacuu

SEQ ID NO: 1895988 - RNA, 19 nt, Homo sapiens
  misc_RNA (1)...(19): siRNA sense strand
gugaaagucuacaacaacu

SEQ ID NO: 1895989 - RNA, 19 nt, Homo sapiens
  misc_RNA (1)...(19): siRNA sense strand
gcccauguccuccaucuuc

SEQ ID NO: 1895990 - RNA, 19 nt, Homo sapiens
  misc_RNA (1)...(19): siRNA sense strand
cagauccaccauuacauuu

SEQ ID NO: 1895991 - RNA, 19 nt, Homo sapiens
  misc_RNA (1)...(19): siRNA sense strand
gcgcuagacuccgagaaca

SEQ ID NO: 1895992 - RNA, 19 nt, Homo sapiens
  misc_RNA (1)...(19): siRNA sense strand
gccaugaacagcaucuuug

SEQ ID NO: 1895993 - RNA, 19 nt, Homo sapiens
  misc_RNA (1)...(19): siRNA sense strand
ggagcuaacaggacauagu

SEQ ID NO: 1895994 - RNA, 19 nt, Homo sapiens
  misc_RNA (1)...(19): siRNA sense strand
cagcugacaaggagaagaa

SEQ ID NO: 1895995 - RNA, 19 nt, Homo sapiens
  misc_RNA (1)...(19): siRNA sense strand
ggccaugaacagcaucuuu

SEQ ID NO: 1895996 - RNA, 19 nt, Homo sapiens
  misc_RNA (1)...(19): siRNA sense strand
ccgagaacaugaccaagag

SEQ ID NO: 1895997 - RNA, 19 nt, Homo sapiens
  misc_RNA (1)...(19): siRNA sense strand
uaacaggacauaguaucuu

SEQ ID NO: 1895998 - RNA, 19 nt, Homo sapiens
  misc_RNA (1)...(19): siRNA sense strand
uuacacaucuuuggauaac

SEQ ID NO: 1895999 - RNA, 19 nt, Homo sapiens
  misc_RNA (1)...(19): siRNA sense strand
uggcagcaccucacauuug

SEQ ID NO: 1896000 - RNA, 19 nt, Homo sapiens
  misc_RNA (1)...(19): siRNA sense strand
caaggucugcaaaggguuu

SEQ ID NO: 1896001 - RNA, 19 nt, Homo sapiens
  misc_RNA (1)...(19): siRNA sense strand
guacccagacggauuucaa

SEQ ID NO: 1896002 - RNA, 19 nt, Homo sapiens
  misc_RNA (1)...(19): siRNA sense strand
gauccaccauuacauuuug

SEQ ID NO: 1896003 - RNA, 19 nt, Homo sapiens
  misc_RNA (1)...(19): siRNA sense strand
ucagugccaugacaaacau

SEQ ID NO: 1896004 - RNA, 19 nt, Homo sapiens
  misc_RNA (1)...(19): siRNA sense strand
caggacauaguaucuuuga

SEQ ID NO: 1896005 - RNA, 19 nt, Homo sapiens
  misc_RNA (1)...(19): siRNA sense strand
gauaugacugugaggugaa

SEQ ID NO: 1896006 - RNA, 19 nt, Homo sapiens
  misc_RNA (1)...(19): siRNA sense strand
cagaaaacaucagcaaguu

SEQ ID NO: 1896007 - RNA, 19 nt, Homo sapiens
  misc_RNA (1)...(19): siRNA sense strand
uuacacagguggagcuaac

SEQ ID NO: 1896008 - RNA, 19 nt, Homo sapiens
  misc_RNA (1)...(19): siRNA sense strand
uguccuccaucuucuuuga

SEQ ID NO: 1896009 - RNA, 19 nt, Homo sapiens
  misc_RNA (1)...(19): siRNA sense strand
gagacacuggcacccuaua

SEQ ID NO: 1896010 - RNA, 19 nt, Homo sapiens
  misc_RNA (1)...(19): siRNA sense strand
ccaugaacagcaucuuuga

SEQ ID NO: 1896011 - RNA, 19 nt, Homo sapiens
  misc_RNA (1)...(19): siRNA sense strand
gcuaacaggacauaguauc

SEQ ID NO: 1896012 - RNA, 19 nt, Homo sapiens
  misc_RNA (1)...(19): siRNA sense strand
ggugaaagucuacaacaac

SEQ ID NO: 1896013 - RNA, 19 nt, Homo sapiens
  misc_RNA (1)...(19): siRNA sense strand
gaagcgacagcuggaguau

SEQ ID NO: 1896014 - RNA, 19 nt, Homo sapiens
  misc_RNA (1)...(19): siRNA sense strand
ugaagcgacagcuggagua

SEQ ID NO: 1896015 - RNA, 19 nt, Homo sapiens
  misc_RNA (1)...(19): siRNA sense strand
gaccugaagauugaaguga

SEQ ID NO: 1896016 - RNA, 19 nt, Homo sapiens
  misc_RNA (1)...(19): siRNA sense strand
gcaccaagggucagguagu

SEQ ID NO: 1896017 - RNA, 19 nt, Homo sapiens
  misc_RNA (1)...(19): siRNA sense strand
gcucagccuaugaauucua

SEQ ID NO: 1896018 - RNA, 19 nt, Homo sapiens
  misc_RNA (1)...(19): siRNA sense strand
ggagacggagguguucuau

SEQ ID NO: 1896019 - RNA, 19 nt, Homo sapiens
  misc_RNA (1)...(19): siRNA sense strand
ugguagcccucuccaacaa

SEQ ID NO: 1896020 - RNA, 19 nt, Homo sapiens
  misc_RNA (1)...(19): siRNA sense strand
gcuagacuccgagaacaug

SEQ ID NO: 1896021 - RNA, 19 nt, Homo sapiens
  misc_RNA (1)...(19): siRNA sense strand
acaagccacugagcgcaaa

SEQ ID NO: 1896022 - RNA, 19 nt, Homo sapiens
  misc_RNA (1)...(19): siRNA sense strand
gcccuuugaugccggacaa

SEQ ID NO: 1896023 - RNA, 19 nt, Homo sapiens
  misc_RNA (1)...(19): siRNA sense strand
ccugaagacuauuacacau

SEQ ID NO: 1896024 - RNA, 19 nt, Homo sapiens
  misc_RNA (1)...(19): siRNA sense strand
ggaugaagcugacgaaaug

SEQ ID NO: 1896025 - RNA, 19 nt, Homo sapiens
  misc_RNA (1)...(19): siRNA sense strand
guaaagguguggcuauuaa

SEQ ID NO: 1896026 - RNA, 19 nt, Homo sapiens
  misc_RNA (1)...(19): siRNA sense strand
gagaguaacuggaaugaga

SEQ ID NO: 1896027 - RNA, 19 nt, Homo sapiens
  misc_RNA (1)...(19): siRNA sense strand
gaacgagacgugauuauga

SEQ ID NO: 1896028 - RNA, 19 nt, Homo sapiens
  misc_RNA (1)...(19): siRNA sense strand
agaauuggcucagcagaua

SEQ ID NO: 1896029 - RNA, 19 nt, Homo sapiens
  misc_RNA (1)...(19): siRNA sense strand
gaagaugcaugcucgagau

SEQ ID NO: 1896030 - RNA, 19 nt, Homo sapiens
  misc_RNA (1)...(19): siRNA sense strand
gcagucaucuucaucaaca

SEQ ID NO: 1896031 - RNA, 19 nt, Homo sapiens
  misc_RNA (1)...(19): siRNA sense strand
ucaaggaccagaucuauga

SEQ ID NO: 1896032 - RNA, 19 nt, Homo sapiens
  misc_RNA (1)...(19): siRNA sense strand
gcagguuucuuuagucauc

SEQ ID NO: 1896033 - RNA, 19 nt, Homo sapiens
  misc_RNA (1)...(19): siRNA sense strand
caaggguuaugaugugauu

SEQ ID NO: 1896034 - RNA, 19 nt, Homo sapiens
  misc_RNA (1)...(19): siRNA sense strand
cuaugugacuuguaugaaa

SEQ ID NO: 1896035 - RNA, 19 nt, Homo sapiens
  misc_RNA (1)...(19): siRNA sense strand
uaacuggaaugagauuguu

SEQ ID NO: 1896036 - RNA, 19 nt, Homo sapiens
  misc_RNA (1)...(19): siRNA sense strand
caacagcaacacccaggua

SEQ ID NO: 1896037 - RNA, 19 nt, Homo sapiens
  misc_RNA (1)...(19): siRNA sense strand
caagauguuuguacuggau

SEQ ID NO: 1896038 - RNA, 19 nt, Homo sapiens
  misc_RNA (1)...(19): siRNA sense strand
ugacagcuuugaugacaug

SEQ ID NO: 1896039 - RNA, 19 nt, Homo sapiens
  misc_RNA (1)...(19): siRNA sense strand
ugagauuguugacagcuuu

SEQ ID NO: 1896040 - RNA, 19 nt, Homo sapiens
  misc_RNA (1)...(19): siRNA sense strand
gcucgagauuucacuguau

SEQ ID NO: 1896041 - RNA, 19 nt, Homo sapiens
  misc_RNA (1)...(19): siRNA sense strand
gaugcaugcucgagauuuc

SEQ ID NO: 1896042 - RNA, 19 nt, Homo sapiens
  misc_RNA (1)...(19): siRNA sense strand
ccacaaugccuucugaugu

SEQ ID NO: 1896043 - RNA, 19 nt, Homo sapiens
  misc_RNA (1)...(19): siRNA sense strand
gaagcugacgaaauguuaa

SEQ ID NO: 1896044 - RNA, 19 nt, Homo sapiens
  misc_RNA (1)...(19): siRNA sense strand
gaaaugccccucaauguug

SEQ ID NO: 1896045 - RNA, 19 nt, Homo sapiens
  misc_RNA (1)...(19): siRNA sense strand
ugaagcugacgaaauguua

SEQ ID NO: 1896046 - RNA, 19 nt, Homo sapiens
  misc_RNA (1)...(19): siRNA sense strand
caauguugcugaccucauc

SEQ ID NO: 1896047 - RNA, 19 nt, Homo sapiens
  misc_RNA (1)...(19): siRNA sense strand
cagcagguuucuuuaguca

SEQ ID NO: 1896048 - RNA, 19 nt, Homo sapiens
  misc_RNA (1)...(19): siRNA sense strand
gagccauucuaccuuguau

SEQ ID NO: 1896049 - RNA, 19 nt, Homo sapiens
  misc_RNA (1)...(19): siRNA sense strand
ggaaaacuauauccacaga

SEQ ID NO: 1896050 - RNA, 19 nt, Homo sapiens
  misc_RNA (1)...(19): siRNA sense strand
gcagcagguuucuuuaguc

SEQ ID NO: 1896051 - RNA, 19 nt, Homo sapiens
  misc_RNA (1)...(19): siRNA sense strand
ggaacgagacgugauuaug

SEQ ID NO: 1896052 - RNA, 19 nt, Homo sapiens
  misc_RNA (1)...(19): siRNA sense strand
gcagcagauugaauuagau

SEQ ID NO: 1896053 - RNA, 19 nt, Homo sapiens
  misc_RNA (1)...(19): siRNA sense strand
gugcugaggugcagaaacu

SEQ ID NO: 1896054 - RNA, 19 nt, Homo sapiens
  misc_RNA (1)...(19): siRNA sense strand
gaagcuggacacacuaugu

SEQ ID NO: 1896055 - RNA, 19 nt, Homo sapiens
  misc_RNA (1)...(19): siRNA sense strand
cuauuaacauggugacaga

SEQ ID NO: 1896056 - RNA, 19 nt, Homo sapiens
  misc_RNA (1)...(19): siRNA sense strand
guugacagcuuugaugaca

SEQ ID NO: 1896057 - RNA, 19 nt, Homo sapiens
  misc_RNA (1)...(19): siRNA sense strand
uaugaaacccugaccauca

SEQ ID NO: 1896058 - RNA, 19 nt, Homo sapiens
  misc_RNA (1)...(19): siRNA sense strand
gcauggagauauggaccaa

SEQ ID NO: 1896059 - RNA, 19 nt, Homo sapiens
  misc_RNA (1)...(19): siRNA sense strand
cagccacaaugccuucuga

SEQ ID NO: 1896060 - RNA, 19 nt, Homo sapiens
  misc_RNA (1)...(19): siRNA sense strand
uaacauggugacagaagaa

SEQ ID NO: 1896061 - RNA, 19 nt, Homo sapiens
  misc_RNA (1)...(19): siRNA sense strand
guuaagccguggauucaag

SEQ ID NO: 1896062 - RNA, 19 nt, Homo sapiens
  misc_RNA (1)...(19): siRNA sense strand
ggaaaugccccucaauguu

SEQ ID NO: 1896063 - RNA, 19 nt, Homo sapiens
  misc_RNA (1)...(19): siRNA sense strand
acuaugaccuucccaccaa

SEQ ID NO: 1896064 - RNA, 19 nt, Homo sapiens
  misc_RNA (1)...(19): siRNA sense strand
gaaggcgucaucgagagua

SEQ ID NO: 1896065 - RNA, 19 nt, Homo sapiens
  misc_RNA (1)...(19): siRNA sense strand
cguaaagguguggcuauua

SEQ ID NO: 1896066 - RNA, 19 nt, Homo sapiens
  misc_RNA (1)...(19): siRNA sense strand
gagaauuggcucagcagau

SEQ ID NO: 1896067 - RNA, 19 nt, Homo sapiens
  misc_RNA (1)...(19): siRNA sense strand
ugcagcagauugaauuaga

SEQ ID NO: 1896068 - RNA, 19 nt, Homo sapiens
  misc_RNA (1)...(19): siRNA sense strand
gaggacucuucgagacauu

SEQ ID NO: 1896069 - RNA, 19 nt, Homo sapiens
  misc_RNA (1)...(19): siRNA sense strand
uggacuggcucaccgagaa

SEQ ID NO: 1896070 - RNA, 19 nt, Homo sapiens
  misc_RNA (1)...(19): siRNA sense strand
cagcaacacccagguaguu

SEQ ID NO: 1896071 - RNA, 19 nt, Homo sapiens
  misc_RNA (1)...(19): siRNA sense strand
aaaggaacgagacgugauu

SEQ ID NO: 1896072 - RNA, 19 nt, Homo sapiens
  misc_RNA (1)...(19): siRNA sense strand
guaacuggaaugagauugu

SEQ ID NO: 1896073 - RNA, 19 nt, Homo sapiens
  misc_RNA (1)...(19): siRNA sense strand
auugagaccuucuacaaca

SEQ ID NO: 1896074 - RNA, 19 nt, Homo sapiens
  misc_RNA (1)...(19): siRNA sense strand
gccauucuaccuuguauca

SEQ ID NO: 1896075 - RNA, 19 nt, Homo sapiens
  misc_RNA (1)...(19): siRNA sense strand
uuaacauggugacagaaga

SEQ ID NO: 1896076 - RNA, 19 nt, Homo sapiens
  misc_RNA (1)...(19): siRNA sense strand
ccguaaagguguggcuauu

SEQ ID NO: 1896077 - RNA, 19 nt, Homo sapiens
  misc_RNA (1)...(19): siRNA sense strand
gaaauguuaagccguggau

SEQ ID NO: 1896078 - RNA, 19 nt, Homo sapiens
  misc_RNA (1)...(19): siRNA sense strand
acauugagaccuucuacaa

SEQ ID NO: 1896079 - RNA, 19 nt, Homo sapiens
  misc_RNA (1)...(19): siRNA sense strand
gauucaaggaccagaucua

SEQ ID NO: 1896080 - RNA, 19 nt, Homo sapiens
  misc_RNA (1)...(19): siRNA sense strand
ggacucuucgagacauuga

SEQ ID NO: 1896081 - RNA, 19 nt, Homo sapiens
  misc_RNA (1)...(19): siRNA sense strand
gaggguauccgccaguucu

SEQ ID NO: 1896082 - RNA, 19 nt, Homo sapiens
  misc_RNA (1)...(19): siRNA sense strand
cagcuuugaugacaugaac

SEQ ID NO: 1896083 - RNA, 19 nt, Homo sapiens
  misc_RNA (1)...(19): siRNA sense strand
caucgagaguaacuggaau

SEQ ID NO: 1896084 - RNA, 19 nt, Homo sapiens
  misc_RNA (1)...(19): siRNA sense strand
gaagguggucauggcacua

SEQ ID NO: 1896085 - RNA, 19 nt, Homo sapiens
  misc_RNA (1)...(19): siRNA sense strand
gaggugaccaagaaguuca

SEQ ID NO: 1896086 - RNA, 19 nt, Homo sapiens
  misc_RNA (1)...(19): siRNA sense strand
cuacaacaccuccauugag

SEQ ID NO: 1896087 - RNA, 19 nt, Homo sapiens
  misc_RNA (1)...(19): siRNA sense strand
ccauucggauucuugucaa

SEQ ID NO: 1896088 - RNA, 19 nt, Homo sapiens
  misc_RNA (1)...(19): siRNA sense strand
cggucgagguggacgguuu

SEQ ID NO: 1896089 - RNA, 19 nt, Homo sapiens
  misc_RNA (1)...(19): siRNA sense strand
uccaaaagcucaacagcaa

SEQ ID NO: 1896090 - RNA, 19 nt, Homo sapiens
  misc_RNA (1)...(19): siRNA sense strand
gaguaacuggaaugagauu

SEQ ID NO: 1896091 - RNA, 19 nt, Homo sapiens
  misc_RNA (1)...(19): siRNA sense strand
gaguuucguucuggcucua

SEQ ID NO: 1896092 - RNA, 19 nt, Homo sapiens
  misc_RNA (1)...(19): siRNA sense strand
uggcucagcagauacagaa

SEQ ID NO: 1896093 - RNA, 19 nt, Homo sapiens
  misc_RNA (1)...(19): siRNA sense strand
ggugacagaagaagacaag

SEQ ID NO: 1896094 - RNA, 19 nt, Homo sapiens
  misc_RNA (1)...(19): siRNA sense strand
gaguuuugauuaccacuga

SEQ ID NO: 1896095 - RNA, 19 nt, Homo sapiens
  misc_RNA (1)...(19): siRNA sense strand
uaugugacuuguaugaaac

SEQ ID NO: 1896096 - RNA, 19 nt, Homo sapiens
  misc_RNA (1)...(19): siRNA sense strand
ucauggcacuaggagacua

SEQ ID NO: 1896097 - RNA, 19 nt, Homo sapiens
  misc_RNA (1)...(19): siRNA sense strand
ucuacaacaccuccauuga

SEQ ID NO: 1896098 - RNA, 19 nt, Homo sapiens
  misc_RNA (1)...(19): siRNA sense strand
gcagcgagccauucuaccu

SEQ ID NO: 1896099 - RNA, 19 nt, Homo sapiens
  misc_RNA (1)...(19): siRNA sense strand
ugacagaagaagacaagag

SEQ ID NO: 1896100 - RNA, 19 nt, Homo sapiens
  misc_RNA (1)...(19): siRNA sense strand
ugcagcagguuucuuuagu

SEQ ID NO: 1896101 - RNA, 19 nt, Homo sapiens
  misc_RNA (1)...(19): siRNA sense strand
ugucaagaaggaagaguug

SEQ ID NO: 1896102 - RNA, 19 nt, Homo sapiens
  misc_RNA (1)...(19): siRNA sense strand
ggcacuaggagacuacaug

SEQ ID NO: 1896103 - RNA, 19 nt, Homo sapiens
  misc_RNA (1)...(19): siRNA sense strand
gauucccgauccagagaca

SEQ ID NO: 1896104 - RNA, 19 nt, Homo sapiens
  misc_RNA (1)...(19): siRNA sense strand
gcgagccauucuaccuugu

SEQ ID NO: 1896105 - RNA, 19 nt, Homo sapiens
  misc_RNA (1)...(19): siRNA sense strand
gccacaaugccuucugaug

SEQ ID NO: 1896106 - RNA, 19 nt, Homo sapiens
  misc_RNA (1)...(19): siRNA sense strand
uggaugaagcugacgaaau

SEQ ID NO: 1896107 - RNA, 19 nt, Homo sapiens
  misc_RNA (1)...(19): siRNA sense strand
cagcagcgagccauucuac

SEQ ID NO: 1896108 - RNA, 19 nt, Homo sapiens
  misc_RNA (1)...(19): siRNA sense strand
agguguggcuauuaacaug

SEQ ID NO: 1896109 - RNA, 19 nt, Homo sapiens
  misc_RNA (1)...(19): siRNA sense strand
aaagguguggcuauuaaca

SEQ ID NO: 1896110 - RNA, 19 nt, Homo sapiens
  misc_RNA (1)...(19): siRNA sense strand
ggaagcuggacacacuaug

SEQ ID NO: 1896111 - RNA, 19 nt, Homo sapiens
  misc_RNA (1)...(19): siRNA sense strand
gcaacacccagguaguuuu

SEQ ID NO: 1896112 - RNA, 19 nt, Homo sapiens
  misc_RNA (1)...(19): siRNA sense strand
cgagccauucuaccuugua

SEQ ID NO: 1896113 - RNA, 19 nt, Homo sapiens
  misc_RNA (1)...(19): siRNA sense strand
ggaauucuuucgaggauua

SEQ ID NO: 1896114 - RNA, 19 nt, Homo sapiens
  misc_RNA (1)...(19): siRNA sense strand
ggaggaagcaccuauguuu

SEQ ID NO: 1896115 - RNA, 19 nt, Homo sapiens
  misc_RNA (1)...(19): siRNA sense strand
ugacacagcugcuagagaa

SEQ ID NO: 1896116 - RNA, 19 nt, Homo sapiens
  misc_RNA (1)...(19): siRNA sense strand
gaagaugauuccucugcua

SEQ ID NO: 1896117 - RNA, 19 nt, Homo sapiens
  misc_RNA (1)...(19): siRNA sense strand
ccagagagguugaaagguu

SEQ ID NO: 1896118 - RNA, 19 nt, Homo sapiens
  misc_RNA (1)...(19): siRNA sense strand
gaugauagcuuuggagaca

SEQ ID NO: 1896119 - RNA, 19 nt, Homo sapiens
  misc_RNA (1)...(19): siRNA sense strand
gacccaaacugaaucuaaa

SEQ ID NO: 1896120 - RNA, 19 nt, Homo sapiens
  misc_RNA (1)...(19): siRNA sense strand
ggaggaagauugccacucu

SEQ ID NO: 1896121 - RNA, 19 nt, Homo sapiens
  misc_RNA (1)...(19): siRNA sense strand
uaaaguagaugggaugaau

SEQ ID NO: 1896122 - RNA, 19 nt, Homo sapiens
  misc_RNA (1)...(19): siRNA sense strand
gaugauuccucugcuagua

SEQ ID NO: 1896123 - RNA, 19 nt, Homo sapiens
  misc_RNA (1)...(19): siRNA sense strand
gagaagauuaugccgaaua

SEQ ID NO: 1896124 - RNA, 19 nt, Homo sapiens
  misc_RNA (1)...(19): siRNA sense strand
ggaaggaccaggaaggaaa

SEQ ID NO: 1896125 - RNA, 19 nt, Homo sapiens
  misc_RNA (1)...(19): siRNA sense strand
gauuauaggcgugaugaua

SEQ ID NO: 1896126 - RNA, 19 nt, Homo sapiens
  misc_RNA (1)...(19): siRNA sense strand
gauaggcaguggcagaaga

SEQ ID NO: 1896127 - RNA, 19 nt, Homo sapiens
  misc_RNA (1)...(19): siRNA sense strand
agaaagagaaguagaagaa

SEQ ID NO: 1896128 - RNA, 19 nt, Homo sapiens
  misc_RNA (1)...(19): siRNA sense strand
gaaggagucagauaggaaa

SEQ ID NO: 1896129 - RNA, 19 nt, Homo sapiens
  misc_RNA (1)...(19): siRNA sense strand
ugaaacggaugaccuggaa

SEQ ID NO: 1896130 - RNA, 19 nt, Homo sapiens
  misc_RNA (1)...(19): siRNA sense strand
cagagagguugaaagguuu

SEQ ID NO: 1896131 - RNA, 19 nt, Homo sapiens
  misc_RNA (1)...(19): siRNA sense strand
ccuaugauguuacagaaga

SEQ ID NO: 1896132 - RNA, 19 nt, Homo sapiens
  misc_RNA (1)...(19): siRNA sense strand
ccaaagacccaaacugaau

SEQ ID NO: 1896133 - RNA, 19 nt, Homo sapiens
  misc_RNA (1)...(19): siRNA sense strand
ggagacaaguaucgagauc

SEQ ID NO: 1896134 - RNA, 19 nt, Homo sapiens
  misc_RNA (1)...(19): siRNA sense strand
gccgggauauggaucgaua

SEQ ID NO: 1896135 - RNA, 19 nt, Homo sapiens
  misc_RNA (1)...(19): siRNA sense strand
ggaaggagucagauaggaa

SEQ ID NO: 1896136 - RNA, 19 nt, Homo sapiens
  misc_RNA (1)...(19): siRNA sense strand
ggagagagagugagaaguc

SEQ ID NO: 1896137 - RNA, 19 nt, Homo sapiens
  misc_RNA (1)...(19): siRNA sense strand
gaagauugccacucuccaa

SEQ ID NO: 1896138 - RNA, 19 nt, Homo sapiens
  misc_RNA (1)...(19): siRNA sense strand
caaguaugcugcucucucu

SEQ ID NO: 1896139 - RNA, 19 nt, Homo sapiens
  misc_RNA (1)...(19): siRNA sense strand
ggagaaugcuugggugaag

SEQ ID NO: 1896140 - RNA, 19 nt, Homo sapiens
  misc_RNA (1)...(19): siRNA sense strand
acaaguaucgagaucguua

SEQ ID NO: 1896141 - RNA, 19 nt, Homo sapiens
  misc_RNA (1)...(19): siRNA sense strand
gaucugcaccugagccaaa

SEQ ID NO: 1896142 - RNA, 19 nt, Homo sapiens
  misc_RNA (1)...(19): siRNA sense strand
ggcaaagccuguugacaca

SEQ ID NO: 1896143 - RNA, 19 nt, Homo sapiens
  misc_RNA (1)...(19): siRNA sense strand
ggaaaccuacccuaugaug

SEQ ID NO: 1896144 - RNA, 19 nt, Homo sapiens
  misc_RNA (1)...(19): siRNA sense strand
gaacccagcaauccagaga

SEQ ID NO: 1896145 - RNA, 19 nt, Homo sapiens
  misc_RNA (1)...(19): siRNA sense strand
aaauccagcuucuaaguuc

SEQ ID NO: 1896146 - RNA, 19 nt, Homo sapiens
  misc_RNA (1)...(19): siRNA sense strand
caaagaaaccugaggaaaa

SEQ ID NO: 1896147 - RNA, 19 nt, Homo sapiens
  misc_RNA (1)...(19): siRNA sense strand
gaaggaacaagagaaguug

SEQ ID NO: 1896148 - RNA, 19 nt, Homo sapiens
  misc_RNA (1)...(19): siRNA sense strand
gaguggacguugcugauca

SEQ ID NO: 1896149 - RNA, 19 nt, Homo sapiens
  misc_RNA (1)...(19): siRNA sense strand
aaaccuacccuaugauguu

SEQ ID NO: 1896150 - RNA, 19 nt, Homo sapiens
  misc_RNA (1)...(19): siRNA sense strand
cuacagacagcuuugauga

SEQ ID NO: 1896151 - RNA, 19 nt, Homo sapiens
  misc_RNA (1)...(19): siRNA sense strand
ggagucagauaggaaagau

SEQ ID NO: 1896152 - RNA, 19 nt, Homo sapiens
  misc_RNA (1)...(19): siRNA sense strand
ggaagacuaucucccuaac

SEQ ID NO: 1896153 - RNA, 19 nt, Homo sapiens
  misc_RNA (1)...(19): siRNA sense strand
gaagaggugaugauagcuu

SEQ ID NO: 1896154 - RNA, 19 nt, Homo sapiens
  misc_RNA (1)...(19): siRNA sense strand
guaucgagaucguuaugau

SEQ ID NO: 1896155 - RNA, 19 nt, Homo sapiens
  misc_RNA (1)...(19): siRNA sense strand
gacaggaagugagucauca

SEQ ID NO: 1896156 - RNA, 19 nt, Homo sapiens
  misc_RNA (1)...(19): siRNA sense strand
uagaagaggugaugauagc

SEQ ID NO: 1896157 - RNA, 19 nt, Homo sapiens
  misc_RNA (1)...(19): siRNA sense strand
ccaaagaaaccugaggaaa

SEQ ID NO: 1896158 - RNA, 19 nt, Homo sapiens
  misc_RNA (1)...(19): siRNA sense strand
uagaagaacggcuacagaa

SEQ ID NO: 1896159 - RNA, 19 nt, Homo sapiens
  misc_RNA (1)...(19): siRNA sense strand
ucgagcugcuucuaucuuu

SEQ ID NO: 1896160 - RNA, 19 nt, Homo sapiens
  misc_RNA (1)...(19): siRNA sense strand
caccacaucuagcagaaau

SEQ ID NO: 1896161 - RNA, 19 nt, Homo sapiens
  misc_RNA (1)...(19): siRNA sense strand
aagaggugaugauagcuuu

SEQ ID NO: 1896162 - RNA, 19 nt, Homo sapiens
  misc_RNA (1)...(19): siRNA sense strand
gauugccacucuccaacuu

SEQ ID NO: 1896163 - RNA, 19 nt, Homo sapiens
  misc_RNA (1)...(19): siRNA sense strand
augaaacacucaauaagga

SEQ ID NO: 1896164 - RNA, 19 nt, Homo sapiens
  misc_RNA (1)...(19): siRNA sense strand
cagaagagucaauuaagga

SEQ ID NO: 1896165 - RNA, 19 nt, Homo sapiens
  misc_RNA (1)...(19): siRNA sense strand
ggacaggaagugagucauc

SEQ ID NO: 1896166 - RNA, 19 nt, Homo sapiens
  misc_RNA (1)...(19): siRNA sense strand
aagaacggcuacagaagga

SEQ ID NO: 1896167 - RNA, 19 nt, Homo sapiens
  misc_RNA (1)...(19): siRNA sense strand
agacagggaugaucguucu

SEQ ID NO: 1896168 - RNA, 19 nt, Homo sapiens
  misc_RNA (1)...(19): siRNA sense strand
ggagcuccagagaugauua

SEQ ID NO: 1896169 - RNA, 19 nt, Homo sapiens
  misc_RNA (1)...(19): siRNA sense strand
agaagauuaugccgaauag

SEQ ID NO: 1896170 - RNA, 19 nt, Homo sapiens
  misc_RNA (1)...(19): siRNA sense strand
gaccaggaaggaaagauga

SEQ ID NO: 1896171 - RNA, 19 nt, Homo sapiens
  misc_RNA (1)...(19): siRNA sense strand
aaccuacccuaugauguua

SEQ ID NO: 1896172 - RNA, 19 nt, Homo sapiens
  misc_RNA (1)...(19): siRNA sense strand
gaaaugcacgaaggagaga

SEQ ID NO: 1896173 - RNA, 19 nt, Homo sapiens
  misc_RNA (1)...(19): siRNA sense strand
cuagguaacaggagaauuc

SEQ ID NO: 1896174 - RNA, 19 nt, Homo sapiens
  misc_RNA (1)...(19): siRNA sense strand
aaagaaaccugaggaaaau

SEQ ID NO: 1896175 - RNA, 19 nt, Homo sapiens
  misc_RNA (1)...(19): siRNA sense strand
ggaccaggaaggaaagaug

SEQ ID NO: 1896176 - RNA, 19 nt, Homo sapiens
  misc_RNA (1)...(19): siRNA sense strand
gaucagccccuaaagguaa

SEQ ID NO: 1896177 - RNA, 19 nt, Homo sapiens
  misc_RNA (1)...(19): siRNA sense strand
gaaaccuacccuaugaugu

SEQ ID NO: 1896178 - RNA, 19 nt, Homo sapiens
  misc_RNA (1)...(19): siRNA sense strand
ggaaugagccaaaacuaga

SEQ ID NO: 1896179 - RNA, 19 nt, Homo sapiens
  misc_RNA (1)...(19): siRNA sense strand
gaguacuccugaagaagau

SEQ ID NO: 1896180 - RNA, 19 nt, Homo sapiens
  misc_RNA (1)...(19): siRNA sense strand
acagaagagucaauuaagg

SEQ ID NO: 1896181 - RNA, 19 nt, Homo sapiens
  misc_RNA (1)...(19): siRNA sense strand
aagcaccuauguuuccaaa

SEQ ID NO: 1896182 - RNA, 19 nt, Homo sapiens
  misc_RNA (1)...(19): siRNA sense strand
agaaggaacaagagaaguu

SEQ ID NO: 1896183 - RNA, 19 nt, Homo sapiens
  misc_RNA (1)...(19): siRNA sense strand
gaagagucaauuaaggaau

SEQ ID NO: 1896184 - RNA, 19 nt, Homo sapiens
  misc_RNA (1)...(19): siRNA sense strand
gagaaagagaaguagaaga

SEQ ID NO: 1896185 - RNA, 19 nt, Homo sapiens
  misc_RNA (1)...(19): siRNA sense strand
aaucuaaagccucggagua

SEQ ID NO: 1896186 - RNA, 19 nt, Homo sapiens
  misc_RNA (1)...(19): siRNA sense strand
gcuaugaagaccgauauga

SEQ ID NO: 1896187 - RNA, 19 nt, Homo sapiens
  misc_RNA (1)...(19): siRNA sense strand
gaugacuacccaccuagaa

SEQ ID NO: 1896188 - RNA, 19 nt, Homo sapiens
  misc_RNA (1)...(19): siRNA sense strand
uagagaaagagaaguagaa

SEQ ID NO: 1896189 - RNA, 19 nt, Homo sapiens
  misc_RNA (1)...(19): siRNA sense strand
ucaaccaucugaggaagga

SEQ ID NO: 1896190 - RNA, 19 nt, Homo sapiens
  misc_RNA (1)...(19): siRNA sense strand
agaagucucuagaaaauga

SEQ ID NO: 1896191 - RNA, 19 nt, Homo sapiens
  misc_RNA (1)...(19): siRNA sense strand
guugaaagguuuugguuau

SEQ ID NO: 1896192 - RNA, 19 nt, Homo sapiens
  misc_RNA (1)...(19): siRNA sense strand
aaaaugagggagaagauua

SEQ ID NO: 1896193 - RNA, 19 nt, Homo sapiens
  misc_RNA (1)...(19): siRNA sense strand
cgaaggagagagagugaga

SEQ ID NO: 1896194 - RNA, 19 nt, Homo sapiens
  misc_RNA (1)...(19): siRNA sense strand
cagggaugaugacuacaga

SEQ ID NO: 1896195 - RNA, 19 nt, Homo sapiens
  misc_RNA (1)...(19): siRNA sense strand
ccuagaagaggugaugaua

SEQ ID NO: 1896196 - RNA, 19 nt, Homo sapiens
  misc_RNA (1)...(19): siRNA sense strand
agacagcuuugaugacuac

SEQ ID NO: 1896197 - RNA, 19 nt, Homo sapiens
  misc_RNA (1)...(19): siRNA sense strand
gagagagagugagaagucu

SEQ ID NO: 1896198 - RNA, 19 nt, Homo sapiens
  misc_RNA (1)...(19): siRNA sense strand
gaggaagcaccuauguuuc

SEQ ID NO: 1896199 - RNA, 19 nt, Homo sapiens
  misc_RNA (1)...(19): siRNA sense strand
ucgcagggaugaugacuac

SEQ ID NO: 1896200 - RNA, 19 nt, Homo sapiens
  misc_RNA (1)...(19): siRNA sense strand
gauaaagacagggaugauc

SEQ ID NO: 1896201 - RNA, 19 nt, Homo sapiens
  misc_RNA (1)...(19): siRNA sense strand
guuacagaagagucaauua

SEQ ID NO: 1896202 - RNA, 19 nt, Homo sapiens
  misc_RNA (1)...(19): siRNA sense strand
gaacggucgaggacaggaa

SEQ ID NO: 1896203 - RNA, 19 nt, Homo sapiens
  misc_RNA (1)...(19): siRNA sense strand
agacccaaacugaaucuaa

SEQ ID NO: 1896204 - RNA, 19 nt, Homo sapiens
  misc_RNA (1)...(19): siRNA sense strand
uuauaggcgugaugauaga

SEQ ID NO: 1896205 - RNA, 19 nt, Homo sapiens
  misc_RNA (1)...(19): siRNA sense strand
cagacagcuuugaugacua

SEQ ID NO: 1896206 - RNA, 19 nt, Homo sapiens
  misc_RNA (1)...(19): siRNA sense strand
ugacuacccaccuagaaga

SEQ ID NO: 1896207 - RNA, 19 nt, Homo sapiens
  misc_RNA (1)...(19): siRNA sense strand
guaugcugcucucucuguu

SEQ ID NO: 1896208 - RNA, 19 nt, Homo sapiens
  misc_RNA (1)...(19): siRNA sense strand
gagcagcaguccccuacaa

SEQ ID NO: 1896209 - RNA, 19 nt, Homo sapiens
  misc_RNA (1)...(19): siRNA sense strand
ggaccuccaccacaucuag

SEQ ID NO: 1896210 - RNA, 19 nt, Homo sapiens
  misc_RNA (1)...(19): siRNA sense strand
uaucagugcagugcguuua

SEQ ID NO: 1896211 - RNA, 19 nt, Homo sapiens
  misc_RNA (1)...(19): siRNA sense strand
caaagacccaaacugaauc

SEQ ID NO: 1896212 - RNA, 19 nt, Homo sapiens
  misc_RNA (1)...(19): siRNA sense strand
aggcuaugauucccggaua

SEQ ID NO: 1896213 - RNA, 19 nt, Homo sapiens
  misc_RNA (1)...(19): siRNA sense strand
gagcgaagcuugugucuca

SEQ ID NO: 1896214 - RNA, 19 nt, Homo sapiens
  misc_RNA (1)...(19): siRNA sense strand
gagcagaucuccacucuca

SEQ ID NO: 1896215 - RNA, 19 nt, Homo sapiens
  misc_RNA (1)...(19): siRNA sense strand
ccaaggagcuggacaaagu

SEQ ID NO: 1896216 - RNA, 19 nt, Homo sapiens
  misc_RNA (1)...(19): siRNA sense strand
gaaaggcgcaaguauacua

SEQ ID NO: 1896217 - RNA, 19 nt, Homo sapiens
  misc_RNA (1)...(19): siRNA sense strand
gagaucauccuggagauua

SEQ ID NO: 1896218 - RNA, 19 nt, Homo sapiens
  misc_RNA (1)...(19): siRNA sense strand
ccaccuggcucacccauga

SEQ ID NO: 1896219 - RNA, 19 nt, Homo sapiens
  misc_RNA (1)...(19): siRNA sense strand
gaacacaaccaagcaauca

SEQ ID NO: 1896220 - RNA, 19 nt, Homo sapiens
  misc_RNA (1)...(19): siRNA sense strand
cagcagaucuuggacuuug

SEQ ID NO: 1896221 - RNA, 19 nt, Homo sapiens
  misc_RNA (1)...(19): siRNA sense strand
agaaggugcugaccggaua

SEQ ID NO: 1896222 - RNA, 19 nt, Homo sapiens
  misc_RNA (1)...(19): siRNA sense strand
gagaaaggcgcaaguauac

SEQ ID NO: 1896223 - RNA, 19 nt, Homo sapiens
  misc_RNA (1)...(19): siRNA sense strand
ccaaaccucuaauggaguu

SEQ ID NO: 1896224 - RNA, 19 nt, Homo sapiens
  misc_RNA (1)...(19): siRNA sense strand
gagcauagccaccgagauc

SEQ ID NO: 1896225 - RNA, 19 nt, Homo sapiens
  misc_RNA (1)...(19): siRNA sense strand
ccagaccucuacuuugaaa

SEQ ID NO: 1896226 - RNA, 19 nt, Homo sapiens
  misc_RNA (1)...(19): siRNA sense strand
agagaaaggcgcaaguaua

SEQ ID NO: 1896227 - RNA, 19 nt, Homo sapiens
  misc_RNA (1)...(19): siRNA sense strand
uaagaaggcauuugaggaa

SEQ ID NO: 1896228 - RNA, 19 nt, Homo sapiens
  misc_RNA (1)...(19): siRNA sense strand
acagaugccugcucaacaa

SEQ ID NO: 1896229 - RNA, 19 nt, Homo sapiens
  misc_RNA (1)...(19): siRNA sense strand
uggacaaaguguuuaauga

SEQ ID NO: 1896230 - RNA, 19 nt, Homo sapiens
  misc_RNA (1)...(19): siRNA sense strand
cuaauggaguugauugaga

SEQ ID NO: 1896231 - RNA, 19 nt, Homo sapiens
  misc_RNA (1)...(19): siRNA sense strand
agaacugggugaagaagaa

SEQ ID NO: 1896232 - RNA, 19 nt, Homo sapiens
  misc_RNA (1)...(19): siRNA sense strand
gagcucaucuaccacaaag

SEQ ID NO: 1896233 - RNA, 19 nt, Homo sapiens
  misc_RNA (1)...(19): siRNA sense strand
ccggauaucugaacuacau

SEQ ID NO: 1896234 - RNA, 19 nt, Homo sapiens
  misc_RNA (1)...(19): siRNA sense strand
gggagaacaucgccgacaa

SEQ ID NO: 1896235 - RNA, 19 nt, Homo sapiens
  misc_RNA (1)...(19): siRNA sense strand
agagaucaguggagcauga

SEQ ID NO: 1896236 - RNA, 19 nt, Homo sapiens
  misc_RNA (1)...(19): siRNA sense strand
ucuacaacaugauaggaua

SEQ ID NO: 1896237 - RNA, 19 nt, Homo sapiens
  misc_RNA (1)...(19): siRNA sense strand
gaaaaucagccaaggaaaa

SEQ ID NO: 1896238 - RNA, 19 nt, Homo sapiens
  misc_RNA (1)...(19): siRNA sense strand
gaugccugcucaacaacua

SEQ ID NO: 1896239 - RNA, 19 nt, Homo sapiens
  misc_RNA (1)...(19): siRNA sense strand
gugaccagcuccaucuuga

SEQ ID NO: 1896240 - RNA, 19 nt, Homo sapiens
  misc_RNA (1)...(19): siRNA sense strand
ggacgccgaugagaaguuc

SEQ ID NO: 1896241 - RNA, 19 nt, Homo sapiens
  misc_RNA (1)...(19): siRNA sense strand
acaacuacaugaucuggaa

SEQ ID NO: 1896242 - RNA, 19 nt, Homo sapiens
  misc_RNA (1)...(19): siRNA sense strand
gacaaaguguuuaaugacu

SEQ ID NO: 1896243 - RNA, 19 nt, Homo sapiens
  misc_RNA (1)...(19): siRNA sense strand
uuccagaccucuacuuuga

SEQ ID NO: 1896244 - RNA, 19 nt, Homo sapiens
  misc_RNA (1)...(19): siRNA sense strand
gccaugacuucuucagcua

SEQ ID NO: 1896245 - RNA, 19 nt, Homo sapiens
  misc_RNA (1)...(19): siRNA sense strand
gagagaaaggcgcaaguau

SEQ ID NO: 1896246 - RNA, 19 nt, Homo sapiens
  misc_RNA (1)...(19): siRNA sense strand
cccaaggccuuaaacuuug

SEQ ID NO: 1896247 - RNA, 19 nt, Homo sapiens
  misc_RNA (1)...(19): siRNA sense strand
aggaauaccuugagcagau

SEQ ID NO: 1896248 - RNA, 19 nt, Homo sapiens
  misc_RNA (1)...(19): siRNA sense strand
gagagacuauuaccugaac

SEQ ID NO: 1896249 - RNA, 19 nt, Homo sapiens
  misc_RNA (1)...(19): siRNA sense strand
ggagcuggacaaaguguuu

SEQ ID NO: 1896250 - RNA, 19 nt, Homo sapiens
  misc_RNA (1)...(19): siRNA sense strand
caagaaugagauuguguuu

SEQ ID NO: 1896251 - RNA, 19 nt, Homo sapiens
  misc_RNA (1)...(19): siRNA sense strand
gaucuccacucucaucaac

SEQ ID NO: 1896252 - RNA, 19 nt, Homo sapiens
  misc_RNA (1)...(19): siRNA sense strand
caagugcgaagucugguaa

SEQ ID NO: 1896253 - RNA, 19 nt, Homo sapiens
  misc_RNA (1)...(19): siRNA sense strand
ggacaaaguguuuaaugac

SEQ ID NO: 1896254 - RNA, 19 nt, Homo sapiens
  misc_RNA (1)...(19): siRNA sense strand
ccaauaaccagcucuucuu

SEQ ID NO: 1896255 - RNA, 19 nt, Homo sapiens
  misc_RNA (1)...(19): siRNA sense strand
caaaguguuuaaugacuac

SEQ ID NO: 1896256 - RNA, 19 nt, Homo sapiens
  misc_RNA (1)...(19): siRNA sense strand
gcucagggccaaaccucua

SEQ ID NO: 1896257 - RNA, 19 nt, Homo sapiens
  misc_RNA (1)...(19): siRNA sense strand
cuuaaacuuugguggcaua

SEQ ID NO: 1896258 - RNA, 19 nt, Homo sapiens
  misc_RNA (1)...(19): siRNA sense strand
gcagaucuccacucucauc

SEQ ID NO: 1896259 - RNA, 19 nt, Homo sapiens
  misc_RNA (1)...(19): siRNA sense strand
gcucaucuaccacaaagug

SEQ ID NO: 1896260 - RNA, 19 nt, Homo sapiens
  misc_RNA (1)...(19): siRNA sense strand
ccaacggccugcaggugaa

SEQ ID NO: 1896261 - RNA, 19 nt, Homo sapiens
  misc_RNA (1)...(19): siRNA sense strand
agaaugagauuguguuucc

SEQ ID NO: 1896262 - RNA, 19 nt, Homo sapiens
  misc_RNA (1)...(19): siRNA sense strand
gugcugaccggauaucuga

SEQ ID NO: 1896263 - RNA, 19 nt, Homo sapiens
  misc_RNA (1)...(19): siRNA sense strand
aaacuuugguggcauaggu

SEQ ID NO: 1896264 - RNA, 19 nt, Homo sapiens
  misc_RNA (1)...(19): siRNA sense strand
ggaauaccuugagcagauc

SEQ ID NO: 1896265 - RNA, 19 nt, Homo sapiens
  misc_RNA (1)...(19): siRNA sense strand
agaagcggcuggugguguu

SEQ ID NO: 1896266 - RNA, 19 nt, Homo sapiens
  misc_RNA (1)...(19): siRNA sense strand
acccaaggccuuaaacuuu

SEQ ID NO: 1896267 - RNA, 19 nt, Homo sapiens
  misc_RNA (1)...(19): siRNA sense strand
gagcuggacaaaguguuua

SEQ ID NO: 1896268 - RNA, 19 nt, Homo sapiens
  misc_RNA (1)...(19): siRNA sense strand
caaccaagcaaucaucaag

SEQ ID NO: 1896269 - RNA, 19 nt, Homo sapiens
  misc_RNA (1)...(19): siRNA sense strand
gcucaacaacuacaugauc

SEQ ID NO: 1896270 - RNA, 19 nt, Homo sapiens
  misc_RNA (1)...(19): siRNA sense strand
ugacuacacugcaguucca

SEQ ID NO: 1896271 - RNA, 19 nt, Homo sapiens
  misc_RNA (1)...(19): siRNA sense strand
ucaagcaccuccucgaaaa

SEQ ID NO: 1896272 - RNA, 19 nt, Homo sapiens
  misc_RNA (1)...(19): siRNA sense strand
ccaagaaugagauuguguu

SEQ ID NO: 1896273 - RNA, 19 nt, Homo sapiens
  misc_RNA (1)...(19): siRNA sense strand
gaggacagcaagagcauag

SEQ ID NO: 1896274 - RNA, 19 nt, Homo sapiens
  misc_RNA (1)...(19): siRNA sense strand
agacggcacuggccaacau

SEQ ID NO: 1896275 - RNA, 19 nt, Homo sapiens
  misc_RNA (1)...(19): siRNA sense strand
gaccggauaucugaacuac

SEQ ID NO: 1896276 - RNA, 19 nt, Homo sapiens
  misc_RNA (1)...(19): siRNA sense strand
gggccaaaccucuaaugga

SEQ ID NO: 1896277 - RNA, 19 nt, Homo sapiens
  misc_RNA (1)...(19): siRNA sense strand
ccaccaagaaugagauugu

SEQ ID NO: 1896278 - RNA, 19 nt, Homo sapiens
  misc_RNA (1)...(19): siRNA sense strand
gaaguggauggaugaggaa

SEQ ID NO: 1896279 - RNA, 19 nt, Homo sapiens
  misc_RNA (1)...(19): siRNA sense strand
caaugaauccgagccuauu

SEQ ID NO: 1896280 - RNA, 19 nt, Homo sapiens
  misc_RNA (1)...(19): siRNA sense strand
gaaaacaaccugggcuuug

SEQ ID NO: 1896281 - RNA, 19 nt, Homo sapiens
  misc_RNA (1)...(19): siRNA sense strand
cccugggccucaccaauaa

SEQ ID NO: 1896282 - RNA, 19 nt, Homo sapiens
  misc_RNA (1)...(19): siRNA sense strand
gaucaaggacgggaguaug

SEQ ID NO: 1896283 - RNA, 19 nt, Homo sapiens
  misc_RNA (1)...(19): siRNA sense strand
gcaggcaccauucuacaca

SEQ ID NO: 1896284 - RNA, 19 nt, Homo sapiens
  misc_RNA (1)...(19): siRNA sense strand
ggaacacaaccaagcaauc

SEQ ID NO: 1896285 - RNA, 19 nt, Homo sapiens
  misc_RNA (1)...(19): siRNA sense strand
gaaaacaagcuccuuccuu

SEQ ID NO: 1896286 - RNA, 19 nt, Homo sapiens
  misc_RNA (1)...(19): siRNA sense strand
aagaaggcauuugaggaaa

SEQ ID NO: 1896287 - RNA, 19 nt, Homo sapiens
  misc_RNA (1)...(19): siRNA sense strand
caucaagcaccuccucgaa

SEQ ID NO: 1896288 - RNA, 19 nt, Homo sapiens
  misc_RNA (1)...(19): siRNA sense strand
agaucauccuggagauuaa

SEQ ID NO: 1896289 - RNA, 19 nt, Homo sapiens
  misc_RNA (1)...(19): siRNA sense strand
ccaagaacuccaacagcaa

SEQ ID NO: 1896290 - RNA, 19 nt, Homo sapiens
  misc_RNA (1)...(19): siRNA sense strand
agauuaagaaggcauuuga

SEQ ID NO: 1896291 - RNA, 19 nt, Homo sapiens
  misc_RNA (1)...(19): siRNA sense strand
ccguggagaucaaugaauc

SEQ ID NO: 1896292 - RNA, 19 nt, Homo sapiens
  misc_RNA (1)...(19): siRNA sense strand
ggagcucaucuaccacaaa

SEQ ID NO: 1896293 - RNA, 19 nt, Homo sapiens
  misc_RNA (1)...(19): siRNA sense strand
ucaaugaauccgagccuau

SEQ ID NO: 1896294 - RNA, 19 nt, Homo sapiens
  misc_RNA (1)...(19): siRNA sense strand
guagagcaguacagcaacu

SEQ ID NO: 1896295 - RNA, 19 nt, Homo sapiens
  misc_RNA (1)...(19): siRNA sense strand
gaaggcauuugaggaaagc

SEQ ID NO: 1896296 - RNA, 19 nt, Homo sapiens
  misc_RNA (1)...(19): siRNA sense strand
gagauuaagaaggcauuug

SEQ ID NO: 1896297 - RNA, 19 nt, Homo sapiens
  misc_RNA (1)...(19): siRNA sense strand
gagacuauuaccugaacaa

SEQ ID NO: 1896298 - RNA, 19 nt, Homo sapiens
  misc_RNA (1)...(19): siRNA sense strand
caauaaccagcucuucuuc

SEQ ID NO: 1896299 - RNA, 19 nt, Homo sapiens
  misc_RNA (1)...(19): siRNA sense strand
gaagcuugugucucaguga

SEQ ID NO: 1896300 - RNA, 19 nt, Homo sapiens
  misc_RNA (1)...(19): siRNA sense strand
agagagaaaggcgcaagua

SEQ ID NO: 1896301 - RNA, 19 nt, Homo sapiens
  misc_RNA (1)...(19): siRNA sense strand
ucagaccgagugcauggua

SEQ ID NO: 1896302 - RNA, 19 nt, Homo sapiens
  misc_RNA (1)...(19): siRNA sense strand
ugagcacccugaaguggau

SEQ ID NO: 1896303 - RNA, 19 nt, Homo sapiens
  misc_RNA (1)...(19): siRNA sense strand
gacagaugccugcucaaca

SEQ ID NO: 1896304 - RNA, 19 nt, Homo sapiens
  misc_RNA (1)...(19): siRNA sense strand
caggagaagcgccgugaug

SEQ ID NO: 1896305 - RNA, 19 nt, Homo sapiens
  misc_RNA (1)...(19): siRNA sense strand
ccaugaacccgccucacaa

SEQ ID NO: 1896306 - RNA, 19 nt, Homo sapiens
  misc_RNA (1)...(19): siRNA sense strand
gagaaguucauggaaguca

SEQ ID NO: 1896307 - RNA, 19 nt, Homo sapiens
  misc_RNA (1)...(19): siRNA sense strand
cuucuucucugucuauguc

SEQ ID NO: 1896308 - RNA, 19 nt, Homo sapiens
  misc_RNA (1)...(19): siRNA sense strand
acccugggccucaccaaua

SEQ ID NO: 1896309 - RNA, 19 nt, Homo sapiens
  misc_RNA (1)...(19): siRNA sense strand
agaaggcauuugaggaaag

SEQ ID NO: 1896310 - RNA, 19 nt, Homo sapiens
  misc_RNA (1)...(19): siRNA sense strand
ggagauuaagaaggcauuu

SEQ ID NO: 1896311 - RNA, 19 nt, Homo sapiens
  misc_RNA (1)...(19): siRNA sense strand
ucagcaaccucugggaaca

SEQ ID NO: 1896312 - RNA, 19 nt, Homo sapiens
  misc_RNA (1)...(19): siRNA sense strand
uguggucuaugacaaggaa

SEQ ID NO: 1896313 - RNA, 19 nt, Homo sapiens
  misc_RNA (1)...(19): siRNA sense strand
gaaagcagaucuugucaua

SEQ ID NO: 1896314 - RNA, 19 nt, Homo sapiens
  misc_RNA (1)...(19): siRNA sense strand
gaacaaaccuuucuaugug

SEQ ID NO: 1896315 - RNA, 19 nt, Homo sapiens
  misc_RNA (1)...(19): siRNA sense strand
gaaagaagauccugacaug

SEQ ID NO: 1896316 - RNA, 19 nt, Homo sapiens
  misc_RNA (1)...(19): siRNA sense strand
gaauaucacugucaagaaa

SEQ ID NO: 1896317 - RNA, 19 nt, Homo sapiens
  misc_RNA (1)...(19): siRNA sense strand
gcagaucugugccauacuu

SEQ ID NO: 1896318 - RNA, 19 nt, Homo sapiens
  misc_RNA (1)...(19): siRNA sense strand
ggacguugcuggaguucuu

SEQ ID NO: 1896319 - RNA, 19 nt, Homo sapiens
  misc_RNA (1)...(19): siRNA sense strand
gaaaacggaggaauuauua

SEQ ID NO: 1896320 - RNA, 19 nt, Homo sapiens
  misc_RNA (1)...(19): siRNA sense strand
gacaaggaguuaauugaau

SEQ ID NO: 1896321 - RNA, 19 nt, Homo sapiens
  misc_RNA (1)...(19): siRNA sense strand
aagaagcgauuuaguguau

SEQ ID NO: 1896322 - RNA, 19 nt, Homo sapiens
  misc_RNA (1)...(19): siRNA sense strand
ucaucaagcucuaucugua

SEQ ID NO: 1896323 - RNA, 19 nt, Homo sapiens
  misc_RNA (1)...(19): siRNA sense strand
ggagaaagcagaucuuguc

SEQ ID NO: 1896324 - RNA, 19 nt, Homo sapiens
  misc_RNA (1)...(19): siRNA sense strand
aagcagaucuugucauagu

SEQ ID NO: 1896325 - RNA, 19 nt, Homo sapiens
  misc_RNA (1)...(19): siRNA sense strand
gagaauaucacugucaaga

SEQ ID NO: 1896326 - RNA, 19 nt, Homo sapiens
  misc_RNA (1)...(19): siRNA sense strand
gaagcgauuuaguguauac

SEQ ID NO: 1896327 - RNA, 19 nt, Homo sapiens
  misc_RNA (1)...(19): siRNA sense strand
guccggcucuuuccacuaa

SEQ ID NO: 1896328 - RNA, 19 nt, Homo sapiens
  misc_RNA (1)...(19): siRNA sense strand
gagcgacaauauugacuca

SEQ ID NO: 1896329 - RNA, 19 nt, Homo sapiens
  misc_RNA (1)...(19): siRNA sense strand
cgacaaggaguuaauugaa

SEQ ID NO: 1896330 - RNA, 19 nt, Homo sapiens
  misc_RNA (1)...(19): siRNA sense strand
cagcaagacgucccagaua

SEQ ID NO: 1896331 - RNA, 19 nt, Homo sapiens
  misc_RNA (1)...(19): siRNA sense strand
cuuaaucacucugcuguuu

SEQ ID NO: 1896332 - RNA, 19 nt, Homo sapiens
  misc_RNA (1)...(19): siRNA sense strand
ccaagaagcgauuuagugu

SEQ ID NO: 1896333 - RNA, 19 nt, Homo sapiens
  misc_RNA (1)...(19): siRNA sense strand
aaagauggagcgacaauau

SEQ ID NO: 1896334 - RNA, 19 nt, Homo sapiens
  misc_RNA (1)...(19): siRNA sense strand
agcaagacgucccagauaa

SEQ ID NO: 1896335 - RNA, 19 nt, Homo sapiens
  misc_RNA (1)...(19): siRNA sense strand
gaaacaaaauugcagaucu

SEQ ID NO: 1896336 - RNA, 19 nt, Homo sapiens
  misc_RNA (1)...(19): siRNA sense strand
caucaagcucuaucuguaa

SEQ ID NO: 1896337 - RNA, 19 nt, Homo sapiens
  misc_RNA (1)...(19): siRNA sense strand
ggaggaauuauuaacaaga

SEQ ID NO: 1896338 - RNA, 19 nt, Homo sapiens
  misc_RNA (1)...(19): siRNA sense strand
ugucauaguuggugcugaa

SEQ ID NO: 1896339 - RNA, 19 nt, Homo sapiens
  misc_RNA (1)...(19): siRNA sense strand
caagaagcgauuuagugua

SEQ ID NO: 1896340 - RNA, 19 nt, Homo sapiens
  misc_RNA (1)...(19): siRNA sense strand
ggacgacaaggaguuaauu

SEQ ID NO: 1896341 - RNA, 19 nt, Homo sapiens
  misc_RNA (1)...(19): siRNA sense strand
gcagaucuugucauaguug

SEQ ID NO: 1896342 - RNA, 19 nt, Homo sapiens
  misc_RNA (1)...(19): siRNA sense strand
gugccauacuuucaucaaa

SEQ ID NO: 1896343 - RNA, 19 nt, Homo sapiens
  misc_RNA (1)...(19): siRNA sense strand
cauaguuggugcugaagga

SEQ ID NO: 1896344 - RNA, 19 nt, Homo sapiens
  misc_RNA (1)...(19): siRNA sense strand
gccaagaagcgauuuagug

SEQ ID NO: 1896345 - RNA, 19 nt, Homo sapiens
  misc_RNA (1)...(19): siRNA sense strand
agacgucccagauaaguuu

SEQ ID NO: 1896346 - RNA, 19 nt, Homo sapiens
  misc_RNA (1)...(19): siRNA sense strand
cagagucacagccugauuu

SEQ ID NO: 1896347 - RNA, 19 nt, Homo sapiens
  misc_RNA (1)...(19): siRNA sense strand
gaucugugccauacuuuca

SEQ ID NO: 1896348 - RNA, 19 nt, Homo sapiens
  misc_RNA (1)...(19): siRNA sense strand
agucucagaugaaagaaga

SEQ ID NO: 1896349 - RNA, 19 nt, Homo sapiens
  misc_RNA (1)...(19): siRNA sense strand
caaagauggagcgacaaua

SEQ ID NO: 1896350 - RNA, 19 nt, Homo sapiens
  misc_RNA (1)...(19): siRNA sense strand
auacuccgauuacuccaaa

SEQ ID NO: 1896351 - RNA, 19 nt, Homo sapiens
  misc_RNA (1)...(19): siRNA sense strand
gcaagacgucccagauaag

SEQ ID NO: 1896352 - RNA, 19 nt, Homo sapiens
  misc_RNA (1)...(19): siRNA sense strand
ccagagugguccugagagu

SEQ ID NO: 1896353 - RNA, 19 nt, Homo sapiens
  misc_RNA (1)...(19): siRNA sense strand
ucccagauaaguuuaagua

SEQ ID NO: 1896354 - RNA, 19 nt, Homo sapiens
  misc_RNA (1)...(19): siRNA sense strand
uuaagucucagaugaaaga

SEQ ID NO: 1896355 - RNA, 19 nt, Homo sapiens
  misc_RNA (1)...(19): siRNA sense strand
uccgauuacuccaaaugua

SEQ ID NO: 1896356 - RNA, 19 nt, Homo sapiens
  misc_RNA (1)...(19): siRNA sense strand
uuaaucacucugcuguuua

SEQ ID NO: 1896357 - RNA, 19 nt, Homo sapiens
  misc_RNA (1)...(19): siRNA sense strand
ucucaccagugccauagaa

SEQ ID NO: 1896358 - RNA, 19 nt, Homo sapiens
  misc_RNA (1)...(19): siRNA sense strand
gauggagcgacaauauuga

SEQ ID NO: 1896359 - RNA, 19 nt, Homo sapiens
  misc_RNA (1)...(19): siRNA sense strand
uaaucacucugcuguuuac

SEQ ID NO: 1896360 - RNA, 19 nt, Homo sapiens
  misc_RNA (1)...(19): siRNA sense strand
aagcacagaacaaaccuuu

SEQ ID NO: 1896361 - RNA, 19 nt, Homo sapiens
  misc_RNA (1)...(19): siRNA sense strand
agauggagcgacaauauug

SEQ ID NO: 1896362 - RNA, 19 nt, Homo sapiens
  misc_RNA (1)...(19): siRNA sense strand
ccucagcagucagcgauga

SEQ ID NO: 1896363 - RNA, 19 nt, Homo sapiens
  misc_RNA (1)...(19): siRNA sense strand
acggaggaauuauuaacaa

SEQ ID NO: 1896364 - RNA, 19 nt, Homo sapiens
  misc_RNA (1)...(19): siRNA sense strand
gagaaagcagaucuuguca

SEQ ID NO: 1896365 - RNA, 19 nt, Homo sapiens
  misc_RNA (1)...(19): siRNA sense strand
gucacagccugauuuguca

SEQ ID NO: 1896366 - RNA, 19 nt, Homo sapiens
  misc_RNA (1)...(19): siRNA sense strand
gcugaaggaguuguugaaa

SEQ ID NO: 1896367 - RNA, 19 nt, Homo sapiens
  misc_RNA (1)...(19): siRNA sense strand
ugauuugucagguaagaaa

SEQ ID NO: 1896368 - RNA, 19 nt, Homo sapiens
  misc_RNA (1)...(19): siRNA sense strand
cuuuaagucucagaugaaa

SEQ ID NO: 1896369 - RNA, 19 nt, Homo sapiens
  misc_RNA (1)...(19): siRNA sense strand
gacgacaaggaguuaauug

SEQ ID NO: 1896370 - RNA, 19 nt, Homo sapiens
  misc_RNA (1)...(19): siRNA sense strand
ucaaagauggagcgacaau

SEQ ID NO: 1896371 - RNA, 19 nt, Homo sapiens
  misc_RNA (1)...(19): siRNA sense strand
caaucucaccagugccaua

SEQ ID NO: 1896372 - RNA, 19 nt, Homo sapiens
  misc_RNA (1)...(19): siRNA sense strand
agaagcgauuuaguguaua

SEQ ID NO: 1896373 - RNA, 19 nt, Homo sapiens
  misc_RNA (1)...(19): siRNA sense strand
aggagaauaucacugucaa

SEQ ID NO: 1896374 - RNA, 19 nt, Homo sapiens
  misc_RNA (1)...(19): siRNA sense strand
caagacgucccagauaagu

SEQ ID NO: 1896375 - RNA, 19 nt, Homo sapiens
  misc_RNA (1)...(19): siRNA sense strand
ugaaagaagauccugacau

SEQ ID NO: 1896376 - RNA, 19 nt, Homo sapiens
  misc_RNA (1)...(19): siRNA sense strand
guugaaaacggaggaauua

SEQ ID NO: 1896377 - RNA, 19 nt, Homo sapiens
  misc_RNA (1)...(19): siRNA sense strand
agaauaucacugucaagaa

SEQ ID NO: 1896378 - RNA, 19 nt, Homo sapiens
  misc_RNA (1)...(19): siRNA sense strand
ugccaaagcacagaacaaa

SEQ ID NO: 1896379 - RNA, 19 nt, Homo sapiens
  misc_RNA (1)...(19): siRNA sense strand
guaagaaaauggccaaagc

SEQ ID NO: 1896380 - RNA, 19 nt, Homo sapiens
  misc_RNA (1)...(19): siRNA sense strand
cuaugugguugcagaaagu

SEQ ID NO: 1896381 - RNA, 19 nt, Homo sapiens
  misc_RNA (1)...(19): siRNA sense strand
aaacaaaauugcagaucug

SEQ ID NO: 1896382 - RNA, 19 nt, Homo sapiens
  misc_RNA (1)...(19): siRNA sense strand
cggaggaauuauuaacaag

SEQ ID NO: 1896383 - RNA, 19 nt, Homo sapiens
  misc_RNA (1)...(19): siRNA sense strand
aagauggagcgacaauauu

SEQ ID NO: 1896384 - RNA, 19 nt, Homo sapiens
  misc_RNA (1)...(19): siRNA sense strand
uugcagaucugugccauac

SEQ ID NO: 1896385 - RNA, 19 nt, Homo sapiens
  misc_RNA (1)...(19): siRNA sense strand
ucggcuacaucauggagaa

SEQ ID NO: 1896386 - RNA, 19 nt, Homo sapiens
  misc_RNA (1)...(19): siRNA sense strand
caaguuuguccggcucuuu

SEQ ID NO: 1896387 - RNA, 19 nt, Homo sapiens
  misc_RNA (1)...(19): siRNA sense strand
ugaaggaguuguugaaaac

SEQ ID NO: 1896388 - RNA, 19 nt, Homo sapiens
  misc_RNA (1)...(19): siRNA sense strand
aaacggaggaauuauuaac

SEQ ID NO: 1896389 - RNA, 19 nt, Homo sapiens
  misc_RNA (1)...(19): siRNA sense strand
agucuugccucccuggaau

SEQ ID NO: 1896390 - RNA, 19 nt, Homo sapiens
  misc_RNA (1)...(19): siRNA sense strand
ugaaaacggaggaauuauu

SEQ ID NO: 1896391 - RNA, 19 nt, Homo sapiens
  misc_RNA (1)...(19): siRNA sense strand
gacuggacaagaccucaaa

SEQ ID NO: 1896392 - RNA, 19 nt, Homo sapiens
  misc_RNA (1)...(19): siRNA sense strand
ccagcaagacgucccagau

SEQ ID NO: 1896393 - RNA, 19 nt, Homo sapiens
  misc_RNA (1)...(19): siRNA sense strand
caggagaauaucacuguca

SEQ ID NO: 1896394 - RNA, 19 nt, Homo sapiens
  misc_RNA (1)...(19): siRNA sense strand
ucuaugugguugcagaaag

SEQ ID NO: 1896395 - RNA, 19 nt, Homo sapiens
  misc_RNA (1)...(19): siRNA sense strand
ccaaagcacagaacaaacc

SEQ ID NO: 1896396 - RNA, 19 nt, Homo sapiens
  misc_RNA (1)...(19): siRNA sense strand
agucacagccugauuuguc

SEQ ID NO: 1896397 - RNA, 19 nt, Homo sapiens
  misc_RNA (1)...(19): siRNA sense strand
gcucaucaagcucuaucug

SEQ ID NO: 1896398 - RNA, 19 nt, Homo sapiens
  misc_RNA (1)...(19): siRNA sense strand
gcagauguauuucaugaua

SEQ ID NO: 1896399 - RNA, 19 nt, Homo sapiens
  misc_RNA (1)...(19): siRNA sense strand
gaaggcagcccuacagaaa

SEQ ID NO: 1896400 - RNA, 19 nt, Homo sapiens
  misc_RNA (1)...(19): siRNA sense strand
gaaaucugcucaucaucuu

SEQ ID NO: 1896401 - RNA, 19 nt, Homo sapiens
  misc_RNA (1)...(19): siRNA sense strand
guucugacguccacuuuaa

SEQ ID NO: 1896402 - RNA, 19 nt, Homo sapiens
  misc_RNA (1)...(19): siRNA sense strand
ggucuugggugauuggaaa

SEQ ID NO: 1896403 - RNA, 19 nt, Homo sapiens
  misc_RNA (1)...(19): siRNA sense strand
caaguuccaucuaccaaga

SEQ ID NO: 1896404 - RNA, 19 nt, Homo sapiens
  misc_RNA (1)...(19): siRNA sense strand
gcagcaaguucaucuccuu

SEQ ID NO: 1896405 - RNA, 19 nt, Homo sapiens
  misc_RNA (1)...(19): siRNA sense strand
caacgaugggcauguauuu

SEQ ID NO: 1896406 - RNA, 19 nt, Homo sapiens
  misc_RNA (1)...(19): siRNA sense strand
gacguccacuuuaauguga

SEQ ID NO: 1896407 - RNA, 19 nt, Homo sapiens
  misc_RNA (1)...(19): siRNA sense strand
ggccaucugugcugacauu

SEQ ID NO: 1896408 - RNA, 19 nt, Homo sapiens
  misc_RNA (1)...(19): siRNA sense strand
gccaucagcugcccacuuc

SEQ ID NO: 1896409 - RNA, 19 nt, Homo sapiens
  misc_RNA (1)...(19): siRNA sense strand
uaccaagagucuauucaaa

SEQ ID NO: 1896410 - RNA, 19 nt, Homo sapiens
  misc_RNA (1)...(19): siRNA sense strand
ggucuuguauccugcuuau

SEQ ID NO: 1896411 - RNA, 19 nt, Homo sapiens
  misc_RNA (1)...(19): siRNA sense strand
ggaaaucugcucaucaucu

SEQ ID NO: 1896412 - RNA, 19 nt, Homo sapiens
  misc_RNA (1)...(19): siRNA sense strand
ugauaacugugauguaugu

SEQ ID NO: 1896413 - RNA, 19 nt, Homo sapiens
  misc_RNA (1)...(19): siRNA sense strand
ccauuacuaugcaucauug

SEQ ID NO: 1896414 - RNA, 19 nt, Homo sapiens
  misc_RNA (1)...(19): siRNA sense strand
ucuauagucugagaaauug

SEQ ID NO: 1896415 - RNA, 19 nt, Homo sapiens
  misc_RNA (1)...(19): siRNA sense strand
uacagaaacucuucagcaa

SEQ ID NO: 1896416 - RNA, 19 nt, Homo sapiens
  misc_RNA (1)...(19): siRNA sense strand
gcaaguucaucuccuuugg

SEQ ID NO: 1896417 - RNA, 19 nt, Homo sapiens
  misc_RNA (1)...(19): siRNA sense strand
uagccaauuucuacuguga

SEQ ID NO: 1896418 - RNA, 19 nt, Homo sapiens
  misc_RNA (1)...(19): siRNA sense strand
agugauaacugugauguau

SEQ ID NO: 1896419 - RNA, 19 nt, Homo sapiens
  misc_RNA (1)...(19): siRNA sense strand
ccacuucauuacacaacaa

SEQ ID NO: 1896420 - RNA, 19 nt, Homo sapiens
  misc_RNA (1)...(19): siRNA sense strand
ccaagagucuauucaaagc

SEQ ID NO: 1896421 - RNA, 19 nt, Homo sapiens
  misc_RNA (1)...(19): siRNA sense strand
caauuucuacugugacauu

SEQ ID NO: 1896422 - RNA, 19 nt, Homo sapiens
  misc_RNA (1)...(19): siRNA sense strand
ccccaaagaugcagugaua

SEQ ID NO: 1896423 - RNA, 19 nt, Homo sapiens
  misc_RNA (1)...(19): siRNA sense strand
ccaucacacugacuggaaa

SEQ ID NO: 1896424 - RNA, 19 nt, Homo sapiens
  misc_RNA (1)...(19): siRNA sense strand
gaaaaucaauccuuuaacc

SEQ ID NO: 1896425 - RNA, 19 nt, Homo sapiens
  misc_RNA (1)...(19): siRNA sense strand
gaauaaugucuucuuugug

SEQ ID NO: 1896426 - RNA, 19 nt, Homo sapiens
  misc_RNA (1)...(19): siRNA sense strand
acugugacauuaugccuuu

SEQ ID NO: 1896427 - RNA, 19 nt, Homo sapiens
  misc_RNA (1)...(19): siRNA sense strand
augcagauguauuucauga

SEQ ID NO: 1896428 - RNA, 19 nt, Homo sapiens
  misc_RNA (1)...(19): siRNA sense strand
gccuaaugcagauguauuu

SEQ ID NO: 1896429 - RNA, 19 nt, Homo sapiens
  misc_RNA (1)...(19): siRNA sense strand
gcucccaccucacaguugu

SEQ ID NO: 1896430 - RNA, 19 nt, Homo sapiens
  misc_RNA (1)...(19): siRNA sense strand
cagcaagaacagaauaaug

SEQ ID NO: 1896431 - RNA, 19 nt, Homo sapiens
  misc_RNA (1)...(19): siRNA sense strand
gcaucauugucuccuaugu

SEQ ID NO: 1896432 - RNA, 19 nt, Homo sapiens
  misc_RNA (1)...(19): siRNA sense strand
accaggaaguagccaauuu

SEQ ID NO: 1896433 - RNA, 19 nt, Homo sapiens
  misc_RNA (1)...(19): siRNA sense strand
ucagcugcccacuucauua

SEQ ID NO: 1896434 - RNA, 19 nt, Homo sapiens
  misc_RNA (1)...(19): siRNA sense strand
gcaagaacagaauaauguc

SEQ ID NO: 1896435 - RNA, 19 nt, Homo sapiens
  misc_RNA (1)...(19): siRNA sense strand
gggaguuacuagucagcaa

SEQ ID NO: 1896436 - RNA, 19 nt, Homo sapiens
  misc_RNA (1)...(19): siRNA sense strand
ccacuuuaaugugaagaug

SEQ ID NO: 1896437 - RNA, 19 nt, Homo sapiens
  misc_RNA (1)...(19): siRNA sense strand
gccaauuucuacugugaca

SEQ ID NO: 1896438 - RNA, 19 nt, Homo sapiens
  misc_RNA (1)...(19): siRNA sense strand
ccuuucaucuauagucuga

SEQ ID NO: 1896439 - RNA, 19 nt, Homo sapiens
  misc_RNA (1)...(19): siRNA sense strand
gaugccuaaugcagaugua

SEQ ID NO: 1896440 - RNA, 19 nt, Homo sapiens
  misc_RNA (1)...(19): siRNA sense strand
cugagaaauugggauauga

SEQ ID NO: 1896441 - RNA, 19 nt, Homo sapiens
  misc_RNA (1)...(19): siRNA sense strand
ucuuguauccugcuuauug

SEQ ID NO: 1896442 - RNA, 19 nt, Homo sapiens
  misc_RNA (1)...(19): siRNA sense strand
gcuauaccuuggcugcaau

SEQ ID NO: 1896443 - RNA, 19 nt, Homo sapiens
  misc_RNA (1)...(19): siRNA sense strand
ggccaaggcagacagcuau

SEQ ID NO: 1896444 - RNA, 19 nt, Homo sapiens
  misc_RNA (1)...(19): siRNA sense strand
cuggaaaucugcucaucau

SEQ ID NO: 1896445 - RNA, 19 nt, Homo sapiens
  misc_RNA (1)...(19): siRNA sense strand
cuaaggugcuggccaacca

SEQ ID NO: 1896446 - RNA, 19 nt, Homo sapiens
  misc_RNA (1)...(19): siRNA sense strand
ugagaaauugggauaugaa

SEQ ID NO: 1896447 - RNA, 19 nt, Homo sapiens
  misc_RNA (1)...(19): siRNA sense strand
ucugagaaauugggauaug

SEQ ID NO: 1896448 - RNA, 19 nt, Homo sapiens
  misc_RNA (1)...(19): siRNA sense strand
gcauuaaauccuuucaucu

SEQ ID NO: 1896449 - RNA, 19 nt, Homo sapiens
  misc_RNA (1)...(19): siRNA sense strand
agaacagaauaaugucuuc

SEQ ID NO: 1896450 - RNA, 19 nt, Homo sapiens
  misc_RNA (1)...(19): siRNA sense strand
cagauguauuucaugauag

SEQ ID NO: 1896451 - RNA, 19 nt, Homo sapiens
  misc_RNA (1)...(19): siRNA sense strand
gcagugaccccagcauuaa

SEQ ID NO: 1896452 - RNA, 19 nt, Homo sapiens
  misc_RNA (1)...(19): siRNA sense strand
ccaaagaugcagugauaac

SEQ ID NO: 1896453 - RNA, 19 nt, Homo sapiens
  misc_RNA (1)...(19): siRNA sense strand
ccaggaaguagccaauuuc

SEQ ID NO: 1896454 - RNA, 19 nt, Homo sapiens
  misc_RNA (1)...(19): siRNA sense strand
uuucuacugugacauuaug

SEQ ID NO: 1896455 - RNA, 19 nt, Homo sapiens
  misc_RNA (1)...(19): siRNA sense strand
ugaaggcagcccuacagaa

SEQ ID NO: 1896456 - RNA, 19 nt, Homo sapiens
  misc_RNA (1)...(19): siRNA sense strand
uuucaucuauagucugaga

SEQ ID NO: 1896457 - RNA, 19 nt, Homo sapiens
  misc_RNA (1)...(19): siRNA sense strand
agcaagaacagaauaaugu

SEQ ID NO: 1896458 - RNA, 19 nt, Homo sapiens
  misc_RNA (1)...(19): siRNA sense strand
caucauugucuccuauguu

SEQ ID NO: 1896459 - RNA, 19 nt, Homo sapiens
  misc_RNA (1)...(19): siRNA sense strand
gccauuacuaugcaucauu

SEQ ID NO: 1896460 - RNA, 19 nt, Homo sapiens
  misc_RNA (1)...(19): siRNA sense strand
gugcugacauucgccuuca

SEQ ID NO: 1896461 - RNA, 19 nt, Homo sapiens
  misc_RNA (1)...(19): siRNA sense strand
agcauuaaauccuuucauc

SEQ ID NO: 1896462 - RNA, 19 nt, Homo sapiens
  misc_RNA (1)...(19): siRNA sense strand
cagcaaguucaucuccuuu

SEQ ID NO: 1896463 - RNA, 19 nt, Homo sapiens
  misc_RNA (1)...(19): siRNA sense strand
gagaaauugggauaugaag

SEQ ID NO: 1896464 - RNA, 19 nt, Homo sapiens
  misc_RNA (1)...(19): siRNA sense strand
cuaccaagagucuauucaa

SEQ ID NO: 1896465 - RNA, 19 nt, Homo sapiens
  misc_RNA (1)...(19): siRNA sense strand
ugacguccacuuuaaugug

SEQ ID NO: 1896466 - RNA, 19 nt, Homo sapiens
  misc_RNA (1)...(19): siRNA sense strand
uugcugaaguuguccuguu

SEQ ID NO: 1896467 - RNA, 19 nt, Homo sapiens
  misc_RNA (1)...(19): siRNA sense strand
cauuaugccuuugcugaag

SEQ ID NO: 1896468 - RNA, 19 nt, Homo sapiens
  misc_RNA (1)...(19): siRNA sense strand
ucacagcuaguuuguccuu

SEQ ID NO: 1896469 - RNA, 19 nt, Homo sapiens
  misc_RNA (1)...(19): siRNA sense strand
caaccaggaaguagccaau

SEQ ID NO: 1896470 - RNA, 19 nt, Homo sapiens
  misc_RNA (1)...(19): siRNA sense strand
caucuauagucugagaaau

SEQ ID NO: 1896471 - RNA, 19 nt, Homo sapiens
  misc_RNA (1)...(19): siRNA sense strand
cuaaugcagauguauuuca

SEQ ID NO: 1896472 - RNA, 19 nt, Homo sapiens
  misc_RNA (1)...(19): siRNA sense strand
cacacugacuggaaaucug

SEQ ID NO: 1896473 - RNA, 19 nt, Homo sapiens
  misc_RNA (1)...(19): siRNA sense strand
agucugagaaauugggaua

SEQ ID NO: 1896474 - RNA, 19 nt, Homo sapiens
  misc_RNA (1)...(19): siRNA sense strand
ggcagugaccccagcauua

SEQ ID NO: 1896475 - RNA, 19 nt, Homo sapiens
  misc_RNA (1)...(19): siRNA sense strand
cuagucagcaagaacagaa

SEQ ID NO: 1896476 - RNA, 19 nt, Homo sapiens
  misc_RNA (1)...(19): siRNA sense strand
caaagaugcagugauaacu

SEQ ID NO: 1896477 - RNA, 19 nt, Homo sapiens
  misc_RNA (1)...(19): siRNA sense strand
caagaacagaauaaugucu

SEQ ID NO: 1896478 - RNA, 19 nt, Homo sapiens
  misc_RNA (1)...(19): siRNA sense strand
cagcuaguuuguccuucug

SEQ ID NO: 1896479 - RNA, 19 nt, Homo sapiens
  misc_RNA (1)...(19): siRNA sense strand
uggcugcaauggcauacga

SEQ ID NO: 1896480 - RNA, 19 nt, Homo sapiens
  misc_RNA (1)...(19): siRNA sense strand
uccacagucuuccaaguuc

SEQ ID NO: 1896481 - RNA, 19 nt, Homo sapiens
  misc_RNA (1)...(19): siRNA sense strand
gacuggaaaucugcucauc

SEQ ID NO: 1896482 - RNA, 19 nt, Homo sapiens
  misc_RNA (1)...(19): siRNA sense strand
ccuuuaaccuggauuuuau

SEQ ID NO: 1896483 - RNA, 19 nt, Homo sapiens
  misc_RNA (1)...(19): siRNA sense strand
gccaaggcagacagcuaua

SEQ ID NO: 1896484 - RNA, 19 nt, Homo sapiens
  misc_RNA (1)...(19): siRNA sense strand
aucauugucuccuauguuc

SEQ ID NO: 1896485 - RNA, 19 nt, Homo sapiens
  misc_RNA (1)...(19): siRNA sense strand
gaguuacuagucagcaaga

SEQ ID NO: 1896486 - RNA, 19 nt, Homo sapiens
  misc_RNA (1)...(19): siRNA sense strand
gucagcaagaacagaauaa

SEQ ID NO: 1896487 - RNA, 19 nt, Homo sapiens
  misc_RNA (1)...(19): siRNA sense strand
ucaucuauagucugagaaa

SEQ ID NO: 1896488 - RNA, 19 nt, Homo sapiens
  misc_RNA (1)...(19): siRNA sense strand
ucuccuauguucaggucuu

SEQ ID NO: 1896489 - RNA, 19 nt, Homo sapiens
  misc_RNA (1)...(19): siRNA sense strand
ggucggcguuuucucuuug

SEQ ID NO: 1896490 - RNA, 19 nt, Homo sapiens
  misc_RNA (1)...(19): siRNA sense strand
gaagaaagaaaaucaaucc

SEQ ID NO: 1896491 - RNA, 19 nt, Homo sapiens
  misc_RNA (1)...(19): siRNA sense strand
gcagugaggucuucaagug

SEQ ID NO: 1896492 - RNA, 19 nt, Homo sapiens
  misc_RNA (1)...(19): siRNA sense strand
gagcuucggugacagcaaa

SEQ ID NO: 1896493 - RNA, 19 nt, Homo sapiens
  misc_RNA (1)...(19): siRNA sense strand
caucggagccuucaacauu

SEQ ID NO: 1896494 - RNA, 19 nt, Homo sapiens
  misc_RNA (1)...(19): siRNA sense strand
acaaggagauguaccuguu

SEQ ID NO: 1896495 - RNA, 19 nt, Homo sapiens
  misc_RNA (1)...(19): siRNA sense strand
agauguaccuguucgugua

SEQ ID NO: 1896496 - RNA, 19 nt, Homo sapiens
  misc_RNA (1)...(19): siRNA sense strand
gagcacgaguacagcuuug

SEQ ID NO: 1896497 - RNA, 19 nt, Homo sapiens
  misc_RNA (1)...(19): siRNA sense strand
gauccuggcuggcuaugac

SEQ ID NO: 1896498 - RNA, 19 nt, Homo sapiens
  misc_RNA (1)...(19): siRNA sense strand
gaggagcagugaggucuuc

SEQ ID NO: 1896499 - RNA, 19 nt, Homo sapiens
  misc_RNA (1)...(19): siRNA sense strand
ggaccagacucaggcucuu

SEQ ID NO: 1896500 - RNA, 19 nt, Homo sapiens
  misc_RNA (1)...(19): siRNA sense strand
gaagauccuggcuggcuau

SEQ ID NO: 1896501 - RNA, 19 nt, Homo sapiens
  misc_RNA (1)...(19): siRNA sense strand
cacagaaccuggugcugau

SEQ ID NO: 1896502 - RNA, 19 nt, Homo sapiens
  misc_RNA (1)...(19): siRNA sense strand
caacgccgacugcagcuau

SEQ ID NO: 1896503 - RNA, 19 nt, Homo sapiens
  misc_RNA (1)...(19): siRNA sense strand
gcagcaucaucgcgaagau

SEQ ID NO: 1896504 - RNA, 19 nt, Homo sapiens
  misc_RNA (1)...(19): siRNA sense strand
gcacgaguacagcuuugug

SEQ ID NO: 1896505 - RNA, 19 nt, Homo sapiens
  misc_RNA (1)...(19): siRNA sense strand
gcaccgacgacaugcuguu

SEQ ID NO: 1896506 - RNA, 19 nt, Homo sapiens
  misc_RNA (1)...(19): siRNA sense strand
auucagagcuucggugaca

SEQ ID NO: 1896507 - RNA, 19 nt, Homo sapiens
  misc_RNA (1)...(19): siRNA sense strand
ggagaucgacgcgcucuac

SEQ ID NO: 1896508 - RNA, 19 nt, Homo sapiens
  misc_RNA (1)...(19): siRNA sense strand
gagcagugaggucuucaag

SEQ ID NO: 1896509 - RNA, 19 nt, Homo sapiens
  misc_RNA (1)...(19): siRNA sense strand
cgagcacgaguacagcuuu

SEQ ID NO: 1896510 - RNA, 19 nt, Homo sapiens
  misc_RNA (1)...(19): siRNA sense strand
ccucaaguuccaccgauga

SEQ ID NO: 1896511 - RNA, 19 nt, Homo sapiens
  misc_RNA (1)...(19): siRNA sense strand
ucggagccuucaacauuca

SEQ ID NO: 1896512 - RNA, 19 nt, Homo sapiens
  misc_RNA (1)...(19): siRNA sense strand
ugccaucagcgaccacuuu

SEQ ID NO: 1896513 - RNA, 19 nt, Homo sapiens
  misc_RNA (1)...(19): siRNA sense strand
caaggagauguaccuguuc

SEQ ID NO: 1896514 - RNA, 19 nt, Homo sapiens
  misc_RNA (1)...(19): siRNA sense strand
gccgggaccaguacaagga

SEQ ID NO: 1896515 - RNA, 19 nt, Homo sapiens
  misc_RNA (1)...(19): siRNA sense strand
cauggaagauggcuuaaua

SEQ ID NO: 1896516 - RNA, 19 nt, Homo sapiens
  misc_RNA (1)...(19): siRNA sense strand
acacagagcucuaugagau

SEQ ID NO: 1896517 - RNA, 19 nt, Homo sapiens
  misc_RNA (1)...(19): siRNA sense strand
ucacaaaggucaugagcaa

SEQ ID NO: 1896518 - RNA, 19 nt, Homo sapiens
  misc_RNA (1)...(19): siRNA sense strand
gcagaaucgucaaugauga

SEQ ID NO: 1896519 - RNA, 19 nt, Homo sapiens
  misc_RNA (1)...(19): siRNA sense strand
gcaccaccaugaucauuga

SEQ ID NO: 1896520 - RNA, 19 nt, Homo sapiens
  misc_RNA (1)...(19): siRNA sense strand
gaagauggcuuaauaaaac

SEQ ID NO: 1896521 - RNA, 19 nt, Homo sapiens
  misc_RNA (1)...(19): siRNA sense strand
gaauaucuguggguucuga

SEQ ID NO: 1896522 - RNA, 19 nt, Homo sapiens
  misc_RNA (1)...(19): siRNA sense strand
gcacaaacgcugccaagau

SEQ ID NO: 1896523 - RNA, 19 nt, Homo sapiens
  misc_RNA (1)...(19): siRNA sense strand
gcaagaucaugcuggaaga

SEQ ID NO: 1896524 - RNA, 19 nt, Homo sapiens
  misc_RNA (1)...(19): siRNA sense strand
uaucacaucucugaguuaa

SEQ ID NO: 1896525 - RNA, 19 nt, Homo sapiens
  misc_RNA (1)...(19): siRNA sense strand
cacaguagaugacuucuuc

SEQ ID NO: 1896526 - RNA, 19 nt, Homo sapiens
  misc_RNA (1)...(19): siRNA sense strand
ggacaucacccacuggaau

SEQ ID NO: 1896527 - RNA, 19 nt, Homo sapiens
  misc_RNA (1)...(19): siRNA sense strand
gaggcagaaucgucaauga

SEQ ID NO: 1896528 - RNA, 19 nt, Homo sapiens
  misc_RNA (1)...(19): siRNA sense strand
ggauuuguaucaaguaucu

SEQ ID NO: 1896529 - RNA, 19 nt, Homo sapiens
  misc_RNA (1)...(19): siRNA sense strand
cagcugaccucaucucaca

SEQ ID NO: 1896530 - RNA, 19 nt, Homo sapiens
  misc_RNA (1)...(19): siRNA sense strand
ggagcaaacccgcauguug

SEQ ID NO: 1896531 - RNA, 19 nt, Homo sapiens
  misc_RNA (1)...(19): siRNA sense strand
gaagaguugcugugacuau

SEQ ID NO: 1896532 - RNA, 19 nt, Homo sapiens
  misc_RNA (1)...(19): siRNA sense strand
cacaaacgcugccaagauc

SEQ ID NO: 1896533 - RNA, 19 nt, Homo sapiens
  misc_RNA (1)...(19): siRNA sense strand
caaggcggcugcauuugug

SEQ ID NO: 1896534 - RNA, 19 nt, Homo sapiens
  misc_RNA (1)...(19): siRNA sense strand
gaacccaccugugaggaau

SEQ ID NO: 1896535 - RNA, 19 nt, Homo sapiens
  misc_RNA (1)...(19): siRNA sense strand
gcaucgauguccauacuca

SEQ ID NO: 1896536 - RNA, 19 nt, Homo sapiens
  misc_RNA (1)...(19): siRNA sense strand
gaucgucucugccaagaac

SEQ ID NO: 1896537 - RNA, 19 nt, Homo sapiens
  misc_RNA (1)...(19): siRNA sense strand
guuaacuccuucaugguuu

SEQ ID NO: 1896538 - RNA, 19 nt, Homo sapiens
  misc_RNA (1)...(19): siRNA sense strand
uuacauggaagauggcuua

SEQ ID NO: 1896539 - RNA, 19 nt, Homo sapiens
  misc_RNA (1)...(19): siRNA sense strand
ggaaugaccacaguagaug

SEQ ID NO: 1896540 - RNA, 19 nt, Homo sapiens
  misc_RNA (1)...(19): siRNA sense strand
cuucagcacugcccagaaa

SEQ ID NO: 1896541 - RNA, 19 nt, Homo sapiens
  misc_RNA (1)...(19): siRNA sense strand
gagugcagcugaccucauc

SEQ ID NO: 1896542 - RNA, 19 nt, Homo sapiens
  misc_RNA (1)...(19): siRNA sense strand
ugacugaggccuaugagaa

SEQ ID NO: 1896543 - RNA, 19 nt, Homo sapiens
  misc_RNA (1)...(19): siRNA sense strand
gggaagaguugcugugacu

SEQ ID NO: 1896544 - RNA, 19 nt, Homo sapiens
  misc_RNA (1)...(19): siRNA sense strand
ucuaauaucacaucucuga

SEQ ID NO: 1896545 - RNA, 19 nt, Homo sapiens
  misc_RNA (1)...(19): siRNA sense strand
guucuaauaucacaucucu

SEQ ID NO: 1896546 - RNA, 19 nt, Homo sapiens
  misc_RNA (1)...(19): siRNA sense strand
ggccaaggcggcugcauuu

SEQ ID NO: 1896547 - RNA, 19 nt, Homo sapiens
  misc_RNA (1)...(19): siRNA sense strand
cuucaucagucgggauuua

SEQ ID NO: 1896548 - RNA, 19 nt, Homo sapiens
  misc_RNA (1)...(19): siRNA sense strand
guacugagcaggccagaag

SEQ ID NO: 1896549 - RNA, 19 nt, Homo sapiens
  misc_RNA (1)...(19): siRNA sense strand
uaugagaaauggagagagu

SEQ ID NO: 1896550 - RNA, 19 nt, Homo sapiens
  misc_RNA (1)...(19): siRNA sense strand
caacuacuccggacuacau

SEQ ID NO: 1896551 - RNA, 19 nt, Homo sapiens
  misc_RNA (1)...(19): siRNA sense strand
uuaacuccuucaugguuua

SEQ ID NO: 1896552 - RNA, 19 nt, Homo sapiens
  misc_RNA (1)...(19): siRNA sense strand
gaaugaccacaguagauga

SEQ ID NO: 1896553 - RNA, 19 nt, Homo sapiens
  misc_RNA (1)...(19): siRNA sense strand
ugcagaaccucaucaagga

SEQ ID NO: 1896554 - RNA, 19 nt, Homo sapiens
  misc_RNA (1)...(19): siRNA sense strand
ccaagaucuucaaccugua

SEQ ID NO: 1896555 - RNA, 19 nt, Homo sapiens
  misc_RNA (1)...(19): siRNA sense strand
aauaucacaucucugaguu

SEQ ID NO: 1896556 - RNA, 19 nt, Homo sapiens
  misc_RNA (1)...(19): siRNA sense strand
gacugaggccuaugagaaa

SEQ ID NO: 1896557 - RNA, 19 nt, Homo sapiens
  misc_RNA (1)...(19): siRNA sense strand
cagaguacaacaucuuuga

SEQ ID NO: 1896558 - RNA, 19 nt, Homo sapiens
  misc_RNA (1)...(19): siRNA sense strand
ggacaacuucacagccauu

SEQ ID NO: 1896559 - RNA, 19 nt, Homo sapiens
  misc_RNA (1)...(19): siRNA sense strand
agaaagcaauugggaagga

SEQ ID NO: 1896560 - RNA, 19 nt, Homo sapiens
  misc_RNA (1)...(19): siRNA sense strand
gcacugcccagaaagcaau

SEQ ID NO: 1896561 - RNA, 19 nt, Homo sapiens
  misc_RNA (1)...(19): siRNA sense strand
ggaagauggcuuaauaaaa

SEQ ID NO: 1896562 - RNA, 19 nt, Homo sapiens
  misc_RNA (1)...(19): siRNA sense strand
ggccauugcucaaguucau

SEQ ID NO: 1896563 - RNA, 19 nt, Homo sapiens
  misc_RNA (1)...(19): siRNA sense strand
guacgaugggccuguguuu

SEQ ID NO: 1896564 - RNA, 19 nt, Homo sapiens
  misc_RNA (1)...(19): siRNA sense strand
gggaaugaccacaguagau

SEQ ID NO: 1896565 - RNA, 19 nt, Homo sapiens
  misc_RNA (1)...(19): siRNA sense strand
ggauccagaugcugugaag

SEQ ID NO: 1896566 - RNA, 19 nt, Homo sapiens
  misc_RNA (1)...(19): siRNA sense strand
ucaaguucaugcugagaau

SEQ ID NO: 1896567 - RNA, 19 nt, Homo sapiens
  misc_RNA (1)...(19): siRNA sense strand
gguuaacuccuucaugguu

SEQ ID NO: 1896568 - RNA, 19 nt, Homo sapiens
  misc_RNA (1)...(19): siRNA sense strand
gcagcccguucuccgacua

SEQ ID NO: 1896569 - RNA, 19 nt, Homo sapiens
  misc_RNA (1)...(19): siRNA sense strand
acaaaggucaugagcaaga

SEQ ID NO: 1896570 - RNA, 19 nt, Homo sapiens
  misc_RNA (1)...(19): siRNA sense strand
ccagaaggccauguacuga

SEQ ID NO: 1896571 - RNA, 19 nt, Homo sapiens
  misc_RNA (1)...(19): siRNA sense strand
gggcugaugggaagaguug

SEQ ID NO: 1896572 - RNA, 19 nt, Homo sapiens
  misc_RNA (1)...(19): siRNA sense strand
gaggagugaagaccauuga

SEQ ID NO: 1896573 - RNA, 19 nt, Homo sapiens
  misc_RNA (1)...(19): siRNA sense strand
uggaagauggcuuaauaaa

SEQ ID NO: 1896574 - RNA, 19 nt, Homo sapiens
  misc_RNA (1)...(19): siRNA sense strand
ggcagaaucgucaaugaug

SEQ ID NO: 1896575 - RNA, 19 nt, Homo sapiens
  misc_RNA (1)...(19): siRNA sense strand
caaacccgcauguuggaaa

SEQ ID NO: 1896576 - RNA, 19 nt, Homo sapiens
  misc_RNA (1)...(19): siRNA sense strand
ccaaggcggcugcauuugu

SEQ ID NO: 1896577 - RNA, 19 nt, Homo sapiens
  misc_RNA (1)...(19): siRNA sense strand
gaugaucaguccuuuuaug

SEQ ID NO: 1896578 - RNA, 19 nt, Homo sapiens
  misc_RNA (1)...(19): siRNA sense strand
ggagugaagaccauugaag

SEQ ID NO: 1896579 - RNA, 19 nt, Homo sapiens
  misc_RNA (1)...(19): siRNA sense strand
cgagugaccgucuccuuau

SEQ ID NO: 1896580 - RNA, 19 nt, Homo sapiens
  misc_RNA (1)...(19): siRNA sense strand
gcagaguacaacaucuuug

SEQ ID NO: 1896581 - RNA, 19 nt, Homo sapiens
  misc_RNA (1)...(19): siRNA sense strand
caagaucuucaaccuguau

SEQ ID NO: 1896582 - RNA, 19 nt, Homo sapiens
  misc_RNA (1)...(19): siRNA sense strand
gaggagcggaugucuguca

SEQ ID NO: 1896583 - RNA, 19 nt, Homo sapiens
  misc_RNA (1)...(19): siRNA sense strand
gcaagggaagaauaucugu

SEQ ID NO: 1896584 - RNA, 19 nt, Homo sapiens
  misc_RNA (1)...(19): siRNA sense strand
uaacacagagcucuaugag

SEQ ID NO: 1896585 - RNA, 19 nt, Homo sapiens
  misc_RNA (1)...(19): siRNA sense strand
caaaccaauugcccucucu

SEQ ID NO: 1896586 - RNA, 19 nt, Homo sapiens
  misc_RNA (1)...(19): siRNA sense strand
acuuccagaugccauauaa

SEQ ID NO: 1896587 - RNA, 19 nt, Homo sapiens
  misc_RNA (1)...(19): siRNA sense strand
acgagugaccgucuccuua

SEQ ID NO: 1896588 - RNA, 19 nt, Homo sapiens
  misc_RNA (1)...(19): siRNA sense strand
uggcuuauaaggauuugua

SEQ ID NO: 1896589 - RNA, 19 nt, Homo sapiens
  misc_RNA (1)...(19): siRNA sense strand
gaagugcagaaccucauca

SEQ ID NO: 1896590 - RNA, 19 nt, Homo sapiens
  misc_RNA (1)...(19): siRNA sense strand
gagugaccgucuccuuauc

SEQ ID NO: 1896591 - RNA, 19 nt, Homo sapiens
  misc_RNA (1)...(19): siRNA sense strand
gaccacaguagaugacuuc

SEQ ID NO: 1896592 - RNA, 19 nt, Homo sapiens
  misc_RNA (1)...(19): siRNA sense strand
ggaggcaucgauguccaua

SEQ ID NO: 1896593 - RNA, 19 nt, Homo sapiens
  misc_RNA (1)...(19): siRNA sense strand
cggacuacaucaacuccuu

SEQ ID NO: 1896594 - RNA, 19 nt, Homo sapiens
  misc_RNA (1)...(19): siRNA sense strand
gacaucacccacuggaaug

SEQ ID NO: 1896595 - RNA, 19 nt, Homo sapiens
  misc_RNA (1)...(19): siRNA sense strand
acgaugggccuguguuuga

SEQ ID NO: 1896596 - RNA, 19 nt, Homo sapiens
  misc_RNA (1)...(19): siRNA sense strand
gaguacaacaucuuugaag

SEQ ID NO: 1896597 - RNA, 19 nt, Homo sapiens
  misc_RNA (1)...(19): siRNA sense strand
ggcagaguacaacaucuuu

SEQ ID NO: 1896598 - RNA, 19 nt, Homo sapiens
  misc_RNA (1)...(19): siRNA sense strand
aaacccgcauguuggaaau

SEQ ID NO: 1896599 - RNA, 19 nt, Homo sapiens
  misc_RNA (1)...(19): siRNA sense strand
aaggaaauguagucuuugg

SEQ ID NO: 1896600 - RNA, 19 nt, Homo sapiens
  misc_RNA (1)...(19): siRNA sense strand
uaauaucacaucucugagu

SEQ ID NO: 1896601 - RNA, 19 nt, Homo sapiens
  misc_RNA (1)...(19): siRNA sense strand
ggaggagugaagaccauug

SEQ ID NO: 1896602 - RNA, 19 nt, Homo sapiens
  misc_RNA (1)...(19): siRNA sense strand
caauugggaaggacaacuu

SEQ ID NO: 1896603 - RNA, 19 nt, Homo sapiens
  misc_RNA (1)...(19): siRNA sense strand
ccaauugcccucucuacgu

SEQ ID NO: 1896604 - RNA, 19 nt, Homo sapiens
  misc_RNA (1)...(19): siRNA sense strand
cgauguccauacucacuuc

SEQ ID NO: 1896605 - RNA, 19 nt, Homo sapiens
  misc_RNA (1)...(19): siRNA sense strand
cagggaaaauggacgaaaa

SEQ ID NO: 1896606 - RNA, 19 nt, Homo sapiens
  misc_RNA (1)...(19): siRNA sense strand
caaaggucaugagcaagag

SEQ ID NO: 1896607 - RNA, 19 nt, Homo sapiens
  misc_RNA (1)...(19): siRNA sense strand
uaagggaaugaccacagua

SEQ ID NO: 1896608 - RNA, 19 nt, Homo sapiens
  misc_RNA (1)...(19): siRNA sense strand
caaacgcugccaagaucuu

SEQ ID NO: 1896609 - RNA, 19 nt, Homo sapiens
  misc_RNA (1)...(19): siRNA sense strand
augcugauauuuacaugga

SEQ ID NO: 1896610 - RNA, 19 nt, Homo sapiens
  misc_RNA (1)...(19): siRNA sense strand
ggaggcagaaucgucaaug

SEQ ID NO: 1896611 - RNA, 19 nt, Homo sapiens
  misc_RNA (1)...(19): siRNA sense strand
gaaccucaucaaggacaaa

SEQ ID NO: 1896612 - RNA, 19 nt, Homo sapiens
  misc_RNA (1)...(19): siRNA sense strand
gauauuuacauggaagaug

SEQ ID NO: 1896613 - RNA, 19 nt, Homo sapiens
  misc_RNA (1)...(19): siRNA sense strand
gugaccgucuccuuaucaa

SEQ ID NO: 1896614 - RNA, 19 nt, Homo sapiens
  misc_RNA (1)...(19): siRNA sense strand
acagcgaccucgucaucug

SEQ ID NO: 1896615 - RNA, 19 nt, Homo sapiens
  misc_RNA (1)...(19): siRNA sense strand
gaacaacuauuucuccauu

SEQ ID NO: 1896616 - RNA, 19 nt, Homo sapiens
  misc_RNA (1)...(19): siRNA sense strand
gaacuugucaugcaguaua

SEQ ID NO: 1896617 - RNA, 19 nt, Homo sapiens
  misc_RNA (1)...(19): siRNA sense strand
gaauauuccuccaagaaga

SEQ ID NO: 1896618 - RNA, 19 nt, Homo sapiens
  misc_RNA (1)...(19): siRNA sense strand
uaaauacacuguccacgaa

SEQ ID NO: 1896619 - RNA, 19 nt, Homo sapiens
  misc_RNA (1)...(19): siRNA sense strand
caaacaagcugcugccaau

SEQ ID NO: 1896620 - RNA, 19 nt, Homo sapiens
  misc_RNA (1)...(19): siRNA sense strand
ccacagagcugaggccuau

SEQ ID NO: 1896621 - RNA, 19 nt, Homo sapiens
  misc_RNA (1)...(19): siRNA sense strand
gagcugaggccuauauuga

SEQ ID NO: 1896622 - RNA, 19 nt, Homo sapiens
  misc_RNA (1)...(19): siRNA sense strand
cagcgcagauacuaauaua

SEQ ID NO: 1896623 - RNA, 19 nt, Homo sapiens
  misc_RNA (1)...(19): siRNA sense strand
ccgcaaaugugaauuauca

SEQ ID NO: 1896624 - RNA, 19 nt, Homo sapiens
  misc_RNA (1)...(19): siRNA sense strand
ugaaggauguugugugcua

SEQ ID NO: 1896625 - RNA, 19 nt, Homo sapiens
  misc_RNA (1)...(19): siRNA sense strand
gaaccaagcgcccaugaug

SEQ ID NO: 1896626 - RNA, 19 nt, Homo sapiens
  misc_RNA (1)...(19): siRNA sense strand
ggagauggauugcauuguc

SEQ ID NO: 1896627 - RNA, 19 nt, Homo sapiens
  misc_RNA (1)...(19): siRNA sense strand
aaagaugccuugacugaau

SEQ ID NO: 1896628 - RNA, 19 nt, Homo sapiens
  misc_RNA (1)...(19): siRNA sense strand
gugggagccucaaacaaua

SEQ ID NO: 1896629 - RNA, 19 nt, Homo sapiens
  misc_RNA (1)...(19): siRNA sense strand
aaucaaauauggcugagaa

SEQ ID NO: 1896630 - RNA, 19 nt, Homo sapiens
  misc_RNA (1)...(19): siRNA sense strand
acucagagaccacaucuua

SEQ ID NO: 1896631 - RNA, 19 nt, Homo sapiens
  misc_RNA (1)...(19): siRNA sense strand
gauuagcuaugaugucuuc

SEQ ID NO: 1896632 - RNA, 19 nt, Homo sapiens
  misc_RNA (1)...(19): siRNA sense strand
gcaggaagggugucacuga

SEQ ID NO: 1896633 - RNA, 19 nt, Homo sapiens
  misc_RNA (1)...(19): siRNA sense strand
gauacugaaucaaauaugg

SEQ ID NO: 1896634 - RNA, 19 nt, Homo sapiens
  misc_RNA (1)...(19): siRNA sense strand
caacagcgcagauacuaau

SEQ ID NO: 1896635 - RNA, 19 nt, Homo sapiens
  misc_RNA (1)...(19): siRNA sense strand
gaaggaagagccguucaaa

SEQ ID NO: 1896636 - RNA, 19 nt, Homo sapiens
  misc_RNA (1)...(19): siRNA sense strand
gaaacuccacgaccacauu

SEQ ID NO: 1896637 - RNA, 19 nt, Homo sapiens
  misc_RNA (1)...(19): siRNA sense strand
gaacuccuccgucaagugu

SEQ ID NO: 1896638 - RNA, 19 nt, Homo sapiens
  misc_RNA (1)...(19): siRNA sense strand
gaagcaagcaccagcugaa

SEQ ID NO: 1896639 - RNA, 19 nt, Homo sapiens
  misc_RNA (1)...(19): siRNA sense strand
gagacaaggagaaagaauu

SEQ ID NO: 1896640 - RNA, 19 nt, Homo sapiens
  misc_RNA (1)...(19): siRNA sense strand
gagauggauugcauuguca

SEQ ID NO: 1896641 - RNA, 19 nt, Homo sapiens
  misc_RNA (1)...(19): siRNA sense strand
caaacaauaugacccacau

SEQ ID NO: 1896642 - RNA, 19 nt, Homo sapiens
  misc_RNA (1)...(19): siRNA sense strand
gaacaagcugugguacuuu

SEQ ID NO: 1896643 - RNA, 19 nt, Homo sapiens
  misc_RNA (1)...(19): siRNA sense strand
gaccaacuccagaaauauu

SEQ ID NO: 1896644 - RNA, 19 nt, Homo sapiens
  misc_RNA (1)...(19): siRNA sense strand
cacaugagccgauuagcua

SEQ ID NO: 1896645 - RNA, 19 nt, Homo sapiens
  misc_RNA (1)...(19): siRNA sense strand
gcugugguacuuugaauuu

SEQ ID NO: 1896646 - RNA, 19 nt, Homo sapiens
  misc_RNA (1)...(19): siRNA sense strand
agaacaagcugugguacuu

SEQ ID NO: 1896647 - RNA, 19 nt, Homo sapiens
  misc_RNA (1)...(19): siRNA sense strand
uugaccaacuccagaaaua

SEQ ID NO: 1896648 - RNA, 19 nt, Homo sapiens
  misc_RNA (1)...(19): siRNA sense strand
gcagccauguugcacgauu

SEQ ID NO: 1896649 - RNA, 19 nt, Homo sapiens
  misc_RNA (1)...(19): siRNA sense strand
gcgaacuugucaugcagua

SEQ ID NO: 1896650 - RNA, 19 nt, Homo sapiens
  misc_RNA (1)...(19): siRNA sense strand
ggugggagccucaaacaau

SEQ ID NO: 1896651 - RNA, 19 nt, Homo sapiens
  misc_RNA (1)...(19): siRNA sense strand
cagaauauuccuccaagaa

SEQ ID NO: 1896652 - RNA, 19 nt, Homo sapiens
  misc_RNA (1)...(19): siRNA sense strand
gcgcagauacuaauauaca

SEQ ID NO: 1896653 - RNA, 19 nt, Homo sapiens
  misc_RNA (1)...(19): siRNA sense strand
caacuucugccauaucaug

SEQ ID NO: 1896654 - RNA, 19 nt, Homo sapiens
  misc_RNA (1)...(19): siRNA sense strand
cagccauguugcacgauua

SEQ ID NO: 1896655 - RNA, 19 nt, Homo sapiens
  misc_RNA (1)...(19): siRNA sense strand
gcuaugaugucuucaagcu

SEQ ID NO: 1896656 - RNA, 19 nt, Homo sapiens
  misc_RNA (1)...(19): siRNA sense strand
guucauguuucgccucuau

SEQ ID NO: 1896657 - RNA, 19 nt, Homo sapiens
  misc_RNA (1)...(19): siRNA sense strand
aaauauggcugagaagcaa

SEQ ID NO: 1896658 - RNA, 19 nt, Homo sapiens
  misc_RNA (1)...(19): siRNA sense strand
acauugaguuggaguguga

SEQ ID NO: 1896659 - RNA, 19 nt, Homo sapiens
  misc_RNA (1)...(19): siRNA sense strand
gaaauucugcguucaagac

SEQ ID NO: 1896660 - RNA, 19 nt, Homo sapiens
  misc_RNA (1)...(19): siRNA sense strand
ggagggagccagcaacagu

SEQ ID NO: 1896661 - RNA, 19 nt, Homo sapiens
  misc_RNA (1)...(19): siRNA sense strand
gcauugccauucucaacau

SEQ ID NO: 1896662 - RNA, 19 nt, Homo sapiens
  misc_RNA (1)...(19): siRNA sense strand
ugaagaacaagcuguggua

SEQ ID NO: 1896663 - RNA, 19 nt, Homo sapiens
  misc_RNA (1)...(19): siRNA sense strand
gauaaaagaugccuugacu

SEQ ID NO: 1896664 - RNA, 19 nt, Homo sapiens
  misc_RNA (1)...(19): siRNA sense strand
gcagauacuaauauacaga

SEQ ID NO: 1896665 - RNA, 19 nt, Homo sapiens
  misc_RNA (1)...(19): siRNA sense strand
gcugaggccuauauugaag

SEQ ID NO: 1896666 - RNA, 19 nt, Homo sapiens
  misc_RNA (1)...(19): siRNA sense strand
gaugacguuucaccgcaaa

SEQ ID NO: 1896667 - RNA, 19 nt, Homo sapiens
  misc_RNA (1)...(19): siRNA sense strand
ggagggagacaaggagaaa

SEQ ID NO: 1896668 - RNA, 19 nt, Homo sapiens
  misc_RNA (1)...(19): siRNA sense strand
ggacaggccaggugagaag

SEQ ID NO: 1896669 - RNA, 19 nt, Homo sapiens
  misc_RNA (1)...(19): siRNA sense strand
ggacggcuuugugucucua

SEQ ID NO: 1896670 - RNA, 19 nt, Homo sapiens
  misc_RNA (1)...(19): siRNA sense strand
cagaagaauuugaccaacu

SEQ ID NO: 1896671 - RNA, 19 nt, Homo sapiens
  misc_RNA (1)...(19): siRNA sense strand
cauacagcaucaugaacaa

SEQ ID NO: 1896672 - RNA, 19 nt, Homo sapiens
  misc_RNA (1)...(19): siRNA sense strand
ggauugcauugucaaccaa

SEQ ID NO: 1896673 - RNA, 19 nt, Homo sapiens
  misc_RNA (1)...(19): siRNA sense strand
uaaaagaugccuugacuga

SEQ ID NO: 1896674 - RNA, 19 nt, Homo sapiens
  misc_RNA (1)...(19): siRNA sense strand
gcaucaugaacaacuauuu

SEQ ID NO: 1896675 - RNA, 19 nt, Homo sapiens
  misc_RNA (1)...(19): siRNA sense strand
uaagcuggaguucauguuu

SEQ ID NO: 1896676 - RNA, 19 nt, Homo sapiens
  misc_RNA (1)...(19): siRNA sense strand
aggauaagcuggaguucau

SEQ ID NO: 1896677 - RNA, 19 nt, Homo sapiens
  misc_RNA (1)...(19): siRNA sense strand
gaacucagagaccacaucu

SEQ ID NO: 1896678 - RNA, 19 nt, Homo sapiens
  misc_RNA (1)...(19): siRNA sense strand
gugaccagcuccuugaagu

SEQ ID NO: 1896679 - RNA, 19 nt, Homo sapiens
  misc_RNA (1)...(19): siRNA sense strand
gaagaaccgggcugugauc

SEQ ID NO: 1896680 - RNA, 19 nt, Homo sapiens
  misc_RNA (1)...(19): siRNA sense strand
gauaaggccaacuuugcaa

SEQ ID NO: 1896681 - RNA, 19 nt, Homo sapiens
  misc_RNA (1)...(19): siRNA sense strand
acuccagacuuccguguuu

SEQ ID NO: 1896682 - RNA, 19 nt, Homo sapiens
  misc_RNA (1)...(19): siRNA sense strand
gccaacagcgcagauacua

SEQ ID NO: 1896683 - RNA, 19 nt, Homo sapiens
  misc_RNA (1)...(19): siRNA sense strand
gaucuacaccggccugaag

SEQ ID NO: 1896684 - RNA, 19 nt, Homo sapiens
  misc_RNA (1)...(19): siRNA sense strand
acagcaggaugaagaacaa

SEQ ID NO: 1896685 - RNA, 19 nt, Homo sapiens
  misc_RNA (1)...(19): siRNA sense strand
gagagaaacauccugaaaa

SEQ ID NO: 1896686 - RNA, 19 nt, Homo sapiens
  misc_RNA (1)...(19): siRNA sense strand
agagagaaacauccugaaa

SEQ ID NO: 1896687 - RNA, 19 nt, Homo sapiens
  misc_RNA (1)...(19): siRNA sense strand
gauuccaugugaugagaga

SEQ ID NO: 1896688 - RNA, 19 nt, Homo sapiens
  misc_RNA (1)...(19): siRNA sense strand
gcauugauaaggccaacuu

SEQ ID NO: 1896689 - RNA, 19 nt, Homo sapiens
  misc_RNA (1)...(19): siRNA sense strand
ucaagaaaccaaccuacug

SEQ ID NO: 1896690 - RNA, 19 nt, Homo sapiens
  misc_RNA (1)...(19): siRNA sense strand
caaauauggcugagaagca

SEQ ID NO: 1896691 - RNA, 19 nt, Homo sapiens
  misc_RNA (1)...(19): siRNA sense strand
ugccuugacugaauuuaau

SEQ ID NO: 1896692 - RNA, 19 nt, Homo sapiens
  misc_RNA (1)...(19): siRNA sense strand
aagaugccuugacugaauu

SEQ ID NO: 1896693 - RNA, 19 nt, Homo sapiens
  misc_RNA (1)...(19): siRNA sense strand
cagauuccaugugaugaga

SEQ ID NO: 1896694 - RNA, 19 nt, Homo sapiens
  misc_RNA (1)...(19): siRNA sense strand
agaagaauuugaccaacuc

SEQ ID NO: 1896695 - RNA, 19 nt, Homo sapiens
  misc_RNA (1)...(19): siRNA sense strand
uacugcaacuucugccaua

SEQ ID NO: 1896696 - RNA, 19 nt, Homo sapiens
  misc_RNA (1)...(19): siRNA sense strand
aaaccaaccuacugcaacu

SEQ ID NO: 1896697 - RNA, 19 nt, Homo sapiens
  misc_RNA (1)...(19): siRNA sense strand
gcagauaaugccaccaaag

SEQ ID NO: 1896698 - RNA, 19 nt, Homo sapiens
  misc_RNA (1)...(19): siRNA sense strand
ccgauuagcuaugaugucu

SEQ ID NO: 1896699 - RNA, 19 nt, Homo sapiens
  misc_RNA (1)...(19): siRNA sense strand
agacaaggagaaagaauuc

SEQ ID NO: 1896700 - RNA, 19 nt, Homo sapiens
  misc_RNA (1)...(19): siRNA sense strand
aagcggagauggauugcau

SEQ ID NO: 1896701 - RNA, 19 nt, Homo sapiens
  misc_RNA (1)...(19): siRNA sense strand
ucagaauauuccuccaaga

SEQ ID NO: 1896702 - RNA, 19 nt, Homo sapiens
  misc_RNA (1)...(19): siRNA sense strand
ggaccaagcggagauggau

SEQ ID NO: 1896703 - RNA, 19 nt, Homo sapiens
  misc_RNA (1)...(19): siRNA sense strand
aagaagaaccgggcuguga

SEQ ID NO: 1896704 - RNA, 19 nt, Homo sapiens
  misc_RNA (1)...(19): siRNA sense strand
aacaagcugugguacuuug

SEQ ID NO: 1896705 - RNA, 19 nt, Homo sapiens
  misc_RNA (1)...(19): siRNA sense strand
acaaaaguaucaagugcua

SEQ ID NO: 1896706 - RNA, 19 nt, Homo sapiens
  misc_RNA (1)...(19): siRNA sense strand
gcaaaugugaauuaucaac

SEQ ID NO: 1896707 - RNA, 19 nt, Homo sapiens
  misc_RNA (1)...(19): siRNA sense strand
caucaugaacaacuauuuc

SEQ ID NO: 1896708 - RNA, 19 nt, Homo sapiens
  misc_RNA (1)...(19): siRNA sense strand
ccauacagcaucaugaaca

SEQ ID NO: 1896709 - RNA, 19 nt, Homo sapiens
  misc_RNA (1)...(19): siRNA sense strand
ggagacaaggagaaagaau

SEQ ID NO: 1896710 - RNA, 19 nt, Homo sapiens
  misc_RNA (1)...(19): siRNA sense strand
uagcuaugaugucuucaag

SEQ ID NO: 1896711 - RNA, 19 nt, Homo sapiens
  misc_RNA (1)...(19): siRNA sense strand
gaagagccguucaaaagac

SEQ ID NO: 1896712 - RNA, 19 nt, Homo sapiens
  misc_RNA (1)...(19): siRNA sense strand
ggaagagccguucaaaaga

SEQ ID NO: 1896713 - RNA, 19 nt, Homo sapiens
  misc_RNA (1)...(19): siRNA sense strand
ucagugaccagcuccuuga

SEQ ID NO: 1896714 - RNA, 19 nt, Homo sapiens
  misc_RNA (1)...(19): siRNA sense strand
gaaagcaggaaggguguca

SEQ ID NO: 1896715 - RNA, 19 nt, Homo sapiens
  misc_RNA (1)...(19): siRNA sense strand
ggccaagacuccaccuaua

SEQ ID NO: 1896716 - RNA, 19 nt, Homo sapiens
  misc_RNA (1)...(19): siRNA sense strand
gaacaaguaucagaucaac

SEQ ID NO: 1896717 - RNA, 19 nt, Homo sapiens
  misc_RNA (1)...(19): siRNA sense strand
ucacgcaccugcucugguu

SEQ ID NO: 1896718 - RNA, 19 nt, Homo sapiens
  misc_RNA (1)...(19): siRNA sense strand
uagauggcgucaccaauga

SEQ ID NO: 1896719 - RNA, 19 nt, Homo sapiens
  misc_RNA (1)...(19): siRNA sense strand
gccaagacuccaccuauaa

SEQ ID NO: 1896720 - RNA, 19 nt, Homo sapiens
  misc_RNA (1)...(19): siRNA sense strand
gccagagacugcaaauuca

SEQ ID NO: 1896721 - RNA, 19 nt, Homo sapiens
  misc_RNA (1)...(19): siRNA sense strand
ggucaagggcuacuucuuc

SEQ ID NO: 1896722 - RNA, 19 nt, Homo sapiens
  misc_RNA (1)...(19): siRNA sense strand
gaaaccugguaccugaaga

SEQ ID NO: 1896723 - RNA, 19 nt, Homo sapiens
  misc_RNA (1)...(19): siRNA sense strand
ugacagaaccgcaucucaa

SEQ ID NO: 1896724 - RNA, 19 nt, Homo sapiens
  misc_RNA (1)...(19): siRNA sense strand
gugaacaaguaucagauca

SEQ ID NO: 1896725 - RNA, 19 nt, Homo sapiens
  misc_RNA (1)...(19): siRNA sense strand
acacgucucucccugacuu

SEQ ID NO: 1896726 - RNA, 19 nt, Homo sapiens
  misc_RNA (1)...(19): siRNA sense strand
gcaggaagcccaaggucau

SEQ ID NO: 1896727 - RNA, 19 nt, Homo sapiens
  misc_RNA (1)...(19): siRNA sense strand
caucugccaugaccacuuc

SEQ ID NO: 1896728 - RNA, 19 nt, Homo sapiens
  misc_RNA (1)...(19): siRNA sense strand
ccauugacaucugccauga

SEQ ID NO: 1896729 - RNA, 19 nt, Homo sapiens
  misc_RNA (1)...(19): siRNA sense strand
ccugggagguggacugguu

SEQ ID NO: 1896730 - RNA, 19 nt, Homo sapiens
  misc_RNA (1)...(19): siRNA sense strand
gcuaugccgucuccaccuu

SEQ ID NO: 1896731 - RNA, 19 nt, Homo sapiens
  misc_RNA (1)...(19): siRNA sense strand
gcccagcucuauaccuugu

SEQ ID NO: 1896732 - RNA, 19 nt, Homo sapiens
  misc_RNA (1)...(19): siRNA sense strand
ugauugacuucuucuggaa

SEQ ID NO: 1896733 - RNA, 19 nt, Homo sapiens
  misc_RNA (1)...(19): siRNA sense strand
cuacgugauugacuucuuc

SEQ ID NO: 1896734 - RNA, 19 nt, Homo sapiens
  misc_RNA (1)...(19): siRNA sense strand
cgccagagacugcaaauuc

SEQ ID NO: 1896735 - RNA, 19 nt, Homo sapiens
  misc_RNA (1)...(19): siRNA sense strand
caccugcucugguuugcaa

SEQ ID NO: 1896736 - RNA, 19 nt, Homo sapiens
  misc_RNA (1)...(19): siRNA sense strand
ugaagaccauugacaucug

SEQ ID NO: 1896737 - RNA, 19 nt, Homo sapiens
  misc_RNA (1)...(19): siRNA sense strand
ccgcccagcucuauaccuu

SEQ ID NO: 1896738 - RNA, 19 nt, Homo sapiens
  misc_RNA (1)...(19): siRNA sense strand
cuagauggcgucaccaaug

SEQ ID NO: 1896739 - RNA, 19 nt, Homo sapiens
  misc_RNA (1)...(19): siRNA sense strand
gggccaagacuccaccuau

SEQ ID NO: 1896740 - RNA, 19 nt, Homo sapiens
  misc_RNA (1)...(19): siRNA sense strand
ccaucuacgugauugacuu

SEQ ID NO: 1896741 - RNA, 19 nt, Homo sapiens
  misc_RNA (1)...(19): siRNA sense strand
gacagaaccgcaucucaag

SEQ ID NO: 1896742 - RNA, 19 nt, Homo sapiens
  misc_RNA (1)...(19): siRNA sense strand
ucacaggcaauuucuuuua

SEQ ID NO: 1896743 - RNA, 19 nt, Homo sapiens
  misc_RNA (1)...(19): siRNA sense strand
gcugcagggucuguacuug

SEQ ID NO: 1896744 - RNA, 19 nt, Homo sapiens
  misc_RNA (1)...(19): siRNA sense strand
gcucggcucucggacaucu

SEQ ID NO: 1896745 - RNA, 19 nt, Homo sapiens
  misc_RNA (1)...(19): siRNA sense strand
ccaccaucaucuucgacaa

SEQ ID NO: 1896746 - RNA, 19 nt, Homo sapiens
  misc_RNA (1)...(19): siRNA sense strand
gcaggccaucuacgugauu

SEQ ID NO: 1896747 - RNA, 19 nt, Homo sapiens
  misc_RNA (1)...(19): siRNA sense strand
ggacaucgucaccggacau

SEQ ID NO: 1896748 - RNA, 19 nt, Homo sapiens
  misc_RNA (1)...(19): siRNA sense strand
ucaagcuguucuucaaugg

SEQ ID NO: 1896749 - RNA, 19 nt, Homo sapiens
  misc_RNA (1)...(19): siRNA sense strand
caacccaacauucccaaag

SEQ ID NO: 1896750 - RNA, 19 nt, Homo sapiens
  misc_RNA (1)...(19): siRNA sense strand
ggacaucugggccaagacu

SEQ ID NO: 1896751 - RNA, 19 nt, Homo sapiens
  misc_RNA (1)...(19): siRNA sense strand
cucccugacuucugccaua

SEQ ID NO: 1896752 - RNA, 19 nt, Homo sapiens
  misc_RNA (1)...(19): siRNA sense strand
gacuucuucuggaacgaaa

SEQ ID NO: 1896753 - RNA, 19 nt, Homo sapiens
  misc_RNA (1)...(19): siRNA sense strand
acuucaagcuguucuucaa

SEQ ID NO: 1896754 - RNA, 19 nt, Homo sapiens
  misc_RNA (1)...(19): siRNA sense strand
gugucuggcugccuuaucu

SEQ ID NO: 1896755 - RNA, 19 nt, Homo sapiens
  misc_RNA (1)...(19): siRNA sense strand
ccugcugccuggaaucuuc

SEQ ID NO: 1896756 - RNA, 19 nt, Homo sapiens
  misc_RNA (1)...(19): siRNA sense strand
guuucuacccggcuacgua

SEQ ID NO: 1896757 - RNA, 19 nt, Homo sapiens
  misc_RNA (1)...(19): siRNA sense strand
uucaagcuguucuucaaug

SEQ ID NO: 1896758 - RNA, 19 nt, Homo sapiens
  misc_RNA (1)...(19): siRNA sense strand
auucacaggcaauuucuuu

SEQ ID NO: 1896759 - RNA, 19 nt, Homo sapiens
  misc_RNA (1)...(19): siRNA sense strand
ucggacaucugggccaaga

SEQ ID NO: 1896760 - RNA, 19 nt, Homo sapiens
  misc_RNA (1)...(19): siRNA sense strand
ggugggcuacuacaucuuc

SEQ ID NO: 1896761 - RNA, 19 nt, Homo sapiens
  misc_RNA (1)...(19): siRNA sense strand
gagcgucaucuuccuacug

SEQ ID NO: 1896762 - RNA, 19 nt, Homo sapiens
  misc_RNA (1)...(19): siRNA sense strand
caucgucuacuacuucauc

SEQ ID NO: 1896763 - RNA, 19 nt, Homo sapiens
  misc_RNA (1)...(19): siRNA sense strand
ugaacaaguaucagaucaa

SEQ ID NO: 1896764 - RNA, 19 nt, Homo sapiens
  misc_RNA (1)...(19): siRNA sense strand
gcaacccaacauucccaaa

SEQ ID NO: 1896765 - RNA, 19 nt, Homo sapiens
  misc_RNA (1)...(19): siRNA sense strand
cgucuacuacuucaucaug

SEQ ID NO: 1896766 - RNA, 19 nt, Homo sapiens
  misc_RNA (1)...(19): siRNA sense strand
ucuggcugccuuaucuuua

SEQ ID NO: 1896767 - RNA, 19 nt, Homo sapiens
  misc_RNA (1)...(19): siRNA sense strand
ucccugacuucugccauaa

SEQ ID NO: 1896768 - RNA, 19 nt, Homo sapiens
  misc_RNA (1)...(19): siRNA sense strand
ucagaucaacggccugcaa

SEQ ID NO: 1896769 - RNA, 19 nt, Homo sapiens
  misc_RNA (1)...(19): siRNA sense strand
gccaccugcugcccuacuu

SEQ ID NO: 1896770 - RNA, 19 nt, Homo sapiens
  misc_RNA (1)...(19): siRNA sense strand
ccaagacuccaccuauaac

SEQ ID NO: 1896771 - RNA, 19 nt, Homo sapiens
  misc_RNA (1)...(19): siRNA sense strand
ggcagaggcaccacagcaa

SEQ ID NO: 1896772 - RNA, 19 nt, Homo sapiens
  misc_RNA (1)...(19): siRNA sense strand
ccuuccaggugcuucugua

SEQ ID NO: 1896773 - RNA, 19 nt, Homo sapiens
  misc_RNA (1)...(19): siRNA sense strand
gcgcaccuccucaccaaau

SEQ ID NO: 1896774 - RNA, 19 nt, Homo sapiens
  misc_RNA (1)...(19): siRNA sense strand
cgcaccuccucaccaaaua

SEQ ID NO: 1896775 - RNA, 19 nt, Homo sapiens
  misc_RNA (1)...(19): siRNA sense strand
gggagggaagucuggaaga

SEQ ID NO: 1896776 - RNA, 19 nt, Homo sapiens
  misc_RNA (1)...(19): siRNA sense strand
gcccacaacuuacaggaua

SEQ ID NO: 1896777 - RNA, 19 nt, Homo sapiens
  misc_RNA (1)...(19): siRNA sense strand
gccaagagguuccacauca

SEQ ID NO: 1896778 - RNA, 19 nt, Homo sapiens
  misc_RNA (1)...(19): siRNA sense strand
ugagagagccaaggaaaua

SEQ ID NO: 1896779 - RNA, 19 nt, Homo sapiens
  misc_RNA (1)...(19): siRNA sense strand
ugacugaccugcagcuguu

SEQ ID NO: 1896780 - RNA, 19 nt, Homo sapiens
  misc_RNA (1)...(19): siRNA sense strand
agaaggcccugcuuucaga

SEQ ID NO: 1896781 - RNA, 19 nt, Homo sapiens
  misc_RNA (1)...(19): siRNA sense strand
ugaaugagauuuacaaccu

SEQ ID NO: 1896782 - RNA, 19 nt, Homo sapiens
  misc_RNA (1)...(19): siRNA sense strand
gagaauggccuaucuaucc

SEQ ID NO: 1896783 - RNA, 19 nt, Homo sapiens
  misc_RNA (1)...(19): siRNA sense strand
ggacgugcuuagagacaga

SEQ ID NO: 1896784 - RNA, 19 nt, Homo sapiens
  misc_RNA (1)...(19): siRNA sense strand
gguguagacuguacuccaa

SEQ ID NO: 1896785 - RNA, 19 nt, Homo sapiens
  misc_RNA (1)...(19): siRNA sense strand
gagagaauggccuaucuau

SEQ ID NO: 1896786 - RNA, 19 nt, Homo sapiens
  misc_RNA (1)...(19): siRNA sense strand
uggccuaucuauccuauga

SEQ ID NO: 1896787 - RNA, 19 nt, Homo sapiens
  misc_RNA (1)...(19): siRNA sense strand
gcaccaugcugaugcugau

SEQ ID NO: 1896788 - RNA, 19 nt, Homo sapiens
  misc_RNA (1)...(19): siRNA sense strand
aggccuagcccacaacuua

SEQ ID NO: 1896789 - RNA, 19 nt, Homo sapiens
  misc_RNA (1)...(19): siRNA sense strand
cagcaggcccuucaucuug

SEQ ID NO: 1896790 - RNA, 19 nt, Homo sapiens
  misc_RNA (1)...(19): siRNA sense strand
ccgcagauguuguucaagu

SEQ ID NO: 1896791 - RNA, 19 nt, Homo sapiens
  misc_RNA (1)...(19): siRNA sense strand
ggcaagcauugauggaaga

SEQ ID NO: 1896792 - RNA, 19 nt, Homo sapiens
  misc_RNA (1)...(19): siRNA sense strand
ggacagcugaaugagauuu

SEQ ID NO: 1896793 - RNA, 19 nt, Homo sapiens
  misc_RNA (1)...(19): siRNA sense strand
gaagagagaauggccuauc

SEQ ID NO: 1896794 - RNA, 19 nt, Homo sapiens
  misc_RNA (1)...(19): siRNA sense strand
gcacauccagcaggccuuu

SEQ ID NO: 1896795 - RNA, 19 nt, Homo sapiens
  misc_RNA (1)...(19): siRNA sense strand
gacagcugaaugagauuua

SEQ ID NO: 1896796 - RNA, 19 nt, Homo sapiens
  misc_RNA (1)...(19): siRNA sense strand
gaaguguaggcaagcauug

SEQ ID NO: 1896797 - RNA, 19 nt, Homo sapiens
  misc_RNA (1)...(19): siRNA sense strand
gauguggcccagcaacaaa

SEQ ID NO: 1896798 - RNA, 19 nt, Homo sapiens
  misc_RNA (1)...(19): siRNA sense strand
gcacaggcuccaccagugu

SEQ ID NO: 1896799 - RNA, 19 nt, Homo sapiens
  misc_RNA (1)...(19): siRNA sense strand
gcagauguuguucaaguuc

SEQ ID NO: 1896800 - RNA, 19 nt, Homo sapiens
  misc_RNA (1)...(19): siRNA sense strand
gguaaaggcagagcuggaa

SEQ ID NO: 1896801 - RNA, 19 nt, Homo sapiens
  misc_RNA (1)...(19): siRNA sense strand
gccuaucuauccuaugaga

SEQ ID NO: 1896802 - RNA, 19 nt, Homo sapiens
  misc_RNA (1)...(19): siRNA sense strand
ggagaaguguaggcaagca

SEQ ID NO: 1896803 - RNA, 19 nt, Homo sapiens
  misc_RNA (1)...(19): siRNA sense strand
caaccguccucuuggucuu

SEQ ID NO: 1896804 - RNA, 19 nt, Homo sapiens
  misc_RNA (1)...(19): siRNA sense strand
ucacggagaccuucaagag

SEQ ID NO: 1896805 - RNA, 19 nt, Homo sapiens
  misc_RNA (1)...(19): siRNA sense strand
aagcauugauggaagaaca

SEQ ID NO: 1896806 - RNA, 19 nt, Homo sapiens
  misc_RNA (1)...(19): siRNA sense strand
agggacagcugaaugagau

SEQ ID NO: 1896807 - RNA, 19 nt, Homo sapiens
  misc_RNA (1)...(19): siRNA sense strand
ccaaggaaauaugggagau

SEQ ID NO: 1896808 - RNA, 19 nt, Homo sapiens
  misc_RNA (1)...(19): siRNA sense strand
uaugagagagccaaggaaa

SEQ ID NO: 1896809 - RNA, 19 nt, Homo sapiens
  misc_RNA (1)...(19): siRNA sense strand
ccuccaaugugccuucaug

SEQ ID NO: 1896810 - RNA, 19 nt, Homo sapiens
  misc_RNA (1)...(19): siRNA sense strand
ggauguggcccagcaacaa

SEQ ID NO: 1896811 - RNA, 19 nt, Homo sapiens
  misc_RNA (1)...(19): siRNA sense strand
aaggaaauaugggagauca

SEQ ID NO: 1896812 - RNA, 19 nt, Homo sapiens
  misc_RNA (1)...(19): siRNA sense strand
uuuacaaccucaaacacaa

SEQ ID NO: 1896813 - RNA, 19 nt, Homo sapiens
  misc_RNA (1)...(19): siRNA sense strand
gcaggcccuucaucuugga

SEQ ID NO: 1896814 - RNA, 19 nt, Homo sapiens
  misc_RNA (1)...(19): siRNA sense strand
ccacagacuggcaggaaug

SEQ ID NO: 1896815 - RNA, 19 nt, Homo sapiens
  misc_RNA (1)...(19): siRNA sense strand
gagagagccaaggaaauau

SEQ ID NO: 1896816 - RNA, 19 nt, Homo sapiens
  misc_RNA (1)...(19): siRNA sense strand
ugagaaggcccugcuuuca

SEQ ID NO: 1896817 - RNA, 19 nt, Homo sapiens
  misc_RNA (1)...(19): siRNA sense strand
gaccuucaagagccgaaua

SEQ ID NO: 1896818 - RNA, 19 nt, Homo sapiens
  misc_RNA (1)...(19): siRNA sense strand
gaauggccuaucuauccua

SEQ ID NO: 1896819 - RNA, 19 nt, Homo sapiens
  misc_RNA (1)...(19): siRNA sense strand
gagaaggcccugcuuucag

SEQ ID NO: 1896820 - RNA, 19 nt, Homo sapiens
  misc_RNA (1)...(19): siRNA sense strand
gcuuagagacagaggaugu

SEQ ID NO: 1896821 - RNA, 19 nt, Homo sapiens
  misc_RNA (1)...(19): siRNA sense strand
aagagagaauggccuaucu

SEQ ID NO: 1896822 - RNA, 19 nt, Homo sapiens
  misc_RNA (1)...(19): siRNA sense strand
uggaagaagccaagagguu

SEQ ID NO: 1896823 - RNA, 19 nt, Homo sapiens
  misc_RNA (1)...(19): siRNA sense strand
uaaaggcagagcuggaaga

SEQ ID NO: 1896824 - RNA, 19 nt, Homo sapiens
  misc_RNA (1)...(19): siRNA sense strand
gugagaaggcccugcuuuc

SEQ ID NO: 1896825 - RNA, 19 nt, Homo sapiens
  misc_RNA (1)...(19): siRNA sense strand
uggaagaacaggugaaugg

SEQ ID NO: 1896826 - RNA, 19 nt, Homo sapiens
  misc_RNA (1)...(19): siRNA sense strand
gauggaagaacaggugaau

SEQ ID NO: 1896827 - RNA, 19 nt, Homo sapiens
  misc_RNA (1)...(19): siRNA sense strand
ccaagagguuccacaucag

SEQ ID NO: 1896828 - RNA, 19 nt, Homo sapiens
  misc_RNA (1)...(19): siRNA sense strand
cuaucuauccuaugagaga

SEQ ID NO: 1896829 - RNA, 19 nt, Homo sapiens
  misc_RNA (1)...(19): siRNA sense strand
ccagcaggcccuucaucuu

SEQ ID NO: 1896830 - RNA, 19 nt, Homo sapiens
  misc_RNA (1)...(19): siRNA sense strand
cgcagauguuguucaaguu

SEQ ID NO: 1896831 - RNA, 19 nt, Homo sapiens
  misc_RNA (1)...(19): siRNA sense strand
ccagcaggccuuugagaag

SEQ ID NO: 1896832 - RNA, 19 nt, Homo sapiens
  misc_RNA (1)...(19): siRNA sense strand
agagagaauggccuaucua

SEQ ID NO: 1896833 - RNA, 19 nt, Homo sapiens
  misc_RNA (1)...(19): siRNA sense strand
ggaagaacaggugaauggu

SEQ ID NO: 1896834 - RNA, 19 nt, Homo sapiens
  misc_RNA (1)...(19): siRNA sense strand
gaaagcgacccagccaacu

SEQ ID NO: 1896835 - RNA, 19 nt, Homo sapiens
  misc_RNA (1)...(19): siRNA sense strand
cgggauggcaacacuguga

SEQ ID NO: 1896836 - RNA, 19 nt, Homo sapiens
  misc_RNA (1)...(19): siRNA sense strand
gcaagcauugauggaagaa

SEQ ID NO: 1896837 - RNA, 19 nt, Homo sapiens
  misc_RNA (1)...(19): siRNA sense strand
gagagccaaggaaauaugg

SEQ ID NO: 1896838 - RNA, 19 nt, Homo sapiens
  misc_RNA (1)...(19): siRNA sense strand
ucaagagccgaauauccaa

SEQ ID NO: 1896839 - RNA, 19 nt, Homo sapiens
  misc_RNA (1)...(19): siRNA sense strand
gaacucaaccaucaucuug

SEQ ID NO: 1896840 - RNA, 19 nt, Homo sapiens
  misc_RNA (1)...(19): siRNA sense strand
uaacccagcucuaugucuu

SEQ ID NO: 1896841 - RNA, 19 nt, Homo sapiens
  misc_RNA (1)...(19): siRNA sense strand
gcaaguucauuucccuguu

SEQ ID NO: 1896842 - RNA, 19 nt, Homo sapiens
  misc_RNA (1)...(19): siRNA sense strand
gaccagggcaaguucauuu

SEQ ID NO: 1896843 - RNA, 19 nt, Homo sapiens
  misc_RNA (1)...(19): siRNA sense strand
caaccaggcugugcucaau

SEQ ID NO: 1896844 - RNA, 19 nt, Homo sapiens
  misc_RNA (1)...(19): siRNA sense strand
gcagggcuuuguucugaug

SEQ ID NO: 1896845 - RNA, 19 nt, Homo sapiens
  misc_RNA (1)...(19): siRNA sense strand
caaguucauuucccuguuc

SEQ ID NO: 1896846 - RNA, 19 nt, Homo sapiens
  misc_RNA (1)...(19): siRNA sense strand
cgaaaggcguucaauacgu

SEQ ID NO: 1896847 - RNA, 19 nt, Homo sapiens
  misc_RNA (1)...(19): siRNA sense strand
gccauccucuucuccuauu

SEQ ID NO: 1896848 - RNA, 19 nt, Homo sapiens
  misc_RNA (1)...(19): siRNA sense strand
cgaggugccugccaugauc

SEQ ID NO: 1896849 - RNA, 19 nt, Homo sapiens
  misc_RNA (1)...(19): siRNA sense strand
uugcagggcuuuguucuga

SEQ ID NO: 1896850 - RNA, 19 nt, Homo sapiens
  misc_RNA (1)...(19): siRNA sense strand
ucagcaaccucuccuccuu

SEQ ID NO: 1896851 - RNA, 19 nt, Homo sapiens
  misc_RNA (1)...(19): siRNA sense strand
cuugggaacucaaccauca

SEQ ID NO: 1896852 - RNA, 19 nt, Homo sapiens
  misc_RNA (1)...(19): siRNA sense strand
caaccaucaucuugcuuuc

SEQ ID NO: 1896853 - RNA, 19 nt, Homo sapiens
  misc_RNA (1)...(19): siRNA sense strand
gaucuccuacugccucauu

SEQ ID NO: 1896854 - RNA, 19 nt, Homo sapiens
  misc_RNA (1)...(19): siRNA sense strand
ggaacucaaccaucaucuu

SEQ ID NO: 1896855 - RNA, 19 nt, Homo sapiens
  misc_RNA (1)...(19): siRNA sense strand
ggaccaggcaagaccauca

SEQ ID NO: 1896856 - RNA, 19 nt, Homo sapiens
  misc_RNA (1)...(19): siRNA sense strand
ggcgaaaggcguucaauac

SEQ ID NO: 1896857 - RNA, 19 nt, Homo sapiens
  misc_RNA (1)...(19): siRNA sense strand
ucaaccaucaucuugcuuu

SEQ ID NO: 1896858 - RNA, 19 nt, Homo sapiens
  misc_RNA (1)...(19): siRNA sense strand
gggaaaggaagagaaguug

SEQ ID NO: 1896859 - RNA, 19 nt, Homo sapiens
  misc_RNA (1)...(19): siRNA sense strand
ggcaagaccaucagcuaug

SEQ ID NO: 1896860 - RNA, 19 nt, Homo sapiens
  misc_RNA (1)...(19): siRNA sense strand
gugauccagucaacauuca

SEQ ID NO: 1896861 - RNA, 19 nt, Homo sapiens
  misc_RNA (1)...(19): siRNA sense strand
uagccauccucuucuccua

SEQ ID NO: 1896862 - RNA, 19 nt, Homo sapiens
  misc_RNA (1)...(19): siRNA sense strand
ccagcucuaugucuuccuu

SEQ ID NO: 1896863 - RNA, 19 nt, Homo sapiens
  misc_RNA (1)...(19): siRNA sense strand
ucauuucccuguucuacuc

SEQ ID NO: 1896864 - RNA, 19 nt, Homo sapiens
  misc_RNA (1)...(19): siRNA sense strand
gcagucccacuaagcauca

SEQ ID NO: 1896865 - RNA, 19 nt, Homo sapiens
  misc_RNA (1)...(19): siRNA sense strand
ggaccagggcaaguucauu

SEQ ID NO: 1896866 - RNA, 19 nt, Homo sapiens
  misc_RNA (1)...(19): siRNA sense strand
caggcaagaccaucagcua

SEQ ID NO: 1896867 - RNA, 19 nt, Homo sapiens
  misc_RNA (1)...(19): siRNA sense strand
ucacugcagucccacuaag

SEQ ID NO: 1896868 - RNA, 19 nt, Homo sapiens
  misc_RNA (1)...(19): siRNA sense strand
auacgugccucucccaucu

SEQ ID NO: 1896869 - RNA, 19 nt, Homo sapiens
  misc_RNA (1)...(19): siRNA sense strand
cugcauaacccagcucuau

SEQ ID NO: 1896870 - RNA, 19 nt, Homo sapiens
  misc_RNA (1)...(19): siRNA sense strand
aggcgaaaggcguucaaua

SEQ ID NO: 1896871 - RNA, 19 nt, Homo sapiens
  misc_RNA (1)...(19): siRNA sense strand
gcgaaaggcguucaauacg

SEQ ID NO: 1896872 - RNA, 19 nt, Homo sapiens
  misc_RNA (1)...(19): siRNA sense strand
gacccuacuugggaacuca

SEQ ID NO: 1896873 - RNA, 19 nt, Homo sapiens
  misc_RNA (1)...(19): siRNA sense strand
gcgaggugccugccaugau

SEQ ID NO: 1896874 - RNA, 19 nt, Homo sapiens
  misc_RNA (1)...(19): siRNA sense strand
ccgcuacaccgccaucaug

SEQ ID NO: 1896875 - RNA, 19 nt, Homo sapiens
  misc_RNA (1)...(19): siRNA sense strand
gcuacaccgccaucaugaa

SEQ ID NO: 1896876 - RNA, 19 nt, Homo sapiens
  misc_RNA (1)...(19): siRNA sense strand
ccuauuugcugacccuacu

SEQ ID NO: 1896877 - RNA, 19 nt, Homo sapiens
  misc_RNA (1)...(19): siRNA sense strand
ugaaugauagcuccuugca

SEQ ID NO: 1896878 - RNA, 19 nt, Homo sapiens
  misc_RNA (1)...(19): siRNA sense strand
ggugguguuccucuucuau

SEQ ID NO: 1896879 - RNA, 19 nt, Homo sapiens
  misc_RNA (1)...(19): siRNA sense strand
gcuuuguucugaugagcau

SEQ ID NO: 1896880 - RNA, 19 nt, Homo sapiens
  misc_RNA (1)...(19): siRNA sense strand
ggaagaagcugcccucuga

SEQ ID NO: 1896881 - RNA, 19 nt, Homo sapiens
  misc_RNA (1)...(19): siRNA sense strand
gaacaaagcuguggagaag

SEQ ID NO: 1896882 - RNA, 19 nt, Homo sapiens
  misc_RNA (1)...(19): siRNA sense strand
guacugaccuggcucauga

SEQ ID NO: 1896883 - RNA, 19 nt, Homo sapiens
  misc_RNA (1)...(19): siRNA sense strand
gaaggaggcugaagagaag

SEQ ID NO: 1896884 - RNA, 19 nt, Homo sapiens
  misc_RNA (1)...(19): siRNA sense strand
cgaaauaacuaccugaagu

SEQ ID NO: 1896885 - RNA, 19 nt, Homo sapiens
  misc_RNA (1)...(19): siRNA sense strand
guacaugaauuucuacaag

SEQ ID NO: 1896886 - RNA, 19 nt, Homo sapiens
  misc_RNA (1)...(19): siRNA sense strand
caaaucagacacccuuaua

SEQ ID NO: 1896887 - RNA, 19 nt, Homo sapiens
  misc_RNA (1)...(19): siRNA sense strand
ugaccaaccugauguaugu

SEQ ID NO: 1896888 - RNA, 19 nt, Homo sapiens
  misc_RNA (1)...(19): siRNA sense strand
gcacagaugaacccaauga

SEQ ID NO: 1896889 - RNA, 19 nt, Homo sapiens
  misc_RNA (1)...(19): siRNA sense strand
uaaaguacauggccuucuu

SEQ ID NO: 1896890 - RNA, 19 nt, Homo sapiens
  misc_RNA (1)...(19): siRNA sense strand
ggacagagaaagugaagga

SEQ ID NO: 1896891 - RNA, 19 nt, Homo sapiens
  misc_RNA (1)...(19): siRNA sense strand
cagagaaagugaaggagaa

SEQ ID NO: 1896892 - RNA, 19 nt, Homo sapiens
  misc_RNA (1)...(19): siRNA sense strand
cagaggugguuccagcuua

SEQ ID NO: 1896893 - RNA, 19 nt, Homo sapiens
  misc_RNA (1)...(19): siRNA sense strand
caacaucguuagcaaaguc

SEQ ID NO: 1896894 - RNA, 19 nt, Homo sapiens
  misc_RNA (1)...(19): siRNA sense strand
agaaggaccugaaugagau

SEQ ID NO: 1896895 - RNA, 19 nt, Homo sapiens
  misc_RNA (1)...(19): siRNA sense strand
ggaagauacugaugcugau

SEQ ID NO: 1896896 - RNA, 19 nt, Homo sapiens
  misc_RNA (1)...(19): siRNA sense strand
ggacaucauuacggacaaa

SEQ ID NO: 1896897 - RNA, 19 nt, Homo sapiens
  misc_RNA (1)...(19): siRNA sense strand
acaaauagcgccaucauca

SEQ ID NO: 1896898 - RNA, 19 nt, Homo sapiens
  misc_RNA (1)...(19): siRNA sense strand
gguuccagcuuaugaagaa

SEQ ID NO: 1896899 - RNA, 19 nt, Homo sapiens
  misc_RNA (1)...(19): siRNA sense strand
gaaagcuggaucuguguuu

SEQ ID NO: 1896900 - RNA, 19 nt, Homo sapiens
  misc_RNA (1)...(19): siRNA sense strand
ggaggaagaggaaguggaa

SEQ ID NO: 1896901 - RNA, 19 nt, Homo sapiens
  misc_RNA (1)...(19): siRNA sense strand
ucacgggcgucuuugcuuu

SEQ ID NO: 1896902 - RNA, 19 nt, Homo sapiens
  misc_RNA (1)...(19): siRNA sense strand
gaagauacugaugcugaua

SEQ ID NO: 1896903 - RNA, 19 nt, Homo sapiens
  misc_RNA (1)...(19): siRNA sense strand
ggagaucggccgugagaug

SEQ ID NO: 1896904 - RNA, 19 nt, Homo sapiens
  misc_RNA (1)...(19): siRNA sense strand
cagcaaagccuacguguac

SEQ ID NO: 1896905 - RNA, 19 nt, Homo sapiens
  misc_RNA (1)...(19): siRNA sense strand
gcugauggauuaccuaugc

SEQ ID NO: 1896906 - RNA, 19 nt, Homo sapiens
  misc_RNA (1)...(19): siRNA sense strand
gaaauaacuaccugaaguc

SEQ ID NO: 1896907 - RNA, 19 nt, Homo sapiens
  misc_RNA (1)...(19): siRNA sense strand
cauuugaauuccugucuuu

SEQ ID NO: 1896908 - RNA, 19 nt, Homo sapiens
  misc_RNA (1)...(19): siRNA sense strand
acaaagcuguggagaagau

SEQ ID NO: 1896909 - RNA, 19 nt, Homo sapiens
  misc_RNA (1)...(19): siRNA sense strand
ggagcacuauugcgacaug

SEQ ID NO: 1896910 - RNA, 19 nt, Homo sapiens
  misc_RNA (1)...(19): siRNA sense strand
ucaaggagcggacagagaa

SEQ ID NO: 1896911 - RNA, 19 nt, Homo sapiens
  misc_RNA (1)...(19): siRNA sense strand
gugcacagaugaacccaau

SEQ ID NO: 1896912 - RNA, 19 nt, Homo sapiens
  misc_RNA (1)...(19): siRNA sense strand
gaaguuacuccggaagaaa

SEQ ID NO: 1896913 - RNA, 19 nt, Homo sapiens
  misc_RNA (1)...(19): siRNA sense strand
gaauuccugucuuuauuac

SEQ ID NO: 1896914 - RNA, 19 nt, Homo sapiens
  misc_RNA (1)...(19): siRNA sense strand
gacaugcucugcugcaagu

SEQ ID NO: 1896915 - RNA, 19 nt, Homo sapiens
  misc_RNA (1)...(19): siRNA sense strand
ccgaggagguggcugaaga

SEQ ID NO: 1896916 - RNA, 19 nt, Homo sapiens
  misc_RNA (1)...(19): siRNA sense strand
uggagaagaugcccagaga

SEQ ID NO: 1896917 - RNA, 19 nt, Homo sapiens
  misc_RNA (1)...(19): siRNA sense strand
gaagagaauccacccucaa

SEQ ID NO: 1896918 - RNA, 19 nt, Homo sapiens
  misc_RNA (1)...(19): siRNA sense strand
gaaacagcacccagaagug

SEQ ID NO: 1896919 - RNA, 19 nt, Homo sapiens
  misc_RNA (1)...(19): siRNA sense strand
gaagugcagguggaagaua

SEQ ID NO: 1896920 - RNA, 19 nt, Homo sapiens
  misc_RNA (1)...(19): siRNA sense strand
gcccuuacuuccaccauau

SEQ ID NO: 1896921 - RNA, 19 nt, Homo sapiens
  misc_RNA (1)...(19): siRNA sense strand
aaaaggacaugcgaaauaa

SEQ ID NO: 1896922 - RNA, 19 nt, Homo sapiens
  misc_RNA (1)...(19): siRNA sense strand
gggaggagaaggcggagua

SEQ ID NO: 1896923 - RNA, 19 nt, Homo sapiens
  misc_RNA (1)...(19): siRNA sense strand
gcaaaaggcggcaaacuug

SEQ ID NO: 1896924 - RNA, 19 nt, Homo sapiens
  misc_RNA (1)...(19): siRNA sense strand
caugaaggguguagagaag

SEQ ID NO: 1896925 - RNA, 19 nt, Homo sapiens
  misc_RNA (1)...(19): siRNA sense strand
gauaagaaggaccugaaug

SEQ ID NO: 1896926 - RNA, 19 nt, Homo sapiens
  misc_RNA (1)...(19): siRNA sense strand
gcauuugaauuccugucuu

SEQ ID NO: 1896927 - RNA, 19 nt, Homo sapiens
  misc_RNA (1)...(19): siRNA sense strand
agacacgccugcaguuugu

SEQ ID NO: 1896928 - RNA, 19 nt, Homo sapiens
  misc_RNA (1)...(19): siRNA sense strand
ccaagaaggaggcugaaga

SEQ ID NO: 1896929 - RNA, 19 nt, Homo sapiens
  misc_RNA (1)...(19): siRNA sense strand
gggaggaggccaagaagga

SEQ ID NO: 1896930 - RNA, 19 nt, Homo sapiens
  misc_RNA (1)...(19): siRNA sense strand
ggauugaagaggagaaaga

SEQ ID NO: 1896931 - RNA, 19 nt, Homo sapiens
  misc_RNA (1)...(19): siRNA sense strand
ggacacagggugcacagau

SEQ ID NO: 1896932 - RNA, 19 nt, Homo sapiens
  misc_RNA (1)...(19): siRNA sense strand
gacacagggugcacagaug

SEQ ID NO: 1896933 - RNA, 19 nt, Homo sapiens
  misc_RNA (1)...(19): siRNA sense strand
gcaacaauaagcccaagga

SEQ ID NO: 1896934 - RNA, 19 nt, Homo sapiens
  misc_RNA (1)...(19): siRNA sense strand
gugaugaucggacagauga

SEQ ID NO: 1896935 - RNA, 19 nt, Homo sapiens
  misc_RNA (1)...(19): siRNA sense strand
uaugcgaccucaucuacuu

SEQ ID NO: 1896936 - RNA, 19 nt, Homo sapiens
  misc_RNA (1)...(19): siRNA sense strand
gugauggccuggaauugga

SEQ ID NO: 1896937 - RNA, 19 nt, Homo sapiens
  misc_RNA (1)...(19): siRNA sense strand
gcacaaauagcgccaucau

SEQ ID NO: 1896938 - RNA, 19 nt, Homo sapiens
  misc_RNA (1)...(19): siRNA sense strand
agaaggaggcugaagagaa

SEQ ID NO: 1896939 - RNA, 19 nt, Homo sapiens
  misc_RNA (1)...(19): siRNA sense strand
agagagcugucccggauug

SEQ ID NO: 1896940 - RNA, 19 nt, Homo sapiens
  misc_RNA (1)...(19): siRNA sense strand
cgaaacagcacccagaagu

SEQ ID NO: 1896941 - RNA, 19 nt, Homo sapiens
  misc_RNA (1)...(19): siRNA sense strand
auaagaaggaccugaauga

SEQ ID NO: 1896942 - RNA, 19 nt, Homo sapiens
  misc_RNA (1)...(19): siRNA sense strand
ugaagacccucaucaccau

SEQ ID NO: 1896943 - RNA, 19 nt, Homo sapiens
  misc_RNA (1)...(19): siRNA sense strand
gcauugacccgcugaccaa

SEQ ID NO: 1896944 - RNA, 19 nt, Homo sapiens
  misc_RNA (1)...(19): siRNA sense strand
uggaagaggagcacuauug

SEQ ID NO: 1896945 - RNA, 19 nt, Homo sapiens
  misc_RNA (1)...(19): siRNA sense strand
ugaaggagaaacucauuga

SEQ ID NO: 1896946 - RNA, 19 nt, Homo sapiens
  misc_RNA (1)...(19): siRNA sense strand
uauauucgcuguuacuacu

SEQ ID NO: 1896947 - RNA, 19 nt, Homo sapiens
  misc_RNA (1)...(19): siRNA sense strand
caaauagcgccaucaucaa

SEQ ID NO: 1896948 - RNA, 19 nt, Homo sapiens
  misc_RNA (1)...(19): siRNA sense strand
ccagagcacuucagaucag

SEQ ID NO: 1896949 - RNA, 19 nt, Homo sapiens
  misc_RNA (1)...(19): siRNA sense strand
gcacggugaaguacaugaa

SEQ ID NO: 1896950 - RNA, 19 nt, Homo sapiens
  misc_RNA (1)...(19): siRNA sense strand
ucugaggucuggagagaug

SEQ ID NO: 1896951 - RNA, 19 nt, Homo sapiens
  misc_RNA (1)...(19): siRNA sense strand
ggaucuguguuuggagaaa

SEQ ID NO: 1896952 - RNA, 19 nt, Homo sapiens
  misc_RNA (1)...(19): siRNA sense strand
gugggaaacaguuauauuc

SEQ ID NO: 1896953 - RNA, 19 nt, Homo sapiens
  misc_RNA (1)...(19): siRNA sense strand
acuggcugcugauggauua

SEQ ID NO: 1896954 - RNA, 19 nt, Homo sapiens
  misc_RNA (1)...(19): siRNA sense strand
gagcggacagagaaaguga

SEQ ID NO: 1896955 - RNA, 19 nt, Homo sapiens
  misc_RNA (1)...(19): siRNA sense strand
cgcaaggcaugcuggauga

SEQ ID NO: 1896956 - RNA, 19 nt, Homo sapiens
  misc_RNA (1)...(19): siRNA sense strand
agaaguuacuccggaagaa

SEQ ID NO: 1896957 - RNA, 19 nt, Homo sapiens
  misc_RNA (1)...(19): siRNA sense strand
ccaucgacgugaacuacaa

SEQ ID NO: 1896958 - RNA, 19 nt, Homo sapiens
  misc_RNA (1)...(19): siRNA sense strand
ggaaccagagccagagaug

SEQ ID NO: 1896959 - RNA, 19 nt, Homo sapiens
  misc_RNA (1)...(19): siRNA sense strand
aagaaggaccugaaugaga

SEQ ID NO: 1896960 - RNA, 19 nt, Homo sapiens
  misc_RNA (1)...(19): siRNA sense strand
gaucuguguuuggagaaau

SEQ ID NO: 1896961 - RNA, 19 nt, Homo sapiens
  misc_RNA (1)...(19): siRNA sense strand
cagccuaccuucucuacag

SEQ ID NO: 1896962 - RNA, 19 nt, Homo sapiens
  misc_RNA (1)...(19): siRNA sense strand
ccaaaucagacacccuuau

SEQ ID NO: 1896963 - RNA, 19 nt, Homo sapiens
  misc_RNA (1)...(19): siRNA sense strand
ccagggcgcugagauuucu

SEQ ID NO: 1896964 - RNA, 19 nt, Homo sapiens
  misc_RNA (1)...(19): siRNA sense strand
ucuacagccugcauuugaa

SEQ ID NO: 1896965 - RNA, 19 nt, Homo sapiens
  misc_RNA (1)...(19): siRNA sense strand
ccugauguauguccuaugg

SEQ ID NO: 1896966 - RNA, 19 nt, Homo sapiens
  misc_RNA (1)...(19): siRNA sense strand
uggaagaaguaccaguuuc

SEQ ID NO: 1896967 - RNA, 19 nt, Homo sapiens
  misc_RNA (1)...(19): siRNA sense strand
gauugaagaggagaaagaa

SEQ ID NO: 1896968 - RNA, 19 nt, Homo sapiens
  misc_RNA (1)...(19): siRNA sense strand
gaaggaccugaaugagauu

SEQ ID NO: 1896969 - RNA, 19 nt, Homo sapiens
  misc_RNA (1)...(19): siRNA sense strand
ggaauccauccucagcaaa

SEQ ID NO: 1896970 - RNA, 19 nt, Homo sapiens
  misc_RNA (1)...(19): siRNA sense strand
ggacaugcgaaauaacuac

SEQ ID NO: 1896971 - RNA, 19 nt, Homo sapiens
  misc_RNA (1)...(19): siRNA sense strand
ccaagaugcaggaggaaga

SEQ ID NO: 1896972 - RNA, 19 nt, Homo sapiens
  misc_RNA (1)...(19): siRNA sense strand
gaauccauccucagcaaag

SEQ ID NO: 1896973 - RNA, 19 nt, Homo sapiens
  misc_RNA (1)...(19): siRNA sense strand
gaagaugccggaggaaagg

SEQ ID NO: 1896974 - RNA, 19 nt, Homo sapiens
  misc_RNA (1)...(19): siRNA sense strand
ggauaagaaggaccugaau

SEQ ID NO: 1896975 - RNA, 19 nt, Homo sapiens
  misc_RNA (1)...(19): siRNA sense strand
gugcagaaccgcgucaaga

SEQ ID NO: 1896976 - RNA, 19 nt, Homo sapiens
  misc_RNA (1)...(19): siRNA sense strand
ggacagcacggugaaguac

SEQ ID NO: 1896977 - RNA, 19 nt, Homo sapiens
  misc_RNA (1)...(19): siRNA sense strand
guuacuacuuugcugugaa

SEQ ID NO: 1896978 - RNA, 19 nt, Homo sapiens
  misc_RNA (1)...(19): siRNA sense strand
uauucgcuguuacuacuuu

SEQ ID NO: 1896979 - RNA, 19 nt, Homo sapiens
  misc_RNA (1)...(19): siRNA sense strand
gaccacagccuaccuucuc

SEQ ID NO: 1896980 - RNA, 19 nt, Homo sapiens
  misc_RNA (1)...(19): siRNA sense strand
gcauggaacuggagcugua

SEQ ID NO: 1896981 - RNA, 19 nt, Homo sapiens
  misc_RNA (1)...(19): siRNA sense strand
gggaaacgcuacuucgaau

SEQ ID NO: 1896982 - RNA, 19 nt, Homo sapiens
  misc_RNA (1)...(19): siRNA sense strand
ucgcugaguucaaguguaa

SEQ ID NO: 1896983 - RNA, 19 nt, Homo sapiens
  misc_RNA (1)...(19): siRNA sense strand
guauguaggucucacagau

SEQ ID NO: 1896984 - RNA, 19 nt, Homo sapiens
  misc_RNA (1)...(19): siRNA sense strand
gcagcucccucaacaccuu

SEQ ID NO: 1896985 - RNA, 19 nt, Homo sapiens
  misc_RNA (1)...(19): siRNA sense strand
ggauugguguccgcuauga

SEQ ID NO: 1896986 - RNA, 19 nt, Homo sapiens
  misc_RNA (1)...(19): siRNA sense strand
caagcuggaucaagaggau

SEQ ID NO: 1896987 - RNA, 19 nt, Homo sapiens
  misc_RNA (1)...(19): siRNA sense strand
guauggaguugacgacaag

SEQ ID NO: 1896988 - RNA, 19 nt, Homo sapiens
  misc_RNA (1)...(19): siRNA sense strand
gaaguacacgaucucacaa

SEQ ID NO: 1896989 - RNA, 19 nt, Homo sapiens
  misc_RNA (1)...(19): siRNA sense strand
guacacgaucucacaagaa

SEQ ID NO: 1896990 - RNA, 19 nt, Homo sapiens
  misc_RNA (1)...(19): siRNA sense strand
gaaacgcuacuucgaaugc

SEQ ID NO: 1896991 - RNA, 19 nt, Homo sapiens
  misc_RNA (1)...(19): siRNA sense strand
gguccgcucuuuccugaag

SEQ ID NO: 1896992 - RNA, 19 nt, Homo sapiens
  misc_RNA (1)...(19): siRNA sense strand
caccaucgcugaguucaag

SEQ ID NO: 1896993 - RNA, 19 nt, Homo sapiens
  misc_RNA (1)...(19): siRNA sense strand
ucgaaugccaggccaagua

SEQ ID NO: 1896994 - RNA, 19 nt, Homo sapiens
  misc_RNA (1)...(19): siRNA sense strand
auguaggucucacagauuu

SEQ ID NO: 1896995 - RNA, 19 nt, Homo sapiens
  misc_RNA (1)...(19): siRNA sense strand
uacacgaucucacaagaag

SEQ ID NO: 1896996 - RNA, 19 nt, Homo sapiens
  misc_RNA (1)...(19): siRNA sense strand
gaaugggaaacgcuacuuc

SEQ ID NO: 1896997 - RNA, 19 nt, Homo sapiens
  misc_RNA (1)...(19): siRNA sense strand
ggaaacgcuacuucgaaug

SEQ ID NO: 1896998 - RNA, 19 nt, Homo sapiens
  misc_RNA (1)...(19): siRNA sense strand
ccaaguauggcgccuuugu

SEQ ID NO: 1896999 - RNA, 19 nt, Homo sapiens
  misc_RNA (1)...(19): siRNA sense strand
gaguugacgacaaguucua

SEQ ID NO: 1897000 - RNA, 19 nt, Homo sapiens
  misc_RNA (1)...(19): siRNA sense strand
ugucccggguggagaagua

SEQ ID NO: 1897001 - RNA, 19 nt, Homo sapiens
  misc_RNA (1)...(19): siRNA sense strand
guggagaaguacacgaucu

SEQ ID NO: 1897002 - RNA, 19 nt, Homo sapiens
  misc_RNA (1)...(19): siRNA sense strand
guauggcgccuuugucaag

SEQ ID NO: 1897003 - RNA, 19 nt, Homo sapiens
  misc_RNA (1)...(19): siRNA sense strand
agaaguacacgaucucaca

SEQ ID NO: 1897004 - RNA, 19 nt, Homo sapiens
  misc_RNA (1)...(19): siRNA sense strand
cgaaugccaggccaaguau

SEQ ID NO: 1897005 - RNA, 19 nt, Homo sapiens
  misc_RNA (1)...(19): siRNA sense strand
uguauggaguugacgacaa

SEQ ID NO: 1897006 - RNA, 19 nt, Homo sapiens
  misc_RNA (1)...(19): siRNA sense strand
aguacacgaucucacaaga

SEQ ID NO: 1897007 - RNA, 19 nt, Homo sapiens
  misc_RNA (1)...(19): siRNA sense strand
ggagcuguauggaguugac

SEQ ID NO: 1897008 - RNA, 19 nt, Homo sapiens
  misc_RNA (1)...(19): siRNA sense strand
uauguaggucucacagauu

SEQ ID NO: 1897009 - RNA, 19 nt, Homo sapiens
  misc_RNA (1)...(19): siRNA sense strand
ugggaaacgcuacuucgaa

SEQ ID NO: 1897010 - RNA, 19 nt, Homo sapiens
  misc_RNA (1)...(19): siRNA sense strand
cuacggguuggacgagaua

SEQ ID NO: 1897011 - RNA, 19 nt, Homo sapiens
  misc_RNA (1)...(19): siRNA sense strand
acgacaaguucuacagcaa

SEQ ID NO: 1897012 - RNA, 19 nt, Homo sapiens
  misc_RNA (1)...(19): siRNA sense strand
guaggucucacagauuuca

SEQ ID NO: 1897013 - RNA, 19 nt, Homo sapiens
  misc_RNA (1)...(19): siRNA sense strand
ggaacuggagcuguaugga

SEQ ID NO: 1897014 - RNA, 19 nt, Homo sapiens
  misc_RNA (1)...(19): siRNA sense strand
caucaaaggugugcuguuu

SEQ ID NO: 1897015 - RNA, 19 nt, Homo sapiens
  misc_RNA (1)...(19): siRNA sense strand
caaaguguaugaugauaug

SEQ ID NO: 1897016 - RNA, 19 nt, Homo sapiens
  misc_RNA (1)...(19): siRNA sense strand
uaaugaaccugcaugugua

SEQ ID NO: 1897017 - RNA, 19 nt, Homo sapiens
  misc_RNA (1)...(19): siRNA sense strand
caagagggcugaggacuau

SEQ ID NO: 1897018 - RNA, 19 nt, Homo sapiens
  misc_RNA (1)...(19): siRNA sense strand
cgaccaaaguguaugauga

SEQ ID NO: 1897019 - RNA, 19 nt, Homo sapiens
  misc_RNA (1)...(19): siRNA sense strand
acaaggcccucaacacauu

SEQ ID NO: 1897020 - RNA, 19 nt, Homo sapiens
  misc_RNA (1)...(19): siRNA sense strand
gaacagcacgaucuugugu

SEQ ID NO: 1897021 - RNA, 19 nt, Homo sapiens
  misc_RNA (1)...(19): siRNA sense strand
ccaucuacauccacguuua

SEQ ID NO: 1897022 - RNA, 19 nt, Homo sapiens
  misc_RNA (1)...(19): siRNA sense strand
caagaaugauauccaguuc

SEQ ID NO: 1897023 - RNA, 19 nt, Homo sapiens
  misc_RNA (1)...(19): siRNA sense strand
ucaaaggugugcuguuuag

SEQ ID NO: 1897024 - RNA, 19 nt, Homo sapiens
  misc_RNA (1)...(19): siRNA sense strand
gcacuuugcugagcucgau

SEQ ID NO: 1897025 - RNA, 19 nt, Homo sapiens
  misc_RNA (1)...(19): siRNA sense strand
gaacggcuccaucuacauc

SEQ ID NO: 1897026 - RNA, 19 nt, Homo sapiens
  misc_RNA (1)...(19): siRNA sense strand
ucaagaugcccguuaugua

SEQ ID NO: 1897027 - RNA, 19 nt, Homo sapiens
  misc_RNA (1)...(19): siRNA sense strand
gaagcggacccagaaauga

SEQ ID NO: 1897028 - RNA, 19 nt, Homo sapiens
  misc_RNA (1)...(19): siRNA sense strand
caacaucaccaucaacauc

SEQ ID NO: 1897029 - RNA, 19 nt, Homo sapiens
  misc_RNA (1)...(19): siRNA sense strand
gacagaagcggacccagaa

SEQ ID NO: 1897030 - RNA, 19 nt, Homo sapiens
  misc_RNA (1)...(19): siRNA sense strand
ggacaacgagaccaacuuc

SEQ ID NO: 1897031 - RNA, 19 nt, Homo sapiens
  misc_RNA (1)...(19): siRNA sense strand
cgugagcggugacuacuau

SEQ ID NO: 1897032 - RNA, 19 nt, Homo sapiens
  misc_RNA (1)...(19): siRNA sense strand
gaagaucaccaaggucaug

SEQ ID NO: 1897033 - RNA, 19 nt, Homo sapiens
  misc_RNA (1)...(19): siRNA sense strand
cagaacggcuccaucuaca

SEQ ID NO: 1897034 - RNA, 19 nt, Homo sapiens
  misc_RNA (1)...(19): siRNA sense strand
caagaugcccguuauguac

SEQ ID NO: 1897035 - RNA, 19 nt, Homo sapiens
  misc_RNA (1)...(19): siRNA sense strand
gcagaacggcuccaucuac

SEQ ID NO: 1897036 - RNA, 19 nt, Homo sapiens
  misc_RNA (1)...(19): siRNA sense strand
caacgaguuuggcaugagu

SEQ ID NO: 1897037 - RNA, 19 nt, Homo sapiens
  misc_RNA (1)...(19): siRNA sense strand
acuacaagcucaagucugu

SEQ ID NO: 1897038 - RNA, 19 nt, Homo sapiens
  misc_RNA (1)...(19): siRNA sense strand
ugacuacuaucccaucauc

SEQ ID NO: 1897039 - RNA, 19 nt, Homo sapiens
  misc_RNA (1)...(19): siRNA sense strand
ggaucaauaugugaaguuc

SEQ ID NO: 1897040 - RNA, 19 nt, Homo sapiens
  misc_RNA (1)...(19): siRNA sense strand
gcaccaagucgcccuggaa

SEQ ID NO: 1897041 - RNA, 19 nt, Homo sapiens
  misc_RNA (1)...(19): siRNA sense strand
uuaaugaaccugcaugugu

SEQ ID NO: 1897042 - RNA, 19 nt, Homo sapiens
  misc_RNA (1)...(19): siRNA sense strand
cuacaaggcccucaacaca

SEQ ID NO: 1897043 - RNA, 19 nt, Homo sapiens
  misc_RNA (1)...(19): siRNA sense strand
cccggaugaucaacaaaua

SEQ ID NO: 1897044 - RNA, 19 nt, Homo sapiens
  misc_RNA (1)...(19): siRNA sense strand
guccacaugucccggauga

SEQ ID NO: 1897045 - RNA, 19 nt, Homo sapiens
  misc_RNA (1)...(19): siRNA sense strand
ucagagcacgagcacuuua

SEQ ID NO: 1897046 - RNA, 19 nt, Homo sapiens
  misc_RNA (1)...(19): siRNA sense strand
ucaagaaugauauccaguu

SEQ ID NO: 1897047 - RNA, 19 nt, Homo sapiens
  misc_RNA (1)...(19): siRNA sense strand
ucaagagggcugaggacua

SEQ ID NO: 1897048 - RNA, 19 nt, Homo sapiens
  misc_RNA (1)...(19): siRNA sense strand
acagcacgaucuuguguau

SEQ ID NO: 1897049 - RNA, 19 nt, Homo sapiens
  misc_RNA (1)...(19): siRNA sense strand
gggaacagcacgaucuugu

SEQ ID NO: 1897050 - RNA, 19 nt, Homo sapiens
  misc_RNA (1)...(19): siRNA sense strand
uuuaggaucuucaucaucu

SEQ ID NO: 1897051 - RNA, 19 nt, Homo sapiens
  misc_RNA (1)...(19): siRNA sense strand
gcuaugccgucuacagucu

SEQ ID NO: 1897052 - RNA, 19 nt, Homo sapiens
  misc_RNA (1)...(19): siRNA sense strand
cuacauccacguuuacuuc

SEQ ID NO: 1897053 - RNA, 19 nt, Homo sapiens
  misc_RNA (1)...(19): siRNA sense strand
gaccaaaguguaugaugau

SEQ ID NO: 1897054 - RNA, 19 nt, Homo sapiens
  misc_RNA (1)...(19): siRNA sense strand
acuggaaccugcagaagga

SEQ ID NO: 1897055 - RNA, 19 nt, Homo sapiens
  misc_RNA (1)...(19): siRNA sense strand
ccaaaguguaugaugauau

SEQ ID NO: 1897056 - RNA, 19 nt, Homo sapiens
  misc_RNA (1)...(19): siRNA sense strand
gcacaggguggcaggaauc

SEQ ID NO: 1897057 - RNA, 19 nt, Homo sapiens
  misc_RNA (1)...(19): siRNA sense strand
caggucagcgucuucauug

SEQ ID NO: 1897058 - RNA, 19 nt, Homo sapiens
  misc_RNA (1)...(19): siRNA sense strand
gggcugcuaugccgucuac

SEQ ID NO: 1897059 - RNA, 19 nt, Homo sapiens
  misc_RNA (1)...(19): siRNA sense strand
ucaccaucaucgugucuau

SEQ ID NO: 1897060 - RNA, 19 nt, Homo sapiens
  misc_RNA (1)...(19): siRNA sense strand
ggugugcuguuuaggaucu

SEQ ID NO: 1897061 - RNA, 19 nt, Homo sapiens
  misc_RNA (1)...(19): siRNA sense strand
ggaacagcacgaucuugug

SEQ ID NO: 1897062 - RNA, 19 nt, Homo sapiens
  misc_RNA (1)...(19): siRNA sense strand
ucuggaagaucaccaaggu

SEQ ID NO: 1897063 - RNA, 19 nt, Homo sapiens
  misc_RNA (1)...(19): siRNA sense strand
ccaggucagcgucuucauu

SEQ ID NO: 1897064 - RNA, 19 nt, Homo sapiens
  misc_RNA (1)...(19): siRNA sense strand
ggaaccugcagaaggacua

SEQ ID NO: 1897065 - RNA, 19 nt, Homo sapiens
  misc_RNA (1)...(19): siRNA sense strand
cccaucaucuacuucaaug

SEQ ID NO: 1897066 - RNA, 19 nt, Homo sapiens
  misc_RNA (1)...(19): siRNA sense strand
cacagagcguccagcagaa

SEQ ID NO: 1897067 - RNA, 19 nt, Homo sapiens
  misc_RNA (1)...(19): siRNA sense strand
ucucagagcacgagcacuu

SEQ ID NO: 1897068 - RNA, 19 nt, Homo sapiens
  misc_RNA (1)...(19): siRNA sense strand
uguacgagcagucagauga

SEQ ID NO: 1897069 - RNA, 19 nt, Homo sapiens
  misc_RNA (1)...(19): siRNA sense strand
ggugacuacuaucccauca

SEQ ID NO: 1897070 - RNA, 19 nt, Homo sapiens
  misc_RNA (1)...(19): siRNA sense strand
gaugaucaacaaauacaag

SEQ ID NO: 1897071 - RNA, 19 nt, Homo sapiens
  misc_RNA (1)...(19): siRNA sense strand
cacguuuacuucaccaaga

SEQ ID NO: 1897072 - RNA, 19 nt, Homo sapiens
  misc_RNA (1)...(19): siRNA sense strand
cagcagaacggcuccaucu

SEQ ID NO: 1897073 - RNA, 19 nt, Homo sapiens
  misc_RNA (1)...(19): siRNA sense strand
ccacccgagucaacgaguu

SEQ ID NO: 1897074 - RNA, 19 nt, Homo sapiens
  misc_RNA (1)...(19): siRNA sense strand
caucaucgugucuaucguu

SEQ ID NO: 1897075 - RNA, 19 nt, Homo sapiens
  misc_RNA (1)...(19): siRNA sense strand
ccacaugucccggaugauc

SEQ ID NO: 1897076 - RNA, 19 nt, Homo sapiens
  misc_RNA (1)...(19): siRNA sense strand
gccagcagaggacaagaaa

SEQ ID NO: 1897077 - RNA, 19 nt, Homo sapiens
  misc_RNA (1)...(19): siRNA sense strand
gagcacaggguggcaggaa

SEQ ID NO: 1897078 - RNA, 19 nt, Homo sapiens
  misc_RNA (1)...(19): siRNA sense strand
guuccuggccuucaagaau

SEQ ID NO: 1897079 - RNA, 19 nt, Homo sapiens
  misc_RNA (1)...(19): siRNA sense strand
aaaggugugcuguuuagga

SEQ ID NO: 1897080 - RNA, 19 nt, Homo sapiens
  misc_RNA (1)...(19): siRNA sense strand
caacuacaagcucaagucu

SEQ ID NO: 1897081 - RNA, 19 nt, Homo sapiens
  misc_RNA (1)...(19): siRNA sense strand
cagaagcggacccagaaau

SEQ ID NO: 1897082 - RNA, 19 nt, Homo sapiens
  misc_RNA (1)...(19): siRNA sense strand
uacaagcgcagacgauuuc

SEQ ID NO: 1897083 - RNA, 19 nt, Homo sapiens
  misc_RNA (1)...(19): siRNA sense strand
gcacuuuacagacuucaac

SEQ ID NO: 1897084 - RNA, 19 nt, Homo sapiens
  misc_RNA (1)...(19): siRNA sense strand
cacgagcacuuuacagacu

SEQ ID NO: 1897085 - RNA, 19 nt, Homo sapiens
  misc_RNA (1)...(19): siRNA sense strand
auacaagcgcagacgauuu

SEQ ID NO: 1897086 - RNA, 19 nt, Homo sapiens
  misc_RNA (1)...(19): siRNA sense strand
ggcgcaugcucaccuacaa

SEQ ID NO: 1897087 - RNA, 19 nt, Homo sapiens
  misc_RNA (1)...(19): siRNA sense strand
aaggugugcuguuuaggau

SEQ ID NO: 1897088 - RNA, 19 nt, Homo sapiens
  misc_RNA (1)...(19): siRNA sense strand
ucacagugucuucgaguuc

SEQ ID NO: 1897089 - RNA, 19 nt, Homo sapiens
  misc_RNA (1)...(19): siRNA sense strand
acuacuaucccaucaucua

SEQ ID NO: 1897090 - RNA, 19 nt, Homo sapiens
  misc_RNA (1)...(19): siRNA sense strand
acccagaaaugaucaagag

SEQ ID NO: 1897091 - RNA, 19 nt, Homo sapiens
  misc_RNA (1)...(19): siRNA sense strand
agaagcggacccagaaaug

SEQ ID NO: 1897092 - RNA, 19 nt, Homo sapiens
  misc_RNA (1)...(19): siRNA sense strand
accaaaguguaugaugaua

SEQ ID NO: 1897093 - RNA, 19 nt, Homo sapiens
  misc_RNA (1)...(19): siRNA sense strand
aagcgcagacgauuucaga

SEQ ID NO: 1897094 - RNA, 19 nt, Homo sapiens
  misc_RNA (1)...(19): siRNA sense strand
gucaacgaguuuggcauga

SEQ ID NO: 1897095 - RNA, 19 nt, Homo sapiens
  misc_RNA (1)...(19): siRNA sense strand
caggguggcaggaaucuuc

SEQ ID NO: 1897096 - RNA, 19 nt, Homo sapiens
  misc_RNA (1)...(19): siRNA sense strand
ucaucgaccucuggaagau

SEQ ID NO: 1897097 - RNA, 19 nt, Homo sapiens
  misc_RNA (1)...(19): siRNA sense strand
agcacgaucuuguguaugg

SEQ ID NO: 1897098 - RNA, 19 nt, Homo sapiens
  misc_RNA (1)...(19): siRNA sense strand
ggaugaucaacaaauacaa

SEQ ID NO: 1897099 - RNA, 19 nt, Homo sapiens
  misc_RNA (1)...(19): siRNA sense strand
uguaugaugauauggcauu

SEQ ID NO: 1897100 - RNA, 19 nt, Homo sapiens
  misc_RNA (1)...(19): siRNA sense strand
uuccuggccuucaagaaug

SEQ ID NO: 1897101 - RNA, 19 nt, Homo sapiens
  misc_RNA (1)...(19): siRNA sense strand
ggacuagcggcgagaacuc

SEQ ID NO: 1897102 - RNA, 19 nt, Homo sapiens
  misc_RNA (1)...(19): siRNA sense strand
ccuguucgccuuugucauc

SEQ ID NO: 1897103 - RNA, 19 nt, Homo sapiens
  misc_RNA (1)...(19): siRNA sense strand
gacgaccuguucgccuuug

SEQ ID NO: 1897104 - RNA, 19 nt, Homo sapiens
  misc_RNA (1)...(19): siRNA sense strand
cgacgaccuguucgccuuu

SEQ ID NO: 1897105 - RNA, 19 nt, Homo sapiens
  misc_RNA (1)...(19): siRNA sense strand
guaugaugauauggcauuc

SEQ ID NO: 1897106 - RNA, 19 nt, Homo sapiens
  misc_RNA (1)...(19): siRNA sense strand
ugucccggaugaucaacaa

SEQ ID NO: 1897107 - RNA, 19 nt, Homo sapiens
  misc_RNA (1)...(19): siRNA sense strand
cugcugaccuucggcuuca

SEQ ID NO: 1897108 - RNA, 19 nt, Homo sapiens
  misc_RNA (1)...(19): siRNA sense strand
ucgaguuccuggccuucaa

SEQ ID NO: 1897109 - RNA, 19 nt, Homo sapiens
  misc_RNA (1)...(19): siRNA sense strand
acuaucccaucaucuacuu

SEQ ID NO: 1897110 - RNA, 19 nt, Homo sapiens
  misc_RNA (1)...(19): siRNA sense strand
caucaaagcuggcaacuug

SEQ ID NO: 1897111 - RNA, 19 nt, Homo sapiens
  misc_RNA (1)...(19): siRNA sense strand
gaaauucucuggguuaaca

SEQ ID NO: 1897112 - RNA, 19 nt, Homo sapiens
  misc_RNA (1)...(19): siRNA sense strand
gaacagauaaccagacuug

SEQ ID NO: 1897113 - RNA, 19 nt, Homo sapiens
  misc_RNA (1)...(19): siRNA sense strand
gaaguuguucucugucuuu

SEQ ID NO: 1897114 - RNA, 19 nt, Homo sapiens
  misc_RNA (1)...(19): siRNA sense strand
ggcagaaacuauuauggaa

SEQ ID NO: 1897115 - RNA, 19 nt, Homo sapiens
  misc_RNA (1)...(19): siRNA sense strand
gaucaucuccaccauccua

SEQ ID NO: 1897116 - RNA, 19 nt, Homo sapiens
  misc_RNA (1)...(19): siRNA sense strand
gcagaaacuauuauggaaa

SEQ ID NO: 1897117 - RNA, 19 nt, Homo sapiens
  misc_RNA (1)...(19): siRNA sense strand
gaaggaagaaagaaagcuu

SEQ ID NO: 1897118 - RNA, 19 nt, Homo sapiens
  misc_RNA (1)...(19): siRNA sense strand
ucaccaaccucucccuugu

SEQ ID NO: 1897119 - RNA, 19 nt, Homo sapiens
  misc_RNA (1)...(19): siRNA sense strand
agacuugggugagugaauu

SEQ ID NO: 1897120 - RNA, 19 nt, Homo sapiens
  misc_RNA (1)...(19): siRNA sense strand
agacugcuaucaccuuuca

SEQ ID NO: 1897121 - RNA, 19 nt, Homo sapiens
  misc_RNA (1)...(19): siRNA sense strand
cauauccugugaacuccua

SEQ ID NO: 1897122 - RNA, 19 nt, Homo sapiens
  misc_RNA (1)...(19): siRNA sense strand
cauggugucuagcauuguu

SEQ ID NO: 1897123 - RNA, 19 nt, Homo sapiens
  misc_RNA (1)...(19): siRNA sense strand
gggaacagauaaccagacu

SEQ ID NO: 1897124 - RNA, 19 nt, Homo sapiens
  misc_RNA (1)...(19): siRNA sense strand
uagcauuguucuucugaug

SEQ ID NO: 1897125 - RNA, 19 nt, Homo sapiens
  misc_RNA (1)...(19): siRNA sense strand
cagagaaggaagaaagaaa

SEQ ID NO: 1897126 - RNA, 19 nt, Homo sapiens
  misc_RNA (1)...(19): siRNA sense strand
ggacaccuccuccaaugag

SEQ ID NO: 1897127 - RNA, 19 nt, Homo sapiens
  misc_RNA (1)...(19): siRNA sense strand
acauaaagccaucccauuc

SEQ ID NO: 1897128 - RNA, 19 nt, Homo sapiens
  misc_RNA (1)...(19): siRNA sense strand
uggaaauucucuggguuaa

SEQ ID NO: 1897129 - RNA, 19 nt, Homo sapiens
  misc_RNA (1)...(19): siRNA sense strand
ggccuggcagaaacuauua

SEQ ID NO: 1897130 - RNA, 19 nt, Homo sapiens
  misc_RNA (1)...(19): siRNA sense strand
uaaccagacuugggugagu

SEQ ID NO: 1897131 - RNA, 19 nt, Homo sapiens
  misc_RNA (1)...(19): siRNA sense strand
ucucuggguuaacaucaaa

SEQ ID NO: 1897132 - RNA, 19 nt, Homo sapiens
  misc_RNA (1)...(19): siRNA sense strand
caaccucucccuugucgau

SEQ ID NO: 1897133 - RNA, 19 nt, Homo sapiens
  misc_RNA (1)...(19): siRNA sense strand
cugcggugauggccuauga

SEQ ID NO: 1897134 - RNA, 19 nt, Homo sapiens
  misc_RNA (1)...(19): siRNA sense strand
uaaagauccaguccagaga

SEQ ID NO: 1897135 - RNA, 19 nt, Homo sapiens
  misc_RNA (1)...(19): siRNA sense strand
acacucccauguauuucuu

SEQ ID NO: 1897136 - RNA, 19 nt, Homo sapiens
  misc_RNA (1)...(19): siRNA sense strand
gggccuggcagaaacuauu

SEQ ID NO: 1897137 - RNA, 19 nt, Homo sapiens
  misc_RNA (1)...(19): siRNA sense strand
auuuacagccuaaggaaua

SEQ ID NO: 1897138 - RNA, 19 nt, Homo sapiens
  misc_RNA (1)...(19): siRNA sense strand
gauccaguccagagaagga

SEQ ID NO: 1897139 - RNA, 19 nt, Homo sapiens
  misc_RNA (1)...(19): siRNA sense strand
gcauuguucuucugaugac

SEQ ID NO: 1897140 - RNA, 19 nt, Homo sapiens
  misc_RNA (1)...(19): siRNA sense strand
acucgggucucccuguuug

SEQ ID NO: 1897141 - RNA, 19 nt, Homo sapiens
  misc_RNA (1)...(19): siRNA sense strand
uggcagaaacuauuaugga

SEQ ID NO: 1897142 - RNA, 19 nt, Homo sapiens
  misc_RNA (1)...(19): siRNA sense strand
cccaugauuuacagccuaa

SEQ ID NO: 1897143 - RNA, 19 nt, Homo sapiens
  misc_RNA (1)...(19): siRNA sense strand
caucauggugucuagcauu

SEQ ID NO: 1897144 - RNA, 19 nt, Homo sapiens
  misc_RNA (1)...(19): siRNA sense strand
acuccacacucccauguau

SEQ ID NO: 1897145 - RNA, 19 nt, Homo sapiens
  misc_RNA (1)...(19): siRNA sense strand
acacucgggucucccuguu

SEQ ID NO: 1897146 - RNA, 19 nt, Homo sapiens
  misc_RNA (1)...(19): siRNA sense strand
ugggugggauugaguuugu

SEQ ID NO: 1897147 - RNA, 19 nt, Homo sapiens
  misc_RNA (1)...(19): siRNA sense strand
aaagauccaguccagagaa

SEQ ID NO: 1897148 - RNA, 19 nt, Homo sapiens
  misc_RNA (1)...(19): siRNA sense strand
ccuuucagcugcccaugug

SEQ ID NO: 1897149 - RNA, 19 nt, Homo sapiens
  misc_RNA (1)...(19): siRNA sense strand
ccuugucgaugucuccuau

SEQ ID NO: 1897150 - RNA, 19 nt, Homo sapiens
  misc_RNA (1)...(19): siRNA sense strand
uuuacagccuaaggaauaa

SEQ ID NO: 1897151 - RNA, 19 nt, Homo sapiens
  misc_RNA (1)...(19): siRNA sense strand
guuguucucugucuuuuau

SEQ ID NO: 1897152 - RNA, 19 nt, Homo sapiens
  misc_RNA (1)...(19): siRNA sense strand
uugggugagugaauuuauu

SEQ ID NO: 1897153 - RNA, 19 nt, Homo sapiens
  misc_RNA (1)...(19): siRNA sense strand
uccacacucccauguauuu

SEQ ID NO: 1897154 - RNA, 19 nt, Homo sapiens
  misc_RNA (1)...(19): siRNA sense strand
ccagagaaggaagaaagaa

SEQ ID NO: 1897155 - RNA, 19 nt, Homo sapiens
  misc_RNA (1)...(19): siRNA sense strand
gaacugucucauuguccuu

SEQ ID NO: 1897156 - RNA, 19 nt, Homo sapiens
  misc_RNA (1)...(19): siRNA sense strand
uaaggaauaaagaggugaa

SEQ ID NO: 1897157 - RNA, 19 nt, Homo sapiens
  misc_RNA (1)...(19): siRNA sense strand
ggacagccgacuccacacu

SEQ ID NO: 1897158 - RNA, 19 nt, Homo sapiens
  misc_RNA (1)...(19): siRNA sense strand
gauacucggccaucaugca

SEQ ID NO: 1897159 - RNA, 19 nt, Homo sapiens
  misc_RNA (1)...(19): siRNA sense strand
auaaagccaucccauucca

SEQ ID NO: 1897160 - RNA, 19 nt, Homo sapiens
  misc_RNA (1)...(19): siRNA sense strand
ugauuuacagccuaaggaa

SEQ ID NO: 1897161 - RNA, 19 nt, Homo sapiens
  misc_RNA (1)...(19): siRNA sense strand
guguggccauuuucacuua

SEQ ID NO: 1897162 - RNA, 19 nt, Homo sapiens
  misc_RNA (1)...(19): siRNA sense strand
guccagagaaggaagaaag

SEQ ID NO: 1897163 - RNA, 19 nt, Homo sapiens
  misc_RNA (1)...(19): siRNA sense strand
aacauaaagccaucccauu

SEQ ID NO: 1897164 - RNA, 19 nt, Homo sapiens
  misc_RNA (1)...(19): siRNA sense strand
auggaaauucucuggguua

SEQ ID NO: 1897165 - RNA, 19 nt, Homo sapiens
  misc_RNA (1)...(19): siRNA sense strand
gauuuacagccuaaggaau

SEQ ID NO: 1897166 - RNA, 19 nt, Homo sapiens
  misc_RNA (1)...(19): siRNA sense strand
agagaaggaagaaagaaag

SEQ ID NO: 1897167 - RNA, 19 nt, Homo sapiens
  misc_RNA (1)...(19): siRNA sense strand
ucuccaccauccuaaagau

SEQ ID NO: 1897168 - RNA, 19 nt, Homo sapiens
  misc_RNA (1)...(19): siRNA sense strand
cgacuccacacucccaugu

SEQ ID NO: 1897169 - RNA, 19 nt, Homo sapiens
  misc_RNA (1)...(19): siRNA sense strand
gaaauacgguuauacaucu

SEQ ID NO: 1897170 - RNA, 19 nt, Homo sapiens
  misc_RNA (1)...(19): siRNA sense strand
gcaccaaccucaccuguca

SEQ ID NO: 1897171 - RNA, 19 nt, Homo sapiens
  misc_RNA (1)...(19): siRNA sense strand
guacucagaaaucaagaua

SEQ ID NO: 1897172 - RNA, 19 nt, Homo sapiens
  misc_RNA (1)...(19): siRNA sense strand
gcauacuucuuucgguuga

SEQ ID NO: 1897173 - RNA, 19 nt, Homo sapiens
  misc_RNA (1)...(19): siRNA sense strand
gaugaaauacgguuauaca

SEQ ID NO: 1897174 - RNA, 19 nt, Homo sapiens
  misc_RNA (1)...(19): siRNA sense strand
ccucugggcucccugcaaa

SEQ ID NO: 1897175 - RNA, 19 nt, Homo sapiens
  misc_RNA (1)...(19): siRNA sense strand
gaaaucaagauacacaagu

SEQ ID NO: 1897176 - RNA, 19 nt, Homo sapiens
  misc_RNA (1)...(19): siRNA sense strand
ccacuacgcuguccuacac

SEQ ID NO: 1897177 - RNA, 19 nt, Homo sapiens
  misc_RNA (1)...(19): siRNA sense strand
agacaggcauaguuucaga

SEQ ID NO: 1897178 - RNA, 19 nt, Homo sapiens
  misc_RNA (1)...(19): siRNA sense strand
caaacgacccagacgaaga

SEQ ID NO: 1897179 - RNA, 19 nt, Homo sapiens
  misc_RNA (1)...(19): siRNA sense strand
gaaccauccagcucaaugu

SEQ ID NO: 1897180 - RNA, 19 nt, Homo sapiens
  misc_RNA (1)...(19): siRNA sense strand
acucagaaaucaagauaca

SEQ ID NO: 1897181 - RNA, 19 nt, Homo sapiens
  misc_RNA (1)...(19): siRNA sense strand
aguagggucugcagaagaa

SEQ ID NO: 1897182 - RNA, 19 nt, Homo sapiens
  misc_RNA (1)...(19): siRNA sense strand
uggaugaaauacgguuaua

SEQ ID NO: 1897183 - RNA, 19 nt, Homo sapiens
  misc_RNA (1)...(19): siRNA sense strand
ucaaguagggucugcagaa

SEQ ID NO: 1897184 - RNA, 19 nt, Homo sapiens
  misc_RNA (1)...(19): siRNA sense strand
ugaaauacgguuauacauc

SEQ ID NO: 1897185 - RNA, 19 nt, Homo sapiens
  misc_RNA (1)...(19): siRNA sense strand
aaacgacccagacgaagaa

SEQ ID NO: 1897186 - RNA, 19 nt, Homo sapiens
  misc_RNA (1)...(19): siRNA sense strand
aaaucaagauacacaagug

SEQ ID NO: 1897187 - RNA, 19 nt, Homo sapiens
  misc_RNA (1)...(19): siRNA sense strand
ccucguacccugcagauug

SEQ ID NO: 1897188 - RNA, 19 nt, Homo sapiens
  misc_RNA (1)...(19): siRNA sense strand
caaguagggucugcagaag

SEQ ID NO: 1897189 - RNA, 19 nt, Homo sapiens
  misc_RNA (1)...(19): siRNA sense strand
caaaggucaccgacacuga

SEQ ID NO: 1897190 - RNA, 19 nt, Homo sapiens
  misc_RNA (1)...(19): siRNA sense strand
ggccaucccagcaaucuga

SEQ ID NO: 1897191 - RNA, 19 nt, Homo sapiens
  misc_RNA (1)...(19): siRNA sense strand
gagccggugugaccaugga

SEQ ID NO: 1897192 - RNA, 19 nt, Homo sapiens
  misc_RNA (1)...(19): siRNA sense strand
ccagacaggcauaguuuca

SEQ ID NO: 1897193 - RNA, 19 nt, Homo sapiens
  misc_RNA (1)...(19): siRNA sense strand
ucagaaaucaagauacaca

SEQ ID NO: 1897194 - RNA, 19 nt, Homo sapiens
  misc_RNA (1)...(19): siRNA sense strand
cacaaacgacccagacgaa

SEQ ID NO: 1897195 - RNA, 19 nt, Homo sapiens
  misc_RNA (1)...(19): siRNA sense strand
gcagaagaaggagauuuca

SEQ ID NO: 1897196 - RNA, 19 nt, Homo sapiens
  misc_RNA (1)...(19): siRNA sense strand
cgacccagacgaagaagug

SEQ ID NO: 1897197 - RNA, 19 nt, Homo sapiens
  misc_RNA (1)...(19): siRNA sense strand
agagaaccauccagcucaa

SEQ ID NO: 1897198 - RNA, 19 nt, Homo sapiens
  misc_RNA (1)...(19): siRNA sense strand
cugagucucuuugugcauu

SEQ ID NO: 1897199 - RNA, 19 nt, Homo sapiens
  misc_RNA (1)...(19): siRNA sense strand
cugcacaccugagcugguu

SEQ ID NO: 1897200 - RNA, 19 nt, Homo sapiens
  misc_RNA (1)...(19): siRNA sense strand
cagccucguacuaugguua

SEQ ID NO: 1897201 - RNA, 19 nt, Homo sapiens
  misc_RNA (1)...(19): siRNA sense strand
ggugugaccauggagagaa

SEQ ID NO: 1897202 - RNA, 19 nt, Homo sapiens
  misc_RNA (1)...(19): siRNA sense strand
gcuccacuacgcuguccua

SEQ ID NO: 1897203 - RNA, 19 nt, Homo sapiens
  misc_RNA (1)...(19): siRNA sense strand
guuccagacaggcauaguu

SEQ ID NO: 1897204 - RNA, 19 nt, Homo sapiens
  misc_RNA (1)...(19): siRNA sense strand
aaucaagauacacaaguga

SEQ ID NO: 1897205 - RNA, 19 nt, Homo sapiens
  misc_RNA (1)...(19): siRNA sense strand
ggugcaaccucaggaacca

SEQ ID NO: 1897206 - RNA, 19 nt, Homo sapiens
  misc_RNA (1)...(19): siRNA sense strand
ugagucucuuugugcauug

SEQ ID NO: 1897207 - RNA, 19 nt, Homo sapiens
  misc_RNA (1)...(19): siRNA sense strand
gaaauacgguuauacaucu

SEQ ID NO: 1897208 - RNA, 19 nt, Homo sapiens
  misc_RNA (1)...(19): siRNA sense strand
gcaccaaccucaccuguca

SEQ ID NO: 1897209 - RNA, 19 nt, Homo sapiens
  misc_RNA (1)...(19): siRNA sense strand
guacucagaaaucaagaua

SEQ ID NO: 1897210 - RNA, 19 nt, Homo sapiens
  misc_RNA (1)...(19): siRNA sense strand
gcauacuucuuucgguuga

SEQ ID NO: 1897211 - RNA, 19 nt, Homo sapiens
  misc_RNA (1)...(19): siRNA sense strand
gaugaaauacgguuauaca

SEQ ID NO: 1897212 - RNA, 19 nt, Homo sapiens
  misc_RNA (1)...(19): siRNA sense strand
ccucugggcucccugcaaa

SEQ ID NO: 1897213 - RNA, 19 nt, Homo sapiens
  misc_RNA (1)...(19): siRNA sense strand
gaaaucaagauacacaagu

SEQ ID NO: 1897214 - RNA, 19 nt, Homo sapiens
  misc_RNA (1)...(19): siRNA sense strand
ccacuacgcuguccuacac

SEQ ID NO: 1897215 - RNA, 19 nt, Homo sapiens
  misc_RNA (1)...(19): siRNA sense strand
agacaggcauaguuucaga

SEQ ID NO: 1897216 - RNA, 19 nt, Homo sapiens
  misc_RNA (1)...(19): siRNA sense strand
caaacgacccagacgaaga

SEQ ID NO: 1897217 - RNA, 19 nt, Homo sapiens
  misc_RNA (1)...(19): siRNA sense strand
gaaccauccagcucaaugu

SEQ ID NO: 1897218 - RNA, 19 nt, Homo sapiens
  misc_RNA (1)...(19): siRNA sense strand
acucagaaaucaagauaca

SEQ ID NO: 1897219 - RNA, 19 nt, Homo sapiens
  misc_RNA (1)...(19): siRNA sense strand
aguagggucugcagaagaa

SEQ ID NO: 1897220 - RNA, 19 nt, Homo sapiens
  misc_RNA (1)...(19): siRNA sense strand
uggaugaaauacgguuaua

SEQ ID NO: 1897221 - RNA, 19 nt, Homo sapiens
  misc_RNA (1)...(19): siRNA sense strand
ucaaguagggucugcagaa

SEQ ID NO: 1897222 - RNA, 19 nt, Homo sapiens
  misc_RNA (1)...(19): siRNA sense strand
ugaaauacgguuauacauc

SEQ ID NO: 1897223 - RNA, 19 nt, Homo sapiens
  misc_RNA (1)...(19): siRNA sense strand
aaacgacccagacgaagaa

SEQ ID NO: 1897224 - RNA, 19 nt, Homo sapiens
  misc_RNA (1)...(19): siRNA sense strand
aaaucaagauacacaagug

SEQ ID NO: 1897225 - RNA, 19 nt, Homo sapiens
  misc_RNA (1)...(19): siRNA sense strand
ccucguacccugcagauug

SEQ ID NO: 1897226 - RNA, 19 nt, Homo sapiens
  misc_RNA (1)...(19): siRNA sense strand
caaguagggucugcagaag

SEQ ID NO: 1897227 - RNA, 19 nt, Homo sapiens
  misc_RNA (1)...(19): siRNA sense strand
caaaggucaccgacacuga

SEQ ID NO: 1897228 - RNA, 19 nt, Homo sapiens
  misc_RNA (1)...(19): siRNA sense strand
ggccaucccagcaaucuga

SEQ ID NO: 1897229 - RNA, 19 nt, Homo sapiens
  misc_RNA (1)...(19): siRNA sense strand
gagccggugugaccaugga

SEQ ID NO: 1897230 - RNA, 19 nt, Homo sapiens
  misc_RNA (1)...(19): siRNA sense strand
ccagacaggcauaguuuca

SEQ ID NO: 1897231 - RNA, 19 nt, Homo sapiens
  misc_RNA (1)...(19): siRNA sense strand
ucagaaaucaagauacaca

SEQ ID NO: 1897232 - RNA, 19 nt, Homo sapiens
  misc_RNA (1)...(19): siRNA sense strand
cacaaacgacccagacgaa

SEQ ID NO: 1897233 - RNA, 19 nt, Homo sapiens
  misc_RNA (1)...(19): siRNA sense strand
gcagaagaaggagauuuca

SEQ ID NO: 1897234 - RNA, 19 nt, Homo sapiens
  misc_RNA (1)...(19): siRNA sense strand
cgacccagacgaagaagug

SEQ ID NO: 1897235 - RNA, 19 nt, Homo sapiens
  misc_RNA (1)...(19): siRNA sense strand
agagaaccauccagcucaa

SEQ ID NO: 1897236 - RNA, 19 nt, Homo sapiens
  misc_RNA (1)...(19): siRNA sense strand
cugagucucuuugugcauu

SEQ ID NO: 1897237 - RNA, 19 nt, Homo sapiens
  misc_RNA (1)...(19): siRNA sense strand
cugcacaccugagcugguu

SEQ ID NO: 1897238 - RNA, 19 nt, Homo sapiens
  misc_RNA (1)...(19): siRNA sense strand
cagccucguacuaugguua

SEQ ID NO: 1897239 - RNA, 19 nt, Homo sapiens
  misc_RNA (1)...(19): siRNA sense strand
ggugugaccauggagagaa

SEQ ID NO: 1897240 - RNA, 19 nt, Homo sapiens
  misc_RNA (1)...(19): siRNA sense strand
gcuccacuacgcuguccua

SEQ ID NO: 1897241 - RNA, 19 nt, Homo sapiens
  misc_RNA (1)...(19): siRNA sense strand
guuccagacaggcauaguu

SEQ ID NO: 1897242 - RNA, 19 nt, Homo sapiens
  misc_RNA (1)...(19): siRNA sense strand
aaucaagauacacaaguga

SEQ ID NO: 1897243 - RNA, 19 nt, Homo sapiens
  misc_RNA (1)...(19): siRNA sense strand
ggugcaaccucaggaacca

SEQ ID NO: 1897244 - RNA, 19 nt, Homo sapiens
  misc_RNA (1)...(19): siRNA sense strand
ugagucucuuugugcauug

SEQ ID NO: 1897245 - RNA, 19 nt, Homo sapiens
  misc_RNA (1)...(19): siRNA sense strand
gaaauacgguuauacaucu

SEQ ID NO: 1897246 - RNA, 19 nt, Homo sapiens
  misc_RNA (1)...(19): siRNA sense strand
gcaccaaccucaccuguca

SEQ ID NO: 1897247 - RNA, 19 nt, Homo sapiens
  misc_RNA (1)...(19): siRNA sense strand
gcauacuucuuucgguuga

SEQ ID NO: 1897248 - RNA, 19 nt, Homo sapiens
  misc_RNA (1)...(19): siRNA sense strand
gaugaaauacgguuauaca

SEQ ID NO: 1897249 - RNA, 19 nt, Homo sapiens
  misc_RNA (1)...(19): siRNA sense strand
ccucugggcucccugcaaa

SEQ ID NO: 1897250 - RNA, 19 nt, Homo sapiens
  misc_RNA (1)...(19): siRNA sense strand
agacaggcauaguuucaga

SEQ ID NO: 1897251 - RNA, 19 nt, Homo sapiens
  misc_RNA (1)...(19): siRNA sense strand
caaacgacccagacgaaga

SEQ ID NO: 1897252 - RNA, 19 nt, Homo sapiens
  misc_RNA (1)...(19): siRNA sense strand
gaaccauccagcucaaugu

SEQ ID NO: 1897253 - RNA, 19 nt, Homo sapiens
  misc_RNA (1)...(19): siRNA sense strand
aguagggucugcagaagaa

SEQ ID NO: 1897254 - RNA, 19 nt, Homo sapiens
  misc_RNA (1)...(19): siRNA sense strand
uggaugaaauacgguuaua

SEQ ID NO: 1897255 - RNA, 19 nt, Homo sapiens
  misc_RNA (1)...(19): siRNA sense strand
ucaaguagggucugcagaa

SEQ ID NO: 1897256 - RNA, 19 nt, Homo sapiens
  misc_RNA (1)...(19): siRNA sense strand
ugaaauacgguuauacauc

SEQ ID NO: 1897257 - RNA, 19 nt, Homo sapiens
  misc_RNA (1)...(19): siRNA sense strand
ccucguacccugcagauug

SEQ ID NO: 1897258 - RNA, 19 nt, Homo sapiens
  misc_RNA (1)...(19): siRNA sense strand
aaacgacccagacgaagaa

SEQ ID NO: 1897259 - RNA, 19 nt, Homo sapiens
  misc_RNA (1)...(19): siRNA sense strand
caaguagggucugcagaag

SEQ ID NO: 1897260 - RNA, 19 nt, Homo sapiens
  misc_RNA (1)...(19): siRNA sense strand
ggccaucccagcaaucuga

SEQ ID NO: 1897261 - RNA, 19 nt, Homo sapiens
  misc_RNA (1)...(19): siRNA sense strand
gagccggugugaccaugga

SEQ ID NO: 1897262 - RNA, 19 nt, Homo sapiens
  misc_RNA (1)...(19): siRNA sense strand
ccagacaggcauaguuuca

SEQ ID NO: 1897263 - RNA, 19 nt, Homo sapiens
  misc_RNA (1)...(19): siRNA sense strand
cacaaacgacccagacgaa

SEQ ID NO: 1897264 - RNA, 19 nt, Homo sapiens
  misc_RNA (1)...(19): siRNA sense strand
gcagaagaaggagauuuca

SEQ ID NO: 1897265 - RNA, 19 nt, Homo sapiens
  misc_RNA (1)...(19): siRNA sense strand
cgacccagacgaagaagug

SEQ ID NO: 1897266 - RNA, 19 nt, Homo sapiens
  misc_RNA (1)...(19): siRNA sense strand
agagaaccauccagcucaa

SEQ ID NO: 1897267 - RNA, 19 nt, Homo sapiens
  misc_RNA (1)...(19): siRNA sense strand
cugagucucuuugugcauu

SEQ ID NO: 1897268 - RNA, 19 nt, Homo sapiens
  misc_RNA (1)...(19): siRNA sense strand
cagccucguacuaugguua

SEQ ID NO: 1897269 - RNA, 19 nt, Homo sapiens
  misc_RNA (1)...(19): siRNA sense strand
cugcacaccugagcugguu

SEQ ID NO: 1897270 - RNA, 19 nt, Homo sapiens
  misc_RNA (1)...(19): siRNA sense strand
ggugugaccauggagagaa

SEQ ID NO: 1897271 - RNA, 19 nt, Homo sapiens
  misc_RNA (1)...(19): siRNA sense strand
guuccagacaggcauaguu

SEQ ID NO: 1897272 - RNA, 19 nt, Homo sapiens
  misc_RNA (1)...(19): siRNA sense strand
ugagucucuuugugcauug

SEQ ID NO: 1897273 - RNA, 19 nt, Homo sapiens
  misc_RNA (1)...(19): siRNA sense strand
gagcaggucuucucaaagu

SEQ ID NO: 1897274 - RNA, 19 nt, Homo sapiens
  misc_RNA (1)...(19): siRNA sense strand
gcaggcaagucgucagaca

SEQ ID NO: 1897275 - RNA, 19 nt, Homo sapiens
  misc_RNA (1)...(19): siRNA sense strand
gaacauugacgacgcuaag

SEQ ID NO: 1897276 - RNA, 19 nt, Homo sapiens
  misc_RNA (1)...(19): siRNA sense strand
uggagcaggucuucucaaa

SEQ ID NO: 1897277 - RNA, 19 nt, Homo sapiens
  misc_RNA (1)...(19): siRNA sense strand
ccagagaucucggggauuu

SEQ ID NO: 1897278 - RNA, 19 nt, Homo sapiens
  misc_RNA (1)...(19): siRNA sense strand
ucagaugaaggcaaacuuu

SEQ ID NO: 1897279 - RNA, 19 nt, Homo sapiens
  misc_RNA (1)...(19): siRNA sense strand
gguccuacagagacaguua

SEQ ID NO: 1897280 - RNA, 19 nt, Homo sapiens
  misc_RNA (1)...(19): siRNA sense strand
gauuuggguuugucaccuu

SEQ ID NO: 1897281 - RNA, 19 nt, Homo sapiens
  misc_RNA (1)...(19): siRNA sense strand
uauagcagccggagucaga

SEQ ID NO: 1897282 - RNA, 19 nt, Homo sapiens
  misc_RNA (1)...(19): siRNA sense strand
ugggaagucuguagaugga

SEQ ID NO: 1897283 - RNA, 19 nt, Homo sapiens
  misc_RNA (1)...(19): siRNA sense strand
gaaugggaagucuguagau

SEQ ID NO: 1897284 - RNA, 19 nt, Homo sapiens
  misc_RNA (1)...(19): siRNA sense strand
ucagagugguggcuacagu

SEQ ID NO: 1897285 - RNA, 19 nt, Homo sapiens
  misc_RNA (1)...(19): siRNA sense strand
ggccguggguucucuagag

SEQ ID NO: 1897286 - RNA, 19 nt, Homo sapiens
  misc_RNA (1)...(19): siRNA sense strand
ugaaguggugguugugaaa

SEQ ID NO: 1897287 - RNA, 19 nt, Homo sapiens
  misc_RNA (1)...(19): siRNA sense strand
ucucugaaguggugguugu

SEQ ID NO: 1897288 - RNA, 19 nt, Homo sapiens
  misc_RNA (1)...(19): siRNA sense strand
ggacggcagauccgaguag

SEQ ID NO: 1897289 - RNA, 19 nt, Homo sapiens
  misc_RNA (1)...(19): siRNA sense strand
ugaaugggaagucuguaga

SEQ ID NO: 1897290 - RNA, 19 nt, Homo sapiens
  misc_RNA (1)...(19): siRNA sense strand
cugaaguggugguugugaa

SEQ ID NO: 1897291 - RNA, 19 nt, Homo sapiens
  misc_RNA (1)...(19): siRNA sense strand
gacggcagauccgaguaga

SEQ ID NO: 1897292 - RNA, 19 nt, Homo sapiens
  misc_RNA (1)...(19): siRNA sense strand
gcaggucuucucaaaguac

SEQ ID NO: 1897293 - RNA, 19 nt, Homo sapiens
  misc_RNA (1)...(19): siRNA sense strand
cgcuaaggaugccaugaug

SEQ ID NO: 1897294 - RNA, 19 nt, Homo sapiens
  misc_RNA (1)...(19): siRNA sense strand
aaugggaagucuguagaug

SEQ ID NO: 1897295 - RNA, 19 nt, Homo sapiens
  misc_RNA (1)...(19): siRNA sense strand
acaguuacgcuacacacaa

SEQ ID NO: 1897296 - RNA, 19 nt, Homo sapiens
  misc_RNA (1)...(19): siRNA sense strand
aaguggugguugugaaaga

SEQ ID NO: 1897297 - RNA, 19 nt, Homo sapiens
  misc_RNA (1)...(19): siRNA sense strand
acagggagacccagagauc

SEQ ID NO: 1897298 - RNA, 19 nt, Homo sapiens
  misc_RNA (1)...(19): siRNA sense strand
ggagcaggucuucucaaag

SEQ ID NO: 1897299 - RNA, 19 nt, Homo sapiens
  misc_RNA (1)...(19): siRNA sense strand
caguuacgcuacacacaac

SEQ ID NO: 1897300 - RNA, 19 nt, Homo sapiens
  misc_RNA (1)...(19): siRNA sense strand
ucaaaguacggacagaucu

SEQ ID NO: 1897301 - RNA, 19 nt, Homo sapiens
  misc_RNA (1)...(19): siRNA sense strand
gaaguggugguugugaaag

SEQ ID NO: 1897302 - RNA, 19 nt, Homo sapiens
  misc_RNA (1)...(19): siRNA sense strand
gaccaacccuccaauuaua

SEQ ID NO: 1897303 - RNA, 19 nt, Homo sapiens
  misc_RNA (1)...(19): siRNA sense strand
caaaggagcuucaaagagu

SEQ ID NO: 1897304 - RNA, 19 nt, Homo sapiens
  misc_RNA (1)...(19): siRNA sense strand
gaaguuuaaugacugguua

SEQ ID NO: 1897305 - RNA, 19 nt, Homo sapiens
  misc_RNA (1)...(19): siRNA sense strand
uaggaaaccugccauauga

SEQ ID NO: 1897306 - RNA, 19 nt, Homo sapiens
  misc_RNA (1)...(19): siRNA sense strand
gaacugacauuugauaagg

SEQ ID NO: 1897307 - RNA, 19 nt, Homo sapiens
  misc_RNA (1)...(19): siRNA sense strand
ccauaacgguggaugagua

SEQ ID NO: 1897308 - RNA, 19 nt, Homo sapiens
  misc_RNA (1)...(19): siRNA sense strand
gaacagaugguauccagau

SEQ ID NO: 1897309 - RNA, 19 nt, Homo sapiens
  misc_RNA (1)...(19): siRNA sense strand
gaaaccugccauaugaaua

SEQ ID NO: 1897310 - RNA, 19 nt, Homo sapiens
  misc_RNA (1)...(19): siRNA sense strand
ggacauccuucuccacaca

SEQ ID NO: 1897311 - RNA, 19 nt, Homo sapiens
  misc_RNA (1)...(19): siRNA sense strand
gagacuggguuccaaagga

SEQ ID NO: 1897312 - RNA, 19 nt, Homo sapiens
  misc_RNA (1)...(19): siRNA sense strand
ccagaggacuuugacaaug

SEQ ID NO: 1897313 - RNA, 19 nt, Homo sapiens
  misc_RNA (1)...(19): siRNA sense strand
cagaggacuuugacaaugu

SEQ ID NO: 1897314 - RNA, 19 nt, Homo sapiens
  misc_RNA (1)...(19): siRNA sense strand
ggcccaagcuccauguguu

SEQ ID NO: 1897315 - RNA, 19 nt, Homo sapiens
  misc_RNA (1)...(19): siRNA sense strand
cgaccaacccuccaauuau

SEQ ID NO: 1897316 - RNA, 19 nt, Homo sapiens
  misc_RNA (1)...(19): siRNA sense strand
uuuaaugacugguuaggaa

SEQ ID NO: 1897317 - RNA, 19 nt, Homo sapiens
  misc_RNA (1)...(19): siRNA sense strand
caaggcaaaguuaccauaa

SEQ ID NO: 1897318 - RNA, 19 nt, Homo sapiens
  misc_RNA (1)...(19): siRNA sense strand
ggaaaccugccauaugaau

SEQ ID NO: 1897319 - RNA, 19 nt, Homo sapiens
  misc_RNA (1)...(19): siRNA sense strand
ccgaccaacccuccaauua

SEQ ID NO: 1897320 - RNA, 19 nt, Homo sapiens
  misc_RNA (1)...(19): siRNA sense strand
ggaaucaugaacugacauu

SEQ ID NO: 1897321 - RNA, 19 nt, Homo sapiens
  misc_RNA (1)...(19): siRNA sense strand
cacaugggauuccuucuca

SEQ ID NO: 1897322 - RNA, 19 nt, Homo sapiens
  misc_RNA (1)...(19): siRNA sense strand
caugaacugacauuugaua

SEQ ID NO: 1897323 - RNA, 19 nt, Homo sapiens
  misc_RNA (1)...(19): siRNA sense strand
aucaugaacugacauuuga

SEQ ID NO: 1897324 - RNA, 19 nt, Homo sapiens
  misc_RNA (1)...(19): siRNA sense strand
ugaagguuauggcaucaug

SEQ ID NO: 1897325 - RNA, 19 nt, Homo sapiens
  misc_RNA (1)...(19): siRNA sense strand
gacauuugauaaggaauuc

SEQ ID NO: 1897326 - RNA, 19 nt, Homo sapiens
  misc_RNA (1)...(19): siRNA sense strand
guauccagaugccuuaugg

SEQ ID NO: 1897327 - RNA, 19 nt, Homo sapiens
  misc_RNA (1)...(19): siRNA sense strand
ucaaggcaaaguuaccaua

SEQ ID NO: 1897328 - RNA, 19 nt, Homo sapiens
  misc_RNA (1)...(19): siRNA sense strand
aaucaugaacugacauuug

SEQ ID NO: 1897329 - RNA, 19 nt, Homo sapiens
  misc_RNA (1)...(19): siRNA sense strand
ggcauugacauacucauga

SEQ ID NO: 1897330 - RNA, 19 nt, Homo sapiens
  misc_RNA (1)...(19): siRNA sense strand
cauggcagaccuuguuaaa

SEQ ID NO: 1897331 - RNA, 19 nt, Homo sapiens
  misc_RNA (1)...(19): siRNA sense strand
cuuacaagauucggaggua

SEQ ID NO: 1897332 - RNA, 19 nt, Homo sapiens
  misc_RNA (1)...(19): siRNA sense strand
gcacaugggauuccuucuc

SEQ ID NO: 1897333 - RNA, 19 nt, Homo sapiens
  misc_RNA (1)...(19): siRNA sense strand
acacauggaccuccucuag

SEQ ID NO: 1897334 - RNA, 19 nt, Homo sapiens
  misc_RNA (1)...(19): siRNA sense strand
uuacacaacguacaucaau

SEQ ID NO: 1897335 - RNA, 19 nt, Homo sapiens
  misc_RNA (1)...(19): siRNA sense strand
ccaaaggagcuucaaagag

SEQ ID NO: 1897336 - RNA, 19 nt, Homo sapiens
  misc_RNA (1)...(19): siRNA sense strand
uuaggaaaccugccauaug

SEQ ID NO: 1897337 - RNA, 19 nt, Homo sapiens
  misc_RNA (1)...(19): siRNA sense strand
gaagguuauggcaucauga

SEQ ID NO: 1897338 - RNA, 19 nt, Homo sapiens
  misc_RNA (1)...(19): siRNA sense strand
gucagucucugcuggacaa

SEQ ID NO: 1897339 - RNA, 19 nt, Homo sapiens
  misc_RNA (1)...(19): siRNA sense strand
gcccaagcuccauguguuu

SEQ ID NO: 1897340 - RNA, 19 nt, Homo sapiens
  misc_RNA (1)...(19): siRNA sense strand
caacccuccaauuauauuu

SEQ ID NO: 1897341 - RNA, 19 nt, Homo sapiens
  misc_RNA (1)...(19): siRNA sense strand
gacacacacuccagaacag

SEQ ID NO: 1897342 - RNA, 19 nt, Homo sapiens
  misc_RNA (1)...(19): siRNA sense strand
gcauugacauacucaugac

SEQ ID NO: 1897343 - RNA, 19 nt, Homo sapiens
  misc_RNA (1)...(19): siRNA sense strand
ggacaaguggaaccucauc

SEQ ID NO: 1897344 - RNA, 19 nt, Homo sapiens
  misc_RNA (1)...(19): siRNA sense strand
agaggacuuugacaauguu

SEQ ID NO: 1897345 - RNA, 19 nt, Homo sapiens
  misc_RNA (1)...(19): siRNA sense strand
ugaaaccagaggacuuuga

SEQ ID NO: 1897346 - RNA, 19 nt, Homo sapiens
  misc_RNA (1)...(19): siRNA sense strand
ccaacccuccaauuauauu

SEQ ID NO: 1897347 - RNA, 19 nt, Homo sapiens
  misc_RNA (1)...(19): siRNA sense strand
gggcauugacauacucaug

SEQ ID NO: 1897348 - RNA, 19 nt, Homo sapiens
  misc_RNA (1)...(19): siRNA sense strand
gauuccagccuccacaugu

SEQ ID NO: 1897349 - RNA, 19 nt, Homo sapiens
  misc_RNA (1)...(19): siRNA sense strand
gaagggauucaggauauac

SEQ ID NO: 1897350 - RNA, 19 nt, Homo sapiens
  misc_RNA (1)...(19): siRNA sense strand
ggaauucauggcagaccuu

SEQ ID NO: 1897351 - RNA, 19 nt, Homo sapiens
  misc_RNA (1)...(19): siRNA sense strand
gaaucaugaacugacauuu

SEQ ID NO: 1897352 - RNA, 19 nt, Homo sapiens
  misc_RNA (1)...(19): siRNA sense strand
ucagagguuaagaaguuua

SEQ ID NO: 1897353 - RNA, 19 nt, Homo sapiens
  misc_RNA (1)...(19): siRNA sense strand
gaaaccagaggacuuugac

SEQ ID NO: 1897354 - RNA, 19 nt, Homo sapiens
  misc_RNA (1)...(19): siRNA sense strand
aucaaugccucgacgugua

SEQ ID NO: 1897355 - RNA, 19 nt, Homo sapiens
  misc_RNA (1)...(19): siRNA sense strand
acugacauuugauaaggaa

SEQ ID NO: 1897356 - RNA, 19 nt, Homo sapiens
  misc_RNA (1)...(19): siRNA sense strand
guuaggaaaccugccauau

SEQ ID NO: 1897357 - RNA, 19 nt, Homo sapiens
  misc_RNA (1)...(19): siRNA sense strand
caaccgaccaacccuccaa

SEQ ID NO: 1897358 - RNA, 19 nt, Homo sapiens
  misc_RNA (1)...(19): siRNA sense strand
uacacaacguacaucaaug

SEQ ID NO: 1897359 - RNA, 19 nt, Homo sapiens
  misc_RNA (1)...(19): siRNA sense strand
auuccagccuccacaugua

SEQ ID NO: 1897360 - RNA, 19 nt, Homo sapiens
  misc_RNA (1)...(19): siRNA sense strand
agacacacacuccagaaca

SEQ ID NO: 1897361 - RNA, 19 nt, Homo sapiens
  misc_RNA (1)...(19): siRNA sense strand
caugaagguuauggcauca

SEQ ID NO: 1897362 - RNA, 19 nt, Homo sapiens
  misc_RNA (1)...(19): siRNA sense strand
uuaaugacugguuaggaaa

SEQ ID NO: 1897363 - RNA, 19 nt, Homo sapiens
  misc_RNA (1)...(19): siRNA sense strand
ccauguguuugguggaauc

SEQ ID NO: 1897364 - RNA, 19 nt, Homo sapiens
  misc_RNA (1)...(19): siRNA sense strand
ucagacacacacuccagaa

SEQ ID NO: 1897365 - RNA, 19 nt, Homo sapiens
  misc_RNA (1)...(19): siRNA sense strand
acccuccaauuauauuuga

SEQ ID NO: 1897366 - RNA, 19 nt, Homo sapiens
  misc_RNA (1)...(19): siRNA sense strand
gacguguacagucagcuuu

SEQ ID NO: 1897367 - RNA, 19 nt, Homo sapiens
  misc_RNA (1)...(19): siRNA sense strand
uccaaaggagcuucaaaga

SEQ ID NO: 1897368 - RNA, 19 nt, Homo sapiens
  misc_RNA (1)...(19): siRNA sense strand
aauagugauugcugggaau

SEQ ID NO: 1897369 - RNA, 19 nt, Homo sapiens
  misc_RNA (1)...(19): siRNA sense strand
gcuguguggagcuguuaaa

SEQ ID NO: 1897370 - RNA, 19 nt, Homo sapiens
  misc_RNA (1)...(19): siRNA sense strand
agucucugcuggacaagug

SEQ ID NO: 1897371 - RNA, 19 nt, Homo sapiens
  misc_RNA (1)...(19): siRNA sense strand
auucggagguaacagugaa

SEQ ID NO: 1897372 - RNA, 19 nt, Homo sapiens
  misc_RNA (1)...(19): siRNA sense strand
ugaacugacauuugauaag

SEQ ID NO: 1897373 - RNA, 19 nt, Homo sapiens
  misc_RNA (1)...(19): siRNA sense strand
ggacaacgcaguguucaau

SEQ ID NO: 1897374 - RNA, 19 nt, Homo sapiens
  misc_RNA (1)...(19): siRNA sense strand
ccagacaucuuuccagaac

SEQ ID NO: 1897375 - RNA, 19 nt, Homo sapiens
  misc_RNA (1)...(19): siRNA sense strand
caucuuuccagaacacaaa

SEQ ID NO: 1897376 - RNA, 19 nt, Homo sapiens
  misc_RNA (1)...(19): siRNA sense strand
uccagcagcuccagacauc

SEQ ID NO: 1897377 - RNA, 19 nt, Homo sapiens
  misc_RNA (1)...(19): siRNA sense strand
cagcagcuccagacaucuu

SEQ ID NO: 1897378 - RNA, 19 nt, Homo sapiens
  misc_RNA (1)...(19): siRNA sense strand
acgcaguguucaauccauu

SEQ ID NO: 1897379 - RNA, 19 nt, Homo sapiens
  misc_RNA (1)...(19): siRNA sense strand
agacaucuuuccagaacac

SEQ ID NO: 1897380 - RNA, 19 nt, Homo sapiens
  misc_RNA (1)...(19): siRNA sense strand
gaagauugcucgugaugaa

SEQ ID NO: 1897381 - RNA, 19 nt, Homo sapiens
  misc_RNA (1)...(19): siRNA sense strand
caaaggaacugacaucaug

SEQ ID NO: 1897382 - RNA, 19 nt, Homo sapiens
  misc_RNA (1)...(19): siRNA sense strand
gcaauacaaaggcauuaua

SEQ ID NO: 1897383 - RNA, 19 nt, Homo sapiens
  misc_RNA (1)...(19): siRNA sense strand
gcgguaaccuggccaaugu

SEQ ID NO: 1897384 - RNA, 19 nt, Homo sapiens
  misc_RNA (1)...(19): siRNA sense strand
uaacuucgccuucaaagau

SEQ ID NO: 1897385 - RNA, 19 nt, Homo sapiens
  misc_RNA (1)...(19): siRNA sense strand
gugcuugucuuguaugaug

SEQ ID NO: 1897386 - RNA, 19 nt, Homo sapiens
  misc_RNA (1)...(19): siRNA sense strand
ggacaagagaacccaguuu

SEQ ID NO: 1897387 - RNA, 19 nt, Homo sapiens
  misc_RNA (1)...(19): siRNA sense strand
gcucuuaacuucgccuuca

SEQ ID NO: 1897388 - RNA, 19 nt, Homo sapiens
  misc_RNA (1)...(19): siRNA sense strand
uggccaaugucaucagaua

SEQ ID NO: 1897389 - RNA, 19 nt, Homo sapiens
  misc_RNA (1)...(19): siRNA sense strand
gcagauaagcaauacaaag

SEQ ID NO: 1897390 - RNA, 19 nt, Homo sapiens
  misc_RNA (1)...(19): siRNA sense strand
gcaaaggaacugacaucau

SEQ ID NO: 1897391 - RNA, 19 nt, Homo sapiens
  misc_RNA (1)...(19): siRNA sense strand
ucacugcagauaagcaaua

SEQ ID NO: 1897392 - RNA, 19 nt, Homo sapiens
  misc_RNA (1)...(19): siRNA sense strand
cacccaggcucuuaacuuc

SEQ ID NO: 1897393 - RNA, 19 nt, Homo sapiens
  misc_RNA (1)...(19): siRNA sense strand
caauacaaaggcauuauag

SEQ ID NO: 1897394 - RNA, 19 nt, Homo sapiens
  misc_RNA (1)...(19): siRNA sense strand
ugucuuguaugaugaaauc

SEQ ID NO: 1897395 - RNA, 19 nt, Homo sapiens
  misc_RNA (1)...(19): siRNA sense strand
gaugaaaucaagaaguaca

SEQ ID NO: 1897396 - RNA, 19 nt, Homo sapiens
  misc_RNA (1)...(19): siRNA sense strand
cuaccgagccgccuacuuc

SEQ ID NO: 1897397 - RNA, 19 nt, Homo sapiens
  misc_RNA (1)...(19): siRNA sense strand
gcagucagggcgcaaagga

SEQ ID NO: 1897398 - RNA, 19 nt, Homo sapiens
  misc_RNA (1)...(19): siRNA sense strand
gaugaaggaggcaaagcuu

SEQ ID NO: 1897399 - RNA, 19 nt, Homo sapiens
  misc_RNA (1)...(19): siRNA sense strand
gaucacugcagauaagcaa

SEQ ID NO: 1897400 - RNA, 19 nt, Homo sapiens
  misc_RNA (1)...(19): siRNA sense strand
ccaaugucaucagauacuu

SEQ ID NO: 1897401 - RNA, 19 nt, Homo sapiens
  misc_RNA (1)...(19): siRNA sense strand
cagauaagcaauacaaagg

SEQ ID NO: 1897402 - RNA, 19 nt, Homo sapiens
  misc_RNA (1)...(19): siRNA sense strand
ggaagauugcucgugauga

SEQ ID NO: 1897403 - RNA, 19 nt, Homo sapiens
  misc_RNA (1)...(19): siRNA sense strand
gaaaucaagaaguacacau

SEQ ID NO: 1897404 - RNA, 19 nt, Homo sapiens
  misc_RNA (1)...(19): siRNA sense strand
ccacccaggcucuuaacuu

SEQ ID NO: 1897405 - RNA, 19 nt, Homo sapiens
  misc_RNA (1)...(19): siRNA sense strand
gcgcaaaggaacugacauc

SEQ ID NO: 1897406 - RNA, 19 nt, Homo sapiens
  misc_RNA (1)...(19): siRNA sense strand
uaaccuggccaaugucauc

SEQ ID NO: 1897407 - RNA, 19 nt, Homo sapiens
  misc_RNA (1)...(19): siRNA sense strand
guugacuuccuauccauuu

SEQ ID NO: 1897408 - RNA, 19 nt, Homo sapiens
  misc_RNA (1)...(19): siRNA sense strand
gcgcuacuuugcagggaau

SEQ ID NO: 1897409 - RNA, 19 nt, Homo sapiens
  misc_RNA (1)...(19): siRNA sense strand
ugcaggguauuaucaucua

SEQ ID NO: 1897410 - RNA, 19 nt, Homo sapiens
  misc_RNA (1)...(19): siRNA sense strand
aacuucgccuucaaagaua

SEQ ID NO: 1897411 - RNA, 19 nt, Homo sapiens
  misc_RNA (1)...(19): siRNA sense strand
ggugcaugguccaauguuc

SEQ ID NO: 1897412 - RNA, 19 nt, Homo sapiens
  misc_RNA (1)...(19): siRNA sense strand
uaagcaauacaaaggcauu

SEQ ID NO: 1897413 - RNA, 19 nt, Homo sapiens
  misc_RNA (1)...(19): siRNA sense strand
gaacacucacaucgucauc

SEQ ID NO: 1897414 - RNA, 19 nt, Homo sapiens
  misc_RNA (1)...(19): siRNA sense strand
gacaagagaacccaguuuu

SEQ ID NO: 1897415 - RNA, 19 nt, Homo sapiens
  misc_RNA (1)...(19): siRNA sense strand
gauaaauacaagcagaucu

SEQ ID NO: 1897416 - RNA, 19 nt, Homo sapiens
  misc_RNA (1)...(19): siRNA sense strand
ggauuaagggccuguacca

SEQ ID NO: 1897417 - RNA, 19 nt, Homo sapiens
  misc_RNA (1)...(19): siRNA sense strand
uagcagcugauguggguaa

SEQ ID NO: 1897418 - RNA, 19 nt, Homo sapiens
  misc_RNA (1)...(19): siRNA sense strand
uaaauacaagcagaucuuc

SEQ ID NO: 1897419 - RNA, 19 nt, Homo sapiens
  misc_RNA (1)...(19): siRNA sense strand
ugacuuccuauccauuuga

SEQ ID NO: 1897420 - RNA, 19 nt, Homo sapiens
  misc_RNA (1)...(19): siRNA sense strand
gcaggguauuaucaucuac

SEQ ID NO: 1897421 - RNA, 19 nt, Homo sapiens
  misc_RNA (1)...(19): siRNA sense strand
ccaaggcuuuaacgugucu

SEQ ID NO: 1897422 - RNA, 19 nt, Homo sapiens
  misc_RNA (1)...(19): siRNA sense strand
gcggaagauugcucgugau

SEQ ID NO: 1897423 - RNA, 19 nt, Homo sapiens
  misc_RNA (1)...(19): siRNA sense strand
uuguguacccucuugauuu

SEQ ID NO: 1897424 - RNA, 19 nt, Homo sapiens
  misc_RNA (1)...(19): siRNA sense strand
cugcagauaagcaauacaa

SEQ ID NO: 1897425 - RNA, 19 nt, Homo sapiens
  misc_RNA (1)...(19): siRNA sense strand
ccaagaacacucacaucgu

SEQ ID NO: 1897426 - RNA, 19 nt, Homo sapiens
  misc_RNA (1)...(19): siRNA sense strand
cuacuucgguaucuaugac

SEQ ID NO: 1897427 - RNA, 19 nt, Homo sapiens
  misc_RNA (1)...(19): siRNA sense strand
uagacugcgugguccguau

SEQ ID NO: 1897428 - RNA, 19 nt, Homo sapiens
  misc_RNA (1)...(19): siRNA sense strand
auacaaaggcauuauagac

SEQ ID NO: 1897429 - RNA, 19 nt, Homo sapiens
  misc_RNA (1)...(19): siRNA sense strand
aagggugcaugguccaaug

SEQ ID NO: 1897430 - RNA, 19 nt, Homo sapiens
  misc_RNA (1)...(19): siRNA sense strand
gauugcucgugaugaagga

SEQ ID NO: 1897431 - RNA, 19 nt, Homo sapiens
  misc_RNA (1)...(19): siRNA sense strand
cagcugauguggguaaagc

SEQ ID NO: 1897432 - RNA, 19 nt, Homo sapiens
  misc_RNA (1)...(19): siRNA sense strand
uguguacccucuugauuuu

SEQ ID NO: 1897433 - RNA, 19 nt, Homo sapiens
  misc_RNA (1)...(19): siRNA sense strand
gauuaagggccuguaccaa

SEQ ID NO: 1897434 - RNA, 19 nt, Homo sapiens
  misc_RNA (1)...(19): siRNA sense strand
aagcaauacaaaggcauua

SEQ ID NO: 1897435 - RNA, 19 nt, Homo sapiens
  misc_RNA (1)...(19): siRNA sense strand
guaucuaugacacugcaaa

SEQ ID NO: 1897436 - RNA, 19 nt, Homo sapiens
  misc_RNA (1)...(19): siRNA sense strand
ccgcagccaucuccaagac

SEQ ID NO: 1897437 - RNA, 19 nt, Homo sapiens
  misc_RNA (1)...(19): siRNA sense strand
cuugacugcuggcggaaga

SEQ ID NO: 1897438 - RNA, 19 nt, Homo sapiens
  misc_RNA (1)...(19): siRNA sense strand
gguaaccuggccaauguca

SEQ ID NO: 1897439 - RNA, 19 nt, Homo sapiens
  misc_RNA (1)...(19): siRNA sense strand
caaguuaggugggaauuau

SEQ ID NO: 1897440 - RNA, 19 nt, Homo sapiens
  misc_RNA (1)...(19): siRNA sense strand
cacgaaagcuucucucugu

SEQ ID NO: 1897441 - RNA, 19 nt, Homo sapiens
  misc_RNA (1)...(19): siRNA sense strand
agaaggagcugaaggagau

SEQ ID NO: 1897442 - RNA, 19 nt, Homo sapiens
  misc_RNA (1)...(19): siRNA sense strand
gggcagaucugggcacgaa

SEQ ID NO: 1897443 - RNA, 19 nt, Homo sapiens
  misc_RNA (1)...(19): siRNA sense strand
cacagaagccucauaagaa

SEQ ID NO: 1897444 - RNA, 19 nt, Homo sapiens
  misc_RNA (1)...(19): siRNA sense strand
ugacacagaagccucauaa

SEQ ID NO: 1897445 - RNA, 19 nt, Homo sapiens
  misc_RNA (1)...(19): siRNA sense strand
acacagaagccucauaaga

SEQ ID NO: 1897446 - RNA, 19 nt, Homo sapiens
  misc_RNA (1)...(19): siRNA sense strand
ccaugaacaucuuugucua

SEQ ID NO: 1897447 - RNA, 19 nt, Homo sapiens
  misc_RNA (1)...(19): siRNA sense strand
gaauccagcccuuccagaa

SEQ ID NO: 1897448 - RNA, 19 nt, Homo sapiens
  misc_RNA (1)...(19): siRNA sense strand
acagaagccucauaagaag

SEQ ID NO: 1897449 - RNA, 19 nt, Homo sapiens
  misc_RNA (1)...(19): siRNA sense strand
gauaugccuccuccaguuu

SEQ ID NO: 1897450 - RNA, 19 nt, Homo sapiens
  misc_RNA (1)...(19): siRNA sense strand
agauaugccuccuccaguu

SEQ ID NO: 1897451 - RNA, 19 nt, Homo sapiens
  misc_RNA (1)...(19): siRNA sense strand
gaucugggcacgaaagcuu

SEQ ID NO: 1897452 - RNA, 19 nt, Homo sapiens
  misc_RNA (1)...(19): siRNA sense strand
gccugugccugccgaguuu

SEQ ID NO: 1897453 - RNA, 19 nt, Homo sapiens
  misc_RNA (1)...(19): siRNA sense strand
gaaccaugaacaucuuugu

SEQ ID NO: 1897454 - RNA, 19 nt, Homo sapiens
  misc_RNA (1)...(19): siRNA sense strand
gcaccgaauccuguacaaa

SEQ ID NO: 1897455 - RNA, 19 nt, Homo sapiens
  misc_RNA (1)...(19): siRNA sense strand
gacagagucuacuggacau

SEQ ID NO: 1897456 - RNA, 19 nt, Homo sapiens
  misc_RNA (1)...(19): siRNA sense strand
gagcgcacgaucaccauga

SEQ ID NO: 1897457 - RNA, 19 nt, Homo sapiens
  misc_RNA (1)...(19): siRNA sense strand
ggagauccaguacggaauc

SEQ ID NO: 1897458 - RNA, 19 nt, Homo sapiens
  misc_RNA (1)...(19): siRNA sense strand
gauccaguacggaaucaga

SEQ ID NO: 1897459 - RNA, 19 nt, Homo sapiens
  misc_RNA (1)...(19): siRNA sense strand
ucaucgaaguggacaagga

SEQ ID NO: 1897460 - RNA, 19 nt, Homo sapiens
  misc_RNA (1)...(19): siRNA sense strand
gagauccaguacggaauca

SEQ ID NO: 1897461 - RNA, 19 nt, Homo sapiens
  misc_RNA (1)...(19): siRNA sense strand
gacauuuaccgaccacaug

SEQ ID NO: 1897462 - RNA, 19 nt, Homo sapiens
  misc_RNA (1)...(19): siRNA sense strand
cgaauccuguacaaagaca

SEQ ID NO: 1897463 - RNA, 19 nt, Homo sapiens
  misc_RNA (1)...(19): siRNA sense strand
cuacuggacccacgaagau

SEQ ID NO: 1897464 - RNA, 19 nt, Homo sapiens
  misc_RNA (1)...(19): siRNA sense strand
gaccugcagcuggaaauga

SEQ ID NO: 1897465 - RNA, 19 nt, Homo sapiens
  misc_RNA (1)...(19): siRNA sense strand
gcacgaucaccaugaagca

SEQ ID NO: 1897466 - RNA, 19 nt, Homo sapiens
  misc_RNA (1)...(19): siRNA sense strand
gcagaucugggcacgaaag

SEQ ID NO: 1897467 - RNA, 19 nt, Homo sapiens
  misc_RNA (1)...(19): siRNA sense strand
caccgaauccuguacaaag

SEQ ID NO: 1897468 - RNA, 19 nt, Homo sapiens
  misc_RNA (1)...(19): siRNA sense strand
cgaucaccaugaagcaguu

SEQ ID NO: 1897469 - RNA, 19 nt, Homo sapiens
  misc_RNA (1)...(19): siRNA sense strand
gcaacaggaggcacucaag

SEQ ID NO: 1897470 - RNA, 19 nt, Homo sapiens
  misc_RNA (1)...(19): siRNA sense strand
acaaguuaggugggaauua

SEQ ID NO: 1897471 - RNA, 19 nt, Homo sapiens
  misc_RNA (1)...(19): siRNA sense strand
ggaaccaugaacaucuuug

SEQ ID NO: 1897472 - RNA, 19 nt, Homo sapiens
  misc_RNA (1)...(19): siRNA sense strand
ugggaaccaugaacaucuu

SEQ ID NO: 1897473 - RNA, 19 nt, Homo sapiens
  misc_RNA (1)...(19): siRNA sense strand
cagguccucuggcuguaug

SEQ ID NO: 1897474 - RNA, 19 nt, Homo sapiens
  misc_RNA (1)...(19): siRNA sense strand
guguuugggaagacauuua

SEQ ID NO: 1897475 - RNA, 19 nt, Homo sapiens
  misc_RNA (1)...(19): siRNA sense strand
accgaauccuguacaaaga

SEQ ID NO: 1897476 - RNA, 19 nt, Homo sapiens
  misc_RNA (1)...(19): siRNA sense strand
gaaggcguucaaaggcaaa

SEQ ID NO: 1897477 - RNA, 19 nt, Homo sapiens
  misc_RNA (1)...(19): siRNA sense strand
gcgcuccuguucgucauuc

SEQ ID NO: 1897478 - RNA, 19 nt, Homo sapiens
  misc_RNA (1)...(19): siRNA sense strand
gaggugggaaccaugaaca

SEQ ID NO: 1897479 - RNA, 19 nt, Homo sapiens
  misc_RNA (1)...(19): siRNA sense strand
uuaugggcccaccguguua

SEQ ID NO: 1897480 - RNA, 19 nt, Homo sapiens
  misc_RNA (1)...(19): siRNA sense strand
ucgacaagcuggaguugcu

SEQ ID NO: 1897481 - RNA, 19 nt, Homo sapiens
  misc_RNA (1)...(19): siRNA sense strand
gggaaccaugaacaucuuu

SEQ ID NO: 1897482 - RNA, 19 nt, Homo sapiens
  misc_RNA (1)...(19): siRNA sense strand
aaaugggccugagcugauc

SEQ ID NO: 1897483 - RNA, 19 nt, Homo sapiens
  misc_RNA (1)...(19): siRNA sense strand
guacaagcagcucuucuua

SEQ ID NO: 1897484 - RNA, 19 nt, Homo sapiens
  misc_RNA (1)...(19): siRNA sense strand
cuauagagcugccuacuuc

SEQ ID NO: 1897485 - RNA, 19 nt, Homo sapiens
  misc_RNA (1)...(19): siRNA sense strand
ggaggaagauugcaaaaga

SEQ ID NO: 1897486 - RNA, 19 nt, Homo sapiens
  misc_RNA (1)...(19): siRNA sense strand
caaggcaucauuaucuaua

SEQ ID NO: 1897487 - RNA, 19 nt, Homo sapiens
  misc_RNA (1)...(19): siRNA sense strand
cacccaagcucucaacuuc

SEQ ID NO: 1897488 - RNA, 19 nt, Homo sapiens
  misc_RNA (1)...(19): siRNA sense strand
gcuuggagcuuccuaaagg

SEQ ID NO: 1897489 - RNA, 19 nt, Homo sapiens
  misc_RNA (1)...(19): siRNA sense strand
uuugugagcuggaugauug

SEQ ID NO: 1897490 - RNA, 19 nt, Homo sapiens
  misc_RNA (1)...(19): siRNA sense strand
ccaagaacgugcacauuuu

SEQ ID NO: 1897491 - RNA, 19 nt, Homo sapiens
  misc_RNA (1)...(19): siRNA sense strand
aaaggugccugguccaaug

SEQ ID NO: 1897492 - RNA, 19 nt, Homo sapiens
  misc_RNA (1)...(19): siRNA sense strand
gccaaggccuucuucaaag

SEQ ID NO: 1897493 - RNA, 19 nt, Homo sapiens
  misc_RNA (1)...(19): siRNA sense strand
guauugguguuguaugaug

SEQ ID NO: 1897494 - RNA, 19 nt, Homo sapiens
  misc_RNA (1)...(19): siRNA sense strand
acaagcagcucuucuuagg

SEQ ID NO: 1897495 - RNA, 19 nt, Homo sapiens
  misc_RNA (1)...(19): siRNA sense strand
gcaguucuggcgcuacuuu

SEQ ID NO: 1897496 - RNA, 19 nt, Homo sapiens
  misc_RNA (1)...(19): siRNA sense strand
cagguuggcugcugaugug

SEQ ID NO: 1897497 - RNA, 19 nt, Homo sapiens
  misc_RNA (1)...(19): siRNA sense strand
cccaagaacgugcacauuu

SEQ ID NO: 1897498 - RNA, 19 nt, Homo sapiens
  misc_RNA (1)...(19): siRNA sense strand
gcgacuguaucaucaagau

SEQ ID NO: 1897499 - RNA, 19 nt, Homo sapiens
  misc_RNA (1)...(19): siRNA sense strand
ucaagaucuucaagucuga

SEQ ID NO: 1897500 - RNA, 19 nt, Homo sapiens
  misc_RNA (1)...(19): siRNA sense strand
gagccaaggccuucuucaa

SEQ ID NO: 1897501 - RNA, 19 nt, Homo sapiens
  misc_RNA (1)...(19): siRNA sense strand
gguguuguaugaugagauc

SEQ ID NO: 1897502 - RNA, 19 nt, Homo sapiens
  misc_RNA (1)...(19): siRNA sense strand
gggcggugcuuuuguauug

SEQ ID NO: 1897503 - RNA, 19 nt, Homo sapiens
  misc_RNA (1)...(19): siRNA sense strand
gcucucaacuucgccuuca

SEQ ID NO: 1897504 - RNA, 19 nt, Homo sapiens
  misc_RNA (1)...(19): siRNA sense strand
ucaucaagaucuucaaguc

SEQ ID NO: 1897505 - RNA, 19 nt, Homo sapiens
  misc_RNA (1)...(19): siRNA sense strand
gguccagcaugccagcaaa

SEQ ID NO: 1897506 - RNA, 19 nt, Homo sapiens
  misc_RNA (1)...(19): siRNA sense strand
guugacugcuggaggaaga

SEQ ID NO: 1897507 - RNA, 19 nt, Homo sapiens
  misc_RNA (1)...(19): siRNA sense strand
uccaaggcaucauuaucua

SEQ ID NO: 1897508 - RNA, 19 nt, Homo sapiens
  misc_RNA (1)...(19): siRNA sense strand
ccaccucccuuugcuuugu

SEQ ID NO: 1897509 - RNA, 19 nt, Homo sapiens
  misc_RNA (1)...(19): siRNA sense strand
ggucugggcgacuguauca

SEQ ID NO: 1897510 - RNA, 19 nt, Homo sapiens
  misc_RNA (1)...(19): siRNA sense strand
cagcaugccagcaaacaga

SEQ ID NO: 1897511 - RNA, 19 nt, Homo sapiens
  misc_RNA (1)...(19): siRNA sense strand
ggccaccucccuuugcuuu

SEQ ID NO: 1897512 - RNA, 19 nt, Homo sapiens
  misc_RNA (1)...(19): siRNA sense strand
ggcgcuacuuugcugguaa

SEQ ID NO: 1897513 - RNA, 19 nt, Homo sapiens
  misc_RNA (1)...(19): siRNA sense strand
agccaaggccuucuucaaa

SEQ ID NO: 1897514 - RNA, 19 nt, Homo sapiens
  misc_RNA (1)...(19): siRNA sense strand
ccgcuggacuuugcuagga

SEQ ID NO: 1897515 - RNA, 19 nt, Homo sapiens
  misc_RNA (1)...(19): siRNA sense strand
uuguauugguguuguauga

SEQ ID NO: 1897516 - RNA, 19 nt, Homo sapiens
  misc_RNA (1)...(19): siRNA sense strand
gcaguacaaagggaucauu

SEQ ID NO: 1897517 - RNA, 19 nt, Homo sapiens
  misc_RNA (1)...(19): siRNA sense strand
gggcgacuguaucaucaag

SEQ ID NO: 1897518 - RNA, 19 nt, Homo sapiens
  misc_RNA (1)...(19): siRNA sense strand
guccaaggcaucauuaucu

SEQ ID NO: 1897519 - RNA, 19 nt, Homo sapiens
  misc_RNA (1)...(19): siRNA sense strand
gggccgauauuauguacac

SEQ ID NO: 1897520 - RNA, 19 nt, Homo sapiens
  misc_RNA (1)...(19): siRNA sense strand
ugacacuguucgucguaga

SEQ ID NO: 1897521 - RNA, 19 nt, Homo sapiens
  misc_RNA (1)...(19): siRNA sense strand
uaaccuggccaacgugauc

SEQ ID NO: 1897522 - RNA, 19 nt, Homo sapiens
  misc_RNA (1)...(19): siRNA sense strand
ccaaggcaucauuaucuau

SEQ ID NO: 1897523 - RNA, 19 nt, Homo sapiens
  misc_RNA (1)...(19): siRNA sense strand
gcuggaggaagauugcaaa

SEQ ID NO: 1897524 - RNA, 19 nt, Homo sapiens
  misc_RNA (1)...(19): siRNA sense strand
ucaaggacaaguacaagca

SEQ ID NO: 1897525 - RNA, 19 nt, Homo sapiens
  misc_RNA (1)...(19): siRNA sense strand
uauugguguuguaugauga

SEQ ID NO: 1897526 - RNA, 19 nt, Homo sapiens
  misc_RNA (1)...(19): siRNA sense strand
caaaggugccugguccaau

SEQ ID NO: 1897527 - RNA, 19 nt, Homo sapiens
  misc_RNA (1)...(19): siRNA sense strand
gaagauugcaaaagacgaa

SEQ ID NO: 1897528 - RNA, 19 nt, Homo sapiens
  misc_RNA (1)...(19): siRNA sense strand
guucgucguagaaugauga

SEQ ID NO: 1897529 - RNA, 19 nt, Homo sapiens
  misc_RNA (1)...(19): siRNA sense strand
gcugagaagcaguacaaag

SEQ ID NO: 1897530 - RNA, 19 nt, Homo sapiens
  misc_RNA (1)...(19): siRNA sense strand
caugggcggugcuuuugua

SEQ ID NO: 1897531 - RNA, 19 nt, Homo sapiens
  misc_RNA (1)...(19): siRNA sense strand
aggcaucauuaucuauaga

SEQ ID NO: 1897532 - RNA, 19 nt, Homo sapiens
  misc_RNA (1)...(19): siRNA sense strand
ccacccaagcucucaacuu

SEQ ID NO: 1897533 - RNA, 19 nt, Homo sapiens
  misc_RNA (1)...(19): siRNA sense strand
gacuguaucaucaagaucu

SEQ ID NO: 1897534 - RNA, 19 nt, Homo sapiens
  misc_RNA (1)...(19): siRNA sense strand
gacacuguucgucguagaa

SEQ ID NO: 1897535 - RNA, 19 nt, Homo sapiens
  misc_RNA (1)...(19): siRNA sense strand
caucaagaucuucaagucu

SEQ ID NO: 1897536 - RNA, 19 nt, Homo sapiens
  misc_RNA (1)...(19): siRNA sense strand
gaucauggcuguccucuuu

SEQ ID NO: 1897537 - RNA, 19 nt, Homo sapiens
  misc_RNA (1)...(19): siRNA sense strand
uagaagaucuggcuauguu

SEQ ID NO: 1897538 - RNA, 19 nt, Homo sapiens
  misc_RNA (1)...(19): siRNA sense strand
ggaggaccauuauuaugaa

SEQ ID NO: 1897539 - RNA, 19 nt, Homo sapiens
  misc_RNA (1)...(19): siRNA sense strand
gaagaucagcuccgacuug

SEQ ID NO: 1897540 - RNA, 19 nt, Homo sapiens
  misc_RNA (1)...(19): siRNA sense strand
gaacuagccgccaauacaa

SEQ ID NO: 1897541 - RNA, 19 nt, Homo sapiens
  misc_RNA (1)...(19): siRNA sense strand
ggaacuagccgccaauaca

SEQ ID NO: 1897542 - RNA, 19 nt, Homo sapiens
  misc_RNA (1)...(19): siRNA sense strand
gaaaaugccaucaucuaua

SEQ ID NO: 1897543 - RNA, 19 nt, Homo sapiens
  misc_RNA (1)...(19): siRNA sense strand
aaacauggcugagcagauc

SEQ ID NO: 1897544 - RNA, 19 nt, Homo sapiens
  misc_RNA (1)...(19): siRNA sense strand
uaacaacaaugaggacuuc

SEQ ID NO: 1897545 - RNA, 19 nt, Homo sapiens
  misc_RNA (1)...(19): siRNA sense strand
gaacugcugaagaaagaaa

SEQ ID NO: 1897546 - RNA, 19 nt, Homo sapiens
  misc_RNA (1)...(19): siRNA sense strand
ucacccaccuggcaguuaa

SEQ ID NO: 1897547 - RNA, 19 nt, Homo sapiens
  misc_RNA (1)...(19): siRNA sense strand
cgacagggaugccauugca

SEQ ID NO: 1897548 - RNA, 19 nt, Homo sapiens
  misc_RNA (1)...(19): siRNA sense strand
ccgaacugcugaagaaaga

SEQ ID NO: 1897549 - RNA, 19 nt, Homo sapiens
  misc_RNA (1)...(19): siRNA sense strand
ccagauggcccuagaagau

SEQ ID NO: 1897550 - RNA, 19 nt, Homo sapiens
  misc_RNA (1)...(19): siRNA sense strand
gaagaucuggcuauguuuc

SEQ ID NO: 1897551 - RNA, 19 nt, Homo sapiens
  misc_RNA (1)...(19): siRNA sense strand
ggaccauuauuaugaaggu

SEQ ID NO: 1897552 - RNA, 19 nt, Homo sapiens
  misc_RNA (1)...(19): siRNA sense strand
ccacaucaacugucuuuua

SEQ ID NO: 1897553 - RNA, 19 nt, Homo sapiens
  misc_RNA (1)...(19): siRNA sense strand
uggaggaccauuauuauga

SEQ ID NO: 1897554 - RNA, 19 nt, Homo sapiens
  misc_RNA (1)...(19): siRNA sense strand
gccaucaucuauaacaaca

SEQ ID NO: 1897555 - RNA, 19 nt, Homo sapiens
  misc_RNA (1)...(19): siRNA sense strand
gcaguuaaccggguaccaa

SEQ ID NO: 1897556 - RNA, 19 nt, Homo sapiens
  misc_RNA (1)...(19): siRNA sense strand
cugccgaacugcugaagaa

SEQ ID NO: 1897557 - RNA, 19 nt, Homo sapiens
  misc_RNA (1)...(19): siRNA sense strand
ccguggaggaccauuauua

SEQ ID NO: 1897558 - RNA, 19 nt, Homo sapiens
  misc_RNA (1)...(19): siRNA sense strand
gccaaccgccuacguauca

SEQ ID NO: 1897559 - RNA, 19 nt, Homo sapiens
  misc_RNA (1)...(19): siRNA sense strand
gugauggcguugcuacaga

SEQ ID NO: 1897560 - RNA, 19 nt, Homo sapiens
  misc_RNA (1)...(19): siRNA sense strand
gguagaagauaaggagucu

SEQ ID NO: 1897561 - RNA, 19 nt, Homo sapiens
  misc_RNA (1)...(19): siRNA sense strand
gaugaccaggugaccguua

SEQ ID NO: 1897562 - RNA, 19 nt, Homo sapiens
  misc_RNA (1)...(19): siRNA sense strand
ucuauaagcuggacaaccu

SEQ ID NO: 1897563 - RNA, 19 nt, Homo sapiens
  misc_RNA (1)...(19): siRNA sense strand
ccaaggugguccugaagag

SEQ ID NO: 1897564 - RNA, 19 nt, Homo sapiens
  misc_RNA (1)...(19): siRNA sense strand
ccuagaagaucuggcuaug

SEQ ID NO: 1897565 - RNA, 19 nt, Homo sapiens
  misc_RNA (1)...(19): siRNA sense strand
gagccuggcaucacuguca

SEQ ID NO: 1897566 - RNA, 19 nt, Homo sapiens
  misc_RNA (1)...(19): siRNA sense strand
caaaggguaucugcuucau

SEQ ID NO: 1897567 - RNA, 19 nt, Homo sapiens
  misc_RNA (1)...(19): siRNA sense strand
aagccaaggugguccugaa

SEQ ID NO: 1897568 - RNA, 19 nt, Homo sapiens
  misc_RNA (1)...(19): siRNA sense strand
ccagcuaccgagucuauug

SEQ ID NO: 1897569 - RNA, 19 nt, Homo sapiens
  misc_RNA (1)...(19): siRNA sense strand
ggacuuccaggucggacaa

SEQ ID NO: 1897570 - RNA, 19 nt, Homo sapiens
  misc_RNA (1)...(19): siRNA sense strand
ggccuucgccagcaucuau

SEQ ID NO: 1897571 - RNA, 19 nt, Homo sapiens
  misc_RNA (1)...(19): siRNA sense strand
agagaaggcaguggaacua

SEQ ID NO: 1897572 - RNA, 19 nt, Homo sapiens
  misc_RNA (1)...(19): siRNA sense strand
cugcccagcuacaaaguug

SEQ ID NO: 1897573 - RNA, 19 nt, Homo sapiens
  misc_RNA (1)...(19): siRNA sense strand
ggacaaccucguggccauu

SEQ ID NO: 1897574 - RNA, 19 nt, Homo sapiens
  misc_RNA (1)...(19): siRNA sense strand
ggccagcuaccgagucuau

SEQ ID NO: 1897575 - RNA, 19 nt, Homo sapiens
  misc_RNA (1)...(19): siRNA sense strand
guuaaccggguaccaagaa

SEQ ID NO: 1897576 - RNA, 19 nt, Homo sapiens
  misc_RNA (1)...(19): siRNA sense strand
ucaccguggaggaccauua

SEQ ID NO: 1897577 - RNA, 19 nt, Homo sapiens
  misc_RNA (1)...(19): siRNA sense strand
gaggaccauuauuaugaag

SEQ ID NO: 1897578 - RNA, 19 nt, Homo sapiens
  misc_RNA (1)...(19): siRNA sense strand
gcugagcugcugaagaugu

SEQ ID NO: 1897579 - RNA, 19 nt, Homo sapiens
  misc_RNA (1)...(19): siRNA sense strand
cggcaaauacuucgacaag

SEQ ID NO: 1897580 - RNA, 19 nt, Homo sapiens
  misc_RNA (1)...(19): siRNA sense strand
cugcugaaccugaggaaga

SEQ ID NO: 1897581 - RNA, 19 nt, Homo sapiens
  misc_RNA (1)...(19): siRNA sense strand
caguggacauugccaacau

SEQ ID NO: 1897582 - RNA, 19 nt, Homo sapiens
  misc_RNA (1)...(19): siRNA sense strand
caaccucguggccauucua

SEQ ID NO: 1897583 - RNA, 19 nt, Homo sapiens
  misc_RNA (1)...(19): siRNA sense strand
gcuaccgagucuauugcuu

SEQ ID NO: 1897584 - RNA, 19 nt, Homo sapiens
  misc_RNA (1)...(19): siRNA sense strand
guggaggaccauuauuaug

SEQ ID NO: 1897585 - RNA, 19 nt, Homo sapiens
  misc_RNA (1)...(19): siRNA sense strand
cuucaucgagugcuacauu

SEQ ID NO: 1897586 - RNA, 19 nt, Homo sapiens
  misc_RNA (1)...(19): siRNA sense strand
ggccuacaccggcaaauac

SEQ ID NO: 1897587 - RNA, 19 nt, Homo sapiens
  misc_RNA (1)...(19): siRNA sense strand
ugcugaagauguuugguau

SEQ ID NO: 1897588 - RNA, 19 nt, Homo sapiens
  misc_RNA (1)...(19): siRNA sense strand
uuaugaagguggcauuggu

SEQ ID NO: 1897589 - RNA, 19 nt, Homo sapiens
  misc_RNA (1)...(19): siRNA sense strand
cguggaggaccauuauuau

SEQ ID NO: 1897590 - RNA, 19 nt, Homo sapiens
  misc_RNA (1)...(19): siRNA sense strand
acagccagauccagagcaa

SEQ ID NO: 1897591 - RNA, 19 nt, Homo sapiens
  misc_RNA (1)...(19): siRNA sense strand
ccagccaacagccaucauu

SEQ ID NO: 1897592 - RNA, 19 nt, Homo sapiens
  misc_RNA (1)...(19): siRNA sense strand
cugagcugcugaagauguu

SEQ ID NO: 1897593 - RNA, 19 nt, Homo sapiens
  misc_RNA (1)...(19): siRNA sense strand
ucaagccccuggacagaaa

SEQ ID NO: 1897594 - RNA, 19 nt, Homo sapiens
  misc_RNA (1)...(19): siRNA sense strand
gaaagaaaagaucaacauc

SEQ ID NO: 1897595 - RNA, 19 nt, Homo sapiens
  misc_RNA (1)...(19): siRNA sense strand
cagaaaaugccaucaucua

SEQ ID NO: 1897596 - RNA, 19 nt, Homo sapiens
  misc_RNA (1)...(19): siRNA sense strand
caaaguuggggacaagaua

SEQ ID NO: 1897597 - RNA, 19 nt, Homo sapiens
  misc_RNA (1)...(19): siRNA sense strand
cagccaacagccaucauug

SEQ ID NO: 1897598 - RNA, 19 nt, Homo sapiens
  misc_RNA (1)...(19): siRNA sense strand
cugcugaagauguuuggua

SEQ ID NO: 1897599 - RNA, 19 nt, Homo sapiens
  misc_RNA (1)...(19): siRNA sense strand
gagcugcugaagauguuug

SEQ ID NO: 1897600 - RNA, 19 nt, Homo sapiens
  misc_RNA (1)...(19): siRNA sense strand
cuacaccggcaaauacuuc

SEQ ID NO: 1897601 - RNA, 19 nt, Homo sapiens
  misc_RNA (1)...(19): siRNA sense strand
gcaucuauaagcuggacaa

SEQ ID NO: 1897602 - RNA, 19 nt, Homo sapiens
  misc_RNA (1)...(19): siRNA sense strand
cugaagauguuugguaucg

SEQ ID NO: 1897603 - RNA, 19 nt, Homo sapiens
  misc_RNA (1)...(19): siRNA sense strand
ggaagaucagcuccgacuu

SEQ ID NO: 1897604 - RNA, 19 nt, Homo sapiens
  misc_RNA (1)...(19): siRNA sense strand
gagaaggcaguggaacuag

SEQ ID NO: 1897605 - RNA, 19 nt, Homo sapiens
  misc_RNA (1)...(19): siRNA sense strand
ccucccagauggcccuaga

SEQ ID NO: 1897606 - RNA, 19 nt, Homo sapiens
  misc_RNA (1)...(19): siRNA sense strand
acaggacggugcccuucug

SEQ ID NO: 1897607 - RNA, 19 nt, Homo sapiens
  misc_RNA (1)...(19): siRNA sense strand
aggcggagcugcugaaccu

SEQ ID NO: 1897608 - RNA, 19 nt, Homo sapiens
  misc_RNA (1)...(19): siRNA sense strand
ggaaugcacuggagaagua

SEQ ID NO: 1897609 - RNA, 19 nt, Homo sapiens
  misc_RNA (1)...(19): siRNA sense strand
gaacagcauuucuauuuag

SEQ ID NO: 1897610 - RNA, 19 nt, Homo sapiens
  misc_RNA (1)...(19): siRNA sense strand
gauccgauaugucacuaua

SEQ ID NO: 1897611 - RNA, 19 nt, Homo sapiens
  misc_RNA (1)...(19): siRNA sense strand
ugucggagcucaccuauga

SEQ ID NO: 1897612 - RNA, 19 nt, Homo sapiens
  misc_RNA (1)...(19): siRNA sense strand
ugacggagaucaucaccua

SEQ ID NO: 1897613 - RNA, 19 nt, Homo sapiens
  misc_RNA (1)...(19): siRNA sense strand
ggaagaggcugaaggacau

SEQ ID NO: 1897614 - RNA, 19 nt, Homo sapiens
  misc_RNA (1)...(19): siRNA sense strand
ccaauucucaucaacuuua

SEQ ID NO: 1897615 - RNA, 19 nt, Homo sapiens
  misc_RNA (1)...(19): siRNA sense strand
gagcugauccgauauguca

SEQ ID NO: 1897616 - RNA, 19 nt, Homo sapiens
  misc_RNA (1)...(19): siRNA sense strand
gaaagacaacagcagauga

SEQ ID NO: 1897617 - RNA, 19 nt, Homo sapiens
  misc_RNA (1)...(19): siRNA sense strand
cggagaucaucaccuauua

SEQ ID NO: 1897618 - RNA, 19 nt, Homo sapiens
  misc_RNA (1)...(19): siRNA sense strand
ugccugagcugauccgaua

SEQ ID NO: 1897619 - RNA, 19 nt, Homo sapiens
  misc_RNA (1)...(19): siRNA sense strand
gaucaucaccuauuauuac

SEQ ID NO: 1897620 - RNA, 19 nt, Homo sapiens
  misc_RNA (1)...(19): siRNA sense strand
ggaccugccuggauauuac

SEQ ID NO: 1897621 - RNA, 19 nt, Homo sapiens
  misc_RNA (1)...(19): siRNA sense strand
gagaucaucaccuauuauu

SEQ ID NO: 1897622 - RNA, 19 nt, Homo sapiens
  misc_RNA (1)...(19): siRNA sense strand
gcaacuaugugcagaucug

SEQ ID NO: 1897623 - RNA, 19 nt, Homo sapiens
  misc_RNA (1)...(19): siRNA sense strand
gcacgcggaucccagacaa

SEQ ID NO: 1897624 - RNA, 19 nt, Homo sapiens
  misc_RNA (1)...(19): siRNA sense strand
gcacgcugcugucaacaca

SEQ ID NO: 1897625 - RNA, 19 nt, Homo sapiens
  misc_RNA (1)...(19): siRNA sense strand
gagccaagcaggacuucua

SEQ ID NO: 1897626 - RNA, 19 nt, Homo sapiens
  misc_RNA (1)...(19): siRNA sense strand
ggagggugauccggaauug

SEQ ID NO: 1897627 - RNA, 19 nt, Homo sapiens
  misc_RNA (1)...(19): siRNA sense strand
ugaguggaauggcuauauu

SEQ ID NO: 1897628 - RNA, 19 nt, Homo sapiens
  misc_RNA (1)...(19): siRNA sense strand
gcagaggacaccuucuuug

SEQ ID NO: 1897629 - RNA, 19 nt, Homo sapiens
  misc_RNA (1)...(19): siRNA sense strand
acauuuaccuggccgacua

SEQ ID NO: 1897630 - RNA, 19 nt, Homo sapiens
  misc_RNA (1)...(19): siRNA sense strand
gggccguucuccucaauga

SEQ ID NO: 1897631 - RNA, 19 nt, Homo sapiens
  misc_RNA (1)...(19): siRNA sense strand
ugaggaaccugcccaugug

SEQ ID NO: 1897632 - RNA, 19 nt, Homo sapiens
  misc_RNA (1)...(19): siRNA sense strand
ggaaagacaacagcagaug

SEQ ID NO: 1897633 - RNA, 19 nt, Homo sapiens
  misc_RNA (1)...(19): siRNA sense strand
agaaguaugugacggagau

SEQ ID NO: 1897634 - RNA, 19 nt, Homo sapiens
  misc_RNA (1)...(19): siRNA sense strand
gauacaccguccagaucaa

SEQ ID NO: 1897635 - RNA, 19 nt, Homo sapiens
  misc_RNA (1)...(19): siRNA sense strand
gcacuggagaaguauguga

SEQ ID NO: 1897636 - RNA, 19 nt, Homo sapiens
  misc_RNA (1)...(19): siRNA sense strand
ggagaucaucaccuauuau

SEQ ID NO: 1897637 - RNA, 19 nt, Homo sapiens
  misc_RNA (1)...(19): siRNA sense strand
gggagagacuuugcaacug

SEQ ID NO: 1897638 - RNA, 19 nt, Homo sapiens
  misc_RNA (1)...(19): siRNA sense strand
ugaccacucuggagaccuu

SEQ ID NO: 1897639 - RNA, 19 nt, Homo sapiens
  misc_RNA (1)...(19): siRNA sense strand
ggaccugggugagcucauc

SEQ ID NO: 1897640 - RNA, 19 nt, Homo sapiens
  misc_RNA (1)...(19): siRNA sense strand
ccauggcacuggcuuucaa

SEQ ID NO: 1897641 - RNA, 19 nt, Homo sapiens
  misc_RNA (1)...(19): siRNA sense strand
gugaagaccacgugcauca

SEQ ID NO: 1897642 - RNA, 19 nt, Homo sapiens
  misc_RNA (1)...(19): siRNA sense strand
gggcagaggacaccuucuu

SEQ ID NO: 1897643 - RNA, 19 nt, Homo sapiens
  misc_RNA (1)...(19): siRNA sense strand
gcugaaggacauuaggaaa

SEQ ID NO: 1897644 - RNA, 19 nt, Homo sapiens
  misc_RNA (1)...(19): siRNA sense strand
gauccggaauugcagucuu

SEQ ID NO: 1897645 - RNA, 19 nt, Homo sapiens
  misc_RNA (1)...(19): siRNA sense strand
ccaucucacugaccauugu

SEQ ID NO: 1897646 - RNA, 19 nt, Homo sapiens
  misc_RNA (1)...(19): siRNA sense strand
gaaccgugccugagcugau

SEQ ID NO: 1897647 - RNA, 19 nt, Homo sapiens
  misc_RNA (1)...(19): siRNA sense strand
gcaggaaauauuuaaagag

SEQ ID NO: 1897648 - RNA, 19 nt, Homo sapiens
  misc_RNA (1)...(19): siRNA sense strand
caaccggccugaguggaau

SEQ ID NO: 1897649 - RNA, 19 nt, Homo sapiens
  misc_RNA (1)...(19): siRNA sense strand
ugggugagcucaucaucau

SEQ ID NO: 1897650 - RNA, 19 nt, Homo sapiens
  misc_RNA (1)...(19): siRNA sense strand
acacaaggagagagccaua

SEQ ID NO: 1897651 - RNA, 19 nt, Homo sapiens
  misc_RNA (1)...(19): siRNA sense strand
cgauaugucacuauaguca

SEQ ID NO: 1897652 - RNA, 19 nt, Homo sapiens
  misc_RNA (1)...(19): siRNA sense strand
ucccaauucucaucaacuu

SEQ ID NO: 1897653 - RNA, 19 nt, Homo sapiens
  misc_RNA (1)...(19): siRNA sense strand
ggcagaggacaccuucuuu

SEQ ID NO: 1897654 - RNA, 19 nt, Homo sapiens
  misc_RNA (1)...(19): siRNA sense strand
aaucugucgucuccgagua

SEQ ID NO: 1897655 - RNA, 19 nt, Homo sapiens
  misc_RNA (1)...(19): siRNA sense strand
gcuggagacacaccucauu

SEQ ID NO: 1897656 - RNA, 19 nt, Homo sapiens
  misc_RNA (1)...(19): siRNA sense strand
acacaggccagauggaguu

SEQ ID NO: 1897657 - RNA, 19 nt, Homo sapiens
  misc_RNA (1)...(19): siRNA sense strand
gaacacgggacuccaucuc

SEQ ID NO: 1897658 - RNA, 19 nt, Homo sapiens
  misc_RNA (1)...(19): siRNA sense strand
gauauuacuaccgcgauga

SEQ ID NO: 1897659 - RNA, 19 nt, Homo sapiens
  misc_RNA (1)...(19): siRNA sense strand
gcggaucccagacaaguuc

SEQ ID NO: 1897660 - RNA, 19 nt, Homo sapiens
  misc_RNA (1)...(19): siRNA sense strand
agucuugggugcaggaaau

SEQ ID NO: 1897661 - RNA, 19 nt, Homo sapiens
  misc_RNA (1)...(19): siRNA sense strand
guccagaucaacagcauug

SEQ ID NO: 1897662 - RNA, 19 nt, Homo sapiens
  misc_RNA (1)...(19): siRNA sense strand
cgagggaacgugcuugcaa

SEQ ID NO: 1897663 - RNA, 19 nt, Homo sapiens
  misc_RNA (1)...(19): siRNA sense strand
ccaaccggccugaguggaa

SEQ ID NO: 1897664 - RNA, 19 nt, Homo sapiens
  misc_RNA (1)...(19): siRNA sense strand
ccagaucucacacgacauc

SEQ ID NO: 1897665 - RNA, 19 nt, Homo sapiens
  misc_RNA (1)...(19): siRNA sense strand
ggacacuucccggacauuc

SEQ ID NO: 1897666 - RNA, 19 nt, Homo sapiens
  misc_RNA (1)...(19): siRNA sense strand
ccacuuugggagagacuuu

SEQ ID NO: 1897667 - RNA, 19 nt, Homo sapiens
  misc_RNA (1)...(19): siRNA sense strand
ccaucuuccugcccaguga

SEQ ID NO: 1897668 - RNA, 19 nt, Homo sapiens
  misc_RNA (1)...(19): siRNA sense strand
gaaggacauuaggaaaauu

SEQ ID NO: 1897669 - RNA, 19 nt, Homo sapiens
  misc_RNA (1)...(19): siRNA sense strand
auccaccgauucagacuaa

SEQ ID NO: 1897670 - RNA, 19 nt, Homo sapiens
  misc_RNA (1)...(19): siRNA sense strand
gcaaacauucguggaagag

SEQ ID NO: 1897671 - RNA, 19 nt, Homo sapiens
  misc_RNA (1)...(19): siRNA sense strand
ccgccuggaugcccaacuu

SEQ ID NO: 1897672 - RNA, 19 nt, Homo sapiens
  misc_RNA (1)...(19): siRNA sense strand
gugcaggaaauauuuaaag

SEQ ID NO: 1897673 - RNA, 19 nt, Homo sapiens
  misc_RNA (1)...(19): siRNA sense strand
ugaaggacauuaggaaaau

SEQ ID NO: 1897674 - RNA, 19 nt, Homo sapiens
  misc_RNA (1)...(19): siRNA sense strand
cacaggcaccgaccucuug

SEQ ID NO: 1897675 - RNA, 19 nt, Homo sapiens
  misc_RNA (1)...(19): siRNA sense strand
uccgauaugucacuauagu

SEQ ID NO: 1897676 - RNA, 19 nt, Homo sapiens
  misc_RNA (1)...(19): siRNA sense strand
cgauacaccguccagauca

SEQ ID NO: 1897677 - RNA, 19 nt, Homo sapiens
  misc_RNA (1)...(19): siRNA sense strand
ucauccgccugcacaaaga

SEQ ID NO: 1897678 - RNA, 19 nt, Homo sapiens
  misc_RNA (1)...(19): siRNA sense strand
gaagaggcugaaggacauu

SEQ ID NO: 1897679 - RNA, 19 nt, Homo sapiens
  misc_RNA (1)...(19): siRNA sense strand
gccagcgccugaaccagau

SEQ ID NO: 1897680 - RNA, 19 nt, Homo sapiens
  misc_RNA (1)...(19): siRNA sense strand
caucauccgccugcacaaa

SEQ ID NO: 1897681 - RNA, 19 nt, Homo sapiens
  misc_RNA (1)...(19): siRNA sense strand
gggugcaggaaauauuuaa

SEQ ID NO: 1897682 - RNA, 19 nt, Homo sapiens
  misc_RNA (1)...(19): siRNA sense strand
ugcaaacauucguggaaga

SEQ ID NO: 1897683 - RNA, 19 nt, Homo sapiens
  misc_RNA (1)...(19): siRNA sense strand
cagaggacaccuucuuugg

SEQ ID NO: 1897684 - RNA, 19 nt, Homo sapiens
  misc_RNA (1)...(19): siRNA sense strand
ggacccgagggcaagauga

SEQ ID NO: 1897685 - RNA, 19 nt, Homo sapiens
  misc_RNA (1)...(19): siRNA sense strand
acacguugccggaugugaa

SEQ ID NO: 1897686 - RNA, 19 nt, Homo sapiens
  misc_RNA (1)...(19): siRNA sense strand
ggagacacaccucauugcu

SEQ ID NO: 1897687 - RNA, 19 nt, Homo sapiens
  misc_RNA (1)...(19): siRNA sense strand
gguacgcuaugcggaguuc

SEQ ID NO: 1897688 - RNA, 19 nt, Homo sapiens
  misc_RNA (1)...(19): siRNA sense strand
gauucccaauucucaucaa

SEQ ID NO: 1897689 - RNA, 19 nt, Homo sapiens
  misc_RNA (1)...(19): siRNA sense strand
ccuauuauuacccgaguga

SEQ ID NO: 1897690 - RNA, 19 nt, Homo sapiens
  misc_RNA (1)...(19): siRNA sense strand
ccacaggcaccgaccucuu

SEQ ID NO: 1897691 - RNA, 19 nt, Homo sapiens
  misc_RNA (1)...(19): siRNA sense strand
ggaggccacaggaaagaca

SEQ ID NO: 1897692 - RNA, 19 nt, Homo sapiens
  misc_RNA (1)...(19): siRNA sense strand
caagacguggguacgcuau

SEQ ID NO: 1897693 - RNA, 19 nt, Homo sapiens
  misc_RNA (1)...(19): siRNA sense strand
acccggugcugauugagaa

SEQ ID NO: 1897694 - RNA, 19 nt, Homo sapiens
  misc_RNA (1)...(19): siRNA sense strand
uggacccggugcugauuga

SEQ ID NO: 1897695 - RNA, 19 nt, Homo sapiens
  misc_RNA (1)...(19): siRNA sense strand
agaccuucauggacacguu

SEQ ID NO: 1897696 - RNA, 19 nt, Homo sapiens
  misc_RNA (1)...(19): siRNA sense strand
ggugcaggaaauauuuaaa

SEQ ID NO: 1897697 - RNA, 19 nt, Homo sapiens
  misc_RNA (1)...(19): siRNA sense strand
cugaggaaccugcccaugu

SEQ ID NO: 1897698 - RNA, 19 nt, Homo sapiens
  misc_RNA (1)...(19): siRNA sense strand
acggagaucaucaccuauu

SEQ ID NO: 1897699 - RNA, 19 nt, Homo sapiens
  misc_RNA (1)...(19): siRNA sense strand
ggaauauucugguuuaaug

SEQ ID NO: 1897700 - RNA, 19 nt, Homo sapiens
  misc_RNA (1)...(19): siRNA sense strand
gaaggaggcuagguuuaaa

SEQ ID NO: 1897701 - RNA, 19 nt, Homo sapiens
  misc_RNA (1)...(19): siRNA sense strand
caugagcccuuguacauuu

SEQ ID NO: 1897702 - RNA, 19 nt, Homo sapiens
  misc_RNA (1)...(19): siRNA sense strand
caaagaugcuuggaauauu

SEQ ID NO: 1897703 - RNA, 19 nt, Homo sapiens
  misc_RNA (1)...(19): siRNA sense strand
gcaaagaccacacagauuc

SEQ ID NO: 1897704 - RNA, 19 nt, Homo sapiens
  misc_RNA (1)...(19): siRNA sense strand
gaaacuagcagcagcaaau

SEQ ID NO: 1897705 - RNA, 19 nt, Homo sapiens
  misc_RNA (1)...(19): siRNA sense strand
ccauuuaucucauugcuau

SEQ ID NO: 1897706 - RNA, 19 nt, Homo sapiens
  misc_RNA (1)...(19): siRNA sense strand
uaaugugccugaaaucuau

SEQ ID NO: 1897707 - RNA, 19 nt, Homo sapiens
  misc_RNA (1)...(19): siRNA sense strand
gcauauggccauugugaaa

SEQ ID NO: 1897708 - RNA, 19 nt, Homo sapiens
  misc_RNA (1)...(19): siRNA sense strand
gagcauauggccauuguga

SEQ ID NO: 1897709 - RNA, 19 nt, Homo sapiens
  misc_RNA (1)...(19): siRNA sense strand
ccauggcccuggaccguua

SEQ ID NO: 1897710 - RNA, 19 nt, Homo sapiens
  misc_RNA (1)...(19): siRNA sense strand
caacaucacagucuacaug

SEQ ID NO: 1897711 - RNA, 19 nt, Homo sapiens
  misc_RNA (1)...(19): siRNA sense strand
gcuaggagccacagacauu

SEQ ID NO: 1897712 - RNA, 19 nt, Homo sapiens
  misc_RNA (1)...(19): siRNA sense strand
ccacacagauucgcauuca

SEQ ID NO: 1897713 - RNA, 19 nt, Homo sapiens
  misc_RNA (1)...(19): siRNA sense strand
cagcaaauguucaagucaa

SEQ ID NO: 1897714 - RNA, 19 nt, Homo sapiens
  misc_RNA (1)...(19): siRNA sense strand
aaagaugcuuggaauauuc

SEQ ID NO: 1897715 - RNA, 19 nt, Homo sapiens
  misc_RNA (1)...(19): siRNA sense strand
cuuggaauauucugguuua

SEQ ID NO: 1897716 - RNA, 19 nt, Homo sapiens
  misc_RNA (1)...(19): siRNA sense strand
ggccaucuguuauccacua

SEQ ID NO: 1897717 - RNA, 19 nt, Homo sapiens
  misc_RNA (1)...(19): siRNA sense strand
uaaagugccgguuucaauu

SEQ ID NO: 1897718 - RNA, 19 nt, Homo sapiens
  misc_RNA (1)...(19): siRNA sense strand
gauuugaccucacauucau

SEQ ID NO: 1897719 - RNA, 19 nt, Homo sapiens
  misc_RNA (1)...(19): siRNA sense strand
ucaauccacuugucuaugg

SEQ ID NO: 1897720 - RNA, 19 nt, Homo sapiens
  misc_RNA (1)...(19): siRNA sense strand
cuacaugcccucuguguug

SEQ ID NO: 1897721 - RNA, 19 nt, Homo sapiens
  misc_RNA (1)...(19): siRNA sense strand
ggauugggauuccauucug

SEQ ID NO: 1897722 - RNA, 19 nt, Homo sapiens
  misc_RNA (1)...(19): siRNA sense strand
gaggcuagguuuaaagcau

SEQ ID NO: 1897723 - RNA, 19 nt, Homo sapiens
  misc_RNA (1)...(19): siRNA sense strand
gguuuaaugugccugaaau

SEQ ID NO: 1897724 - RNA, 19 nt, Homo sapiens
  misc_RNA (1)...(19): siRNA sense strand
caucuguuauccacuaaga

SEQ ID NO: 1897725 - RNA, 19 nt, Homo sapiens
  misc_RNA (1)...(19): siRNA sense strand
guuauguggccaucuguua

SEQ ID NO: 1897726 - RNA, 19 nt, Homo sapiens
  misc_RNA (1)...(19): siRNA sense strand
ggauuugaccucacauuca

SEQ ID NO: 1897727 - RNA, 19 nt, Homo sapiens
  misc_RNA (1)...(19): siRNA sense strand
acucagggcugcuauucuu

SEQ ID NO: 1897728 - RNA, 19 nt, Homo sapiens
  misc_RNA (1)...(19): siRNA sense strand
agaaggaggcuagguuuaa

SEQ ID NO: 1897729 - RNA, 19 nt, Homo sapiens
  misc_RNA (1)...(19): siRNA sense strand
cagaaggaggcuagguuua

SEQ ID NO: 1897730 - RNA, 19 nt, Homo sapiens
  misc_RNA (1)...(19): siRNA sense strand
uguccuacauccagauauu

SEQ ID NO: 1897731 - RNA, 19 nt, Homo sapiens
  misc_RNA (1)...(19): siRNA sense strand
ccagaaggaggcuagguuu

SEQ ID NO: 1897732 - RNA, 19 nt, Homo sapiens
  misc_RNA (1)...(19): siRNA sense strand
gauuccugcuugcuucaaa

SEQ ID NO: 1897733 - RNA, 19 nt, Homo sapiens
  misc_RNA (1)...(19): siRNA sense strand
aaagugccgguuucaauuu

SEQ ID NO: 1897734 - RNA, 19 nt, Homo sapiens
  misc_RNA (1)...(19): siRNA sense strand
cugcauugcucacaucugu

SEQ ID NO: 1897735 - RNA, 19 nt, Homo sapiens
  misc_RNA (1)...(19): siRNA sense strand
gugcaaagaccacacagau

SEQ ID NO: 1897736 - RNA, 19 nt, Homo sapiens
  misc_RNA (1)...(19): siRNA sense strand
uuaaugugccugaaaucua

SEQ ID NO: 1897737 - RNA, 19 nt, Homo sapiens
  misc_RNA (1)...(19): siRNA sense strand
acuaagacaugccaacauc

SEQ ID NO: 1897738 - RNA, 19 nt, Homo sapiens
  misc_RNA (1)...(19): siRNA sense strand
gugagcauauggccauugu

SEQ ID NO: 1897739 - RNA, 19 nt, Homo sapiens
  misc_RNA (1)...(19): siRNA sense strand
gauucgcauucauguggua

SEQ ID NO: 1897740 - RNA, 19 nt, Homo sapiens
  misc_RNA (1)...(19): siRNA sense strand
gaccucacauucaucacau

SEQ ID NO: 1897741 - RNA, 19 nt, Homo sapiens
  misc_RNA (1)...(19): siRNA sense strand
ccacuugucuauggugcaa

SEQ ID NO: 1897742 - RNA, 19 nt, Homo sapiens
  misc_RNA (1)...(19): siRNA sense strand
ucacauucaucacauuguc

SEQ ID NO: 1897743 - RNA, 19 nt, Homo sapiens
  misc_RNA (1)...(19): siRNA sense strand
cagggcugcuauucuugua

SEQ ID NO: 1897744 - RNA, 19 nt, Homo sapiens
  misc_RNA (1)...(19): siRNA sense strand
acacagauucgcauucaug

SEQ ID NO: 1897745 - RNA, 19 nt, Homo sapiens
  misc_RNA (1)...(19): siRNA sense strand
gccuaguacugauaaagug

SEQ ID NO: 1897746 - RNA, 19 nt, Homo sapiens
  misc_RNA (1)...(19): siRNA sense strand
gauugggauuccauucugu

SEQ ID NO: 1897747 - RNA, 19 nt, Homo sapiens
  misc_RNA (1)...(19): siRNA sense strand
ugagcaucaucaaaucuga

SEQ ID NO: 1897748 - RNA, 19 nt, Homo sapiens
  misc_RNA (1)...(19): siRNA sense strand
cccaccagcuugucauuca

SEQ ID NO: 1897749 - RNA, 19 nt, Homo sapiens
  misc_RNA (1)...(19): siRNA sense strand
gauaaagugccgguuucaa

SEQ ID NO: 1897750 - RNA, 19 nt, Homo sapiens
  misc_RNA (1)...(19): siRNA sense strand
gaucccaggccuagaaucu

SEQ ID NO: 1897751 - RNA, 19 nt, Homo sapiens
  misc_RNA (1)...(19): siRNA sense strand
guacucagggcugcuauuc

SEQ ID NO: 1897752 - RNA, 19 nt, Homo sapiens
  misc_RNA (1)...(19): siRNA sense strand
aggcuagguuuaaagcauu

SEQ ID NO: 1897753 - RNA, 19 nt, Homo sapiens
  misc_RNA (1)...(19): siRNA sense strand
auaaagugccgguuucaau

SEQ ID NO: 1897754 - RNA, 19 nt, Homo sapiens
  misc_RNA (1)...(19): siRNA sense strand
cuucugagcaucaucaaau

SEQ ID NO: 1897755 - RNA, 19 nt, Homo sapiens
  misc_RNA (1)...(19): siRNA sense strand
cugauaaagugccgguuuc

SEQ ID NO: 1897756 - RNA, 19 nt, Homo sapiens
  misc_RNA (1)...(19): siRNA sense strand
cagcuugucauucagauag

SEQ ID NO: 1897757 - RNA, 19 nt, Homo sapiens
  misc_RNA (1)...(19): siRNA sense strand
gcuggucccuccauuucuc

SEQ ID NO: 1897758 - RNA, 19 nt, Homo sapiens
  misc_RNA (1)...(19): siRNA sense strand
guuuguggccuucacugua

SEQ ID NO: 1897759 - RNA, 19 nt, Homo sapiens
  misc_RNA (1)...(19): siRNA sense strand
gcagcaaauguucaaguca

SEQ ID NO: 1897760 - RNA, 19 nt, Homo sapiens
  misc_RNA (1)...(19): siRNA sense strand
uccauucugugccauuuau

SEQ ID NO: 1897761 - RNA, 19 nt, Homo sapiens
  misc_RNA (1)...(19): siRNA sense strand
ggaacuauggucguacuca

SEQ ID NO: 1897762 - RNA, 19 nt, Homo sapiens
  misc_RNA (1)...(19): siRNA sense strand
gccaucuguuauccacuaa

SEQ ID NO: 1897763 - RNA, 19 nt, Homo sapiens
  misc_RNA (1)...(19): siRNA sense strand
cauauucucuuuucuagca

SEQ ID NO: 1897764 - RNA, 19 nt, Homo sapiens
  misc_RNA (1)...(19): siRNA sense strand
caucuucacccaccagcuu

SEQ ID NO: 1897765 - RNA, 19 nt, Homo sapiens
  misc_RNA (1)...(19): siRNA sense strand
ucugugcagugcuggauug

SEQ ID NO: 1897766 - RNA, 19 nt, Homo sapiens
  misc_RNA (1)...(19): siRNA sense strand
uacaugcccucuguguuga

SEQ ID NO: 1897767 - RNA, 19 nt, Homo sapiens
  misc_RNA (1)...(19): siRNA sense strand
uccuacauccagauauuua

SEQ ID NO: 1897768 - RNA, 19 nt, Homo sapiens
  misc_RNA (1)...(19): siRNA sense strand
ccacacauugcaggguaua

SEQ ID NO: 1897769 - RNA, 19 nt, Homo sapiens
  misc_RNA (1)...(19): siRNA sense strand
ucccaggccuagaaucugu

SEQ ID NO: 1897770 - RNA, 19 nt, Homo sapiens
  misc_RNA (1)...(19): siRNA sense strand
ccacuaagacaugccaaca

SEQ ID NO: 1897771 - RNA, 19 nt, Homo sapiens
  misc_RNA (1)...(19): siRNA sense strand
gcagugcuggauugggauu

SEQ ID NO: 1897772 - RNA, 19 nt, Homo sapiens
  misc_RNA (1)...(19): siRNA sense strand
uuuccaacaucacagucua

SEQ ID NO: 1897773 - RNA, 19 nt, Homo sapiens
  misc_RNA (1)...(19): siRNA sense strand
cuucuucacacauagguuu

SEQ ID NO: 1897774 - RNA, 19 nt, Homo sapiens
  misc_RNA (1)...(19): siRNA sense strand
cuaccuccuugccuucuuc

SEQ ID NO: 1897775 - RNA, 19 nt, Homo sapiens
  misc_RNA (1)...(19): siRNA sense strand
cagucuacaugcccucugu

SEQ ID NO: 1897776 - RNA, 19 nt, Homo sapiens
  misc_RNA (1)...(19): siRNA sense strand
gaccacacagauucgcauu

SEQ ID NO: 1897777 - RNA, 19 nt, Homo sapiens
  misc_RNA (1)...(19): siRNA sense strand
ccaugagcccuuguacauu

SEQ ID NO: 1897778 - RNA, 19 nt, Homo sapiens
  misc_RNA (1)...(19): siRNA sense strand
gcuuggaauauucugguuu

SEQ ID NO: 1897779 - RNA, 19 nt, Homo sapiens
  misc_RNA (1)...(19): siRNA sense strand
ccauuucucaauccacuug

SEQ ID NO: 1897780 - RNA, 19 nt, Homo sapiens
  misc_RNA (1)...(19): siRNA sense strand
cacauagguuugggucuca

SEQ ID NO: 1897781 - RNA, 19 nt, Homo sapiens
  misc_RNA (1)...(19): siRNA sense strand
gguuuaaagcauucaauac

SEQ ID NO: 1897782 - RNA, 19 nt, Homo sapiens
  misc_RNA (1)...(19): siRNA sense strand
uccaugagcccuuguacau

SEQ ID NO: 1897783 - RNA, 19 nt, Homo sapiens
  misc_RNA (1)...(19): siRNA sense strand
ccugcuugcuucaaaugug

SEQ ID NO: 1897784 - RNA, 19 nt, Homo sapiens
  misc_RNA (1)...(19): siRNA sense strand
acacauugcaggguauaga

SEQ ID NO: 1897785 - RNA, 19 nt, Homo sapiens
  misc_RNA (1)...(19): siRNA sense strand
ugcaaagaccacacagauu

SEQ ID NO: 1897786 - RNA, 19 nt, Homo sapiens
  misc_RNA (1)...(19): siRNA sense strand
uuuguggccuucacuguag

SEQ ID NO: 1897787 - RNA, 19 nt, Homo sapiens
  misc_RNA (1)...(19): siRNA sense strand
gcaaagaaaugaagaaugu

SEQ ID NO: 1897788 - RNA, 19 nt, Homo sapiens
  misc_RNA (1)...(19): siRNA sense strand
gaaauagacaugaagguua

SEQ ID NO: 1897789 - RNA, 19 nt, Homo sapiens
  misc_RNA (1)...(19): siRNA sense strand
ggaaauugcuggccagguu

SEQ ID NO: 1897790 - RNA, 19 nt, Homo sapiens
  misc_RNA (1)...(19): siRNA sense strand
gcacugaaauagacaugaa

SEQ ID NO: 1897791 - RNA, 19 nt, Homo sapiens
  misc_RNA (1)...(19): siRNA sense strand
aaacaaagcaggaugauga

SEQ ID NO: 1897792 - RNA, 19 nt, Homo sapiens
  misc_RNA (1)...(19): siRNA sense strand
gagaaauccuccaaauguu

SEQ ID NO: 1897793 - RNA, 19 nt, Homo sapiens
  misc_RNA (1)...(19): siRNA sense strand
gauacacacuggagaggua

SEQ ID NO: 1897794 - RNA, 19 nt, Homo sapiens
  misc_RNA (1)...(19): siRNA sense strand
ccaagaaucugguuaugau

SEQ ID NO: 1897795 - RNA, 19 nt, Homo sapiens
  misc_RNA (1)...(19): siRNA sense strand
ggagagggcuguaucuaag

SEQ ID NO: 1897796 - RNA, 19 nt, Homo sapiens
  misc_RNA (1)...(19): siRNA sense strand
gaaauuagaaugugaggau

SEQ ID NO: 1897797 - RNA, 19 nt, Homo sapiens
  misc_RNA (1)...(19): siRNA sense strand
gcaaaguccucaaucucaa

SEQ ID NO: 1897798 - RNA, 19 nt, Homo sapiens
  misc_RNA (1)...(19): siRNA sense strand
ucaugaaccuggacgauuu

SEQ ID NO: 1897799 - RNA, 19 nt, Homo sapiens
  misc_RNA (1)...(19): siRNA sense strand
gaacagaggaaacaaagca

SEQ ID NO: 1897800 - RNA, 19 nt, Homo sapiens
  misc_RNA (1)...(19): siRNA sense strand
gcaugcaucuggagaagga

SEQ ID NO: 1897801 - RNA, 19 nt, Homo sapiens
  misc_RNA (1)...(19): siRNA sense strand
acaguuagaugaagaagga

SEQ ID NO: 1897802 - RNA, 19 nt, Homo sapiens
  misc_RNA (1)...(19): siRNA sense strand
ccaaugagcugcggcacaa

SEQ ID NO: 1897803 - RNA, 19 nt, Homo sapiens
  misc_RNA (1)...(19): siRNA sense strand
gcaaugcuauauacagagu

SEQ ID NO: 1897804 - RNA, 19 nt, Homo sapiens
  misc_RNA (1)...(19): siRNA sense strand
gacagcggaugccucgaua

SEQ ID NO: 1897805 - RNA, 19 nt, Homo sapiens
  misc_RNA (1)...(19): siRNA sense strand
gcggaugccucgauacugu

SEQ ID NO: 1897806 - RNA, 19 nt, Homo sapiens
  misc_RNA (1)...(19): siRNA sense strand
caaaagauaugacaaugug

SEQ ID NO: 1897807 - RNA, 19 nt, Homo sapiens
  misc_RNA (1)...(19): siRNA sense strand
ugucuuaugucuccagaaa

SEQ ID NO: 1897808 - RNA, 19 nt, Homo sapiens
  misc_RNA (1)...(19): siRNA sense strand
caagcaaaguccucaaucu

SEQ ID NO: 1897809 - RNA, 19 nt, Homo sapiens
  misc_RNA (1)...(19): siRNA sense strand
aaagcaggaugaugacuga

SEQ ID NO: 1897810 - RNA, 19 nt, Homo sapiens
  misc_RNA (1)...(19): siRNA sense strand
ugaagcagauagcauacuu

SEQ ID NO: 1897811 - RNA, 19 nt, Homo sapiens
  misc_RNA (1)...(19): siRNA sense strand
gcacuacuacucagagaga

SEQ ID NO: 1897812 - RNA, 19 nt, Homo sapiens
  misc_RNA (1)...(19): siRNA sense strand
ccauauacauucugcaaag

SEQ ID NO: 1897813 - RNA, 19 nt, Homo sapiens
  misc_RNA (1)...(19): siRNA sense strand
ucagauaacaauagggaua

SEQ ID NO: 1897814 - RNA, 19 nt, Homo sapiens
  misc_RNA (1)...(19): siRNA sense strand
gauccuuucucacaucaau

SEQ ID NO: 1897815 - RNA, 19 nt, Homo sapiens
  misc_RNA (1)...(19): siRNA sense strand
gaacugacugggacugaga

SEQ ID NO: 1897816 - RNA, 19 nt, Homo sapiens
  misc_RNA (1)...(19): siRNA sense strand
ggagaaggagccaugaaga

SEQ ID NO: 1897817 - RNA, 19 nt, Homo sapiens
  misc_RNA (1)...(19): siRNA sense strand
aauacaaacucacccaaga

SEQ ID NO: 1897818 - RNA, 19 nt, Homo sapiens
  misc_RNA (1)...(19): siRNA sense strand
gaaccuggacgauuugaca

SEQ ID NO: 1897819 - RNA, 19 nt, Homo sapiens
  misc_RNA (1)...(19): siRNA sense strand
gggcuucaaugcuuucugu

SEQ ID NO: 1897820 - RNA, 19 nt, Homo sapiens
  misc_RNA (1)...(19): siRNA sense strand
gaagguuauucagcaaaga

SEQ ID NO: 1897821 - RNA, 19 nt, Homo sapiens
  misc_RNA (1)...(19): siRNA sense strand
gagaagcaaggaaggauug

SEQ ID NO: 1897822 - RNA, 19 nt, Homo sapiens
  misc_RNA (1)...(19): siRNA sense strand
uuaugaagaucuugacaga

SEQ ID NO: 1897823 - RNA, 19 nt, Homo sapiens
  misc_RNA (1)...(19): siRNA sense strand
guccugggcucuaauguca

SEQ ID NO: 1897824 - RNA, 19 nt, Homo sapiens
  misc_RNA (1)...(19): siRNA sense strand
ucacgcaucagcccauaua

SEQ ID NO: 1897825 - RNA, 19 nt, Homo sapiens
  misc_RNA (1)...(19): siRNA sense strand
ugaagaaugugaucauacu

SEQ ID NO: 1897826 - RNA, 19 nt, Homo sapiens
  misc_RNA (1)...(19): siRNA sense strand
acaaauccauggcacugaa

SEQ ID NO: 1897827 - RNA, 19 nt, Homo sapiens
  misc_RNA (1)...(19): siRNA sense strand
auacagaugucuuaugucu

SEQ ID NO: 1897828 - RNA, 19 nt, Homo sapiens
  misc_RNA (1)...(19): siRNA sense strand
gagaaggagccaugaagau

SEQ ID NO: 1897829 - RNA, 19 nt, Homo sapiens
  misc_RNA (1)...(19): siRNA sense strand
agaaauccuccaaauguuu

SEQ ID NO: 1897830 - RNA, 19 nt, Homo sapiens
  misc_RNA (1)...(19): siRNA sense strand
aaagaaccaaugcaaguuu

SEQ ID NO: 1897831 - RNA, 19 nt, Homo sapiens
  misc_RNA (1)...(19): siRNA sense strand
gaaaugaagaaugugauca

SEQ ID NO: 1897832 - RNA, 19 nt, Homo sapiens
  misc_RNA (1)...(19): siRNA sense strand
gauauugucauuggaauca

SEQ ID NO: 1897833 - RNA, 19 nt, Homo sapiens
  misc_RNA (1)...(19): siRNA sense strand
gguaguuacaggugucaua

SEQ ID NO: 1897834 - RNA, 19 nt, Homo sapiens
  misc_RNA (1)...(19): siRNA sense strand
caaugugaccauccucuuu

SEQ ID NO: 1897835 - RNA, 19 nt, Homo sapiens
  misc_RNA (1)...(19): siRNA sense strand
ucucaagggucaaaugauc

SEQ ID NO: 1897836 - RNA, 19 nt, Homo sapiens
  misc_RNA (1)...(19): siRNA sense strand
uggcaaugcuauauacaga

SEQ ID NO: 1897837 - RNA, 19 nt, Homo sapiens
  misc_RNA (1)...(19): siRNA sense strand
gaagcagauagcauacuuu

SEQ ID NO: 1897838 - RNA, 19 nt, Homo sapiens
  misc_RNA (1)...(19): siRNA sense strand
ugacaucccucugcaugau

SEQ ID NO: 1897839 - RNA, 19 nt, Homo sapiens
  misc_RNA (1)...(19): siRNA sense strand
caagaaucugguuaugaua

SEQ ID NO: 1897840 - RNA, 19 nt, Homo sapiens
  misc_RNA (1)...(19): siRNA sense strand
uuuauaagguggagacugu

SEQ ID NO: 1897841 - RNA, 19 nt, Homo sapiens
  misc_RNA (1)...(19): siRNA sense strand
ugaaauagacaugaagguu

SEQ ID NO: 1897842 - RNA, 19 nt, Homo sapiens
  misc_RNA (1)...(19): siRNA sense strand
gcuaccaucuacccaggaa

SEQ ID NO: 1897843 - RNA, 19 nt, Homo sapiens
  misc_RNA (1)...(19): siRNA sense strand
uguuggauguggagaaauu

SEQ ID NO: 1897844 - RNA, 19 nt, Homo sapiens
  misc_RNA (1)...(19): siRNA sense strand
ggacagcggaugccucgau

SEQ ID NO: 1897845 - RNA, 19 nt, Homo sapiens
  misc_RNA (1)...(19): siRNA sense strand
aaugugaccauccucuuua

SEQ ID NO: 1897846 - RNA, 19 nt, Homo sapiens
  misc_RNA (1)...(19): siRNA sense strand
caucagcccauauacauuc

SEQ ID NO: 1897847 - RNA, 19 nt, Homo sapiens
  misc_RNA (1)...(19): siRNA sense strand
gaaucacgcccuggaguug

SEQ ID NO: 1897848 - RNA, 19 nt, Homo sapiens
  misc_RNA (1)...(19): siRNA sense strand
gaaacaaagcaggaugaug

SEQ ID NO: 1897849 - RNA, 19 nt, Homo sapiens
  misc_RNA (1)...(19): siRNA sense strand
gagcacagaggcccagugu

SEQ ID NO: 1897850 - RNA, 19 nt, Homo sapiens
  misc_RNA (1)...(19): siRNA sense strand
ggcuacagcucacguuaag

SEQ ID NO: 1897851 - RNA, 19 nt, Homo sapiens
  misc_RNA (1)...(19): siRNA sense strand
caaacucacccaagaacug

SEQ ID NO: 1897852 - RNA, 19 nt, Homo sapiens
  misc_RNA (1)...(19): siRNA sense strand
uggagaaauuagaauguga

SEQ ID NO: 1897853 - RNA, 19 nt, Homo sapiens
  misc_RNA (1)...(19): siRNA sense strand
cuugacagauuugaagaaa

SEQ ID NO: 1897854 - RNA, 19 nt, Homo sapiens
  misc_RNA (1)...(19): siRNA sense strand
agagaggaauacaaacuca

SEQ ID NO: 1897855 - RNA, 19 nt, Homo sapiens
  misc_RNA (1)...(19): siRNA sense strand
ggauguggagaaauuagaa

SEQ ID NO: 1897856 - RNA, 19 nt, Homo sapiens
  misc_RNA (1)...(19): siRNA sense strand
gcaaggaaggauuguugga

SEQ ID NO: 1897857 - RNA, 19 nt, Homo sapiens
  misc_RNA (1)...(19): siRNA sense strand
gcugguucguccucauauu

SEQ ID NO: 1897858 - RNA, 19 nt, Homo sapiens
  misc_RNA (1)...(19): siRNA sense strand
guggagaaauuagaaugug

SEQ ID NO: 1897859 - RNA, 19 nt, Homo sapiens
  misc_RNA (1)...(19): siRNA sense strand
caaguuugguuucuaucca

SEQ ID NO: 1897860 - RNA, 19 nt, Homo sapiens
  misc_RNA (1)...(19): siRNA sense strand
aagaaccaaugcaaguuug

SEQ ID NO: 1897861 - RNA, 19 nt, Homo sapiens
  misc_RNA (1)...(19): siRNA sense strand
gcaagcaaaguccucaauc

SEQ ID NO: 1897862 - RNA, 19 nt, Homo sapiens
  misc_RNA (1)...(19): siRNA sense strand
ggacuucaggauauuguca

SEQ ID NO: 1897863 - RNA, 19 nt, Homo sapiens
  misc_RNA (1)...(19): siRNA sense strand
gccaagaaucugguuauga

SEQ ID NO: 1897864 - RNA, 19 nt, Homo sapiens
  misc_RNA (1)...(19): siRNA sense strand
gacuguuggugacaaguau

SEQ ID NO: 1897865 - RNA, 19 nt, Homo sapiens
  misc_RNA (1)...(19): siRNA sense strand
ggagacuguuggugacaag

SEQ ID NO: 1897866 - RNA, 19 nt, Homo sapiens
  misc_RNA (1)...(19): siRNA sense strand
agaaugugaucauacucaa

SEQ ID NO: 1897867 - RNA, 19 nt, Homo sapiens
  misc_RNA (1)...(19): siRNA sense strand
gaaucugguuaugauacaa

SEQ ID NO: 1897868 - RNA, 19 nt, Homo sapiens
  misc_RNA (1)...(19): siRNA sense strand
gggaauugcagccuucugu

SEQ ID NO: 1897869 - RNA, 19 nt, Homo sapiens
  misc_RNA (1)...(19): siRNA sense strand
caccuggccuuggacauga

SEQ ID NO: 1897870 - RNA, 19 nt, Homo sapiens
  misc_RNA (1)...(19): siRNA sense strand
gauuugacacacugacuga

SEQ ID NO: 1897871 - RNA, 19 nt, Homo sapiens
  misc_RNA (1)...(19): siRNA sense strand
agaugaagaaggacaguuu

SEQ ID NO: 1897872 - RNA, 19 nt, Homo sapiens
  misc_RNA (1)...(19): siRNA sense strand
gcaucagcccauauacauu

SEQ ID NO: 1897873 - RNA, 19 nt, Homo sapiens
  misc_RNA (1)...(19): siRNA sense strand
agaacaauuuagagaggaa

SEQ ID NO: 1897874 - RNA, 19 nt, Homo sapiens
  misc_RNA (1)...(19): siRNA sense strand
ucucacaucaauacuguuu

SEQ ID NO: 1897875 - RNA, 19 nt, Homo sapiens
  misc_RNA (1)...(19): siRNA sense strand
gggauccuuucucacauca

SEQ ID NO: 1897876 - RNA, 19 nt, Homo sapiens
  misc_RNA (1)...(19): siRNA sense strand
ggugugggaagacaucaaa

SEQ ID NO: 1897877 - RNA, 19 nt, Homo sapiens
  misc_RNA (1)...(19): siRNA sense strand
ccauggcacugaaauagac

SEQ ID NO: 1897878 - RNA, 19 nt, Homo sapiens
  misc_RNA (1)...(19): siRNA sense strand
acagaaaccacaggagaaa

SEQ ID NO: 1897879 - RNA, 19 nt, Homo sapiens
  misc_RNA (1)...(19): siRNA sense strand
gauaugacaaugugaccau

SEQ ID NO: 1897880 - RNA, 19 nt, Homo sapiens
  misc_RNA (1)...(19): siRNA sense strand
aagcaaggaaggauuguug

SEQ ID NO: 1897881 - RNA, 19 nt, Homo sapiens
  misc_RNA (1)...(19): siRNA sense strand
caugggauccuuucucaca

SEQ ID NO: 1897882 - RNA, 19 nt, Homo sapiens
  misc_RNA (1)...(19): siRNA sense strand
ccaccuugcuaccaucuac

SEQ ID NO: 1897883 - RNA, 19 nt, Homo sapiens
  misc_RNA (1)...(19): siRNA sense strand
ccaugaagaucgucaaccu

SEQ ID NO: 1897884 - RNA, 19 nt, Homo sapiens
  misc_RNA (1)...(19): siRNA sense strand
ucaagggucaaaugaucua

SEQ ID NO: 1897885 - RNA, 19 nt, Homo sapiens
  misc_RNA (1)...(19): siRNA sense strand
cgaccucuacaccagauuu

SEQ ID NO: 1897886 - RNA, 19 nt, Homo sapiens
  misc_RNA (1)...(19): siRNA sense strand
ggaaacaaagcaggaugau

SEQ ID NO: 1897887 - RNA, 19 nt, Homo sapiens
  misc_RNA (1)...(19): siRNA sense strand
agaaagaacuucagaaugg

SEQ ID NO: 1897888 - RNA, 19 nt, Homo sapiens
  misc_RNA (1)...(19): siRNA sense strand
ccaaagggaugacauagug

SEQ ID NO: 1897889 - RNA, 19 nt, Homo sapiens
  misc_RNA (1)...(19): siRNA sense strand
gaugaucuaccuccaaaua

SEQ ID NO: 1897890 - RNA, 19 nt, Homo sapiens
  misc_RNA (1)...(19): siRNA sense strand
agaagaggcuggacuuuga

SEQ ID NO: 1897891 - RNA, 19 nt, Homo sapiens
  misc_RNA (1)...(19): siRNA sense strand
ggacccaacucaucucaga

SEQ ID NO: 1897892 - RNA, 19 nt, Homo sapiens
  misc_RNA (1)...(19): siRNA sense strand
gggcucaacuggagaaaga

SEQ ID NO: 1897893 - RNA, 19 nt, Homo sapiens
  misc_RNA (1)...(19): siRNA sense strand
caacuugacuggcccuaug

SEQ ID NO: 1897894 - RNA, 19 nt, Homo sapiens
  misc_RNA (1)...(19): siRNA sense strand
ggagaaagaacuucagaau

SEQ ID NO: 1897895 - RNA, 19 nt, Homo sapiens
  misc_RNA (1)...(19): siRNA sense strand
ggaguuugaucaugacguu

SEQ ID NO: 1897896 - RNA, 19 nt, Homo sapiens
  misc_RNA (1)...(19): siRNA sense strand
ucagaaugguucccuguuu

SEQ ID NO: 1897897 - RNA, 19 nt, Homo sapiens
  misc_RNA (1)...(19): siRNA sense strand
ggagaucauugccagguau

SEQ ID NO: 1897898 - RNA, 19 nt, Homo sapiens
  misc_RNA (1)...(19): siRNA sense strand
gaacugccuagaagacuuu

SEQ ID NO: 1897899 - RNA, 19 nt, Homo sapiens
  misc_RNA (1)...(19): siRNA sense strand
cggcaggccugucuucaaa

SEQ ID NO: 1897900 - RNA, 19 nt, Homo sapiens
  misc_RNA (1)...(19): siRNA sense strand
gagaaagaacuucagaaug

SEQ ID NO: 1897901 - RNA, 19 nt, Homo sapiens
  misc_RNA (1)...(19): siRNA sense strand
gcaggccugucuucaaaug

SEQ ID NO: 1897902 - RNA, 19 nt, Homo sapiens
  misc_RNA (1)...(19): siRNA sense strand
ggaacugccuagaagacuu

SEQ ID NO: 1897903 - RNA, 19 nt, Homo sapiens
  misc_RNA (1)...(19): siRNA sense strand
gaaagaacuucagaauggu

SEQ ID NO: 1897904 - RNA, 19 nt, Homo sapiens
  misc_RNA (1)...(19): siRNA sense strand
cagaaugguucccuguuug

SEQ ID NO: 1897905 - RNA, 19 nt, Homo sapiens
  misc_RNA (1)...(19): siRNA sense strand
gaacagugucaccaucuga

SEQ ID NO: 1897906 - RNA, 19 nt, Homo sapiens
  misc_RNA (1)...(19): siRNA sense strand
gaucuaccuccaaauauga

SEQ ID NO: 1897907 - RNA, 19 nt, Homo sapiens
  misc_RNA (1)...(19): siRNA sense strand
ugacuggcccuaugaauau

SEQ ID NO: 1897908 - RNA, 19 nt, Homo sapiens
  misc_RNA (1)...(19): siRNA sense strand
gcccaaagcugugcuaaac

SEQ ID NO: 1897909 - RNA, 19 nt, Homo sapiens
  misc_RNA (1)...(19): siRNA sense strand
gagagaaggaacugaaaga

SEQ ID NO: 1897910 - RNA, 19 nt, Homo sapiens
  misc_RNA (1)...(19): siRNA sense strand
gagaagaggcuggacuuug

SEQ ID NO: 1897911 - RNA, 19 nt, Homo sapiens
  misc_RNA (1)...(19): siRNA sense strand
ggagauggcccucaaacgu

SEQ ID NO: 1897912 - RNA, 19 nt, Homo sapiens
  misc_RNA (1)...(19): siRNA sense strand
ccaaagcugugcuaaacca

SEQ ID NO: 1897913 - RNA, 19 nt, Homo sapiens
  misc_RNA (1)...(19): siRNA sense strand
gggagaucauugccaggua

SEQ ID NO: 1897914 - RNA, 19 nt, Homo sapiens
  misc_RNA (1)...(19): siRNA sense strand
cuagaagacuuugaucaga

SEQ ID NO: 1897915 - RNA, 19 nt, Homo sapiens
  misc_RNA (1)...(19): siRNA sense strand
agacaaugcuuuggacaug

SEQ ID NO: 1897916 - RNA, 19 nt, Homo sapiens
  misc_RNA (1)...(19): siRNA sense strand
ugaucuaccuccaaauaug

SEQ ID NO: 1897917 - RNA, 19 nt, Homo sapiens
  misc_RNA (1)...(19): siRNA sense strand
gaggaggaguuugaucaug

SEQ ID NO: 1897918 - RNA, 19 nt, Homo sapiens
  misc_RNA (1)...(19): siRNA sense strand
uagaagacuuugaucagau

SEQ ID NO: 1897919 - RNA, 19 nt, Homo sapiens
  misc_RNA (1)...(19): siRNA sense strand
aggaggaguuugaucauga

SEQ ID NO: 1897920 - RNA, 19 nt, Homo sapiens
  misc_RNA (1)...(19): siRNA sense strand
gcaggaugaugaguuguuc

SEQ ID NO: 1897921 - RNA, 19 nt, Homo sapiens
  misc_RNA (1)...(19): siRNA sense strand
gagaaggaacugaaagaca

SEQ ID NO: 1897922 - RNA, 19 nt, Homo sapiens
  misc_RNA (1)...(19): siRNA sense strand
gaacagauuuggaaaagcu

SEQ ID NO: 1897923 - RNA, 19 nt, Homo sapiens
  misc_RNA (1)...(19): siRNA sense strand
gcgaggaggaggaguuuga

SEQ ID NO: 1897924 - RNA, 19 nt, Homo sapiens
  misc_RNA (1)...(19): siRNA sense strand
gacuuugaauggacacuga

SEQ ID NO: 1897925 - RNA, 19 nt, Homo sapiens
  misc_RNA (1)...(19): siRNA sense strand
ccagaagcaucgagagaag

SEQ ID NO: 1897926 - RNA, 19 nt, Homo sapiens
  misc_RNA (1)...(19): siRNA sense strand
uggaaaagcuggaaaagga

SEQ ID NO: 1897927 - RNA, 19 nt, Homo sapiens
  misc_RNA (1)...(19): siRNA sense strand
aagcugugcuaaaccaauu

SEQ ID NO: 1897928 - RNA, 19 nt, Homo sapiens
  misc_RNA (1)...(19): siRNA sense strand
gaagaggcuggacuuugaa

SEQ ID NO: 1897929 - RNA, 19 nt, Homo sapiens
  misc_RNA (1)...(19): siRNA sense strand
caguaucacuugcugaaca

SEQ ID NO: 1897930 - RNA, 19 nt, Homo sapiens
  misc_RNA (1)...(19): siRNA sense strand
guccaccucuucuaccaaa

SEQ ID NO: 1897931 - RNA, 19 nt, Homo sapiens
  misc_RNA (1)...(19): siRNA sense strand
caaauaugagauuccauga

SEQ ID NO: 1897932 - RNA, 19 nt, Homo sapiens
  misc_RNA (1)...(19): siRNA sense strand
gagauuacagcccggaaug

SEQ ID NO: 1897933 - RNA, 19 nt, Homo sapiens
  misc_RNA (1)...(19): siRNA sense strand
agagugcccuggcugagaa

SEQ ID NO: 1897934 - RNA, 19 nt, Homo sapiens
  misc_RNA (1)...(19): siRNA sense strand
aggaugaucuaccuccaaa

SEQ ID NO: 1897935 - RNA, 19 nt, Homo sapiens
  misc_RNA (1)...(19): siRNA sense strand
ggagaagaggcuggacuuu

SEQ ID NO: 1897936 - RNA, 19 nt, Homo sapiens
  misc_RNA (1)...(19): siRNA sense strand
gaaggaacugaaagacaga

SEQ ID NO: 1897937 - RNA, 19 nt, Homo sapiens
  misc_RNA (1)...(19): siRNA sense strand
acaaugcuuuggacauguu

SEQ ID NO: 1897938 - RNA, 19 nt, Homo sapiens
  misc_RNA (1)...(19): siRNA sense strand
gcuacaccauggaaaucaa

SEQ ID NO: 1897939 - RNA, 19 nt, Homo sapiens
  misc_RNA (1)...(19): siRNA sense strand
cuaccaaagggaugacaua

SEQ ID NO: 1897940 - RNA, 19 nt, Homo sapiens
  misc_RNA (1)...(19): siRNA sense strand
gagauuccaugaggagaag

SEQ ID NO: 1897941 - RNA, 19 nt, Homo sapiens
  misc_RNA (1)...(19): siRNA sense strand
cuaugcccaugaugcuuua

SEQ ID NO: 1897942 - RNA, 19 nt, Homo sapiens
  misc_RNA (1)...(19): siRNA sense strand
gcuaccaguuccucaaugg

SEQ ID NO: 1897943 - RNA, 19 nt, Homo sapiens
  misc_RNA (1)...(19): siRNA sense strand
gacaaugcuuuggacaugu

SEQ ID NO: 1897944 - RNA, 19 nt, Homo sapiens
  misc_RNA (1)...(19): siRNA sense strand
gacgauggccacagugaug

SEQ ID NO: 1897945 - RNA, 19 nt, Homo sapiens
  misc_RNA (1)...(19): siRNA sense strand
cgagauccaguaucacuug

SEQ ID NO: 1897946 - RNA, 19 nt, Homo sapiens
  misc_RNA (1)...(19): siRNA sense strand
ugcacgagauccaguauca

SEQ ID NO: 1897947 - RNA, 19 nt, Homo sapiens
  misc_RNA (1)...(19): siRNA sense strand
cugcagaccguaaggauga

SEQ ID NO: 1897948 - RNA, 19 nt, Homo sapiens
  misc_RNA (1)...(19): siRNA sense strand
augaugaguuguucagcua

SEQ ID NO: 1897949 - RNA, 19 nt, Homo sapiens
  misc_RNA (1)...(19): siRNA sense strand
gaccgagguuucccugucu

SEQ ID NO: 1897950 - RNA, 19 nt, Homo sapiens
  misc_RNA (1)...(19): siRNA sense strand
gccauuuccucaccaugug

SEQ ID NO: 1897951 - RNA, 19 nt, Homo sapiens
  misc_RNA (1)...(19): siRNA sense strand
uuacggcucugggagauca

SEQ ID NO: 1897952 - RNA, 19 nt, Homo sapiens
  misc_RNA (1)...(19): siRNA sense strand
uugacuggcccuaugaaua

SEQ ID NO: 1897953 - RNA, 19 nt, Homo sapiens
  misc_RNA (1)...(19): siRNA sense strand
uaaaccaauuccgaacaga

SEQ ID NO: 1897954 - RNA, 19 nt, Homo sapiens
  misc_RNA (1)...(19): siRNA sense strand
gccaggagacaaugcuuug

SEQ ID NO: 1897955 - RNA, 19 nt, Homo sapiens
  misc_RNA (1)...(19): siRNA sense strand
ggaggaguuugaucaugac

SEQ ID NO: 1897956 - RNA, 19 nt, Homo sapiens
  misc_RNA (1)...(19): siRNA sense strand
gagaacagugucaccaucu

SEQ ID NO: 1897957 - RNA, 19 nt, Homo sapiens
  misc_RNA (1)...(19): siRNA sense strand
gaaagacagacagcagauc

SEQ ID NO: 1897958 - RNA, 19 nt, Homo sapiens
  misc_RNA (1)...(19): siRNA sense strand
gaaugguucccuguuugaa

SEQ ID NO: 1897959 - RNA, 19 nt, Homo sapiens
  misc_RNA (1)...(19): siRNA sense strand
gaucguccaccucuucuac

SEQ ID NO: 1897960 - RNA, 19 nt, Homo sapiens
  misc_RNA (1)...(19): siRNA sense strand
ggagauuacagcccggaau

SEQ ID NO: 1897961 - RNA, 19 nt, Homo sapiens
  misc_RNA (1)...(19): siRNA sense strand
cuaaaccaauuccgaacag

SEQ ID NO: 1897962 - RNA, 19 nt, Homo sapiens
  misc_RNA (1)...(19): siRNA sense strand
caaagggaugacauaguga

SEQ ID NO: 1897963 - RNA, 19 nt, Homo sapiens
  misc_RNA (1)...(19): siRNA sense strand
gagacaaugcuuuggacau

SEQ ID NO: 1897964 - RNA, 19 nt, Homo sapiens
  misc_RNA (1)...(19): siRNA sense strand
acagacagcagaucuacug

SEQ ID NO: 1897965 - RNA, 19 nt, Homo sapiens
  misc_RNA (1)...(19): siRNA sense strand
gcuaaaccaauuccgaaca

SEQ ID NO: 1897966 - RNA, 19 nt, Homo sapiens
  misc_RNA (1)...(19): siRNA sense strand
ccaaggaagaugugacgau

SEQ ID NO: 1897967 - RNA, 19 nt, Homo sapiens
  misc_RNA (1)...(19): siRNA sense strand
gaggcuggacuuugaaugg

SEQ ID NO: 1897968 - RNA, 19 nt, Homo sapiens
  misc_RNA (1)...(19): siRNA sense strand
ccaauuccgaacagauuug

SEQ ID NO: 1897969 - RNA, 19 nt, Homo sapiens
  misc_RNA (1)...(19): siRNA sense strand
gaucauugccagguaugug

SEQ ID NO: 1897970 - RNA, 19 nt, Homo sapiens
  misc_RNA (1)...(19): siRNA sense strand
ggaggaggaguuugaucau

SEQ ID NO: 1897971 - RNA, 19 nt, Homo sapiens
  misc_RNA (1)...(19): siRNA sense strand
gaggagagaagcaauaccu

SEQ ID NO: 1897972 - RNA, 19 nt, Homo sapiens
  misc_RNA (1)...(19): siRNA sense strand
caaaguccuggguccgaaa

SEQ ID NO: 1897973 - RNA, 19 nt, Homo sapiens
  misc_RNA (1)...(19): siRNA sense strand
gggcgaggaggaggaguuu

SEQ ID NO: 1897974 - RNA, 19 nt, Homo sapiens
  misc_RNA (1)...(19): siRNA sense strand
aaagggaugacauagugaa

SEQ ID NO: 1897975 - RNA, 19 nt, Homo sapiens
  misc_RNA (1)...(19): siRNA sense strand
gcccauggucauccagauu

SEQ ID NO: 1897976 - RNA, 19 nt, Homo sapiens
  misc_RNA (1)...(19): siRNA sense strand
agaaugguucccuguuuga

SEQ ID NO: 1897977 - RNA, 19 nt, Homo sapiens
  misc_RNA (1)...(19): siRNA sense strand
ugagauuccaugaggagaa

SEQ ID NO: 1897978 - RNA, 19 nt, Homo sapiens
  misc_RNA (1)...(19): siRNA sense strand
caccuggaaggaaggguua

SEQ ID NO: 1897979 - RNA, 19 nt, Homo sapiens
  misc_RNA (1)...(19): siRNA sense strand
ucuaugcccaugaugcuuu

SEQ ID NO: 1897980 - RNA, 19 nt, Homo sapiens
  misc_RNA (1)...(19): siRNA sense strand
acucccaggugcucucuau

SEQ ID NO: 1897981 - RNA, 19 nt, Homo sapiens
  misc_RNA (1)...(19): siRNA sense strand
ccauggucauccagauuca

SEQ ID NO: 1897982 - RNA, 19 nt, Homo sapiens
  misc_RNA (1)...(19): siRNA sense strand
uacaaccgcgugcagcuuu

SEQ ID NO: 1897983 - RNA, 19 nt, Homo sapiens
  misc_RNA (1)...(19): siRNA sense strand
ggcaggaugaugaguuguu

SEQ ID NO: 1897984 - RNA, 19 nt, Homo sapiens
  misc_RNA (1)...(19): siRNA sense strand
gaccuacugcucccucugu

SEQ ID NO: 1897985 - RNA, 19 nt, Homo sapiens
  misc_RNA (1)...(19): siRNA sense strand
aaccaauuccgaacagauu

SEQ ID NO: 1897986 - RNA, 19 nt, Homo sapiens
  misc_RNA (1)...(19): siRNA sense strand
gagguuucccugucuccuu

SEQ ID NO: 1897987 - RNA, 19 nt, Homo sapiens
  misc_RNA (1)...(19): siRNA sense strand
gaaauggacuucaguucuu

SEQ ID NO: 1897988 - RNA, 19 nt, Homo sapiens
  misc_RNA (1)...(19): siRNA sense strand
gaauaaaccagaugccuua

SEQ ID NO: 1897989 - RNA, 19 nt, Homo sapiens
  misc_RNA (1)...(19): siRNA sense strand
gcagaaagggccaauguaa

SEQ ID NO: 1897990 - RNA, 19 nt, Homo sapiens
  misc_RNA (1)...(19): siRNA sense strand
gggagcagcuguuagauug

SEQ ID NO: 1897991 - RNA, 19 nt, Homo sapiens
  misc_RNA (1)...(19): siRNA sense strand
guacagaccugcugaaugc

SEQ ID NO: 1897992 - RNA, 19 nt, Homo sapiens
  misc_RNA (1)...(19): siRNA sense strand
gaaagagcuuguucagaga

SEQ ID NO: 1897993 - RNA, 19 nt, Homo sapiens
  misc_RNA (1)...(19): siRNA sense strand
caucucaguuguuacuuua

SEQ ID NO: 1897994 - RNA, 19 nt, Homo sapiens
  misc_RNA (1)...(19): siRNA sense strand
gaauacagccauuggauga

SEQ ID NO: 1897995 - RNA, 19 nt, Homo sapiens
  misc_RNA (1)...(19): siRNA sense strand
ccaaaugucugauaugaag

SEQ ID NO: 1897996 - RNA, 19 nt, Homo sapiens
  misc_RNA (1)...(19): siRNA sense strand
ugauacaucucaguuguua

SEQ ID NO: 1897997 - RNA, 19 nt, Homo sapiens
  misc_RNA (1)...(19): siRNA sense strand
uaacauugcucacaugaag

SEQ ID NO: 1897998 - RNA, 19 nt, Homo sapiens
  misc_RNA (1)...(19): siRNA sense strand
ggaugaauaugaagacaau

SEQ ID NO: 1897999 - RNA, 19 nt, Homo sapiens
  misc_RNA (1)...(19): siRNA sense strand
gaagaagugggaucaguuu

SEQ ID NO: 1898000 - RNA, 19 nt, Homo sapiens
  misc_RNA (1)...(19): siRNA sense strand
cuacaagagucaagauuug

SEQ ID NO: 1898001 - RNA, 19 nt, Homo sapiens
  misc_RNA (1)...(19): siRNA sense strand
guuaagagauggucagaca

SEQ ID NO: 1898002 - RNA, 19 nt, Homo sapiens
  misc_RNA (1)...(19): siRNA sense strand
aaugaugcauccacucuua

SEQ ID NO: 1898003 - RNA, 19 nt, Homo sapiens
  misc_RNA (1)...(19): siRNA sense strand
gaaauccugugggaauuau

SEQ ID NO: 1898004 - RNA, 19 nt, Homo sapiens
  misc_RNA (1)...(19): siRNA sense strand
cauccacucuuaaauuuga

SEQ ID NO: 1898005 - RNA, 19 nt, Homo sapiens
  misc_RNA (1)...(19): siRNA sense strand
ugaagacaauccugaaaga

SEQ ID NO: 1898006 - RNA, 19 nt, Homo sapiens
  misc_RNA (1)...(19): siRNA sense strand
ggaaauggaggaguuugua

SEQ ID NO: 1898007 - RNA, 19 nt, Homo sapiens
  misc_RNA (1)...(19): siRNA sense strand
agaaagggccaauguaauu

SEQ ID NO: 1898008 - RNA, 19 nt, Homo sapiens
  misc_RNA (1)...(19): siRNA sense strand
caagaaauccugugggaau

SEQ ID NO: 1898009 - RNA, 19 nt, Homo sapiens
  misc_RNA (1)...(19): siRNA sense strand
gccauuggaugaauaugaa

SEQ ID NO: 1898010 - RNA, 19 nt, Homo sapiens
  misc_RNA (1)...(19): siRNA sense strand
cuaaggaaauggaggaguu

SEQ ID NO: 1898011 - RNA, 19 nt, Homo sapiens
  misc_RNA (1)...(19): siRNA sense strand
gggaaaagcugacauaugg

SEQ ID NO: 1898012 - RNA, 19 nt, Homo sapiens
  misc_RNA (1)...(19): siRNA sense strand
gaagacccacuaccuuauu

SEQ ID NO: 1898013 - RNA, 19 nt, Homo sapiens
  misc_RNA (1)...(19): siRNA sense strand
caagggagcagcuguuaga

SEQ ID NO: 1898014 - RNA, 19 nt, Homo sapiens
  misc_RNA (1)...(19): siRNA sense strand
ucaauuuccucauccauuc

SEQ ID NO: 1898015 - RNA, 19 nt, Homo sapiens
  misc_RNA (1)...(19): siRNA sense strand
caacaugaucaaccaguaa

SEQ ID NO: 1898016 - RNA, 19 nt, Homo sapiens
  misc_RNA (1)...(19): siRNA sense strand
guacuggcaucuucagcuu

SEQ ID NO: 1898017 - RNA, 19 nt, Homo sapiens
  misc_RNA (1)...(19): siRNA sense strand
cgagcagucuucuggauug

SEQ ID NO: 1898018 - RNA, 19 nt, Homo sapiens
  misc_RNA (1)...(19): siRNA sense strand
ucaacaugaucaaccagua

SEQ ID NO: 1898019 - RNA, 19 nt, Homo sapiens
  misc_RNA (1)...(19): siRNA sense strand
uaagagauggucagacauu

SEQ ID NO: 1898020 - RNA, 19 nt, Homo sapiens
  misc_RNA (1)...(19): siRNA sense strand
gcagucuucuggauugaau

SEQ ID NO: 1898021 - RNA, 19 nt, Homo sapiens
  misc_RNA (1)...(19): siRNA sense strand
ugcauccacucuuaaauuu

SEQ ID NO: 1898022 - RNA, 19 nt, Homo sapiens
  misc_RNA (1)...(19): siRNA sense strand
uggcaacugugauauuuau

SEQ ID NO: 1898023 - RNA, 19 nt, Homo sapiens
  misc_RNA (1)...(19): siRNA sense strand
ggaagacccacuaccuuau

SEQ ID NO: 1898024 - RNA, 19 nt, Homo sapiens
  misc_RNA (1)...(19): siRNA sense strand
uaaaccagaugccuuaggu

SEQ ID NO: 1898025 - RNA, 19 nt, Homo sapiens
  misc_RNA (1)...(19): siRNA sense strand
gagcagcuguuagauugga

SEQ ID NO: 1898026 - RNA, 19 nt, Homo sapiens
  misc_RNA (1)...(19): siRNA sense strand
ggugggcauuccauuguuu

SEQ ID NO: 1898027 - RNA, 19 nt, Homo sapiens
  misc_RNA (1)...(19): siRNA sense strand
ccagaugccuuaggucuca

SEQ ID NO: 1898028 - RNA, 19 nt, Homo sapiens
  misc_RNA (1)...(19): siRNA sense strand
ugacuguacuggcaucuuc

SEQ ID NO: 1898029 - RNA, 19 nt, Homo sapiens
  misc_RNA (1)...(19): siRNA sense strand
ugucugauaugaagaagug

SEQ ID NO: 1898030 - RNA, 19 nt, Homo sapiens
  misc_RNA (1)...(19): siRNA sense strand
gccaaacaccuucgaguug

SEQ ID NO: 1898031 - RNA, 19 nt, Homo sapiens
  misc_RNA (1)...(19): siRNA sense strand
gauaacauugcucacauga

SEQ ID NO: 1898032 - RNA, 19 nt, Homo sapiens
  misc_RNA (1)...(19): siRNA sense strand
ucuggaaguuugcuagaaa

SEQ ID NO: 1898033 - RNA, 19 nt, Homo sapiens
  misc_RNA (1)...(19): siRNA sense strand
gcuguuagauuggacuuca

SEQ ID NO: 1898034 - RNA, 19 nt, Homo sapiens
  misc_RNA (1)...(19): siRNA sense strand
uguggcaacugugauauuu

SEQ ID NO: 1898035 - RNA, 19 nt, Homo sapiens
  misc_RNA (1)...(19): siRNA sense strand
cuacuuaacauacgguuug

SEQ ID NO: 1898036 - RNA, 19 nt, Homo sapiens
  misc_RNA (1)...(19): siRNA sense strand
uaacauacgguuuguguac

SEQ ID NO: 1898037 - RNA, 19 nt, Homo sapiens
  misc_RNA (1)...(19): siRNA sense strand
cuguaaagauguaguuuca

SEQ ID NO: 1898038 - RNA, 19 nt, Homo sapiens
  misc_RNA (1)...(19): siRNA sense strand
cccaugaccucaccugguu

SEQ ID NO: 1898039 - RNA, 19 nt, Homo sapiens
  misc_RNA (1)...(19): siRNA sense strand
ccucauccauucuuaccaa

SEQ ID NO: 1898040 - RNA, 19 nt, Homo sapiens
  misc_RNA (1)...(19): siRNA sense strand
cccacuaccuuauuugaga

SEQ ID NO: 1898041 - RNA, 19 nt, Homo sapiens
  misc_RNA (1)...(19): siRNA sense strand
aggaagacccacuaccuua

SEQ ID NO: 1898042 - RNA, 19 nt, Homo sapiens
  misc_RNA (1)...(19): siRNA sense strand
auacucggcuguacaagug

SEQ ID NO: 1898043 - RNA, 19 nt, Homo sapiens
  misc_RNA (1)...(19): siRNA sense strand
gaaaagggaagaagggaaa

SEQ ID NO: 1898044 - RNA, 19 nt, Homo sapiens
  misc_RNA (1)...(19): siRNA sense strand
ugcaacagguuaagagaug

SEQ ID NO: 1898045 - RNA, 19 nt, Homo sapiens
  misc_RNA (1)...(19): siRNA sense strand
gagcagucuucuggauuga

SEQ ID NO: 1898046 - RNA, 19 nt, Homo sapiens
  misc_RNA (1)...(19): siRNA sense strand
uaacaugacagcagaaagg

SEQ ID NO: 1898047 - RNA, 19 nt, Homo sapiens
  misc_RNA (1)...(19): siRNA sense strand
ucagugauaaguaacauga

SEQ ID NO: 1898048 - RNA, 19 nt, Homo sapiens
  misc_RNA (1)...(19): siRNA sense strand
guaccacucuuuggaugug

SEQ ID NO: 1898049 - RNA, 19 nt, Homo sapiens
  misc_RNA (1)...(19): siRNA sense strand
ggagauuugacgggaauaa

SEQ ID NO: 1898050 - RNA, 19 nt, Homo sapiens
  misc_RNA (1)...(19): siRNA sense strand
aagacccacuaccuuauuu

SEQ ID NO: 1898051 - RNA, 19 nt, Homo sapiens
  misc_RNA (1)...(19): siRNA sense strand
aagaaauccugugggaauu

SEQ ID NO: 1898052 - RNA, 19 nt, Homo sapiens
  misc_RNA (1)...(19): siRNA sense strand
acuccuggcuacacaauug

SEQ ID NO: 1898053 - RNA, 19 nt, Homo sapiens
  misc_RNA (1)...(19): siRNA sense strand
acaucucaguuguuacuuu

SEQ ID NO: 1898054 - RNA, 19 nt, Homo sapiens
  misc_RNA (1)...(19): siRNA sense strand
gccaagggagcagcuguua

SEQ ID NO: 1898055 - RNA, 19 nt, Homo sapiens
  misc_RNA (1)...(19): siRNA sense strand
gagauuugacgggaauaaa

SEQ ID NO: 1898056 - RNA, 19 nt, Homo sapiens
  misc_RNA (1)...(19): siRNA sense strand
cagcagaaagggccaaugu

SEQ ID NO: 1898057 - RNA, 19 nt, Homo sapiens
  misc_RNA (1)...(19): siRNA sense strand
uuccaaaugucugauauga

SEQ ID NO: 1898058 - RNA, 19 nt, Homo sapiens
  misc_RNA (1)...(19): siRNA sense strand
agaaauccugugggaauua

SEQ ID NO: 1898059 - RNA, 19 nt, Homo sapiens
  misc_RNA (1)...(19): siRNA sense strand
gcagaauacagccauugga

SEQ ID NO: 1898060 - RNA, 19 nt, Homo sapiens
  misc_RNA (1)...(19): siRNA sense strand
agauuggacuucaacacaa

SEQ ID NO: 1898061 - RNA, 19 nt, Homo sapiens
  misc_RNA (1)...(19): siRNA sense strand
ugauaacauugcucacaug

SEQ ID NO: 1898062 - RNA, 19 nt, Homo sapiens
  misc_RNA (1)...(19): siRNA sense strand
ucaauacucggcuguacaa

SEQ ID NO: 1898063 - RNA, 19 nt, Homo sapiens
  misc_RNA (1)...(19): siRNA sense strand
cagaaagggccaauguaau

SEQ ID NO: 1898064 - RNA, 19 nt, Homo sapiens
  misc_RNA (1)...(19): siRNA sense strand
ggacugauuuucccuccuu

SEQ ID NO: 1898065 - RNA, 19 nt, Homo sapiens
  misc_RNA (1)...(19): siRNA sense strand
gaaauggaggaguuuguac

SEQ ID NO: 1898066 - RNA, 19 nt, Homo sapiens
  misc_RNA (1)...(19): siRNA sense strand
ugaagaagugggaucaguu

SEQ ID NO: 1898067 - RNA, 19 nt, Homo sapiens
  misc_RNA (1)...(19): siRNA sense strand
ugaaguuuauccuacaucu

SEQ ID NO: 1898068 - RNA, 19 nt, Homo sapiens
  misc_RNA (1)...(19): siRNA sense strand
aagguucuguggagauuug

SEQ ID NO: 1898069 - RNA, 19 nt, Homo sapiens
  misc_RNA (1)...(19): siRNA sense strand
gggaucaguuuuacaguga

SEQ ID NO: 1898070 - RNA, 19 nt, Homo sapiens
  misc_RNA (1)...(19): siRNA sense strand
gguuccaaaugucugauau

SEQ ID NO: 1898071 - RNA, 19 nt, Homo sapiens
  misc_RNA (1)...(19): siRNA sense strand
guggagauuugacgggaau

SEQ ID NO: 1898072 - RNA, 19 nt, Homo sapiens
  misc_RNA (1)...(19): siRNA sense strand
caagaauucaacaugauca

SEQ ID NO: 1898073 - RNA, 19 nt, Homo sapiens
  misc_RNA (1)...(19): siRNA sense strand
cugaagacaguaauuaaug

SEQ ID NO: 1898074 - RNA, 19 nt, Homo sapiens
  misc_RNA (1)...(19): siRNA sense strand
uacagccauuggaugaaua

SEQ ID NO: 1898075 - RNA, 19 nt, Homo sapiens
  misc_RNA (1)...(19): siRNA sense strand
gaaguuuauccuacaucuu

SEQ ID NO: 1898076 - RNA, 19 nt, Homo sapiens
  misc_RNA (1)...(19): siRNA sense strand
ucaacacaaugucgaguac

SEQ ID NO: 1898077 - RNA, 19 nt, Homo sapiens
  misc_RNA (1)...(19): siRNA sense strand
ugacgggaauaaaccagau

SEQ ID NO: 1898078 - RNA, 19 nt, Homo sapiens
  misc_RNA (1)...(19): siRNA sense strand
gacccacuaccuuauuuga

SEQ ID NO: 1898079 - RNA, 19 nt, Homo sapiens
  misc_RNA (1)...(19): siRNA sense strand
agaauaucaucaugcaaca

SEQ ID NO: 1898080 - RNA, 19 nt, Homo sapiens
  misc_RNA (1)...(19): siRNA sense strand
gcaucuaugaggcaaucua

SEQ ID NO: 1898081 - RNA, 19 nt, Homo sapiens
  misc_RNA (1)...(19): siRNA sense strand
uguguacagucuccgcuuu

SEQ ID NO: 1898082 - RNA, 19 nt, Homo sapiens
  misc_RNA (1)...(19): siRNA sense strand
gaagacaauccugaaagag

SEQ ID NO: 1898083 - RNA, 19 nt, Homo sapiens
  misc_RNA (1)...(19): siRNA sense strand
caaacaccuucgaguugca

SEQ ID NO: 1898084 - RNA, 19 nt, Homo sapiens
  misc_RNA (1)...(19): siRNA sense strand
cagaauacagccauuggau

SEQ ID NO: 1898085 - RNA, 19 nt, Homo sapiens
  misc_RNA (1)...(19): siRNA sense strand
uacuuuagcucugggaguu

SEQ ID NO: 1898086 - RNA, 19 nt, Homo sapiens
  misc_RNA (1)...(19): siRNA sense strand
guguacagucuccgcuuua

SEQ ID NO: 1898087 - RNA, 19 nt, Homo sapiens
  misc_RNA (1)...(19): siRNA sense strand
gaaauggacuucaguaauu

SEQ ID NO: 1898088 - RNA, 19 nt, Homo sapiens
  misc_RNA (1)...(19): siRNA sense strand
gaauaaaccagauaccuua

SEQ ID NO: 1898089 - RNA, 19 nt, Homo sapiens
  misc_RNA (1)...(19): siRNA sense strand
caacugagcuuuugcuuua

SEQ ID NO: 1898090 - RNA, 19 nt, Homo sapiens
  misc_RNA (1)...(19): siRNA sense strand
guacaagagucaagauuug

SEQ ID NO: 1898091 - RNA, 19 nt, Homo sapiens
  misc_RNA (1)...(19): siRNA sense strand
gaagaaagggccaacguaa

SEQ ID NO: 1898092 - RNA, 19 nt, Homo sapiens
  misc_RNA (1)...(19): siRNA sense strand
ggaaauggaagacuuugua

SEQ ID NO: 1898093 - RNA, 19 nt, Homo sapiens
  misc_RNA (1)...(19): siRNA sense strand
gaauacagccauuggauga

SEQ ID NO: 1898094 - RNA, 19 nt, Homo sapiens
  misc_RNA (1)...(19): siRNA sense strand
uaacauugcucacaugaag

SEQ ID NO: 1898095 - RNA, 19 nt, Homo sapiens
  misc_RNA (1)...(19): siRNA sense strand
cuacguaccuguuguuaug

SEQ ID NO: 1898096 - RNA, 19 nt, Homo sapiens
  misc_RNA (1)...(19): siRNA sense strand
gaagaagugggaucaguuu

SEQ ID NO: 1898097 - RNA, 19 nt, Homo sapiens
  misc_RNA (1)...(19): siRNA sense strand
gccauuggaugaauauaaa

SEQ ID NO: 1898098 - RNA, 19 nt, Homo sapiens
  misc_RNA (1)...(19): siRNA sense strand
caacucauccgcucuuaaa

SEQ ID NO: 1898099 - RNA, 19 nt, Homo sapiens
  misc_RNA (1)...(19): siRNA sense strand
cgaaauauuugacaugaag

SEQ ID NO: 1898100 - RNA, 19 nt, Homo sapiens
  misc_RNA (1)...(19): siRNA sense strand
uaacauacccuuuguguac

SEQ ID NO: 1898101 - RNA, 19 nt, Homo sapiens
  misc_RNA (1)...(19): siRNA sense strand
ggaauaaaccagauaccuu

SEQ ID NO: 1898102 - RNA, 19 nt, Homo sapiens
  misc_RNA (1)...(19): siRNA sense strand
gcauugaagagaguaauua

SEQ ID NO: 1898103 - RNA, 19 nt, Homo sapiens
  misc_RNA (1)...(19): siRNA sense strand
gagauuugaugggaauaaa

SEQ ID NO: 1898104 - RNA, 19 nt, Homo sapiens
  misc_RNA (1)...(19): siRNA sense strand
guacagacuugcugaaugc

SEQ ID NO: 1898105 - RNA, 19 nt, Homo sapiens
  misc_RNA (1)...(19): siRNA sense strand
ucaguaacaugacagaaga

SEQ ID NO: 1898106 - RNA, 19 nt, Homo sapiens
  misc_RNA (1)...(19): siRNA sense strand
caggaaaucaugucaauau

SEQ ID NO: 1898107 - RNA, 19 nt, Homo sapiens
  misc_RNA (1)...(19): siRNA sense strand
agaaagggccaacguaauu

SEQ ID NO: 1898108 - RNA, 19 nt, Homo sapiens
  misc_RNA (1)...(19): siRNA sense strand
gcugcuggcugagcuauuu

SEQ ID NO: 1898109 - RNA, 19 nt, Homo sapiens
  misc_RNA (1)...(19): siRNA sense strand
cauaguggaggauuuauuu

SEQ ID NO: 1898110 - RNA, 19 nt, Homo sapiens
  misc_RNA (1)...(19): siRNA sense strand
cauccacucuuaccaaaug

SEQ ID NO: 1898111 - RNA, 19 nt, Homo sapiens
  misc_RNA (1)...(19): siRNA sense strand
ucuaugugcuuuacuuuga

SEQ ID NO: 1898112 - RNA, 19 nt, Homo sapiens
  misc_RNA (1)...(19): siRNA sense strand
cuaaggaaauggaagacuu

SEQ ID NO: 1898113 - RNA, 19 nt, Homo sapiens
  misc_RNA (1)...(19): siRNA sense strand
guacuggcaucuucagcuu

SEQ ID NO: 1898114 - RNA, 19 nt, Homo sapiens
  misc_RNA (1)...(19): siRNA sense strand
cgagcagucuucuggauug

SEQ ID NO: 1898115 - RNA, 19 nt, Homo sapiens
  misc_RNA (1)...(19): siRNA sense strand
gaccagagcuuuuauaacu

SEQ ID NO: 1898116 - RNA, 19 nt, Homo sapiens
  misc_RNA (1)...(19): siRNA sense strand
gaaagggccaacguaauug

SEQ ID NO: 1898117 - RNA, 19 nt, Homo sapiens
  misc_RNA (1)...(19): siRNA sense strand
gcagucuucuggauugaau

SEQ ID NO: 1898118 - RNA, 19 nt, Homo sapiens
  misc_RNA (1)...(19): siRNA sense strand
ggaagacccacuacguuau

SEQ ID NO: 1898119 - RNA, 19 nt, Homo sapiens
  misc_RNA (1)...(19): siRNA sense strand
uggcaacugugauauuuau

SEQ ID NO: 1898120 - RNA, 19 nt, Homo sapiens
  misc_RNA (1)...(19): siRNA sense strand
gcugagcuauuuaacauac

SEQ ID NO: 1898121 - RNA, 19 nt, Homo sapiens
  misc_RNA (1)...(19): siRNA sense strand
gcugacguauggcuuauuc

SEQ ID NO: 1898122 - RNA, 19 nt, Homo sapiens
  misc_RNA (1)...(19): siRNA sense strand
ugacuguacuggcaucuuc

SEQ ID NO: 1898123 - RNA, 19 nt, Homo sapiens
  misc_RNA (1)...(19): siRNA sense strand
uaucccacaucuuuaacua

SEQ ID NO: 1898124 - RNA, 19 nt, Homo sapiens
  misc_RNA (1)...(19): siRNA sense strand
gauaacauugcucacauga

SEQ ID NO: 1898125 - RNA, 19 nt, Homo sapiens
  misc_RNA (1)...(19): siRNA sense strand
cagacuugcugaaugcauu

SEQ ID NO: 1898126 - RNA, 19 nt, Homo sapiens
  misc_RNA (1)...(19): siRNA sense strand
uggcugagcuauuuaacau

SEQ ID NO: 1898127 - RNA, 19 nt, Homo sapiens
  misc_RNA (1)...(19): siRNA sense strand
ucuggaaguuugcuagaaa

SEQ ID NO: 1898128 - RNA, 19 nt, Homo sapiens
  misc_RNA (1)...(19): siRNA sense strand
ucaauggucaguaacauga

SEQ ID NO: 1898129 - RNA, 19 nt, Homo sapiens
  misc_RNA (1)...(19): siRNA sense strand
uaaggaaauggaagacuuu

SEQ ID NO: 1898130 - RNA, 19 nt, Homo sapiens
  misc_RNA (1)...(19): siRNA sense strand
uguggcaacugugauauuu

SEQ ID NO: 1898131 - RNA, 19 nt, Homo sapiens
  misc_RNA (1)...(19): siRNA sense strand
caacaugaucaaccaguga

SEQ ID NO: 1898132 - RNA, 19 nt, Homo sapiens
  misc_RNA (1)...(19): siRNA sense strand
ugcaacagauuaagagaug

SEQ ID NO: 1898133 - RNA, 19 nt, Homo sapiens
  misc_RNA (1)...(19): siRNA sense strand
uaacaugacagaagaaagg

SEQ ID NO: 1898134 - RNA, 19 nt, Homo sapiens
  misc_RNA (1)...(19): siRNA sense strand
ggggaaagcugacguaugg

SEQ ID NO: 1898135 - RNA, 19 nt, Homo sapiens
  misc_RNA (1)...(19): siRNA sense strand
gaagugggaucaguuuuau

SEQ ID NO: 1898136 - RNA, 19 nt, Homo sapiens
  misc_RNA (1)...(19): siRNA sense strand
gaucuaugugcuuuacuuu

SEQ ID NO: 1898137 - RNA, 19 nt, Homo sapiens
  misc_RNA (1)...(19): siRNA sense strand
uacaggaaaucaugucaau

SEQ ID NO: 1898138 - RNA, 19 nt, Homo sapiens
  misc_RNA (1)...(19): siRNA sense strand
cuguaaagauguaguuuca

SEQ ID NO: 1898139 - RNA, 19 nt, Homo sapiens
  misc_RNA (1)...(19): siRNA sense strand
gcagcagaauacagccauu

SEQ ID NO: 1898140 - RNA, 19 nt, Homo sapiens
  misc_RNA (1)...(19): siRNA sense strand
gaguggacuucaacacaau

SEQ ID NO: 1898141 - RNA, 19 nt, Homo sapiens
  misc_RNA (1)...(19): siRNA sense strand
agaguggacuucaacacaa

SEQ ID NO: 1898142 - RNA, 19 nt, Homo sapiens
  misc_RNA (1)...(19): siRNA sense strand
ggagauuugaugggaauaa

SEQ ID NO: 1898143 - RNA, 19 nt, Homo sapiens
  misc_RNA (1)...(19): siRNA sense strand
aggaagacccacuacguua

SEQ ID NO: 1898144 - RNA, 19 nt, Homo sapiens
  misc_RNA (1)...(19): siRNA sense strand
ugaaauuuaucccacaucu

SEQ ID NO: 1898145 - RNA, 19 nt, Homo sapiens
  misc_RNA (1)...(19): siRNA sense strand
acguauggcuuauucgaaa

SEQ ID NO: 1898146 - RNA, 19 nt, Homo sapiens
  misc_RNA (1)...(19): siRNA sense strand
gaagacccacuacguuauc

SEQ ID NO: 1898147 - RNA, 19 nt, Homo sapiens
  misc_RNA (1)...(19): siRNA sense strand
gcuaauacaacugagcuuu

SEQ ID NO: 1898148 - RNA, 19 nt, Homo sapiens
  misc_RNA (1)...(19): siRNA sense strand
caacaacucauccgcucuu

SEQ ID NO: 1898149 - RNA, 19 nt, Homo sapiens
  misc_RNA (1)...(19): siRNA sense strand
gagcagucuucuggauuga

SEQ ID NO: 1898150 - RNA, 19 nt, Homo sapiens
  misc_RNA (1)...(19): siRNA sense strand
gcauaguggaggauuuauu

SEQ ID NO: 1898151 - RNA, 19 nt, Homo sapiens
  misc_RNA (1)...(19): siRNA sense strand
gaaauuuaucccacaucuu

SEQ ID NO: 1898152 - RNA, 19 nt, Homo sapiens
  misc_RNA (1)...(19): siRNA sense strand
guaccacucuuuggaugug

SEQ ID NO: 1898153 - RNA, 19 nt, Homo sapiens
  misc_RNA (1)...(19): siRNA sense strand
uauuugacaugaagaagug

SEQ ID NO: 1898154 - RNA, 19 nt, Homo sapiens
  misc_RNA (1)...(19): siRNA sense strand
aaagcauaguggaggauuu

SEQ ID NO: 1898155 - RNA, 19 nt, Homo sapiens
  misc_RNA (1)...(19): siRNA sense strand
guuggagaauuucaucaug

SEQ ID NO: 1898156 - RNA, 19 nt, Homo sapiens
  misc_RNA (1)...(19): siRNA sense strand
aagcauaguggaggauuua

SEQ ID NO: 1898157 - RNA, 19 nt, Homo sapiens
  misc_RNA (1)...(19): siRNA sense strand
gauccuucauauaaagaga

SEQ ID NO: 1898158 - RNA, 19 nt, Homo sapiens
  misc_RNA (1)...(19): siRNA sense strand
gaugggaauaaaccagaua

SEQ ID NO: 1898159 - RNA, 19 nt, Homo sapiens
  misc_RNA (1)...(19): siRNA sense strand
ugaucuaugugcuuuacuu

SEQ ID NO: 1898160 - RNA, 19 nt, Homo sapiens
  misc_RNA (1)...(19): siRNA sense strand
ggaugagcuuauucagaga

SEQ ID NO: 1898161 - RNA, 19 nt, Homo sapiens
  misc_RNA (1)...(19): siRNA sense strand
gaaauggaagacuuuguac

SEQ ID NO: 1898162 - RNA, 19 nt, Homo sapiens
  misc_RNA (1)...(19): siRNA sense strand
uagugaaguucuaggaaga

SEQ ID NO: 1898163 - RNA, 19 nt, Homo sapiens
  misc_RNA (1)...(19): siRNA sense strand
gaaaguucuguaaagaugu

SEQ ID NO: 1898164 - RNA, 19 nt, Homo sapiens
  misc_RNA (1)...(19): siRNA sense strand
agaagaaagggccaacgua

SEQ ID NO: 1898165 - RNA, 19 nt, Homo sapiens
  misc_RNA (1)...(19): siRNA sense strand
gggaucaguuuuauaguga

SEQ ID NO: 1898166 - RNA, 19 nt, Homo sapiens
  misc_RNA (1)...(19): siRNA sense strand
gcagaauacagccauugga

SEQ ID NO: 1898167 - RNA, 19 nt, Homo sapiens
  misc_RNA (1)...(19): siRNA sense strand
gaaaagcaaagaagggaaa

SEQ ID NO: 1898168 - RNA, 19 nt, Homo sapiens
  misc_RNA (1)...(19): siRNA sense strand
ugaaugcauugaagagagu

SEQ ID NO: 1898169 - RNA, 19 nt, Homo sapiens
  misc_RNA (1)...(19): siRNA sense strand
ugauaacauugcucacaug

SEQ ID NO: 1898170 - RNA, 19 nt, Homo sapiens
  misc_RNA (1)...(19): siRNA sense strand
guggagauuugaugggaau

SEQ ID NO: 1898171 - RNA, 19 nt, Homo sapiens
  misc_RNA (1)...(19): siRNA sense strand
ggucaauggucaguaacau

SEQ ID NO: 1898172 - RNA, 19 nt, Homo sapiens
  misc_RNA (1)...(19): siRNA sense strand
ugaagaagugggaucaguu

SEQ ID NO: 1898173 - RNA, 19 nt, Homo sapiens
  misc_RNA (1)...(19): siRNA sense strand
uacguuaucugagacaaug

SEQ ID NO: 1898174 - RNA, 19 nt, Homo sapiens
  misc_RNA (1)...(19): siRNA sense strand
aagguucuguggagauuug

SEQ ID NO: 1898175 - RNA, 19 nt, Homo sapiens
  misc_RNA (1)...(19): siRNA sense strand
guacaggaaaucaugucaa

SEQ ID NO: 1898176 - RNA, 19 nt, Homo sapiens
  misc_RNA (1)...(19): siRNA sense strand
uacagccauuggaugaaua

SEQ ID NO: 1898177 - RNA, 19 nt, Homo sapiens
  misc_RNA (1)...(19): siRNA sense strand
caagaauucaacaugauca

SEQ ID NO: 1898178 - RNA, 19 nt, Homo sapiens
  misc_RNA (1)...(19): siRNA sense strand
agaauuucaucaugcaaca

SEQ ID NO: 1898179 - RNA, 19 nt, Homo sapiens
  misc_RNA (1)...(19): siRNA sense strand
ucaacacaaugucgaguac

SEQ ID NO: 1898180 - RNA, 19 nt, Homo sapiens
  misc_RNA (1)...(19): siRNA sense strand
acaaguacaggaaaucaug

SEQ ID NO: 1898181 - RNA, 19 nt, Homo sapiens
  misc_RNA (1)...(19): siRNA sense strand
uaggaagacccacuacguu

SEQ ID NO: 1898182 - RNA, 19 nt, Homo sapiens
  misc_RNA (1)...(19): siRNA sense strand
ccacaaaggagcuaaacac

SEQ ID NO: 1898183 - RNA, 19 nt, Homo sapiens
  misc_RNA (1)...(19): siRNA sense strand
ccaaaccccugccuaagga

SEQ ID NO: 1898184 - RNA, 19 nt, Homo sapiens
  misc_RNA (1)...(19): siRNA sense strand
cauccgcucuuaaaauuga

SEQ ID NO: 1898185 - RNA, 19 nt, Homo sapiens
  misc_RNA (1)...(19): siRNA sense strand
cagaauacagccauuggau

SEQ ID NO: 1898186 - RNA, 19 nt, Homo sapiens
  misc_RNA (1)...(19): siRNA sense strand
cccacgaccucaccugguu

SEQ ID NO: 1898187 - RNA, 19 nt, Homo sapiens
  misc_RNA (1)...(19): siRNA sense strand
gaagaaugguggaggauuu

SEQ ID NO: 1898188 - RNA, 19 nt, Homo sapiens
  misc_RNA (1)...(19): siRNA sense strand
uaacauugcucacaugaaa

SEQ ID NO: 1898189 - RNA, 19 nt, Homo sapiens
  misc_RNA (1)...(19): siRNA sense strand
gcuacuggcugaacuauuu

SEQ ID NO: 1898190 - RNA, 19 nt, Homo sapiens
  misc_RNA (1)...(19): siRNA sense strand
gcaagaagccaaauacauu

SEQ ID NO: 1898191 - RNA, 19 nt, Homo sapiens
  misc_RNA (1)...(19): siRNA sense strand
gaauacagccauuggauaa

SEQ ID NO: 1898192 - RNA, 19 nt, Homo sapiens
  misc_RNA (1)...(19): siRNA sense strand
guaacaagcucuguaaaga

SEQ ID NO: 1898193 - RNA, 19 nt, Homo sapiens
  misc_RNA (1)...(19): siRNA sense strand
gcauugaagucagucauua

SEQ ID NO: 1898194 - RNA, 19 nt, Homo sapiens
  misc_RNA (1)...(19): siRNA sense strand
gaaauggacgucagucuuu

SEQ ID NO: 1898195 - RNA, 19 nt, Homo sapiens
  misc_RNA (1)...(19): siRNA sense strand
ugauacagcucaguuguua

SEQ ID NO: 1898196 - RNA, 19 nt, Homo sapiens
  misc_RNA (1)...(19): siRNA sense strand
gagauuugcucaaugcauu

SEQ ID NO: 1898197 - RNA, 19 nt, Homo sapiens
  misc_RNA (1)...(19): siRNA sense strand
gaagaaagugccaacauga

SEQ ID NO: 1898198 - RNA, 19 nt, Homo sapiens
  misc_RNA (1)...(19): siRNA sense strand
caagaagccaaauacauua

SEQ ID NO: 1898199 - RNA, 19 nt, Homo sapiens
  misc_RNA (1)...(19): siRNA sense strand
gaaccaauggcaucuauga

SEQ ID NO: 1898200 - RNA, 19 nt, Homo sapiens
  misc_RNA (1)...(19): siRNA sense strand
uuaaugacccugucuauaa

SEQ ID NO: 1898201 - RNA, 19 nt, Homo sapiens
  misc_RNA (1)...(19): siRNA sense strand
cagcucaguuguuacuuua

SEQ ID NO: 1898202 - RNA, 19 nt, Homo sapiens
  misc_RNA (1)...(19): siRNA sense strand
gaagaagugggaccaguuu

SEQ ID NO: 1898203 - RNA, 19 nt, Homo sapiens
  misc_RNA (1)...(19): siRNA sense strand
uaaugacccugucuauaaa

SEQ ID NO: 1898204 - RNA, 19 nt, Homo sapiens
  misc_RNA (1)...(19): siRNA sense strand
uaacauacccuuucuguac

SEQ ID NO: 1898205 - RNA, 19 nt, Homo sapiens
  misc_RNA (1)...(19): siRNA sense strand
gaaagugccaacaugauug

SEQ ID NO: 1898206 - RNA, 19 nt, Homo sapiens
  misc_RNA (1)...(19): siRNA sense strand
gaagacccacuacauuauu

SEQ ID NO: 1898207 - RNA, 19 nt, Homo sapiens
  misc_RNA (1)...(19): siRNA sense strand
cuaaggaaauggaagaguu

SEQ ID NO: 1898208 - RNA, 19 nt, Homo sapiens
  misc_RNA (1)...(19): siRNA sense strand
gccaguaaaucaucugcua

SEQ ID NO: 1898209 - RNA, 19 nt, Homo sapiens
  misc_RNA (1)...(19): siRNA sense strand
ggauauaugguguuucaaa

SEQ ID NO: 1898210 - RNA, 19 nt, Homo sapiens
  misc_RNA (1)...(19): siRNA sense strand
ggaagacccacuacauuau

SEQ ID NO: 1898211 - RNA, 19 nt, Homo sapiens
  misc_RNA (1)...(19): siRNA sense strand
ggaauauuaugacuacagu

SEQ ID NO: 1898212 - RNA, 19 nt, Homo sapiens
  misc_RNA (1)...(19): siRNA sense strand
ucaguaacaugucagaaga

SEQ ID NO: 1898213 - RNA, 19 nt, Homo sapiens
  misc_RNA (1)...(19): siRNA sense strand
gaugaucaguaacauguca

SEQ ID NO: 1898214 - RNA, 19 nt, Homo sapiens
  misc_RNA (1)...(19): siRNA sense strand
agaagaaagugccaacaug

SEQ ID NO: 1898215 - RNA, 19 nt, Homo sapiens
  misc_RNA (1)...(19): siRNA sense strand
guagagauuugcucaaugc

SEQ ID NO: 1898216 - RNA, 19 nt, Homo sapiens
  misc_RNA (1)...(19): siRNA sense strand
ugaagacaauccuggaaga

SEQ ID NO: 1898217 - RNA, 19 nt, Homo sapiens
  misc_RNA (1)...(19): siRNA sense strand
cgagcagucuucuggauug

SEQ ID NO: 1898218 - RNA, 19 nt, Homo sapiens
  misc_RNA (1)...(19): siRNA sense strand
uaacaugucagaagaaagu

SEQ ID NO: 1898219 - RNA, 19 nt, Homo sapiens
  misc_RNA (1)...(19): siRNA sense strand
cuauguaccuguuguuaug

SEQ ID NO: 1898220 - RNA, 19 nt, Homo sapiens
  misc_RNA (1)...(19): siRNA sense strand
gcugaacuauuuaacauac

SEQ ID NO: 1898221 - RNA, 19 nt, Homo sapiens
  misc_RNA (1)...(19): siRNA sense strand
aggaagacccacuacauua

SEQ ID NO: 1898222 - RNA, 19 nt, Homo sapiens
  misc_RNA (1)...(19): siRNA sense strand
gccauuggauaaauaugaa

SEQ ID NO: 1898223 - RNA, 19 nt, Homo sapiens
  misc_RNA (1)...(19): siRNA sense strand
gagauuugauggcaagaag

SEQ ID NO: 1898224 - RNA, 19 nt, Homo sapiens
  misc_RNA (1)...(19): siRNA sense strand
uuuaugaucugaagaagug

SEQ ID NO: 1898225 - RNA, 19 nt, Homo sapiens
  misc_RNA (1)...(19): siRNA sense strand
gaaagaagaagaaaagaga

SEQ ID NO: 1898226 - RNA, 19 nt, Homo sapiens
  misc_RNA (1)...(19): siRNA sense strand
uggcaacugugauauuuau

SEQ ID NO: 1898227 - RNA, 19 nt, Homo sapiens
  misc_RNA (1)...(19): siRNA sense strand
gaauuguguugggaauauu

SEQ ID NO: 1898228 - RNA, 19 nt, Homo sapiens
  misc_RNA (1)...(19): siRNA sense strand
cguggcaacugugauauuu

SEQ ID NO: 1898229 - RNA, 19 nt, Homo sapiens
  misc_RNA (1)...(19): siRNA sense strand
caucagcccuugcccagau

SEQ ID NO: 1898230 - RNA, 19 nt, Homo sapiens
  misc_RNA (1)...(19): siRNA sense strand
caagaauuguguugggaau

SEQ ID NO: 1898231 - RNA, 19 nt, Homo sapiens
  misc_RNA (1)...(19): siRNA sense strand
uuggaggacuucacuguaa

SEQ ID NO: 1898232 - RNA, 19 nt, Homo sapiens
  misc_RNA (1)...(19): siRNA sense strand
aacaagcucuguaaagaug

SEQ ID NO: 1898233 - RNA, 19 nt, Homo sapiens
  misc_RNA (1)...(19): siRNA sense strand
agaauuguguugggaauau

SEQ ID NO: 1898234 - RNA, 19 nt, Homo sapiens
  misc_RNA (1)...(19): siRNA sense strand
gauaacauugcucacauga

SEQ ID NO: 1898235 - RNA, 19 nt, Homo sapiens
  misc_RNA (1)...(19): siRNA sense strand
gaagccaaauacauuaggu

SEQ ID NO: 1898236 - RNA, 19 nt, Homo sapiens
  misc_RNA (1)...(19): siRNA sense strand
gcuacacauuugagaagaa

SEQ ID NO: 1898237 - RNA, 19 nt, Homo sapiens
  misc_RNA (1)...(19): siRNA sense strand
ggauuucuguucccuccuu

SEQ ID NO: 1898238 - RNA, 19 nt, Homo sapiens
  misc_RNA (1)...(19): siRNA sense strand
gacccugucuauaaagaga

SEQ ID NO: 1898239 - RNA, 19 nt, Homo sapiens
  misc_RNA (1)...(19): siRNA sense strand
ggugggcauucccuuguuu

SEQ ID NO: 1898240 - RNA, 19 nt, Homo sapiens
  misc_RNA (1)...(19): siRNA sense strand
uaaggaaauggaagaguuu

SEQ ID NO: 1898241 - RNA, 19 nt, Homo sapiens
  misc_RNA (1)...(19): siRNA sense strand
agucuucgauucucuguug

SEQ ID NO: 1898242 - RNA, 19 nt, Homo sapiens
  misc_RNA (1)...(19): siRNA sense strand
ccaaauacauuagguucca

SEQ ID NO: 1898243 - RNA, 19 nt, Homo sapiens
  misc_RNA (1)...(19): siRNA sense strand
acagcucaguuguuacuuu

SEQ ID NO: 1898244 - RNA, 19 nt, Homo sapiens
  misc_RNA (1)...(19): siRNA sense strand
uaacaagcucuguaaagau

SEQ ID NO: 1898245 - RNA, 19 nt, Homo sapiens
  misc_RNA (1)...(19): siRNA sense strand
gcagucuucuggauugagu

SEQ ID NO: 1898246 - RNA, 19 nt, Homo sapiens
  misc_RNA (1)...(19): siRNA sense strand
agaaagugccaacaugauu

SEQ ID NO: 1898247 - RNA, 19 nt, Homo sapiens
  misc_RNA (1)...(19): siRNA sense strand
ggaaauggaagaguuugug

SEQ ID NO: 1898248 - RNA, 19 nt, Homo sapiens
  misc_RNA (1)...(19): siRNA sense strand
aagacccacuacauuauuu

SEQ ID NO: 1898249 - RNA, 19 nt, Homo sapiens
  misc_RNA (1)...(19): siRNA sense strand
ucuguuggcuacacauuug

SEQ ID NO: 1898250 - RNA, 19 nt, Homo sapiens
  misc_RNA (1)...(19): siRNA sense strand
uacagccauuggauaaaua

SEQ ID NO: 1898251 - RNA, 19 nt, Homo sapiens
  misc_RNA (1)...(19): siRNA sense strand
cucgauagauggauauaug

SEQ ID NO: 1898252 - RNA, 19 nt, Homo sapiens
  misc_RNA (1)...(19): siRNA sense strand
gagcagucuucuggauuga

SEQ ID NO: 1898253 - RNA, 19 nt, Homo sapiens
  misc_RNA (1)...(19): siRNA sense strand
agaauacagccauuggaua

SEQ ID NO: 1898254 - RNA, 19 nt, Homo sapiens
  misc_RNA (1)...(19): siRNA sense strand
uggcugaacuauuuaacau

SEQ ID NO: 1898255 - RNA, 19 nt, Homo sapiens
  misc_RNA (1)...(19): siRNA sense strand
guaccacucuuuggaugug

SEQ ID NO: 1898256 - RNA, 19 nt, Homo sapiens
  misc_RNA (1)...(19): siRNA sense strand
caugucaaguagagauuug

SEQ ID NO: 1898257 - RNA, 19 nt, Homo sapiens
  misc_RNA (1)...(19): siRNA sense strand
uaggaagacccacuacauu

SEQ ID NO: 1898258 - RNA, 19 nt, Homo sapiens
  misc_RNA (1)...(19): siRNA sense strand
ugacuguguugacaucuuc

SEQ ID NO: 1898259 - RNA, 19 nt, Homo sapiens
  misc_RNA (1)...(19): siRNA sense strand
gaugaaacuacaagaguca

SEQ ID NO: 1898260 - RNA, 19 nt, Homo sapiens
  misc_RNA (1)...(19): siRNA sense strand
guacagucuucgauucucu

SEQ ID NO: 1898261 - RNA, 19 nt, Homo sapiens
  misc_RNA (1)...(19): siRNA sense strand
ucaggaccaugucaaguag

SEQ ID NO: 1898262 - RNA, 19 nt, Homo sapiens
  misc_RNA (1)...(19): siRNA sense strand
uagugaaguucuaggaaga

SEQ ID NO: 1898263 - RNA, 19 nt, Homo sapiens
  misc_RNA (1)...(19): siRNA sense strand
caguaaaucaucugcuauu

SEQ ID NO: 1898264 - RNA, 19 nt, Homo sapiens
  misc_RNA (1)...(19): siRNA sense strand
uacauuagguuccaauacu

SEQ ID NO: 1898265 - RNA, 19 nt, Homo sapiens
  misc_RNA (1)...(19): siRNA sense strand
aagguucuauggagauuug

SEQ ID NO: 1898266 - RNA, 19 nt, Homo sapiens
  misc_RNA (1)...(19): siRNA sense strand
auacagccauuggauaaau

SEQ ID NO: 1898267 - RNA, 19 nt, Homo sapiens
  misc_RNA (1)...(19): siRNA sense strand
ugaaauggacgucagucuu

SEQ ID NO: 1898268 - RNA, 19 nt, Homo sapiens
  misc_RNA (1)...(19): siRNA sense strand
ugauaacauugcucacaug

SEQ ID NO: 1898269 - RNA, 19 nt, Homo sapiens
  misc_RNA (1)...(19): siRNA sense strand
auacucgacuguacaagug

SEQ ID NO: 1898270 - RNA, 19 nt, Homo sapiens
  misc_RNA (1)...(19): siRNA sense strand
ugaaaauucucgauagaug

SEQ ID NO: 1898271 - RNA, 19 nt, Homo sapiens
  misc_RNA (1)...(19): siRNA sense strand
uggaaccaauggcaucuau

SEQ ID NO: 1898272 - RNA, 19 nt, Homo sapiens
  misc_RNA (1)...(19): siRNA sense strand
aguaacaugucagaagaaa

SEQ ID NO: 1898273 - RNA, 19 nt, Homo sapiens
  misc_RNA (1)...(19): siRNA sense strand
uggaggacuucacuguaaa

SEQ ID NO: 1898274 - RNA, 19 nt, Homo sapiens
  misc_RNA (1)...(19): siRNA sense strand
cccacuacauuauuugaga

SEQ ID NO: 1898275 - RNA, 19 nt, Homo sapiens
  misc_RNA (1)...(19): siRNA sense strand
cuacacauuugagaagaau

SEQ ID NO: 1898276 - RNA, 19 nt, Homo sapiens
  misc_RNA (1)...(19): siRNA sense strand
aaaguuugaugucauucug

SEQ ID NO: 1898277 - RNA, 19 nt, Homo sapiens
  misc_RNA (1)...(19): siRNA sense strand
ggcaagaagccaaauacau

SEQ ID NO: 1898278 - RNA, 19 nt, Homo sapiens
  misc_RNA (1)...(19): siRNA sense strand
caaauacauuagguuccaa

SEQ ID NO: 1898279 - RNA, 19 nt, Homo sapiens
  misc_RNA (1)...(19): siRNA sense strand
agauggauauaugguguuu

SEQ ID NO: 1898280 - RNA, 19 nt, Homo sapiens
  misc_RNA (1)...(19): siRNA sense strand
aaguagagauuugcucaau

SEQ ID NO: 1898281 - RNA, 19 nt, Homo sapiens
  misc_RNA (1)...(19): siRNA sense strand
ccaaagcuuuuauaacuca

SEQ ID NO: 1898282 - RNA, 19 nt, Homo sapiens
  misc_RNA (1)...(19): siRNA sense strand
ccaauacucgacuguacaa

SEQ ID NO: 1898283 - RNA, 19 nt, Homo sapiens
  misc_RNA (1)...(19): siRNA sense strand
gaaacuacaagagucaaag

SEQ ID NO: 1898284 - RNA, 19 nt, Homo sapiens
  misc_RNA (1)...(19): siRNA sense strand
ugaagaagugggaccaguu

SEQ ID NO: 1898285 - RNA, 19 nt, Homo sapiens
  misc_RNA (1)...(19): siRNA sense strand
gauccaguaccacucuuug

SEQ ID NO: 1898286 - RNA, 19 nt, Homo sapiens
  misc_RNA (1)...(19): siRNA sense strand
gaaguuuauccuacaucuu

SEQ ID NO: 1898287 - RNA, 19 nt, Homo sapiens
  misc_RNA (1)...(19): siRNA sense strand
gaagaaugguggaggauuu

SEQ ID NO: 1898288 - RNA, 19 nt, Homo sapiens
  misc_RNA (1)...(19): siRNA sense strand
gcaagaagccaaauacuuu

SEQ ID NO: 1898289 - RNA, 19 nt, Homo sapiens
  misc_RNA (1)...(19): siRNA sense strand
uaacauugcucacaugaaa

SEQ ID NO: 1898290 - RNA, 19 nt, Homo sapiens
  misc_RNA (1)...(19): siRNA sense strand
gaauacagccauuggauaa

SEQ ID NO: 1898291 - RNA, 19 nt, Homo sapiens
  misc_RNA (1)...(19): siRNA sense strand
gcauugaagucagucauua

SEQ ID NO: 1898292 - RNA, 19 nt, Homo sapiens
  misc_RNA (1)...(19): siRNA sense strand
gagauuugcucaaugcauu

SEQ ID NO: 1898293 - RNA, 19 nt, Homo sapiens
  misc_RNA (1)...(19): siRNA sense strand
cauaugaucugaagaagug

SEQ ID NO: 1898294 - RNA, 19 nt, Homo sapiens
  misc_RNA (1)...(19): siRNA sense strand
gaagaaagugccaacauga

SEQ ID NO: 1898295 - RNA, 19 nt, Homo sapiens
  misc_RNA (1)...(19): siRNA sense strand
gggaauauucugacuauaa

SEQ ID NO: 1898296 - RNA, 19 nt, Homo sapiens
  misc_RNA (1)...(19): siRNA sense strand
gcagcucaguuguuacuuu

SEQ ID NO: 1898297 - RNA, 19 nt, Homo sapiens
  misc_RNA (1)...(19): siRNA sense strand
gaaccaauggcaucuauga

SEQ ID NO: 1898298 - RNA, 19 nt, Homo sapiens
  misc_RNA (1)...(19): siRNA sense strand
gaacaagaaacuuaugaga

SEQ ID NO: 1898299 - RNA, 19 nt, Homo sapiens
  misc_RNA (1)...(19): siRNA sense strand
cagcucaguuguuacuuua

SEQ ID NO: 1898300 - RNA, 19 nt, Homo sapiens
  misc_RNA (1)...(19): siRNA sense strand
gaagaagugggaccaguuu

SEQ ID NO: 1898301 - RNA, 19 nt, Homo sapiens
  misc_RNA (1)...(19): siRNA sense strand
ugaugcagcucaguuguua

SEQ ID NO: 1898302 - RNA, 19 nt, Homo sapiens
  misc_RNA (1)...(19): siRNA sense strand
uaacauacccuuucuguac

SEQ ID NO: 1898303 - RNA, 19 nt, Homo sapiens
  misc_RNA (1)...(19): siRNA sense strand
caagaagccaaauacuuua

SEQ ID NO: 1898304 - RNA, 19 nt, Homo sapiens
  misc_RNA (1)...(19): siRNA sense strand
gaaagugccaacaugauug

SEQ ID NO: 1898305 - RNA, 19 nt, Homo sapiens
  misc_RNA (1)...(19): siRNA sense strand
gaaauggaugucagucuuu

SEQ ID NO: 1898306 - RNA, 19 nt, Homo sapiens
  misc_RNA (1)...(19): siRNA sense strand
gaagacccacuacauuauu

SEQ ID NO: 1898307 - RNA, 19 nt, Homo sapiens
  misc_RNA (1)...(19): siRNA sense strand
cuaaggaaauggaagaguu

SEQ ID NO: 1898308 - RNA, 19 nt, Homo sapiens
  misc_RNA (1)...(19): siRNA sense strand
gccaguaaaucaucugcua

SEQ ID NO: 1898309 - RNA, 19 nt, Homo sapiens
  misc_RNA (1)...(19): siRNA sense strand
ggaagacccacuacauuau

SEQ ID NO: 1898310 - RNA, 19 nt, Homo sapiens
  misc_RNA (1)...(19): siRNA sense strand
gacccuaucuauaaagaga

SEQ ID NO: 1898311 - RNA, 19 nt, Homo sapiens
  misc_RNA (1)...(19): siRNA sense strand
ucaguaacaugucagaaga

SEQ ID NO: 1898312 - RNA, 19 nt, Homo sapiens
  misc_RNA (1)...(19): siRNA sense strand
ugaaauggaugucagucuu

SEQ ID NO: 1898313 - RNA, 19 nt, Homo sapiens
  misc_RNA (1)...(19): siRNA sense strand
gauagauggacauauagua

SEQ ID NO: 1898314 - RNA, 19 nt, Homo sapiens
  misc_RNA (1)...(19): siRNA sense strand
agaagaaagugccaacaug

SEQ ID NO: 1898315 - RNA, 19 nt, Homo sapiens
  misc_RNA (1)...(19): siRNA sense strand
gaugaucaguaacauguca

SEQ ID NO: 1898316 - RNA, 19 nt, Homo sapiens
  misc_RNA (1)...(19): siRNA sense strand
uucgauagauggacauaua

SEQ ID NO: 1898317 - RNA, 19 nt, Homo sapiens
  misc_RNA (1)...(19): siRNA sense strand
guagagauuugcucaaugc

SEQ ID NO: 1898318 - RNA, 19 nt, Homo sapiens
  misc_RNA (1)...(19): siRNA sense strand
ugaagacaauccuggaaga

SEQ ID NO: 1898319 - RNA, 19 nt, Homo sapiens
  misc_RNA (1)...(19): siRNA sense strand
cgagcagucuucuggauug

SEQ ID NO: 1898320 - RNA, 19 nt, Homo sapiens
  misc_RNA (1)...(19): siRNA sense strand
uaacaugucagaagaaagu

SEQ ID NO: 1898321 - RNA, 19 nt, Homo sapiens
  misc_RNA (1)...(19): siRNA sense strand
cuauguaccuguuguuaug

SEQ ID NO: 1898322 - RNA, 19 nt, Homo sapiens
  misc_RNA (1)...(19): siRNA sense strand
gcuacacaguugagaagaa

SEQ ID NO: 1898323 - RNA, 19 nt, Homo sapiens
  misc_RNA (1)...(19): siRNA sense strand
aggaagacccacuacauua

SEQ ID NO: 1898324 - RNA, 19 nt, Homo sapiens
  misc_RNA (1)...(19): siRNA sense strand
gccauuggauaaauaugaa

SEQ ID NO: 1898325 - RNA, 19 nt, Homo sapiens
  misc_RNA (1)...(19): siRNA sense strand
gagauuugauggcaagaag

SEQ ID NO: 1898326 - RNA, 19 nt, Homo sapiens
  misc_RNA (1)...(19): siRNA sense strand
gcugcuggcugaacuacuu

SEQ ID NO: 1898327 - RNA, 19 nt, Homo sapiens
  misc_RNA (1)...(19): siRNA sense strand
gaauuguguugggaauauu

SEQ ID NO: 1898328 - RNA, 19 nt, Homo sapiens
  misc_RNA (1)...(19): siRNA sense strand
caucagcccuugcccagau

SEQ ID NO: 1898329 - RNA, 19 nt, Homo sapiens
  misc_RNA (1)...(19): siRNA sense strand
caagaauuguguugggaau

SEQ ID NO: 1898330 - RNA, 19 nt, Homo sapiens
  misc_RNA (1)...(19): siRNA sense strand
uuggaggacuucacuguaa

SEQ ID NO: 1898331 - RNA, 19 nt, Homo sapiens
  misc_RNA (1)...(19): siRNA sense strand
auauaaagcucugugaaga

SEQ ID NO: 1898332 - RNA, 19 nt, Homo sapiens
  misc_RNA (1)...(19): siRNA sense strand
gucaugaggugauuguguu

SEQ ID NO: 1898333 - RNA, 19 nt, Homo sapiens
  misc_RNA (1)...(19): siRNA sense strand
gauaacauugcucacauga

SEQ ID NO: 1898334 - RNA, 19 nt, Homo sapiens
  misc_RNA (1)...(19): siRNA sense strand
gaagccaaauacuuuaggu

SEQ ID NO: 1898335 - RNA, 19 nt, Homo sapiens
  misc_RNA (1)...(19): siRNA sense strand
agaauuguguugggaauau

SEQ ID NO: 1898336 - RNA, 19 nt, Homo sapiens
  misc_RNA (1)...(19): siRNA sense strand
ggauuucuguucccuccuu

SEQ ID NO: 1898337 - RNA, 19 nt, Homo sapiens
  misc_RNA (1)...(19): siRNA sense strand
ggugggcauucccuuguuu

SEQ ID NO: 1898338 - RNA, 19 nt, Homo sapiens
  misc_RNA (1)...(19): siRNA sense strand
ucaagcauaugaucugaag

SEQ ID NO: 1898339 - RNA, 19 nt, Homo sapiens
  misc_RNA (1)...(19): siRNA sense strand
uaaggaaauggaagaguuu

SEQ ID NO: 1898340 - RNA, 19 nt, Homo sapiens
  misc_RNA (1)...(19): siRNA sense strand
ggcaagaagccaaauacuu

SEQ ID NO: 1898341 - RNA, 19 nt, Homo sapiens
  misc_RNA (1)...(19): siRNA sense strand
auaaagcucugugaagaug

SEQ ID NO: 1898342 - RNA, 19 nt, Homo sapiens
  misc_RNA (1)...(19): siRNA sense strand
cacaaaauguugccuguuu

SEQ ID NO: 1898343 - RNA, 19 nt, Homo sapiens
  misc_RNA (1)...(19): siRNA sense strand
cagccaaacccuugccuaa

SEQ ID NO: 1898344 - RNA, 19 nt, Homo sapiens
  misc_RNA (1)...(19): siRNA sense strand
uacagccauuggauaaaua

SEQ ID NO: 1898345 - RNA, 19 nt, Homo sapiens
  misc_RNA (1)...(19): siRNA sense strand
cguggcaacuaugauauuu

SEQ ID NO: 1898346 - RNA, 19 nt, Homo sapiens
  misc_RNA (1)...(19): siRNA sense strand
gcagucuucuggauugagu

SEQ ID NO: 1898347 - RNA, 19 nt, Homo sapiens
  misc_RNA (1)...(19): siRNA sense strand
agaaagugccaacaugauu

SEQ ID NO: 1898348 - RNA, 19 nt, Homo sapiens
  misc_RNA (1)...(19): siRNA sense strand
ggaaauggaagaguuugug

SEQ ID NO: 1898349 - RNA, 19 nt, Homo sapiens
  misc_RNA (1)...(19): siRNA sense strand
aagacccacuacauuauuu

SEQ ID NO: 1898350 - RNA, 19 nt, Homo sapiens
  misc_RNA (1)...(19): siRNA sense strand
agaauacagccauuggaua

SEQ ID NO: 1898351 - RNA, 19 nt, Homo sapiens
  misc_RNA (1)...(19): siRNA sense strand
gagcagucuucuggauuga

SEQ ID NO: 1898352 - RNA, 19 nt, Homo sapiens
  misc_RNA (1)...(19): siRNA sense strand
cuacacaguugagaagaau

SEQ ID NO: 1898353 - RNA, 19 nt, Homo sapiens
  misc_RNA (1)...(19): siRNA sense strand
gugauuguguugacaucuu

SEQ ID NO: 1898354 - RNA, 19 nt, Homo sapiens
  misc_RNA (1)...(19): siRNA sense strand
guaccacucuuuggaugug

SEQ ID NO: 1898355 - RNA, 19 nt, Homo sapiens
  misc_RNA (1)...(19): siRNA sense strand
caugucaaguagagauuug

SEQ ID NO: 1898356 - RNA, 19 nt, Homo sapiens
  misc_RNA (1)...(19): siRNA sense strand
uaggaagacccacuacauu

SEQ ID NO: 1898357 - RNA, 19 nt, Homo sapiens
  misc_RNA (1)...(19): siRNA sense strand
agucuccgcuucucuguug

SEQ ID NO: 1898358 - RNA, 19 nt, Homo sapiens
  misc_RNA (1)...(19): siRNA sense strand
aagcauaugaucugaagaa

SEQ ID NO: 1898359 - RNA, 19 nt, Homo sapiens
  misc_RNA (1)...(19): siRNA sense strand
uagugaaguucuaggaaga

SEQ ID NO: 1898360 - RNA, 19 nt, Homo sapiens
  misc_RNA (1)...(19): siRNA sense strand
ucaggaccaugucaaguag

SEQ ID NO: 1898361 - RNA, 19 nt, Homo sapiens
  misc_RNA (1)...(19): siRNA sense strand
caguaaaucaucugcuauu

SEQ ID NO: 1898362 - RNA, 19 nt, Homo sapiens
  misc_RNA (1)...(19): siRNA sense strand
gaguuugucaugcgccaua

SEQ ID NO: 1898363 - RNA, 19 nt, Homo sapiens
  misc_RNA (1)...(19): siRNA sense strand
aagguucuauggagauuug

SEQ ID NO: 1898364 - RNA, 19 nt, Homo sapiens
  misc_RNA (1)...(19): siRNA sense strand
auacagccauuggauaaau

SEQ ID NO: 1898365 - RNA, 19 nt, Homo sapiens
  misc_RNA (1)...(19): siRNA sense strand
cuacuuaacauacccuuuc

SEQ ID NO: 1898366 - RNA, 19 nt, Homo sapiens
  misc_RNA (1)...(19): siRNA sense strand
uggcugaacuacuuaacau

SEQ ID NO: 1898367 - RNA, 19 nt, Homo sapiens
  misc_RNA (1)...(19): siRNA sense strand
ugauaacauugcucacaug

SEQ ID NO: 1898368 - RNA, 19 nt, Homo sapiens
  misc_RNA (1)...(19): siRNA sense strand
cccacuacauuauuugaga

SEQ ID NO: 1898369 - RNA, 19 nt, Homo sapiens
  misc_RNA (1)...(19): siRNA sense strand
ugacaucuucggcuucuau

SEQ ID NO: 1898370 - RNA, 19 nt, Homo sapiens
  misc_RNA (1)...(19): siRNA sense strand
uggaaccaauggcaucuau

SEQ ID NO: 1898371 - RNA, 19 nt, Homo sapiens
  misc_RNA (1)...(19): siRNA sense strand
ccaaauacuuuagguucca

SEQ ID NO: 1898372 - RNA, 19 nt, Homo sapiens
  misc_RNA (1)...(19): siRNA sense strand
aguaacaugucagaagaaa

SEQ ID NO: 1898373 - RNA, 19 nt, Homo sapiens
  misc_RNA (1)...(19): siRNA sense strand
uggaggacuucacuguaaa

SEQ ID NO: 1898374 - RNA, 19 nt, Homo sapiens
  misc_RNA (1)...(19): siRNA sense strand
uugggaauauucugacuau

SEQ ID NO: 1898375 - RNA, 19 nt, Homo sapiens
  misc_RNA (1)...(19): siRNA sense strand
caaauacuuuagguuccaa

SEQ ID NO: 1898376 - RNA, 19 nt, Homo sapiens
  misc_RNA (1)...(19): siRNA sense strand
ccaaagcuuuuauaacuca

SEQ ID NO: 1898377 - RNA, 19 nt, Homo sapiens
  misc_RNA (1)...(19): siRNA sense strand
aaguagagauuugcucaau

SEQ ID NO: 1898378 - RNA, 19 nt, Homo sapiens
  misc_RNA (1)...(19): siRNA sense strand
gaaguuuauccuacaucuu

SEQ ID NO: 1898379 - RNA, 19 nt, Homo sapiens
  misc_RNA (1)...(19): siRNA sense strand
gauccaguaccacucuuug

SEQ ID NO: 1898380 - RNA, 19 nt, Homo sapiens
  misc_RNA (1)...(19): siRNA sense strand
ugaagaagugggaccaguu

SEQ ID NO: 1898381 - RNA, 19 nt, Homo sapiens
  misc_RNA (1)...(19): siRNA sense strand
ucuguucccuccuuccuau

SEQ ID NO: 1898382 - RNA, 19 nt, Homo sapiens
  misc_RNA (1)...(19): siRNA sense strand
cauugaagucagucauuaa

SEQ ID NO: 1898383 - RNA, 19 nt, Homo sapiens
  misc_RNA (1)...(19): siRNA sense strand
ggucaugaggugauugugu

SEQ ID NO: 1898384 - RNA, 19 nt, Homo sapiens
  misc_RNA (1)...(19): siRNA sense strand
auucgaaccuauugggauu

SEQ ID NO: 1898385 - RNA, 19 nt, Homo sapiens
  misc_RNA (1)...(19): siRNA sense strand
guucccuccuuccuaugua

SEQ ID NO: 1898386 - RNA, 19 nt, Homo sapiens
  misc_RNA (1)...(19): siRNA sense strand
cagaauacagccauuggau

SEQ ID NO: 1898387 - RNA, 19 nt, Homo sapiens
  misc_RNA (1)...(19): siRNA sense strand
gaagaaagcuauggcaauu

SEQ ID NO: 1898388 - RNA, 19 nt, Homo sapiens
  misc_RNA (1)...(19): siRNA sense strand
caagagagauguggauaua

SEQ ID NO: 1898389 - RNA, 19 nt, Homo sapiens
  misc_RNA (1)...(19): siRNA sense strand
gaagaaccguuaccaauca

SEQ ID NO: 1898390 - RNA, 19 nt, Homo sapiens
  misc_RNA (1)...(19): siRNA sense strand
guacaggaauaacaugauu

SEQ ID NO: 1898391 - RNA, 19 nt, Homo sapiens
  misc_RNA (1)...(19): siRNA sense strand
ccaacuuccuuguuaauuu

SEQ ID NO: 1898392 - RNA, 19 nt, Homo sapiens
  misc_RNA (1)...(19): siRNA sense strand
gguaucaacuguaagaaga

SEQ ID NO: 1898393 - RNA, 19 nt, Homo sapiens
  misc_RNA (1)...(19): siRNA sense strand
caacuuccuuguuaauuug

SEQ ID NO: 1898394 - RNA, 19 nt, Homo sapiens
  misc_RNA (1)...(19): siRNA sense strand
caucgaaucuugcgaacaa

SEQ ID NO: 1898395 - RNA, 19 nt, Homo sapiens
  misc_RNA (1)...(19): siRNA sense strand
gauaugacuuugugcuuga

SEQ ID NO: 1898396 - RNA, 19 nt, Homo sapiens
  misc_RNA (1)...(19): siRNA sense strand
gaucaauggucucagaaau

SEQ ID NO: 1898397 - RNA, 19 nt, Homo sapiens
  misc_RNA (1)...(19): siRNA sense strand
caaagcgcauggagacuaa

SEQ ID NO: 1898398 - RNA, 19 nt, Homo sapiens
  misc_RNA (1)...(19): siRNA sense strand
gaauuugaagccuacauua

SEQ ID NO: 1898399 - RNA, 19 nt, Homo sapiens
  misc_RNA (1)...(19): siRNA sense strand
gaacauggaauugugguuu

SEQ ID NO: 1898400 - RNA, 19 nt, Homo sapiens
  misc_RNA (1)...(19): siRNA sense strand
gauccuggcugaguauuug

SEQ ID NO: 1898401 - RNA, 19 nt, Homo sapiens
  misc_RNA (1)...(19): siRNA sense strand
guuaagauaugacuuugug

SEQ ID NO: 1898402 - RNA, 19 nt, Homo sapiens
  misc_RNA (1)...(19): siRNA sense strand
ggagugacccugaauguuc

SEQ ID NO: 1898403 - RNA, 19 nt, Homo sapiens
  misc_RNA (1)...(19): siRNA sense strand
guggccaacuuccuuguua

SEQ ID NO: 1898404 - RNA, 19 nt, Homo sapiens
  misc_RNA (1)...(19): siRNA sense strand
ggcaauugcugaugcuuug

SEQ ID NO: 1898405 - RNA, 19 nt, Homo sapiens
  misc_RNA (1)...(19): siRNA sense strand
ucaauggucucagaaauuc

SEQ ID NO: 1898406 - RNA, 19 nt, Homo sapiens
  misc_RNA (1)...(19): siRNA sense strand
gcaaagcgcauggagacua

SEQ ID NO: 1898407 - RNA, 19 nt, Homo sapiens
  misc_RNA (1)...(19): siRNA sense strand
gaaccguuaccaaucauuu

SEQ ID NO: 1898408 - RNA, 19 nt, Homo sapiens
  misc_RNA (1)...(19): siRNA sense strand
agagagauguggauauaau

SEQ ID NO: 1898409 - RNA, 19 nt, Homo sapiens
  misc_RNA (1)...(19): siRNA sense strand
ggagguaucaacuguaaga

SEQ ID NO: 1898410 - RNA, 19 nt, Homo sapiens
  misc_RNA (1)...(19): siRNA sense strand
cuguuuggcuguuaagaua

SEQ ID NO: 1898411 - RNA, 19 nt, Homo sapiens
  misc_RNA (1)...(19): siRNA sense strand
uaagaaagcccacaaaucc

SEQ ID NO: 1898412 - RNA, 19 nt, Homo sapiens
  misc_RNA (1)...(19): siRNA sense strand
ggaauuugaagccuacauu

SEQ ID NO: 1898413 - RNA, 19 nt, Homo sapiens
  misc_RNA (1)...(19): siRNA sense strand
gguggugccugaaguuaau

SEQ ID NO: 1898414 - RNA, 19 nt, Homo sapiens
  misc_RNA (1)...(19): siRNA sense strand
gcgaacaacacgauacuug

SEQ ID NO: 1898415 - RNA, 19 nt, Homo sapiens
  misc_RNA (1)...(19): siRNA sense strand
guaagaagaggaaagacuu

SEQ ID NO: 1898416 - RNA, 19 nt, Homo sapiens
  misc_RNA (1)...(19): siRNA sense strand
caacauggucuucauugga

SEQ ID NO: 1898417 - RNA, 19 nt, Homo sapiens
  misc_RNA (1)...(19): siRNA sense strand
gaauugugguuuucucuuu

SEQ ID NO: 1898418 - RNA, 19 nt, Homo sapiens
  misc_RNA (1)...(19): siRNA sense strand
gcuguuaagauaugacuuu

SEQ ID NO: 1898419 - RNA, 19 nt, Homo sapiens
  misc_RNA (1)...(19): siRNA sense strand
gagcuggagugacccugaa

SEQ ID NO: 1898420 - RNA, 19 nt, Homo sapiens
  misc_RNA (1)...(19): siRNA sense strand
gcccagacccuguguccua

SEQ ID NO: 1898421 - RNA, 19 nt, Homo sapiens
  misc_RNA (1)...(19): siRNA sense strand
guuggagcccuaucuauuu

SEQ ID NO: 1898422 - RNA, 19 nt, Homo sapiens
  misc_RNA (1)...(19): siRNA sense strand
cagacagaguacaggaaua

SEQ ID NO: 1898423 - RNA, 19 nt, Homo sapiens
  misc_RNA (1)...(19): siRNA sense strand
agacagaguacaggaauaa

SEQ ID NO: 1898424 - RNA, 19 nt, Homo sapiens
  misc_RNA (1)...(19): siRNA sense strand
gggacacccugaacuucuu

SEQ ID NO: 1898425 - RNA, 19 nt, Homo sapiens
  misc_RNA (1)...(19): siRNA sense strand
cagcuguccucaagagaga

SEQ ID NO: 1898426 - RNA, 19 nt, Homo sapiens
  misc_RNA (1)...(19): siRNA sense strand
guaugaaggauauaguuga

SEQ ID NO: 1898427 - RNA, 19 nt, Homo sapiens
  misc_RNA (1)...(19): siRNA sense strand
uuaaggagagcaaguuuga

SEQ ID NO: 1898428 - RNA, 19 nt, Homo sapiens
  misc_RNA (1)...(19): siRNA sense strand
ucacuuugcugagcgauca

SEQ ID NO: 1898429 - RNA, 19 nt, Homo sapiens
  misc_RNA (1)...(19): siRNA sense strand
cgugauugguuuccucuug

SEQ ID NO: 1898430 - RNA, 19 nt, Homo sapiens
  misc_RNA (1)...(19): siRNA sense strand
gacccugaauguucuggaa

SEQ ID NO: 1898431 - RNA, 19 nt, Homo sapiens
  misc_RNA (1)...(19): siRNA sense strand
caucagcuguccucaagag

SEQ ID NO: 1898432 - RNA, 19 nt, Homo sapiens
  misc_RNA (1)...(19): siRNA sense strand
cccacgaccucaccuggua

SEQ ID NO: 1898433 - RNA, 19 nt, Homo sapiens
  misc_RNA (1)...(19): siRNA sense strand
gugaucagauggacaaugc

SEQ ID NO: 1898434 - RNA, 19 nt, Homo sapiens
  misc_RNA (1)...(19): siRNA sense strand
ggucucuguuuggcuguua

SEQ ID NO: 1898435 - RNA, 19 nt, Homo sapiens
  misc_RNA (1)...(19): siRNA sense strand
uuucagaccacaugacuuu

SEQ ID NO: 1898436 - RNA, 19 nt, Homo sapiens
  misc_RNA (1)...(19): siRNA sense strand
gaugacccgugccuuuauc

SEQ ID NO: 1898437 - RNA, 19 nt, Homo sapiens
  misc_RNA (1)...(19): siRNA sense strand
uuggagguaucaacuguaa

SEQ ID NO: 1898438 - RNA, 19 nt, Homo sapiens
  misc_RNA (1)...(19): siRNA sense strand
ugaagaaccguuaccaauc

SEQ ID NO: 1898439 - RNA, 19 nt, Homo sapiens
  misc_RNA (1)...(19): siRNA sense strand
cuucaucaccuuuaaaugu

SEQ ID NO: 1898440 - RNA, 19 nt, Homo sapiens
  misc_RNA (1)...(19): siRNA sense strand
gaucagauggacaaugcaa

SEQ ID NO: 1898441 - RNA, 19 nt, Homo sapiens
  misc_RNA (1)...(19): siRNA sense strand
ggauauaguugagguucuc

SEQ ID NO: 1898442 - RNA, 19 nt, Homo sapiens
  misc_RNA (1)...(19): siRNA sense strand
gggugauccuggcugagua

SEQ ID NO: 1898443 - RNA, 19 nt, Homo sapiens
  misc_RNA (1)...(19): siRNA sense strand
guuauuggccuguacuuca

SEQ ID NO: 1898444 - RNA, 19 nt, Homo sapiens
  misc_RNA (1)...(19): siRNA sense strand
cuccuucgcucauuucaga

SEQ ID NO: 1898445 - RNA, 19 nt, Homo sapiens
  misc_RNA (1)...(19): siRNA sense strand
gaaauuccagagaagaaag

SEQ ID NO: 1898446 - RNA, 19 nt, Homo sapiens
  misc_RNA (1)...(19): siRNA sense strand
gacccuguguccuacauuc

SEQ ID NO: 1898447 - RNA, 19 nt, Homo sapiens
  misc_RNA (1)...(19): siRNA sense strand
cauuggagguaucaacugu

SEQ ID NO: 1898448 - RNA, 19 nt, Homo sapiens
  misc_RNA (1)...(19): siRNA sense strand
ccuuggacgugauugguuu

SEQ ID NO: 1898449 - RNA, 19 nt, Homo sapiens
  misc_RNA (1)...(19): siRNA sense strand
ccgaugacccgugccuuua

SEQ ID NO: 1898450 - RNA, 19 nt, Homo sapiens
  misc_RNA (1)...(19): siRNA sense strand
agaaagcuauggcaauugc

SEQ ID NO: 1898451 - RNA, 19 nt, Homo sapiens
  misc_RNA (1)...(19): siRNA sense strand
cagaaauuccagagaagaa

SEQ ID NO: 1898452 - RNA, 19 nt, Homo sapiens
  misc_RNA (1)...(19): siRNA sense strand
uggagaacauggaauugug

SEQ ID NO: 1898453 - RNA, 19 nt, Homo sapiens
  misc_RNA (1)...(19): siRNA sense strand
gaguacaggaauaacauga

SEQ ID NO: 1898454 - RNA, 19 nt, Homo sapiens
  misc_RNA (1)...(19): siRNA sense strand
ggaucaauggucucagaaa

SEQ ID NO: 1898455 - RNA, 19 nt, Homo sapiens
  misc_RNA (1)...(19): siRNA sense strand
uuugaagccuacauuaaug

SEQ ID NO: 1898456 - RNA, 19 nt, Homo sapiens
  misc_RNA (1)...(19): siRNA sense strand
uuucacagacccagccuua

SEQ ID NO: 1898457 - RNA, 19 nt, Homo sapiens
  misc_RNA (1)...(19): siRNA sense strand
ggacacccugaacuucuuu

SEQ ID NO: 1898458 - RNA, 19 nt, Homo sapiens
  misc_RNA (1)...(19): siRNA sense strand
gagugacccugaauguucu

SEQ ID NO: 1898459 - RNA, 19 nt, Homo sapiens
  misc_RNA (1)...(19): siRNA sense strand
guuaagaaagcccacaaau

SEQ ID NO: 1898460 - RNA, 19 nt, Homo sapiens
  misc_RNA (1)...(19): siRNA sense strand
ucuauccagugccguauga

SEQ ID NO: 1898461 - RNA, 19 nt, Homo sapiens
  misc_RNA (1)...(19): siRNA sense strand
ggcuuaguaugaaggauau

SEQ ID NO: 1898462 - RNA, 19 nt, Homo sapiens
  misc_RNA (1)...(19): siRNA sense strand
uuaagaaagcccacaaauc

SEQ ID NO: 1898463 - RNA, 19 nt, Homo sapiens
  misc_RNA (1)...(19): siRNA sense strand
uaagaagaggaaagacuug

SEQ ID NO: 1898464 - RNA, 19 nt, Homo sapiens
  misc_RNA (1)...(19): siRNA sense strand
acaaauccaagacccauug

SEQ ID NO: 1898465 - RNA, 19 nt, Homo sapiens
  misc_RNA (1)...(19): siRNA sense strand
gugaugaugcccuuguuug

SEQ ID NO: 1898466 - RNA, 19 nt, Homo sapiens
  misc_RNA (1)...(19): siRNA sense strand
uggccaacuuccuuguuaa

SEQ ID NO: 1898467 - RNA, 19 nt, Homo sapiens
  misc_RNA (1)...(19): siRNA sense strand
gaacccgaccaucgaaucu

SEQ ID NO: 1898468 - RNA, 19 nt, Homo sapiens
  misc_RNA (1)...(19): siRNA sense strand
ugggaucaauggucucaga

SEQ ID NO: 1898469 - RNA, 19 nt, Homo sapiens
  misc_RNA (1)...(19): siRNA sense strand
cgcaucagcuguccucaag

SEQ ID NO: 1898470 - RNA, 19 nt, Homo sapiens
  misc_RNA (1)...(19): siRNA sense strand
agaaagcccacaaauccaa

SEQ ID NO: 1898471 - RNA, 19 nt, Homo sapiens
  misc_RNA (1)...(19): siRNA sense strand
uaugaaggauauaguugag

SEQ ID NO: 1898472 - RNA, 19 nt, Homo sapiens
  misc_RNA (1)...(19): siRNA sense strand
ugaauguucuggaaaugac

SEQ ID NO: 1898473 - RNA, 19 nt, Homo sapiens
  misc_RNA (1)...(19): siRNA sense strand
ggugaugaugcccuuguuu

SEQ ID NO: 1898474 - RNA, 19 nt, Homo sapiens
  misc_RNA (1)...(19): siRNA sense strand
agaagaaagcuauggcaau

SEQ ID NO: 1898475 - RNA, 19 nt, Homo sapiens
  misc_RNA (1)...(19): siRNA sense strand
uggcuuaguaugaaggaua

SEQ ID NO: 1898476 - RNA, 19 nt, Homo sapiens
  misc_RNA (1)...(19): siRNA sense strand
cugaagaaccguuaccaau

SEQ ID NO: 1898477 - RNA, 19 nt, Homo sapiens
  misc_RNA (1)...(19): siRNA sense strand
ggucuucauuggagguauc

SEQ ID NO: 1898478 - RNA, 19 nt, Homo sapiens
  misc_RNA (1)...(19): siRNA sense strand
ucaagagagauguggauau

SEQ ID NO: 1898479 - RNA, 19 nt, Homo sapiens
  misc_RNA (1)...(19): siRNA sense strand
acccugaacuucuuuaagg

SEQ ID NO: 1898480 - RNA, 19 nt, Homo sapiens
  misc_RNA (1)...(19): siRNA sense strand
guuuggcuguuaagauaug

SEQ ID NO: 1898481 - RNA, 19 nt, Homo sapiens
  misc_RNA (1)...(19): siRNA sense strand
caaguuugaugcucuuuuc

SEQ ID NO: 1898482 - RNA, 19 nt, Homo sapiens
  misc_RNA (1)...(19): siRNA sense strand
ucaucaccuuuaaauguug

SEQ ID NO: 1898483 - RNA, 19 nt, Homo sapiens
  misc_RNA (1)...(19): siRNA sense strand
gcugaagaaccguuaccaa

SEQ ID NO: 1898484 - RNA, 19 nt, Homo sapiens
  misc_RNA (1)...(19): siRNA sense strand
uuaaguggcuaccccaaaa

SEQ ID NO: 1898485 - RNA, 19 nt, Homo sapiens
  misc_RNA (1)...(19): siRNA sense strand
ggaacccgaccaucgaauc

SEQ ID NO: 1898486 - RNA, 19 nt, Homo sapiens
  misc_RNA (1)...(19): siRNA sense strand
ugacuuugugcuugaauau

SEQ ID NO: 1898487 - RNA, 19 nt, Homo sapiens
  misc_RNA (1)...(19): siRNA sense strand
gaaauccugugggcaauua

SEQ ID NO: 1898488 - RNA, 19 nt, Homo sapiens
  misc_RNA (1)...(19): siRNA sense strand
gaggaaagcugacauaugg

SEQ ID NO: 1898489 - RNA, 19 nt, Homo sapiens
  misc_RNA (1)...(19): siRNA sense strand
gaauaaaccagaugccuua

SEQ ID NO: 1898490 - RNA, 19 nt, Homo sapiens
  misc_RNA (1)...(19): siRNA sense strand
guuaagagauugucagaaa

SEQ ID NO: 1898491 - RNA, 19 nt, Homo sapiens
  misc_RNA (1)...(19): siRNA sense strand
gaauacagccuuuggauga

SEQ ID NO: 1898492 - RNA, 19 nt, Homo sapiens
  misc_RNA (1)...(19): siRNA sense strand
gaagaaagggccaacguaa

SEQ ID NO: 1898493 - RNA, 19 nt, Homo sapiens
  misc_RNA (1)...(19): siRNA sense strand
guacagaccugcugaaugc

SEQ ID NO: 1898494 - RNA, 19 nt, Homo sapiens
  misc_RNA (1)...(19): siRNA sense strand
gaaauggacuacaguucug

SEQ ID NO: 1898495 - RNA, 19 nt, Homo sapiens
  misc_RNA (1)...(19): siRNA sense strand
ggaugaauaugaagacaau

SEQ ID NO: 1898496 - RNA, 19 nt, Homo sapiens
  misc_RNA (1)...(19): siRNA sense strand
gaagaagugggaucaguuu

SEQ ID NO: 1898497 - RNA, 19 nt, Homo sapiens
  misc_RNA (1)...(19): siRNA sense strand
cuacguaccuguuguuaug

SEQ ID NO: 1898498 - RNA, 19 nt, Homo sapiens
  misc_RNA (1)...(19): siRNA sense strand
cuacaagagucaagauuug

SEQ ID NO: 1898499 - RNA, 19 nt, Homo sapiens
  misc_RNA (1)...(19): siRNA sense strand
uaaauuuccucauccauuc

SEQ ID NO: 1898500 - RNA, 19 nt, Homo sapiens
  misc_RNA (1)...(19): siRNA sense strand
uaacauacccuuuguguac

SEQ ID NO: 1898501 - RNA, 19 nt, Homo sapiens
  misc_RNA (1)...(19): siRNA sense strand
ugaagacaauccugaaaga

SEQ ID NO: 1898502 - RNA, 19 nt, Homo sapiens
  misc_RNA (1)...(19): siRNA sense strand
gagaauaucaucaugcaau

SEQ ID NO: 1898503 - RNA, 19 nt, Homo sapiens
  misc_RNA (1)...(19): siRNA sense strand
ggaaauggaggaguuugua

SEQ ID NO: 1898504 - RNA, 19 nt, Homo sapiens
  misc_RNA (1)...(19): siRNA sense strand
caaaggagccaaacaucuu

SEQ ID NO: 1898505 - RNA, 19 nt, Homo sapiens
  misc_RNA (1)...(19): siRNA sense strand
gauaauauugcucacauga

SEQ ID NO: 1898506 - RNA, 19 nt, Homo sapiens
  misc_RNA (1)...(19): siRNA sense strand
ggaagacccacuacauuau

SEQ ID NO: 1898507 - RNA, 19 nt, Homo sapiens
  misc_RNA (1)...(19): siRNA sense strand
gagauuugaugggaauaaa

SEQ ID NO: 1898508 - RNA, 19 nt, Homo sapiens
  misc_RNA (1)...(19): siRNA sense strand
cuaaggaaauggaggaguu

SEQ ID NO: 1898509 - RNA, 19 nt, Homo sapiens
  misc_RNA (1)...(19): siRNA sense strand
ucaguaacaugacagaaga

SEQ ID NO: 1898510 - RNA, 19 nt, Homo sapiens
  misc_RNA (1)...(19): siRNA sense strand
gcugcuggcugagcuauuu

SEQ ID NO: 1898511 - RNA, 19 nt, Homo sapiens
  misc_RNA (1)...(19): siRNA sense strand
agaaagggccaacguaauu

SEQ ID NO: 1898512 - RNA, 19 nt, Homo sapiens
  misc_RNA (1)...(19): siRNA sense strand
gcacaguggaggauuuauu

SEQ ID NO: 1898513 - RNA, 19 nt, Homo sapiens
  misc_RNA (1)...(19): siRNA sense strand
caagggagcagcuguuaga

SEQ ID NO: 1898514 - RNA, 19 nt, Homo sapiens
  misc_RNA (1)...(19): siRNA sense strand
cauccacucuuaaacuuga

SEQ ID NO: 1898515 - RNA, 19 nt, Homo sapiens
  misc_RNA (1)...(19): siRNA sense strand
ggacuacaguucugcugau

SEQ ID NO: 1898516 - RNA, 19 nt, Homo sapiens
  misc_RNA (1)...(19): siRNA sense strand
uaauauugcucacaugaag

SEQ ID NO: 1898517 - RNA, 19 nt, Homo sapiens
  misc_RNA (1)...(19): siRNA sense strand
guacuggcaucuucagcuu

SEQ ID NO: 1898518 - RNA, 19 nt, Homo sapiens
  misc_RNA (1)...(19): siRNA sense strand
cgagcagucuucuggauug

SEQ ID NO: 1898519 - RNA, 19 nt, Homo sapiens
  misc_RNA (1)...(19): siRNA sense strand
aggaagacccacuacauua

SEQ ID NO: 1898520 - RNA, 19 nt, Homo sapiens
  misc_RNA (1)...(19): siRNA sense strand
cgaaacuccuggaauuuua

SEQ ID NO: 1898521 - RNA, 19 nt, Homo sapiens
  misc_RNA (1)...(19): siRNA sense strand
guggaaaggugcugguaug

SEQ ID NO: 1898522 - RNA, 19 nt, Homo sapiens
  misc_RNA (1)...(19): siRNA sense strand
gcagucuucuggauugaau

SEQ ID NO: 1898523 - RNA, 19 nt, Homo sapiens
  misc_RNA (1)...(19): siRNA sense strand
gaaagggccaacguaauug

SEQ ID NO: 1898524 - RNA, 19 nt, Homo sapiens
  misc_RNA (1)...(19): siRNA sense strand
gaagacaauccugaaagaa

SEQ ID NO: 1898525 - RNA, 19 nt, Homo sapiens
  misc_RNA (1)...(19): siRNA sense strand
gcugagcuauuuaacauac

SEQ ID NO: 1898526 - RNA, 19 nt, Homo sapiens
  misc_RNA (1)...(19): siRNA sense strand
ggugggcauuccauuguuu

SEQ ID NO: 1898527 - RNA, 19 nt, Homo sapiens
  misc_RNA (1)...(19): siRNA sense strand
ccagaugccuuaggucuca

SEQ ID NO: 1898528 - RNA, 19 nt, Homo sapiens
  misc_RNA (1)...(19): siRNA sense strand
uaaaccagaugccuuaggu

SEQ ID NO: 1898529 - RNA, 19 nt, Homo sapiens
  misc_RNA (1)...(19): siRNA sense strand
ugacuguacuggcaucuuc

SEQ ID NO: 1898530 - RNA, 19 nt, Homo sapiens
  misc_RNA (1)...(19): siRNA sense strand
cgacucauccacucuuaaa

SEQ ID NO: 1898531 - RNA, 19 nt, Homo sapiens
  misc_RNA (1)...(19): siRNA sense strand
gacuacaguucugcugaua

SEQ ID NO: 1898532 - RNA, 19 nt, Homo sapiens
  misc_RNA (1)...(19): siRNA sense strand
gagauugucagaaauucaa

SEQ ID NO: 1898533 - RNA, 19 nt, Homo sapiens
  misc_RNA (1)...(19): siRNA sense strand
gaaguuugcuagaaaagga

SEQ ID NO: 1898534 - RNA, 19 nt, Homo sapiens
  misc_RNA (1)...(19): siRNA sense strand
cuacaguucugcugauaca

SEQ ID NO: 1898535 - RNA, 19 nt, Homo sapiens
  misc_RNA (1)...(19): siRNA sense strand
ucuggaaguuugcuagaaa

SEQ ID NO: 1898536 - RNA, 19 nt, Homo sapiens
  misc_RNA (1)...(19): siRNA sense strand
ucaauggucaguaacauga

SEQ ID NO: 1898537 - RNA, 19 nt, Homo sapiens
  misc_RNA (1)...(19): siRNA sense strand
uggcugagcuauuuaacau

SEQ ID NO: 1898538 - RNA, 19 nt, Homo sapiens
  misc_RNA (1)...(19): siRNA sense strand
gcucugaaauggacuacag

SEQ ID NO: 1898539 - RNA, 19 nt, Homo sapiens
  misc_RNA (1)...(19): siRNA sense strand
gaagacccacuacauuauc

SEQ ID NO: 1898540 - RNA, 19 nt, Homo sapiens
  misc_RNA (1)...(19): siRNA sense strand
caacaugaucaaccaguga

SEQ ID NO: 1898541 - RNA, 19 nt, Homo sapiens
  misc_RNA (1)...(19): siRNA sense strand
augcgaaacuccuggaauu

SEQ ID NO: 1898542 - RNA, 19 nt, Homo sapiens
  misc_RNA (1)...(19): siRNA sense strand
uggcaaccgugcuauuuau

SEQ ID NO: 1898543 - RNA, 19 nt, Homo sapiens
  misc_RNA (1)...(19): siRNA sense strand
ccacaaaggagccaaacau

SEQ ID NO: 1898544 - RNA, 19 nt, Homo sapiens
  misc_RNA (1)...(19): siRNA sense strand
uaacaugacagaagaaagg

SEQ ID NO: 1898545 - RNA, 19 nt, Homo sapiens
  misc_RNA (1)...(19): siRNA sense strand
cuguaaagauguaguuuca

SEQ ID NO: 1898546 - RNA, 19 nt, Homo sapiens
  misc_RNA (1)...(19): siRNA sense strand
gaguggacuucaacacaau

SEQ ID NO: 1898547 - RNA, 19 nt, Homo sapiens
  misc_RNA (1)...(19): siRNA sense strand
agaguggacuucaacacaa

SEQ ID NO: 1898548 - RNA, 19 nt, Homo sapiens
  misc_RNA (1)...(19): siRNA sense strand
ggagauuugaugggaauaa

SEQ ID NO: 1898549 - RNA, 19 nt, Homo sapiens
  misc_RNA (1)...(19): siRNA sense strand
ccucauccauucuuaccaa

SEQ ID NO: 1898550 - RNA, 19 nt, Homo sapiens
  misc_RNA (1)...(19): siRNA sense strand
cacaguggaggauuuauuu

SEQ ID NO: 1898551 - RNA, 19 nt, Homo sapiens
  misc_RNA (1)...(19): siRNA sense strand
ugcaauugguuaagagauu

SEQ ID NO: 1898552 - RNA, 19 nt, Homo sapiens
  misc_RNA (1)...(19): siRNA sense strand
guggcaaccgugcuauuua

SEQ ID NO: 1898553 - RNA, 19 nt, Homo sapiens
  misc_RNA (1)...(19): siRNA sense strand
gagcagucuucuggauuga

SEQ ID NO: 1898554 - RNA, 19 nt, Homo sapiens
  misc_RNA (1)...(19): siRNA sense strand
uaggaagacccacuacauu

SEQ ID NO: 1898555 - RNA, 19 nt, Homo sapiens
  misc_RNA (1)...(19): siRNA sense strand
caaccgugcuauuuaucau

SEQ ID NO: 1898556 - RNA, 19 nt, Homo sapiens
  misc_RNA (1)...(19): siRNA sense strand
gcaaccgugcuauuuauca

SEQ ID NO: 1898557 - RNA, 19 nt, Homo sapiens
  misc_RNA (1)...(19): siRNA sense strand
guaccacucuuuggaugug

SEQ ID NO: 1898558 - RNA, 19 nt, Homo sapiens
  misc_RNA (1)...(19): siRNA sense strand
gccuuuggaugaauaugaa

SEQ ID NO: 1898559 - RNA, 19 nt, Homo sapiens
  misc_RNA (1)...(19): siRNA sense strand
gaauaucaucaugcaauug

SEQ ID NO: 1898560 - RNA, 19 nt, Homo sapiens
  misc_RNA (1)...(19): siRNA sense strand
gauccuucauauaaagaga

SEQ ID NO: 1898561 - RNA, 19 nt, Homo sapiens
  misc_RNA (1)...(19): siRNA sense strand
gugggcaauuaaugacaua

SEQ ID NO: 1898562 - RNA, 19 nt, Homo sapiens
  misc_RNA (1)...(19): siRNA sense strand
agaagaaagggccaacgua

SEQ ID NO: 1898563 - RNA, 19 nt, Homo sapiens
  misc_RNA (1)...(19): siRNA sense strand
agacaauccugaaagaacu

SEQ ID NO: 1898564 - RNA, 19 nt, Homo sapiens
  misc_RNA (1)...(19): siRNA sense strand
gccaagggagcagcuguua

SEQ ID NO: 1898565 - RNA, 19 nt, Homo sapiens
  misc_RNA (1)...(19): siRNA sense strand
aauaugcucuaugugcuuu

SEQ ID NO: 1898566 - RNA, 19 nt, Homo sapiens
  misc_RNA (1)...(19): siRNA sense strand
gaaaaggaaagaagggaaa

SEQ ID NO: 1898567 - RNA, 19 nt, Homo sapiens
  misc_RNA (1)...(19): siRNA sense strand
agccaaacaucuucgaguu

SEQ ID NO: 1898568 - RNA, 19 nt, Homo sapiens
  misc_RNA (1)...(19): siRNA sense strand
gcagaauacagccuuugga

SEQ ID NO: 1898569 - RNA, 19 nt, Homo sapiens
  misc_RNA (1)...(19): siRNA sense strand
auacucgacuguacaagug

SEQ ID NO: 1898570 - RNA, 19 nt, Homo sapiens
  misc_RNA (1)...(19): siRNA sense strand
ggucaauggucaguaacau

SEQ ID NO: 1898571 - RNA, 19 nt, Homo sapiens
  misc_RNA (1)...(19): siRNA sense strand
uaucugagacaaugaggaa

SEQ ID NO: 1898572 - RNA, 19 nt, Homo sapiens
  misc_RNA (1)...(19): siRNA sense strand
gaaaggcacaguggaggau

SEQ ID NO: 1898573 - RNA, 19 nt, Homo sapiens
  misc_RNA (1)...(19): siRNA sense strand
gaaauggaggaguuuguac

SEQ ID NO: 1898574 - RNA, 19 nt, Homo sapiens
  misc_RNA (1)...(19): siRNA sense strand
ugaagaagugggaucaguu

SEQ ID NO: 1898575 - RNA, 19 nt, Homo sapiens
  misc_RNA (1)...(19): siRNA sense strand
ugaaguuuauccuacaucu

SEQ ID NO: 1898576 - RNA, 19 nt, Homo sapiens
  misc_RNA (1)...(19): siRNA sense strand
ugaaauggacuacaguucu

SEQ ID NO: 1898577 - RNA, 19 nt, Homo sapiens
  misc_RNA (1)...(19): siRNA sense strand
ugaggaaagcugacauaug

SEQ ID NO: 1898578 - RNA, 19 nt, Homo sapiens
  misc_RNA (1)...(19): siRNA sense strand
gggaucaguuuuacaguga

SEQ ID NO: 1898579 - RNA, 19 nt, Homo sapiens
  misc_RNA (1)...(19): siRNA sense strand
uaccuguuguuaugucaaa

SEQ ID NO: 1898580 - RNA, 19 nt, Homo sapiens
  misc_RNA (1)...(19): siRNA sense strand
caagaauucaacaugauca

SEQ ID NO: 1898581 - RNA, 19 nt, Homo sapiens
  misc_RNA (1)...(19): siRNA sense strand
cugaagacaguaauuaaug

SEQ ID NO: 1898582 - RNA, 19 nt, Homo sapiens
  misc_RNA (1)...(19): siRNA sense strand
uacagccuuuggaugaaua

SEQ ID NO: 1898583 - RNA, 19 nt, Homo sapiens
  misc_RNA (1)...(19): siRNA sense strand
caacgacucauccacucuu

SEQ ID NO: 1898584 - RNA, 19 nt, Homo sapiens
  misc_RNA (1)...(19): siRNA sense strand
gaaguuuauccuacaucuu

SEQ ID NO: 1898585 - RNA, 19 nt, Homo sapiens
  misc_RNA (1)...(19): siRNA sense strand
ucaacacaaugucgaguac

SEQ ID NO: 1898586 - RNA, 19 nt, Homo sapiens
  misc_RNA (1)...(19): siRNA sense strand
cccacuacauuaucugaga

SEQ ID NO: 1898587 - RNA, 19 nt, Homo sapiens
  misc_RNA (1)...(19): siRNA sense strand
cagggagaauucaaucaca

SEQ ID NO: 1898588 - RNA, 19 nt, Homo sapiens
  misc_RNA (1)...(19): siRNA sense strand
uguaaauucuccaacugau

SEQ ID NO: 1898589 - RNA, 19 nt, Homo sapiens
  misc_RNA (1)...(19): siRNA sense strand
ccuguaaauucuccaacug

SEQ ID NO: 1898590 - RNA, 19 nt, Homo sapiens
  misc_RNA (1)...(19): siRNA sense strand
guaaauucuccaacugauc

SEQ ID NO: 1898591 - RNA, 19 nt, Homo sapiens
  misc_RNA (1)...(19): siRNA sense strand
gagaauucaaucacacucu

SEQ ID NO: 1898592 - RNA, 19 nt, Homo sapiens
  misc_RNA (1)...(19): siRNA sense strand
ccaccacguuuuccuuuug

SEQ ID NO: 1898593 - RNA, 19 nt, Homo sapiens
  misc_RNA (1)...(19): siRNA sense strand
gcucuugcagcguguuuca

SEQ ID NO: 1898594 - RNA, 19 nt, Homo sapiens
  misc_RNA (1)...(19): siRNA sense strand
acuuggaucuugggccuuu

SEQ ID NO: 1898595 - RNA, 19 nt, Homo sapiens
  misc_RNA (1)...(19): siRNA sense strand
gguccagggagaauucaau

SEQ ID NO: 1898596 - RNA, 19 nt, Homo sapiens
  misc_RNA (1)...(19): siRNA sense strand
gauccugcccucccuacuc

SEQ ID NO: 1898597 - RNA, 19 nt, Homo sapiens
  misc_RNA (1)...(19): siRNA sense strand
gcaagauccgggaagagua

SEQ ID NO: 1898598 - RNA, 19 nt, Homo sapiens
  misc_RNA (1)...(19): siRNA sense strand
gcaguucacggccauguuc

SEQ ID NO: 1898599 - RNA, 19 nt, Homo sapiens
  misc_RNA (1)...(19): siRNA sense strand
uggagagaaucaacgugua

SEQ ID NO: 1898600 - RNA, 19 nt, Homo sapiens
  misc_RNA (1)...(19): siRNA sense strand
gaacaccuucagcgucaug

SEQ ID NO: 1898601 - RNA, 19 nt, Homo sapiens
  misc_RNA (1)...(19): siRNA sense strand
caagaacagcagcuacuuc

SEQ ID NO: 1898602 - RNA, 19 nt, Homo sapiens
  misc_RNA (1)...(19): siRNA sense strand
ccaagggccacuacacaga

SEQ ID NO: 1898603 - RNA, 19 nt, Homo sapiens
  misc_RNA (1)...(19): siRNA sense strand
gcgagggcauggacgagau

SEQ ID NO: 1898604 - RNA, 19 nt, Homo sapiens
  misc_RNA (1)...(19): siRNA sense strand
gagcucacccagcagaugu

SEQ ID NO: 1898605 - RNA, 19 nt, Homo sapiens
  misc_RNA (1)...(19): siRNA sense strand
guacccagaccgcaucaug

SEQ ID NO: 1898606 - RNA, 19 nt, Homo sapiens
  misc_RNA (1)...(19): siRNA sense strand
ucagcaagauccgggaaga

SEQ ID NO: 1898607 - RNA, 19 nt, Homo sapiens
  misc_RNA (1)...(19): siRNA sense strand
ggagagaaucaacguguac

SEQ ID NO: 1898608 - RNA, 19 nt, Homo sapiens
  misc_RNA (1)...(19): siRNA sense strand
gcauggacgagauggaguu

SEQ ID NO: 1898609 - RNA, 19 nt, Homo sapiens
  misc_RNA (1)...(19): siRNA sense strand
ggagguggacgagcagaug

SEQ ID NO: 1898610 - RNA, 19 nt, Homo sapiens
  misc_RNA (1)...(19): siRNA sense strand
gcgcaucuccgagcaguuc

SEQ ID NO: 1898611 - RNA, 19 nt, Homo sapiens
  misc_RNA (1)...(19): siRNA sense strand
gagaaucaacguguacuac

SEQ ID NO: 1898612 - RNA, 19 nt, Homo sapiens
  misc_RNA (1)...(19): siRNA sense strand
ucaacgugcagaacaagaa

SEQ ID NO: 1898613 - RNA, 19 nt, Homo sapiens
  misc_RNA (1)...(19): siRNA sense strand
ccagaccgcaucaugaaca

SEQ ID NO: 1898614 - RNA, 19 nt, Homo sapiens
  misc_RNA (1)...(19): siRNA sense strand
gggcgaggacgaggcuuaa

SEQ ID NO: 1898615 - RNA, 19 nt, Homo sapiens
  misc_RNA (1)...(19): siRNA sense strand
cagaguggagccgggaaua

SEQ ID NO: 1898616 - RNA, 19 nt, Homo sapiens
  misc_RNA (1)...(19): siRNA sense strand
caagauccgggaagaguac

SEQ ID NO: 1898617 - RNA, 19 nt, Homo sapiens
  misc_RNA (1)...(19): siRNA sense strand
ucaccgaggccgagagcaa

SEQ ID NO: 1898618 - RNA, 19 nt, Homo sapiens
  misc_RNA (1)...(19): siRNA sense strand
gcaagcuggcggugaacau

SEQ ID NO: 1898619 - RNA, 19 nt, Homo sapiens
  misc_RNA (1)...(19): siRNA sense strand
ucgacucgguccuggaugu

SEQ ID NO: 1898620 - RNA, 19 nt, Homo sapiens
  misc_RNA (1)...(19): siRNA sense strand
gaagccaggugacuuuaua

SEQ ID NO: 1898621 - RNA, 19 nt, Homo sapiens
  misc_RNA (1)...(19): siRNA sense strand
gcacauauuuaccugaauc

SEQ ID NO: 1898622 - RNA, 19 nt, Homo sapiens
  misc_RNA (1)...(19): siRNA sense strand
aaauggaaauggcuguuua

SEQ ID NO: 1898623 - RNA, 19 nt, Homo sapiens
  misc_RNA (1)...(19): siRNA sense strand
caauggaucccgagacuuu

SEQ ID NO: 1898624 - RNA, 19 nt, Homo sapiens
  misc_RNA (1)...(19): siRNA sense strand
ggacuugggcccaguuuau

SEQ ID NO: 1898625 - RNA, 19 nt, Homo sapiens
  misc_RNA (1)...(19): siRNA sense strand
acagagauauggaaucaga

SEQ ID NO: 1898626 - RNA, 19 nt, Homo sapiens
  misc_RNA (1)...(19): siRNA sense strand
ccaaacguguguucuggaa

SEQ ID NO: 1898627 - RNA, 19 nt, Homo sapiens
  misc_RNA (1)...(19): siRNA sense strand
ccaggugacuuuauacaca

SEQ ID NO: 1898628 - RNA, 19 nt, Homo sapiens
  misc_RNA (1)...(19): siRNA sense strand
auacagagauauggaauca

SEQ ID NO: 1898629 - RNA, 19 nt, Homo sapiens
  misc_RNA (1)...(19): siRNA sense strand
ccaaagcucaggauucuuc

SEQ ID NO: 1898630 - RNA, 19 nt, Homo sapiens
  misc_RNA (1)...(19): siRNA sense strand
ucacaucgagccacugaaa

SEQ ID NO: 1898631 - RNA, 19 nt, Homo sapiens
  misc_RNA (1)...(19): siRNA sense strand
gcuacagccugagagauga

SEQ ID NO: 1898632 - RNA, 19 nt, Homo sapiens
  misc_RNA (1)...(19): siRNA sense strand
gacagaagaaucaucaugu

SEQ ID NO: 1898633 - RNA, 19 nt, Homo sapiens
  misc_RNA (1)...(19): siRNA sense strand
ccagagaucgggagacaug

SEQ ID NO: 1898634 - RNA, 19 nt, Homo sapiens
  misc_RNA (1)...(19): siRNA sense strand
gcacaucacgggccugaag

SEQ ID NO: 1898635 - RNA, 19 nt, Homo sapiens
  misc_RNA (1)...(19): siRNA sense strand
acagaagaaucaucaugug

SEQ ID NO: 1898636 - RNA, 19 nt, Homo sapiens
  misc_RNA (1)...(19): siRNA sense strand
uuugggagaugcacauauu

SEQ ID NO: 1898637 - RNA, 19 nt, Homo sapiens
  misc_RNA (1)...(19): siRNA sense strand
ugggagaugcacauauuua

SEQ ID NO: 1898638 - RNA, 19 nt, Homo sapiens
  misc_RNA (1)...(19): siRNA sense strand
gaauacagagauauggaau

SEQ ID NO: 1898639 - RNA, 19 nt, Homo sapiens
  misc_RNA (1)...(19): siRNA sense strand
aaccaacccugacgacaga

SEQ ID NO: 1898640 - RNA, 19 nt, Homo sapiens
  misc_RNA (1)...(19): siRNA sense strand
cgacagaagaaucaucaug

SEQ ID NO: 1898641 - RNA, 19 nt, Homo sapiens
  misc_RNA (1)...(19): siRNA sense strand
ucuauguggugaacaguga

SEQ ID NO: 1898642 - RNA, 19 nt, Homo sapiens
  misc_RNA (1)...(19): siRNA sense strand
ugaauucccucugcugaca

SEQ ID NO: 1898643 - RNA, 19 nt, Homo sapiens
  misc_RNA (1)...(19): siRNA sense strand
guacaugauugcgcacauc

SEQ ID NO: 1898644 - RNA, 19 nt, Homo sapiens
  misc_RNA (1)...(19): siRNA sense strand
gaccaacugcaaagaguga

SEQ ID NO: 1898645 - RNA, 19 nt, Homo sapiens
  misc_RNA (1)...(19): siRNA sense strand
aaagagugauugacaccau

SEQ ID NO: 1898646 - RNA, 19 nt, Homo sapiens
  misc_RNA (1)...(19): siRNA sense strand
gauccacaaaugcuaaaga

SEQ ID NO: 1898647 - RNA, 19 nt, Homo sapiens
  misc_RNA (1)...(19): siRNA sense strand
aaucugggaugccaaugga

SEQ ID NO: 1898648 - RNA, 19 nt, Homo sapiens
  misc_RNA (1)...(19): siRNA sense strand
gccaauggaucccgagacu

SEQ ID NO: 1898649 - RNA, 19 nt, Homo sapiens
  misc_RNA (1)...(19): siRNA sense strand
caaccaaacguguguucug

SEQ ID NO: 1898650 - RNA, 19 nt, Homo sapiens
  misc_RNA (1)...(19): siRNA sense strand
gacgacagaagaaucauca

SEQ ID NO: 1898651 - RNA, 19 nt, Homo sapiens
  misc_RNA (1)...(19): siRNA sense strand
caacugcaaagagugauug

SEQ ID NO: 1898652 - RNA, 19 nt, Homo sapiens
  misc_RNA (1)...(19): siRNA sense strand
gcucaggauucuucgaaaa

SEQ ID NO: 1898653 - RNA, 19 nt, Homo sapiens
  misc_RNA (1)...(19): siRNA sense strand
ucccaaagcucaggauucu

SEQ ID NO: 1898654 - RNA, 19 nt, Homo sapiens
  misc_RNA (1)...(19): siRNA sense strand
gcgagaacccagaccuuuc

SEQ ID NO: 1898655 - RNA, 19 nt, Homo sapiens
  misc_RNA (1)...(19): siRNA sense strand
gugacuuuauacacacuuu

SEQ ID NO: 1898656 - RNA, 19 nt, Homo sapiens
  misc_RNA (1)...(19): siRNA sense strand
gccaugcccucugccaguu

SEQ ID NO: 1898657 - RNA, 19 nt, Homo sapiens
  misc_RNA (1)...(19): siRNA sense strand
aauccgcauccaacuauua

SEQ ID NO: 1898658 - RNA, 19 nt, Homo sapiens
  misc_RNA (1)...(19): siRNA sense strand
acaauccgcauccaacuau

SEQ ID NO: 1898659 - RNA, 19 nt, Homo sapiens
  misc_RNA (1)...(19): siRNA sense strand
uaccagagaucgggagaca

SEQ ID NO: 1898660 - RNA, 19 nt, Homo sapiens
  misc_RNA (1)...(19): siRNA sense strand
uaucaagggauccacaaau

SEQ ID NO: 1898661 - RNA, 19 nt, Homo sapiens
  misc_RNA (1)...(19): siRNA sense strand
aucaagggauccacaaaug

SEQ ID NO: 1898662 - RNA, 19 nt, Homo sapiens
  misc_RNA (1)...(19): siRNA sense strand
ugagaaaauugaugacuuc

SEQ ID NO: 1898663 - RNA, 19 nt, Homo sapiens
  misc_RNA (1)...(19): siRNA sense strand
gcauccaacuauuaaaaug

SEQ ID NO: 1898664 - RNA, 19 nt, Homo sapiens
  misc_RNA (1)...(19): siRNA sense strand
gcagaauacagagauaugg

SEQ ID NO: 1898665 - RNA, 19 nt, Homo sapiens
  misc_RNA (1)...(19): siRNA sense strand
caauccgcauccaacuauu

SEQ ID NO: 1898666 - RNA, 19 nt, Homo sapiens
  misc_RNA (1)...(19): siRNA sense strand
gcccugcucacguacauga

SEQ ID NO: 1898667 - RNA, 19 nt, Homo sapiens
  misc_RNA (1)...(19): siRNA sense strand
cagaauacagagauaugga

SEQ ID NO: 1898668 - RNA, 19 nt, Homo sapiens
  misc_RNA (1)...(19): siRNA sense strand
cauauuuaccugaaucaca

SEQ ID NO: 1898669 - RNA, 19 nt, Homo sapiens
  misc_RNA (1)...(19): siRNA sense strand
gggcagaauacagagauau

SEQ ID NO: 1898670 - RNA, 19 nt, Homo sapiens
  misc_RNA (1)...(19): siRNA sense strand
ggcagaauacagagauaug

SEQ ID NO: 1898671 - RNA, 19 nt, Homo sapiens
  misc_RNA (1)...(19): siRNA sense strand
agaauacagagauauggaa

SEQ ID NO: 1898672 - RNA, 19 nt, Homo sapiens
  misc_RNA (1)...(19): siRNA sense strand
augcacauauuuaccugaa

SEQ ID NO: 1898673 - RNA, 19 nt, Homo sapiens
  misc_RNA (1)...(19): siRNA sense strand
gggagaugcacauauuuac

SEQ ID NO: 1898674 - RNA, 19 nt, Homo sapiens
  misc_RNA (1)...(19): siRNA sense strand
caucaugugcgcuuggaau

SEQ ID NO: 1898675 - RNA, 19 nt, Homo sapiens
  misc_RNA (1)...(19): siRNA sense strand
gggacuugggcccaguuua

SEQ ID NO: 1898676 - RNA, 19 nt, Homo sapiens
  misc_RNA (1)...(19): siRNA sense strand
gagaugcacauauuuaccu

SEQ ID NO: 1898677 - RNA, 19 nt, Homo sapiens
  misc_RNA (1)...(19): siRNA sense strand
cugcucacguacaugauug

SEQ ID NO: 1898678 - RNA, 19 nt, Homo sapiens
  misc_RNA (1)...(19): siRNA sense strand
gaaaaucugggaugccaau

SEQ ID NO: 1898679 - RNA, 19 nt, Homo sapiens
  misc_RNA (1)...(19): siRNA sense strand
aaucacaucgagccacuga

SEQ ID NO: 1898680 - RNA, 19 nt, Homo sapiens
  misc_RNA (1)...(19): siRNA sense strand
caagggauccacaaaugcu

SEQ ID NO: 1898681 - RNA, 19 nt, Homo sapiens
  misc_RNA (1)...(19): siRNA sense strand
uauacacacuuugggagau

SEQ ID NO: 1898682 - RNA, 19 nt, Homo sapiens
  misc_RNA (1)...(19): siRNA sense strand
cugcaaagagugauugaca

SEQ ID NO: 1898683 - RNA, 19 nt, Homo sapiens
  misc_RNA (1)...(19): siRNA sense strand
gacaaccaaacguguguuc

SEQ ID NO: 1898684 - RNA, 19 nt, Homo sapiens
  misc_RNA (1)...(19): siRNA sense strand
uacaauccgcauccaacua

SEQ ID NO: 1898685 - RNA, 19 nt, Homo sapiens
  misc_RNA (1)...(19): siRNA sense strand
guacaauccgcauccaacu

SEQ ID NO: 1898686 - RNA, 19 nt, Homo sapiens
  misc_RNA (1)...(19): siRNA sense strand
cggugugccuuucaacauc

SEQ ID NO: 1898687 - RNA, 19 nt, Homo sapiens
  misc_RNA (1)...(19): siRNA sense strand
ccggcacccugucgguauu

SEQ ID NO: 1898688 - RNA, 19 nt, Homo sapiens
  misc_RNA (1)...(19): siRNA sense strand
caacccugacgacagaaga

SEQ ID NO: 1898689 - RNA, 19 nt, Homo sapiens
  misc_RNA (1)...(19): siRNA sense strand
auacacacuuugggagaug

SEQ ID NO: 1898690 - RNA, 19 nt, Homo sapiens
  misc_RNA (1)...(19): siRNA sense strand
gagcauaccugagcguuga

SEQ ID NO: 1898691 - RNA, 19 nt, Homo sapiens
  misc_RNA (1)...(19): siRNA sense strand
ggaguggccugguucuaug

SEQ ID NO: 1898692 - RNA, 19 nt, Homo sapiens
  misc_RNA (1)...(19): siRNA sense strand
gcacguccauccucuuugg

SEQ ID NO: 1898693 - RNA, 19 nt, Homo sapiens
  misc_RNA (1)...(19): siRNA sense strand
cuacggagccuacaucuuc

SEQ ID NO: 1898694 - RNA, 19 nt, Homo sapiens
  misc_RNA (1)...(19): siRNA sense strand
acaacaaguucaccaacaa

SEQ ID NO: 1898695 - RNA, 19 nt, Homo sapiens
  misc_RNA (1)...(19): siRNA sense strand
ucacgcuccuggaccauuu

SEQ ID NO: 1898696 - RNA, 19 nt, Homo sapiens
  misc_RNA (1)...(19): siRNA sense strand
ggccagggcugaucuucau

SEQ ID NO: 1898697 - RNA, 19 nt, Homo sapiens
  misc_RNA (1)...(19): siRNA sense strand
ucacagccaccaugccaua

SEQ ID NO: 1898698 - RNA, 19 nt, Homo sapiens
  misc_RNA (1)...(19): siRNA sense strand
cgaggcgucuguuuggauu

SEQ ID NO: 1898699 - RNA, 19 nt, Homo sapiens
  misc_RNA (1)...(19): siRNA sense strand
cgaaggagguggagcucau

SEQ ID NO: 1898700 - RNA, 19 nt, Homo sapiens
  misc_RNA (1)...(19): siRNA sense strand
cagggaaggugguauggau

SEQ ID NO: 1898701 - RNA, 19 nt, Homo sapiens
  misc_RNA (1)...(19): siRNA sense strand
gccguggucuucuucauca

SEQ ID NO: 1898702 - RNA, 19 nt, Homo sapiens
  misc_RNA (1)...(19): siRNA sense strand
gcuggugucuggaagaucu

SEQ ID NO: 1898703 - RNA, 19 nt, Homo sapiens
  misc_RNA (1)...(19): siRNA sense strand
ucaacucccugacgagcuu

SEQ ID NO: 1898704 - RNA, 19 nt, Homo sapiens
  misc_RNA (1)...(19): siRNA sense strand
gguauggagucagugauca

SEQ ID NO: 1898705 - RNA, 19 nt, Homo sapiens
  misc_RNA (1)...(19): siRNA sense strand
gggcaagaagaucgacuuu

SEQ ID NO: 1898706 - RNA, 19 nt, Homo sapiens
  misc_RNA (1)...(19): siRNA sense strand
gcgacgacauccagcagau

SEQ ID NO: 1898707 - RNA, 19 nt, Homo sapiens
  misc_RNA (1)...(19): siRNA sense strand
ccacaccugcugccgagua

SEQ ID NO: 1898708 - RNA, 19 nt, Homo sapiens
  misc_RNA (1)...(19): siRNA sense strand
ccugggcgcugcacuaucu

SEQ ID NO: 1898709 - RNA, 19 nt, Homo sapiens
  misc_RNA (1)...(19): siRNA sense strand
uacaacaaguucaccaaca

SEQ ID NO: 1898710 - RNA, 19 nt, Homo sapiens
  misc_RNA (1)...(19): siRNA sense strand
gcgcugcacuaucucuucu

SEQ ID NO: 1898711 - RNA, 19 nt, Homo sapiens
  misc_RNA (1)...(19): siRNA sense strand
ggagguggagcucauccuu

SEQ ID NO: 1898712 - RNA, 19 nt, Homo sapiens
  misc_RNA (1)...(19): siRNA sense strand
ugcaacaacuccuggaaca

SEQ ID NO: 1898713 - RNA, 19 nt, Homo sapiens
  misc_RNA (1)...(19): siRNA sense strand
gcaguucagcgacgacauc

SEQ ID NO: 1898714 - RNA, 19 nt, Homo sapiens
  misc_RNA (1)...(19): siRNA sense strand
cagccugccuggguccuuu

SEQ ID NO: 1898715 - RNA, 19 nt, Homo sapiens
  misc_RNA (1)...(19): siRNA sense strand
gggaaggugguauggauca

SEQ ID NO: 1898716 - RNA, 19 nt, Homo sapiens
  misc_RNA (1)...(19): siRNA sense strand
uaugucggcuucuucuaca

SEQ ID NO: 1898717 - RNA, 19 nt, Homo sapiens
  misc_RNA (1)...(19): siRNA sense strand
ucaucgugcugcucuacuu

SEQ ID NO: 1898718 - RNA, 19 nt, Homo sapiens
  misc_RNA (1)...(19): siRNA sense strand
gcucuucacgcucuucauc

SEQ ID NO: 1898719 - RNA, 19 nt, Homo sapiens
  misc_RNA (1)...(19): siRNA sense strand
ucuaugcggccuacaaguu

SEQ ID NO: 1898720 - RNA, 19 nt, Homo sapiens
  misc_RNA (1)...(19): siRNA sense strand
uagacggcaucagagcaua

SEQ ID NO: 1898721 - RNA, 19 nt, Homo sapiens
  misc_RNA (1)...(19): siRNA sense strand
ccugagcguugacuucuac

SEQ ID NO: 1898722 - RNA, 19 nt, Homo sapiens
  misc_RNA (1)...(19): siRNA sense strand
ccauugcacccgagaagga

SEQ ID NO: 1898723 - RNA, 19 nt, Homo sapiens
  misc_RNA (1)...(19): siRNA sense strand
cggcacguccauccucuuu

SEQ ID NO: 1898724 - RNA, 19 nt, Homo sapiens
  misc_RNA (1)...(19): siRNA sense strand
gaucaccgggcucaucgau

SEQ ID NO: 1898725 - RNA, 19 nt, Homo sapiens
  misc_RNA (1)...(19): siRNA sense strand
ccgugggacucaugucuuc

SEQ ID NO: 1898726 - RNA, 19 nt, Homo sapiens
  misc_RNA (1)...(19): siRNA sense strand
agguggagcucauccuugu

SEQ ID NO: 1898727 - RNA, 19 nt, Homo sapiens
  misc_RNA (1)...(19): siRNA sense strand
ccuggguccuuucgagaga

SEQ ID NO: 1898728 - RNA, 19 nt, Homo sapiens
  misc_RNA (1)...(19): siRNA sense strand
ccacuacggagccuacauc

SEQ ID NO: 1898729 - RNA, 19 nt, Homo sapiens
  misc_RNA (1)...(19): siRNA sense strand
uaucucuucuccuccuuca

SEQ ID NO: 1898730 - RNA, 19 nt, Homo sapiens
  misc_RNA (1)...(19): siRNA sense strand
ggugguauggagucaguga

SEQ ID NO: 1898731 - RNA, 19 nt, Homo sapiens
  misc_RNA (1)...(19): siRNA sense strand
guaugucggcuucuucuac

SEQ ID NO: 1898732 - RNA, 19 nt, Homo sapiens
  misc_RNA (1)...(19): siRNA sense strand
cggaguggccugguucuau

SEQ ID NO: 1898733 - RNA, 19 nt, Homo sapiens
  misc_RNA (1)...(19): siRNA sense strand
gcuacaacaaguucaccaa

SEQ ID NO: 1898734 - RNA, 19 nt, Homo sapiens
  misc_RNA (1)...(19): siRNA sense strand
gaaggugguauggaucaca

SEQ ID NO: 1898735 - RNA, 19 nt, Homo sapiens
  misc_RNA (1)...(19): siRNA sense strand
gguggcaucuacgucuuca

SEQ ID NO: 1898736 - RNA, 19 nt, Homo sapiens
  misc_RNA (1)...(19): siRNA sense strand
guggagcucauccuuguca

SEQ ID NO: 1898737 - RNA, 19 nt, Homo sapiens
  misc_RNA (1)...(19): siRNA sense strand
agccauagacggcaucaga

SEQ ID NO: 1898738 - RNA, 19 nt, Homo sapiens
  misc_RNA (1)...(19): siRNA sense strand
gaagaucugccccauacug

SEQ ID NO: 1898739 - RNA, 19 nt, Homo sapiens
  misc_RNA (1)...(19): siRNA sense strand
caacaaguucaccaacaac

SEQ ID NO: 1898740 - RNA, 19 nt, Homo sapiens
  misc_RNA (1)...(19): siRNA sense strand
gaucugccccauacugaaa

SEQ ID NO: 1898741 - RNA, 19 nt, Homo sapiens
  misc_RNA (1)...(19): siRNA sense strand
ggagaaugaugcccuggaa

SEQ ID NO: 1898742 - RNA, 19 nt, Homo sapiens
  misc_RNA (1)...(19): siRNA sense strand
aaagcuggcugcaagaauu

SEQ ID NO: 1898743 - RNA, 19 nt, Homo sapiens
  misc_RNA (1)...(19): siRNA sense strand
agcaggaacuggccaagua

SEQ ID NO: 1898744 - RNA, 19 nt, Homo sapiens
  misc_RNA (1)...(19): siRNA sense strand
ccaaccagacggagaauga

SEQ ID NO: 1898745 - RNA, 19 nt, Homo sapiens
  misc_RNA (1)...(19): siRNA sense strand
ggcuugagcugcagagauc

SEQ ID NO: 1898746 - RNA, 19 nt, Homo sapiens
  misc_RNA (1)...(19): siRNA sense strand
gcaaagcuggcugcaagaa

SEQ ID NO: 1898747 - RNA, 19 nt, Homo sapiens
  misc_RNA (1)...(19): siRNA sense strand
agagaucugcuaacucaaa

SEQ ID NO: 1898748 - RNA, 19 nt, Homo sapiens
  misc_RNA (1)...(19): siRNA sense strand
ggaacuggccaaguacuuc

SEQ ID NO: 1898749 - RNA, 19 nt, Homo sapiens
  misc_RNA (1)...(19): siRNA sense strand
gagaucugcuaacucaaac

SEQ ID NO: 1898750 - RNA, 19 nt, Homo sapiens
  misc_RNA (1)...(19): siRNA sense strand
ccuggaaccugaagaucug

SEQ ID NO: 1898751 - RNA, 19 nt, Homo sapiens
  misc_RNA (1)...(19): siRNA sense strand
gaacuggccaaguacuucu

SEQ ID NO: 1898752 - RNA, 19 nt, Homo sapiens
  misc_RNA (1)...(19): siRNA sense strand
agacuuucacauccuguua

SEQ ID NO: 1898753 - RNA, 19 nt, Homo sapiens
  misc_RNA (1)...(19): siRNA sense strand
caaagcuggcugcaagaau

SEQ ID NO: 1898754 - RNA, 19 nt, Homo sapiens
  misc_RNA (1)...(19): siRNA sense strand
aggaugaaaugaggcuuga

SEQ ID NO: 1898755 - RNA, 19 nt, Homo sapiens
  misc_RNA (1)...(19): siRNA sense strand
gcaggaacuggccaaguac

SEQ ID NO: 1898756 - RNA, 19 nt, Homo sapiens
  misc_RNA (1)...(19): siRNA sense strand
gaucaaggguguauuagua

SEQ ID NO: 1898757 - RNA, 19 nt, Homo sapiens
  misc_RNA (1)...(19): siRNA sense strand
gcacuuggauucaucuuaa

SEQ ID NO: 1898758 - RNA, 19 nt, Homo sapiens
  misc_RNA (1)...(19): siRNA sense strand
uaucagcgauggcuuauua

SEQ ID NO: 1898759 - RNA, 19 nt, Homo sapiens
  misc_RNA (1)...(19): siRNA sense strand
ggagagcgauggcuacuuu

SEQ ID NO: 1898760 - RNA, 19 nt, Homo sapiens
  misc_RNA (1)...(19): siRNA sense strand
uaacagagcuaacaaacug

SEQ ID NO: 1898761 - RNA, 19 nt, Homo sapiens
  misc_RNA (1)...(19): siRNA sense strand
gaugaaccauggcgaauaa

SEQ ID NO: 1898762 - RNA, 19 nt, Homo sapiens
  misc_RNA (1)...(19): siRNA sense strand
ggauauaucucaucuucaa

SEQ ID NO: 1898763 - RNA, 19 nt, Homo sapiens
  misc_RNA (1)...(19): siRNA sense strand
gagagaaggugcacaguau

SEQ ID NO: 1898764 - RNA, 19 nt, Homo sapiens
  misc_RNA (1)...(19): siRNA sense strand
gcaaauaucucaggugauc

SEQ ID NO: 1898765 - RNA, 19 nt, Homo sapiens
  misc_RNA (1)...(19): siRNA sense strand
guaaaggagucgugaaguu

SEQ ID NO: 1898766 - RNA, 19 nt, Homo sapiens
  misc_RNA (1)...(19): siRNA sense strand
ggaggagcauauuauuuaa

SEQ ID NO: 1898767 - RNA, 19 nt, Homo sapiens
  misc_RNA (1)...(19): siRNA sense strand
gaggauggcuuugcaaaug

SEQ ID NO: 1898768 - RNA, 19 nt, Homo sapiens
  misc_RNA (1)...(19): siRNA sense strand
ggauuuacaccacuaauuu

SEQ ID NO: 1898769 - RNA, 19 nt, Homo sapiens
  misc_RNA (1)...(19): siRNA sense strand
gcagaugacuugagagaag

SEQ ID NO: 1898770 - RNA, 19 nt, Homo sapiens
  misc_RNA (1)...(19): siRNA sense strand
aaacucacguccagcuuua

SEQ ID NO: 1898771 - RNA, 19 nt, Homo sapiens
  misc_RNA (1)...(19): siRNA sense strand
gaugaucuguggccaugua

SEQ ID NO: 1898772 - RNA, 19 nt, Homo sapiens
  misc_RNA (1)...(19): siRNA sense strand
gaagacaagccaugaaaga

SEQ ID NO: 1898773 - RNA, 19 nt, Homo sapiens
  misc_RNA (1)...(19): siRNA sense strand
ucaaggacaagaagaauua

SEQ ID NO: 1898774 - RNA, 19 nt, Homo sapiens
  misc_RNA (1)...(19): siRNA sense strand
gagaugcuguggucacgua

SEQ ID NO: 1898775 - RNA, 19 nt, Homo sapiens
  misc_RNA (1)...(19): siRNA sense strand
ccaauuaucucaaacuucu

SEQ ID NO: 1898776 - RNA, 19 nt, Homo sapiens
  misc_RNA (1)...(19): siRNA sense strand
uaagaaagauugguugcaa

SEQ ID NO: 1898777 - RNA, 19 nt, Homo sapiens
  misc_RNA (1)...(19): siRNA sense strand
ugagggauguggauaugua

SEQ ID NO: 1898778 - RNA, 19 nt, Homo sapiens
  misc_RNA (1)...(19): siRNA sense strand
gguaguaaguguggaauau

SEQ ID NO: 1898779 - RNA, 19 nt, Homo sapiens
  misc_RNA (1)...(19): siRNA sense strand
ugacaacuaucacaggauu

SEQ ID NO: 1898780 - RNA, 19 nt, Homo sapiens
  misc_RNA (1)...(19): siRNA sense strand
ggaaagauaaacagaauag

SEQ ID NO: 1898781 - RNA, 19 nt, Homo sapiens
  misc_RNA (1)...(19): siRNA sense strand
gagaaggugcacaguauuu

SEQ ID NO: 1898782 - RNA, 19 nt, Homo sapiens
  misc_RNA (1)...(19): siRNA sense strand
gaaagacuguaagaucaga

SEQ ID NO: 1898783 - RNA, 19 nt, Homo sapiens
  misc_RNA (1)...(19): siRNA sense strand
gcauuagcaucccuaguga

SEQ ID NO: 1898784 - RNA, 19 nt, Homo sapiens
  misc_RNA (1)...(19): siRNA sense strand
ucaagcacagcuaauauua

SEQ ID NO: 1898785 - RNA, 19 nt, Homo sapiens
  misc_RNA (1)...(19): siRNA sense strand
gggcugcauugcuaacaua

SEQ ID NO: 1898786 - RNA, 19 nt, Homo sapiens
  misc_RNA (1)...(19): siRNA sense strand
ggucuaaucuucgccuuug

SEQ ID NO: 1898787 - RNA, 19 nt, Homo sapiens
  misc_RNA (1)...(19): siRNA sense strand
gaugauaaagagcaagaua

SEQ ID NO: 1898788 - RNA, 19 nt, Homo sapiens
  misc_RNA (1)...(19): siRNA sense strand
aggaggagcauauuauuua

SEQ ID NO: 1898789 - RNA, 19 nt, Homo sapiens
  misc_RNA (1)...(19): siRNA sense strand
cagcacuacuauuaugaua

SEQ ID NO: 1898790 - RNA, 19 nt, Homo sapiens
  misc_RNA (1)...(19): siRNA sense strand
gcaacuaauggauuuguaa

SEQ ID NO: 1898791 - RNA, 19 nt, Homo sapiens
  misc_RNA (1)...(19): siRNA sense strand
gagcuugaacuuuauaaga

SEQ ID NO: 1898792 - RNA, 19 nt, Homo sapiens
  misc_RNA (1)...(19): siRNA sense strand
gauaaugagcuugaacuuu

SEQ ID NO: 1898793 - RNA, 19 nt, Homo sapiens
  misc_RNA (1)...(19): siRNA sense strand
ggaagaggauggcaagacu

SEQ ID NO: 1898794 - RNA, 19 nt, Homo sapiens
  misc_RNA (1)...(19): siRNA sense strand
cuacacaagcccugacuua

SEQ ID NO: 1898795 - RNA, 19 nt, Homo sapiens
  misc_RNA (1)...(19): siRNA sense strand
gaggaggagcauauuauuu

SEQ ID NO: 1898796 - RNA, 19 nt, Homo sapiens
  misc_RNA (1)...(19): siRNA sense strand
uaacagauaaugagcuuga

SEQ ID NO: 1898797 - RNA, 19 nt, Homo sapiens
  misc_RNA (1)...(19): siRNA sense strand
cgauuuagauacuuccaaa

SEQ ID NO: 1898798 - RNA, 19 nt, Homo sapiens
  misc_RNA (1)...(19): siRNA sense strand
ccacuaauuucugcaggua

SEQ ID NO: 1898799 - RNA, 19 nt, Homo sapiens
  misc_RNA (1)...(19): siRNA sense strand
gauccuacuucuugcuauu

SEQ ID NO: 1898800 - RNA, 19 nt, Homo sapiens
  misc_RNA (1)...(19): siRNA sense strand
gauguuugcuaaagguuau

SEQ ID NO: 1898801 - RNA, 19 nt, Homo sapiens
  misc_RNA (1)...(19): siRNA sense strand
guggaaagauaaacagaau

SEQ ID NO: 1898802 - RNA, 19 nt, Homo sapiens
  misc_RNA (1)...(19): siRNA sense strand
gacaggugcuccaaacuca

SEQ ID NO: 1898803 - RNA, 19 nt, Homo sapiens
  misc_RNA (1)...(19): siRNA sense strand
gaucagguuaaaugaguua

SEQ ID NO: 1898804 - RNA, 19 nt, Homo sapiens
  misc_RNA (1)...(19): siRNA sense strand
uggaaagacuguaagauca

SEQ ID NO: 1898805 - RNA, 19 nt, Homo sapiens
  misc_RNA (1)...(19): siRNA sense strand
gaggaggaggagcauauua

SEQ ID NO: 1898806 - RNA, 19 nt, Homo sapiens
  misc_RNA (1)...(19): siRNA sense strand
gaacauucaagcacagcua

SEQ ID NO: 1898807 - RNA, 19 nt, Homo sapiens
  misc_RNA (1)...(19): siRNA sense strand
uaaacagaauagaccauga

SEQ ID NO: 1898808 - RNA, 19 nt, Homo sapiens
  misc_RNA (1)...(19): siRNA sense strand
gaacaacuuccagguaaug

SEQ ID NO: 1898809 - RNA, 19 nt, Homo sapiens
  misc_RNA (1)...(19): siRNA sense strand
uaaaggagucgugaaguuu

SEQ ID NO: 1898810 - RNA, 19 nt, Homo sapiens
  misc_RNA (1)...(19): siRNA sense strand
gacaacaucuacccagcuu

SEQ ID NO: 1898811 - RNA, 19 nt, Homo sapiens
  misc_RNA (1)...(19): siRNA sense strand
ggaggaggagcauauuauu

SEQ ID NO: 1898812 - RNA, 19 nt, Homo sapiens
  misc_RNA (1)...(19): siRNA sense strand
ggaacacuccuagccauuu

SEQ ID NO: 1898813 - RNA, 19 nt, Homo sapiens
  misc_RNA (1)...(19): siRNA sense strand
uaggagauaucaauaccaa

SEQ ID NO: 1898814 - RNA, 19 nt, Homo sapiens
  misc_RNA (1)...(19): siRNA sense strand
gguuugaccuuauugauac

SEQ ID NO: 1898815 - RNA, 19 nt, Homo sapiens
  misc_RNA (1)...(19): siRNA sense strand
gaaggugcacaguauuuga

SEQ ID NO: 1898816 - RNA, 19 nt, Homo sapiens
  misc_RNA (1)...(19): siRNA sense strand
gacaagccaugaaagagau

SEQ ID NO: 1898817 - RNA, 19 nt, Homo sapiens
  misc_RNA (1)...(19): siRNA sense strand
guacauauggguccucgaa

SEQ ID NO: 1898818 - RNA, 19 nt, Homo sapiens
  misc_RNA (1)...(19): siRNA sense strand
uccuugggcuguauauuua

SEQ ID NO: 1898819 - RNA, 19 nt, Homo sapiens
  misc_RNA (1)...(19): siRNA sense strand
cuacccagcuuuccagaug

SEQ ID NO: 1898820 - RNA, 19 nt, Homo sapiens
  misc_RNA (1)...(19): siRNA sense strand
ucacaggauugucuacuuc

SEQ ID NO: 1898821 - RNA, 19 nt, Homo sapiens
  misc_RNA (1)...(19): siRNA sense strand
cagaucagguuaaaugagu

SEQ ID NO: 1898822 - RNA, 19 nt, Homo sapiens
  misc_RNA (1)...(19): siRNA sense strand
aaaagaaggucuggauaua

SEQ ID NO: 1898823 - RNA, 19 nt, Homo sapiens
  misc_RNA (1)...(19): siRNA sense strand
acuaauuucugcagguaua

SEQ ID NO: 1898824 - RNA, 19 nt, Homo sapiens
  misc_RNA (1)...(19): siRNA sense strand
gaacacuccuagccauuuu

SEQ ID NO: 1898825 - RNA, 19 nt, Homo sapiens
  misc_RNA (1)...(19): siRNA sense strand
cagaaaccgugguggaguu

SEQ ID NO: 1898826 - RNA, 19 nt, Homo sapiens
  misc_RNA (1)...(19): siRNA sense strand
guuaaugacacuaucguaa

SEQ ID NO: 1898827 - RNA, 19 nt, Homo sapiens
  misc_RNA (1)...(19): siRNA sense strand
ccaauuacacacaaaguug

SEQ ID NO: 1898828 - RNA, 19 nt, Homo sapiens
  misc_RNA (1)...(19): siRNA sense strand
aagaaggucuggauauauc

SEQ ID NO: 1898829 - RNA, 19 nt, Homo sapiens
  misc_RNA (1)...(19): siRNA sense strand
acacuuguccuuggauuua

SEQ ID NO: 1898830 - RNA, 19 nt, Homo sapiens
  misc_RNA (1)...(19): siRNA sense strand
guccaucgaucaagccaaa

SEQ ID NO: 1898831 - RNA, 19 nt, Homo sapiens
  misc_RNA (1)...(19): siRNA sense strand
gaagaaaguacuccaacca

SEQ ID NO: 1898832 - RNA, 19 nt, Homo sapiens
  misc_RNA (1)...(19): siRNA sense strand
ggaaaucauugagccauac

SEQ ID NO: 1898833 - RNA, 19 nt, Homo sapiens
  misc_RNA (1)...(19): siRNA sense strand
guaaguguggaauauagua

SEQ ID NO: 1898834 - RNA, 19 nt, Homo sapiens
  misc_RNA (1)...(19): siRNA sense strand
ccaaggaugugguaguaag

SEQ ID NO: 1898835 - RNA, 19 nt, Homo sapiens
  misc_RNA (1)...(19): siRNA sense strand
ggaauggagugggaagcaa

SEQ ID NO: 1898836 - RNA, 19 nt, Homo sapiens
  misc_RNA (1)...(19): siRNA sense strand
gauaaagagcaagauauug

SEQ ID NO: 1898837 - RNA, 19 nt, Homo sapiens
  misc_RNA (1)...(19): siRNA sense strand
gcacugcagcauucaauuc

SEQ ID NO: 1898838 - RNA, 19 nt, Homo sapiens
  misc_RNA (1)...(19): siRNA sense strand
cuuaauugcugaacugaau

SEQ ID NO: 1898839 - RNA, 19 nt, Homo sapiens
  misc_RNA (1)...(19): siRNA sense strand
cuaacaaacuguacuucug

SEQ ID NO: 1898840 - RNA, 19 nt, Homo sapiens
  misc_RNA (1)...(19): siRNA sense strand
uaauaaugauggccacugu

SEQ ID NO: 1898841 - RNA, 19 nt, Homo sapiens
  misc_RNA (1)...(19): siRNA sense strand
aaacacacuuguccuugga

SEQ ID NO: 1898842 - RNA, 19 nt, Homo sapiens
  misc_RNA (1)...(19): siRNA sense strand
cuucguggcuacaucuuaa

SEQ ID NO: 1898843 - RNA, 19 nt, Homo sapiens
  misc_RNA (1)...(19): siRNA sense strand
augaacaacuuccagguaa

SEQ ID NO: 1898844 - RNA, 19 nt, Homo sapiens
  misc_RNA (1)...(19): siRNA sense strand
uaaugacacuaucguaaca

SEQ ID NO: 1898845 - RNA, 19 nt, Homo sapiens
  misc_RNA (1)...(19): siRNA sense strand
caccagcacuacuauuaug

SEQ ID NO: 1898846 - RNA, 19 nt, Homo sapiens
  misc_RNA (1)...(19): siRNA sense strand
cgaauuauuggagccauua

SEQ ID NO: 1898847 - RNA, 19 nt, Homo sapiens
  misc_RNA (1)...(19): siRNA sense strand
cuaaggaccuaccaccaau

SEQ ID NO: 1898848 - RNA, 19 nt, Homo sapiens
  misc_RNA (1)...(19): siRNA sense strand
guaguaaguguggaauaua

SEQ ID NO: 1898849 - RNA, 19 nt, Homo sapiens
  misc_RNA (1)...(19): siRNA sense strand
caauauggaguagugguua

SEQ ID NO: 1898850 - RNA, 19 nt, Homo sapiens
  misc_RNA (1)...(19): siRNA sense strand
aaauaucagcgauggcuua

SEQ ID NO: 1898851 - RNA, 19 nt, Homo sapiens
  misc_RNA (1)...(19): siRNA sense strand
gcuaacauaugugauaguc

SEQ ID NO: 1898852 - RNA, 19 nt, Homo sapiens
  misc_RNA (1)...(19): siRNA sense strand
uugcugaacugaauguuau

SEQ ID NO: 1898853 - RNA, 19 nt, Homo sapiens
  misc_RNA (1)...(19): siRNA sense strand
caucuuaauugcugaacug

SEQ ID NO: 1898854 - RNA, 19 nt, Homo sapiens
  misc_RNA (1)...(19): siRNA sense strand
guggcuacaucuuaacauu

SEQ ID NO: 1898855 - RNA, 19 nt, Homo sapiens
  misc_RNA (1)...(19): siRNA sense strand
caacaucuacccagcuuuc

SEQ ID NO: 1898856 - RNA, 19 nt, Homo sapiens
  misc_RNA (1)...(19): siRNA sense strand
gcacagaacuugaguauuu

SEQ ID NO: 1898857 - RNA, 19 nt, Homo sapiens
  misc_RNA (1)...(19): siRNA sense strand
gaacagagcuacaaugaga

SEQ ID NO: 1898858 - RNA, 19 nt, Homo sapiens
  misc_RNA (1)...(19): siRNA sense strand
uggcugagcugaaggauga

SEQ ID NO: 1898859 - RNA, 19 nt, Homo sapiens
  misc_RNA (1)...(19): siRNA sense strand
gcagcucucuggcaucaau

SEQ ID NO: 1898860 - RNA, 19 nt, Homo sapiens
  misc_RNA (1)...(19): siRNA sense strand
cacagaacuugaguauuua

SEQ ID NO: 1898861 - RNA, 19 nt, Homo sapiens
  misc_RNA (1)...(19): siRNA sense strand
uggcauggguuuccaguau

SEQ ID NO: 1898862 - RNA, 19 nt, Homo sapiens
  misc_RNA (1)...(19): siRNA sense strand
gcugcugccuccuaugaaa

SEQ ID NO: 1898863 - RNA, 19 nt, Homo sapiens
  misc_RNA (1)...(19): siRNA sense strand
cagauaggcuccgaagaug

SEQ ID NO: 1898864 - RNA, 19 nt, Homo sapiens
  misc_RNA (1)...(19): siRNA sense strand
gcucauccuuggacgauuc

SEQ ID NO: 1898865 - RNA, 19 nt, Homo sapiens
  misc_RNA (1)...(19): siRNA sense strand
gcauggguuuccaguaugu

SEQ ID NO: 1898866 - RNA, 19 nt, Homo sapiens
  misc_RNA (1)...(19): siRNA sense strand
ucaaccaacuggccauugu

SEQ ID NO: 1898867 - RNA, 19 nt, Homo sapiens
  misc_RNA (1)...(19): siRNA sense strand
acgagcaacuucaucauug

SEQ ID NO: 1898868 - RNA, 19 nt, Homo sapiens
  misc_RNA (1)...(19): siRNA sense strand
gggccaugcuggucaacaa

SEQ ID NO: 1898869 - RNA, 19 nt, Homo sapiens
  misc_RNA (1)...(19): siRNA sense strand
cagcagcucucuggcauca

SEQ ID NO: 1898870 - RNA, 19 nt, Homo sapiens
  misc_RNA (1)...(19): siRNA sense strand
caucaaugcuguuuucuau

SEQ ID NO: 1898871 - RNA, 19 nt, Homo sapiens
  misc_RNA (1)...(19): siRNA sense strand
ggugaaacccagcacagaa

SEQ ID NO: 1898872 - RNA, 19 nt, Homo sapiens
  misc_RNA (1)...(19): siRNA sense strand
gcaguuuggguacaacauu

SEQ ID NO: 1898873 - RNA, 19 nt, Homo sapiens
  misc_RNA (1)...(19): siRNA sense strand
cuacgucuuccuucuauuu

SEQ ID NO: 1898874 - RNA, 19 nt, Homo sapiens
  misc_RNA (1)...(19): siRNA sense strand
gacgagcaacuucaucauu

SEQ ID NO: 1898875 - RNA, 19 nt, Homo sapiens
  misc_RNA (1)...(19): siRNA sense strand
cagcacagaacuugaguau

SEQ ID NO: 1898876 - RNA, 19 nt, Homo sapiens
  misc_RNA (1)...(19): siRNA sense strand
acagauaggcuccgaagau

SEQ ID NO: 1898877 - RNA, 19 nt, Homo sapiens
  misc_RNA (1)...(19): siRNA sense strand
ccauggcuguggcugguuu

SEQ ID NO: 1898878 - RNA, 19 nt, Homo sapiens
  misc_RNA (1)...(19): siRNA sense strand
caguuuggguacaacauug

SEQ ID NO: 1898879 - RNA, 19 nt, Homo sapiens
  misc_RNA (1)...(19): siRNA sense strand
ugagcuacgucuccauugu

SEQ ID NO: 1898880 - RNA, 19 nt, Homo sapiens
  misc_RNA (1)...(19): siRNA sense strand
ucauugguaucaucucuca

SEQ ID NO: 1898881 - RNA, 19 nt, Homo sapiens
  misc_RNA (1)...(19): siRNA sense strand
cuuggacgauuccucauug

SEQ ID NO: 1898882 - RNA, 19 nt, Homo sapiens
  misc_RNA (1)...(19): siRNA sense strand
caacuggacgagcaacuuc

SEQ ID NO: 1898883 - RNA, 19 nt, Homo sapiens
  misc_RNA (1)...(19): siRNA sense strand
ucaacacagucuucaccuu

SEQ ID NO: 1898884 - RNA, 19 nt, Homo sapiens
  misc_RNA (1)...(19): siRNA sense strand
gauuuccuccuuccucauu

SEQ ID NO: 1898885 - RNA, 19 nt, Homo sapiens
  misc_RNA (1)...(19): siRNA sense strand
caccggacacccucucuuu

SEQ ID NO: 1898886 - RNA, 19 nt, Homo sapiens
  misc_RNA (1)...(19): siRNA sense strand
ucaguggcuuggaaggaaa

SEQ ID NO: 1898887 - RNA, 19 nt, Homo sapiens
  misc_RNA (1)...(19): siRNA sense strand
ggcauggguuuccaguaug

SEQ ID NO: 1898888 - RNA, 19 nt, Homo sapiens
  misc_RNA (1)...(19): siRNA sense strand
gagcuacgucuccauugug

SEQ ID NO: 1898889 - RNA, 19 nt, Homo sapiens
  misc_RNA (1)...(19): siRNA sense strand
cugcugggcuucuucaucu

SEQ ID NO: 1898890 - RNA, 19 nt, Homo sapiens
  misc_RNA (1)...(19): siRNA sense strand
cucagaaggugauugaaca

SEQ ID NO: 1898891 - RNA, 19 nt, Homo sapiens
  misc_RNA (1)...(19): siRNA sense strand
aaccaacuggccauuguua

SEQ ID NO: 1898892 - RNA, 19 nt, Homo sapiens
  misc_RNA (1)...(19): siRNA sense strand
uugaacagagcuacaauga

SEQ ID NO: 1898893 - RNA, 19 nt, Homo sapiens
  misc_RNA (1)...(19): siRNA sense strand
ccaacuggccauuguuauc

SEQ ID NO: 1898894 - RNA, 19 nt, Homo sapiens
  misc_RNA (1)...(19): siRNA sense strand
gaaacccagcacagaacuu

SEQ ID NO: 1898895 - RNA, 19 nt, Homo sapiens
  misc_RNA (1)...(19): siRNA sense strand
cgagcaacuucaucauugg

SEQ ID NO: 1898896 - RNA, 19 nt, Homo sapiens
  misc_RNA (1)...(19): siRNA sense strand
ggccauuguuaucggcauu

SEQ ID NO: 1898897 - RNA, 19 nt, Homo sapiens
  misc_RNA (1)...(19): siRNA sense strand
ccaugcuggucaacaaugu

SEQ ID NO: 1898898 - RNA, 19 nt, Homo sapiens
  misc_RNA (1)...(19): siRNA sense strand
aaagggccaugcuggucaa

SEQ ID NO: 1898899 - RNA, 19 nt, Homo sapiens
  misc_RNA (1)...(19): siRNA sense strand
cuucaucuucaccuucuua

SEQ ID NO: 1898900 - RNA, 19 nt, Homo sapiens
  misc_RNA (1)...(19): siRNA sense strand
caugagcuacgucuccauu

SEQ ID NO: 1898901 - RNA, 19 nt, Homo sapiens
  misc_RNA (1)...(19): siRNA sense strand
caaccaacuggccauuguu

SEQ ID NO: 1898902 - RNA, 19 nt, Homo sapiens
  misc_RNA (1)...(19): siRNA sense strand
aaacccagcacagaacuug

SEQ ID NO: 1898903 - RNA, 19 nt, Homo sapiens
  misc_RNA (1)...(19): siRNA sense strand
ggacgagcaacuucaucau

SEQ ID NO: 1898904 - RNA, 19 nt, Homo sapiens
  misc_RNA (1)...(19): siRNA sense strand
ccuccuuccucauugguau

SEQ ID NO: 1898905 - RNA, 19 nt, Homo sapiens
  misc_RNA (1)...(19): siRNA sense strand
gcccuacgucuuccuucua

SEQ ID NO: 1898906 - RNA, 19 nt, Homo sapiens
  misc_RNA (1)...(19): siRNA sense strand
caucguggccgagcucuuc

SEQ ID NO: 1898907 - RNA, 19 nt, Homo sapiens
  misc_RNA (1)...(19): siRNA sense strand
ccucauugguaucaucucu

SEQ ID NO: 1898908 - RNA, 19 nt, Homo sapiens
  misc_RNA (1)...(19): siRNA sense strand
gcggcaugauuuccuccuu

SEQ ID NO: 1898909 - RNA, 19 nt, Homo sapiens
  misc_RNA (1)...(19): siRNA sense strand
ccgucgggcuuccaacaga

SEQ ID NO: 1898910 - RNA, 19 nt, Homo sapiens
  misc_RNA (1)...(19): siRNA sense strand
cccuacgucuuccuucuau

SEQ ID NO: 1898911 - RNA, 19 nt, Homo sapiens
  misc_RNA (1)...(19): siRNA sense strand
gguccuugcuguguucucu

SEQ ID NO: 1898912 - RNA, 19 nt, Homo sapiens
  misc_RNA (1)...(19): siRNA sense strand
cucaguggcuuggaaggaa

SEQ ID NO: 1898913 - RNA, 19 nt, Homo sapiens
  misc_RNA (1)...(19): siRNA sense strand
gagcgaguuccagccauga

SEQ ID NO: 1898914 - RNA, 19 nt, Homo sapiens
  misc_RNA (1)...(19): siRNA sense strand
caacuggccauuguuaucg

SEQ ID NO: 1898915 - RNA, 19 nt, Homo sapiens
  misc_RNA (1)...(19): siRNA sense strand
gaccagcaucuucgagaca

SEQ ID NO: 1898916 - RNA, 19 nt, Homo sapiens
  misc_RNA (1)...(19): siRNA sense strand
ccggacacccucucuuuua

SEQ ID NO: 1898917 - RNA, 19 nt, Homo sapiens
  misc_RNA (1)...(19): siRNA sense strand
gcuuggcucccugcaguuu

SEQ ID NO: 1898918 - RNA, 19 nt, Homo sapiens
  misc_RNA (1)...(19): siRNA sense strand
gaacagagauugagacaac

SEQ ID NO: 1898919 - RNA, 19 nt, Homo sapiens
  misc_RNA (1)...(19): siRNA sense strand
ccaacuggauguauuguua

SEQ ID NO: 1898920 - RNA, 19 nt, Homo sapiens
  misc_RNA (1)...(19): siRNA sense strand
caacaauggucaccucuau

SEQ ID NO: 1898921 - RNA, 19 nt, Homo sapiens
  misc_RNA (1)...(19): siRNA sense strand
agacaaagaugguggagaa

SEQ ID NO: 1898922 - RNA, 19 nt, Homo sapiens
  misc_RNA (1)...(19): siRNA sense strand
caaagaugguggagaaaug

SEQ ID NO: 1898923 - RNA, 19 nt, Homo sapiens
  misc_RNA (1)...(19): siRNA sense strand
ccacaagccuggcacaaug

SEQ ID NO: 1898924 - RNA, 19 nt, Homo sapiens
  misc_RNA (1)...(19): siRNA sense strand
gguauaagcuacacuacau

SEQ ID NO: 1898925 - RNA, 19 nt, Homo sapiens
  misc_RNA (1)...(19): siRNA sense strand
ggauauagacgaugaccua

SEQ ID NO: 1898926 - RNA, 19 nt, Homo sapiens
  misc_RNA (1)...(19): siRNA sense strand
caacugugcucaaaugaca

SEQ ID NO: 1898927 - RNA, 19 nt, Homo sapiens
  misc_RNA (1)...(19): siRNA sense strand
ucacaaggcuucaaauguc

SEQ ID NO: 1898928 - RNA, 19 nt, Homo sapiens
  misc_RNA (1)...(19): siRNA sense strand
guacauaaacgaagaggaa

SEQ ID NO: 1898929 - RNA, 19 nt, Homo sapiens
  misc_RNA (1)...(19): siRNA sense strand
gggaauugcuauacuuuca

SEQ ID NO: 1898930 - RNA, 19 nt, Homo sapiens
  misc_RNA (1)...(19): siRNA sense strand
gaauaugggcugcaaguca

SEQ ID NO: 1898931 - RNA, 19 nt, Homo sapiens
  misc_RNA (1)...(19): siRNA sense strand
gagcuaaggugaucaucca

SEQ ID NO: 1898932 - RNA, 19 nt, Homo sapiens
  misc_RNA (1)...(19): siRNA sense strand
gcucacagauacccagaug

SEQ ID NO: 1898933 - RNA, 19 nt, Homo sapiens
  misc_RNA (1)...(19): siRNA sense strand
gccaaacucuugauauucu

SEQ ID NO: 1898934 - RNA, 19 nt, Homo sapiens
  misc_RNA (1)...(19): siRNA sense strand
ccaagcaaguggugggauu

SEQ ID NO: 1898935 - RNA, 19 nt, Homo sapiens
  misc_RNA (1)...(19): siRNA sense strand
ccaaccagcucacagauac

SEQ ID NO: 1898936 - RNA, 19 nt, Homo sapiens
  misc_RNA (1)...(19): siRNA sense strand
uggccaaacucuugauauu

SEQ ID NO: 1898937 - RNA, 19 nt, Homo sapiens
  misc_RNA (1)...(19): siRNA sense strand
gaagaugugggaacagaga

SEQ ID NO: 1898938 - RNA, 19 nt, Homo sapiens
  misc_RNA (1)...(19): siRNA sense strand
ggucaccucuauaggaaug

SEQ ID NO: 1898939 - RNA, 19 nt, Homo sapiens
  misc_RNA (1)...(19): siRNA sense strand
cuccagaucugccuucauu

SEQ ID NO: 1898940 - RNA, 19 nt, Homo sapiens
  misc_RNA (1)...(19): siRNA sense strand
gccaggaauuucacgcuuu

SEQ ID NO: 1898941 - RNA, 19 nt, Homo sapiens
  misc_RNA (1)...(19): siRNA sense strand
gaucaucgaggucuucuuc

SEQ ID NO: 1898942 - RNA, 19 nt, Homo sapiens
  misc_RNA (1)...(19): siRNA sense strand
gauggaguguccugugaug

SEQ ID NO: 1898943 - RNA, 19 nt, Homo sapiens
  misc_RNA (1)...(19): siRNA sense strand
ccaacugcaucgagccuuu

SEQ ID NO: 1898944 - RNA, 19 nt, Homo sapiens
  misc_RNA (1)...(19): siRNA sense strand
ggaaugcaccugacagagu

SEQ ID NO: 1898945 - RNA, 19 nt, Homo sapiens
  misc_RNA (1)...(19): siRNA sense strand
acgaugaccuacccacuuu

SEQ ID NO: 1898946 - RNA, 19 nt, Homo sapiens
  misc_RNA (1)...(19): siRNA sense strand
ggaaagcagccuagauucu

SEQ ID NO: 1898947 - RNA, 19 nt, Homo sapiens
  misc_RNA (1)...(19): siRNA sense strand
gcuggugaccugcuucuuu

SEQ ID NO: 1898948 - RNA, 19 nt, Homo sapiens
  misc_RNA (1)...(19): siRNA sense strand
cagcugggccuguggauga

SEQ ID NO: 1898949 - RNA, 19 nt, Homo sapiens
  misc_RNA (1)...(19): siRNA sense strand
gaaagcagccuagauucuc

SEQ ID NO: 1898950 - RNA, 19 nt, Homo sapiens
  misc_RNA (1)...(19): siRNA sense strand
ccaaacucuugauauucua

SEQ ID NO: 1898951 - RNA, 19 nt, Homo sapiens
  misc_RNA (1)...(19): siRNA sense strand
ugagugagcccuccaguca

SEQ ID NO: 1898952 - RNA, 19 nt, Homo sapiens
  misc_RNA (1)...(19): siRNA sense strand
gguacugccucaacaccaa

SEQ ID NO: 1898953 - RNA, 19 nt, Homo sapiens
  misc_RNA (1)...(19): siRNA sense strand
ugucucaguuuccaucaaa

SEQ ID NO: 1898954 - RNA, 19 nt, Homo sapiens
  misc_RNA (1)...(19): siRNA sense strand
ucauugacuucuucucuau

SEQ ID NO: 1898955 - RNA, 19 nt, Homo sapiens
  misc_RNA (1)...(19): siRNA sense strand
caucugugguuucggagaa

SEQ ID NO: 1898956 - RNA, 19 nt, Homo sapiens
  misc_RNA (1)...(19): siRNA sense strand
gauguauuguuacuaccaa

SEQ ID NO: 1898957 - RNA, 19 nt, Homo sapiens
  misc_RNA (1)...(19): siRNA sense strand
gcaagucauuuuguacaua

SEQ ID NO: 1898958 - RNA, 19 nt, Homo sapiens
  misc_RNA (1)...(19): siRNA sense strand
caugggaauugcuauacuu

SEQ ID NO: 1898959 - RNA, 19 nt, Homo sapiens
  misc_RNA (1)...(19): siRNA sense strand
gaauugcuauacuuucaac

SEQ ID NO: 1898960 - RNA, 19 nt, Homo sapiens
  misc_RNA (1)...(19): siRNA sense strand
ggagugacgugccaaucag

SEQ ID NO: 1898961 - RNA, 19 nt, Homo sapiens
  misc_RNA (1)...(19): siRNA sense strand
ccuucuagcugacuuggaa

SEQ ID NO: 1898962 - RNA, 19 nt, Homo sapiens
  misc_RNA (1)...(19): siRNA sense strand
gaaccagagauccaucaug

SEQ ID NO: 1898963 - RNA, 19 nt, Homo sapiens
  misc_RNA (1)...(19): siRNA sense strand
agacuuggccaaacucuug

SEQ ID NO: 1898964 - RNA, 19 nt, Homo sapiens
  misc_RNA (1)...(19): siRNA sense strand
ccagagaggcccugaaguc

SEQ ID NO: 1898965 - RNA, 19 nt, Homo sapiens
  misc_RNA (1)...(19): siRNA sense strand
gauuccaacugugcucaaa

SEQ ID NO: 1898966 - RNA, 19 nt, Homo sapiens
  misc_RNA (1)...(19): siRNA sense strand
caauggccaucugugguuu

SEQ ID NO: 1898967 - RNA, 19 nt, Homo sapiens
  misc_RNA (1)...(19): siRNA sense strand
agacagacuuggccaaacu

SEQ ID NO: 1898968 - RNA, 19 nt, Homo sapiens
  misc_RNA (1)...(19): siRNA sense strand
gagaagaaaaucaacauga

SEQ ID NO: 1898969 - RNA, 19 nt, Homo sapiens
  misc_RNA (1)...(19): siRNA sense strand
gagcccagccaacaguauu

SEQ ID NO: 1898970 - RNA, 19 nt, Homo sapiens
  misc_RNA (1)...(19): siRNA sense strand
uaaacgaagaggaauacaa

SEQ ID NO: 1898971 - RNA, 19 nt, Homo sapiens
  misc_RNA (1)...(19): siRNA sense strand
cacaaggcuucaaauguca

SEQ ID NO: 1898972 - RNA, 19 nt, Homo sapiens
  misc_RNA (1)...(19): siRNA sense strand
gagccuuuguccaggaaga

SEQ ID NO: 1898973 - RNA, 19 nt, Homo sapiens
  misc_RNA (1)...(19): siRNA sense strand
ggagaagaucaaagccaaa

SEQ ID NO: 1898974 - RNA, 19 nt, Homo sapiens
  misc_RNA (1)...(19): siRNA sense strand
cuggugaccugcuucuuug

SEQ ID NO: 1898975 - RNA, 19 nt, Homo sapiens
  misc_RNA (1)...(19): siRNA sense strand
guggugggauuccaacugu

SEQ ID NO: 1898976 - RNA, 19 nt, Homo sapiens
  misc_RNA (1)...(19): siRNA sense strand
gaucaaagccaaaaucaag

SEQ ID NO: 1898977 - RNA, 19 nt, Homo sapiens
  misc_RNA (1)...(19): siRNA sense strand
ugacuucuucucuaucauu

SEQ ID NO: 1898978 - RNA, 19 nt, Homo sapiens
  misc_RNA (1)...(19): siRNA sense strand
caucgaggucuucuucauu

SEQ ID NO: 1898979 - RNA, 19 nt, Homo sapiens
  misc_RNA (1)...(19): siRNA sense strand
caacaguauugagaugcuu

SEQ ID NO: 1898980 - RNA, 19 nt, Homo sapiens
  misc_RNA (1)...(19): siRNA sense strand
gggagugacgugccaauca

SEQ ID NO: 1898981 - RNA, 19 nt, Homo sapiens
  misc_RNA (1)...(19): siRNA sense strand
ucgaagaugugggaacaga

SEQ ID NO: 1898982 - RNA, 19 nt, Homo sapiens
  misc_RNA (1)...(19): siRNA sense strand
ggaauugcuauacuuucaa

SEQ ID NO: 1898983 - RNA, 19 nt, Homo sapiens
  misc_RNA (1)...(19): siRNA sense strand
gcaugggaauugcuauacu

SEQ ID NO: 1898984 - RNA, 19 nt, Homo sapiens
  misc_RNA (1)...(19): siRNA sense strand
uggaucggguucacacuga

SEQ ID NO: 1898985 - RNA, 19 nt, Homo sapiens
  misc_RNA (1)...(19): siRNA sense strand
gacuucuucucuaucauug

SEQ ID NO: 1898986 - RNA, 19 nt, Homo sapiens
  misc_RNA (1)...(19): siRNA sense strand
ggagagcccagccaacagu

SEQ ID NO: 1898987 - RNA, 19 nt, Homo sapiens
  misc_RNA (1)...(19): siRNA sense strand
ccagaucugccuucauuca

SEQ ID NO: 1898988 - RNA, 19 nt, Homo sapiens
  misc_RNA (1)...(19): siRNA sense strand
uauaagcuacacuacauga

SEQ ID NO: 1898989 - RNA, 19 nt, Homo sapiens
  misc_RNA (1)...(19): siRNA sense strand
gcaaguggugggauuccaa

SEQ ID NO: 1898990 - RNA, 19 nt, Homo sapiens
  misc_RNA (1)...(19): siRNA sense strand
gagaggcggaguccuggaa

SEQ ID NO: 1898991 - RNA, 19 nt, Homo sapiens
  misc_RNA (1)...(19): siRNA sense strand
aaaucaacaugagcuauuc

SEQ ID NO: 1898992 - RNA, 19 nt, Homo sapiens
  misc_RNA (1)...(19): siRNA sense strand
agggaaagcagccuagauu

SEQ ID NO: 1898993 - RNA, 19 nt, Homo sapiens
  misc_RNA (1)...(19): siRNA sense strand
gacgaugaccuacccacuu

SEQ ID NO: 1898994 - RNA, 19 nt, Homo sapiens
  misc_RNA (1)...(19): siRNA sense strand
gcuauacuuucaacaacag

SEQ ID NO: 1898995 - RNA, 19 nt, Homo sapiens
  misc_RNA (1)...(19): siRNA sense strand
gaccagagaggcccugaag

SEQ ID NO: 1898996 - RNA, 19 nt, Homo sapiens
  misc_RNA (1)...(19): siRNA sense strand
acaauggucaccucuauag

SEQ ID NO: 1898997 - RNA, 19 nt, Homo sapiens
  misc_RNA (1)...(19): siRNA sense strand
gucaccaucugcaacauca

SEQ ID NO: 1898998 - RNA, 19 nt, Homo sapiens
  misc_RNA (1)...(19): siRNA sense strand
cgucgaagaugugggaaca

SEQ ID NO: 1898999 - RNA, 19 nt, Homo sapiens
  misc_RNA (1)...(19): siRNA sense strand
aaacgaagaggaauacaac

SEQ ID NO: 1899000 - RNA, 19 nt, Homo sapiens
  misc_RNA (1)...(19): siRNA sense strand
aauaugggcugcaagucau

SEQ ID NO: 1899001 - RNA, 19 nt, Homo sapiens
  misc_RNA (1)...(19): siRNA sense strand
aagcuacacuacaugaaca

SEQ ID NO: 1899002 - RNA, 19 nt, Homo sapiens
  misc_RNA (1)...(19): siRNA sense strand
gggaaagcagccuagauuc

SEQ ID NO: 1899003 - RNA, 19 nt, Homo sapiens
  misc_RNA (1)...(19): siRNA sense strand
acauaaacgaagaggaaua

SEQ ID NO: 1899004 - RNA, 19 nt, Homo sapiens
  misc_RNA (1)...(19): siRNA sense strand
gcgaauaugggcugcaagu

SEQ ID NO: 1899005 - RNA, 19 nt, Homo sapiens
  misc_RNA (1)...(19): siRNA sense strand
gcaaggccagggacuucuu

SEQ ID NO: 1899006 - RNA, 19 nt, Homo sapiens
  misc_RNA (1)...(19): siRNA sense strand
gaugaccuacccacuuuca

SEQ ID NO: 1899007 - RNA, 19 nt, Homo sapiens
  misc_RNA (1)...(19): siRNA sense strand
gugaccugcuucuuugaug

SEQ ID NO: 1899008 - RNA, 19 nt, Homo sapiens
  misc_RNA (1)...(19): siRNA sense strand
ugacagaguccuucaagcu

SEQ ID NO: 1899009 - RNA, 19 nt, Homo sapiens
  misc_RNA (1)...(19): siRNA sense strand
gagagcccagccaacagua

SEQ ID NO: 1899010 - RNA, 19 nt, Homo sapiens
  misc_RNA (1)...(19): siRNA sense strand
agaucugccuucauucaug

SEQ ID NO: 1899011 - RNA, 19 nt, Homo sapiens
  misc_RNA (1)...(19): siRNA sense strand
ccauucaggagugguauaa

SEQ ID NO: 1899012 - RNA, 19 nt, Homo sapiens
  misc_RNA (1)...(19): siRNA sense strand
ggaguggugggccuggaaa

SEQ ID NO: 1899013 - RNA, 19 nt, Homo sapiens
  misc_RNA (1)...(19): siRNA sense strand
ggccaaacucuugauauuc

SEQ ID NO: 1899014 - RNA, 19 nt, Homo sapiens
  misc_RNA (1)...(19): siRNA sense strand
cagcaccguucgccaccuu

SEQ ID NO: 1899015 - RNA, 19 nt, Homo sapiens
  misc_RNA (1)...(19): siRNA sense strand
ccuacucgcuccagaucug

SEQ ID NO: 1899016 - RNA, 19 nt, Homo sapiens
  misc_RNA (1)...(19): siRNA sense strand
ccaggaauuucacgcuuuu

SEQ ID NO: 1899017 - RNA, 19 nt, Homo sapiens
  misc_RNA (1)...(19): siRNA sense strand
uugauggaguguccuguga

SEQ ID NO: 1899018 - RNA, 19 nt, Homo sapiens
  misc_RNA (1)...(19): siRNA sense strand
gaagagagguuacauaaau

SEQ ID NO: 1899019 - RNA, 19 nt, Homo sapiens
  misc_RNA (1)...(19): siRNA sense strand
ggaagaaacuuuaguguuc

SEQ ID NO: 1899020 - RNA, 19 nt, Homo sapiens
  misc_RNA (1)...(19): siRNA sense strand
caaauggaauggucuauaa

SEQ ID NO: 1899021 - RNA, 19 nt, Homo sapiens
  misc_RNA (1)...(19): siRNA sense strand
gaaaugacaucaacagugu

SEQ ID NO: 1899022 - RNA, 19 nt, Homo sapiens
  misc_RNA (1)...(19): siRNA sense strand
gcaauaccaugaaguaauu

SEQ ID NO: 1899023 - RNA, 19 nt, Homo sapiens
  misc_RNA (1)...(19): siRNA sense strand
gaacaucaguuuugcauua

SEQ ID NO: 1899024 - RNA, 19 nt, Homo sapiens
  misc_RNA (1)...(19): siRNA sense strand
cuaagucgcuggaauuaua

SEQ ID NO: 1899025 - RNA, 19 nt, Homo sapiens
  misc_RNA (1)...(19): siRNA sense strand
gaucugaacuggaauacuu

SEQ ID NO: 1899026 - RNA, 19 nt, Homo sapiens
  misc_RNA (1)...(19): siRNA sense strand
gaauaaaguuaccuucuga

SEQ ID NO: 1899027 - RNA, 19 nt, Homo sapiens
  misc_RNA (1)...(19): siRNA sense strand
gcugaaaugucaaggaaua

SEQ ID NO: 1899028 - RNA, 19 nt, Homo sapiens
  misc_RNA (1)...(19): siRNA sense strand
caacauguguggauaaaug

SEQ ID NO: 1899029 - RNA, 19 nt, Homo sapiens
  misc_RNA (1)...(19): siRNA sense strand
gaaugaaguuuccagcuuu

SEQ ID NO: 1899030 - RNA, 19 nt, Homo sapiens
  misc_RNA (1)...(19): siRNA sense strand
caacucagcucgcuauuca

SEQ ID NO: 1899031 - RNA, 19 nt, Homo sapiens
  misc_RNA (1)...(19): siRNA sense strand
gagauuucgucaugauuua

SEQ ID NO: 1899032 - RNA, 19 nt, Homo sapiens
  misc_RNA (1)...(19): siRNA sense strand
ccaaagcaccugaguguua

SEQ ID NO: 1899033 - RNA, 19 nt, Homo sapiens
  misc_RNA (1)...(19): siRNA sense strand
ggaauuauaugacgcuaug

SEQ ID NO: 1899034 - RNA, 19 nt, Homo sapiens
  misc_RNA (1)...(19): siRNA sense strand
gaagagauaugaaguacca

SEQ ID NO: 1899035 - RNA, 19 nt, Homo sapiens
  misc_RNA (1)...(19): siRNA sense strand
cauaagagauuucgucaug

SEQ ID NO: 1899036 - RNA, 19 nt, Homo sapiens
  misc_RNA (1)...(19): siRNA sense strand
caacaaagcaauaccauga

SEQ ID NO: 1899037 - RNA, 19 nt, Homo sapiens
  misc_RNA (1)...(19): siRNA sense strand
gaaauuuaguggauuggaa

SEQ ID NO: 1899038 - RNA, 19 nt, Homo sapiens
  misc_RNA (1)...(19): siRNA sense strand
gaacaacuacuaaucaaug

SEQ ID NO: 1899039 - RNA, 19 nt, Homo sapiens
  misc_RNA (1)...(19): siRNA sense strand
gcuauugccuuaauuguug

SEQ ID NO: 1899040 - RNA, 19 nt, Homo sapiens
  misc_RNA (1)...(19): siRNA sense strand
cagcuagacuuuacaauug

SEQ ID NO: 1899041 - RNA, 19 nt, Homo sapiens
  misc_RNA (1)...(19): siRNA sense strand
gaagacagacuuuaugaug

SEQ ID NO: 1899042 - RNA, 19 nt, Homo sapiens
  misc_RNA (1)...(19): siRNA sense strand
gaacugauggauuacauuu

SEQ ID NO: 1899043 - RNA, 19 nt, Homo sapiens
  misc_RNA (1)...(19): siRNA sense strand
guccaaauguguuaaauga

SEQ ID NO: 1899044 - RNA, 19 nt, Homo sapiens
  misc_RNA (1)...(19): siRNA sense strand
gaagaacuuugcagaagau

SEQ ID NO: 1899045 - RNA, 19 nt, Homo sapiens
  misc_RNA (1)...(19): siRNA sense strand
gaacuaaauuauccaccuu

SEQ ID NO: 1899046 - RNA, 19 nt, Homo sapiens
  misc_RNA (1)...(19): siRNA sense strand
uaaaugauccugucaaugu

SEQ ID NO: 1899047 - RNA, 19 nt, Homo sapiens
  misc_RNA (1)...(19): siRNA sense strand
gauggaaguacaccaauua

SEQ ID NO: 1899048 - RNA, 19 nt, Homo sapiens
  misc_RNA (1)...(19): siRNA sense strand
ccauuuagcauccaaguua

SEQ ID NO: 1899049 - RNA, 19 nt, Homo sapiens
  misc_RNA (1)...(19): siRNA sense strand
ggaacuaccuuagcauuuc

SEQ ID NO: 1899050 - RNA, 19 nt, Homo sapiens
  misc_RNA (1)...(19): siRNA sense strand
ggaaagucauucgguguuu

SEQ ID NO: 1899051 - RNA, 19 nt, Homo sapiens
  misc_RNA (1)...(19): siRNA sense strand
ugaaugagccaucaaguuu

SEQ ID NO: 1899052 - RNA, 19 nt, Homo sapiens
  misc_RNA (1)...(19): siRNA sense strand
caagauuacugauccaaau

SEQ ID NO: 1899053 - RNA, 19 nt, Homo sapiens
  misc_RNA (1)...(19): siRNA sense strand
aaagagggauuguaauuuc

SEQ ID NO: 1899054 - RNA, 19 nt, Homo sapiens
  misc_RNA (1)...(19): siRNA sense strand
guaaauggaacaacuacua

SEQ ID NO: 1899055 - RNA, 19 nt, Homo sapiens
  misc_RNA (1)...(19): siRNA sense strand
gaagacaugcugcucauug

SEQ ID NO: 1899056 - RNA, 19 nt, Homo sapiens
  misc_RNA (1)...(19): siRNA sense strand
gaggacaauuucaaacauu

SEQ ID NO: 1899057 - RNA, 19 nt, Homo sapiens
  misc_RNA (1)...(19): siRNA sense strand
cagcugaccuccaacuaaa

SEQ ID NO: 1899058 - RNA, 19 nt, Homo sapiens
  misc_RNA (1)...(19): siRNA sense strand
gaagaaacuuuaguguuca

SEQ ID NO: 1899059 - RNA, 19 nt, Homo sapiens
  misc_RNA (1)...(19): siRNA sense strand
ccaaauguguuaaaugauc

SEQ ID NO: 1899060 - RNA, 19 nt, Homo sapiens
  misc_RNA (1)...(19): siRNA sense strand
gauggaauuuagucuguuu

SEQ ID NO: 1899061 - RNA, 19 nt, Homo sapiens
  misc_RNA (1)...(19): siRNA sense strand
ccaauuaugucguuaugga

SEQ ID NO: 1899062 - RNA, 19 nt, Homo sapiens
  misc_RNA (1)...(19): siRNA sense strand
ggcccugcauuacuuauua

SEQ ID NO: 1899063 - RNA, 19 nt, Homo sapiens
  misc_RNA (1)...(19): siRNA sense strand
acaaguaguucaacaguau

SEQ ID NO: 1899064 - RNA, 19 nt, Homo sapiens
  misc_RNA (1)...(19): siRNA sense strand
gcagcuagacuuuacaauu

SEQ ID NO: 1899065 - RNA, 19 nt, Homo sapiens
  misc_RNA (1)...(19): siRNA sense strand
caacagcaaugcaauggau

SEQ ID NO: 1899066 - RNA, 19 nt, Homo sapiens
  misc_RNA (1)...(19): siRNA sense strand
uugcagaucucaaacuuaa

SEQ ID NO: 1899067 - RNA, 19 nt, Homo sapiens
  misc_RNA (1)...(19): siRNA sense strand
caacuaagucgcuggaauu

SEQ ID NO: 1899068 - RNA, 19 nt, Homo sapiens
  misc_RNA (1)...(19): siRNA sense strand
gguccagcauuuaugguua

SEQ ID NO: 1899069 - RNA, 19 nt, Homo sapiens
  misc_RNA (1)...(19): siRNA sense strand
gcauuacgauguucacaau

SEQ ID NO: 1899070 - RNA, 19 nt, Homo sapiens
  misc_RNA (1)...(19): siRNA sense strand
gaugguuuguggauugaua

SEQ ID NO: 1899071 - RNA, 19 nt, Homo sapiens
  misc_RNA (1)...(19): siRNA sense strand
gcaaaugccagaauaaagu

SEQ ID NO: 1899072 - RNA, 19 nt, Homo sapiens
  misc_RNA (1)...(19): siRNA sense strand
uauaacagcugaccuccaa

SEQ ID NO: 1899073 - RNA, 19 nt, Homo sapiens
  misc_RNA (1)...(19): siRNA sense strand
gaacuaccuuagcauuuca

SEQ ID NO: 1899074 - RNA, 19 nt, Homo sapiens
  misc_RNA (1)...(19): siRNA sense strand
gaacaaauggaauggucua

SEQ ID NO: 1899075 - RNA, 19 nt, Homo sapiens
  misc_RNA (1)...(19): siRNA sense strand
aaaccaaccugggauauau

SEQ ID NO: 1899076 - RNA, 19 nt, Homo sapiens
  misc_RNA (1)...(19): siRNA sense strand
caacuccugcucuaacuua

SEQ ID NO: 1899077 - RNA, 19 nt, Homo sapiens
  misc_RNA (1)...(19): siRNA sense strand
gaauuuagucuguuuggaa

SEQ ID NO: 1899078 - RNA, 19 nt, Homo sapiens
  misc_RNA (1)...(19): siRNA sense strand
ccagagaaauuguggacuu

SEQ ID NO: 1899079 - RNA, 19 nt, Homo sapiens
  misc_RNA (1)...(19): siRNA sense strand
uaacggacucccucaauuu

SEQ ID NO: 1899080 - RNA, 19 nt, Homo sapiens
  misc_RNA (1)...(19): siRNA sense strand
caauguuacucuagaagaa

SEQ ID NO: 1899081 - RNA, 19 nt, Homo sapiens
  misc_RNA (1)...(19): siRNA sense strand
gaacuacuccugucaaugc

SEQ ID NO: 1899082 - RNA, 19 nt, Homo sapiens
  misc_RNA (1)...(19): siRNA sense strand
caacguggcuguguaugga

SEQ ID NO: 1899083 - RNA, 19 nt, Homo sapiens
  misc_RNA (1)...(19): siRNA sense strand
gaccaguucuucaugaguu

SEQ ID NO: 1899084 - RNA, 19 nt, Homo sapiens
  misc_RNA (1)...(19): siRNA sense strand
uuauaaagcccauguguuu

SEQ ID NO: 1899085 - RNA, 19 nt, Homo sapiens
  misc_RNA (1)...(19): siRNA sense strand
gcaauaugauggacuuugg

SEQ ID NO: 1899086 - RNA, 19 nt, Homo sapiens
  misc_RNA (1)...(19): siRNA sense strand
uaagacaccugcuguugau

SEQ ID NO: 1899087 - RNA, 19 nt, Homo sapiens
  misc_RNA (1)...(19): siRNA sense strand
cauggaagcugagcagauu

SEQ ID NO: 1899088 - RNA, 19 nt, Homo sapiens
  misc_RNA (1)...(19): siRNA sense strand
gaacaacauaugcaaccua

SEQ ID NO: 1899089 - RNA, 19 nt, Homo sapiens
  misc_RNA (1)...(19): siRNA sense strand
gcaaugcaauggagauuuu

SEQ ID NO: 1899090 - RNA, 19 nt, Homo sapiens
  misc_RNA (1)...(19): siRNA sense strand
gaagcugagcagauucuua

SEQ ID NO: 1899091 - RNA, 19 nt, Homo sapiens
  misc_RNA (1)...(19): siRNA sense strand
gcagaaaugacgaacuaaa

SEQ ID NO: 1899092 - RNA, 19 nt, Homo sapiens
  misc_RNA (1)...(19): siRNA sense strand
gagaaauuguggacuuuua

SEQ ID NO: 1899093 - RNA, 19 nt, Homo sapiens
  misc_RNA (1)...(19): siRNA sense strand
gaaagaggacagcagaaug

SEQ ID NO: 1899094 - RNA, 19 nt, Homo sapiens
  misc_RNA (1)...(19): siRNA sense strand
gacauugacuacauggaaa

SEQ ID NO: 1899095 - RNA, 19 nt, Homo sapiens
  misc_RNA (1)...(19): siRNA sense strand
gggcaaugcucaugguguu

SEQ ID NO: 1899096 - RNA, 19 nt, Homo sapiens
  misc_RNA (1)...(19): siRNA sense strand
gaacauacagcauuuaagc

SEQ ID NO: 1899097 - RNA, 19 nt, Homo sapiens
  misc_RNA (1)...(19): siRNA sense strand
gaacgcucauuccaauuuc

SEQ ID NO: 1899098 - RNA, 19 nt, Homo sapiens
  misc_RNA (1)...(19): siRNA sense strand
gugcacacauucaucauau

SEQ ID NO: 1899099 - RNA, 19 nt, Homo sapiens
  misc_RNA (1)...(19): siRNA sense strand
gaugcuauuugguaugauu

SEQ ID NO: 1899100 - RNA, 19 nt, Homo sapiens
  misc_RNA (1)...(19): siRNA sense strand
ggauugacaugaaugaagu

SEQ ID NO: 1899101 - RNA, 19 nt, Homo sapiens
  misc_RNA (1)...(19): siRNA sense strand
gaagcuggcauaccauuug

SEQ ID NO: 1899102 - RNA, 19 nt, Homo sapiens
  misc_RNA (1)...(19): siRNA sense strand
auacacaggucacugauau

SEQ ID NO: 1899103 - RNA, 19 nt, Homo sapiens
  misc_RNA (1)...(19): siRNA sense strand
guauugaucugaccacaca

SEQ ID NO: 1899104 - RNA, 19 nt, Homo sapiens
  misc_RNA (1)...(19): siRNA sense strand
gagagaguauagacaccua

SEQ ID NO: 1899105 - RNA, 19 nt, Homo sapiens
  misc_RNA (1)...(19): siRNA sense strand
gcuaaugguggcacuguua

SEQ ID NO: 1899106 - RNA, 19 nt, Homo sapiens
  misc_RNA (1)...(19): siRNA sense strand
gaugaaguuugaugguuug

SEQ ID NO: 1899107 - RNA, 19 nt, Homo sapiens
  misc_RNA (1)...(19): siRNA sense strand
gaucucaaacuuaaucuug

SEQ ID NO: 1899108 - RNA, 19 nt, Homo sapiens
  misc_RNA (1)...(19): siRNA sense strand
ucaaggcaguauuuaacua

SEQ ID NO: 1899109 - RNA, 19 nt, Homo sapiens
  misc_RNA (1)...(19): siRNA sense strand
ugaaugaaguuuccagcuu

SEQ ID NO: 1899110 - RNA, 19 nt, Homo sapiens
  misc_RNA (1)...(19): siRNA sense strand
ugaaguuccucaucaguau

SEQ ID NO: 1899111 - RNA, 19 nt, Homo sapiens
  misc_RNA (1)...(19): siRNA sense strand
gcagaaugaugucuuuguc

SEQ ID NO: 1899112 - RNA, 19 nt, Homo sapiens
  misc_RNA (1)...(19): siRNA sense strand
gcaaugcaauggauguuac

SEQ ID NO: 1899113 - RNA, 19 nt, Homo sapiens
  misc_RNA (1)...(19): siRNA sense strand
ggaagagucauuugggauu

SEQ ID NO: 1899114 - RNA, 19 nt, Homo sapiens
  misc_RNA (1)...(19): siRNA sense strand
uagaggagguuauaucauc

SEQ ID NO: 1899115 - RNA, 19 nt, Homo sapiens
  misc_RNA (1)...(19): siRNA sense strand
ucacugauauugacuacau

SEQ ID NO: 1899116 - RNA, 19 nt, Homo sapiens
  misc_RNA (1)...(19): siRNA sense strand
acacacaaaugcaugaaau

SEQ ID NO: 1899117 - RNA, 19 nt, Homo sapiens
  misc_RNA (1)...(19): siRNA sense strand
gauauuacguauugaucug

SEQ ID NO: 1899118 - RNA, 19 nt, Homo sapiens
  misc_RNA (1)...(19): siRNA sense strand
gcaaauggcucuuuacaaa

SEQ ID NO: 1899119 - RNA, 19 nt, Homo sapiens
  misc_RNA (1)...(19): siRNA sense strand
ggaaagauguuauugauga

SEQ ID NO: 1899120 - RNA, 19 nt, Homo sapiens
  misc_RNA (1)...(19): siRNA sense strand
gaaagaugcuggaaauauu

SEQ ID NO: 1899121 - RNA, 19 nt, Homo sapiens
  misc_RNA (1)...(19): siRNA sense strand
ggacagaguucgcacagua

SEQ ID NO: 1899122 - RNA, 19 nt, Homo sapiens
  misc_RNA (1)...(19): siRNA sense strand
gcaaggagcuggugaggaa

SEQ ID NO: 1899123 - RNA, 19 nt, Homo sapiens
  misc_RNA (1)...(19): siRNA sense strand
gcaaggaacugagcacaua

SEQ ID NO: 1899124 - RNA, 19 nt, Homo sapiens
  misc_RNA (1)...(19): siRNA sense strand
gaauugagcuggaugaaga

SEQ ID NO: 1899125 - RNA, 19 nt, Homo sapiens
  misc_RNA (1)...(19): siRNA sense strand
ugacauaucugaagaagaa

SEQ ID NO: 1899126 - RNA, 19 nt, Homo sapiens
  misc_RNA (1)...(19): siRNA sense strand
gcaaacagaugguggauau

SEQ ID NO: 1899127 - RNA, 19 nt, Homo sapiens
  misc_RNA (1)...(19): siRNA sense strand
ccaaagaccuacacgauaa

SEQ ID NO: 1899128 - RNA, 19 nt, Homo sapiens
  misc_RNA (1)...(19): siRNA sense strand
gcaaagaguugucaugaug

SEQ ID NO: 1899129 - RNA, 19 nt, Homo sapiens
  misc_RNA (1)...(19): siRNA sense strand
ggagaagccaucagaauua

SEQ ID NO: 1899130 - RNA, 19 nt, Homo sapiens
  misc_RNA (1)...(19): siRNA sense strand
caacuuggcuaauuacuug

SEQ ID NO: 1899131 - RNA, 19 nt, Homo sapiens
  misc_RNA (1)...(19): siRNA sense strand
guagaugugucucgaauaa

SEQ ID NO: 1899132 - RNA, 19 nt, Homo sapiens
  misc_RNA (1)...(19): siRNA sense strand
gauauaauccgcagcaaua

SEQ ID NO: 1899133 - RNA, 19 nt, Homo sapiens
  misc_RNA (1)...(19): siRNA sense strand
uacaauaucuugacccuua

SEQ ID NO: 1899134 - RNA, 19 nt, Homo sapiens
  misc_RNA (1)...(19): siRNA sense strand
ccacauggaugauggcaua

SEQ ID NO: 1899135 - RNA, 19 nt, Homo sapiens
  misc_RNA (1)...(19): siRNA sense strand
gcaaacagcucguauuaac

SEQ ID NO: 1899136 - RNA, 19 nt, Homo sapiens
  misc_RNA (1)...(19): siRNA sense strand
guacugaacuccauugaug

SEQ ID NO: 1899137 - RNA, 19 nt, Homo sapiens
  misc_RNA (1)...(19): siRNA sense strand
gcaccacgcuucucucauu

SEQ ID NO: 1899138 - RNA, 19 nt, Homo sapiens
  misc_RNA (1)...(19): siRNA sense strand
cauauaagcuauugucuga

SEQ ID NO: 1899139 - RNA, 19 nt, Homo sapiens
  misc_RNA (1)...(19): siRNA sense strand
ggacaacgcugcagaggau

SEQ ID NO: 1899140 - RNA, 19 nt, Homo sapiens
  misc_RNA (1)...(19): siRNA sense strand
gaaaugguacuaugaauug

SEQ ID NO: 1899141 - RNA, 19 nt, Homo sapiens
  misc_RNA (1)...(19): siRNA sense strand
gaaaucaaguucuuugcaa

SEQ ID NO: 1899142 - RNA, 19 nt, Homo sapiens
  misc_RNA (1)...(19): siRNA sense strand
gaagaacaaagccagauua

SEQ ID NO: 1899143 - RNA, 19 nt, Homo sapiens
  misc_RNA (1)...(19): siRNA sense strand
gagcacaacuuggcuaauu

SEQ ID NO: 1899144 - RNA, 19 nt, Homo sapiens
  misc_RNA (1)...(19): siRNA sense strand
aaacaaagcugaaggucuu

SEQ ID NO: 1899145 - RNA, 19 nt, Homo sapiens
  misc_RNA (1)...(19): siRNA sense strand
gaacuucguuguacagaau

SEQ ID NO: 1899146 - RNA, 19 nt, Homo sapiens
  misc_RNA (1)...(19): siRNA sense strand
caacugagaccuucuauga

SEQ ID NO: 1899147 - RNA, 19 nt, Homo sapiens
  misc_RNA (1)...(19): siRNA sense strand
ggagcgcaauuacaacuua

SEQ ID NO: 1899148 - RNA, 19 nt, Homo sapiens
  misc_RNA (1)...(19): siRNA sense strand
gagaagaccuaauauugga

SEQ ID NO: 1899149 - RNA, 19 nt, Homo sapiens
  misc_RNA (1)...(19): siRNA sense strand
gagaacauuucccuuauga

SEQ ID NO: 1899150 - RNA, 19 nt, Homo sapiens
  misc_RNA (1)...(19): siRNA sense strand
gagaaacgauuugccuaua

SEQ ID NO: 1899151 - RNA, 19 nt, Homo sapiens
  misc_RNA (1)...(19): siRNA sense strand
gcucaugauucguggauua

SEQ ID NO: 1899152 - RNA, 19 nt, Homo sapiens
  misc_RNA (1)...(19): siRNA sense strand
caacaucgauggccucuuc

SEQ ID NO: 1899153 - RNA, 19 nt, Homo sapiens
  misc_RNA (1)...(19): siRNA sense strand
gaacucagacuggcaauaa

SEQ ID NO: 1899154 - RNA, 19 nt, Homo sapiens
  misc_RNA (1)...(19): siRNA sense strand
ccaaauagcggauccagua

SEQ ID NO: 1899155 - RNA, 19 nt, Homo sapiens
  misc_RNA (1)...(19): siRNA sense strand
agaaugacuuggaagauua

SEQ ID NO: 1899156 - RNA, 19 nt, Homo sapiens
  misc_RNA (1)...(19): siRNA sense strand
gauaugaaaugugacgaua

SEQ ID NO: 1899157 - RNA, 19 nt, Homo sapiens
  misc_RNA (1)...(19): siRNA sense strand
ggauaaauauggagaguuc

SEQ ID NO: 1899158 - RNA, 19 nt, Homo sapiens
  misc_RNA (1)...(19): siRNA sense strand
gcagagagcguccugaauu

SEQ ID NO: 1899159 - RNA, 19 nt, Homo sapiens
  misc_RNA (1)...(19): siRNA sense strand
gaaagaguauuggauauag

SEQ ID NO: 1899160 - RNA, 19 nt, Homo sapiens
  misc_RNA (1)...(19): siRNA sense strand
caacuaauguggaagaugu

SEQ ID NO: 1899161 - RNA, 19 nt, Homo sapiens
  misc_RNA (1)...(19): siRNA sense strand
gaggcaacguucugcauua

SEQ ID NO: 1899162 - RNA, 19 nt, Homo sapiens
  misc_RNA (1)...(19): siRNA sense strand
gaaaugguguuggagauga

SEQ ID NO: 1899163 - RNA, 19 nt, Homo sapiens
  misc_RNA (1)...(19): siRNA sense strand
caagaaagguguugggaau

SEQ ID NO: 1899164 - RNA, 19 nt, Homo sapiens
  misc_RNA (1)...(19): siRNA sense strand
cuuauuagcuguuguugua

SEQ ID NO: 1899165 - RNA, 19 nt, Homo sapiens
  misc_RNA (1)...(19): siRNA sense strand
cagagagcguccugaauua

SEQ ID NO: 1899166 - RNA, 19 nt, Homo sapiens
  misc_RNA (1)...(19): siRNA sense strand
gaacaaggacaacggaauu

SEQ ID NO: 1899167 - RNA, 19 nt, Homo sapiens
  misc_RNA (1)...(19): siRNA sense strand
gcucagaacuggcuuucaa

SEQ ID NO: 1899168 - RNA, 19 nt, Homo sapiens
  misc_RNA (1)...(19): siRNA sense strand
gaagauguaucaagaaagg

SEQ ID NO: 1899169 - RNA, 19 nt, Homo sapiens
  misc_RNA (1)...(19): siRNA sense strand
gacagcagcucccauagaa

SEQ ID NO: 1899170 - RNA, 19 nt, Homo sapiens
  misc_RNA (1)...(19): siRNA sense strand
ggaagaaaucguggaauua

SEQ ID NO: 1899171 - RNA, 19 nt, Homo sapiens
  misc_RNA (1)...(19): siRNA sense strand
agagagauaucuugacuuu

SEQ ID NO: 1899172 - RNA, 19 nt, Homo sapiens
  misc_RNA (1)...(19): siRNA sense strand
caaagaagcuacuaaacca

SEQ ID NO: 1899173 - RNA, 19 nt, Homo sapiens
  misc_RNA (1)...(19): siRNA sense strand
gagaagaccuaugcaguga

SEQ ID NO: 1899174 - RNA, 19 nt, Homo sapiens
  misc_RNA (1)...(19): siRNA sense strand
ugacaucacuuucuucuuc

SEQ ID NO: 1899175 - RNA, 19 nt, Homo sapiens
  misc_RNA (1)...(19): siRNA sense strand
ggaaucaauuagugacuuu

SEQ ID NO: 1899176 - RNA, 19 nt, Homo sapiens
  misc_RNA (1)...(19): siRNA sense strand
gaugugggcuucuuucaga

SEQ ID NO: 1899177 - RNA, 19 nt, Homo sapiens
  misc_RNA (1)...(19): siRNA sense strand
ggcauaaacuacugucuaa

SEQ ID NO: 1899178 - RNA, 19 nt, Homo sapiens
  misc_RNA (1)...(19): siRNA sense strand
gaacaaagccagauuacag

SEQ ID NO: 1899179 - RNA, 19 nt, Homo sapiens
  misc_RNA (1)...(19): siRNA sense strand
gaacgugccuuugccuuug

SEQ ID NO: 1899180 - RNA, 19 nt, Homo sapiens
  misc_RNA (1)...(19): siRNA sense strand
gauggcaaauggcucuuua

SEQ ID NO: 1899181 - RNA, 19 nt, Homo sapiens
  misc_RNA (1)...(19): siRNA sense strand
gcacuuacucagaagauua

SEQ ID NO: 1899182 - RNA, 19 nt, Homo sapiens
  misc_RNA (1)...(19): siRNA sense strand
gcacagccgucuugccauu

SEQ ID NO: 1899183 - RNA, 19 nt, Homo sapiens
  misc_RNA (1)...(19): siRNA sense strand
gaagagaagcucaugauuc

SEQ ID NO: 1899184 - RNA, 19 nt, Homo sapiens
  misc_RNA (1)...(19): siRNA sense strand
gaaaagcccucucgucuga

SEQ ID NO: 1899185 - RNA, 19 nt, Homo sapiens
  misc_RNA (1)...(19): siRNA sense strand
caucagauuuccaucagua

SEQ ID NO: 1899186 - RNA, 19 nt, Homo sapiens
  misc_RNA (1)...(19): siRNA sense strand
guagaaagaguauuggaua

SEQ ID NO: 1899187 - RNA, 19 nt, Homo sapiens
  misc_RNA (1)...(19): siRNA sense strand
gcuauuagauggcaaaugg

SEQ ID NO: 1899188 - RNA, 19 nt, Homo sapiens
  misc_RNA (1)...(19): siRNA sense strand
cgauuuagccugaaagaua

SEQ ID NO: 1899189 - RNA, 19 nt, Homo sapiens
  misc_RNA (1)...(19): siRNA sense strand
gaaagguacuugcacuugu

SEQ ID NO: 1899190 - RNA, 19 nt, Homo sapiens
  misc_RNA (1)...(19): siRNA sense strand
ggaagaaaaucauagcaua

SEQ ID NO: 1899191 - RNA, 19 nt, Homo sapiens
  misc_RNA (1)...(19): siRNA sense strand
caugguggcugaaguguuu

SEQ ID NO: 1899192 - RNA, 19 nt, Homo sapiens
  misc_RNA (1)...(19): siRNA sense strand
caacaucaauugucaacug

SEQ ID NO: 1899193 - RNA, 19 nt, Homo sapiens
  misc_RNA (1)...(19): siRNA sense strand
gcagaacacucccaugaca

SEQ ID NO: 1899194 - RNA, 19 nt, Homo sapiens
  misc_RNA (1)...(19): siRNA sense strand
gaagagacuuguuauugca

SEQ ID NO: 1899195 - RNA, 19 nt, Homo sapiens
  misc_RNA (1)...(19): siRNA sense strand
gaacugagcacauacuauc

SEQ ID NO: 1899196 - RNA, 19 nt, Homo sapiens
  misc_RNA (1)...(19): siRNA sense strand
gaaagauacugaggaugaa

SEQ ID NO: 1899197 - RNA, 19 nt, Homo sapiens
  misc_RNA (1)...(19): siRNA sense strand
ugaauucucuguaugaguu

SEQ ID NO: 1899198 - RNA, 19 nt, Homo sapiens
  misc_RNA (1)...(19): siRNA sense strand
gaagauaaacugauagaag

SEQ ID NO: 1899199 - RNA, 19 nt, Homo sapiens
  misc_RNA (1)...(19): siRNA sense strand
caacaaagagaaagaaaug

SEQ ID NO: 1899200 - RNA, 19 nt, Homo sapiens
  misc_RNA (1)...(19): siRNA sense strand
cagcuucggugauggauaa

SEQ ID NO: 1899201 - RNA, 19 nt, Homo sapiens
  misc_RNA (1)...(19): siRNA sense strand
guaaagaacagaagaaauc

SEQ ID NO: 1899202 - RNA, 19 nt, Homo sapiens
  misc_RNA (1)...(19): siRNA sense strand
cuacggacaugccauauug

SEQ ID NO: 1899203 - RNA, 19 nt, Homo sapiens
  misc_RNA (1)...(19): siRNA sense strand
caccagauaugaaauguga

SEQ ID NO: 1899204 - RNA, 19 nt, Homo sapiens
  misc_RNA (1)...(19): siRNA sense strand
gaaagacagcuccuuauca

SEQ ID NO: 1899205 - RNA, 19 nt, Homo sapiens
  misc_RNA (1)...(19): siRNA sense strand
caacgaaggcggagagaaa

SEQ ID NO: 1899206 - RNA, 19 nt, Homo sapiens
  misc_RNA (1)...(19): siRNA sense strand
cagcugauccuucuguuua

SEQ ID NO: 1899207 - RNA, 19 nt, Homo sapiens
  misc_RNA (1)...(19): siRNA sense strand
ggaggaagaugacacuauc

SEQ ID NO: 1899208 - RNA, 19 nt, Homo sapiens
  misc_RNA (1)...(19): siRNA sense strand
aaagguaguucguuauuug

SEQ ID NO: 1899209 - RNA, 19 nt, Homo sapiens
  misc_RNA (1)...(19): siRNA sense strand
cagcaacacugauaucaug

SEQ ID NO: 1899210 - RNA, 19 nt, Homo sapiens
  misc_RNA (1)...(19): siRNA sense strand
gagcuuggcuggcaguaug

SEQ ID NO: 1899211 - RNA, 19 nt, Homo sapiens
  misc_RNA (1)...(19): siRNA sense strand
gaugaucucuucuccuaug

SEQ ID NO: 1899212 - RNA, 19 nt, Homo sapiens
  misc_RNA (1)...(19): siRNA sense strand
ggaagagacuuguuauugc

SEQ ID NO: 1899213 - RNA, 19 nt, Homo sapiens
  misc_RNA (1)...(19): siRNA sense strand
gaccugagcuuuaucaaac

SEQ ID NO: 1899214 - RNA, 19 nt, Homo sapiens
  misc_RNA (1)...(19): siRNA sense strand
gauaggcaaugauuacuuc

SEQ ID NO: 1899215 - RNA, 19 nt, Homo sapiens
  misc_RNA (1)...(19): siRNA sense strand
gaaaugugacgauaugcua

SEQ ID NO: 1899216 - RNA, 19 nt, Homo sapiens
  misc_RNA (1)...(19): siRNA sense strand
gaagucccauaauuucaaa

SEQ ID NO: 1899217 - RNA, 19 nt, Homo sapiens
  misc_RNA (1)...(19): siRNA sense strand
gacaagaaccugcuaaugu

SEQ ID NO: 1899218 - RNA, 19 nt, Homo sapiens
  misc_RNA (1)...(19): siRNA sense strand
gaaugcaacuucuucuuaa

SEQ ID NO: 1899219 - RNA, 19 nt, Homo sapiens
  misc_RNA (1)...(19): siRNA sense strand
gggacuagcucuucgcaua

SEQ ID NO: 1899220 - RNA, 19 nt, Homo sapiens
  misc_RNA (1)...(19): siRNA sense strand
gcagaaagaaugcaacuuc

SEQ ID NO: 1899221 - RNA, 19 nt, Homo sapiens
  misc_RNA (1)...(19): siRNA sense strand
ggacuagcucuucgcauaa

SEQ ID NO: 1899222 - RNA, 19 nt, Homo sapiens
  misc_RNA (1)...(19): siRNA sense strand
gggcugaccaugacuguuu

SEQ ID NO: 1899223 - RNA, 19 nt, Homo sapiens
  misc_RNA (1)...(19): siRNA sense strand
ggucuccgcuccugauaau

SEQ ID NO: 1899224 - RNA, 19 nt, Homo sapiens
  misc_RNA (1)...(19): siRNA sense strand
gaucuucaaucagacauca

SEQ ID NO: 1899225 - RNA, 19 nt, Homo sapiens
  misc_RNA (1)...(19): siRNA sense strand
gcaagacacacacggagaa

SEQ ID NO: 1899226 - RNA, 19 nt, Homo sapiens
  misc_RNA (1)...(19): siRNA sense strand
gagacggccauucagcuua

SEQ ID NO: 1899227 - RNA, 19 nt, Homo sapiens
  misc_RNA (1)...(19): siRNA sense strand
gauccuucuucgaaaguuu

SEQ ID NO: 1899228 - RNA, 19 nt, Homo sapiens
  misc_RNA (1)...(19): siRNA sense strand
ggguuuaccugcuguuaag

SEQ ID NO: 1899229 - RNA, 19 nt, Homo sapiens
  misc_RNA (1)...(19): siRNA sense strand
uaccugcuguuaagaaaga

SEQ ID NO: 1899230 - RNA, 19 nt, Homo sapiens
  misc_RNA (1)...(19): siRNA sense strand
acacggagaagcagaaaga

SEQ ID NO: 1899231 - RNA, 19 nt, Homo sapiens
  misc_RNA (1)...(19): siRNA sense strand
ccaugcugcucacugguuu

SEQ ID NO: 1899232 - RNA, 19 nt, Homo sapiens
  misc_RNA (1)...(19): siRNA sense strand
cggagaagcagaaagaaug

SEQ ID NO: 1899233 - RNA, 19 nt, Homo sapiens
  misc_RNA (1)...(19): siRNA sense strand
gcaaccuggccaccauuaa

SEQ ID NO: 1899234 - RNA, 19 nt, Homo sapiens
  misc_RNA (1)...(19): siRNA sense strand
agacggccauucagcuuau

SEQ ID NO: 1899235 - RNA, 19 nt, Homo sapiens
  misc_RNA (1)...(19): siRNA sense strand
gcaacgcacuggccaugcu

SEQ ID NO: 1899236 - RNA, 19 nt, Homo sapiens
  misc_RNA (1)...(19): siRNA sense strand
cgaccgagacggccauuca

SEQ ID NO: 1899237 - RNA, 19 nt, Homo sapiens
  misc_RNA (1)...(19): siRNA sense strand
gggacguggugcuucauca

SEQ ID NO: 1899238 - RNA, 19 nt, Homo sapiens
  misc_RNA (1)...(19): siRNA sense strand
gguaugcgagccacaugaa

SEQ ID NO: 1899239 - RNA, 19 nt, Homo sapiens
  misc_RNA (1)...(19): siRNA sense strand
gcaacgggacuagcucuuc

SEQ ID NO: 1899240 - RNA, 19 nt, Homo sapiens
  misc_RNA (1)...(19): siRNA sense strand
caaccuggccaccauuaag

SEQ ID NO: 1899241 - RNA, 19 nt, Homo sapiens
  misc_RNA (1)...(19): siRNA sense strand
ugcaacuucuucuuaauag

SEQ ID NO: 1899242 - RNA, 19 nt, Homo sapiens
  misc_RNA (1)...(19): siRNA sense strand
gagagcaagcgcaagaagu

SEQ ID NO: 1899243 - RNA, 19 nt, Homo sapiens
  misc_RNA (1)...(19): siRNA sense strand
gggcucuccucguuguuca

SEQ ID NO: 1899244 - RNA, 19 nt, Homo sapiens
  misc_RNA (1)...(19): siRNA sense strand
uuucuucgccucugccuuu

SEQ ID NO: 1899245 - RNA, 19 nt, Homo sapiens
  misc_RNA (1)...(19): siRNA sense strand
ggagagcaagcgcaagaag

SEQ ID NO: 1899246 - RNA, 19 nt, Homo sapiens
  misc_RNA (1)...(19): siRNA sense strand
ccaaggccacggcaucuca

SEQ ID NO: 1899247 - RNA, 19 nt, Homo sapiens
  misc_RNA (1)...(19): siRNA sense strand
ucuccgcuccugauaauga

SEQ ID NO: 1899248 - RNA, 19 nt, Homo sapiens
  misc_RNA (1)...(19): siRNA sense strand
caacuucuucuuaauagcu

SEQ ID NO: 1899249 - RNA, 19 nt, Homo sapiens
  misc_RNA (1)...(19): siRNA sense strand
cgagacggccauucagcuu

SEQ ID NO: 1899250 - RNA, 19 nt, Homo sapiens
  misc_RNA (1)...(19): siRNA sense strand
uuuaccugcuguuaagaaa

SEQ ID NO: 1899251 - RNA, 19 nt, Homo sapiens
  misc_RNA (1)...(19): siRNA sense strand
ggagaagcagaaagaaugc

SEQ ID NO: 1899252 - RNA, 19 nt, Homo sapiens
  misc_RNA (1)...(19): siRNA sense strand
uaugcgagccacaugaaga

SEQ ID NO: 1899253 - RNA, 19 nt, Homo sapiens
  misc_RNA (1)...(19): siRNA sense strand
gcaagcgcaagaaguccuu

SEQ ID NO: 1899254 - RNA, 19 nt, Homo sapiens
  misc_RNA (1)...(19): siRNA sense strand
ucguguaccuguccaagca

SEQ ID NO: 1899255 - RNA, 19 nt, Homo sapiens
  misc_RNA (1)...(19): siRNA sense strand
cgggagagcaagcgcaaga

SEQ ID NO: 1899256 - RNA, 19 nt, Homo sapiens
  misc_RNA (1)...(19): siRNA sense strand
gcaacuucuucuuaauagc

SEQ ID NO: 1899257 - RNA, 19 nt, Homo sapiens
  misc_RNA (1)...(19): siRNA sense strand
agacacacacggagaagca

SEQ ID NO: 1899258 - RNA, 19 nt, Homo sapiens
  misc_RNA (1)...(19): siRNA sense strand
ucuuggauccuuggguuua

SEQ ID NO: 1899259 - RNA, 19 nt, Homo sapiens
  misc_RNA (1)...(19): siRNA sense strand
gacuagcucuucgcauaac

SEQ ID NO: 1899260 - RNA, 19 nt, Homo sapiens
  misc_RNA (1)...(19): siRNA sense strand
gaaugcaacuucuucuuaa

SEQ ID NO: 1899261 - RNA, 19 nt, Homo sapiens
  misc_RNA (1)...(19): siRNA sense strand
gggacuagcucuucgcaua

SEQ ID NO: 1899262 - RNA, 19 nt, Homo sapiens
  misc_RNA (1)...(19): siRNA sense strand
gcagaaagaaugcaacuuc

SEQ ID NO: 1899263 - RNA, 19 nt, Homo sapiens
  misc_RNA (1)...(19): siRNA sense strand
ggacuagcucuucgcauaa

SEQ ID NO: 1899264 - RNA, 19 nt, Homo sapiens
  misc_RNA (1)...(19): siRNA sense strand
gggcugaccaugacuguuu

SEQ ID NO: 1899265 - RNA, 19 nt, Homo sapiens
  misc_RNA (1)...(19): siRNA sense strand
ggucuccgcuccugauaau

SEQ ID NO: 1899266 - RNA, 19 nt, Homo sapiens
  misc_RNA (1)...(19): siRNA sense strand
gaucuucaaucagacauca

SEQ ID NO: 1899267 - RNA, 19 nt, Homo sapiens
  misc_RNA (1)...(19): siRNA sense strand
gcaagacacacacggagaa

SEQ ID NO: 1899268 - RNA, 19 nt, Homo sapiens
  misc_RNA (1)...(19): siRNA sense strand
gagacggccauucagcuua

SEQ ID NO: 1899269 - RNA, 19 nt, Homo sapiens
  misc_RNA (1)...(19): siRNA sense strand
gauccuucuucgaaaguuu

SEQ ID NO: 1899270 - RNA, 19 nt, Homo sapiens
  misc_RNA (1)...(19): siRNA sense strand
ggguuuaccugcuguuaag

SEQ ID NO: 1899271 - RNA, 19 nt, Homo sapiens
  misc_RNA (1)...(19): siRNA sense strand
uaccugcuguuaagaaaga

SEQ ID NO: 1899272 - RNA, 19 nt, Homo sapiens
  misc_RNA (1)...(19): siRNA sense strand
acacggagaagcagaaaga

SEQ ID NO: 1899273 - RNA, 19 nt, Homo sapiens
  misc_RNA (1)...(19): siRNA sense strand
ccaugcugcucacugguuu

SEQ ID NO: 1899274 - RNA, 19 nt, Homo sapiens
  misc_RNA (1)...(19): siRNA sense strand
cggagaagcagaaagaaug

SEQ ID NO: 1899275 - RNA, 19 nt, Homo sapiens
  misc_RNA (1)...(19): siRNA sense strand
gcaaccuggccaccauuaa

SEQ ID NO: 1899276 - RNA, 19 nt, Homo sapiens
  misc_RNA (1)...(19): siRNA sense strand
agacggccauucagcuuau

SEQ ID NO: 1899277 - RNA, 19 nt, Homo sapiens
  misc_RNA (1)...(19): siRNA sense strand
gcaacgcacuggccaugcu

SEQ ID NO: 1899278 - RNA, 19 nt, Homo sapiens
  misc_RNA (1)...(19): siRNA sense strand
cgaccgagacggccauuca

SEQ ID NO: 1899279 - RNA, 19 nt, Homo sapiens
  misc_RNA (1)...(19): siRNA sense strand
gggacguggugcuucauca

SEQ ID NO: 1899280 - RNA, 19 nt, Homo sapiens
  misc_RNA (1)...(19): siRNA sense strand
gguaugcgagccacaugaa

SEQ ID NO: 1899281 - RNA, 19 nt, Homo sapiens
  misc_RNA (1)...(19): siRNA sense strand
gcaacgggacuagcucuuc

SEQ ID NO: 1899282 - RNA, 19 nt, Homo sapiens
  misc_RNA (1)...(19): siRNA sense strand
caaccuggccaccauuaag

SEQ ID NO: 1899283 - RNA, 19 nt, Homo sapiens
  misc_RNA (1)...(19): siRNA sense strand
ugcaacuucuucuuaauag

SEQ ID NO: 1899284 - RNA, 19 nt, Homo sapiens
  misc_RNA (1)...(19): siRNA sense strand
gagagcaagcgcaagaagu

SEQ ID NO: 1899285 - RNA, 19 nt, Homo sapiens
  misc_RNA (1)...(19): siRNA sense strand
gggcucuccucguuguuca

SEQ ID NO: 1899286 - RNA, 19 nt, Homo sapiens
  misc_RNA (1)...(19): siRNA sense strand
uuucuucgccucugccuuu

SEQ ID NO: 1899287 - RNA, 19 nt, Homo sapiens
  misc_RNA (1)...(19): siRNA sense strand
ggagagcaagcgcaagaag

SEQ ID NO: 1899288 - RNA, 19 nt, Homo sapiens
  misc_RNA (1)...(19): siRNA sense strand
ccaaggccacggcaucuca

SEQ ID NO: 1899289 - RNA, 19 nt, Homo sapiens
  misc_RNA (1)...(19): siRNA sense strand
ucuccgcuccugauaauga

SEQ ID NO: 1899290 - RNA, 19 nt, Homo sapiens
  misc_RNA (1)...(19): siRNA sense strand
caacuucuucuuaauagcu

SEQ ID NO: 1899291 - RNA, 19 nt, Homo sapiens
  misc_RNA (1)...(19): siRNA sense strand
cgagacggccauucagcuu

SEQ ID NO: 1899292 - RNA, 19 nt, Homo sapiens
  misc_RNA (1)...(19): siRNA sense strand
uuuaccugcuguuaagaaa

SEQ ID NO: 1899293 - RNA, 19 nt, Homo sapiens
  misc_RNA (1)...(19): siRNA sense strand
ggagaagcagaaagaaugc

SEQ ID NO: 1899294 - RNA, 19 nt, Homo sapiens
  misc_RNA (1)...(19): siRNA sense strand
uaugcgagccacaugaaga

SEQ ID NO: 1899295 - RNA, 19 nt, Homo sapiens
  misc_RNA (1)...(19): siRNA sense strand
gcaagcgcaagaaguccuu

SEQ ID NO: 1899296 - RNA, 19 nt, Homo sapiens
  misc_RNA (1)...(19): siRNA sense strand
ucguguaccuguccaagca

SEQ ID NO: 1899297 - RNA, 19 nt, Homo sapiens
  misc_RNA (1)...(19): siRNA sense strand
cgggagagcaagcgcaaga

SEQ ID NO: 1899298 - RNA, 19 nt, Homo sapiens
  misc_RNA (1)...(19): siRNA sense strand
gcaacuucuucuuaauagc

SEQ ID NO: 1899299 - RNA, 19 nt, Homo sapiens
  misc_RNA (1)...(19): siRNA sense strand
agacacacacggagaagca

SEQ ID NO: 1899300 - RNA, 19 nt, Homo sapiens
  misc_RNA (1)...(19): siRNA sense strand
ucuuggauccuuggguuua

SEQ ID NO: 1899301 - RNA, 19 nt, Homo sapiens
  misc_RNA (1)...(19): siRNA sense strand
gacuagcucuucgcauaac

SEQ ID NO: 1899302 - RNA, 19 nt, Homo sapiens
  misc_RNA (1)...(19): siRNA sense strand
gaaugcaacuucuucuuaa

SEQ ID NO: 1899303 - RNA, 19 nt, Homo sapiens
  misc_RNA (1)...(19): siRNA sense strand
gggacuagcucuucgcaua

SEQ ID NO: 1899304 - RNA, 19 nt, Homo sapiens
  misc_RNA (1)...(19): siRNA sense strand
gcagaaagaaugcaacuuc

SEQ ID NO: 1899305 - RNA, 19 nt, Homo sapiens
  misc_RNA (1)...(19): siRNA sense strand
ggacuagcucuucgcauaa

SEQ ID NO: 1899306 - RNA, 19 nt, Homo sapiens
  misc_RNA (1)...(19): siRNA sense strand
gggcugaccaugacuguuu

SEQ ID NO: 1899307 - RNA, 19 nt, Homo sapiens
  misc_RNA (1)...(19): siRNA sense strand
ggucuccgcuccugauaau

SEQ ID NO: 1899308 - RNA, 19 nt, Homo sapiens
  misc_RNA (1)...(19): siRNA sense strand
gaucuucaaucagacauca

SEQ ID NO: 1899309 - RNA, 19 nt, Homo sapiens
  misc_RNA (1)...(19): siRNA sense strand
gcaagacacacacggagaa

SEQ ID NO: 1899310 - RNA, 19 nt, Homo sapiens
  misc_RNA (1)...(19): siRNA sense strand
gagacggccauucagcuua

SEQ ID NO: 1899311 - RNA, 19 nt, Homo sapiens
  misc_RNA (1)...(19): siRNA sense strand
gauccuucuucgaaaguuu

SEQ ID NO: 1899312 - RNA, 19 nt, Homo sapiens
  misc_RNA (1)...(19): siRNA sense strand
ggguuuaccugcuguuaag

SEQ ID NO: 1899313 - RNA, 19 nt, Homo sapiens
  misc_RNA (1)...(19): siRNA sense strand
uaccugcuguuaagaaaga

SEQ ID NO: 1899314 - RNA, 19 nt, Homo sapiens
  misc_RNA (1)...(19): siRNA sense strand
acacggagaagcagaaaga

SEQ ID NO: 1899315 - RNA, 19 nt, Homo sapiens
  misc_RNA (1)...(19): siRNA sense strand
ccaugcugcucacugguuu

SEQ ID NO: 1899316 - RNA, 19 nt, Homo sapiens
  misc_RNA (1)...(19): siRNA sense strand
cggagaagcagaaagaaug

SEQ ID NO: 1899317 - RNA, 19 nt, Homo sapiens
  misc_RNA (1)...(19): siRNA sense strand
gcaaccuggccaccauuaa

SEQ ID NO: 1899318 - RNA, 19 nt, Homo sapiens
  misc_RNA (1)...(19): siRNA sense strand
agacggccauucagcuuau

SEQ ID NO: 1899319 - RNA, 19 nt, Homo sapiens
  misc_RNA (1)...(19): siRNA sense strand
gcaacgcacuggccaugcu

SEQ ID NO: 1899320 - RNA, 19 nt, Homo sapiens
  misc_RNA (1)...(19): siRNA sense strand
cgaccgagacggccauuca

SEQ ID NO: 1899321 - RNA, 19 nt, Homo sapiens
  misc_RNA (1)...(19): siRNA sense strand
gggacguggugcuucauca

SEQ ID NO: 1899322 - RNA, 19 nt, Homo sapiens
  misc_RNA (1)...(19): siRNA sense strand
gguaugcgagccacaugaa

SEQ ID NO: 1899323 - RNA, 19 nt, Homo sapiens
  misc_RNA (1)...(19): siRNA sense strand
gcaacgggacuagcucuuc

SEQ ID NO: 1899324 - RNA, 19 nt, Homo sapiens
  misc_RNA (1)...(19): siRNA sense strand
caaccuggccaccauuaag

SEQ ID NO: 1899325 - RNA, 19 nt, Homo sapiens
  misc_RNA (1)...(19): siRNA sense strand
ugcaacuucuucuuaauag

SEQ ID NO: 1899326 - RNA, 19 nt, Homo sapiens
  misc_RNA (1)...(19): siRNA sense strand
gagagcaagcgcaagaagu

SEQ ID NO: 1899327 - RNA, 19 nt, Homo sapiens
  misc_RNA (1)...(19): siRNA sense strand
gggcucuccucguuguuca

SEQ ID NO: 1899328 - RNA, 19 nt, Homo sapiens
  misc_RNA (1)...(19): siRNA sense strand
uuucuucgccucugccuuu

SEQ ID NO: 1899329 - RNA, 19 nt, Homo sapiens
  misc_RNA (1)...(19): siRNA sense strand
ggagagcaagcgcaagaag

SEQ ID NO: 1899330 - RNA, 19 nt, Homo sapiens
  misc_RNA (1)...(19): siRNA sense strand
ccaaggccacggcaucuca

SEQ ID NO: 1899331 - RNA, 19 nt, Homo sapiens
  misc_RNA (1)...(19): siRNA sense strand
ucuccgcuccugauaauga

SEQ ID NO: 1899332 - RNA, 19 nt, Homo sapiens
  misc_RNA (1)...(19): siRNA sense strand
caacuucuucuuaauagcu

SEQ ID NO: 1899333 - RNA, 19 nt, Homo sapiens
  misc_RNA (1)...(19): siRNA sense strand
cgagacggccauucagcuu

SEQ ID NO: 1899334 - RNA, 19 nt, Homo sapiens
  misc_RNA (1)...(19): siRNA sense strand
uuuaccugcuguuaagaaa

SEQ ID NO: 1899335 - RNA, 19 nt, Homo sapiens
  misc_RNA (1)...(19): siRNA sense strand
ggagaagcagaaagaaugc

SEQ ID NO: 1899336 - RNA, 19 nt, Homo sapiens
  misc_RNA (1)...(19): siRNA sense strand
uaugcgagccacaugaaga

SEQ ID NO: 1899337 - RNA, 19 nt, Homo sapiens
  misc_RNA (1)...(19): siRNA sense strand
gcaagcgcaagaaguccuu

SEQ ID NO: 1899338 - RNA, 19 nt, Homo sapiens
  misc_RNA (1)...(19): siRNA sense strand
ucguguaccuguccaagca

SEQ ID NO: 1899339 - RNA, 19 nt, Homo sapiens
  misc_RNA (1)...(19): siRNA sense strand
cgggagagcaagcgcaaga

SEQ ID NO: 1899340 - RNA, 19 nt, Homo sapiens
  misc_RNA (1)...(19): siRNA sense strand
gcaacuucuucuuaauagc

SEQ ID NO: 1899341 - RNA, 19 nt, Homo sapiens
  misc_RNA (1)...(19): siRNA sense strand
agacacacacggagaagca

SEQ ID NO: 1899342 - RNA, 19 nt, Homo sapiens
  misc_RNA (1)...(19): siRNA sense strand
ucuuggauccuuggguuua

SEQ ID NO: 1899343 - RNA, 19 nt, Homo sapiens
  misc_RNA (1)...(19): siRNA sense strand
gacuagcucuucgcauaac

SEQ ID NO: 1899344 - RNA, 19 nt, Homo sapiens
  misc_RNA (1)...(19): siRNA sense strand
gaaugcaacuucuucuuaa

SEQ ID NO: 1899345 - RNA, 19 nt, Homo sapiens
  misc_RNA (1)...(19): siRNA sense strand
gggacuagcucuucgcaua

SEQ ID NO: 1899346 - RNA, 19 nt, Homo sapiens
  misc_RNA (1)...(19): siRNA sense strand
gcagaaagaaugcaacuuc

SEQ ID NO: 1899347 - RNA, 19 nt, Homo sapiens
  misc_RNA (1)...(19): siRNA sense strand
ggacuagcucuucgcauaa

SEQ ID NO: 1899348 - RNA, 19 nt, Homo sapiens
  misc_RNA (1)...(19): siRNA sense strand
gggcugaccaugacuguuu

SEQ ID NO: 1899349 - RNA, 19 nt, Homo sapiens
  misc_RNA (1)...(19): siRNA sense strand
ggucuccgcuccugauaau

SEQ ID NO: 1899350 - RNA, 19 nt, Homo sapiens
  misc_RNA (1)...(19): siRNA sense strand
gaucuucaaucagacauca

SEQ ID NO: 1899351 - RNA, 19 nt, Homo sapiens
  misc_RNA (1)...(19): siRNA sense strand
gcaagacacacacggagaa

SEQ ID NO: 1899352 - RNA, 19 nt, Homo sapiens
  misc_RNA (1)...(19): siRNA sense strand
gagacggccauucagcuua

SEQ ID NO: 1899353 - RNA, 19 nt, Homo sapiens
  misc_RNA (1)...(19): siRNA sense strand
gauccuucuucgaaaguuu

SEQ ID NO: 1899354 - RNA, 19 nt, Homo sapiens
  misc_RNA (1)...(19): siRNA sense strand
ggguuuaccugcuguuaag

SEQ ID NO: 1899355 - RNA, 19 nt, Homo sapiens
  misc_RNA (1)...(19): siRNA sense strand
uaccugcuguuaagaaaga

SEQ ID NO: 1899356 - RNA, 19 nt, Homo sapiens
  misc_RNA (1)...(19): siRNA sense strand
acacggagaagcagaaaga

SEQ ID NO: 1899357 - RNA, 19 nt, Homo sapiens
  misc_RNA (1)...(19): siRNA sense strand
ccaugcugcucacugguuu

SEQ ID NO: 1899358 - RNA, 19 nt, Homo sapiens
  misc_RNA (1)...(19): siRNA sense strand
cggagaagcagaaagaaug

SEQ ID NO: 1899359 - RNA, 19 nt, Homo sapiens
  misc_RNA (1)...(19): siRNA sense strand
gcaaccuggccaccauuaa

SEQ ID NO: 1899360 - RNA, 19 nt, Homo sapiens
  misc_RNA (1)...(19): siRNA sense strand
agacggccauucagcuuau

SEQ ID NO: 1899361 - RNA, 19 nt, Homo sapiens
  misc_RNA (1)...(19): siRNA sense strand
gcaacgcacuggccaugcu

SEQ ID NO: 1899362 - RNA, 19 nt, Homo sapiens
  misc_RNA (1)...(19): siRNA sense strand
cgaccgagacggccauuca

SEQ ID NO: 1899363 - RNA, 19 nt, Homo sapiens
  misc_RNA (1)...(19): siRNA sense strand
gggacguggugcuucauca

SEQ ID NO: 1899364 - RNA, 19 nt, Homo sapiens
  misc_RNA (1)...(19): siRNA sense strand
gguaugcgagccacaugaa

SEQ ID NO: 1899365 - RNA, 19 nt, Homo sapiens
  misc_RNA (1)...(19): siRNA sense strand
gcaacgggacuagcucuuc

SEQ ID NO: 1899366 - RNA, 19 nt, Homo sapiens
  misc_RNA (1)...(19): siRNA sense strand
caaccuggccaccauuaag

SEQ ID NO: 1899367 - RNA, 19 nt, Homo sapiens
  misc_RNA (1)...(19): siRNA sense strand
ugcaacuucuucuuaauag

SEQ ID NO: 1899368 - RNA, 19 nt, Homo sapiens
  misc_RNA (1)...(19): siRNA sense strand
gagagcaagcgcaagaagu

SEQ ID NO: 1899369 - RNA, 19 nt, Homo sapiens
  misc_RNA (1)...(19): siRNA sense strand
gggcucuccucguuguuca

SEQ ID NO: 1899370 - RNA, 19 nt, Homo sapiens
  misc_RNA (1)...(19): siRNA sense strand
uuucuucgccucugccuuu

SEQ ID NO: 1899371 - RNA, 19 nt, Homo sapiens
  misc_RNA (1)...(19): siRNA sense strand
ggagagcaagcgcaagaag

SEQ ID NO: 1899372 - RNA, 19 nt, Homo sapiens
  misc_RNA (1)...(19): siRNA sense strand
ccaaggccacggcaucuca

SEQ ID NO: 1899373 - RNA, 19 nt, Homo sapiens
  misc_RNA (1)...(19): siRNA sense strand
ucuccgcuccugauaauga

SEQ ID NO: 1899374 - RNA, 19 nt, Homo sapiens
  misc_RNA (1)...(19): siRNA sense strand
caacuucuucuuaauagcu

SEQ ID NO: 1899375 - RNA, 19 nt, Homo sapiens
  misc_RNA (1)...(19): siRNA sense strand
cgagacggccauucagcuu

SEQ ID NO: 1899376 - RNA, 19 nt, Homo sapiens
  misc_RNA (1)...(19): siRNA sense strand
uuuaccugcuguuaagaaa

SEQ ID NO: 1899377 - RNA, 19 nt, Homo sapiens
  misc_RNA (1)...(19): siRNA sense strand
ggagaagcagaaagaaugc

SEQ ID NO: 1899378 - RNA, 19 nt, Homo sapiens
  misc_RNA (1)...(19): siRNA sense strand
uaugcgagccacaugaaga

SEQ ID NO: 1899379 - RNA, 19 nt, Homo sapiens
  misc_RNA (1)...(19): siRNA sense strand
gcaagcgcaagaaguccuu

SEQ ID NO: 1899380 - RNA, 19 nt, Homo sapiens
  misc_RNA (1)...(19): siRNA sense strand
ucguguaccuguccaagca

SEQ ID NO: 1899381 - RNA, 19 nt, Homo sapiens
  misc_RNA (1)...(19): siRNA sense strand
cgggagagcaagcgcaaga

SEQ ID NO: 1899382 - RNA, 19 nt, Homo sapiens
  misc_RNA (1)...(19): siRNA sense strand
gcaacuucuucuuaauagc

SEQ ID NO: 1899383 - RNA, 19 nt, Homo sapiens
  misc_RNA (1)...(19): siRNA sense strand
agacacacacggagaagca

SEQ ID NO: 1899384 - RNA, 19 nt, Homo sapiens
  misc_RNA (1)...(19): siRNA sense strand
ucuuggauccuuggguuua

SEQ ID NO: 1899385 - RNA, 19 nt, Homo sapiens
  misc_RNA (1)...(19): siRNA sense strand
gacuagcucuucgcauaac

SEQ ID NO: 1899386 - RNA, 19 nt, Homo sapiens
  misc_RNA (1)...(19): siRNA sense strand
gaaugcaacuucuucuuaa

SEQ ID NO: 1899387 - RNA, 19 nt, Homo sapiens
  misc_RNA (1)...(19): siRNA sense strand
gggacuagcucuucgcaua

SEQ ID NO: 1899388 - RNA, 19 nt, Homo sapiens
  misc_RNA (1)...(19): siRNA sense strand
gcagaaagaaugcaacuuc

SEQ ID NO: 1899389 - RNA, 19 nt, Homo sapiens
  misc_RNA (1)...(19): siRNA sense strand
ggacuagcucuucgcauaa

SEQ ID NO: 1899390 - RNA, 19 nt, Homo sapiens
  misc_RNA (1)...(19): siRNA sense strand
gggcugaccaugacuguuu

SEQ ID NO: 1899391 - RNA, 19 nt, Homo sapiens
  misc_RNA (1)...(19): siRNA sense strand
ggucuccgcuccugauaau

SEQ ID NO: 1899392 - RNA, 19 nt, Homo sapiens
  misc_RNA (1)...(19): siRNA sense strand
gaucuucaaucagacauca

SEQ ID NO: 1899393 - RNA, 19 nt, Homo sapiens
  misc_RNA (1)...(19): siRNA sense strand
gcaagacacacacggagaa

SEQ ID NO: 1899394 - RNA, 19 nt, Homo sapiens
  misc_RNA (1)...(19): siRNA sense strand
gagacggccauucagcuua

SEQ ID NO: 1899395 - RNA, 19 nt, Homo sapiens
  misc_RNA (1)...(19): siRNA sense strand
gauccuucuucgaaaguuu

SEQ ID NO: 1899396 - RNA, 19 nt, Homo sapiens
  misc_RNA (1)...(19): siRNA sense strand
ggguuuaccugcuguuaag

SEQ ID NO: 1899397 - RNA, 19 nt, Homo sapiens
  misc_RNA (1)...(19): siRNA sense strand
uaccugcuguuaagaaaga

SEQ ID NO: 1899398 - RNA, 19 nt, Homo sapiens
  misc_RNA (1)...(19): siRNA sense strand
acacggagaagcagaaaga

SEQ ID NO: 1899399 - RNA, 19 nt, Homo sapiens
  misc_RNA (1)...(19): siRNA sense strand
ccaugcugcucacugguuu

SEQ ID NO: 1899400 - RNA, 19 nt, Homo sapiens
  misc_RNA (1)...(19): siRNA sense strand
cggagaagcagaaagaaug

SEQ ID NO: 1899401 - RNA, 19 nt, Homo sapiens
  misc_RNA (1)...(19): siRNA sense strand
gcaaccuggccaccauuaa

SEQ ID NO: 1899402 - RNA, 19 nt, Homo sapiens
  misc_RNA (1)...(19): siRNA sense strand
agacggccauucagcuuau

SEQ ID NO: 1899403 - RNA, 19 nt, Homo sapiens
  misc_RNA (1)...(19): siRNA sense strand
gcaacgcacuggccaugcu

SEQ ID NO: 1899404 - RNA, 19 nt, Homo sapiens
  misc_RNA (1)...(19): siRNA sense strand
cgaccgagacggccauuca

SEQ ID NO: 1899405 - RNA, 19 nt, Homo sapiens
  misc_RNA (1)...(19): siRNA sense strand
gggacguggugcuucauca

SEQ ID NO: 1899406 - RNA, 19 nt, Homo sapiens
  misc_RNA (1)...(19): siRNA sense strand
gguaugcgagccacaugaa

SEQ ID NO: 1899407 - RNA, 19 nt, Homo sapiens
  misc_RNA (1)...(19): siRNA sense strand
gcaacgggacuagcucuuc

SEQ ID NO: 1899408 - RNA, 19 nt, Homo sapiens
  misc_RNA (1)...(19): siRNA sense strand
caaccuggccaccauuaag

SEQ ID NO: 1899409 - RNA, 19 nt, Homo sapiens
  misc_RNA (1)...(19): siRNA sense strand
ugcaacuucuucuuaauag

SEQ ID NO: 1899410 - RNA, 19 nt, Homo sapiens
  misc_RNA (1)...(19): siRNA sense strand
gagagcaagcgcaagaagu

SEQ ID NO: 1899411 - RNA, 19 nt, Homo sapiens
  misc_RNA (1)...(19): siRNA sense strand
gggcucuccucguuguuca

SEQ ID NO: 1899412 - RNA, 19 nt, Homo sapiens
  misc_RNA (1)...(19): siRNA sense strand
uuucuucgccucugccuuu

SEQ ID NO: 1899413 - RNA, 19 nt, Homo sapiens
  misc_RNA (1)...(19): siRNA sense strand
ggagagcaagcgcaagaag

SEQ ID NO: 1899414 - RNA, 19 nt, Homo sapiens
  misc_RNA (1)...(19): siRNA sense strand
ccaaggccacggcaucuca

SEQ ID NO: 1899415 - RNA, 19 nt, Homo sapiens
  misc_RNA (1)...(19): siRNA sense strand
ucuccgcuccugauaauga

SEQ ID NO: 1899416 - RNA, 19 nt, Homo sapiens
  misc_RNA (1)...(19): siRNA sense strand
caacuucuucuuaauagcu

SEQ ID NO: 1899417 - RNA, 19 nt, Homo sapiens
  misc_RNA (1)...(19): siRNA sense strand
cgagacggccauucagcuu

SEQ ID NO: 1899418 - RNA, 19 nt, Homo sapiens
  misc_RNA (1)...(19): siRNA sense strand
uuuaccugcuguuaagaaa

SEQ ID NO: 1899419 - RNA, 19 nt, Homo sapiens
  misc_RNA (1)...(19): siRNA sense strand
ggagaagcagaaagaaugc

SEQ ID NO: 1899420 - RNA, 19 nt, Homo sapiens
  misc_RNA (1)...(19): siRNA sense strand
uaugcgagccacaugaaga

SEQ ID NO: 1899421 - RNA, 19 nt, Homo sapiens
  misc_RNA (1)...(19): siRNA sense strand
gcaagcgcaagaaguccuu

SEQ ID NO: 1899422 - RNA, 19 nt, Homo sapiens
  misc_RNA (1)...(19): siRNA sense strand
ucguguaccuguccaagca

SEQ ID NO: 1899423 - RNA, 19 nt, Homo sapiens
  misc_RNA (1)...(19): siRNA sense strand
cgggagagcaagcgcaaga

SEQ ID NO: 1899424 - RNA, 19 nt, Homo sapiens
  misc_RNA (1)...(19): siRNA sense strand
gcaacuucuucuuaauagc

SEQ ID NO: 1899425 - RNA, 19 nt, Homo sapiens
  misc_RNA (1)...(19): siRNA sense strand
agacacacacggagaagca

SEQ ID NO: 1899426 - RNA, 19 nt, Homo sapiens
  misc_RNA (1)...(19): siRNA sense strand
ucuuggauccuuggguuua

SEQ ID NO: 1899427 - RNA, 19 nt, Homo sapiens
  misc_RNA (1)...(19): siRNA sense strand
gacuagcucuucgcauaac

SEQ ID NO: 1899428 - RNA, 19 nt, Homo sapiens
  misc_RNA (1)...(19): siRNA sense strand
gaaugcaacuucuucuuaa

SEQ ID NO: 1899429 - RNA, 19 nt, Homo sapiens
  misc_RNA (1)...(19): siRNA sense strand
gggacuagcucuucgcaua

SEQ ID NO: 1899430 - RNA, 19 nt, Homo sapiens
  misc_RNA (1)...(19): siRNA sense strand
gcagaaagaaugcaacuuc

SEQ ID NO: 1899431 - RNA, 19 nt, Homo sapiens
  misc_RNA (1)...(19): siRNA sense strand
ggacuagcucuucgcauaa

SEQ ID NO: 1899432 - RNA, 19 nt, Homo sapiens
  misc_RNA (1)...(19): siRNA sense strand
gggcugaccaugacuguuu

SEQ ID NO: 1899433 - RNA, 19 nt, Homo sapiens
  misc_RNA (1)...(19): siRNA sense strand
ggucuccgcuccugauaau

SEQ ID NO: 1899434 - RNA, 19 nt, Homo sapiens
  misc_RNA (1)...(19): siRNA sense strand
gaucuucaaucagacauca

SEQ ID NO: 1899435 - RNA, 19 nt, Homo sapiens
  misc_RNA (1)...(19): siRNA sense strand
gcaagacacacacggagaa

SEQ ID NO: 1899436 - RNA, 19 nt, Homo sapiens
  misc_RNA (1)...(19): siRNA sense strand
gagacggccauucagcuua

SEQ ID NO: 1899437 - RNA, 19 nt, Homo sapiens
  misc_RNA (1)...(19): siRNA sense strand
gauccuucuucgaaaguuu

SEQ ID NO: 1899438 - RNA, 19 nt, Homo sapiens
  misc_RNA (1)...(19): siRNA sense strand
ggguuuaccugcuguuaag

SEQ ID NO: 1899439 - RNA, 19 nt, Homo sapiens
  misc_RNA (1)...(19): siRNA sense strand
uaccugcuguuaagaaaga

SEQ ID NO: 1899440 - RNA, 19 nt, Homo sapiens
  misc_RNA (1)...(19): siRNA sense strand
acacggagaagcagaaaga

SEQ ID NO: 1899441 - RNA, 19 nt, Homo sapiens
  misc_RNA (1)...(19): siRNA sense strand
ccaugcugcucacugguuu

SEQ ID NO: 1899442 - RNA, 19 nt, Homo sapiens
  misc_RNA (1)...(19): siRNA sense strand
cggagaagcagaaagaaug

SEQ ID NO: 1899443 - RNA, 19 nt, Homo sapiens
  misc_RNA (1)...(19): siRNA sense strand
gcaaccuggccaccauuaa

SEQ ID NO: 1899444 - RNA, 19 nt, Homo sapiens
  misc_RNA (1)...(19): siRNA sense strand
agacggccauucagcuuau

SEQ ID NO: 1899445 - RNA, 19 nt, Homo sapiens
  misc_RNA (1)...(19): siRNA sense strand
gcaacgcacuggccaugcu

SEQ ID NO: 1899446 - RNA, 19 nt, Homo sapiens
  misc_RNA (1)...(19): siRNA sense strand
cgaccgagacggccauuca

SEQ ID NO: 1899447 - RNA, 19 nt, Homo sapiens
  misc_RNA (1)...(19): siRNA sense strand
gggacguggugcuucauca

SEQ ID NO: 1899448 - RNA, 19 nt, Homo sapiens
  misc_RNA (1)...(19): siRNA sense strand
gguaugcgagccacaugaa

SEQ ID NO: 1899449 - RNA, 19 nt, Homo sapiens
  misc_RNA (1)...(19): siRNA sense strand
gcaacgggacuagcucuuc

SEQ ID NO: 1899450 - RNA, 19 nt, Homo sapiens
  misc_RNA (1)...(19): siRNA sense strand
caaccuggccaccauuaag

SEQ ID NO: 1899451 - RNA, 19 nt, Homo sapiens
  misc_RNA (1)...(19): siRNA sense strand
ugcaacuucuucuuaauag

SEQ ID NO: 1899452 - RNA, 19 nt, Homo sapiens
  misc_RNA (1)...(19): siRNA sense strand
gagagcaagcgcaagaagu

SEQ ID NO: 1899453 - RNA, 19 nt, Homo sapiens
  misc_RNA (1)...(19): siRNA sense strand
gggcucuccucguuguuca

SEQ ID NO: 1899454 - RNA, 19 nt, Homo sapiens
  misc_RNA (1)...(19): siRNA sense strand
uuucuucgccucugccuuu

SEQ ID NO: 1899455 - RNA, 19 nt, Homo sapiens
  misc_RNA (1)...(19): siRNA sense strand
ggagagcaagcgcaagaag

SEQ ID NO: 1899456 - RNA, 19 nt, Homo sapiens
  misc_RNA (1)...(19): siRNA sense strand
ccaaggccacggcaucuca

SEQ ID NO: 1899457 - RNA, 19 nt, Homo sapiens
  misc_RNA (1)...(19): siRNA sense strand
ucuccgcuccugauaauga

SEQ ID NO: 1899458 - RNA, 19 nt, Homo sapiens
  misc_RNA (1)...(19): siRNA sense strand
caacuucuucuuaauagcu

SEQ ID NO: 1899459 - RNA, 19 nt, Homo sapiens
  misc_RNA (1)...(19): siRNA sense strand
cgagacggccauucagcuu

SEQ ID NO: 1899460 - RNA, 19 nt, Homo sapiens
  misc_RNA (1)...(19): siRNA sense strand
uuuaccugcuguuaagaaa

SEQ ID NO: 1899461 - RNA, 19 nt, Homo sapiens
  misc_RNA (1)...(19): siRNA sense strand
ggagaagcagaaagaaugc

SEQ ID NO: 1899462 - RNA, 19 nt, Homo sapiens
  misc_RNA (1)...(19): siRNA sense strand
uaugcgagccacaugaaga

SEQ ID NO: 1899463 - RNA, 19 nt, Homo sapiens
  misc_RNA (1)...(19): siRNA sense strand
gcaagcgcaagaaguccuu

SEQ ID NO: 1899464 - RNA, 19 nt, Homo sapiens
  misc_RNA (1)...(19): siRNA sense strand
ucguguaccuguccaagca

SEQ ID NO: 1899465 - RNA, 19 nt, Homo sapiens
  misc_RNA (1)...(19): siRNA sense strand
cgggagagcaagcgcaaga

SEQ ID NO: 1899466 - RNA, 19 nt, Homo sapiens
  misc_RNA (1)...(19): siRNA sense strand
gcaacuucuucuuaauagc

SEQ ID NO: 1899467 - RNA, 19 nt, Homo sapiens
  misc_RNA (1)...(19): siRNA sense strand
agacacacacggagaagca

SEQ ID NO: 1899468 - RNA, 19 nt, Homo sapiens
  misc_RNA (1)...(19): siRNA sense strand
ucuuggauccuuggguuua

SEQ ID NO: 1899469 - RNA, 19 nt, Homo sapiens
  misc_RNA (1)...(19): siRNA sense strand
gacuagcucuucgcauaac

SEQ ID NO: 1899470 - RNA, 19 nt, Homo sapiens
  misc_RNA (1)...(19): siRNA sense strand
gaaugcaacuucuucuuaa

SEQ ID NO: 1899471 - RNA, 19 nt, Homo sapiens
  misc_RNA (1)...(19): siRNA sense strand
gggacuagcucuucgcaua

SEQ ID NO: 1899472 - RNA, 19 nt, Homo sapiens
  misc_RNA (1)...(19): siRNA sense strand
gcagaaagaaugcaacuuc

SEQ ID NO: 1899473 - RNA, 19 nt, Homo sapiens
  misc_RNA (1)...(19): siRNA sense strand
ggacuagcucuucgcauaa

SEQ ID NO: 1899474 - RNA, 19 nt, Homo sapiens
  misc_RNA (1)...(19): siRNA sense strand
gggcugaccaugacuguuu

SEQ ID NO: 1899475 - RNA, 19 nt, Homo sapiens
  misc_RNA (1)...(19): siRNA sense strand
ggucuccgcuccugauaau

SEQ ID NO: 1899476 - RNA, 19 nt, Homo sapiens
  misc_RNA (1)...(19): siRNA sense strand
gaucuucaaucagacauca

SEQ ID NO: 1899477 - RNA, 19 nt, Homo sapiens
  misc_RNA (1)...(19): siRNA sense strand
gcaagacacacacggagaa

SEQ ID NO: 1899478 - RNA, 19 nt, Homo sapiens
  misc_RNA (1)...(19): siRNA sense strand
gagacggccauucagcuua

SEQ ID NO: 1899479 - RNA, 19 nt, Homo sapiens
  misc_RNA (1)...(19): siRNA sense strand
gauccuucuucgaaaguuu

SEQ ID NO: 1899480 - RNA, 19 nt, Homo sapiens
  misc_RNA (1)...(19): siRNA sense strand
ggguuuaccugcuguuaag

SEQ ID NO: 1899481 - RNA, 19 nt, Homo sapiens
  misc_RNA (1)...(19): siRNA sense strand
uaccugcuguuaagaaaga

SEQ ID NO: 1899482 - RNA, 19 nt, Homo sapiens
  misc_RNA (1)...(19): siRNA sense strand
acacggagaagcagaaaga

SEQ ID NO: 1899483 - RNA, 19 nt, Homo sapiens
  misc_RNA (1)...(19): siRNA sense strand
ccaugcugcucacugguuu

SEQ ID NO: 1899484 - RNA, 19 nt, Homo sapiens
  misc_RNA (1)...(19): siRNA sense strand
cggagaagcagaaagaaug

SEQ ID NO: 1899485 - RNA, 19 nt, Homo sapiens
  misc_RNA (1)...(19): siRNA sense strand
gcaaccuggccaccauuaa

SEQ ID NO: 1899486 - RNA, 19 nt, Homo sapiens
  misc_RNA (1)...(19): siRNA sense strand
agacggccauucagcuuau

SEQ ID NO: 1899487 - RNA, 19 nt, Homo sapiens
  misc_RNA (1)...(19): siRNA sense strand
gcaacgcacuggccaugcu

SEQ ID NO: 1899488 - RNA, 19 nt, Homo sapiens
  misc_RNA (1)...(19): siRNA sense strand
cgaccgagacggccauuca

SEQ ID NO: 1899489 - RNA, 19 nt, Homo sapiens
  misc_RNA (1)...(19): siRNA sense strand
gggacguggugcuucauca

SEQ ID NO: 1899490 - RNA, 19 nt, Homo sapiens
  misc_RNA (1)...(19): siRNA sense strand
gguaugcgagccacaugaa

SEQ ID NO: 1899491 - RNA, 19 nt, Homo sapiens
  misc_RNA (1)...(19): siRNA sense strand
gcaacgggacuagcucuuc

SEQ ID NO: 1899492 - RNA, 19 nt, Homo sapiens
  misc_RNA (1)...(19): siRNA sense strand
caaccuggccaccauuaag

SEQ ID NO: 1899493 - RNA, 19 nt, Homo sapiens
  misc_RNA (1)...(19): siRNA sense strand
ugcaacuucuucuuaauag

SEQ ID NO: 1899494 - RNA, 19 nt, Homo sapiens
  misc_RNA (1)...(19): siRNA sense strand
gagagcaagcgcaagaagu

SEQ ID NO: 1899495 - RNA, 19 nt, Homo sapiens
  misc_RNA (1)...(19): siRNA sense strand
gggcucuccucguuguuca

SEQ ID NO: 1899496 - RNA, 19 nt, Homo sapiens
  misc_RNA (1)...(19): siRNA sense strand
uuucuucgccucugccuuu

SEQ ID NO: 1899497 - RNA, 19 nt, Homo sapiens
  misc_RNA (1)...(19): siRNA sense strand
ggagagcaagcgcaagaag

SEQ ID NO: 1899498 - RNA, 19 nt, Homo sapiens
  misc_RNA (1)...(19): siRNA sense strand
ccaaggccacggcaucuca

SEQ ID NO: 1899499 - RNA, 19 nt, Homo sapiens
  misc_RNA (1)...(19): siRNA sense strand
ucuccgcuccugauaauga

SEQ ID NO: 1899500 - RNA, 19 nt, Homo sapiens
  misc_RNA (1)...(19): siRNA sense strand
caacuucuucuuaauagcu

SEQ ID NO: 1899501 - RNA, 19 nt, Homo sapiens
  misc_RNA (1)...(19): siRNA sense strand
cgagacggccauucagcuu

SEQ ID NO: 1899502 - RNA, 19 nt, Homo sapiens
  misc_RNA (1)...(19): siRNA sense strand
uuuaccugcuguuaagaaa

SEQ ID NO: 1899503 - RNA, 19 nt, Homo sapiens
  misc_RNA (1)...(19): siRNA sense strand
ggagaagcagaaagaaugc

SEQ ID NO: 1899504 - RNA, 19 nt, Homo sapiens
  misc_RNA (1)...(19): siRNA sense strand
uaugcgagccacaugaaga

SEQ ID NO: 1899505 - RNA, 19 nt, Homo sapiens
  misc_RNA (1)...(19): siRNA sense strand
gcaagcgcaagaaguccuu

SEQ ID NO: 1899506 - RNA, 19 nt, Homo sapiens
  misc_RNA (1)...(19): siRNA sense strand
ucguguaccuguccaagca

SEQ ID NO: 1899507 - RNA, 19 nt, Homo sapiens
  misc_RNA (1)...(19): siRNA sense strand
cgggagagcaagcgcaaga

SEQ ID NO: 1899508 - RNA, 19 nt, Homo sapiens
  misc_RNA (1)...(19): siRNA sense strand
gcaacuucuucuuaauagc

SEQ ID NO: 1899509 - RNA, 19 nt, Homo sapiens
  misc_RNA (1)...(19): siRNA sense strand
agacacacacggagaagca

SEQ ID NO: 1899510 - RNA, 19 nt, Homo sapiens
  misc_RNA (1)...(19): siRNA sense strand
ucuuggauccuuggguuua

SEQ ID NO: 1899511 - RNA, 19 nt, Homo sapiens
  misc_RNA (1)...(19): siRNA sense strand
gacuagcucuucgcauaac

SEQ ID NO: 1899512 - RNA, 19 nt, Homo sapiens
  misc_RNA (1)...(19): siRNA sense strand
gaaugcaacuucuucuuaa

SEQ ID NO: 1899513 - RNA, 19 nt, Homo sapiens
  misc_RNA (1)...(19): siRNA sense strand
gggacuagcucuucgcaua

SEQ ID NO: 1899514 - RNA, 19 nt, Homo sapiens
  misc_RNA (1)...(19): siRNA sense strand
gcagaaagaaugcaacuuc

SEQ ID NO: 1899515 - RNA, 19 nt, Homo sapiens
  misc_RNA (1)...(19): siRNA sense strand
ggacuagcucuucgcauaa

SEQ ID NO: 1899516 - RNA, 19 nt, Homo sapiens
  misc_RNA (1)...(19): siRNA sense strand
gggcugaccaugacuguuu

SEQ ID NO: 1899517 - RNA, 19 nt, Homo sapiens
  misc_RNA (1)...(19): siRNA sense strand
ggucuccgcuccugauaau

SEQ ID NO: 1899518 - RNA, 19 nt, Homo sapiens
  misc_RNA (1)...(19): siRNA sense strand
gaucuucaaucagacauca

SEQ ID NO: 1899519 - RNA, 19 nt, Homo sapiens
  misc_RNA (1)...(19): siRNA sense strand
gcaagacacacacggagaa

SEQ ID NO: 1899520 - RNA, 19 nt, Homo sapiens
  misc_RNA (1)...(19): siRNA sense strand
gagacggccauucagcuua

SEQ ID NO: 1899521 - RNA, 19 nt, Homo sapiens
  misc_RNA (1)...(19): siRNA sense strand
gauccuucuucgaaaguuu

SEQ ID NO: 1899522 - RNA, 19 nt, Homo sapiens
  misc_RNA (1)...(19): siRNA sense strand
ggguuuaccugcuguuaag

SEQ ID NO: 1899523 - RNA, 19 nt, Homo sapiens
  misc_RNA (1)...(19): siRNA sense strand
uaccugcuguuaagaaaga

SEQ ID NO: 1899524 - RNA, 19 nt, Homo sapiens
  misc_RNA (1)...(19): siRNA sense strand
acacggagaagcagaaaga

SEQ ID NO: 1899525 - RNA, 19 nt, Homo sapiens
  misc_RNA (1)...(19): siRNA sense strand
ccaugcugcucacugguuu

SEQ ID NO: 1899526 - RNA, 19 nt, Homo sapiens
  misc_RNA (1)...(19): siRNA sense strand
cggagaagcagaaagaaug

SEQ ID NO: 1899527 - RNA, 19 nt, Homo sapiens
  misc_RNA (1)...(19): siRNA sense strand
gcaaccuggccaccauuaa

SEQ ID NO: 1899528 - RNA, 19 nt, Homo sapiens
  misc_RNA (1)...(19): siRNA sense strand
agacggccauucagcuuau

SEQ ID NO: 1899529 - RNA, 19 nt, Homo sapiens
  misc_RNA (1)...(19): siRNA sense strand
gcaacgcacuggccaugcu

SEQ ID NO: 1899530 - RNA, 19 nt, Homo sapiens
  misc_RNA (1)...(19): siRNA sense strand
cgaccgagacggccauuca

SEQ ID NO: 1899531 - RNA, 19 nt, Homo sapiens
  misc_RNA (1)...(19): siRNA sense strand
gggacguggugcuucauca

SEQ ID NO: 1899532 - RNA, 19 nt, Homo sapiens
  misc_RNA (1)...(19): siRNA sense strand
gguaugcgagccacaugaa

SEQ ID NO: 1899533 - RNA, 19 nt, Homo sapiens
  misc_RNA (1)...(19): siRNA sense strand
gcaacgggacuagcucuuc

SEQ ID NO: 1899534 - RNA, 19 nt, Homo sapiens
  misc_RNA (1)...(19): siRNA sense strand
caaccuggccaccauuaag

SEQ ID NO: 1899535 - RNA, 19 nt, Homo sapiens
  misc_RNA (1)...(19): siRNA sense strand
ugcaacuucuucuuaauag

SEQ ID NO: 1899536 - RNA, 19 nt, Homo sapiens
  misc_RNA (1)...(19): siRNA sense strand
gagagcaagcgcaagaagu

SEQ ID NO: 1899537 - RNA, 19 nt, Homo sapiens
  misc_RNA (1)...(19): siRNA sense strand
gggcucuccucguuguuca

SEQ ID NO: 1899538 - RNA, 19 nt, Homo sapiens
  misc_RNA (1)...(19): siRNA sense strand
uuucuucgccucugccuuu

SEQ ID NO: 1899539 - RNA, 19 nt, Homo sapiens
  misc_RNA (1)...(19): siRNA sense strand
ggagagcaagcgcaagaag

SEQ ID NO: 1899540 - RNA, 19 nt, Homo sapiens
  misc_RNA (1)...(19): siRNA sense strand
ccaaggccacggcaucuca

SEQ ID NO: 1899541 - RNA, 19 nt, Homo sapiens
  misc_RNA (1)...(19): siRNA sense strand
ucuccgcuccugauaauga

SEQ ID NO: 1899542 - RNA, 19 nt, Homo sapiens
  misc_RNA (1)...(19): siRNA sense strand
caacuucuucuuaauagcu

SEQ ID NO: 1899543 - RNA, 19 nt, Homo sapiens
  misc_RNA (1)...(19): siRNA sense strand
cgagacggccauucagcuu

SEQ ID NO: 1899544 - RNA, 19 nt, Homo sapiens
  misc_RNA (1)...(19): siRNA sense strand
uuuaccugcuguuaagaaa

SEQ ID NO: 1899545 - RNA, 19 nt, Homo sapiens
  misc_RNA (1)...(19): siRNA sense strand
ggagaagcagaaagaaugc

SEQ ID NO: 1899546 - RNA, 19 nt, Homo sapiens
  misc_RNA (1)...(19): siRNA sense strand
uaugcgagccacaugaaga

SEQ ID NO: 1899547 - RNA, 19 nt, Homo sapiens
  misc_RNA (1)...(19): siRNA sense strand
gcaagcgcaagaaguccuu

SEQ ID NO: 1899548 - RNA, 19 nt, Homo sapiens
  misc_RNA (1)...(19): siRNA sense strand
ucguguaccuguccaagca

SEQ ID NO: 1899549 - RNA, 19 nt, Homo sapiens
  misc_RNA (1)...(19): siRNA sense strand
cgggagagcaagcgcaaga

SEQ ID NO: 1899550 - RNA, 19 nt, Homo sapiens
  misc_RNA (1)...(19): siRNA sense strand
gcaacuucuucuuaauagc

SEQ ID NO: 1899551 - RNA, 19 nt, Homo sapiens
  misc_RNA (1)...(19): siRNA sense strand
agacacacacggagaagca

SEQ ID NO: 1899552 - RNA, 19 nt, Homo sapiens
  misc_RNA (1)...(19): siRNA sense strand
ucuuggauccuuggguuua

SEQ ID NO: 1899553 - RNA, 19 nt, Homo sapiens
  misc_RNA (1)...(19): siRNA sense strand
gacuagcucuucgcauaac

SEQ ID NO: 1899554 - RNA, 19 nt, Homo sapiens
  misc_RNA (1)...(19): siRNA sense strand
gaaugcaacuucuucuuaa

SEQ ID NO: 1899555 - RNA, 19 nt, Homo sapiens
  misc_RNA (1)...(19): siRNA sense strand
gggacuagcucuucgcaua

SEQ ID NO: 1899556 - RNA, 19 nt, Homo sapiens
  misc_RNA (1)...(19): siRNA sense strand
gcagaaagaaugcaacuuc

SEQ ID NO: 1899557 - RNA, 19 nt, Homo sapiens
  misc_RNA (1)...(19): siRNA sense strand
ggacuagcucuucgcauaa

SEQ ID NO: 1899558 - RNA, 19 nt, Homo sapiens
  misc_RNA (1)...(19): siRNA sense strand
gggcugaccaugacuguuu

SEQ ID NO: 1899559 - RNA, 19 nt, Homo sapiens
  misc_RNA (1)...(19): siRNA sense strand
ggucuccgcuccugauaau

SEQ ID NO: 1899560 - RNA, 19 nt, Homo sapiens
  misc_RNA (1)...(19): siRNA sense strand
gaucuucaaucagacauca

SEQ ID NO: 1899561 - RNA, 19 nt, Homo sapiens
  misc_RNA (1)...(19): siRNA sense strand
gcaagacacacacggagaa

SEQ ID NO: 1899562 - RNA, 19 nt, Homo sapiens
  misc_RNA (1)...(19): siRNA sense strand
gagacggccauucagcuua

SEQ ID NO: 1899563 - RNA, 19 nt, Homo sapiens
  misc_RNA (1)...(19): siRNA sense strand
gauccuucuucgaaaguuu

SEQ ID NO: 1899564 - RNA, 19 nt, Homo sapiens
  misc_RNA (1)...(19): siRNA sense strand
ggguuuaccugcuguuaag

SEQ ID NO: 1899565 - RNA, 19 nt, Homo sapiens
  misc_RNA (1)...(19): siRNA sense strand
uaccugcuguuaagaaaga

SEQ ID NO: 1899566 - RNA, 19 nt, Homo sapiens
  misc_RNA (1)...(19): siRNA sense strand
acacggagaagcagaaaga

SEQ ID NO: 1899567 - RNA, 19 nt, Homo sapiens
  misc_RNA (1)...(19): siRNA sense strand
ccaugcugcucacugguuu

SEQ ID NO: 1899568 - RNA, 19 nt, Homo sapiens
  misc_RNA (1)...(19): siRNA sense strand
cggagaagcagaaagaaug

SEQ ID NO: 1899569 - RNA, 19 nt, Homo sapiens
  misc_RNA (1)...(19): siRNA sense strand
gcaaccuggccaccauuaa

SEQ ID NO: 1899570 - RNA, 19 nt, Homo sapiens
  misc_RNA (1)...(19): siRNA sense strand
agacggccauucagcuuau

SEQ ID NO: 1899571 - RNA, 19 nt, Homo sapiens
  misc_RNA (1)...(19): siRNA sense strand
gcaacgcacuggccaugcu

SEQ ID NO: 1899572 - RNA, 19 nt, Homo sapiens
  misc_RNA (1)...(19): siRNA sense strand
cgaccgagacggccauuca

SEQ ID NO: 1899573 - RNA, 19 nt, Homo sapiens
  misc_RNA (1)...(19): siRNA sense strand
gggacguggugcuucauca

SEQ ID NO: 1899574 - RNA, 19 nt, Homo sapiens
  misc_RNA (1)...(19): siRNA sense strand
gguaugcgagccacaugaa

SEQ ID NO: 1899575 - RNA, 19 nt, Homo sapiens
  misc_RNA (1)...(19): siRNA sense strand
gcaacgggacuagcucuuc

SEQ ID NO: 1899576 - RNA, 19 nt, Homo sapiens
  misc_RNA (1)...(19): siRNA sense strand
caaccuggccaccauuaag

SEQ ID NO: 1899577 - RNA, 19 nt, Homo sapiens
  misc_RNA (1)...(19): siRNA sense strand
ugcaacuucuucuuaauag

SEQ ID NO: 1899578 - RNA, 19 nt, Homo sapiens
  misc_RNA (1)...(19): siRNA sense strand
gagagcaagcgcaagaagu

SEQ ID NO: 1899579 - RNA, 19 nt, Homo sapiens
  misc_RNA (1)...(19): siRNA sense strand
gggcucuccucguuguuca

SEQ ID NO: 1899580 - RNA, 19 nt, Homo sapiens
  misc_RNA (1)...(19): siRNA sense strand
uuucuucgccucugccuuu

SEQ ID NO: 1899581 - RNA, 19 nt, Homo sapiens
  misc_RNA (1)...(19): siRNA sense strand
ggagagcaagcgcaagaag

SEQ ID NO: 1899582 - RNA, 19 nt, Homo sapiens
  misc_RNA (1)...(19): siRNA sense strand
ccaaggccacggcaucuca

SEQ ID NO: 1899583 - RNA, 19 nt, Homo sapiens
  misc_RNA (1)...(19): siRNA sense strand
ucuccgcuccugauaauga

SEQ ID NO: 1899584 - RNA, 19 nt, Homo sapiens
  misc_RNA (1)...(19): siRNA sense strand
caacuucuucuuaauagcu

SEQ ID NO: 1899585 - RNA, 19 nt, Homo sapiens
  misc_RNA (1)...(19): siRNA sense strand
cgagacggccauucagcuu

SEQ ID NO: 1899586 - RNA, 19 nt, Homo sapiens
  misc_RNA (1)...(19): siRNA sense strand
uuuaccugcuguuaagaaa

SEQ ID NO: 1899587 - RNA, 19 nt, Homo sapiens
  misc_RNA (1)...(19): siRNA sense strand
ggagaagcagaaagaaugc

SEQ ID NO: 1899588 - RNA, 19 nt, Homo sapiens
  misc_RNA (1)...(19): siRNA sense strand
uaugcgagccacaugaaga

SEQ ID NO: 1899589 - RNA, 19 nt, Homo sapiens
  misc_RNA (1)...(19): siRNA sense strand
gcaagcgcaagaaguccuu

SEQ ID NO: 1899590 - RNA, 19 nt, Homo sapiens
  misc_RNA (1)...(19): siRNA sense strand
ucguguaccuguccaagca

SEQ ID NO: 1899591 - RNA, 19 nt, Homo sapiens
  misc_RNA (1)...(19): siRNA sense strand
cgggagagcaagcgcaaga

SEQ ID NO: 1899592 - RNA, 19 nt, Homo sapiens
  misc_RNA (1)...(19): siRNA sense strand
gcaacuucuucuuaauagc

SEQ ID NO: 1899593 - RNA, 19 nt, Homo sapiens
  misc_RNA (1)...(19): siRNA sense strand
agacacacacggagaagca

SEQ ID NO: 1899594 - RNA, 19 nt, Homo sapiens
  misc_RNA (1)...(19): siRNA sense strand
ucuuggauccuuggguuua

SEQ ID NO: 1899595 - RNA, 19 nt, Homo sapiens
  misc_RNA (1)...(19): siRNA sense strand
gacuagcucuucgcauaac

SEQ ID NO: 1899596 - RNA, 19 nt, Homo sapiens
  misc_RNA (1)...(19): siRNA sense strand
gaaugcaacuucuucuuaa

SEQ ID NO: 1899597 - RNA, 19 nt, Homo sapiens
  misc_RNA (1)...(19): siRNA sense strand
gggacuagcucuucgcaua

SEQ ID NO: 1899598 - RNA, 19 nt, Homo sapiens
  misc_RNA (1)...(19): siRNA sense strand
gcagaaagaaugcaacuuc

SEQ ID NO: 1899599 - RNA, 19 nt, Homo sapiens
  misc_RNA (1)...(19): siRNA sense strand
ggacuagcucuucgcauaa

SEQ ID NO: 1899600 - RNA, 19 nt, Homo sapiens
  misc_RNA (1)...(19): siRNA sense strand
gggcugaccaugacuguuu

SEQ ID NO: 1899601 - RNA, 19 nt, Homo sapiens
  misc_RNA (1)...(19): siRNA sense strand
ggucuccgcuccugauaau

SEQ ID NO: 1899602 - RNA, 19 nt, Homo sapiens
  misc_RNA (1)...(19): siRNA sense strand
gaucuucaaucagacauca

SEQ ID NO: 1899603 - RNA, 19 nt, Homo sapiens
  misc_RNA (1)...(19): siRNA sense strand
gcaagacacacacggagaa

SEQ ID NO: 1899604 - RNA, 19 nt, Homo sapiens
  misc_RNA (1)...(19): siRNA sense strand
gagacggccauucagcuua

SEQ ID NO: 1899605 - RNA, 19 nt, Homo sapiens
  misc_RNA (1)...(19): siRNA sense strand
gauccuucuucgaaaguuu

SEQ ID NO: 1899606 - RNA, 19 nt, Homo sapiens
  misc_RNA (1)...(19): siRNA sense strand
ggguuuaccugcuguuaag

SEQ ID NO: 1899607 - RNA, 19 nt, Homo sapiens
  misc_RNA (1)...(19): siRNA sense strand
uaccugcuguuaagaaaga

SEQ ID NO: 1899608 - RNA, 19 nt, Homo sapiens
  misc_RNA (1)...(19): siRNA sense strand
acacggagaagcagaaaga

SEQ ID NO: 1899609 - RNA, 19 nt, Homo sapiens
  misc_RNA (1)...(19): siRNA sense strand
ccaugcugcucacugguuu

SEQ ID NO: 1899610 - RNA, 19 nt, Homo sapiens
  misc_RNA (1)...(19): siRNA sense strand
cggagaagcagaaagaaug

SEQ ID NO: 1899611 - RNA, 19 nt, Homo sapiens
  misc_RNA (1)...(19): siRNA sense strand
gcaaccuggccaccauuaa

SEQ ID NO: 1899612 - RNA, 19 nt, Homo sapiens
  misc_RNA (1)...(19): siRNA sense strand
agacggccauucagcuuau

SEQ ID NO: 1899613 - RNA, 19 nt, Homo sapiens
  misc_RNA (1)...(19): siRNA sense strand
gcaacgcacuggccaugcu

SEQ ID NO: 1899614 - RNA, 19 nt, Homo sapiens
  misc_RNA (1)...(19): siRNA sense strand
cgaccgagacggccauuca

SEQ ID NO: 1899615 - RNA, 19 nt, Homo sapiens
  misc_RNA (1)...(19): siRNA sense strand
gggacguggugcuucauca

SEQ ID NO: 1899616 - RNA, 19 nt, Homo sapiens
  misc_RNA (1)...(19): siRNA sense strand
gguaugcgagccacaugaa

SEQ ID NO: 1899617 - RNA, 19 nt, Homo sapiens
  misc_RNA (1)...(19): siRNA sense strand
gcaacgggacuagcucuuc

SEQ ID NO: 1899618 - RNA, 19 nt, Homo sapiens
  misc_RNA (1)...(19): siRNA sense strand
caaccuggccaccauuaag

SEQ ID NO: 1899619 - RNA, 19 nt, Homo sapiens
  misc_RNA (1)...(19): siRNA sense strand
ugcaacuucuucuuaauag

SEQ ID NO: 1899620 - RNA, 19 nt, Homo sapiens
  misc_RNA (1)...(19): siRNA sense strand
gagagcaagcgcaagaagu

SEQ ID NO: 1899621 - RNA, 19 nt, Homo sapiens
  misc_RNA (1)...(19): siRNA sense strand
gggcucuccucguuguuca

SEQ ID NO: 1899622 - RNA, 19 nt, Homo sapiens
  misc_RNA (1)...(19): siRNA sense strand
uuucuucgccucugccuuu

SEQ ID NO: 1899623 - RNA, 19 nt, Homo sapiens
  misc_RNA (1)...(19): siRNA sense strand
ggagagcaagcgcaagaag

SEQ ID NO: 1899624 - RNA, 19 nt, Homo sapiens
  misc_RNA (1)...(19): siRNA sense strand
ccaaggccacggcaucuca

SEQ ID NO: 1899625 - RNA, 19 nt, Homo sapiens
  misc_RNA (1)...(19): siRNA sense strand
ucuccgcuccugauaauga

SEQ ID NO: 1899626 - RNA, 19 nt, Homo sapiens
  misc_RNA (1)...(19): siRNA sense strand
caacuucuucuuaauagcu

SEQ ID NO: 1899627 - RNA, 19 nt, Homo sapiens
  misc_RNA (1)...(19): siRNA sense strand
cgagacggccauucagcuu

SEQ ID NO: 1899628 - RNA, 19 nt, Homo sapiens
  misc_RNA (1)...(19): siRNA sense strand
uuuaccugcuguuaagaaa

SEQ ID NO: 1899629 - RNA, 19 nt, Homo sapiens
  misc_RNA (1)...(19): siRNA sense strand
ggagaagcagaaagaaugc

SEQ ID NO: 1899630 - RNA, 19 nt, Homo sapiens
  misc_RNA (1)...(19): siRNA sense strand
uaugcgagccacaugaaga

SEQ ID NO: 1899631 - RNA, 19 nt, Homo sapiens
  misc_RNA (1)...(19): siRNA sense strand
gcaagcgcaagaaguccuu

SEQ ID NO: 1899632 - RNA, 19 nt, Homo sapiens
  misc_RNA (1)...(19): siRNA sense strand
ucguguaccuguccaagca

SEQ ID NO: 1899633 - RNA, 19 nt, Homo sapiens
  misc_RNA (1)...(19): siRNA sense strand
cgggagagcaagcgcaaga

SEQ ID NO: 1899634 - RNA, 19 nt, Homo sapiens
  misc_RNA (1)...(19): siRNA sense strand
gcaacuucuucuuaauagc

SEQ ID NO: 1899635 - RNA, 19 nt, Homo sapiens
  misc_RNA (1)...(19): siRNA sense strand
agacacacacggagaagca

SEQ ID NO: 1899636 - RNA, 19 nt, Homo sapiens
  misc_RNA (1)...(19): siRNA sense strand
ucuuggauccuuggguuua

SEQ ID NO: 1899637 - RNA, 19 nt, Homo sapiens
  misc_RNA (1)...(19): siRNA sense strand
gacuagcucuucgcauaac

SEQ ID NO: 1899638 - RNA, 19 nt, Homo sapiens
  misc_RNA (1)...(19): siRNA sense strand
gacaagaacugcaucauca

SEQ ID NO: 1899639 - RNA, 19 nt, Homo sapiens
  misc_RNA (1)...(19): siRNA sense strand
gcaaauacacuacgaacaa

SEQ ID NO: 1899640 - RNA, 19 nt, Homo sapiens
  misc_RNA (1)...(19): siRNA sense strand
cagcaguucugaagagaua

SEQ ID NO: 1899641 - RNA, 19 nt, Homo sapiens
  misc_RNA (1)...(19): siRNA sense strand
gaacaacagcucagaacaa

SEQ ID NO: 1899642 - RNA, 19 nt, Homo sapiens
  misc_RNA (1)...(19): siRNA sense strand
gaaacaagaagaagaagga

SEQ ID NO: 1899643 - RNA, 19 nt, Homo sapiens
  misc_RNA (1)...(19): siRNA sense strand
gaaacgaccgaaacaagaa

SEQ ID NO: 1899644 - RNA, 19 nt, Homo sapiens
  misc_RNA (1)...(19): siRNA sense strand
gagcagcaguucugaagag

SEQ ID NO: 1899645 - RNA, 19 nt, Homo sapiens
  misc_RNA (1)...(19): siRNA sense strand
ccaagaugcuaaugaagau

SEQ ID NO: 1899646 - RNA, 19 nt, Homo sapiens
  misc_RNA (1)...(19): siRNA sense strand
ucagugaacucuccaccaa

SEQ ID NO: 1899647 - RNA, 19 nt, Homo sapiens
  misc_RNA (1)...(19): siRNA sense strand
ccaaggagucugugagaaa

SEQ ID NO: 1899648 - RNA, 19 nt, Homo sapiens
  misc_RNA (1)...(19): siRNA sense strand
ggacaagaacugcaucauc

SEQ ID NO: 1899649 - RNA, 19 nt, Homo sapiens
  misc_RNA (1)...(19): siRNA sense strand
gcagaagugcuuugaagug

SEQ ID NO: 1899650 - RNA, 19 nt, Homo sapiens
  misc_RNA (1)...(19): siRNA sense strand
gagaaacgaccgaaacaag

SEQ ID NO: 1899651 - RNA, 19 nt, Homo sapiens
  misc_RNA (1)...(19): siRNA sense strand
gcaaagcgcaccaggaaac

SEQ ID NO: 1899652 - RNA, 19 nt, Homo sapiens
  misc_RNA (1)...(19): siRNA sense strand
cagcaccagcuuccaguua

SEQ ID NO: 1899653 - RNA, 19 nt, Homo sapiens
  misc_RNA (1)...(19): siRNA sense strand
ccaccaagugcaucauuaa

SEQ ID NO: 1899654 - RNA, 19 nt, Homo sapiens
  misc_RNA (1)...(19): siRNA sense strand
ccaagugcaucauuaagac

SEQ ID NO: 1899655 - RNA, 19 nt, Homo sapiens
  misc_RNA (1)...(19): siRNA sense strand
caaauacacuacgaacaac

SEQ ID NO: 1899656 - RNA, 19 nt, Homo sapiens
  misc_RNA (1)...(19): siRNA sense strand
agaacugcaucaucaacaa

SEQ ID NO: 1899657 - RNA, 19 nt, Homo sapiens
  misc_RNA (1)...(19): siRNA sense strand
gaccgaaacaagaagaaga

SEQ ID NO: 1899658 - RNA, 19 nt, Homo sapiens
  misc_RNA (1)...(19): siRNA sense strand
uccaccaagugcaucauua

SEQ ID NO: 1899659 - RNA, 19 nt, Homo sapiens
  misc_RNA (1)...(19): siRNA sense strand
caacagcucagaacaacgu

SEQ ID NO: 1899660 - RNA, 19 nt, Homo sapiens
  misc_RNA (1)...(19): siRNA sense strand
gcaccagcuuccaguuagu

SEQ ID NO: 1899661 - RNA, 19 nt, Homo sapiens
  misc_RNA (1)...(19): siRNA sense strand
agaaacgaccgaaacaaga

SEQ ID NO: 1899662 - RNA, 19 nt, Homo sapiens
  misc_RNA (1)...(19): siRNA sense strand
ucauuaagacuguggaguu

SEQ ID NO: 1899663 - RNA, 19 nt, Homo sapiens
  misc_RNA (1)...(19): siRNA sense strand
caaggagucugugagaaac

SEQ ID NO: 1899664 - RNA, 19 nt, Homo sapiens
  misc_RNA (1)...(19): siRNA sense strand
cauuaagacuguggaguuc

SEQ ID NO: 1899665 - RNA, 19 nt, Homo sapiens
  misc_RNA (1)...(19): siRNA sense strand
cugcagaagugcuuugaag

SEQ ID NO: 1899666 - RNA, 19 nt, Homo sapiens
  misc_RNA (1)...(19): siRNA sense strand
ugaucacgcugaagaugga

SEQ ID NO: 1899667 - RNA, 19 nt, Homo sapiens
  misc_RNA (1)...(19): siRNA sense strand
uggaggcgcuaaaggucua

SEQ ID NO: 1899668 - RNA, 19 nt, Homo sapiens
  misc_RNA (1)...(19): siRNA sense strand
gaacugcaucaucaacaag

SEQ ID NO: 1899669 - RNA, 19 nt, Homo sapiens
  misc_RNA (1)...(19): siRNA sense strand
agaagaacaugguguacac

SEQ ID NO: 1899670 - RNA, 19 nt, Homo sapiens
  misc_RNA (1)...(19): siRNA sense strand
ccagaucacccuccucaag

SEQ ID NO: 1899671 - RNA, 19 nt, Homo sapiens
  misc_RNA (1)...(19): siRNA sense strand
cagcugggcaaauacacua

SEQ ID NO: 1899672 - RNA, 19 nt, Homo sapiens
  misc_RNA (1)...(19): siRNA sense strand
cccaagaugcuaaugaaga

SEQ ID NO: 1899673 - RNA, 19 nt, Homo sapiens
  misc_RNA (1)...(19): siRNA sense strand
ggaaauguuggagaacuca

SEQ ID NO: 1899674 - RNA, 19 nt, Homo sapiens
  misc_RNA (1)...(19): siRNA sense strand
caccaucgccgaccagauc

SEQ ID NO: 1899675 - RNA, 19 nt, Homo sapiens
  misc_RNA (1)...(19): siRNA sense strand
uuacugaccugcgaagcau

SEQ ID NO: 1899676 - RNA, 19 nt, Homo sapiens
  misc_RNA (1)...(19): siRNA sense strand
gccgcagcauccagaagaa

SEQ ID NO: 1899677 - RNA, 19 nt, Homo sapiens
  misc_RNA (1)...(19): siRNA sense strand
caggaaauguuggagaacu

SEQ ID NO: 1899678 - RNA, 19 nt, Homo sapiens
  misc_RNA (1)...(19): siRNA sense strand
ccaguuaguggauauagca

SEQ ID NO: 1899679 - RNA, 19 nt, Homo sapiens
  misc_RNA (1)...(19): siRNA sense strand
agugaacucuccaccaagu

SEQ ID NO: 1899680 - RNA, 19 nt, Homo sapiens
  misc_RNA (1)...(19): siRNA sense strand
acauugaccucugggacaa

SEQ ID NO: 1899681 - RNA, 19 nt, Homo sapiens
  misc_RNA (1)...(19): siRNA sense strand
cagaacaacgugucucucu

SEQ ID NO: 1899682 - RNA, 19 nt, Homo sapiens
  misc_RNA (1)...(19): siRNA sense strand
gugagaaacgaccgaaaca

SEQ ID NO: 1899683 - RNA, 19 nt, Homo sapiens
  misc_RNA (1)...(19): siRNA sense strand
aacaacagcucagaacaac

SEQ ID NO: 1899684 - RNA, 19 nt, Homo sapiens
  misc_RNA (1)...(19): siRNA sense strand
guccucaggcuaccacuau

SEQ ID NO: 1899685 - RNA, 19 nt, Homo sapiens
  misc_RNA (1)...(19): siRNA sense strand
ucucauccaggaaauguug

SEQ ID NO: 1899686 - RNA, 19 nt, Homo sapiens
  misc_RNA (1)...(19): siRNA sense strand
cagaagaacaugguguaca

SEQ ID NO: 1899687 - RNA, 19 nt, Homo sapiens
  misc_RNA (1)...(19): siRNA sense strand
cgaacaacagcucagaaca

SEQ ID NO: 1899688 - RNA, 19 nt, Homo sapiens
  misc_RNA (1)...(19): siRNA sense strand
cggaaccgcugccaguacu

SEQ ID NO: 1899689 - RNA, 19 nt, Homo sapiens
  misc_RNA (1)...(19): siRNA sense strand
caagaacugcaucaucaac

SEQ ID NO: 1899690 - RNA, 19 nt, Homo sapiens
  misc_RNA (1)...(19): siRNA sense strand
guccaaggagucugugaga

SEQ ID NO: 1899691 - RNA, 19 nt, Homo sapiens
  misc_RNA (1)...(19): siRNA sense strand
ggugaucacgcugaagaug

SEQ ID NO: 1899692 - RNA, 19 nt, Homo sapiens
  misc_RNA (1)...(19): siRNA sense strand
ugagaaacgaccgaaacaa

SEQ ID NO: 1899693 - RNA, 19 nt, Homo sapiens
  misc_RNA (1)...(19): siRNA sense strand
gcccagagcuuccugagua

SEQ ID NO: 1899694 - RNA, 19 nt, Homo sapiens
  misc_RNA (1)...(19): siRNA sense strand
gcugcuauauauggcauua

SEQ ID NO: 1899695 - RNA, 19 nt, Homo sapiens
  misc_RNA (1)...(19): siRNA sense strand
ggagacagaccaagaaguc

SEQ ID NO: 1899696 - RNA, 19 nt, Homo sapiens
  misc_RNA (1)...(19): siRNA sense strand
ccaccugccuggauacuuc

SEQ ID NO: 1899697 - RNA, 19 nt, Homo sapiens
  misc_RNA (1)...(19): siRNA sense strand
uuaaccaccugccuggaua

SEQ ID NO: 1899698 - RNA, 19 nt, Homo sapiens
  misc_RNA (1)...(19): siRNA sense strand
caucuacaauggcaaagga

SEQ ID NO: 1899699 - RNA, 19 nt, Homo sapiens
  misc_RNA (1)...(19): siRNA sense strand
gggaagaggccagggagua

SEQ ID NO: 1899700 - RNA, 19 nt, Homo sapiens
  misc_RNA (1)...(19): siRNA sense strand
ggaagaggccagggaguau

SEQ ID NO: 1899701 - RNA, 19 nt, Homo sapiens
  misc_RNA (1)...(19): siRNA sense strand
gaagaggccagggaguauu

SEQ ID NO: 1899702 - RNA, 19 nt, Homo sapiens
  misc_RNA (1)...(19): siRNA sense strand
ccucucugcugcugcuaua

SEQ ID NO: 1899703 - RNA, 19 nt, Homo sapiens
  misc_RNA (1)...(19): siRNA sense strand
ggagagcuacaucuacaau

SEQ ID NO: 1899704 - RNA, 19 nt, Homo sapiens
  misc_RNA (1)...(19): siRNA sense strand
gaguagccauacccggauu

SEQ ID NO: 1899705 - RNA, 19 nt, Homo sapiens
  misc_RNA (1)...(19): siRNA sense strand
gguggcauccugcucauug

SEQ ID NO: 1899706 - RNA, 19 nt, Homo sapiens
  misc_RNA (1)...(19): siRNA sense strand
ggaacgggagugucuggaa

SEQ ID NO: 1899707 - RNA, 19 nt, Homo sapiens
  misc_RNA (1)...(19): siRNA sense strand
ugggagagcuacaucuaca

SEQ ID NO: 1899708 - RNA, 19 nt, Homo sapiens
  misc_RNA (1)...(19): siRNA sense strand
agagcuacaucuacaaugg

SEQ ID NO: 1899709 - RNA, 19 nt, Homo sapiens
  misc_RNA (1)...(19): siRNA sense strand
ugaggagacagaccaagaa

SEQ ID NO: 1899710 - RNA, 19 nt, Homo sapiens
  misc_RNA (1)...(19): siRNA sense strand
ucucugcugcugcuauaua

SEQ ID NO: 1899711 - RNA, 19 nt, Homo sapiens
  misc_RNA (1)...(19): siRNA sense strand
cuacaucuacaauggcaaa

SEQ ID NO: 1899712 - RNA, 19 nt, Homo sapiens
  misc_RNA (1)...(19): siRNA sense strand
gugaggagacagaccaaga

SEQ ID NO: 1899713 - RNA, 19 nt, Homo sapiens
  misc_RNA (1)...(19): siRNA sense strand
gaaccuggaacgggagugu

SEQ ID NO: 1899714 - RNA, 19 nt, Homo sapiens
  misc_RNA (1)...(19): siRNA sense strand
aagaggccagggaguauuu

SEQ ID NO: 1899715 - RNA, 19 nt, Homo sapiens
  misc_RNA (1)...(19): siRNA sense strand
gagagcuacaucuacaaug

SEQ ID NO: 1899716 - RNA, 19 nt, Homo sapiens
  misc_RNA (1)...(19): siRNA sense strand
gaggagacagaccaagaag

SEQ ID NO: 1899717 - RNA, 19 nt, Homo sapiens
  misc_RNA (1)...(19): siRNA sense strand
gggaguauuuugaggacaa

SEQ ID NO: 1899718 - RNA, 19 nt, Homo sapiens
  misc_RNA (1)...(19): siRNA sense strand
ccaacugcuucgccucuug

SEQ ID NO: 1899719 - RNA, 19 nt, Homo sapiens
  misc_RNA (1)...(19): siRNA sense strand
cugcccaucuucuccauga

SEQ ID NO: 1899720 - RNA, 19 nt, Homo sapiens
  misc_RNA (1)...(19): siRNA sense strand
ggagcccaaugcugguguu

SEQ ID NO: 1899721 - RNA, 19 nt, Homo sapiens
  misc_RNA (1)...(19): siRNA sense strand
ggagauggugggccagcuu

SEQ ID NO: 1899722 - RNA, 19 nt, Homo sapiens
  misc_RNA (1)...(19): siRNA sense strand
ugggccagcuugucgguau

SEQ ID NO: 1899723 - RNA, 19 nt, Homo sapiens
  misc_RNA (1)...(19): siRNA sense strand
gcggcugcauggucuucuu

SEQ ID NO: 1899724 - RNA, 19 nt, Homo sapiens
  misc_RNA (1)...(19): siRNA sense strand
uuagguggcucaacaagga

SEQ ID NO: 1899725 - RNA, 19 nt, Homo sapiens
  misc_RNA (1)...(19): siRNA sense strand
gcgaagugcucaaggacau

SEQ ID NO: 1899726 - RNA, 19 nt, Homo sapiens
  misc_RNA (1)...(19): siRNA sense strand
ccagcaaugugcagaagug

SEQ ID NO: 1899727 - RNA, 19 nt, Homo sapiens
  misc_RNA (1)...(19): siRNA sense strand
gagcagugcccggucauug

SEQ ID NO: 1899728 - RNA, 19 nt, Homo sapiens
  misc_RNA (1)...(19): siRNA sense strand
gcuccauccgccaguauua

SEQ ID NO: 1899729 - RNA, 19 nt, Homo sapiens
  misc_RNA (1)...(19): siRNA sense strand
ccugcaagcugcucaacau

SEQ ID NO: 1899730 - RNA, 19 nt, Homo sapiens
  misc_RNA (1)...(19): siRNA sense strand
gcaagcugcucaacaucac

SEQ ID NO: 1899731 - RNA, 19 nt, Homo sapiens
  misc_RNA (1)...(19): siRNA sense strand
gagguggacucaucaugcu

SEQ ID NO: 1899732 - RNA, 19 nt, Homo sapiens
  misc_RNA (1)...(19): siRNA sense strand
ggaagucagcggccuggau

SEQ ID NO: 1899733 - RNA, 19 nt, Homo sapiens
  misc_RNA (1)...(19): siRNA sense strand
acagcgagguggacucauc

SEQ ID NO: 1899734 - RNA, 19 nt, Homo sapiens
  misc_RNA (1)...(19): siRNA sense strand
uauggccgcuucauuaggu

SEQ ID NO: 1899735 - RNA, 19 nt, Homo sapiens
  misc_RNA (1)...(19): siRNA sense strand
ccuucuaccucuccuacuu

SEQ ID NO: 1899736 - RNA, 19 nt, Homo sapiens
  misc_RNA (1)...(19): siRNA sense strand
gcuauggccgcuucauuag

SEQ ID NO: 1899737 - RNA, 19 nt, Homo sapiens
  misc_RNA (1)...(19): siRNA sense strand
agcuauggccgcuucauua

SEQ ID NO: 1899738 - RNA, 19 nt, Homo sapiens
  misc_RNA (1)...(19): siRNA sense strand
cagcuauggccgcuucauu

SEQ ID NO: 1899739 - RNA, 19 nt, Homo sapiens
  misc_RNA (1)...(19): siRNA sense strand
ucagcggccuggaugaaag

SEQ ID NO: 1899740 - RNA, 19 nt, Homo sapiens
  misc_RNA (1)...(19): siRNA sense strand
aagggcaucuucaaaauug

SEQ ID NO: 1899741 - RNA, 19 nt, Homo sapiens
  misc_RNA (1)...(19): siRNA sense strand
uucauuagguggcucaaca

SEQ ID NO: 1899742 - RNA, 19 nt, Homo sapiens
  misc_RNA (1)...(19): siRNA sense strand
gaaccgucccgccaugaac

SEQ ID NO: 1899743 - RNA, 19 nt, Homo sapiens
  misc_RNA (1)...(19): siRNA sense strand
cgacagcgagguggacuca

SEQ ID NO: 1899744 - RNA, 19 nt, Homo sapiens
  misc_RNA (1)...(19): siRNA sense strand
caacaaagauggugcauua

SEQ ID NO: 1899745 - RNA, 19 nt, Homo sapiens
  misc_RNA (1)...(19): siRNA sense strand
ggacgugacuuacauaguu

SEQ ID NO: 1899746 - RNA, 19 nt, Homo sapiens
  misc_RNA (1)...(19): siRNA sense strand
gcugucaucuguuugauua

SEQ ID NO: 1899747 - RNA, 19 nt, Homo sapiens
  misc_RNA (1)...(19): siRNA sense strand
gggcaagucugaagaacua

SEQ ID NO: 1899748 - RNA, 19 nt, Homo sapiens
  misc_RNA (1)...(19): siRNA sense strand
caacuucacugcaacauca

SEQ ID NO: 1899749 - RNA, 19 nt, Homo sapiens
  misc_RNA (1)...(19): siRNA sense strand
aaacguggcuugcuuugaa

SEQ ID NO: 1899750 - RNA, 19 nt, Homo sapiens
  misc_RNA (1)...(19): siRNA sense strand
caaagauggugcauuauca

SEQ ID NO: 1899751 - RNA, 19 nt, Homo sapiens
  misc_RNA (1)...(19): siRNA sense strand
ggagcuggcuguggaagua

SEQ ID NO: 1899752 - RNA, 19 nt, Homo sapiens
  misc_RNA (1)...(19): siRNA sense strand
gguggaguauuuagaagua

SEQ ID NO: 1899753 - RNA, 19 nt, Homo sapiens
  misc_RNA (1)...(19): siRNA sense strand
gaaugaagcagguaaagau

SEQ ID NO: 1899754 - RNA, 19 nt, Homo sapiens
  misc_RNA (1)...(19): siRNA sense strand
ccgcuaaacccuuggauua

SEQ ID NO: 1899755 - RNA, 19 nt, Homo sapiens
  misc_RNA (1)...(19): siRNA sense strand
ucagauaccuagugacuuc

SEQ ID NO: 1899756 - RNA, 19 nt, Homo sapiens
  misc_RNA (1)...(19): siRNA sense strand
ccaauuauucacugacuua

SEQ ID NO: 1899757 - RNA, 19 nt, Homo sapiens
  misc_RNA (1)...(19): siRNA sense strand
gaagcaguuucucggauga

SEQ ID NO: 1899758 - RNA, 19 nt, Homo sapiens
  misc_RNA (1)...(19): siRNA sense strand
gcuaaacccuuggauuaug

SEQ ID NO: 1899759 - RNA, 19 nt, Homo sapiens
  misc_RNA (1)...(19): siRNA sense strand
gaacacccaagucaaggua

SEQ ID NO: 1899760 - RNA, 19 nt, Homo sapiens
  misc_RNA (1)...(19): siRNA sense strand
ggaccagcaucuaauguca

SEQ ID NO: 1899761 - RNA, 19 nt, Homo sapiens
  misc_RNA (1)...(19): siRNA sense strand
caauauuacugaugugugu

SEQ ID NO: 1899762 - RNA, 19 nt, Homo sapiens
  misc_RNA (1)...(19): siRNA sense strand
caccaucacuugaacagaa

SEQ ID NO: 1899763 - RNA, 19 nt, Homo sapiens
  misc_RNA (1)...(19): siRNA sense strand
agaaagcccuggccaacuu

SEQ ID NO: 1899764 - RNA, 19 nt, Homo sapiens
  misc_RNA (1)...(19): siRNA sense strand
aaccugagaucuuuaaaug

SEQ ID NO: 1899765 - RNA, 19 nt, Homo sapiens
  misc_RNA (1)...(19): siRNA sense strand
ccagcgaccuucauucaga

SEQ ID NO: 1899766 - RNA, 19 nt, Homo sapiens
  misc_RNA (1)...(19): siRNA sense strand
aaaugucguucucccaaua

SEQ ID NO: 1899767 - RNA, 19 nt, Homo sapiens
  misc_RNA (1)...(19): siRNA sense strand
ggucauggauaacaacauc

SEQ ID NO: 1899768 - RNA, 19 nt, Homo sapiens
  misc_RNA (1)...(19): siRNA sense strand
ggacuccugagaacaauaa

SEQ ID NO: 1899769 - RNA, 19 nt, Homo sapiens
  misc_RNA (1)...(19): siRNA sense strand
gguucacgcuccuguauga

SEQ ID NO: 1899770 - RNA, 19 nt, Homo sapiens
  misc_RNA (1)...(19): siRNA sense strand
gcaugaauguccagacuac

SEQ ID NO: 1899771 - RNA, 19 nt, Homo sapiens
  misc_RNA (1)...(19): siRNA sense strand
gcugguggauccaaauguu

SEQ ID NO: 1899772 - RNA, 19 nt, Homo sapiens
  misc_RNA (1)...(19): siRNA sense strand
gcaaaccagaccauggaua

SEQ ID NO: 1899773 - RNA, 19 nt, Homo sapiens
  misc_RNA (1)...(19): siRNA sense strand
ccugagaucuuuaaauguc

SEQ ID NO: 1899774 - RNA, 19 nt, Homo sapiens
  misc_RNA (1)...(19): siRNA sense strand
gaagggcaagucugaagaa

SEQ ID NO: 1899775 - RNA, 19 nt, Homo sapiens
  misc_RNA (1)...(19): siRNA sense strand
ggaaggagagacacucaug

SEQ ID NO: 1899776 - RNA, 19 nt, Homo sapiens
  misc_RNA (1)...(19): siRNA sense strand
cggccacucuguugaauga

SEQ ID NO: 1899777 - RNA, 19 nt, Homo sapiens
  misc_RNA (1)...(19): siRNA sense strand
gaacagaaucaagcugaga

SEQ ID NO: 1899778 - RNA, 19 nt, Homo sapiens
  misc_RNA (1)...(19): siRNA sense strand
ggacaguuaccuccuggaa

SEQ ID NO: 1899779 - RNA, 19 nt, Homo sapiens
  misc_RNA (1)...(19): siRNA sense strand
cagauccucuuaccacaau

SEQ ID NO: 1899780 - RNA, 19 nt, Homo sapiens
  misc_RNA (1)...(19): siRNA sense strand
gccaaucccuccacauucu

SEQ ID NO: 1899781 - RNA, 19 nt, Homo sapiens
  misc_RNA (1)...(19): siRNA sense strand
ggacuuccuaccaauuauu

SEQ ID NO: 1899782 - RNA, 19 nt, Homo sapiens
  misc_RNA (1)...(19): siRNA sense strand
uggauuauguggagauuca

SEQ ID NO: 1899783 - RNA, 19 nt, Homo sapiens
  misc_RNA (1)...(19): siRNA sense strand
ucauucagauaccuaguga

SEQ ID NO: 1899784 - RNA, 19 nt, Homo sapiens
  misc_RNA (1)...(19): siRNA sense strand
cauggugaccugcaucuuu

SEQ ID NO: 1899785 - RNA, 19 nt, Homo sapiens
  misc_RNA (1)...(19): siRNA sense strand
cuaaacccuuggauuaugu

SEQ ID NO: 1899786 - RNA, 19 nt, Homo sapiens
  misc_RNA (1)...(19): siRNA sense strand
gaaagcuuccauucugaga

SEQ ID NO: 1899787 - RNA, 19 nt, Homo sapiens
  misc_RNA (1)...(19): siRNA sense strand
uggaggacauacaucauga

SEQ ID NO: 1899788 - RNA, 19 nt, Homo sapiens
  misc_RNA (1)...(19): siRNA sense strand
uaaaugucguucucccaau

SEQ ID NO: 1899789 - RNA, 19 nt, Homo sapiens
  misc_RNA (1)...(19): siRNA sense strand
cucaacaccugccuucuga

SEQ ID NO: 1899790 - RNA, 19 nt, Homo sapiens
  misc_RNA (1)...(19): siRNA sense strand
gcauuaucauugcuaccaa

SEQ ID NO: 1899791 - RNA, 19 nt, Homo sapiens
  misc_RNA (1)...(19): siRNA sense strand
gccagagaauccugaaaca

SEQ ID NO: 1899792 - RNA, 19 nt, Homo sapiens
  misc_RNA (1)...(19): siRNA sense strand
ugacagcccuucccuuuug

SEQ ID NO: 1899793 - RNA, 19 nt, Homo sapiens
  misc_RNA (1)...(19): siRNA sense strand
gaaaaccugagaucuuuaa

SEQ ID NO: 1899794 - RNA, 19 nt, Homo sapiens
  misc_RNA (1)...(19): siRNA sense strand
caccuacccugauugacuu

SEQ ID NO: 1899795 - RNA, 19 nt, Homo sapiens
  misc_RNA (1)...(19): siRNA sense strand
uuucugcugucaucuguuu

SEQ ID NO: 1899796 - RNA, 19 nt, Homo sapiens
  misc_RNA (1)...(19): siRNA sense strand
caacaccugccuucugaau

SEQ ID NO: 1899797 - RNA, 19 nt, Homo sapiens
  misc_RNA (1)...(19): siRNA sense strand
gauggugcauuaucauugc

SEQ ID NO: 1899798 - RNA, 19 nt, Homo sapiens
  misc_RNA (1)...(19): siRNA sense strand
acaccugccuucugaaugg

SEQ ID NO: 1899799 - RNA, 19 nt, Homo sapiens
  misc_RNA (1)...(19): siRNA sense strand
ucucaaaccauuaagucua

SEQ ID NO: 1899800 - RNA, 19 nt, Homo sapiens
  misc_RNA (1)...(19): siRNA sense strand
gagaagggcaagucugaag

SEQ ID NO: 1899801 - RNA, 19 nt, Homo sapiens
  misc_RNA (1)...(19): siRNA sense strand
aaacccuaccuguggauua

SEQ ID NO: 1899802 - RNA, 19 nt, Homo sapiens
  misc_RNA (1)...(19): siRNA sense strand
caaugccacuaaccagaug

SEQ ID NO: 1899803 - RNA, 19 nt, Homo sapiens
  misc_RNA (1)...(19): siRNA sense strand
ugagaacaauaaggaguau

SEQ ID NO: 1899804 - RNA, 19 nt, Homo sapiens
  misc_RNA (1)...(19): siRNA sense strand
cauuaucauugcuaccaaa

SEQ ID NO: 1899805 - RNA, 19 nt, Homo sapiens
  misc_RNA (1)...(19): siRNA sense strand
agagggagguagaaagcuu

SEQ ID NO: 1899806 - RNA, 19 nt, Homo sapiens
  misc_RNA (1)...(19): siRNA sense strand
caaaagaacacccaaguca

SEQ ID NO: 1899807 - RNA, 19 nt, Homo sapiens
  misc_RNA (1)...(19): siRNA sense strand
gcugguggaguauuuagaa

SEQ ID NO: 1899808 - RNA, 19 nt, Homo sapiens
  misc_RNA (1)...(19): siRNA sense strand
ucacgcuccuguaugaaau

SEQ ID NO: 1899809 - RNA, 19 nt, Homo sapiens
  misc_RNA (1)...(19): siRNA sense strand
ccuucugaauggacaguua

SEQ ID NO: 1899810 - RNA, 19 nt, Homo sapiens
  misc_RNA (1)...(19): siRNA sense strand
gacgugacuuacauaguuc

SEQ ID NO: 1899811 - RNA, 19 nt, Homo sapiens
  misc_RNA (1)...(19): siRNA sense strand
aacccuaccuguggauuaa

SEQ ID NO: 1899812 - RNA, 19 nt, Homo sapiens
  misc_RNA (1)...(19): siRNA sense strand
acaguuaccuccuggaaaa

SEQ ID NO: 1899813 - RNA, 19 nt, Homo sapiens
  misc_RNA (1)...(19): siRNA sense strand
gcaccggccacucuguuga

SEQ ID NO: 1899814 - RNA, 19 nt, Homo sapiens
  misc_RNA (1)...(19): siRNA sense strand
ugugacagcccuucccuuu

SEQ ID NO: 1899815 - RNA, 19 nt, Homo sapiens
  misc_RNA (1)...(19): siRNA sense strand
aaagaacacccaagucaag

SEQ ID NO: 1899816 - RNA, 19 nt, Homo sapiens
  misc_RNA (1)...(19): siRNA sense strand
uggaaaaccugagaucuuu

SEQ ID NO: 1899817 - RNA, 19 nt, Homo sapiens
  misc_RNA (1)...(19): siRNA sense strand
ugaagaaucagccaaagag

SEQ ID NO: 1899818 - RNA, 19 nt, Homo sapiens
  misc_RNA (1)...(19): siRNA sense strand
cuacccugauugacuuaaa

SEQ ID NO: 1899819 - RNA, 19 nt, Homo sapiens
  misc_RNA (1)...(19): siRNA sense strand
cagagaauccugaaacaac

SEQ ID NO: 1899820 - RNA, 19 nt, Homo sapiens
  misc_RNA (1)...(19): siRNA sense strand
caaaccagaccauggauac

SEQ ID NO: 1899821 - RNA, 19 nt, Homo sapiens
  misc_RNA (1)...(19): siRNA sense strand
gcuccuguaugaaauucga

SEQ ID NO: 1899822 - RNA, 19 nt, Homo sapiens
  misc_RNA (1)...(19): siRNA sense strand
cauuaagucuagagaagag

SEQ ID NO: 1899823 - RNA, 19 nt, Homo sapiens
  misc_RNA (1)...(19): siRNA sense strand
gauacaaccguguggaucu

SEQ ID NO: 1899824 - RNA, 19 nt, Homo sapiens
  misc_RNA (1)...(19): siRNA sense strand
gucaucuguuugauuauug

SEQ ID NO: 1899825 - RNA, 19 nt, Homo sapiens
  misc_RNA (1)...(19): siRNA sense strand
gacaguuaccuccuggaaa

SEQ ID NO: 1899826 - RNA, 19 nt, Homo sapiens
  misc_RNA (1)...(19): siRNA sense strand
acaaagauggugcauuauc

SEQ ID NO: 1899827 - RNA, 19 nt, Homo sapiens
  misc_RNA (1)...(19): siRNA sense strand
uucacaaggucaacaaaga

SEQ ID NO: 1899828 - RNA, 19 nt, Homo sapiens
  misc_RNA (1)...(19): siRNA sense strand
gaaacccacauaccuggau

SEQ ID NO: 1899829 - RNA, 19 nt, Homo sapiens
  misc_RNA (1)...(19): siRNA sense strand
aggacuugcugguggagua

SEQ ID NO: 1899830 - RNA, 19 nt, Homo sapiens
  misc_RNA (1)...(19): siRNA sense strand
uuaccuggaucccgcaugu

SEQ ID NO: 1899831 - RNA, 19 nt, Homo sapiens
  misc_RNA (1)...(19): siRNA sense strand
ccagcugggugguuuggau

SEQ ID NO: 1899832 - RNA, 19 nt, Homo sapiens
  misc_RNA (1)...(19): siRNA sense strand
aaaauccucucaaaccauu

SEQ ID NO: 1899833 - RNA, 19 nt, Homo sapiens
  misc_RNA (1)...(19): siRNA sense strand
gcuuuaaaauccucucaaa

SEQ ID NO: 1899834 - RNA, 19 nt, Homo sapiens
  misc_RNA (1)...(19): siRNA sense strand
ccacagggaaggagagaca

SEQ ID NO: 1899835 - RNA, 19 nt, Homo sapiens
  misc_RNA (1)...(19): siRNA sense strand
uuucucggaugaacuuuau

SEQ ID NO: 1899836 - RNA, 19 nt, Homo sapiens
  misc_RNA (1)...(19): siRNA sense strand
ucacaaggucaacaaagau

SEQ ID NO: 1899837 - RNA, 19 nt, Homo sapiens
  misc_RNA (1)...(19): siRNA sense strand
gcagagggagguagaaagc

SEQ ID NO: 1899838 - RNA, 19 nt, Homo sapiens
  misc_RNA (1)...(19): siRNA sense strand
ugggacagauggaggacuu

SEQ ID NO: 1899839 - RNA, 19 nt, Homo sapiens
  misc_RNA (1)...(19): siRNA sense strand
augcucaucuguuggagaa

SEQ ID NO: 1899840 - RNA, 19 nt, Homo sapiens
  misc_RNA (1)...(19): siRNA sense strand
ugccagauccacaugcuaa

SEQ ID NO: 1899841 - RNA, 19 nt, Homo sapiens
  misc_RNA (1)...(19): siRNA sense strand
ugaaugaagcagguaaaga

SEQ ID NO: 1899842 - RNA, 19 nt, Homo sapiens
  misc_RNA (1)...(19): siRNA sense strand
gauccucuuaccacaauau

SEQ ID NO: 1899843 - RNA, 19 nt, Homo sapiens
  misc_RNA (1)...(19): siRNA sense strand
gcccuucccuuuugucuga

SEQ ID NO: 1899844 - RNA, 19 nt, Homo sapiens
  misc_RNA (1)...(19): siRNA sense strand
gaagaauucuguacauuug

SEQ ID NO: 1899845 - RNA, 19 nt, Homo sapiens
  misc_RNA (1)...(19): siRNA sense strand
ccucagcaccuuaauauua

SEQ ID NO: 1899846 - RNA, 19 nt, Homo sapiens
  misc_RNA (1)...(19): siRNA sense strand
ggagaugcuuccuaagaaa

SEQ ID NO: 1899847 - RNA, 19 nt, Homo sapiens
  misc_RNA (1)...(19): siRNA sense strand
gcagaggagugaaacagaa

SEQ ID NO: 1899848 - RNA, 19 nt, Homo sapiens
  misc_RNA (1)...(19): siRNA sense strand
ugaaacagaaccucauuua

SEQ ID NO: 1899849 - RNA, 19 nt, Homo sapiens
  misc_RNA (1)...(19): siRNA sense strand
aaacagaaccucauuuaga

SEQ ID NO: 1899850 - RNA, 19 nt, Homo sapiens
  misc_RNA (1)...(19): siRNA sense strand
uaccuuaccuuuccguuaa

SEQ ID NO: 1899851 - RNA, 19 nt, Homo sapiens
  misc_RNA (1)...(19): siRNA sense strand
cuacucgccuguccaauug

SEQ ID NO: 1899852 - RNA, 19 nt, Homo sapiens
  misc_RNA (1)...(19): siRNA sense strand
ccgaggaagugacugguuu

SEQ ID NO: 1899853 - RNA, 19 nt, Homo sapiens
  misc_RNA (1)...(19): siRNA sense strand
caacucagccagugccauu

SEQ ID NO: 1899854 - RNA, 19 nt, Homo sapiens
  misc_RNA (1)...(19): siRNA sense strand
gaaacagaaccucauuuag

SEQ ID NO: 1899855 - RNA, 19 nt, Homo sapiens
  misc_RNA (1)...(19): siRNA sense strand
gaaauaagacagggcaaca

SEQ ID NO: 1899856 - RNA, 19 nt, Homo sapiens
  misc_RNA (1)...(19): siRNA sense strand
uaagacagggcaacauuga

SEQ ID NO: 1899857 - RNA, 19 nt, Homo sapiens
  misc_RNA (1)...(19): siRNA sense strand
uggagaugcuuccuaagaa

SEQ ID NO: 1899858 - RNA, 19 nt, Homo sapiens
  misc_RNA (1)...(19): siRNA sense strand
gagcgugagugcaaagaag

SEQ ID NO: 1899859 - RNA, 19 nt, Homo sapiens
  misc_RNA (1)...(19): siRNA sense strand
ggucaccaccaucaaauga

SEQ ID NO: 1899860 - RNA, 19 nt, Homo sapiens
  misc_RNA (1)...(19): siRNA sense strand
gagaguaaccgaggaagug

SEQ ID NO: 1899861 - RNA, 19 nt, Homo sapiens
  misc_RNA (1)...(19): siRNA sense strand
guaguugggcgcucagauu

SEQ ID NO: 1899862 - RNA, 19 nt, Homo sapiens
  misc_RNA (1)...(19): siRNA sense strand
guuaaucuuuggccucuuc

SEQ ID NO: 1899863 - RNA, 19 nt, Homo sapiens
  misc_RNA (1)...(19): siRNA sense strand
gcgcucagauuccgucucu

SEQ ID NO: 1899864 - RNA, 19 nt, Homo sapiens
  misc_RNA (1)...(19): siRNA sense strand
cccaccagaugaaguguuu

SEQ ID NO: 1899865 - RNA, 19 nt, Homo sapiens
  misc_RNA (1)...(19): siRNA sense strand
cucagcaccuuaauauuau

SEQ ID NO: 1899866 - RNA, 19 nt, Homo sapiens
  misc_RNA (1)...(19): siRNA sense strand
aauaagacagggcaacauu

SEQ ID NO: 1899867 - RNA, 19 nt, Homo sapiens
  misc_RNA (1)...(19): siRNA sense strand
aacagaaccucauuuagac

SEQ ID NO: 1899868 - RNA, 19 nt, Homo sapiens
  misc_RNA (1)...(19): siRNA sense strand
uuaccuuaccuuuccguua

SEQ ID NO: 1899869 - RNA, 19 nt, Homo sapiens
  misc_RNA (1)...(19): siRNA sense strand
ucuuuggccucuucauuau

SEQ ID NO: 1899870 - RNA, 19 nt, Homo sapiens
  misc_RNA (1)...(19): siRNA sense strand
gugaaacagaaccucauuu

SEQ ID NO: 1899871 - RNA, 19 nt, Homo sapiens
  misc_RNA (1)...(19): siRNA sense strand
gcucagauuccgucucuac

SEQ ID NO: 1899872 - RNA, 19 nt, Homo sapiens
  misc_RNA (1)...(19): siRNA sense strand
cauagucaacuccaacuca

SEQ ID NO: 1899873 - RNA, 19 nt, Homo sapiens
  misc_RNA (1)...(19): siRNA sense strand
ucuacucgccuguccaauu

SEQ ID NO: 1899874 - RNA, 19 nt, Homo sapiens
  misc_RNA (1)...(19): siRNA sense strand
gcaagagaagcuuuugaaa

SEQ ID NO: 1899875 - RNA, 19 nt, Homo sapiens
  misc_RNA (1)...(19): siRNA sense strand
ggagaguaaccgaggaagu

SEQ ID NO: 1899876 - RNA, 19 nt, Homo sapiens
  misc_RNA (1)...(19): siRNA sense strand
caccagaugaaguguuuga

SEQ ID NO: 1899877 - RNA, 19 nt, Homo sapiens
  misc_RNA (1)...(19): siRNA sense strand
ugaagaagcaagagaagcu

SEQ ID NO: 1899878 - RNA, 19 nt, Homo sapiens
  misc_RNA (1)...(19): siRNA sense strand
ugagugcaaagaagaauuc

SEQ ID NO: 1899879 - RNA, 19 nt, Homo sapiens
  misc_RNA (1)...(19): siRNA sense strand
aaacgcuacccaagagcua

SEQ ID NO: 1899880 - RNA, 19 nt, Homo sapiens
  misc_RNA (1)...(19): siRNA sense strand
ucccucagcaccuuaauau

SEQ ID NO: 1899881 - RNA, 19 nt, Homo sapiens
  misc_RNA (1)...(19): siRNA sense strand
cuggagaugcuuccuaaga

SEQ ID NO: 1899882 - RNA, 19 nt, Homo sapiens
  misc_RNA (1)...(19): siRNA sense strand
gaugcuuccuaagaaacaa

SEQ ID NO: 1899883 - RNA, 19 nt, Homo sapiens
  misc_RNA (1)...(19): siRNA sense strand
ccagaugaaguguuugaca

SEQ ID NO: 1899884 - RNA, 19 nt, Homo sapiens
  misc_RNA (1)...(19): siRNA sense strand
uaccuuuccguuaaucuuu

SEQ ID NO: 1899885 - RNA, 19 nt, Homo sapiens
  misc_RNA (1)...(19): siRNA sense strand
acucguagacagacaguga

SEQ ID NO: 1899886 - RNA, 19 nt, Homo sapiens
  misc_RNA (1)...(19): siRNA sense strand
aaucuuuggccucuucauu

SEQ ID NO: 1899887 - RNA, 19 nt, Homo sapiens
  misc_RNA (1)...(19): siRNA sense strand
acauugagcgugagugcaa

SEQ ID NO: 1899888 - RNA, 19 nt, Homo sapiens
  misc_RNA (1)...(19): siRNA sense strand
cauuauccuccuugucauu

SEQ ID NO: 1899889 - RNA, 19 nt, Homo sapiens
  misc_RNA (1)...(19): siRNA sense strand
caacuacgguggagugaua

SEQ ID NO: 1899890 - RNA, 19 nt, Homo sapiens
  misc_RNA (1)...(19): siRNA sense strand
gaaaguagccagcagauau

SEQ ID NO: 1899891 - RNA, 19 nt, Homo sapiens
  misc_RNA (1)...(19): siRNA sense strand
aaagaaagcugggauaaga

SEQ ID NO: 1899892 - RNA, 19 nt, Homo sapiens
  misc_RNA (1)...(19): siRNA sense strand
gaaugaagcugaaucugau

SEQ ID NO: 1899893 - RNA, 19 nt, Homo sapiens
  misc_RNA (1)...(19): siRNA sense strand
gaacugguauuugacauug

SEQ ID NO: 1899894 - RNA, 19 nt, Homo sapiens
  misc_RNA (1)...(19): siRNA sense strand
ggagagguguucauuguug

SEQ ID NO: 1899895 - RNA, 19 nt, Homo sapiens
  misc_RNA (1)...(19): siRNA sense strand
gaaggaggacuuuggauuu

SEQ ID NO: 1899896 - RNA, 19 nt, Homo sapiens
  misc_RNA (1)...(19): siRNA sense strand
caacaaagcuuccaaaagu

SEQ ID NO: 1899897 - RNA, 19 nt, Homo sapiens
  misc_RNA (1)...(19): siRNA sense strand
gcaaaggaaucaaucaucu

SEQ ID NO: 1899898 - RNA, 19 nt, Homo sapiens
  misc_RNA (1)...(19): siRNA sense strand
gaauaugccuugguuaauc

SEQ ID NO: 1899899 - RNA, 19 nt, Homo sapiens
  misc_RNA (1)...(19): siRNA sense strand
gugaggagauguuguaguu

SEQ ID NO: 1899900 - RNA, 19 nt, Homo sapiens
  misc_RNA (1)...(19): siRNA sense strand
guggagugauaaagaauua

SEQ ID NO: 1899901 - RNA, 19 nt, Homo sapiens
  misc_RNA (1)...(19): siRNA sense strand
ggaccaguuugauccauuu

SEQ ID NO: 1899902 - RNA, 19 nt, Homo sapiens
  misc_RNA (1)...(19): siRNA sense strand
ggauaucaaugucagcaaa

SEQ ID NO: 1899903 - RNA, 19 nt, Homo sapiens
  misc_RNA (1)...(19): siRNA sense strand
gcagaaaguggaccaguuu

SEQ ID NO: 1899904 - RNA, 19 nt, Homo sapiens
  misc_RNA (1)...(19): siRNA sense strand
aaagaaaguucaccuaagu

SEQ ID NO: 1899905 - RNA, 19 nt, Homo sapiens
  misc_RNA (1)...(19): siRNA sense strand
ugaagaauaugccuugguu

SEQ ID NO: 1899906 - RNA, 19 nt, Homo sapiens
  misc_RNA (1)...(19): siRNA sense strand
aaacauagaaccagagauu

SEQ ID NO: 1899907 - RNA, 19 nt, Homo sapiens
  misc_RNA (1)...(19): siRNA sense strand
gccagcagauaucagaaua

SEQ ID NO: 1899908 - RNA, 19 nt, Homo sapiens
  misc_RNA (1)...(19): siRNA sense strand
gcagauaucagaauaacau

SEQ ID NO: 1899909 - RNA, 19 nt, Homo sapiens
  misc_RNA (1)...(19): siRNA sense strand
aaggaggacuuuggauuua

SEQ ID NO: 1899910 - RNA, 19 nt, Homo sapiens
  misc_RNA (1)...(19): siRNA sense strand
gaugugaggagauguugua

SEQ ID NO: 1899911 - RNA, 19 nt, Homo sapiens
  misc_RNA (1)...(19): siRNA sense strand
gaaccagagauuauaagaa

SEQ ID NO: 1899912 - RNA, 19 nt, Homo sapiens
  misc_RNA (1)...(19): siRNA sense strand
gaaaaugaauccauacaag

SEQ ID NO: 1899913 - RNA, 19 nt, Homo sapiens
  misc_RNA (1)...(19): siRNA sense strand
gaagagcccuuuuaguguu

SEQ ID NO: 1899914 - RNA, 19 nt, Homo sapiens
  misc_RNA (1)...(19): siRNA sense strand
gaggagauguuguaguucu

SEQ ID NO: 1899915 - RNA, 19 nt, Homo sapiens
  misc_RNA (1)...(19): siRNA sense strand
ucuagcaccuuaugugaaa

SEQ ID NO: 1899916 - RNA, 19 nt, Homo sapiens
  misc_RNA (1)...(19): siRNA sense strand
gaagaauaugccuugguua

SEQ ID NO: 1899917 - RNA, 19 nt, Homo sapiens
  misc_RNA (1)...(19): siRNA sense strand
guucugggauaguugagua

SEQ ID NO: 1899918 - RNA, 19 nt, Homo sapiens
  misc_RNA (1)...(19): siRNA sense strand
ggaaggagagguguucauu

SEQ ID NO: 1899919 - RNA, 19 nt, Homo sapiens
  misc_RNA (1)...(19): siRNA sense strand
aaaaggagaugcagaaaau

SEQ ID NO: 1899920 - RNA, 19 nt, Homo sapiens
  misc_RNA (1)...(19): siRNA sense strand
aaggagagguguucauugu

SEQ ID NO: 1899921 - RNA, 19 nt, Homo sapiens
  misc_RNA (1)...(19): siRNA sense strand
gaaggagagguguucauug

SEQ ID NO: 1899922 - RNA, 19 nt, Homo sapiens
  misc_RNA (1)...(19): siRNA sense strand
caucgucucuggguauauu

SEQ ID NO: 1899923 - RNA, 19 nt, Homo sapiens
  misc_RNA (1)...(19): siRNA sense strand
cauagaaccagagauuaua

SEQ ID NO: 1899924 - RNA, 19 nt, Homo sapiens
  misc_RNA (1)...(19): siRNA sense strand
gcuggacccucaugacaau

SEQ ID NO: 1899925 - RNA, 19 nt, Homo sapiens
  misc_RNA (1)...(19): siRNA sense strand
aaccagagauuauaagaag

SEQ ID NO: 1899926 - RNA, 19 nt, Homo sapiens
  misc_RNA (1)...(19): siRNA sense strand
gaagcugaaucugauguca

SEQ ID NO: 1899927 - RNA, 19 nt, Homo sapiens
  misc_RNA (1)...(19): siRNA sense strand
ccaaaagucucacaauuca

SEQ ID NO: 1899928 - RNA, 19 nt, Homo sapiens
  misc_RNA (1)...(19): siRNA sense strand
aagaauaugccuugguuaa

SEQ ID NO: 1899929 - RNA, 19 nt, Homo sapiens
  misc_RNA (1)...(19): siRNA sense strand
agaaugaagcugaaucuga

SEQ ID NO: 1899930 - RNA, 19 nt, Homo sapiens
  misc_RNA (1)...(19): siRNA sense strand
caaaggaaucaaucaucua

SEQ ID NO: 1899931 - RNA, 19 nt, Homo sapiens
  misc_RNA (1)...(19): siRNA sense strand
gaaagcugggauaagauuu

SEQ ID NO: 1899932 - RNA, 19 nt, Homo sapiens
  misc_RNA (1)...(19): siRNA sense strand
cauacaagauugauauagg

SEQ ID NO: 1899933 - RNA, 19 nt, Homo sapiens
  misc_RNA (1)...(19): siRNA sense strand
gaaaguggaccaguuugau

SEQ ID NO: 1899934 - RNA, 19 nt, Homo sapiens
  misc_RNA (1)...(19): siRNA sense strand
gaaucaaucaucuacugaa

SEQ ID NO: 1899935 - RNA, 19 nt, Homo sapiens
  misc_RNA (1)...(19): siRNA sense strand
ggaaucaaucaucuacuga

SEQ ID NO: 1899936 - RNA, 19 nt, Homo sapiens
  misc_RNA (1)...(19): siRNA sense strand
ggaggacuuuggauuuaag

SEQ ID NO: 1899937 - RNA, 19 nt, Homo sapiens
  misc_RNA (1)...(19): siRNA sense strand
ucaaucaucuacugaagag

SEQ ID NO: 1899938 - RNA, 19 nt, Homo sapiens
  misc_RNA (1)...(19): siRNA sense strand
acauugacaugacagacua

SEQ ID NO: 1899939 - RNA, 19 nt, Homo sapiens
  misc_RNA (1)...(19): siRNA sense strand
ugaaggaggacuuuggauu

SEQ ID NO: 1899940 - RNA, 19 nt, Homo sapiens
  misc_RNA (1)...(19): siRNA sense strand
guugggagcacuugaagaa

SEQ ID NO: 1899941 - RNA, 19 nt, Homo sapiens
  misc_RNA (1)...(19): siRNA sense strand
gcaguacguucugggauag

SEQ ID NO: 1899942 - RNA, 19 nt, Homo sapiens
  misc_RNA (1)...(19): siRNA sense strand
gaaaaggagaugcagaaaa

SEQ ID NO: 1899943 - RNA, 19 nt, Homo sapiens
  misc_RNA (1)...(19): siRNA sense strand
ugcaguacguucugggaua

SEQ ID NO: 1899944 - RNA, 19 nt, Homo sapiens
  misc_RNA (1)...(19): siRNA sense strand
cgcaguauauucucacaga

SEQ ID NO: 1899945 - RNA, 19 nt, Homo sapiens
  misc_RNA (1)...(19): siRNA sense strand
aaaggguggucaagacguu

SEQ ID NO: 1899946 - RNA, 19 nt, Homo sapiens
  misc_RNA (1)...(19): siRNA sense strand
ugggauaguugaguauuug

SEQ ID NO: 1899947 - RNA, 19 nt, Homo sapiens
  misc_RNA (1)...(19): siRNA sense strand
aauaugccuugguuaauca

SEQ ID NO: 1899948 - RNA, 19 nt, Homo sapiens
  misc_RNA (1)...(19): siRNA sense strand
uggcuggagugggagauua

SEQ ID NO: 1899949 - RNA, 19 nt, Homo sapiens
  misc_RNA (1)...(19): siRNA sense strand
cagcagauaucagaauaac

SEQ ID NO: 1899950 - RNA, 19 nt, Homo sapiens
  misc_RNA (1)...(19): siRNA sense strand
ggagaaugaagcugaaucu

SEQ ID NO: 1899951 - RNA, 19 nt, Homo sapiens
  misc_RNA (1)...(19): siRNA sense strand
agaaagcugggauaagauu

SEQ ID NO: 1899952 - RNA, 19 nt, Homo sapiens
  misc_RNA (1)...(19): siRNA sense strand
acauagaaccagagauuau

SEQ ID NO: 1899953 - RNA, 19 nt, Homo sapiens
  misc_RNA (1)...(19): siRNA sense strand
caucugccgugaauuggau

SEQ ID NO: 1899954 - RNA, 19 nt, Homo sapiens
  misc_RNA (1)...(19): siRNA sense strand
ccaaucaacacaauacagu

SEQ ID NO: 1899955 - RNA, 19 nt, Homo sapiens
  misc_RNA (1)...(19): siRNA sense strand
ugaauuggaugccauuucc

SEQ ID NO: 1899956 - RNA, 19 nt, Homo sapiens
  misc_RNA (1)...(19): siRNA sense strand
guagccagcagauaucaga

SEQ ID NO: 1899957 - RNA, 19 nt, Homo sapiens
  misc_RNA (1)...(19): siRNA sense strand
aauaaagaaagcugggaua

SEQ ID NO: 1899958 - RNA, 19 nt, Homo sapiens
  misc_RNA (1)...(19): siRNA sense strand
cuauugauuugcagaaagu

SEQ ID NO: 1899959 - RNA, 19 nt, Homo sapiens
  misc_RNA (1)...(19): siRNA sense strand
uuguaguucugcagacaua

SEQ ID NO: 1899960 - RNA, 19 nt, Homo sapiens
  misc_RNA (1)...(19): siRNA sense strand
gcaccuuaugugaaaguuu

SEQ ID NO: 1899961 - RNA, 19 nt, Homo sapiens
  misc_RNA (1)...(19): siRNA sense strand
agaggagaaugaagcugaa

SEQ ID NO: 1899962 - RNA, 19 nt, Homo sapiens
  misc_RNA (1)...(19): siRNA sense strand
aggaaucaaucaucuacug

SEQ ID NO: 1899963 - RNA, 19 nt, Homo sapiens
  misc_RNA (1)...(19): siRNA sense strand
ugggagcacuugaagaaag

SEQ ID NO: 1899964 - RNA, 19 nt, Homo sapiens
  misc_RNA (1)...(19): siRNA sense strand
auaaagaaagcugggauaa

SEQ ID NO: 1899965 - RNA, 19 nt, Homo sapiens
  misc_RNA (1)...(19): siRNA sense strand
cugggauaguugaguauuu

SEQ ID NO: 1899966 - RNA, 19 nt, Homo sapiens
  misc_RNA (1)...(19): siRNA sense strand
caucauugacagagcauug

SEQ ID NO: 1899967 - RNA, 19 nt, Homo sapiens
  misc_RNA (1)...(19): siRNA sense strand
aaucaacacaauacaguga

SEQ ID NO: 1899968 - RNA, 19 nt, Homo sapiens
  misc_RNA (1)...(19): siRNA sense strand
caccuuaugugaaaguuuu

SEQ ID NO: 1899969 - RNA, 19 nt, Homo sapiens
  misc_RNA (1)...(19): siRNA sense strand
agcugaaucugaugucaaa

SEQ ID NO: 1899970 - RNA, 19 nt, Homo sapiens
  misc_RNA (1)...(19): siRNA sense strand
ccaguuugauccauuuacu

SEQ ID NO: 1899971 - RNA, 19 nt, Homo sapiens
  misc_RNA (1)...(19): siRNA sense strand
ugcagaaaguggaccaguu

SEQ ID NO: 1899972 - RNA, 19 nt, Homo sapiens
  misc_RNA (1)...(19): siRNA sense strand
uguaaaggguggucaagac

SEQ ID NO: 1899973 - RNA, 19 nt, Homo sapiens
  misc_RNA (1)...(19): siRNA sense strand
gaguauuugagccuuguaa

SEQ ID NO: 1899974 - RNA, 19 nt, Homo sapiens
  misc_RNA (1)...(19): siRNA sense strand
aggaggacuuuggauuuaa

SEQ ID NO: 1899975 - RNA, 19 nt, Homo sapiens
  misc_RNA (1)...(19): siRNA sense strand
gagcauugaaggaggacuu

SEQ ID NO: 1899976 - RNA, 19 nt, Homo sapiens
  misc_RNA (1)...(19): siRNA sense strand
agagugaucuggaaaagga

SEQ ID NO: 1899977 - RNA, 19 nt, Homo sapiens
  misc_RNA (1)...(19): siRNA sense strand
gaccaguuugauccauuua

SEQ ID NO: 1899978 - RNA, 19 nt, Homo sapiens
  misc_RNA (1)...(19): siRNA sense strand
agaaaguggaccaguuuga

SEQ ID NO: 1899979 - RNA, 19 nt, Homo sapiens
  misc_RNA (1)...(19): siRNA sense strand
ggacuuuggauuuaagcau

SEQ ID NO: 1899980 - RNA, 19 nt, Homo sapiens
  misc_RNA (1)...(19): siRNA sense strand
uuugauccauuuacuguuc

SEQ ID NO: 1899981 - RNA, 19 nt, Homo sapiens
  misc_RNA (1)...(19): siRNA sense strand
gccuauugauuugcagaaa

SEQ ID NO: 1899982 - RNA, 19 nt, Homo sapiens
  misc_RNA (1)...(19): siRNA sense strand
agauuaugcuccaguacug

SEQ ID NO: 1899983 - RNA, 19 nt, Homo sapiens
  misc_RNA (1)...(19): siRNA sense strand
gagauuaugcuccaguacu

SEQ ID NO: 1899984 - RNA, 19 nt, Homo sapiens
  misc_RNA (1)...(19): siRNA sense strand
uaaagaaagcugggauaag

SEQ ID NO: 1899985 - RNA, 19 nt, Homo sapiens
  misc_RNA (1)...(19): siRNA sense strand
gguggagugauaaagaauu

SEQ ID NO: 1899986 - RNA, 19 nt, Homo sapiens
  misc_RNA (1)...(19): siRNA sense strand
guauuugacauugacauga

SEQ ID NO: 1899987 - RNA, 19 nt, Homo sapiens
  misc_RNA (1)...(19): siRNA sense strand
aaucaaucaucuacugaag

SEQ ID NO: 1899988 - RNA, 19 nt, Homo sapiens
  misc_RNA (1)...(19): siRNA sense strand
ucaaacauagaaccagaga

SEQ ID NO: 1899989 - RNA, 19 nt, Homo sapiens
  misc_RNA (1)...(19): siRNA sense strand
ggaaugagccucuguauca

SEQ ID NO: 1899990 - RNA, 19 nt, Homo sapiens
  misc_RNA (1)...(19): siRNA sense strand
gcagauggcugaugaagag

SEQ ID NO: 1899991 - RNA, 19 nt, Homo sapiens
  misc_RNA (1)...(19): siRNA sense strand
ggaaguacgugguaugcaa

SEQ ID NO: 1899992 - RNA, 19 nt, Homo sapiens
  misc_RNA (1)...(19): siRNA sense strand
gaugaagagucucgccuuu

SEQ ID NO: 1899993 - RNA, 19 nt, Homo sapiens
  misc_RNA (1)...(19): siRNA sense strand
cauaaccucuccucagaaa

SEQ ID NO: 1899994 - RNA, 19 nt, Homo sapiens
  misc_RNA (1)...(19): siRNA sense strand
ccaaagcuguagagauuga

SEQ ID NO: 1899995 - RNA, 19 nt, Homo sapiens
  misc_RNA (1)...(19): siRNA sense strand
caaaggaucgccauggaaa

SEQ ID NO: 1899996 - RNA, 19 nt, Homo sapiens
  misc_RNA (1)...(19): siRNA sense strand
cgaauucgauaaacgguau

SEQ ID NO: 1899997 - RNA, 19 nt, Homo sapiens
  misc_RNA (1)...(19): siRNA sense strand
ggagcaagcccaacagaug

SEQ ID NO: 1899998 - RNA, 19 nt, Homo sapiens
  misc_RNA (1)...(19): siRNA sense strand
gagcaagcccaacagauga

SEQ ID NO: 1899999 - RNA, 19 nt, Homo sapiens
  misc_RNA (1)...(19): siRNA sense strand
ucagaaauguucagcgaau

SEQ ID NO: 1900000 - RNA, 19 nt, Homo sapiens
  misc_RNA (1)...(19): siRNA sense strand
auccaaagcuguagagauu

SEQ ID NO: 1900001 - RNA, 19 nt, Homo sapiens
  misc_RNA (1)...(19): siRNA sense strand
acgcagggauucacauaaa

SEQ ID NO: 1900002 - RNA, 19 nt, Homo sapiens
  misc_RNA (1)...(19): siRNA sense strand
uaaccucuccucagaaaug

SEQ ID NO: 1900003 - RNA, 19 nt, Homo sapiens
  misc_RNA (1)...(19): siRNA sense strand
ugaagagucucgccuuucu

SEQ ID NO: 1900004 - RNA, 19 nt, Homo sapiens
  misc_RNA (1)...(19): siRNA sense strand
ccacaacaacaacugcuaa

SEQ ID NO: 1900005 - RNA, 19 nt, Homo sapiens
  misc_RNA (1)...(19): siRNA sense strand
agucucgccuuucugcuua

SEQ ID NO: 1900006 - RNA, 19 nt, Homo sapiens
  misc_RNA (1)...(19): siRNA sense strand
uccauaaccucuccucaga

SEQ ID NO: 1900007 - RNA, 19 nt, Homo sapiens
  misc_RNA (1)...(19): siRNA sense strand
guucagcgaauucgauaaa

SEQ ID NO: 1900008 - RNA, 19 nt, Homo sapiens
  misc_RNA (1)...(19): siRNA sense strand
cagaaauguucagcgaauu

SEQ ID NO: 1900009 - RNA, 19 nt, Homo sapiens
  misc_RNA (1)...(19): siRNA sense strand
gaggcuauccuauccaaag

SEQ ID NO: 1900010 - RNA, 19 nt, Homo sapiens
  misc_RNA (1)...(19): siRNA sense strand
aaugagaucuacccugucu

SEQ ID NO: 1900011 - RNA, 19 nt, Homo sapiens
  misc_RNA (1)...(19): siRNA sense strand
cuacgcagggauucacaua

SEQ ID NO: 1900012 - RNA, 19 nt, Homo sapiens
  misc_RNA (1)...(19): siRNA sense strand
gcccaacagaugaaucaaa

SEQ ID NO: 1900013 - RNA, 19 nt, Homo sapiens
  misc_RNA (1)...(19): siRNA sense strand
cgaaucauccacaacaaca

SEQ ID NO: 1900014 - RNA, 19 nt, Homo sapiens
  misc_RNA (1)...(19): siRNA sense strand
gcauauugcgauccuggaa

SEQ ID NO: 1900015 - RNA, 19 nt, Homo sapiens
  misc_RNA (1)...(19): siRNA sense strand
uuucugagccugauaguca

SEQ ID NO: 1900016 - RNA, 19 nt, Homo sapiens
  misc_RNA (1)...(19): siRNA sense strand
caaaccaaacggcuucuag

SEQ ID NO: 1900017 - RNA, 19 nt, Homo sapiens
  misc_RNA (1)...(19): siRNA sense strand
aaucgacaauuaucucaag

SEQ ID NO: 1900018 - RNA, 19 nt, Homo sapiens
  misc_RNA (1)...(19): siRNA sense strand
aaaccaaacggcuucuaga

SEQ ID NO: 1900019 - RNA, 19 nt, Homo sapiens
  misc_RNA (1)...(19): siRNA sense strand
caacagcugccacacuucu

SEQ ID NO: 1900020 - RNA, 19 nt, Homo sapiens
  misc_RNA (1)...(19): siRNA sense strand
gccgaaucauccacaacaa

SEQ ID NO: 1900021 - RNA, 19 nt, Homo sapiens
  misc_RNA (1)...(19): siRNA sense strand
uauccuauccaaagcugua

SEQ ID NO: 1900022 - RNA, 19 nt, Homo sapiens
  misc_RNA (1)...(19): siRNA sense strand
gcaaaccaaacggcuucua

SEQ ID NO: 1900023 - RNA, 19 nt, Homo sapiens
  misc_RNA (1)...(19): siRNA sense strand
ucaaaggaucgccauggaa

SEQ ID NO: 1900024 - RNA, 19 nt, Homo sapiens
  misc_RNA (1)...(19): siRNA sense strand
cggaggcuauccuauccaa

SEQ ID NO: 1900025 - RNA, 19 nt, Homo sapiens
  misc_RNA (1)...(19): siRNA sense strand
cuccugaagugccgaauca

SEQ ID NO: 1900026 - RNA, 19 nt, Homo sapiens
  misc_RNA (1)...(19): siRNA sense strand
caaagaaaaugagaucuac

SEQ ID NO: 1900027 - RNA, 19 nt, Homo sapiens
  misc_RNA (1)...(19): siRNA sense strand
gauugaggagcaaaccaaa

SEQ ID NO: 1900028 - RNA, 19 nt, Homo sapiens
  misc_RNA (1)...(19): siRNA sense strand
cccaacagaugaaucaaaa

SEQ ID NO: 1900029 - RNA, 19 nt, Homo sapiens
  misc_RNA (1)...(19): siRNA sense strand
gaaucauccacaacaacaa

SEQ ID NO: 1900030 - RNA, 19 nt, Homo sapiens
  misc_RNA (1)...(19): siRNA sense strand
ucgccuuucugcuuauuau

SEQ ID NO: 1900031 - RNA, 19 nt, Homo sapiens
  misc_RNA (1)...(19): siRNA sense strand
gauggcugaugaagagucu

SEQ ID NO: 1900032 - RNA, 19 nt, Homo sapiens
  misc_RNA (1)...(19): siRNA sense strand
ccaaagaaaaugagaucua

SEQ ID NO: 1900033 - RNA, 19 nt, Homo sapiens
  misc_RNA (1)...(19): siRNA sense strand
auauugcgauccuggaaug

SEQ ID NO: 1900034 - RNA, 19 nt, Homo sapiens
  misc_RNA (1)...(19): siRNA sense strand
aucaacagcugccacacuu

SEQ ID NO: 1900035 - RNA, 19 nt, Homo sapiens
  misc_RNA (1)...(19): siRNA sense strand
agaaauguucagcgaauuc

SEQ ID NO: 1900036 - RNA, 19 nt, Homo sapiens
  misc_RNA (1)...(19): siRNA sense strand
acaaggagcaagcccaaca

SEQ ID NO: 1900037 - RNA, 19 nt, Homo sapiens
  misc_RNA (1)...(19): siRNA sense strand
gagucucgccuuucugcuu

SEQ ID NO: 1900038 - RNA, 19 nt, Homo sapiens
  misc_RNA (1)...(19): siRNA sense strand
gaauucgauaaacgguaua

SEQ ID NO: 1900039 - RNA, 19 nt, Homo sapiens
  misc_RNA (1)...(19): siRNA sense strand
guacgugguaugcaagaag

SEQ ID NO: 1900040 - RNA, 19 nt, Homo sapiens
  misc_RNA (1)...(19): siRNA sense strand
gaagagucucgccuuucug

SEQ ID NO: 1900041 - RNA, 19 nt, Homo sapiens
  misc_RNA (1)...(19): siRNA sense strand
cauccugaaaccaaagaaa

SEQ ID NO: 1900042 - RNA, 19 nt, Homo sapiens
  misc_RNA (1)...(19): siRNA sense strand
cccugcagauggcugauga

SEQ ID NO: 1900043 - RNA, 19 nt, Homo sapiens
  misc_RNA (1)...(19): siRNA sense strand
ggcauggagcugauaguca

SEQ ID NO: 1900044 - RNA, 19 nt, Homo sapiens
  misc_RNA (1)...(19): siRNA sense strand
gaaauguucagcgaauucg

SEQ ID NO: 1900045 - RNA, 19 nt, Homo sapiens
  misc_RNA (1)...(19): siRNA sense strand
gauaauggcugcacucuuu

SEQ ID NO: 1900046 - RNA, 19 nt, Homo sapiens
  misc_RNA (1)...(19): siRNA sense strand
gaucauugcuccucuugua

SEQ ID NO: 1900047 - RNA, 19 nt, Homo sapiens
  misc_RNA (1)...(19): siRNA sense strand
ggaaagcugugguccaauu

SEQ ID NO: 1900048 - RNA, 19 nt, Homo sapiens
  misc_RNA (1)...(19): siRNA sense strand
gaucagagaugaaugaaag

SEQ ID NO: 1900049 - RNA, 19 nt, Homo sapiens
  misc_RNA (1)...(19): siRNA sense strand
gaaacuauguacccaauuc

SEQ ID NO: 1900050 - RNA, 19 nt, Homo sapiens
  misc_RNA (1)...(19): siRNA sense strand
gggaaacgcuaucugaauu

SEQ ID NO: 1900051 - RNA, 19 nt, Homo sapiens
  misc_RNA (1)...(19): siRNA sense strand
gaaagacacuccgaucaga

SEQ ID NO: 1900052 - RNA, 19 nt, Homo sapiens
  misc_RNA (1)...(19): siRNA sense strand
gauuugcacuacugaauuu

SEQ ID NO: 1900053 - RNA, 19 nt, Homo sapiens
  misc_RNA (1)...(19): siRNA sense strand
ccauaaacauugcacuuaa

SEQ ID NO: 1900054 - RNA, 19 nt, Homo sapiens
  misc_RNA (1)...(19): siRNA sense strand
aaauggagcuguagaugaa

SEQ ID NO: 1900055 - RNA, 19 nt, Homo sapiens
  misc_RNA (1)...(19): siRNA sense strand
gggaggugguugcaaauuu

SEQ ID NO: 1900056 - RNA, 19 nt, Homo sapiens
  misc_RNA (1)...(19): siRNA sense strand
caugaugcuucuacauuua

SEQ ID NO: 1900057 - RNA, 19 nt, Homo sapiens
  misc_RNA (1)...(19): siRNA sense strand
gcagacaaguauccuguug

SEQ ID NO: 1900058 - RNA, 19 nt, Homo sapiens
  misc_RNA (1)...(19): siRNA sense strand
gaccuuaaauggagcugua

SEQ ID NO: 1900059 - RNA, 19 nt, Homo sapiens
  misc_RNA (1)...(19): siRNA sense strand
ggaaauggacccaccaaga

SEQ ID NO: 1900060 - RNA, 19 nt, Homo sapiens
  misc_RNA (1)...(19): siRNA sense strand
gaaauggacccaccaagau

SEQ ID NO: 1900061 - RNA, 19 nt, Homo sapiens
  misc_RNA (1)...(19): siRNA sense strand
ugaaugcuuugaugucaua

SEQ ID NO: 1900062 - RNA, 19 nt, Homo sapiens
  misc_RNA (1)...(19): siRNA sense strand
ugaaagaagucauggaaca

SEQ ID NO: 1900063 - RNA, 19 nt, Homo sapiens
  misc_RNA (1)...(19): siRNA sense strand
gaagggauuugcacuacug

SEQ ID NO: 1900064 - RNA, 19 nt, Homo sapiens
  misc_RNA (1)...(19): siRNA sense strand
gagagguggugauggaauu

SEQ ID NO: 1900065 - RNA, 19 nt, Homo sapiens
  misc_RNA (1)...(19): siRNA sense strand
cgacuugucugcaguagau

SEQ ID NO: 1900066 - RNA, 19 nt, Homo sapiens
  misc_RNA (1)...(19): siRNA sense strand
gcaaauuucuaagguacaa

SEQ ID NO: 1900067 - RNA, 19 nt, Homo sapiens
  misc_RNA (1)...(19): siRNA sense strand
ggaggugguugcaaauuuc

SEQ ID NO: 1900068 - RNA, 19 nt, Homo sapiens
  misc_RNA (1)...(19): siRNA sense strand
uaaacuggauccugauaug

SEQ ID NO: 1900069 - RNA, 19 nt, Homo sapiens
  misc_RNA (1)...(19): siRNA sense strand
ucaugaugcuucuacauuu

SEQ ID NO: 1900070 - RNA, 19 nt, Homo sapiens
  misc_RNA (1)...(19): siRNA sense strand
ggugauggaauuaauagua

SEQ ID NO: 1900071 - RNA, 19 nt, Homo sapiens
  misc_RNA (1)...(19): siRNA sense strand
gaucagcucuuuuacacua

SEQ ID NO: 1900072 - RNA, 19 nt, Homo sapiens
  misc_RNA (1)...(19): siRNA sense strand
gaaacgcuaucugaauuca

SEQ ID NO: 1900073 - RNA, 19 nt, Homo sapiens
  misc_RNA (1)...(19): siRNA sense strand
gaaggucuuugcaggcuau

SEQ ID NO: 1900074 - RNA, 19 nt, Homo sapiens
  misc_RNA (1)...(19): siRNA sense strand
ccaccaagauucuccugaa

SEQ ID NO: 1900075 - RNA, 19 nt, Homo sapiens
  misc_RNA (1)...(19): siRNA sense strand
uuacauugauccacugaaa

SEQ ID NO: 1900076 - RNA, 19 nt, Homo sapiens
  misc_RNA (1)...(19): siRNA sense strand
gaacaaaacagaaagauca

SEQ ID NO: 1900077 - RNA, 19 nt, Homo sapiens
  misc_RNA (1)...(19): siRNA sense strand
ucagggaggugguugcaaa

SEQ ID NO: 1900078 - RNA, 19 nt, Homo sapiens
  misc_RNA (1)...(19): siRNA sense strand
gcuucuacauuuaccauaa

SEQ ID NO: 1900079 - RNA, 19 nt, Homo sapiens
  misc_RNA (1)...(19): siRNA sense strand
ggaacacuaugcugaucaa

SEQ ID NO: 1900080 - RNA, 19 nt, Homo sapiens
  misc_RNA (1)...(19): siRNA sense strand
gcagucagccaaauauuuc

SEQ ID NO: 1900081 - RNA, 19 nt, Homo sapiens
  misc_RNA (1)...(19): siRNA sense strand
gaauucaggaggauuuauu

SEQ ID NO: 1900082 - RNA, 19 nt, Homo sapiens
  misc_RNA (1)...(19): siRNA sense strand
gauaaacuggauccugaua

SEQ ID NO: 1900083 - RNA, 19 nt, Homo sapiens
  misc_RNA (1)...(19): siRNA sense strand
ugauaaagcuaagcaugaa

SEQ ID NO: 1900084 - RNA, 19 nt, Homo sapiens
  misc_RNA (1)...(19): siRNA sense strand
uaacgugggagaagacuuu

SEQ ID NO: 1900085 - RNA, 19 nt, Homo sapiens
  misc_RNA (1)...(19): siRNA sense strand
ggaguucauugcaccaguu

SEQ ID NO: 1900086 - RNA, 19 nt, Homo sapiens
  misc_RNA (1)...(19): siRNA sense strand
ugacaaauccaaggacuuu

SEQ ID NO: 1900087 - RNA, 19 nt, Homo sapiens
  misc_RNA (1)...(19): siRNA sense strand
acacuaugcugaucaagau

SEQ ID NO: 1900088 - RNA, 19 nt, Homo sapiens
  misc_RNA (1)...(19): siRNA sense strand
gcaaguugaucuggagaau

SEQ ID NO: 1900089 - RNA, 19 nt, Homo sapiens
  misc_RNA (1)...(19): siRNA sense strand
gaauuuggaaggcuauuau

SEQ ID NO: 1900090 - RNA, 19 nt, Homo sapiens
  misc_RNA (1)...(19): siRNA sense strand
ccgaaaugcuagagaaaug

SEQ ID NO: 1900091 - RNA, 19 nt, Homo sapiens
  misc_RNA (1)...(19): siRNA sense strand
cauguuuacugaaugcuuu

SEQ ID NO: 1900092 - RNA, 19 nt, Homo sapiens
  misc_RNA (1)...(19): siRNA sense strand
agucauaacuguagcaaca

SEQ ID NO: 1900093 - RNA, 19 nt, Homo sapiens
  misc_RNA (1)...(19): siRNA sense strand
gaaaaugucccaacugaug

SEQ ID NO: 1900094 - RNA, 19 nt, Homo sapiens
  misc_RNA (1)...(19): siRNA sense strand
gaaagcugugguccaauuu

SEQ ID NO: 1900095 - RNA, 19 nt, Homo sapiens
  misc_RNA (1)...(19): siRNA sense strand
uaaauggagcuguagauga

SEQ ID NO: 1900096 - RNA, 19 nt, Homo sapiens
  misc_RNA (1)...(19): siRNA sense strand
gaauagaguaggaguaugg

SEQ ID NO: 1900097 - RNA, 19 nt, Homo sapiens
  misc_RNA (1)...(19): siRNA sense strand
ggccagaaagugagauuaa

SEQ ID NO: 1900098 - RNA, 19 nt, Homo sapiens
  misc_RNA (1)...(19): siRNA sense strand
gcagugucauuuauagauc

SEQ ID NO: 1900099 - RNA, 19 nt, Homo sapiens
  misc_RNA (1)...(19): siRNA sense strand
gcuauuauacgaagggauu

SEQ ID NO: 1900100 - RNA, 19 nt, Homo sapiens
  misc_RNA (1)...(19): siRNA sense strand
gugaugaauugguagaaga

SEQ ID NO: 1900101 - RNA, 19 nt, Homo sapiens
  misc_RNA (1)...(19): siRNA sense strand
cagaaagugagauuaauga

SEQ ID NO: 1900102 - RNA, 19 nt, Homo sapiens
  misc_RNA (1)...(19): siRNA sense strand
gcaaagccagagcuaagaa

SEQ ID NO: 1900103 - RNA, 19 nt, Homo sapiens
  misc_RNA (1)...(19): siRNA sense strand
ggaaucuccaggauaauga

SEQ ID NO: 1900104 - RNA, 19 nt, Homo sapiens
  misc_RNA (1)...(19): siRNA sense strand
ggaauuuuguggccagaua

SEQ ID NO: 1900105 - RNA, 19 nt, Homo sapiens
  misc_RNA (1)...(19): siRNA sense strand
gaucugguugucauguuua

SEQ ID NO: 1900106 - RNA, 19 nt, Homo sapiens
  misc_RNA (1)...(19): siRNA sense strand
ccguauaucuggugguuau

SEQ ID NO: 1900107 - RNA, 19 nt, Homo sapiens
  misc_RNA (1)...(19): siRNA sense strand
ccagaaacaugggaaugga

SEQ ID NO: 1900108 - RNA, 19 nt, Homo sapiens
  misc_RNA (1)...(19): siRNA sense strand
ggauuugcacuacugaauu

SEQ ID NO: 1900109 - RNA, 19 nt, Homo sapiens
  misc_RNA (1)...(19): siRNA sense strand
gcucuuugccgaaaugcua

SEQ ID NO: 1900110 - RNA, 19 nt, Homo sapiens
  misc_RNA (1)...(19): siRNA sense strand
cauuaccaguggcaauuaa

SEQ ID NO: 1900111 - RNA, 19 nt, Homo sapiens
  misc_RNA (1)...(19): siRNA sense strand
guugcaaauuucuaaggua

SEQ ID NO: 1900112 - RNA, 19 nt, Homo sapiens
  misc_RNA (1)...(19): siRNA sense strand
aaguugaucuggagaaugu

SEQ ID NO: 1900113 - RNA, 19 nt, Homo sapiens
  misc_RNA (1)...(19): siRNA sense strand
uggcuaauguguacuuaau

SEQ ID NO: 1900114 - RNA, 19 nt, Homo sapiens
  misc_RNA (1)...(19): siRNA sense strand
gggaauagaguaggaguau

SEQ ID NO: 1900115 - RNA, 19 nt, Homo sapiens
  misc_RNA (1)...(19): siRNA sense strand
ggauauuguucaagggaau

SEQ ID NO: 1900116 - RNA, 19 nt, Homo sapiens
  misc_RNA (1)...(19): siRNA sense strand
acaaauccaaggacuuuaa

SEQ ID NO: 1900117 - RNA, 19 nt, Homo sapiens
  misc_RNA (1)...(19): siRNA sense strand
ucauaacuguagcaacaaa

SEQ ID NO: 1900118 - RNA, 19 nt, Homo sapiens
  misc_RNA (1)...(19): siRNA sense strand
aagggaagcuauuaacauc

SEQ ID NO: 1900119 - RNA, 19 nt, Homo sapiens
  misc_RNA (1)...(19): siRNA sense strand
gaaaaggacaucaagguau

SEQ ID NO: 1900120 - RNA, 19 nt, Homo sapiens
  misc_RNA (1)...(19): siRNA sense strand
cugggagacucacacauuu

SEQ ID NO: 1900121 - RNA, 19 nt, Homo sapiens
  misc_RNA (1)...(19): siRNA sense strand
cgaaaaggcuggagcuuca

SEQ ID NO: 1900122 - RNA, 19 nt, Homo sapiens
  misc_RNA (1)...(19): siRNA sense strand
cugaugauauccacaugaa

SEQ ID NO: 1900123 - RNA, 19 nt, Homo sapiens
  misc_RNA (1)...(19): siRNA sense strand
ggaaagacacuccgaucag

SEQ ID NO: 1900124 - RNA, 19 nt, Homo sapiens
  misc_RNA (1)...(19): siRNA sense strand
ggaauagaguaggaguaug

SEQ ID NO: 1900125 - RNA, 19 nt, Homo sapiens
  misc_RNA (1)...(19): siRNA sense strand
ucaagggaauagaguagga

SEQ ID NO: 1900126 - RNA, 19 nt, Homo sapiens
  misc_RNA (1)...(19): siRNA sense strand
gcuauuaacaucacauugg

SEQ ID NO: 1900127 - RNA, 19 nt, Homo sapiens
  misc_RNA (1)...(19): siRNA sense strand
caaauccaaggacuuuaaa

SEQ ID NO: 1900128 - RNA, 19 nt, Homo sapiens
  misc_RNA (1)...(19): siRNA sense strand
ggaaacgcuaucugaauuc

SEQ ID NO: 1900129 - RNA, 19 nt, Homo sapiens
  misc_RNA (1)...(19): siRNA sense strand
uuaauaacgugggagaaga

SEQ ID NO: 1900130 - RNA, 19 nt, Homo sapiens
  misc_RNA (1)...(19): siRNA sense strand
ccagaaagugagauuaaug

SEQ ID NO: 1900131 - RNA, 19 nt, Homo sapiens
  misc_RNA (1)...(19): siRNA sense strand
ggaugcagauguuguuuug

SEQ ID NO: 1900132 - RNA, 19 nt, Homo sapiens
  misc_RNA (1)...(19): siRNA sense strand
gcugcacucuuugugaauu

SEQ ID NO: 1900133 - RNA, 19 nt, Homo sapiens
  misc_RNA (1)...(19): siRNA sense strand
ugaucugguugucauguuu

SEQ ID NO: 1900134 - RNA, 19 nt, Homo sapiens
  misc_RNA (1)...(19): siRNA sense strand
gccagaaagugagauuaau

SEQ ID NO: 1900135 - RNA, 19 nt, Homo sapiens
  misc_RNA (1)...(19): siRNA sense strand
ccagagcuaagaauacauu

SEQ ID NO: 1900136 - RNA, 19 nt, Homo sapiens
  misc_RNA (1)...(19): siRNA sense strand
cuauuaacaucacauugga

SEQ ID NO: 1900137 - RNA, 19 nt, Homo sapiens
  misc_RNA (1)...(19): siRNA sense strand
aaaagaaagugauggauuc

SEQ ID NO: 1900138 - RNA, 19 nt, Homo sapiens
  misc_RNA (1)...(19): siRNA sense strand
aagaagucauggaacacua

SEQ ID NO: 1900139 - RNA, 19 nt, Homo sapiens
  misc_RNA (1)...(19): siRNA sense strand
ccuguggacuggaaggaaa

SEQ ID NO: 1900140 - RNA, 19 nt, Homo sapiens
  misc_RNA (1)...(19): siRNA sense strand
gaagauuauguggauauug

SEQ ID NO: 1900141 - RNA, 19 nt, Homo sapiens
  misc_RNA (1)...(19): siRNA sense strand
guugucauguuuacugaau

SEQ ID NO: 1900142 - RNA, 19 nt, Homo sapiens
  misc_RNA (1)...(19): siRNA sense strand
aaaaggacaucaagguauu

SEQ ID NO: 1900143 - RNA, 19 nt, Homo sapiens
  misc_RNA (1)...(19): siRNA sense strand
cauccaaacguaucaauag

SEQ ID NO: 1900144 - RNA, 19 nt, Homo sapiens
  misc_RNA (1)...(19): siRNA sense strand
ggcaauuaauggaaaugga

SEQ ID NO: 1900145 - RNA, 19 nt, Homo sapiens
  misc_RNA (1)...(19): siRNA sense strand
gauaauggcugcacucuuu

SEQ ID NO: 1900146 - RNA, 19 nt, Homo sapiens
  misc_RNA (1)...(19): siRNA sense strand
gaucauugcuccucuugua

SEQ ID NO: 1900147 - RNA, 19 nt, Homo sapiens
  misc_RNA (1)...(19): siRNA sense strand
ggaaagcugugguccaauu

SEQ ID NO: 1900148 - RNA, 19 nt, Homo sapiens
  misc_RNA (1)...(19): siRNA sense strand
gaucagagaugaaugaaag

SEQ ID NO: 1900149 - RNA, 19 nt, Homo sapiens
  misc_RNA (1)...(19): siRNA sense strand
gaaacuauguacccaauuc

SEQ ID NO: 1900150 - RNA, 19 nt, Homo sapiens
  misc_RNA (1)...(19): siRNA sense strand
gggaaacgcuaucugaauu

SEQ ID NO: 1900151 - RNA, 19 nt, Homo sapiens
  misc_RNA (1)...(19): siRNA sense strand
gaaagacacuccgaucaga

SEQ ID NO: 1900152 - RNA, 19 nt, Homo sapiens
  misc_RNA (1)...(19): siRNA sense strand
gauuugcacuacugaauuu

SEQ ID NO: 1900153 - RNA, 19 nt, Homo sapiens
  misc_RNA (1)...(19): siRNA sense strand
ccauaaacauugcacuuaa

SEQ ID NO: 1900154 - RNA, 19 nt, Homo sapiens
  misc_RNA (1)...(19): siRNA sense strand
aaauggagcuguagaugaa

SEQ ID NO: 1900155 - RNA, 19 nt, Homo sapiens
  misc_RNA (1)...(19): siRNA sense strand
gggaggugguugcaaauuu

SEQ ID NO: 1900156 - RNA, 19 nt, Homo sapiens
  misc_RNA (1)...(19): siRNA sense strand
caugaugcuucuacauuua

SEQ ID NO: 1900157 - RNA, 19 nt, Homo sapiens
  misc_RNA (1)...(19): siRNA sense strand
gcagacaaguauccuguug

SEQ ID NO: 1900158 - RNA, 19 nt, Homo sapiens
  misc_RNA (1)...(19): siRNA sense strand
gaccuuaaauggagcugua

SEQ ID NO: 1900159 - RNA, 19 nt, Homo sapiens
  misc_RNA (1)...(19): siRNA sense strand
ggaaauggacccaccaaga

SEQ ID NO: 1900160 - RNA, 19 nt, Homo sapiens
  misc_RNA (1)...(19): siRNA sense strand
gaaauggacccaccaagau

SEQ ID NO: 1900161 - RNA, 19 nt, Homo sapiens
  misc_RNA (1)...(19): siRNA sense strand
ugaaugcuuugaugucaua

SEQ ID NO: 1900162 - RNA, 19 nt, Homo sapiens
  misc_RNA (1)...(19): siRNA sense strand
ugaaagaagucauggaaca

SEQ ID NO: 1900163 - RNA, 19 nt, Homo sapiens
  misc_RNA (1)...(19): siRNA sense strand
gaagggauuugcacuacug

SEQ ID NO: 1900164 - RNA, 19 nt, Homo sapiens
  misc_RNA (1)...(19): siRNA sense strand
gagagguggugauggaauu

SEQ ID NO: 1900165 - RNA, 19 nt, Homo sapiens
  misc_RNA (1)...(19): siRNA sense strand
cgacuugucugcaguagau

SEQ ID NO: 1900166 - RNA, 19 nt, Homo sapiens
  misc_RNA (1)...(19): siRNA sense strand
gcaaauuucuaagguacaa

SEQ ID NO: 1900167 - RNA, 19 nt, Homo sapiens
  misc_RNA (1)...(19): siRNA sense strand
ggaggugguugcaaauuuc

SEQ ID NO: 1900168 - RNA, 19 nt, Homo sapiens
  misc_RNA (1)...(19): siRNA sense strand
uaaacuggauccugauaug

SEQ ID NO: 1900169 - RNA, 19 nt, Homo sapiens
  misc_RNA (1)...(19): siRNA sense strand
ucaugaugcuucuacauuu

SEQ ID NO: 1900170 - RNA, 19 nt, Homo sapiens
  misc_RNA (1)...(19): siRNA sense strand
ggugauggaauuaauagua

SEQ ID NO: 1900171 - RNA, 19 nt, Homo sapiens
  misc_RNA (1)...(19): siRNA sense strand
gaucagcucuuuuacacua

SEQ ID NO: 1900172 - RNA, 19 nt, Homo sapiens
  misc_RNA (1)...(19): siRNA sense strand
gaaacgcuaucugaauuca

SEQ ID NO: 1900173 - RNA, 19 nt, Homo sapiens
  misc_RNA (1)...(19): siRNA sense strand
gaaggucuuugcaggcuau

SEQ ID NO: 1900174 - RNA, 19 nt, Homo sapiens
  misc_RNA (1)...(19): siRNA sense strand
ccaccaagauucuccugaa

SEQ ID NO: 1900175 - RNA, 19 nt, Homo sapiens
  misc_RNA (1)...(19): siRNA sense strand
uuacauugauccacugaaa

SEQ ID NO: 1900176 - RNA, 19 nt, Homo sapiens
  misc_RNA (1)...(19): siRNA sense strand
gaacaaaacagaaagauca

SEQ ID NO: 1900177 - RNA, 19 nt, Homo sapiens
  misc_RNA (1)...(19): siRNA sense strand
ucagggaggugguugcaaa

SEQ ID NO: 1900178 - RNA, 19 nt, Homo sapiens
  misc_RNA (1)...(19): siRNA sense strand
gcuucuacauuuaccauaa

SEQ ID NO: 1900179 - RNA, 19 nt, Homo sapiens
  misc_RNA (1)...(19): siRNA sense strand
ggaacacuaugcugaucaa

SEQ ID NO: 1900180 - RNA, 19 nt, Homo sapiens
  misc_RNA (1)...(19): siRNA sense strand
gcagucagccaaauauuuc

SEQ ID NO: 1900181 - RNA, 19 nt, Homo sapiens
  misc_RNA (1)...(19): siRNA sense strand
gaauucaggaggauuuauu

SEQ ID NO: 1900182 - RNA, 19 nt, Homo sapiens
  misc_RNA (1)...(19): siRNA sense strand
gauaaacuggauccugaua

SEQ ID NO: 1900183 - RNA, 19 nt, Homo sapiens
  misc_RNA (1)...(19): siRNA sense strand
ugauaaagcuaagcaugaa

SEQ ID NO: 1900184 - RNA, 19 nt, Homo sapiens
  misc_RNA (1)...(19): siRNA sense strand
uaacgugggagaagacuuu

SEQ ID NO: 1900185 - RNA, 19 nt, Homo sapiens
  misc_RNA (1)...(19): siRNA sense strand
ggaguucauugcaccaguu

SEQ ID NO: 1900186 - RNA, 19 nt, Homo sapiens
  misc_RNA (1)...(19): siRNA sense strand
ugacaaauccaaggacuuu

SEQ ID NO: 1900187 - RNA, 19 nt, Homo sapiens
  misc_RNA (1)...(19): siRNA sense strand
acacuaugcugaucaagau

SEQ ID NO: 1900188 - RNA, 19 nt, Homo sapiens
  misc_RNA (1)...(19): siRNA sense strand
gcaaguugaucuggagaau

SEQ ID NO: 1900189 - RNA, 19 nt, Homo sapiens
  misc_RNA (1)...(19): siRNA sense strand
gaauuuggaaggcuauuau

SEQ ID NO: 1900190 - RNA, 19 nt, Homo sapiens
  misc_RNA (1)...(19): siRNA sense strand
ccgaaaugcuagagaaaug

SEQ ID NO: 1900191 - RNA, 19 nt, Homo sapiens
  misc_RNA (1)...(19): siRNA sense strand
cauguuuacugaaugcuuu

SEQ ID NO: 1900192 - RNA, 19 nt, Homo sapiens
  misc_RNA (1)...(19): siRNA sense strand
agucauaacuguagcaaca

SEQ ID NO: 1900193 - RNA, 19 nt, Homo sapiens
  misc_RNA (1)...(19): siRNA sense strand
gaaaaugucccaacugaug

SEQ ID NO: 1900194 - RNA, 19 nt, Homo sapiens
  misc_RNA (1)...(19): siRNA sense strand
gaaagcugugguccaauuu

SEQ ID NO: 1900195 - RNA, 19 nt, Homo sapiens
  misc_RNA (1)...(19): siRNA sense strand
uaaauggagcuguagauga

SEQ ID NO: 1900196 - RNA, 19 nt, Homo sapiens
  misc_RNA (1)...(19): siRNA sense strand
gaauagaguaggaguaugg

SEQ ID NO: 1900197 - RNA, 19 nt, Homo sapiens
  misc_RNA (1)...(19): siRNA sense strand
ggccagaaagugagauuaa

SEQ ID NO: 1900198 - RNA, 19 nt, Homo sapiens
  misc_RNA (1)...(19): siRNA sense strand
gcagugucauuuauagauc

SEQ ID NO: 1900199 - RNA, 19 nt, Homo sapiens
  misc_RNA (1)...(19): siRNA sense strand
gcuauuauacgaagggauu

SEQ ID NO: 1900200 - RNA, 19 nt, Homo sapiens
  misc_RNA (1)...(19): siRNA sense strand
gugaugaauugguagaaga

SEQ ID NO: 1900201 - RNA, 19 nt, Homo sapiens
  misc_RNA (1)...(19): siRNA sense strand
cagaaagugagauuaauga

SEQ ID NO: 1900202 - RNA, 19 nt, Homo sapiens
  misc_RNA (1)...(19): siRNA sense strand
gcaaagccagagcuaagaa

SEQ ID NO: 1900203 - RNA, 19 nt, Homo sapiens
  misc_RNA (1)...(19): siRNA sense strand
ggaaucuccaggauaauga

SEQ ID NO: 1900204 - RNA, 19 nt, Homo sapiens
  misc_RNA (1)...(19): siRNA sense strand
ggaauuuuguggccagaua

SEQ ID NO: 1900205 - RNA, 19 nt, Homo sapiens
  misc_RNA (1)...(19): siRNA sense strand
gaucugguugucauguuua

SEQ ID NO: 1900206 - RNA, 19 nt, Homo sapiens
  misc_RNA (1)...(19): siRNA sense strand
ccguauaucuggugguuau

SEQ ID NO: 1900207 - RNA, 19 nt, Homo sapiens
  misc_RNA (1)...(19): siRNA sense strand
ccagaaacaugggaaugga

SEQ ID NO: 1900208 - RNA, 19 nt, Homo sapiens
  misc_RNA (1)...(19): siRNA sense strand
ggauuugcacuacugaauu

SEQ ID NO: 1900209 - RNA, 19 nt, Homo sapiens
  misc_RNA (1)...(19): siRNA sense strand
gcucuuugccgaaaugcua

SEQ ID NO: 1900210 - RNA, 19 nt, Homo sapiens
  misc_RNA (1)...(19): siRNA sense strand
cauuaccaguggcaauuaa

SEQ ID NO: 1900211 - RNA, 19 nt, Homo sapiens
  misc_RNA (1)...(19): siRNA sense strand
guugcaaauuucuaaggua

SEQ ID NO: 1900212 - RNA, 19 nt, Homo sapiens
  misc_RNA (1)...(19): siRNA sense strand
aaguugaucuggagaaugu

SEQ ID NO: 1900213 - RNA, 19 nt, Homo sapiens
  misc_RNA (1)...(19): siRNA sense strand
uggcuaauguguacuuaau

SEQ ID NO: 1900214 - RNA, 19 nt, Homo sapiens
  misc_RNA (1)...(19): siRNA sense strand
gggaauagaguaggaguau

SEQ ID NO: 1900215 - RNA, 19 nt, Homo sapiens
  misc_RNA (1)...(19): siRNA sense strand
ggauauuguucaagggaau

SEQ ID NO: 1900216 - RNA, 19 nt, Homo sapiens
  misc_RNA (1)...(19): siRNA sense strand
acaaauccaaggacuuuaa

SEQ ID NO: 1900217 - RNA, 19 nt, Homo sapiens
  misc_RNA (1)...(19): siRNA sense strand
ucauaacuguagcaacaaa

SEQ ID NO: 1900218 - RNA, 19 nt, Homo sapiens
  misc_RNA (1)...(19): siRNA sense strand
aagggaagcuauuaacauc

SEQ ID NO: 1900219 - RNA, 19 nt, Homo sapiens
  misc_RNA (1)...(19): siRNA sense strand
gaaaaggacaucaagguau

SEQ ID NO: 1900220 - RNA, 19 nt, Homo sapiens
  misc_RNA (1)...(19): siRNA sense strand
cugggagacucacacauuu

SEQ ID NO: 1900221 - RNA, 19 nt, Homo sapiens
  misc_RNA (1)...(19): siRNA sense strand
cgaaaaggcuggagcuuca

SEQ ID NO: 1900222 - RNA, 19 nt, Homo sapiens
  misc_RNA (1)...(19): siRNA sense strand
cugaugauauccacaugaa

SEQ ID NO: 1900223 - RNA, 19 nt, Homo sapiens
  misc_RNA (1)...(19): siRNA sense strand
ggaaagacacuccgaucag

SEQ ID NO: 1900224 - RNA, 19 nt, Homo sapiens
  misc_RNA (1)...(19): siRNA sense strand
ggaauagaguaggaguaug

SEQ ID NO: 1900225 - RNA, 19 nt, Homo sapiens
  misc_RNA (1)...(19): siRNA sense strand
ucaagggaauagaguagga

SEQ ID NO: 1900226 - RNA, 19 nt, Homo sapiens
  misc_RNA (1)...(19): siRNA sense strand
gcuauuaacaucacauugg

SEQ ID NO: 1900227 - RNA, 19 nt, Homo sapiens
  misc_RNA (1)...(19): siRNA sense strand
caaauccaaggacuuuaaa

SEQ ID NO: 1900228 - RNA, 19 nt, Homo sapiens
  misc_RNA (1)...(19): siRNA sense strand
ggaaacgcuaucugaauuc

SEQ ID NO: 1900229 - RNA, 19 nt, Homo sapiens
  misc_RNA (1)...(19): siRNA sense strand
uuaauaacgugggagaaga

SEQ ID NO: 1900230 - RNA, 19 nt, Homo sapiens
  misc_RNA (1)...(19): siRNA sense strand
ccagaaagugagauuaaug

SEQ ID NO: 1900231 - RNA, 19 nt, Homo sapiens
  misc_RNA (1)...(19): siRNA sense strand
ggaugcagauguuguuuug

SEQ ID NO: 1900232 - RNA, 19 nt, Homo sapiens
  misc_RNA (1)...(19): siRNA sense strand
gcugcacucuuugugaauu

SEQ ID NO: 1900233 - RNA, 19 nt, Homo sapiens
  misc_RNA (1)...(19): siRNA sense strand
ugaucugguugucauguuu

SEQ ID NO: 1900234 - RNA, 19 nt, Homo sapiens
  misc_RNA (1)...(19): siRNA sense strand
gccagaaagugagauuaau

SEQ ID NO: 1900235 - RNA, 19 nt, Homo sapiens
  misc_RNA (1)...(19): siRNA sense strand
ccagagcuaagaauacauu

SEQ ID NO: 1900236 - RNA, 19 nt, Homo sapiens
  misc_RNA (1)...(19): siRNA sense strand
cuauuaacaucacauugga

SEQ ID NO: 1900237 - RNA, 19 nt, Homo sapiens
  misc_RNA (1)...(19): siRNA sense strand
aaaagaaagugauggauuc

SEQ ID NO: 1900238 - RNA, 19 nt, Homo sapiens
  misc_RNA (1)...(19): siRNA sense strand
aagaagucauggaacacua

SEQ ID NO: 1900239 - RNA, 19 nt, Homo sapiens
  misc_RNA (1)...(19): siRNA sense strand
ccuguggacuggaaggaaa

SEQ ID NO: 1900240 - RNA, 19 nt, Homo sapiens
  misc_RNA (1)...(19): siRNA sense strand
gaagauuauguggauauug

SEQ ID NO: 1900241 - RNA, 19 nt, Homo sapiens
  misc_RNA (1)...(19): siRNA sense strand
guugucauguuuacugaau

SEQ ID NO: 1900242 - RNA, 19 nt, Homo sapiens
  misc_RNA (1)...(19): siRNA sense strand
aaaaggacaucaagguauu

SEQ ID NO: 1900243 - RNA, 19 nt, Homo sapiens
  misc_RNA (1)...(19): siRNA sense strand
cauccaaacguaucaauag

SEQ ID NO: 1900244 - RNA, 19 nt, Homo sapiens
  misc_RNA (1)...(19): siRNA sense strand
ggcaauuaauggaaaugga

SEQ ID NO: 1900245 - RNA, 19 nt, Homo sapiens
  misc_RNA (1)...(19): siRNA sense strand
cagugaagguguacccuaa

SEQ ID NO: 1900246 - RNA, 19 nt, Homo sapiens
  misc_RNA (1)...(19): siRNA sense strand
caagaacgccuacaagaag

SEQ ID NO: 1900247 - RNA, 19 nt, Homo sapiens
  misc_RNA (1)...(19): siRNA sense strand
gcaagccggugggcaagaa

SEQ ID NO: 1900248 - RNA, 19 nt, Homo sapiens
  misc_RNA (1)...(19): siRNA sense strand
ucaagaacgccuacaagaa

SEQ ID NO: 1900249 - RNA, 19 nt, Homo sapiens
  misc_RNA (1)...(19): siRNA sense strand
ggccgagacucccauguuc

SEQ ID NO: 1900250 - RNA, 19 nt, Homo sapiens
  misc_RNA (1)...(19): siRNA sense strand
gcaaccugcuggagugcau

SEQ ID NO: 1900251 - RNA, 19 nt, Homo sapiens
  misc_RNA (1)...(19): siRNA sense strand
gcgcuacggcgguuucaug

SEQ ID NO: 1900252 - RNA, 19 nt, Homo sapiens
  misc_RNA (1)...(19): siRNA sense strand
gaagcgcgaggacgucuca

SEQ ID NO: 1900253 - RNA, 19 nt, Homo sapiens
  misc_RNA (1)...(19): siRNA sense strand
cuacaagaagggcgaguga

SEQ ID NO: 1900254 - RNA, 19 nt, Homo sapiens
  misc_RNA (1)...(19): siRNA sense strand
ccuacaggauggagcacuu

SEQ ID NO: 1900255 - RNA, 19 nt, Homo sapiens
  misc_RNA (1)...(19): siRNA sense strand
caucaagaacgccuacaag

SEQ ID NO: 1900256 - RNA, 19 nt, Homo sapiens
  misc_RNA (1)...(19): siRNA sense strand
aaaacgccaucaucaagaa

SEQ ID NO: 1900257 - RNA, 19 nt, Homo sapiens
  misc_RNA (1)...(19): siRNA sense strand
gcuucaggccuccauggaa

SEQ ID NO: 1900258 - RNA, 19 nt, Homo sapiens
  misc_RNA (1)...(19): siRNA sense strand
guaaauuucugcuggacaa

SEQ ID NO: 1900259 - RNA, 19 nt, Homo sapiens
  misc_RNA (1)...(19): siRNA sense strand
caagaaguauugucagagu

SEQ ID NO: 1900260 - RNA, 19 nt, Homo sapiens
  misc_RNA (1)...(19): siRNA sense strand
ggacagcuguaaauuucug

SEQ ID NO: 1900261 - RNA, 19 nt, Homo sapiens
  misc_RNA (1)...(19): siRNA sense strand
acaagaaccuggacaccaa

SEQ ID NO: 1900262 - RNA, 19 nt, Homo sapiens
  misc_RNA (1)...(19): siRNA sense strand
uggaugaacuggacaagug

SEQ ID NO: 1900263 - RNA, 19 nt, Homo sapiens
  misc_RNA (1)...(19): siRNA sense strand
gaaguauugucagaguuga

SEQ ID NO: 1900264 - RNA, 19 nt, Homo sapiens
  misc_RNA (1)...(19): siRNA sense strand
gcuaugaccaggccaagaa

SEQ ID NO: 1900265 - RNA, 19 nt, Homo sapiens
  misc_RNA (1)...(19): siRNA sense strand
cuggacagcuguaaauuuc

SEQ ID NO: 1900266 - RNA, 19 nt, Homo sapiens
  misc_RNA (1)...(19): siRNA sense strand
caacuacggcugcuacugu

SEQ ID NO: 1900267 - RNA, 19 nt, Homo sapiens
  misc_RNA (1)...(19): siRNA sense strand
ggacaagugcugccagaca

SEQ ID NO: 1900268 - RNA, 19 nt, Homo sapiens
  misc_RNA (1)...(19): siRNA sense strand
gcucggcaaucaccuguag

SEQ ID NO: 1900269 - RNA, 19 nt, Homo sapiens
  misc_RNA (1)...(19): siRNA sense strand
uaacaaggcacacaagaac

SEQ ID NO: 1900270 - RNA, 19 nt, Homo sapiens
  misc_RNA (1)...(19): siRNA sense strand
caacgcugccaucugcuuu

SEQ ID NO: 1900271 - RNA, 19 nt, Homo sapiens
  misc_RNA (1)...(19): siRNA sense strand
gaaccuggacaccaagaag

SEQ ID NO: 1900272 - RNA, 19 nt, Homo sapiens
  misc_RNA (1)...(19): siRNA sense strand
acacccacaccuauucaua

SEQ ID NO: 1900273 - RNA, 19 nt, Homo sapiens
  misc_RNA (1)...(19): siRNA sense strand
caaaagcuccauauaacaa

SEQ ID NO: 1900274 - RNA, 19 nt, Homo sapiens
  misc_RNA (1)...(19): siRNA sense strand
agacacaugacaacugcua

SEQ ID NO: 1900275 - RNA, 19 nt, Homo sapiens
  misc_RNA (1)...(19): siRNA sense strand
agaaguauugucagaguug

SEQ ID NO: 1900276 - RNA, 19 nt, Homo sapiens
  misc_RNA (1)...(19): siRNA sense strand
accaagaaguauugucaga

SEQ ID NO: 1900277 - RNA, 19 nt, Homo sapiens
  misc_RNA (1)...(19): siRNA sense strand
gagugugaggccuucauuu

SEQ ID NO: 1900278 - RNA, 19 nt, Homo sapiens
  misc_RNA (1)...(19): siRNA sense strand
aagaaguauugucagaguu

SEQ ID NO: 1900279 - RNA, 19 nt, Homo sapiens
  misc_RNA (1)...(19): siRNA sense strand
acaccaagaaguauuguca

SEQ ID NO: 1900280 - RNA, 19 nt, Homo sapiens
  misc_RNA (1)...(19): siRNA sense strand
gcaacgcugccaucugcuu

SEQ ID NO: 1900281 - RNA, 19 nt, Homo sapiens
  misc_RNA (1)...(19): siRNA sense strand
cauauaacaaggcacacaa

SEQ ID NO: 1900282 - RNA, 19 nt, Homo sapiens
  misc_RNA (1)...(19): siRNA sense strand
gaaacuccuugugcuagcu

SEQ ID NO: 1900283 - RNA, 19 nt, Homo sapiens
  misc_RNA (1)...(19): siRNA sense strand
uauaacaaggcacacaaga

SEQ ID NO: 1900284 - RNA, 19 nt, Homo sapiens
  misc_RNA (1)...(19): siRNA sense strand
gugaggccuucauuugcaa

SEQ ID NO: 1900285 - RNA, 19 nt, Homo sapiens
  misc_RNA (1)...(19): siRNA sense strand
ugugaggccuucauuugca

SEQ ID NO: 1900286 - RNA, 19 nt, Homo sapiens
  misc_RNA (1)...(19): siRNA sense strand
guacacccacaccuauuca

SEQ ID NO: 1900287 - RNA, 19 nt, Homo sapiens
  misc_RNA (1)...(19): siRNA sense strand
aaucaccuguagcagcaaa

SEQ ID NO: 1900288 - RNA, 19 nt, Homo sapiens
  misc_RNA (1)...(19): siRNA sense strand
auaacaaggcacacaagaa

SEQ ID NO: 1900289 - RNA, 19 nt, Homo sapiens
  misc_RNA (1)...(19): siRNA sense strand
agugugaggccuucauuug

SEQ ID NO: 1900290 - RNA, 19 nt, Homo sapiens
  misc_RNA (1)...(19): siRNA sense strand
ggagugaccccuucuugga

SEQ ID NO: 1900291 - RNA, 19 nt, Homo sapiens
  misc_RNA (1)...(19): siRNA sense strand
cacaugacaacugcuauga

SEQ ID NO: 1900292 - RNA, 19 nt, Homo sapiens
  misc_RNA (1)...(19): siRNA sense strand
acacaugacaacugcuaug

SEQ ID NO: 1900293 - RNA, 19 nt, Homo sapiens
  misc_RNA (1)...(19): siRNA sense strand
gagaagggcugcaacauuc

SEQ ID NO: 1900294 - RNA, 19 nt, Homo sapiens
  misc_RNA (1)...(19): siRNA sense strand
gcacacaguccuacaaaua

SEQ ID NO: 1900295 - RNA, 19 nt, Homo sapiens
  misc_RNA (1)...(19): siRNA sense strand
ggaagaacgcccugacaaa

SEQ ID NO: 1900296 - RNA, 19 nt, Homo sapiens
  misc_RNA (1)...(19): siRNA sense strand
ggagaagggcugcaacauu

SEQ ID NO: 1900297 - RNA, 19 nt, Homo sapiens
  misc_RNA (1)...(19): siRNA sense strand
agaacgcccugacaaacua

SEQ ID NO: 1900298 - RNA, 19 nt, Homo sapiens
  misc_RNA (1)...(19): siRNA sense strand
gaggcuugcuggaccuaaa

SEQ ID NO: 1900299 - RNA, 19 nt, Homo sapiens
  misc_RNA (1)...(19): siRNA sense strand
gaagaacgcccugacaaac

SEQ ID NO: 1900300 - RNA, 19 nt, Homo sapiens
  misc_RNA (1)...(19): siRNA sense strand
agagaaaccuacggagcua

SEQ ID NO: 1900301 - RNA, 19 nt, Homo sapiens
  misc_RNA (1)...(19): siRNA sense strand
gggaagaacgcccugacaa

SEQ ID NO: 1900302 - RNA, 19 nt, Homo sapiens
  misc_RNA (1)...(19): siRNA sense strand
ccaauacuuucccaacauc

SEQ ID NO: 1900303 - RNA, 19 nt, Homo sapiens
  misc_RNA (1)...(19): siRNA sense strand
ggagcuacaacccacagua

SEQ ID NO: 1900304 - RNA, 19 nt, Homo sapiens
  misc_RNA (1)...(19): siRNA sense strand
ucuacugccucaagagaaa

SEQ ID NO: 1900305 - RNA, 19 nt, Homo sapiens
  misc_RNA (1)...(19): siRNA sense strand
ccaaggauggcaccgauug

SEQ ID NO: 1900306 - RNA, 19 nt, Homo sapiens
  misc_RNA (1)...(19): siRNA sense strand
acacaguccuacaaauaca

SEQ ID NO: 1900307 - RNA, 19 nt, Homo sapiens
  misc_RNA (1)...(19): siRNA sense strand
uaccaauacuuucccaaca

SEQ ID NO: 1900308 - RNA, 19 nt, Homo sapiens
  misc_RNA (1)...(19): siRNA sense strand
ccaacauccucugcuccua

SEQ ID NO: 1900309 - RNA, 19 nt, Homo sapiens
  misc_RNA (1)...(19): siRNA sense strand
gggcccuucugccauguga

SEQ ID NO: 1900310 - RNA, 19 nt, Homo sapiens
  misc_RNA (1)...(19): siRNA sense strand
gacaaacuacggcuucuac

SEQ ID NO: 1900311 - RNA, 19 nt, Homo sapiens
  misc_RNA (1)...(19): siRNA sense strand
gaggagaagggcugcaaca

SEQ ID NO: 1900312 - RNA, 19 nt, Homo sapiens
  misc_RNA (1)...(19): siRNA sense strand
gcgcaugaccacugcuaug

SEQ ID NO: 1900313 - RNA, 19 nt, Homo sapiens
  misc_RNA (1)...(19): siRNA sense strand
gagcuacaacccacaguac

SEQ ID NO: 1900314 - RNA, 19 nt, Homo sapiens
  misc_RNA (1)...(19): siRNA sense strand
acaacccacaguaccaaua

SEQ ID NO: 1900315 - RNA, 19 nt, Homo sapiens
  misc_RNA (1)...(19): siRNA sense strand
gagaaggugacagggaaga

SEQ ID NO: 1900316 - RNA, 19 nt, Homo sapiens
  misc_RNA (1)...(19): siRNA sense strand
accggaagcucgucuacug

SEQ ID NO: 1900317 - RNA, 19 nt, Homo sapiens
  misc_RNA (1)...(19): siRNA sense strand
uagugugccugcugugcaa

SEQ ID NO: 1900318 - RNA, 19 nt, Homo sapiens
  misc_RNA (1)...(19): siRNA sense strand
caacccacaguaccaauac

SEQ ID NO: 1900319 - RNA, 19 nt, Homo sapiens
  misc_RNA (1)...(19): siRNA sense strand
ugacaaacuacggcuucua

SEQ ID NO: 1900320 - RNA, 19 nt, Homo sapiens
  misc_RNA (1)...(19): siRNA sense strand
gggcgcaugaccacugcua

SEQ ID NO: 1900321 - RNA, 19 nt, Homo sapiens
  misc_RNA (1)...(19): siRNA sense strand
gaaggugacagggaagaac

SEQ ID NO: 1900322 - RNA, 19 nt, Homo sapiens
  misc_RNA (1)...(19): siRNA sense strand
gcugcaacauucgcacaca

SEQ ID NO: 1900323 - RNA, 19 nt, Homo sapiens
  misc_RNA (1)...(19): siRNA sense strand
ggaaccagguguccgagua

SEQ ID NO: 1900324 - RNA, 19 nt, Homo sapiens
  misc_RNA (1)...(19): siRNA sense strand
gcuaucauauucagcauuu

SEQ ID NO: 1900325 - RNA, 19 nt, Homo sapiens
  misc_RNA (1)...(19): siRNA sense strand
ggacgggccugacagauuc

SEQ ID NO: 1900326 - RNA, 19 nt, Homo sapiens
  misc_RNA (1)...(19): siRNA sense strand
ccacagacauguccaaaca

SEQ ID NO: 1900327 - RNA, 19 nt, Homo sapiens
  misc_RNA (1)...(19): siRNA sense strand
agagacagcuuuagccaaa

SEQ ID NO: 1900328 - RNA, 19 nt, Homo sapiens
  misc_RNA (1)...(19): siRNA sense strand
ccucacagcuaucauauuc

SEQ ID NO: 1900329 - RNA, 19 nt, Homo sapiens
  misc_RNA (1)...(19): siRNA sense strand
ggaguugccugacacugaa

SEQ ID NO: 1900330 - RNA, 19 nt, Homo sapiens
  misc_RNA (1)...(19): siRNA sense strand
ccaaccaguuucugauuaa

SEQ ID NO: 1900331 - RNA, 19 nt, Homo sapiens
  misc_RNA (1)...(19): siRNA sense strand
ggaagaggaugaggaggaa

SEQ ID NO: 1900332 - RNA, 19 nt, Homo sapiens
  misc_RNA (1)...(19): siRNA sense strand
ggagaggacaugauuguga

SEQ ID NO: 1900333 - RNA, 19 nt, Homo sapiens
  misc_RNA (1)...(19): siRNA sense strand
ggcagaagcuggcauugga

SEQ ID NO: 1900334 - RNA, 19 nt, Homo sapiens
  misc_RNA (1)...(19): siRNA sense strand
gaauccaggucuugcagaa

SEQ ID NO: 1900335 - RNA, 19 nt, Homo sapiens
  misc_RNA (1)...(19): siRNA sense strand
gagauggccuccaacaagu

SEQ ID NO: 1900336 - RNA, 19 nt, Homo sapiens
  misc_RNA (1)...(19): siRNA sense strand
caaagaggccuuggaguug

SEQ ID NO: 1900337 - RNA, 19 nt, Homo sapiens
  misc_RNA (1)...(19): siRNA sense strand
aauccuggcugcccucuuu

SEQ ID NO: 1900338 - RNA, 19 nt, Homo sapiens
  misc_RNA (1)...(19): siRNA sense strand
uccaaccaguuucugauua

SEQ ID NO: 1900339 - RNA, 19 nt, Homo sapiens
  misc_RNA (1)...(19): siRNA sense strand
ccugacagauuccaguuug

SEQ ID NO: 1900340 - RNA, 19 nt, Homo sapiens
  misc_RNA (1)...(19): siRNA sense strand
gagcgggaccugcugaaga

SEQ ID NO: 1900341 - RNA, 19 nt, Homo sapiens
  misc_RNA (1)...(19): siRNA sense strand
cagacacacuggccaccua

SEQ ID NO: 1900342 - RNA, 19 nt, Homo sapiens
  misc_RNA (1)...(19): siRNA sense strand
gggaccugcugaagacauu

SEQ ID NO: 1900343 - RNA, 19 nt, Homo sapiens
  misc_RNA (1)...(19): siRNA sense strand
uagaagacaccaacaagug

SEQ ID NO: 1900344 - RNA, 19 nt, Homo sapiens
  misc_RNA (1)...(19): siRNA sense strand
gggacgggccugacagauu

SEQ ID NO: 1900345 - RNA, 19 nt, Homo sapiens
  misc_RNA (1)...(19): siRNA sense strand
caagguggcggacguaagu

SEQ ID NO: 1900346 - RNA, 19 nt, Homo sapiens
  misc_RNA (1)...(19): siRNA sense strand
ucacagcuaucauauucag

SEQ ID NO: 1900347 - RNA, 19 nt, Homo sapiens
  misc_RNA (1)...(19): siRNA sense strand
acagacauguccaaacaca

SEQ ID NO: 1900348 - RNA, 19 nt, Homo sapiens
  misc_RNA (1)...(19): siRNA sense strand
ggguuucauugacuacauu

SEQ ID NO: 1900349 - RNA, 19 nt, Homo sapiens
  misc_RNA (1)...(19): siRNA sense strand
caucauggccgaguucuuc

SEQ ID NO: 1900350 - RNA, 19 nt, Homo sapiens
  misc_RNA (1)...(19): siRNA sense strand
gcaacuggccaaggagcua

SEQ ID NO: 1900351 - RNA, 19 nt, Homo sapiens
  misc_RNA (1)...(19): siRNA sense strand
acucagacguggcgcuuau

SEQ ID NO: 1900352 - RNA, 19 nt, Homo sapiens
  misc_RNA (1)...(19): siRNA sense strand
ccaccuaccugcugaugcu

SEQ ID NO: 1900353 - RNA, 19 nt, Homo sapiens
  misc_RNA (1)...(19): siRNA sense strand
gcuagaagacaccaacaag

SEQ ID NO: 1900354 - RNA, 19 nt, Homo sapiens
  misc_RNA (1)...(19): siRNA sense strand
aggagcaacuggccaagga

SEQ ID NO: 1900355 - RNA, 19 nt, Homo sapiens
  misc_RNA (1)...(19): siRNA sense strand
ugacagauuccaguuugaa

SEQ ID NO: 1900356 - RNA, 19 nt, Homo sapiens
  misc_RNA (1)...(19): siRNA sense strand
ccagguggguuucauugac

SEQ ID NO: 1900357 - RNA, 19 nt, Homo sapiens
  misc_RNA (1)...(19): siRNA sense strand
gcugaagacauuccagauc

SEQ ID NO: 1900358 - RNA, 19 nt, Homo sapiens
  misc_RNA (1)...(19): siRNA sense strand
ggaggcagaggaagaggau

SEQ ID NO: 1900359 - RNA, 19 nt, Homo sapiens
  misc_RNA (1)...(19): siRNA sense strand
uggacacgcuggaggacaa

SEQ ID NO: 1900360 - RNA, 19 nt, Homo sapiens
  misc_RNA (1)...(19): siRNA sense strand
ugauuaacaccaacucaga

SEQ ID NO: 1900361 - RNA, 19 nt, Homo sapiens
  misc_RNA (1)...(19): siRNA sense strand
uccaacagcgcuucuauuc

SEQ ID NO: 1900362 - RNA, 19 nt, Homo sapiens
  misc_RNA (1)...(19): siRNA sense strand
acauggugcuggccacaga

SEQ ID NO: 1900363 - RNA, 19 nt, Homo sapiens
  misc_RNA (1)...(19): siRNA sense strand
ucacagacuuggaaauccu

SEQ ID NO: 1900364 - RNA, 19 nt, Homo sapiens
  misc_RNA (1)...(19): siRNA sense strand
guucacagacuuggaaauc

SEQ ID NO: 1900365 - RNA, 19 nt, Homo sapiens
  misc_RNA (1)...(19): siRNA sense strand
ugacccaccuguccgaaac

SEQ ID NO: 1900366 - RNA, 19 nt, Homo sapiens
  misc_RNA (1)...(19): siRNA sense strand
agagaacugcgauaucuuc

SEQ ID NO: 1900367 - RNA, 19 nt, Homo sapiens
  misc_RNA (1)...(19): siRNA sense strand
acguggcgcuuauguacaa

SEQ ID NO: 1900368 - RNA, 19 nt, Homo sapiens
  misc_RNA (1)...(19): siRNA sense strand
gaaccagguguccgaguac

SEQ ID NO: 1900369 - RNA, 19 nt, Homo sapiens
  misc_RNA (1)...(19): siRNA sense strand
gcgcgaguccuuccuguac

SEQ ID NO: 1900370 - RNA, 19 nt, Homo sapiens
  misc_RNA (1)...(19): siRNA sense strand
ggccagcgaccuacaugga

SEQ ID NO: 1900371 - RNA, 19 nt, Homo sapiens
  misc_RNA (1)...(19): siRNA sense strand
cagcccaugucccggauca

SEQ ID NO: 1900372 - RNA, 19 nt, Homo sapiens
  misc_RNA (1)...(19): siRNA sense strand
ccagaucccagcagacaca

SEQ ID NO: 1900373 - RNA, 19 nt, Homo sapiens
  misc_RNA (1)...(19): siRNA sense strand
uggaguugccugacacuga

SEQ ID NO: 1900374 - RNA, 19 nt, Homo sapiens
  misc_RNA (1)...(19): siRNA sense strand
gagagugguaccagagcaa

SEQ ID NO: 1900375 - RNA, 19 nt, Homo sapiens
  misc_RNA (1)...(19): siRNA sense strand
ucgacaaccagaggacuua

SEQ ID NO: 1900376 - RNA, 19 nt, Homo sapiens
  misc_RNA (1)...(19): siRNA sense strand
gggaagagacagcuuuagc

SEQ ID NO: 1900377 - RNA, 19 nt, Homo sapiens
  misc_RNA (1)...(19): siRNA sense strand
gcuuugaccuggaaaaugg

SEQ ID NO: 1900378 - RNA, 19 nt, Homo sapiens
  misc_RNA (1)...(19): siRNA sense strand
gaacuccuguccccugaag

SEQ ID NO: 1900379 - RNA, 19 nt, Homo sapiens
  misc_RNA (1)...(19): siRNA sense strand
agacguggcgcuuauguac

SEQ ID NO: 1900380 - RNA, 19 nt, Homo sapiens
  misc_RNA (1)...(19): siRNA sense strand
gauggccuccaacaaguuc

SEQ ID NO: 1900381 - RNA, 19 nt, Homo sapiens
  misc_RNA (1)...(19): siRNA sense strand
ggaugaggaggaagaagag

SEQ ID NO: 1900382 - RNA, 19 nt, Homo sapiens
  misc_RNA (1)...(19): siRNA sense strand
ggaggaggcagaggaagag

SEQ ID NO: 1900383 - RNA, 19 nt, Homo sapiens
  misc_RNA (1)...(19): siRNA sense strand
cauccaacagcgcuucuau

SEQ ID NO: 1900384 - RNA, 19 nt, Homo sapiens
  misc_RNA (1)...(19): siRNA sense strand
ccucggugcuggagaacca

SEQ ID NO: 1900385 - RNA, 19 nt, Homo sapiens
  misc_RNA (1)...(19): siRNA sense strand
ccggaucaguggccuacau

SEQ ID NO: 1900386 - RNA, 19 nt, Homo sapiens
  misc_RNA (1)...(19): siRNA sense strand
acugcgauaucuuccagaa

SEQ ID NO: 1900387 - RNA, 19 nt, Homo sapiens
  misc_RNA (1)...(19): siRNA sense strand
cagacguggcgcuuaugua

SEQ ID NO: 1900388 - RNA, 19 nt, Homo sapiens
  misc_RNA (1)...(19): siRNA sense strand
cuagaagacaccaacaagu

SEQ ID NO: 1900389 - RNA, 19 nt, Homo sapiens
  misc_RNA (1)...(19): siRNA sense strand
ucacuaccacgccaaugug

SEQ ID NO: 1900390 - RNA, 19 nt, Homo sapiens
  misc_RNA (1)...(19): siRNA sense strand
ggacuuaccccucgacaac

SEQ ID NO: 1900391 - RNA, 19 nt, Homo sapiens
  misc_RNA (1)...(19): siRNA sense strand
uaccacaacagccuacaug

SEQ ID NO: 1900392 - RNA, 19 nt, Homo sapiens
  misc_RNA (1)...(19): siRNA sense strand
ggaaagagaugagaaggua

SEQ ID NO: 1900393 - RNA, 19 nt, Homo sapiens
  misc_RNA (1)...(19): siRNA sense strand
gagaagaaguugcccagua

SEQ ID NO: 1900394 - RNA, 19 nt, Homo sapiens
  misc_RNA (1)...(19): siRNA sense strand
gaagaaauauggagacaag

SEQ ID NO: 1900395 - RNA, 19 nt, Homo sapiens
  misc_RNA (1)...(19): siRNA sense strand
caaaucaucuuguaacugu

SEQ ID NO: 1900396 - RNA, 19 nt, Homo sapiens
  misc_RNA (1)...(19): siRNA sense strand
ggucaaagacaucauauuu

SEQ ID NO: 1900397 - RNA, 19 nt, Homo sapiens
  misc_RNA (1)...(19): siRNA sense strand
gaaaggcaaggaacacaua

SEQ ID NO: 1900398 - RNA, 19 nt, Homo sapiens
  misc_RNA (1)...(19): siRNA sense strand
gagaaugaauugauguaug

SEQ ID NO: 1900399 - RNA, 19 nt, Homo sapiens
  misc_RNA (1)...(19): siRNA sense strand
gaaugugaggugauaaaua

SEQ ID NO: 1900400 - RNA, 19 nt, Homo sapiens
  misc_RNA (1)...(19): siRNA sense strand
gagaugggcuuugcuggaa

SEQ ID NO: 1900401 - RNA, 19 nt, Homo sapiens
  misc_RNA (1)...(19): siRNA sense strand
gaugcuaaaggacuuauua

SEQ ID NO: 1900402 - RNA, 19 nt, Homo sapiens
  misc_RNA (1)...(19): siRNA sense strand
uaaagaaggaguugaaugu

SEQ ID NO: 1900403 - RNA, 19 nt, Homo sapiens
  misc_RNA (1)...(19): siRNA sense strand
agaagaaguugcccaguau

SEQ ID NO: 1900404 - RNA, 19 nt, Homo sapiens
  misc_RNA (1)...(19): siRNA sense strand
gcuagagaaugaauugaug

SEQ ID NO: 1900405 - RNA, 19 nt, Homo sapiens
  misc_RNA (1)...(19): siRNA sense strand
gccaagaccuacuacaugu

SEQ ID NO: 1900406 - RNA, 19 nt, Homo sapiens
  misc_RNA (1)...(19): siRNA sense strand
ggagacaagaggauuauug

SEQ ID NO: 1900407 - RNA, 19 nt, Homo sapiens
  misc_RNA (1)...(19): siRNA sense strand
gcaaggaacacauauaacu

SEQ ID NO: 1900408 - RNA, 19 nt, Homo sapiens
  misc_RNA (1)...(19): siRNA sense strand
uaacugugguuucccauuc

SEQ ID NO: 1900409 - RNA, 19 nt, Homo sapiens
  misc_RNA (1)...(19): siRNA sense strand
gagacaagaggauuauuga

SEQ ID NO: 1900410 - RNA, 19 nt, Homo sapiens
  misc_RNA (1)...(19): siRNA sense strand
gcagugcuaucuaaagaag

SEQ ID NO: 1900411 - RNA, 19 nt, Homo sapiens
  misc_RNA (1)...(19): siRNA sense strand
gaagguauuucugcuugga

SEQ ID NO: 1900412 - RNA, 19 nt, Homo sapiens
  misc_RNA (1)...(19): siRNA sense strand
aguaggagcugaaaucugu

SEQ ID NO: 1900413 - RNA, 19 nt, Homo sapiens
  misc_RNA (1)...(19): siRNA sense strand
aagaaggaguugaauguga

SEQ ID NO: 1900414 - RNA, 19 nt, Homo sapiens
  misc_RNA (1)...(19): siRNA sense strand
ggaauucagaggaugcuaa

SEQ ID NO: 1900415 - RNA, 19 nt, Homo sapiens
  misc_RNA (1)...(19): siRNA sense strand
gaaguugcccaguaugaug

SEQ ID NO: 1900416 - RNA, 19 nt, Homo sapiens
  misc_RNA (1)...(19): siRNA sense strand
caaagauucuagaggacaa

SEQ ID NO: 1900417 - RNA, 19 nt, Homo sapiens
  misc_RNA (1)...(19): siRNA sense strand
uaaaucaggguauggauga

SEQ ID NO: 1900418 - RNA, 19 nt, Homo sapiens
  misc_RNA (1)...(19): siRNA sense strand
gacaguucgugaugcuaua

SEQ ID NO: 1900419 - RNA, 19 nt, Homo sapiens
  misc_RNA (1)...(19): siRNA sense strand
gaugggcuuugcuggaauu

SEQ ID NO: 1900420 - RNA, 19 nt, Homo sapiens
  misc_RNA (1)...(19): siRNA sense strand
agaaugaauugauguaugg

SEQ ID NO: 1900421 - RNA, 19 nt, Homo sapiens
  misc_RNA (1)...(19): siRNA sense strand
gcaagccauugaccagguu

SEQ ID NO: 1900422 - RNA, 19 nt, Homo sapiens
  misc_RNA (1)...(19): siRNA sense strand
ggaagguccugcguucaau

SEQ ID NO: 1900423 - RNA, 19 nt, Homo sapiens
  misc_RNA (1)...(19): siRNA sense strand
gaauucagaggaugcuaaa

SEQ ID NO: 1900424 - RNA, 19 nt, Homo sapiens
  misc_RNA (1)...(19): siRNA sense strand
gacaagaggauuauugaca

SEQ ID NO: 1900425 - RNA, 19 nt, Homo sapiens
  misc_RNA (1)...(19): siRNA sense strand
cauagaagccagugucaug

SEQ ID NO: 1900426 - RNA, 19 nt, Homo sapiens
  misc_RNA (1)...(19): siRNA sense strand
augaggagcuggaaagaga

SEQ ID NO: 1900427 - RNA, 19 nt, Homo sapiens
  misc_RNA (1)...(19): siRNA sense strand
gcccauuugugaauuuaug

SEQ ID NO: 1900428 - RNA, 19 nt, Homo sapiens
  misc_RNA (1)...(19): siRNA sense strand
aaucagccauucgggauaa

SEQ ID NO: 1900429 - RNA, 19 nt, Homo sapiens
  misc_RNA (1)...(19): siRNA sense strand
gcacugcccaggcuuaaag

SEQ ID NO: 1900430 - RNA, 19 nt, Homo sapiens
  misc_RNA (1)...(19): siRNA sense strand
gugcuuugcugccugguau

SEQ ID NO: 1900431 - RNA, 19 nt, Homo sapiens
  misc_RNA (1)...(19): siRNA sense strand
uauugacacucccauauca

SEQ ID NO: 1900432 - RNA, 19 nt, Homo sapiens
  misc_RNA (1)...(19): siRNA sense strand
uaaauaugcguaccauuag

SEQ ID NO: 1900433 - RNA, 19 nt, Homo sapiens
  misc_RNA (1)...(19): siRNA sense strand
gaagcucagucaaaagauu

SEQ ID NO: 1900434 - RNA, 19 nt, Homo sapiens
  misc_RNA (1)...(19): siRNA sense strand
ccauugaccagguuauaaa

SEQ ID NO: 1900435 - RNA, 19 nt, Homo sapiens
  misc_RNA (1)...(19): siRNA sense strand
cgagggcuguggaagaaau

SEQ ID NO: 1900436 - RNA, 19 nt, Homo sapiens
  misc_RNA (1)...(19): siRNA sense strand
gaagguccugcguucaauu

SEQ ID NO: 1900437 - RNA, 19 nt, Homo sapiens
  misc_RNA (1)...(19): siRNA sense strand
aaagagaugagaagguauu

SEQ ID NO: 1900438 - RNA, 19 nt, Homo sapiens
  misc_RNA (1)...(19): siRNA sense strand
aggcaaggaacacauauaa

SEQ ID NO: 1900439 - RNA, 19 nt, Homo sapiens
  misc_RNA (1)...(19): siRNA sense strand
aaauaugcguaccauuaga

SEQ ID NO: 1900440 - RNA, 19 nt, Homo sapiens
  misc_RNA (1)...(19): siRNA sense strand
gucgagggcuguggaagaa

SEQ ID NO: 1900441 - RNA, 19 nt, Homo sapiens
  misc_RNA (1)...(19): siRNA sense strand
ggaaaagccaaaauagaaa

SEQ ID NO: 1900442 - RNA, 19 nt, Homo sapiens
  misc_RNA (1)...(19): siRNA sense strand
gauuauugacacucccaua

SEQ ID NO: 1900443 - RNA, 19 nt, Homo sapiens
  misc_RNA (1)...(19): siRNA sense strand
ucaggucaaagacaucaua

SEQ ID NO: 1900444 - RNA, 19 nt, Homo sapiens
  misc_RNA (1)...(19): siRNA sense strand
caaggaacacauauaacug

SEQ ID NO: 1900445 - RNA, 19 nt, Homo sapiens
  misc_RNA (1)...(19): siRNA sense strand
gaagaaguugcccaguaug

SEQ ID NO: 1900446 - RNA, 19 nt, Homo sapiens
  misc_RNA (1)...(19): siRNA sense strand
gaaagagaugagaagguau

SEQ ID NO: 1900447 - RNA, 19 nt, Homo sapiens
  misc_RNA (1)...(19): siRNA sense strand
uaucagagaugggcuuugc

SEQ ID NO: 1900448 - RNA, 19 nt, Homo sapiens
  misc_RNA (1)...(19): siRNA sense strand
gaagccagugucaugaaga

SEQ ID NO: 1900449 - RNA, 19 nt, Homo sapiens
  misc_RNA (1)...(19): siRNA sense strand
uauggagacaagaggauua

SEQ ID NO: 1900450 - RNA, 19 nt, Homo sapiens
  misc_RNA (1)...(19): siRNA sense strand
ugaccagguuauaaacuca

SEQ ID NO: 1900451 - RNA, 19 nt, Homo sapiens
  misc_RNA (1)...(19): siRNA sense strand
gccauugaccagguuauaa

SEQ ID NO: 1900452 - RNA, 19 nt, Homo sapiens
  misc_RNA (1)...(19): siRNA sense strand
ggugcuagagaaugaauug

SEQ ID NO: 1900453 - RNA, 19 nt, Homo sapiens
  misc_RNA (1)...(19): siRNA sense strand
caagaggauuauugacacu

SEQ ID NO: 1900454 - RNA, 19 nt, Homo sapiens
  misc_RNA (1)...(19): siRNA sense strand
cuaaagaaggaguugaaug

SEQ ID NO: 1900455 - RNA, 19 nt, Homo sapiens
  misc_RNA (1)...(19): siRNA sense strand
cuuauuaaaucagccauuc

SEQ ID NO: 1900456 - RNA, 19 nt, Homo sapiens
  misc_RNA (1)...(19): siRNA sense strand
gggcuuugcuggaauugcu

SEQ ID NO: 1900457 - RNA, 19 nt, Homo sapiens
  misc_RNA (1)...(19): siRNA sense strand
cggcccauuugugaauuua

SEQ ID NO: 1900458 - RNA, 19 nt, Homo sapiens
  misc_RNA (1)...(19): siRNA sense strand
gauggggcauacaagguua

SEQ ID NO: 1900459 - RNA, 19 nt, Homo sapiens
  misc_RNA (1)...(19): siRNA sense strand
ggaagaaauauggagacaa

SEQ ID NO: 1900460 - RNA, 19 nt, Homo sapiens
  misc_RNA (1)...(19): siRNA sense strand
gauaaauaugcguaccauu

SEQ ID NO: 1900461 - RNA, 19 nt, Homo sapiens
  misc_RNA (1)...(19): siRNA sense strand
ugacaguucgugaugcuau

SEQ ID NO: 1900462 - RNA, 19 nt, Homo sapiens
  misc_RNA (1)...(19): siRNA sense strand
gaaaucugugccaggauca

SEQ ID NO: 1900463 - RNA, 19 nt, Homo sapiens
  misc_RNA (1)...(19): siRNA sense strand
agaggaugcuaaaggacuu

SEQ ID NO: 1900464 - RNA, 19 nt, Homo sapiens
  misc_RNA (1)...(19): siRNA sense strand
gguggucagucccuggaau

SEQ ID NO: 1900465 - RNA, 19 nt, Homo sapiens
  misc_RNA (1)...(19): siRNA sense strand
gagggcuguggaagaaaua

SEQ ID NO: 1900466 - RNA, 19 nt, Homo sapiens
  misc_RNA (1)...(19): siRNA sense strand
aagaaguugcccaguauga

SEQ ID NO: 1900467 - RNA, 19 nt, Homo sapiens
  misc_RNA (1)...(19): siRNA sense strand
ugauaaauaugcguaccau

SEQ ID NO: 1900468 - RNA, 19 nt, Homo sapiens
  misc_RNA (1)...(19): siRNA sense strand
gaggaugcuaaaggacuua

SEQ ID NO: 1900469 - RNA, 19 nt, Homo sapiens
  misc_RNA (1)...(19): siRNA sense strand
gcaggugacaguucgugau

SEQ ID NO: 1900470 - RNA, 19 nt, Homo sapiens
  misc_RNA (1)...(19): siRNA sense strand
aguugaaugugaggugaua

SEQ ID NO: 1900471 - RNA, 19 nt, Homo sapiens
  misc_RNA (1)...(19): siRNA sense strand
uggaaaagccaaaauagaa

SEQ ID NO: 1900472 - RNA, 19 nt, Homo sapiens
  misc_RNA (1)...(19): siRNA sense strand
gacacucccauaucagaga

SEQ ID NO: 1900473 - RNA, 19 nt, Homo sapiens
  misc_RNA (1)...(19): siRNA sense strand
cugaugucccuaugccuua

SEQ ID NO: 1900474 - RNA, 19 nt, Homo sapiens
  misc_RNA (1)...(19): siRNA sense strand
ccuggaugcuccugcuguu

SEQ ID NO: 1900475 - RNA, 19 nt, Homo sapiens
  misc_RNA (1)...(19): siRNA sense strand
ggaguaggagcugaaaucu

SEQ ID NO: 1900476 - RNA, 19 nt, Homo sapiens
  misc_RNA (1)...(19): siRNA sense strand
uuagaccaauggacaugga

SEQ ID NO: 1900477 - RNA, 19 nt, Homo sapiens
  misc_RNA (1)...(19): siRNA sense strand
agugcuaucuaaagaagga

SEQ ID NO: 1900478 - RNA, 19 nt, Homo sapiens
  misc_RNA (1)...(19): siRNA sense strand
ugguggugcuagagaauga

SEQ ID NO: 1900479 - RNA, 19 nt, Homo sapiens
  misc_RNA (1)...(19): siRNA sense strand
cagcugccaagaccuacua

SEQ ID NO: 1900480 - RNA, 19 nt, Homo sapiens
  misc_RNA (1)...(19): siRNA sense strand
ggaugaggagcuggaaaga

SEQ ID NO: 1900481 - RNA, 19 nt, Homo sapiens
  misc_RNA (1)...(19): siRNA sense strand
ggugacaguucgugaugcu

SEQ ID NO: 1900482 - RNA, 19 nt, Homo sapiens
  misc_RNA (1)...(19): siRNA sense strand
ucuuguaacuguggaagga

SEQ ID NO: 1900483 - RNA, 19 nt, Homo sapiens
  misc_RNA (1)...(19): siRNA sense strand
gccugugccuauagucuuc

SEQ ID NO: 1900484 - RNA, 19 nt, Homo sapiens
  misc_RNA (1)...(19): siRNA sense strand
uggaagaaauauggagaca

SEQ ID NO: 1900485 - RNA, 19 nt, Homo sapiens
  misc_RNA (1)...(19): siRNA sense strand
agaagccagugucaugaag

SEQ ID NO: 1900486 - RNA, 19 nt, Homo sapiens
  misc_RNA (1)...(19): siRNA sense strand
uagaagccagugucaugaa

SEQ ID NO: 1900487 - RNA, 19 nt, Homo sapiens
  misc_RNA (1)...(19): siRNA sense strand
cagugguggugcuagagaa

SEQ ID NO: 1900488 - RNA, 19 nt, Homo sapiens
  misc_RNA (1)...(19): siRNA sense strand
uucagaggaugcuaaagga

SEQ ID NO: 1900489 - RNA, 19 nt, Homo sapiens
  misc_RNA (1)...(19): siRNA sense strand
ucuccgggcugcugaagag

SEQ ID NO: 1900490 - RNA, 19 nt, Homo sapiens
  misc_RNA (1)...(19): siRNA sense strand
aaggaacacauauaacugu

SEQ ID NO: 1900491 - RNA, 19 nt, Homo sapiens
  misc_RNA (1)...(19): siRNA sense strand
ggucagucccuggaauuca

SEQ ID NO: 1900492 - RNA, 19 nt, Homo sapiens
  misc_RNA (1)...(19): siRNA sense strand
ggacucccauucacauuua

SEQ ID NO: 1900493 - RNA, 19 nt, Homo sapiens
  misc_RNA (1)...(19): siRNA sense strand
gaaacuuccuggucaugua

SEQ ID NO: 1900494 - RNA, 19 nt, Homo sapiens
  misc_RNA (1)...(19): siRNA sense strand
gaacuaaucaucagcuaga

SEQ ID NO: 1900495 - RNA, 19 nt, Homo sapiens
  misc_RNA (1)...(19): siRNA sense strand
gcaacuggauccucucuuc

SEQ ID NO: 1900496 - RNA, 19 nt, Homo sapiens
  misc_RNA (1)...(19): siRNA sense strand
caacaaaacuccacucgaa

SEQ ID NO: 1900497 - RNA, 19 nt, Homo sapiens
  misc_RNA (1)...(19): siRNA sense strand
gauccucucuucagccauu

SEQ ID NO: 1900498 - RNA, 19 nt, Homo sapiens
  misc_RNA (1)...(19): siRNA sense strand
gcuauggacugaugaucuu

SEQ ID NO: 1900499 - RNA, 19 nt, Homo sapiens
  misc_RNA (1)...(19): siRNA sense strand
caacuugucccacuuagau

SEQ ID NO: 1900500 - RNA, 19 nt, Homo sapiens
  misc_RNA (1)...(19): siRNA sense strand
uguaugugauugucagaua

SEQ ID NO: 1900501 - RNA, 19 nt, Homo sapiens
  misc_RNA (1)...(19): siRNA sense strand
ggauagaacuaaucaucag

SEQ ID NO: 1900502 - RNA, 19 nt, Homo sapiens
  misc_RNA (1)...(19): siRNA sense strand
ggaaccauccuuugcaaga

SEQ ID NO: 1900503 - RNA, 19 nt, Homo sapiens
  misc_RNA (1)...(19): siRNA sense strand
gaaccauccuuugcaagau

SEQ ID NO: 1900504 - RNA, 19 nt, Homo sapiens
  misc_RNA (1)...(19): siRNA sense strand
ccaugaguguugaucgaua

SEQ ID NO: 1900505 - RNA, 19 nt, Homo sapiens
  misc_RNA (1)...(19): siRNA sense strand
aaacgaugcuucagagagu

SEQ ID NO: 1900506 - RNA, 19 nt, Homo sapiens
  misc_RNA (1)...(19): siRNA sense strand
acacuaacauucucucauc

SEQ ID NO: 1900507 - RNA, 19 nt, Homo sapiens
  misc_RNA (1)...(19): siRNA sense strand
gaguguugaucgauacauu

SEQ ID NO: 1900508 - RNA, 19 nt, Homo sapiens
  misc_RNA (1)...(19): siRNA sense strand
uuccauagauuguacacua

SEQ ID NO: 1900509 - RNA, 19 nt, Homo sapiens
  misc_RNA (1)...(19): siRNA sense strand
ggucaacuugucccacuua

SEQ ID NO: 1900510 - RNA, 19 nt, Homo sapiens
  misc_RNA (1)...(19): siRNA sense strand
caucuucgccuucauuaug

SEQ ID NO: 1900511 - RNA, 19 nt, Homo sapiens
  misc_RNA (1)...(19): siRNA sense strand
gggaaaaccucgugaagau

SEQ ID NO: 1900512 - RNA, 19 nt, Homo sapiens
  misc_RNA (1)...(19): siRNA sense strand
gaagaucuguguuuucauc

SEQ ID NO: 1900513 - RNA, 19 nt, Homo sapiens
  misc_RNA (1)...(19): siRNA sense strand
ggcagucccuccaugauca

SEQ ID NO: 1900514 - RNA, 19 nt, Homo sapiens
  misc_RNA (1)...(19): siRNA sense strand
ucagauacaccaagaugaa

SEQ ID NO: 1900515 - RNA, 19 nt, Homo sapiens
  misc_RNA (1)...(19): siRNA sense strand
aaccauccuuugcaagaua

SEQ ID NO: 1900516 - RNA, 19 nt, Homo sapiens
  misc_RNA (1)...(19): siRNA sense strand
ccaccaacaucuacauuuu

SEQ ID NO: 1900517 - RNA, 19 nt, Homo sapiens
  misc_RNA (1)...(19): siRNA sense strand
gcucuagguuacacaaaca

SEQ ID NO: 1900518 - RNA, 19 nt, Homo sapiens
  misc_RNA (1)...(19): siRNA sense strand
uaacauguucaccagcaua

SEQ ID NO: 1900519 - RNA, 19 nt, Homo sapiens
  misc_RNA (1)...(19): siRNA sense strand
guucauggcuacaacaaaa

SEQ ID NO: 1900520 - RNA, 19 nt, Homo sapiens
  misc_RNA (1)...(19): siRNA sense strand
cccaaccucuuccaacauu

SEQ ID NO: 1900521 - RNA, 19 nt, Homo sapiens
  misc_RNA (1)...(19): siRNA sense strand
gaaaaggacaggaaucuuc

SEQ ID NO: 1900522 - RNA, 19 nt, Homo sapiens
  misc_RNA (1)...(19): siRNA sense strand
caggcaagguuccauagau

SEQ ID NO: 1900523 - RNA, 19 nt, Homo sapiens
  misc_RNA (1)...(19): siRNA sense strand
ugucaaggccuuagauuuc

SEQ ID NO: 1900524 - RNA, 19 nt, Homo sapiens
  misc_RNA (1)...(19): siRNA sense strand
ccaauacaguggauagaac

SEQ ID NO: 1900525 - RNA, 19 nt, Homo sapiens
  misc_RNA (1)...(19): siRNA sense strand
uuaaagccuugguuacaau

SEQ ID NO: 1900526 - RNA, 19 nt, Homo sapiens
  misc_RNA (1)...(19): siRNA sense strand
aggcaagguuccauagauu

SEQ ID NO: 1900527 - RNA, 19 nt, Homo sapiens
  misc_RNA (1)...(19): siRNA sense strand
ccauuggucuuccuguaau

SEQ ID NO: 1900528 - RNA, 19 nt, Homo sapiens
  misc_RNA (1)...(19): siRNA sense strand
cacauuuacgucaucauua

SEQ ID NO: 1900529 - RNA, 19 nt, Homo sapiens
  misc_RNA (1)...(19): siRNA sense strand
ucacauuuacgucaucauu

SEQ ID NO: 1900530 - RNA, 19 nt, Homo sapiens
  misc_RNA (1)...(19): siRNA sense strand
ggaacauggccauuuggaa

SEQ ID NO: 1900531 - RNA, 19 nt, Homo sapiens
  misc_RNA (1)...(19): siRNA sense strand
gcaagguuccauagauugu

SEQ ID NO: 1900532 - RNA, 19 nt, Homo sapiens
  misc_RNA (1)...(19): siRNA sense strand
gcacuucugcauugcucua

SEQ ID NO: 1900533 - RNA, 19 nt, Homo sapiens
  misc_RNA (1)...(19): siRNA sense strand
gaagacugccaccaacauc

SEQ ID NO: 1900534 - RNA, 19 nt, Homo sapiens
  misc_RNA (1)...(19): siRNA sense strand
uagaacuaaucaucagcua

SEQ ID NO: 1900535 - RNA, 19 nt, Homo sapiens
  misc_RNA (1)...(19): siRNA sense strand
ggugguggcuguguucauc

SEQ ID NO: 1900536 - RNA, 19 nt, Homo sapiens
  misc_RNA (1)...(19): siRNA sense strand
gccauuggucuuccuguaa

SEQ ID NO: 1900537 - RNA, 19 nt, Homo sapiens
  misc_RNA (1)...(19): siRNA sense strand
caugcucucuggcuccaaa

SEQ ID NO: 1900538 - RNA, 19 nt, Homo sapiens
  misc_RNA (1)...(19): siRNA sense strand
ggucauguaugugauuguc

SEQ ID NO: 1900539 - RNA, 19 nt, Homo sapiens
  misc_RNA (1)...(19): siRNA sense strand
caaccucuuccaacauuga

SEQ ID NO: 1900540 - RNA, 19 nt, Homo sapiens
  misc_RNA (1)...(19): siRNA sense strand
guuacaaucccagaaacua

SEQ ID NO: 1900541 - RNA, 19 nt, Homo sapiens
  misc_RNA (1)...(19): siRNA sense strand
ggccuuagauuuccguacu

SEQ ID NO: 1900542 - RNA, 19 nt, Homo sapiens
  misc_RNA (1)...(19): siRNA sense strand
uccauagauuguacacuaa

SEQ ID NO: 1900543 - RNA, 19 nt, Homo sapiens
  misc_RNA (1)...(19): siRNA sense strand
cccaguccuuuaugcauuu

SEQ ID NO: 1900544 - RNA, 19 nt, Homo sapiens
  misc_RNA (1)...(19): siRNA sense strand
acaggaaucuucgaaggau

SEQ ID NO: 1900545 - RNA, 19 nt, Homo sapiens
  misc_RNA (1)...(19): siRNA sense strand
cuaacauucucucauccaa

SEQ ID NO: 1900546 - RNA, 19 nt, Homo sapiens
  misc_RNA (1)...(19): siRNA sense strand
gaauucgucagaacacuag

SEQ ID NO: 1900547 - RNA, 19 nt, Homo sapiens
  misc_RNA (1)...(19): siRNA sense strand
cgaauucgucagaacacua

SEQ ID NO: 1900548 - RNA, 19 nt, Homo sapiens
  misc_RNA (1)...(19): siRNA sense strand
gacaggaaucuucgaagga

SEQ ID NO: 1900549 - RNA, 19 nt, Homo sapiens
  misc_RNA (1)...(19): siRNA sense strand
ccacucgaauucgucagaa

SEQ ID NO: 1900550 - RNA, 19 nt, Homo sapiens
  misc_RNA (1)...(19): siRNA sense strand
gccaccaacaucuacauuu

SEQ ID NO: 1900551 - RNA, 19 nt, Homo sapiens
  misc_RNA (1)...(19): siRNA sense strand
guggauagaacuaaucauc

SEQ ID NO: 1900552 - RNA, 19 nt, Homo sapiens
  misc_RNA (1)...(19): siRNA sense strand
caccaugaguguugaucga

SEQ ID NO: 1900553 - RNA, 19 nt, Homo sapiens
  misc_RNA (1)...(19): siRNA sense strand
gccagcaauugcacugaug

SEQ ID NO: 1900554 - RNA, 19 nt, Homo sapiens
  misc_RNA (1)...(19): siRNA sense strand
aaacuccacucgaauucgu

SEQ ID NO: 1900555 - RNA, 19 nt, Homo sapiens
  misc_RNA (1)...(19): siRNA sense strand
ccucaacccaguccuuuau

SEQ ID NO: 1900556 - RNA, 19 nt, Homo sapiens
  misc_RNA (1)...(19): siRNA sense strand
ucuuggcacuucugcauug

SEQ ID NO: 1900557 - RNA, 19 nt, Homo sapiens
  misc_RNA (1)...(19): siRNA sense strand
ucacgaucauggcccucua

SEQ ID NO: 1900558 - RNA, 19 nt, Homo sapiens
  misc_RNA (1)...(19): siRNA sense strand
cauagauuguacacuaaca

SEQ ID NO: 1900559 - RNA, 19 nt, Homo sapiens
  misc_RNA (1)...(19): siRNA sense strand
ggcaagguuccauagauug

SEQ ID NO: 1900560 - RNA, 19 nt, Homo sapiens
  misc_RNA (1)...(19): siRNA sense strand
gccaauacaguggauagaa

SEQ ID NO: 1900561 - RNA, 19 nt, Homo sapiens
  misc_RNA (1)...(19): siRNA sense strand
cauuaaagccuugguuaca

SEQ ID NO: 1900562 - RNA, 19 nt, Homo sapiens
  misc_RNA (1)...(19): siRNA sense strand
gauuguacacuaacauucu

SEQ ID NO: 1900563 - RNA, 19 nt, Homo sapiens
  misc_RNA (1)...(19): siRNA sense strand
ccauuuggaaccauccuuu

SEQ ID NO: 1900564 - RNA, 19 nt, Homo sapiens
  misc_RNA (1)...(19): siRNA sense strand
caagguuccauagauugua

SEQ ID NO: 1900565 - RNA, 19 nt, Homo sapiens
  misc_RNA (1)...(19): siRNA sense strand
cauguucaccagcauauuc

SEQ ID NO: 1900566 - RNA, 19 nt, Homo sapiens
  misc_RNA (1)...(19): siRNA sense strand
ucacggccaucacgaucau

SEQ ID NO: 1900567 - RNA, 19 nt, Homo sapiens
  misc_RNA (1)...(19): siRNA sense strand
uuuaugcauuucuggauga

SEQ ID NO: 1900568 - RNA, 19 nt, Homo sapiens
  misc_RNA (1)...(19): siRNA sense strand
auuaaagccuugguuacaa

SEQ ID NO: 1900569 - RNA, 19 nt, Homo sapiens
  misc_RNA (1)...(19): siRNA sense strand
caacuggauccucucuuca

SEQ ID NO: 1900570 - RNA, 19 nt, Homo sapiens
  misc_RNA (1)...(19): siRNA sense strand
ccaguacccugcccuucca

SEQ ID NO: 1900571 - RNA, 19 nt, Homo sapiens
  misc_RNA (1)...(19): siRNA sense strand
caugaguguugaucgauac

SEQ ID NO: 1900572 - RNA, 19 nt, Homo sapiens
  misc_RNA (1)...(19): siRNA sense strand
cgugugcuauggacugaug

SEQ ID NO: 1900573 - RNA, 19 nt, Homo sapiens
  misc_RNA (1)...(19): siRNA sense strand
agacugccaccaacaucua

SEQ ID NO: 1900574 - RNA, 19 nt, Homo sapiens
  misc_RNA (1)...(19): siRNA sense strand
auacaggcaagguuccaua

SEQ ID NO: 1900575 - RNA, 19 nt, Homo sapiens
  misc_RNA (1)...(19): siRNA sense strand
uacaguggauagaacuaau

SEQ ID NO: 1900576 - RNA, 19 nt, Homo sapiens
  misc_RNA (1)...(19): siRNA sense strand
cugcauugcucuagguuac

SEQ ID NO: 1900577 - RNA, 19 nt, Homo sapiens
  misc_RNA (1)...(19): siRNA sense strand
ugccagugcucaucauuac

SEQ ID NO: 1900578 - RNA, 19 nt, Homo sapiens
  misc_RNA (1)...(19): siRNA sense strand
ccuuccagagugugaauua

SEQ ID NO: 1900579 - RNA, 19 nt, Homo sapiens
  misc_RNA (1)...(19): siRNA sense strand
acccaguccuuuaugcauu

SEQ ID NO: 1900580 - RNA, 19 nt, Homo sapiens
  misc_RNA (1)...(19): siRNA sense strand
gcucucuggcuccaaagaa

SEQ ID NO: 1900581 - RNA, 19 nt, Homo sapiens
  misc_RNA (1)...(19): siRNA sense strand
gaucuguguuuucaucuuc

SEQ ID NO: 1900582 - RNA, 19 nt, Homo sapiens
  misc_RNA (1)...(19): siRNA sense strand
gggaacauggccauuugga

SEQ ID NO: 1900583 - RNA, 19 nt, Homo sapiens
  misc_RNA (1)...(19): siRNA sense strand
agccauuggucuuccugua

SEQ ID NO: 1900584 - RNA, 19 nt, Homo sapiens
  misc_RNA (1)...(19): siRNA sense strand
guuccugggucaacuuguc

SEQ ID NO: 1900585 - RNA, 19 nt, Homo sapiens
  misc_RNA (1)...(19): siRNA sense strand
aaacuuccuggucauguau

SEQ ID NO: 1900586 - RNA, 19 nt, Homo sapiens
  misc_RNA (1)...(19): siRNA sense strand
ucucucauccaaccuggua

SEQ ID NO: 1900587 - RNA, 19 nt, Homo sapiens
  misc_RNA (1)...(19): siRNA sense strand
ugucagauacaccaagaug

SEQ ID NO: 1900588 - RNA, 19 nt, Homo sapiens
  misc_RNA (1)...(19): siRNA sense strand
guaauguucauggcuacaa

SEQ ID NO: 1900589 - RNA, 19 nt, Homo sapiens
  misc_RNA (1)...(19): siRNA sense strand
gaaaaccucgugaagaucu

SEQ ID NO: 1900590 - RNA, 19 nt, Homo sapiens
  misc_RNA (1)...(19): siRNA sense strand
cuuccaacauugagcaaca

SEQ ID NO: 1900591 - RNA, 19 nt, Homo sapiens
  misc_RNA (1)...(19): siRNA sense strand
ccaaccucuuccaacauug

SEQ ID NO: 1900592 - RNA, 19 nt, Homo sapiens
  misc_RNA (1)...(19): siRNA sense strand
ggacaagccucguauuauu

SEQ ID NO: 1900593 - RNA, 19 nt, Homo sapiens
  misc_RNA (1)...(19): siRNA sense strand
ugacuucucugaaagauua

SEQ ID NO: 1900594 - RNA, 19 nt, Homo sapiens
  misc_RNA (1)...(19): siRNA sense strand
gaaauagaauugcuacaug

SEQ ID NO: 1900595 - RNA, 19 nt, Homo sapiens
  misc_RNA (1)...(19): siRNA sense strand
acaaauggguauccaauaa

SEQ ID NO: 1900596 - RNA, 19 nt, Homo sapiens
  misc_RNA (1)...(19): siRNA sense strand
gaccaguacuuucuaauga

SEQ ID NO: 1900597 - RNA, 19 nt, Homo sapiens
  misc_RNA (1)...(19): siRNA sense strand
agaaagaucuggugacuuc

SEQ ID NO: 1900598 - RNA, 19 nt, Homo sapiens
  misc_RNA (1)...(19): siRNA sense strand
ggacaaguuagaacaaaua

SEQ ID NO: 1900599 - RNA, 19 nt, Homo sapiens
  misc_RNA (1)...(19): siRNA sense strand
uaaagucucuguucuagau

SEQ ID NO: 1900600 - RNA, 19 nt, Homo sapiens
  misc_RNA (1)...(19): siRNA sense strand
ugaaacgucugaauacuga

SEQ ID NO: 1900601 - RNA, 19 nt, Homo sapiens
  misc_RNA (1)...(19): siRNA sense strand
caaaguggccuauacagaa

SEQ ID NO: 1900602 - RNA, 19 nt, Homo sapiens
  misc_RNA (1)...(19): siRNA sense strand
gaaguuggagcuaguguuu

SEQ ID NO: 1900603 - RNA, 19 nt, Homo sapiens
  misc_RNA (1)...(19): siRNA sense strand
gagagcuaaugguaacuua

SEQ ID NO: 1900604 - RNA, 19 nt, Homo sapiens
  misc_RNA (1)...(19): siRNA sense strand
gauaaagucucuguucuag

SEQ ID NO: 1900605 - RNA, 19 nt, Homo sapiens
  misc_RNA (1)...(19): siRNA sense strand
ggagugaguuggagaaucu

SEQ ID NO: 1900606 - RNA, 19 nt, Homo sapiens
  misc_RNA (1)...(19): siRNA sense strand
ggagaaggagauuauagua

SEQ ID NO: 1900607 - RNA, 19 nt, Homo sapiens
  misc_RNA (1)...(19): siRNA sense strand
ggacaagaauuucgaagac

SEQ ID NO: 1900608 - RNA, 19 nt, Homo sapiens
  misc_RNA (1)...(19): siRNA sense strand
gaacugcuguuuucuggua

SEQ ID NO: 1900609 - RNA, 19 nt, Homo sapiens
  misc_RNA (1)...(19): siRNA sense strand
uggagaaucugguccuuaa

SEQ ID NO: 1900610 - RNA, 19 nt, Homo sapiens
  misc_RNA (1)...(19): siRNA sense strand
gauggaaaccguaauccua

SEQ ID NO: 1900611 - RNA, 19 nt, Homo sapiens
  misc_RNA (1)...(19): siRNA sense strand
gaagcagauuauuaccaua

SEQ ID NO: 1900612 - RNA, 19 nt, Homo sapiens
  misc_RNA (1)...(19): siRNA sense strand
cuacauggcuguuuuauau

SEQ ID NO: 1900613 - RNA, 19 nt, Homo sapiens
  misc_RNA (1)...(19): siRNA sense strand
gaggacaaguuagaacaaa

SEQ ID NO: 1900614 - RNA, 19 nt, Homo sapiens
  misc_RNA (1)...(19): siRNA sense strand
ccuguggugucucgaauua

SEQ ID NO: 1900615 - RNA, 19 nt, Homo sapiens
  misc_RNA (1)...(19): siRNA sense strand
auuauucgcuuccaugaua

SEQ ID NO: 1900616 - RNA, 19 nt, Homo sapiens
  misc_RNA (1)...(19): siRNA sense strand
caucagagagcuaauggua

SEQ ID NO: 1900617 - RNA, 19 nt, Homo sapiens
  misc_RNA (1)...(19): siRNA sense strand
ggcuuuaucucuaaccuaa

SEQ ID NO: 1900618 - RNA, 19 nt, Homo sapiens
  misc_RNA (1)...(19): siRNA sense strand
ggcagaagaggacaaguua

SEQ ID NO: 1900619 - RNA, 19 nt, Homo sapiens
  misc_RNA (1)...(19): siRNA sense strand
gguagcaaauuauggaguu

SEQ ID NO: 1900620 - RNA, 19 nt, Homo sapiens
  misc_RNA (1)...(19): siRNA sense strand
gagcuaaugguaacuuaaa

SEQ ID NO: 1900621 - RNA, 19 nt, Homo sapiens
  misc_RNA (1)...(19): siRNA sense strand
gagugaaacacaaaucuuu

SEQ ID NO: 1900622 - RNA, 19 nt, Homo sapiens
  misc_RNA (1)...(19): siRNA sense strand
gaauuucgaagaccuugua

SEQ ID NO: 1900623 - RNA, 19 nt, Homo sapiens
  misc_RNA (1)...(19): siRNA sense strand
gagaauacaagaucuaaca

SEQ ID NO: 1900624 - RNA, 19 nt, Homo sapiens
  misc_RNA (1)...(19): siRNA sense strand
gcaaaguggccuauacaga

SEQ ID NO: 1900625 - RNA, 19 nt, Homo sapiens
  misc_RNA (1)...(19): siRNA sense strand
ggaauuacagguagcaaau

SEQ ID NO: 1900626 - RNA, 19 nt, Homo sapiens
  misc_RNA (1)...(19): siRNA sense strand
agaaggagauuauaguaca

SEQ ID NO: 1900627 - RNA, 19 nt, Homo sapiens
  misc_RNA (1)...(19): siRNA sense strand
ccaugaacguggacaagaa

SEQ ID NO: 1900628 - RNA, 19 nt, Homo sapiens
  misc_RNA (1)...(19): siRNA sense strand
ggauaugucagauggcuuu

SEQ ID NO: 1900629 - RNA, 19 nt, Homo sapiens
  misc_RNA (1)...(19): siRNA sense strand
ggaaauagaauugcuacau

SEQ ID NO: 1900630 - RNA, 19 nt, Homo sapiens
  misc_RNA (1)...(19): siRNA sense strand
gaacaucagagagcuaaug

SEQ ID NO: 1900631 - RNA, 19 nt, Homo sapiens
  misc_RNA (1)...(19): siRNA sense strand
ugaacuagauccugaacau

SEQ ID NO: 1900632 - RNA, 19 nt, Homo sapiens
  misc_RNA (1)...(19): siRNA sense strand
gacaaaagauccagaagga

SEQ ID NO: 1900633 - RNA, 19 nt, Homo sapiens
  misc_RNA (1)...(19): siRNA sense strand
gcaggaggagccacuguuu

SEQ ID NO: 1900634 - RNA, 19 nt, Homo sapiens
  misc_RNA (1)...(19): siRNA sense strand
gaaaccguaauccuaaauu

SEQ ID NO: 1900635 - RNA, 19 nt, Homo sapiens
  misc_RNA (1)...(19): siRNA sense strand
gcugaggacugcuuugagu

SEQ ID NO: 1900636 - RNA, 19 nt, Homo sapiens
  misc_RNA (1)...(19): siRNA sense strand
caaauggguauccaauaaa

SEQ ID NO: 1900637 - RNA, 19 nt, Homo sapiens
  misc_RNA (1)...(19): siRNA sense strand
caacaaauggguauccaau

SEQ ID NO: 1900638 - RNA, 19 nt, Homo sapiens
  misc_RNA (1)...(19): siRNA sense strand
caggauaccuacaauuugg

SEQ ID NO: 1900639 - RNA, 19 nt, Homo sapiens
  misc_RNA (1)...(19): siRNA sense strand
ugagccagaugcuuucaaa

SEQ ID NO: 1900640 - RNA, 19 nt, Homo sapiens
  misc_RNA (1)...(19): siRNA sense strand
gaugaaggcgagauuucua

SEQ ID NO: 1900641 - RNA, 19 nt, Homo sapiens
  misc_RNA (1)...(19): siRNA sense strand
cagaagaggacaaguuaga

SEQ ID NO: 1900642 - RNA, 19 nt, Homo sapiens
  misc_RNA (1)...(19): siRNA sense strand
ucagagagcuaaugguaac

SEQ ID NO: 1900643 - RNA, 19 nt, Homo sapiens
  misc_RNA (1)...(19): siRNA sense strand
uccaguaaaugcauucaaa

SEQ ID NO: 1900644 - RNA, 19 nt, Homo sapiens
  misc_RNA (1)...(19): siRNA sense strand
gaacguggacaagaauuuc

SEQ ID NO: 1900645 - RNA, 19 nt, Homo sapiens
  misc_RNA (1)...(19): siRNA sense strand
cagcuaaacaggaggauga

SEQ ID NO: 1900646 - RNA, 19 nt, Homo sapiens
  misc_RNA (1)...(19): siRNA sense strand
ucucuaaccuaaccauuca

SEQ ID NO: 1900647 - RNA, 19 nt, Homo sapiens
  misc_RNA (1)...(19): siRNA sense strand
ugacugauuugauccauac

SEQ ID NO: 1900648 - RNA, 19 nt, Homo sapiens
  misc_RNA (1)...(19): siRNA sense strand
uaaccuaaccauucagaga

SEQ ID NO: 1900649 - RNA, 19 nt, Homo sapiens
  misc_RNA (1)...(19): siRNA sense strand
ccaguacuuucuaaugaug

SEQ ID NO: 1900650 - RNA, 19 nt, Homo sapiens
  misc_RNA (1)...(19): siRNA sense strand
ucgcuuccaugauauuauu

SEQ ID NO: 1900651 - RNA, 19 nt, Homo sapiens
  misc_RNA (1)...(19): siRNA sense strand
ucuggugacuucucugaaa

SEQ ID NO: 1900652 - RNA, 19 nt, Homo sapiens
  misc_RNA (1)...(19): siRNA sense strand
aagaugagccagaugcuuu

SEQ ID NO: 1900653 - RNA, 19 nt, Homo sapiens
  misc_RNA (1)...(19): siRNA sense strand
agaagcagauuauuaccau

SEQ ID NO: 1900654 - RNA, 19 nt, Homo sapiens
  misc_RNA (1)...(19): siRNA sense strand
agagaccaguacuuucuaa

SEQ ID NO: 1900655 - RNA, 19 nt, Homo sapiens
  misc_RNA (1)...(19): siRNA sense strand
uaccauagauaaagucucu

SEQ ID NO: 1900656 - RNA, 19 nt, Homo sapiens
  misc_RNA (1)...(19): siRNA sense strand
ggagugaaacacaaaucuu

SEQ ID NO: 1900657 - RNA, 19 nt, Homo sapiens
  misc_RNA (1)...(19): siRNA sense strand
gauuugauccauacugaga

SEQ ID NO: 1900658 - RNA, 19 nt, Homo sapiens
  misc_RNA (1)...(19): siRNA sense strand
gggacaagccucguauuau

SEQ ID NO: 1900659 - RNA, 19 nt, Homo sapiens
  misc_RNA (1)...(19): siRNA sense strand
ugggacaagccucguauua

SEQ ID NO: 1900660 - RNA, 19 nt, Homo sapiens
  misc_RNA (1)...(19): siRNA sense strand
gaaugggacaagccucgua

SEQ ID NO: 1900661 - RNA, 19 nt, Homo sapiens
  misc_RNA (1)...(19): siRNA sense strand
gaagcuucuugaacuagau

SEQ ID NO: 1900662 - RNA, 19 nt, Homo sapiens
  misc_RNA (1)...(19): siRNA sense strand
ggcgagauuucuaccauag

SEQ ID NO: 1900663 - RNA, 19 nt, Homo sapiens
  misc_RNA (1)...(19): siRNA sense strand
gaucuggugacuucucuga

SEQ ID NO: 1900664 - RNA, 19 nt, Homo sapiens
  misc_RNA (1)...(19): siRNA sense strand
uaacuaguacagcgacaaa

SEQ ID NO: 1900665 - RNA, 19 nt, Homo sapiens
  misc_RNA (1)...(19): siRNA sense strand
gacaagccucguauuauuc

SEQ ID NO: 1900666 - RNA, 19 nt, Homo sapiens
  misc_RNA (1)...(19): siRNA sense strand
uagauaaagucucuguucu

SEQ ID NO: 1900667 - RNA, 19 nt, Homo sapiens
  misc_RNA (1)...(19): siRNA sense strand
ggaaaccguaauccuaaau

SEQ ID NO: 1900668 - RNA, 19 nt, Homo sapiens
  misc_RNA (1)...(19): siRNA sense strand
uaaugaaacgucugaauac

SEQ ID NO: 1900669 - RNA, 19 nt, Homo sapiens
  misc_RNA (1)...(19): siRNA sense strand
cugauuugauccauacuga

SEQ ID NO: 1900670 - RNA, 19 nt, Homo sapiens
  misc_RNA (1)...(19): siRNA sense strand
gauccauacugagaaagau

SEQ ID NO: 1900671 - RNA, 19 nt, Homo sapiens
  misc_RNA (1)...(19): siRNA sense strand
ugagaaagaucuggugacu

SEQ ID NO: 1900672 - RNA, 19 nt, Homo sapiens
  misc_RNA (1)...(19): siRNA sense strand
ugaaaucgucaaagaccua

SEQ ID NO: 1900673 - RNA, 19 nt, Homo sapiens
  misc_RNA (1)...(19): siRNA sense strand
aagucucuguucuagauua

SEQ ID NO: 1900674 - RNA, 19 nt, Homo sapiens
  misc_RNA (1)...(19): siRNA sense strand
gaagaggacaaguuagaac

SEQ ID NO: 1900675 - RNA, 19 nt, Homo sapiens
  misc_RNA (1)...(19): siRNA sense strand
uaugucagauggcuuuauc

SEQ ID NO: 1900676 - RNA, 19 nt, Homo sapiens
  misc_RNA (1)...(19): siRNA sense strand
uccaggauaccuacaauuu

SEQ ID NO: 1900677 - RNA, 19 nt, Homo sapiens
  misc_RNA (1)...(19): siRNA sense strand
cgaagaccuuguacguugu

SEQ ID NO: 1900678 - RNA, 19 nt, Homo sapiens
  misc_RNA (1)...(19): siRNA sense strand
gagaaggagauuauaguac

SEQ ID NO: 1900679 - RNA, 19 nt, Homo sapiens
  misc_RNA (1)...(19): siRNA sense strand
cuaaacaggaggaugaaug

SEQ ID NO: 1900680 - RNA, 19 nt, Homo sapiens
  misc_RNA (1)...(19): siRNA sense strand
aaaguggccuauacagaag

SEQ ID NO: 1900681 - RNA, 19 nt, Homo sapiens
  misc_RNA (1)...(19): siRNA sense strand
ccaggauaccuacaauuug

SEQ ID NO: 1900682 - RNA, 19 nt, Homo sapiens
  misc_RNA (1)...(19): siRNA sense strand
ccuacaauuuggauacaga

SEQ ID NO: 1900683 - RNA, 19 nt, Homo sapiens
  misc_RNA (1)...(19): siRNA sense strand
agauaaagucucuguucua

SEQ ID NO: 1900684 - RNA, 19 nt, Homo sapiens
  misc_RNA (1)...(19): siRNA sense strand
uggaaaccguaauccuaaa

SEQ ID NO: 1900685 - RNA, 19 nt, Homo sapiens
  misc_RNA (1)...(19): siRNA sense strand
ggaguuggaggacaguaug

SEQ ID NO: 1900686 - RNA, 19 nt, Homo sapiens
  misc_RNA (1)...(19): siRNA sense strand
uguggugucucgaauuaau

SEQ ID NO: 1900687 - RNA, 19 nt, Homo sapiens
  misc_RNA (1)...(19): siRNA sense strand
gaaaacuacaccaaagaaa

SEQ ID NO: 1900688 - RNA, 19 nt, Homo sapiens
  misc_RNA (1)...(19): siRNA sense strand
gaaggagauuauaguacac

SEQ ID NO: 1900689 - RNA, 19 nt, Homo sapiens
  misc_RNA (1)...(19): siRNA sense strand
gagacagaaguacgaaaug

SEQ ID NO: 1900690 - RNA, 19 nt, Homo sapiens
  misc_RNA (1)...(19): siRNA sense strand
gaccuuguacguugucaga

SEQ ID NO: 1900691 - RNA, 19 nt, Homo sapiens
  misc_RNA (1)...(19): siRNA sense strand
ugaacguggacaagaauuu

SEQ ID NO: 1900692 - RNA, 19 nt, Homo sapiens
  misc_RNA (1)...(19): siRNA sense strand
ggagauggcucauggaaga

SEQ ID NO: 1900693 - RNA, 19 nt, Homo sapiens
  misc_RNA (1)...(19): siRNA sense strand
gaagacaucgugcgcaaua

SEQ ID NO: 1900694 - RNA, 19 nt, Homo sapiens
  misc_RNA (1)...(19): siRNA sense strand
gcuaauggccuucuacuuu

SEQ ID NO: 1900695 - RNA, 19 nt, Homo sapiens
  misc_RNA (1)...(19): siRNA sense strand
caacagcucuuccuaugga

SEQ ID NO: 1900696 - RNA, 19 nt, Homo sapiens
  misc_RNA (1)...(19): siRNA sense strand
gaacagaacauuugaaggu

SEQ ID NO: 1900697 - RNA, 19 nt, Homo sapiens
  misc_RNA (1)...(19): siRNA sense strand
caaaucauguggccuagaa

SEQ ID NO: 1900698 - RNA, 19 nt, Homo sapiens
  misc_RNA (1)...(19): siRNA sense strand
gagcggaacugcuacuuca

SEQ ID NO: 1900699 - RNA, 19 nt, Homo sapiens
  misc_RNA (1)...(19): siRNA sense strand
aaacagcucucccugcaaa

SEQ ID NO: 1900700 - RNA, 19 nt, Homo sapiens
  misc_RNA (1)...(19): siRNA sense strand
ggauuacguuaacauguuu

SEQ ID NO: 1900701 - RNA, 19 nt, Homo sapiens
  misc_RNA (1)...(19): siRNA sense strand
ggagcuggcuugcuaaugg

SEQ ID NO: 1900702 - RNA, 19 nt, Homo sapiens
  misc_RNA (1)...(19): siRNA sense strand
gaaacaagggcucaauaug

SEQ ID NO: 1900703 - RNA, 19 nt, Homo sapiens
  misc_RNA (1)...(19): siRNA sense strand
gagaaacaagggcucaaua

SEQ ID NO: 1900704 - RNA, 19 nt, Homo sapiens
  misc_RNA (1)...(19): siRNA sense strand
acacguccaucuacaguuu

SEQ ID NO: 1900705 - RNA, 19 nt, Homo sapiens
  misc_RNA (1)...(19): siRNA sense strand
cgucuuggcucuacaugaa

SEQ ID NO: 1900706 - RNA, 19 nt, Homo sapiens
  misc_RNA (1)...(19): siRNA sense strand
aaacacgacuuugaagcua

SEQ ID NO: 1900707 - RNA, 19 nt, Homo sapiens
  misc_RNA (1)...(19): siRNA sense strand
acuaggagcuggcuugcua

SEQ ID NO: 1900708 - RNA, 19 nt, Homo sapiens
  misc_RNA (1)...(19): siRNA sense strand
cagcagacuuggaacagaa

SEQ ID NO: 1900709 - RNA, 19 nt, Homo sapiens
  misc_RNA (1)...(19): siRNA sense strand
gggcagguguccauagaug

SEQ ID NO: 1900710 - RNA, 19 nt, Homo sapiens
  misc_RNA (1)...(19): siRNA sense strand
ggaugacucguacuuguuu

SEQ ID NO: 1900711 - RNA, 19 nt, Homo sapiens
  misc_RNA (1)...(19): siRNA sense strand
ccagguggcuuacgaggau

SEQ ID NO: 1900712 - RNA, 19 nt, Homo sapiens
  misc_RNA (1)...(19): siRNA sense strand
ggcucaauauggaggauua

SEQ ID NO: 1900713 - RNA, 19 nt, Homo sapiens
  misc_RNA (1)...(19): siRNA sense strand
aaaguucaguugagaaaca

SEQ ID NO: 1900714 - RNA, 19 nt, Homo sapiens
  misc_RNA (1)...(19): siRNA sense strand
ggagguuauuggugauuau

SEQ ID NO: 1900715 - RNA, 19 nt, Homo sapiens
  misc_RNA (1)...(19): siRNA sense strand
aaacaagggcucaauaugg

SEQ ID NO: 1900716 - RNA, 19 nt, Homo sapiens
  misc_RNA (1)...(19): siRNA sense strand
aacaagggcucaauaugga

SEQ ID NO: 1900717 - RNA, 19 nt, Homo sapiens
  misc_RNA (1)...(19): siRNA sense strand
caggaugacucguacuugu

SEQ ID NO: 1900718 - RNA, 19 nt, Homo sapiens
  misc_RNA (1)...(19): siRNA sense strand
gcaauauccaggccaguga

SEQ ID NO: 1900719 - RNA, 19 nt, Homo sapiens
  misc_RNA (1)...(19): siRNA sense strand
uuacgaggauucagacugu

SEQ ID NO: 1900720 - RNA, 19 nt, Homo sapiens
  misc_RNA (1)...(19): siRNA sense strand
gaagagaggagacaaacac

SEQ ID NO: 1900721 - RNA, 19 nt, Homo sapiens
  misc_RNA (1)...(19): siRNA sense strand
aaccugaguuugagaaguu

SEQ ID NO: 1900722 - RNA, 19 nt, Homo sapiens
  misc_RNA (1)...(19): siRNA sense strand
gaaaaguucaguugagaaa

SEQ ID NO: 1900723 - RNA, 19 nt, Homo sapiens
  misc_RNA (1)...(19): siRNA sense strand
caggaagaaauacagaaua

SEQ ID NO: 1900724 - RNA, 19 nt, Homo sapiens
  misc_RNA (1)...(19): siRNA sense strand
aggauuacguuaacauguu

SEQ ID NO: 1900725 - RNA, 19 nt, Homo sapiens
  misc_RNA (1)...(19): siRNA sense strand
gaagaaauacagaauaacc

SEQ ID NO: 1900726 - RNA, 19 nt, Homo sapiens
  misc_RNA (1)...(19): siRNA sense strand
cgacgagaccaaagacuug

SEQ ID NO: 1900727 - RNA, 19 nt, Homo sapiens
  misc_RNA (1)...(19): siRNA sense strand
caauauggaggauuacguu

SEQ ID NO: 1900728 - RNA, 19 nt, Homo sapiens
  misc_RNA (1)...(19): siRNA sense strand
gaucgaggugcugguguua

SEQ ID NO: 1900729 - RNA, 19 nt, Homo sapiens
  misc_RNA (1)...(19): siRNA sense strand
uggaaaacaucgggaauua

SEQ ID NO: 1900730 - RNA, 19 nt, Homo sapiens
  misc_RNA (1)...(19): siRNA sense strand
gaacccagcaagaagaaag

SEQ ID NO: 1900731 - RNA, 19 nt, Homo sapiens
  misc_RNA (1)...(19): siRNA sense strand
gaaguacucagagcugguu

SEQ ID NO: 1900732 - RNA, 19 nt, Homo sapiens
  misc_RNA (1)...(19): siRNA sense strand
acagaacauuugaagguau

SEQ ID NO: 1900733 - RNA, 19 nt, Homo sapiens
  misc_RNA (1)...(19): siRNA sense strand
agaaacaagggcucaauau

SEQ ID NO: 1900734 - RNA, 19 nt, Homo sapiens
  misc_RNA (1)...(19): siRNA sense strand
cuagaagaaucggcaguga

SEQ ID NO: 1900735 - RNA, 19 nt, Homo sapiens
  misc_RNA (1)...(19): siRNA sense strand
aacagaacauuugaaggua

SEQ ID NO: 1900736 - RNA, 19 nt, Homo sapiens
  misc_RNA (1)...(19): siRNA sense strand
gcgcugcacuggucuacag

SEQ ID NO: 1900737 - RNA, 19 nt, Homo sapiens
  misc_RNA (1)...(19): siRNA sense strand
cuaauggccuucuacuuuu

SEQ ID NO: 1900738 - RNA, 19 nt, Homo sapiens
  misc_RNA (1)...(19): siRNA sense strand
ggacagugaaaccugaguu

SEQ ID NO: 1900739 - RNA, 19 nt, Homo sapiens
  misc_RNA (1)...(19): siRNA sense strand
gcacacguccaucuacagu

SEQ ID NO: 1900740 - RNA, 19 nt, Homo sapiens
  misc_RNA (1)...(19): siRNA sense strand
caagaugggcgagaugaug

SEQ ID NO: 1900741 - RNA, 19 nt, Homo sapiens
  misc_RNA (1)...(19): siRNA sense strand
cagaacauuugaagguauc

SEQ ID NO: 1900742 - RNA, 19 nt, Homo sapiens
  misc_RNA (1)...(19): siRNA sense strand
gaggauuacguuaacaugu

SEQ ID NO: 1900743 - RNA, 19 nt, Homo sapiens
  misc_RNA (1)...(19): siRNA sense strand
gaugaaaaccgaauuguag

SEQ ID NO: 1900744 - RNA, 19 nt, Homo sapiens
  misc_RNA (1)...(19): siRNA sense strand
gagacuacgccuucuucaa

SEQ ID NO: 1900745 - RNA, 19 nt, Homo sapiens
  misc_RNA (1)...(19): siRNA sense strand
ggaggauuacguuaacaug

SEQ ID NO: 1900746 - RNA, 19 nt, Homo sapiens
  misc_RNA (1)...(19): siRNA sense strand
gcgccaagccagaccuuau

SEQ ID NO: 1900747 - RNA, 19 nt, Homo sapiens
  misc_RNA (1)...(19): siRNA sense strand
ggccgaaugucaaauaucc

SEQ ID NO: 1900748 - RNA, 19 nt, Homo sapiens
  misc_RNA (1)...(19): siRNA sense strand
uucaacagcucuuccuaug

SEQ ID NO: 1900749 - RNA, 19 nt, Homo sapiens
  misc_RNA (1)...(19): siRNA sense strand
gacuacgccuucuucaaca

SEQ ID NO: 1900750 - RNA, 19 nt, Homo sapiens
  misc_RNA (1)...(19): siRNA sense strand
agagaguggugaucaugug

SEQ ID NO: 1900751 - RNA, 19 nt, Homo sapiens
  misc_RNA (1)...(19): siRNA sense strand
caaagacuuggaucuggaa

SEQ ID NO: 1900752 - RNA, 19 nt, Homo sapiens
  misc_RNA (1)...(19): siRNA sense strand
gaggcgaacccagcaagaa

SEQ ID NO: 1900753 - RNA, 19 nt, Homo sapiens
  misc_RNA (1)...(19): siRNA sense strand
cauguggccuagaagaauc

SEQ ID NO: 1900754 - RNA, 19 nt, Homo sapiens
  misc_RNA (1)...(19): siRNA sense strand
cauguuuguugaaggauuc

SEQ ID NO: 1900755 - RNA, 19 nt, Homo sapiens
  misc_RNA (1)...(19): siRNA sense strand
ggaagagaggagacaaaca

SEQ ID NO: 1900756 - RNA, 19 nt, Homo sapiens
  misc_RNA (1)...(19): siRNA sense strand
gagagaguggugaucaugu

SEQ ID NO: 1900757 - RNA, 19 nt, Homo sapiens
  misc_RNA (1)...(19): siRNA sense strand
aaaccgaauuguagagcau

SEQ ID NO: 1900758 - RNA, 19 nt, Homo sapiens
  misc_RNA (1)...(19): siRNA sense strand
ugauugccaugacugaugu

SEQ ID NO: 1900759 - RNA, 19 nt, Homo sapiens
  misc_RNA (1)...(19): siRNA sense strand
ccgggcagguguccauaga

SEQ ID NO: 1900760 - RNA, 19 nt, Homo sapiens
  misc_RNA (1)...(19): siRNA sense strand
aggagguuauuggugauua

SEQ ID NO: 1900761 - RNA, 19 nt, Homo sapiens
  misc_RNA (1)...(19): siRNA sense strand
agaagaaucggcagugaca

SEQ ID NO: 1900762 - RNA, 19 nt, Homo sapiens
  misc_RNA (1)...(19): siRNA sense strand
ggagcggaacugcuacuuc

SEQ ID NO: 1900763 - RNA, 19 nt, Homo sapiens
  misc_RNA (1)...(19): siRNA sense strand
gcgaacccagcaagaagaa

SEQ ID NO: 1900764 - RNA, 19 nt, Homo sapiens
  misc_RNA (1)...(19): siRNA sense strand
uauggaggauuacguuaac

SEQ ID NO: 1900765 - RNA, 19 nt, Homo sapiens
  misc_RNA (1)...(19): siRNA sense strand
aacacgacuuugaagcuaa

SEQ ID NO: 1900766 - RNA, 19 nt, Homo sapiens
  misc_RNA (1)...(19): siRNA sense strand
agacuacgccuucuucaac

SEQ ID NO: 1900767 - RNA, 19 nt, Homo sapiens
  misc_RNA (1)...(19): siRNA sense strand
ucaggaagaaauacagaau

SEQ ID NO: 1900768 - RNA, 19 nt, Homo sapiens
  misc_RNA (1)...(19): siRNA sense strand
gagguuauuggugauuauu

SEQ ID NO: 1900769 - RNA, 19 nt, Homo sapiens
  misc_RNA (1)...(19): siRNA sense strand
uuauacagcagacuuggaa

SEQ ID NO: 1900770 - RNA, 19 nt, Homo sapiens
  misc_RNA (1)...(19): siRNA sense strand
ggauggagggaaaauuaua

SEQ ID NO: 1900771 - RNA, 19 nt, Homo sapiens
  misc_RNA (1)...(19): siRNA sense strand
ccauggaggugaaaaguuc

SEQ ID NO: 1900772 - RNA, 19 nt, Homo sapiens
  misc_RNA (1)...(19): siRNA sense strand
gaugaugcucgcccuguuc

SEQ ID NO: 1900773 - RNA, 19 nt, Homo sapiens
  misc_RNA (1)...(19): siRNA sense strand
gacaccauccggagcauca

SEQ ID NO: 1900774 - RNA, 19 nt, Homo sapiens
  misc_RNA (1)...(19): siRNA sense strand
gcacccaggagguuauugg

SEQ ID NO: 1900775 - RNA, 19 nt, Homo sapiens
  misc_RNA (1)...(19): siRNA sense strand
gaggagacaaacacgacuu

SEQ ID NO: 1900776 - RNA, 19 nt, Homo sapiens
  misc_RNA (1)...(19): siRNA sense strand
gugauugccaugacugaug

SEQ ID NO: 1900777 - RNA, 19 nt, Homo sapiens
  misc_RNA (1)...(19): siRNA sense strand
gugagagaguggugaucau

SEQ ID NO: 1900778 - RNA, 19 nt, Homo sapiens
  misc_RNA (1)...(19): siRNA sense strand
agaucgaggugcugguguu

SEQ ID NO: 1900779 - RNA, 19 nt, Homo sapiens
  misc_RNA (1)...(19): siRNA sense strand
caugaccaguggagacuac

SEQ ID NO: 1900780 - RNA, 19 nt, Homo sapiens
  misc_RNA (1)...(19): siRNA sense strand
aaucggcagugacaggaau

SEQ ID NO: 1900781 - RNA, 19 nt, Homo sapiens
  misc_RNA (1)...(19): siRNA sense strand
gcaaaucauguggccuaga

SEQ ID NO: 1900782 - RNA, 19 nt, Homo sapiens
  misc_RNA (1)...(19): siRNA sense strand
gacuuggaacagaacauuu

SEQ ID NO: 1900783 - RNA, 19 nt, Homo sapiens
  misc_RNA (1)...(19): siRNA sense strand
acagcagacuuggaacaga

SEQ ID NO: 1900784 - RNA, 19 nt, Homo sapiens
  misc_RNA (1)...(19): siRNA sense strand
agaugaugcucgcccuguu

SEQ ID NO: 1900785 - RNA, 19 nt, Homo sapiens
  misc_RNA (1)...(19): siRNA sense strand
aauauggaggauuacguua

SEQ ID NO: 1900786 - RNA, 19 nt, Homo sapiens
  misc_RNA (1)...(19): siRNA sense strand
cgacuuugaagcuaagcaa

SEQ ID NO: 1900787 - RNA, 19 nt, Homo sapiens
  misc_RNA (1)...(19): siRNA sense strand
gaaucggcagugacaggaa

SEQ ID NO: 1900788 - RNA, 19 nt, Homo sapiens
  misc_RNA (1)...(19): siRNA sense strand
gccaagaugggcgagauga

SEQ ID NO: 1900789 - RNA, 19 nt, Homo sapiens
  misc_RNA (1)...(19): siRNA sense strand
agacuuggaacagaacauu

SEQ ID NO: 1900790 - RNA, 19 nt, Homo sapiens
  misc_RNA (1)...(19): siRNA sense strand
gcuuccagguggcuuacga

SEQ ID NO: 1900791 - RNA, 19 nt, Homo sapiens
  misc_RNA (1)...(19): siRNA sense strand
acauguuuguugaaggauu

SEQ ID NO: 1900792 - RNA, 19 nt, Homo sapiens
  misc_RNA (1)...(19): siRNA sense strand
gcaacucgcuggucauguu

SEQ ID NO: 1900793 - RNA, 19 nt, Homo sapiens
  misc_RNA (1)...(19): siRNA sense strand
gaagacagcaaccaacauu

SEQ ID NO: 1900794 - RNA, 19 nt, Homo sapiens
  misc_RNA (1)...(19): siRNA sense strand
aggcaaagaucaucaauau

SEQ ID NO: 1900795 - RNA, 19 nt, Homo sapiens
  misc_RNA (1)...(19): siRNA sense strand
ggacucccauucacauauu

SEQ ID NO: 1900796 - RNA, 19 nt, Homo sapiens
  misc_RNA (1)...(19): siRNA sense strand
ggugggaccucuucaugaa

SEQ ID NO: 1900797 - RNA, 19 nt, Homo sapiens
  misc_RNA (1)...(19): siRNA sense strand
agacagcaaccaacauuua

SEQ ID NO: 1900798 - RNA, 19 nt, Homo sapiens
  misc_RNA (1)...(19): siRNA sense strand
ggaagacgucgaugucauu

SEQ ID NO: 1900799 - RNA, 19 nt, Homo sapiens
  misc_RNA (1)...(19): siRNA sense strand
gaucugcgucuucaucuuu

SEQ ID NO: 1900800 - RNA, 19 nt, Homo sapiens
  misc_RNA (1)...(19): siRNA sense strand
gcaaccaacauuuacauau

SEQ ID NO: 1900801 - RNA, 19 nt, Homo sapiens
  misc_RNA (1)...(19): siRNA sense strand
gcaccaaagucagggaaga

SEQ ID NO: 1900802 - RNA, 19 nt, Homo sapiens
  misc_RNA (1)...(19): siRNA sense strand
caacagcagcgccugguuu

SEQ ID NO: 1900803 - RNA, 19 nt, Homo sapiens
  misc_RNA (1)...(19): siRNA sense strand
cuacaaccaugcccuuuca

SEQ ID NO: 1900804 - RNA, 19 nt, Homo sapiens
  misc_RNA (1)...(19): siRNA sense strand
gaugugcugugcaagauag

SEQ ID NO: 1900805 - RNA, 19 nt, Homo sapiens
  misc_RNA (1)...(19): siRNA sense strand
gggaagacgucgaugucau

SEQ ID NO: 1900806 - RNA, 19 nt, Homo sapiens
  misc_RNA (1)...(19): siRNA sense strand
gaugaauaaaccaguauga

SEQ ID NO: 1900807 - RNA, 19 nt, Homo sapiens
  misc_RNA (1)...(19): siRNA sense strand
uaaccuggcuuuggcagau

SEQ ID NO: 1900808 - RNA, 19 nt, Homo sapiens
  misc_RNA (1)...(19): siRNA sense strand
uggcaucucugcaauaguc

SEQ ID NO: 1900809 - RNA, 19 nt, Homo sapiens
  misc_RNA (1)...(19): siRNA sense strand
gcaagauaguaauuuccau

SEQ ID NO: 1900810 - RNA, 19 nt, Homo sapiens
  misc_RNA (1)...(19): siRNA sense strand
gggaugugcugugcaagau

SEQ ID NO: 1900811 - RNA, 19 nt, Homo sapiens
  misc_RNA (1)...(19): siRNA sense strand
gacuucugcuuuccacuga

SEQ ID NO: 1900812 - RNA, 19 nt, Homo sapiens
  misc_RNA (1)...(19): siRNA sense strand
ugggaugaauaaaccagua

SEQ ID NO: 1900813 - RNA, 19 nt, Homo sapiens
  misc_RNA (1)...(19): siRNA sense strand
accaugcccuuucagagua

SEQ ID NO: 1900814 - RNA, 19 nt, Homo sapiens
  misc_RNA (1)...(19): siRNA sense strand
gaaggcaaagaucaucaau

SEQ ID NO: 1900815 - RNA, 19 nt, Homo sapiens
  misc_RNA (1)...(19): siRNA sense strand
cgugaucccuguccucauc

SEQ ID NO: 1900816 - RNA, 19 nt, Homo sapiens
  misc_RNA (1)...(19): siRNA sense strand
gaagacgucgaugucauug

SEQ ID NO: 1900817 - RNA, 19 nt, Homo sapiens
  misc_RNA (1)...(19): siRNA sense strand
agacgucgaugucauugag

SEQ ID NO: 1900818 - RNA, 19 nt, Homo sapiens
  misc_RNA (1)...(19): siRNA sense strand
gaucauccgauacacaaag

SEQ ID NO: 1900819 - RNA, 19 nt, Homo sapiens
  misc_RNA (1)...(19): siRNA sense strand
guuggcaucucugcaauag

SEQ ID NO: 1900820 - RNA, 19 nt, Homo sapiens
  misc_RNA (1)...(19): siRNA sense strand
ggaugugcugugcaagaua

SEQ ID NO: 1900821 - RNA, 19 nt, Homo sapiens
  misc_RNA (1)...(19): siRNA sense strand
ggcagaugcuuuaguuacu

SEQ ID NO: 1900822 - RNA, 19 nt, Homo sapiens
  misc_RNA (1)...(19): siRNA sense strand
ggcuuuggcagaugcuuua

SEQ ID NO: 1900823 - RNA, 19 nt, Homo sapiens
  misc_RNA (1)...(19): siRNA sense strand
uuuggcagaugcuuuaguu

SEQ ID NO: 1900824 - RNA, 19 nt, Homo sapiens
  misc_RNA (1)...(19): siRNA sense strand
acuagcagaguccgaaaua

SEQ ID NO: 1900825 - RNA, 19 nt, Homo sapiens
  misc_RNA (1)...(19): siRNA sense strand
ucaccagcaucuucaccuu

SEQ ID NO: 1900826 - RNA, 19 nt, Homo sapiens
  misc_RNA (1)...(19): siRNA sense strand
uagcagaguccgaaauaca

SEQ ID NO: 1900827 - RNA, 19 nt, Homo sapiens
  misc_RNA (1)...(19): siRNA sense strand
gcacuagcagaguccgaaa

SEQ ID NO: 1900828 - RNA, 19 nt, Homo sapiens
  misc_RNA (1)...(19): siRNA sense strand
guucccagaugaugacuac

SEQ ID NO: 1900829 - RNA, 19 nt, Homo sapiens
  misc_RNA (1)...(19): siRNA sense strand
gugaucauccgauacacaa

SEQ ID NO: 1900830 - RNA, 19 nt, Homo sapiens
  misc_RNA (1)...(19): siRNA sense strand
ugugcaagauaguaauuuc

SEQ ID NO: 1900831 - RNA, 19 nt, Homo sapiens
  misc_RNA (1)...(19): siRNA sense strand
uuacuucugcaucgccuua

SEQ ID NO: 1900832 - RNA, 19 nt, Homo sapiens
  misc_RNA (1)...(19): siRNA sense strand
gugcugugcaagauaguaa

SEQ ID NO: 1900833 - RNA, 19 nt, Homo sapiens
  misc_RNA (1)...(19): siRNA sense strand
cuacgccuuucuugaugaa

SEQ ID NO: 1900834 - RNA, 19 nt, Homo sapiens
  misc_RNA (1)...(19): siRNA sense strand
caucuuugccuucgugauc

SEQ ID NO: 1900835 - RNA, 19 nt, Homo sapiens
  misc_RNA (1)...(19): siRNA sense strand
accagcaucuucaccuuga

SEQ ID NO: 1900836 - RNA, 19 nt, Homo sapiens
  misc_RNA (1)...(19): siRNA sense strand
gcugugcaagauaguaauu

SEQ ID NO: 1900837 - RNA, 19 nt, Homo sapiens
  misc_RNA (1)...(19): siRNA sense strand
uaccaacaguagccugaau

SEQ ID NO: 1900838 - RNA, 19 nt, Homo sapiens
  misc_RNA (1)...(19): siRNA sense strand
gacagcaaccaacauuuac

SEQ ID NO: 1900839 - RNA, 19 nt, Homo sapiens
  misc_RNA (1)...(19): siRNA sense strand
gggaugaauaaaccaguau

SEQ ID NO: 1900840 - RNA, 19 nt, Homo sapiens
  misc_RNA (1)...(19): siRNA sense strand
cugaugauccugcgucuca

SEQ ID NO: 1900841 - RNA, 19 nt, Homo sapiens
  misc_RNA (1)...(19): siRNA sense strand
ccuugcaguucccagauga

SEQ ID NO: 1900842 - RNA, 19 nt, Homo sapiens
  misc_RNA (1)...(19): siRNA sense strand
ucucuacgccuuucuugau

SEQ ID NO: 1900843 - RNA, 19 nt, Homo sapiens
  misc_RNA (1)...(19): siRNA sense strand
ggaugaauaaaccaguaug

SEQ ID NO: 1900844 - RNA, 19 nt, Homo sapiens
  misc_RNA (1)...(19): siRNA sense strand
aaggcaaagaucaucaaua

SEQ ID NO: 1900845 - RNA, 19 nt, Homo sapiens
  misc_RNA (1)...(19): siRNA sense strand
gcagaguccgaaauacagu

SEQ ID NO: 1900846 - RNA, 19 nt, Homo sapiens
  misc_RNA (1)...(19): siRNA sense strand
ucuacgccuuucuugauga

SEQ ID NO: 1900847 - RNA, 19 nt, Homo sapiens
  misc_RNA (1)...(19): siRNA sense strand
acaaagaugaagacagcaa

SEQ ID NO: 1900848 - RNA, 19 nt, Homo sapiens
  misc_RNA (1)...(19): siRNA sense strand
gggcaacucgcuggucaug

SEQ ID NO: 1900849 - RNA, 19 nt, Homo sapiens
  misc_RNA (1)...(19): siRNA sense strand
cagcaaccaacauuuacau

SEQ ID NO: 1900850 - RNA, 19 nt, Homo sapiens
  misc_RNA (1)...(19): siRNA sense strand
cggucuacuugaugaauuc

SEQ ID NO: 1900851 - RNA, 19 nt, Homo sapiens
  misc_RNA (1)...(19): siRNA sense strand
ugaaggcaaagaucaucaa

SEQ ID NO: 1900852 - RNA, 19 nt, Homo sapiens
  misc_RNA (1)...(19): siRNA sense strand
cauguucaccagcaucuuc

SEQ ID NO: 1900853 - RNA, 19 nt, Homo sapiens
  misc_RNA (1)...(19): siRNA sense strand
gaauguggcuguagaugaa

SEQ ID NO: 1900854 - RNA, 19 nt, Homo sapiens
  misc_RNA (1)...(19): siRNA sense strand
cagcuuugcuccugaaauu

SEQ ID NO: 1900855 - RNA, 19 nt, Homo sapiens
  misc_RNA (1)...(19): siRNA sense strand
guaagaaaguacucauugu

SEQ ID NO: 1900856 - RNA, 19 nt, Homo sapiens
  misc_RNA (1)...(19): siRNA sense strand
gaaaguacucauugucuau

SEQ ID NO: 1900857 - RNA, 19 nt, Homo sapiens
  misc_RNA (1)...(19): siRNA sense strand
cugaagggcuggauggaua

SEQ ID NO: 1900858 - RNA, 19 nt, Homo sapiens
  misc_RNA (1)...(19): siRNA sense strand
ccacgaagccuacaagcaa

SEQ ID NO: 1900859 - RNA, 19 nt, Homo sapiens
  misc_RNA (1)...(19): siRNA sense strand
gaaauugcauccgaagaag

SEQ ID NO: 1900860 - RNA, 19 nt, Homo sapiens
  misc_RNA (1)...(19): siRNA sense strand
acacuucuguggauuuaaa

SEQ ID NO: 1900861 - RNA, 19 nt, Homo sapiens
  misc_RNA (1)...(19): siRNA sense strand
gguaagaaaguacucauug

SEQ ID NO: 1900862 - RNA, 19 nt, Homo sapiens
  misc_RNA (1)...(19): siRNA sense strand
ugaagaauguggcuguaga

SEQ ID NO: 1900863 - RNA, 19 nt, Homo sapiens
  misc_RNA (1)...(19): siRNA sense strand
cacagugucugauuuguau

SEQ ID NO: 1900864 - RNA, 19 nt, Homo sapiens
  misc_RNA (1)...(19): siRNA sense strand
agaaaguacucauugucua

SEQ ID NO: 1900865 - RNA, 19 nt, Homo sapiens
  misc_RNA (1)...(19): siRNA sense strand
gaagacaggagucaaugga

SEQ ID NO: 1900866 - RNA, 19 nt, Homo sapiens
  misc_RNA (1)...(19): siRNA sense strand
uuacacuucuguggauuua

SEQ ID NO: 1900867 - RNA, 19 nt, Homo sapiens
  misc_RNA (1)...(19): siRNA sense strand
caacggauccuugaagaau

SEQ ID NO: 1900868 - RNA, 19 nt, Homo sapiens
  misc_RNA (1)...(19): siRNA sense strand
ucacugguacucuuucuaa

SEQ ID NO: 1900869 - RNA, 19 nt, Homo sapiens
  misc_RNA (1)...(19): siRNA sense strand
ugaaauugcauccgaagaa

SEQ ID NO: 1900870 - RNA, 19 nt, Homo sapiens
  misc_RNA (1)...(19): siRNA sense strand
ggaggcugaccuagugaua

SEQ ID NO: 1900871 - RNA, 19 nt, Homo sapiens
  misc_RNA (1)...(19): siRNA sense strand
gauaucacugguacucuuu

SEQ ID NO: 1900872 - RNA, 19 nt, Homo sapiens
  misc_RNA (1)...(19): siRNA sense strand
aggcugaccuagugauauu

SEQ ID NO: 1900873 - RNA, 19 nt, Homo sapiens
  misc_RNA (1)...(19): siRNA sense strand
ucacagugucugauuugua

SEQ ID NO: 1900874 - RNA, 19 nt, Homo sapiens
  misc_RNA (1)...(19): siRNA sense strand
cggccgagauguacacgaa

SEQ ID NO: 1900875 - RNA, 19 nt, Homo sapiens
  misc_RNA (1)...(19): siRNA sense strand
gguaaacuagcgcuccuuu

SEQ ID NO: 1900876 - RNA, 19 nt, Homo sapiens
  misc_RNA (1)...(19): siRNA sense strand
gccgagauguacacgaaga

SEQ ID NO: 1900877 - RNA, 19 nt, Homo sapiens
  misc_RNA (1)...(19): siRNA sense strand
ccgguuugcuccaggguaa

SEQ ID NO: 1900878 - RNA, 19 nt, Homo sapiens
  misc_RNA (1)...(19): siRNA sense strand
gaagaauguggcuguagau

SEQ ID NO: 1900879 - RNA, 19 nt, Homo sapiens
  misc_RNA (1)...(19): siRNA sense strand
gacaaagauaucacuggua

SEQ ID NO: 1900880 - RNA, 19 nt, Homo sapiens
  misc_RNA (1)...(19): siRNA sense strand
cacgaagccuacaagcaaa

SEQ ID NO: 1900881 - RNA, 19 nt, Homo sapiens
  misc_RNA (1)...(19): siRNA sense strand
agauaucacugguacucuu

SEQ ID NO: 1900882 - RNA, 19 nt, Homo sapiens
  misc_RNA (1)...(19): siRNA sense strand
gccagggcuuugccuuuga

SEQ ID NO: 1900883 - RNA, 19 nt, Homo sapiens
  misc_RNA (1)...(19): siRNA sense strand
ucgggaggcugaccuagug

SEQ ID NO: 1900884 - RNA, 19 nt, Homo sapiens
  misc_RNA (1)...(19): siRNA sense strand
uaagaaaguacucauuguc

SEQ ID NO: 1900885 - RNA, 19 nt, Homo sapiens
  misc_RNA (1)...(19): siRNA sense strand
gaggcacggccgagaugua

SEQ ID NO: 1900886 - RNA, 19 nt, Homo sapiens
  misc_RNA (1)...(19): siRNA sense strand
gccgagggccacagacaaa

SEQ ID NO: 1900887 - RNA, 19 nt, Homo sapiens
  misc_RNA (1)...(19): siRNA sense strand
gcacagcccacuggcacuu

SEQ ID NO: 1900888 - RNA, 19 nt, Homo sapiens
  misc_RNA (1)...(19): siRNA sense strand
gggcuuugccuuugacauc

SEQ ID NO: 1900889 - RNA, 19 nt, Homo sapiens
  misc_RNA (1)...(19): siRNA sense strand
agaauguggcuguagauga

SEQ ID NO: 1900890 - RNA, 19 nt, Homo sapiens
  misc_RNA (1)...(19): siRNA sense strand
auccugagguuuucaauua

SEQ ID NO: 1900891 - RNA, 19 nt, Homo sapiens
  misc_RNA (1)...(19): siRNA sense strand
accaggaacccaagucuuu

SEQ ID NO: 1900892 - RNA, 19 nt, Homo sapiens
  misc_RNA (1)...(19): siRNA sense strand
ugccagggcuuugccuuug

SEQ ID NO: 1900893 - RNA, 19 nt, Homo sapiens
  misc_RNA (1)...(19): siRNA sense strand
uauuucaguucccgcugua

SEQ ID NO: 1900894 - RNA, 19 nt, Homo sapiens
  misc_RNA (1)...(19): siRNA sense strand
uuucaauuauggaguggaa

SEQ ID NO: 1900895 - RNA, 19 nt, Homo sapiens
  misc_RNA (1)...(19): siRNA sense strand
auucuacgauuccgguuug

SEQ ID NO: 1900896 - RNA, 19 nt, Homo sapiens
  misc_RNA (1)...(19): siRNA sense strand
cgucacagugucugauuug

SEQ ID NO: 1900897 - RNA, 19 nt, Homo sapiens
  misc_RNA (1)...(19): siRNA sense strand
gauucuacgauuccgguuu

SEQ ID NO: 1900898 - RNA, 19 nt, Homo sapiens
  misc_RNA (1)...(19): siRNA sense strand
gaggcugaccuagugauau

SEQ ID NO: 1900899 - RNA, 19 nt, Homo sapiens
  misc_RNA (1)...(19): siRNA sense strand
ggccacagacaaagauauc

SEQ ID NO: 1900900 - RNA, 19 nt, Homo sapiens
  misc_RNA (1)...(19): siRNA sense strand
gcagguaagaaaguacuca

SEQ ID NO: 1900901 - RNA, 19 nt, Homo sapiens
  misc_RNA (1)...(19): siRNA sense strand
ccgucacagugucugauuu

SEQ ID NO: 1900902 - RNA, 19 nt, Homo sapiens
  misc_RNA (1)...(19): siRNA sense strand
gugccagggcuuugccuuu

SEQ ID NO: 1900903 - RNA, 19 nt, Homo sapiens
  misc_RNA (1)...(19): siRNA sense strand
aaagauaucacugguacuc

SEQ ID NO: 1900904 - RNA, 19 nt, Homo sapiens
  misc_RNA (1)...(19): siRNA sense strand
cccagaggcugcagaccau

SEQ ID NO: 1900905 - RNA, 19 nt, Homo sapiens
  misc_RNA (1)...(19): siRNA sense strand
gacaggagucaauggagau

SEQ ID NO: 1900906 - RNA, 19 nt, Homo sapiens
  misc_RNA (1)...(19): siRNA sense strand
gcaccgucacagugucuga

SEQ ID NO: 1900907 - RNA, 19 nt, Homo sapiens
  misc_RNA (1)...(19): siRNA sense strand
acggauccuugaagaaugu

SEQ ID NO: 1900908 - RNA, 19 nt, Homo sapiens
  misc_RNA (1)...(19): siRNA sense strand
cauccgaagaagaaagaaa

SEQ ID NO: 1900909 - RNA, 19 nt, Homo sapiens
  misc_RNA (1)...(19): siRNA sense strand
cgagggccacagacaaaga

SEQ ID NO: 1900910 - RNA, 19 nt, Homo sapiens
  misc_RNA (1)...(19): siRNA sense strand
ugauuuguaugccaugaac

SEQ ID NO: 1900911 - RNA, 19 nt, Homo sapiens
  misc_RNA (1)...(19): siRNA sense strand
aauugcauccgaagaagaa

SEQ ID NO: 1900912 - RNA, 19 nt, Homo sapiens
  misc_RNA (1)...(19): siRNA sense strand
guaaacuagcgcuccuuuc

SEQ ID NO: 1900913 - RNA, 19 nt, Homo sapiens
  misc_RNA (1)...(19): siRNA sense strand
ucccaggauucuacgauuc

SEQ ID NO: 1900914 - RNA, 19 nt, Homo sapiens
  misc_RNA (1)...(19): siRNA sense strand
cuugaagaauguggcugua

SEQ ID NO: 1900915 - RNA, 19 nt, Homo sapiens
  misc_RNA (1)...(19): siRNA sense strand
gcauugagcugacacgaaa

SEQ ID NO: 1900916 - RNA, 19 nt, Homo sapiens
  misc_RNA (1)...(19): siRNA sense strand
ucaaugaccuguacacuug

SEQ ID NO: 1900917 - RNA, 19 nt, Homo sapiens
  misc_RNA (1)...(19): siRNA sense strand
caacacagccucaagaaug

SEQ ID NO: 1900918 - RNA, 19 nt, Homo sapiens
  misc_RNA (1)...(19): siRNA sense strand
gguacucacucaccaauga

SEQ ID NO: 1900919 - RNA, 19 nt, Homo sapiens
  misc_RNA (1)...(19): siRNA sense strand
uaaaacaccuggccuauga

SEQ ID NO: 1900920 - RNA, 19 nt, Homo sapiens
  misc_RNA (1)...(19): siRNA sense strand
ccucaagaauggagucuaa

SEQ ID NO: 1900921 - RNA, 19 nt, Homo sapiens
  misc_RNA (1)...(19): siRNA sense strand
gccaagcgcucaugcucua

SEQ ID NO: 1900922 - RNA, 19 nt, Homo sapiens
  misc_RNA (1)...(19): siRNA sense strand
ucagugacauuguggguuu

SEQ ID NO: 1900923 - RNA, 19 nt, Homo sapiens
  misc_RNA (1)...(19): siRNA sense strand
gauugucuccuucuucaua

SEQ ID NO: 1900924 - RNA, 19 nt, Homo sapiens
  misc_RNA (1)...(19): siRNA sense strand
guauacagcuuugggauca

SEQ ID NO: 1900925 - RNA, 19 nt, Homo sapiens
  misc_RNA (1)...(19): siRNA sense strand
ugaaacgugugaaccguaa

SEQ ID NO: 1900926 - RNA, 19 nt, Homo sapiens
  misc_RNA (1)...(19): siRNA sense strand
gcaaaggccgaguuaucua

SEQ ID NO: 1900927 - RNA, 19 nt, Homo sapiens
  misc_RNA (1)...(19): siRNA sense strand
ccaagacagcauauuauaa

SEQ ID NO: 1900928 - RNA, 19 nt, Homo sapiens
  misc_RNA (1)...(19): siRNA sense strand
gccaagacagcauauuaua

SEQ ID NO: 1900929 - RNA, 19 nt, Homo sapiens
  misc_RNA (1)...(19): siRNA sense strand
caagacagcauauuauaag

SEQ ID NO: 1900930 - RNA, 19 nt, Homo sapiens
  misc_RNA (1)...(19): siRNA sense strand
gcagcaacauccuggacaa

SEQ ID NO: 1900931 - RNA, 19 nt, Homo sapiens
  misc_RNA (1)...(19): siRNA sense strand
gcaaggacacaccguuuau

SEQ ID NO: 1900932 - RNA, 19 nt, Homo sapiens
  misc_RNA (1)...(19): siRNA sense strand
gagcaaggacacaccguuu

SEQ ID NO: 1900933 - RNA, 19 nt, Homo sapiens
  misc_RNA (1)...(19): siRNA sense strand
aggcauaccuggaggagaa

SEQ ID NO: 1900934 - RNA, 19 nt, Homo sapiens
  misc_RNA (1)...(19): siRNA sense strand
cauauaaagacccagauaa

SEQ ID NO: 1900935 - RNA, 19 nt, Homo sapiens
  misc_RNA (1)...(19): siRNA sense strand
cagauaaucccgaguacuu

SEQ ID NO: 1900936 - RNA, 19 nt, Homo sapiens
  misc_RNA (1)...(19): siRNA sense strand
gaaccgaagcuuucaaggu

SEQ ID NO: 1900937 - RNA, 19 nt, Homo sapiens
  misc_RNA (1)...(19): siRNA sense strand
ggaagaugcagcuggagaa

SEQ ID NO: 1900938 - RNA, 19 nt, Homo sapiens
  misc_RNA (1)...(19): siRNA sense strand
ugacguugcgcaaauuuaa

SEQ ID NO: 1900939 - RNA, 19 nt, Homo sapiens
  misc_RNA (1)...(19): siRNA sense strand
cgaacaaucuggaggaacu

SEQ ID NO: 1900940 - RNA, 19 nt, Homo sapiens
  misc_RNA (1)...(19): siRNA sense strand
gcgcaaaggccgaguuauc

SEQ ID NO: 1900941 - RNA, 19 nt, Homo sapiens
  misc_RNA (1)...(19): siRNA sense strand
caaccaagaucaccuuucc

SEQ ID NO: 1900942 - RNA, 19 nt, Homo sapiens
  misc_RNA (1)...(19): siRNA sense strand
cgcgaccgccucaauauua

SEQ ID NO: 1900943 - RNA, 19 nt, Homo sapiens
  misc_RNA (1)...(19): siRNA sense strand
gcuacacgccugcgaggua

SEQ ID NO: 1900944 - RNA, 19 nt, Homo sapiens
  misc_RNA (1)...(19): siRNA sense strand
uguuugaacugaagcauau

SEQ ID NO: 1900945 - RNA, 19 nt, Homo sapiens
  misc_RNA (1)...(19): siRNA sense strand
acacaccguuuaugccaaa

SEQ ID NO: 1900946 - RNA, 19 nt, Homo sapiens
  misc_RNA (1)...(19): siRNA sense strand
gggaagcccugaagaucca

SEQ ID NO: 1900947 - RNA, 19 nt, Homo sapiens
  misc_RNA (1)...(19): siRNA sense strand
ggaggaguuuggugguuuc

SEQ ID NO: 1900948 - RNA, 19 nt, Homo sapiens
  misc_RNA (1)...(19): siRNA sense strand
agaugcagcuggagaagga

SEQ ID NO: 1900949 - RNA, 19 nt, Homo sapiens
  misc_RNA (1)...(19): siRNA sense strand
caacuuugauguguacaag

SEQ ID NO: 1900950 - RNA, 19 nt, Homo sapiens
  misc_RNA (1)...(19): siRNA sense strand
uagacaacuuugaugugua

SEQ ID NO: 1900951 - RNA, 19 nt, Homo sapiens
  misc_RNA (1)...(19): siRNA sense strand
agagucaccuggaggaguu

SEQ ID NO: 1900952 - RNA, 19 nt, Homo sapiens
  misc_RNA (1)...(19): siRNA sense strand
gaaaaguccuguuugaacu

SEQ ID NO: 1900953 - RNA, 19 nt, Homo sapiens
  misc_RNA (1)...(19): siRNA sense strand
uggaauuccugaagcaguu

SEQ ID NO: 1900954 - RNA, 19 nt, Homo sapiens
  misc_RNA (1)...(19): siRNA sense strand
cuacuucagugacauugug

SEQ ID NO: 1900955 - RNA, 19 nt, Homo sapiens
  misc_RNA (1)...(19): siRNA sense strand
aauuacggcucccugcuaa

SEQ ID NO: 1900956 - RNA, 19 nt, Homo sapiens
  misc_RNA (1)...(19): siRNA sense strand
gauguggaaccgaagcuuu

SEQ ID NO: 1900957 - RNA, 19 nt, Homo sapiens
  misc_RNA (1)...(19): siRNA sense strand
ucacucagcggauguggaa

SEQ ID NO: 1900958 - RNA, 19 nt, Homo sapiens
  misc_RNA (1)...(19): siRNA sense strand
gaagggcaaaggcaagguu

SEQ ID NO: 1900959 - RNA, 19 nt, Homo sapiens
  misc_RNA (1)...(19): siRNA sense strand
uugcuuugaugcugucaua

SEQ ID NO: 1900960 - RNA, 19 nt, Homo sapiens
  misc_RNA (1)...(19): siRNA sense strand
gacgggcuccugcucuaua

SEQ ID NO: 1900961 - RNA, 19 nt, Homo sapiens
  misc_RNA (1)...(19): siRNA sense strand
uguacaagguggagacaau

SEQ ID NO: 1900962 - RNA, 19 nt, Homo sapiens
  misc_RNA (1)...(19): siRNA sense strand
ggaauuccugaagcaguua

SEQ ID NO: 1900963 - RNA, 19 nt, Homo sapiens
  misc_RNA (1)...(19): siRNA sense strand
agacaacuuugauguguac

SEQ ID NO: 1900964 - RNA, 19 nt, Homo sapiens
  misc_RNA (1)...(19): siRNA sense strand
guacugccgcuggccaaua

SEQ ID NO: 1900965 - RNA, 19 nt, Homo sapiens
  misc_RNA (1)...(19): siRNA sense strand
ggccgaagccuuugacagu

SEQ ID NO: 1900966 - RNA, 19 nt, Homo sapiens
  misc_RNA (1)...(19): siRNA sense strand
gcaucacccuggacuggau

SEQ ID NO: 1900967 - RNA, 19 nt, Homo sapiens
  misc_RNA (1)...(19): siRNA sense strand
caauuacggcucccugcua

SEQ ID NO: 1900968 - RNA, 19 nt, Homo sapiens
  misc_RNA (1)...(19): siRNA sense strand
gacugaagaugccccguua

SEQ ID NO: 1900969 - RNA, 19 nt, Homo sapiens
  misc_RNA (1)...(19): siRNA sense strand
gcauucugauugucuccuu

SEQ ID NO: 1900970 - RNA, 19 nt, Homo sapiens
  misc_RNA (1)...(19): siRNA sense strand
guacaagguggagacaauu

SEQ ID NO: 1900971 - RNA, 19 nt, Homo sapiens
  misc_RNA (1)...(19): siRNA sense strand
cgugguagaugggcgcuuu

SEQ ID NO: 1900972 - RNA, 19 nt, Homo sapiens
  misc_RNA (1)...(19): siRNA sense strand
ucaagggcaugcuguuucu

SEQ ID NO: 1900973 - RNA, 19 nt, Homo sapiens
  misc_RNA (1)...(19): siRNA sense strand
uugccaagacagcauauua

SEQ ID NO: 1900974 - RNA, 19 nt, Homo sapiens
  misc_RNA (1)...(19): siRNA sense strand
ggcaugcuguuucuacaca

SEQ ID NO: 1900975 - RNA, 19 nt, Homo sapiens
  misc_RNA (1)...(19): siRNA sense strand
gaagaugccccguuacugu

SEQ ID NO: 1900976 - RNA, 19 nt, Homo sapiens
  misc_RNA (1)...(19): siRNA sense strand
auagacaacuuugaugugu

SEQ ID NO: 1900977 - RNA, 19 nt, Homo sapiens
  misc_RNA (1)...(19): siRNA sense strand
uggugacccugcucaauga

SEQ ID NO: 1900978 - RNA, 19 nt, Homo sapiens
  misc_RNA (1)...(19): siRNA sense strand
acuaugggcuggagagcuu

SEQ ID NO: 1900979 - RNA, 19 nt, Homo sapiens
  misc_RNA (1)...(19): siRNA sense strand
guacuuggaauuccugaag

SEQ ID NO: 1900980 - RNA, 19 nt, Homo sapiens
  misc_RNA (1)...(19): siRNA sense strand
uggaggaguuuggugguuu

SEQ ID NO: 1900981 - RNA, 19 nt, Homo sapiens
  misc_RNA (1)...(19): siRNA sense strand
ucaagaauggagucuaaug

SEQ ID NO: 1900982 - RNA, 19 nt, Homo sapiens
  misc_RNA (1)...(19): siRNA sense strand
ugcgggaugugcagaauga

SEQ ID NO: 1900983 - RNA, 19 nt, Homo sapiens
  misc_RNA (1)...(19): siRNA sense strand
uauaaagacccagauaauc

SEQ ID NO: 1900984 - RNA, 19 nt, Homo sapiens
  misc_RNA (1)...(19): siRNA sense strand
caagaauggagucuaaugg

SEQ ID NO: 1900985 - RNA, 19 nt, Homo sapiens
  misc_RNA (1)...(19): siRNA sense strand
ccuguacacuugcuuugau

SEQ ID NO: 1900986 - RNA, 19 nt, Homo sapiens
  misc_RNA (1)...(19): siRNA sense strand
ggugacguauacagcuuug

SEQ ID NO: 1900987 - RNA, 19 nt, Homo sapiens
  misc_RNA (1)...(19): siRNA sense strand
aaaguccuguuugaacuga

SEQ ID NO: 1900988 - RNA, 19 nt, Homo sapiens
  misc_RNA (1)...(19): siRNA sense strand
cugauugucuccuucuuca

SEQ ID NO: 1900989 - RNA, 19 nt, Homo sapiens
  misc_RNA (1)...(19): siRNA sense strand
acauauaaagacccagaua

SEQ ID NO: 1900990 - RNA, 19 nt, Homo sapiens
  misc_RNA (1)...(19): siRNA sense strand
ggagaacagcagcaacauc

SEQ ID NO: 1900991 - RNA, 19 nt, Homo sapiens
  misc_RNA (1)...(19): siRNA sense strand
gcaaauuuaacagggagaa

SEQ ID NO: 1900992 - RNA, 19 nt, Homo sapiens
  misc_RNA (1)...(19): siRNA sense strand
ugaagcauaugcgggaugu

SEQ ID NO: 1900993 - RNA, 19 nt, Homo sapiens
  misc_RNA (1)...(19): siRNA sense strand
uucaaggugugacaggaua

SEQ ID NO: 1900994 - RNA, 19 nt, Homo sapiens
  misc_RNA (1)...(19): siRNA sense strand
caaccucguggcugugaaa

SEQ ID NO: 1900995 - RNA, 19 nt, Homo sapiens
  misc_RNA (1)...(19): siRNA sense strand
ggaguggugggacugaaga

SEQ ID NO: 1900996 - RNA, 19 nt, Homo sapiens
  misc_RNA (1)...(19): siRNA sense strand
ccgaagccuuugacagugu

SEQ ID NO: 1900997 - RNA, 19 nt, Homo sapiens
  misc_RNA (1)...(19): siRNA sense strand
gagcaguacgcgaacaauc

SEQ ID NO: 1900998 - RNA, 19 nt, Homo sapiens
  misc_RNA (1)...(19): siRNA sense strand
gcaacauccuggacaaccu

SEQ ID NO: 1900999 - RNA, 19 nt, Homo sapiens
  misc_RNA (1)...(19): siRNA sense strand
cgaagccuuugacaguguu

SEQ ID NO: 1901000 - RNA, 19 nt, Homo sapiens
  misc_RNA (1)...(19): siRNA sense strand
gcgaccgccucaauauuac

SEQ ID NO: 1901001 - RNA, 19 nt, Homo sapiens
  misc_RNA (1)...(19): siRNA sense strand
guggugacccugcucaaug

SEQ ID NO: 1901002 - RNA, 19 nt, Homo sapiens
  misc_RNA (1)...(19): siRNA sense strand
gcaguacgcgaacaaucug

SEQ ID NO: 1901003 - RNA, 19 nt, Homo sapiens
  misc_RNA (1)...(19): siRNA sense strand
gcuuugaugcugucauaga

SEQ ID NO: 1901004 - RNA, 19 nt, Homo sapiens
  misc_RNA (1)...(19): siRNA sense strand
gcaugcuguuucuacacaa

SEQ ID NO: 1901005 - RNA, 19 nt, Homo sapiens
  misc_RNA (1)...(19): siRNA sense strand
ugacaguguuaccaucuac

SEQ ID NO: 1901006 - RNA, 19 nt, Homo sapiens
  misc_RNA (1)...(19): siRNA sense strand
cgccugacguugcgcaaau

SEQ ID NO: 1901007 - RNA, 19 nt, Homo sapiens
  misc_RNA (1)...(19): siRNA sense strand
cccuggaggugcuggcuuu

SEQ ID NO: 1901008 - RNA, 19 nt, Homo sapiens
  misc_RNA (1)...(19): siRNA sense strand
ucauagacaacuuugaugu

SEQ ID NO: 1901009 - RNA, 19 nt, Homo sapiens
  misc_RNA (1)...(19): siRNA sense strand
gaccugagccccaaagaga

SEQ ID NO: 1901010 - RNA, 19 nt, Homo sapiens
  misc_RNA (1)...(19): siRNA sense strand
gcaaccucguggcugugaa

SEQ ID NO: 1901011 - RNA, 19 nt, Homo sapiens
  misc_RNA (1)...(19): siRNA sense strand
gcucaagaucaccgacuau

SEQ ID NO: 1901012 - RNA, 19 nt, Homo sapiens
  misc_RNA (1)...(19): siRNA sense strand
gaggggauguagaaaugaa

SEQ ID NO: 1901013 - RNA, 19 nt, Homo sapiens
  misc_RNA (1)...(19): siRNA sense strand
ccgcgcaaaggccgaguua

SEQ ID NO: 1901014 - RNA, 19 nt, Homo sapiens
  misc_RNA (1)...(19): siRNA sense strand
cauagacaacuuugaugug

SEQ ID NO: 1901015 - RNA, 19 nt, Homo sapiens
  misc_RNA (1)...(19): siRNA sense strand
aaacugagcuggaaucuaa

SEQ ID NO: 1901016 - RNA, 19 nt, Homo sapiens
  misc_RNA (1)...(19): siRNA sense strand
gaagaaaugaggacaaauu

SEQ ID NO: 1901017 - RNA, 19 nt, Homo sapiens
  misc_RNA (1)...(19): siRNA sense strand
gcaaacagaugauccaagu

SEQ ID NO: 1901018 - RNA, 19 nt, Homo sapiens
  misc_RNA (1)...(19): siRNA sense strand
ugaggaagaugguaacuaa

SEQ ID NO: 1901019 - RNA, 19 nt, Homo sapiens
  misc_RNA (1)...(19): siRNA sense strand
ggagaaaggugcucaagag

SEQ ID NO: 1901020 - RNA, 19 nt, Homo sapiens
  misc_RNA (1)...(19): siRNA sense strand
gaggacaaauuacaucaaa

SEQ ID NO: 1901021 - RNA, 19 nt, Homo sapiens
  misc_RNA (1)...(19): siRNA sense strand
cagcuaagauuuaucagaa

SEQ ID NO: 1901022 - RNA, 19 nt, Homo sapiens
  misc_RNA (1)...(19): siRNA sense strand
gcacgaaagucaaagaagu

SEQ ID NO: 1901023 - RNA, 19 nt, Homo sapiens
  misc_RNA (1)...(19): siRNA sense strand
gguauccggucuuagaaua

SEQ ID NO: 1901024 - RNA, 19 nt, Homo sapiens
  misc_RNA (1)...(19): siRNA sense strand
caaagaaguugggaaaguu

SEQ ID NO: 1901025 - RNA, 19 nt, Homo sapiens
  misc_RNA (1)...(19): siRNA sense strand
gaacugaggaagaugguaa

SEQ ID NO: 1901026 - RNA, 19 nt, Homo sapiens
  misc_RNA (1)...(19): siRNA sense strand
gaaaugaggacaaauuaca

SEQ ID NO: 1901027 - RNA, 19 nt, Homo sapiens
  misc_RNA (1)...(19): siRNA sense strand
caaggaagcagcaaagaaa

SEQ ID NO: 1901028 - RNA, 19 nt, Homo sapiens
  misc_RNA (1)...(19): siRNA sense strand
ggacaaauuacaucaaaga

SEQ ID NO: 1901029 - RNA, 19 nt, Homo sapiens
  misc_RNA (1)...(19): siRNA sense strand
gaacagccaauuucucuau

SEQ ID NO: 1901030 - RNA, 19 nt, Homo sapiens
  misc_RNA (1)...(19): siRNA sense strand
cauugaaccugaaauugua

SEQ ID NO: 1901031 - RNA, 19 nt, Homo sapiens
  misc_RNA (1)...(19): siRNA sense strand
uguaagagaugcugacuau

SEQ ID NO: 1901032 - RNA, 19 nt, Homo sapiens
  misc_RNA (1)...(19): siRNA sense strand
uugaacagcuggugaaauu

SEQ ID NO: 1901033 - RNA, 19 nt, Homo sapiens
  misc_RNA (1)...(19): siRNA sense strand
ucaaagaacugaggaagau

SEQ ID NO: 1901034 - RNA, 19 nt, Homo sapiens
  misc_RNA (1)...(19): siRNA sense strand
caaagguacuuccaggauu

SEQ ID NO: 1901035 - RNA, 19 nt, Homo sapiens
  misc_RNA (1)...(19): siRNA sense strand
guacaucgcuccugcaaaa

SEQ ID NO: 1901036 - RNA, 19 nt, Homo sapiens
  misc_RNA (1)...(19): siRNA sense strand
gaagaauacaccaucauga

SEQ ID NO: 1901037 - RNA, 19 nt, Homo sapiens
  misc_RNA (1)...(19): siRNA sense strand
gagaaaagcccgucuguuu

SEQ ID NO: 1901038 - RNA, 19 nt, Homo sapiens
  misc_RNA (1)...(19): siRNA sense strand
aaagguacuuccaggauuu

SEQ ID NO: 1901039 - RNA, 19 nt, Homo sapiens
  misc_RNA (1)...(19): siRNA sense strand
gaaaauguaucaagcucua

SEQ ID NO: 1901040 - RNA, 19 nt, Homo sapiens
  misc_RNA (1)...(19): siRNA sense strand
aauaacagauccacgcuuu

SEQ ID NO: 1901041 - RNA, 19 nt, Homo sapiens
  misc_RNA (1)...(19): siRNA sense strand
gcuaagauuuaucagaaug

SEQ ID NO: 1901042 - RNA, 19 nt, Homo sapiens
  misc_RNA (1)...(19): siRNA sense strand
ggaagaugguaacuaagug

SEQ ID NO: 1901043 - RNA, 19 nt, Homo sapiens
  misc_RNA (1)...(19): siRNA sense strand
cgaaagaauuguccugcuu

SEQ ID NO: 1901044 - RNA, 19 nt, Homo sapiens
  misc_RNA (1)...(19): siRNA sense strand
uaagagaugcugacuauuc

SEQ ID NO: 1901045 - RNA, 19 nt, Homo sapiens
  misc_RNA (1)...(19): siRNA sense strand
uagaagaagugauggguau

SEQ ID NO: 1901046 - RNA, 19 nt, Homo sapiens
  misc_RNA (1)...(19): siRNA sense strand
ggaaauggccaucguccuu

SEQ ID NO: 1901047 - RNA, 19 nt, Homo sapiens
  misc_RNA (1)...(19): siRNA sense strand
caaccaagcauucauguuc

SEQ ID NO: 1901048 - RNA, 19 nt, Homo sapiens
  misc_RNA (1)...(19): siRNA sense strand
gaccuagucuuuaaugaag

SEQ ID NO: 1901049 - RNA, 19 nt, Homo sapiens
  misc_RNA (1)...(19): siRNA sense strand
ugagaucauuuaugucuga

SEQ ID NO: 1901050 - RNA, 19 nt, Homo sapiens
  misc_RNA (1)...(19): siRNA sense strand
gacugcagcucaccuuuga

SEQ ID NO: 1901051 - RNA, 19 nt, Homo sapiens
  misc_RNA (1)...(19): siRNA sense strand
gcaucagucugccauguau

SEQ ID NO: 1901052 - RNA, 19 nt, Homo sapiens
  misc_RNA (1)...(19): siRNA sense strand
guaucaagcucuacuuuac

SEQ ID NO: 1901053 - RNA, 19 nt, Homo sapiens
  misc_RNA (1)...(19): siRNA sense strand
ggaccgaugagaauaacua

SEQ ID NO: 1901054 - RNA, 19 nt, Homo sapiens
  misc_RNA (1)...(19): siRNA sense strand
uguggcagcugcaaaguuu

SEQ ID NO: 1901055 - RNA, 19 nt, Homo sapiens
  misc_RNA (1)...(19): siRNA sense strand
aaacaacaguacucaagga

SEQ ID NO: 1901056 - RNA, 19 nt, Homo sapiens
  misc_RNA (1)...(19): siRNA sense strand
ccagggaacuccucugaca

SEQ ID NO: 1901057 - RNA, 19 nt, Homo sapiens
  misc_RNA (1)...(19): siRNA sense strand
ugagcgaccugcuggaauu

SEQ ID NO: 1901058 - RNA, 19 nt, Homo sapiens
  misc_RNA (1)...(19): siRNA sense strand
guaacuaagugucccaaca

SEQ ID NO: 1901059 - RNA, 19 nt, Homo sapiens
  misc_RNA (1)...(19): siRNA sense strand
ucaaagaaguugggaaagu

SEQ ID NO: 1901060 - RNA, 19 nt, Homo sapiens
  misc_RNA (1)...(19): siRNA sense strand
gcacagcccugcacaugcu

SEQ ID NO: 1901061 - RNA, 19 nt, Homo sapiens
  misc_RNA (1)...(19): siRNA sense strand
guccauggguuuauauaug

SEQ ID NO: 1901062 - RNA, 19 nt, Homo sapiens
  misc_RNA (1)...(19): siRNA sense strand
gaagagaagaugcaucagu

SEQ ID NO: 1901063 - RNA, 19 nt, Homo sapiens
  misc_RNA (1)...(19): siRNA sense strand
gcaacacaacuauuuaugu

SEQ ID NO: 1901064 - RNA, 19 nt, Homo sapiens
  misc_RNA (1)...(19): siRNA sense strand
gcagcucaccuuugaagaa

SEQ ID NO: 1901065 - RNA, 19 nt, Homo sapiens
  misc_RNA (1)...(19): siRNA sense strand
caucguccuuccacucuaa

SEQ ID NO: 1901066 - RNA, 19 nt, Homo sapiens
  misc_RNA (1)...(19): siRNA sense strand
gaacacgcccuugagauca

SEQ ID NO: 1901067 - RNA, 19 nt, Homo sapiens
  misc_RNA (1)...(19): siRNA sense strand
caaaggaaauggccaucgu

SEQ ID NO: 1901068 - RNA, 19 nt, Homo sapiens
  misc_RNA (1)...(19): siRNA sense strand
gcaaagguacuuccaggau

SEQ ID NO: 1901069 - RNA, 19 nt, Homo sapiens
  misc_RNA (1)...(19): siRNA sense strand
cuacagagaggaccgauga

SEQ ID NO: 1901070 - RNA, 19 nt, Homo sapiens
  misc_RNA (1)...(19): siRNA sense strand
gcucaugucuaggaggaaa

SEQ ID NO: 1901071 - RNA, 19 nt, Homo sapiens
  misc_RNA (1)...(19): siRNA sense strand
gaacagcuggugaaauuuu

SEQ ID NO: 1901072 - RNA, 19 nt, Homo sapiens
  misc_RNA (1)...(19): siRNA sense strand
gaauacaccaucaugaaag

SEQ ID NO: 1901073 - RNA, 19 nt, Homo sapiens
  misc_RNA (1)...(19): siRNA sense strand
gagaggaccgaugagaaua

SEQ ID NO: 1901074 - RNA, 19 nt, Homo sapiens
  misc_RNA (1)...(19): siRNA sense strand
ccucagcucuccacaaucu

SEQ ID NO: 1901075 - RNA, 19 nt, Homo sapiens
  misc_RNA (1)...(19): siRNA sense strand
aaagaaguugggaaaguua

SEQ ID NO: 1901076 - RNA, 19 nt, Homo sapiens
  misc_RNA (1)...(19): siRNA sense strand
uaaacaaugccuucagcua

SEQ ID NO: 1901077 - RNA, 19 nt, Homo sapiens
  misc_RNA (1)...(19): siRNA sense strand
cagcagaaccaacaaggaa

SEQ ID NO: 1901078 - RNA, 19 nt, Homo sapiens
  misc_RNA (1)...(19): siRNA sense strand
cuacuaagcacaauuccaa

SEQ ID NO: 1901079 - RNA, 19 nt, Homo sapiens
  misc_RNA (1)...(19): siRNA sense strand
gcccuucgaacacuaauaa

SEQ ID NO: 1901080 - RNA, 19 nt, Homo sapiens
  misc_RNA (1)...(19): siRNA sense strand
gaccaaaggcuaccacagu

SEQ ID NO: 1901081 - RNA, 19 nt, Homo sapiens
  misc_RNA (1)...(19): siRNA sense strand
cuaagugucccaacaauuc

SEQ ID NO: 1901082 - RNA, 19 nt, Homo sapiens
  misc_RNA (1)...(19): siRNA sense strand
uaacuaagugucccaacaa

SEQ ID NO: 1901083 - RNA, 19 nt, Homo sapiens
  misc_RNA (1)...(19): siRNA sense strand
uaagcacaauuccaaagga

SEQ ID NO: 1901084 - RNA, 19 nt, Homo sapiens
  misc_RNA (1)...(19): siRNA sense strand
ucagaaaugucuucaagcu

SEQ ID NO: 1901085 - RNA, 19 nt, Homo sapiens
  misc_RNA (1)...(19): siRNA sense strand
ggaagggcaacacaacuau

SEQ ID NO: 1901086 - RNA, 19 nt, Homo sapiens
  misc_RNA (1)...(19): siRNA sense strand
gaccugucgucuagaagaa

SEQ ID NO: 1901087 - RNA, 19 nt, Homo sapiens
  misc_RNA (1)...(19): siRNA sense strand
gugacuggccagcuuaaua

SEQ ID NO: 1901088 - RNA, 19 nt, Homo sapiens
  misc_RNA (1)...(19): siRNA sense strand
aacaugacaucuucgguuu

SEQ ID NO: 1901089 - RNA, 19 nt, Homo sapiens
  misc_RNA (1)...(19): siRNA sense strand
cagaugacgggagcuauua

SEQ ID NO: 1901090 - RNA, 19 nt, Homo sapiens
  misc_RNA (1)...(19): siRNA sense strand
uccaaaggauggccucaaa

SEQ ID NO: 1901091 - RNA, 19 nt, Homo sapiens
  misc_RNA (1)...(19): siRNA sense strand
ccaaaucagccuucaguuc

SEQ ID NO: 1901092 - RNA, 19 nt, Homo sapiens
  misc_RNA (1)...(19): siRNA sense strand
gaauuuaggagcacgaaag

SEQ ID NO: 1901093 - RNA, 19 nt, Homo sapiens
  misc_RNA (1)...(19): siRNA sense strand
gcuggaaucuaaggaacuu

SEQ ID NO: 1901094 - RNA, 19 nt, Homo sapiens
  misc_RNA (1)...(19): siRNA sense strand
gaagaugguaacuaagugu

SEQ ID NO: 1901095 - RNA, 19 nt, Homo sapiens
  misc_RNA (1)...(19): siRNA sense strand
acagccaauuucucuauuu

SEQ ID NO: 1901096 - RNA, 19 nt, Homo sapiens
  misc_RNA (1)...(19): siRNA sense strand
cuauuuaugugcuggaaga

SEQ ID NO: 1901097 - RNA, 19 nt, Homo sapiens
  misc_RNA (1)...(19): siRNA sense strand
gaagggcaacacaacuauu

SEQ ID NO: 1901098 - RNA, 19 nt, Homo sapiens
  misc_RNA (1)...(19): siRNA sense strand
ugacuggccagcuuaauau

SEQ ID NO: 1901099 - RNA, 19 nt, Homo sapiens
  misc_RNA (1)...(19): siRNA sense strand
ucaaguccguuaaguagca

SEQ ID NO: 1901100 - RNA, 19 nt, Homo sapiens
  misc_RNA (1)...(19): siRNA sense strand
ggaagcaugaguccagcua

SEQ ID NO: 1901101 - RNA, 19 nt, Homo sapiens
  misc_RNA (1)...(19): siRNA sense strand
cauggagauugucaacgua

SEQ ID NO: 1901102 - RNA, 19 nt, Homo sapiens
  misc_RNA (1)...(19): siRNA sense strand
cagagguucuaccaacuga

SEQ ID NO: 1901103 - RNA, 19 nt, Homo sapiens
  misc_RNA (1)...(19): siRNA sense strand
gggcaacacaacuauuuau

SEQ ID NO: 1901104 - RNA, 19 nt, Homo sapiens
  misc_RNA (1)...(19): siRNA sense strand
cagcucaccuuugaagaau

SEQ ID NO: 1901105 - RNA, 19 nt, Homo sapiens
  misc_RNA (1)...(19): siRNA sense strand
aaauucggauucuucauuc

SEQ ID NO: 1901106 - RNA, 19 nt, Homo sapiens
  misc_RNA (1)...(19): siRNA sense strand
agaauacaccaucaugaaa

SEQ ID NO: 1901107 - RNA, 19 nt, Homo sapiens
  misc_RNA (1)...(19): siRNA sense strand
aagaauacaccaucaugaa

SEQ ID NO: 1901108 - RNA, 19 nt, Homo sapiens
  misc_RNA (1)...(19): siRNA sense strand
gcucaccuuugaagaauac

SEQ ID NO: 1901109 - RNA, 19 nt, Homo sapiens
  misc_RNA (1)...(19): siRNA sense strand
gaauaacuacauggagauu

SEQ ID NO: 1901110 - RNA, 19 nt, Homo sapiens
  misc_RNA (1)...(19): siRNA sense strand
ggucaacacagcacugguu

SEQ ID NO: 1901111 - RNA, 19 nt, Homo sapiens
  misc_RNA (1)...(19): siRNA sense strand
gaaggucuagauauggaaa

SEQ ID NO: 1901112 - RNA, 19 nt, Homo sapiens
  misc_RNA (1)...(19): siRNA sense strand
gagcacgaaagucaaagaa

SEQ ID NO: 1901113 - RNA, 19 nt, Homo sapiens
  misc_RNA (1)...(19): siRNA sense strand
cuucagaaaugucuucaag

SEQ ID NO: 1901114 - RNA, 19 nt, Homo sapiens
  misc_RNA (1)...(19): siRNA sense strand
ugauggguauccggucuua

SEQ ID NO: 1901115 - RNA, 19 nt, Homo sapiens
  misc_RNA (1)...(19): siRNA sense strand
gaaaggacaucacagguaa

SEQ ID NO: 1901116 - RNA, 19 nt, Homo sapiens
  misc_RNA (1)...(19): siRNA sense strand
gaacuucaaucccaucauu

SEQ ID NO: 1901117 - RNA, 19 nt, Homo sapiens
  misc_RNA (1)...(19): siRNA sense strand
gaucaaagcuagaaaauga

SEQ ID NO: 1901118 - RNA, 19 nt, Homo sapiens
  misc_RNA (1)...(19): siRNA sense strand
gaaggacccugcgaacuuu

SEQ ID NO: 1901119 - RNA, 19 nt, Homo sapiens
  misc_RNA (1)...(19): siRNA sense strand
caacugacauauagcauug

SEQ ID NO: 1901120 - RNA, 19 nt, Homo sapiens
  misc_RNA (1)...(19): siRNA sense strand
gcaaguccaucccaacuga

SEQ ID NO: 1901121 - RNA, 19 nt, Homo sapiens
  misc_RNA (1)...(19): siRNA sense strand
ccgcagaccuugugauauu

SEQ ID NO: 1901122 - RNA, 19 nt, Homo sapiens
  misc_RNA (1)...(19): siRNA sense strand
gaaccucaacugacauaua

SEQ ID NO: 1901123 - RNA, 19 nt, Homo sapiens
  misc_RNA (1)...(19): siRNA sense strand
agaaacgccuggagaauau

SEQ ID NO: 1901124 - RNA, 19 nt, Homo sapiens
  misc_RNA (1)...(19): siRNA sense strand
gaagagcacugaucguacu

SEQ ID NO: 1901125 - RNA, 19 nt, Homo sapiens
  misc_RNA (1)...(19): siRNA sense strand
ggaagaaacgccuggagaa

SEQ ID NO: 1901126 - RNA, 19 nt, Homo sapiens
  misc_RNA (1)...(19): siRNA sense strand
gagaauauuugggaugaga

SEQ ID NO: 1901127 - RNA, 19 nt, Homo sapiens
  misc_RNA (1)...(19): siRNA sense strand
gagaguuugcuuacacuua

SEQ ID NO: 1901128 - RNA, 19 nt, Homo sapiens
  misc_RNA (1)...(19): siRNA sense strand
gcagacgcccgaauucaaa

SEQ ID NO: 1901129 - RNA, 19 nt, Homo sapiens
  misc_RNA (1)...(19): siRNA sense strand
ggacaucacagguaaacug

SEQ ID NO: 1901130 - RNA, 19 nt, Homo sapiens
  misc_RNA (1)...(19): siRNA sense strand
gaugagacaccacuguauu

SEQ ID NO: 1901131 - RNA, 19 nt, Homo sapiens
  misc_RNA (1)...(19): siRNA sense strand
caggcaggauucuuaauga

SEQ ID NO: 1901132 - RNA, 19 nt, Homo sapiens
  misc_RNA (1)...(19): siRNA sense strand
ccgagucuguucuggcuua

SEQ ID NO: 1901133 - RNA, 19 nt, Homo sapiens
  misc_RNA (1)...(19): siRNA sense strand
cagaagagcacugaucgua

SEQ ID NO: 1901134 - RNA, 19 nt, Homo sapiens
  misc_RNA (1)...(19): siRNA sense strand
gaagaaacgccuggagaau

SEQ ID NO: 1901135 - RNA, 19 nt, Homo sapiens
  misc_RNA (1)...(19): siRNA sense strand
agaguggcauucugcauuu

SEQ ID NO: 1901136 - RNA, 19 nt, Homo sapiens
  misc_RNA (1)...(19): siRNA sense strand
agucuguucuggcuuauaa

SEQ ID NO: 1901137 - RNA, 19 nt, Homo sapiens
  misc_RNA (1)...(19): siRNA sense strand
gucauucucuggccaauuc

SEQ ID NO: 1901138 - RNA, 19 nt, Homo sapiens
  misc_RNA (1)...(19): siRNA sense strand
agaaaggacaucacaggua

SEQ ID NO: 1901139 - RNA, 19 nt, Homo sapiens
  misc_RNA (1)...(19): siRNA sense strand
gcaggauucuuaaugaaaa

SEQ ID NO: 1901140 - RNA, 19 nt, Homo sapiens
  misc_RNA (1)...(19): siRNA sense strand
aagaaacgccuggagaaua

SEQ ID NO: 1901141 - RNA, 19 nt, Homo sapiens
  misc_RNA (1)...(19): siRNA sense strand
ugaaggacccugcgaacuu

SEQ ID NO: 1901142 - RNA, 19 nt, Homo sapiens
  misc_RNA (1)...(19): siRNA sense strand
gcauuucuguggcuuccaa

SEQ ID NO: 1901143 - RNA, 19 nt, Homo sapiens
  misc_RNA (1)...(19): siRNA sense strand
caucacagguaaacugaag

SEQ ID NO: 1901144 - RNA, 19 nt, Homo sapiens
  misc_RNA (1)...(19): siRNA sense strand
gguacaggaugaggagaaa

SEQ ID NO: 1901145 - RNA, 19 nt, Homo sapiens
  misc_RNA (1)...(19): siRNA sense strand
acacuuacgcugccaugua

SEQ ID NO: 1901146 - RNA, 19 nt, Homo sapiens
  misc_RNA (1)...(19): siRNA sense strand
gggaugagacaccacugua

SEQ ID NO: 1901147 - RNA, 19 nt, Homo sapiens
  misc_RNA (1)...(19): siRNA sense strand
cagcggcuuugaagaagaa

SEQ ID NO: 1901148 - RNA, 19 nt, Homo sapiens
  misc_RNA (1)...(19): siRNA sense strand
guaagaaggcagugcuuuc

SEQ ID NO: 1901149 - RNA, 19 nt, Homo sapiens
  misc_RNA (1)...(19): siRNA sense strand
aacaagaaauuuggccuuu

SEQ ID NO: 1901150 - RNA, 19 nt, Homo sapiens
  misc_RNA (1)...(19): siRNA sense strand
aaccucaacugacauauag

SEQ ID NO: 1901151 - RNA, 19 nt, Homo sapiens
  misc_RNA (1)...(19): siRNA sense strand
cuuagaaccucaacugaca

SEQ ID NO: 1901152 - RNA, 19 nt, Homo sapiens
  misc_RNA (1)...(19): siRNA sense strand
gcagcggcuuugaagaaga

SEQ ID NO: 1901153 - RNA, 19 nt, Homo sapiens
  misc_RNA (1)...(19): siRNA sense strand
caacugacaaccagaucaa

SEQ ID NO: 1901154 - RNA, 19 nt, Homo sapiens
  misc_RNA (1)...(19): siRNA sense strand
ggaccucuaugccaugaac

SEQ ID NO: 1901155 - RNA, 19 nt, Homo sapiens
  misc_RNA (1)...(19): siRNA sense strand
uggagaauauuugggauga

SEQ ID NO: 1901156 - RNA, 19 nt, Homo sapiens
  misc_RNA (1)...(19): siRNA sense strand
cacuuacgcugccauguau

SEQ ID NO: 1901157 - RNA, 19 nt, Homo sapiens
  misc_RNA (1)...(19): siRNA sense strand
gcuggaagccgcagaccuu

SEQ ID NO: 1901158 - RNA, 19 nt, Homo sapiens
  misc_RNA (1)...(19): siRNA sense strand
ggaccuccuucaacuaugc

SEQ ID NO: 1901159 - RNA, 19 nt, Homo sapiens
  misc_RNA (1)...(19): siRNA sense strand
gcuccaagcagccucuuug

SEQ ID NO: 1901160 - RNA, 19 nt, Homo sapiens
  misc_RNA (1)...(19): siRNA sense strand
ggaugagacaccacuguau

SEQ ID NO: 1901161 - RNA, 19 nt, Homo sapiens
  misc_RNA (1)...(19): siRNA sense strand
ggcaggauucuuaaugaaa

SEQ ID NO: 1901162 - RNA, 19 nt, Homo sapiens
  misc_RNA (1)...(19): siRNA sense strand
ggaagccgcagaccuugug

SEQ ID NO: 1901163 - RNA, 19 nt, Homo sapiens
  misc_RNA (1)...(19): siRNA sense strand
ucauaggagaguuugcuua

SEQ ID NO: 1901164 - RNA, 19 nt, Homo sapiens
  misc_RNA (1)...(19): siRNA sense strand
ccaggcaggauucuuaaug

SEQ ID NO: 1901165 - RNA, 19 nt, Homo sapiens
  misc_RNA (1)...(19): siRNA sense strand
gacaucacagguaaacuga

SEQ ID NO: 1901166 - RNA, 19 nt, Homo sapiens
  misc_RNA (1)...(19): siRNA sense strand
uauaaagaaggccaucuga

SEQ ID NO: 1901167 - RNA, 19 nt, Homo sapiens
  misc_RNA (1)...(19): siRNA sense strand
ucaacuaugccaugaagga

SEQ ID NO: 1901168 - RNA, 19 nt, Homo sapiens
  misc_RNA (1)...(19): siRNA sense strand
ugccauguaugacaaagga

SEQ ID NO: 1901169 - RNA, 19 nt, Homo sapiens
  misc_RNA (1)...(19): siRNA sense strand
cuuccaggcaggauucuua

SEQ ID NO: 1901170 - RNA, 19 nt, Homo sapiens
  misc_RNA (1)...(19): siRNA sense strand
uagaaccucaacugacaua

SEQ ID NO: 1901171 - RNA, 19 nt, Homo sapiens
  misc_RNA (1)...(19): siRNA sense strand
agaguuugcuuacacuuac

SEQ ID NO: 1901172 - RNA, 19 nt, Homo sapiens
  misc_RNA (1)...(19): siRNA sense strand
ggcaguggcuccauguacu

SEQ ID NO: 1901173 - RNA, 19 nt, Homo sapiens
  misc_RNA (1)...(19): siRNA sense strand
gaucguacuggcucacuca

SEQ ID NO: 1901174 - RNA, 19 nt, Homo sapiens
  misc_RNA (1)...(19): siRNA sense strand
ucaacugacauauagcauu

SEQ ID NO: 1901175 - RNA, 19 nt, Homo sapiens
  misc_RNA (1)...(19): siRNA sense strand
aggcaggauucuuaaugaa

SEQ ID NO: 1901176 - RNA, 19 nt, Homo sapiens
  misc_RNA (1)...(19): siRNA sense strand
cagauauuguggcugaaca

SEQ ID NO: 1901177 - RNA, 19 nt, Homo sapiens
  misc_RNA (1)...(19): siRNA sense strand
cugcagcggcuuugaagaa

SEQ ID NO: 1901178 - RNA, 19 nt, Homo sapiens
  misc_RNA (1)...(19): siRNA sense strand
aaacgccuggagaauauuu

SEQ ID NO: 1901179 - RNA, 19 nt, Homo sapiens
  misc_RNA (1)...(19): siRNA sense strand
uaggagaguuugcuuacac

SEQ ID NO: 1901180 - RNA, 19 nt, Homo sapiens
  misc_RNA (1)...(19): siRNA sense strand
gacaaccagaucaaagcua

SEQ ID NO: 1901181 - RNA, 19 nt, Homo sapiens
  misc_RNA (1)...(19): siRNA sense strand
gaauauuugggaugagaca

SEQ ID NO: 1901182 - RNA, 19 nt, Homo sapiens
  misc_RNA (1)...(19): siRNA sense strand
gaaacgccuggagaauauu

SEQ ID NO: 1901183 - RNA, 19 nt, Homo sapiens
  misc_RNA (1)...(19): siRNA sense strand
ccugcgaacuuucaguauc

SEQ ID NO: 1901184 - RNA, 19 nt, Homo sapiens
  misc_RNA (1)...(19): siRNA sense strand
agaaggcagugcuuuccau

SEQ ID NO: 1901185 - RNA, 19 nt, Homo sapiens
  misc_RNA (1)...(19): siRNA sense strand
gguggagucggaccucuau

SEQ ID NO: 1901186 - RNA, 19 nt, Homo sapiens
  misc_RNA (1)...(19): siRNA sense strand
ucaguauccugccgagucu

SEQ ID NO: 1901187 - RNA, 19 nt, Homo sapiens
  misc_RNA (1)...(19): siRNA sense strand
cauaggagaguuugcuuac

SEQ ID NO: 1901188 - RNA, 19 nt, Homo sapiens
  misc_RNA (1)...(19): siRNA sense strand
aaacuuccaggcaggauuc

SEQ ID NO: 1901189 - RNA, 19 nt, Homo sapiens
  misc_RNA (1)...(19): siRNA sense strand
ucacagguaaacugaagga

SEQ ID NO: 1901190 - RNA, 19 nt, Homo sapiens
  misc_RNA (1)...(19): siRNA sense strand
cagcagacgcccgaauuca

SEQ ID NO: 1901191 - RNA, 19 nt, Homo sapiens
  misc_RNA (1)...(19): siRNA sense strand
uggagucccugccauucug

SEQ ID NO: 1901192 - RNA, 19 nt, Homo sapiens
  misc_RNA (1)...(19): siRNA sense strand
gcagccucuuugaccuaaa

SEQ ID NO: 1901193 - RNA, 19 nt, Homo sapiens
  misc_RNA (1)...(19): siRNA sense strand
ggagaauauuugggaugag

SEQ ID NO: 1901194 - RNA, 19 nt, Homo sapiens
  misc_RNA (1)...(19): siRNA sense strand
augagacaccacuguauuu

SEQ ID NO: 1901195 - RNA, 19 nt, Homo sapiens
  misc_RNA (1)...(19): siRNA sense strand
uaaacuuccaggcaggauu

SEQ ID NO: 1901196 - RNA, 19 nt, Homo sapiens
  misc_RNA (1)...(19): siRNA sense strand
guacuggcucacucagaga

SEQ ID NO: 1901197 - RNA, 19 nt, Homo sapiens
  misc_RNA (1)...(19): siRNA sense strand
ggauugaacuuucgaauua

SEQ ID NO: 1901198 - RNA, 19 nt, Homo sapiens
  misc_RNA (1)...(19): siRNA sense strand
ggaaugaucucacugauga

SEQ ID NO: 1901199 - RNA, 19 nt, Homo sapiens
  misc_RNA (1)...(19): siRNA sense strand
ggaaaguaaugaagaguug

SEQ ID NO: 1901200 - RNA, 19 nt, Homo sapiens
  misc_RNA (1)...(19): siRNA sense strand
gauaaugcauacaucgaua

SEQ ID NO: 1901201 - RNA, 19 nt, Homo sapiens
  misc_RNA (1)...(19): siRNA sense strand
gcaaacgaauuguuccaaa

SEQ ID NO: 1901202 - RNA, 19 nt, Homo sapiens
  misc_RNA (1)...(19): siRNA sense strand
uaacgcaacuuucuauuuc

SEQ ID NO: 1901203 - RNA, 19 nt, Homo sapiens
  misc_RNA (1)...(19): siRNA sense strand
gcaaugacaaggauuuauu

SEQ ID NO: 1901204 - RNA, 19 nt, Homo sapiens
  misc_RNA (1)...(19): siRNA sense strand
ggugguggcuggcaagaaa

SEQ ID NO: 1901205 - RNA, 19 nt, Homo sapiens
  misc_RNA (1)...(19): siRNA sense strand
acccagaccugccagauua

SEQ ID NO: 1901206 - RNA, 19 nt, Homo sapiens
  misc_RNA (1)...(19): siRNA sense strand
caacauuccucccucuuca

SEQ ID NO: 1901207 - RNA, 19 nt, Homo sapiens
  misc_RNA (1)...(19): siRNA sense strand
gaauaacgcaacuuucuau

SEQ ID NO: 1901208 - RNA, 19 nt, Homo sapiens
  misc_RNA (1)...(19): siRNA sense strand
gaaacuaauuaccauccuu

SEQ ID NO: 1901209 - RNA, 19 nt, Homo sapiens
  misc_RNA (1)...(19): siRNA sense strand
agaaacaacuagucaccua

SEQ ID NO: 1901210 - RNA, 19 nt, Homo sapiens
  misc_RNA (1)...(19): siRNA sense strand
gcaagucccuuuggaaugg

SEQ ID NO: 1901211 - RNA, 19 nt, Homo sapiens
  misc_RNA (1)...(19): siRNA sense strand
caacaacacucaacauucc

SEQ ID NO: 1901212 - RNA, 19 nt, Homo sapiens
  misc_RNA (1)...(19): siRNA sense strand
gcaacuuucuauuucaaga

SEQ ID NO: 1901213 - RNA, 19 nt, Homo sapiens
  misc_RNA (1)...(19): siRNA sense strand
guacaaggaugcugcaaaa

SEQ ID NO: 1901214 - RNA, 19 nt, Homo sapiens
  misc_RNA (1)...(19): siRNA sense strand
uugcaacgcugaaguuuau

SEQ ID NO: 1901215 - RNA, 19 nt, Homo sapiens
  misc_RNA (1)...(19): siRNA sense strand
gaaacaacuagucaccuaa

SEQ ID NO: 1901216 - RNA, 19 nt, Homo sapiens
  misc_RNA (1)...(19): siRNA sense strand
augcugcucugaagaaaua

SEQ ID NO: 1901217 - RNA, 19 nt, Homo sapiens
  misc_RNA (1)...(19): siRNA sense strand
auacaucgauauucagcua

SEQ ID NO: 1901218 - RNA, 19 nt, Homo sapiens
  misc_RNA (1)...(19): siRNA sense strand
caaggaaaguaaugaagag

SEQ ID NO: 1901219 - RNA, 19 nt, Homo sapiens
  misc_RNA (1)...(19): siRNA sense strand
ggauuguccuguucaaagu

SEQ ID NO: 1901220 - RNA, 19 nt, Homo sapiens
  misc_RNA (1)...(19): siRNA sense strand
cgaaagcugugagaccaaa

SEQ ID NO: 1901221 - RNA, 19 nt, Homo sapiens
  misc_RNA (1)...(19): siRNA sense strand
caaacgaauuguuccaaag

SEQ ID NO: 1901222 - RNA, 19 nt, Homo sapiens
  misc_RNA (1)...(19): siRNA sense strand
gaagaggagcaguacgaaa

SEQ ID NO: 1901223 - RNA, 19 nt, Homo sapiens
  misc_RNA (1)...(19): siRNA sense strand
gguuggcucugacacguuu

SEQ ID NO: 1901224 - RNA, 19 nt, Homo sapiens
  misc_RNA (1)...(19): siRNA sense strand
ccagagauauacccaccaa

SEQ ID NO: 1901225 - RNA, 19 nt, Homo sapiens
  misc_RNA (1)...(19): siRNA sense strand
guacaaccaccuaccaaga

SEQ ID NO: 1901226 - RNA, 19 nt, Homo sapiens
  misc_RNA (1)...(19): siRNA sense strand
ccaggcugcuacuaaguuu

SEQ ID NO: 1901227 - RNA, 19 nt, Homo sapiens
  misc_RNA (1)...(19): siRNA sense strand
guacagauaaugcauacau

SEQ ID NO: 1901228 - RNA, 19 nt, Homo sapiens
  misc_RNA (1)...(19): siRNA sense strand
cagagaauaacgcaacuuu

SEQ ID NO: 1901229 - RNA, 19 nt, Homo sapiens
  misc_RNA (1)...(19): siRNA sense strand
ccaaggaaaguaaugaaga

SEQ ID NO: 1901230 - RNA, 19 nt, Homo sapiens
  misc_RNA (1)...(19): siRNA sense strand
gccaaagccuagauugcaa

SEQ ID NO: 1901231 - RNA, 19 nt, Homo sapiens
  misc_RNA (1)...(19): siRNA sense strand
cuaagacgguuggcucuga

SEQ ID NO: 1901232 - RNA, 19 nt, Homo sapiens
  misc_RNA (1)...(19): siRNA sense strand
ggaugcugcucugaagaaa

SEQ ID NO: 1901233 - RNA, 19 nt, Homo sapiens
  misc_RNA (1)...(19): siRNA sense strand
gaggagcaguacgaaauuc

SEQ ID NO: 1901234 - RNA, 19 nt, Homo sapiens
  misc_RNA (1)...(19): siRNA sense strand
acaaccaccuaccaagauu

SEQ ID NO: 1901235 - RNA, 19 nt, Homo sapiens
  misc_RNA (1)...(19): siRNA sense strand
acgaauugcuuccuucuca

SEQ ID NO: 1901236 - RNA, 19 nt, Homo sapiens
  misc_RNA (1)...(19): siRNA sense strand
ggugauaccggugaaugua

SEQ ID NO: 1901237 - RNA, 19 nt, Homo sapiens
  misc_RNA (1)...(19): siRNA sense strand
ccaaaguaacaaccaguuu

SEQ ID NO: 1901238 - RNA, 19 nt, Homo sapiens
  misc_RNA (1)...(19): siRNA sense strand
ugacugcaaugacaaggau

SEQ ID NO: 1901239 - RNA, 19 nt, Homo sapiens
  misc_RNA (1)...(19): siRNA sense strand
ccgaggaaauugacugcaa

SEQ ID NO: 1901240 - RNA, 19 nt, Homo sapiens
  misc_RNA (1)...(19): siRNA sense strand
gaauggugauaccggugaa

SEQ ID NO: 1901241 - RNA, 19 nt, Homo sapiens
  misc_RNA (1)...(19): siRNA sense strand
ggaaucacaguccgaggaa

SEQ ID NO: 1901242 - RNA, 19 nt, Homo sapiens
  misc_RNA (1)...(19): siRNA sense strand
ggugguggcuggauugaac

SEQ ID NO: 1901243 - RNA, 19 nt, Homo sapiens
  misc_RNA (1)...(19): siRNA sense strand
gacaggugguggcuggauu

SEQ ID NO: 1901244 - RNA, 19 nt, Homo sapiens
  misc_RNA (1)...(19): siRNA sense strand
caaccaguuuguauuguac

SEQ ID NO: 1901245 - RNA, 19 nt, Homo sapiens
  misc_RNA (1)...(19): siRNA sense strand
gaggagacacugacucaca

SEQ ID NO: 1901246 - RNA, 19 nt, Homo sapiens
  misc_RNA (1)...(19): siRNA sense strand
aaacgaauuguuccaaaga

SEQ ID NO: 1901247 - RNA, 19 nt, Homo sapiens
  misc_RNA (1)...(19): siRNA sense strand
gcauaacugaagccacuaa

SEQ ID NO: 1901248 - RNA, 19 nt, Homo sapiens
  misc_RNA (1)...(19): siRNA sense strand
aaugaagaguugaccgaaa

SEQ ID NO: 1901249 - RNA, 19 nt, Homo sapiens
  misc_RNA (1)...(19): siRNA sense strand
ugacucacaccaucacaaa

SEQ ID NO: 1901250 - RNA, 19 nt, Homo sapiens
  misc_RNA (1)...(19): siRNA sense strand
gacacggcauucaguacuu

SEQ ID NO: 1901251 - RNA, 19 nt, Homo sapiens
  misc_RNA (1)...(19): siRNA sense strand
gcuccaggcugcuacuaag

SEQ ID NO: 1901252 - RNA, 19 nt, Homo sapiens
  misc_RNA (1)...(19): siRNA sense strand
gggaagaggagcaguacga

SEQ ID NO: 1901253 - RNA, 19 nt, Homo sapiens
  misc_RNA (1)...(19): siRNA sense strand
augcauacaucgauauuca

SEQ ID NO: 1901254 - RNA, 19 nt, Homo sapiens
  misc_RNA (1)...(19): siRNA sense strand
gaaaguaaugaagaguuga

SEQ ID NO: 1901255 - RNA, 19 nt, Homo sapiens
  misc_RNA (1)...(19): siRNA sense strand
gaaucacaguccgaggaaa

SEQ ID NO: 1901256 - RNA, 19 nt, Homo sapiens
  misc_RNA (1)...(19): siRNA sense strand
ggaagaggagcaguacgaa

SEQ ID NO: 1901257 - RNA, 19 nt, Homo sapiens
  misc_RNA (1)...(19): siRNA sense strand
ggcauucaguacuuuaaca

SEQ ID NO: 1901258 - RNA, 19 nt, Homo sapiens
  misc_RNA (1)...(19): siRNA sense strand
gcaggacugugaguacaag

SEQ ID NO: 1901259 - RNA, 19 nt, Homo sapiens
  misc_RNA (1)...(19): siRNA sense strand
ccagggaaaccacauguuc

SEQ ID NO: 1901260 - RNA, 19 nt, Homo sapiens
  misc_RNA (1)...(19): siRNA sense strand
gaauuguuccaaagagaau

SEQ ID NO: 1901261 - RNA, 19 nt, Homo sapiens
  misc_RNA (1)...(19): siRNA sense strand
acacggcauucaguacuuu

SEQ ID NO: 1901262 - RNA, 19 nt, Homo sapiens
  misc_RNA (1)...(19): siRNA sense strand
gggauuguccuguucaaag

SEQ ID NO: 1901263 - RNA, 19 nt, Homo sapiens
  misc_RNA (1)...(19): siRNA sense strand
ugaaaaggccuccagguuu

SEQ ID NO: 1901264 - RNA, 19 nt, Homo sapiens
  misc_RNA (1)...(19): siRNA sense strand
cgaauuguuccaaagagaa

SEQ ID NO: 1901265 - RNA, 19 nt, Homo sapiens
  misc_RNA (1)...(19): siRNA sense strand
uaacugaagccacuaagac

SEQ ID NO: 1901266 - RNA, 19 nt, Homo sapiens
  misc_RNA (1)...(19): siRNA sense strand
cgcugaaguuuauguggua

SEQ ID NO: 1901267 - RNA, 19 nt, Homo sapiens
  misc_RNA (1)...(19): siRNA sense strand
uaacaacaacacucaacau

SEQ ID NO: 1901268 - RNA, 19 nt, Homo sapiens
  misc_RNA (1)...(19): siRNA sense strand
gcauucaguacuuuaacaa

SEQ ID NO: 1901269 - RNA, 19 nt, Homo sapiens
  misc_RNA (1)...(19): siRNA sense strand
gaccuggagcccauucuga

SEQ ID NO: 1901270 - RNA, 19 nt, Homo sapiens
  misc_RNA (1)...(19): siRNA sense strand
aagaggagcaguacgaaau

SEQ ID NO: 1901271 - RNA, 19 nt, Homo sapiens
  misc_RNA (1)...(19): siRNA sense strand
ugagacacggcauucagua

SEQ ID NO: 1901272 - RNA, 19 nt, Homo sapiens
  misc_RNA (1)...(19): siRNA sense strand
gggaaugaucucacugaug

SEQ ID NO: 1901273 - RNA, 19 nt, Homo sapiens
  misc_RNA (1)...(19): siRNA sense strand
caaccaccuaccaagauuu

SEQ ID NO: 1901274 - RNA, 19 nt, Homo sapiens
  misc_RNA (1)...(19): siRNA sense strand
gcucugaagaaauauaaca

SEQ ID NO: 1901275 - RNA, 19 nt, Homo sapiens
  misc_RNA (1)...(19): siRNA sense strand
ggacugugaguacaaggau

SEQ ID NO: 1901276 - RNA, 19 nt, Homo sapiens
  misc_RNA (1)...(19): siRNA sense strand
aaauuuacccuacugucaa

SEQ ID NO: 1901277 - RNA, 19 nt, Homo sapiens
  misc_RNA (1)...(19): siRNA sense strand
gaacugugacauuuaucca

SEQ ID NO: 1901278 - RNA, 19 nt, Homo sapiens
  misc_RNA (1)...(19): siRNA sense strand
acaacaacacucaacauuc

SEQ ID NO: 1901279 - RNA, 19 nt, Homo sapiens
  misc_RNA (1)...(19): siRNA sense strand
aagaagaaacaacuaguca

SEQ ID NO: 1901280 - RNA, 19 nt, Homo sapiens
  misc_RNA (1)...(19): siRNA sense strand
ggccaaagccuagauugca

SEQ ID NO: 1901281 - RNA, 19 nt, Homo sapiens
  misc_RNA (1)...(19): siRNA sense strand
cacaccaucacaaagcuua

SEQ ID NO: 1901282 - RNA, 19 nt, Homo sapiens
  misc_RNA (1)...(19): siRNA sense strand
uauuguaccgcauaacuga

SEQ ID NO: 1901283 - RNA, 19 nt, Homo sapiens
  misc_RNA (1)...(19): siRNA sense strand
gcaacgcugaaguuuaugu

SEQ ID NO: 1901284 - RNA, 19 nt, Homo sapiens
  misc_RNA (1)...(19): siRNA sense strand
gauugcaacgcugaaguuu

SEQ ID NO: 1901285 - RNA, 19 nt, Homo sapiens
  misc_RNA (1)...(19): siRNA sense strand
agagauauacccaccaaca

SEQ ID NO: 1901286 - RNA, 19 nt, Homo sapiens
  misc_RNA (1)...(19): siRNA sense strand
aacaacaacacucaacauu

SEQ ID NO: 1901287 - RNA, 19 nt, Homo sapiens
  misc_RNA (1)...(19): siRNA sense strand
ucaaguacgaaaucaagga

SEQ ID NO: 1901288 - RNA, 19 nt, Homo sapiens
  misc_RNA (1)...(19): siRNA sense strand
uggcuggcaagaaauauuu

SEQ ID NO: 1901289 - RNA, 19 nt, Homo sapiens
  misc_RNA (1)...(19): siRNA sense strand
gaauugcuuccuucucaca

SEQ ID NO: 1901290 - RNA, 19 nt, Homo sapiens
  misc_RNA (1)...(19): siRNA sense strand
acgaauuguuccaaagaga

SEQ ID NO: 1901291 - RNA, 19 nt, Homo sapiens
  misc_RNA (1)...(19): siRNA sense strand
acucaauugugcaaacgaa

SEQ ID NO: 1901292 - RNA, 19 nt, Homo sapiens
  misc_RNA (1)...(19): siRNA sense strand
gauugaacuuucgaauuac

SEQ ID NO: 1901293 - RNA, 19 nt, Homo sapiens
  misc_RNA (1)...(19): siRNA sense strand
uggauugaacuuucgaauu

SEQ ID NO: 1901294 - RNA, 19 nt, Homo sapiens
  misc_RNA (1)...(19): siRNA sense strand
accggugaauguacagaua

SEQ ID NO: 1901295 - RNA, 19 nt, Homo sapiens
  misc_RNA (1)...(19): siRNA sense strand
uuuccgaucaucacgaaua

SEQ ID NO: 1901296 - RNA, 19 nt, Homo sapiens
  misc_RNA (1)...(19): siRNA sense strand
gaauaggggaaauaaaaga

SEQ ID NO: 1901297 - RNA, 19 nt, Homo sapiens
  misc_RNA (1)...(19): siRNA sense strand
gauacaaugcugccuauaa

SEQ ID NO: 1901298 - RNA, 19 nt, Homo sapiens
  misc_RNA (1)...(19): siRNA sense strand
cauggaaucuuaugaacuu

SEQ ID NO: 1901299 - RNA, 19 nt, Homo sapiens
  misc_RNA (1)...(19): siRNA sense strand
augaaagcauggaaucuua

SEQ ID NO: 1901300 - RNA, 19 nt, Homo sapiens
  misc_RNA (1)...(19): siRNA sense strand
auacaaugcugccuauaau

SEQ ID NO: 1901301 - RNA, 19 nt, Homo sapiens
  misc_RNA (1)...(19): siRNA sense strand
ggagaaaugcaaauaccuu

SEQ ID NO: 1901302 - RNA, 19 nt, Homo sapiens
  misc_RNA (1)...(19): siRNA sense strand
ugugaugacuacagacuuu

SEQ ID NO: 1901303 - RNA, 19 nt, Homo sapiens
  misc_RNA (1)...(19): siRNA sense strand
ggaagccugugaugacuac

SEQ ID NO: 1901304 - RNA, 19 nt, Homo sapiens
  misc_RNA (1)...(19): siRNA sense strand
gaaagcauggaaucuuaug

SEQ ID NO: 1901305 - RNA, 19 nt, Homo sapiens
  misc_RNA (1)...(19): siRNA sense strand
ccuuagcgguaguaacuuu

SEQ ID NO: 1901306 - RNA, 19 nt, Homo sapiens
  misc_RNA (1)...(19): siRNA sense strand
gaaaugcaaauaccuucau

SEQ ID NO: 1901307 - RNA, 19 nt, Homo sapiens
  misc_RNA (1)...(19): siRNA sense strand
uaacaggagaaaugcaaau

SEQ ID NO: 1901308 - RNA, 19 nt, Homo sapiens
  misc_RNA (1)...(19): siRNA sense strand
aagcauggaaucuuaugaa

SEQ ID NO: 1901309 - RNA, 19 nt, Homo sapiens
  misc_RNA (1)...(19): siRNA sense strand
uggauacaaugcugccuau

SEQ ID NO: 1901310 - RNA, 19 nt, Homo sapiens
  misc_RNA (1)...(19): siRNA sense strand
caugguuuauggauacaau

SEQ ID NO: 1901311 - RNA, 19 nt, Homo sapiens
  misc_RNA (1)...(19): siRNA sense strand
ucaauagggaagccuguga

SEQ ID NO: 1901312 - RNA, 19 nt, Homo sapiens
  misc_RNA (1)...(19): siRNA sense strand
ugaaagcauggaaucuuau

SEQ ID NO: 1901313 - RNA, 19 nt, Homo sapiens
  misc_RNA (1)...(19): siRNA sense strand
gggaagccugugaugacua

SEQ ID NO: 1901314 - RNA, 19 nt, Homo sapiens
  misc_RNA (1)...(19): siRNA sense strand
caggagaaaugcaaauacc

SEQ ID NO: 1901315 - RNA, 19 nt, Homo sapiens
  misc_RNA (1)...(19): siRNA sense strand
ggauacaaugcugccuaua

SEQ ID NO: 1901316 - RNA, 19 nt, Homo sapiens
  misc_RNA (1)...(19): siRNA sense strand
gcauggaaucuuaugaacu

SEQ ID NO: 1901317 - RNA, 19 nt, Homo sapiens
  misc_RNA (1)...(19): siRNA sense strand
gauccgagaacgcucuaag

SEQ ID NO: 1901318 - RNA, 19 nt, Homo sapiens
  misc_RNA (1)...(19): siRNA sense strand
aacaggagaaaugcaaaua

SEQ ID NO: 1901319 - RNA, 19 nt, Homo sapiens
  misc_RNA (1)...(19): siRNA sense strand
gaauugaccuguacaaaga

SEQ ID NO: 1901320 - RNA, 19 nt, Homo sapiens
  misc_RNA (1)...(19): siRNA sense strand
gaucugagcuccuuaagug

SEQ ID NO: 1901321 - RNA, 19 nt, Homo sapiens
  misc_RNA (1)...(19): siRNA sense strand
ccacagagauuaccuggaa

SEQ ID NO: 1901322 - RNA, 19 nt, Homo sapiens
  misc_RNA (1)...(19): siRNA sense strand
augcgaagcuuucauauua

SEQ ID NO: 1901323 - RNA, 19 nt, Homo sapiens
  misc_RNA (1)...(19): siRNA sense strand
cugaagagcucaagaauug

SEQ ID NO: 1901324 - RNA, 19 nt, Homo sapiens
  misc_RNA (1)...(19): siRNA sense strand
gggaaacagugauaaguaa

SEQ ID NO: 1901325 - RNA, 19 nt, Homo sapiens
  misc_RNA (1)...(19): siRNA sense strand
gcauaauuguccugaaaua

SEQ ID NO: 1901326 - RNA, 19 nt, Homo sapiens
  misc_RNA (1)...(19): siRNA sense strand
gaaauugaguggauuacug

SEQ ID NO: 1901327 - RNA, 19 nt, Homo sapiens
  misc_RNA (1)...(19): siRNA sense strand
ggagguucauccuauauuu

SEQ ID NO: 1901328 - RNA, 19 nt, Homo sapiens
  misc_RNA (1)...(19): siRNA sense strand
guggagagauggcauaauu

SEQ ID NO: 1901329 - RNA, 19 nt, Homo sapiens
  misc_RNA (1)...(19): siRNA sense strand
gaagugguuuccaucagua

SEQ ID NO: 1901330 - RNA, 19 nt, Homo sapiens
  misc_RNA (1)...(19): siRNA sense strand
gagcggagguucauccuau

SEQ ID NO: 1901331 - RNA, 19 nt, Homo sapiens
  misc_RNA (1)...(19): siRNA sense strand
gaccucaccuugauauauu

SEQ ID NO: 1901332 - RNA, 19 nt, Homo sapiens
  misc_RNA (1)...(19): siRNA sense strand
ggagugggcuucccugaau

SEQ ID NO: 1901333 - RNA, 19 nt, Homo sapiens
  misc_RNA (1)...(19): siRNA sense strand
aaacagagaagaagcauuu

SEQ ID NO: 1901334 - RNA, 19 nt, Homo sapiens
  misc_RNA (1)...(19): siRNA sense strand
ggacaagcauuucaacuac

SEQ ID NO: 1901335 - RNA, 19 nt, Homo sapiens
  misc_RNA (1)...(19): siRNA sense strand
ggacaacugugaggugaaa

SEQ ID NO: 1901336 - RNA, 19 nt, Homo sapiens
  misc_RNA (1)...(19): siRNA sense strand
caaagaaguuggagugcaa

SEQ ID NO: 1901337 - RNA, 19 nt, Homo sapiens
  misc_RNA (1)...(19): siRNA sense strand
ccugggaacuccugaauuu

SEQ ID NO: 1901338 - RNA, 19 nt, Homo sapiens
  misc_RNA (1)...(19): siRNA sense strand
caggagaacggccauauua

SEQ ID NO: 1901339 - RNA, 19 nt, Homo sapiens
  misc_RNA (1)...(19): siRNA sense strand
uaaaggagacuucagauug

SEQ ID NO: 1901340 - RNA, 19 nt, Homo sapiens
  misc_RNA (1)...(19): siRNA sense strand
gaccaggcuugcucuauaa

SEQ ID NO: 1901341 - RNA, 19 nt, Homo sapiens
  misc_RNA (1)...(19): siRNA sense strand
gcagcaggaugucuccaua

SEQ ID NO: 1901342 - RNA, 19 nt, Homo sapiens
  misc_RNA (1)...(19): siRNA sense strand
aauggaagcucuauuguug

SEQ ID NO: 1901343 - RNA, 19 nt, Homo sapiens
  misc_RNA (1)...(19): siRNA sense strand
gccaguaccucuucucuug

SEQ ID NO: 1901344 - RNA, 19 nt, Homo sapiens
  misc_RNA (1)...(19): siRNA sense strand
gcaaauucguccagaaaca

SEQ ID NO: 1901345 - RNA, 19 nt, Homo sapiens
  misc_RNA (1)...(19): siRNA sense strand
gaggauaacuccaccuaca

SEQ ID NO: 1901346 - RNA, 19 nt, Homo sapiens
  misc_RNA (1)...(19): siRNA sense strand
ccacagccaucuucuucua

SEQ ID NO: 1901347 - RNA, 19 nt, Homo sapiens
  misc_RNA (1)...(19): siRNA sense strand
gaaagagaaaggaaacauu

SEQ ID NO: 1901348 - RNA, 19 nt, Homo sapiens
  misc_RNA (1)...(19): siRNA sense strand
gaacuugggucugaguaau

SEQ ID NO: 1901349 - RNA, 19 nt, Homo sapiens
  misc_RNA (1)...(19): siRNA sense strand
gcaggaagauaccacaauc

SEQ ID NO: 1901350 - RNA, 19 nt, Homo sapiens
  misc_RNA (1)...(19): siRNA sense strand
ggacacuucucuauucauc

SEQ ID NO: 1901351 - RNA, 19 nt, Homo sapiens
  misc_RNA (1)...(19): siRNA sense strand
cagaguggcugauggaaga

SEQ ID NO: 1901352 - RNA, 19 nt, Homo sapiens
  misc_RNA (1)...(19): siRNA sense strand
gcagggauuucacaaagug

SEQ ID NO: 1901353 - RNA, 19 nt, Homo sapiens
  misc_RNA (1)...(19): siRNA sense strand
uggaggaaauacuacauua

SEQ ID NO: 1901354 - RNA, 19 nt, Homo sapiens
  misc_RNA (1)...(19): siRNA sense strand
guaaugcgaagcuuucaua

SEQ ID NO: 1901355 - RNA, 19 nt, Homo sapiens
  misc_RNA (1)...(19): siRNA sense strand
ccuauaaaguugagacaaa

SEQ ID NO: 1901356 - RNA, 19 nt, Homo sapiens
  misc_RNA (1)...(19): siRNA sense strand
ggaagaggcaggaaagcua

SEQ ID NO: 1901357 - RNA, 19 nt, Homo sapiens
  misc_RNA (1)...(19): siRNA sense strand
gggaacuccugaauuugua

SEQ ID NO: 1901358 - RNA, 19 nt, Homo sapiens
  misc_RNA (1)...(19): siRNA sense strand
ggacaccuguuugaucuga

SEQ ID NO: 1901359 - RNA, 19 nt, Homo sapiens
  misc_RNA (1)...(19): siRNA sense strand
ucaaauuccugcaucaaga

SEQ ID NO: 1901360 - RNA, 19 nt, Homo sapiens
  misc_RNA (1)...(19): siRNA sense strand
agaccaggcuugcucuaua

SEQ ID NO: 1901361 - RNA, 19 nt, Homo sapiens
  misc_RNA (1)...(19): siRNA sense strand
gggaguguguggucaguuu

SEQ ID NO: 1901362 - RNA, 19 nt, Homo sapiens
  misc_RNA (1)...(19): siRNA sense strand
ggaaagugcaccaguguug

SEQ ID NO: 1901363 - RNA, 19 nt, Homo sapiens
  misc_RNA (1)...(19): siRNA sense strand
gaaacauucaacucucuua

SEQ ID NO: 1901364 - RNA, 19 nt, Homo sapiens
  misc_RNA (1)...(19): siRNA sense strand
gcaccuacuucuucacaug

SEQ ID NO: 1901365 - RNA, 19 nt, Homo sapiens
  misc_RNA (1)...(19): siRNA sense strand
gaaguuggagugcaaauuc

SEQ ID NO: 1901366 - RNA, 19 nt, Homo sapiens
  misc_RNA (1)...(19): siRNA sense strand
gacaugcacucucuucuuc

SEQ ID NO: 1901367 - RNA, 19 nt, Homo sapiens
  misc_RNA (1)...(19): siRNA sense strand
gcaaggauauaacgucucu

SEQ ID NO: 1901368 - RNA, 19 nt, Homo sapiens
  misc_RNA (1)...(19): siRNA sense strand
ggaauacgccuguguuaag

SEQ ID NO: 1901369 - RNA, 19 nt, Homo sapiens
  misc_RNA (1)...(19): siRNA sense strand
gcaauccucucccuuacau

SEQ ID NO: 1901370 - RNA, 19 nt, Homo sapiens
  misc_RNA (1)...(19): siRNA sense strand
uaucaccucucacaaagaa

SEQ ID NO: 1901371 - RNA, 19 nt, Homo sapiens
  misc_RNA (1)...(19): siRNA sense strand
gaggaagcaugaucucaau

SEQ ID NO: 1901372 - RNA, 19 nt, Homo sapiens
  misc_RNA (1)...(19): siRNA sense strand
gaaaggaagggcaggagaa

SEQ ID NO: 1901373 - RNA, 19 nt, Homo sapiens
  misc_RNA (1)...(19): siRNA sense strand
caacuuuccuccaucacaa

SEQ ID NO: 1901374 - RNA, 19 nt, Homo sapiens
  misc_RNA (1)...(19): siRNA sense strand
ggacauccagcaucauauu

SEQ ID NO: 1901375 - RNA, 19 nt, Homo sapiens
  misc_RNA (1)...(19): siRNA sense strand
gaagcucuauuguugacuu

SEQ ID NO: 1901376 - RNA, 19 nt, Homo sapiens
  misc_RNA (1)...(19): siRNA sense strand
ugacucagaagcuaacuua

SEQ ID NO: 1901377 - RNA, 19 nt, Homo sapiens
  misc_RNA (1)...(19): siRNA sense strand
acacuuacuuugaguuuga

SEQ ID NO: 1901378 - RNA, 19 nt, Homo sapiens
  misc_RNA (1)...(19): siRNA sense strand
gcaccaguguugagaacuu

SEQ ID NO: 1901379 - RNA, 19 nt, Homo sapiens
  misc_RNA (1)...(19): siRNA sense strand
caacugccgcuaugaaauu

SEQ ID NO: 1901380 - RNA, 19 nt, Homo sapiens
  misc_RNA (1)...(19): siRNA sense strand
gcuaugaaauugaguggau

SEQ ID NO: 1901381 - RNA, 19 nt, Homo sapiens
  misc_RNA (1)...(19): siRNA sense strand
acucaaaggugaauaagga

SEQ ID NO: 1901382 - RNA, 19 nt, Homo sapiens
  misc_RNA (1)...(19): siRNA sense strand
gggaacgccuaagcuguua

SEQ ID NO: 1901383 - RNA, 19 nt, Homo sapiens
  misc_RNA (1)...(19): siRNA sense strand
ccaccaggaucacguuuga

SEQ ID NO: 1901384 - RNA, 19 nt, Homo sapiens
  misc_RNA (1)...(19): siRNA sense strand
gaauucaacacaacaguga

SEQ ID NO: 1901385 - RNA, 19 nt, Homo sapiens
  misc_RNA (1)...(19): siRNA sense strand
cauccagcaucauauuuaa

SEQ ID NO: 1901386 - RNA, 19 nt, Homo sapiens
  misc_RNA (1)...(19): siRNA sense strand
ggaggaaauacuacauuaa

SEQ ID NO: 1901387 - RNA, 19 nt, Homo sapiens
  misc_RNA (1)...(19): siRNA sense strand
cgauaccucucaagucaaa

SEQ ID NO: 1901388 - RNA, 19 nt, Homo sapiens
  misc_RNA (1)...(19): siRNA sense strand
gaaaggauaagaccaaguc

SEQ ID NO: 1901389 - RNA, 19 nt, Homo sapiens
  misc_RNA (1)...(19): siRNA sense strand
cagcugcacuuacuacuuc

SEQ ID NO: 1901390 - RNA, 19 nt, Homo sapiens
  misc_RNA (1)...(19): siRNA sense strand
gaagcugggugucauaggu

SEQ ID NO: 1901391 - RNA, 19 nt, Homo sapiens
  misc_RNA (1)...(19): siRNA sense strand
ggagucucguacuauauaa

SEQ ID NO: 1901392 - RNA, 19 nt, Homo sapiens
  misc_RNA (1)...(19): siRNA sense strand
gggcgaagcugugguguag

SEQ ID NO: 1901393 - RNA, 19 nt, Homo sapiens
  misc_RNA (1)...(19): siRNA sense strand
gaauggaagcucuauuguu

SEQ ID NO: 1901394 - RNA, 19 nt, Homo sapiens
  misc_RNA (1)...(19): siRNA sense strand
cucagaagcuaacuuauga

SEQ ID NO: 1901395 - RNA, 19 nt, Homo sapiens
  misc_RNA (1)...(19): siRNA sense strand
caacuuguaugaccugaag

SEQ ID NO: 1901396 - RNA, 19 nt, Homo sapiens
  misc_RNA (1)...(19): siRNA sense strand
gcagacagaccacauauac

SEQ ID NO: 1901397 - RNA, 19 nt, Homo sapiens
  misc_RNA (1)...(19): siRNA sense strand
gaaugcagcucaggguuuc

SEQ ID NO: 1901398 - RNA, 19 nt, Homo sapiens
  misc_RNA (1)...(19): siRNA sense strand
cagaaugugugcacuacuu

SEQ ID NO: 1901399 - RNA, 19 nt, Homo sapiens
  misc_RNA (1)...(19): siRNA sense strand
ggccacaagucuucaguga

SEQ ID NO: 1901400 - RNA, 19 nt, Homo sapiens
  misc_RNA (1)...(19): siRNA sense strand
caaugaaacuggauuacag

SEQ ID NO: 1901401 - RNA, 19 nt, Homo sapiens
  misc_RNA (1)...(19): siRNA sense strand
gaacaaggaggcuguaagg

SEQ ID NO: 1901402 - RNA, 19 nt, Homo sapiens
  misc_RNA (1)...(19): siRNA sense strand
guuaugaggcuuaugauga

SEQ ID NO: 1901403 - RNA, 19 nt, Homo sapiens
  misc_RNA (1)...(19): siRNA sense strand
auacguugauggcgacuua

SEQ ID NO: 1901404 - RNA, 19 nt, Homo sapiens
  misc_RNA (1)...(19): siRNA sense strand
aaaggagacuucagauugu

SEQ ID NO: 1901405 - RNA, 19 nt, Homo sapiens
  misc_RNA (1)...(19): siRNA sense strand
gcagccuccuucuggaaua

SEQ ID NO: 1901406 - RNA, 19 nt, Homo sapiens
  misc_RNA (1)...(19): siRNA sense strand
ugagaagacuuggaacuug

SEQ ID NO: 1901407 - RNA, 19 nt, Homo sapiens
  misc_RNA (1)...(19): siRNA sense strand
auaaggaggugccaugcua

SEQ ID NO: 1901408 - RNA, 19 nt, Homo sapiens
  misc_RNA (1)...(19): siRNA sense strand
caacguguccuacaaauac

SEQ ID NO: 1901409 - RNA, 19 nt, Homo sapiens
  misc_RNA (1)...(19): siRNA sense strand
gggaagcuguugauaccaa

SEQ ID NO: 1901410 - RNA, 19 nt, Homo sapiens
  misc_RNA (1)...(19): siRNA sense strand
gugcaaaguuccuauugau

SEQ ID NO: 1901411 - RNA, 19 nt, Homo sapiens
  misc_RNA (1)...(19): siRNA sense strand
ccaacaagaggcugagaua

SEQ ID NO: 1901412 - RNA, 19 nt, Homo sapiens
  misc_RNA (1)...(19): siRNA sense strand
ggaccucaguggagagaug

SEQ ID NO: 1901413 - RNA, 19 nt, Homo sapiens
  misc_RNA (1)...(19): siRNA sense strand
ucaccgaccuggcuggaaa

SEQ ID NO: 1901414 - RNA, 19 nt, Homo sapiens
  misc_RNA (1)...(19): siRNA sense strand
ucacaugggacacggaaua

SEQ ID NO: 1901415 - RNA, 19 nt, Homo sapiens
  misc_RNA (1)...(19): siRNA sense strand
auaagagugugaucaguuu

SEQ ID NO: 1901416 - RNA, 19 nt, Homo sapiens
  misc_RNA (1)...(19): siRNA sense strand
gaccgcauccuccgugaua

SEQ ID NO: 1901417 - RNA, 19 nt, Homo sapiens
  misc_RNA (1)...(19): siRNA sense strand
gaucguugcccuccagaaa

SEQ ID NO: 1901418 - RNA, 19 nt, Homo sapiens
  misc_RNA (1)...(19): siRNA sense strand
ggaagcuguugauaccaaa

SEQ ID NO: 1901419 - RNA, 19 nt, Homo sapiens
  misc_RNA (1)...(19): siRNA sense strand
ggacucaacuugucauuua

SEQ ID NO: 1901420 - RNA, 19 nt, Homo sapiens
  misc_RNA (1)...(19): siRNA sense strand
ccaaagagaugucuaaauu

SEQ ID NO: 1901421 - RNA, 19 nt, Homo sapiens
  misc_RNA (1)...(19): siRNA sense strand
gaaaugcucucacaugaaa

SEQ ID NO: 1901422 - RNA, 19 nt, Homo sapiens
  misc_RNA (1)...(19): siRNA sense strand
guaaagaaguugccaaauu

SEQ ID NO: 1901423 - RNA, 19 nt, Homo sapiens
  misc_RNA (1)...(19): siRNA sense strand
gcuaaaggaugucaauuaa

SEQ ID NO: 1901424 - RNA, 19 nt, Homo sapiens
  misc_RNA (1)...(19): siRNA sense strand
gaacggcucuuuccagugu

SEQ ID NO: 1901425 - RNA, 19 nt, Homo sapiens
  misc_RNA (1)...(19): siRNA sense strand
caucucagcuuaugaagaa

SEQ ID NO: 1901426 - RNA, 19 nt, Homo sapiens
  misc_RNA (1)...(19): siRNA sense strand
agaagaagcaggcacauua

SEQ ID NO: 1901427 - RNA, 19 nt, Homo sapiens
  misc_RNA (1)...(19): siRNA sense strand
gaagacugccugcuuauug

SEQ ID NO: 1901428 - RNA, 19 nt, Homo sapiens
  misc_RNA (1)...(19): siRNA sense strand
aaacggagcugcauugagu

SEQ ID NO: 1901429 - RNA, 19 nt, Homo sapiens
  misc_RNA (1)...(19): siRNA sense strand
caaaugaugcugaaagauu

SEQ ID NO: 1901430 - RNA, 19 nt, Homo sapiens
  misc_RNA (1)...(19): siRNA sense strand
gacaaaugaugcugaaaga

SEQ ID NO: 1901431 - RNA, 19 nt, Homo sapiens
  misc_RNA (1)...(19): siRNA sense strand
gaccaucagugaagaagaa

SEQ ID NO: 1901432 - RNA, 19 nt, Homo sapiens
  misc_RNA (1)...(19): siRNA sense strand
gaaggacuccggaaacauu

SEQ ID NO: 1901433 - RNA, 19 nt, Homo sapiens
  misc_RNA (1)...(19): siRNA sense strand
ggaagcuacuggugucauu

SEQ ID NO: 1901434 - RNA, 19 nt, Homo sapiens
  misc_RNA (1)...(19): siRNA sense strand
uaacaacgguacccucuuc

SEQ ID NO: 1901435 - RNA, 19 nt, Homo sapiens
  misc_RNA (1)...(19): siRNA sense strand
gaagguggauuugaugcaa

SEQ ID NO: 1901436 - RNA, 19 nt, Homo sapiens
  misc_RNA (1)...(19): siRNA sense strand
gaagugaacagcuccaaau

SEQ ID NO: 1901437 - RNA, 19 nt, Homo sapiens
  misc_RNA (1)...(19): siRNA sense strand
aagaaaugcucucacauga

SEQ ID NO: 1901438 - RNA, 19 nt, Homo sapiens
  misc_RNA (1)...(19): siRNA sense strand
aaauaagccucucagugua

SEQ ID NO: 1901439 - RNA, 19 nt, Homo sapiens
  misc_RNA (1)...(19): siRNA sense strand
ugucaacugucuuggaaua

SEQ ID NO: 1901440 - RNA, 19 nt, Homo sapiens
  misc_RNA (1)...(19): siRNA sense strand
caacugcgacugucagaaa

SEQ ID NO: 1901441 - RNA, 19 nt, Homo sapiens
  misc_RNA (1)...(19): siRNA sense strand
agaaagaaguggaagugaa

SEQ ID NO: 1901442 - RNA, 19 nt, Homo sapiens
  misc_RNA (1)...(19): siRNA sense strand
ugugaagacugccugcuua

SEQ ID NO: 1901443 - RNA, 19 nt, Homo sapiens
  misc_RNA (1)...(19): siRNA sense strand
gcagaaaccugugaagacu

SEQ ID NO: 1901444 - RNA, 19 nt, Homo sapiens
  misc_RNA (1)...(19): siRNA sense strand
ggauuuguauuaccucaug

SEQ ID NO: 1901445 - RNA, 19 nt, Homo sapiens
  misc_RNA (1)...(19): siRNA sense strand
cagcaaaccuuuuagcuaa

SEQ ID NO: 1901446 - RNA, 19 nt, Homo sapiens
  misc_RNA (1)...(19): siRNA sense strand
ccacuugucucccuaugga

SEQ ID NO: 1901447 - RNA, 19 nt, Homo sapiens
  misc_RNA (1)...(19): siRNA sense strand
uacagaggauccacaagua

SEQ ID NO: 1901448 - RNA, 19 nt, Homo sapiens
  misc_RNA (1)...(19): siRNA sense strand
gaaugaauacuccauguca

SEQ ID NO: 1901449 - RNA, 19 nt, Homo sapiens
  misc_RNA (1)...(19): siRNA sense strand
gaagaagcaggcacauuau

SEQ ID NO: 1901450 - RNA, 19 nt, Homo sapiens
  misc_RNA (1)...(19): siRNA sense strand
gugaacagcuccaaauguc

SEQ ID NO: 1901451 - RNA, 19 nt, Homo sapiens
  misc_RNA (1)...(19): siRNA sense strand
ggaccaaccugugaacgau

SEQ ID NO: 1901452 - RNA, 19 nt, Homo sapiens
  misc_RNA (1)...(19): siRNA sense strand
ggaugucaauuaaacuuca

SEQ ID NO: 1901453 - RNA, 19 nt, Homo sapiens
  misc_RNA (1)...(19): siRNA sense strand
gaaacauucuccagcugau

SEQ ID NO: 1901454 - RNA, 19 nt, Homo sapiens
  misc_RNA (1)...(19): siRNA sense strand
uuggacaacucauugauaa

SEQ ID NO: 1901455 - RNA, 19 nt, Homo sapiens
  misc_RNA (1)...(19): siRNA sense strand
gaaaacaacaccagaagaa

SEQ ID NO: 1901456 - RNA, 19 nt, Homo sapiens
  misc_RNA (1)...(19): siRNA sense strand
caugucaacugucuuggaa

SEQ ID NO: 1901457 - RNA, 19 nt, Homo sapiens
  misc_RNA (1)...(19): siRNA sense strand
gguggaacuggaaguauua

SEQ ID NO: 1901458 - RNA, 19 nt, Homo sapiens
  misc_RNA (1)...(19): siRNA sense strand
gaaauugugaagaaucaga

SEQ ID NO: 1901459 - RNA, 19 nt, Homo sapiens
  misc_RNA (1)...(19): siRNA sense strand
ggaauggacagcaaacuag

SEQ ID NO: 1901460 - RNA, 19 nt, Homo sapiens
  misc_RNA (1)...(19): siRNA sense strand
aaaugaugcugaaagauuc

SEQ ID NO: 1901461 - RNA, 19 nt, Homo sapiens
  misc_RNA (1)...(19): siRNA sense strand
guagaccuuuccacagauu

SEQ ID NO: 1901462 - RNA, 19 nt, Homo sapiens
  misc_RNA (1)...(19): siRNA sense strand
caaaagaaaugcucucaca

SEQ ID NO: 1901463 - RNA, 19 nt, Homo sapiens
  misc_RNA (1)...(19): siRNA sense strand
uuauugaucuucgcuguaa

SEQ ID NO: 1901464 - RNA, 19 nt, Homo sapiens
  misc_RNA (1)...(19): siRNA sense strand
uaugcaagcugcugugugu

SEQ ID NO: 1901465 - RNA, 19 nt, Homo sapiens
  misc_RNA (1)...(19): siRNA sense strand
cuacuggugucauuucaug

SEQ ID NO: 1901466 - RNA, 19 nt, Homo sapiens
  misc_RNA (1)...(19): siRNA sense strand
gaaagaaguggaagugaac

SEQ ID NO: 1901467 - RNA, 19 nt, Homo sapiens
  misc_RNA (1)...(19): siRNA sense strand
aaagaaaugcucucacaug

SEQ ID NO: 1901468 - RNA, 19 nt, Homo sapiens
  misc_RNA (1)...(19): siRNA sense strand
gcaggcaucgucauuccua

SEQ ID NO: 1901469 - RNA, 19 nt, Homo sapiens
  misc_RNA (1)...(19): siRNA sense strand
aggaaggaaugaucacgua

SEQ ID NO: 1901470 - RNA, 19 nt, Homo sapiens
  misc_RNA (1)...(19): siRNA sense strand
ggugugcucaggagaauuu

SEQ ID NO: 1901471 - RNA, 19 nt, Homo sapiens
  misc_RNA (1)...(19): siRNA sense strand
aaacaacaccagaagaaau

SEQ ID NO: 1901472 - RNA, 19 nt, Homo sapiens
  misc_RNA (1)...(19): siRNA sense strand
ggaacuggaaguauuagga

SEQ ID NO: 1901473 - RNA, 19 nt, Homo sapiens
  misc_RNA (1)...(19): siRNA sense strand
cagaaggacuccggaaaca

SEQ ID NO: 1901474 - RNA, 19 nt, Homo sapiens
  misc_RNA (1)...(19): siRNA sense strand
gccaacccuugcaguagua

SEQ ID NO: 1901475 - RNA, 19 nt, Homo sapiens
  misc_RNA (1)...(19): siRNA sense strand
aaagcuugauccuuaaguu

SEQ ID NO: 1901476 - RNA, 19 nt, Homo sapiens
  misc_RNA (1)...(19): siRNA sense strand
ccauacuucuguuuaccua

SEQ ID NO: 1901477 - RNA, 19 nt, Homo sapiens
  misc_RNA (1)...(19): siRNA sense strand
gagaauuacgcaaaacuua

SEQ ID NO: 1901478 - RNA, 19 nt, Homo sapiens
  misc_RNA (1)...(19): siRNA sense strand
gaaccaauccacucuacag

SEQ ID NO: 1901479 - RNA, 19 nt, Homo sapiens
  misc_RNA (1)...(19): siRNA sense strand
aagaauguguggacaagug

SEQ ID NO: 1901480 - RNA, 19 nt, Homo sapiens
  misc_RNA (1)...(19): siRNA sense strand
ggacaacucauugauaaac

SEQ ID NO: 1901481 - RNA, 19 nt, Homo sapiens
  misc_RNA (1)...(19): siRNA sense strand
caaaggaugguucuguuuc

SEQ ID NO: 1901482 - RNA, 19 nt, Homo sapiens
  misc_RNA (1)...(19): siRNA sense strand
ggaagugaacagcuccaaa

SEQ ID NO: 1901483 - RNA, 19 nt, Homo sapiens
  misc_RNA (1)...(19): siRNA sense strand
gagaagaagcaggcacauu

SEQ ID NO: 1901484 - RNA, 19 nt, Homo sapiens
  misc_RNA (1)...(19): siRNA sense strand
gcccuggaauuacuuguca

SEQ ID NO: 1901485 - RNA, 19 nt, Homo sapiens
  misc_RNA (1)...(19): siRNA sense strand
gaaggaaugaucacguaca

SEQ ID NO: 1901486 - RNA, 19 nt, Homo sapiens
  misc_RNA (1)...(19): siRNA sense strand
uaacggcgacugugacugu

SEQ ID NO: 1901487 - RNA, 19 nt, Homo sapiens
  misc_RNA (1)...(19): siRNA sense strand
gggaugcccuggaauuacu

SEQ ID NO: 1901488 - RNA, 19 nt, Homo sapiens
  misc_RNA (1)...(19): siRNA sense strand
ggacagcaagaaugaauac

SEQ ID NO: 1901489 - RNA, 19 nt, Homo sapiens
  misc_RNA (1)...(19): siRNA sense strand
aaaauuggcuggcggaaug

SEQ ID NO: 1901490 - RNA, 19 nt, Homo sapiens
  misc_RNA (1)...(19): siRNA sense strand
ggacuacccgguggauuug

SEQ ID NO: 1901491 - RNA, 19 nt, Homo sapiens
  misc_RNA (1)...(19): siRNA sense strand
acucauugauaaacuggua

SEQ ID NO: 1901492 - RNA, 19 nt, Homo sapiens
  misc_RNA (1)...(19): siRNA sense strand
gaaguugccaaauuugaag

SEQ ID NO: 1901493 - RNA, 19 nt, Homo sapiens
  misc_RNA (1)...(19): siRNA sense strand
ucaaaggaugguucuguuu

SEQ ID NO: 1901494 - RNA, 19 nt, Homo sapiens
  misc_RNA (1)...(19): siRNA sense strand
gagaagaauguguggacaa

SEQ ID NO: 1901495 - RNA, 19 nt, Homo sapiens
  misc_RNA (1)...(19): siRNA sense strand
guggacaagugcaaacuag

SEQ ID NO: 1901496 - RNA, 19 nt, Homo sapiens
  misc_RNA (1)...(19): siRNA sense strand
agacugggcuucggaucuu

SEQ ID NO: 1901497 - RNA, 19 nt, Homo sapiens
  misc_RNA (1)...(19): siRNA sense strand
gggaaccaauccacucuac

SEQ ID NO: 1901498 - RNA, 19 nt, Homo sapiens
  misc_RNA (1)...(19): siRNA sense strand
ccaaacauucccaugauca

SEQ ID NO: 1901499 - RNA, 19 nt, Homo sapiens
  misc_RNA (1)...(19): siRNA sense strand
uccgaagccuccaaacauu

SEQ ID NO: 1901500 - RNA, 19 nt, Homo sapiens
  misc_RNA (1)...(19): siRNA sense strand
ggagaaaaugaaugucuua

SEQ ID NO: 1901501 - RNA, 19 nt, Homo sapiens
  misc_RNA (1)...(19): siRNA sense strand
gagguaacggcgacuguga

SEQ ID NO: 1901502 - RNA, 19 nt, Homo sapiens
  misc_RNA (1)...(19): siRNA sense strand
aaacauuuaugggccuuau

SEQ ID NO: 1901503 - RNA, 19 nt, Homo sapiens
  misc_RNA (1)...(19): siRNA sense strand
gaagcaggcacauuaucau

SEQ ID NO: 1901504 - RNA, 19 nt, Homo sapiens
  misc_RNA (1)...(19): siRNA sense strand
gaugacgaccucaacacaa

SEQ ID NO: 1901505 - RNA, 19 nt, Homo sapiens
  misc_RNA (1)...(19): siRNA sense strand
ugccaaauuugaagcagaa

SEQ ID NO: 1901506 - RNA, 19 nt, Homo sapiens
  misc_RNA (1)...(19): siRNA sense strand
gaagcuacuggugucauuu

SEQ ID NO: 1901507 - RNA, 19 nt, Homo sapiens
  misc_RNA (1)...(19): siRNA sense strand
augaagaacugcggucuga

SEQ ID NO: 1901508 - RNA, 19 nt, Homo sapiens
  misc_RNA (1)...(19): siRNA sense strand
aagaaugaauacuccaugu

SEQ ID NO: 1901509 - RNA, 19 nt, Homo sapiens
  misc_RNA (1)...(19): siRNA sense strand
gaaauugccaacccuugca

SEQ ID NO: 1901510 - RNA, 19 nt, Homo sapiens
  misc_RNA (1)...(19): siRNA sense strand
gacgaccucaacacaauaa

SEQ ID NO: 1901511 - RNA, 19 nt, Homo sapiens
  misc_RNA (1)...(19): siRNA sense strand
uggauuugaugcaauuaug

SEQ ID NO: 1901512 - RNA, 19 nt, Homo sapiens
  misc_RNA (1)...(19): siRNA sense strand
aaggaaugaucacguacaa

SEQ ID NO: 1901513 - RNA, 19 nt, Homo sapiens
  misc_RNA (1)...(19): siRNA sense strand
gcugcuguguguaaggaaa

SEQ ID NO: 1901514 - RNA, 19 nt, Homo sapiens
  misc_RNA (1)...(19): siRNA sense strand
caacgguacccucuuccaa

SEQ ID NO: 1901515 - RNA, 19 nt, Homo sapiens
  misc_RNA (1)...(19): siRNA sense strand
agcuaaaggaugucaauua

SEQ ID NO: 1901516 - RNA, 19 nt, Homo sapiens
  misc_RNA (1)...(19): siRNA sense strand
ucagugaagaagaagauuu

SEQ ID NO: 1901517 - RNA, 19 nt, Homo sapiens
  misc_RNA (1)...(19): siRNA sense strand
aagcaggcacauuaucaua

SEQ ID NO: 1901518 - RNA, 19 nt, Homo sapiens
  misc_RNA (1)...(19): siRNA sense strand
cagcgugacugugaauauc

SEQ ID NO: 1901519 - RNA, 19 nt, Homo sapiens
  misc_RNA (1)...(19): siRNA sense strand
guacuggacugaugaguuu

SEQ ID NO: 1901520 - RNA, 19 nt, Homo sapiens
  misc_RNA (1)...(19): siRNA sense strand
uaacuacuaugcagaaaug

SEQ ID NO: 1901521 - RNA, 19 nt, Homo sapiens
  misc_RNA (1)...(19): siRNA sense strand
caucggcacuccucucauu

SEQ ID NO: 1901522 - RNA, 19 nt, Homo sapiens
  misc_RNA (1)...(19): siRNA sense strand
ucaaugaguucguggaugu

SEQ ID NO: 1901523 - RNA, 19 nt, Homo sapiens
  misc_RNA (1)...(19): siRNA sense strand
caacguggaugagaagaau

SEQ ID NO: 1901524 - RNA, 19 nt, Homo sapiens
  misc_RNA (1)...(19): siRNA sense strand
agaaucgccuggcuacuuu

SEQ ID NO: 1901525 - RNA, 19 nt, Homo sapiens
  misc_RNA (1)...(19): siRNA sense strand
ucucauuggugucuacuuu

SEQ ID NO: 1901526 - RNA, 19 nt, Homo sapiens
  misc_RNA (1)...(19): siRNA sense strand
ggacaucaacaucucuuug

SEQ ID NO: 1901527 - RNA, 19 nt, Homo sapiens
  misc_RNA (1)...(19): siRNA sense strand
gaaguucuauguggucauc

SEQ ID NO: 1901528 - RNA, 19 nt, Homo sapiens
  misc_RNA (1)...(19): siRNA sense strand
gagaaucgccuggcuacuu

SEQ ID NO: 1901529 - RNA, 19 nt, Homo sapiens
  misc_RNA (1)...(19): siRNA sense strand
aagcugcuauuccacauuu

SEQ ID NO: 1901530 - RNA, 19 nt, Homo sapiens
  misc_RNA (1)...(19): siRNA sense strand
caaccaccguauccauuga

SEQ ID NO: 1901531 - RNA, 19 nt, Homo sapiens
  misc_RNA (1)...(19): siRNA sense strand
caaauaucccguacgugua

SEQ ID NO: 1901532 - RNA, 19 nt, Homo sapiens
  misc_RNA (1)...(19): siRNA sense strand
guggaacccugaggacuuu

SEQ ID NO: 1901533 - RNA, 19 nt, Homo sapiens
  misc_RNA (1)...(19): siRNA sense strand
ucgcugaccuucaccaguu

SEQ ID NO: 1901534 - RNA, 19 nt, Homo sapiens
  misc_RNA (1)...(19): siRNA sense strand
ccauugacgucauugucua

SEQ ID NO: 1901535 - RNA, 19 nt, Homo sapiens
  misc_RNA (1)...(19): siRNA sense strand
ccaguuggcugcacaccau

SEQ ID NO: 1901536 - RNA, 19 nt, Homo sapiens
  misc_RNA (1)...(19): siRNA sense strand
ugcugaggcugucggauua

SEQ ID NO: 1901537 - RNA, 19 nt, Homo sapiens
  misc_RNA (1)...(19): siRNA sense strand
ccuguagccucgacaucua

SEQ ID NO: 1901538 - RNA, 19 nt, Homo sapiens
  misc_RNA (1)...(19): siRNA sense strand
guuaugcucugguccaucu

SEQ ID NO: 1901539 - RNA, 19 nt, Homo sapiens
  misc_RNA (1)...(19): siRNA sense strand
gcauggcucugcuggugau

SEQ ID NO: 1901540 - RNA, 19 nt, Homo sapiens
  misc_RNA (1)...(19): siRNA sense strand
gccgagaccaucuucauug

SEQ ID NO: 1901541 - RNA, 19 nt, Homo sapiens
  misc_RNA (1)...(19): siRNA sense strand
ugagggagcagucaacuuc

SEQ ID NO: 1901542 - RNA, 19 nt, Homo sapiens
  misc_RNA (1)...(19): siRNA sense strand
acaggagugucuucaugaa

SEQ ID NO: 1901543 - RNA, 19 nt, Homo sapiens
  misc_RNA (1)...(19): siRNA sense strand
guggggaagucuccaaaua

SEQ ID NO: 1901544 - RNA, 19 nt, Homo sapiens
  misc_RNA (1)...(19): siRNA sense strand
gacaucaacaucucuuugu

SEQ ID NO: 1901545 - RNA, 19 nt, Homo sapiens
  misc_RNA (1)...(19): siRNA sense strand
ggacaucgugggcuucuac

SEQ ID NO: 1901546 - RNA, 19 nt, Homo sapiens
  misc_RNA (1)...(19): siRNA sense strand
gcauggaaagcaguaacua

SEQ ID NO: 1901547 - RNA, 19 nt, Homo sapiens
  misc_RNA (1)...(19): siRNA sense strand
ccaaccaccguauccauug

SEQ ID NO: 1901548 - RNA, 19 nt, Homo sapiens
  misc_RNA (1)...(19): siRNA sense strand
ccgagaccaucuucauugu

SEQ ID NO: 1901549 - RNA, 19 nt, Homo sapiens
  misc_RNA (1)...(19): siRNA sense strand
aaauaucccguacguguau

SEQ ID NO: 1901550 - RNA, 19 nt, Homo sapiens
  misc_RNA (1)...(19): siRNA sense strand
ucauuggugucuacuuugu

SEQ ID NO: 1901551 - RNA, 19 nt, Homo sapiens
  misc_RNA (1)...(19): siRNA sense strand
uugacaacaucaccaaguu

SEQ ID NO: 1901552 - RNA, 19 nt, Homo sapiens
  misc_RNA (1)...(19): siRNA sense strand
gcucugcuggugauaaguu

SEQ ID NO: 1901553 - RNA, 19 nt, Homo sapiens
  misc_RNA (1)...(19): siRNA sense strand
gcuacucggucuuccugau

SEQ ID NO: 1901554 - RNA, 19 nt, Homo sapiens
  misc_RNA (1)...(19): siRNA sense strand
gaagagcccgagggacaga

SEQ ID NO: 1901555 - RNA, 19 nt, Homo sapiens
  misc_RNA (1)...(19): siRNA sense strand
gccaaccaccguauccauu

SEQ ID NO: 1901556 - RNA, 19 nt, Homo sapiens
  misc_RNA (1)...(19): siRNA sense strand
uacagcaucacccugguua

SEQ ID NO: 1901557 - RNA, 19 nt, Homo sapiens
  misc_RNA (1)...(19): siRNA sense strand
ugaggacuuugacaacauc

SEQ ID NO: 1901558 - RNA, 19 nt, Homo sapiens
  misc_RNA (1)...(19): siRNA sense strand
cagcaucacccugguuaug

SEQ ID NO: 1901559 - RNA, 19 nt, Homo sapiens
  misc_RNA (1)...(19): siRNA sense strand
cguauccauugacgucauu

SEQ ID NO: 1901560 - RNA, 19 nt, Homo sapiens
  misc_RNA (1)...(19): siRNA sense strand
ggccgagaccaucuucauu

SEQ ID NO: 1901561 - RNA, 19 nt, Homo sapiens
  misc_RNA (1)...(19): siRNA sense strand
guaacuacuaugcagaaau

SEQ ID NO: 1901562 - RNA, 19 nt, Homo sapiens
  misc_RNA (1)...(19): siRNA sense strand
ggaacccugaggacuuuga

SEQ ID NO: 1901563 - RNA, 19 nt, Homo sapiens
  misc_RNA (1)...(19): siRNA sense strand
ggagugucuucaugaacca

SEQ ID NO: 1901564 - RNA, 19 nt, Homo sapiens
  misc_RNA (1)...(19): siRNA sense strand
ccugaggacuuugacaaca

SEQ ID NO: 1901565 - RNA, 19 nt, Homo sapiens
  misc_RNA (1)...(19): siRNA sense strand
ggggaagucuccaaauauc

SEQ ID NO: 1901566 - RNA, 19 nt, Homo sapiens
  misc_RNA (1)...(19): siRNA sense strand
gcucagccaugggaaacca

SEQ ID NO: 1901567 - RNA, 19 nt, Homo sapiens
  misc_RNA (1)...(19): siRNA sense strand
cggauuaccuuuugaccaa

SEQ ID NO: 1901568 - RNA, 19 nt, Homo sapiens
  misc_RNA (1)...(19): siRNA sense strand
ucccggacauucucaucaa

SEQ ID NO: 1901569 - RNA, 19 nt, Homo sapiens
  misc_RNA (1)...(19): siRNA sense strand
ccagggagagugggaguug

SEQ ID NO: 1901570 - RNA, 19 nt, Homo sapiens
  misc_RNA (1)...(19): siRNA sense strand
acaucaacaucucuuugug

SEQ ID NO: 1901571 - RNA, 19 nt, Homo sapiens
  misc_RNA (1)...(19): siRNA sense strand
gccucgacaucuacaacuu

SEQ ID NO: 1901572 - RNA, 19 nt, Homo sapiens
  misc_RNA (1)...(19): siRNA sense strand
caucaaggcgaaguucaga

SEQ ID NO: 1901573 - RNA, 19 nt, Homo sapiens
  misc_RNA (1)...(19): siRNA sense strand
gccaggaggagccgaaaca

SEQ ID NO: 1901574 - RNA, 19 nt, Homo sapiens
  misc_RNA (1)...(19): siRNA sense strand
gcuccgugcuggacaagcu

SEQ ID NO: 1901575 - RNA, 19 nt, Homo sapiens
  misc_RNA (1)...(19): siRNA sense strand
ucaccugguucuggagaga

SEQ ID NO: 1901576 - RNA, 19 nt, Homo sapiens
  misc_RNA (1)...(19): siRNA sense strand
ggaagccaaccaccguauc

SEQ ID NO: 1901577 - RNA, 19 nt, Homo sapiens
  misc_RNA (1)...(19): siRNA sense strand
cuacuaugcagaaaugaag

SEQ ID NO: 1901578 - RNA, 19 nt, Homo sapiens
  misc_RNA (1)...(19): siRNA sense strand
uagcggugcuggccuacag

SEQ ID NO: 1901579 - RNA, 19 nt, Homo sapiens
  misc_RNA (1)...(19): siRNA sense strand
cugcugaggcugucggauu

SEQ ID NO: 1901580 - RNA, 19 nt, Homo sapiens
  misc_RNA (1)...(19): siRNA sense strand
cugaggacuuugacaacau

SEQ ID NO: 1901581 - RNA, 19 nt, Homo sapiens
  misc_RNA (1)...(19): siRNA sense strand
gcugucggauuaccuuuug

SEQ ID NO: 1901582 - RNA, 19 nt, Homo sapiens
  misc_RNA (1)...(19): siRNA sense strand
gugcugaccaccuacaucu

SEQ ID NO: 1901583 - RNA, 19 nt, Homo sapiens
  misc_RNA (1)...(19): siRNA sense strand
ggacucagauucggacuca

SEQ ID NO: 1901584 - RNA, 19 nt, Homo sapiens
  misc_RNA (1)...(19): siRNA sense strand
ucacauggcuggguuacug

SEQ ID NO: 1901585 - RNA, 19 nt, Homo sapiens
  misc_RNA (1)...(19): siRNA sense strand
gcaggcgucuagccacgaa

SEQ ID NO: 1901586 - RNA, 19 nt, Homo sapiens
  misc_RNA (1)...(19): siRNA sense strand
caacacguccaacuucuuc

SEQ ID NO: 1901587 - RNA, 19 nt, Homo sapiens
  misc_RNA (1)...(19): siRNA sense strand
gcgcaacacguccaacuuc

SEQ ID NO: 1901588 - RNA, 19 nt, Homo sapiens
  misc_RNA (1)...(19): siRNA sense strand
ccacgaagcacagcaggaa

SEQ ID NO: 1901589 - RNA, 19 nt, Homo sapiens
  misc_RNA (1)...(19): siRNA sense strand
ccucuucgauguccucaca

SEQ ID NO: 1901590 - RNA, 19 nt, Homo sapiens
  misc_RNA (1)...(19): siRNA sense strand
caucaucuacccacucuuc

SEQ ID NO: 1901591 - RNA, 19 nt, Homo sapiens
  misc_RNA (1)...(19): siRNA sense strand
gcaacacguccaacuucuu

SEQ ID NO: 1901592 - RNA, 19 nt, Homo sapiens
  misc_RNA (1)...(19): siRNA sense strand
cuucacgucugaccugaug

SEQ ID NO: 1901593 - RNA, 19 nt, Homo sapiens
  misc_RNA (1)...(19): siRNA sense strand
cgucgggccucaccuucuu

SEQ ID NO: 1901594 - RNA, 19 nt, Homo sapiens
  misc_RNA (1)...(19): siRNA sense strand
ccauaugcuucaccuacug

SEQ ID NO: 1901595 - RNA, 19 nt, Homo sapiens
  misc_RNA (1)...(19): siRNA sense strand
gcuacaagcugcgcaugac

SEQ ID NO: 1901596 - RNA, 19 nt, Homo sapiens
  misc_RNA (1)...(19): siRNA sense strand
caucuacccacucuucaug

SEQ ID NO: 1901597 - RNA, 19 nt, Homo sapiens
  misc_RNA (1)...(19): siRNA sense strand
ugaccugguugcccuucuu

SEQ ID NO: 1901598 - RNA, 19 nt, Homo sapiens
  misc_RNA (1)...(19): siRNA sense strand
cugggcauguucuuuguga

SEQ ID NO: 1901599 - RNA, 19 nt, Homo sapiens
  misc_RNA (1)...(19): siRNA sense strand
ucacugcgcaccucucaca

SEQ ID NO: 1901600 - RNA, 19 nt, Homo sapiens
  misc_RNA (1)...(19): siRNA sense strand
ggaccgccuucgacgugau

SEQ ID NO: 1901601 - RNA, 19 nt, Homo sapiens
  misc_RNA (1)...(19): siRNA sense strand
gccauaugcuucaccuacu

SEQ ID NO: 1901602 - RNA, 19 nt, Homo sapiens
  misc_RNA (1)...(19): siRNA sense strand
gaccugguugcccuucuuu

SEQ ID NO: 1901603 - RNA, 19 nt, Homo sapiens
  misc_RNA (1)...(19): siRNA sense strand
ucaauuucuucaacaucga

SEQ ID NO: 1901604 - RNA, 19 nt, Homo sapiens
  misc_RNA (1)...(19): siRNA sense strand
cucaaccucugccucauca

SEQ ID NO: 1901605 - RNA, 19 nt, Homo sapiens
  misc_RNA (1)...(19): siRNA sense strand
gcauccugcugggcauguu

SEQ ID NO: 1901606 - RNA, 19 nt, Homo sapiens
  misc_RNA (1)...(19): siRNA sense strand
agagagagcuggauuaugg

SEQ ID NO: 1901607 - RNA, 19 nt, Homo sapiens
  misc_RNA (1)...(19): siRNA sense strand
caaguggucugugacauuu

SEQ ID NO: 1901608 - RNA, 19 nt, Homo sapiens
  misc_RNA (1)...(19): siRNA sense strand
caaguaggauugcaaagga

SEQ ID NO: 1901609 - RNA, 19 nt, Homo sapiens
  misc_RNA (1)...(19): siRNA sense strand
gaaaagcacuaaaucaguu

SEQ ID NO: 1901610 - RNA, 19 nt, Homo sapiens
  misc_RNA (1)...(19): siRNA sense strand
gcacugaugacaacaacua

SEQ ID NO: 1901611 - RNA, 19 nt, Homo sapiens
  misc_RNA (1)...(19): siRNA sense strand
ggucugaauucaagcauga

SEQ ID NO: 1901612 - RNA, 19 nt, Homo sapiens
  misc_RNA (1)...(19): siRNA sense strand
gagcagcaaagacauuaua

SEQ ID NO: 1901613 - RNA, 19 nt, Homo sapiens
  misc_RNA (1)...(19): siRNA sense strand
caugagaaaucuuggagaa

SEQ ID NO: 1901614 - RNA, 19 nt, Homo sapiens
  misc_RNA (1)...(19): siRNA sense strand
ugugaucgcugcaauuauu

SEQ ID NO: 1901615 - RNA, 19 nt, Homo sapiens
  misc_RNA (1)...(19): siRNA sense strand
uagcagagaugaugaaugc

SEQ ID NO: 1901616 - RNA, 19 nt, Homo sapiens
  misc_RNA (1)...(19): siRNA sense strand
gcaaguggucugugacauu

SEQ ID NO: 1901617 - RNA, 19 nt, Homo sapiens
  misc_RNA (1)...(19): siRNA sense strand
aaucuugggugcauuugua

SEQ ID NO: 1901618 - RNA, 19 nt, Homo sapiens
  misc_RNA (1)...(19): siRNA sense strand
ccaaggaacuagcagagau

SEQ ID NO: 1901619 - RNA, 19 nt, Homo sapiens
  misc_RNA (1)...(19): siRNA sense strand
guaucucaauucccuuaua

SEQ ID NO: 1901620 - RNA, 19 nt, Homo sapiens
  misc_RNA (1)...(19): siRNA sense strand
ccacauuguuuccaccauu

SEQ ID NO: 1901621 - RNA, 19 nt, Homo sapiens
  misc_RNA (1)...(19): siRNA sense strand
caaaagaucucagguacaa

SEQ ID NO: 1901622 - RNA, 19 nt, Homo sapiens
  misc_RNA (1)...(19): siRNA sense strand
gaaaaggacuccaaagcau

SEQ ID NO: 1901623 - RNA, 19 nt, Homo sapiens
  misc_RNA (1)...(19): siRNA sense strand
gaacuagcagagaugauga

SEQ ID NO: 1901624 - RNA, 19 nt, Homo sapiens
  misc_RNA (1)...(19): siRNA sense strand
cuaaaucaguuuccacauc

SEQ ID NO: 1901625 - RNA, 19 nt, Homo sapiens
  misc_RNA (1)...(19): siRNA sense strand
ggaggugaauggccaaguc

SEQ ID NO: 1901626 - RNA, 19 nt, Homo sapiens
  misc_RNA (1)...(19): siRNA sense strand
ucaauucccuuauaaaucc

SEQ ID NO: 1901627 - RNA, 19 nt, Homo sapiens
  misc_RNA (1)...(19): siRNA sense strand
ggaacuagcagagaugaug

SEQ ID NO: 1901628 - RNA, 19 nt, Homo sapiens
  misc_RNA (1)...(19): siRNA sense strand
gaacggaaagcagccacua

SEQ ID NO: 1901629 - RNA, 19 nt, Homo sapiens
  misc_RNA (1)...(19): siRNA sense strand
caaaggaggaggugaaugg

SEQ ID NO: 1901630 - RNA, 19 nt, Homo sapiens
  misc_RNA (1)...(19): siRNA sense strand
gacauuauaccacaagaga

SEQ ID NO: 1901631 - RNA, 19 nt, Homo sapiens
  misc_RNA (1)...(19): siRNA sense strand
ccauccagccaauuauuua

SEQ ID NO: 1901632 - RNA, 19 nt, Homo sapiens
  misc_RNA (1)...(19): siRNA sense strand
ccacuacccugggauuaau

SEQ ID NO: 1901633 - RNA, 19 nt, Homo sapiens
  misc_RNA (1)...(19): siRNA sense strand
caaagacauuauaccacaa

SEQ ID NO: 1901634 - RNA, 19 nt, Homo sapiens
  misc_RNA (1)...(19): siRNA sense strand
acuaucaacucccuuguga

SEQ ID NO: 1901635 - RNA, 19 nt, Homo sapiens
  misc_RNA (1)...(19): siRNA sense strand
guaauauguuggcuuccuu

SEQ ID NO: 1901636 - RNA, 19 nt, Homo sapiens
  misc_RNA (1)...(19): siRNA sense strand
uaaacagaaugccauccaa

SEQ ID NO: 1901637 - RNA, 19 nt, Homo sapiens
  misc_RNA (1)...(19): siRNA sense strand
cacauuguuuccaccauuu

SEQ ID NO: 1901638 - RNA, 19 nt, Homo sapiens
  misc_RNA (1)...(19): siRNA sense strand
ggauuaaucuugggugcau

SEQ ID NO: 1901639 - RNA, 19 nt, Homo sapiens
  misc_RNA (1)...(19): siRNA sense strand
gagacaagcaaguaggauu

SEQ ID NO: 1901640 - RNA, 19 nt, Homo sapiens
  misc_RNA (1)...(19): siRNA sense strand
gugcauuuguaauauguug

SEQ ID NO: 1901641 - RNA, 19 nt, Homo sapiens
  misc_RNA (1)...(19): siRNA sense strand
aaagaucucagguacaaga

SEQ ID NO: 1901642 - RNA, 19 nt, Homo sapiens
  misc_RNA (1)...(19): siRNA sense strand
gcauugauuuugauccuuu

SEQ ID NO: 1901643 - RNA, 19 nt, Homo sapiens
  misc_RNA (1)...(19): siRNA sense strand
aaacagaaugccauccaaa

SEQ ID NO: 1901644 - RNA, 19 nt, Homo sapiens
  misc_RNA (1)...(19): siRNA sense strand
cacaagagacaagcaagua

SEQ ID NO: 1901645 - RNA, 19 nt, Homo sapiens
  misc_RNA (1)...(19): siRNA sense strand
gcagagaugaugaaugcau

SEQ ID NO: 1901646 - RNA, 19 nt, Homo sapiens
  misc_RNA (1)...(19): siRNA sense strand
uggcuuggguaucucaauu

SEQ ID NO: 1901647 - RNA, 19 nt, Homo sapiens
  misc_RNA (1)...(19): siRNA sense strand
gugagagagagcuggauua

SEQ ID NO: 1901648 - RNA, 19 nt, Homo sapiens
  misc_RNA (1)...(19): siRNA sense strand
caagaaagcauuccaaaag

SEQ ID NO: 1901649 - RNA, 19 nt, Homo sapiens
  misc_RNA (1)...(19): siRNA sense strand
ugaauucaagcaugagaaa

SEQ ID NO: 1901650 - RNA, 19 nt, Homo sapiens
  misc_RNA (1)...(19): siRNA sense strand
ggcauuaugauuacaauag

SEQ ID NO: 1901651 - RNA, 19 nt, Homo sapiens
  misc_RNA (1)...(19): siRNA sense strand
ggguaucucaauucccuua

SEQ ID NO: 1901652 - RNA, 19 nt, Homo sapiens
  misc_RNA (1)...(19): siRNA sense strand
gucuuuaucugacccauca

SEQ ID NO: 1901653 - RNA, 19 nt, Homo sapiens
  misc_RNA (1)...(19): siRNA sense strand
uagagcagcaaagacauua

SEQ ID NO: 1901654 - RNA, 19 nt, Homo sapiens
  misc_RNA (1)...(19): siRNA sense strand
gacauuuggcugaguguug

SEQ ID NO: 1901655 - RNA, 19 nt, Homo sapiens
  misc_RNA (1)...(19): siRNA sense strand
uggcauggcuuggguaucu

SEQ ID NO: 1901656 - RNA, 19 nt, Homo sapiens
  misc_RNA (1)...(19): siRNA sense strand
ccacuggcauugauuuuga

SEQ ID NO: 1901657 - RNA, 19 nt, Homo sapiens
  misc_RNA (1)...(19): siRNA sense strand
cagaugcuguugaguaugc

SEQ ID NO: 1901658 - RNA, 19 nt, Homo sapiens
  misc_RNA (1)...(19): siRNA sense strand
acauuuggcugaguguuga

SEQ ID NO: 1901659 - RNA, 19 nt, Homo sapiens
  misc_RNA (1)...(19): siRNA sense strand
gggugcauuuguaauaugu

SEQ ID NO: 1901660 - RNA, 19 nt, Homo sapiens
  misc_RNA (1)...(19): siRNA sense strand
cagcaaagacauuauacca

SEQ ID NO: 1901661 - RNA, 19 nt, Homo sapiens
  misc_RNA (1)...(19): siRNA sense strand
caccauuuacucaacauuu

SEQ ID NO: 1901662 - RNA, 19 nt, Homo sapiens
  misc_RNA (1)...(19): siRNA sense strand
gugaauggccaaguccuuu

SEQ ID NO: 1901663 - RNA, 19 nt, Homo sapiens
  misc_RNA (1)...(19): siRNA sense strand
gcaccauccagccaauuau

SEQ ID NO: 1901664 - RNA, 19 nt, Homo sapiens
  misc_RNA (1)...(19): siRNA sense strand
ggaucgguaucgagcaauc

SEQ ID NO: 1901665 - RNA, 19 nt, Homo sapiens
  misc_RNA (1)...(19): siRNA sense strand
agacaagcaaguaggauug

SEQ ID NO: 1901666 - RNA, 19 nt, Homo sapiens
  misc_RNA (1)...(19): siRNA sense strand
ugagagagagcuggauuau

SEQ ID NO: 1901667 - RNA, 19 nt, Homo sapiens
  misc_RNA (1)...(19): siRNA sense strand
cuugugaucgcugcaauua

SEQ ID NO: 1901668 - RNA, 19 nt, Homo sapiens
  misc_RNA (1)...(19): siRNA sense strand
caacauuuggagcuuucua

SEQ ID NO: 1901669 - RNA, 19 nt, Homo sapiens
  misc_RNA (1)...(19): siRNA sense strand
uugcaucucucagcuauag

SEQ ID NO: 1901670 - RNA, 19 nt, Homo sapiens
  misc_RNA (1)...(19): siRNA sense strand
gccacuacccugggauuaa

SEQ ID NO: 1901671 - RNA, 19 nt, Homo sapiens
  misc_RNA (1)...(19): siRNA sense strand
cauccagccaauuauuuaa

SEQ ID NO: 1901672 - RNA, 19 nt, Homo sapiens
  misc_RNA (1)...(19): siRNA sense strand
ggaaaaggacuccaaagca

SEQ ID NO: 1901673 - RNA, 19 nt, Homo sapiens
  misc_RNA (1)...(19): siRNA sense strand
ugacaacaacuaucaacuc

SEQ ID NO: 1901674 - RNA, 19 nt, Homo sapiens
  misc_RNA (1)...(19): siRNA sense strand
caaggaacuagcagagaug

SEQ ID NO: 1901675 - RNA, 19 nt, Homo sapiens
  misc_RNA (1)...(19): siRNA sense strand
accauuuacucaacauuug

SEQ ID NO: 1901676 - RNA, 19 nt, Homo sapiens
  misc_RNA (1)...(19): siRNA sense strand
cauuguguauauugugaga

SEQ ID NO: 1901677 - RNA, 19 nt, Homo sapiens
  misc_RNA (1)...(19): siRNA sense strand
cuugggugcauuuguaaua

SEQ ID NO: 1901678 - RNA, 19 nt, Homo sapiens
  misc_RNA (1)...(19): siRNA sense strand
ugucugggcuggcacugau

SEQ ID NO: 1901679 - RNA, 19 nt, Homo sapiens
  misc_RNA (1)...(19): siRNA sense strand
ugacccaucaacagacuuu

SEQ ID NO: 1901680 - RNA, 19 nt, Homo sapiens
  misc_RNA (1)...(19): siRNA sense strand
gagagagagcuggauuaug

SEQ ID NO: 1901681 - RNA, 19 nt, Homo sapiens
  misc_RNA (1)...(19): siRNA sense strand
cuugugcgaugucgauguu

SEQ ID NO: 1901682 - RNA, 19 nt, Homo sapiens
  misc_RNA (1)...(19): siRNA sense strand
uaauauguuggcuuccuuu

SEQ ID NO: 1901683 - RNA, 19 nt, Homo sapiens
  misc_RNA (1)...(19): siRNA sense strand
cauuauaccacaagagaca

SEQ ID NO: 1901684 - RNA, 19 nt, Homo sapiens
  misc_RNA (1)...(19): siRNA sense strand
uggcugaguguugacauua

SEQ ID NO: 1901685 - RNA, 19 nt, Homo sapiens
  misc_RNA (1)...(19): siRNA sense strand
cuacaucccacuggcauug

SEQ ID NO: 1901686 - RNA, 19 nt, Homo sapiens
  misc_RNA (1)...(19): siRNA sense strand
cuucagcauuguguauauu

SEQ ID NO: 1901687 - RNA, 19 nt, Homo sapiens
  misc_RNA (1)...(19): siRNA sense strand
ccacaagagacaagcaagu

SEQ ID NO: 1901688 - RNA, 19 nt, Homo sapiens
  misc_RNA (1)...(19): siRNA sense strand
auuuggagcuuucuacauc

SEQ ID NO: 1901689 - RNA, 19 nt, Homo sapiens
  misc_RNA (1)...(19): siRNA sense strand
ccuucagcauuguguauau

SEQ ID NO: 1901690 - RNA, 19 nt, Homo sapiens
  misc_RNA (1)...(19): siRNA sense strand
gcaaaggaggaggugaaug

SEQ ID NO: 1901691 - RNA, 19 nt, Homo sapiens
  misc_RNA (1)...(19): siRNA sense strand
cagaaugccauccaaaauu

SEQ ID NO: 1901692 - RNA, 19 nt, Homo sapiens
  misc_RNA (1)...(19): siRNA sense strand
caccauccagccaauuauu

SEQ ID NO: 1901693 - RNA, 19 nt, Homo sapiens
  misc_RNA (1)...(19): siRNA sense strand
ucuugcaucucucagcuau

SEQ ID NO: 1901694 - RNA, 19 nt, Homo sapiens
  misc_RNA (1)...(19): siRNA sense strand
ucagcauuguguauauugu

SEQ ID NO: 1901695 - RNA, 19 nt, Homo sapiens
  misc_RNA (1)...(19): siRNA sense strand
cucuaugccuccucuauuc

SEQ ID NO: 1901696 - RNA, 19 nt, Homo sapiens
  misc_RNA (1)...(19): siRNA sense strand
acucaacauuuggagcuuu

SEQ ID NO: 1901697 - RNA, 19 nt, Homo sapiens
  misc_RNA (1)...(19): siRNA sense strand
ugcaccauccagccaauua

SEQ ID NO: 1901698 - RNA, 19 nt, Homo sapiens
  misc_RNA (1)...(19): siRNA sense strand
gaugacaacaacuaucaac

SEQ ID NO: 1901699 - RNA, 19 nt, Homo sapiens
  misc_RNA (1)...(19): siRNA sense strand
gaauucaagcaugagaaau

SEQ ID NO: 1901700 - RNA, 19 nt, Homo sapiens
  misc_RNA (1)...(19): siRNA sense strand
cccuugcagucacagauuu

SEQ ID NO: 1901701 - RNA, 19 nt, Homo sapiens
  misc_RNA (1)...(19): siRNA sense strand
gagaaaagcacuaaaucag

SEQ ID NO: 1901702 - RNA, 19 nt, Homo sapiens
  misc_RNA (1)...(19): siRNA sense strand
cauccuauguacuagaaaa

SEQ ID NO: 1901703 - RNA, 19 nt, Homo sapiens
  misc_RNA (1)...(19): siRNA sense strand
gggcuggcacugaugacaa

SEQ ID NO: 1901704 - RNA, 19 nt, Homo sapiens
  misc_RNA (1)...(19): siRNA sense strand
agcauuguguauauuguga

SEQ ID NO: 1901705 - RNA, 19 nt, Homo sapiens
  misc_RNA (1)...(19): siRNA sense strand
gauuaaucuugggugcauu

SEQ ID NO: 1901706 - RNA, 19 nt, Homo sapiens
  misc_RNA (1)...(19): siRNA sense strand
gaagaaggcuuacuuaguc

SEQ ID NO: 1901707 - RNA, 19 nt, Homo sapiens
  misc_RNA (1)...(19): siRNA sense strand
cgaagaacauccacaauug

SEQ ID NO: 1901708 - RNA, 19 nt, Homo sapiens
  misc_RNA (1)...(19): siRNA sense strand
ggagauauuuguguggaua

SEQ ID NO: 1901709 - RNA, 19 nt, Homo sapiens
  misc_RNA (1)...(19): siRNA sense strand
caacucaggugaugaaaca

SEQ ID NO: 1901710 - RNA, 19 nt, Homo sapiens
  misc_RNA (1)...(19): siRNA sense strand
caagaaacauggaauucga

SEQ ID NO: 1901711 - RNA, 19 nt, Homo sapiens
  misc_RNA (1)...(19): siRNA sense strand
ucacaccucuugcaauuau

SEQ ID NO: 1901712 - RNA, 19 nt, Homo sapiens
  misc_RNA (1)...(19): siRNA sense strand
gaacagagagccucaaagg

SEQ ID NO: 1901713 - RNA, 19 nt, Homo sapiens
  misc_RNA (1)...(19): siRNA sense strand
ggauuaacccugccaugua

SEQ ID NO: 1901714 - RNA, 19 nt, Homo sapiens
  misc_RNA (1)...(19): siRNA sense strand
agaagaagcugcaguaugc

SEQ ID NO: 1901715 - RNA, 19 nt, Homo sapiens
  misc_RNA (1)...(19): siRNA sense strand
gaagagcgaguuaguuaug

SEQ ID NO: 1901716 - RNA, 19 nt, Homo sapiens
  misc_RNA (1)...(19): siRNA sense strand
gcgaagaacauccacaauu

SEQ ID NO: 1901717 - RNA, 19 nt, Homo sapiens
  misc_RNA (1)...(19): siRNA sense strand
gaacuucaaagcacaauuc

SEQ ID NO: 1901718 - RNA, 19 nt, Homo sapiens
  misc_RNA (1)...(19): siRNA sense strand
ccaaacuacucuccaaaug

SEQ ID NO: 1901719 - RNA, 19 nt, Homo sapiens
  misc_RNA (1)...(19): siRNA sense strand
ggaauccaauggcagagaa

SEQ ID NO: 1901720 - RNA, 19 nt, Homo sapiens
  misc_RNA (1)...(19): siRNA sense strand
gcauuuggccgauauauca

SEQ ID NO: 1901721 - RNA, 19 nt, Homo sapiens
  misc_RNA (1)...(19): siRNA sense strand
acaguggugugguuaauuu

SEQ ID NO: 1901722 - RNA, 19 nt, Homo sapiens
  misc_RNA (1)...(19): siRNA sense strand
uggugucccuucuuuauua

SEQ ID NO: 1901723 - RNA, 19 nt, Homo sapiens
  misc_RNA (1)...(19): siRNA sense strand
ccauuucaguggaucguua

SEQ ID NO: 1901724 - RNA, 19 nt, Homo sapiens
  misc_RNA (1)...(19): siRNA sense strand
ccaaugaggcuccgaaguu

SEQ ID NO: 1901725 - RNA, 19 nt, Homo sapiens
  misc_RNA (1)...(19): siRNA sense strand
uuaaagggauagagacuga

SEQ ID NO: 1901726 - RNA, 19 nt, Homo sapiens
  misc_RNA (1)...(19): siRNA sense strand
uaaccaaacuacucuccaa

SEQ ID NO: 1901727 - RNA, 19 nt, Homo sapiens
  misc_RNA (1)...(19): siRNA sense strand
ggaauucgaaaugggauua

SEQ ID NO: 1901728 - RNA, 19 nt, Homo sapiens
  misc_RNA (1)...(19): siRNA sense strand
ucuacacccucuucaauaa

SEQ ID NO: 1901729 - RNA, 19 nt, Homo sapiens
  misc_RNA (1)...(19): siRNA sense strand
cuucacaccucuugcaauu

SEQ ID NO: 1901730 - RNA, 19 nt, Homo sapiens
  misc_RNA (1)...(19): siRNA sense strand
cugaagagcgaguuaguua

SEQ ID NO: 1901731 - RNA, 19 nt, Homo sapiens
  misc_RNA (1)...(19): siRNA sense strand
aaacauggaauucgaaaug

SEQ ID NO: 1901732 - RNA, 19 nt, Homo sapiens
  misc_RNA (1)...(19): siRNA sense strand
gauauaucaccugcaauua

SEQ ID NO: 1901733 - RNA, 19 nt, Homo sapiens
  misc_RNA (1)...(19): siRNA sense strand
uaacuggucuggauuacag

SEQ ID NO: 1901734 - RNA, 19 nt, Homo sapiens
  misc_RNA (1)...(19): siRNA sense strand
guggacaacccaaacaaua

SEQ ID NO: 1901735 - RNA, 19 nt, Homo sapiens
  misc_RNA (1)...(19): siRNA sense strand
cugggcagcucuucugaua

SEQ ID NO: 1901736 - RNA, 19 nt, Homo sapiens
  misc_RNA (1)...(19): siRNA sense strand
guucaaccauucagucuuc

SEQ ID NO: 1901737 - RNA, 19 nt, Homo sapiens
  misc_RNA (1)...(19): siRNA sense strand
gcuccgaaguucaaccauu

SEQ ID NO: 1901738 - RNA, 19 nt, Homo sapiens
  misc_RNA (1)...(19): siRNA sense strand
gcagaccauuuccaacgaa

SEQ ID NO: 1901739 - RNA, 19 nt, Homo sapiens
  misc_RNA (1)...(19): siRNA sense strand
gagaagaagcugcaguaug

SEQ ID NO: 1901740 - RNA, 19 nt, Homo sapiens
  misc_RNA (1)...(19): siRNA sense strand
cagaggaaaugaaacagau

SEQ ID NO: 1901741 - RNA, 19 nt, Homo sapiens
  misc_RNA (1)...(19): siRNA sense strand
gauuaacccugccauguac

SEQ ID NO: 1901742 - RNA, 19 nt, Homo sapiens
  misc_RNA (1)...(19): siRNA sense strand
gugauaauacccacaauug

SEQ ID NO: 1901743 - RNA, 19 nt, Homo sapiens
  misc_RNA (1)...(19): siRNA sense strand
cgauauaucaccugcaauu

SEQ ID NO: 1901744 - RNA, 19 nt, Homo sapiens
  misc_RNA (1)...(19): siRNA sense strand
agaaaacgcuccaguaaga

SEQ ID NO: 1901745 - RNA, 19 nt, Homo sapiens
  misc_RNA (1)...(19): siRNA sense strand
gauaauacccacaauuggu

SEQ ID NO: 1901746 - RNA, 19 nt, Homo sapiens
  misc_RNA (1)...(19): siRNA sense strand
gcgaguuaguuauguauag

SEQ ID NO: 1901747 - RNA, 19 nt, Homo sapiens
  misc_RNA (1)...(19): siRNA sense strand
gagcaccuuuguucacguu

SEQ ID NO: 1901748 - RNA, 19 nt, Homo sapiens
  misc_RNA (1)...(19): siRNA sense strand
gggcagcucuucugauacu

SEQ ID NO: 1901749 - RNA, 19 nt, Homo sapiens
  misc_RNA (1)...(19): siRNA sense strand
caaugaggcuccgaaguuc

SEQ ID NO: 1901750 - RNA, 19 nt, Homo sapiens
  misc_RNA (1)...(19): siRNA sense strand
ucaccuacuuucucacuau

SEQ ID NO: 1901751 - RNA, 19 nt, Homo sapiens
  misc_RNA (1)...(19): siRNA sense strand
caauaauguuugaggcuau

SEQ ID NO: 1901752 - RNA, 19 nt, Homo sapiens
  misc_RNA (1)...(19): siRNA sense strand
gcaccuuuguucacguuau

SEQ ID NO: 1901753 - RNA, 19 nt, Homo sapiens
  misc_RNA (1)...(19): siRNA sense strand
ucuauguccugccugguua

SEQ ID NO: 1901754 - RNA, 19 nt, Homo sapiens
  misc_RNA (1)...(19): siRNA sense strand
gcuacagcauucaucaaga

SEQ ID NO: 1901755 - RNA, 19 nt, Homo sapiens
  misc_RNA (1)...(19): siRNA sense strand
gccgauauaucaccugcaa

SEQ ID NO: 1901756 - RNA, 19 nt, Homo sapiens
  misc_RNA (1)...(19): siRNA sense strand
ggaugcauuuggccgauau

SEQ ID NO: 1901757 - RNA, 19 nt, Homo sapiens
  misc_RNA (1)...(19): siRNA sense strand
uauguggugucccuucuuu

SEQ ID NO: 1901758 - RNA, 19 nt, Homo sapiens
  misc_RNA (1)...(19): siRNA sense strand
ggacaacccaaacaauauc

SEQ ID NO: 1901759 - RNA, 19 nt, Homo sapiens
  misc_RNA (1)...(19): siRNA sense strand
caauccaggccaaucaaua

SEQ ID NO: 1901760 - RNA, 19 nt, Homo sapiens
  misc_RNA (1)...(19): siRNA sense strand
acagaagaaggcuuacuua

SEQ ID NO: 1901761 - RNA, 19 nt, Homo sapiens
  misc_RNA (1)...(19): siRNA sense strand
gccauuccagucccuauua

SEQ ID NO: 1901762 - RNA, 19 nt, Homo sapiens
  misc_RNA (1)...(19): siRNA sense strand
cuacagcauucaucaagau

SEQ ID NO: 1901763 - RNA, 19 nt, Homo sapiens
  misc_RNA (1)...(19): siRNA sense strand
gaggaaaugaaacagauug

SEQ ID NO: 1901764 - RNA, 19 nt, Homo sapiens
  misc_RNA (1)...(19): siRNA sense strand
gguggaaauacccuuguua

SEQ ID NO: 1901765 - RNA, 19 nt, Homo sapiens
  misc_RNA (1)...(19): siRNA sense strand
gagugaauccuuuggucua

SEQ ID NO: 1901766 - RNA, 19 nt, Homo sapiens
  misc_RNA (1)...(19): siRNA sense strand
gaaacacuuaugcgaagaa

SEQ ID NO: 1901767 - RNA, 19 nt, Homo sapiens
  misc_RNA (1)...(19): siRNA sense strand
ccauuccagucccuauuaa

SEQ ID NO: 1901768 - RNA, 19 nt, Homo sapiens
  misc_RNA (1)...(19): siRNA sense strand
gaagaacauccacaauugg

SEQ ID NO: 1901769 - RNA, 19 nt, Homo sapiens
  misc_RNA (1)...(19): siRNA sense strand
gaaggcuuacuuagucaaa

SEQ ID NO: 1901770 - RNA, 19 nt, Homo sapiens
  misc_RNA (1)...(19): siRNA sense strand
ccaauugcccucuugacaa

SEQ ID NO: 1901771 - RNA, 19 nt, Homo sapiens
  misc_RNA (1)...(19): siRNA sense strand
aaacuacucuccaaaugcu

SEQ ID NO: 1901772 - RNA, 19 nt, Homo sapiens
  misc_RNA (1)...(19): siRNA sense strand
ucaaagguccuagggauug

SEQ ID NO: 1901773 - RNA, 19 nt, Homo sapiens
  misc_RNA (1)...(19): siRNA sense strand
gcacaauuccugagcacau

SEQ ID NO: 1901774 - RNA, 19 nt, Homo sapiens
  misc_RNA (1)...(19): siRNA sense strand
uucaguggaucguuacaua

SEQ ID NO: 1901775 - RNA, 19 nt, Homo sapiens
  misc_RNA (1)...(19): siRNA sense strand
gcaucucugugccauuuca

SEQ ID NO: 1901776 - RNA, 19 nt, Homo sapiens
  misc_RNA (1)...(19): siRNA sense strand
agagcgaguuaguuaugua

SEQ ID NO: 1901777 - RNA, 19 nt, Homo sapiens
  misc_RNA (1)...(19): siRNA sense strand
ggucuacacccucuucaau

SEQ ID NO: 1901778 - RNA, 19 nt, Homo sapiens
  misc_RNA (1)...(19): siRNA sense strand
gcacugggcagcucuucug

SEQ ID NO: 1901779 - RNA, 19 nt, Homo sapiens
  misc_RNA (1)...(19): siRNA sense strand
cugguuggauuguuuguga

SEQ ID NO: 1901780 - RNA, 19 nt, Homo sapiens
  misc_RNA (1)...(19): siRNA sense strand
ggugauaauacccacaauu

SEQ ID NO: 1901781 - RNA, 19 nt, Homo sapiens
  misc_RNA (1)...(19): siRNA sense strand
cacaauuccugagcacauu

SEQ ID NO: 1901782 - RNA, 19 nt, Homo sapiens
  misc_RNA (1)...(19): siRNA sense strand
gggaugcauuuggccgaua

SEQ ID NO: 1901783 - RNA, 19 nt, Homo sapiens
  misc_RNA (1)...(19): siRNA sense strand
gguccuagggauuguguuu

SEQ ID NO: 1901784 - RNA, 19 nt, Homo sapiens
  misc_RNA (1)...(19): siRNA sense strand
agaagaaggcuuacuuagu

SEQ ID NO: 1901785 - RNA, 19 nt, Homo sapiens
  misc_RNA (1)...(19): siRNA sense strand
gaugccaauugcccucuug

SEQ ID NO: 1901786 - RNA, 19 nt, Homo sapiens
  misc_RNA (1)...(19): siRNA sense strand
cugauuugcugguuggauu

SEQ ID NO: 1901787 - RNA, 19 nt, Homo sapiens
  misc_RNA (1)...(19): siRNA sense strand
cagcauucaucaagauuac

SEQ ID NO: 1901788 - RNA, 19 nt, Homo sapiens
  misc_RNA (1)...(19): siRNA sense strand
ugugauuccuguaaccaaa

SEQ ID NO: 1901789 - RNA, 19 nt, Homo sapiens
  misc_RNA (1)...(19): siRNA sense strand
ccuuggcgguggcugauuu

SEQ ID NO: 1901790 - RNA, 19 nt, Homo sapiens
  misc_RNA (1)...(19): siRNA sense strand
ugaggaacagggaaauaaa

SEQ ID NO: 1901791 - RNA, 19 nt, Homo sapiens
  misc_RNA (1)...(19): siRNA sense strand
guggaaauacccuuguuau

SEQ ID NO: 1901792 - RNA, 19 nt, Homo sapiens
  misc_RNA (1)...(19): siRNA sense strand
gggauuaacccugccaugu

SEQ ID NO: 1901793 - RNA, 19 nt, Homo sapiens
  misc_RNA (1)...(19): siRNA sense strand
caaagguccuagggauugu

SEQ ID NO: 1901794 - RNA, 19 nt, Homo sapiens
  misc_RNA (1)...(19): siRNA sense strand
gaaucaauaccagaggaaa

SEQ ID NO: 1901795 - RNA, 19 nt, Homo sapiens
  misc_RNA (1)...(19): siRNA sense strand
augcaucucugugccauuu

SEQ ID NO: 1901796 - RNA, 19 nt, Homo sapiens
  misc_RNA (1)...(19): siRNA sense strand
acaaggcucugcccaacuc

SEQ ID NO: 1901797 - RNA, 19 nt, Homo sapiens
  misc_RNA (1)...(19): siRNA sense strand
uaagaucuacuuccggaau

SEQ ID NO: 1901798 - RNA, 19 nt, Homo sapiens
  misc_RNA (1)...(19): siRNA sense strand
gucuacacccucuucaaua

SEQ ID NO: 1901799 - RNA, 19 nt, Homo sapiens
  misc_RNA (1)...(19): siRNA sense strand
uggagaagaagcugcagua

SEQ ID NO: 1901800 - RNA, 19 nt, Homo sapiens
  misc_RNA (1)...(19): siRNA sense strand
gagcgaguuaguuauguau

SEQ ID NO: 1901801 - RNA, 19 nt, Homo sapiens
  misc_RNA (1)...(19): siRNA sense strand
gaaacauggaauucgaaau

SEQ ID NO: 1901802 - RNA, 19 nt, Homo sapiens
  misc_RNA (1)...(19): siRNA sense strand
gauacucauggugauaaua

SEQ ID NO: 1901803 - RNA, 19 nt, Homo sapiens
  misc_RNA (1)...(19): siRNA sense strand
uauccaugcuuuacagaag

SEQ ID NO: 1901804 - RNA, 19 nt, Homo sapiens
  misc_RNA (1)...(19): siRNA sense strand
ccucuugacaauaauguuu

SEQ ID NO: 1901805 - RNA, 19 nt, Homo sapiens
  misc_RNA (1)...(19): siRNA sense strand
ggagaagaagcugcaguau

SEQ ID NO: 1901806 - RNA, 19 nt, Homo sapiens
  misc_RNA (1)...(19): siRNA sense strand
ggaaaguacugcugguuau

SEQ ID NO: 1901807 - RNA, 19 nt, Homo sapiens
  misc_RNA (1)...(19): siRNA sense strand
gcgccaaggacuacauuua

SEQ ID NO: 1901808 - RNA, 19 nt, Homo sapiens
  misc_RNA (1)...(19): siRNA sense strand
aaacaagcauuccauaaac

SEQ ID NO: 1901809 - RNA, 19 nt, Homo sapiens
  misc_RNA (1)...(19): siRNA sense strand
ucacauggcugggcuaucu

SEQ ID NO: 1901810 - RNA, 19 nt, Homo sapiens
  misc_RNA (1)...(19): siRNA sense strand
gcaaagaugccugcugguu

SEQ ID NO: 1901811 - RNA, 19 nt, Homo sapiens
  misc_RNA (1)...(19): siRNA sense strand
cgucggacaucacuuguug

SEQ ID NO: 1901812 - RNA, 19 nt, Homo sapiens
  misc_RNA (1)...(19): siRNA sense strand
uaucucaacucccucauca

SEQ ID NO: 1901813 - RNA, 19 nt, Homo sapiens
  misc_RNA (1)...(19): siRNA sense strand
aagaggaggugucggaaug

SEQ ID NO: 1901814 - RNA, 19 nt, Homo sapiens
  misc_RNA (1)...(19): siRNA sense strand
gagccuuuauuguguguug

SEQ ID NO: 1901815 - RNA, 19 nt, Homo sapiens
  misc_RNA (1)...(19): siRNA sense strand
ccaccacgcucuccaaugc

SEQ ID NO: 1901816 - RNA, 19 nt, Homo sapiens
  misc_RNA (1)...(19): siRNA sense strand
gacccgagcccagcugaua

SEQ ID NO: 1901817 - RNA, 19 nt, Homo sapiens
  misc_RNA (1)...(19): siRNA sense strand
gaauccggaucuccugugu

SEQ ID NO: 1901818 - RNA, 19 nt, Homo sapiens
  misc_RNA (1)...(19): siRNA sense strand
uggaaaguacugcugguua

SEQ ID NO: 1901819 - RNA, 19 nt, Homo sapiens
  misc_RNA (1)...(19): siRNA sense strand
uggcuacccuucuucauca

SEQ ID NO: 1901820 - RNA, 19 nt, Homo sapiens
  misc_RNA (1)...(19): siRNA sense strand
gaaaguacugcugguuaug

SEQ ID NO: 1901821 - RNA, 19 nt, Homo sapiens
  misc_RNA (1)...(19): siRNA sense strand
gaagaggaggugucggaau

SEQ ID NO: 1901822 - RNA, 19 nt, Homo sapiens
  misc_RNA (1)...(19): siRNA sense strand
ggacuuuaaacaagcauuc

SEQ ID NO: 1901823 - RNA, 19 nt, Homo sapiens
  misc_RNA (1)...(19): siRNA sense strand
uauuggcgcucaucaccuu

SEQ ID NO: 1901824 - RNA, 19 nt, Homo sapiens
  misc_RNA (1)...(19): siRNA sense strand
cguccucggucaccucuau

SEQ ID NO: 1901825 - RNA, 19 nt, Homo sapiens
  misc_RNA (1)...(19): siRNA sense strand
guacugcugguuaugcuau

SEQ ID NO: 1901826 - RNA, 19 nt, Homo sapiens
  misc_RNA (1)...(19): siRNA sense strand
gcucuccaaugccuuugug

SEQ ID NO: 1901827 - RNA, 19 nt, Homo sapiens
  misc_RNA (1)...(19): siRNA sense strand
uucaucaucucccuaguga

SEQ ID NO: 1901828 - RNA, 19 nt, Homo sapiens
  misc_RNA (1)...(19): siRNA sense strand
agcauuccauaaacugaua

SEQ ID NO: 1901829 - RNA, 19 nt, Homo sapiens
  misc_RNA (1)...(19): siRNA sense strand
ccggaucuccuguguaugu

SEQ ID NO: 1901830 - RNA, 19 nt, Homo sapiens
  misc_RNA (1)...(19): siRNA sense strand
caagcauuccauaaacuga

SEQ ID NO: 1901831 - RNA, 19 nt, Homo sapiens
  misc_RNA (1)...(19): siRNA sense strand
agugaugccuaucugcaaa

SEQ ID NO: 1901832 - RNA, 19 nt, Homo sapiens
  misc_RNA (1)...(19): siRNA sense strand
gagcgcaaagccaccaaga

SEQ ID NO: 1901833 - RNA, 19 nt, Homo sapiens
  misc_RNA (1)...(19): siRNA sense strand
ucagcaccauguacacugu

SEQ ID NO: 1901834 - RNA, 19 nt, Homo sapiens
  misc_RNA (1)...(19): siRNA sense strand
auccggaucuccuguguau

SEQ ID NO: 1901835 - RNA, 19 nt, Homo sapiens
  misc_RNA (1)...(19): siRNA sense strand
ugaaacagacgcccaacag

SEQ ID NO: 1901836 - RNA, 19 nt, Homo sapiens
  misc_RNA (1)...(19): siRNA sense strand
uguguuggcuacccuucuu

SEQ ID NO: 1901837 - RNA, 19 nt, Homo sapiens
  misc_RNA (1)...(19): siRNA sense strand
ucggucaccucuauuaacu

SEQ ID NO: 1901838 - RNA, 19 nt, Homo sapiens
  misc_RNA (1)...(19): siRNA sense strand
cuccaaugccuuugugauu

SEQ ID NO: 1901839 - RNA, 19 nt, Homo sapiens
  misc_RNA (1)...(19): siRNA sense strand
uaaucuauaccauguccaa

SEQ ID NO: 1901840 - RNA, 19 nt, Homo sapiens
  misc_RNA (1)...(19): siRNA sense strand
uugggagccuuuauugugu

SEQ ID NO: 1901841 - RNA, 19 nt, Homo sapiens
  misc_RNA (1)...(19): siRNA sense strand
gcuaaaaggacucccaaga

SEQ ID NO: 1901842 - RNA, 19 nt, Homo sapiens
  misc_RNA (1)...(19): siRNA sense strand
gccguggaguacucagcua

SEQ ID NO: 1901843 - RNA, 19 nt, Homo sapiens
  misc_RNA (1)...(19): siRNA sense strand
ccaagacccuagggaucau

SEQ ID NO: 1901844 - RNA, 19 nt, Homo sapiens
  misc_RNA (1)...(19): siRNA sense strand
caucuuugacuucuucaca

SEQ ID NO: 1901845 - RNA, 19 nt, Homo sapiens
  misc_RNA (1)...(19): siRNA sense strand
ugggccagguggucuguga

SEQ ID NO: 1901846 - RNA, 19 nt, Homo sapiens
  misc_RNA (1)...(19): siRNA sense strand
gggagccuuuauugugugu

SEQ ID NO: 1901847 - RNA, 19 nt, Homo sapiens
  misc_RNA (1)...(19): siRNA sense strand
cacggugggugcuuucuac

SEQ ID NO: 1901848 - RNA, 19 nt, Homo sapiens
  misc_RNA (1)...(19): siRNA sense strand
ggucuucuccaucucuauc

SEQ ID NO: 1901849 - RNA, 19 nt, Homo sapiens
  misc_RNA (1)...(19): siRNA sense strand
gugugggucuucuccaucu

SEQ ID NO: 1901850 - RNA, 19 nt, Homo sapiens
  misc_RNA (1)...(19): siRNA sense strand
ucuuugacuucuucacaug

SEQ ID NO: 1901851 - RNA, 19 nt, Homo sapiens
  misc_RNA (1)...(19): siRNA sense strand
ccaccuagccaucuuugac

SEQ ID NO: 1901852 - RNA, 19 nt, Homo sapiens
  misc_RNA (1)...(19): siRNA sense strand
ccucggucaccucuauuaa

SEQ ID NO: 1901853 - RNA, 19 nt, Homo sapiens
  misc_RNA (1)...(19): siRNA sense strand
acaccgaccacauccucua

SEQ ID NO: 1901854 - RNA, 19 nt, Homo sapiens
  misc_RNA (1)...(19): siRNA sense strand
gaacuuggcugugaucaug

SEQ ID NO: 1901855 - RNA, 19 nt, Homo sapiens
  misc_RNA (1)...(19): siRNA sense strand
cauguuaucuacaccauuu

SEQ ID NO: 1901856 - RNA, 19 nt, Homo sapiens
  misc_RNA (1)...(19): siRNA sense strand
gaucaacccucugcucuau

SEQ ID NO: 1901857 - RNA, 19 nt, Homo sapiens
  misc_RNA (1)...(19): siRNA sense strand
ccaagagccuuuaccagaa

SEQ ID NO: 1901858 - RNA, 19 nt, Homo sapiens
  misc_RNA (1)...(19): siRNA sense strand
gcacagauagccagaauuc

SEQ ID NO: 1901859 - RNA, 19 nt, Homo sapiens
  misc_RNA (1)...(19): siRNA sense strand
caagagccuuuaccagaaa

SEQ ID NO: 1901860 - RNA, 19 nt, Homo sapiens
  misc_RNA (1)...(19): siRNA sense strand
ccaacuaccuaaucuguuc

SEQ ID NO: 1901861 - RNA, 19 nt, Homo sapiens
  misc_RNA (1)...(19): siRNA sense strand
ccaagaccaucacugagaa

SEQ ID NO: 1901862 - RNA, 19 nt, Homo sapiens
  misc_RNA (1)...(19): siRNA sense strand
gcuggaagcuuggguacuu

SEQ ID NO: 1901863 - RNA, 19 nt, Homo sapiens
  misc_RNA (1)...(19): siRNA sense strand
ccacagaguuugaaaaguu

SEQ ID NO: 1901864 - RNA, 19 nt, Homo sapiens
  misc_RNA (1)...(19): siRNA sense strand
ugacguggcucgguuaugu

SEQ ID NO: 1901865 - RNA, 19 nt, Homo sapiens
  misc_RNA (1)...(19): siRNA sense strand
gauucugggugcauucauu

SEQ ID NO: 1901866 - RNA, 19 nt, Homo sapiens
  misc_RNA (1)...(19): siRNA sense strand
gagaagaugcucauuugca

SEQ ID NO: 1901867 - RNA, 19 nt, Homo sapiens
  misc_RNA (1)...(19): siRNA sense strand
cagauagccagaauucuuu

SEQ ID NO: 1901868 - RNA, 19 nt, Homo sapiens
  misc_RNA (1)...(19): siRNA sense strand
gaacgucagcagaucucua

SEQ ID NO: 1901869 - RNA, 19 nt, Homo sapiens
  misc_RNA (1)...(19): siRNA sense strand
gacccaagaccaucacuga

SEQ ID NO: 1901870 - RNA, 19 nt, Homo sapiens
  misc_RNA (1)...(19): siRNA sense strand
ucaccacccucaccacguu

SEQ ID NO: 1901871 - RNA, 19 nt, Homo sapiens
  misc_RNA (1)...(19): siRNA sense strand
ccucagacccuaccacaga

SEQ ID NO: 1901872 - RNA, 19 nt, Homo sapiens
  misc_RNA (1)...(19): siRNA sense strand
ggaagaggacggccaagag

SEQ ID NO: 1901873 - RNA, 19 nt, Homo sapiens
  misc_RNA (1)...(19): siRNA sense strand
acagauagccagaauucuu

SEQ ID NO: 1901874 - RNA, 19 nt, Homo sapiens
  misc_RNA (1)...(19): siRNA sense strand
gauacugauucucuauuac

SEQ ID NO: 1901875 - RNA, 19 nt, Homo sapiens
  misc_RNA (1)...(19): siRNA sense strand
uaugugaauucucugauca

SEQ ID NO: 1901876 - RNA, 19 nt, Homo sapiens
  misc_RNA (1)...(19): siRNA sense strand
gauucucuauuaccggauu

SEQ ID NO: 1901877 - RNA, 19 nt, Homo sapiens
  misc_RNA (1)...(19): siRNA sense strand
ccucugcucuauacgaguu

SEQ ID NO: 1901878 - RNA, 19 nt, Homo sapiens
  misc_RNA (1)...(19): siRNA sense strand
aagcacagauagccagaau

SEQ ID NO: 1901879 - RNA, 19 nt, Homo sapiens
  misc_RNA (1)...(19): siRNA sense strand
ccaccagccugccaacuac

SEQ ID NO: 1901880 - RNA, 19 nt, Homo sapiens
  misc_RNA (1)...(19): siRNA sense strand
ucaccacguugcugaacuu

SEQ ID NO: 1901881 - RNA, 19 nt, Homo sapiens
  misc_RNA (1)...(19): siRNA sense strand
guacugggccaucaccaau

SEQ ID NO: 1901882 - RNA, 19 nt, Homo sapiens
  misc_RNA (1)...(19): siRNA sense strand
gcugugaucauggcuauug

SEQ ID NO: 1901883 - RNA, 19 nt, Homo sapiens
  misc_RNA (1)...(19): siRNA sense strand
ucaacccucugcucuauac

SEQ ID NO: 1901884 - RNA, 19 nt, Homo sapiens
  misc_RNA (1)...(19): siRNA sense strand
uugcugaacuuggcuguga

SEQ ID NO: 1901885 - RNA, 19 nt, Homo sapiens
  misc_RNA (1)...(19): siRNA sense strand
caucuacauugucauggau

SEQ ID NO: 1901886 - RNA, 19 nt, Homo sapiens
  misc_RNA (1)...(19): siRNA sense strand
ggccaucaccaaugcuauu

SEQ ID NO: 1901887 - RNA, 19 nt, Homo sapiens
  misc_RNA (1)...(19): siRNA sense strand
ugacuuugauacugauucu

SEQ ID NO: 1901888 - RNA, 19 nt, Homo sapiens
  misc_RNA (1)...(19): siRNA sense strand
caucaucuacauugucaug

SEQ ID NO: 1901889 - RNA, 19 nt, Homo sapiens
  misc_RNA (1)...(19): siRNA sense strand
gcaacagaagcacagauag

SEQ ID NO: 1901890 - RNA, 19 nt, Homo sapiens
  misc_RNA (1)...(19): siRNA sense strand
ucaucuacauugucaugga

SEQ ID NO: 1901891 - RNA, 19 nt, Homo sapiens
  misc_RNA (1)...(19): siRNA sense strand
gagcaucaucuacauuguc

SEQ ID NO: 1901892 - RNA, 19 nt, Homo sapiens
  misc_RNA (1)...(19): siRNA sense strand
gacagguacugggccauca

SEQ ID NO: 1901893 - RNA, 19 nt, Homo sapiens
  misc_RNA (1)...(19): siRNA sense strand
guggcucgguuaugugaau

SEQ ID NO: 1901894 - RNA, 19 nt, Homo sapiens
  misc_RNA (1)...(19): siRNA sense strand
cuucgacaaugaucuagau

SEQ ID NO: 1901895 - RNA, 19 nt, Homo sapiens
  misc_RNA (1)...(19): siRNA sense strand
caacagaagcacagauagc

SEQ ID NO: 1901896 - RNA, 19 nt, Homo sapiens
  misc_RNA (1)...(19): siRNA sense strand
agucggcacuuaagcaaca

SEQ ID NO: 1901897 - RNA, 19 nt, Homo sapiens
  misc_RNA (1)...(19): siRNA sense strand
aaacuuacacagacuuucu

SEQ ID NO: 1901898 - RNA, 19 nt, Homo sapiens
  misc_RNA (1)...(19): siRNA sense strand
cccaagaccaucacugaga

SEQ ID NO: 1901899 - RNA, 19 nt, Homo sapiens
  misc_RNA (1)...(19): siRNA sense strand
ucgguuaugugaauucucu

SEQ ID NO: 1901900 - RNA, 19 nt, Homo sapiens
  misc_RNA (1)...(19): siRNA sense strand
ggagaacgucagcagaucu

SEQ ID NO: 1901901 - RNA, 19 nt, Homo sapiens
  misc_RNA (1)...(19): siRNA sense strand
caggagaacgucagcagau

SEQ ID NO: 1901902 - RNA, 19 nt, Homo sapiens
  misc_RNA (1)...(19): siRNA sense strand
uggcugugaucauggcuau

SEQ ID NO: 1901903 - RNA, 19 nt, Homo sapiens
  misc_RNA (1)...(19): siRNA sense strand
agcaacagaagcacagaua

SEQ ID NO: 1901904 - RNA, 19 nt, Homo sapiens
  misc_RNA (1)...(19): siRNA sense strand
uauauccccuugacuuuga

SEQ ID NO: 1901905 - RNA, 19 nt, Homo sapiens
  misc_RNA (1)...(19): siRNA sense strand
cccuugacuuugauacuga

SEQ ID NO: 1901906 - RNA, 19 nt, Homo sapiens
  misc_RNA (1)...(19): siRNA sense strand
uuaugugaauucucugauc

SEQ ID NO: 1901907 - RNA, 19 nt, Homo sapiens
  misc_RNA (1)...(19): siRNA sense strand
ugagcaucaucuacauugu

SEQ ID NO: 1901908 - RNA, 19 nt, Homo sapiens
  misc_RNA (1)...(19): siRNA sense strand
ccagaauucuuuugcaagu

SEQ ID NO: 1901909 - RNA, 19 nt, Homo sapiens
  misc_RNA (1)...(19): siRNA sense strand
gguacugggccaucaccaa

SEQ ID NO: 1901910 - RNA, 19 nt, Homo sapiens
  misc_RNA (1)...(19): siRNA sense strand
uuggguacuuccucuguga

SEQ ID NO: 1901911 - RNA, 19 nt, Homo sapiens
  misc_RNA (1)...(19): siRNA sense strand
agcaucaucuacauuguca

SEQ ID NO: 1901912 - RNA, 19 nt, Homo sapiens
  misc_RNA (1)...(19): siRNA sense strand
cugagcaucaucuacauug

SEQ ID NO: 1901913 - RNA, 19 nt, Homo sapiens
  misc_RNA (1)...(19): siRNA sense strand
ugaucaacccucugcucua

SEQ ID NO: 1901914 - RNA, 19 nt, Homo sapiens
  misc_RNA (1)...(19): siRNA sense strand
agaauucuuuugcaaguug

SEQ ID NO: 1901915 - RNA, 19 nt, Homo sapiens
  misc_RNA (1)...(19): siRNA sense strand
gaagcacagauagccagaa

SEQ ID NO: 1901916 - RNA, 19 nt, Homo sapiens
  misc_RNA (1)...(19): siRNA sense strand
gaagaugucucaggaauuc

SEQ ID NO: 1901917 - RNA, 19 nt, Homo sapiens
  misc_RNA (1)...(19): siRNA sense strand
agaggacacugcaguauua

SEQ ID NO: 1901918 - RNA, 19 nt, Homo sapiens
  misc_RNA (1)...(19): siRNA sense strand
gacaguggaucuucuauau

SEQ ID NO: 1901919 - RNA, 19 nt, Homo sapiens
  misc_RNA (1)...(19): siRNA sense strand
cagcagggcuccacagaaa

SEQ ID NO: 1901920 - RNA, 19 nt, Homo sapiens
  misc_RNA (1)...(19): siRNA sense strand
gauuguaucuccaaagguu

SEQ ID NO: 1901921 - RNA, 19 nt, Homo sapiens
  misc_RNA (1)...(19): siRNA sense strand
cccaaccacuuaccaauua

SEQ ID NO: 1901922 - RNA, 19 nt, Homo sapiens
  misc_RNA (1)...(19): siRNA sense strand
gaacaucaaguuauugguu

SEQ ID NO: 1901923 - RNA, 19 nt, Homo sapiens
  misc_RNA (1)...(19): siRNA sense strand
ccagaaaguuugaugaugu

SEQ ID NO: 1901924 - RNA, 19 nt, Homo sapiens
  misc_RNA (1)...(19): siRNA sense strand
gagaagcuaugcucugaug

SEQ ID NO: 1901925 - RNA, 19 nt, Homo sapiens
  misc_RNA (1)...(19): siRNA sense strand
ggacacugcaguauuauga

SEQ ID NO: 1901926 - RNA, 19 nt, Homo sapiens
  misc_RNA (1)...(19): siRNA sense strand
uggaacagguugcaaauga

SEQ ID NO: 1901927 - RNA, 19 nt, Homo sapiens
  misc_RNA (1)...(19): siRNA sense strand
gcuaugcucugauguuuca

SEQ ID NO: 1901928 - RNA, 19 nt, Homo sapiens
  misc_RNA (1)...(19): siRNA sense strand
gaagucaaaggacaaauga

SEQ ID NO: 1901929 - RNA, 19 nt, Homo sapiens
  misc_RNA (1)...(19): siRNA sense strand
ggacaaaugauccauguuc

SEQ ID NO: 1901930 - RNA, 19 nt, Homo sapiens
  misc_RNA (1)...(19): siRNA sense strand
gcugacaccugauggaaga

SEQ ID NO: 1901931 - RNA, 19 nt, Homo sapiens
  misc_RNA (1)...(19): siRNA sense strand
gauuaaggcugcaggaaag

SEQ ID NO: 1901932 - RNA, 19 nt, Homo sapiens
  misc_RNA (1)...(19): siRNA sense strand
gaagaccgauucagaugag

SEQ ID NO: 1901933 - RNA, 19 nt, Homo sapiens
  misc_RNA (1)...(19): siRNA sense strand
ugauguagcccagcaauua

SEQ ID NO: 1901934 - RNA, 19 nt, Homo sapiens
  misc_RNA (1)...(19): siRNA sense strand
caguggaucuucuauauuc

SEQ ID NO: 1901935 - RNA, 19 nt, Homo sapiens
  misc_RNA (1)...(19): siRNA sense strand
gaauuagcaucaacaccuu

SEQ ID NO: 1901936 - RNA, 19 nt, Homo sapiens
  misc_RNA (1)...(19): siRNA sense strand
guuauugccuguuuggaaa

SEQ ID NO: 1901937 - RNA, 19 nt, Homo sapiens
  misc_RNA (1)...(19): siRNA sense strand
gcagaccacuccaacaaag

SEQ ID NO: 1901938 - RNA, 19 nt, Homo sapiens
  misc_RNA (1)...(19): siRNA sense strand
ugauggaacuuucagaaga

SEQ ID NO: 1901939 - RNA, 19 nt, Homo sapiens
  misc_RNA (1)...(19): siRNA sense strand
gaacuguacaccagauuug

SEQ ID NO: 1901940 - RNA, 19 nt, Homo sapiens
  misc_RNA (1)...(19): siRNA sense strand
ucacaaagugcucaaguuu

SEQ ID NO: 1901941 - RNA, 19 nt, Homo sapiens
  misc_RNA (1)...(19): siRNA sense strand
ggugaugccuacuguguug

SEQ ID NO: 1901942 - RNA, 19 nt, Homo sapiens
  misc_RNA (1)...(19): siRNA sense strand
caagauggguugaagaaaa

SEQ ID NO: 1901943 - RNA, 19 nt, Homo sapiens
  misc_RNA (1)...(19): siRNA sense strand
gaagaucuaucggcuggau

SEQ ID NO: 1901944 - RNA, 19 nt, Homo sapiens
  misc_RNA (1)...(19): siRNA sense strand
gaacagguugcaaaugaga

SEQ ID NO: 1901945 - RNA, 19 nt, Homo sapiens
  misc_RNA (1)...(19): siRNA sense strand
gaagcuaugcucugauguu

SEQ ID NO: 1901946 - RNA, 19 nt, Homo sapiens
  misc_RNA (1)...(19): siRNA sense strand
gauggaagaccgauucaga

SEQ ID NO: 1901947 - RNA, 19 nt, Homo sapiens
  misc_RNA (1)...(19): siRNA sense strand
gagaguccuucgagcugua

SEQ ID NO: 1901948 - RNA, 19 nt, Homo sapiens
  misc_RNA (1)...(19): siRNA sense strand
gcaugucaguccuucaguu

SEQ ID NO: 1901949 - RNA, 19 nt, Homo sapiens
  misc_RNA (1)...(19): siRNA sense strand
aauuguagcugucuuacuu

SEQ ID NO: 1901950 - RNA, 19 nt, Homo sapiens
  misc_RNA (1)...(19): siRNA sense strand
gcaguauuaugaacaucaa

SEQ ID NO: 1901951 - RNA, 19 nt, Homo sapiens
  misc_RNA (1)...(19): siRNA sense strand
ggaagucaaaggacaaaug

SEQ ID NO: 1901952 - RNA, 19 nt, Homo sapiens
  misc_RNA (1)...(19): siRNA sense strand
gcuaauauacucgguuuga

SEQ ID NO: 1901953 - RNA, 19 nt, Homo sapiens
  misc_RNA (1)...(19): siRNA sense strand
ggaagaccgauucagauga

SEQ ID NO: 1901954 - RNA, 19 nt, Homo sapiens
  misc_RNA (1)...(19): siRNA sense strand
guacaggccagaaaguuug

SEQ ID NO: 1901955 - RNA, 19 nt, Homo sapiens
  misc_RNA (1)...(19): siRNA sense strand
uaacggcuuugaugcuuug

SEQ ID NO: 1901956 - RNA, 19 nt, Homo sapiens
  misc_RNA (1)...(19): siRNA sense strand
ggagucaccaucuuuccua

SEQ ID NO: 1901957 - RNA, 19 nt, Homo sapiens
  misc_RNA (1)...(19): siRNA sense strand
gaggacugcuucgagauug

SEQ ID NO: 1901958 - RNA, 19 nt, Homo sapiens
  misc_RNA (1)...(19): siRNA sense strand
gaugauggaacuuucagaa

SEQ ID NO: 1901959 - RNA, 19 nt, Homo sapiens
  misc_RNA (1)...(19): siRNA sense strand
gauccauguuccagaauca

SEQ ID NO: 1901960 - RNA, 19 nt, Homo sapiens
  misc_RNA (1)...(19): siRNA sense strand
gauggaacuuucagaagag

SEQ ID NO: 1901961 - RNA, 19 nt, Homo sapiens
  misc_RNA (1)...(19): siRNA sense strand
gaagaugauggaacuuuca

SEQ ID NO: 1901962 - RNA, 19 nt, Homo sapiens
  misc_RNA (1)...(19): siRNA sense strand
uauacucgguuugaaguuu

SEQ ID NO: 1901963 - RNA, 19 nt, Homo sapiens
  misc_RNA (1)...(19): siRNA sense strand
cugauggccuugaagauga

SEQ ID NO: 1901964 - RNA, 19 nt, Homo sapiens
  misc_RNA (1)...(19): siRNA sense strand
guuaaugccaccuuugaaa

SEQ ID NO: 1901965 - RNA, 19 nt, Homo sapiens
  misc_RNA (1)...(19): siRNA sense strand
ugucuuacuuuccuuauca

SEQ ID NO: 1901966 - RNA, 19 nt, Homo sapiens
  misc_RNA (1)...(19): siRNA sense strand
aagcuaugcucugauguuu

SEQ ID NO: 1901967 - RNA, 19 nt, Homo sapiens
  misc_RNA (1)...(19): siRNA sense strand
ugaagaugauggaacuuuc

SEQ ID NO: 1901968 - RNA, 19 nt, Homo sapiens
  misc_RNA (1)...(19): siRNA sense strand
ucuaacagaugcuccuaug

SEQ ID NO: 1901969 - RNA, 19 nt, Homo sapiens
  misc_RNA (1)...(19): siRNA sense strand
gaggauaggaauucacuca

SEQ ID NO: 1901970 - RNA, 19 nt, Homo sapiens
  misc_RNA (1)...(19): siRNA sense strand
agacaucccuauccaugau

SEQ ID NO: 1901971 - RNA, 19 nt, Homo sapiens
  misc_RNA (1)...(19): siRNA sense strand
ggaacagguugcaaaugag

SEQ ID NO: 1901972 - RNA, 19 nt, Homo sapiens
  misc_RNA (1)...(19): siRNA sense strand
uaacagaugcuccuaugca

SEQ ID NO: 1901973 - RNA, 19 nt, Homo sapiens
  misc_RNA (1)...(19): siRNA sense strand
caucaacaccuucuguaga

SEQ ID NO: 1901974 - RNA, 19 nt, Homo sapiens
  misc_RNA (1)...(19): siRNA sense strand
cggcuuugaugcuuuguug

SEQ ID NO: 1901975 - RNA, 19 nt, Homo sapiens
  misc_RNA (1)...(19): siRNA sense strand
gccagaaaguuugaugaug

SEQ ID NO: 1901976 - RNA, 19 nt, Homo sapiens
  misc_RNA (1)...(19): siRNA sense strand
guacucucaugcuccacua

SEQ ID NO: 1901977 - RNA, 19 nt, Homo sapiens
  misc_RNA (1)...(19): siRNA sense strand
gcaaguacaggccagaaag

SEQ ID NO: 1901978 - RNA, 19 nt, Homo sapiens
  misc_RNA (1)...(19): siRNA sense strand
cugcuaauauacucgguuu

SEQ ID NO: 1901979 - RNA, 19 nt, Homo sapiens
  misc_RNA (1)...(19): siRNA sense strand
gauguagcccagcaauuau

SEQ ID NO: 1901980 - RNA, 19 nt, Homo sapiens
  misc_RNA (1)...(19): siRNA sense strand
ucaagaggacacugcagua

SEQ ID NO: 1901981 - RNA, 19 nt, Homo sapiens
  misc_RNA (1)...(19): siRNA sense strand
aaugauccauguuccagaa

SEQ ID NO: 1901982 - RNA, 19 nt, Homo sapiens
  misc_RNA (1)...(19): siRNA sense strand
aaagagcucccugaaggua

SEQ ID NO: 1901983 - RNA, 19 nt, Homo sapiens
  misc_RNA (1)...(19): siRNA sense strand
agaagaaauugaagauguc

SEQ ID NO: 1901984 - RNA, 19 nt, Homo sapiens
  misc_RNA (1)...(19): siRNA sense strand
ucuaggcucugcuggaaug

SEQ ID NO: 1901985 - RNA, 19 nt, Homo sapiens
  misc_RNA (1)...(19): siRNA sense strand
ggacugcuucgagauugua

SEQ ID NO: 1901986 - RNA, 19 nt, Homo sapiens
  misc_RNA (1)...(19): siRNA sense strand
ccugcggaccucagaauua

SEQ ID NO: 1901987 - RNA, 19 nt, Homo sapiens
  misc_RNA (1)...(19): siRNA sense strand
guuugaaguuugaggaaau

SEQ ID NO: 1901988 - RNA, 19 nt, Homo sapiens
  misc_RNA (1)...(19): siRNA sense strand
cuaauauacucgguuugaa

SEQ ID NO: 1901989 - RNA, 19 nt, Homo sapiens
  misc_RNA (1)...(19): siRNA sense strand
caggaauucuucaguguac

SEQ ID NO: 1901990 - RNA, 19 nt, Homo sapiens
  misc_RNA (1)...(19): siRNA sense strand
gcccaaccacuuaccaauu

SEQ ID NO: 1901991 - RNA, 19 nt, Homo sapiens
  misc_RNA (1)...(19): siRNA sense strand
gugcgaaugccacguuauu

SEQ ID NO: 1901992 - RNA, 19 nt, Homo sapiens
  misc_RNA (1)...(19): siRNA sense strand
gcuaaacccauugcucuga

SEQ ID NO: 1901993 - RNA, 19 nt, Homo sapiens
  misc_RNA (1)...(19): siRNA sense strand
ccaguguacucccaugcaa

SEQ ID NO: 1901994 - RNA, 19 nt, Homo sapiens
  misc_RNA (1)...(19): siRNA sense strand
ggcaauuguagcugucuua

SEQ ID NO: 1901995 - RNA, 19 nt, Homo sapiens
  misc_RNA (1)...(19): siRNA sense strand
gcaaugcuggggaugauua

SEQ ID NO: 1901996 - RNA, 19 nt, Homo sapiens
  misc_RNA (1)...(19): siRNA sense strand
gguuugaaguuugaggaaa

SEQ ID NO: 1901997 - RNA, 19 nt, Homo sapiens
  misc_RNA (1)...(19): siRNA sense strand
gggaaggucuaaggaagca

SEQ ID NO: 1901998 - RNA, 19 nt, Homo sapiens
  misc_RNA (1)...(19): siRNA sense strand
gggugcgaaugccacguua

SEQ ID NO: 1901999 - RNA, 19 nt, Homo sapiens
  misc_RNA (1)...(19): siRNA sense strand
cagaaaguuugaugauguc

SEQ ID NO: 1902000 - RNA, 19 nt, Homo sapiens
  misc_RNA (1)...(19): siRNA sense strand
aagauuuggugaagaguuc

SEQ ID NO: 1902001 - RNA, 19 nt, Homo sapiens
  misc_RNA (1)...(19): siRNA sense strand
agacaguggaucuucuaua

SEQ ID NO: 1902002 - RNA, 19 nt, Homo sapiens
  misc_RNA (1)...(19): siRNA sense strand
aaggacaaaugauccaugu

SEQ ID NO: 1902003 - RNA, 19 nt, Homo sapiens
  misc_RNA (1)...(19): siRNA sense strand
caagaggacacugcaguau

SEQ ID NO: 1902004 - RNA, 19 nt, Homo sapiens
  misc_RNA (1)...(19): siRNA sense strand
ugauuaaggcugcaggaaa

SEQ ID NO: 1902005 - RNA, 19 nt, Homo sapiens
  misc_RNA (1)...(19): siRNA sense strand
gcuauuuccuggagguaag

SEQ ID NO: 1902006 - RNA, 19 nt, Homo sapiens
  misc_RNA (1)...(19): siRNA sense strand
ccaaccacuuaccaauuau

SEQ ID NO: 1902007 - RNA, 19 nt, Homo sapiens
  misc_RNA (1)...(19): siRNA sense strand
ccacguuauugccuguuug

SEQ ID NO: 1902008 - RNA, 19 nt, Homo sapiens
  misc_RNA (1)...(19): siRNA sense strand
gcagcagggcuccacagaa

SEQ ID NO: 1902009 - RNA, 19 nt, Homo sapiens
  misc_RNA (1)...(19): siRNA sense strand
ggauauuuauaagguggaa

SEQ ID NO: 1902010 - RNA, 19 nt, Homo sapiens
  misc_RNA (1)...(19): siRNA sense strand
ugucuaggcucugcuggaa

SEQ ID NO: 1902011 - RNA, 19 nt, Homo sapiens
  misc_RNA (1)...(19): siRNA sense strand
ggugauggaagucaaagga

SEQ ID NO: 1902012 - RNA, 19 nt, Homo sapiens
  misc_RNA (1)...(19): siRNA sense strand
aagacaaggugauggaagu

SEQ ID NO: 1902013 - RNA, 19 nt, Homo sapiens
  misc_RNA (1)...(19): siRNA sense strand
gcucugauggccuugaaga

SEQ ID NO: 1902014 - RNA, 19 nt, Homo sapiens
  misc_RNA (1)...(19): siRNA sense strand
ccaacaaagaagaaauuga

SEQ ID NO: 1902015 - RNA, 19 nt, Homo sapiens
  misc_RNA (1)...(19): siRNA sense strand
gccacguuauugccuguuu

SEQ ID NO: 1902016 - RNA, 19 nt, Homo sapiens
  misc_RNA (1)...(19): siRNA sense strand
gcacgaagcucaaggaucu

SEQ ID NO: 1902017 - RNA, 19 nt, Homo sapiens
  misc_RNA (1)...(19): siRNA sense strand
ggacaacucugugaagaaa

SEQ ID NO: 1902018 - RNA, 19 nt, Homo sapiens
  misc_RNA (1)...(19): siRNA sense strand
gagaagaacauacaagaaa

SEQ ID NO: 1902019 - RNA, 19 nt, Homo sapiens
  misc_RNA (1)...(19): siRNA sense strand
cccaacaacuuacagauua

SEQ ID NO: 1902020 - RNA, 19 nt, Homo sapiens
  misc_RNA (1)...(19): siRNA sense strand
gagaguauuugcaaacuga

SEQ ID NO: 1902021 - RNA, 19 nt, Homo sapiens
  misc_RNA (1)...(19): siRNA sense strand
ucagagagcugcaaagcaa

SEQ ID NO: 1902022 - RNA, 19 nt, Homo sapiens
  misc_RNA (1)...(19): siRNA sense strand
gagcagccauugccaagaa

SEQ ID NO: 1902023 - RNA, 19 nt, Homo sapiens
  misc_RNA (1)...(19): siRNA sense strand
gagucuaucuucacacuuu

SEQ ID NO: 1902024 - RNA, 19 nt, Homo sapiens
  misc_RNA (1)...(19): siRNA sense strand
aaaggcagcugcucacgua

SEQ ID NO: 1902025 - RNA, 19 nt, Homo sapiens
  misc_RNA (1)...(19): siRNA sense strand
gaggcacccuuaaagauuu

SEQ ID NO: 1902026 - RNA, 19 nt, Homo sapiens
  misc_RNA (1)...(19): siRNA sense strand
ggagcucucugaugaaguu

SEQ ID NO: 1902027 - RNA, 19 nt, Homo sapiens
  misc_RNA (1)...(19): siRNA sense strand
gccaagaaguucaguaaug

SEQ ID NO: 1902028 - RNA, 19 nt, Homo sapiens
  misc_RNA (1)...(19): siRNA sense strand
ugauggagcucucugauga

SEQ ID NO: 1902029 - RNA, 19 nt, Homo sapiens
  misc_RNA (1)...(19): siRNA sense strand
ggcagcugcucacguauua

SEQ ID NO: 1902030 - RNA, 19 nt, Homo sapiens
  misc_RNA (1)...(19): siRNA sense strand
ccacaucgcuauucugcaa

SEQ ID NO: 1902031 - RNA, 19 nt, Homo sapiens
  misc_RNA (1)...(19): siRNA sense strand
gcagcgaguuugugaauca

SEQ ID NO: 1902032 - RNA, 19 nt, Homo sapiens
  misc_RNA (1)...(19): siRNA sense strand
gcucacguauuauaugaaa

SEQ ID NO: 1902033 - RNA, 19 nt, Homo sapiens
  misc_RNA (1)...(19): siRNA sense strand
caagauggccugaagaaga

SEQ ID NO: 1902034 - RNA, 19 nt, Homo sapiens
  misc_RNA (1)...(19): siRNA sense strand
guggagagcuggaugucua

SEQ ID NO: 1902035 - RNA, 19 nt, Homo sapiens
  misc_RNA (1)...(19): siRNA sense strand
ccaccaaacuucccuagug

SEQ ID NO: 1902036 - RNA, 19 nt, Homo sapiens
  misc_RNA (1)...(19): siRNA sense strand
ggaagaugcaagccaauuu

SEQ ID NO: 1902037 - RNA, 19 nt, Homo sapiens
  misc_RNA (1)...(19): siRNA sense strand
ggaauagauuagcaaccua

SEQ ID NO: 1902038 - RNA, 19 nt, Homo sapiens
  misc_RNA (1)...(19): siRNA sense strand
ggaggcacccuuaaagauu

SEQ ID NO: 1902039 - RNA, 19 nt, Homo sapiens
  misc_RNA (1)...(19): siRNA sense strand
aaagaaagauguggaagau

SEQ ID NO: 1902040 - RNA, 19 nt, Homo sapiens
  misc_RNA (1)...(19): siRNA sense strand
ccaagaaguucaguaaugu

SEQ ID NO: 1902041 - RNA, 19 nt, Homo sapiens
  misc_RNA (1)...(19): siRNA sense strand
gaauaugcaguuuguugua

SEQ ID NO: 1902042 - RNA, 19 nt, Homo sapiens
  misc_RNA (1)...(19): siRNA sense strand
gaucaugacuauguugaau

SEQ ID NO: 1902043 - RNA, 19 nt, Homo sapiens
  misc_RNA (1)...(19): siRNA sense strand
ccaguggaguuaucaaaga

SEQ ID NO: 1902044 - RNA, 19 nt, Homo sapiens
  misc_RNA (1)...(19): siRNA sense strand
caaagacuguccugguuuc

SEQ ID NO: 1902045 - RNA, 19 nt, Homo sapiens
  misc_RNA (1)...(19): siRNA sense strand
aaacuucccuagugaaauc

SEQ ID NO: 1902046 - RNA, 19 nt, Homo sapiens
  misc_RNA (1)...(19): siRNA sense strand
ggaaguggaagugucguua

SEQ ID NO: 1902047 - RNA, 19 nt, Homo sapiens
  misc_RNA (1)...(19): siRNA sense strand
agaguguccuuucuccuua

SEQ ID NO: 1902048 - RNA, 19 nt, Homo sapiens
  misc_RNA (1)...(19): siRNA sense strand
aggcaaagcaucaggaaua

SEQ ID NO: 1902049 - RNA, 19 nt, Homo sapiens
  misc_RNA (1)...(19): siRNA sense strand
gaacaggagagacuuucaa

SEQ ID NO: 1902050 - RNA, 19 nt, Homo sapiens
  misc_RNA (1)...(19): siRNA sense strand
gagaaccaccucccugauu

SEQ ID NO: 1902051 - RNA, 19 nt, Homo sapiens
  misc_RNA (1)...(19): siRNA sense strand
gaccuucugugcuccauau

SEQ ID NO: 1902052 - RNA, 19 nt, Homo sapiens
  misc_RNA (1)...(19): siRNA sense strand
gaaguggaagugucguuaa

SEQ ID NO: 1902053 - RNA, 19 nt, Homo sapiens
  misc_RNA (1)...(19): siRNA sense strand
gucaagacauuccugagaa

SEQ ID NO: 1902054 - RNA, 19 nt, Homo sapiens
  misc_RNA (1)...(19): siRNA sense strand
ggaacaagcccgagcucaa

SEQ ID NO: 1902055 - RNA, 19 nt, Homo sapiens
  misc_RNA (1)...(19): siRNA sense strand
caccaaacuucccuaguga

SEQ ID NO: 1902056 - RNA, 19 nt, Homo sapiens
  misc_RNA (1)...(19): siRNA sense strand
gaacauuggcaaagcacaa

SEQ ID NO: 1902057 - RNA, 19 nt, Homo sapiens
  misc_RNA (1)...(19): siRNA sense strand
ugaaucagcccuacuuguu

SEQ ID NO: 1902058 - RNA, 19 nt, Homo sapiens
  misc_RNA (1)...(19): siRNA sense strand
gaaucagcccuacuuguug

SEQ ID NO: 1902059 - RNA, 19 nt, Homo sapiens
  misc_RNA (1)...(19): siRNA sense strand
ggguuugacucauugaaga

SEQ ID NO: 1902060 - RNA, 19 nt, Homo sapiens
  misc_RNA (1)...(19): siRNA sense strand
ucucagacaucccaauuca

SEQ ID NO: 1902061 - RNA, 19 nt, Homo sapiens
  misc_RNA (1)...(19): siRNA sense strand
ugaauccagugcaaucuug

SEQ ID NO: 1902062 - RNA, 19 nt, Homo sapiens
  misc_RNA (1)...(19): siRNA sense strand
caaagcaucaggaauagau

SEQ ID NO: 1902063 - RNA, 19 nt, Homo sapiens
  misc_RNA (1)...(19): siRNA sense strand
gaacaagcccgagcucaag

SEQ ID NO: 1902064 - RNA, 19 nt, Homo sapiens
  misc_RNA (1)...(19): siRNA sense strand
ugagggauguggucuuaau

SEQ ID NO: 1902065 - RNA, 19 nt, Homo sapiens
  misc_RNA (1)...(19): siRNA sense strand
guggacagauuagaagauu

SEQ ID NO: 1902066 - RNA, 19 nt, Homo sapiens
  misc_RNA (1)...(19): siRNA sense strand
cagcugcucacguauuaua

SEQ ID NO: 1902067 - RNA, 19 nt, Homo sapiens
  misc_RNA (1)...(19): siRNA sense strand
ucaccaugcucuucucaga

SEQ ID NO: 1902068 - RNA, 19 nt, Homo sapiens
  misc_RNA (1)...(19): siRNA sense strand
gaagaacauacaagaaagu

SEQ ID NO: 1902069 - RNA, 19 nt, Homo sapiens
  misc_RNA (1)...(19): siRNA sense strand
caggagagacuuucaagga

SEQ ID NO: 1902070 - RNA, 19 nt, Homo sapiens
  misc_RNA (1)...(19): siRNA sense strand
ggagaugggacaacucugu

SEQ ID NO: 1902071 - RNA, 19 nt, Homo sapiens
  misc_RNA (1)...(19): siRNA sense strand
caacaaggaacaaacucaa

SEQ ID NO: 1902072 - RNA, 19 nt, Homo sapiens
  misc_RNA (1)...(19): siRNA sense strand
gaauguugcacuucagaga

SEQ ID NO: 1902073 - RNA, 19 nt, Homo sapiens
  misc_RNA (1)...(19): siRNA sense strand
uggagaaccuaucaagaug

SEQ ID NO: 1902074 - RNA, 19 nt, Homo sapiens
  misc_RNA (1)...(19): siRNA sense strand
caagacauuuccauuccau

SEQ ID NO: 1902075 - RNA, 19 nt, Homo sapiens
  misc_RNA (1)...(19): siRNA sense strand
uuagcaaccuauauaccua

SEQ ID NO: 1902076 - RNA, 19 nt, Homo sapiens
  misc_RNA (1)...(19): siRNA sense strand
ccaaacuucccuagugaaa

SEQ ID NO: 1902077 - RNA, 19 nt, Homo sapiens
  misc_RNA (1)...(19): siRNA sense strand
gaguuaaaaugccccguua

SEQ ID NO: 1902078 - RNA, 19 nt, Homo sapiens
  misc_RNA (1)...(19): siRNA sense strand
acugagggauguggucuua

SEQ ID NO: 1902079 - RNA, 19 nt, Homo sapiens
  misc_RNA (1)...(19): siRNA sense strand
gcaagacauuuccauucca

SEQ ID NO: 1902080 - RNA, 19 nt, Homo sapiens
  misc_RNA (1)...(19): siRNA sense strand
cacucuggcuaacaaauuu

SEQ ID NO: 1902081 - RNA, 19 nt, Homo sapiens
  misc_RNA (1)...(19): siRNA sense strand
ccauugcgaugccuauugu

SEQ ID NO: 1902082 - RNA, 19 nt, Homo sapiens
  misc_RNA (1)...(19): siRNA sense strand
ggacagauuagaagauuuu

SEQ ID NO: 1902083 - RNA, 19 nt, Homo sapiens
  misc_RNA (1)...(19): siRNA sense strand
uccauuccauuucauguuu

SEQ ID NO: 1902084 - RNA, 19 nt, Homo sapiens
  misc_RNA (1)...(19): siRNA sense strand
agacauuuccauuccauuu

SEQ ID NO: 1902085 - RNA, 19 nt, Homo sapiens
  misc_RNA (1)...(19): siRNA sense strand
gauaugacaauucugcaau

SEQ ID NO: 1902086 - RNA, 19 nt, Homo sapiens
  misc_RNA (1)...(19): siRNA sense strand
caucaggaauagauuagca

SEQ ID NO: 1902087 - RNA, 19 nt, Homo sapiens
  misc_RNA (1)...(19): siRNA sense strand
gcucucugaugaaguuaug

SEQ ID NO: 1902088 - RNA, 19 nt, Homo sapiens
  misc_RNA (1)...(19): siRNA sense strand
agaagaacauacaagaaag

SEQ ID NO: 1902089 - RNA, 19 nt, Homo sapiens
  misc_RNA (1)...(19): siRNA sense strand
caguggaguuaucaaagaa

SEQ ID NO: 1902090 - RNA, 19 nt, Homo sapiens
  misc_RNA (1)...(19): siRNA sense strand
ggaacaaacucaaaaccau

SEQ ID NO: 1902091 - RNA, 19 nt, Homo sapiens
  misc_RNA (1)...(19): siRNA sense strand
ucaaagacuguccugguuu

SEQ ID NO: 1902092 - RNA, 19 nt, Homo sapiens
  misc_RNA (1)...(19): siRNA sense strand
gcccaacaacuuacagauu

SEQ ID NO: 1902093 - RNA, 19 nt, Homo sapiens
  misc_RNA (1)...(19): siRNA sense strand
agaaccaccucccugauuc

SEQ ID NO: 1902094 - RNA, 19 nt, Homo sapiens
  misc_RNA (1)...(19): siRNA sense strand
uggauaaggaggaugauuu

SEQ ID NO: 1902095 - RNA, 19 nt, Homo sapiens
  misc_RNA (1)...(19): siRNA sense strand
uaaggaggaugauuuucua

SEQ ID NO: 1902096 - RNA, 19 nt, Homo sapiens
  misc_RNA (1)...(19): siRNA sense strand
ggcaaagcaucaggaauag

SEQ ID NO: 1902097 - RNA, 19 nt, Homo sapiens
  misc_RNA (1)...(19): siRNA sense strand
gagggauguggucuuaaua

SEQ ID NO: 1902098 - RNA, 19 nt, Homo sapiens
  misc_RNA (1)...(19): siRNA sense strand
aggagagacuuucaaggaa

SEQ ID NO: 1902099 - RNA, 19 nt, Homo sapiens
  misc_RNA (1)...(19): siRNA sense strand
gaugaacaggagagacuuu

SEQ ID NO: 1902100 - RNA, 19 nt, Homo sapiens
  misc_RNA (1)...(19): siRNA sense strand
ccucaaaggccaaaugauc

SEQ ID NO: 1902101 - RNA, 19 nt, Homo sapiens
  misc_RNA (1)...(19): siRNA sense strand
gaagaugcaagccaauuuu

SEQ ID NO: 1902102 - RNA, 19 nt, Homo sapiens
  misc_RNA (1)...(19): siRNA sense strand
gcagagaguauuugcaaac

SEQ ID NO: 1902103 - RNA, 19 nt, Homo sapiens
  misc_RNA (1)...(19): siRNA sense strand
gaucuacauuguugaaucc

SEQ ID NO: 1902104 - RNA, 19 nt, Homo sapiens
  misc_RNA (1)...(19): siRNA sense strand
ucaaaggccaaaugaucua

SEQ ID NO: 1902105 - RNA, 19 nt, Homo sapiens
  misc_RNA (1)...(19): siRNA sense strand
acaacucugugaagaaauc

SEQ ID NO: 1902106 - RNA, 19 nt, Homo sapiens
  misc_RNA (1)...(19): siRNA sense strand
ggacugcacucuggaucag

SEQ ID NO: 1902107 - RNA, 19 nt, Homo sapiens
  misc_RNA (1)...(19): siRNA sense strand
gcucaccgcugcaggucau

SEQ ID NO: 1902108 - RNA, 19 nt, Homo sapiens
  misc_RNA (1)...(19): siRNA sense strand
gaccucaaaggccaaauga

SEQ ID NO: 1902109 - RNA, 19 nt, Homo sapiens
  misc_RNA (1)...(19): siRNA sense strand
gacaaagauaugacaauuc

SEQ ID NO: 1902110 - RNA, 19 nt, Homo sapiens
  misc_RNA (1)...(19): siRNA sense strand
aagcaucaggaauagauua

SEQ ID NO: 1902111 - RNA, 19 nt, Homo sapiens
  misc_RNA (1)...(19): siRNA sense strand
ggcagagaguauuugcaaa

SEQ ID NO: 1902112 - RNA, 19 nt, Homo sapiens
  misc_RNA (1)...(19): siRNA sense strand
uggcgucguuggaguuaaa

SEQ ID NO: 1902113 - RNA, 19 nt, Homo sapiens
  misc_RNA (1)...(19): siRNA sense strand
cuucugugcuccauauuuc

SEQ ID NO: 1902114 - RNA, 19 nt, Homo sapiens
  misc_RNA (1)...(19): siRNA sense strand
acaaugcacugagggaugu

SEQ ID NO: 1902115 - RNA, 19 nt, Homo sapiens
  misc_RNA (1)...(19): siRNA sense strand
uugaaauucugacuccaaa

SEQ ID NO: 1902116 - RNA, 19 nt, Homo sapiens
  misc_RNA (1)...(19): siRNA sense strand
ccaaggaggccgagaauau

SEQ ID NO: 1902117 - RNA, 19 nt, Homo sapiens
  misc_RNA (1)...(19): siRNA sense strand
gaacacugcagcuugaaug

SEQ ID NO: 1902118 - RNA, 19 nt, Homo sapiens
  misc_RNA (1)...(19): siRNA sense strand
caccacgccucaucuguga

SEQ ID NO: 1902119 - RNA, 19 nt, Homo sapiens
  misc_RNA (1)...(19): siRNA sense strand
ugaaugagaauaucacugu

SEQ ID NO: 1902120 - RNA, 19 nt, Homo sapiens
  misc_RNA (1)...(19): siRNA sense strand
gcagcugcauguggauaaa

SEQ ID NO: 1902121 - RNA, 19 nt, Homo sapiens
  misc_RNA (1)...(19): siRNA sense strand
gccgaguccuggagaggua

SEQ ID NO: 1902122 - RNA, 19 nt, Homo sapiens
  misc_RNA (1)...(19): siRNA sense strand
cacugcagcuugaaugaga

SEQ ID NO: 1902123 - RNA, 19 nt, Homo sapiens
  misc_RNA (1)...(19): siRNA sense strand
gcagcaggccguagaaguc

SEQ ID NO: 1902124 - RNA, 19 nt, Homo sapiens
  misc_RNA (1)...(19): siRNA sense strand
gcagcuugaaugagaauau

SEQ ID NO: 1902125 - RNA, 19 nt, Homo sapiens
  misc_RNA (1)...(19): siRNA sense strand
gcuccacuccgaacaauca

SEQ ID NO: 1902126 - RNA, 19 nt, Homo sapiens
  misc_RNA (1)...(19): siRNA sense strand
aaucacugcugacacuuuc

SEQ ID NO: 1902127 - RNA, 19 nt, Homo sapiens
  misc_RNA (1)...(19): siRNA sense strand
ccagacaccaaaguuaauu

SEQ ID NO: 1902128 - RNA, 19 nt, Homo sapiens
  misc_RNA (1)...(19): siRNA sense strand
caaucacugcugacacuuu

SEQ ID NO: 1902129 - RNA, 19 nt, Homo sapiens
  misc_RNA (1)...(19): siRNA sense strand
caaggaggccgagaauauc

SEQ ID NO: 1902130 - RNA, 19 nt, Homo sapiens
  misc_RNA (1)...(19): siRNA sense strand
cagcuugaaugagaauauc

SEQ ID NO: 1902131 - RNA, 19 nt, Homo sapiens
  misc_RNA (1)...(19): siRNA sense strand
ucccagacaccaaaguuaa

SEQ ID NO: 1902132 - RNA, 19 nt, Homo sapiens
  misc_RNA (1)...(19): siRNA sense strand
gucccagacaccaaaguua

SEQ ID NO: 1902133 - RNA, 19 nt, Homo sapiens
  misc_RNA (1)...(19): siRNA sense strand
cagacaccaaaguuaauuu

SEQ ID NO: 1902134 - RNA, 19 nt, Homo sapiens
  misc_RNA (1)...(19): siRNA sense strand
aacaaucacugcugacacu

SEQ ID NO: 1902135 - RNA, 19 nt, Homo sapiens
  misc_RNA (1)...(19): siRNA sense strand
gcugacacuuuccgcaaac

SEQ ID NO: 1902136 - RNA, 19 nt, Homo sapiens
  misc_RNA (1)...(19): siRNA sense strand
ccaaaguuaauuucuaugc

SEQ ID NO: 1902137 - RNA, 19 nt, Homo sapiens
  misc_RNA (1)...(19): siRNA sense strand
agacaccaaaguuaauuuc

SEQ ID NO: 1902138 - RNA, 19 nt, Homo sapiens
  misc_RNA (1)...(19): siRNA sense strand
gccaaggaggccgagaaua

SEQ ID NO: 1902139 - RNA, 19 nt, Homo sapiens
  misc_RNA (1)...(19): siRNA sense strand
gaaacgggauuguacuauc

SEQ ID NO: 1902140 - RNA, 19 nt, Homo sapiens
  misc_RNA (1)...(19): siRNA sense strand
ggaauucacuacaucaucu

SEQ ID NO: 1902141 - RNA, 19 nt, Homo sapiens
  misc_RNA (1)...(19): siRNA sense strand
gcaaaggugcugacaucua

SEQ ID NO: 1902142 - RNA, 19 nt, Homo sapiens
  misc_RNA (1)...(19): siRNA sense strand
gagagugccugucuacaag

SEQ ID NO: 1902143 - RNA, 19 nt, Homo sapiens
  misc_RNA (1)...(19): siRNA sense strand
gcucagggcagccuccaua

SEQ ID NO: 1902144 - RNA, 19 nt, Homo sapiens
  misc_RNA (1)...(19): siRNA sense strand
aaacgggauuguacuauca

SEQ ID NO: 1902145 - RNA, 19 nt, Homo sapiens
  misc_RNA (1)...(19): siRNA sense strand
cggcaaaggugcugacauc

SEQ ID NO: 1902146 - RNA, 19 nt, Homo sapiens
  misc_RNA (1)...(19): siRNA sense strand
gcacgugggugagcugcaa

SEQ ID NO: 1902147 - RNA, 19 nt, Homo sapiens
  misc_RNA (1)...(19): siRNA sense strand
ggaugagagugccugucua

SEQ ID NO: 1902148 - RNA, 19 nt, Homo sapiens
  misc_RNA (1)...(19): siRNA sense strand
uggcugaggaggaaucuua

SEQ ID NO: 1902149 - RNA, 19 nt, Homo sapiens
  misc_RNA (1)...(19): siRNA sense strand
gaggaggaaucuuacuucu

SEQ ID NO: 1902150 - RNA, 19 nt, Homo sapiens
  misc_RNA (1)...(19): siRNA sense strand
uuccagggcuucauuguug

SEQ ID NO: 1902151 - RNA, 19 nt, Homo sapiens
  misc_RNA (1)...(19): siRNA sense strand
cagaagccgucuaccugaa

SEQ ID NO: 1902152 - RNA, 19 nt, Homo sapiens
  misc_RNA (1)...(19): siRNA sense strand
gcccggauuucuucucuca

SEQ ID NO: 1902153 - RNA, 19 nt, Homo sapiens
  misc_RNA (1)...(19): siRNA sense strand
gcacccagaaugugacuuc

SEQ ID NO: 1902154 - RNA, 19 nt, Homo sapiens
  misc_RNA (1)...(19): siRNA sense strand
ugagagugccugucuacaa

SEQ ID NO: 1902155 - RNA, 19 nt, Homo sapiens
  misc_RNA (1)...(19): siRNA sense strand
ggaggacccgugcuaagug

SEQ ID NO: 1902156 - RNA, 19 nt, Homo sapiens
  misc_RNA (1)...(19): siRNA sense strand
gcugcaaacuggccuucga

SEQ ID NO: 1902157 - RNA, 19 nt, Homo sapiens
  misc_RNA (1)...(19): siRNA sense strand
cagaggagaugcccaacac

SEQ ID NO: 1902158 - RNA, 19 nt, Homo sapiens
  misc_RNA (1)...(19): siRNA sense strand
gugaaacgggauuguacua

SEQ ID NO: 1902159 - RNA, 19 nt, Homo sapiens
  misc_RNA (1)...(19): siRNA sense strand
caagaggugaggacugaga

SEQ ID NO: 1902160 - RNA, 19 nt, Homo sapiens
  misc_RNA (1)...(19): siRNA sense strand
gcugcuggcugaggaggaa

SEQ ID NO: 1902161 - RNA, 19 nt, Homo sapiens
  misc_RNA (1)...(19): siRNA sense strand
accaagaggugaggacuga

SEQ ID NO: 1902162 - RNA, 19 nt, Homo sapiens
  misc_RNA (1)...(19): siRNA sense strand
gcugagagaggaugagagu

SEQ ID NO: 1902163 - RNA, 19 nt, Homo sapiens
  misc_RNA (1)...(19): siRNA sense strand
ucaacuuccugccagacaa

SEQ ID NO: 1902164 - RNA, 19 nt, Homo sapiens
  misc_RNA (1)...(19): siRNA sense strand
gaucccacucuuuggaauu

SEQ ID NO: 1902165 - RNA, 19 nt, Homo sapiens
  misc_RNA (1)...(19): siRNA sense strand
ucugagcccuuuccaccuu

SEQ ID NO: 1902166 - RNA, 19 nt, Homo sapiens
  misc_RNA (1)...(19): siRNA sense strand
gcugugaaacgggauugua

SEQ ID NO: 1902167 - RNA, 19 nt, Homo sapiens
  misc_RNA (1)...(19): siRNA sense strand
gaugagagugccugucuac

SEQ ID NO: 1902168 - RNA, 19 nt, Homo sapiens
  misc_RNA (1)...(19): siRNA sense strand
cuacaucaucuucaacuuc

SEQ ID NO: 1902169 - RNA, 19 nt, Homo sapiens
  misc_RNA (1)...(19): siRNA sense strand
cagcuucuccacuguucua

SEQ ID NO: 1902170 - RNA, 19 nt, Homo sapiens
  misc_RNA (1)...(19): siRNA sense strand
cccagaaugugacuucauc

SEQ ID NO: 1902171 - RNA, 19 nt, Homo sapiens
  misc_RNA (1)...(19): siRNA sense strand
gauuucuucucucacuuca

SEQ ID NO: 1902172 - RNA, 19 nt, Homo sapiens
  misc_RNA (1)...(19): siRNA sense strand
gaagccgucuaccugaacu

SEQ ID NO: 1902173 - RNA, 19 nt, Homo sapiens
  misc_RNA (1)...(19): siRNA sense strand
aaucuuacuucuccacagu

SEQ ID NO: 1902174 - RNA, 19 nt, Homo sapiens
  misc_RNA (1)...(19): siRNA sense strand
gcagaggagaugcccaaca

SEQ ID NO: 1902175 - RNA, 19 nt, Homo sapiens
  misc_RNA (1)...(19): siRNA sense strand
caucaaagggcccauuguc

SEQ ID NO: 1902176 - RNA, 19 nt, Homo sapiens
  misc_RNA (1)...(19): siRNA sense strand
ucuccacagugaagauuau

SEQ ID NO: 1902177 - RNA, 19 nt, Homo sapiens
  misc_RNA (1)...(19): siRNA sense strand
ucacuucagcucagaguca

SEQ ID NO: 1902178 - RNA, 19 nt, Homo sapiens
  misc_RNA (1)...(19): siRNA sense strand
ggauuucuucucucacuuc

SEQ ID NO: 1902179 - RNA, 19 nt, Homo sapiens
  misc_RNA (1)...(19): siRNA sense strand
gaucaucaaagggcccauu

SEQ ID NO: 1902180 - RNA, 19 nt, Homo sapiens
  misc_RNA (1)...(19): siRNA sense strand
ggggugaacuuugggcuuu

SEQ ID NO: 1902181 - RNA, 19 nt, Homo sapiens
  misc_RNA (1)...(19): siRNA sense strand
ugaggaggaaucuuacuuc

SEQ ID NO: 1902182 - RNA, 19 nt, Homo sapiens
  misc_RNA (1)...(19): siRNA sense strand
gaauucacuacaucaucuu

SEQ ID NO: 1902183 - RNA, 19 nt, Homo sapiens
  misc_RNA (1)...(19): siRNA sense strand
caacuuccugccagacaau

SEQ ID NO: 1902184 - RNA, 19 nt, Homo sapiens
  misc_RNA (1)...(19): siRNA sense strand
ugaaacgggauuguacuau

SEQ ID NO: 1902185 - RNA, 19 nt, Homo sapiens
  misc_RNA (1)...(19): siRNA sense strand
cugagcccuuuccaccuua

SEQ ID NO: 1902186 - RNA, 19 nt, Homo sapiens
  misc_RNA (1)...(19): siRNA sense strand
gagugccugucuacaagca

SEQ ID NO: 1902187 - RNA, 19 nt, Homo sapiens
  misc_RNA (1)...(19): siRNA sense strand
ucuuacuucuccacaguga

SEQ ID NO: 1902188 - RNA, 19 nt, Homo sapiens
  misc_RNA (1)...(19): siRNA sense strand
ccacuguucuaugcaaggu

SEQ ID NO: 1902189 - RNA, 19 nt, Homo sapiens
  misc_RNA (1)...(19): siRNA sense strand
gccaugacccugagcuucu

SEQ ID NO: 1902190 - RNA, 19 nt, Homo sapiens
  misc_RNA (1)...(19): siRNA sense strand
guacaagacuggaaauuug

SEQ ID NO: 1902191 - RNA, 19 nt, Homo sapiens
  misc_RNA (1)...(19): siRNA sense strand
cgacagaacugcuccauga

SEQ ID NO: 1902192 - RNA, 19 nt, Homo sapiens
  misc_RNA (1)...(19): siRNA sense strand
gcagaaacuuccaaaauua

SEQ ID NO: 1902193 - RNA, 19 nt, Homo sapiens
  misc_RNA (1)...(19): siRNA sense strand
ugacauaguucucuuugaa

SEQ ID NO: 1902194 - RNA, 19 nt, Homo sapiens
  misc_RNA (1)...(19): siRNA sense strand
caaagucauuccucucauu

SEQ ID NO: 1902195 - RNA, 19 nt, Homo sapiens
  misc_RNA (1)...(19): siRNA sense strand
cgagacaugugaagaaaga

SEQ ID NO: 1902196 - RNA, 19 nt, Homo sapiens
  misc_RNA (1)...(19): siRNA sense strand
guuccaagguuaucagaaa

SEQ ID NO: 1902197 - RNA, 19 nt, Homo sapiens
  misc_RNA (1)...(19): siRNA sense strand
gagaguaccugcuguucau

SEQ ID NO: 1902198 - RNA, 19 nt, Homo sapiens
  misc_RNA (1)...(19): siRNA sense strand
gggaaauacugaacgcaaa

SEQ ID NO: 1902199 - RNA, 19 nt, Homo sapiens
  misc_RNA (1)...(19): siRNA sense strand
gacauuuguuccaagguua

SEQ ID NO: 1902200 - RNA, 19 nt, Homo sapiens
  misc_RNA (1)...(19): siRNA sense strand
ccacaucggucuugguuuc

SEQ ID NO: 1902201 - RNA, 19 nt, Homo sapiens
  misc_RNA (1)...(19): siRNA sense strand
uaacggagaaugggaaaua

SEQ ID NO: 1902202 - RNA, 19 nt, Homo sapiens
  misc_RNA (1)...(19): siRNA sense strand
gaaaauaucccagcuugua

SEQ ID NO: 1902203 - RNA, 19 nt, Homo sapiens
  misc_RNA (1)...(19): siRNA sense strand
guaacaggcucgguucuga

SEQ ID NO: 1902204 - RNA, 19 nt, Homo sapiens
  misc_RNA (1)...(19): siRNA sense strand
ggugggauccauuccauua

SEQ ID NO: 1902205 - RNA, 19 nt, Homo sapiens
  misc_RNA (1)...(19): siRNA sense strand
gaaaucaucccaucgucuu

SEQ ID NO: 1902206 - RNA, 19 nt, Homo sapiens
  misc_RNA (1)...(19): siRNA sense strand
gaaaucaaacggaacuguu

SEQ ID NO: 1902207 - RNA, 19 nt, Homo sapiens
  misc_RNA (1)...(19): siRNA sense strand
gaaauggguccgcccugua

SEQ ID NO: 1902208 - RNA, 19 nt, Homo sapiens
  misc_RNA (1)...(19): siRNA sense strand
cauuaaaguuccaucagaa

SEQ ID NO: 1902209 - RNA, 19 nt, Homo sapiens
  misc_RNA (1)...(19): siRNA sense strand
ccauuaaaguuccaucaga

SEQ ID NO: 1902210 - RNA, 19 nt, Homo sapiens
  misc_RNA (1)...(19): siRNA sense strand
ugagacgccugccuuuauu

SEQ ID NO: 1902211 - RNA, 19 nt, Homo sapiens
  misc_RNA (1)...(19): siRNA sense strand
ccacagguuucaacucaau

SEQ ID NO: 1902212 - RNA, 19 nt, Homo sapiens
  misc_RNA (1)...(19): siRNA sense strand
gaaauuuguagcucaaguu

SEQ ID NO: 1902213 - RNA, 19 nt, Homo sapiens
  misc_RNA (1)...(19): siRNA sense strand
ggaaauuuguagcucaagu

SEQ ID NO: 1902214 - RNA, 19 nt, Homo sapiens
  misc_RNA (1)...(19): siRNA sense strand
caccacagguuucaacuca

SEQ ID NO: 1902215 - RNA, 19 nt, Homo sapiens
  misc_RNA (1)...(19): siRNA sense strand
gaaaggcaaaguccucgaa

SEQ ID NO: 1902216 - RNA, 19 nt, Homo sapiens
  misc_RNA (1)...(19): siRNA sense strand
gaagaaaucaucccaucgu

SEQ ID NO: 1902217 - RNA, 19 nt, Homo sapiens
  misc_RNA (1)...(19): siRNA sense strand
caucauuguuaccguguuu

SEQ ID NO: 1902218 - RNA, 19 nt, Homo sapiens
  misc_RNA (1)...(19): siRNA sense strand
caccaugguugaccucauu

SEQ ID NO: 1902219 - RNA, 19 nt, Homo sapiens
  misc_RNA (1)...(19): siRNA sense strand
uaucccagcuuguagaugu

SEQ ID NO: 1902220 - RNA, 19 nt, Homo sapiens
  misc_RNA (1)...(19): siRNA sense strand
uuagauacauuucgagaca

SEQ ID NO: 1902221 - RNA, 19 nt, Homo sapiens
  misc_RNA (1)...(19): siRNA sense strand
gaaacagcuuagugaugga

SEQ ID NO: 1902222 - RNA, 19 nt, Homo sapiens
  misc_RNA (1)...(19): siRNA sense strand
agaggagagucaaccagua

SEQ ID NO: 1902223 - RNA, 19 nt, Homo sapiens
  misc_RNA (1)...(19): siRNA sense strand
aaacagaaacagcuuagug

SEQ ID NO: 1902224 - RNA, 19 nt, Homo sapiens
  misc_RNA (1)...(19): siRNA sense strand
agacauuuguuccaagguu

SEQ ID NO: 1902225 - RNA, 19 nt, Homo sapiens
  misc_RNA (1)...(19): siRNA sense strand
ggucuugguuucucugaca

SEQ ID NO: 1902226 - RNA, 19 nt, Homo sapiens
  misc_RNA (1)...(19): siRNA sense strand
guacuccuaucccuuuauc

SEQ ID NO: 1902227 - RNA, 19 nt, Homo sapiens
  misc_RNA (1)...(19): siRNA sense strand
gcuuguagauguggaugaa

SEQ ID NO: 1902228 - RNA, 19 nt, Homo sapiens
  misc_RNA (1)...(19): siRNA sense strand
ccaaggucaucgugaaauc

SEQ ID NO: 1902229 - RNA, 19 nt, Homo sapiens
  misc_RNA (1)...(19): siRNA sense strand
ugggauccauuccauuaaa

SEQ ID NO: 1902230 - RNA, 19 nt, Homo sapiens
  misc_RNA (1)...(19): siRNA sense strand
ggacagaccacaaguuacg

SEQ ID NO: 1902231 - RNA, 19 nt, Homo sapiens
  misc_RNA (1)...(19): siRNA sense strand
cagaacugcuccaugaagu

SEQ ID NO: 1902232 - RNA, 19 nt, Homo sapiens
  misc_RNA (1)...(19): siRNA sense strand
ggagaaugggaaauacuga

SEQ ID NO: 1902233 - RNA, 19 nt, Homo sapiens
  misc_RNA (1)...(19): siRNA sense strand
ggaauggacagaccacaag

SEQ ID NO: 1902234 - RNA, 19 nt, Homo sapiens
  misc_RNA (1)...(19): siRNA sense strand
gagaaugggaaauacugaa

SEQ ID NO: 1902235 - RNA, 19 nt, Homo sapiens
  misc_RNA (1)...(19): siRNA sense strand
cauuaacguucaccacaga

SEQ ID NO: 1902236 - RNA, 19 nt, Homo sapiens
  misc_RNA (1)...(19): siRNA sense strand
ggagaguaccugcuguuca

SEQ ID NO: 1902237 - RNA, 19 nt, Homo sapiens
  misc_RNA (1)...(19): siRNA sense strand
cuauuuaccuucggaugaa

SEQ ID NO: 1902238 - RNA, 19 nt, Homo sapiens
  misc_RNA (1)...(19): siRNA sense strand
guucuuguguucuauuuac

SEQ ID NO: 1902239 - RNA, 19 nt, Homo sapiens
  misc_RNA (1)...(19): siRNA sense strand
gacauaguucucuuugaaa

SEQ ID NO: 1902240 - RNA, 19 nt, Homo sapiens
  misc_RNA (1)...(19): siRNA sense strand
gguaguacaagacuggaaa

SEQ ID NO: 1902241 - RNA, 19 nt, Homo sapiens
  misc_RNA (1)...(19): siRNA sense strand
ucauguggaucgcuacuca

SEQ ID NO: 1902242 - RNA, 19 nt, Homo sapiens
  misc_RNA (1)...(19): siRNA sense strand
ccucagacauuuguuccaa

SEQ ID NO: 1902243 - RNA, 19 nt, Homo sapiens
  misc_RNA (1)...(19): siRNA sense strand
gggacggcguguacuccua

SEQ ID NO: 1902244 - RNA, 19 nt, Homo sapiens
  misc_RNA (1)...(19): siRNA sense strand
cagaaacagcuuagugaug

SEQ ID NO: 1902245 - RNA, 19 nt, Homo sapiens
  misc_RNA (1)...(19): siRNA sense strand
uuaccguguuugucauuaa

SEQ ID NO: 1902246 - RNA, 19 nt, Homo sapiens
  misc_RNA (1)...(19): siRNA sense strand
guuaccguguuugucauua

SEQ ID NO: 1902247 - RNA, 19 nt, Homo sapiens
  misc_RNA (1)...(19): siRNA sense strand
caaccaauguguggcucaa

SEQ ID NO: 1902248 - RNA, 19 nt, Homo sapiens
  misc_RNA (1)...(19): siRNA sense strand
gauccauuccauuaaaguu

SEQ ID NO: 1902249 - RNA, 19 nt, Homo sapiens
  misc_RNA (1)...(19): siRNA sense strand
ggcuacauaguuaccauua

SEQ ID NO: 1902250 - RNA, 19 nt, Homo sapiens
  misc_RNA (1)...(19): siRNA sense strand
ugaagaugcccuccucaga

SEQ ID NO: 1902251 - RNA, 19 nt, Homo sapiens
  misc_RNA (1)...(19): siRNA sense strand
gagucaaccaguagugaaa

SEQ ID NO: 1902252 - RNA, 19 nt, Homo sapiens
  misc_RNA (1)...(19): siRNA sense strand
gagagucaaccaguaguga

SEQ ID NO: 1902253 - RNA, 19 nt, Homo sapiens
  misc_RNA (1)...(19): siRNA sense strand
gaggagagucaaccaguag

SEQ ID NO: 1902254 - RNA, 19 nt, Homo sapiens
  misc_RNA (1)...(19): siRNA sense strand
gaaagaggagagucaacca

SEQ ID NO: 1902255 - RNA, 19 nt, Homo sapiens
  misc_RNA (1)...(19): siRNA sense strand
ggaaauacugaacgcaaag

SEQ ID NO: 1902256 - RNA, 19 nt, Homo sapiens
  misc_RNA (1)...(19): siRNA sense strand
uucgaaggcucccugauga

SEQ ID NO: 1902257 - RNA, 19 nt, Homo sapiens
  misc_RNA (1)...(19): siRNA sense strand
uauacccucuuucucauca

SEQ ID NO: 1902258 - RNA, 19 nt, Homo sapiens
  misc_RNA (1)...(19): siRNA sense strand
ggacggcguguacuccuau

SEQ ID NO: 1902259 - RNA, 19 nt, Homo sapiens
  misc_RNA (1)...(19): siRNA sense strand
gauaacggagaaugggaaa

SEQ ID NO: 1902260 - RNA, 19 nt, Homo sapiens
  misc_RNA (1)...(19): siRNA sense strand
caguucuuguguucuauuu

SEQ ID NO: 1902261 - RNA, 19 nt, Homo sapiens
  misc_RNA (1)...(19): siRNA sense strand
gggauccauuccauuaaag

SEQ ID NO: 1902262 - RNA, 19 nt, Homo sapiens
  misc_RNA (1)...(19): siRNA sense strand
gcuacauaguuaccauuag

SEQ ID NO: 1902263 - RNA, 19 nt, Homo sapiens
  misc_RNA (1)...(19): siRNA sense strand
aagaugcccuccucagaca

SEQ ID NO: 1902264 - RNA, 19 nt, Homo sapiens
  misc_RNA (1)...(19): siRNA sense strand
ugcagaaacuuccaaaauu

SEQ ID NO: 1902265 - RNA, 19 nt, Homo sapiens
  misc_RNA (1)...(19): siRNA sense strand
ucugacaguuuuccuuuua

SEQ ID NO: 1902266 - RNA, 19 nt, Homo sapiens
  misc_RNA (1)...(19): siRNA sense strand
ccuaucccuuuaucacgua

SEQ ID NO: 1902267 - RNA, 19 nt, Homo sapiens
  misc_RNA (1)...(19): siRNA sense strand
gaaaaugucgacagaaaag

SEQ ID NO: 1902268 - RNA, 19 nt, Homo sapiens
  misc_RNA (1)...(19): siRNA sense strand
caaugaaaaugucgacaga

SEQ ID NO: 1902269 - RNA, 19 nt, Homo sapiens
  misc_RNA (1)...(19): siRNA sense strand
acgccugccuuuauucuau

SEQ ID NO: 1902270 - RNA, 19 nt, Homo sapiens
  misc_RNA (1)...(19): siRNA sense strand
cugcugauuccauuagaua

SEQ ID NO: 1902271 - RNA, 19 nt, Homo sapiens
  misc_RNA (1)...(19): siRNA sense strand
cgccugccuuuauucuaua

SEQ ID NO: 1902272 - RNA, 19 nt, Homo sapiens
  misc_RNA (1)...(19): siRNA sense strand
auggacagaccacaaguua

SEQ ID NO: 1902273 - RNA, 19 nt, Homo sapiens
  misc_RNA (1)...(19): siRNA sense strand
ucagccagguaguacaaga

SEQ ID NO: 1902274 - RNA, 19 nt, Homo sapiens
  misc_RNA (1)...(19): siRNA sense strand
caccacagaucuucuucca

SEQ ID NO: 1902275 - RNA, 19 nt, Homo sapiens
  misc_RNA (1)...(19): siRNA sense strand
ccaaagucauuccucucau

SEQ ID NO: 1902276 - RNA, 19 nt, Homo sapiens
  misc_RNA (1)...(19): siRNA sense strand
guguacuccuaucccuuua

SEQ ID NO: 1902277 - RNA, 19 nt, Homo sapiens
  misc_RNA (1)...(19): siRNA sense strand
gaagggacggcguguacuc

SEQ ID NO: 1902278 - RNA, 19 nt, Homo sapiens
  misc_RNA (1)...(19): siRNA sense strand
gcaccaugguugaccucau

SEQ ID NO: 1902279 - RNA, 19 nt, Homo sapiens
  misc_RNA (1)...(19): siRNA sense strand
ucuguggcuuccugacaua

SEQ ID NO: 1902280 - RNA, 19 nt, Homo sapiens
  misc_RNA (1)...(19): siRNA sense strand
uaaaguuccaucagaaucu

SEQ ID NO: 1902281 - RNA, 19 nt, Homo sapiens
  misc_RNA (1)...(19): siRNA sense strand
aaaucaaacggaacuguug

SEQ ID NO: 1902282 - RNA, 19 nt, Homo sapiens
  misc_RNA (1)...(19): siRNA sense strand
agauacauuucgagacaug

SEQ ID NO: 1902283 - RNA, 19 nt, Homo sapiens
  misc_RNA (1)...(19): siRNA sense strand
aacagaaacagcuuaguga

SEQ ID NO: 1902284 - RNA, 19 nt, Homo sapiens
  misc_RNA (1)...(19): siRNA sense strand
aagaaacagaaacagcuua

SEQ ID NO: 1902285 - RNA, 19 nt, Homo sapiens
  misc_RNA (1)...(19): siRNA sense strand
ccaagguuaucagaaaugg

SEQ ID NO: 1902286 - RNA, 19 nt, Homo sapiens
  misc_RNA (1)...(19): siRNA sense strand
cguguacuccuaucccuuu

SEQ ID NO: 1902287 - RNA, 19 nt, Homo sapiens
  misc_RNA (1)...(19): siRNA sense strand
aguacaagacuggaaauuu

SEQ ID NO: 1902288 - RNA, 19 nt, Homo sapiens
  misc_RNA (1)...(19): siRNA sense strand
acagaucuucuuccacgua

SEQ ID NO: 1902289 - RNA, 19 nt, Homo sapiens
  misc_RNA (1)...(19): siRNA sense strand
agucauuccucucauugga

SEQ ID NO: 1902290 - RNA, 19 nt, Homo sapiens
  misc_RNA (1)...(19): siRNA sense strand
ggaaggagaugguggauua

SEQ ID NO: 1902291 - RNA, 19 nt, Homo sapiens
  misc_RNA (1)...(19): siRNA sense strand
ggaaagagcuggguuaauu

SEQ ID NO: 1902292 - RNA, 19 nt, Homo sapiens
  misc_RNA (1)...(19): siRNA sense strand
ucaaaggacugcaggcuua

SEQ ID NO: 1902293 - RNA, 19 nt, Homo sapiens
  misc_RNA (1)...(19): siRNA sense strand
gcagauucauucaacuuua

SEQ ID NO: 1902294 - RNA, 19 nt, Homo sapiens
  misc_RNA (1)...(19): siRNA sense strand
gcuaaaggguuccaacaaa

SEQ ID NO: 1902295 - RNA, 19 nt, Homo sapiens
  misc_RNA (1)...(19): siRNA sense strand
caaagcggcuggccugauu

SEQ ID NO: 1902296 - RNA, 19 nt, Homo sapiens
  misc_RNA (1)...(19): siRNA sense strand
gcaagugaauuccgaagga

SEQ ID NO: 1902297 - RNA, 19 nt, Homo sapiens
  misc_RNA (1)...(19): siRNA sense strand
acaaauggcuauuggugaa

SEQ ID NO: 1902298 - RNA, 19 nt, Homo sapiens
  misc_RNA (1)...(19): siRNA sense strand
guuaauugguggagugaaa

SEQ ID NO: 1902299 - RNA, 19 nt, Homo sapiens
  misc_RNA (1)...(19): siRNA sense strand
gcacagccaucaggauuca

SEQ ID NO: 1902300 - RNA, 19 nt, Homo sapiens
  misc_RNA (1)...(19): siRNA sense strand
gaaagagcuggguuaauug

SEQ ID NO: 1902301 - RNA, 19 nt, Homo sapiens
  misc_RNA (1)...(19): siRNA sense strand
caaagugaaugaagcucuu

SEQ ID NO: 1902302 - RNA, 19 nt, Homo sapiens
  misc_RNA (1)...(19): siRNA sense strand
ggaguggaguuugcagauu

SEQ ID NO: 1902303 - RNA, 19 nt, Homo sapiens
  misc_RNA (1)...(19): siRNA sense strand
acauauggcugcacguuga

SEQ ID NO: 1902304 - RNA, 19 nt, Homo sapiens
  misc_RNA (1)...(19): siRNA sense strand
caacaaggaagacauaugg

SEQ ID NO: 1902305 - RNA, 19 nt, Homo sapiens
  misc_RNA (1)...(19): siRNA sense strand
gguggaaucugcccaugug

SEQ ID NO: 1902306 - RNA, 19 nt, Homo sapiens
  misc_RNA (1)...(19): siRNA sense strand
gaguggaguuugcagauuc

SEQ ID NO: 1902307 - RNA, 19 nt, Homo sapiens
  misc_RNA (1)...(19): siRNA sense strand
uaggauguauggagucaaa

SEQ ID NO: 1902308 - RNA, 19 nt, Homo sapiens
  misc_RNA (1)...(19): siRNA sense strand
gcauucaucugcccugagu

SEQ ID NO: 1902309 - RNA, 19 nt, Homo sapiens
  misc_RNA (1)...(19): siRNA sense strand
cggcuggccugauuccuuu

SEQ ID NO: 1902310 - RNA, 19 nt, Homo sapiens
  misc_RNA (1)...(19): siRNA sense strand
caucaggauucagggcuua

SEQ ID NO: 1902311 - RNA, 19 nt, Homo sapiens
  misc_RNA (1)...(19): siRNA sense strand
ggaacuaccaaaggcauuu

SEQ ID NO: 1902312 - RNA, 19 nt, Homo sapiens
  misc_RNA (1)...(19): siRNA sense strand
cuaaaggguuccaacaaag

SEQ ID NO: 1902313 - RNA, 19 nt, Homo sapiens
  misc_RNA (1)...(19): siRNA sense strand
ggaguuugcagauucauuc

SEQ ID NO: 1902314 - RNA, 19 nt, Homo sapiens
  misc_RNA (1)...(19): siRNA sense strand
ccagggaagugccagugaa

SEQ ID NO: 1902315 - RNA, 19 nt, Homo sapiens
  misc_RNA (1)...(19): siRNA sense strand
ggccugauuccuuucuuua

SEQ ID NO: 1902316 - RNA, 19 nt, Homo sapiens
  misc_RNA (1)...(19): siRNA sense strand
gcaacaaggaagacauaug

SEQ ID NO: 1902317 - RNA, 19 nt, Homo sapiens
  misc_RNA (1)...(19): siRNA sense strand
ccacugggcagaagauuuc

SEQ ID NO: 1902318 - RNA, 19 nt, Homo sapiens
  misc_RNA (1)...(19): siRNA sense strand
agacuuaacgggagccuuu

SEQ ID NO: 1902319 - RNA, 19 nt, Homo sapiens
  misc_RNA (1)...(19): siRNA sense strand
caacaugcugcuccuuuga

SEQ ID NO: 1902320 - RNA, 19 nt, Homo sapiens
  misc_RNA (1)...(19): siRNA sense strand
ccugauuccuuucuuuaug

SEQ ID NO: 1902321 - RNA, 19 nt, Homo sapiens
  misc_RNA (1)...(19): siRNA sense strand
acaacaugcugcuccuuug

SEQ ID NO: 1902322 - RNA, 19 nt, Homo sapiens
  misc_RNA (1)...(19): siRNA sense strand
ccagcugucccaugaguuu

SEQ ID NO: 1902323 - RNA, 19 nt, Homo sapiens
  misc_RNA (1)...(19): siRNA sense strand
gcuggagacugugaugaug

SEQ ID NO: 1902324 - RNA, 19 nt, Homo sapiens
  misc_RNA (1)...(19): siRNA sense strand
ugaaaucuguguggaaguc

SEQ ID NO: 1902325 - RNA, 19 nt, Homo sapiens
  misc_RNA (1)...(19): siRNA sense strand
aggaagcccuggagagaga

SEQ ID NO: 1902326 - RNA, 19 nt, Homo sapiens
  misc_RNA (1)...(19): siRNA sense strand
gaaugagaaagcuggagaa

SEQ ID NO: 1902327 - RNA, 19 nt, Homo sapiens
  misc_RNA (1)...(19): siRNA sense strand
gcacagccccuacuucuuc

SEQ ID NO: 1902328 - RNA, 19 nt, Homo sapiens
  misc_RNA (1)...(19): siRNA sense strand
cuaccggcauuggcagaua

SEQ ID NO: 1902329 - RNA, 19 nt, Homo sapiens
  misc_RNA (1)...(19): siRNA sense strand
caacuuuaauccccacaaa

SEQ ID NO: 1902330 - RNA, 19 nt, Homo sapiens
  misc_RNA (1)...(19): siRNA sense strand
ggagugauccagggaagug

SEQ ID NO: 1902331 - RNA, 19 nt, Homo sapiens
  misc_RNA (1)...(19): siRNA sense strand
aaauggcuauuggugaauu

SEQ ID NO: 1902332 - RNA, 19 nt, Homo sapiens
  misc_RNA (1)...(19): siRNA sense strand
cacaacaugcugcuccuuu

SEQ ID NO: 1902333 - RNA, 19 nt, Homo sapiens
  misc_RNA (1)...(19): siRNA sense strand
aagaauaaacagugccaaa

SEQ ID NO: 1902334 - RNA, 19 nt, Homo sapiens
  misc_RNA (1)...(19): siRNA sense strand
caacaaagugaaugaagcu

SEQ ID NO: 1902335 - RNA, 19 nt, Homo sapiens
  misc_RNA (1)...(19): siRNA sense strand
aagcacagccaucaggauu

SEQ ID NO: 1902336 - RNA, 19 nt, Homo sapiens
  misc_RNA (1)...(19): siRNA sense strand
ugaauggaguggaguuugc

SEQ ID NO: 1902337 - RNA, 19 nt, Homo sapiens
  misc_RNA (1)...(19): siRNA sense strand
caacuacauggaaggcauu

SEQ ID NO: 1902338 - RNA, 19 nt, Homo sapiens
  misc_RNA (1)...(19): siRNA sense strand
uaaaggguuccaacaaagu

SEQ ID NO: 1902339 - RNA, 19 nt, Homo sapiens
  misc_RNA (1)...(19): siRNA sense strand
gaaggagagggaaggagau

SEQ ID NO: 1902340 - RNA, 19 nt, Homo sapiens
  misc_RNA (1)...(19): siRNA sense strand
aaagagaacagacuuaacg

SEQ ID NO: 1902341 - RNA, 19 nt, Homo sapiens
  misc_RNA (1)...(19): siRNA sense strand
uugacaaucucuuagaagu

SEQ ID NO: 1902342 - RNA, 19 nt, Homo sapiens
  misc_RNA (1)...(19): siRNA sense strand
ccugggaacacaucaaaga

SEQ ID NO: 1902343 - RNA, 19 nt, Homo sapiens
  misc_RNA (1)...(19): siRNA sense strand
gaagcacagccaucaggau

SEQ ID NO: 1902344 - RNA, 19 nt, Homo sapiens
  misc_RNA (1)...(19): siRNA sense strand
ggagagggaaggagauggu

SEQ ID NO: 1902345 - RNA, 19 nt, Homo sapiens
  misc_RNA (1)...(19): siRNA sense strand
gaagaugcuggaacuacca

SEQ ID NO: 1902346 - RNA, 19 nt, Homo sapiens
  misc_RNA (1)...(19): siRNA sense strand
ggccugggaacacaucaaa

SEQ ID NO: 1902347 - RNA, 19 nt, Homo sapiens
  misc_RNA (1)...(19): siRNA sense strand
ucaggagccagacacguuu

SEQ ID NO: 1902348 - RNA, 19 nt, Homo sapiens
  misc_RNA (1)...(19): siRNA sense strand
cugcaacaaggaagacaua

SEQ ID NO: 1902349 - RNA, 19 nt, Homo sapiens
  misc_RNA (1)...(19): siRNA sense strand
uggccugauuccuuucuuu

SEQ ID NO: 1902350 - RNA, 19 nt, Homo sapiens
  misc_RNA (1)...(19): siRNA sense strand
guggaaagagcuggguuaa

SEQ ID NO: 1902351 - RNA, 19 nt, Homo sapiens
  misc_RNA (1)...(19): siRNA sense strand
uugguggagugaaauuaaa

SEQ ID NO: 1902352 - RNA, 19 nt, Homo sapiens
  misc_RNA (1)...(19): siRNA sense strand
ucacacaggccgcuaucau

SEQ ID NO: 1902353 - RNA, 19 nt, Homo sapiens
  misc_RNA (1)...(19): siRNA sense strand
gauguauggagucaaagga

SEQ ID NO: 1902354 - RNA, 19 nt, Homo sapiens
  misc_RNA (1)...(19): siRNA sense strand
gggaagaugcuggaacuac

SEQ ID NO: 1902355 - RNA, 19 nt, Homo sapiens
  misc_RNA (1)...(19): siRNA sense strand
uggagacugugaugaugga

SEQ ID NO: 1902356 - RNA, 19 nt, Homo sapiens
  misc_RNA (1)...(19): siRNA sense strand
ucaccucagggacaaguuu

SEQ ID NO: 1902357 - RNA, 19 nt, Homo sapiens
  misc_RNA (1)...(19): siRNA sense strand
ggcuaaaggguuccaacaa

SEQ ID NO: 1902358 - RNA, 19 nt, Homo sapiens
  misc_RNA (1)...(19): siRNA sense strand
cuugucugcuuucggcuaa

SEQ ID NO: 1902359 - RNA, 19 nt, Homo sapiens
  misc_RNA (1)...(19): siRNA sense strand
cuuugacaaucucuuagaa

SEQ ID NO: 1902360 - RNA, 19 nt, Homo sapiens
  misc_RNA (1)...(19): siRNA sense strand
gagcuggagacugugauga

SEQ ID NO: 1902361 - RNA, 19 nt, Homo sapiens
  misc_RNA (1)...(19): siRNA sense strand
guuccaacaaagugaauga

SEQ ID NO: 1902362 - RNA, 19 nt, Homo sapiens
  misc_RNA (1)...(19): siRNA sense strand
guccagcugucccaugagu

SEQ ID NO: 1902363 - RNA, 19 nt, Homo sapiens
  misc_RNA (1)...(19): siRNA sense strand
guuugcagauucauucaac

SEQ ID NO: 1902364 - RNA, 19 nt, Homo sapiens
  misc_RNA (1)...(19): siRNA sense strand
ggacugcaggcuuauaucc

SEQ ID NO: 1902365 - RNA, 19 nt, Homo sapiens
  misc_RNA (1)...(19): siRNA sense strand
aauggcuauuggugaauuu

SEQ ID NO: 1902366 - RNA, 19 nt, Homo sapiens
  misc_RNA (1)...(19): siRNA sense strand
cacacaggccgcuaucaug

SEQ ID NO: 1902367 - RNA, 19 nt, Homo sapiens
  misc_RNA (1)...(19): siRNA sense strand
gcaggcagugcauucaucu

SEQ ID NO: 1902368 - RNA, 19 nt, Homo sapiens
  misc_RNA (1)...(19): siRNA sense strand
cugauuccuuucuuuaugg

SEQ ID NO: 1902369 - RNA, 19 nt, Homo sapiens
  misc_RNA (1)...(19): siRNA sense strand
gcggcuggccugauuccuu

SEQ ID NO: 1902370 - RNA, 19 nt, Homo sapiens
  misc_RNA (1)...(19): siRNA sense strand
guccugcgcuuugccaucu

SEQ ID NO: 1902371 - RNA, 19 nt, Homo sapiens
  misc_RNA (1)...(19): siRNA sense strand
caaaggacugcaggcuuau

SEQ ID NO: 1902372 - RNA, 19 nt, Homo sapiens
  misc_RNA (1)...(19): siRNA sense strand
cagggcuuaucacugacua

SEQ ID NO: 1902373 - RNA, 19 nt, Homo sapiens
  misc_RNA (1)...(19): siRNA sense strand
ggacuggcucgggaagaug

SEQ ID NO: 1902374 - RNA, 19 nt, Homo sapiens
  misc_RNA (1)...(19): siRNA sense strand
agacauauggcugcacguu

SEQ ID NO: 1902375 - RNA, 19 nt, Homo sapiens
  misc_RNA (1)...(19): siRNA sense strand
ucgggaagaugcuggaacu

SEQ ID NO: 1902376 - RNA, 19 nt, Homo sapiens
  misc_RNA (1)...(19): siRNA sense strand
gcugcuccuuugacaaucu

SEQ ID NO: 1902377 - RNA, 19 nt, Homo sapiens
  misc_RNA (1)...(19): siRNA sense strand
gaagaaaugggugguauua

SEQ ID NO: 1902378 - RNA, 19 nt, Homo sapiens
  misc_RNA (1)...(19): siRNA sense strand
gaaauacuauggcaacaca

SEQ ID NO: 1902379 - RNA, 19 nt, Homo sapiens
  misc_RNA (1)...(19): siRNA sense strand
gcaagaugguaaugaagaa

SEQ ID NO: 1902380 - RNA, 19 nt, Homo sapiens
  misc_RNA (1)...(19): siRNA sense strand
ggagcaaagugguuauuau

SEQ ID NO: 1902381 - RNA, 19 nt, Homo sapiens
  misc_RNA (1)...(19): siRNA sense strand
gcaaagugguuauuauguc

SEQ ID NO: 1902382 - RNA, 19 nt, Homo sapiens
  misc_RNA (1)...(19): siRNA sense strand
gaggaucaccugucacuga

SEQ ID NO: 1902383 - RNA, 19 nt, Homo sapiens
  misc_RNA (1)...(19): siRNA sense strand
agaaaugggugguauuaca

SEQ ID NO: 1902384 - RNA, 19 nt, Homo sapiens
  misc_RNA (1)...(19): siRNA sense strand
gagcaaagugguuauuaug

SEQ ID NO: 1902385 - RNA, 19 nt, Homo sapiens
  misc_RNA (1)...(19): siRNA sense strand
uuacacagacaccauauaa

SEQ ID NO: 1902386 - RNA, 19 nt, Homo sapiens
  misc_RNA (1)...(19): siRNA sense strand
gcauggagauggaugugau

SEQ ID NO: 1902387 - RNA, 19 nt, Homo sapiens
  misc_RNA (1)...(19): siRNA sense strand
caaagugguuauuaugucu

SEQ ID NO: 1902388 - RNA, 19 nt, Homo sapiens
  misc_RNA (1)...(19): siRNA sense strand
ccacaguaauauugacaug

SEQ ID NO: 1902389 - RNA, 19 nt, Homo sapiens
  misc_RNA (1)...(19): siRNA sense strand
ggaaccacaguaauauuga

SEQ ID NO: 1902390 - RNA, 19 nt, Homo sapiens
  misc_RNA (1)...(19): siRNA sense strand
gcuugcugcugcugguuua

SEQ ID NO: 1902391 - RNA, 19 nt, Homo sapiens
  misc_RNA (1)...(19): siRNA sense strand
gggcaagagugugugagaa

SEQ ID NO: 1902392 - RNA, 19 nt, Homo sapiens
  misc_RNA (1)...(19): siRNA sense strand
acacagacaccauauaaag

SEQ ID NO: 1902393 - RNA, 19 nt, Homo sapiens
  misc_RNA (1)...(19): siRNA sense strand
cagaagaugcgaacuuuua

SEQ ID NO: 1902394 - RNA, 19 nt, Homo sapiens
  misc_RNA (1)...(19): siRNA sense strand
guauuacacagacaccaua

SEQ ID NO: 1902395 - RNA, 19 nt, Homo sapiens
  misc_RNA (1)...(19): siRNA sense strand
ggccacaauugucauagug

SEQ ID NO: 1902396 - RNA, 19 nt, Homo sapiens
  misc_RNA (1)...(19): siRNA sense strand
cauaggcggugaugaggau

SEQ ID NO: 1902397 - RNA, 19 nt, Homo sapiens
  misc_RNA (1)...(19): siRNA sense strand
aaacauaggcggugaugag

SEQ ID NO: 1902398 - RNA, 19 nt, Homo sapiens
  misc_RNA (1)...(19): siRNA sense strand
cauauaaagucuccaucuc

SEQ ID NO: 1902399 - RNA, 19 nt, Homo sapiens
  misc_RNA (1)...(19): siRNA sense strand
gaaccacaguaauauugac

SEQ ID NO: 1902400 - RNA, 19 nt, Homo sapiens
  misc_RNA (1)...(19): siRNA sense strand
uccuggaucugaaauacua

SEQ ID NO: 1902401 - RNA, 19 nt, Homo sapiens
  misc_RNA (1)...(19): siRNA sense strand
ggcaagaugguaaugaaga

SEQ ID NO: 1902402 - RNA, 19 nt, Homo sapiens
  misc_RNA (1)...(19): siRNA sense strand
ggagaggccaccaccuguu

SEQ ID NO: 1902403 - RNA, 19 nt, Homo sapiens
  misc_RNA (1)...(19): siRNA sense strand
gcaagagugugugagaacu

SEQ ID NO: 1902404 - RNA, 19 nt, Homo sapiens
  misc_RNA (1)...(19): siRNA sense strand
ggaagcaaaccagaagaug

SEQ ID NO: 1902405 - RNA, 19 nt, Homo sapiens
  misc_RNA (1)...(19): siRNA sense strand
uauggcaacacaaugauaa

SEQ ID NO: 1902406 - RNA, 19 nt, Homo sapiens
  misc_RNA (1)...(19): siRNA sense strand
cauaggcagugaugaggau

SEQ ID NO: 1902407 - RNA, 19 nt, Homo sapiens
  misc_RNA (1)...(19): siRNA sense strand
accagaagaugcgaacuuu

SEQ ID NO: 1902408 - RNA, 19 nt, Homo sapiens
  misc_RNA (1)...(19): siRNA sense strand
aaacauaggcagugaugag

SEQ ID NO: 1902409 - RNA, 19 nt, Homo sapiens
  misc_RNA (1)...(19): siRNA sense strand
gaauuggagcaaagugguu

SEQ ID NO: 1902410 - RNA, 19 nt, Homo sapiens
  misc_RNA (1)...(19): siRNA sense strand
ugaugucgguggccacaau

SEQ ID NO: 1902411 - RNA, 19 nt, Homo sapiens
  misc_RNA (1)...(19): siRNA sense strand
gagaggccaccaccuguuc

SEQ ID NO: 1902412 - RNA, 19 nt, Homo sapiens
  misc_RNA (1)...(19): siRNA sense strand
gaaaugggugguauuacac

SEQ ID NO: 1902413 - RNA, 19 nt, Homo sapiens
  misc_RNA (1)...(19): siRNA sense strand
uggaaccacaguaauauug

SEQ ID NO: 1902414 - RNA, 19 nt, Homo sapiens
  misc_RNA (1)...(19): siRNA sense strand
aggaucaccugucacugaa

SEQ ID NO: 1902415 - RNA, 19 nt, Homo sapiens
  misc_RNA (1)...(19): siRNA sense strand
caagaugguaaugaagaaa

SEQ ID NO: 1902416 - RNA, 19 nt, Homo sapiens
  misc_RNA (1)...(19): siRNA sense strand
agaugguaaugaagaaaug

SEQ ID NO: 1902417 - RNA, 19 nt, Homo sapiens
  misc_RNA (1)...(19): siRNA sense strand
gaugcgaacuuuuaucucu

SEQ ID NO: 1902418 - RNA, 19 nt, Homo sapiens
  misc_RNA (1)...(19): siRNA sense strand
cagaggaagcaaaccagaa

SEQ ID NO: 1902419 - RNA, 19 nt, Homo sapiens
  misc_RNA (1)...(19): siRNA sense strand
ugaagaaaugggugguauu

SEQ ID NO: 1902420 - RNA, 19 nt, Homo sapiens
  misc_RNA (1)...(19): siRNA sense strand
ugacaugcccucaguaucc

SEQ ID NO: 1902421 - RNA, 19 nt, Homo sapiens
  misc_RNA (1)...(19): siRNA sense strand
agaacugcauggagaugga

SEQ ID NO: 1902422 - RNA, 19 nt, Homo sapiens
  misc_RNA (1)...(19): siRNA sense strand
uggagcaaagugguuauua

SEQ ID NO: 1902423 - RNA, 19 nt, Homo sapiens
  misc_RNA (1)...(19): siRNA sense strand
uuucagaauuggagcaaag

SEQ ID NO: 1902424 - RNA, 19 nt, Homo sapiens
  misc_RNA (1)...(19): siRNA sense strand
guuuacuacuggagcaaga

SEQ ID NO: 1902425 - RNA, 19 nt, Homo sapiens
  misc_RNA (1)...(19): siRNA sense strand
gguggccacaauugucaua

SEQ ID NO: 1902426 - RNA, 19 nt, Homo sapiens
  misc_RNA (1)...(19): siRNA sense strand
acagacaccauauaaaguc

SEQ ID NO: 1902427 - RNA, 19 nt, Homo sapiens
  misc_RNA (1)...(19): siRNA sense strand
ggggcaagaugguaaugaa

SEQ ID NO: 1902428 - RNA, 19 nt, Homo sapiens
  misc_RNA (1)...(19): siRNA sense strand
gaggaagcaaaccagaaga

SEQ ID NO: 1902429 - RNA, 19 nt, Homo sapiens
  misc_RNA (1)...(19): siRNA sense strand
ccauauaaagucuccaucu

SEQ ID NO: 1902430 - RNA, 19 nt, Homo sapiens
  misc_RNA (1)...(19): siRNA sense strand
gggccucugccucuuauca

SEQ ID NO: 1902431 - RNA, 19 nt, Homo sapiens
  misc_RNA (1)...(19): siRNA sense strand
uacuauggcaacacaauga

SEQ ID NO: 1902432 - RNA, 19 nt, Homo sapiens
  misc_RNA (1)...(19): siRNA sense strand
augaagaaaugggugguau

SEQ ID NO: 1902433 - RNA, 19 nt, Homo sapiens
  misc_RNA (1)...(19): siRNA sense strand
cuauggcaacacaaugaua

SEQ ID NO: 1902434 - RNA, 19 nt, Homo sapiens
  misc_RNA (1)...(19): siRNA sense strand
gguauuacacagacaccau

SEQ ID NO: 1902435 - RNA, 19 nt, Homo sapiens
  misc_RNA (1)...(19): siRNA sense strand
cacagacaccauauaaagu

SEQ ID NO: 1902436 - RNA, 19 nt, Homo sapiens
  misc_RNA (1)...(19): siRNA sense strand
gcaaaggggacaaaacaag

SEQ ID NO: 1902437 - RNA, 19 nt, Homo sapiens
  misc_RNA (1)...(19): siRNA sense strand
gagaagaaccaaaugauga

SEQ ID NO: 1902438 - RNA, 19 nt, Homo sapiens
  misc_RNA (1)...(19): siRNA sense strand
ggaaguauguugccauggu

SEQ ID NO: 1902439 - RNA, 19 nt, Homo sapiens
  misc_RNA (1)...(19): siRNA sense strand
ucacugugcuggucuucua

SEQ ID NO: 1902440 - RNA, 19 nt, Homo sapiens
  misc_RNA (1)...(19): siRNA sense strand
gaugagaagaaccaaauga

SEQ ID NO: 1902441 - RNA, 19 nt, Homo sapiens
  misc_RNA (1)...(19): siRNA sense strand
gaccaaggcccaccucuuc

SEQ ID NO: 1902442 - RNA, 19 nt, Homo sapiens
  misc_RNA (1)...(19): siRNA sense strand
gaaggaggacuggaaguau

SEQ ID NO: 1902443 - RNA, 19 nt, Homo sapiens
  misc_RNA (1)...(19): siRNA sense strand
gaagaucacgcugugcauu

SEQ ID NO: 1902444 - RNA, 19 nt, Homo sapiens
  misc_RNA (1)...(19): siRNA sense strand
gaaggugugcacuacauug

SEQ ID NO: 1902445 - RNA, 19 nt, Homo sapiens
  misc_RNA (1)...(19): siRNA sense strand
ggaguggagcgacuacaaa

SEQ ID NO: 1902446 - RNA, 19 nt, Homo sapiens
  misc_RNA (1)...(19): siRNA sense strand
ucgcucagcucaucgaugu

SEQ ID NO: 1902447 - RNA, 19 nt, Homo sapiens
  misc_RNA (1)...(19): siRNA sense strand
gaggacagaugggcaugug

SEQ ID NO: 1902448 - RNA, 19 nt, Homo sapiens
  misc_RNA (1)...(19): siRNA sense strand
ugaaggaggacuggaagua

SEQ ID NO: 1902449 - RNA, 19 nt, Homo sapiens
  misc_RNA (1)...(19): siRNA sense strand
gcaucgacgucaccuucuu

SEQ ID NO: 1902450 - RNA, 19 nt, Homo sapiens
  misc_RNA (1)...(19): siRNA sense strand
cuucagacguggugauugu

SEQ ID NO: 1902451 - RNA, 19 nt, Homo sapiens
  misc_RNA (1)...(19): siRNA sense strand
ccaccaacgucuggcuaaa

SEQ ID NO: 1902452 - RNA, 19 nt, Homo sapiens
  misc_RNA (1)...(19): siRNA sense strand
ggaaggugugcacuacauu

SEQ ID NO: 1902453 - RNA, 19 nt, Homo sapiens
  misc_RNA (1)...(19): siRNA sense strand
gcgaguaccugcuguucac

SEQ ID NO: 1902454 - RNA, 19 nt, Homo sapiens
  misc_RNA (1)...(19): siRNA sense strand
aaggaggacuggaaguaug

SEQ ID NO: 1902455 - RNA, 19 nt, Homo sapiens
  misc_RNA (1)...(19): siRNA sense strand
uaccugcuguucaccauga

SEQ ID NO: 1902456 - RNA, 19 nt, Homo sapiens
  misc_RNA (1)...(19): siRNA sense strand
ugagaagaaccaaaugaug

SEQ ID NO: 1902457 - RNA, 19 nt, Homo sapiens
  misc_RNA (1)...(19): siRNA sense strand
gcaccuacaacagcaagaa

SEQ ID NO: 1902458 - RNA, 19 nt, Homo sapiens
  misc_RNA (1)...(19): siRNA sense strand
cccgguggcuucugaugaa

SEQ ID NO: 1902459 - RNA, 19 nt, Homo sapiens
  misc_RNA (1)...(19): siRNA sense strand
guccaucgcucagcucauc

SEQ ID NO: 1902460 - RNA, 19 nt, Homo sapiens
  misc_RNA (1)...(19): siRNA sense strand
gcagaaggcacuggaaggu

SEQ ID NO: 1902461 - RNA, 19 nt, Homo sapiens
  misc_RNA (1)...(19): siRNA sense strand
ggcaacaucacaucucuca

SEQ ID NO: 1902462 - RNA, 19 nt, Homo sapiens
  misc_RNA (1)...(19): siRNA sense strand
gaucuuccucuggcuguuu

SEQ ID NO: 1902463 - RNA, 19 nt, Homo sapiens
  misc_RNA (1)...(19): siRNA sense strand
cuguggaccugaaggacua

SEQ ID NO: 1902464 - RNA, 19 nt, Homo sapiens
  misc_RNA (1)...(19): siRNA sense strand
ccuacaacagcaagaagua

SEQ ID NO: 1902465 - RNA, 19 nt, Homo sapiens
  misc_RNA (1)...(19): siRNA sense strand
aagaucacgcugugcauuu

SEQ ID NO: 1902466 - RNA, 19 nt, Homo sapiens
  misc_RNA (1)...(19): siRNA sense strand
cccagcagguggagaggaa

SEQ ID NO: 1902467 - RNA, 19 nt, Homo sapiens
  misc_RNA (1)...(19): siRNA sense strand
gaccaucggccucuuucug

SEQ ID NO: 1902468 - RNA, 19 nt, Homo sapiens
  misc_RNA (1)...(19): siRNA sense strand
cgagugggccaucgucaau

SEQ ID NO: 1902469 - RNA, 19 nt, Homo sapiens
  misc_RNA (1)...(19): siRNA sense strand
gcucaucuccugccucacu

SEQ ID NO: 1902470 - RNA, 19 nt, Homo sapiens
  misc_RNA (1)...(19): siRNA sense strand
uggaaggugugcacuacau

SEQ ID NO: 1902471 - RNA, 19 nt, Homo sapiens
  misc_RNA (1)...(19): siRNA sense strand
gcuccuggacuuaugacaa

SEQ ID NO: 1902472 - RNA, 19 nt, Homo sapiens
  misc_RNA (1)...(19): siRNA sense strand
agggugagcugcugcuauc

SEQ ID NO: 1902473 - RNA, 19 nt, Homo sapiens
  misc_RNA (1)...(19): siRNA sense strand
ggaugagaagaaccaaaug

SEQ ID NO: 1902474 - RNA, 19 nt, Homo sapiens
  misc_RNA (1)...(19): siRNA sense strand
gagggugagcugcugcuau

SEQ ID NO: 1902475 - RNA, 19 nt, Homo sapiens
  misc_RNA (1)...(19): siRNA sense strand
gcucuucaaacaccucuuc

SEQ ID NO: 1902476 - RNA, 19 nt, Homo sapiens
  misc_RNA (1)...(19): siRNA sense strand
uggaugagaagaaccaaau

SEQ ID NO: 1902477 - RNA, 19 nt, Homo sapiens
  misc_RNA (1)...(19): siRNA sense strand
ggucaucgacaggaucuuc

SEQ ID NO: 1902478 - RNA, 19 nt, Homo sapiens
  misc_RNA (1)...(19): siRNA sense strand
caccuacgccuucgucauc

SEQ ID NO: 1902479 - RNA, 19 nt, Homo sapiens
  misc_RNA (1)...(19): siRNA sense strand
caaugcagauggggaguuu

SEQ ID NO: 1902480 - RNA, 19 nt, Homo sapiens
  misc_RNA (1)...(19): siRNA sense strand
acuacaaacugcgcuggaa

SEQ ID NO: 1902481 - RNA, 19 nt, Homo sapiens
  misc_RNA (1)...(19): siRNA sense strand
agaucgaccuggagcagau

SEQ ID NO: 1902482 - RNA, 19 nt, Homo sapiens
  misc_RNA (1)...(19): siRNA sense strand
guggagcgacuacaaacug

SEQ ID NO: 1902483 - RNA, 19 nt, Homo sapiens
  misc_RNA (1)...(19): siRNA sense strand
gcgagugggccaucgucaa

SEQ ID NO: 1902484 - RNA, 19 nt, Homo sapiens
  misc_RNA (1)...(19): siRNA sense strand
aggaccggcucuucaaaca

SEQ ID NO: 1902485 - RNA, 19 nt, Homo sapiens
  misc_RNA (1)...(19): siRNA sense strand
agaucacgcugugcauuuc

SEQ ID NO: 1902486 - RNA, 19 nt, Homo sapiens
  misc_RNA (1)...(19): siRNA sense strand
gaagaagucugcuaaagaa

SEQ ID NO: 1902487 - RNA, 19 nt, Homo sapiens
  misc_RNA (1)...(19): siRNA sense strand
gcucaaggauuucaucuuc

SEQ ID NO: 1902488 - RNA, 19 nt, Homo sapiens
  misc_RNA (1)...(19): siRNA sense strand
gaugguggcauauggauua

SEQ ID NO: 1902489 - RNA, 19 nt, Homo sapiens
  misc_RNA (1)...(19): siRNA sense strand
gugaguguaucuaccuuua

SEQ ID NO: 1902490 - RNA, 19 nt, Homo sapiens
  misc_RNA (1)...(19): siRNA sense strand
gcauauggauuaaucucuu

SEQ ID NO: 1902491 - RNA, 19 nt, Homo sapiens
  misc_RNA (1)...(19): siRNA sense strand
uuacucauccucuuucuua

SEQ ID NO: 1902492 - RNA, 19 nt, Homo sapiens
  misc_RNA (1)...(19): siRNA sense strand
gcgaauaugugccgcuuuc

SEQ ID NO: 1902493 - RNA, 19 nt, Homo sapiens
  misc_RNA (1)...(19): siRNA sense strand
gaguguaucuaccuuuaau

SEQ ID NO: 1902494 - RNA, 19 nt, Homo sapiens
  misc_RNA (1)...(19): siRNA sense strand
gcugcuaccuggugccuuu

SEQ ID NO: 1902495 - RNA, 19 nt, Homo sapiens
  misc_RNA (1)...(19): siRNA sense strand
agagagauauggugcgauu

SEQ ID NO: 1902496 - RNA, 19 nt, Homo sapiens
  misc_RNA (1)...(19): siRNA sense strand
gagccucucuguccagguu

SEQ ID NO: 1902497 - RNA, 19 nt, Homo sapiens
  misc_RNA (1)...(19): siRNA sense strand
gaauaugugccgcuuucua

SEQ ID NO: 1902498 - RNA, 19 nt, Homo sapiens
  misc_RNA (1)...(19): siRNA sense strand
gaaacacgcuggucaucac

SEQ ID NO: 1902499 - RNA, 19 nt, Homo sapiens
  misc_RNA (1)...(19): siRNA sense strand
gaagucugcuaaagaaagg

SEQ ID NO: 1902500 - RNA, 19 nt, Homo sapiens
  misc_RNA (1)...(19): siRNA sense strand
guugacagccuucuuguga

SEQ ID NO: 1902501 - RNA, 19 nt, Homo sapiens
  misc_RNA (1)...(19): siRNA sense strand
ggacagcgauggguguuac

SEQ ID NO: 1902502 - RNA, 19 nt, Homo sapiens
  misc_RNA (1)...(19): siRNA sense strand
gcaagaccaccaccuacuu

SEQ ID NO: 1902503 - RNA, 19 nt, Homo sapiens
  misc_RNA (1)...(19): siRNA sense strand
gaacucuaccagggaauaa

SEQ ID NO: 1902504 - RNA, 19 nt, Homo sapiens
  misc_RNA (1)...(19): siRNA sense strand
ugacagccuucuugugaau

SEQ ID NO: 1902505 - RNA, 19 nt, Homo sapiens
  misc_RNA (1)...(19): siRNA sense strand
agaagaagucugcuaaaga

SEQ ID NO: 1902506 - RNA, 19 nt, Homo sapiens
  misc_RNA (1)...(19): siRNA sense strand
gguggcauauggauuaauc

SEQ ID NO: 1902507 - RNA, 19 nt, Homo sapiens
  misc_RNA (1)...(19): siRNA sense strand
gggcaccucugugagugua

SEQ ID NO: 1902508 - RNA, 19 nt, Homo sapiens
  misc_RNA (1)...(19): siRNA sense strand
ggaacucuaccagggaaua

SEQ ID NO: 1902509 - RNA, 19 nt, Homo sapiens
  misc_RNA (1)...(19): siRNA sense strand
gcuaaagaaaggaaaccua

SEQ ID NO: 1902510 - RNA, 19 nt, Homo sapiens
  misc_RNA (1)...(19): siRNA sense strand
ggaaacacgcuggucauca

SEQ ID NO: 1902511 - RNA, 19 nt, Homo sapiens
  misc_RNA (1)...(19): siRNA sense strand
gcuuucuacugccaaauga

SEQ ID NO: 1902512 - RNA, 19 nt, Homo sapiens
  misc_RNA (1)...(19): siRNA sense strand
cggugcagauucucuugua

SEQ ID NO: 1902513 - RNA, 19 nt, Homo sapiens
  misc_RNA (1)...(19): siRNA sense strand
gauauggugcgauuugcaa

SEQ ID NO: 1902514 - RNA, 19 nt, Homo sapiens
  misc_RNA (1)...(19): siRNA sense strand
gaccaccaccuacuucaug

SEQ ID NO: 1902515 - RNA, 19 nt, Homo sapiens
  misc_RNA (1)...(19): siRNA sense strand
caucaucuacugcuucaug

SEQ ID NO: 1902516 - RNA, 19 nt, Homo sapiens
  misc_RNA (1)...(19): siRNA sense strand
ccaaccugauggccaagaa

SEQ ID NO: 1902517 - RNA, 19 nt, Homo sapiens
  misc_RNA (1)...(19): siRNA sense strand
ucucuuguacuccuugaua

SEQ ID NO: 1902518 - RNA, 19 nt, Homo sapiens
  misc_RNA (1)...(19): siRNA sense strand
agagauauggugcgauuug

SEQ ID NO: 1902519 - RNA, 19 nt, Homo sapiens
  misc_RNA (1)...(19): siRNA sense strand
caagaccaccaccuacuuc

SEQ ID NO: 1902520 - RNA, 19 nt, Homo sapiens
  misc_RNA (1)...(19): siRNA sense strand
gugaauggaagcaacauca

SEQ ID NO: 1902521 - RNA, 19 nt, Homo sapiens
  misc_RNA (1)...(19): siRNA sense strand
acaaccagaccgcgaauau

SEQ ID NO: 1902522 - RNA, 19 nt, Homo sapiens
  misc_RNA (1)...(19): siRNA sense strand
gauggguguuaccugcaaa

SEQ ID NO: 1902523 - RNA, 19 nt, Homo sapiens
  misc_RNA (1)...(19): siRNA sense strand
acacauuccuguuacucau

SEQ ID NO: 1902524 - RNA, 19 nt, Homo sapiens
  misc_RNA (1)...(19): siRNA sense strand
gaggcuagccagaagaagu

SEQ ID NO: 1902525 - RNA, 19 nt, Homo sapiens
  misc_RNA (1)...(19): siRNA sense strand
caccagcagcggcaaauau

SEQ ID NO: 1902526 - RNA, 19 nt, Homo sapiens
  misc_RNA (1)...(19): siRNA sense strand
gcaccucugugaguguauc

SEQ ID NO: 1902527 - RNA, 19 nt, Homo sapiens
  misc_RNA (1)...(19): siRNA sense strand
aaagaaaggaaaccuagca

SEQ ID NO: 1902528 - RNA, 19 nt, Homo sapiens
  misc_RNA (1)...(19): siRNA sense strand
cucauccucuuucuuauuc

SEQ ID NO: 1902529 - RNA, 19 nt, Homo sapiens
  misc_RNA (1)...(19): siRNA sense strand
cagcaguccuggcacacau

SEQ ID NO: 1902530 - RNA, 19 nt, Homo sapiens
  misc_RNA (1)...(19): siRNA sense strand
ggacggucaccaacaucuu

SEQ ID NO: 1902531 - RNA, 19 nt, Homo sapiens
  misc_RNA (1)...(19): siRNA sense strand
cgauggguguuaccugcaa

SEQ ID NO: 1902532 - RNA, 19 nt, Homo sapiens
  misc_RNA (1)...(19): siRNA sense strand
gcagccagcggugcagauu

SEQ ID NO: 1902533 - RNA, 19 nt, Homo sapiens
  misc_RNA (1)...(19): siRNA sense strand
caaccagaccgcgaauaug

SEQ ID NO: 1902534 - RNA, 19 nt, Homo sapiens
  misc_RNA (1)...(19): siRNA sense strand
gaugaugguggcauaugga

SEQ ID NO: 1902535 - RNA, 19 nt, Homo sapiens
  misc_RNA (1)...(19): siRNA sense strand
aaccagaccgcgaauaugu

SEQ ID NO: 1902536 - RNA, 19 nt, Homo sapiens
  misc_RNA (1)...(19): siRNA sense strand
gagauauggugcgauuugc

SEQ ID NO: 1902537 - RNA, 19 nt, Homo sapiens
  misc_RNA (1)...(19): siRNA sense strand
ccuggugccuuuccuuuac

SEQ ID NO: 1902538 - RNA, 19 nt, Homo sapiens
  misc_RNA (1)...(19): siRNA sense strand
uaaucucuuuggaacucua

SEQ ID NO: 1902539 - RNA, 19 nt, Homo sapiens
  misc_RNA (1)...(19): siRNA sense strand
gaauggaagcaacaucacu

SEQ ID NO: 1902540 - RNA, 19 nt, Homo sapiens
  misc_RNA (1)...(19): siRNA sense strand
auagcaacuuggugccuuu

SEQ ID NO: 1902541 - RNA, 19 nt, Homo sapiens
  misc_RNA (1)...(19): siRNA sense strand
caaccugauggccaagaaa

SEQ ID NO: 1902542 - RNA, 19 nt, Homo sapiens
  misc_RNA (1)...(19): siRNA sense strand
ugaugaugguggcauaugg

SEQ ID NO: 1902543 - RNA, 19 nt, Homo sapiens
  misc_RNA (1)...(19): siRNA sense strand
ucugguagccauaucucua

SEQ ID NO: 1902544 - RNA, 19 nt, Homo sapiens
  misc_RNA (1)...(19): siRNA sense strand
caucgugguccucuucuuc

SEQ ID NO: 1902545 - RNA, 19 nt, Homo sapiens
  misc_RNA (1)...(19): siRNA sense strand
ugaguguaucuaccuuuaa

SEQ ID NO: 1902546 - RNA, 19 nt, Homo sapiens
  misc_RNA (1)...(19): siRNA sense strand
uggauuaaucucuuuggaa

SEQ ID NO: 1902547 - RNA, 19 nt, Homo sapiens
  misc_RNA (1)...(19): siRNA sense strand
gcacacauuccuguuacuc

SEQ ID NO: 1902548 - RNA, 19 nt, Homo sapiens
  misc_RNA (1)...(19): siRNA sense strand
cuacugccaaaugauguua

SEQ ID NO: 1902549 - RNA, 19 nt, Homo sapiens
  misc_RNA (1)...(19): siRNA sense strand
gacggucaccaacaucuuc

SEQ ID NO: 1902550 - RNA, 19 nt, Homo sapiens
  misc_RNA (1)...(19): siRNA sense strand
ccagcagcggcaaauauga

SEQ ID NO: 1902551 - RNA, 19 nt, Homo sapiens
  misc_RNA (1)...(19): siRNA sense strand
ccaccagcagcggcaaaua

SEQ ID NO: 1902552 - RNA, 19 nt, Homo sapiens
  misc_RNA (1)...(19): siRNA sense strand
uggcacacauuccuguuac

SEQ ID NO: 1902553 - RNA, 19 nt, Homo sapiens
  misc_RNA (1)...(19): siRNA sense strand
ugccuuuccuuuaccauca

SEQ ID NO: 1902554 - RNA, 19 nt, Homo sapiens
  misc_RNA (1)...(19): siRNA sense strand
gugguugacagccuucuug

SEQ ID NO: 1902555 - RNA, 19 nt, Homo sapiens
  misc_RNA (1)...(19): siRNA sense strand
cccaucaucuacugcuuca

SEQ ID NO: 1902556 - RNA, 19 nt, Homo sapiens
  misc_RNA (1)...(19): siRNA sense strand
gcaguccuggcacacauuc

SEQ ID NO: 1902557 - RNA, 19 nt, Homo sapiens
  misc_RNA (1)...(19): siRNA sense strand
agaagucugcuaaagaaag

SEQ ID NO: 1902558 - RNA, 19 nt, Homo sapiens
  misc_RNA (1)...(19): siRNA sense strand
ggacagauauauacaagga

SEQ ID NO: 1902559 - RNA, 19 nt, Homo sapiens
  misc_RNA (1)...(19): siRNA sense strand
caagauaccuauagaggaa

SEQ ID NO: 1902560 - RNA, 19 nt, Homo sapiens
  misc_RNA (1)...(19): siRNA sense strand
gaacauagcacguuucucu

SEQ ID NO: 1902561 - RNA, 19 nt, Homo sapiens
  misc_RNA (1)...(19): siRNA sense strand
caaagaaucuaccgugcaa

SEQ ID NO: 1902562 - RNA, 19 nt, Homo sapiens
  misc_RNA (1)...(19): siRNA sense strand
gaacacugcucucagacau

SEQ ID NO: 1902563 - RNA, 19 nt, Homo sapiens
  misc_RNA (1)...(19): siRNA sense strand
acacugcucucagacauua

SEQ ID NO: 1902564 - RNA, 19 nt, Homo sapiens
  misc_RNA (1)...(19): siRNA sense strand
guaaugggacagauauaua

SEQ ID NO: 1902565 - RNA, 19 nt, Homo sapiens
  misc_RNA (1)...(19): siRNA sense strand
ggacagaguguuugugaau

SEQ ID NO: 1902566 - RNA, 19 nt, Homo sapiens
  misc_RNA (1)...(19): siRNA sense strand
cgaggaauauauaggugua

SEQ ID NO: 1902567 - RNA, 19 nt, Homo sapiens
  misc_RNA (1)...(19): siRNA sense strand
ccacucugcuccuugcuuu

SEQ ID NO: 1902568 - RNA, 19 nt, Homo sapiens
  misc_RNA (1)...(19): siRNA sense strand
caccguggcuggcaucauu

SEQ ID NO: 1902569 - RNA, 19 nt, Homo sapiens
  misc_RNA (1)...(19): siRNA sense strand
cacaagcucuguugaggaa

SEQ ID NO: 1902570 - RNA, 19 nt, Homo sapiens
  misc_RNA (1)...(19): siRNA sense strand
gaggacagaguguuuguga

SEQ ID NO: 1902571 - RNA, 19 nt, Homo sapiens
  misc_RNA (1)...(19): siRNA sense strand
cauugucacugaugucauu

SEQ ID NO: 1902572 - RNA, 19 nt, Homo sapiens
  misc_RNA (1)...(19): siRNA sense strand
acagaguguuugugaauug

SEQ ID NO: 1902573 - RNA, 19 nt, Homo sapiens
  misc_RNA (1)...(19): siRNA sense strand
gacagaguguuugugaauu

SEQ ID NO: 1902574 - RNA, 19 nt, Homo sapiens
  misc_RNA (1)...(19): siRNA sense strand
caagcucuguugaggaaug

SEQ ID NO: 1902575 - RNA, 19 nt, Homo sapiens
  misc_RNA (1)...(19): siRNA sense strand
gaaucuaccgugcaaguuc

SEQ ID NO: 1902576 - RNA, 19 nt, Homo sapiens
  misc_RNA (1)...(19): siRNA sense strand
gcaauaccagcaucacaug

SEQ ID NO: 1902577 - RNA, 19 nt, Homo sapiens
  misc_RNA (1)...(19): siRNA sense strand
aaacugggcucggaacaag

SEQ ID NO: 1902578 - RNA, 19 nt, Homo sapiens
  misc_RNA (1)...(19): siRNA sense strand
gaauauauagguguaaugg

SEQ ID NO: 1902579 - RNA, 19 nt, Homo sapiens
  misc_RNA (1)...(19): siRNA sense strand
ggacccacgaggaauauau

SEQ ID NO: 1902580 - RNA, 19 nt, Homo sapiens
  misc_RNA (1)...(19): siRNA sense strand
gaaacugggcucggaacaa

SEQ ID NO: 1902581 - RNA, 19 nt, Homo sapiens
  misc_RNA (1)...(19): siRNA sense strand
gacccacgaggaauauaua

SEQ ID NO: 1902582 - RNA, 19 nt, Homo sapiens
  misc_RNA (1)...(19): siRNA sense strand
ugggaacacugcucucaga

SEQ ID NO: 1902583 - RNA, 19 nt, Homo sapiens
  misc_RNA (1)...(19): siRNA sense strand
cgacacacaagcucuguug

SEQ ID NO: 1902584 - RNA, 19 nt, Homo sapiens
  misc_RNA (1)...(19): siRNA sense strand
gaacuugaggacagagugu

SEQ ID NO: 1902585 - RNA, 19 nt, Homo sapiens
  misc_RNA (1)...(19): siRNA sense strand
gcucucagacauuacaaga

SEQ ID NO: 1902586 - RNA, 19 nt, Homo sapiens
  misc_RNA (1)...(19): siRNA sense strand
ggaauauauagguguaaug

SEQ ID NO: 1902587 - RNA, 19 nt, Homo sapiens
  misc_RNA (1)...(19): siRNA sense strand
ucucagacauuacaagacu

SEQ ID NO: 1902588 - RNA, 19 nt, Homo sapiens
  misc_RNA (1)...(19): siRNA sense strand
caagugagccccuucaaga

SEQ ID NO: 1902589 - RNA, 19 nt, Homo sapiens
  misc_RNA (1)...(19): siRNA sense strand
gagaugaugcucaguacag

SEQ ID NO: 1902590 - RNA, 19 nt, Homo sapiens
  misc_RNA (1)...(19): siRNA sense strand
gguguaaugggacagauau

SEQ ID NO: 1902591 - RNA, 19 nt, Homo sapiens
  misc_RNA (1)...(19): siRNA sense strand
guuucucucuggccuggua

SEQ ID NO: 1902592 - RNA, 19 nt, Homo sapiens
  misc_RNA (1)...(19): siRNA sense strand
ccuccgagaucgagaugau

SEQ ID NO: 1902593 - RNA, 19 nt, Homo sapiens
  misc_RNA (1)...(19): siRNA sense strand
cuaccgugcaaguucauua

SEQ ID NO: 1902594 - RNA, 19 nt, Homo sapiens
  misc_RNA (1)...(19): siRNA sense strand
gaguguuugugaauugcaa

SEQ ID NO: 1902595 - RNA, 19 nt, Homo sapiens
  misc_RNA (1)...(19): siRNA sense strand
acccuucucucgcaaguga

SEQ ID NO: 1902596 - RNA, 19 nt, Homo sapiens
  misc_RNA (1)...(19): siRNA sense strand
ggaacacugcucucagaca

SEQ ID NO: 1902597 - RNA, 19 nt, Homo sapiens
  misc_RNA (1)...(19): siRNA sense strand
ccacgaggaauauauaggu

SEQ ID NO: 1902598 - RNA, 19 nt, Homo sapiens
  misc_RNA (1)...(19): siRNA sense strand
aaucuaccgugcaaguuca

SEQ ID NO: 1902599 - RNA, 19 nt, Homo sapiens
  misc_RNA (1)...(19): siRNA sense strand
uaaugggacagauauauac

SEQ ID NO: 1902600 - RNA, 19 nt, Homo sapiens
  misc_RNA (1)...(19): siRNA sense strand
ugggacagauauauacaag

SEQ ID NO: 1902601 - RNA, 19 nt, Homo sapiens
  misc_RNA (1)...(19): siRNA sense strand
ccuucaagauaccuauaga

SEQ ID NO: 1902602 - RNA, 19 nt, Homo sapiens
  misc_RNA (1)...(19): siRNA sense strand
ggaaacugggcucggaaca

SEQ ID NO: 1902603 - RNA, 19 nt, Homo sapiens
  misc_RNA (1)...(19): siRNA sense strand
ccuggacccacgaggaaua

SEQ ID NO: 1902604 - RNA, 19 nt, Homo sapiens
  misc_RNA (1)...(19): siRNA sense strand
gaaugugccagagcugugu

SEQ ID NO: 1902605 - RNA, 19 nt, Homo sapiens
  misc_RNA (1)...(19): siRNA sense strand
uguaaugggacagauauau

SEQ ID NO: 1902606 - RNA, 19 nt, Homo sapiens
  misc_RNA (1)...(19): siRNA sense strand
agaggaacuugaggacaga

SEQ ID NO: 1902607 - RNA, 19 nt, Homo sapiens
  misc_RNA (1)...(19): siRNA sense strand
uugggagucuucugcuuug

SEQ ID NO: 1902608 - RNA, 19 nt, Homo sapiens
  misc_RNA (1)...(19): siRNA sense strand
auacaaggacaaagaaucu

SEQ ID NO: 1902609 - RNA, 19 nt, Homo sapiens
  misc_RNA (1)...(19): siRNA sense strand
uauacaaggacaaagaauc

SEQ ID NO: 1902610 - RNA, 19 nt, Homo sapiens
  misc_RNA (1)...(19): siRNA sense strand
caagacuggaccugggaaa

SEQ ID NO: 1902611 - RNA, 19 nt, Homo sapiens
  misc_RNA (1)...(19): siRNA sense strand
gaggaauauauagguguaa

SEQ ID NO: 1902612 - RNA, 19 nt, Homo sapiens
  misc_RNA (1)...(19): siRNA sense strand
cgugcaaguucauuaucga

SEQ ID NO: 1902613 - RNA, 19 nt, Homo sapiens
  misc_RNA (1)...(19): siRNA sense strand
acagccaccuuggaggaaa

SEQ ID NO: 1902614 - RNA, 19 nt, Homo sapiens
  misc_RNA (1)...(19): siRNA sense strand
ucacagacaugaugcagaa

SEQ ID NO: 1902615 - RNA, 19 nt, Homo sapiens
  misc_RNA (1)...(19): siRNA sense strand
gacccucucugaaagguua

SEQ ID NO: 1902616 - RNA, 19 nt, Homo sapiens
  misc_RNA (1)...(19): siRNA sense strand
gcaagaggaccaucauuga

SEQ ID NO: 1902617 - RNA, 19 nt, Homo sapiens
  misc_RNA (1)...(19): siRNA sense strand
ggagucauuugaugugauu

SEQ ID NO: 1902618 - RNA, 19 nt, Homo sapiens
  misc_RNA (1)...(19): siRNA sense strand
gugagcaccuggcugagua

SEQ ID NO: 1902619 - RNA, 19 nt, Homo sapiens
  misc_RNA (1)...(19): siRNA sense strand
aaagagaaguacagcaaug

SEQ ID NO: 1902620 - RNA, 19 nt, Homo sapiens
  misc_RNA (1)...(19): siRNA sense strand
ccaaaucccugcagcuagu

SEQ ID NO: 1902621 - RNA, 19 nt, Homo sapiens
  misc_RNA (1)...(19): siRNA sense strand
gcccaaggauagcuacuga

SEQ ID NO: 1902622 - RNA, 19 nt, Homo sapiens
  misc_RNA (1)...(19): siRNA sense strand
ugagaucgagcgcauauuu

SEQ ID NO: 1902623 - RNA, 19 nt, Homo sapiens
  misc_RNA (1)...(19): siRNA sense strand
cagaugauggcauaugaua

SEQ ID NO: 1902624 - RNA, 19 nt, Homo sapiens
  misc_RNA (1)...(19): siRNA sense strand
gaucugugcucaacaaucc

SEQ ID NO: 1902625 - RNA, 19 nt, Homo sapiens
  misc_RNA (1)...(19): siRNA sense strand
ggugggacccucucugaaa

SEQ ID NO: 1902626 - RNA, 19 nt, Homo sapiens
  misc_RNA (1)...(19): siRNA sense strand
gaugauggcauaugauaag

SEQ ID NO: 1902627 - RNA, 19 nt, Homo sapiens
  misc_RNA (1)...(19): siRNA sense strand
ccguacagaugauggcaua

SEQ ID NO: 1902628 - RNA, 19 nt, Homo sapiens
  misc_RNA (1)...(19): siRNA sense strand
gaaagguuaugaggucaca

SEQ ID NO: 1902629 - RNA, 19 nt, Homo sapiens
  misc_RNA (1)...(19): siRNA sense strand
ggaccaaugucagcuacug

SEQ ID NO: 1902630 - RNA, 19 nt, Homo sapiens
  misc_RNA (1)...(19): siRNA sense strand
gcaccugaccguacagaug

SEQ ID NO: 1902631 - RNA, 19 nt, Homo sapiens
  misc_RNA (1)...(19): siRNA sense strand
guuaugaggucacagacau

SEQ ID NO: 1902632 - RNA, 19 nt, Homo sapiens
  misc_RNA (1)...(19): siRNA sense strand
ggcaagaggaccaucauug

SEQ ID NO: 1902633 - RNA, 19 nt, Homo sapiens
  misc_RNA (1)...(19): siRNA sense strand
uacagaugauggcauauga

SEQ ID NO: 1902634 - RNA, 19 nt, Homo sapiens
  misc_RNA (1)...(19): siRNA sense strand
ggaagucacagaugaagca

SEQ ID NO: 1902635 - RNA, 19 nt, Homo sapiens
  misc_RNA (1)...(19): siRNA sense strand
caaaguguccucaccaaag

SEQ ID NO: 1902636 - RNA, 19 nt, Homo sapiens
  misc_RNA (1)...(19): siRNA sense strand
cgaaagggccaagcacaaa

SEQ ID NO: 1902637 - RNA, 19 nt, Homo sapiens
  misc_RNA (1)...(19): siRNA sense strand
gaggaggacuaugcagaug

SEQ ID NO: 1902638 - RNA, 19 nt, Homo sapiens
  misc_RNA (1)...(19): siRNA sense strand
ccaccggagucauuugaug

SEQ ID NO: 1902639 - RNA, 19 nt, Homo sapiens
  misc_RNA (1)...(19): siRNA sense strand
ugaagcaccugaccguaca

SEQ ID NO: 1902640 - RNA, 19 nt, Homo sapiens
  misc_RNA (1)...(19): siRNA sense strand
uuaaagagaaguacagcaa

SEQ ID NO: 1902641 - RNA, 19 nt, Homo sapiens
  misc_RNA (1)...(19): siRNA sense strand
ggaggaggacuaugcagau

SEQ ID NO: 1902642 - RNA, 19 nt, Homo sapiens
  misc_RNA (1)...(19): siRNA sense strand
gagaucgagcgcauauuug

SEQ ID NO: 1902643 - RNA, 19 nt, Homo sapiens
  misc_RNA (1)...(19): siRNA sense strand
guacagaugauggcauaug

SEQ ID NO: 1902644 - RNA, 19 nt, Homo sapiens
  misc_RNA (1)...(19): siRNA sense strand
ggccaaaucccugcagcua

SEQ ID NO: 1902645 - RNA, 19 nt, Homo sapiens
  misc_RNA (1)...(19): siRNA sense strand
gagcagaaggccaggagau

SEQ ID NO: 1902646 - RNA, 19 nt, Homo sapiens
  misc_RNA (1)...(19): siRNA sense strand
uugcggaagugcagaguga

SEQ ID NO: 1902647 - RNA, 19 nt, Homo sapiens
  misc_RNA (1)...(19): siRNA sense strand
caccugaccguacagauga

SEQ ID NO: 1902648 - RNA, 19 nt, Homo sapiens
  misc_RNA (1)...(19): siRNA sense strand
gucaaaguguccucaccaa

SEQ ID NO: 1902649 - RNA, 19 nt, Homo sapiens
  misc_RNA (1)...(19): siRNA sense strand
cagcuacuguggcguacug

SEQ ID NO: 1902650 - RNA, 19 nt, Homo sapiens
  misc_RNA (1)...(19): siRNA sense strand
aaaguguccucaccaaagg

SEQ ID NO: 1902651 - RNA, 19 nt, Homo sapiens
  misc_RNA (1)...(19): siRNA sense strand
gaaagggccaagcacaaac

SEQ ID NO: 1902652 - RNA, 19 nt, Homo sapiens
  misc_RNA (1)...(19): siRNA sense strand
ucucuucgacuuccucaaa

SEQ ID NO: 1902653 - RNA, 19 nt, Homo sapiens
  misc_RNA (1)...(19): siRNA sense strand
uugaugugauucuggauga

SEQ ID NO: 1902654 - RNA, 19 nt, Homo sapiens
  misc_RNA (1)...(19): siRNA sense strand
gcagaaggccaggagaucu

SEQ ID NO: 1902655 - RNA, 19 nt, Homo sapiens
  misc_RNA (1)...(19): siRNA sense strand
ucaaaguguccucaccaaa

SEQ ID NO: 1902656 - RNA, 19 nt, Homo sapiens
  misc_RNA (1)...(19): siRNA sense strand
uaaagagaaguacagcaau

SEQ ID NO: 1902657 - RNA, 19 nt, Homo sapiens
  misc_RNA (1)...(19): siRNA sense strand
gcuugaugcccucugauga

SEQ ID NO: 1902658 - RNA, 19 nt, Homo sapiens
  misc_RNA (1)...(19): siRNA sense strand
gcggugaggaccaauguca

SEQ ID NO: 1902659 - RNA, 19 nt, Homo sapiens
  misc_RNA (1)...(19): siRNA sense strand
caagaggaccaucauugag

SEQ ID NO: 1902660 - RNA, 19 nt, Homo sapiens
  misc_RNA (1)...(19): siRNA sense strand
gugggacccucucugaaag

SEQ ID NO: 1902661 - RNA, 19 nt, Homo sapiens
  misc_RNA (1)...(19): siRNA sense strand
agaucgagcgcauauuuga

SEQ ID NO: 1902662 - RNA, 19 nt, Homo sapiens
  misc_RNA (1)...(19): siRNA sense strand
guacuccagcgucucauuc

SEQ ID NO: 1902663 - RNA, 19 nt, Homo sapiens
  misc_RNA (1)...(19): siRNA sense strand
gggcaagaggaccaucauu

SEQ ID NO: 1902664 - RNA, 19 nt, Homo sapiens
  misc_RNA (1)...(19): siRNA sense strand
acagcuugaugcccucuga

SEQ ID NO: 1902665 - RNA, 19 nt, Homo sapiens
  misc_RNA (1)...(19): siRNA sense strand
gcucagcagcagcucgaaa

SEQ ID NO: 1902666 - RNA, 19 nt, Homo sapiens
  misc_RNA (1)...(19): siRNA sense strand
gcuccagcauugcggaagu

SEQ ID NO: 1902667 - RNA, 19 nt, Homo sapiens
  misc_RNA (1)...(19): siRNA sense strand
cauaugauaagcugguuca

SEQ ID NO: 1902668 - RNA, 19 nt, Homo sapiens
  misc_RNA (1)...(19): siRNA sense strand
aaagcaggcggaacauguu

SEQ ID NO: 1902669 - RNA, 19 nt, Homo sapiens
  misc_RNA (1)...(19): siRNA sense strand
gaugugauucuggaugaga

SEQ ID NO: 1902670 - RNA, 19 nt, Homo sapiens
  misc_RNA (1)...(19): siRNA sense strand
ugaggucacagacaugaug

SEQ ID NO: 1902671 - RNA, 19 nt, Homo sapiens
  misc_RNA (1)...(19): siRNA sense strand
ccaaagauuuucugcacau

SEQ ID NO: 1902672 - RNA, 19 nt, Homo sapiens
  misc_RNA (1)...(19): siRNA sense strand
ggaagugcagagugagauc

SEQ ID NO: 1902673 - RNA, 19 nt, Homo sapiens
  misc_RNA (1)...(19): siRNA sense strand
gagaaguacagcaaugacu

SEQ ID NO: 1902674 - RNA, 19 nt, Homo sapiens
  misc_RNA (1)...(19): siRNA sense strand
cgccaucucuagccaagca

SEQ ID NO: 1902675 - RNA, 19 nt, Homo sapiens
  misc_RNA (1)...(19): siRNA sense strand
cagagcacaaccacaguga

SEQ ID NO: 1902676 - RNA, 19 nt, Homo sapiens
  misc_RNA (1)...(19): siRNA sense strand
gcccaccggagucauuuga

SEQ ID NO: 1902677 - RNA, 19 nt, Homo sapiens
  misc_RNA (1)...(19): siRNA sense strand
aaagcgaucugugcucaac

SEQ ID NO: 1902678 - RNA, 19 nt, Homo sapiens
  misc_RNA (1)...(19): siRNA sense strand
gggcucuggagucaacuuu

SEQ ID NO: 1902679 - RNA, 19 nt, Homo sapiens
  misc_RNA (1)...(19): siRNA sense strand
ucugcccgcuccagcauug

SEQ ID NO: 1902680 - RNA, 19 nt, Homo sapiens
  misc_RNA (1)...(19): siRNA sense strand
aagagaaguacagcaauga

SEQ ID NO: 1902681 - RNA, 19 nt, Homo sapiens
  misc_RNA (1)...(19): siRNA sense strand
gcacauuaaagagaaguac

SEQ ID NO: 1902682 - RNA, 19 nt, Homo sapiens
  misc_RNA (1)...(19): siRNA sense strand
caaaucccugcagcuagua

SEQ ID NO: 1902683 - RNA, 19 nt, Homo sapiens
  misc_RNA (1)...(19): siRNA sense strand
ucgaaagggccaagcacaa

SEQ ID NO: 1902684 - RNA, 19 nt, Homo sapiens
  misc_RNA (1)...(19): siRNA sense strand
ccggagucauuugauguga

SEQ ID NO: 1902685 - RNA, 19 nt, Homo sapiens
  misc_RNA (1)...(19): siRNA sense strand
gcacagcuaucuccuuuga

SEQ ID NO: 1902686 - RNA, 19 nt, Homo sapiens
  misc_RNA (1)...(19): siRNA sense strand
ccagaaauguuugauguua

SEQ ID NO: 1902687 - RNA, 19 nt, Homo sapiens
  misc_RNA (1)...(19): siRNA sense strand
gaaagagggcugugaaauu

SEQ ID NO: 1902688 - RNA, 19 nt, Homo sapiens
  misc_RNA (1)...(19): siRNA sense strand
uaacagacaugaugcagaa

SEQ ID NO: 1902689 - RNA, 19 nt, Homo sapiens
  misc_RNA (1)...(19): siRNA sense strand
guccaaaccuguagcauuu

SEQ ID NO: 1902690 - RNA, 19 nt, Homo sapiens
  misc_RNA (1)...(19): siRNA sense strand
uaagaggucuguccuaaau

SEQ ID NO: 1902691 - RNA, 19 nt, Homo sapiens
  misc_RNA (1)...(19): siRNA sense strand
gaaaucaaguggaaauucu

SEQ ID NO: 1902692 - RNA, 19 nt, Homo sapiens
  misc_RNA (1)...(19): siRNA sense strand
ggagggaaaucaaguggaa

SEQ ID NO: 1902693 - RNA, 19 nt, Homo sapiens
  misc_RNA (1)...(19): siRNA sense strand
gcuaagaggucuguccuaa

SEQ ID NO: 1902694 - RNA, 19 nt, Homo sapiens
  misc_RNA (1)...(19): siRNA sense strand
aaagagggcugugaaauug

SEQ ID NO: 1902695 - RNA, 19 nt, Homo sapiens
  misc_RNA (1)...(19): siRNA sense strand
ccacggcacucucaccaua

SEQ ID NO: 1902696 - RNA, 19 nt, Homo sapiens
  misc_RNA (1)...(19): siRNA sense strand
ggccgucacugaaagguua

SEQ ID NO: 1902697 - RNA, 19 nt, Homo sapiens
  misc_RNA (1)...(19): siRNA sense strand
gcacauuccuccuuacgau

SEQ ID NO: 1902698 - RNA, 19 nt, Homo sapiens
  misc_RNA (1)...(19): siRNA sense strand
agaggaaagucacaaagua

SEQ ID NO: 1902699 - RNA, 19 nt, Homo sapiens
  misc_RNA (1)...(19): siRNA sense strand
uaggaaggcuggugaaaga

SEQ ID NO: 1902700 - RNA, 19 nt, Homo sapiens
  misc_RNA (1)...(19): siRNA sense strand
uuacagcgguugauuaaau

SEQ ID NO: 1902701 - RNA, 19 nt, Homo sapiens
  misc_RNA (1)...(19): siRNA sense strand
cuaaugaccucugaugaaa

SEQ ID NO: 1902702 - RNA, 19 nt, Homo sapiens
  misc_RNA (1)...(19): siRNA sense strand
ggaaguacaaagugaaauu

SEQ ID NO: 1902703 - RNA, 19 nt, Homo sapiens
  misc_RNA (1)...(19): siRNA sense strand
gguggcagcugauaaacuu

SEQ ID NO: 1902704 - RNA, 19 nt, Homo sapiens
  misc_RNA (1)...(19): siRNA sense strand
gaacacccgguccagcuua

SEQ ID NO: 1902705 - RNA, 19 nt, Homo sapiens
  misc_RNA (1)...(19): siRNA sense strand
gaggaaagucacaaaguaa

SEQ ID NO: 1902706 - RNA, 19 nt, Homo sapiens
  misc_RNA (1)...(19): siRNA sense strand
aagcacagcuaucuccuuu

SEQ ID NO: 1902707 - RNA, 19 nt, Homo sapiens
  misc_RNA (1)...(19): siRNA sense strand
agaggucuguccuaaauaa

SEQ ID NO: 1902708 - RNA, 19 nt, Homo sapiens
  misc_RNA (1)...(19): siRNA sense strand
gaagucuaaugaccucuga

SEQ ID NO: 1902709 - RNA, 19 nt, Homo sapiens
  misc_RNA (1)...(19): siRNA sense strand
uauaaagacuuccuuagca

SEQ ID NO: 1902710 - RNA, 19 nt, Homo sapiens
  misc_RNA (1)...(19): siRNA sense strand
gaaagggcucggaagagua

SEQ ID NO: 1902711 - RNA, 19 nt, Homo sapiens
  misc_RNA (1)...(19): siRNA sense strand
acugaaagguuacgaggua

SEQ ID NO: 1902712 - RNA, 19 nt, Homo sapiens
  misc_RNA (1)...(19): siRNA sense strand
aagauuacccugacucaua

SEQ ID NO: 1902713 - RNA, 19 nt, Homo sapiens
  misc_RNA (1)...(19): siRNA sense strand
ggaaauucuucuucaaguc

SEQ ID NO: 1902714 - RNA, 19 nt, Homo sapiens
  misc_RNA (1)...(19): siRNA sense strand
gaacauacggauccagcaa

SEQ ID NO: 1902715 - RNA, 19 nt, Homo sapiens
  misc_RNA (1)...(19): siRNA sense strand
cugauaaacuugcacaaug

SEQ ID NO: 1902716 - RNA, 19 nt, Homo sapiens
  misc_RNA (1)...(19): siRNA sense strand
cagcacaacuuauaaagac

SEQ ID NO: 1902717 - RNA, 19 nt, Homo sapiens
  misc_RNA (1)...(19): siRNA sense strand
ggacgaggaugugccuguu

SEQ ID NO: 1902718 - RNA, 19 nt, Homo sapiens
  misc_RNA (1)...(19): siRNA sense strand
acucauaccaggacacuua

SEQ ID NO: 1902719 - RNA, 19 nt, Homo sapiens
  misc_RNA (1)...(19): siRNA sense strand
gaaaugguaucugggacau

SEQ ID NO: 1902720 - RNA, 19 nt, Homo sapiens
  misc_RNA (1)...(19): siRNA sense strand
gaaguacaaagugaaauug

SEQ ID NO: 1902721 - RNA, 19 nt, Homo sapiens
  misc_RNA (1)...(19): siRNA sense strand
gcugacauuucucuugcua

SEQ ID NO: 1902722 - RNA, 19 nt, Homo sapiens
  misc_RNA (1)...(19): siRNA sense strand
ggaaaucaaguggaaauuc

SEQ ID NO: 1902723 - RNA, 19 nt, Homo sapiens
  misc_RNA (1)...(19): siRNA sense strand
ugaaagggcucggaagagu

SEQ ID NO: 1902724 - RNA, 19 nt, Homo sapiens
  misc_RNA (1)...(19): siRNA sense strand
ucacccagcacaacuuaua

SEQ ID NO: 1902725 - RNA, 19 nt, Homo sapiens
  misc_RNA (1)...(19): siRNA sense strand
uagcggaaguacaaaguga

SEQ ID NO: 1902726 - RNA, 19 nt, Homo sapiens
  misc_RNA (1)...(19): siRNA sense strand
gagagugacagcugacauu

SEQ ID NO: 1902727 - RNA, 19 nt, Homo sapiens
  misc_RNA (1)...(19): siRNA sense strand
acagcuaucuccuuugaug

SEQ ID NO: 1902728 - RNA, 19 nt, Homo sapiens
  misc_RNA (1)...(19): siRNA sense strand
guaaaagucucaucuccaa

SEQ ID NO: 1902729 - RNA, 19 nt, Homo sapiens
  misc_RNA (1)...(19): siRNA sense strand
cagcuuagcggaaguacaa

SEQ ID NO: 1902730 - RNA, 19 nt, Homo sapiens
  misc_RNA (1)...(19): siRNA sense strand
gagaacagcaagcagcuau

SEQ ID NO: 1902731 - RNA, 19 nt, Homo sapiens
  misc_RNA (1)...(19): siRNA sense strand
agccaugacucccgacaua

SEQ ID NO: 1902732 - RNA, 19 nt, Homo sapiens
  misc_RNA (1)...(19): siRNA sense strand
cacagcaauuucuggguua

SEQ ID NO: 1902733 - RNA, 19 nt, Homo sapiens
  misc_RNA (1)...(19): siRNA sense strand
ugacuccgaugucucuuug

SEQ ID NO: 1902734 - RNA, 19 nt, Homo sapiens
  misc_RNA (1)...(19): siRNA sense strand
gaaauucuucuucaagucu

SEQ ID NO: 1902735 - RNA, 19 nt, Homo sapiens
  misc_RNA (1)...(19): siRNA sense strand
ucauuacccucuuguggaa

SEQ ID NO: 1902736 - RNA, 19 nt, Homo sapiens
  misc_RNA (1)...(19): siRNA sense strand
ugacauuucucuugcuaag

SEQ ID NO: 1902737 - RNA, 19 nt, Homo sapiens
  misc_RNA (1)...(19): siRNA sense strand
gaaagucacaaaguaaaca

SEQ ID NO: 1902738 - RNA, 19 nt, Homo sapiens
  misc_RNA (1)...(19): siRNA sense strand
gaagaggaccgggaagcaa

SEQ ID NO: 1902739 - RNA, 19 nt, Homo sapiens
  misc_RNA (1)...(19): siRNA sense strand
cagcaagagagcaauaauu

SEQ ID NO: 1902740 - RNA, 19 nt, Homo sapiens
  misc_RNA (1)...(19): siRNA sense strand
gaagaagauuacccugacu

SEQ ID NO: 1902741 - RNA, 19 nt, Homo sapiens
  misc_RNA (1)...(19): siRNA sense strand
uuacagagucagcgaauga

SEQ ID NO: 1902742 - RNA, 19 nt, Homo sapiens
  misc_RNA (1)...(19): siRNA sense strand
gcacaacuuauaaagacuu

SEQ ID NO: 1902743 - RNA, 19 nt, Homo sapiens
  misc_RNA (1)...(19): siRNA sense strand
ccacucagauuggagaaca

SEQ ID NO: 1902744 - RNA, 19 nt, Homo sapiens
  misc_RNA (1)...(19): siRNA sense strand
gaacucuccaauugaaaga

SEQ ID NO: 1902745 - RNA, 19 nt, Homo sapiens
  misc_RNA (1)...(19): siRNA sense strand
ccgagcaacucccacauca

SEQ ID NO: 1902746 - RNA, 19 nt, Homo sapiens
  misc_RNA (1)...(19): siRNA sense strand
cuaaauaaucccagcaaga

SEQ ID NO: 1902747 - RNA, 19 nt, Homo sapiens
  misc_RNA (1)...(19): siRNA sense strand
gagcaacucccacaucaac

SEQ ID NO: 1902748 - RNA, 19 nt, Homo sapiens
  misc_RNA (1)...(19): siRNA sense strand
uaaauaaucccagcaagag

SEQ ID NO: 1902749 - RNA, 19 nt, Homo sapiens
  misc_RNA (1)...(19): siRNA sense strand
cgagguaacagacaugaug

SEQ ID NO: 1902750 - RNA, 19 nt, Homo sapiens
  misc_RNA (1)...(19): siRNA sense strand
agucucaucuccaaagguu

SEQ ID NO: 1902751 - RNA, 19 nt, Homo sapiens
  misc_RNA (1)...(19): siRNA sense strand
gcuugaggaugcaugugaa

SEQ ID NO: 1902752 - RNA, 19 nt, Homo sapiens
  misc_RNA (1)...(19): siRNA sense strand
gcaaaguccaaaccuguag

SEQ ID NO: 1902753 - RNA, 19 nt, Homo sapiens
  misc_RNA (1)...(19): siRNA sense strand
ucuaaugaccucugaugaa

SEQ ID NO: 1902754 - RNA, 19 nt, Homo sapiens
  misc_RNA (1)...(19): siRNA sense strand
ccauaucccacagcaauuu

SEQ ID NO: 1902755 - RNA, 19 nt, Homo sapiens
  misc_RNA (1)...(19): siRNA sense strand
caacugguggcagcugaua

SEQ ID NO: 1902756 - RNA, 19 nt, Homo sapiens
  misc_RNA (1)...(19): siRNA sense strand
ggagagagaacagcaagca

SEQ ID NO: 1902757 - RNA, 19 nt, Homo sapiens
  misc_RNA (1)...(19): siRNA sense strand
uggaaauucuucuucaagu

SEQ ID NO: 1902758 - RNA, 19 nt, Homo sapiens
  misc_RNA (1)...(19): siRNA sense strand
gauaggaaggcuggugaaa

SEQ ID NO: 1902759 - RNA, 19 nt, Homo sapiens
  misc_RNA (1)...(19): siRNA sense strand
aaugauugguggauaggaa

SEQ ID NO: 1902760 - RNA, 19 nt, Homo sapiens
  misc_RNA (1)...(19): siRNA sense strand
ggugaaagagggcugugaa

SEQ ID NO: 1902761 - RNA, 19 nt, Homo sapiens
  misc_RNA (1)...(19): siRNA sense strand
caccauaucccacagcaau

SEQ ID NO: 1902762 - RNA, 19 nt, Homo sapiens
  misc_RNA (1)...(19): siRNA sense strand
ugauaaacuugcacaaugc

SEQ ID NO: 1902763 - RNA, 19 nt, Homo sapiens
  misc_RNA (1)...(19): siRNA sense strand
gcuaucuccuuugaugcua

SEQ ID NO: 1902764 - RNA, 19 nt, Homo sapiens
  misc_RNA (1)...(19): siRNA sense strand
agugacagcugacauuucu

SEQ ID NO: 1902765 - RNA, 19 nt, Homo sapiens
  misc_RNA (1)...(19): siRNA sense strand
ugaaagagggcugugaaau

SEQ ID NO: 1902766 - RNA, 19 nt, Homo sapiens
  misc_RNA (1)...(19): siRNA sense strand
agacaggguucagcggauu

SEQ ID NO: 1902767 - RNA, 19 nt, Homo sapiens
  misc_RNA (1)...(19): siRNA sense strand
gcggaaguacaaagugaaa

SEQ ID NO: 1902768 - RNA, 19 nt, Homo sapiens
  misc_RNA (1)...(19): siRNA sense strand
caaguggaaauucuucuuc

SEQ ID NO: 1902769 - RNA, 19 nt, Homo sapiens
  misc_RNA (1)...(19): siRNA sense strand
acauacggauccagcaaga

SEQ ID NO: 1902770 - RNA, 19 nt, Homo sapiens
  misc_RNA (1)...(19): siRNA sense strand
ggaaagucacaaaguaaac

SEQ ID NO: 1902771 - RNA, 19 nt, Homo sapiens
  misc_RNA (1)...(19): siRNA sense strand
ccagcacaacuuauaaaga

SEQ ID NO: 1902772 - RNA, 19 nt, Homo sapiens
  misc_RNA (1)...(19): siRNA sense strand
gcugauaaacuugcacaau

SEQ ID NO: 1902773 - RNA, 19 nt, Homo sapiens
  misc_RNA (1)...(19): siRNA sense strand
gcggauuccuacacaagca

SEQ ID NO: 1902774 - RNA, 19 nt, Homo sapiens
  misc_RNA (1)...(19): siRNA sense strand
gcaaccacuccacagagaa

SEQ ID NO: 1902775 - RNA, 19 nt, Homo sapiens
  misc_RNA (1)...(19): siRNA sense strand
gcauuugccgugaagacaa

SEQ ID NO: 1902776 - RNA, 19 nt, Homo sapiens
  misc_RNA (1)...(19): siRNA sense strand
aaucacccagcacaacuua

SEQ ID NO: 1902777 - RNA, 19 nt, Homo sapiens
  misc_RNA (1)...(19): siRNA sense strand
ugagagagcaaaguccaaa

SEQ ID NO: 1902778 - RNA, 19 nt, Homo sapiens
  misc_RNA (1)...(19): siRNA sense strand
ugaagacaaaugugagcua

SEQ ID NO: 1902779 - RNA, 19 nt, Homo sapiens
  misc_RNA (1)...(19): siRNA sense strand
gugaaagagggcugugaaa

SEQ ID NO: 1902780 - RNA, 19 nt, Homo sapiens
  misc_RNA (1)...(19): siRNA sense strand
ggaagaggaccgggaagca

SEQ ID NO: 1902781 - RNA, 19 nt, Homo sapiens
  misc_RNA (1)...(19): siRNA sense strand
cagcaaaacagaagcaaaa

SEQ ID NO: 1902782 - RNA, 19 nt, Homo sapiens
  misc_RNA (1)...(19): siRNA sense strand
uaucuccuuugaugcuaaa

SEQ ID NO: 1902783 - RNA, 19 nt, Homo sapiens
  misc_RNA (1)...(19): siRNA sense strand
agauuacccugacucauac

SEQ ID NO: 1902784 - RNA, 19 nt, Homo sapiens
  misc_RNA (1)...(19): siRNA sense strand
cuaagaggucuguccuaaa

SEQ ID NO: 1902785 - RNA, 19 nt, Homo sapiens
  misc_RNA (1)...(19): siRNA sense strand
aagcaaagcuguagaaaua

SEQ ID NO: 1902786 - RNA, 19 nt, Homo sapiens
  misc_RNA (1)...(19): siRNA sense strand
gcaaugaaguugucuacua

SEQ ID NO: 1902787 - RNA, 19 nt, Homo sapiens
  misc_RNA (1)...(19): siRNA sense strand
ccaaaggaauuacagauua

SEQ ID NO: 1902788 - RNA, 19 nt, Homo sapiens
  misc_RNA (1)...(19): siRNA sense strand
caacauaaccggccaauuu

SEQ ID NO: 1902789 - RNA, 19 nt, Homo sapiens
  misc_RNA (1)...(19): siRNA sense strand
gcaaagcuguagaaauaua

SEQ ID NO: 1902790 - RNA, 19 nt, Homo sapiens
  misc_RNA (1)...(19): siRNA sense strand
gaacagcugcuuaauuaua

SEQ ID NO: 1902791 - RNA, 19 nt, Homo sapiens
  misc_RNA (1)...(19): siRNA sense strand
gcagacauauuacaaauug

SEQ ID NO: 1902792 - RNA, 19 nt, Homo sapiens
  misc_RNA (1)...(19): siRNA sense strand
gaacucaacuggacaagug

SEQ ID NO: 1902793 - RNA, 19 nt, Homo sapiens
  misc_RNA (1)...(19): siRNA sense strand
uugaacagcugcuuaauua

SEQ ID NO: 1902794 - RNA, 19 nt, Homo sapiens
  misc_RNA (1)...(19): siRNA sense strand
gaacaucugucuccgaaau

SEQ ID NO: 1902795 - RNA, 19 nt, Homo sapiens
  misc_RNA (1)...(19): siRNA sense strand
gaacugggacuugucauua

SEQ ID NO: 1902796 - RNA, 19 nt, Homo sapiens
  misc_RNA (1)...(19): siRNA sense strand
ggacaucgcucagcauaug

SEQ ID NO: 1902797 - RNA, 19 nt, Homo sapiens
  misc_RNA (1)...(19): siRNA sense strand
ugagacaccugguuaauau

SEQ ID NO: 1902798 - RNA, 19 nt, Homo sapiens
  misc_RNA (1)...(19): siRNA sense strand
guaaauuccuggauagaga

SEQ ID NO: 1902799 - RNA, 19 nt, Homo sapiens
  misc_RNA (1)...(19): siRNA sense strand
gaacaccaacuuaauauuc

SEQ ID NO: 1902800 - RNA, 19 nt, Homo sapiens
  misc_RNA (1)...(19): siRNA sense strand
gcaaacugcaauaagauua

SEQ ID NO: 1902801 - RNA, 19 nt, Homo sapiens
  misc_RNA (1)...(19): siRNA sense strand
gaacaaacccaguauuucu

SEQ ID NO: 1902802 - RNA, 19 nt, Homo sapiens
  misc_RNA (1)...(19): siRNA sense strand
gaugcaggcuuuacaaaug

SEQ ID NO: 1902803 - RNA, 19 nt, Homo sapiens
  misc_RNA (1)...(19): siRNA sense strand
gaacucugguuaaaucuca

SEQ ID NO: 1902804 - RNA, 19 nt, Homo sapiens
  misc_RNA (1)...(19): siRNA sense strand
gauagagaauuucaccaaa

SEQ ID NO: 1902805 - RNA, 19 nt, Homo sapiens
  misc_RNA (1)...(19): siRNA sense strand
caaaugaacuuguccaaaa

SEQ ID NO: 1902806 - RNA, 19 nt, Homo sapiens
  misc_RNA (1)...(19): siRNA sense strand
gaugagagauauauugaca

SEQ ID NO: 1902807 - RNA, 19 nt, Homo sapiens
  misc_RNA (1)...(19): siRNA sense strand
gaggacagcuucuauaaaa

SEQ ID NO: 1902808 - RNA, 19 nt, Homo sapiens
  misc_RNA (1)...(19): siRNA sense strand
gaugguggguuucuucuga

SEQ ID NO: 1902809 - RNA, 19 nt, Homo sapiens
  misc_RNA (1)...(19): siRNA sense strand
uagaaacccucucagauga

SEQ ID NO: 1902810 - RNA, 19 nt, Homo sapiens
  misc_RNA (1)...(19): siRNA sense strand
ccugaugucugcuuugaua

SEQ ID NO: 1902811 - RNA, 19 nt, Homo sapiens
  misc_RNA (1)...(19): siRNA sense strand
ccaaacaacccaucaugua

SEQ ID NO: 1902812 - RNA, 19 nt, Homo sapiens
  misc_RNA (1)...(19): siRNA sense strand
ggacaagugccuuagauga

SEQ ID NO: 1902813 - RNA, 19 nt, Homo sapiens
  misc_RNA (1)...(19): siRNA sense strand
gaaucaauacucaggaaua

SEQ ID NO: 1902814 - RNA, 19 nt, Homo sapiens
  misc_RNA (1)...(19): siRNA sense strand
ugaagaaucuggcuauaca

SEQ ID NO: 1902815 - RNA, 19 nt, Homo sapiens
  misc_RNA (1)...(19): siRNA sense strand
cguaauggauugugugauu

SEQ ID NO: 1902816 - RNA, 19 nt, Homo sapiens
  misc_RNA (1)...(19): siRNA sense strand
caaacaacccaucauguaa

SEQ ID NO: 1902817 - RNA, 19 nt, Homo sapiens
  misc_RNA (1)...(19): siRNA sense strand
gcacgcagcaguccauauu

SEQ ID NO: 1902818 - RNA, 19 nt, Homo sapiens
  misc_RNA (1)...(19): siRNA sense strand
aaaggagccuagauaauga

SEQ ID NO: 1902819 - RNA, 19 nt, Homo sapiens
  misc_RNA (1)...(19): siRNA sense strand
gaaauugcagccagggaua

SEQ ID NO: 1902820 - RNA, 19 nt, Homo sapiens
  misc_RNA (1)...(19): siRNA sense strand
gaugugaguggaaguguua

SEQ ID NO: 1902821 - RNA, 19 nt, Homo sapiens
  misc_RNA (1)...(19): siRNA sense strand
ccacuggccuagcucgaua

SEQ ID NO: 1902822 - RNA, 19 nt, Homo sapiens
  misc_RNA (1)...(19): siRNA sense strand
gauggaggaugaugacuuc

SEQ ID NO: 1902823 - RNA, 19 nt, Homo sapiens
  misc_RNA (1)...(19): siRNA sense strand
caaucgauccuaaugguua

SEQ ID NO: 1902824 - RNA, 19 nt, Homo sapiens
  misc_RNA (1)...(19): siRNA sense strand
ccaagcaaauguaagaaau

SEQ ID NO: 1902825 - RNA, 19 nt, Homo sapiens
  misc_RNA (1)...(19): siRNA sense strand
ugauguaaauuccuggaua

SEQ ID NO: 1902826 - RNA, 19 nt, Homo sapiens
  misc_RNA (1)...(19): siRNA sense strand
guaccuggaugcauuggaa

SEQ ID NO: 1902827 - RNA, 19 nt, Homo sapiens
  misc_RNA (1)...(19): siRNA sense strand
gcaaugaccugaaaauauc

SEQ ID NO: 1902828 - RNA, 19 nt, Homo sapiens
  misc_RNA (1)...(19): siRNA sense strand
caccauggguugauaauag

SEQ ID NO: 1902829 - RNA, 19 nt, Homo sapiens
  misc_RNA (1)...(19): siRNA sense strand
caaagaggcuggagaaaau

SEQ ID NO: 1902830 - RNA, 19 nt, Homo sapiens
  misc_RNA (1)...(19): siRNA sense strand
agagcaaacugcaauaaga

SEQ ID NO: 1902831 - RNA, 19 nt, Homo sapiens
  misc_RNA (1)...(19): siRNA sense strand
cuaaagacaugcuuauucu

SEQ ID NO: 1902832 - RNA, 19 nt, Homo sapiens
  misc_RNA (1)...(19): siRNA sense strand
ggauugacacuuaaacuga

SEQ ID NO: 1902833 - RNA, 19 nt, Homo sapiens
  misc_RNA (1)...(19): siRNA sense strand
caagaugagagauauauug

SEQ ID NO: 1902834 - RNA, 19 nt, Homo sapiens
  misc_RNA (1)...(19): siRNA sense strand
gaguagaugugucuuugga

SEQ ID NO: 1902835 - RNA, 19 nt, Homo sapiens
  misc_RNA (1)...(19): siRNA sense strand
gggaguagaugugucuuug

SEQ ID NO: 1902836 - RNA, 19 nt, Homo sapiens
  misc_RNA (1)...(19): siRNA sense strand
ggacuugucauuacuggaa

SEQ ID NO: 1902837 - RNA, 19 nt, Homo sapiens
  misc_RNA (1)...(19): siRNA sense strand
uggauaagaugcaagaaga

SEQ ID NO: 1902838 - RNA, 19 nt, Homo sapiens
  misc_RNA (1)...(19): siRNA sense strand
cuacagcaguuucucuuga

SEQ ID NO: 1902839 - RNA, 19 nt, Homo sapiens
  misc_RNA (1)...(19): siRNA sense strand
gauguaaauuccuggauag

SEQ ID NO: 1902840 - RNA, 19 nt, Homo sapiens
  misc_RNA (1)...(19): siRNA sense strand
ucacugcucccuacuuuaa

SEQ ID NO: 1902841 - RNA, 19 nt, Homo sapiens
  misc_RNA (1)...(19): siRNA sense strand
caaacuagaagagacaaua

SEQ ID NO: 1902842 - RNA, 19 nt, Homo sapiens
  misc_RNA (1)...(19): siRNA sense strand
gcaauaagaaucaauacuc

SEQ ID NO: 1902843 - RNA, 19 nt, Homo sapiens
  misc_RNA (1)...(19): siRNA sense strand
gaacuccaaauaagauuga

SEQ ID NO: 1902844 - RNA, 19 nt, Homo sapiens
  misc_RNA (1)...(19): siRNA sense strand
uggccuagcucgauauuau

SEQ ID NO: 1902845 - RNA, 19 nt, Homo sapiens
  misc_RNA (1)...(19): siRNA sense strand
gcacacaccggcuguuaug

SEQ ID NO: 1902846 - RNA, 19 nt, Homo sapiens
  misc_RNA (1)...(19): siRNA sense strand
uaacgacaguaaaucauuc

SEQ ID NO: 1902847 - RNA, 19 nt, Homo sapiens
  misc_RNA (1)...(19): siRNA sense strand
gaaacccucucagaugaug

SEQ ID NO: 1902848 - RNA, 19 nt, Homo sapiens
  misc_RNA (1)...(19): siRNA sense strand
gacgacaaauaucuuauca

SEQ ID NO: 1902849 - RNA, 19 nt, Homo sapiens
  misc_RNA (1)...(19): siRNA sense strand
caguugagauggaggauga

SEQ ID NO: 1902850 - RNA, 19 nt, Homo sapiens
  misc_RNA (1)...(19): siRNA sense strand
ggagaaaauuggcaagaaa

SEQ ID NO: 1902851 - RNA, 19 nt, Homo sapiens
  misc_RNA (1)...(19): siRNA sense strand
cgaaauaagaugauugaug

SEQ ID NO: 1902852 - RNA, 19 nt, Homo sapiens
  misc_RNA (1)...(19): siRNA sense strand
caacuggacaagugccuua

SEQ ID NO: 1902853 - RNA, 19 nt, Homo sapiens
  misc_RNA (1)...(19): siRNA sense strand
gauaauaguagaacuccaa

SEQ ID NO: 1902854 - RNA, 19 nt, Homo sapiens
  misc_RNA (1)...(19): siRNA sense strand
ggaauccaguuucuacuac

SEQ ID NO: 1902855 - RNA, 19 nt, Homo sapiens
  misc_RNA (1)...(19): siRNA sense strand
cagcauaugugccaucagu

SEQ ID NO: 1902856 - RNA, 19 nt, Homo sapiens
  misc_RNA (1)...(19): siRNA sense strand
gaaucgggcauuaugguaa

SEQ ID NO: 1902857 - RNA, 19 nt, Homo sapiens
  misc_RNA (1)...(19): siRNA sense strand
uaccagaguuuaucccaaa

SEQ ID NO: 1902858 - RNA, 19 nt, Homo sapiens
  misc_RNA (1)...(19): siRNA sense strand
caacgaguuuauugauaga

SEQ ID NO: 1902859 - RNA, 19 nt, Homo sapiens
  misc_RNA (1)...(19): siRNA sense strand
agagagagcccaggagaua

SEQ ID NO: 1902860 - RNA, 19 nt, Homo sapiens
  misc_RNA (1)...(19): siRNA sense strand
gauugaccuuuaugaugua

SEQ ID NO: 1902861 - RNA, 19 nt, Homo sapiens
  misc_RNA (1)...(19): siRNA sense strand
aagaaacagugacguaaug

SEQ ID NO: 1902862 - RNA, 19 nt, Homo sapiens
  misc_RNA (1)...(19): siRNA sense strand
agacaaagcuaagcaaguc

SEQ ID NO: 1902863 - RNA, 19 nt, Homo sapiens
  misc_RNA (1)...(19): siRNA sense strand
caaugaaguugucuacuac

SEQ ID NO: 1902864 - RNA, 19 nt, Homo sapiens
  misc_RNA (1)...(19): siRNA sense strand
acaaugucuuggaggauua

SEQ ID NO: 1902865 - RNA, 19 nt, Homo sapiens
  misc_RNA (1)...(19): siRNA sense strand
cagaaucuuucauggagaa

SEQ ID NO: 1902866 - RNA, 19 nt, Homo sapiens
  misc_RNA (1)...(19): siRNA sense strand
caguuucucuugaguuuga

SEQ ID NO: 1902867 - RNA, 19 nt, Homo sapiens
  misc_RNA (1)...(19): siRNA sense strand
ggauagagaauuucaccaa

SEQ ID NO: 1902868 - RNA, 19 nt, Homo sapiens
  misc_RNA (1)...(19): siRNA sense strand
aaucauggguggauaagau

SEQ ID NO: 1902869 - RNA, 19 nt, Homo sapiens
  misc_RNA (1)...(19): siRNA sense strand
ggagugaaagcacgauuug

SEQ ID NO: 1902870 - RNA, 19 nt, Homo sapiens
  misc_RNA (1)...(19): siRNA sense strand
gaaacaggacauacacaug

SEQ ID NO: 1902871 - RNA, 19 nt, Homo sapiens
  misc_RNA (1)...(19): siRNA sense strand
agagauauauugacaaagg

SEQ ID NO: 1902872 - RNA, 19 nt, Homo sapiens
  misc_RNA (1)...(19): siRNA sense strand
agauugaccuuuaugaugu

SEQ ID NO: 1902873 - RNA, 19 nt, Homo sapiens
  misc_RNA (1)...(19): siRNA sense strand
gacaagugccuuagaugaa

SEQ ID NO: 1902874 - RNA, 19 nt, Homo sapiens
  misc_RNA (1)...(19): siRNA sense strand
gagaaaagcuuaugaacac

SEQ ID NO: 1902875 - RNA, 19 nt, Homo sapiens
  misc_RNA (1)...(19): siRNA sense strand
uuacugcaaugaccugaaa

SEQ ID NO: 1902876 - RNA, 19 nt, Homo sapiens
  misc_RNA (1)...(19): siRNA sense strand
uggcacagauuacaguuug

SEQ ID NO: 1902877 - RNA, 19 nt, Homo sapiens
  misc_RNA (1)...(19): siRNA sense strand
uaucacagccaaaggaauu

SEQ ID NO: 1902878 - RNA, 19 nt, Homo sapiens
  misc_RNA (1)...(19): siRNA sense strand
aauagagucuugcuugaug

SEQ ID NO: 1902879 - RNA, 19 nt, Homo sapiens
  misc_RNA (1)...(19): siRNA sense strand
guaacgcggauuugauuaa

SEQ ID NO: 1902880 - RNA, 19 nt, Homo sapiens
  misc_RNA (1)...(19): siRNA sense strand
gagauauauugacaaagga

SEQ ID NO: 1902881 - RNA, 19 nt, Homo sapiens
  misc_RNA (1)...(19): siRNA sense strand
aaguggagauucgaaauaa

SEQ ID NO: 1902882 - RNA, 19 nt, Homo sapiens
  misc_RNA (1)...(19): siRNA sense strand
cccaguauuucuucgauaa

SEQ ID NO: 1902883 - RNA, 19 nt, Homo sapiens
  misc_RNA (1)...(19): siRNA sense strand
ggccgucacuaucaaauca

SEQ ID NO: 1902884 - RNA, 19 nt, Homo sapiens
  misc_RNA (1)...(19): siRNA sense strand
gagauucgaaauaagauga

SEQ ID NO: 1902885 - RNA, 19 nt, Homo sapiens
  misc_RNA (1)...(19): siRNA sense strand
ggaaauucaucauccaguu

SEQ ID NO: 1902886 - RNA, 19 nt, Homo sapiens
  misc_RNA (1)...(19): siRNA sense strand
gccaaacgcucgguauuaa

SEQ ID NO: 1902887 - RNA, 19 nt, Homo sapiens
  misc_RNA (1)...(19): siRNA sense strand
caacacaaggucaagcuua

SEQ ID NO: 1902888 - RNA, 19 nt, Homo sapiens
  misc_RNA (1)...(19): siRNA sense strand
gguagcagcugauaaacug

SEQ ID NO: 1902889 - RNA, 19 nt, Homo sapiens
  misc_RNA (1)...(19): siRNA sense strand
cauagaugcuacuggcuua

SEQ ID NO: 1902890 - RNA, 19 nt, Homo sapiens
  misc_RNA (1)...(19): siRNA sense strand
gcuacgaggucacagauau

SEQ ID NO: 1902891 - RNA, 19 nt, Homo sapiens
  misc_RNA (1)...(19): siRNA sense strand
gacaaagcccguugcauuu

SEQ ID NO: 1902892 - RNA, 19 nt, Homo sapiens
  misc_RNA (1)...(19): siRNA sense strand
gaugugaucuuggaugaga

SEQ ID NO: 1902893 - RNA, 19 nt, Homo sapiens
  misc_RNA (1)...(19): siRNA sense strand
gaugguagcagcugauaaa

SEQ ID NO: 1902894 - RNA, 19 nt, Homo sapiens
  misc_RNA (1)...(19): siRNA sense strand
gaaauucaucauccaguuu

SEQ ID NO: 1902895 - RNA, 19 nt, Homo sapiens
  misc_RNA (1)...(19): siRNA sense strand
agacaaagcccguugcauu

SEQ ID NO: 1902896 - RNA, 19 nt, Homo sapiens
  misc_RNA (1)...(19): siRNA sense strand
cgagggaaaucucaagcua

SEQ ID NO: 1902897 - RNA, 19 nt, Homo sapiens
  misc_RNA (1)...(19): siRNA sense strand
uggcuuagaugcagaagaa

SEQ ID NO: 1902898 - RNA, 19 nt, Homo sapiens
  misc_RNA (1)...(19): siRNA sense strand
agaagaaccuaguguggaa

SEQ ID NO: 1902899 - RNA, 19 nt, Homo sapiens
  misc_RNA (1)...(19): siRNA sense strand
caguuugggugacauagua

SEQ ID NO: 1902900 - RNA, 19 nt, Homo sapiens
  misc_RNA (1)...(19): siRNA sense strand
uagcggaaguucagaguga

SEQ ID NO: 1902901 - RNA, 19 nt, Homo sapiens
  misc_RNA (1)...(19): siRNA sense strand
guacggguguccuaugguu

SEQ ID NO: 1902902 - RNA, 19 nt, Homo sapiens
  misc_RNA (1)...(19): siRNA sense strand
ggaaaucucaagcuaaaca

SEQ ID NO: 1902903 - RNA, 19 nt, Homo sapiens
  misc_RNA (1)...(19): siRNA sense strand
ccaaggaucgcuacuguga

SEQ ID NO: 1902904 - RNA, 19 nt, Homo sapiens
  misc_RNA (1)...(19): siRNA sense strand
gggcggauauccaucacaa

SEQ ID NO: 1902905 - RNA, 19 nt, Homo sapiens
  misc_RNA (1)...(19): siRNA sense strand
auagaaagauccaacacaa

SEQ ID NO: 1902906 - RNA, 19 nt, Homo sapiens
  misc_RNA (1)...(19): siRNA sense strand
ucacagauaugaugcaaaa

SEQ ID NO: 1902907 - RNA, 19 nt, Homo sapiens
  misc_RNA (1)...(19): siRNA sense strand
aaggaucgcuacugugaaa

SEQ ID NO: 1902908 - RNA, 19 nt, Homo sapiens
  misc_RNA (1)...(19): siRNA sense strand
agggaaaucucaagcuaaa

SEQ ID NO: 1902909 - RNA, 19 nt, Homo sapiens
  misc_RNA (1)...(19): siRNA sense strand
gugagcaccuugccgacua

SEQ ID NO: 1902910 - RNA, 19 nt, Homo sapiens
  misc_RNA (1)...(19): siRNA sense strand
cuccagagcuguucgaugu

SEQ ID NO: 1902911 - RNA, 19 nt, Homo sapiens
  misc_RNA (1)...(19): siRNA sense strand
aaagaaggcugugaaaucg

SEQ ID NO: 1902912 - RNA, 19 nt, Homo sapiens
  misc_RNA (1)...(19): siRNA sense strand
ccaguaagcacgcaauaau

SEQ ID NO: 1902913 - RNA, 19 nt, Homo sapiens
  misc_RNA (1)...(19): siRNA sense strand
gaagggcggauauccauca

SEQ ID NO: 1902914 - RNA, 19 nt, Homo sapiens
  misc_RNA (1)...(19): siRNA sense strand
ccagagcuguucgauguga

SEQ ID NO: 1902915 - RNA, 19 nt, Homo sapiens
  misc_RNA (1)...(19): siRNA sense strand
gcuguucgaugugaucuug

SEQ ID NO: 1902916 - RNA, 19 nt, Homo sapiens
  misc_RNA (1)...(19): siRNA sense strand
uaacaaugacugguggaua

SEQ ID NO: 1902917 - RNA, 19 nt, Homo sapiens
  misc_RNA (1)...(19): siRNA sense strand
cagcgcagccgucauaaau

SEQ ID NO: 1902918 - RNA, 19 nt, Homo sapiens
  misc_RNA (1)...(19): siRNA sense strand
gagggaaaucucaagcuaa

SEQ ID NO: 1902919 - RNA, 19 nt, Homo sapiens
  misc_RNA (1)...(19): siRNA sense strand
caguaagcacgcaauaaua

SEQ ID NO: 1902920 - RNA, 19 nt, Homo sapiens
  misc_RNA (1)...(19): siRNA sense strand
uaaaucaggaggaaauuca

SEQ ID NO: 1902921 - RNA, 19 nt, Homo sapiens
  misc_RNA (1)...(19): siRNA sense strand
guauuaaacaaucccagua

SEQ ID NO: 1902922 - RNA, 19 nt, Homo sapiens
  misc_RNA (1)...(19): siRNA sense strand
ggaggaaauucaucaucca

SEQ ID NO: 1902923 - RNA, 19 nt, Homo sapiens
  misc_RNA (1)...(19): siRNA sense strand
ggauagggcgauugguaaa

SEQ ID NO: 1902924 - RNA, 19 nt, Homo sapiens
  misc_RNA (1)...(19): siRNA sense strand
aagcagcgcagccgucaua

SEQ ID NO: 1902925 - RNA, 19 nt, Homo sapiens
  misc_RNA (1)...(19): siRNA sense strand
ggucacagauaugaugcaa

SEQ ID NO: 1902926 - RNA, 19 nt, Homo sapiens
  misc_RNA (1)...(19): siRNA sense strand
aacaaugacugguggauag

SEQ ID NO: 1902927 - RNA, 19 nt, Homo sapiens
  misc_RNA (1)...(19): siRNA sense strand
aauaaaaucucgagggaaa

SEQ ID NO: 1902928 - RNA, 19 nt, Homo sapiens
  misc_RNA (1)...(19): siRNA sense strand
ugacaucucgcuugccaaa

SEQ ID NO: 1902929 - RNA, 19 nt, Homo sapiens
  misc_RNA (1)...(19): siRNA sense strand
guggauagggcgauuggua

SEQ ID NO: 1902930 - RNA, 19 nt, Homo sapiens
  misc_RNA (1)...(19): siRNA sense strand
gagccaagcaagggaaauu

SEQ ID NO: 1902931 - RNA, 19 nt, Homo sapiens
  misc_RNA (1)...(19): siRNA sense strand
caagaacauugcaguuggu

SEQ ID NO: 1902932 - RNA, 19 nt, Homo sapiens
  misc_RNA (1)...(19): siRNA sense strand
agagugaaaucgaaaggau

SEQ ID NO: 1902933 - RNA, 19 nt, Homo sapiens
  misc_RNA (1)...(19): siRNA sense strand
gaguacggguguccuaugg

SEQ ID NO: 1902934 - RNA, 19 nt, Homo sapiens
  misc_RNA (1)...(19): siRNA sense strand
gcacacuccuccguaugau

SEQ ID NO: 1902935 - RNA, 19 nt, Homo sapiens
  misc_RNA (1)...(19): siRNA sense strand
auggagaagugauaucaaa

SEQ ID NO: 1902936 - RNA, 19 nt, Homo sapiens
  misc_RNA (1)...(19): siRNA sense strand
uucccaagcugaagaagaa

SEQ ID NO: 1902937 - RNA, 19 nt, Homo sapiens
  misc_RNA (1)...(19): siRNA sense strand
cuagugggcccuucucuga

SEQ ID NO: 1902938 - RNA, 19 nt, Homo sapiens
  misc_RNA (1)...(19): siRNA sense strand
ugacgcggauacaauuaau

SEQ ID NO: 1902939 - RNA, 19 nt, Homo sapiens
  misc_RNA (1)...(19): siRNA sense strand
ugaaaaggauggagaagug

SEQ ID NO: 1902940 - RNA, 19 nt, Homo sapiens
  misc_RNA (1)...(19): siRNA sense strand
ucgaugugaucuuggauga

SEQ ID NO: 1902941 - RNA, 19 nt, Homo sapiens
  misc_RNA (1)...(19): siRNA sense strand
guaccuaguuccagaaaau

SEQ ID NO: 1902942 - RNA, 19 nt, Homo sapiens
  misc_RNA (1)...(19): siRNA sense strand
ggauggagaagugauauca

SEQ ID NO: 1902943 - RNA, 19 nt, Homo sapiens
  misc_RNA (1)...(19): siRNA sense strand
gauuucuucuccuaagguu

SEQ ID NO: 1902944 - RNA, 19 nt, Homo sapiens
  misc_RNA (1)...(19): siRNA sense strand
ccaugaagaugauguucca

SEQ ID NO: 1902945 - RNA, 19 nt, Homo sapiens
  misc_RNA (1)...(19): siRNA sense strand
gcauggccaucucauucga

SEQ ID NO: 1902946 - RNA, 19 nt, Homo sapiens
  misc_RNA (1)...(19): siRNA sense strand
gcacgcaauaauagaaaga

SEQ ID NO: 1902947 - RNA, 19 nt, Homo sapiens
  misc_RNA (1)...(19): siRNA sense strand
uaagcacgcaauaauagaa

SEQ ID NO: 1902948 - RNA, 19 nt, Homo sapiens
  misc_RNA (1)...(19): siRNA sense strand
guaagcacgcaauaauaga

SEQ ID NO: 1902949 - RNA, 19 nt, Homo sapiens
  misc_RNA (1)...(19): siRNA sense strand
acaccuccaucaucugcua

SEQ ID NO: 1902950 - RNA, 19 nt, Homo sapiens
  misc_RNA (1)...(19): siRNA sense strand
ugccaaacgcucgguauua

SEQ ID NO: 1902951 - RNA, 19 nt, Homo sapiens
  misc_RNA (1)...(19): siRNA sense strand
gcgcagccgucauaaaucc

SEQ ID NO: 1902952 - RNA, 19 nt, Homo sapiens
  misc_RNA (1)...(19): siRNA sense strand
cuucaagucugccucuuag

SEQ ID NO: 1902953 - RNA, 19 nt, Homo sapiens
  misc_RNA (1)...(19): siRNA sense strand
ccaagcaagggaaauucua

SEQ ID NO: 1902954 - RNA, 19 nt, Homo sapiens
  misc_RNA (1)...(19): siRNA sense strand
aaaggauggagaagugaua

SEQ ID NO: 1902955 - RNA, 19 nt, Homo sapiens
  misc_RNA (1)...(19): siRNA sense strand
gcuccuauccguucugcuu

SEQ ID NO: 1902956 - RNA, 19 nt, Homo sapiens
  misc_RNA (1)...(19): siRNA sense strand
cacccuagccucuaauuca

SEQ ID NO: 1902957 - RNA, 19 nt, Homo sapiens
  misc_RNA (1)...(19): siRNA sense strand
ccaaacgcucgguauuaaa

SEQ ID NO: 1902958 - RNA, 19 nt, Homo sapiens
  misc_RNA (1)...(19): siRNA sense strand
ggugacauaguaccuaguu

SEQ ID NO: 1902959 - RNA, 19 nt, Homo sapiens
  misc_RNA (1)...(19): siRNA sense strand
gcggauacaauuaaucauc

SEQ ID NO: 1902960 - RNA, 19 nt, Homo sapiens
  misc_RNA (1)...(19): siRNA sense strand
gcagcgcagccgucauaaa

SEQ ID NO: 1902961 - RNA, 19 nt, Homo sapiens
  misc_RNA (1)...(19): siRNA sense strand
gcugcagcaugaacagaga

SEQ ID NO: 1902962 - RNA, 19 nt, Homo sapiens
  misc_RNA (1)...(19): siRNA sense strand
ccacaacgagugcaacaag

SEQ ID NO: 1902963 - RNA, 19 nt, Homo sapiens
  misc_RNA (1)...(19): siRNA sense strand
gaaagauccaacacaaggu

SEQ ID NO: 1902964 - RNA, 19 nt, Homo sapiens
  misc_RNA (1)...(19): siRNA sense strand
uaaacaaucccaguaagca

SEQ ID NO: 1902965 - RNA, 19 nt, Homo sapiens
  misc_RNA (1)...(19): siRNA sense strand
caguaaaucaggaggaaau

SEQ ID NO: 1902966 - RNA, 19 nt, Homo sapiens
  misc_RNA (1)...(19): siRNA sense strand
uagagccaaaggaagauua

SEQ ID NO: 1902967 - RNA, 19 nt, Homo sapiens
  misc_RNA (1)...(19): siRNA sense strand
uggaaccagucaagaaauc

SEQ ID NO: 1902968 - RNA, 19 nt, Homo sapiens
  misc_RNA (1)...(19): siRNA sense strand
ucauccagcucaacucagu

SEQ ID NO: 1902969 - RNA, 19 nt, Homo sapiens
  misc_RNA (1)...(19): siRNA sense strand
gcaauaauagaaagaucca

SEQ ID NO: 1902970 - RNA, 19 nt, Homo sapiens
  misc_RNA (1)...(19): siRNA sense strand
cgaggucacagauaugaug

SEQ ID NO: 1902971 - RNA, 19 nt, Homo sapiens
  misc_RNA (1)...(19): siRNA sense strand
uaaacccagugcaaacagu

SEQ ID NO: 1902972 - RNA, 19 nt, Homo sapiens
  misc_RNA (1)...(19): siRNA sense strand
gagagcaggaccacaacga

SEQ ID NO: 1902973 - RNA, 19 nt, Homo sapiens
  misc_RNA (1)...(19): siRNA sense strand
cgggagcagugaccacaga

SEQ ID NO: 1902974 - RNA, 19 nt, Homo sapiens
  misc_RNA (1)...(19): siRNA sense strand
guacauuagccacuucaag

SEQ ID NO: 1902975 - RNA, 19 nt, Homo sapiens
  misc_RNA (1)...(19): siRNA sense strand
gcaccuugccgacuaucug

SEQ ID NO: 1902976 - RNA, 19 nt, Homo sapiens
  misc_RNA (1)...(19): siRNA sense strand
caagcccagucaaacuaga

SEQ ID NO: 1902977 - RNA, 19 nt, Homo sapiens
  misc_RNA (1)...(19): siRNA sense strand
caaacgcucgguauuaaac

SEQ ID NO: 1902978 - RNA, 19 nt, Homo sapiens
  misc_RNA (1)...(19): siRNA sense strand
agagcacacuccuccguau

SEQ ID NO: 1902979 - RNA, 19 nt, Homo sapiens
  misc_RNA (1)...(19): siRNA sense strand
guaaaucaggaggaaauuc

SEQ ID NO: 1902980 - RNA, 19 nt, Homo sapiens
  misc_RNA (1)...(19): siRNA sense strand
acugaucgcuccgcuccua

SEQ ID NO: 1902981 - RNA, 19 nt, Homo sapiens
  misc_RNA (1)...(19): siRNA sense strand
ggucaagcuuagcggaagu

SEQ ID NO: 1902982 - RNA, 19 nt, Homo sapiens
  misc_RNA (1)...(19): siRNA sense strand
uggauagggcgauugguaa

SEQ ID NO: 1902983 - RNA, 19 nt, Homo sapiens
  misc_RNA (1)...(19): siRNA sense strand
aaucaacaccuccaucauc

SEQ ID NO: 1902984 - RNA, 19 nt, Homo sapiens
  misc_RNA (1)...(19): siRNA sense strand
ggaggcagugcgcagagaa

SEQ ID NO: 1902985 - RNA, 19 nt, Homo sapiens
  misc_RNA (1)...(19): siRNA sense strand
gaauaugccuuccugauua

SEQ ID NO: 1902986 - RNA, 19 nt, Homo sapiens
  misc_RNA (1)...(19): siRNA sense strand
gaacagcucccaacuauuu

SEQ ID NO: 1902987 - RNA, 19 nt, Homo sapiens
  misc_RNA (1)...(19): siRNA sense strand
gaaauucggugugucauaa

SEQ ID NO: 1902988 - RNA, 19 nt, Homo sapiens
  misc_RNA (1)...(19): siRNA sense strand
gaacaugccucucaacagu

SEQ ID NO: 1902989 - RNA, 19 nt, Homo sapiens
  misc_RNA (1)...(19): siRNA sense strand
gaaaguacccugcgaagaa

SEQ ID NO: 1902990 - RNA, 19 nt, Homo sapiens
  misc_RNA (1)...(19): siRNA sense strand
gauuauagcguauggauua

SEQ ID NO: 1902991 - RNA, 19 nt, Homo sapiens
  misc_RNA (1)...(19): siRNA sense strand
ggacauugcuguggacuuu

SEQ ID NO: 1902992 - RNA, 19 nt, Homo sapiens
  misc_RNA (1)...(19): siRNA sense strand
gaacggcucuuaagaucaa

SEQ ID NO: 1902993 - RNA, 19 nt, Homo sapiens
  misc_RNA (1)...(19): siRNA sense strand
cgaagagccugcauuagua

SEQ ID NO: 1902994 - RNA, 19 nt, Homo sapiens
  misc_RNA (1)...(19): siRNA sense strand
ggagcaagcuaaugaagaa

SEQ ID NO: 1902995 - RNA, 19 nt, Homo sapiens
  misc_RNA (1)...(19): siRNA sense strand
gaacacugcucagaaagaa

SEQ ID NO: 1902996 - RNA, 19 nt, Homo sapiens
  misc_RNA (1)...(19): siRNA sense strand
guccugaacuccauuauaa

SEQ ID NO: 1902997 - RNA, 19 nt, Homo sapiens
  misc_RNA (1)...(19): siRNA sense strand
ugacacagauucaagauau

SEQ ID NO: 1902998 - RNA, 19 nt, Homo sapiens
  misc_RNA (1)...(19): siRNA sense strand
ggaacacgauacuggguua

SEQ ID NO: 1902999 - RNA, 19 nt, Homo sapiens
  misc_RNA (1)...(19): siRNA sense strand
ccgaauagcuccaagcaaa

SEQ ID NO: 1903000 - RNA, 19 nt, Homo sapiens
  misc_RNA (1)...(19): siRNA sense strand
gauaacaaccagaucaaua

SEQ ID NO: 1903001 - RNA, 19 nt, Homo sapiens
  misc_RNA (1)...(19): siRNA sense strand
ggacagacgugcucuacug

SEQ ID NO: 1903002 - RNA, 19 nt, Homo sapiens
  misc_RNA (1)...(19): siRNA sense strand
gaucauccuuggcucauuu

SEQ ID NO: 1903003 - RNA, 19 nt, Homo sapiens
  misc_RNA (1)...(19): siRNA sense strand
ggaaaccauuugacauauu

SEQ ID NO: 1903004 - RNA, 19 nt, Homo sapiens
  misc_RNA (1)...(19): siRNA sense strand
gaacaucuuugugggcuuu

SEQ ID NO: 1903005 - RNA, 19 nt, Homo sapiens
  misc_RNA (1)...(19): siRNA sense strand
gagcaggaguauuucagua

SEQ ID NO: 1903006 - RNA, 19 nt, Homo sapiens
  misc_RNA (1)...(19): siRNA sense strand
cggcaaaucuggaggcuuu

SEQ ID NO: 1903007 - RNA, 19 nt, Homo sapiens
  misc_RNA (1)...(19): siRNA sense strand
gaagagagcaauagaaucu

SEQ ID NO: 1903008 - RNA, 19 nt, Homo sapiens
  misc_RNA (1)...(19): siRNA sense strand
cagagaagguccaguguga

SEQ ID NO: 1903009 - RNA, 19 nt, Homo sapiens
  misc_RNA (1)...(19): siRNA sense strand
gaggaaggcaaacgaaaua

SEQ ID NO: 1903010 - RNA, 19 nt, Homo sapiens
  misc_RNA (1)...(19): siRNA sense strand
caacaaaucauaacuugga

SEQ ID NO: 1903011 - RNA, 19 nt, Homo sapiens
  misc_RNA (1)...(19): siRNA sense strand
agaagaagaugauguguuc

SEQ ID NO: 1903012 - RNA, 19 nt, Homo sapiens
  misc_RNA (1)...(19): siRNA sense strand
gaacggaucuggcaaaaca

SEQ ID NO: 1903013 - RNA, 19 nt, Homo sapiens
  misc_RNA (1)...(19): siRNA sense strand
acaacaagguuacaauuga

SEQ ID NO: 1903014 - RNA, 19 nt, Homo sapiens
  misc_RNA (1)...(19): siRNA sense strand
caacuuaguggcauccuua

SEQ ID NO: 1903015 - RNA, 19 nt, Homo sapiens
  misc_RNA (1)...(19): siRNA sense strand
gaaggcaaacgaaauacua

SEQ ID NO: 1903016 - RNA, 19 nt, Homo sapiens
  misc_RNA (1)...(19): siRNA sense strand
ggacaucgauccggagaau

SEQ ID NO: 1903017 - RNA, 19 nt, Homo sapiens
  misc_RNA (1)...(19): siRNA sense strand
caaguaaagcccagaagua

SEQ ID NO: 1903018 - RNA, 19 nt, Homo sapiens
  misc_RNA (1)...(19): siRNA sense strand
gaaaagaacccgcuauuau

SEQ ID NO: 1903019 - RNA, 19 nt, Homo sapiens
  misc_RNA (1)...(19): siRNA sense strand
gcgaagaacaccacaauug

SEQ ID NO: 1903020 - RNA, 19 nt, Homo sapiens
  misc_RNA (1)...(19): siRNA sense strand
ugaaagucaucgcauuuaa

SEQ ID NO: 1903021 - RNA, 19 nt, Homo sapiens
  misc_RNA (1)...(19): siRNA sense strand
gauuauugcuacauccuaa

SEQ ID NO: 1903022 - RNA, 19 nt, Homo sapiens
  misc_RNA (1)...(19): siRNA sense strand
ggacccaacugaaagugaa

SEQ ID NO: 1903023 - RNA, 19 nt, Homo sapiens
  misc_RNA (1)...(19): siRNA sense strand
gaaagaagaagcggaagaa

SEQ ID NO: 1903024 - RNA, 19 nt, Homo sapiens
  misc_RNA (1)...(19): siRNA sense strand
ggagcaccuuugacaauuu

SEQ ID NO: 1903025 - RNA, 19 nt, Homo sapiens
  misc_RNA (1)...(19): siRNA sense strand
cuaaagggcuacuuggauu

SEQ ID NO: 1903026 - RNA, 19 nt, Homo sapiens
  misc_RNA (1)...(19): siRNA sense strand
gauggaauuuacuggauuu

SEQ ID NO: 1903027 - RNA, 19 nt, Homo sapiens
  misc_RNA (1)...(19): siRNA sense strand
cugaacaccuuaaccauuu

SEQ ID NO: 1903028 - RNA, 19 nt, Homo sapiens
  misc_RNA (1)...(19): siRNA sense strand
caaaugccaaucucaauaa

SEQ ID NO: 1903029 - RNA, 19 nt, Homo sapiens
  misc_RNA (1)...(19): siRNA sense strand
aaacagugauuucaacuuc

SEQ ID NO: 1903030 - RNA, 19 nt, Homo sapiens
  misc_RNA (1)...(19): siRNA sense strand
ggaaugcugugauguacga

SEQ ID NO: 1903031 - RNA, 19 nt, Homo sapiens
  misc_RNA (1)...(19): siRNA sense strand
ggacuucccugagcaacuu

SEQ ID NO: 1903032 - RNA, 19 nt, Homo sapiens
  misc_RNA (1)...(19): siRNA sense strand
cauuguagcuuucuucaug

SEQ ID NO: 1903033 - RNA, 19 nt, Homo sapiens
  misc_RNA (1)...(19): siRNA sense strand
gaacaucggcccaaucuac

SEQ ID NO: 1903034 - RNA, 19 nt, Homo sapiens
  misc_RNA (1)...(19): siRNA sense strand
ggccaucgcuguagacaau

SEQ ID NO: 1903035 - RNA, 19 nt, Homo sapiens
  misc_RNA (1)...(19): siRNA sense strand
guaggauuguuuaguguaa

SEQ ID NO: 1903036 - RNA, 19 nt, Homo sapiens
  misc_RNA (1)...(19): siRNA sense strand
gacgaugacucgcccguuu

SEQ ID NO: 1903037 - RNA, 19 nt, Homo sapiens
  misc_RNA (1)...(19): siRNA sense strand
gcacgucccuugcggagau

SEQ ID NO: 1903038 - RNA, 19 nt, Homo sapiens
  misc_RNA (1)...(19): siRNA sense strand
caauuuggcugaugcugaa

SEQ ID NO: 1903039 - RNA, 19 nt, Homo sapiens
  misc_RNA (1)...(19): siRNA sense strand
gaaaagagagccuagaaaa

SEQ ID NO: 1903040 - RNA, 19 nt, Homo sapiens
  misc_RNA (1)...(19): siRNA sense strand
gcaccagacuuccucuuuc

SEQ ID NO: 1903041 - RNA, 19 nt, Homo sapiens
  misc_RNA (1)...(19): siRNA sense strand
gagauccuguugaagauga

SEQ ID NO: 1903042 - RNA, 19 nt, Homo sapiens
  misc_RNA (1)...(19): siRNA sense strand
ggaucucucucccaaagaa

SEQ ID NO: 1903043 - RNA, 19 nt, Homo sapiens
  misc_RNA (1)...(19): siRNA sense strand
gaacuucgggcugugauaa

SEQ ID NO: 1903044 - RNA, 19 nt, Homo sapiens
  misc_RNA (1)...(19): siRNA sense strand
gcaggaacuacuucaauuu

SEQ ID NO: 1903045 - RNA, 19 nt, Homo sapiens
  misc_RNA (1)...(19): siRNA sense strand
cgaaggaucucggaguuga

SEQ ID NO: 1903046 - RNA, 19 nt, Homo sapiens
  misc_RNA (1)...(19): siRNA sense strand
ggauggaauuuacuggauu

SEQ ID NO: 1903047 - RNA, 19 nt, Homo sapiens
  misc_RNA (1)...(19): siRNA sense strand
ggaaauucggugugucaua

SEQ ID NO: 1903048 - RNA, 19 nt, Homo sapiens
  misc_RNA (1)...(19): siRNA sense strand
ggacagucauguuuaaugc

SEQ ID NO: 1903049 - RNA, 19 nt, Homo sapiens
  misc_RNA (1)...(19): siRNA sense strand
ggccugcguugcuguauaa

SEQ ID NO: 1903050 - RNA, 19 nt, Homo sapiens
  misc_RNA (1)...(19): siRNA sense strand
caacaagguuacaauugau

SEQ ID NO: 1903051 - RNA, 19 nt, Homo sapiens
  misc_RNA (1)...(19): siRNA sense strand
ggaagaaggaggagaggaa

SEQ ID NO: 1903052 - RNA, 19 nt, Homo sapiens
  misc_RNA (1)...(19): siRNA sense strand
ggccuuagcuauuuacauc

SEQ ID NO: 1903053 - RNA, 19 nt, Homo sapiens
  misc_RNA (1)...(19): siRNA sense strand
gagauccuccuucaacuuu

SEQ ID NO: 1903054 - RNA, 19 nt, Homo sapiens
  misc_RNA (1)...(19): siRNA sense strand
gagaagguccagugugaaa

SEQ ID NO: 1903055 - RNA, 19 nt, Homo sapiens
  misc_RNA (1)...(19): siRNA sense strand
agagauacauggcuauuuc

SEQ ID NO: 1903056 - RNA, 19 nt, Homo sapiens
  misc_RNA (1)...(19): siRNA sense strand
gcaagaggcaccagacuuc

SEQ ID NO: 1903057 - RNA, 19 nt, Homo sapiens
  misc_RNA (1)...(19): siRNA sense strand
gagauuaguugccaugaac

SEQ ID NO: 1903058 - RNA, 19 nt, Homo sapiens
  misc_RNA (1)...(19): siRNA sense strand
gcagauguuugggaaaguu

SEQ ID NO: 1903059 - RNA, 19 nt, Homo sapiens
  misc_RNA (1)...(19): siRNA sense strand
gaagcggacccaacugaaa

SEQ ID NO: 1903060 - RNA, 19 nt, Homo sapiens
  misc_RNA (1)...(19): siRNA sense strand
gagaagaggaugaagacaa

SEQ ID NO: 1903061 - RNA, 19 nt, Homo sapiens
  misc_RNA (1)...(19): siRNA sense strand
caccaacuuugauaacuuu

SEQ ID NO: 1903062 - RNA, 19 nt, Homo sapiens
  misc_RNA (1)...(19): siRNA sense strand
ccagaaauccggcgugcua

SEQ ID NO: 1903063 - RNA, 19 nt, Homo sapiens
  misc_RNA (1)...(19): siRNA sense strand
caacaaaugccaaucucaa

SEQ ID NO: 1903064 - RNA, 19 nt, Homo sapiens
  misc_RNA (1)...(19): siRNA sense strand
caagcaaacuguccugucu

SEQ ID NO: 1903065 - RNA, 19 nt, Homo sapiens
  misc_RNA (1)...(19): siRNA sense strand
aaagaacccgcuauuauga

SEQ ID NO: 1903066 - RNA, 19 nt, Homo sapiens
  misc_RNA (1)...(19): siRNA sense strand
gaacaacaaaccagaaguc

SEQ ID NO: 1903067 - RNA, 19 nt, Homo sapiens
  misc_RNA (1)...(19): siRNA sense strand
cuuaguggcauccuuauua

SEQ ID NO: 1903068 - RNA, 19 nt, Homo sapiens
  misc_RNA (1)...(19): siRNA sense strand
ccagauugguugacacaga

SEQ ID NO: 1903069 - RNA, 19 nt, Homo sapiens
  misc_RNA (1)...(19): siRNA sense strand
ggaccuggcggaugaaaug

SEQ ID NO: 1903070 - RNA, 19 nt, Homo sapiens
  misc_RNA (1)...(19): siRNA sense strand
gaaauccggcgugcuauau

SEQ ID NO: 1903071 - RNA, 19 nt, Homo sapiens
  misc_RNA (1)...(19): siRNA sense strand
gaagaaaaccagcaugaaa

SEQ ID NO: 1903072 - RNA, 19 nt, Homo sapiens
  misc_RNA (1)...(19): siRNA sense strand
gcaagcuaaugaagaacuu

SEQ ID NO: 1903073 - RNA, 19 nt, Homo sapiens
  misc_RNA (1)...(19): siRNA sense strand
gaucaucaaucuguuugug

SEQ ID NO: 1903074 - RNA, 19 nt, Homo sapiens
  misc_RNA (1)...(19): siRNA sense strand
aguccaagauguucaauga

SEQ ID NO: 1903075 - RNA, 19 nt, Homo sapiens
  misc_RNA (1)...(19): siRNA sense strand
gggaaguucuaucgcugua

SEQ ID NO: 1903076 - RNA, 19 nt, Homo sapiens
  misc_RNA (1)...(19): siRNA sense strand
caauuucccucaagcacuu

SEQ ID NO: 1903077 - RNA, 19 nt, Homo sapiens
  misc_RNA (1)...(19): siRNA sense strand
gcagauacccaggcagaaa

SEQ ID NO: 1903078 - RNA, 19 nt, Homo sapiens
  misc_RNA (1)...(19): siRNA sense strand
ccaaaggccuucaauucca

SEQ ID NO: 1903079 - RNA, 19 nt, Homo sapiens
  misc_RNA (1)...(19): siRNA sense strand
ggaaugaucgucugcaucu

SEQ ID NO: 1903080 - RNA, 19 nt, Homo sapiens
  misc_RNA (1)...(19): siRNA sense strand
uuaguggcauccuuauuaa

SEQ ID NO: 1903081 - RNA, 19 nt, Homo sapiens
  misc_RNA (1)...(19): siRNA sense strand
gaugaacagcucccaacua

SEQ ID NO: 1903082 - RNA, 19 nt, Homo sapiens
  misc_RNA (1)...(19): siRNA sense strand
gaaauucaagaaacggaaa

SEQ ID NO: 1903083 - RNA, 19 nt, Homo sapiens
  misc_RNA (1)...(19): siRNA sense strand
caacuuugccauugucuau

SEQ ID NO: 1903084 - RNA, 19 nt, Homo sapiens
  misc_RNA (1)...(19): siRNA sense strand
gagcaccuuugacaauuuc

SEQ ID NO: 1903085 - RNA, 19 nt, Homo sapiens
  misc_RNA (1)...(19): siRNA sense strand
ggacagcucuggacauuaa

SEQ ID NO: 1903086 - RNA, 19 nt, Homo sapiens
  misc_RNA (1)...(19): siRNA sense strand
ccaagaagcucaucgauug

SEQ ID NO: 1903087 - RNA, 19 nt, Homo sapiens
  misc_RNA (1)...(19): siRNA sense strand
ggaaugaggugauguacaa

SEQ ID NO: 1903088 - RNA, 19 nt, Homo sapiens
  misc_RNA (1)...(19): siRNA sense strand
ggaggcagguuuaacuuua

SEQ ID NO: 1903089 - RNA, 19 nt, Homo sapiens
  misc_RNA (1)...(19): siRNA sense strand
gacagaaccuuauuucauu

SEQ ID NO: 1903090 - RNA, 19 nt, Homo sapiens
  misc_RNA (1)...(19): siRNA sense strand
gcagguauuuggaaacaua

SEQ ID NO: 1903091 - RNA, 19 nt, Homo sapiens
  misc_RNA (1)...(19): siRNA sense strand
ggaagaagaugacaaaugc

SEQ ID NO: 1903092 - RNA, 19 nt, Homo sapiens
  misc_RNA (1)...(19): siRNA sense strand
gcaacaaaguccugaggua

SEQ ID NO: 1903093 - RNA, 19 nt, Homo sapiens
  misc_RNA (1)...(19): siRNA sense strand
gaaauuauccugacagaca

SEQ ID NO: 1903094 - RNA, 19 nt, Homo sapiens
  misc_RNA (1)...(19): siRNA sense strand
gaugagcacuguguugaua

SEQ ID NO: 1903095 - RNA, 19 nt, Homo sapiens
  misc_RNA (1)...(19): siRNA sense strand
ggaauuggcuguacuucau

SEQ ID NO: 1903096 - RNA, 19 nt, Homo sapiens
  misc_RNA (1)...(19): siRNA sense strand
caagagaugucccuccaaa

SEQ ID NO: 1903097 - RNA, 19 nt, Homo sapiens
  misc_RNA (1)...(19): siRNA sense strand
guagugaccuccuugaaga

SEQ ID NO: 1903098 - RNA, 19 nt, Homo sapiens
  misc_RNA (1)...(19): siRNA sense strand
gaacaccaguggcuucaau

SEQ ID NO: 1903099 - RNA, 19 nt, Homo sapiens
  misc_RNA (1)...(19): siRNA sense strand
gcaggaacccacuucaaua

SEQ ID NO: 1903100 - RNA, 19 nt, Homo sapiens
  misc_RNA (1)...(19): siRNA sense strand
ugaagucuaucaucaguuu

SEQ ID NO: 1903101 - RNA, 19 nt, Homo sapiens
  misc_RNA (1)...(19): siRNA sense strand
ucaacaaccugcuaaguga

SEQ ID NO: 1903102 - RNA, 19 nt, Homo sapiens
  misc_RNA (1)...(19): siRNA sense strand
gaacaauucagguauucua

SEQ ID NO: 1903103 - RNA, 19 nt, Homo sapiens
  misc_RNA (1)...(19): siRNA sense strand
guucuacaguggcaaguua

SEQ ID NO: 1903104 - RNA, 19 nt, Homo sapiens
  misc_RNA (1)...(19): siRNA sense strand
caauaccaaugaugccuua

SEQ ID NO: 1903105 - RNA, 19 nt, Homo sapiens
  misc_RNA (1)...(19): siRNA sense strand
gaagagagagcccaggauu

SEQ ID NO: 1903106 - RNA, 19 nt, Homo sapiens
  misc_RNA (1)...(19): siRNA sense strand
acacugagauguaugaaau

SEQ ID NO: 1903107 - RNA, 19 nt, Homo sapiens
  misc_RNA (1)...(19): siRNA sense strand
gaagacagaaccuuauuuc

SEQ ID NO: 1903108 - RNA, 19 nt, Homo sapiens
  misc_RNA (1)...(19): siRNA sense strand
gggauaagcguucaaauuc

SEQ ID NO: 1903109 - RNA, 19 nt, Homo sapiens
  misc_RNA (1)...(19): siRNA sense strand
ccucuacuaugcagaauuu

SEQ ID NO: 1903110 - RNA, 19 nt, Homo sapiens
  misc_RNA (1)...(19): siRNA sense strand
agagagagcccaggauuua

SEQ ID NO: 1903111 - RNA, 19 nt, Homo sapiens
  misc_RNA (1)...(19): siRNA sense strand
gaacccacuucaauacuca

SEQ ID NO: 1903112 - RNA, 19 nt, Homo sapiens
  misc_RNA (1)...(19): siRNA sense strand
gaauaucuuugacuucauc

SEQ ID NO: 1903113 - RNA, 19 nt, Homo sapiens
  misc_RNA (1)...(19): siRNA sense strand
caauucagguauucuagaa

SEQ ID NO: 1903114 - RNA, 19 nt, Homo sapiens
  misc_RNA (1)...(19): siRNA sense strand
ccuccaaaguggcauauaa

SEQ ID NO: 1903115 - RNA, 19 nt, Homo sapiens
  misc_RNA (1)...(19): siRNA sense strand
cgagacaccuggaauaucu

SEQ ID NO: 1903116 - RNA, 19 nt, Homo sapiens
  misc_RNA (1)...(19): siRNA sense strand
acaaaguccugagguauuu

SEQ ID NO: 1903117 - RNA, 19 nt, Homo sapiens
  misc_RNA (1)...(19): siRNA sense strand
ggaauuugguggucuccuu

SEQ ID NO: 1903118 - RNA, 19 nt, Homo sapiens
  misc_RNA (1)...(19): siRNA sense strand
ccacugugcuguacaauac

SEQ ID NO: 1903119 - RNA, 19 nt, Homo sapiens
  misc_RNA (1)...(19): siRNA sense strand
gggcacagguucccuaagu

SEQ ID NO: 1903120 - RNA, 19 nt, Homo sapiens
  misc_RNA (1)...(19): siRNA sense strand
gcccugaaguaccugaaua

SEQ ID NO: 1903121 - RNA, 19 nt, Homo sapiens
  misc_RNA (1)...(19): siRNA sense strand
gaaguggucugggcaaucu

SEQ ID NO: 1903122 - RNA, 19 nt, Homo sapiens
  misc_RNA (1)...(19): siRNA sense strand
cuauguagaucacgagaaa

SEQ ID NO: 1903123 - RNA, 19 nt, Homo sapiens
  misc_RNA (1)...(19): siRNA sense strand
ggaccacugugcuguacaa

SEQ ID NO: 1903124 - RNA, 19 nt, Homo sapiens
  misc_RNA (1)...(19): siRNA sense strand
ggcaguaucacagaaauua

SEQ ID NO: 1903125 - RNA, 19 nt, Homo sapiens
  misc_RNA (1)...(19): siRNA sense strand
ggucaucgcuuuuggcuuu

SEQ ID NO: 1903126 - RNA, 19 nt, Homo sapiens
  misc_RNA (1)...(19): siRNA sense strand
gaacauccgccuuagaagu

SEQ ID NO: 1903127 - RNA, 19 nt, Homo sapiens
  misc_RNA (1)...(19): siRNA sense strand
ucacccaccuccucuacua

SEQ ID NO: 1903128 - RNA, 19 nt, Homo sapiens
  misc_RNA (1)...(19): siRNA sense strand
ggaaggauggccucaaguu

SEQ ID NO: 1903129 - RNA, 19 nt, Homo sapiens
  misc_RNA (1)...(19): siRNA sense strand
ggaacauccuggacuuugu

SEQ ID NO: 1903130 - RNA, 19 nt, Homo sapiens
  misc_RNA (1)...(19): siRNA sense strand
gcacagguucccuaaguga

SEQ ID NO: 1903131 - RNA, 19 nt, Homo sapiens
  misc_RNA (1)...(19): siRNA sense strand
gcaccgaucuggccuacgu

SEQ ID NO: 1903132 - RNA, 19 nt, Homo sapiens
  misc_RNA (1)...(19): siRNA sense strand
ggaugcagguauuuggaaa

SEQ ID NO: 1903133 - RNA, 19 nt, Homo sapiens
  misc_RNA (1)...(19): siRNA sense strand
ccuaugagcuggcccugaa

SEQ ID NO: 1903134 - RNA, 19 nt, Homo sapiens
  misc_RNA (1)...(19): siRNA sense strand
uguacaagcucuucauguu

SEQ ID NO: 1903135 - RNA, 19 nt, Homo sapiens
  misc_RNA (1)...(19): siRNA sense strand
ggacuggaaugaggugaug

SEQ ID NO: 1903136 - RNA, 19 nt, Homo sapiens
  misc_RNA (1)...(19): siRNA sense strand
ggaaauaugccaagaagcu

SEQ ID NO: 1903137 - RNA, 19 nt, Homo sapiens
  misc_RNA (1)...(19): siRNA sense strand
gaucauggacuacuauaag

SEQ ID NO: 1903138 - RNA, 19 nt, Homo sapiens
  misc_RNA (1)...(19): siRNA sense strand
gccaugaucgccuugaaua

SEQ ID NO: 1903139 - RNA, 19 nt, Homo sapiens
  misc_RNA (1)...(19): siRNA sense strand
gcagcacucuguagaugug

SEQ ID NO: 1903140 - RNA, 19 nt, Homo sapiens
  misc_RNA (1)...(19): siRNA sense strand
ccuuugagaugguuauaaa

SEQ ID NO: 1903141 - RNA, 19 nt, Homo sapiens
  misc_RNA (1)...(19): siRNA sense strand
ggagaagacagaaccuuau

SEQ ID NO: 1903142 - RNA, 19 nt, Homo sapiens
  misc_RNA (1)...(19): siRNA sense strand
cacuucaccuccacacuua

SEQ ID NO: 1903143 - RNA, 19 nt, Homo sapiens
  misc_RNA (1)...(19): siRNA sense strand
gccaguagcugaggacaug

SEQ ID NO: 1903144 - RNA, 19 nt, Homo sapiens
  misc_RNA (1)...(19): siRNA sense strand
aagauaacauugucaggaa

SEQ ID NO: 1903145 - RNA, 19 nt, Homo sapiens
  misc_RNA (1)...(19): siRNA sense strand
ccgaagggcuuucaugaag

SEQ ID NO: 1903146 - RNA, 19 nt, Homo sapiens
  misc_RNA (1)...(19): siRNA sense strand
gagaagacagaaccuuauu

SEQ ID NO: 1903147 - RNA, 19 nt, Homo sapiens
  misc_RNA (1)...(19): siRNA sense strand
cgcaauggcuggaauguca

SEQ ID NO: 1903148 - RNA, 19 nt, Homo sapiens
  misc_RNA (1)...(19): siRNA sense strand
accaguggcuucaauauga

SEQ ID NO: 1903149 - RNA, 19 nt, Homo sapiens
  misc_RNA (1)...(19): siRNA sense strand
ggacuauggcuuuguacaa

SEQ ID NO: 1903150 - RNA, 19 nt, Homo sapiens
  misc_RNA (1)...(19): siRNA sense strand
ggacuccuucggcaaauuu

SEQ ID NO: 1903151 - RNA, 19 nt, Homo sapiens
  misc_RNA (1)...(19): siRNA sense strand
gagcgugcuucaugaacaa

SEQ ID NO: 1903152 - RNA, 19 nt, Homo sapiens
  misc_RNA (1)...(19): siRNA sense strand
gcucuuaccuccgcaaugg

SEQ ID NO: 1903153 - RNA, 19 nt, Homo sapiens
  misc_RNA (1)...(19): siRNA sense strand
gaaaugcugacucucaugu

SEQ ID NO: 1903154 - RNA, 19 nt, Homo sapiens
  misc_RNA (1)...(19): siRNA sense strand
ucaacauacucauugugua

SEQ ID NO: 1903155 - RNA, 19 nt, Homo sapiens
  misc_RNA (1)...(19): siRNA sense strand
caucgagcgugcuucauga

SEQ ID NO: 1903156 - RNA, 19 nt, Homo sapiens
  misc_RNA (1)...(19): siRNA sense strand
gaaccgaagggcuuucaug

SEQ ID NO: 1903157 - RNA, 19 nt, Homo sapiens
  misc_RNA (1)...(19): siRNA sense strand
gcgaaagcaucuucucucu

SEQ ID NO: 1903158 - RNA, 19 nt, Homo sapiens
  misc_RNA (1)...(19): siRNA sense strand
gcauggagccuucaucucu

SEQ ID NO: 1903159 - RNA, 19 nt, Homo sapiens
  misc_RNA (1)...(19): siRNA sense strand
agaguaaggugaagaagca

SEQ ID NO: 1903160 - RNA, 19 nt, Homo sapiens
  misc_RNA (1)...(19): siRNA sense strand
cagaaauuauccugacaga

SEQ ID NO: 1903161 - RNA, 19 nt, Homo sapiens
  misc_RNA (1)...(19): siRNA sense strand
gcacggacaguuccaagga

SEQ ID NO: 1903162 - RNA, 19 nt, Homo sapiens
  misc_RNA (1)...(19): siRNA sense strand
caacaaaguccugagguau

SEQ ID NO: 1903163 - RNA, 19 nt, Homo sapiens
  misc_RNA (1)...(19): siRNA sense strand
agaagaagcagaagaagga

SEQ ID NO: 1903164 - RNA, 19 nt, Homo sapiens
  misc_RNA (1)...(19): siRNA sense strand
agaugucccugaagaugua

SEQ ID NO: 1903165 - RNA, 19 nt, Homo sapiens
  misc_RNA (1)...(19): siRNA sense strand
caggaaauaugccaagaag

SEQ ID NO: 1903166 - RNA, 19 nt, Homo sapiens
  misc_RNA (1)...(19): siRNA sense strand
gcuggaaugucauggacuu

SEQ ID NO: 1903167 - RNA, 19 nt, Homo sapiens
  misc_RNA (1)...(19): siRNA sense strand
caaaaucuaugcagcaaug

SEQ ID NO: 1903168 - RNA, 19 nt, Homo sapiens
  misc_RNA (1)...(19): siRNA sense strand
ggcagcagcuagacucaga

SEQ ID NO: 1903169 - RNA, 19 nt, Homo sapiens
  misc_RNA (1)...(19): siRNA sense strand
gcauguggccgcauccauu

SEQ ID NO: 1903170 - RNA, 19 nt, Homo sapiens
  misc_RNA (1)...(19): siRNA sense strand
ugagaugguuauaaagaug

SEQ ID NO: 1903171 - RNA, 19 nt, Homo sapiens
  misc_RNA (1)...(19): siRNA sense strand
aggaggagguggagaagaa

SEQ ID NO: 1903172 - RNA, 19 nt, Homo sapiens
  misc_RNA (1)...(19): siRNA sense strand
gagaggcuguggugaccuu

SEQ ID NO: 1903173 - RNA, 19 nt, Homo sapiens
  misc_RNA (1)...(19): siRNA sense strand
ggaacccacuucaauacuc

SEQ ID NO: 1903174 - RNA, 19 nt, Homo sapiens
  misc_RNA (1)...(19): siRNA sense strand
uaucaaaagugcaaaggua

SEQ ID NO: 1903175 - RNA, 19 nt, Homo sapiens
  misc_RNA (1)...(19): siRNA sense strand
cucaggagaucauugcuaa

SEQ ID NO: 1903176 - RNA, 19 nt, Homo sapiens
  misc_RNA (1)...(19): siRNA sense strand
uggaauaucuuugacuuca

SEQ ID NO: 1903177 - RNA, 19 nt, Homo sapiens
  misc_RNA (1)...(19): siRNA sense strand
agaagaagaagcagaagaa

SEQ ID NO: 1903178 - RNA, 19 nt, Homo sapiens
  misc_RNA (1)...(19): siRNA sense strand
gaaggaggcagagaucaga

SEQ ID NO: 1903179 - RNA, 19 nt, Homo sapiens
  misc_RNA (1)...(19): siRNA sense strand
caacuacacgcuacugaau

SEQ ID NO: 1903180 - RNA, 19 nt, Homo sapiens
  misc_RNA (1)...(19): siRNA sense strand
gguuaaaucccagguguuu

SEQ ID NO: 1903181 - RNA, 19 nt, Homo sapiens
  misc_RNA (1)...(19): siRNA sense strand
ggagaugucccugaagaug

SEQ ID NO: 1903182 - RNA, 19 nt, Homo sapiens
  misc_RNA (1)...(19): siRNA sense strand
gaaggauggccucaaguuc

SEQ ID NO: 1903183 - RNA, 19 nt, Homo sapiens
  misc_RNA (1)...(19): siRNA sense strand
uacaagcucuucauguuca

SEQ ID NO: 1903184 - RNA, 19 nt, Homo sapiens
  misc_RNA (1)...(19): siRNA sense strand
gcaacuacacgcuacugaa

SEQ ID NO: 1903185 - RNA, 19 nt, Homo sapiens
  misc_RNA (1)...(19): siRNA sense strand
gcaagcagguuacgaagug

SEQ ID NO: 1903186 - RNA, 19 nt, Homo sapiens
  misc_RNA (1)...(19): siRNA sense strand
ccucaagggucaucuccaa

SEQ ID NO: 1903187 - RNA, 19 nt, Homo sapiens
  misc_RNA (1)...(19): siRNA sense strand
aacaugaccugggccauuu

SEQ ID NO: 1903188 - RNA, 19 nt, Homo sapiens
  misc_RNA (1)...(19): siRNA sense strand
ugaaguacguggcugugau

SEQ ID NO: 1903189 - RNA, 19 nt, Homo sapiens
  misc_RNA (1)...(19): siRNA sense strand
caagggucaucuccaaaca

SEQ ID NO: 1903190 - RNA, 19 nt, Homo sapiens
  misc_RNA (1)...(19): siRNA sense strand
gaaguacguggcugugaug

SEQ ID NO: 1903191 - RNA, 19 nt, Homo sapiens
  misc_RNA (1)...(19): siRNA sense strand
ccuccaggcugccaucaga

SEQ ID NO: 1903192 - RNA, 19 nt, Homo sapiens
  misc_RNA (1)...(19): siRNA sense strand
aaacaugaccugggccauu

SEQ ID NO: 1903193 - RNA, 19 nt, Homo sapiens
  misc_RNA (1)...(19): siRNA sense strand
ggugcaagcagguuacgaa

SEQ ID NO: 1903194 - RNA, 19 nt, Homo sapiens
  misc_RNA (1)...(19): siRNA sense strand
cauaggagaccagccacua

SEQ ID NO: 1903195 - RNA, 19 nt, Homo sapiens
  misc_RNA (1)...(19): siRNA sense strand
caagcagguuacgaaguga

SEQ ID NO: 1903196 - RNA, 19 nt, Homo sapiens
  misc_RNA (1)...(19): siRNA sense strand
ggagaccagccacuaacug

SEQ ID NO: 1903197 - RNA, 19 nt, Homo sapiens
  misc_RNA (1)...(19): siRNA sense strand
agggucaucuccaaacaug

SEQ ID NO: 1903198 - RNA, 19 nt, Homo sapiens
  misc_RNA (1)...(19): siRNA sense strand
ugcaggcugugacugauga

SEQ ID NO: 1903199 - RNA, 19 nt, Homo sapiens
  misc_RNA (1)...(19): siRNA sense strand
ugaccugggccauuucaug

SEQ ID NO: 1903200 - RNA, 19 nt, Homo sapiens
  misc_RNA (1)...(19): siRNA sense strand
gacugcaggcugugacuga

SEQ ID NO: 1903201 - RNA, 19 nt, Homo sapiens
  misc_RNA (1)...(19): siRNA sense strand
cagccgauguggacaagac

SEQ ID NO: 1903202 - RNA, 19 nt, Homo sapiens
  misc_RNA (1)...(19): siRNA sense strand
cucagucccacgacaguua

SEQ ID NO: 1903203 - RNA, 19 nt, Homo sapiens
  misc_RNA (1)...(19): siRNA sense strand
auaggagaccagccacuaa

SEQ ID NO: 1903204 - RNA, 19 nt, Homo sapiens
  misc_RNA (1)...(19): siRNA sense strand
ggacugacauccucuauaa

SEQ ID NO: 1903205 - RNA, 19 nt, Homo sapiens
  misc_RNA (1)...(19): siRNA sense strand
gaacaacgcucugaaauac

SEQ ID NO: 1903206 - RNA, 19 nt, Homo sapiens
  misc_RNA (1)...(19): siRNA sense strand
ggacaugacuguucacuuc

SEQ ID NO: 1903207 - RNA, 19 nt, Homo sapiens
  misc_RNA (1)...(19): siRNA sense strand
gaaaugcccugcucgaguu

SEQ ID NO: 1903208 - RNA, 19 nt, Homo sapiens
  misc_RNA (1)...(19): siRNA sense strand
ggaacaacgcucugaaaua

SEQ ID NO: 1903209 - RNA, 19 nt, Homo sapiens
  misc_RNA (1)...(19): siRNA sense strand
ggaaagacaucaauaccau

SEQ ID NO: 1903210 - RNA, 19 nt, Homo sapiens
  misc_RNA (1)...(19): siRNA sense strand
ugaaauaccuggauuacau

SEQ ID NO: 1903211 - RNA, 19 nt, Homo sapiens
  misc_RNA (1)...(19): siRNA sense strand
gaaggaggcugagauagug

SEQ ID NO: 1903212 - RNA, 19 nt, Homo sapiens
  misc_RNA (1)...(19): siRNA sense strand
gagcagaaaugaccugauc

SEQ ID NO: 1903213 - RNA, 19 nt, Homo sapiens
  misc_RNA (1)...(19): siRNA sense strand
ucacagagaugucccugaa

SEQ ID NO: 1903214 - RNA, 19 nt, Homo sapiens
  misc_RNA (1)...(19): siRNA sense strand
uaacagagauugcggaaac

SEQ ID NO: 1903215 - RNA, 19 nt, Homo sapiens
  misc_RNA (1)...(19): siRNA sense strand
uauaagacguggacauuug

SEQ ID NO: 1903216 - RNA, 19 nt, Homo sapiens
  misc_RNA (1)...(19): siRNA sense strand
ggacggcacuggagaucaa

SEQ ID NO: 1903217 - RNA, 19 nt, Homo sapiens
  misc_RNA (1)...(19): siRNA sense strand
ggagaaggaggcugagaua

SEQ ID NO: 1903218 - RNA, 19 nt, Homo sapiens
  misc_RNA (1)...(19): siRNA sense strand
ccaaagaaguggcugaagu

SEQ ID NO: 1903219 - RNA, 19 nt, Homo sapiens
  misc_RNA (1)...(19): siRNA sense strand
caaagcagcaucaguguga

SEQ ID NO: 1903220 - RNA, 19 nt, Homo sapiens
  misc_RNA (1)...(19): siRNA sense strand
ggaagcggaugacgugaug

SEQ ID NO: 1903221 - RNA, 19 nt, Homo sapiens
  misc_RNA (1)...(19): siRNA sense strand
ggaacuggcucuacuucau

SEQ ID NO: 1903222 - RNA, 19 nt, Homo sapiens
  misc_RNA (1)...(19): siRNA sense strand
ccaagagaguggcaucaaa

SEQ ID NO: 1903223 - RNA, 19 nt, Homo sapiens
  misc_RNA (1)...(19): siRNA sense strand
ggcagucguuccaguauaa

SEQ ID NO: 1903224 - RNA, 19 nt, Homo sapiens
  misc_RNA (1)...(19): siRNA sense strand
guucauauuugccgucauu

SEQ ID NO: 1903225 - RNA, 19 nt, Homo sapiens
  misc_RNA (1)...(19): siRNA sense strand
cccaagagcugaccaagga

SEQ ID NO: 1903226 - RNA, 19 nt, Homo sapiens
  misc_RNA (1)...(19): siRNA sense strand
gaugauauuugacuucuac

SEQ ID NO: 1903227 - RNA, 19 nt, Homo sapiens
  misc_RNA (1)...(19): siRNA sense strand
agacagagagcucgucaua

SEQ ID NO: 1903228 - RNA, 19 nt, Homo sapiens
  misc_RNA (1)...(19): siRNA sense strand
ccagaagacuuuggacuug

SEQ ID NO: 1903229 - RNA, 19 nt, Homo sapiens
  misc_RNA (1)...(19): siRNA sense strand
ugauaaagaugaucgacuu

SEQ ID NO: 1903230 - RNA, 19 nt, Homo sapiens
  misc_RNA (1)...(19): siRNA sense strand
ucaccaacuuugacaauau

SEQ ID NO: 1903231 - RNA, 19 nt, Homo sapiens
  misc_RNA (1)...(19): siRNA sense strand
gaaauaccuggauuacauu

SEQ ID NO: 1903232 - RNA, 19 nt, Homo sapiens
  misc_RNA (1)...(19): siRNA sense strand
cgaacacuauuguacauau

SEQ ID NO: 1903233 - RNA, 19 nt, Homo sapiens
  misc_RNA (1)...(19): siRNA sense strand
gagaagauguuccgguuuu

SEQ ID NO: 1903234 - RNA, 19 nt, Homo sapiens
  misc_RNA (1)...(19): siRNA sense strand
gaaacuacacucugcugaa

SEQ ID NO: 1903235 - RNA, 19 nt, Homo sapiens
  misc_RNA (1)...(19): siRNA sense strand
ccauaagccugaugagaug

SEQ ID NO: 1903236 - RNA, 19 nt, Homo sapiens
  misc_RNA (1)...(19): siRNA sense strand
gaacacuauuguacauauc

SEQ ID NO: 1903237 - RNA, 19 nt, Homo sapiens
  misc_RNA (1)...(19): siRNA sense strand
ugucugggauuccaaguuu

SEQ ID NO: 1903238 - RNA, 19 nt, Homo sapiens
  misc_RNA (1)...(19): siRNA sense strand
gucaguauuuggauuauga

SEQ ID NO: 1903239 - RNA, 19 nt, Homo sapiens
  misc_RNA (1)...(19): siRNA sense strand
ugaacucccugaagaaugu

SEQ ID NO: 1903240 - RNA, 19 nt, Homo sapiens
  misc_RNA (1)...(19): siRNA sense strand
gcucugaaauaccuggauu

SEQ ID NO: 1903241 - RNA, 19 nt, Homo sapiens
  misc_RNA (1)...(19): siRNA sense strand
gaaggagauuuccguugug

SEQ ID NO: 1903242 - RNA, 19 nt, Homo sapiens
  misc_RNA (1)...(19): siRNA sense strand
aaucaucgcucugggcuuu

SEQ ID NO: 1903243 - RNA, 19 nt, Homo sapiens
  misc_RNA (1)...(19): siRNA sense strand
gcgggacucuuccauccua

SEQ ID NO: 1903244 - RNA, 19 nt, Homo sapiens
  misc_RNA (1)...(19): siRNA sense strand
acagagaugucccugaaga

SEQ ID NO: 1903245 - RNA, 19 nt, Homo sapiens
  misc_RNA (1)...(19): siRNA sense strand
ggagggagaggaccgguuu

SEQ ID NO: 1903246 - RNA, 19 nt, Homo sapiens
  misc_RNA (1)...(19): siRNA sense strand
guggugaacucccugaaga

SEQ ID NO: 1903247 - RNA, 19 nt, Homo sapiens
  misc_RNA (1)...(19): siRNA sense strand
gcacagacucgcccaggaa

SEQ ID NO: 1903248 - RNA, 19 nt, Homo sapiens
  misc_RNA (1)...(19): siRNA sense strand
gaagaagcagccaaucaga

SEQ ID NO: 1903249 - RNA, 19 nt, Homo sapiens
  misc_RNA (1)...(19): siRNA sense strand
ggaggaaggagaagauguu

SEQ ID NO: 1903250 - RNA, 19 nt, Homo sapiens
  misc_RNA (1)...(19): siRNA sense strand
acagagagcucgucauacu

SEQ ID NO: 1903251 - RNA, 19 nt, Homo sapiens
  misc_RNA (1)...(19): siRNA sense strand
gagcagcaccucccugaug

SEQ ID NO: 1903252 - RNA, 19 nt, Homo sapiens
  misc_RNA (1)...(19): siRNA sense strand
acaaugacauguuugagau

SEQ ID NO: 1903253 - RNA, 19 nt, Homo sapiens
  misc_RNA (1)...(19): siRNA sense strand
ggaaugucuuugacuuugu

SEQ ID NO: 1903254 - RNA, 19 nt, Homo sapiens
  misc_RNA (1)...(19): siRNA sense strand
caacaucuuuguggcuuug

SEQ ID NO: 1903255 - RNA, 19 nt, Homo sapiens
  misc_RNA (1)...(19): siRNA sense strand
gcacagaugaauccaagga

SEQ ID NO: 1903256 - RNA, 19 nt, Homo sapiens
  misc_RNA (1)...(19): siRNA sense strand
gacauccucuauaauacaa

SEQ ID NO: 1903257 - RNA, 19 nt, Homo sapiens
  misc_RNA (1)...(19): siRNA sense strand
gaauuggcucugacccuua

SEQ ID NO: 1903258 - RNA, 19 nt, Homo sapiens
  misc_RNA (1)...(19): siRNA sense strand
gaacauucuggacuucauu

SEQ ID NO: 1903259 - RNA, 19 nt, Homo sapiens
  misc_RNA (1)...(19): siRNA sense strand
ccuuugagauggugauaaa

SEQ ID NO: 1903260 - RNA, 19 nt, Homo sapiens
  misc_RNA (1)...(19): siRNA sense strand
ccaagaagagcagaaauga

SEQ ID NO: 1903261 - RNA, 19 nt, Homo sapiens
  misc_RNA (1)...(19): siRNA sense strand
gugcucaaguccaucauga

SEQ ID NO: 1903262 - RNA, 19 nt, Homo sapiens
  misc_RNA (1)...(19): siRNA sense strand
caguuacaaugacauguuu

SEQ ID NO: 1903263 - RNA, 19 nt, Homo sapiens
  misc_RNA (1)...(19): siRNA sense strand
guauuuggauuaugagaag

SEQ ID NO: 1903264 - RNA, 19 nt, Homo sapiens
  misc_RNA (1)...(19): siRNA sense strand
aaacuacacucugcugaau

SEQ ID NO: 1903265 - RNA, 19 nt, Homo sapiens
  misc_RNA (1)...(19): siRNA sense strand
cugaggaucuucaaaguca

SEQ ID NO: 1903266 - RNA, 19 nt, Homo sapiens
  misc_RNA (1)...(19): siRNA sense strand
acugacauccucuauaaua

SEQ ID NO: 1903267 - RNA, 19 nt, Homo sapiens
  misc_RNA (1)...(19): siRNA sense strand
uuaugcagcucugaugaua

SEQ ID NO: 1903268 - RNA, 19 nt, Homo sapiens
  misc_RNA (1)...(19): siRNA sense strand
gaacgagagggcuugcauu

SEQ ID NO: 1903269 - RNA, 19 nt, Homo sapiens
  misc_RNA (1)...(19): siRNA sense strand
agaugucccugaagaugua

SEQ ID NO: 1903270 - RNA, 19 nt, Homo sapiens
  misc_RNA (1)...(19): siRNA sense strand
caaccaacuucgacaccuu

SEQ ID NO: 1903271 - RNA, 19 nt, Homo sapiens
  misc_RNA (1)...(19): siRNA sense strand
gggcagugguuccgugaau

SEQ ID NO: 1903272 - RNA, 19 nt, Homo sapiens
  misc_RNA (1)...(19): siRNA sense strand
ggaauauugcccuggauga

SEQ ID NO: 1903273 - RNA, 19 nt, Homo sapiens
  misc_RNA (1)...(19): siRNA sense strand
gcagguguuugggaauauu

SEQ ID NO: 1903274 - RNA, 19 nt, Homo sapiens
  misc_RNA (1)...(19): siRNA sense strand
ccauacagcuccauguucu

SEQ ID NO: 1903275 - RNA, 19 nt, Homo sapiens
  misc_RNA (1)...(19): siRNA sense strand
ugaaaugccugaacaucgu

SEQ ID NO: 1903276 - RNA, 19 nt, Homo sapiens
  misc_RNA (1)...(19): siRNA sense strand
ugauagcccucaacacugu

SEQ ID NO: 1903277 - RNA, 19 nt, Homo sapiens
  misc_RNA (1)...(19): siRNA sense strand
gagauggugauaaagauga

SEQ ID NO: 1903278 - RNA, 19 nt, Homo sapiens
  misc_RNA (1)...(19): siRNA sense strand
ccucauguuugccaucauu

SEQ ID NO: 1903279 - RNA, 19 nt, Homo sapiens
  misc_RNA (1)...(19): siRNA sense strand
cagcucugaugauauuuga

SEQ ID NO: 1903280 - RNA, 19 nt, Homo sapiens
  misc_RNA (1)...(19): siRNA sense strand
cgagagggcuugcauugac

SEQ ID NO: 1903281 - RNA, 19 nt, Homo sapiens
  misc_RNA (1)...(19): siRNA sense strand
ggucuacuuuguggucuuu

SEQ ID NO: 1903282 - RNA, 19 nt, Homo sapiens
  misc_RNA (1)...(19): siRNA sense strand
ggaagaagcagccaaucag

SEQ ID NO: 1903283 - RNA, 19 nt, Homo sapiens
  misc_RNA (1)...(19): siRNA sense strand
gcuggaacgucauggacuu

SEQ ID NO: 1903284 - RNA, 19 nt, Homo sapiens
  misc_RNA (1)...(19): siRNA sense strand
gcuccuuucugauguugaa

SEQ ID NO: 1903285 - RNA, 19 nt, Homo sapiens
  misc_RNA (1)...(19): siRNA sense strand
gcucuucauguucauauuu

SEQ ID NO: 1903286 - RNA, 19 nt, Homo sapiens
  misc_RNA (1)...(19): siRNA sense strand
ggaacauucuggacuucau

SEQ ID NO: 1903287 - RNA, 19 nt, Homo sapiens
  misc_RNA (1)...(19): siRNA sense strand
ucacuggugucuuuaccuu

SEQ ID NO: 1903288 - RNA, 19 nt, Homo sapiens
  misc_RNA (1)...(19): siRNA sense strand
gccagaggaugcagacaau

SEQ ID NO: 1903289 - RNA, 19 nt, Homo sapiens
  misc_RNA (1)...(19): siRNA sense strand
guguggccauggugcauua

SEQ ID NO: 1903290 - RNA, 19 nt, Homo sapiens
  misc_RNA (1)...(19): siRNA sense strand
ucauuggccuggaguucua

SEQ ID NO: 1903291 - RNA, 19 nt, Homo sapiens
  misc_RNA (1)...(19): siRNA sense strand
gaacuggcucuacuucauc

SEQ ID NO: 1903292 - RNA, 19 nt, Homo sapiens
  misc_RNA (1)...(19): siRNA sense strand
augcagcucugaugauauu

SEQ ID NO: 1903293 - RNA, 19 nt, Homo sapiens
  misc_RNA (1)...(19): siRNA sense strand
gaaugucuuugacuuuguc

SEQ ID NO: 1903294 - RNA, 19 nt, Homo sapiens
  misc_RNA (1)...(19): siRNA sense strand
ccaggcaguggaagaaaua

SEQ ID NO: 1903295 - RNA, 19 nt, Homo sapiens
  misc_RNA (1)...(19): siRNA sense strand
ucaauaccaucaagucucu

SEQ ID NO: 1903296 - RNA, 19 nt, Homo sapiens
  misc_RNA (1)...(19): siRNA sense strand
ggcagcgucuggacaguga

SEQ ID NO: 1903297 - RNA, 19 nt, Homo sapiens
  misc_RNA (1)...(19): siRNA sense strand
gagaguggcaucaaagagu

SEQ ID NO: 1903298 - RNA, 19 nt, Homo sapiens
  misc_RNA (1)...(19): siRNA sense strand
acaaggugaugucugaaug

SEQ ID NO: 1903299 - RNA, 19 nt, Homo sapiens
  misc_RNA (1)...(19): siRNA sense strand
caucuugauugucuacaug

SEQ ID NO: 1903300 - RNA, 19 nt, Homo sapiens
  misc_RNA (1)...(19): siRNA sense strand
aaagggaaagacaucaaua

SEQ ID NO: 1903301 - RNA, 19 nt, Homo sapiens
  misc_RNA (1)...(19): siRNA sense strand
uggaaugucuuugacuuug

SEQ ID NO: 1903302 - RNA, 19 nt, Homo sapiens
  misc_RNA (1)...(19): siRNA sense strand
agagaugccuggaaugucu

SEQ ID NO: 1903303 - RNA, 19 nt, Homo sapiens
  misc_RNA (1)...(19): siRNA sense strand
ucaaacggcugcccaagcu

SEQ ID NO: 1903304 - RNA, 19 nt, Homo sapiens
  misc_RNA (1)...(19): siRNA sense strand
gaaggacacagcuguacaa

SEQ ID NO: 1903305 - RNA, 19 nt, Homo sapiens
  misc_RNA (1)...(19): siRNA sense strand
ggagaaggacacagcugua

SEQ ID NO: 1903306 - RNA, 19 nt, Homo sapiens
  misc_RNA (1)...(19): siRNA sense strand
gcaauuggucuucauucaa

SEQ ID NO: 1903307 - RNA, 19 nt, Homo sapiens
  misc_RNA (1)...(19): siRNA sense strand
ucucagcccuguggaaauu

SEQ ID NO: 1903308 - RNA, 19 nt, Homo sapiens
  misc_RNA (1)...(19): siRNA sense strand
caacugcaauuggucuuca

SEQ ID NO: 1903309 - RNA, 19 nt, Homo sapiens
  misc_RNA (1)...(19): siRNA sense strand
cccaggagcugcaggacaa

SEQ ID NO: 1903310 - RNA, 19 nt, Homo sapiens
  misc_RNA (1)...(19): siRNA sense strand
ggucagccaccuccaaguu

SEQ ID NO: 1903311 - RNA, 19 nt, Homo sapiens
  misc_RNA (1)...(19): siRNA sense strand
caagcucugucccaaaugg

SEQ ID NO: 1903312 - RNA, 19 nt, Homo sapiens
  misc_RNA (1)...(19): siRNA sense strand
gaucacaguggcuauaucu

SEQ ID NO: 1903313 - RNA, 19 nt, Homo sapiens
  misc_RNA (1)...(19): siRNA sense strand
guggcuauaucuccaugaa

SEQ ID NO: 1903314 - RNA, 19 nt, Homo sapiens
  misc_RNA (1)...(19): siRNA sense strand
ggagggcaguaugguagug

SEQ ID NO: 1903315 - RNA, 19 nt, Homo sapiens
  misc_RNA (1)...(19): siRNA sense strand
ucagaucacaguggcuaua

SEQ ID NO: 1903316 - RNA, 19 nt, Homo sapiens
  misc_RNA (1)...(19): siRNA sense strand
ugcaauuggucuucauuca

SEQ ID NO: 1903317 - RNA, 19 nt, Homo sapiens
  misc_RNA (1)...(19): siRNA sense strand
agcaagcucugucccaaau

SEQ ID NO: 1903318 - RNA, 19 nt, Homo sapiens
  misc_RNA (1)...(19): siRNA sense strand
gaaccucuuccagcaguau

SEQ ID NO: 1903319 - RNA, 19 nt, Homo sapiens
  misc_RNA (1)...(19): siRNA sense strand
caagucaggccgcaucgau

SEQ ID NO: 1903320 - RNA, 19 nt, Homo sapiens
  misc_RNA (1)...(19): siRNA sense strand
gaggacuucgucaccauga

SEQ ID NO: 1903321 - RNA, 19 nt, Homo sapiens
  misc_RNA (1)...(19): siRNA sense strand
gacagcuucucggaugcua

SEQ ID NO: 1903322 - RNA, 19 nt, Homo sapiens
  misc_RNA (1)...(19): siRNA sense strand
gagaaggacacagcuguac

SEQ ID NO: 1903323 - RNA, 19 nt, Homo sapiens
  misc_RNA (1)...(19): siRNA sense strand
cagcaagcucugucccaaa

SEQ ID NO: 1903324 - RNA, 19 nt, Homo sapiens
  misc_RNA (1)...(19): siRNA sense strand
gcucgggcuccauuagcua

SEQ ID NO: 1903325 - RNA, 19 nt, Homo sapiens
  misc_RNA (1)...(19): siRNA sense strand
ccaugaaggagcuaaagca

SEQ ID NO: 1903326 - RNA, 19 nt, Homo sapiens
  misc_RNA (1)...(19): siRNA sense strand
cagcuucucggaugcuaug

SEQ ID NO: 1903327 - RNA, 19 nt, Homo sapiens
  misc_RNA (1)...(19): siRNA sense strand
agaaggagauggagauuaa

SEQ ID NO: 1903328 - RNA, 19 nt, Homo sapiens
  misc_RNA (1)...(19): siRNA sense strand
ggacuuguauccaugauug

SEQ ID NO: 1903329 - RNA, 19 nt, Homo sapiens
  misc_RNA (1)...(19): siRNA sense strand
gaucaacgcugaccaacug

SEQ ID NO: 1903330 - RNA, 19 nt, Homo sapiens
  misc_RNA (1)...(19): siRNA sense strand
ggaauaagauccuggugau

SEQ ID NO: 1903331 - RNA, 19 nt, Homo sapiens
  misc_RNA (1)...(19): siRNA sense strand
ggagacaaauuccagauca

SEQ ID NO: 1903332 - RNA, 19 nt, Homo sapiens
  misc_RNA (1)...(19): siRNA sense strand
accaggaacucuacuauua

SEQ ID NO: 1903333 - RNA, 19 nt, Homo sapiens
  misc_RNA (1)...(19): siRNA sense strand
gccaugaacuuuccaucua

SEQ ID NO: 1903334 - RNA, 19 nt, Homo sapiens
  misc_RNA (1)...(19): siRNA sense strand
caaggcuucuucaggaaua

SEQ ID NO: 1903335 - RNA, 19 nt, Homo sapiens
  misc_RNA (1)...(19): siRNA sense strand
agacggcgcugcucaaguu

SEQ ID NO: 1903336 - RNA, 19 nt, Homo sapiens
  misc_RNA (1)...(19): siRNA sense strand
ccaagcgccuggccaguaa

SEQ ID NO: 1903337 - RNA, 19 nt, Homo sapiens
  misc_RNA (1)...(19): siRNA sense strand
gggcaucgcuggcucagau

SEQ ID NO: 1903338 - RNA, 19 nt, Homo sapiens
  misc_RNA (1)...(19): siRNA sense strand
ggaaggagaagcuggagaa

SEQ ID NO: 1903339 - RNA, 19 nt, Homo sapiens
  misc_RNA (1)...(19): siRNA sense strand
gaaggcagacaucggagua

SEQ ID NO: 1903340 - RNA, 19 nt, Homo sapiens
  misc_RNA (1)...(19): siRNA sense strand
uggcggagcuggaacagaa

SEQ ID NO: 1903341 - RNA, 19 nt, Homo sapiens
  misc_RNA (1)...(19): siRNA sense strand
ggaaggccgagaacuauga

SEQ ID NO: 1903342 - RNA, 19 nt, Homo sapiens
  misc_RNA (1)...(19): siRNA sense strand
ucucuucggugccacauuu

SEQ ID NO: 1903343 - RNA, 19 nt, Homo sapiens
  misc_RNA (1)...(19): siRNA sense strand
gcaugcagcugaaggacau

SEQ ID NO: 1903344 - RNA, 19 nt, Homo sapiens
  misc_RNA (1)...(19): siRNA sense strand
caacaucaucgccagcuuu

SEQ ID NO: 1903345 - RNA, 19 nt, Homo sapiens
  misc_RNA (1)...(19): siRNA sense strand
gaacucugcacugacauuu

SEQ ID NO: 1903346 - RNA, 19 nt, Homo sapiens
  misc_RNA (1)...(19): siRNA sense strand
ugacaacuuugccuccauu

SEQ ID NO: 1903347 - RNA, 19 nt, Homo sapiens
  misc_RNA (1)...(19): siRNA sense strand
gagacaaauuccagaucaa

SEQ ID NO: 1903348 - RNA, 19 nt, Homo sapiens
  misc_RNA (1)...(19): siRNA sense strand
gacacuugcuggugaugaa

SEQ ID NO: 1903349 - RNA, 19 nt, Homo sapiens
  misc_RNA (1)...(19): siRNA sense strand
aaaugcagcugacaugauc

SEQ ID NO: 1903350 - RNA, 19 nt, Homo sapiens
  misc_RNA (1)...(19): siRNA sense strand
cagggacucucacucagaa

SEQ ID NO: 1903351 - RNA, 19 nt, Homo sapiens
  misc_RNA (1)...(19): siRNA sense strand
gaagaaggagauggagauu

SEQ ID NO: 1903352 - RNA, 19 nt, Homo sapiens
  misc_RNA (1)...(19): siRNA sense strand
ggagcagggucgacugauc

SEQ ID NO: 1903353 - RNA, 19 nt, Homo sapiens
  misc_RNA (1)...(19): siRNA sense strand
caacuuugccuccauugug

SEQ ID NO: 1903354 - RNA, 19 nt, Homo sapiens
  misc_RNA (1)...(19): siRNA sense strand
gcagcuccauccuuaucaa

SEQ ID NO: 1903355 - RNA, 19 nt, Homo sapiens
  misc_RNA (1)...(19): siRNA sense strand
uggagaacaugaagaagga

SEQ ID NO: 1903356 - RNA, 19 nt, Homo sapiens
  misc_RNA (1)...(19): siRNA sense strand
ggaccaggaacucuacuau

SEQ ID NO: 1903357 - RNA, 19 nt, Homo sapiens
  misc_RNA (1)...(19): siRNA sense strand
gcauugaggugugccagau

SEQ ID NO: 1903358 - RNA, 19 nt, Homo sapiens
  misc_RNA (1)...(19): siRNA sense strand
gaacaucccagagcugaca

SEQ ID NO: 1903359 - RNA, 19 nt, Homo sapiens
  misc_RNA (1)...(19): siRNA sense strand
ucuauugccuacacauuga

SEQ ID NO: 1903360 - RNA, 19 nt, Homo sapiens
  misc_RNA (1)...(19): siRNA sense strand
gaagacacccaucgcuauc

SEQ ID NO: 1903361 - RNA, 19 nt, Homo sapiens
  misc_RNA (1)...(19): siRNA sense strand
aggagaagcuggagaacau

SEQ ID NO: 1903362 - RNA, 19 nt, Homo sapiens
  misc_RNA (1)...(19): siRNA sense strand
ggacaacuccucgcugaca

SEQ ID NO: 1903363 - RNA, 19 nt, Homo sapiens
  misc_RNA (1)...(19): siRNA sense strand
ucaauggcaugcagcugaa

SEQ ID NO: 1903364 - RNA, 19 nt, Homo sapiens
  misc_RNA (1)...(19): siRNA sense strand
ggacuacccgccuggcuau

SEQ ID NO: 1903365 - RNA, 19 nt, Homo sapiens
  misc_RNA (1)...(19): siRNA sense strand
cgcugcagcuccauccuua

SEQ ID NO: 1903366 - RNA, 19 nt, Homo sapiens
  misc_RNA (1)...(19): siRNA sense strand
gaccaggaacucuacuauu

SEQ ID NO: 1903367 - RNA, 19 nt, Homo sapiens
  misc_RNA (1)...(19): siRNA sense strand
cccaacaucuucaacuuca

SEQ ID NO: 1903368 - RNA, 19 nt, Homo sapiens
  misc_RNA (1)...(19): siRNA sense strand
uggcuucacugacuacuuc

SEQ ID NO: 1903369 - RNA, 19 nt, Homo sapiens
  misc_RNA (1)...(19): siRNA sense strand
ccugcuggaugacaacuuu

SEQ ID NO: 1903370 - RNA, 19 nt, Homo sapiens
  misc_RNA (1)...(19): siRNA sense strand
agaacugcguggucaagaa

SEQ ID NO: 1903371 - RNA, 19 nt, Homo sapiens
  misc_RNA (1)...(19): siRNA sense strand
caacaucuucaacuucaug

SEQ ID NO: 1903372 - RNA, 19 nt, Homo sapiens
  misc_RNA (1)...(19): siRNA sense strand
cccaaagcgugacagauug

SEQ ID NO: 1903373 - RNA, 19 nt, Homo sapiens
  misc_RNA (1)...(19): siRNA sense strand
gagaagcuggagaacauga

SEQ ID NO: 1903374 - RNA, 19 nt, Homo sapiens
  misc_RNA (1)...(19): siRNA sense strand
uggaggcgguggagacauu

SEQ ID NO: 1903375 - RNA, 19 nt, Homo sapiens
  misc_RNA (1)...(19): siRNA sense strand
caagagcaccaacaucauc

SEQ ID NO: 1903376 - RNA, 19 nt, Homo sapiens
  misc_RNA (1)...(19): siRNA sense strand
ccaugaacuuuccaucuag

SEQ ID NO: 1903377 - RNA, 19 nt, Homo sapiens
  misc_RNA (1)...(19): siRNA sense strand
gaacaugaagaaggagaug

SEQ ID NO: 1903378 - RNA, 19 nt, Homo sapiens
  misc_RNA (1)...(19): siRNA sense strand
gacaagacagggacucuca

SEQ ID NO: 1903379 - RNA, 19 nt, Homo sapiens
  misc_RNA (1)...(19): siRNA sense strand
ggugaucgccaucguguuc

SEQ ID NO: 1903380 - RNA, 19 nt, Homo sapiens
  misc_RNA (1)...(19): siRNA sense strand
ggaggaccaccaccuacaa

SEQ ID NO: 1903381 - RNA, 19 nt, Homo sapiens
  misc_RNA (1)...(19): siRNA sense strand
gcaugacugugucccaucu

SEQ ID NO: 1903382 - RNA, 19 nt, Homo sapiens
  misc_RNA (1)...(19): siRNA sense strand
agacagggacucucacuca

SEQ ID NO: 1903383 - RNA, 19 nt, Homo sapiens
  misc_RNA (1)...(19): siRNA sense strand
ggccgagagugacaucaug

SEQ ID NO: 1903384 - RNA, 19 nt, Homo sapiens
  misc_RNA (1)...(19): siRNA sense strand
guagaggccaugaacuuuc

SEQ ID NO: 1903385 - RNA, 19 nt, Homo sapiens
  misc_RNA (1)...(19): siRNA sense strand
ucaucgaacucugcacuga

SEQ ID NO: 1903386 - RNA, 19 nt, Homo sapiens
  misc_RNA (1)...(19): siRNA sense strand
cacccuaccucaucuacau

SEQ ID NO: 1903387 - RNA, 19 nt, Homo sapiens
  misc_RNA (1)...(19): siRNA sense strand
ccaagaugagcaagaagaa

SEQ ID NO: 1903388 - RNA, 19 nt, Homo sapiens
  misc_RNA (1)...(19): siRNA sense strand
gcuaugccuucgacguaga

SEQ ID NO: 1903389 - RNA, 19 nt, Homo sapiens
  misc_RNA (1)...(19): siRNA sense strand
ggaccaccaccuacaagau

SEQ ID NO: 1903390 - RNA, 19 nt, Homo sapiens
  misc_RNA (1)...(19): siRNA sense strand
gaagucuauugccuacaca

SEQ ID NO: 1903391 - RNA, 19 nt, Homo sapiens
  misc_RNA (1)...(19): siRNA sense strand
ucgacaaccugaagaaguc

SEQ ID NO: 1903392 - RNA, 19 nt, Homo sapiens
  misc_RNA (1)...(19): siRNA sense strand
caucaucgccagcuuuaag

SEQ ID NO: 1903393 - RNA, 19 nt, Homo sapiens
  misc_RNA (1)...(19): siRNA sense strand
gccuacacauugaccaaga

SEQ ID NO: 1903394 - RNA, 19 nt, Homo sapiens
  misc_RNA (1)...(19): siRNA sense strand
gccaagaugagcaagaaga

SEQ ID NO: 1903395 - RNA, 19 nt, Homo sapiens
  misc_RNA (1)...(19): siRNA sense strand
gaucugcucggacaagaca

SEQ ID NO: 1903396 - RNA, 19 nt, Homo sapiens
  misc_RNA (1)...(19): siRNA sense strand
gcugcaagguggacaacuc

SEQ ID NO: 1903397 - RNA, 19 nt, Homo sapiens
  misc_RNA (1)...(19): siRNA sense strand
gaugaaagguggggacaga

SEQ ID NO: 1903398 - RNA, 19 nt, Homo sapiens
  misc_RNA (1)...(19): siRNA sense strand
ugaagaaggagauggagau

SEQ ID NO: 1903399 - RNA, 19 nt, Homo sapiens
  misc_RNA (1)...(19): siRNA sense strand
gcaaggcuucuucaggaau

SEQ ID NO: 1903400 - RNA, 19 nt, Homo sapiens
  misc_RNA (1)...(19): siRNA sense strand
gcuacuaccaggaauucaa

SEQ ID NO: 1903401 - RNA, 19 nt, Homo sapiens
  misc_RNA (1)...(19): siRNA sense strand
cgagaacuaugagcucuac

SEQ ID NO: 1903402 - RNA, 19 nt, Homo sapiens
  misc_RNA (1)...(19): siRNA sense strand
acccaaagcgugacagauu

SEQ ID NO: 1903403 - RNA, 19 nt, Homo sapiens
  misc_RNA (1)...(19): siRNA sense strand
gcugacacccuaccucauc

SEQ ID NO: 1903404 - RNA, 19 nt, Homo sapiens
  misc_RNA (1)...(19): siRNA sense strand
gagcagggucgacugaucu

SEQ ID NO: 1903405 - RNA, 19 nt, Homo sapiens
  misc_RNA (1)...(19): siRNA sense strand
cagcugacaccacggaaga

SEQ ID NO: 1903406 - RNA, 19 nt, Homo sapiens
  misc_RNA (1)...(19): siRNA sense strand
gaacugcguggucaagaac

SEQ ID NO: 1903407 - RNA, 19 nt, Homo sapiens
  misc_RNA (1)...(19): siRNA sense strand
agaagacacccaucgcuau

SEQ ID NO: 1903408 - RNA, 19 nt, Homo sapiens
  misc_RNA (1)...(19): siRNA sense strand
aagaugagcaagaagaaga

SEQ ID NO: 1903409 - RNA, 19 nt, Homo sapiens
  misc_RNA (1)...(19): siRNA sense strand
gcaggcauccgggugauca

SEQ ID NO: 1903410 - RNA, 19 nt, Homo sapiens
  misc_RNA (1)...(19): siRNA sense strand
gaccaccaccuacaagauc

SEQ ID NO: 1903411 - RNA, 19 nt, Homo sapiens
  misc_RNA (1)...(19): siRNA sense strand
cugugucccuggcauauga

SEQ ID NO: 1903412 - RNA, 19 nt, Homo sapiens
  misc_RNA (1)...(19): siRNA sense strand
ggccugcagugccucaugu

SEQ ID NO: 1903413 - RNA, 19 nt, Homo sapiens
  misc_RNA (1)...(19): siRNA sense strand
gcaagaggaaggagaagcu

SEQ ID NO: 1903414 - RNA, 19 nt, Homo sapiens
  misc_RNA (1)...(19): siRNA sense strand
gcccgugccugugugauca

SEQ ID NO: 1903415 - RNA, 19 nt, Homo sapiens
  misc_RNA (1)...(19): siRNA sense strand
gcgagacaguggaggacau

SEQ ID NO: 1903416 - RNA, 19 nt, Homo sapiens
  misc_RNA (1)...(19): siRNA sense strand
cagaaccgcaugacugugu

SEQ ID NO: 1903417 - RNA, 19 nt, Homo sapiens
  misc_RNA (1)...(19): siRNA sense strand
ccaccgacgacaaucugua

SEQ ID NO: 1903418 - RNA, 19 nt, Homo sapiens
  misc_RNA (1)...(19): siRNA sense strand
ccaggaacucuacuauuag

SEQ ID NO: 1903419 - RNA, 19 nt, Homo sapiens
  misc_RNA (1)...(19): siRNA sense strand
aagaaggagauggagauua

SEQ ID NO: 1903420 - RNA, 19 nt, Homo sapiens
  misc_RNA (1)...(19): siRNA sense strand
ggugggaccaggaacucua

SEQ ID NO: 1903421 - RNA, 19 nt, Homo sapiens
  misc_RNA (1)...(19): siRNA sense strand
gugcaucaccauccucuuc

SEQ ID NO: 1903422 - RNA, 19 nt, Homo sapiens
  misc_RNA (1)...(19): siRNA sense strand
ccuacacauugaccaagaa

SEQ ID NO: 1903423 - RNA, 19 nt, Homo sapiens
  misc_RNA (1)...(19): siRNA sense strand
cugccaagaugagcaagaa

SEQ ID NO: 1903424 - RNA, 19 nt, Homo sapiens
  misc_RNA (1)...(19): siRNA sense strand
agucagggcagacguuuga

SEQ ID NO: 1903425 - RNA, 19 nt, Homo sapiens
  misc_RNA (1)...(19): siRNA sense strand
uggcuaugccuucgacgua

SEQ ID NO: 1903426 - RNA, 19 nt, Homo sapiens
  misc_RNA (1)...(19): siRNA sense strand
cguagaggccaugaacuuu

SEQ ID NO: 1903427 - RNA, 19 nt, Homo sapiens
  misc_RNA (1)...(19): siRNA sense strand
cgaguuggcugaccacauc

SEQ ID NO: 1903428 - RNA, 19 nt, Homo sapiens
  misc_RNA (1)...(19): siRNA sense strand
gcagcgagguagugaagag

SEQ ID NO: 1903429 - RNA, 19 nt, Homo sapiens
  misc_RNA (1)...(19): siRNA sense strand
ggcgcuaccuguaucaaug

SEQ ID NO: 1903430 - RNA, 19 nt, Homo sapiens
  misc_RNA (1)...(19): siRNA sense strand
ucacacuccucgcccuauu

SEQ ID NO: 1903431 - RNA, 19 nt, Homo sapiens
  misc_RNA (1)...(19): siRNA sense strand
ggaggugugugagcucaau

SEQ ID NO: 1903432 - RNA, 19 nt, Homo sapiens
  misc_RNA (1)...(19): siRNA sense strand
gugcagccuuuguguccaa

SEQ ID NO: 1903433 - RNA, 19 nt, Homo sapiens
  misc_RNA (1)...(19): siRNA sense strand
ccaggagggagguguguga

SEQ ID NO: 1903434 - RNA, 19 nt, Homo sapiens
  misc_RNA (1)...(19): siRNA sense strand
gggcagcgagguagugaag

SEQ ID NO: 1903435 - RNA, 19 nt, Homo sapiens
  misc_RNA (1)...(19): siRNA sense strand
gagggcagcgagguaguga

SEQ ID NO: 1903436 - RNA, 19 nt, Homo sapiens
  misc_RNA (1)...(19): siRNA sense strand
gaaaggaacugaacaauac

SEQ ID NO: 1903437 - RNA, 19 nt, Homo sapiens
  misc_RNA (1)...(19): siRNA sense strand
gagagaagcuagaagauga

SEQ ID NO: 1903438 - RNA, 19 nt, Homo sapiens
  misc_RNA (1)...(19): siRNA sense strand
gcuagaagaugaauaugaa

SEQ ID NO: 1903439 - RNA, 19 nt, Homo sapiens
  misc_RNA (1)...(19): siRNA sense strand
gaaggaaagucuauuugga

SEQ ID NO: 1903440 - RNA, 19 nt, Homo sapiens
  misc_RNA (1)...(19): siRNA sense strand
caacauccgucacagcuuu

SEQ ID NO: 1903441 - RNA, 19 nt, Homo sapiens
  misc_RNA (1)...(19): siRNA sense strand
gcucuggccucuuuaaauu

SEQ ID NO: 1903442 - RNA, 19 nt, Homo sapiens
  misc_RNA (1)...(19): siRNA sense strand
guaaagacauaaagaagga

SEQ ID NO: 1903443 - RNA, 19 nt, Homo sapiens
  misc_RNA (1)...(19): siRNA sense strand
gaagauuacuuuagugaag

SEQ ID NO: 1903444 - RNA, 19 nt, Homo sapiens
  misc_RNA (1)...(19): siRNA sense strand
gcaagaauuuaucaaagga

SEQ ID NO: 1903445 - RNA, 19 nt, Homo sapiens
  misc_RNA (1)...(19): siRNA sense strand
gaaccuauccaaccagaaa

SEQ ID NO: 1903446 - RNA, 19 nt, Homo sapiens
  misc_RNA (1)...(19): siRNA sense strand
gaagcuagaagaugaauau

SEQ ID NO: 1903447 - RNA, 19 nt, Homo sapiens
  misc_RNA (1)...(19): siRNA sense strand
gaaagucuauuuggaagau

SEQ ID NO: 1903448 - RNA, 19 nt, Homo sapiens
  misc_RNA (1)...(19): siRNA sense strand
gaaggaaccuauccaacca

SEQ ID NO: 1903449 - RNA, 19 nt, Homo sapiens
  misc_RNA (1)...(19): siRNA sense strand
caucugcucuggccucuuu

SEQ ID NO: 1903450 - RNA, 19 nt, Homo sapiens
  misc_RNA (1)...(19): siRNA sense strand
cgaagaagagaucauauuu

SEQ ID NO: 1903451 - RNA, 19 nt, Homo sapiens
  misc_RNA (1)...(19): siRNA sense strand
cauaaagccuugcgggaaa

SEQ ID NO: 1903452 - RNA, 19 nt, Homo sapiens
  misc_RNA (1)...(19): siRNA sense strand
caggauuucuuaaaggaua

SEQ ID NO: 1903453 - RNA, 19 nt, Homo sapiens
  misc_RNA (1)...(19): siRNA sense strand
ugaaaggaacugaacaaua

SEQ ID NO: 1903454 - RNA, 19 nt, Homo sapiens
  misc_RNA (1)...(19): siRNA sense strand
caaaccaaguguccagaaa

SEQ ID NO: 1903455 - RNA, 19 nt, Homo sapiens
  misc_RNA (1)...(19): siRNA sense strand
gaauaugaaccacgaagaa

SEQ ID NO: 1903456 - RNA, 19 nt, Homo sapiens
  misc_RNA (1)...(19): siRNA sense strand
gaaugaauuuagagccaaa

SEQ ID NO: 1903457 - RNA, 19 nt, Homo sapiens
  misc_RNA (1)...(19): siRNA sense strand
ggacagacuauacaccuuu

SEQ ID NO: 1903458 - RNA, 19 nt, Homo sapiens
  misc_RNA (1)...(19): siRNA sense strand
gggcauugguuuaacuuug

SEQ ID NO: 1903459 - RNA, 19 nt, Homo sapiens
  misc_RNA (1)...(19): siRNA sense strand
aaauggaucuccuucgauu

SEQ ID NO: 1903460 - RNA, 19 nt, Homo sapiens
  misc_RNA (1)...(19): siRNA sense strand
ggacuagaagauuacuuua

SEQ ID NO: 1903461 - RNA, 19 nt, Homo sapiens
  misc_RNA (1)...(19): siRNA sense strand
ggagugagcuaugugaaag

SEQ ID NO: 1903462 - RNA, 19 nt, Homo sapiens
  misc_RNA (1)...(19): siRNA sense strand
gagccaacguauucuaaau

SEQ ID NO: 1903463 - RNA, 19 nt, Homo sapiens
  misc_RNA (1)...(19): siRNA sense strand
gauaaagguuacucuuaca

SEQ ID NO: 1903464 - RNA, 19 nt, Homo sapiens
  misc_RNA (1)...(19): siRNA sense strand
gaagauggcuuugcuuacg

SEQ ID NO: 1903465 - RNA, 19 nt, Homo sapiens
  misc_RNA (1)...(19): siRNA sense strand
gaagaagagaucauauuuc

SEQ ID NO: 1903466 - RNA, 19 nt, Homo sapiens
  misc_RNA (1)...(19): siRNA sense strand
gaacaauaccagaguaagu

SEQ ID NO: 1903467 - RNA, 19 nt, Homo sapiens
  misc_RNA (1)...(19): siRNA sense strand
cuccuucgauuuagauuua

SEQ ID NO: 1903468 - RNA, 19 nt, Homo sapiens
  misc_RNA (1)...(19): siRNA sense strand
ggagggauaagccagauuu

SEQ ID NO: 1903469 - RNA, 19 nt, Homo sapiens
  misc_RNA (1)...(19): siRNA sense strand
ggagauuguugccucauca

SEQ ID NO: 1903470 - RNA, 19 nt, Homo sapiens
  misc_RNA (1)...(19): siRNA sense strand
gaggaaggaaagucuauuu

SEQ ID NO: 1903471 - RNA, 19 nt, Homo sapiens
  misc_RNA (1)...(19): siRNA sense strand
agaguaaguuggagaguga

SEQ ID NO: 1903472 - RNA, 19 nt, Homo sapiens
  misc_RNA (1)...(19): siRNA sense strand
gaauuuagagccaaacugu

SEQ ID NO: 1903473 - RNA, 19 nt, Homo sapiens
  misc_RNA (1)...(19): siRNA sense strand
gauagccaauugcaguuug

SEQ ID NO: 1903474 - RNA, 19 nt, Homo sapiens
  misc_RNA (1)...(19): siRNA sense strand
ccacgaagaagagaucaua

SEQ ID NO: 1903475 - RNA, 19 nt, Homo sapiens
  misc_RNA (1)...(19): siRNA sense strand
aaagauggauccagacaag

SEQ ID NO: 1903476 - RNA, 19 nt, Homo sapiens
  misc_RNA (1)...(19): siRNA sense strand
cuuaaaggauagccaauug

SEQ ID NO: 1903477 - RNA, 19 nt, Homo sapiens
  misc_RNA (1)...(19): siRNA sense strand
gaagggcauugguuuaacu

SEQ ID NO: 1903478 - RNA, 19 nt, Homo sapiens
  misc_RNA (1)...(19): siRNA sense strand
agaaauggaucuccuucga

SEQ ID NO: 1903479 - RNA, 19 nt, Homo sapiens
  misc_RNA (1)...(19): siRNA sense strand
ugaaucauccuaaucaguu

SEQ ID NO: 1903480 - RNA, 19 nt, Homo sapiens
  misc_RNA (1)...(19): siRNA sense strand
ugauaaagguuacucuuac

SEQ ID NO: 1903481 - RNA, 19 nt, Homo sapiens
  misc_RNA (1)...(19): siRNA sense strand
cagauugauuugcuuucua

SEQ ID NO: 1903482 - RNA, 19 nt, Homo sapiens
  misc_RNA (1)...(19): siRNA sense strand
gagagccaacguauucuaa

SEQ ID NO: 1903483 - RNA, 19 nt, Homo sapiens
  misc_RNA (1)...(19): siRNA sense strand
caguauggccuauuucuga

SEQ ID NO: 1903484 - RNA, 19 nt, Homo sapiens
  misc_RNA (1)...(19): siRNA sense strand
cuuagacgcugguucauuc

SEQ ID NO: 1903485 - RNA, 19 nt, Homo sapiens
  misc_RNA (1)...(19): siRNA sense strand
gcaagaggacagacuauac

SEQ ID NO: 1903486 - RNA, 19 nt, Homo sapiens
  misc_RNA (1)...(19): siRNA sense strand
gauccagacaaguuugaua

SEQ ID NO: 1903487 - RNA, 19 nt, Homo sapiens
  misc_RNA (1)...(19): siRNA sense strand
ggaaggaaagucuauuugg

SEQ ID NO: 1903488 - RNA, 19 nt, Homo sapiens
  misc_RNA (1)...(19): siRNA sense strand
gaagaaagcggaggaagcu

SEQ ID NO: 1903489 - RNA, 19 nt, Homo sapiens
  misc_RNA (1)...(19): siRNA sense strand
aaauggugguaaagacaua

SEQ ID NO: 1903490 - RNA, 19 nt, Homo sapiens
  misc_RNA (1)...(19): siRNA sense strand
gaaucauccuaaucaguuc

SEQ ID NO: 1903491 - RNA, 19 nt, Homo sapiens
  misc_RNA (1)...(19): siRNA sense strand
gauuguggcuuuucuuuga

SEQ ID NO: 1903492 - RNA, 19 nt, Homo sapiens
  misc_RNA (1)...(19): siRNA sense strand
cauccugaaugaauuuaga

SEQ ID NO: 1903493 - RNA, 19 nt, Homo sapiens
  misc_RNA (1)...(19): siRNA sense strand
gaaagauggauccagacaa

SEQ ID NO: 1903494 - RNA, 19 nt, Homo sapiens
  misc_RNA (1)...(19): siRNA sense strand
gaaauggaucuccuucgau

SEQ ID NO: 1903495 - RNA, 19 nt, Homo sapiens
  misc_RNA (1)...(19): siRNA sense strand
agaaacuccucaacccaaa

SEQ ID NO: 1903496 - RNA, 19 nt, Homo sapiens
  misc_RNA (1)...(19): siRNA sense strand
ccagacaaguuugauaaag

SEQ ID NO: 1903497 - RNA, 19 nt, Homo sapiens
  misc_RNA (1)...(19): siRNA sense strand
ggaaagauggauccagaca

SEQ ID NO: 1903498 - RNA, 19 nt, Homo sapiens
  misc_RNA (1)...(19): siRNA sense strand
gggaaauguugggaagauu

SEQ ID NO: 1903499 - RNA, 19 nt, Homo sapiens
  misc_RNA (1)...(19): siRNA sense strand
ggguucgaguccauuuaua

SEQ ID NO: 1903500 - RNA, 19 nt, Homo sapiens
  misc_RNA (1)...(19): siRNA sense strand
gaaccacgaagaagagauc

SEQ ID NO: 1903501 - RNA, 19 nt, Homo sapiens
  misc_RNA (1)...(19): siRNA sense strand
gaagauuauucuguccaau

SEQ ID NO: 1903502 - RNA, 19 nt, Homo sapiens
  misc_RNA (1)...(19): siRNA sense strand
aaagguuacucuuacaaca

SEQ ID NO: 1903503 - RNA, 19 nt, Homo sapiens
  misc_RNA (1)...(19): siRNA sense strand
gcaugcgucaguuacauaa

SEQ ID NO: 1903504 - RNA, 19 nt, Homo sapiens
  misc_RNA (1)...(19): siRNA sense strand
uggaagauggcuuugcuua

SEQ ID NO: 1903505 - RNA, 19 nt, Homo sapiens
  misc_RNA (1)...(19): siRNA sense strand
uauaagugaugaagagaag

SEQ ID NO: 1903506 - RNA, 19 nt, Homo sapiens
  misc_RNA (1)...(19): siRNA sense strand
gguucgaguccauuuauaa

SEQ ID NO: 1903507 - RNA, 19 nt, Homo sapiens
  misc_RNA (1)...(19): siRNA sense strand
cagacaaguuugauaaagg

SEQ ID NO: 1903508 - RNA, 19 nt, Homo sapiens
  misc_RNA (1)...(19): siRNA sense strand
agacaaguuugauaaaggu

SEQ ID NO: 1903509 - RNA, 19 nt, Homo sapiens
  misc_RNA (1)...(19): siRNA sense strand
gccaacguauucuaaaugg

SEQ ID NO: 1903510 - RNA, 19 nt, Homo sapiens
  misc_RNA (1)...(19): siRNA sense strand
caagaggacagacuauaca

SEQ ID NO: 1903511 - RNA, 19 nt, Homo sapiens
  misc_RNA (1)...(19): siRNA sense strand
aaugcaguauggccuauuu

SEQ ID NO: 1903512 - RNA, 19 nt, Homo sapiens
  misc_RNA (1)...(19): siRNA sense strand
uaagccagauuuuggauuu

SEQ ID NO: 1903513 - RNA, 19 nt, Homo sapiens
  misc_RNA (1)...(19): siRNA sense strand
ugaagauuauucuguccaa

SEQ ID NO: 1903514 - RNA, 19 nt, Homo sapiens
  misc_RNA (1)...(19): siRNA sense strand
gauggauccagacaaguuu

SEQ ID NO: 1903515 - RNA, 19 nt, Homo sapiens
  misc_RNA (1)...(19): siRNA sense strand
gcaggugaccagaggaaug

SEQ ID NO: 1903516 - RNA, 19 nt, Homo sapiens
  misc_RNA (1)...(19): siRNA sense strand
acagagagaagcuagaaga

SEQ ID NO: 1903517 - RNA, 19 nt, Homo sapiens
  misc_RNA (1)...(19): siRNA sense strand
ugugagagccaacguauuc

SEQ ID NO: 1903518 - RNA, 19 nt, Homo sapiens
  misc_RNA (1)...(19): siRNA sense strand
gacuauacaccuuucaguu

SEQ ID NO: 1903519 - RNA, 19 nt, Homo sapiens
  misc_RNA (1)...(19): siRNA sense strand
ggcaagaggacagacuaua

SEQ ID NO: 1903520 - RNA, 19 nt, Homo sapiens
  misc_RNA (1)...(19): siRNA sense strand
gcugugcagucugaugaaa

SEQ ID NO: 1903521 - RNA, 19 nt, Homo sapiens
  misc_RNA (1)...(19): siRNA sense strand
gcugguucauucaacaaga

SEQ ID NO: 1903522 - RNA, 19 nt, Homo sapiens
  misc_RNA (1)...(19): siRNA sense strand
gacagacuauacaccuuuc

SEQ ID NO: 1903523 - RNA, 19 nt, Homo sapiens
  misc_RNA (1)...(19): siRNA sense strand
ggaaagucuauuuggaaga

SEQ ID NO: 1903524 - RNA, 19 nt, Homo sapiens
  misc_RNA (1)...(19): siRNA sense strand
ggaucuccuucgauuuaga

SEQ ID NO: 1903525 - RNA, 19 nt, Homo sapiens
  misc_RNA (1)...(19): siRNA sense strand
ggcuauaagugaugaagag

SEQ ID NO: 1903526 - RNA, 19 nt, Homo sapiens
  misc_RNA (1)...(19): siRNA sense strand
ggcauugguuuaacuuugg

SEQ ID NO: 1903527 - RNA, 19 nt, Homo sapiens
  misc_RNA (1)...(19): siRNA sense strand
ccauuuauaagaucccuuu

SEQ ID NO: 1903528 - RNA, 19 nt, Homo sapiens
  misc_RNA (1)...(19): siRNA sense strand
ucgaguccauuuauaagau

SEQ ID NO: 1903529 - RNA, 19 nt, Homo sapiens
  misc_RNA (1)...(19): siRNA sense strand
auggaucuccuucgauuua

SEQ ID NO: 1903530 - RNA, 19 nt, Homo sapiens
  misc_RNA (1)...(19): siRNA sense strand
cuagaagauuacuuuagug

SEQ ID NO: 1903531 - RNA, 19 nt, Homo sapiens
  misc_RNA (1)...(19): siRNA sense strand
caaguuugauaaagguuac

SEQ ID NO: 1903532 - RNA, 19 nt, Homo sapiens
  misc_RNA (1)...(19): siRNA sense strand
ggaagcaagaauuuaucaa

SEQ ID NO: 1903533 - RNA, 19 nt, Homo sapiens
  misc_RNA (1)...(19): siRNA sense strand
ggauagccaauugcaguuu

SEQ ID NO: 1903534 - RNA, 19 nt, Homo sapiens
  misc_RNA (1)...(19): siRNA sense strand
gcauugguuuaacuuugga

SEQ ID NO: 1903535 - RNA, 19 nt, Homo sapiens
  misc_RNA (1)...(19): siRNA sense strand
gaaaacuuggcuauugaua

SEQ ID NO: 1903536 - RNA, 19 nt, Homo sapiens
  misc_RNA (1)...(19): siRNA sense strand
gccaagagcuccaagauca

SEQ ID NO: 1903537 - RNA, 19 nt, Homo sapiens
  misc_RNA (1)...(19): siRNA sense strand
gagagaagaugcagaucaa

SEQ ID NO: 1903538 - RNA, 19 nt, Homo sapiens
  misc_RNA (1)...(19): siRNA sense strand
gaucauggauuccuucaag

SEQ ID NO: 1903539 - RNA, 19 nt, Homo sapiens
  misc_RNA (1)...(19): siRNA sense strand
cggacaagcuggugaauga

SEQ ID NO: 1903540 - RNA, 19 nt, Homo sapiens
  misc_RNA (1)...(19): siRNA sense strand
gcagugggcugaccucauc

SEQ ID NO: 1903541 - RNA, 19 nt, Homo sapiens
  misc_RNA (1)...(19): siRNA sense strand
ggacaggaguggaccuaug

SEQ ID NO: 1903542 - RNA, 19 nt, Homo sapiens
  misc_RNA (1)...(19): siRNA sense strand
gaaggagacauacuacuga

SEQ ID NO: 1903543 - RNA, 19 nt, Homo sapiens
  misc_RNA (1)...(19): siRNA sense strand
ggacggcccugucucgaau

SEQ ID NO: 1903544 - RNA, 19 nt, Homo sapiens
  misc_RNA (1)...(19): siRNA sense strand
gcacggcucugaccugaag

SEQ ID NO: 1903545 - RNA, 19 nt, Homo sapiens
  misc_RNA (1)...(19): siRNA sense strand
uggaugagcugaagaagga

SEQ ID NO: 1903546 - RNA, 19 nt, Homo sapiens
  misc_RNA (1)...(19): siRNA sense strand
gaugcaagaugccuuucaa

SEQ ID NO: 1903547 - RNA, 19 nt, Homo sapiens
  misc_RNA (1)...(19): siRNA sense strand
caagaugccuuucaaaaug

SEQ ID NO: 1903548 - RNA, 19 nt, Homo sapiens
  misc_RNA (1)...(19): siRNA sense strand
caacgacaaucuauaucug

SEQ ID NO: 1903549 - RNA, 19 nt, Homo sapiens
  misc_RNA (1)...(19): siRNA sense strand
gcaagaagaaacagaagga

SEQ ID NO: 1903550 - RNA, 19 nt, Homo sapiens
  misc_RNA (1)...(19): siRNA sense strand
gagauuccuuucaacucua

SEQ ID NO: 1903551 - RNA, 19 nt, Homo sapiens
  misc_RNA (1)...(19): siRNA sense strand
gcauugaccugggcacaga

SEQ ID NO: 1903552 - RNA, 19 nt, Homo sapiens
  misc_RNA (1)...(19): siRNA sense strand
uggcagagauuccuuucaa

SEQ ID NO: 1903553 - RNA, 19 nt, Homo sapiens
  misc_RNA (1)...(19): siRNA sense strand
gaagaacaagauccugauu

SEQ ID NO: 1903554 - RNA, 19 nt, Homo sapiens
  misc_RNA (1)...(19): siRNA sense strand
gggcugaccucaucaucug

SEQ ID NO: 1903555 - RNA, 19 nt, Homo sapiens
  misc_RNA (1)...(19): siRNA sense strand
gcucugaccugaaggacau

SEQ ID NO: 1903556 - RNA, 19 nt, Homo sapiens
  misc_RNA (1)...(19): siRNA sense strand
agaaggagguggcaaugga

SEQ ID NO: 1903557 - RNA, 19 nt, Homo sapiens
  misc_RNA (1)...(19): siRNA sense strand
acacagagaucgucuuugc

SEQ ID NO: 1903558 - RNA, 19 nt, Homo sapiens
  misc_RNA (1)...(19): siRNA sense strand
gaacaugguaccucagcaa

SEQ ID NO: 1903559 - RNA, 19 nt, Homo sapiens
  misc_RNA (1)...(19): siRNA sense strand
ggagagaagaugcagauca

SEQ ID NO: 1903560 - RNA, 19 nt, Homo sapiens
  misc_RNA (1)...(19): siRNA sense strand
gcucugacgucucuaagca

SEQ ID NO: 1903561 - RNA, 19 nt, Homo sapiens
  misc_RNA (1)...(19): siRNA sense strand
cagcagaagcucaucauug

SEQ ID NO: 1903562 - RNA, 19 nt, Homo sapiens
  misc_RNA (1)...(19): siRNA sense strand
agaacugccuggugaagaa

SEQ ID NO: 1903563 - RNA, 19 nt, Homo sapiens
  misc_RNA (1)...(19): siRNA sense strand
caaaggcgugggcaucaua

SEQ ID NO: 1903564 - RNA, 19 nt, Homo sapiens
  misc_RNA (1)...(19): siRNA sense strand
gcagaucaacgcagaggaa

SEQ ID NO: 1903565 - RNA, 19 nt, Homo sapiens
  misc_RNA (1)...(19): siRNA sense strand
ggagaugcaagaugccuuu

SEQ ID NO: 1903566 - RNA, 19 nt, Homo sapiens
  misc_RNA (1)...(19): siRNA sense strand
gcuguaagguggauaacuc

SEQ ID NO: 1903567 - RNA, 19 nt, Homo sapiens
  misc_RNA (1)...(19): siRNA sense strand
cggaucaucucuucucaug

SEQ ID NO: 1903568 - RNA, 19 nt, Homo sapiens
  misc_RNA (1)...(19): siRNA sense strand
gagaucgucuuugcucgaa

SEQ ID NO: 1903569 - RNA, 19 nt, Homo sapiens
  misc_RNA (1)...(19): siRNA sense strand
ccacacagagaucgucuuu

SEQ ID NO: 1903570 - RNA, 19 nt, Homo sapiens
  misc_RNA (1)...(19): siRNA sense strand
gaacaucuccgugucuaag

SEQ ID NO: 1903571 - RNA, 19 nt, Homo sapiens
  misc_RNA (1)...(19): siRNA sense strand
gcauguacccgcucaaagu

SEQ ID NO: 1903572 - RNA, 19 nt, Homo sapiens
  misc_RNA (1)...(19): siRNA sense strand
gcaggcagccgacaugauc

SEQ ID NO: 1903573 - RNA, 19 nt, Homo sapiens
  misc_RNA (1)...(19): siRNA sense strand
ggcaauggaugaccacaag

SEQ ID NO: 1903574 - RNA, 19 nt, Homo sapiens
  misc_RNA (1)...(19): siRNA sense strand
gcacugugaccauccuuug

SEQ ID NO: 1903575 - RNA, 19 nt, Homo sapiens
  misc_RNA (1)...(19): siRNA sense strand
uggcugccuuucucucuua

SEQ ID NO: 1903576 - RNA, 19 nt, Homo sapiens
  misc_RNA (1)...(19): siRNA sense strand
gacaggaguggaccuauga

SEQ ID NO: 1903577 - RNA, 19 nt, Homo sapiens
  misc_RNA (1)...(19): siRNA sense strand
gaucaacgcagaggaagug

SEQ ID NO: 1903578 - RNA, 19 nt, Homo sapiens
  misc_RNA (1)...(19): siRNA sense strand
gaagaaggagguggcaaug

SEQ ID NO: 1903579 - RNA, 19 nt, Homo sapiens
  misc_RNA (1)...(19): siRNA sense strand
agcagaagcucaucauugu

SEQ ID NO: 1903580 - RNA, 19 nt, Homo sapiens
  misc_RNA (1)...(19): siRNA sense strand
cgcaauaucuguuucuucu

SEQ ID NO: 1903581 - RNA, 19 nt, Homo sapiens
  misc_RNA (1)...(19): siRNA sense strand
ucaacucuaccaacaagua

SEQ ID NO: 1903582 - RNA, 19 nt, Homo sapiens
  misc_RNA (1)...(19): siRNA sense strand
ccaagggccucaccaacca

SEQ ID NO: 1903583 - RNA, 19 nt, Homo sapiens
  misc_RNA (1)...(19): siRNA sense strand
agaacaagauccugauuuu

SEQ ID NO: 1903584 - RNA, 19 nt, Homo sapiens
  misc_RNA (1)...(19): siRNA sense strand
ggaacuggaugagcugaag

SEQ ID NO: 1903585 - RNA, 19 nt, Homo sapiens
  misc_RNA (1)...(19): siRNA sense strand
gaaacucccagacggacaa

SEQ ID NO: 1903586 - RNA, 19 nt, Homo sapiens
  misc_RNA (1)...(19): siRNA sense strand
agaagaaacagaaggagaa

SEQ ID NO: 1903587 - RNA, 19 nt, Homo sapiens
  misc_RNA (1)...(19): siRNA sense strand
acaaguaccagcugucuau

SEQ ID NO: 1903588 - RNA, 19 nt, Homo sapiens
  misc_RNA (1)...(19): siRNA sense strand
ccugcuggaugacaacuuu

SEQ ID NO: 1903589 - RNA, 19 nt, Homo sapiens
  misc_RNA (1)...(19): siRNA sense strand
gaacgacuccccugcauug

SEQ ID NO: 1903590 - RNA, 19 nt, Homo sapiens
  misc_RNA (1)...(19): siRNA sense strand
agucagcucugcucaagug

SEQ ID NO: 1903591 - RNA, 19 nt, Homo sapiens
  misc_RNA (1)...(19): siRNA sense strand
gggaugaccggaccaugaa

SEQ ID NO: 1903592 - RNA, 19 nt, Homo sapiens
  misc_RNA (1)...(19): siRNA sense strand
caucacggcuacugggaau

SEQ ID NO: 1903593 - RNA, 19 nt, Homo sapiens
  misc_RNA (1)...(19): siRNA sense strand
ccaagaucauggauuccuu

SEQ ID NO: 1903594 - RNA, 19 nt, Homo sapiens
  misc_RNA (1)...(19): siRNA sense strand
ggguggagaaggagacaua

SEQ ID NO: 1903595 - RNA, 19 nt, Homo sapiens
  misc_RNA (1)...(19): siRNA sense strand
ccaaggccauugccaaagg

SEQ ID NO: 1903596 - RNA, 19 nt, Homo sapiens
  misc_RNA (1)...(19): siRNA sense strand
ucugccaucuggaaaguuu

SEQ ID NO: 1903597 - RNA, 19 nt, Homo sapiens
  misc_RNA (1)...(19): siRNA sense strand
cggaugagcugaacuuucc

SEQ ID NO: 1903598 - RNA, 19 nt, Homo sapiens
  misc_RNA (1)...(19): siRNA sense strand
ccugaucuuugacaacuug

SEQ ID NO: 1903599 - RNA, 19 nt, Homo sapiens
  misc_RNA (1)...(19): siRNA sense strand
ugaagaaggcugacauugg

SEQ ID NO: 1903600 - RNA, 19 nt, Homo sapiens
  misc_RNA (1)...(19): siRNA sense strand
gcaagaugccuuucaaaau

SEQ ID NO: 1903601 - RNA, 19 nt, Homo sapiens
  misc_RNA (1)...(19): siRNA sense strand
gcagagauuccuuucaacu

SEQ ID NO: 1903602 - RNA, 19 nt, Homo sapiens
  misc_RNA (1)...(19): siRNA sense strand
gcugagagugauaucauga

SEQ ID NO: 1903603 - RNA, 19 nt, Homo sapiens
  misc_RNA (1)...(19): siRNA sense strand
guucaucauugccaacauc

SEQ ID NO: 1903604 - RNA, 19 nt, Homo sapiens
  misc_RNA (1)...(19): siRNA sense strand
agaaacagaaggagaagga

SEQ ID NO: 1903605 - RNA, 19 nt, Homo sapiens
  misc_RNA (1)...(19): siRNA sense strand
gaacgucuccccagcagaa

SEQ ID NO: 1903606 - RNA, 19 nt, Homo sapiens
  misc_RNA (1)...(19): siRNA sense strand
ggagaucccgcucgacaag

SEQ ID NO: 1903607 - RNA, 19 nt, Homo sapiens
  misc_RNA (1)...(19): siRNA sense strand
ggaagaacugccuggugaa

SEQ ID NO: 1903608 - RNA, 19 nt, Homo sapiens
  misc_RNA (1)...(19): siRNA sense strand
gauaacucauccuuaacag

SEQ ID NO: 1903609 - RNA, 19 nt, Homo sapiens
  misc_RNA (1)...(19): siRNA sense strand
gccacgugcuggugaugaa

SEQ ID NO: 1903610 - RNA, 19 nt, Homo sapiens
  misc_RNA (1)...(19): siRNA sense strand
uggagaaggagacauacua

SEQ ID NO: 1903611 - RNA, 19 nt, Homo sapiens
  misc_RNA (1)...(19): siRNA sense strand
aagaacaagauccugauuu

SEQ ID NO: 1903612 - RNA, 19 nt, Homo sapiens
  misc_RNA (1)...(19): siRNA sense strand
cagcagggcaugaagaaca

SEQ ID NO: 1903613 - RNA, 19 nt, Homo sapiens
  misc_RNA (1)...(19): siRNA sense strand
gaccucaucaucugcaaga

SEQ ID NO: 1903614 - RNA, 19 nt, Homo sapiens
  misc_RNA (1)...(19): siRNA sense strand
ucaagaaccacacagagau

SEQ ID NO: 1903615 - RNA, 19 nt, Homo sapiens
  misc_RNA (1)...(19): siRNA sense strand
gaaggagaaggaacuggau

SEQ ID NO: 1903616 - RNA, 19 nt, Homo sapiens
  misc_RNA (1)...(19): siRNA sense strand
gaccggaccaugaaugauc

SEQ ID NO: 1903617 - RNA, 19 nt, Homo sapiens
  misc_RNA (1)...(19): siRNA sense strand
ugaccauccuuugcauuga

SEQ ID NO: 1903618 - RNA, 19 nt, Homo sapiens
  misc_RNA (1)...(19): siRNA sense strand
cauccaacgacaaucuaua

SEQ ID NO: 1903619 - RNA, 19 nt, Homo sapiens
  misc_RNA (1)...(19): siRNA sense strand
gaacuggaugagcugaaga

SEQ ID NO: 1903620 - RNA, 19 nt, Homo sapiens
  misc_RNA (1)...(19): siRNA sense strand
gggagcgugugcugggauu

SEQ ID NO: 1903621 - RNA, 19 nt, Homo sapiens
  misc_RNA (1)...(19): siRNA sense strand
gaagaacugccuggugaag

SEQ ID NO: 1903622 - RNA, 19 nt, Homo sapiens
  misc_RNA (1)...(19): siRNA sense strand
ggagaaggagacauacuac

SEQ ID NO: 1903623 - RNA, 19 nt, Homo sapiens
  misc_RNA (1)...(19): siRNA sense strand
guguagcccuccgcaugua

SEQ ID NO: 1903624 - RNA, 19 nt, Homo sapiens
  misc_RNA (1)...(19): siRNA sense strand
ggcacuggguggcuucuuc

SEQ ID NO: 1903625 - RNA, 19 nt, Homo sapiens
  misc_RNA (1)...(19): siRNA sense strand
gacaagcuggugaaugaga

SEQ ID NO: 1903626 - RNA, 19 nt, Homo sapiens
  misc_RNA (1)...(19): siRNA sense strand
gcgugggcaucauaucaga

SEQ ID NO: 1903627 - RNA, 19 nt, Homo sapiens
  misc_RNA (1)...(19): siRNA sense strand
uggcagcuguggucauugu

SEQ ID NO: 1903628 - RNA, 19 nt, Homo sapiens
  misc_RNA (1)...(19): siRNA sense strand
ugagagugauaucaugaag

SEQ ID NO: 1903629 - RNA, 19 nt, Homo sapiens
  misc_RNA (1)...(19): siRNA sense strand
caagagcuccaagaucaug

SEQ ID NO: 1903630 - RNA, 19 nt, Homo sapiens
  misc_RNA (1)...(19): siRNA sense strand
caacugaaucugccaucug

SEQ ID NO: 1903631 - RNA, 19 nt, Homo sapiens
  misc_RNA (1)...(19): siRNA sense strand
gaaacagaaggagaaggaa

SEQ ID NO: 1903632 - RNA, 19 nt, Homo sapiens
  misc_RNA (1)...(19): siRNA sense strand
gugcugggauucugucaac

SEQ ID NO: 1903633 - RNA, 19 nt, Homo sapiens
  misc_RNA (1)...(19): siRNA sense strand
ggaaggugguggaguucac

SEQ ID NO: 1903634 - RNA, 19 nt, Homo sapiens
  misc_RNA (1)...(19): siRNA sense strand
gugaccauccuuugcauug

SEQ ID NO: 1903635 - RNA, 19 nt, Homo sapiens
  misc_RNA (1)...(19): siRNA sense strand
gaaggagguggcaauggau

SEQ ID NO: 1903636 - RNA, 19 nt, Homo sapiens
  misc_RNA (1)...(19): siRNA sense strand
gaacacagcuguccacucu

SEQ ID NO: 1903637 - RNA, 19 nt, Homo sapiens
  misc_RNA (1)...(19): siRNA sense strand
gauuauggcuuuccaaguu

SEQ ID NO: 1903638 - RNA, 19 nt, Homo sapiens
  misc_RNA (1)...(19): siRNA sense strand
ggaccugaguuuaaacaaa

SEQ ID NO: 1903639 - RNA, 19 nt, Homo sapiens
  misc_RNA (1)...(19): siRNA sense strand
ggacuugggugugaugaaa

SEQ ID NO: 1903640 - RNA, 19 nt, Homo sapiens
  misc_RNA (1)...(19): siRNA sense strand
ccaaggaccugaguuuaaa

SEQ ID NO: 1903641 - RNA, 19 nt, Homo sapiens
  misc_RNA (1)...(19): siRNA sense strand
gauacggcaugauaaggua

SEQ ID NO: 1903642 - RNA, 19 nt, Homo sapiens
  misc_RNA (1)...(19): siRNA sense strand
ucaauuggcguguuauuaa

SEQ ID NO: 1903643 - RNA, 19 nt, Homo sapiens
  misc_RNA (1)...(19): siRNA sense strand
cagaagagcuggucacacu

SEQ ID NO: 1903644 - RNA, 19 nt, Homo sapiens
  misc_RNA (1)...(19): siRNA sense strand
ggugccagcuuaggaauaa

SEQ ID NO: 1903645 - RNA, 19 nt, Homo sapiens
  misc_RNA (1)...(19): siRNA sense strand
caacgaaggcagacuuuga

SEQ ID NO: 1903646 - RNA, 19 nt, Homo sapiens
  misc_RNA (1)...(19): siRNA sense strand
acacagcuguccacucuga

SEQ ID NO: 1903647 - RNA, 19 nt, Homo sapiens
  misc_RNA (1)...(19): siRNA sense strand
gcacggaggagcuggagaa

SEQ ID NO: 1903648 - RNA, 19 nt, Homo sapiens
  misc_RNA (1)...(19): siRNA sense strand
gcguggaggugcugaaguu

SEQ ID NO: 1903649 - RNA, 19 nt, Homo sapiens
  misc_RNA (1)...(19): siRNA sense strand
gaccaugauuccagauguu

SEQ ID NO: 1903650 - RNA, 19 nt, Homo sapiens
  misc_RNA (1)...(19): siRNA sense strand
ggucugugcuaacaaggaa

SEQ ID NO: 1903651 - RNA, 19 nt, Homo sapiens
  misc_RNA (1)...(19): siRNA sense strand
aaacuugcccaucgacuuu

SEQ ID NO: 1903652 - RNA, 19 nt, Homo sapiens
  misc_RNA (1)...(19): siRNA sense strand
caagggucauaucaucgua

SEQ ID NO: 1903653 - RNA, 19 nt, Homo sapiens
  misc_RNA (1)...(19): siRNA sense strand
ugucagcccuggguucuaa

SEQ ID NO: 1903654 - RNA, 19 nt, Homo sapiens
  misc_RNA (1)...(19): siRNA sense strand
cacggaagaugaagccauu

SEQ ID NO: 1903655 - RNA, 19 nt, Homo sapiens
  misc_RNA (1)...(19): siRNA sense strand
caccaagucccauauagaa

SEQ ID NO: 1903656 - RNA, 19 nt, Homo sapiens
  misc_RNA (1)...(19): siRNA sense strand
gaauaaccagcgauggauu

SEQ ID NO: 1903657 - RNA, 19 nt, Homo sapiens
  misc_RNA (1)...(19): siRNA sense strand
cagcaugguuacugcaguu

SEQ ID NO: 1903658 - RNA, 19 nt, Homo sapiens
  misc_RNA (1)...(19): siRNA sense strand
gaaggcagacuuugacaac

SEQ ID NO: 1903659 - RNA, 19 nt, Homo sapiens
  misc_RNA (1)...(19): siRNA sense strand
uuacauugcuguggagaug

SEQ ID NO: 1903660 - RNA, 19 nt, Homo sapiens
  misc_RNA (1)...(19): siRNA sense strand
gaagucagcaugguuacug

SEQ ID NO: 1903661 - RNA, 19 nt, Homo sapiens
  misc_RNA (1)...(19): siRNA sense strand
caacgucaaaggcaucuau

SEQ ID NO: 1903662 - RNA, 19 nt, Homo sapiens
  misc_RNA (1)...(19): siRNA sense strand
caauuggcguguuauuaag

SEQ ID NO: 1903663 - RNA, 19 nt, Homo sapiens
  misc_RNA (1)...(19): siRNA sense strand
gagcuggucacacuucguu

SEQ ID NO: 1903664 - RNA, 19 nt, Homo sapiens
  misc_RNA (1)...(19): siRNA sense strand
caagucccauauagaaauc

SEQ ID NO: 1903665 - RNA, 19 nt, Homo sapiens
  misc_RNA (1)...(19): siRNA sense strand
ccaagucccauauagaaau

SEQ ID NO: 1903666 - RNA, 19 nt, Homo sapiens
  misc_RNA (1)...(19): siRNA sense strand
ggaauaaccagcgauggau

SEQ ID NO: 1903667 - RNA, 19 nt, Homo sapiens
  misc_RNA (1)...(19): siRNA sense strand
ugacaacacagucgccauu

SEQ ID NO: 1903668 - RNA, 19 nt, Homo sapiens
  misc_RNA (1)...(19): siRNA sense strand
gagcaacgaaggcagacuu

SEQ ID NO: 1903669 - RNA, 19 nt, Homo sapiens
  misc_RNA (1)...(19): siRNA sense strand
augaaaugcugcaggguuu

SEQ ID NO: 1903670 - RNA, 19 nt, Homo sapiens
  misc_RNA (1)...(19): siRNA sense strand
uagaaaaugugaagaccua

SEQ ID NO: 1903671 - RNA, 19 nt, Homo sapiens
  misc_RNA (1)...(19): siRNA sense strand
uaugugagccgccugaaug

SEQ ID NO: 1903672 - RNA, 19 nt, Homo sapiens
  misc_RNA (1)...(19): siRNA sense strand
cugaugauacggcaugaua

SEQ ID NO: 1903673 - RNA, 19 nt, Homo sapiens
  misc_RNA (1)...(19): siRNA sense strand
gaaaacaaaaugugugaug

SEQ ID NO: 1903674 - RNA, 19 nt, Homo sapiens
  misc_RNA (1)...(19): siRNA sense strand
gaugauacggcaugauaag

SEQ ID NO: 1903675 - RNA, 19 nt, Homo sapiens
  misc_RNA (1)...(19): siRNA sense strand
ccagaauaccaacgucaaa

SEQ ID NO: 1903676 - RNA, 19 nt, Homo sapiens
  misc_RNA (1)...(19): siRNA sense strand
ggguggcacuugcgugaau

SEQ ID NO: 1903677 - RNA, 19 nt, Homo sapiens
  misc_RNA (1)...(19): siRNA sense strand
ugaccaugauuccagaugu

SEQ ID NO: 1903678 - RNA, 19 nt, Homo sapiens
  misc_RNA (1)...(19): siRNA sense strand
gaaguucucccaggucaag

SEQ ID NO: 1903679 - RNA, 19 nt, Homo sapiens
  misc_RNA (1)...(19): siRNA sense strand
ugaaugccaucuaucaaaa

SEQ ID NO: 1903680 - RNA, 19 nt, Homo sapiens
  misc_RNA (1)...(19): siRNA sense strand
auaacaacaucccaacugu

SEQ ID NO: 1903681 - RNA, 19 nt, Homo sapiens
  misc_RNA (1)...(19): siRNA sense strand
uguccacucugaauucaug

SEQ ID NO: 1903682 - RNA, 19 nt, Homo sapiens
  misc_RNA (1)...(19): siRNA sense strand
ggccgcagcgucauuguug

SEQ ID NO: 1903683 - RNA, 19 nt, Homo sapiens
  misc_RNA (1)...(19): siRNA sense strand
cagugggacucacggaaga

SEQ ID NO: 1903684 - RNA, 19 nt, Homo sapiens
  misc_RNA (1)...(19): siRNA sense strand
ucaccaagucccauauaga

SEQ ID NO: 1903685 - RNA, 19 nt, Homo sapiens
  misc_RNA (1)...(19): siRNA sense strand
uaccaaggaccugaguuua

SEQ ID NO: 1903686 - RNA, 19 nt, Homo sapiens
  misc_RNA (1)...(19): siRNA sense strand
cgugaauguuggaugugua

SEQ ID NO: 1903687 - RNA, 19 nt, Homo sapiens
  misc_RNA (1)...(19): siRNA sense strand
aaagcgggaugccuaugug

SEQ ID NO: 1903688 - RNA, 19 nt, Homo sapiens
  misc_RNA (1)...(19): siRNA sense strand
caaguugugaggguaaauu

SEQ ID NO: 1903689 - RNA, 19 nt, Homo sapiens
  misc_RNA (1)...(19): siRNA sense strand
gaucccaagcccacaauag

SEQ ID NO: 1903690 - RNA, 19 nt, Homo sapiens
  misc_RNA (1)...(19): siRNA sense strand
cugaaugccaucuaucaaa

SEQ ID NO: 1903691 - RNA, 19 nt, Homo sapiens
  misc_RNA (1)...(19): siRNA sense strand
acaacacagucgccauuca

SEQ ID NO: 1903692 - RNA, 19 nt, Homo sapiens
  misc_RNA (1)...(19): siRNA sense strand
ggauucaaaccgaugacaa

SEQ ID NO: 1903693 - RNA, 19 nt, Homo sapiens
  misc_RNA (1)...(19): siRNA sense strand
accaaggaccugaguuuaa

SEQ ID NO: 1903694 - RNA, 19 nt, Homo sapiens
  misc_RNA (1)...(19): siRNA sense strand
aauaaccagcgauggauuu

SEQ ID NO: 1903695 - RNA, 19 nt, Homo sapiens
  misc_RNA (1)...(19): siRNA sense strand
ucaugcugauuauggcuuu

SEQ ID NO: 1903696 - RNA, 19 nt, Homo sapiens
  misc_RNA (1)...(19): siRNA sense strand
aaaacaaucucaccaaguc

SEQ ID NO: 1903697 - RNA, 19 nt, Homo sapiens
  misc_RNA (1)...(19): siRNA sense strand
gcuguccacucugaauuca

SEQ ID NO: 1903698 - RNA, 19 nt, Homo sapiens
  misc_RNA (1)...(19): siRNA sense strand
caucccaacuguggucuuc

SEQ ID NO: 1903699 - RNA, 19 nt, Homo sapiens
  misc_RNA (1)...(19): siRNA sense strand
gauccccggugccagcuua

SEQ ID NO: 1903700 - RNA, 19 nt, Homo sapiens
  misc_RNA (1)...(19): siRNA sense strand
gcaguuaccaaaaggaaaa

SEQ ID NO: 1903701 - RNA, 19 nt, Homo sapiens
  misc_RNA (1)...(19): siRNA sense strand
uauaacaacaucccaacug

SEQ ID NO: 1903702 - RNA, 19 nt, Homo sapiens
  misc_RNA (1)...(19): siRNA sense strand
auaccaaggaccugaguuu

SEQ ID NO: 1903703 - RNA, 19 nt, Homo sapiens
  misc_RNA (1)...(19): siRNA sense strand
uaaacaaacuggggauuca

SEQ ID NO: 1903704 - RNA, 19 nt, Homo sapiens
  misc_RNA (1)...(19): siRNA sense strand
gcgugaauguuggaugugu

SEQ ID NO: 1903705 - RNA, 19 nt, Homo sapiens
  misc_RNA (1)...(19): siRNA sense strand
guaucacgcaguuaccaaa

SEQ ID NO: 1903706 - RNA, 19 nt, Homo sapiens
  misc_RNA (1)...(19): siRNA sense strand
gauucaaaccgaugacaag

SEQ ID NO: 1903707 - RNA, 19 nt, Homo sapiens
  misc_RNA (1)...(19): siRNA sense strand
ccgccugaaugccaucuau

SEQ ID NO: 1903708 - RNA, 19 nt, Homo sapiens
  misc_RNA (1)...(19): siRNA sense strand
gaaaaugugaagaccuauu

SEQ ID NO: 1903709 - RNA, 19 nt, Homo sapiens
  misc_RNA (1)...(19): siRNA sense strand
ccauucacccuaccucuuc

SEQ ID NO: 1903710 - RNA, 19 nt, Homo sapiens
  misc_RNA (1)...(19): siRNA sense strand
gcaacgaaggcagacuuug

SEQ ID NO: 1903711 - RNA, 19 nt, Homo sapiens
  misc_RNA (1)...(19): siRNA sense strand
gcagggacuugggugugau

SEQ ID NO: 1903712 - RNA, 19 nt, Homo sapiens
  misc_RNA (1)...(19): siRNA sense strand
ucaaugaucagcaccaacu

SEQ ID NO: 1903713 - RNA, 19 nt, Homo sapiens
  misc_RNA (1)...(19): siRNA sense strand
gcuggucacacuucguuga

SEQ ID NO: 1903714 - RNA, 19 nt, Homo sapiens
  misc_RNA (1)...(19): siRNA sense strand
ggcagacuuugacaacaca

SEQ ID NO: 1903715 - RNA, 19 nt, Homo sapiens
  misc_RNA (1)...(19): siRNA sense strand
uggaaaagcucuucuuacu

SEQ ID NO: 1903716 - RNA, 19 nt, Homo sapiens
  misc_RNA (1)...(19): siRNA sense strand
guugugaggguaaauucaa

SEQ ID NO: 1903717 - RNA, 19 nt, Homo sapiens
  misc_RNA (1)...(19): siRNA sense strand
cccgauguaucacgcaguu

SEQ ID NO: 1903718 - RNA, 19 nt, Homo sapiens
  misc_RNA (1)...(19): siRNA sense strand
uuggaagucagcaugguua

SEQ ID NO: 1903719 - RNA, 19 nt, Homo sapiens
  misc_RNA (1)...(19): siRNA sense strand
ugaaaauggucugugcuaa

SEQ ID NO: 1903720 - RNA, 19 nt, Homo sapiens
  misc_RNA (1)...(19): siRNA sense strand
gggacucacggaagaugaa

SEQ ID NO: 1903721 - RNA, 19 nt, Homo sapiens
  misc_RNA (1)...(19): siRNA sense strand
aaucauccguggccaugca

SEQ ID NO: 1903722 - RNA, 19 nt, Homo sapiens
  misc_RNA (1)...(19): siRNA sense strand
cagcuguccacucugaauu

SEQ ID NO: 1903723 - RNA, 19 nt, Homo sapiens
  misc_RNA (1)...(19): siRNA sense strand
gcucuucuuacuccaguug

SEQ ID NO: 1903724 - RNA, 19 nt, Homo sapiens
  misc_RNA (1)...(19): siRNA sense strand
ugaugauacggcaugauaa

SEQ ID NO: 1903725 - RNA, 19 nt, Homo sapiens
  misc_RNA (1)...(19): siRNA sense strand
gcccuggguucuaagacau

SEQ ID NO: 1903726 - RNA, 19 nt, Homo sapiens
  misc_RNA (1)...(19): siRNA sense strand
gaauaccaaggaccugagu

SEQ ID NO: 1903727 - RNA, 19 nt, Homo sapiens
  misc_RNA (1)...(19): siRNA sense strand
cgaaggcagacuuugacaa

SEQ ID NO: 1903728 - RNA, 19 nt, Homo sapiens
  misc_RNA (1)...(19): siRNA sense strand
gcagugaagaugggagcaa

SEQ ID NO: 1903729 - RNA, 19 nt, Homo sapiens
  misc_RNA (1)...(19): siRNA sense strand
aaaauggucugugcuaaca

SEQ ID NO: 1903730 - RNA, 19 nt, Homo sapiens
  misc_RNA (1)...(19): siRNA sense strand
ucucaccaagucccauaua

SEQ ID NO: 1903731 - RNA, 19 nt, Homo sapiens
  misc_RNA (1)...(19): siRNA sense strand
gccugaaugccaucuauca

SEQ ID NO: 1903732 - RNA, 19 nt, Homo sapiens
  misc_RNA (1)...(19): siRNA sense strand
uucaauuggcguguuauua

SEQ ID NO: 1903733 - RNA, 19 nt, Homo sapiens
  misc_RNA (1)...(19): siRNA sense strand
ccaaaaggaaaacaaaaug

SEQ ID NO: 1903734 - RNA, 19 nt, Homo sapiens
  misc_RNA (1)...(19): siRNA sense strand
aaucucaccaagucccaua

SEQ ID NO: 1903735 - RNA, 19 nt, Homo sapiens
  misc_RNA (1)...(19): siRNA sense strand
ugcagggacuuggguguga

SEQ ID NO: 1903736 - RNA, 19 nt, Homo sapiens
  misc_RNA (1)...(19): siRNA sense strand
ggacagaccugaagaagaa

SEQ ID NO: 1903737 - RNA, 19 nt, Homo sapiens
  misc_RNA (1)...(19): siRNA sense strand
gaagagauaaugacaaaga

SEQ ID NO: 1903738 - RNA, 19 nt, Homo sapiens
  misc_RNA (1)...(19): siRNA sense strand
gaaaguugcccauuguaaa

SEQ ID NO: 1903739 - RNA, 19 nt, Homo sapiens
  misc_RNA (1)...(19): siRNA sense strand
ggaaagugaagaaauauga

SEQ ID NO: 1903740 - RNA, 19 nt, Homo sapiens
  misc_RNA (1)...(19): siRNA sense strand
gaaggaggcaaaugaaauu

SEQ ID NO: 1903741 - RNA, 19 nt, Homo sapiens
  misc_RNA (1)...(19): siRNA sense strand
ggauccggcuaaagaaaua

SEQ ID NO: 1903742 - RNA, 19 nt, Homo sapiens
  misc_RNA (1)...(19): siRNA sense strand
gcacggcgcuuugguguuc

SEQ ID NO: 1903743 - RNA, 19 nt, Homo sapiens
  misc_RNA (1)...(19): siRNA sense strand
ggaaaguugcccauuguaa

SEQ ID NO: 1903744 - RNA, 19 nt, Homo sapiens
  misc_RNA (1)...(19): siRNA sense strand
caaauacccuaaucuccaa

SEQ ID NO: 1903745 - RNA, 19 nt, Homo sapiens
  misc_RNA (1)...(19): siRNA sense strand
uggaagagauaaugacaaa

SEQ ID NO: 1903746 - RNA, 19 nt, Homo sapiens
  misc_RNA (1)...(19): siRNA sense strand
gagcuuaaguuugagaaga

SEQ ID NO: 1903747 - RNA, 19 nt, Homo sapiens
  misc_RNA (1)...(19): siRNA sense strand
ccacuagccuccaaagaug

SEQ ID NO: 1903748 - RNA, 19 nt, Homo sapiens
  misc_RNA (1)...(19): siRNA sense strand
ucaaguacaucaaagacaa

SEQ ID NO: 1903749 - RNA, 19 nt, Homo sapiens
  misc_RNA (1)...(19): siRNA sense strand
caacagcaguguacaaggu

SEQ ID NO: 1903750 - RNA, 19 nt, Homo sapiens
  misc_RNA (1)...(19): siRNA sense strand
aaagaaauaucgcgguaug

SEQ ID NO: 1903751 - RNA, 19 nt, Homo sapiens
  misc_RNA (1)...(19): siRNA sense strand
ucaaagaggaggaacauga

SEQ ID NO: 1903752 - RNA, 19 nt, Homo sapiens
  misc_RNA (1)...(19): siRNA sense strand
gaugggauccggcuaaaga

SEQ ID NO: 1903753 - RNA, 19 nt, Homo sapiens
  misc_RNA (1)...(19): siRNA sense strand
gagacggccucaccuacaa

SEQ ID NO: 1903754 - RNA, 19 nt, Homo sapiens
  misc_RNA (1)...(19): siRNA sense strand
ccaaagaugccaagaaaca

SEQ ID NO: 1903755 - RNA, 19 nt, Homo sapiens
  misc_RNA (1)...(19): siRNA sense strand
gaagaagaaucgggacuac

SEQ ID NO: 1903756 - RNA, 19 nt, Homo sapiens
  misc_RNA (1)...(19): siRNA sense strand
aaaugaagaugaugagcuu

SEQ ID NO: 1903757 - RNA, 19 nt, Homo sapiens
  misc_RNA (1)...(19): siRNA sense strand
uguacaaggugucagagua

SEQ ID NO: 1903758 - RNA, 19 nt, Homo sapiens
  misc_RNA (1)...(19): siRNA sense strand
cuccaaagaugccaagaaa

SEQ ID NO: 1903759 - RNA, 19 nt, Homo sapiens
  misc_RNA (1)...(19): siRNA sense strand
gccaagaaccucauugaug

SEQ ID NO: 1903760 - RNA, 19 nt, Homo sapiens
  misc_RNA (1)...(19): siRNA sense strand
ggaggcaaaugaaauucug

SEQ ID NO: 1903761 - RNA, 19 nt, Homo sapiens
  misc_RNA (1)...(19): siRNA sense strand
ccaaugaaguucggaaagu

SEQ ID NO: 1903762 - RNA, 19 nt, Homo sapiens
  misc_RNA (1)...(19): siRNA sense strand
aaagacaaauacccuaauc

SEQ ID NO: 1903763 - RNA, 19 nt, Homo sapiens
  misc_RNA (1)...(19): siRNA sense strand
ccacaacuguacaccugaa

SEQ ID NO: 1903764 - RNA, 19 nt, Homo sapiens
  misc_RNA (1)...(19): siRNA sense strand
gagggaagacuugguggua

SEQ ID NO: 1903765 - RNA, 19 nt, Homo sapiens
  misc_RNA (1)...(19): siRNA sense strand
caaagggucaauccacaaa

SEQ ID NO: 1903766 - RNA, 19 nt, Homo sapiens
  misc_RNA (1)...(19): siRNA sense strand
guacaaggugucagaguau

SEQ ID NO: 1903767 - RNA, 19 nt, Homo sapiens
  misc_RNA (1)...(19): siRNA sense strand
cacagcagcucuucaacug

SEQ ID NO: 1903768 - RNA, 19 nt, Homo sapiens
  misc_RNA (1)...(19): siRNA sense strand
ucaaagacaaauacccuaa

SEQ ID NO: 1903769 - RNA, 19 nt, Homo sapiens
  misc_RNA (1)...(19): siRNA sense strand
caaugaaguucggaaagug

SEQ ID NO: 1903770 - RNA, 19 nt, Homo sapiens
  misc_RNA (1)...(19): siRNA sense strand
guacaucaaagacaaauac

SEQ ID NO: 1903771 - RNA, 19 nt, Homo sapiens
  misc_RNA (1)...(19): siRNA sense strand
ugacaaagagggaagacuu

SEQ ID NO: 1903772 - RNA, 19 nt, Homo sapiens
  misc_RNA (1)...(19): siRNA sense strand
caacuguacaccugaauuc

SEQ ID NO: 1903773 - RNA, 19 nt, Homo sapiens
  misc_RNA (1)...(19): siRNA sense strand
uucggaaagugaagaaaua

SEQ ID NO: 1903774 - RNA, 19 nt, Homo sapiens
  misc_RNA (1)...(19): siRNA sense strand
gaccugacuucugcucuga

SEQ ID NO: 1903775 - RNA, 19 nt, Homo sapiens
  misc_RNA (1)...(19): siRNA sense strand
uccauagccuccauucgua

SEQ ID NO: 1903776 - RNA, 19 nt, Homo sapiens
  misc_RNA (1)...(19): siRNA sense strand
aagggucaauccacaaauu

SEQ ID NO: 1903777 - RNA, 19 nt, Homo sapiens
  misc_RNA (1)...(19): siRNA sense strand
aagggaaaguugcccauug

SEQ ID NO: 1903778 - RNA, 19 nt, Homo sapiens
  misc_RNA (1)...(19): siRNA sense strand
gcagccagaacagauauuu

SEQ ID NO: 1903779 - RNA, 19 nt, Homo sapiens
  misc_RNA (1)...(19): siRNA sense strand
gaaucgggacuacccacua

SEQ ID NO: 1903780 - RNA, 19 nt, Homo sapiens
  misc_RNA (1)...(19): siRNA sense strand
ugaaggaggcaaaugaaau

SEQ ID NO: 1903781 - RNA, 19 nt, Homo sapiens
  misc_RNA (1)...(19): siRNA sense strand
gaaauaugaacagggauuc

SEQ ID NO: 1903782 - RNA, 19 nt, Homo sapiens
  misc_RNA (1)...(19): siRNA sense strand
gaagggaaaguugcccauu

SEQ ID NO: 1903783 - RNA, 19 nt, Homo sapiens
  misc_RNA (1)...(19): siRNA sense strand
gacaaagagggaagacuug

SEQ ID NO: 1903784 - RNA, 19 nt, Homo sapiens
  misc_RNA (1)...(19): siRNA sense strand
gagcuuguggccaucauug

SEQ ID NO: 1903785 - RNA, 19 nt, Homo sapiens
  misc_RNA (1)...(19): siRNA sense strand
ggagacggccucaccuaca

SEQ ID NO: 1903786 - RNA, 19 nt, Homo sapiens
  misc_RNA (1)...(19): siRNA sense strand
gcacagcagcucuucaacu

SEQ ID NO: 1903787 - RNA, 19 nt, Homo sapiens
  misc_RNA (1)...(19): siRNA sense strand
ccugauugcuggcauccaa

SEQ ID NO: 1903788 - RNA, 19 nt, Homo sapiens
  misc_RNA (1)...(19): siRNA sense strand
gcagcaagaagggaaaguu

SEQ ID NO: 1903789 - RNA, 19 nt, Homo sapiens
  misc_RNA (1)...(19): siRNA sense strand
cagcacagcagcucuucaa

SEQ ID NO: 1903790 - RNA, 19 nt, Homo sapiens
  misc_RNA (1)...(19): siRNA sense strand
aaaguugcccauuguaaau

SEQ ID NO: 1903791 - RNA, 19 nt, Homo sapiens
  misc_RNA (1)...(19): siRNA sense strand
gggaaaguugcccauugua

SEQ ID NO: 1903792 - RNA, 19 nt, Homo sapiens
  misc_RNA (1)...(19): siRNA sense strand
cagcaagaagggaaaguug

SEQ ID NO: 1903793 - RNA, 19 nt, Homo sapiens
  misc_RNA (1)...(19): siRNA sense strand
caaaaugugggucauauug

SEQ ID NO: 1903794 - RNA, 19 nt, Homo sapiens
  misc_RNA (1)...(19): siRNA sense strand
caaagacaaauacccuaau

SEQ ID NO: 1903795 - RNA, 19 nt, Homo sapiens
  misc_RNA (1)...(19): siRNA sense strand
caaguacaucaaagacaaa

SEQ ID NO: 1903796 - RNA, 19 nt, Homo sapiens
  misc_RNA (1)...(19): siRNA sense strand
ugaagaagaaucgggacua

SEQ ID NO: 1903797 - RNA, 19 nt, Homo sapiens
  misc_RNA (1)...(19): siRNA sense strand
gaaguucggaaagugaaga

SEQ ID NO: 1903798 - RNA, 19 nt, Homo sapiens
  misc_RNA (1)...(19): siRNA sense strand
acaugacuguuucuuggaa

SEQ ID NO: 1903799 - RNA, 19 nt, Homo sapiens
  misc_RNA (1)...(19): siRNA sense strand
agaaauaugaacagggauu

SEQ ID NO: 1903800 - RNA, 19 nt, Homo sapiens
  misc_RNA (1)...(19): siRNA sense strand
agggaaaguugcccauugu

SEQ ID NO: 1903801 - RNA, 19 nt, Homo sapiens
  misc_RNA (1)...(19): siRNA sense strand
ucagcagccagaacagaua

SEQ ID NO: 1903802 - RNA, 19 nt, Homo sapiens
  misc_RNA (1)...(19): siRNA sense strand
cagugaagcugacaaaauc

SEQ ID NO: 1903803 - RNA, 19 nt, Homo sapiens
  misc_RNA (1)...(19): siRNA sense strand
cauuggcacucaugaggau

SEQ ID NO: 1903804 - RNA, 19 nt, Homo sapiens
  misc_RNA (1)...(19): siRNA sense strand
gcgcuuacaggcgguauug

SEQ ID NO: 1903805 - RNA, 19 nt, Homo sapiens
  misc_RNA (1)...(19): siRNA sense strand
gggauccggcuaaagaaau

SEQ ID NO: 1903806 - RNA, 19 nt, Homo sapiens
  misc_RNA (1)...(19): siRNA sense strand
gaucaaguacaucaaagac

SEQ ID NO: 1903807 - RNA, 19 nt, Homo sapiens
  misc_RNA (1)...(19): siRNA sense strand
ugaagaugaugagcuugug

SEQ ID NO: 1903808 - RNA, 19 nt, Homo sapiens
  misc_RNA (1)...(19): siRNA sense strand
aaucgggacuacccacuag

SEQ ID NO: 1903809 - RNA, 19 nt, Homo sapiens
  misc_RNA (1)...(19): siRNA sense strand
guucggaaagugaagaaau

SEQ ID NO: 1903810 - RNA, 19 nt, Homo sapiens
  misc_RNA (1)...(19): siRNA sense strand
gcuuaaguuugagaagaga

SEQ ID NO: 1903811 - RNA, 19 nt, Homo sapiens
  misc_RNA (1)...(19): siRNA sense strand
ccgaugggauccggcuaaa

SEQ ID NO: 1903812 - RNA, 19 nt, Homo sapiens
  misc_RNA (1)...(19): siRNA sense strand
agacaaauacccuaaucuc

SEQ ID NO: 1903813 - RNA, 19 nt, Homo sapiens
  misc_RNA (1)...(19): siRNA sense strand
ccaagcaacagcaguguac

SEQ ID NO: 1903814 - RNA, 19 nt, Homo sapiens
  misc_RNA (1)...(19): siRNA sense strand
cuggggagcuuaaguuuga

SEQ ID NO: 1903815 - RNA, 19 nt, Homo sapiens
  misc_RNA (1)...(19): siRNA sense strand
gggucaauccacaaauuug

SEQ ID NO: 1903816 - RNA, 19 nt, Homo sapiens
  misc_RNA (1)...(19): siRNA sense strand
gaguaugcacggcgcuuug

SEQ ID NO: 1903817 - RNA, 19 nt, Homo sapiens
  misc_RNA (1)...(19): siRNA sense strand
ugaauuccaggccaaugaa

SEQ ID NO: 1903818 - RNA, 19 nt, Homo sapiens
  misc_RNA (1)...(19): siRNA sense strand
gaucgcgugcgggauguuu

SEQ ID NO: 1903819 - RNA, 19 nt, Homo sapiens
  misc_RNA (1)...(19): siRNA sense strand
ugacuucugcucugaccaa

SEQ ID NO: 1903820 - RNA, 19 nt, Homo sapiens
  misc_RNA (1)...(19): siRNA sense strand
guccauagccuccauucgu

SEQ ID NO: 1903821 - RNA, 19 nt, Homo sapiens
  misc_RNA (1)...(19): siRNA sense strand
ccagaacagauauuucagu

SEQ ID NO: 1903822 - RNA, 19 nt, Homo sapiens
  misc_RNA (1)...(19): siRNA sense strand
cgguauggguucucucgau

SEQ ID NO: 1903823 - RNA, 19 nt, Homo sapiens
  misc_RNA (1)...(19): siRNA sense strand
ccuaaucuccaagucauug

SEQ ID NO: 1903824 - RNA, 19 nt, Homo sapiens
  misc_RNA (1)...(19): siRNA sense strand
cacugaaggaggcaaauga

SEQ ID NO: 1903825 - RNA, 19 nt, Homo sapiens
  misc_RNA (1)...(19): siRNA sense strand
gaaguggcuccaucugcau

SEQ ID NO: 1903826 - RNA, 19 nt, Homo sapiens
  misc_RNA (1)...(19): siRNA sense strand
ccucaccuacaaugacuuu

SEQ ID NO: 1903827 - RNA, 19 nt, Homo sapiens
  misc_RNA (1)...(19): siRNA sense strand
ucacagcacagcagcucuu

SEQ ID NO: 1903828 - RNA, 19 nt, Homo sapiens
  misc_RNA (1)...(19): siRNA sense strand
ccuccagggacauugauuu

SEQ ID NO: 1903829 - RNA, 19 nt, Homo sapiens
  misc_RNA (1)...(19): siRNA sense strand
caaguccgagccaugaugu

SEQ ID NO: 1903830 - RNA, 19 nt, Homo sapiens
  misc_RNA (1)...(19): siRNA sense strand
ccaaguccgagccaugaug

SEQ ID NO: 1903831 - RNA, 19 nt, Homo sapiens
  misc_RNA (1)...(19): siRNA sense strand
uaaagaaauaucgcgguau

SEQ ID NO: 1903832 - RNA, 19 nt, Homo sapiens
  misc_RNA (1)...(19): siRNA sense strand
ggccucaccuacaaugacu

SEQ ID NO: 1903833 - RNA, 19 nt, Homo sapiens
  misc_RNA (1)...(19): siRNA sense strand
ugguguggauguagugguu

SEQ ID NO: 1903834 - RNA, 19 nt, Homo sapiens
  misc_RNA (1)...(19): siRNA sense strand
cccacuagccuccaaagau

SEQ ID NO: 1903835 - RNA, 19 nt, Homo sapiens
  misc_RNA (1)...(19): siRNA sense strand
caaagaggaggaacaugac

SEQ ID NO: 1903836 - RNA, 19 nt, Homo sapiens
  misc_RNA (1)...(19): siRNA sense strand
ggaaggagcucgccaggaa

SEQ ID NO: 1903837 - RNA, 19 nt, Homo sapiens
  misc_RNA (1)...(19): siRNA sense strand
gggcugaggucuacauuga

SEQ ID NO: 1903838 - RNA, 19 nt, Homo sapiens
  misc_RNA (1)...(19): siRNA sense strand
gaaauccgccuccaacauu

SEQ ID NO: 1903839 - RNA, 19 nt, Homo sapiens
  misc_RNA (1)...(19): siRNA sense strand
ugucaaagcucacggaaga

SEQ ID NO: 1903840 - RNA, 19 nt, Homo sapiens
  misc_RNA (1)...(19): siRNA sense strand
gaaagaugcuucgagacaa

SEQ ID NO: 1903841 - RNA, 19 nt, Homo sapiens
  misc_RNA (1)...(19): siRNA sense strand
gcaaggugcugcuggacuu

SEQ ID NO: 1903842 - RNA, 19 nt, Homo sapiens
  misc_RNA (1)...(19): siRNA sense strand
gagcuaugccuguaccuaa

SEQ ID NO: 1903843 - RNA, 19 nt, Homo sapiens
  misc_RNA (1)...(19): siRNA sense strand
ugagagaccugcccugauc

SEQ ID NO: 1903844 - RNA, 19 nt, Homo sapiens
  misc_RNA (1)...(19): siRNA sense strand
ucaggcacauguucuauug

SEQ ID NO: 1903845 - RNA, 19 nt, Homo sapiens
  misc_RNA (1)...(19): siRNA sense strand
agacaccgcuuugccgaua

SEQ ID NO: 1903846 - RNA, 19 nt, Homo sapiens
  misc_RNA (1)...(19): siRNA sense strand
acacagagcaugaaauuag

SEQ ID NO: 1903847 - RNA, 19 nt, Homo sapiens
  misc_RNA (1)...(19): siRNA sense strand
caacaaguuugacaagaac

SEQ ID NO: 1903848 - RNA, 19 nt, Homo sapiens
  misc_RNA (1)...(19): siRNA sense strand
ggccagugcucccuacuuc

SEQ ID NO: 1903849 - RNA, 19 nt, Homo sapiens
  misc_RNA (1)...(19): siRNA sense strand
gcucacagugccaagguua

SEQ ID NO: 1903850 - RNA, 19 nt, Homo sapiens
  misc_RNA (1)...(19): siRNA sense strand
uuacacagagcaugaaauu

SEQ ID NO: 1903851 - RNA, 19 nt, Homo sapiens
  misc_RNA (1)...(19): siRNA sense strand
ucuccaagcucaugucugu

SEQ ID NO: 1903852 - RNA, 19 nt, Homo sapiens
  misc_RNA (1)...(19): siRNA sense strand
gggcguauguggagcagau

SEQ ID NO: 1903853 - RNA, 19 nt, Homo sapiens
  misc_RNA (1)...(19): siRNA sense strand
ccucaucacucagcucuug

SEQ ID NO: 1903854 - RNA, 19 nt, Homo sapiens
  misc_RNA (1)...(19): siRNA sense strand
gcagcagucucuggaacuu

SEQ ID NO: 1903855 - RNA, 19 nt, Homo sapiens
  misc_RNA (1)...(19): siRNA sense strand
gaucggggauuuccugauu

SEQ ID NO: 1903856 - RNA, 19 nt, Homo sapiens
  misc_RNA (1)...(19): siRNA sense strand
ugacgucaaugaacugcuu

SEQ ID NO: 1903857 - RNA, 19 nt, Homo sapiens
  misc_RNA (1)...(19): siRNA sense strand
ugacuucaaugguuucuac

SEQ ID NO: 1903858 - RNA, 19 nt, Homo sapiens
  misc_RNA (1)...(19): siRNA sense strand
ugguguaccuguugucaaa

SEQ ID NO: 1903859 - RNA, 19 nt, Homo sapiens
  misc_RNA (1)...(19): siRNA sense strand
ggaagccgguggaggacau

SEQ ID NO: 1903860 - RNA, 19 nt, Homo sapiens
  misc_RNA (1)...(19): siRNA sense strand
ucgagaaggcguuuaacua

SEQ ID NO: 1903861 - RNA, 19 nt, Homo sapiens
  misc_RNA (1)...(19): siRNA sense strand
gaaaauggcggacaagauc

SEQ ID NO: 1903862 - RNA, 19 nt, Homo sapiens
  misc_RNA (1)...(19): siRNA sense strand
gcugugaccagguucauug

SEQ ID NO: 1903863 - RNA, 19 nt, Homo sapiens
  misc_RNA (1)...(19): siRNA sense strand
cacagagcaugaaauuaga

SEQ ID NO: 1903864 - RNA, 19 nt, Homo sapiens
  misc_RNA (1)...(19): siRNA sense strand
augcagaaauuuacacaga

SEQ ID NO: 1903865 - RNA, 19 nt, Homo sapiens
  misc_RNA (1)...(19): siRNA sense strand
caacuucguccagaauauu

SEQ ID NO: 1903866 - RNA, 19 nt, Homo sapiens
  misc_RNA (1)...(19): siRNA sense strand
ucaacuucguccagaauau

SEQ ID NO: 1903867 - RNA, 19 nt, Homo sapiens
  misc_RNA (1)...(19): siRNA sense strand
ggaccagggcgacuucuuc

SEQ ID NO: 1903868 - RNA, 19 nt, Homo sapiens
  misc_RNA (1)...(19): siRNA sense strand
ggccuucucuuucgacuac

SEQ ID NO: 1903869 - RNA, 19 nt, Homo sapiens
  misc_RNA (1)...(19): siRNA sense strand
cgagaaggcguuuaacuac

SEQ ID NO: 1903870 - RNA, 19 nt, Homo sapiens
  misc_RNA (1)...(19): siRNA sense strand
cugcaguacuuacaacaga

SEQ ID NO: 1903871 - RNA, 19 nt, Homo sapiens
  misc_RNA (1)...(19): siRNA sense strand
ugaaggagcaccugauucu

SEQ ID NO: 1903872 - RNA, 19 nt, Homo sapiens
  misc_RNA (1)...(19): siRNA sense strand
agaaagaugcuucgagaca

SEQ ID NO: 1903873 - RNA, 19 nt, Homo sapiens
  misc_RNA (1)...(19): siRNA sense strand
gguuaaaauugcagaguuu

SEQ ID NO: 1903874 - RNA, 19 nt, Homo sapiens
  misc_RNA (1)...(19): siRNA sense strand
caaggacgaccucaagauc

SEQ ID NO: 1903875 - RNA, 19 nt, Homo sapiens
  misc_RNA (1)...(19): siRNA sense strand
agcagucucuggaacuuaa

SEQ ID NO: 1903876 - RNA, 19 nt, Homo sapiens
  misc_RNA (1)...(19): siRNA sense strand
aaagaugcuucgagacaag

SEQ ID NO: 1903877 - RNA, 19 nt, Homo sapiens
  misc_RNA (1)...(19): siRNA sense strand
gcaucuauagcaccaguga

SEQ ID NO: 1903878 - RNA, 19 nt, Homo sapiens
  misc_RNA (1)...(19): siRNA sense strand
gcagaucgagaaggcguuu

SEQ ID NO: 1903879 - RNA, 19 nt, Homo sapiens
  misc_RNA (1)...(19): siRNA sense strand
caacagaaugcaaaagaaa

SEQ ID NO: 1903880 - RNA, 19 nt, Homo sapiens
  misc_RNA (1)...(19): siRNA sense strand
gauucaccaugacgucaau

SEQ ID NO: 1903881 - RNA, 19 nt, Homo sapiens
  misc_RNA (1)...(19): siRNA sense strand
ucacagugccaagguuaaa

SEQ ID NO: 1903882 - RNA, 19 nt, Homo sapiens
  misc_RNA (1)...(19): siRNA sense strand
aaauuuacacagagcauga

SEQ ID NO: 1903883 - RNA, 19 nt, Homo sapiens
  misc_RNA (1)...(19): siRNA sense strand
aaauccgccuccaacauug

SEQ ID NO: 1903884 - RNA, 19 nt, Homo sapiens
  misc_RNA (1)...(19): siRNA sense strand
ucgacuacaucgucaagug

SEQ ID NO: 1903885 - RNA, 19 nt, Homo sapiens
  misc_RNA (1)...(19): siRNA sense strand
ggagcuaugccuguaccua

SEQ ID NO: 1903886 - RNA, 19 nt, Homo sapiens
  misc_RNA (1)...(19): siRNA sense strand
cgacccauacagugaguuu

SEQ ID NO: 1903887 - RNA, 19 nt, Homo sapiens
  misc_RNA (1)...(19): siRNA sense strand
aggauuacaacgacaagua

SEQ ID NO: 1903888 - RNA, 19 nt, Homo sapiens
  misc_RNA (1)...(19): siRNA sense strand
ccuccaagaucuccaugca

SEQ ID NO: 1903889 - RNA, 19 nt, Homo sapiens
  misc_RNA (1)...(19): siRNA sense strand
gagcgccugucugcagaga

SEQ ID NO: 1903890 - RNA, 19 nt, Homo sapiens
  misc_RNA (1)...(19): siRNA sense strand
cggcugagcaucuauagca

SEQ ID NO: 1903891 - RNA, 19 nt, Homo sapiens
  misc_RNA (1)...(19): siRNA sense strand
gcucaacuucguccagaau

SEQ ID NO: 1903892 - RNA, 19 nt, Homo sapiens
  misc_RNA (1)...(19): siRNA sense strand
ggcagcgaaugcucaacuu

SEQ ID NO: 1903893 - RNA, 19 nt, Homo sapiens
  misc_RNA (1)...(19): siRNA sense strand
uggaggaccugcuguacgu

SEQ ID NO: 1903894 - RNA, 19 nt, Homo sapiens
  misc_RNA (1)...(19): siRNA sense strand
ugcaggagcuugaggaacu

SEQ ID NO: 1903895 - RNA, 19 nt, Homo sapiens
  misc_RNA (1)...(19): siRNA sense strand
gcaguacuuacaacagaau

SEQ ID NO: 1903896 - RNA, 19 nt, Homo sapiens
  misc_RNA (1)...(19): siRNA sense strand
aauuucggauucaccauga

SEQ ID NO: 1903897 - RNA, 19 nt, Homo sapiens
  misc_RNA (1)...(19): siRNA sense strand
cagcacagacaccgcuuug

SEQ ID NO: 1903898 - RNA, 19 nt, Homo sapiens
  misc_RNA (1)...(19): siRNA sense strand
aaagcucacggaagacaaa

SEQ ID NO: 1903899 - RNA, 19 nt, Homo sapiens
  misc_RNA (1)...(19): siRNA sense strand
ugaaauccgccuccaacau

SEQ ID NO: 1903900 - RNA, 19 nt, Homo sapiens
  misc_RNA (1)...(19): siRNA sense strand
gcucaucaucaacaggaaa

SEQ ID NO: 1903901 - RNA, 19 nt, Homo sapiens
  misc_RNA (1)...(19): siRNA sense strand
ucaaggacgaccucaagau

SEQ ID NO: 1903902 - RNA, 19 nt, Homo sapiens
  misc_RNA (1)...(19): siRNA sense strand
ggauuacaacgacaaguac

SEQ ID NO: 1903903 - RNA, 19 nt, Homo sapiens
  misc_RNA (1)...(19): siRNA sense strand
gaagcucugguucuacauc

SEQ ID NO: 1903904 - RNA, 19 nt, Homo sapiens
  misc_RNA (1)...(19): siRNA sense strand
gcaggagcuugaggaacug

SEQ ID NO: 1903905 - RNA, 19 nt, Homo sapiens
  misc_RNA (1)...(19): siRNA sense strand
gcuaccagaugcucuucag

SEQ ID NO: 1903906 - RNA, 19 nt, Homo sapiens
  misc_RNA (1)...(19): siRNA sense strand
ccuggcacauccuggagaa

SEQ ID NO: 1903907 - RNA, 19 nt, Homo sapiens
  misc_RNA (1)...(19): siRNA sense strand
cagcagucucuggaacuua

SEQ ID NO: 1903908 - RNA, 19 nt, Homo sapiens
  misc_RNA (1)...(19): siRNA sense strand
gauguucgaagugauggaa

SEQ ID NO: 1903909 - RNA, 19 nt, Homo sapiens
  misc_RNA (1)...(19): siRNA sense strand
gcagcgaaugcucaacuuc

SEQ ID NO: 1903910 - RNA, 19 nt, Homo sapiens
  misc_RNA (1)...(19): siRNA sense strand
caagcgcuacuuccucaug

SEQ ID NO: 1903911 - RNA, 19 nt, Homo sapiens
  misc_RNA (1)...(19): siRNA sense strand
ucagagaguguggccauga

SEQ ID NO: 1903912 - RNA, 19 nt, Homo sapiens
  misc_RNA (1)...(19): siRNA sense strand
ggauucaccaugacgucaa

SEQ ID NO: 1903913 - RNA, 19 nt, Homo sapiens
  misc_RNA (1)...(19): siRNA sense strand
gcucuucaggcacauguuc

SEQ ID NO: 1903914 - RNA, 19 nt, Homo sapiens
  misc_RNA (1)...(19): siRNA sense strand
cccuuucgcucaucaucaa

SEQ ID NO: 1903915 - RNA, 19 nt, Homo sapiens
  misc_RNA (1)...(19): siRNA sense strand
ugagcacggccaacacuga

SEQ ID NO: 1903916 - RNA, 19 nt, Homo sapiens
  misc_RNA (1)...(19): siRNA sense strand
cuggagaaguggaucuaca

SEQ ID NO: 1903917 - RNA, 19 nt, Homo sapiens
  misc_RNA (1)...(19): siRNA sense strand
gcaugcagaaauuuacaca

SEQ ID NO: 1903918 - RNA, 19 nt, Homo sapiens
  misc_RNA (1)...(19): siRNA sense strand
caacaggaaagcccucacu

SEQ ID NO: 1903919 - RNA, 19 nt, Homo sapiens
  misc_RNA (1)...(19): siRNA sense strand
agaucgagaaggcguuuaa

SEQ ID NO: 1903920 - RNA, 19 nt, Homo sapiens
  misc_RNA (1)...(19): siRNA sense strand
caucauccacgacccauac

SEQ ID NO: 1903921 - RNA, 19 nt, Homo sapiens
  misc_RNA (1)...(19): siRNA sense strand
gcaucauccacgacccaua

SEQ ID NO: 1903922 - RNA, 19 nt, Homo sapiens
  misc_RNA (1)...(19): siRNA sense strand
gggagcuggugcacaggau

SEQ ID NO: 1903923 - RNA, 19 nt, Homo sapiens
  misc_RNA (1)...(19): siRNA sense strand
aggccaccaucaacaaguu

SEQ ID NO: 1903924 - RNA, 19 nt, Homo sapiens
  misc_RNA (1)...(19): siRNA sense strand
caugauguucgaagugaug

SEQ ID NO: 1903925 - RNA, 19 nt, Homo sapiens
  misc_RNA (1)...(19): siRNA sense strand
aggcacauguucuauugca

SEQ ID NO: 1903926 - RNA, 19 nt, Homo sapiens
  misc_RNA (1)...(19): siRNA sense strand
ccagugcucccuacuucga

SEQ ID NO: 1903927 - RNA, 19 nt, Homo sapiens
  misc_RNA (1)...(19): siRNA sense strand
gaaggagcaccugauucug

SEQ ID NO: 1903928 - RNA, 19 nt, Homo sapiens
  misc_RNA (1)...(19): siRNA sense strand
gcaguaccaccagcaucaa

SEQ ID NO: 1903929 - RNA, 19 nt, Homo sapiens
  misc_RNA (1)...(19): siRNA sense strand
aggacgaccucaagaucga

SEQ ID NO: 1903930 - RNA, 19 nt, Homo sapiens
  misc_RNA (1)...(19): siRNA sense strand
gcacaggaaaauaucuaaa

SEQ ID NO: 1903931 - RNA, 19 nt, Homo sapiens
  misc_RNA (1)...(19): siRNA sense strand
ucaccaugacgucaaugaa

SEQ ID NO: 1903932 - RNA, 19 nt, Homo sapiens
  misc_RNA (1)...(19): siRNA sense strand
gaacagccauugaagaauc

SEQ ID NO: 1903933 - RNA, 19 nt, Homo sapiens
  misc_RNA (1)...(19): siRNA sense strand
aaacugggauggauaauug

SEQ ID NO: 1903934 - RNA, 19 nt, Homo sapiens
  misc_RNA (1)...(19): siRNA sense strand
gaagauaaggcaauaguga

SEQ ID NO: 1903935 - RNA, 19 nt, Homo sapiens
  misc_RNA (1)...(19): siRNA sense strand
ugaaaccacugacuguaua

SEQ ID NO: 1903936 - RNA, 19 nt, Homo sapiens
  misc_RNA (1)...(19): siRNA sense strand
acaaauaccugacugugaa

SEQ ID NO: 1903937 - RNA, 19 nt, Homo sapiens
  misc_RNA (1)...(19): siRNA sense strand
ccuccagucuuuaacauua

SEQ ID NO: 1903938 - RNA, 19 nt, Homo sapiens
  misc_RNA (1)...(19): siRNA sense strand
aaacaugaccuuucaaguu

SEQ ID NO: 1903939 - RNA, 19 nt, Homo sapiens
  misc_RNA (1)...(19): siRNA sense strand
gcgaaagucuucuugagau

SEQ ID NO: 1903940 - RNA, 19 nt, Homo sapiens
  misc_RNA (1)...(19): siRNA sense strand
cacucaagcugaauguuua

SEQ ID NO: 1903941 - RNA, 19 nt, Homo sapiens
  misc_RNA (1)...(19): siRNA sense strand
ugagaugcaucaauuaugu

SEQ ID NO: 1903942 - RNA, 19 nt, Homo sapiens
  misc_RNA (1)...(19): siRNA sense strand
aauacaagcuuuccuacuu

SEQ ID NO: 1903943 - RNA, 19 nt, Homo sapiens
  misc_RNA (1)...(19): siRNA sense strand
ugaacuaccuccaccagaa

SEQ ID NO: 1903944 - RNA, 19 nt, Homo sapiens
  misc_RNA (1)...(19): siRNA sense strand
caccagagacuacuuauug

SEQ ID NO: 1903945 - RNA, 19 nt, Homo sapiens
  misc_RNA (1)...(19): siRNA sense strand
gaagaugaaagcgaaagua

SEQ ID NO: 1903946 - RNA, 19 nt, Homo sapiens
  misc_RNA (1)...(19): siRNA sense strand
cugaagagauaaaguuuga

SEQ ID NO: 1903947 - RNA, 19 nt, Homo sapiens
  misc_RNA (1)...(19): siRNA sense strand
gauugguccuccagaagua

SEQ ID NO: 1903948 - RNA, 19 nt, Homo sapiens
  misc_RNA (1)...(19): siRNA sense strand
gacuguauauugugugaaa

SEQ ID NO: 1903949 - RNA, 19 nt, Homo sapiens
  misc_RNA (1)...(19): siRNA sense strand
gagauaaaguuugauacug

SEQ ID NO: 1903950 - RNA, 19 nt, Homo sapiens
  misc_RNA (1)...(19): siRNA sense strand
gaacuaccuccaccagaaa

SEQ ID NO: 1903951 - RNA, 19 nt, Homo sapiens
  misc_RNA (1)...(19): siRNA sense strand
gcuuauaguuggaauuugu

SEQ ID NO: 1903952 - RNA, 19 nt, Homo sapiens
  misc_RNA (1)...(19): siRNA sense strand
gcugaauguuuaugaagaa

SEQ ID NO: 1903953 - RNA, 19 nt, Homo sapiens
  misc_RNA (1)...(19): siRNA sense strand
gauguuacaguuccuaauu

SEQ ID NO: 1903954 - RNA, 19 nt, Homo sapiens
  misc_RNA (1)...(19): siRNA sense strand
guauaaagaccacaguuga

SEQ ID NO: 1903955 - RNA, 19 nt, Homo sapiens
  misc_RNA (1)...(19): siRNA sense strand
caagcugaauguuuaugaa

SEQ ID NO: 1903956 - RNA, 19 nt, Homo sapiens
  misc_RNA (1)...(19): siRNA sense strand
uaaaccuucuuccaguaua

SEQ ID NO: 1903957 - RNA, 19 nt, Homo sapiens
  misc_RNA (1)...(19): siRNA sense strand
gcacacaccauggaugaaa

SEQ ID NO: 1903958 - RNA, 19 nt, Homo sapiens
  misc_RNA (1)...(19): siRNA sense strand
gagcacacaccauggauga

SEQ ID NO: 1903959 - RNA, 19 nt, Homo sapiens
  misc_RNA (1)...(19): siRNA sense strand
auacacaucucuccuggaa

SEQ ID NO: 1903960 - RNA, 19 nt, Homo sapiens
  misc_RNA (1)...(19): siRNA sense strand
aaacacuucuucaugguau

SEQ ID NO: 1903961 - RNA, 19 nt, Homo sapiens
  misc_RNA (1)...(19): siRNA sense strand
acacaucucuccuggaaca

SEQ ID NO: 1903962 - RNA, 19 nt, Homo sapiens
  misc_RNA (1)...(19): siRNA sense strand
guuaaagcagcacuacuua

SEQ ID NO: 1903963 - RNA, 19 nt, Homo sapiens
  misc_RNA (1)...(19): siRNA sense strand
gaacaggagcgaugagucu

SEQ ID NO: 1903964 - RNA, 19 nt, Homo sapiens
  misc_RNA (1)...(19): siRNA sense strand
ugacucauuuacaccauuu

SEQ ID NO: 1903965 - RNA, 19 nt, Homo sapiens
  misc_RNA (1)...(19): siRNA sense strand
gaaaauuggugucuauagu

SEQ ID NO: 1903966 - RNA, 19 nt, Homo sapiens
  misc_RNA (1)...(19): siRNA sense strand
aacaugaccuuucaaguuc

SEQ ID NO: 1903967 - RNA, 19 nt, Homo sapiens
  misc_RNA (1)...(19): siRNA sense strand
uagccaagauucaggaaau

SEQ ID NO: 1903968 - RNA, 19 nt, Homo sapiens
  misc_RNA (1)...(19): siRNA sense strand
gcuuucaacuucugaggaa

SEQ ID NO: 1903969 - RNA, 19 nt, Homo sapiens
  misc_RNA (1)...(19): siRNA sense strand
ucacucaagcugaauguuu

SEQ ID NO: 1903970 - RNA, 19 nt, Homo sapiens
  misc_RNA (1)...(19): siRNA sense strand
caguauagaugaguauuuc

SEQ ID NO: 1903971 - RNA, 19 nt, Homo sapiens
  misc_RNA (1)...(19): siRNA sense strand
cagugugucuuuccucaaa

SEQ ID NO: 1903972 - RNA, 19 nt, Homo sapiens
  misc_RNA (1)...(19): siRNA sense strand
cuggaaaccauuuguauaa

SEQ ID NO: 1903973 - RNA, 19 nt, Homo sapiens
  misc_RNA (1)...(19): siRNA sense strand
uuuagaagcugaagauaag

SEQ ID NO: 1903974 - RNA, 19 nt, Homo sapiens
  misc_RNA (1)...(19): siRNA sense strand
aacauuagaucccuuagug

SEQ ID NO: 1903975 - RNA, 19 nt, Homo sapiens
  misc_RNA (1)...(19): siRNA sense strand
guagaagaaaggauugaaa

SEQ ID NO: 1903976 - RNA, 19 nt, Homo sapiens
  misc_RNA (1)...(19): siRNA sense strand
ucagauugguccuccagaa

SEQ ID NO: 1903977 - RNA, 19 nt, Homo sapiens
  misc_RNA (1)...(19): siRNA sense strand
ugggauggauaauuggaua

SEQ ID NO: 1903978 - RNA, 19 nt, Homo sapiens
  misc_RNA (1)...(19): siRNA sense strand
ggucugaagagauaaaguu

SEQ ID NO: 1903979 - RNA, 19 nt, Homo sapiens
  misc_RNA (1)...(19): siRNA sense strand
uuggaugguuuaagcuuua

SEQ ID NO: 1903980 - RNA, 19 nt, Homo sapiens
  misc_RNA (1)...(19): siRNA sense strand
gaugaaagcgaaaguaaaa

SEQ ID NO: 1903981 - RNA, 19 nt, Homo sapiens
  misc_RNA (1)...(19): siRNA sense strand
cgaaagucuucuugagaug

SEQ ID NO: 1903982 - RNA, 19 nt, Homo sapiens
  misc_RNA (1)...(19): siRNA sense strand
gaaacaaauaccugacugu

SEQ ID NO: 1903983 - RNA, 19 nt, Homo sapiens
  misc_RNA (1)...(19): siRNA sense strand
gccaagauucaggaaauua

SEQ ID NO: 1903984 - RNA, 19 nt, Homo sapiens
  misc_RNA (1)...(19): siRNA sense strand
gaaacacgccugugaucca

SEQ ID NO: 1903985 - RNA, 19 nt, Homo sapiens
  misc_RNA (1)...(19): siRNA sense strand
gugauucauuccauaucua

SEQ ID NO: 1903986 - RNA, 19 nt, Homo sapiens
  misc_RNA (1)...(19): siRNA sense strand
gggauuauacauaugcaaa

SEQ ID NO: 1903987 - RNA, 19 nt, Homo sapiens
  misc_RNA (1)...(19): siRNA sense strand
gaagaaacuaaucaaacug

SEQ ID NO: 1903988 - RNA, 19 nt, Homo sapiens
  misc_RNA (1)...(19): siRNA sense strand
gcaaacaugaccuuucaag

SEQ ID NO: 1903989 - RNA, 19 nt, Homo sapiens
  misc_RNA (1)...(19): siRNA sense strand
gagguugacucauuuacac

SEQ ID NO: 1903990 - RNA, 19 nt, Homo sapiens
  misc_RNA (1)...(19): siRNA sense strand
cuuaaaccuucuuccagua

SEQ ID NO: 1903991 - RNA, 19 nt, Homo sapiens
  misc_RNA (1)...(19): siRNA sense strand
cagcacuacuuacgucaug

SEQ ID NO: 1903992 - RNA, 19 nt, Homo sapiens
  misc_RNA (1)...(19): siRNA sense strand
agaaguacauuuagaagcu

SEQ ID NO: 1903993 - RNA, 19 nt, Homo sapiens
  misc_RNA (1)...(19): siRNA sense strand
gcucucccguuugucauuu

SEQ ID NO: 1903994 - RNA, 19 nt, Homo sapiens
  misc_RNA (1)...(19): siRNA sense strand
ucaauuaugucuucuuucc

SEQ ID NO: 1903995 - RNA, 19 nt, Homo sapiens
  misc_RNA (1)...(19): siRNA sense strand
gucagaauauuacuaguac

SEQ ID NO: 1903996 - RNA, 19 nt, Homo sapiens
  misc_RNA (1)...(19): siRNA sense strand
uuagaucccuuagugauuc

SEQ ID NO: 1903997 - RNA, 19 nt, Homo sapiens
  misc_RNA (1)...(19): siRNA sense strand
agauaaggcaauagugaua

SEQ ID NO: 1903998 - RNA, 19 nt, Homo sapiens
  misc_RNA (1)...(19): siRNA sense strand
uagcuuacuuaucuggaaa

SEQ ID NO: 1903999 - RNA, 19 nt, Homo sapiens
  misc_RNA (1)...(19): siRNA sense strand
ggaaaacacuucaaaugcu

SEQ ID NO: 1904000 - RNA, 19 nt, Homo sapiens
  misc_RNA (1)...(19): siRNA sense strand
gauuauccacugauuuaug

SEQ ID NO: 1904001 - RNA, 19 nt, Homo sapiens
  misc_RNA (1)...(19): siRNA sense strand
ccuacuuccuccagucuuu

SEQ ID NO: 1904002 - RNA, 19 nt, Homo sapiens
  misc_RNA (1)...(19): siRNA sense strand
ggaauccuggaaaccauuu

SEQ ID NO: 1904003 - RNA, 19 nt, Homo sapiens
  misc_RNA (1)...(19): siRNA sense strand
cuucaaaugcugagagaaa

SEQ ID NO: 1904004 - RNA, 19 nt, Homo sapiens
  misc_RNA (1)...(19): siRNA sense strand
aagaugaaagcgaaaguaa

SEQ ID NO: 1904005 - RNA, 19 nt, Homo sapiens
  misc_RNA (1)...(19): siRNA sense strand
ucgcaaagcucagauuggu

SEQ ID NO: 1904006 - RNA, 19 nt, Homo sapiens
  misc_RNA (1)...(19): siRNA sense strand
ccaagauucaggaaauuau

SEQ ID NO: 1904007 - RNA, 19 nt, Homo sapiens
  misc_RNA (1)...(19): siRNA sense strand
caacuucugaggaacaaau

SEQ ID NO: 1904008 - RNA, 19 nt, Homo sapiens
  misc_RNA (1)...(19): siRNA sense strand
uagaugaguauuucucuga

SEQ ID NO: 1904009 - RNA, 19 nt, Homo sapiens
  misc_RNA (1)...(19): siRNA sense strand
gaaaccacugacuguauau

SEQ ID NO: 1904010 - RNA, 19 nt, Homo sapiens
  misc_RNA (1)...(19): siRNA sense strand
cuuagugauucauuccaua

SEQ ID NO: 1904011 - RNA, 19 nt, Homo sapiens
  misc_RNA (1)...(19): siRNA sense strand
ccuggaaaccauuuguaua

SEQ ID NO: 1904012 - RNA, 19 nt, Homo sapiens
  misc_RNA (1)...(19): siRNA sense strand
uauaaagaccacaguugaa

SEQ ID NO: 1904013 - RNA, 19 nt, Homo sapiens
  misc_RNA (1)...(19): siRNA sense strand
cuacuuacgucauggaaaa

SEQ ID NO: 1904014 - RNA, 19 nt, Homo sapiens
  misc_RNA (1)...(19): siRNA sense strand
gcaauagugauacacaucu

SEQ ID NO: 1904015 - RNA, 19 nt, Homo sapiens
  misc_RNA (1)...(19): siRNA sense strand
gaaaacacuucuucauggu

SEQ ID NO: 1904016 - RNA, 19 nt, Homo sapiens
  misc_RNA (1)...(19): siRNA sense strand
auacaagcuuuccuacuuc

SEQ ID NO: 1904017 - RNA, 19 nt, Homo sapiens
  misc_RNA (1)...(19): siRNA sense strand
augcaaacaugaccuuuca

SEQ ID NO: 1904018 - RNA, 19 nt, Homo sapiens
  misc_RNA (1)...(19): siRNA sense strand
gaacuacagcaggacuuug

SEQ ID NO: 1904019 - RNA, 19 nt, Homo sapiens
  misc_RNA (1)...(19): siRNA sense strand
cugaacagccauugaagaa

SEQ ID NO: 1904020 - RNA, 19 nt, Homo sapiens
  misc_RNA (1)...(19): siRNA sense strand
ccaguauagaugaguauuu

SEQ ID NO: 1904021 - RNA, 19 nt, Homo sapiens
  misc_RNA (1)...(19): siRNA sense strand
uguuacaguuccuaauuug

SEQ ID NO: 1904022 - RNA, 19 nt, Homo sapiens
  misc_RNA (1)...(19): siRNA sense strand
cgaugagucugucgggaau

SEQ ID NO: 1904023 - RNA, 19 nt, Homo sapiens
  misc_RNA (1)...(19): siRNA sense strand
ggauggauaauuggauaaa

SEQ ID NO: 1904024 - RNA, 19 nt, Homo sapiens
  misc_RNA (1)...(19): siRNA sense strand
auaaagaccacaguugaaa

SEQ ID NO: 1904025 - RNA, 19 nt, Homo sapiens
  misc_RNA (1)...(19): siRNA sense strand
auuauuugcucucccguuu

SEQ ID NO: 1904026 - RNA, 19 nt, Homo sapiens
  misc_RNA (1)...(19): siRNA sense strand
gaccacaguugaaaaugaa

SEQ ID NO: 1904027 - RNA, 19 nt, Homo sapiens
  misc_RNA (1)...(19): siRNA sense strand
gaaaacaaaaccaggaaau

SEQ ID NO: 1904028 - RNA, 19 nt, Homo sapiens
  misc_RNA (1)...(19): siRNA sense strand
ugucauuuaugcugcgaaa

SEQ ID NO: 1904029 - RNA, 19 nt, Homo sapiens
  misc_RNA (1)...(19): siRNA sense strand
uuagugacgcuguauguga

SEQ ID NO: 1904030 - RNA, 19 nt, Homo sapiens
  misc_RNA (1)...(19): siRNA sense strand
acagcaggacuuuguauga

SEQ ID NO: 1904031 - RNA, 19 nt, Homo sapiens
  misc_RNA (1)...(19): siRNA sense strand
augcaucaauuaugucuuc

SEQ ID NO: 1904032 - RNA, 19 nt, Homo sapiens
  misc_RNA (1)...(19): siRNA sense strand
ggacaaaccucagcccuaa

SEQ ID NO: 1904033 - RNA, 19 nt, Homo sapiens
  misc_RNA (1)...(19): siRNA sense strand
gaauguaacugaaagauac

SEQ ID NO: 1904034 - RNA, 19 nt, Homo sapiens
  misc_RNA (1)...(19): siRNA sense strand
ggagcacgcuuacuaccuu

SEQ ID NO: 1904035 - RNA, 19 nt, Homo sapiens
  misc_RNA (1)...(19): siRNA sense strand
aaagauacauggcuugcaa

SEQ ID NO: 1904036 - RNA, 19 nt, Homo sapiens
  misc_RNA (1)...(19): siRNA sense strand
guaaucaacugggagaaug

SEQ ID NO: 1904037 - RNA, 19 nt, Homo sapiens
  misc_RNA (1)...(19): siRNA sense strand
gcugacggcugcaucuguu

SEQ ID NO: 1904038 - RNA, 19 nt, Homo sapiens
  misc_RNA (1)...(19): siRNA sense strand
ggaacaacaggccuuauuc

SEQ ID NO: 1904039 - RNA, 19 nt, Homo sapiens
  misc_RNA (1)...(19): siRNA sense strand
gggagaauguaacugaaag

SEQ ID NO: 1904040 - RNA, 19 nt, Homo sapiens
  misc_RNA (1)...(19): siRNA sense strand
ggacuuugguuccuuugac

SEQ ID NO: 1904041 - RNA, 19 nt, Homo sapiens
  misc_RNA (1)...(19): siRNA sense strand
ggucauaucaaucauagca

SEQ ID NO: 1904042 - RNA, 19 nt, Homo sapiens
  misc_RNA (1)...(19): siRNA sense strand
gaacgucaccgaggagaag

SEQ ID NO: 1904043 - RNA, 19 nt, Homo sapiens
  misc_RNA (1)...(19): siRNA sense strand
guggucauaucaaucauag

SEQ ID NO: 1904044 - RNA, 19 nt, Homo sapiens
  misc_RNA (1)...(19): siRNA sense strand
gcuggaagccaucaaacug

SEQ ID NO: 1904045 - RNA, 19 nt, Homo sapiens
  misc_RNA (1)...(19): siRNA sense strand
gaacggggacacuuacaaa

SEQ ID NO: 1904046 - RNA, 19 nt, Homo sapiens
  misc_RNA (1)...(19): siRNA sense strand
caauggugguggucauauc

SEQ ID NO: 1904047 - RNA, 19 nt, Homo sapiens
  misc_RNA (1)...(19): siRNA sense strand
gaacaacaggccuuauucc

SEQ ID NO: 1904048 - RNA, 19 nt, Homo sapiens
  misc_RNA (1)...(19): siRNA sense strand
ggagaauguaacugaaaga

SEQ ID NO: 1904049 - RNA, 19 nt, Homo sapiens
  misc_RNA (1)...(19): siRNA sense strand
ugugggagcacgcuuacua

SEQ ID NO: 1904050 - RNA, 19 nt, Homo sapiens
  misc_RNA (1)...(19): siRNA sense strand
gagaauguaacugaaagau

SEQ ID NO: 1904051 - RNA, 19 nt, Homo sapiens
  misc_RNA (1)...(19): siRNA sense strand
gguggucauaucaaucaua

SEQ ID NO: 1904052 - RNA, 19 nt, Homo sapiens
  misc_RNA (1)...(19): siRNA sense strand
ccuggaaccucacaucaac

SEQ ID NO: 1904053 - RNA, 19 nt, Homo sapiens
  misc_RNA (1)...(19): siRNA sense strand
uugacaaguuuaaggagaa

SEQ ID NO: 1904054 - RNA, 19 nt, Homo sapiens
  misc_RNA (1)...(19): siRNA sense strand
aaaucaggauccacugcaa

SEQ ID NO: 1904055 - RNA, 19 nt, Homo sapiens
  misc_RNA (1)...(19): siRNA sense strand
gacuuugguuccuuugaca

SEQ ID NO: 1904056 - RNA, 19 nt, Homo sapiens
  misc_RNA (1)...(19): siRNA sense strand
gaagcugacggcugcaucu

SEQ ID NO: 1904057 - RNA, 19 nt, Homo sapiens
  misc_RNA (1)...(19): siRNA sense strand
caacugggagaauguaacu

SEQ ID NO: 1904058 - RNA, 19 nt, Homo sapiens
  misc_RNA (1)...(19): siRNA sense strand
gugguggucauaucaauca

SEQ ID NO: 1904059 - RNA, 19 nt, Homo sapiens
  misc_RNA (1)...(19): siRNA sense strand
caggauccacugcaaggaa

SEQ ID NO: 1904060 - RNA, 19 nt, Homo sapiens
  misc_RNA (1)...(19): siRNA sense strand
caaauugcugcuuguccaa

SEQ ID NO: 1904061 - RNA, 19 nt, Homo sapiens
  misc_RNA (1)...(19): siRNA sense strand
uggcuugguuucaauaagg

SEQ ID NO: 1904062 - RNA, 19 nt, Homo sapiens
  misc_RNA (1)...(19): siRNA sense strand
gaaagauacauggcuugca

SEQ ID NO: 1904063 - RNA, 19 nt, Homo sapiens
  misc_RNA (1)...(19): siRNA sense strand
aggaacaacaggccuuauu

SEQ ID NO: 1904064 - RNA, 19 nt, Homo sapiens
  misc_RNA (1)...(19): siRNA sense strand
cggggacacuuacaaauug

SEQ ID NO: 1904065 - RNA, 19 nt, Homo sapiens
  misc_RNA (1)...(19): siRNA sense strand
guucaauggugguggucau

SEQ ID NO: 1904066 - RNA, 19 nt, Homo sapiens
  misc_RNA (1)...(19): siRNA sense strand
cccuaacggugguggagaa

SEQ ID NO: 1904067 - RNA, 19 nt, Homo sapiens
  misc_RNA (1)...(19): siRNA sense strand
ggguuggcuugguuucaau

SEQ ID NO: 1904068 - RNA, 19 nt, Homo sapiens
  misc_RNA (1)...(19): siRNA sense strand
ggccaagggagauguuaca

SEQ ID NO: 1904069 - RNA, 19 nt, Homo sapiens
  misc_RNA (1)...(19): siRNA sense strand
ggcuugguuucaauaagga

SEQ ID NO: 1904070 - RNA, 19 nt, Homo sapiens
  misc_RNA (1)...(19): siRNA sense strand
ugacaaguuuaaggagaag

SEQ ID NO: 1904071 - RNA, 19 nt, Homo sapiens
  misc_RNA (1)...(19): siRNA sense strand
ccaaagaguuuauugauca

SEQ ID NO: 1904072 - RNA, 19 nt, Homo sapiens
  misc_RNA (1)...(19): siRNA sense strand
ccaagaagaugaacuuaga

SEQ ID NO: 1904073 - RNA, 19 nt, Homo sapiens
  misc_RNA (1)...(19): siRNA sense strand
ggaagaauaugacauugug

SEQ ID NO: 1904074 - RNA, 19 nt, Homo sapiens
  misc_RNA (1)...(19): siRNA sense strand
gaucgcagcuggaagagaa

SEQ ID NO: 1904075 - RNA, 19 nt, Homo sapiens
  misc_RNA (1)...(19): siRNA sense strand
acacagagcucaucuaugg

SEQ ID NO: 1904076 - RNA, 19 nt, Homo sapiens
  misc_RNA (1)...(19): siRNA sense strand
gaacacgcaugucuggaaa

SEQ ID NO: 1904077 - RNA, 19 nt, Homo sapiens
  misc_RNA (1)...(19): siRNA sense strand
caacagcggcaauuugaua

SEQ ID NO: 1904078 - RNA, 19 nt, Homo sapiens
  misc_RNA (1)...(19): siRNA sense strand
gagaggauccugaagauga

SEQ ID NO: 1904079 - RNA, 19 nt, Homo sapiens
  misc_RNA (1)...(19): siRNA sense strand
gguccaagcugcagguauu

SEQ ID NO: 1904080 - RNA, 19 nt, Homo sapiens
  misc_RNA (1)...(19): siRNA sense strand
gaagugaccaaccgccuua

SEQ ID NO: 1904081 - RNA, 19 nt, Homo sapiens
  misc_RNA (1)...(19): siRNA sense strand
gaaauucggcugugcuuug

SEQ ID NO: 1904082 - RNA, 19 nt, Homo sapiens
  misc_RNA (1)...(19): siRNA sense strand
acaaugaacugcucaagga

SEQ ID NO: 1904083 - RNA, 19 nt, Homo sapiens
  misc_RNA (1)...(19): siRNA sense strand
uggaagaggugaacaaaga

SEQ ID NO: 1904084 - RNA, 19 nt, Homo sapiens
  misc_RNA (1)...(19): siRNA sense strand
gaagaugaacuuagacaug

SEQ ID NO: 1904085 - RNA, 19 nt, Homo sapiens
  misc_RNA (1)...(19): siRNA sense strand
gaaacgggaugcacugagu

SEQ ID NO: 1904086 - RNA, 19 nt, Homo sapiens
  misc_RNA (1)...(19): siRNA sense strand
ggacacagagcucaucuau

SEQ ID NO: 1904087 - RNA, 19 nt, Homo sapiens
  misc_RNA (1)...(19): siRNA sense strand
ugaaggagcgggucaguaa

SEQ ID NO: 1904088 - RNA, 19 nt, Homo sapiens
  misc_RNA (1)...(19): siRNA sense strand
gcacuuaccagcucaagga

SEQ ID NO: 1904089 - RNA, 19 nt, Homo sapiens
  misc_RNA (1)...(19): siRNA sense strand
aggcagagaugaaagauau

SEQ ID NO: 1904090 - RNA, 19 nt, Homo sapiens
  misc_RNA (1)...(19): siRNA sense strand
gauacaggcugacgaacug

SEQ ID NO: 1904091 - RNA, 19 nt, Homo sapiens
  misc_RNA (1)...(19): siRNA sense strand
gcucuucccucucgccaaa

SEQ ID NO: 1904092 - RNA, 19 nt, Homo sapiens
  misc_RNA (1)...(19): siRNA sense strand
ggucugccaucaccauauu

SEQ ID NO: 1904093 - RNA, 19 nt, Homo sapiens
  misc_RNA (1)...(19): siRNA sense strand
uuaagcacauggagaauga

SEQ ID NO: 1904094 - RNA, 19 nt, Homo sapiens
  misc_RNA (1)...(19): siRNA sense strand
aagaugaacuuagacauga

SEQ ID NO: 1904095 - RNA, 19 nt, Homo sapiens
  misc_RNA (1)...(19): siRNA sense strand
gcaaugacccugagcucuu

SEQ ID NO: 1904096 - RNA, 19 nt, Homo sapiens
  misc_RNA (1)...(19): siRNA sense strand
gaugaaagauaugggaauc

SEQ ID NO: 1904097 - RNA, 19 nt, Homo sapiens
  misc_RNA (1)...(19): siRNA sense strand
gggagaggauccugaagau

SEQ ID NO: 1904098 - RNA, 19 nt, Homo sapiens
  misc_RNA (1)...(19): siRNA sense strand
gaucacauguucgguguuc

SEQ ID NO: 1904099 - RNA, 19 nt, Homo sapiens
  misc_RNA (1)...(19): siRNA sense strand
ggagaacgaccgagucuuc

SEQ ID NO: 1904100 - RNA, 19 nt, Homo sapiens
  misc_RNA (1)...(19): siRNA sense strand
guacaugggcacagagauu

SEQ ID NO: 1904101 - RNA, 19 nt, Homo sapiens
  misc_RNA (1)...(19): siRNA sense strand
ugauguccauggaagaaua

SEQ ID NO: 1904102 - RNA, 19 nt, Homo sapiens
  misc_RNA (1)...(19): siRNA sense strand
gaaagcgaccauccucuau

SEQ ID NO: 1904103 - RNA, 19 nt, Homo sapiens
  misc_RNA (1)...(19): siRNA sense strand
caacaugcuccuagagauu

SEQ ID NO: 1904104 - RNA, 19 nt, Homo sapiens
  misc_RNA (1)...(19): siRNA sense strand
caauaucgcgguucucuau

SEQ ID NO: 1904105 - RNA, 19 nt, Homo sapiens
  misc_RNA (1)...(19): siRNA sense strand
gaaguggccaagaagauga

SEQ ID NO: 1904106 - RNA, 19 nt, Homo sapiens
  misc_RNA (1)...(19): siRNA sense strand
ggaacacgcaugucuggaa

SEQ ID NO: 1904107 - RNA, 19 nt, Homo sapiens
  misc_RNA (1)...(19): siRNA sense strand
cagacaaaccaaagaagua

SEQ ID NO: 1904108 - RNA, 19 nt, Homo sapiens
  misc_RNA (1)...(19): siRNA sense strand
cacaaggucuauccaaugu

SEQ ID NO: 1904109 - RNA, 19 nt, Homo sapiens
  misc_RNA (1)...(19): siRNA sense strand
acaauucccucaucagcaa

SEQ ID NO: 1904110 - RNA, 19 nt, Homo sapiens
  misc_RNA (1)...(19): siRNA sense strand
gcaaaucgcaagcuuaugc

SEQ ID NO: 1904111 - RNA, 19 nt, Homo sapiens
  misc_RNA (1)...(19): siRNA sense strand
gccaaagaguuuauugauc

SEQ ID NO: 1904112 - RNA, 19 nt, Homo sapiens
  misc_RNA (1)...(19): siRNA sense strand
ggccgaagcuccagaacuc

SEQ ID NO: 1904113 - RNA, 19 nt, Homo sapiens
  misc_RNA (1)...(19): siRNA sense strand
ccaccgaguccuucauuaa

SEQ ID NO: 1904114 - RNA, 19 nt, Homo sapiens
  misc_RNA (1)...(19): siRNA sense strand
ucacagagauaugcauaca

SEQ ID NO: 1904115 - RNA, 19 nt, Homo sapiens
  misc_RNA (1)...(19): siRNA sense strand
cauguacccugaugaagug

SEQ ID NO: 1904116 - RNA, 19 nt, Homo sapiens
  misc_RNA (1)...(19): siRNA sense strand
gccaggagcugcaguacca

SEQ ID NO: 1904117 - RNA, 19 nt, Homo sapiens
  misc_RNA (1)...(19): siRNA sense strand
gcaaugaucgcagcuggaa

SEQ ID NO: 1904118 - RNA, 19 nt, Homo sapiens
  misc_RNA (1)...(19): siRNA sense strand
ggacggcaagucacacaaa

SEQ ID NO: 1904119 - RNA, 19 nt, Homo sapiens
  misc_RNA (1)...(19): siRNA sense strand
ggcaacagcggcaauuuga

SEQ ID NO: 1904120 - RNA, 19 nt, Homo sapiens
  misc_RNA (1)...(19): siRNA sense strand
gaagaaaggaagagcuaca

SEQ ID NO: 1904121 - RNA, 19 nt, Homo sapiens
  misc_RNA (1)...(19): siRNA sense strand
gaacgaccgagucuucaau

SEQ ID NO: 1904122 - RNA, 19 nt, Homo sapiens
  misc_RNA (1)...(19): siRNA sense strand
gagcauacccucacuuuug

SEQ ID NO: 1904123 - RNA, 19 nt, Homo sapiens
  misc_RNA (1)...(19): siRNA sense strand
uagcagaagcugucaaguu

SEQ ID NO: 1904124 - RNA, 19 nt, Homo sapiens
  misc_RNA (1)...(19): siRNA sense strand
caacccauauucagagaag

SEQ ID NO: 1904125 - RNA, 19 nt, Homo sapiens
  misc_RNA (1)...(19): siRNA sense strand
ugacagcgcccuggaggua

SEQ ID NO: 1904126 - RNA, 19 nt, Homo sapiens
  misc_RNA (1)...(19): siRNA sense strand
ggaguacgaggaauggaaa

SEQ ID NO: 1904127 - RNA, 19 nt, Homo sapiens
  misc_RNA (1)...(19): siRNA sense strand
ugugugagaucuucaaaca

SEQ ID NO: 1904128 - RNA, 19 nt, Homo sapiens
  misc_RNA (1)...(19): siRNA sense strand
gacaacucccgcuacaaua

SEQ ID NO: 1904129 - RNA, 19 nt, Homo sapiens
  misc_RNA (1)...(19): siRNA sense strand
ccugagcucuuccagauuc

SEQ ID NO: 1904130 - RNA, 19 nt, Homo sapiens
  misc_RNA (1)...(19): siRNA sense strand
gaagaggugaacaaagaga

SEQ ID NO: 1904131 - RNA, 19 nt, Homo sapiens
  misc_RNA (1)...(19): siRNA sense strand
gaacguacgaagugaccaa

SEQ ID NO: 1904132 - RNA, 19 nt, Homo sapiens
  misc_RNA (1)...(19): siRNA sense strand
agcagaagcugucaaguuc

SEQ ID NO: 1904133 - RNA, 19 nt, Homo sapiens
  misc_RNA (1)...(19): siRNA sense strand
ggaaguggccaagaagaug

SEQ ID NO: 1904134 - RNA, 19 nt, Homo sapiens
  misc_RNA (1)...(19): siRNA sense strand
uggaggaaguggccaagaa

SEQ ID NO: 1904135 - RNA, 19 nt, Homo sapiens
  misc_RNA (1)...(19): siRNA sense strand
ugacaacucccgcuacaau

SEQ ID NO: 1904136 - RNA, 19 nt, Homo sapiens
  misc_RNA (1)...(19): siRNA sense strand
caaguaugccaccaacaaa

SEQ ID NO: 1904137 - RNA, 19 nt, Homo sapiens
  misc_RNA (1)...(19): siRNA sense strand
cuuaagagcacauuggaaa

SEQ ID NO: 1904138 - RNA, 19 nt, Homo sapiens
  misc_RNA (1)...(19): siRNA sense strand
caccauggcugcugauguc

SEQ ID NO: 1904139 - RNA, 19 nt, Homo sapiens
  misc_RNA (1)...(19): siRNA sense strand
uggaggaguucccaucuau

SEQ ID NO: 1904140 - RNA, 19 nt, Homo sapiens
  misc_RNA (1)...(19): siRNA sense strand
ccaacucugugcaggaaga

SEQ ID NO: 1904141 - RNA, 19 nt, Homo sapiens
  misc_RNA (1)...(19): siRNA sense strand
cauggaagaauaugacauu

SEQ ID NO: 1904142 - RNA, 19 nt, Homo sapiens
  misc_RNA (1)...(19): siRNA sense strand
ccaaggugauguccaugga

SEQ ID NO: 1904143 - RNA, 19 nt, Homo sapiens
  misc_RNA (1)...(19): siRNA sense strand
ugaaagcgaccauccucua

SEQ ID NO: 1904144 - RNA, 19 nt, Homo sapiens
  misc_RNA (1)...(19): siRNA sense strand
accaggagaugcucaacua

SEQ ID NO: 1904145 - RNA, 19 nt, Homo sapiens
  misc_RNA (1)...(19): siRNA sense strand
gccaccgaguccuucauua

SEQ ID NO: 1904146 - RNA, 19 nt, Homo sapiens
  misc_RNA (1)...(19): siRNA sense strand
ccaacaugcuccuagagau

SEQ ID NO: 1904147 - RNA, 19 nt, Homo sapiens
  misc_RNA (1)...(19): siRNA sense strand
gagcugguguuggaaguuc

SEQ ID NO: 1904148 - RNA, 19 nt, Homo sapiens
  misc_RNA (1)...(19): siRNA sense strand
cagcaaauccagcccaaug

SEQ ID NO: 1904149 - RNA, 19 nt, Homo sapiens
  misc_RNA (1)...(19): siRNA sense strand
ccagacauguacccugaug

SEQ ID NO: 1904150 - RNA, 19 nt, Homo sapiens
  misc_RNA (1)...(19): siRNA sense strand
gaucuucaaacacgccuuu

SEQ ID NO: 1904151 - RNA, 19 nt, Homo sapiens
  misc_RNA (1)...(19): siRNA sense strand
ucaaguaugccaccaacaa

SEQ ID NO: 1904152 - RNA, 19 nt, Homo sapiens
  misc_RNA (1)...(19): siRNA sense strand
guaaccaugucaaguaugc

SEQ ID NO: 1904153 - RNA, 19 nt, Homo sapiens
  misc_RNA (1)...(19): siRNA sense strand
aaagagaucgacaccacua

SEQ ID NO: 1904154 - RNA, 19 nt, Homo sapiens
  misc_RNA (1)...(19): siRNA sense strand
gaacucacacaaggucuau

SEQ ID NO: 1904155 - RNA, 19 nt, Homo sapiens
  misc_RNA (1)...(19): siRNA sense strand
gcacauggagaaugaguac

SEQ ID NO: 1904156 - RNA, 19 nt, Homo sapiens
  misc_RNA (1)...(19): siRNA sense strand
caaguuccgccucaccuuu

SEQ ID NO: 1904157 - RNA, 19 nt, Homo sapiens
  misc_RNA (1)...(19): siRNA sense strand
gccaacaauucccucauca

SEQ ID NO: 1904158 - RNA, 19 nt, Homo sapiens
  misc_RNA (1)...(19): siRNA sense strand
ggccaacaauucccucauc

SEQ ID NO: 1904159 - RNA, 19 nt, Homo sapiens
  misc_RNA (1)...(19): siRNA sense strand
gcuacaagguccgauucaa

SEQ ID NO: 1904160 - RNA, 19 nt, Homo sapiens
  misc_RNA (1)...(19): siRNA sense strand
cauguucgguguucagcaa

SEQ ID NO: 1904161 - RNA, 19 nt, Homo sapiens
  misc_RNA (1)...(19): siRNA sense strand
caaugacccugagcucuuc

SEQ ID NO: 1904162 - RNA, 19 nt, Homo sapiens
  misc_RNA (1)...(19): siRNA sense strand
gcaauuugauauccaacac

SEQ ID NO: 1904163 - RNA, 19 nt, Homo sapiens
  misc_RNA (1)...(19): siRNA sense strand
caguuugccucccuagcua

SEQ ID NO: 1904164 - RNA, 19 nt, Homo sapiens
  misc_RNA (1)...(19): siRNA sense strand
ucaacagcgucuccuccua

SEQ ID NO: 1904165 - RNA, 19 nt, Homo sapiens
  misc_RNA (1)...(19): siRNA sense strand
ucauuaagcacauggagaa

SEQ ID NO: 1904166 - RNA, 19 nt, Homo sapiens
  misc_RNA (1)...(19): siRNA sense strand
ucuguaaccaugucaagua

SEQ ID NO: 1904167 - RNA, 19 nt, Homo sapiens
  misc_RNA (1)...(19): siRNA sense strand
aaauucggcugugcuuuga

SEQ ID NO: 1904168 - RNA, 19 nt, Homo sapiens
  misc_RNA (1)...(19): siRNA sense strand
guucacagagauaugcaua

SEQ ID NO: 1904169 - RNA, 19 nt, Homo sapiens
  misc_RNA (1)...(19): siRNA sense strand
ccgcuacgcuggcuacaag

SEQ ID NO: 1904170 - RNA, 19 nt, Homo sapiens
  misc_RNA (1)...(19): siRNA sense strand
ccuuagaucugaguccauu

SEQ ID NO: 1904171 - RNA, 19 nt, Homo sapiens
  misc_RNA (1)...(19): siRNA sense strand
gaaccaaccuuuccuguga

SEQ ID NO: 1904172 - RNA, 19 nt, Homo sapiens
  misc_RNA (1)...(19): siRNA sense strand
gaagcuacuuuguguguaa

SEQ ID NO: 1904173 - RNA, 19 nt, Homo sapiens
  misc_RNA (1)...(19): siRNA sense strand
gauaaugacugcucaaugg

SEQ ID NO: 1904174 - RNA, 19 nt, Homo sapiens
  misc_RNA (1)...(19): siRNA sense strand
uaacacuucugaugcauuu

SEQ ID NO: 1904175 - RNA, 19 nt, Homo sapiens
  misc_RNA (1)...(19): siRNA sense strand
ucaagucacuccagaaaga

SEQ ID NO: 1904176 - RNA, 19 nt, Homo sapiens
  misc_RNA (1)...(19): siRNA sense strand
gcaaagaguccugcaauga

SEQ ID NO: 1904177 - RNA, 19 nt, Homo sapiens
  misc_RNA (1)...(19): siRNA sense strand
gaacuaaggcauuucugaa

SEQ ID NO: 1904178 - RNA, 19 nt, Homo sapiens
  misc_RNA (1)...(19): siRNA sense strand
gaccauaucaguagguaua

SEQ ID NO: 1904179 - RNA, 19 nt, Homo sapiens
  misc_RNA (1)...(19): siRNA sense strand
gugaucaccuacuuucuaa

SEQ ID NO: 1904180 - RNA, 19 nt, Homo sapiens
  misc_RNA (1)...(19): siRNA sense strand
gcucuacaguaaugacuuu

SEQ ID NO: 1904181 - RNA, 19 nt, Homo sapiens
  misc_RNA (1)...(19): siRNA sense strand
aaacuggucugcuuuacug

SEQ ID NO: 1904182 - RNA, 19 nt, Homo sapiens
  misc_RNA (1)...(19): siRNA sense strand
gaaacauacucgucaucau

SEQ ID NO: 1904183 - RNA, 19 nt, Homo sapiens
  misc_RNA (1)...(19): siRNA sense strand
cgaacucccuaaugcaauu

SEQ ID NO: 1904184 - RNA, 19 nt, Homo sapiens
  misc_RNA (1)...(19): siRNA sense strand
ccacuagucuacacacugu

SEQ ID NO: 1904185 - RNA, 19 nt, Homo sapiens
  misc_RNA (1)...(19): siRNA sense strand
gcagaaugccaccaacuau

SEQ ID NO: 1904186 - RNA, 19 nt, Homo sapiens
  misc_RNA (1)...(19): siRNA sense strand
ugacagccguagugauuau

SEQ ID NO: 1904187 - RNA, 19 nt, Homo sapiens
  misc_RNA (1)...(19): siRNA sense strand
ucaccuacuuucuaacuau

SEQ ID NO: 1904188 - RNA, 19 nt, Homo sapiens
  misc_RNA (1)...(19): siRNA sense strand
gaaaaucgaaccaaccuuu

SEQ ID NO: 1904189 - RNA, 19 nt, Homo sapiens
  misc_RNA (1)...(19): siRNA sense strand
gggccaaauuagcuucuuu

SEQ ID NO: 1904190 - RNA, 19 nt, Homo sapiens
  misc_RNA (1)...(19): siRNA sense strand
agaaugccaccaacuauuu

SEQ ID NO: 1904191 - RNA, 19 nt, Homo sapiens
  misc_RNA (1)...(19): siRNA sense strand
ggaaacauacucgucauca

SEQ ID NO: 1904192 - RNA, 19 nt, Homo sapiens
  misc_RNA (1)...(19): siRNA sense strand
aacuauugcuggaaacaua

SEQ ID NO: 1904193 - RNA, 19 nt, Homo sapiens
  misc_RNA (1)...(19): siRNA sense strand
ccaagacaacagauaauga

SEQ ID NO: 1904194 - RNA, 19 nt, Homo sapiens
  misc_RNA (1)...(19): siRNA sense strand
aaagcaagaugccaagaca

SEQ ID NO: 1904195 - RNA, 19 nt, Homo sapiens
  misc_RNA (1)...(19): siRNA sense strand
caccaacuauuuccugaug

SEQ ID NO: 1904196 - RNA, 19 nt, Homo sapiens
  misc_RNA (1)...(19): siRNA sense strand
aaacauacucgucaucaug

SEQ ID NO: 1904197 - RNA, 19 nt, Homo sapiens
  misc_RNA (1)...(19): siRNA sense strand
ccucagaguucuuugucuu

SEQ ID NO: 1904198 - RNA, 19 nt, Homo sapiens
  misc_RNA (1)...(19): siRNA sense strand
gaucgguuaucucucuuca

SEQ ID NO: 1904199 - RNA, 19 nt, Homo sapiens
  misc_RNA (1)...(19): siRNA sense strand
uaucaagucacuccagaaa

SEQ ID NO: 1904200 - RNA, 19 nt, Homo sapiens
  misc_RNA (1)...(19): siRNA sense strand
gacaauagcgacggaguga

SEQ ID NO: 1904201 - RNA, 19 nt, Homo sapiens
  misc_RNA (1)...(19): siRNA sense strand
cugauaugcugcuggguuu

SEQ ID NO: 1904202 - RNA, 19 nt, Homo sapiens
  misc_RNA (1)...(19): siRNA sense strand
gaucggcucuuuuguguca

SEQ ID NO: 1904203 - RNA, 19 nt, Homo sapiens
  misc_RNA (1)...(19): siRNA sense strand
auucgaaggucuuuaagga

SEQ ID NO: 1904204 - RNA, 19 nt, Homo sapiens
  misc_RNA (1)...(19): siRNA sense strand
caauagcgacggagugaau

SEQ ID NO: 1904205 - RNA, 19 nt, Homo sapiens
  misc_RNA (1)...(19): siRNA sense strand
cacgguauauucaguguca

SEQ ID NO: 1904206 - RNA, 19 nt, Homo sapiens
  misc_RNA (1)...(19): siRNA sense strand
gcagucaacccacuagucu

SEQ ID NO: 1904207 - RNA, 19 nt, Homo sapiens
  misc_RNA (1)...(19): siRNA sense strand
acucgccgaugauaacuuu

SEQ ID NO: 1904208 - RNA, 19 nt, Homo sapiens
  misc_RNA (1)...(19): siRNA sense strand
ggcagugucccuagagaaa

SEQ ID NO: 1904209 - RNA, 19 nt, Homo sapiens
  misc_RNA (1)...(19): siRNA sense strand
ugaacacaauaccggcuuu

SEQ ID NO: 1904210 - RNA, 19 nt, Homo sapiens
  misc_RNA (1)...(19): siRNA sense strand
caaagaguccugcaaugag

SEQ ID NO: 1904211 - RNA, 19 nt, Homo sapiens
  misc_RNA (1)...(19): siRNA sense strand
cauguuaaccauccuguau

SEQ ID NO: 1904212 - RNA, 19 nt, Homo sapiens
  misc_RNA (1)...(19): siRNA sense strand
cagaaugccaccaacuauu

SEQ ID NO: 1904213 - RNA, 19 nt, Homo sapiens
  misc_RNA (1)...(19): siRNA sense strand
ucacuugccauagcugaua

SEQ ID NO: 1904214 - RNA, 19 nt, Homo sapiens
  misc_RNA (1)...(19): siRNA sense strand
cuccagaacuaaggcauuu

SEQ ID NO: 1904215 - RNA, 19 nt, Homo sapiens
  misc_RNA (1)...(19): siRNA sense strand
acacuucugaugcauuuaa

SEQ ID NO: 1904216 - RNA, 19 nt, Homo sapiens
  misc_RNA (1)...(19): siRNA sense strand
caacuacgaacucccuaau

SEQ ID NO: 1904217 - RNA, 19 nt, Homo sapiens
  misc_RNA (1)...(19): siRNA sense strand
ccaacuauuuccugauguc

SEQ ID NO: 1904218 - RNA, 19 nt, Homo sapiens
  misc_RNA (1)...(19): siRNA sense strand
gaacacaauaccggcuuug

SEQ ID NO: 1904219 - RNA, 19 nt, Homo sapiens
  misc_RNA (1)...(19): siRNA sense strand
ucaauguguuuguuuggau

SEQ ID NO: 1904220 - RNA, 19 nt, Homo sapiens
  misc_RNA (1)...(19): siRNA sense strand
gaaugccaccaacuauuuc

SEQ ID NO: 1904221 - RNA, 19 nt, Homo sapiens
  misc_RNA (1)...(19): siRNA sense strand
gaugccaagacaacagaua

SEQ ID NO: 1904222 - RNA, 19 nt, Homo sapiens
  misc_RNA (1)...(19): siRNA sense strand
caacuucaaaugggacaaa

SEQ ID NO: 1904223 - RNA, 19 nt, Homo sapiens
  misc_RNA (1)...(19): siRNA sense strand
guggugcccuuucuucauc

SEQ ID NO: 1904224 - RNA, 19 nt, Homo sapiens
  misc_RNA (1)...(19): siRNA sense strand
uuccagcggucgauccaua

SEQ ID NO: 1904225 - RNA, 19 nt, Homo sapiens
  misc_RNA (1)...(19): siRNA sense strand
caucgucuucuuccuguuu

SEQ ID NO: 1904226 - RNA, 19 nt, Homo sapiens
  misc_RNA (1)...(19): siRNA sense strand
gaucaccuacuuucuaacu

SEQ ID NO: 1904227 - RNA, 19 nt, Homo sapiens
  misc_RNA (1)...(19): siRNA sense strand
uauauucagugucaguaca

SEQ ID NO: 1904228 - RNA, 19 nt, Homo sapiens
  misc_RNA (1)...(19): siRNA sense strand
gccgucaucugcaaagagu

SEQ ID NO: 1904229 - RNA, 19 nt, Homo sapiens
  misc_RNA (1)...(19): siRNA sense strand
agaguucuuugucuucaga

SEQ ID NO: 1904230 - RNA, 19 nt, Homo sapiens
  misc_RNA (1)...(19): siRNA sense strand
acugacagccguagugauu

SEQ ID NO: 1904231 - RNA, 19 nt, Homo sapiens
  misc_RNA (1)...(19): siRNA sense strand
aaaggugagcuguguguga

SEQ ID NO: 1904232 - RNA, 19 nt, Homo sapiens
  misc_RNA (1)...(19): siRNA sense strand
gcccuuucuucaucacaaa

SEQ ID NO: 1904233 - RNA, 19 nt, Homo sapiens
  misc_RNA (1)...(19): siRNA sense strand
gcaaggugcugggcaucgu

SEQ ID NO: 1904234 - RNA, 19 nt, Homo sapiens
  misc_RNA (1)...(19): siRNA sense strand
ucagaguucuuugucuuca

SEQ ID NO: 1904235 - RNA, 19 nt, Homo sapiens
  misc_RNA (1)...(19): siRNA sense strand
ggacgauucgaaggucuuu

SEQ ID NO: 1904236 - RNA, 19 nt, Homo sapiens
  misc_RNA (1)...(19): siRNA sense strand
ccugaugucacuugccaua

SEQ ID NO: 1904237 - RNA, 19 nt, Homo sapiens
  misc_RNA (1)...(19): siRNA sense strand
cuacaguaaugacuuuaac

SEQ ID NO: 1904238 - RNA, 19 nt, Homo sapiens
  misc_RNA (1)...(19): siRNA sense strand
cgcuucaacuccagaacua

SEQ ID NO: 1904239 - RNA, 19 nt, Homo sapiens
  misc_RNA (1)...(19): siRNA sense strand
gauguggugcccuuucuuc

SEQ ID NO: 1904240 - RNA, 19 nt, Homo sapiens
  misc_RNA (1)...(19): siRNA sense strand
cuacgucgccauccagaau

SEQ ID NO: 1904241 - RNA, 19 nt, Homo sapiens
  misc_RNA (1)...(19): siRNA sense strand
caagacaacagauaaugac

SEQ ID NO: 1904242 - RNA, 19 nt, Homo sapiens
  misc_RNA (1)...(19): siRNA sense strand
gcacacgggccaaauuagc

SEQ ID NO: 1904243 - RNA, 19 nt, Homo sapiens
  misc_RNA (1)...(19): siRNA sense strand
ugauaacuuuguccugauc

SEQ ID NO: 1904244 - RNA, 19 nt, Homo sapiens
  misc_RNA (1)...(19): siRNA sense strand
guugcuuacucgccgauga

SEQ ID NO: 1904245 - RNA, 19 nt, Homo sapiens
  misc_RNA (1)...(19): siRNA sense strand
gccaagacaacagauaaug

SEQ ID NO: 1904246 - RNA, 19 nt, Homo sapiens
  misc_RNA (1)...(19): siRNA sense strand
gcaagaugccaagacaaca

SEQ ID NO: 1904247 - RNA, 19 nt, Homo sapiens
  misc_RNA (1)...(19): siRNA sense strand
gggcccugcucaauguguu

SEQ ID NO: 1904248 - RNA, 19 nt, Homo sapiens
  misc_RNA (1)...(19): siRNA sense strand
agaagcuacuuugugugua

SEQ ID NO: 1904249 - RNA, 19 nt, Homo sapiens
  misc_RNA (1)...(19): siRNA sense strand
uuugugcagucuggauuua

SEQ ID NO: 1904250 - RNA, 19 nt, Homo sapiens
  misc_RNA (1)...(19): siRNA sense strand
gccguagugauuauucuaa

SEQ ID NO: 1904251 - RNA, 19 nt, Homo sapiens
  misc_RNA (1)...(19): siRNA sense strand
gguauauucagugucagua

SEQ ID NO: 1904252 - RNA, 19 nt, Homo sapiens
  misc_RNA (1)...(19): siRNA sense strand
cgucgugucucuccuuacu

SEQ ID NO: 1904253 - RNA, 19 nt, Homo sapiens
  misc_RNA (1)...(19): siRNA sense strand
gaaaaggugagcugugugu

SEQ ID NO: 1904254 - RNA, 19 nt, Homo sapiens
  misc_RNA (1)...(19): siRNA sense strand
uaaugacugcucaaugguu

SEQ ID NO: 1904255 - RNA, 19 nt, Homo sapiens
  misc_RNA (1)...(19): siRNA sense strand
gcaguuaauuuuagugaac

SEQ ID NO: 1904256 - RNA, 19 nt, Homo sapiens
  misc_RNA (1)...(19): siRNA sense strand
acuacgaacucccuaaugc

SEQ ID NO: 1904257 - RNA, 19 nt, Homo sapiens
  misc_RNA (1)...(19): siRNA sense strand
uucauucccuuaaccauca

SEQ ID NO: 1904258 - RNA, 19 nt, Homo sapiens
  misc_RNA (1)...(19): siRNA sense strand
gaugucacuugccauagcu

SEQ ID NO: 1904259 - RNA, 19 nt, Homo sapiens
  misc_RNA (1)...(19): siRNA sense strand
aagaagcuacuuugugugu

SEQ ID NO: 1904260 - RNA, 19 nt, Homo sapiens
  misc_RNA (1)...(19): siRNA sense strand
acgauucgaaggucuuuaa

SEQ ID NO: 1904261 - RNA, 19 nt, Homo sapiens
  misc_RNA (1)...(19): siRNA sense strand
gcugcuggguuuccuuguc

SEQ ID NO: 1904262 - RNA, 19 nt, Homo sapiens
  misc_RNA (1)...(19): siRNA sense strand
ucgugucucuccuuacuuc

SEQ ID NO: 1904263 - RNA, 19 nt, Homo sapiens
  misc_RNA (1)...(19): siRNA sense strand
caagucacuccagaaagaa

SEQ ID NO: 1904264 - RNA, 19 nt, Homo sapiens
  misc_RNA (1)...(19): siRNA sense strand
gcuaacacuucugaugcau

SEQ ID NO: 1904265 - RNA, 19 nt, Homo sapiens
  misc_RNA (1)...(19): siRNA sense strand
cugcuggguuuccuuguca

SEQ ID NO: 1904266 - RNA, 19 nt, Homo sapiens
  misc_RNA (1)...(19): siRNA sense strand
gugauguggugcccuuucu

SEQ ID NO: 1904267 - RNA, 19 nt, Homo sapiens
  misc_RNA (1)...(19): siRNA sense strand
ucauggcagugucccuaga

SEQ ID NO: 1904268 - RNA, 19 nt, Homo sapiens
  misc_RNA (1)...(19): siRNA sense strand
cagugucaguacaaggaaa

SEQ ID NO: 1904269 - RNA, 19 nt, Homo sapiens
  misc_RNA (1)...(19): siRNA sense strand
ucauggccgucaucugcaa

SEQ ID NO: 1904270 - RNA, 19 nt, Homo sapiens
  misc_RNA (1)...(19): siRNA sense strand
ucaacuacgaacucccuaa

SEQ ID NO: 1904271 - RNA, 19 nt, Homo sapiens
  misc_RNA (1)...(19): siRNA sense strand
gagcuggacucaucugaua

SEQ ID NO: 1904272 - RNA, 19 nt, Homo sapiens
  misc_RNA (1)...(19): siRNA sense strand
gaacacagcacuauaguau

SEQ ID NO: 1904273 - RNA, 19 nt, Homo sapiens
  misc_RNA (1)...(19): siRNA sense strand
gaagaaagccuauuaucug

SEQ ID NO: 1904274 - RNA, 19 nt, Homo sapiens
  misc_RNA (1)...(19): siRNA sense strand
cgacaucacuucugacuau

SEQ ID NO: 1904275 - RNA, 19 nt, Homo sapiens
  misc_RNA (1)...(19): siRNA sense strand
caacuacagugucaauaaa

SEQ ID NO: 1904276 - RNA, 19 nt, Homo sapiens
  misc_RNA (1)...(19): siRNA sense strand
gcaagaggcuuugagaaga

SEQ ID NO: 1904277 - RNA, 19 nt, Homo sapiens
  misc_RNA (1)...(19): siRNA sense strand
gcaagaaggaguucaguuu

SEQ ID NO: 1904278 - RNA, 19 nt, Homo sapiens
  misc_RNA (1)...(19): siRNA sense strand
gggcagacuucaagacuuu

SEQ ID NO: 1904279 - RNA, 19 nt, Homo sapiens
  misc_RNA (1)...(19): siRNA sense strand
gccaugaacucuuugguuu

SEQ ID NO: 1904280 - RNA, 19 nt, Homo sapiens
  misc_RNA (1)...(19): siRNA sense strand
ucagagugcuccucauuaa

SEQ ID NO: 1904281 - RNA, 19 nt, Homo sapiens
  misc_RNA (1)...(19): siRNA sense strand
guacagagguaucuacaca

SEQ ID NO: 1904282 - RNA, 19 nt, Homo sapiens
  misc_RNA (1)...(19): siRNA sense strand
gaaauaccauggcaacaag

SEQ ID NO: 1904283 - RNA, 19 nt, Homo sapiens
  misc_RNA (1)...(19): siRNA sense strand
acacagcacuauaguauug

SEQ ID NO: 1904284 - RNA, 19 nt, Homo sapiens
  misc_RNA (1)...(19): siRNA sense strand
gaagauaaaggauguuguu

SEQ ID NO: 1904285 - RNA, 19 nt, Homo sapiens
  misc_RNA (1)...(19): siRNA sense strand
caacaagcuuaaaggagua

SEQ ID NO: 1904286 - RNA, 19 nt, Homo sapiens
  misc_RNA (1)...(19): siRNA sense strand
gauaaaggauguuguuguc

SEQ ID NO: 1904287 - RNA, 19 nt, Homo sapiens
  misc_RNA (1)...(19): siRNA sense strand
ugaagagccuuggcaauaa

SEQ ID NO: 1904288 - RNA, 19 nt, Homo sapiens
  misc_RNA (1)...(19): siRNA sense strand
ucuagaagcuguauggaaa

SEQ ID NO: 1904289 - RNA, 19 nt, Homo sapiens
  misc_RNA (1)...(19): siRNA sense strand
ggaacuaccugagccagaa

SEQ ID NO: 1904290 - RNA, 19 nt, Homo sapiens
  misc_RNA (1)...(19): siRNA sense strand
gaucaggacuucuaugcau

SEQ ID NO: 1904291 - RNA, 19 nt, Homo sapiens
  misc_RNA (1)...(19): siRNA sense strand
cggaauaacuuagccauga

SEQ ID NO: 1904292 - RNA, 19 nt, Homo sapiens
  misc_RNA (1)...(19): siRNA sense strand
ggaaguugcuccgauggaa

SEQ ID NO: 1904293 - RNA, 19 nt, Homo sapiens
  misc_RNA (1)...(19): siRNA sense strand
uaaaggauguuguugucaa

SEQ ID NO: 1904294 - RNA, 19 nt, Homo sapiens
  misc_RNA (1)...(19): siRNA sense strand
gggagaagauaaaggaugu

SEQ ID NO: 1904295 - RNA, 19 nt, Homo sapiens
  misc_RNA (1)...(19): siRNA sense strand
ccagugggcucaaucacaa

SEQ ID NO: 1904296 - RNA, 19 nt, Homo sapiens
  misc_RNA (1)...(19): siRNA sense strand
aagaaagccuauuaucuga

SEQ ID NO: 1904297 - RNA, 19 nt, Homo sapiens
  misc_RNA (1)...(19): siRNA sense strand
gaagagccuuggcaauaag

SEQ ID NO: 1904298 - RNA, 19 nt, Homo sapiens
  misc_RNA (1)...(19): siRNA sense strand
ggaaaccuccugcgguaaa

SEQ ID NO: 1904299 - RNA, 19 nt, Homo sapiens
  misc_RNA (1)...(19): siRNA sense strand
guaauugacuccucagcau

SEQ ID NO: 1904300 - RNA, 19 nt, Homo sapiens
  misc_RNA (1)...(19): siRNA sense strand
caaagcuccugugagguua

SEQ ID NO: 1904301 - RNA, 19 nt, Homo sapiens
  misc_RNA (1)...(19): siRNA sense strand
gauauuaguucagcuacug

SEQ ID NO: 1904302 - RNA, 19 nt, Homo sapiens
  misc_RNA (1)...(19): siRNA sense strand
acagagguaucuacacaaa

SEQ ID NO: 1904303 - RNA, 19 nt, Homo sapiens
  misc_RNA (1)...(19): siRNA sense strand
gacugaagauacagaagaa

SEQ ID NO: 1904304 - RNA, 19 nt, Homo sapiens
  misc_RNA (1)...(19): siRNA sense strand
gccacgauauuucaacauu

SEQ ID NO: 1904305 - RNA, 19 nt, Homo sapiens
  misc_RNA (1)...(19): siRNA sense strand
uagcugccaugaacucuuu

SEQ ID NO: 1904306 - RNA, 19 nt, Homo sapiens
  misc_RNA (1)...(19): siRNA sense strand
ccaacuacagugucaauaa

SEQ ID NO: 1904307 - RNA, 19 nt, Homo sapiens
  misc_RNA (1)...(19): siRNA sense strand
cacaugaagucuccuaguu

SEQ ID NO: 1904308 - RNA, 19 nt, Homo sapiens
  misc_RNA (1)...(19): siRNA sense strand
caagaggcuuugagaagau

SEQ ID NO: 1904309 - RNA, 19 nt, Homo sapiens
  misc_RNA (1)...(19): siRNA sense strand
cucaaaggaugacgugaua

SEQ ID NO: 1904310 - RNA, 19 nt, Homo sapiens
  misc_RNA (1)...(19): siRNA sense strand
gcaggaacacagcacuaua

SEQ ID NO: 1904311 - RNA, 19 nt, Homo sapiens
  misc_RNA (1)...(19): siRNA sense strand
gcacagaagaugaagaaag

SEQ ID NO: 1904312 - RNA, 19 nt, Homo sapiens
  misc_RNA (1)...(19): siRNA sense strand
gaagcuguauggaaauucu

SEQ ID NO: 1904313 - RNA, 19 nt, Homo sapiens
  misc_RNA (1)...(19): siRNA sense strand
uauaagcccaugcugaaua

SEQ ID NO: 1904314 - RNA, 19 nt, Homo sapiens
  misc_RNA (1)...(19): siRNA sense strand
caugaagucuccuaguuuc

SEQ ID NO: 1904315 - RNA, 19 nt, Homo sapiens
  misc_RNA (1)...(19): siRNA sense strand
gcgaaucgguggccaugau

SEQ ID NO: 1904316 - RNA, 19 nt, Homo sapiens
  misc_RNA (1)...(19): siRNA sense strand
gguauaaccggaauaacuu

SEQ ID NO: 1904317 - RNA, 19 nt, Homo sapiens
  misc_RNA (1)...(19): siRNA sense strand
gagguuagccuacuacucu

SEQ ID NO: 1904318 - RNA, 19 nt, Homo sapiens
  misc_RNA (1)...(19): siRNA sense strand
ucaugcaccugaccaacua

SEQ ID NO: 1904319 - RNA, 19 nt, Homo sapiens
  misc_RNA (1)...(19): siRNA sense strand
ggaacacagcacuauagua

SEQ ID NO: 1904320 - RNA, 19 nt, Homo sapiens
  misc_RNA (1)...(19): siRNA sense strand
guauggaaauucugaccaa

SEQ ID NO: 1904321 - RNA, 19 nt, Homo sapiens
  misc_RNA (1)...(19): siRNA sense strand
gaagaagaacuaguagaug

SEQ ID NO: 1904322 - RNA, 19 nt, Homo sapiens
  misc_RNA (1)...(19): siRNA sense strand
acuaguagaugguuuggaa

SEQ ID NO: 1904323 - RNA, 19 nt, Homo sapiens
  misc_RNA (1)...(19): siRNA sense strand
gcaugucacugcacagaag

SEQ ID NO: 1904324 - RNA, 19 nt, Homo sapiens
  misc_RNA (1)...(19): siRNA sense strand
ggauuuaccucuuuucaga

SEQ ID NO: 1904325 - RNA, 19 nt, Homo sapiens
  misc_RNA (1)...(19): siRNA sense strand
caucagaagcuaaaccauu

SEQ ID NO: 1904326 - RNA, 19 nt, Homo sapiens
  misc_RNA (1)...(19): siRNA sense strand
ggcauuggcauccagguua

SEQ ID NO: 1904327 - RNA, 19 nt, Homo sapiens
  misc_RNA (1)...(19): siRNA sense strand
ggaccacgcccaaauccaa

SEQ ID NO: 1904328 - RNA, 19 nt, Homo sapiens
  misc_RNA (1)...(19): siRNA sense strand
caaaagagccucccuguca

SEQ ID NO: 1904329 - RNA, 19 nt, Homo sapiens
  misc_RNA (1)...(19): siRNA sense strand
gaaacccaguuccucaaag

SEQ ID NO: 1904330 - RNA, 19 nt, Homo sapiens
  misc_RNA (1)...(19): siRNA sense strand
ugagauggaagaugaguuu

SEQ ID NO: 1904331 - RNA, 19 nt, Homo sapiens
  misc_RNA (1)...(19): siRNA sense strand
gcauccagguuauucacaa

SEQ ID NO: 1904332 - RNA, 19 nt, Homo sapiens
  misc_RNA (1)...(19): siRNA sense strand
gcauuggcauccagguuau

SEQ ID NO: 1904333 - RNA, 19 nt, Homo sapiens
  misc_RNA (1)...(19): siRNA sense strand
gaccacggcugucauugca

SEQ ID NO: 1904334 - RNA, 19 nt, Homo sapiens
  misc_RNA (1)...(19): siRNA sense strand
gcaaaucagagacuagcaa

SEQ ID NO: 1904335 - RNA, 19 nt, Homo sapiens
  misc_RNA (1)...(19): siRNA sense strand
gagcagccacgauauuuca

SEQ ID NO: 1904336 - RNA, 19 nt, Homo sapiens
  misc_RNA (1)...(19): siRNA sense strand
gauggaagaugagcacagu

SEQ ID NO: 1904337 - RNA, 19 nt, Homo sapiens
  misc_RNA (1)...(19): siRNA sense strand
ggaauaacuuagccaugag

SEQ ID NO: 1904338 - RNA, 19 nt, Homo sapiens
  misc_RNA (1)...(19): siRNA sense strand
auaagcccaugcugaauaa

SEQ ID NO: 1904339 - RNA, 19 nt, Homo sapiens
  misc_RNA (1)...(19): siRNA sense strand
gaucccaucuccacucucu

SEQ ID NO: 1904340 - RNA, 19 nt, Homo sapiens
  misc_RNA (1)...(19): siRNA sense strand
aaaggauguuguugucaaa

SEQ ID NO: 1904341 - RNA, 19 nt, Homo sapiens
  misc_RNA (1)...(19): siRNA sense strand
ggcggaaccugucacguau

SEQ ID NO: 1904342 - RNA, 19 nt, Homo sapiens
  misc_RNA (1)...(19): siRNA sense strand
gagagcaucagaagcuaaa

SEQ ID NO: 1904343 - RNA, 19 nt, Homo sapiens
  misc_RNA (1)...(19): siRNA sense strand
gaccagcccucaucuacag

SEQ ID NO: 1904344 - RNA, 19 nt, Homo sapiens
  misc_RNA (1)...(19): siRNA sense strand
guauaaccggaauaacuua

SEQ ID NO: 1904345 - RNA, 19 nt, Homo sapiens
  misc_RNA (1)...(19): siRNA sense strand
ggaguugucucugauucug

SEQ ID NO: 1904346 - RNA, 19 nt, Homo sapiens
  misc_RNA (1)...(19): siRNA sense strand
aaacuaucaucucgucaga

SEQ ID NO: 1904347 - RNA, 19 nt, Homo sapiens
  misc_RNA (1)...(19): siRNA sense strand
acacaaacccuaccucauc

SEQ ID NO: 1904348 - RNA, 19 nt, Homo sapiens
  misc_RNA (1)...(19): siRNA sense strand
aucagaagcuaaaccauuu

SEQ ID NO: 1904349 - RNA, 19 nt, Homo sapiens
  misc_RNA (1)...(19): siRNA sense strand
ccagccagcauauuucuuu

SEQ ID NO: 1904350 - RNA, 19 nt, Homo sapiens
  misc_RNA (1)...(19): siRNA sense strand
uacagaagaagaacuagua

SEQ ID NO: 1904351 - RNA, 19 nt, Homo sapiens
  misc_RNA (1)...(19): siRNA sense strand
gaaaccuccugcgguaaau

SEQ ID NO: 1904352 - RNA, 19 nt, Homo sapiens
  misc_RNA (1)...(19): siRNA sense strand
gccaugaucucuagaagcu

SEQ ID NO: 1904353 - RNA, 19 nt, Homo sapiens
  misc_RNA (1)...(19): siRNA sense strand
cuacaaaggguuccacaug

SEQ ID NO: 1904354 - RNA, 19 nt, Homo sapiens
  misc_RNA (1)...(19): siRNA sense strand
agaugaagaaagccuauua

SEQ ID NO: 1904355 - RNA, 19 nt, Homo sapiens
  misc_RNA (1)...(19): siRNA sense strand
gaagaugaagaaagccuau

SEQ ID NO: 1904356 - RNA, 19 nt, Homo sapiens
  misc_RNA (1)...(19): siRNA sense strand
gaccugcggaucuauguuu

SEQ ID NO: 1904357 - RNA, 19 nt, Homo sapiens
  misc_RNA (1)...(19): siRNA sense strand
gagagcagcagccgccaaa

SEQ ID NO: 1904358 - RNA, 19 nt, Homo sapiens
  misc_RNA (1)...(19): siRNA sense strand
gaagaacuaguagaugguu

SEQ ID NO: 1904359 - RNA, 19 nt, Homo sapiens
  misc_RNA (1)...(19): siRNA sense strand
gaugaagaaagccuauuau

SEQ ID NO: 1904360 - RNA, 19 nt, Homo sapiens
  misc_RNA (1)...(19): siRNA sense strand
caucagcggcagcaaguuu

SEQ ID NO: 1904361 - RNA, 19 nt, Homo sapiens
  misc_RNA (1)...(19): siRNA sense strand
cacaaacccuaccucauca

SEQ ID NO: 1904362 - RNA, 19 nt, Homo sapiens
  misc_RNA (1)...(19): siRNA sense strand
uagaagcuguauggaaauu

SEQ ID NO: 1904363 - RNA, 19 nt, Homo sapiens
  misc_RNA (1)...(19): siRNA sense strand
ccaacaaggccacuucuuc

SEQ ID NO: 1904364 - RNA, 19 nt, Homo sapiens
  misc_RNA (1)...(19): siRNA sense strand
acaaagcuccugugagguu

SEQ ID NO: 1904365 - RNA, 19 nt, Homo sapiens
  misc_RNA (1)...(19): siRNA sense strand
ugguugagauggaagauga

SEQ ID NO: 1904366 - RNA, 19 nt, Homo sapiens
  misc_RNA (1)...(19): siRNA sense strand
ugaagaaagccuauuaucu

SEQ ID NO: 1904367 - RNA, 19 nt, Homo sapiens
  misc_RNA (1)...(19): siRNA sense strand
ccagccugcucaagaugua

SEQ ID NO: 1904368 - RNA, 19 nt, Homo sapiens
  misc_RNA (1)...(19): siRNA sense strand
ugaccagccugcucaagau

SEQ ID NO: 1904369 - RNA, 19 nt, Homo sapiens
  misc_RNA (1)...(19): siRNA sense strand
aaugggcacugaaggcuuu

SEQ ID NO: 1904370 - RNA, 19 nt, Homo sapiens
  misc_RNA (1)...(19): siRNA sense strand
ccuauaagcccaugcugaa

SEQ ID NO: 1904371 - RNA, 19 nt, Homo sapiens
  misc_RNA (1)...(19): siRNA sense strand
cgaacaaagugcugaggua

SEQ ID NO: 1904372 - RNA, 19 nt, Homo sapiens
  misc_RNA (1)...(19): siRNA sense strand
cgaagcaaaugaugaguag

SEQ ID NO: 1904373 - RNA, 19 nt, Homo sapiens
  misc_RNA (1)...(19): siRNA sense strand
acaaagugcugagguacaa

SEQ ID NO: 1904374 - RNA, 19 nt, Homo sapiens
  misc_RNA (1)...(19): siRNA sense strand
caaaugaugaguagcuuca

SEQ ID NO: 1904375 - RNA, 19 nt, Homo sapiens
  misc_RNA (1)...(19): siRNA sense strand
gugcuugggucgcugucua

SEQ ID NO: 1904376 - RNA, 19 nt, Homo sapiens
  misc_RNA (1)...(19): siRNA sense strand
ggacacgaagcaaaugaug

SEQ ID NO: 1904377 - RNA, 19 nt, Homo sapiens
  misc_RNA (1)...(19): siRNA sense strand
ccacggaggccgaacaaag

SEQ ID NO: 1904378 - RNA, 19 nt, Homo sapiens
  misc_RNA (1)...(19): siRNA sense strand
gaggacacgaagcaaauga

SEQ ID NO: 1904379 - RNA, 19 nt, Homo sapiens
  misc_RNA (1)...(19): siRNA sense strand
caucagcuuugccaacucu

SEQ ID NO: 1904380 - RNA, 19 nt, Homo sapiens
  misc_RNA (1)...(19): siRNA sense strand
gacacgaagcaaaugauga

SEQ ID NO: 1904381 - RNA, 19 nt, Homo sapiens
  misc_RNA (1)...(19): siRNA sense strand
ugugcggccucaugcuuaa

SEQ ID NO: 1904382 - RNA, 19 nt, Homo sapiens
  misc_RNA (1)...(19): siRNA sense strand
gauguccuaucugcagaau

SEQ ID NO: 1904383 - RNA, 19 nt, Homo sapiens
  misc_RNA (1)...(19): siRNA sense strand
gcucggaggacacgaagca

SEQ ID NO: 1904384 - RNA, 19 nt, Homo sapiens
  misc_RNA (1)...(19): siRNA sense strand
ggagcucggaggacacgaa

SEQ ID NO: 1904385 - RNA, 19 nt, Homo sapiens
  misc_RNA (1)...(19): siRNA sense strand
ggaggacacgaagcaaaug

SEQ ID NO: 1904386 - RNA, 19 nt, Homo sapiens
  misc_RNA (1)...(19): siRNA sense strand
gcugucuacugcuccuuca

SEQ ID NO: 1904387 - RNA, 19 nt, Homo sapiens
  misc_RNA (1)...(19): siRNA sense strand
uguccuaucugcagaaucc

SEQ ID NO: 1904388 - RNA, 19 nt, Homo sapiens
  misc_RNA (1)...(19): siRNA sense strand
cggaggacacgaagcaaau

SEQ ID NO: 1904389 - RNA, 19 nt, Homo sapiens
  misc_RNA (1)...(19): siRNA sense strand
acgaagcaaaugaugagua

SEQ ID NO: 1904390 - RNA, 19 nt, Homo sapiens
  misc_RNA (1)...(19): siRNA sense strand
cgacgccggacuacaugaa

SEQ ID NO: 1904391 - RNA, 19 nt, Homo sapiens
  misc_RNA (1)...(19): siRNA sense strand
cagaauccucagcccauga

SEQ ID NO: 1904392 - RNA, 19 nt, Homo sapiens
  misc_RNA (1)...(19): siRNA sense strand
acacgaagcaaaugaugag

SEQ ID NO: 1904393 - RNA, 19 nt, Homo sapiens
  misc_RNA (1)...(19): siRNA sense strand
gaaccugcugggcaugauc

SEQ ID NO: 1904394 - RNA, 19 nt, Homo sapiens
  misc_RNA (1)...(19): siRNA sense strand
gcaagaacguguagcaaua

SEQ ID NO: 1904395 - RNA, 19 nt, Homo sapiens
  misc_RNA (1)...(19): siRNA sense strand
gaaaggaacuuaaugacau

SEQ ID NO: 1904396 - RNA, 19 nt, Homo sapiens
  misc_RNA (1)...(19): siRNA sense strand
uauaguggcugcuaauuua

SEQ ID NO: 1904397 - RNA, 19 nt, Homo sapiens
  misc_RNA (1)...(19): siRNA sense strand
gaacagagaguaccugauu

SEQ ID NO: 1904398 - RNA, 19 nt, Homo sapiens
  misc_RNA (1)...(19): siRNA sense strand
gagaguaccugauugagaa

SEQ ID NO: 1904399 - RNA, 19 nt, Homo sapiens
  misc_RNA (1)...(19): siRNA sense strand
caguauggaugaacuauua

SEQ ID NO: 1904400 - RNA, 19 nt, Homo sapiens
  misc_RNA (1)...(19): siRNA sense strand
ggucggagauuccugauga

SEQ ID NO: 1904401 - RNA, 19 nt, Homo sapiens
  misc_RNA (1)...(19): siRNA sense strand
caaauauccucccaugaaa

SEQ ID NO: 1904402 - RNA, 19 nt, Homo sapiens
  misc_RNA (1)...(19): siRNA sense strand
ucagaaagauccuuccaaa

SEQ ID NO: 1904403 - RNA, 19 nt, Homo sapiens
  misc_RNA (1)...(19): siRNA sense strand
gacauacgauuugaguuua

SEQ ID NO: 1904404 - RNA, 19 nt, Homo sapiens
  misc_RNA (1)...(19): siRNA sense strand
ggagauuccugaugaagug

SEQ ID NO: 1904405 - RNA, 19 nt, Homo sapiens
  misc_RNA (1)...(19): siRNA sense strand
gcaauaauagcaacaauuc

SEQ ID NO: 1904406 - RNA, 19 nt, Homo sapiens
  misc_RNA (1)...(19): siRNA sense strand
gauuguagaugaucccaaa

SEQ ID NO: 1904407 - RNA, 19 nt, Homo sapiens
  misc_RNA (1)...(19): siRNA sense strand
ccaacguagugaccuauua

SEQ ID NO: 1904408 - RNA, 19 nt, Homo sapiens
  misc_RNA (1)...(19): siRNA sense strand
uggaauaacugccauugaa

SEQ ID NO: 1904409 - RNA, 19 nt, Homo sapiens
  misc_RNA (1)...(19): siRNA sense strand
gaauaacugccauugaauu

SEQ ID NO: 1904410 - RNA, 19 nt, Homo sapiens
  misc_RNA (1)...(19): siRNA sense strand
gguagaggauaaagaaaug

SEQ ID NO: 1904411 - RNA, 19 nt, Homo sapiens
  misc_RNA (1)...(19): siRNA sense strand
gagguucaauguuggauau

SEQ ID NO: 1904412 - RNA, 19 nt, Homo sapiens
  misc_RNA (1)...(19): siRNA sense strand
gagcagcgccuuaucacaa

SEQ ID NO: 1904413 - RNA, 19 nt, Homo sapiens
  misc_RNA (1)...(19): siRNA sense strand
ugacauacgauuugaguuu

SEQ ID NO: 1904414 - RNA, 19 nt, Homo sapiens
  misc_RNA (1)...(19): siRNA sense strand
gaagagcgaagaagggaaa

SEQ ID NO: 1904415 - RNA, 19 nt, Homo sapiens
  misc_RNA (1)...(19): siRNA sense strand
cagcagaacuuuuaaaaug

SEQ ID NO: 1904416 - RNA, 19 nt, Homo sapiens
  misc_RNA (1)...(19): siRNA sense strand
acaaauauccucccaugaa

SEQ ID NO: 1904417 - RNA, 19 nt, Homo sapiens
  misc_RNA (1)...(19): siRNA sense strand
gaaagcugguaauauucuu

SEQ ID NO: 1904418 - RNA, 19 nt, Homo sapiens
  misc_RNA (1)...(19): siRNA sense strand
ccagaaaggaacuuaauga

SEQ ID NO: 1904419 - RNA, 19 nt, Homo sapiens
  misc_RNA (1)...(19): siRNA sense strand
gauguuacccgaaauaaag

SEQ ID NO: 1904420 - RNA, 19 nt, Homo sapiens
  misc_RNA (1)...(19): siRNA sense strand
gaggaugguucaguacaaa

SEQ ID NO: 1904421 - RNA, 19 nt, Homo sapiens
  misc_RNA (1)...(19): siRNA sense strand
ccaugaaaguguuaauguu

SEQ ID NO: 1904422 - RNA, 19 nt, Homo sapiens
  misc_RNA (1)...(19): siRNA sense strand
caaguggucaccuucauaa

SEQ ID NO: 1904423 - RNA, 19 nt, Homo sapiens
  misc_RNA (1)...(19): siRNA sense strand
gugcagccaucccaacgua

SEQ ID NO: 1904424 - RNA, 19 nt, Homo sapiens
  misc_RNA (1)...(19): siRNA sense strand
uuaagaaacuccagaaagg

SEQ ID NO: 1904425 - RNA, 19 nt, Homo sapiens
  misc_RNA (1)...(19): siRNA sense strand
gaaccucguuuugagauua

SEQ ID NO: 1904426 - RNA, 19 nt, Homo sapiens
  misc_RNA (1)...(19): siRNA sense strand
caacaggagcagcgccuua

SEQ ID NO: 1904427 - RNA, 19 nt, Homo sapiens
  misc_RNA (1)...(19): siRNA sense strand
guaagugcguuccuagcaa

SEQ ID NO: 1904428 - RNA, 19 nt, Homo sapiens
  misc_RNA (1)...(19): siRNA sense strand
uagaugaucccaaagcuuu

SEQ ID NO: 1904429 - RNA, 19 nt, Homo sapiens
  misc_RNA (1)...(19): siRNA sense strand
ggaugguucaguacaaaua

SEQ ID NO: 1904430 - RNA, 19 nt, Homo sapiens
  misc_RNA (1)...(19): siRNA sense strand
gggugaggaugguucagua

SEQ ID NO: 1904431 - RNA, 19 nt, Homo sapiens
  misc_RNA (1)...(19): siRNA sense strand
gaacuuuggcuggucauga

SEQ ID NO: 1904432 - RNA, 19 nt, Homo sapiens
  misc_RNA (1)...(19): siRNA sense strand
gaggauaaagaaaugauga

SEQ ID NO: 1904433 - RNA, 19 nt, Homo sapiens
  misc_RNA (1)...(19): siRNA sense strand
gagaggcuaugacuucaag

SEQ ID NO: 1904434 - RNA, 19 nt, Homo sapiens
  misc_RNA (1)...(19): siRNA sense strand
acacagaaacggucagauu

SEQ ID NO: 1904435 - RNA, 19 nt, Homo sapiens
  misc_RNA (1)...(19): siRNA sense strand
gaagaggcaauaauagcaa

SEQ ID NO: 1904436 - RNA, 19 nt, Homo sapiens
  misc_RNA (1)...(19): siRNA sense strand
gaggagaacacaagaaugg

SEQ ID NO: 1904437 - RNA, 19 nt, Homo sapiens
  misc_RNA (1)...(19): siRNA sense strand
gucaugaaauuacuaagug

SEQ ID NO: 1904438 - RNA, 19 nt, Homo sapiens
  misc_RNA (1)...(19): siRNA sense strand
ggugagaggcuaugacuuc

SEQ ID NO: 1904439 - RNA, 19 nt, Homo sapiens
  misc_RNA (1)...(19): siRNA sense strand
uaaugaagacuacagagaa

SEQ ID NO: 1904440 - RNA, 19 nt, Homo sapiens
  misc_RNA (1)...(19): siRNA sense strand
gguggauggucacgaugua

SEQ ID NO: 1904441 - RNA, 19 nt, Homo sapiens
  misc_RNA (1)...(19): siRNA sense strand
ggaacuuaaugacauacga

SEQ ID NO: 1904442 - RNA, 19 nt, Homo sapiens
  misc_RNA (1)...(19): siRNA sense strand
caagaacguguagcaauaa

SEQ ID NO: 1904443 - RNA, 19 nt, Homo sapiens
  misc_RNA (1)...(19): siRNA sense strand
ggaagaggcaauaauagca

SEQ ID NO: 1904444 - RNA, 19 nt, Homo sapiens
  misc_RNA (1)...(19): siRNA sense strand
gaauggaguucuggaagag

SEQ ID NO: 1904445 - RNA, 19 nt, Homo sapiens
  misc_RNA (1)...(19): siRNA sense strand
ggaauaacugccauugaau

SEQ ID NO: 1904446 - RNA, 19 nt, Homo sapiens
  misc_RNA (1)...(19): siRNA sense strand
ggaaaagucacgaagagua

SEQ ID NO: 1904447 - RNA, 19 nt, Homo sapiens
  misc_RNA (1)...(19): siRNA sense strand
gaaaagucacgaagaguaa

SEQ ID NO: 1904448 - RNA, 19 nt, Homo sapiens
  misc_RNA (1)...(19): siRNA sense strand
caugaaaguguuaauguug

SEQ ID NO: 1904449 - RNA, 19 nt, Homo sapiens
  misc_RNA (1)...(19): siRNA sense strand
aaacagggguagaggauaa

SEQ ID NO: 1904450 - RNA, 19 nt, Homo sapiens
  misc_RNA (1)...(19): siRNA sense strand
aaguggagguucaauguug

SEQ ID NO: 1904451 - RNA, 19 nt, Homo sapiens
  misc_RNA (1)...(19): siRNA sense strand
ccagaaagccaagaacaga

SEQ ID NO: 1904452 - RNA, 19 nt, Homo sapiens
  misc_RNA (1)...(19): siRNA sense strand
gauuugaaagcugguaaua

SEQ ID NO: 1904453 - RNA, 19 nt, Homo sapiens
  misc_RNA (1)...(19): siRNA sense strand
ucuggaagaggcaauaaua

SEQ ID NO: 1904454 - RNA, 19 nt, Homo sapiens
  misc_RNA (1)...(19): siRNA sense strand
gcugcuaauuuacagaaga

SEQ ID NO: 1904455 - RNA, 19 nt, Homo sapiens
  misc_RNA (1)...(19): siRNA sense strand
ggugauguuacccgaaaua

SEQ ID NO: 1904456 - RNA, 19 nt, Homo sapiens
  misc_RNA (1)...(19): siRNA sense strand
gaacuuaaugacauacgau

SEQ ID NO: 1904457 - RNA, 19 nt, Homo sapiens
  misc_RNA (1)...(19): siRNA sense strand
aaacggaucaacuuggaaa

SEQ ID NO: 1904458 - RNA, 19 nt, Homo sapiens
  misc_RNA (1)...(19): siRNA sense strand
gauuggguuugcucaguug

SEQ ID NO: 1904459 - RNA, 19 nt, Homo sapiens
  misc_RNA (1)...(19): siRNA sense strand
ugaggaugguucaguacaa

SEQ ID NO: 1904460 - RNA, 19 nt, Homo sapiens
  misc_RNA (1)...(19): siRNA sense strand
ucaggcagcccuaugcaaa

SEQ ID NO: 1904461 - RNA, 19 nt, Homo sapiens
  misc_RNA (1)...(19): siRNA sense strand
gauggucacgauguaguua

SEQ ID NO: 1904462 - RNA, 19 nt, Homo sapiens
  misc_RNA (1)...(19): siRNA sense strand
ucaaguggucaccuucaua

SEQ ID NO: 1904463 - RNA, 19 nt, Homo sapiens
  misc_RNA (1)...(19): siRNA sense strand
ggcaauaauagcaacaauu

SEQ ID NO: 1904464 - RNA, 19 nt, Homo sapiens
  misc_RNA (1)...(19): siRNA sense strand
gaugaucccaaagcuuuaa

SEQ ID NO: 1904465 - RNA, 19 nt, Homo sapiens
  misc_RNA (1)...(19): siRNA sense strand
gauuaagaaacuccagaaa

SEQ ID NO: 1904466 - RNA, 19 nt, Homo sapiens
  misc_RNA (1)...(19): siRNA sense strand
gcaaguccuuuagaaaauu

SEQ ID NO: 1904467 - RNA, 19 nt, Homo sapiens
  misc_RNA (1)...(19): siRNA sense strand
uaacugccauugaauuagc

SEQ ID NO: 1904468 - RNA, 19 nt, Homo sapiens
  misc_RNA (1)...(19): siRNA sense strand
gauggcuccugaagucaug

SEQ ID NO: 1904469 - RNA, 19 nt, Homo sapiens
  misc_RNA (1)...(19): siRNA sense strand
ggucaugaaauuacuaagu

SEQ ID NO: 1904470 - RNA, 19 nt, Homo sapiens
  misc_RNA (1)...(19): siRNA sense strand
ccaaugcuaaugaagacua

SEQ ID NO: 1904471 - RNA, 19 nt, Homo sapiens
  misc_RNA (1)...(19): siRNA sense strand
ggagguucaauguuggaua

SEQ ID NO: 1904472 - RNA, 19 nt, Homo sapiens
  misc_RNA (1)...(19): siRNA sense strand
ucacagggauuugaaagcu

SEQ ID NO: 1904473 - RNA, 19 nt, Homo sapiens
  misc_RNA (1)...(19): siRNA sense strand
gcuaauuuacagaagauug

SEQ ID NO: 1904474 - RNA, 19 nt, Homo sapiens
  misc_RNA (1)...(19): siRNA sense strand
aagaacguguagcaauaaa

SEQ ID NO: 1904475 - RNA, 19 nt, Homo sapiens
  misc_RNA (1)...(19): siRNA sense strand
gcccacagcagcagaacuu

SEQ ID NO: 1904476 - RNA, 19 nt, Homo sapiens
  misc_RNA (1)...(19): siRNA sense strand
ggguagaggauaaagaaau

SEQ ID NO: 1904477 - RNA, 19 nt, Homo sapiens
  misc_RNA (1)...(19): siRNA sense strand
uacccgaaauaaaguaaga

SEQ ID NO: 1904478 - RNA, 19 nt, Homo sapiens
  misc_RNA (1)...(19): siRNA sense strand
aggaagagauacagcagau

SEQ ID NO: 1904479 - RNA, 19 nt, Homo sapiens
  misc_RNA (1)...(19): siRNA sense strand
acgacgagauggaugagaa

SEQ ID NO: 1904480 - RNA, 19 nt, Homo sapiens
  misc_RNA (1)...(19): siRNA sense strand
ggcaagaacguguagcaau

SEQ ID NO: 1904481 - RNA, 19 nt, Homo sapiens
  misc_RNA (1)...(19): siRNA sense strand
acagagaguaccugauuga

SEQ ID NO: 1904482 - RNA, 19 nt, Homo sapiens
  misc_RNA (1)...(19): siRNA sense strand
gaacaggugagaggcuaug

SEQ ID NO: 1904483 - RNA, 19 nt, Homo sapiens
  misc_RNA (1)...(19): siRNA sense strand
uaaaacggaucaacuugga

SEQ ID NO: 1904484 - RNA, 19 nt, Homo sapiens
  misc_RNA (1)...(19): siRNA sense strand
ugauuggguuugcucaguu

SEQ ID NO: 1904485 - RNA, 19 nt, Homo sapiens
  misc_RNA (1)...(19): siRNA sense strand
uuauaguggcugcuaauuu

SEQ ID NO: 1904486 - RNA, 19 nt, Homo sapiens
  misc_RNA (1)...(19): siRNA sense strand
uggucacgauguaguuaua

SEQ ID NO: 1904487 - RNA, 19 nt, Homo sapiens
  misc_RNA (1)...(19): siRNA sense strand
cuaaugaagacuacagaga

SEQ ID NO: 1904488 - RNA, 19 nt, Homo sapiens
  misc_RNA (1)...(19): siRNA sense strand
aggcugacauguggaguuu

SEQ ID NO: 1904489 - RNA, 19 nt, Homo sapiens
  misc_RNA (1)...(19): siRNA sense strand
guacggcaaguccuuuaga

SEQ ID NO: 1904490 - RNA, 19 nt, Homo sapiens
  misc_RNA (1)...(19): siRNA sense strand
gaugaagugaagcugauug

SEQ ID NO: 1904491 - RNA, 19 nt, Homo sapiens
  misc_RNA (1)...(19): siRNA sense strand
cuuaaugacauacgauuug

SEQ ID NO: 1904492 - RNA, 19 nt, Homo sapiens
  misc_RNA (1)...(19): siRNA sense strand
agaaaggaacuuaaugaca

SEQ ID NO: 1904493 - RNA, 19 nt, Homo sapiens
  misc_RNA (1)...(19): siRNA sense strand
ggagugacgacgagaugga

SEQ ID NO: 1904494 - RNA, 19 nt, Homo sapiens
  misc_RNA (1)...(19): siRNA sense strand
cagcaggucuuccagcuua

SEQ ID NO: 1904495 - RNA, 19 nt, Homo sapiens
  misc_RNA (1)...(19): siRNA sense strand
uuacacagcugacuacuga

SEQ ID NO: 1904496 - RNA, 19 nt, Homo sapiens
  misc_RNA (1)...(19): siRNA sense strand
ugaaggagauggugaagga

SEQ ID NO: 1904497 - RNA, 19 nt, Homo sapiens
  misc_RNA (1)...(19): siRNA sense strand
guagagcacuggcagaguu

SEQ ID NO: 1904498 - RNA, 19 nt, Homo sapiens
  misc_RNA (1)...(19): siRNA sense strand
agaaggugcucaaguguuu

SEQ ID NO: 1904499 - RNA, 19 nt, Homo sapiens
  misc_RNA (1)...(19): siRNA sense strand
gaaaggugguacaggaaga

SEQ ID NO: 1904500 - RNA, 19 nt, Homo sapiens
  misc_RNA (1)...(19): siRNA sense strand
uuaagacgcugcuggauga

SEQ ID NO: 1904501 - RNA, 19 nt, Homo sapiens
  misc_RNA (1)...(19): siRNA sense strand
ucgcuuaucucacccuaua

SEQ ID NO: 1904502 - RNA, 19 nt, Homo sapiens
  misc_RNA (1)...(19): siRNA sense strand
gcacucgucaacaugauua

SEQ ID NO: 1904503 - RNA, 19 nt, Homo sapiens
  misc_RNA (1)...(19): siRNA sense strand
gguacacacugcaggauga

SEQ ID NO: 1904504 - RNA, 19 nt, Homo sapiens
  misc_RNA (1)...(19): siRNA sense strand
cagacacgcucauguaugu

SEQ ID NO: 1904505 - RNA, 19 nt, Homo sapiens
  misc_RNA (1)...(19): siRNA sense strand
ccacaggccuggcacuuca

SEQ ID NO: 1904506 - RNA, 19 nt, Homo sapiens
  misc_RNA (1)...(19): siRNA sense strand
cagagaagcaggcuguaua

SEQ ID NO: 1904507 - RNA, 19 nt, Homo sapiens
  misc_RNA (1)...(19): siRNA sense strand
uaccagagauccaguacuu

SEQ ID NO: 1904508 - RNA, 19 nt, Homo sapiens
  misc_RNA (1)...(19): siRNA sense strand
auaagaaccuggcucagaa

SEQ ID NO: 1904509 - RNA, 19 nt, Homo sapiens
  misc_RNA (1)...(19): siRNA sense strand
aaggagcaguuccgaauuu

SEQ ID NO: 1904510 - RNA, 19 nt, Homo sapiens
  misc_RNA (1)...(19): siRNA sense strand
cuacuaugaucccaacauu

SEQ ID NO: 1904511 - RNA, 19 nt, Homo sapiens
  misc_RNA (1)...(19): siRNA sense strand
gaagcuggcagaggagaua

SEQ ID NO: 1904512 - RNA, 19 nt, Homo sapiens
  misc_RNA (1)...(19): siRNA sense strand
ccagugcucuucacaucaa

SEQ ID NO: 1904513 - RNA, 19 nt, Homo sapiens
  misc_RNA (1)...(19): siRNA sense strand
ucaugagccugcccacuuu

SEQ ID NO: 1904514 - RNA, 19 nt, Homo sapiens
  misc_RNA (1)...(19): siRNA sense strand
ugaaacagauccacaagac

SEQ ID NO: 1904515 - RNA, 19 nt, Homo sapiens
  misc_RNA (1)...(19): siRNA sense strand
aagaagaucugccgagagu

SEQ ID NO: 1904516 - RNA, 19 nt, Homo sapiens
  misc_RNA (1)...(19): siRNA sense strand
aaacagauccacaagacaa

SEQ ID NO: 1904517 - RNA, 19 nt, Homo sapiens
  misc_RNA (1)...(19): siRNA sense strand
ggacugcuuugccgauauc

SEQ ID NO: 1904518 - RNA, 19 nt, Homo sapiens
  misc_RNA (1)...(19): siRNA sense strand
gaaggagcaguuccgaauu

SEQ ID NO: 1904519 - RNA, 19 nt, Homo sapiens
  misc_RNA (1)...(19): siRNA sense strand
gccacuauccugucaauga

SEQ ID NO: 1904520 - RNA, 19 nt, Homo sapiens
  misc_RNA (1)...(19): siRNA sense strand
ucagcaaccucuaugacaa

SEQ ID NO: 1904521 - RNA, 19 nt, Homo sapiens
  misc_RNA (1)...(19): siRNA sense strand
ccagagauccaguacuuug

SEQ ID NO: 1904522 - RNA, 19 nt, Homo sapiens
  misc_RNA (1)...(19): siRNA sense strand
ggacuucacuguggagaac

SEQ ID NO: 1904523 - RNA, 19 nt, Homo sapiens
  misc_RNA (1)...(19): siRNA sense strand
gucagaaggugcucaagug

SEQ ID NO: 1904524 - RNA, 19 nt, Homo sapiens
  misc_RNA (1)...(19): siRNA sense strand
gacgucaacuauucugaug

SEQ ID NO: 1904525 - RNA, 19 nt, Homo sapiens
  misc_RNA (1)...(19): siRNA sense strand
ggccagugcucuucacauc

SEQ ID NO: 1904526 - RNA, 19 nt, Homo sapiens
  misc_RNA (1)...(19): siRNA sense strand
ggccauuguucacaucuug

SEQ ID NO: 1904527 - RNA, 19 nt, Homo sapiens
  misc_RNA (1)...(19): siRNA sense strand
ugcaccagcucuacuauga

SEQ ID NO: 1904528 - RNA, 19 nt, Homo sapiens
  misc_RNA (1)...(19): siRNA sense strand
cagauuuguuccuguguga

SEQ ID NO: 1904529 - RNA, 19 nt, Homo sapiens
  misc_RNA (1)...(19): siRNA sense strand
gcaccagccuuggacuuca

SEQ ID NO: 1904530 - RNA, 19 nt, Homo sapiens
  misc_RNA (1)...(19): siRNA sense strand
gagcaguuccgaauuuaca

SEQ ID NO: 1904531 - RNA, 19 nt, Homo sapiens
  misc_RNA (1)...(19): siRNA sense strand
gaucccaacauugagaaua

SEQ ID NO: 1904532 - RNA, 19 nt, Homo sapiens
  misc_RNA (1)...(19): siRNA sense strand
gcagauaugguacgacucu

SEQ ID NO: 1904533 - RNA, 19 nt, Homo sapiens
  misc_RNA (1)...(19): siRNA sense strand
cgucaacuauucugaugug

SEQ ID NO: 1904534 - RNA, 19 nt, Homo sapiens
  misc_RNA (1)...(19): siRNA sense strand
caugugcuguggcagauau

SEQ ID NO: 1904535 - RNA, 19 nt, Homo sapiens
  misc_RNA (1)...(19): siRNA sense strand
guaugucuaugagauguug

SEQ ID NO: 1904536 - RNA, 19 nt, Homo sapiens
  misc_RNA (1)...(19): siRNA sense strand
aggcaucccuggccacuau

SEQ ID NO: 1904537 - RNA, 19 nt, Homo sapiens
  misc_RNA (1)...(19): siRNA sense strand
uguuagagcugcugacagu

SEQ ID NO: 1904538 - RNA, 19 nt, Homo sapiens
  misc_RNA (1)...(19): siRNA sense strand
ugaacacacuccugaaacu

SEQ ID NO: 1904539 - RNA, 19 nt, Homo sapiens
  misc_RNA (1)...(19): siRNA sense strand
ggccuccuguggcuucuuu

SEQ ID NO: 1904540 - RNA, 19 nt, Homo sapiens
  misc_RNA (1)...(19): siRNA sense strand
acuaugaucccaacauuga

SEQ ID NO: 1904541 - RNA, 19 nt, Homo sapiens
  misc_RNA (1)...(19): siRNA sense strand
ucucagacacgcucaugua

SEQ ID NO: 1904542 - RNA, 19 nt, Homo sapiens
  misc_RNA (1)...(19): siRNA sense strand
ccaguucccuucugaugag

SEQ ID NO: 1904543 - RNA, 19 nt, Homo sapiens
  misc_RNA (1)...(19): siRNA sense strand
guugaaugaugcccagguu

SEQ ID NO: 1904544 - RNA, 19 nt, Homo sapiens
  misc_RNA (1)...(19): siRNA sense strand
ccacuauccugucaaugag

SEQ ID NO: 1904545 - RNA, 19 nt, Homo sapiens
  misc_RNA (1)...(19): siRNA sense strand
ccacaucuuugcucaugag

SEQ ID NO: 1904546 - RNA, 19 nt, Homo sapiens
  misc_RNA (1)...(19): siRNA sense strand
cauuggagcucugucugaa

SEQ ID NO: 1904547 - RNA, 19 nt, Homo sapiens
  misc_RNA (1)...(19): siRNA sense strand
caccagcucuacuaugauc

SEQ ID NO: 1904548 - RNA, 19 nt, Homo sapiens
  misc_RNA (1)...(19): siRNA sense strand
gcagagaagcaggcuguau

SEQ ID NO: 1904549 - RNA, 19 nt, Homo sapiens
  misc_RNA (1)...(19): siRNA sense strand
aggagcaguuccgaauuua

SEQ ID NO: 1904550 - RNA, 19 nt, Homo sapiens
  misc_RNA (1)...(19): siRNA sense strand
gaagcggaagccagauuug

SEQ ID NO: 1904551 - RNA, 19 nt, Homo sapiens
  misc_RNA (1)...(19): siRNA sense strand
guccacaucuuugcucaug

SEQ ID NO: 1904552 - RNA, 19 nt, Homo sapiens
  misc_RNA (1)...(19): siRNA sense strand
gccgagagugcaaguauga

SEQ ID NO: 1904553 - RNA, 19 nt, Homo sapiens
  misc_RNA (1)...(19): siRNA sense strand
gagaccaccagcucccuaa

SEQ ID NO: 1904554 - RNA, 19 nt, Homo sapiens
  misc_RNA (1)...(19): siRNA sense strand
gagcagcaccagccuugga

SEQ ID NO: 1904555 - RNA, 19 nt, Homo sapiens
  misc_RNA (1)...(19): siRNA sense strand
gaaacagauccacaagaca

SEQ ID NO: 1904556 - RNA, 19 nt, Homo sapiens
  misc_RNA (1)...(19): siRNA sense strand
agaaggagcaguuccgaau

SEQ ID NO: 1904557 - RNA, 19 nt, Homo sapiens
  misc_RNA (1)...(19): siRNA sense strand
ggugugcgcuaucuuugag

SEQ ID NO: 1904558 - RNA, 19 nt, Homo sapiens
  misc_RNA (1)...(19): siRNA sense strand
cccaggaugugcugaugaa

SEQ ID NO: 1904559 - RNA, 19 nt, Homo sapiens
  misc_RNA (1)...(19): siRNA sense strand
ucccuaugcugccaacauu

SEQ ID NO: 1904560 - RNA, 19 nt, Homo sapiens
  misc_RNA (1)...(19): siRNA sense strand
aggaugugcugaugaaaca

SEQ ID NO: 1904561 - RNA, 19 nt, Homo sapiens
  misc_RNA (1)...(19): siRNA sense strand
cagauuacacagcugacua

SEQ ID NO: 1904562 - RNA, 19 nt, Homo sapiens
  misc_RNA (1)...(19): siRNA sense strand
aucccaacauugagaauaa

SEQ ID NO: 1904563 - RNA, 19 nt, Homo sapiens
  misc_RNA (1)...(19): siRNA sense strand
gcggaagccagauuuguuc

SEQ ID NO: 1904564 - RNA, 19 nt, Homo sapiens
  misc_RNA (1)...(19): siRNA sense strand
ugaagcggaagccagauuu

SEQ ID NO: 1904565 - RNA, 19 nt, Homo sapiens
  misc_RNA (1)...(19): siRNA sense strand
gagcaaaugguugaaugau

SEQ ID NO: 1904566 - RNA, 19 nt, Homo sapiens
  misc_RNA (1)...(19): siRNA sense strand
aauaagaaccuggcucaga

SEQ ID NO: 1904567 - RNA, 19 nt, Homo sapiens
  misc_RNA (1)...(19): siRNA sense strand
cagaggagauacccaaucc

SEQ ID NO: 1904568 - RNA, 19 nt, Homo sapiens
  misc_RNA (1)...(19): siRNA sense strand
gcagaggagauacccaauc

SEQ ID NO: 1904569 - RNA, 19 nt, Homo sapiens
  misc_RNA (1)...(19): siRNA sense strand
gcccagagguacgugaaca

SEQ ID NO: 1904570 - RNA, 19 nt, Homo sapiens
  misc_RNA (1)...(19): siRNA sense strand
gggaaaggugguacaggaa

SEQ ID NO: 1904571 - RNA, 19 nt, Homo sapiens
  misc_RNA (1)...(19): siRNA sense strand
uuugagaagucuguuaaga

SEQ ID NO: 1904572 - RNA, 19 nt, Homo sapiens
  misc_RNA (1)...(19): siRNA sense strand
gaccucccauggcaucugu

SEQ ID NO: 1904573 - RNA, 19 nt, Homo sapiens
  misc_RNA (1)...(19): siRNA sense strand
gaacacacuccugaaacuc

SEQ ID NO: 1904574 - RNA, 19 nt, Homo sapiens
  misc_RNA (1)...(19): siRNA sense strand
acaagaggcgggugaagga

SEQ ID NO: 1904575 - RNA, 19 nt, Homo sapiens
  misc_RNA (1)...(19): siRNA sense strand
agacgcugcuggaugacuu

SEQ ID NO: 1904576 - RNA, 19 nt, Homo sapiens
  misc_RNA (1)...(19): siRNA sense strand
uuggagcucugucugaaug

SEQ ID NO: 1904577 - RNA, 19 nt, Homo sapiens
  misc_RNA (1)...(19): siRNA sense strand
ggcaggcagugcagaaugg

SEQ ID NO: 1904578 - RNA, 19 nt, Homo sapiens
  misc_RNA (1)...(19): siRNA sense strand
gaauuuacaggguggacau

SEQ ID NO: 1904579 - RNA, 19 nt, Homo sapiens
  misc_RNA (1)...(19): siRNA sense strand
gaacaagaggcgggugaag

SEQ ID NO: 1904580 - RNA, 19 nt, Homo sapiens
  misc_RNA (1)...(19): siRNA sense strand
ugaaugaugcccagguugu

SEQ ID NO: 1904581 - RNA, 19 nt, Homo sapiens
  misc_RNA (1)...(19): siRNA sense strand
cugagcaaaugguugaaug

SEQ ID NO: 1904582 - RNA, 19 nt, Homo sapiens
  misc_RNA (1)...(19): siRNA sense strand
gaugugcugaugaaacaga

SEQ ID NO: 1904583 - RNA, 19 nt, Homo sapiens
  misc_RNA (1)...(19): siRNA sense strand
ugaggcaccuacugucaag

SEQ ID NO: 1904584 - RNA, 19 nt, Homo sapiens
  misc_RNA (1)...(19): siRNA sense strand
cagaaggugcucaaguguu

SEQ ID NO: 1904585 - RNA, 19 nt, Homo sapiens
  misc_RNA (1)...(19): siRNA sense strand
gugcugugcuggcccucaa

SEQ ID NO: 1904586 - RNA, 19 nt, Homo sapiens
  misc_RNA (1)...(19): siRNA sense strand
ugugaacgauuggauguca

SEQ ID NO: 1904587 - RNA, 19 nt, Homo sapiens
  misc_RNA (1)...(19): siRNA sense strand
gcucgucaccuccgucaca

SEQ ID NO: 1904588 - RNA, 19 nt, Homo sapiens
  misc_RNA (1)...(19): siRNA sense strand
aaccugcacucgcuuaucu

SEQ ID NO: 1904589 - RNA, 19 nt, Homo sapiens
  misc_RNA (1)...(19): siRNA sense strand
uguccacccucaagaagau

SEQ ID NO: 1904590 - RNA, 19 nt, Homo sapiens
  misc_RNA (1)...(19): siRNA sense strand
cgugaacacacuccugaaa

SEQ ID NO: 1904591 - RNA, 19 nt, Homo sapiens
  misc_RNA (1)...(19): siRNA sense strand
ucuuccagcuuauccagaa

SEQ ID NO: 1904592 - RNA, 19 nt, Homo sapiens
  misc_RNA (1)...(19): siRNA sense strand
gcgagcgagugaacaagag

SEQ ID NO: 1904593 - RNA, 19 nt, Homo sapiens
  misc_RNA (1)...(19): siRNA sense strand
gacagcugguccacaucuu

SEQ ID NO: 1904594 - RNA, 19 nt, Homo sapiens
  misc_RNA (1)...(19): siRNA sense strand
gaauacaacuguuuccuuu

SEQ ID NO: 1904595 - RNA, 19 nt, Homo sapiens
  misc_RNA (1)...(19): siRNA sense strand
ccacagagcuuucacaaau

SEQ ID NO: 1904596 - RNA, 19 nt, Homo sapiens
  misc_RNA (1)...(19): siRNA sense strand
ggaguucgauuuagauauu

SEQ ID NO: 1904597 - RNA, 19 nt, Homo sapiens
  misc_RNA (1)...(19): siRNA sense strand
caacaaggauuuccacaga

SEQ ID NO: 1904598 - RNA, 19 nt, Homo sapiens
  misc_RNA (1)...(19): siRNA sense strand
gcgagggucuuauugaauu

SEQ ID NO: 1904599 - RNA, 19 nt, Homo sapiens
  misc_RNA (1)...(19): siRNA sense strand
uuaaagggcucuuccagaa

SEQ ID NO: 1904600 - RNA, 19 nt, Homo sapiens
  misc_RNA (1)...(19): siRNA sense strand
gaauauggcuauccuacuc

SEQ ID NO: 1904601 - RNA, 19 nt, Homo sapiens
  misc_RNA (1)...(19): siRNA sense strand
ugacaccuaucaaguauga

SEQ ID NO: 1904602 - RNA, 19 nt, Homo sapiens
  misc_RNA (1)...(19): siRNA sense strand
cuacaucacuuugaacgua

SEQ ID NO: 1904603 - RNA, 19 nt, Homo sapiens
  misc_RNA (1)...(19): siRNA sense strand
ccacaagccuuuccuacau

SEQ ID NO: 1904604 - RNA, 19 nt, Homo sapiens
  misc_RNA (1)...(19): siRNA sense strand
gaacgccuuugcuucugua

SEQ ID NO: 1904605 - RNA, 19 nt, Homo sapiens
  misc_RNA (1)...(19): siRNA sense strand
gaggcucuauggccgauua

SEQ ID NO: 1904606 - RNA, 19 nt, Homo sapiens
  misc_RNA (1)...(19): siRNA sense strand
ccacauuccuccauugaga

SEQ ID NO: 1904607 - RNA, 19 nt, Homo sapiens
  misc_RNA (1)...(19): siRNA sense strand
cacauacgcuugcagcuuu

SEQ ID NO: 1904608 - RNA, 19 nt, Homo sapiens
  misc_RNA (1)...(19): siRNA sense strand
agagagcgcucaacaagga

SEQ ID NO: 1904609 - RNA, 19 nt, Homo sapiens
  misc_RNA (1)...(19): siRNA sense strand
uuacaagacugacaccuau

SEQ ID NO: 1904610 - RNA, 19 nt, Homo sapiens
  misc_RNA (1)...(19): siRNA sense strand
uugcauagcuauccucauu

SEQ ID NO: 1904611 - RNA, 19 nt, Homo sapiens
  misc_RNA (1)...(19): siRNA sense strand
gaagcuauuuugcaugaua

SEQ ID NO: 1904612 - RNA, 19 nt, Homo sapiens
  misc_RNA (1)...(19): siRNA sense strand
gacccuagcuaccacauuc

SEQ ID NO: 1904613 - RNA, 19 nt, Homo sapiens
  misc_RNA (1)...(19): siRNA sense strand
caugauauuucaagcaaug

SEQ ID NO: 1904614 - RNA, 19 nt, Homo sapiens
  misc_RNA (1)...(19): siRNA sense strand
gguggagguugcaguauga

SEQ ID NO: 1904615 - RNA, 19 nt, Homo sapiens
  misc_RNA (1)...(19): siRNA sense strand
gauauugaucccaacauuu

SEQ ID NO: 1904616 - RNA, 19 nt, Homo sapiens
  misc_RNA (1)...(19): siRNA sense strand
cagcgagggucuuauugaa

SEQ ID NO: 1904617 - RNA, 19 nt, Homo sapiens
  misc_RNA (1)...(19): siRNA sense strand
caucaugggauucuucuuu

SEQ ID NO: 1904618 - RNA, 19 nt, Homo sapiens
  misc_RNA (1)...(19): siRNA sense strand
caagagagcgcucaacaag

SEQ ID NO: 1904619 - RNA, 19 nt, Homo sapiens
  misc_RNA (1)...(19): siRNA sense strand
ggacugguuuucauccuua

SEQ ID NO: 1904620 - RNA, 19 nt, Homo sapiens
  misc_RNA (1)...(19): siRNA sense strand
cgacucuccuuuccaauuc

SEQ ID NO: 1904621 - RNA, 19 nt, Homo sapiens
  misc_RNA (1)...(19): siRNA sense strand
ccuaacagcuaaugauaag

SEQ ID NO: 1904622 - RNA, 19 nt, Homo sapiens
  misc_RNA (1)...(19): siRNA sense strand
guaauuuggaguucgauuu

SEQ ID NO: 1904623 - RNA, 19 nt, Homo sapiens
  misc_RNA (1)...(19): siRNA sense strand
ugaagcaucugcagaggau

SEQ ID NO: 1904624 - RNA, 19 nt, Homo sapiens
  misc_RNA (1)...(19): siRNA sense strand
uaaguggaauuacguuaca

SEQ ID NO: 1904625 - RNA, 19 nt, Homo sapiens
  misc_RNA (1)...(19): siRNA sense strand
ugggacccguuucuaaaua

SEQ ID NO: 1904626 - RNA, 19 nt, Homo sapiens
  misc_RNA (1)...(19): siRNA sense strand
cugcuugguuucuucauuu

SEQ ID NO: 1904627 - RNA, 19 nt, Homo sapiens
  misc_RNA (1)...(19): siRNA sense strand
agauauugaucccaacauu

SEQ ID NO: 1904628 - RNA, 19 nt, Homo sapiens
  misc_RNA (1)...(19): siRNA sense strand
gacugacaccuaucaagua

SEQ ID NO: 1904629 - RNA, 19 nt, Homo sapiens
  misc_RNA (1)...(19): siRNA sense strand
caaggugucauauacaaug

SEQ ID NO: 1904630 - RNA, 19 nt, Homo sapiens
  misc_RNA (1)...(19): siRNA sense strand
gaaggccagugcucucaag

SEQ ID NO: 1904631 - RNA, 19 nt, Homo sapiens
  misc_RNA (1)...(19): siRNA sense strand
gaccagagcagaguacaug

SEQ ID NO: 1904632 - RNA, 19 nt, Homo sapiens
  misc_RNA (1)...(19): siRNA sense strand
cuacauuccugcucacaca

SEQ ID NO: 1904633 - RNA, 19 nt, Homo sapiens
  misc_RNA (1)...(19): siRNA sense strand
gagcagaguacaugcacuu

SEQ ID NO: 1904634 - RNA, 19 nt, Homo sapiens
  misc_RNA (1)...(19): siRNA sense strand
acagagcuuucacaaaugu

SEQ ID NO: 1904635 - RNA, 19 nt, Homo sapiens
  misc_RNA (1)...(19): siRNA sense strand
gcuaccacauuccuccauu

SEQ ID NO: 1904636 - RNA, 19 nt, Homo sapiens
  misc_RNA (1)...(19): siRNA sense strand
gcugugugguggcgauuug

SEQ ID NO: 1904637 - RNA, 19 nt, Homo sapiens
  misc_RNA (1)...(19): siRNA sense strand
cgagggucuuauugaauuu

SEQ ID NO: 1904638 - RNA, 19 nt, Homo sapiens
  misc_RNA (1)...(19): siRNA sense strand
gagagagagcgccgaguga

SEQ ID NO: 1904639 - RNA, 19 nt, Homo sapiens
  misc_RNA (1)...(19): siRNA sense strand
ggagguugcaguaugaugu

SEQ ID NO: 1904640 - RNA, 19 nt, Homo sapiens
  misc_RNA (1)...(19): siRNA sense strand
cugggaaaccuaaagauuu

SEQ ID NO: 1904641 - RNA, 19 nt, Homo sapiens
  misc_RNA (1)...(19): siRNA sense strand
ggugucauauacaauguca

SEQ ID NO: 1904642 - RNA, 19 nt, Homo sapiens
  misc_RNA (1)...(19): siRNA sense strand
cugaggagauguugcugaa

SEQ ID NO: 1904643 - RNA, 19 nt, Homo sapiens
  misc_RNA (1)...(19): siRNA sense strand
cagaguacaugcacuuggu

SEQ ID NO: 1904644 - RNA, 19 nt, Homo sapiens
  misc_RNA (1)...(19): siRNA sense strand
ggagagagaacgccuuugc

SEQ ID NO: 1904645 - RNA, 19 nt, Homo sapiens
  misc_RNA (1)...(19): siRNA sense strand
aagcgucgguggaauguuc

SEQ ID NO: 1904646 - RNA, 19 nt, Homo sapiens
  misc_RNA (1)...(19): siRNA sense strand
cagcaaaccuaggcuaugc

SEQ ID NO: 1904647 - RNA, 19 nt, Homo sapiens
  misc_RNA (1)...(19): siRNA sense strand
gauauuucaagcaauguga

SEQ ID NO: 1904648 - RNA, 19 nt, Homo sapiens
  misc_RNA (1)...(19): siRNA sense strand
gcucuguguuggacuagug

SEQ ID NO: 1904649 - RNA, 19 nt, Homo sapiens
  misc_RNA (1)...(19): siRNA sense strand
uucauaggcuuuaucauca

SEQ ID NO: 1904650 - RNA, 19 nt, Homo sapiens
  misc_RNA (1)...(19): siRNA sense strand
ccuggaggcuguaauuugg

SEQ ID NO: 1904651 - RNA, 19 nt, Homo sapiens
  misc_RNA (1)...(19): siRNA sense strand
uucaugggcugccuaagaa

SEQ ID NO: 1904652 - RNA, 19 nt, Homo sapiens
  misc_RNA (1)...(19): siRNA sense strand
uacaugcacuugguacuug

SEQ ID NO: 1904653 - RNA, 19 nt, Homo sapiens
  misc_RNA (1)...(19): siRNA sense strand
cacagagcuuucacaaaug

SEQ ID NO: 1904654 - RNA, 19 nt, Homo sapiens
  misc_RNA (1)...(19): siRNA sense strand
caugggcugccuaagaaua

SEQ ID NO: 1904655 - RNA, 19 nt, Homo sapiens
  misc_RNA (1)...(19): siRNA sense strand
uacaucugcugccuacauu

SEQ ID NO: 1904656 - RNA, 19 nt, Homo sapiens
  misc_RNA (1)...(19): siRNA sense strand
ggacccguuucuaaauaca

SEQ ID NO: 1904657 - RNA, 19 nt, Homo sapiens
  misc_RNA (1)...(19): siRNA sense strand
gcuguaauuuggaguucga

SEQ ID NO: 1904658 - RNA, 19 nt, Homo sapiens
  misc_RNA (1)...(19): siRNA sense strand
ccagguggagguugcagua

SEQ ID NO: 1904659 - RNA, 19 nt, Homo sapiens
  misc_RNA (1)...(19): siRNA sense strand
uuacagauucgaagagaga

SEQ ID NO: 1904660 - RNA, 19 nt, Homo sapiens
  misc_RNA (1)...(19): siRNA sense strand
cuaagaauacugaacauac

SEQ ID NO: 1904661 - RNA, 19 nt, Homo sapiens
  misc_RNA (1)...(19): siRNA sense strand
gcauagcuauccucauucc

SEQ ID NO: 1904662 - RNA, 19 nt, Homo sapiens
  misc_RNA (1)...(19): siRNA sense strand
acugacaccuaucaaguau

SEQ ID NO: 1904663 - RNA, 19 nt, Homo sapiens
  misc_RNA (1)...(19): siRNA sense strand
cuacucuccuacucagaaa

SEQ ID NO: 1904664 - RNA, 19 nt, Homo sapiens
  misc_RNA (1)...(19): siRNA sense strand
ccagcgagggucuuauuga

SEQ ID NO: 1904665 - RNA, 19 nt, Homo sapiens
  misc_RNA (1)...(19): siRNA sense strand
ugcaugauauuucaagcaa

SEQ ID NO: 1904666 - RNA, 19 nt, Homo sapiens
  misc_RNA (1)...(19): siRNA sense strand
ccacugggaaaccuaaaga

SEQ ID NO: 1904667 - RNA, 19 nt, Homo sapiens
  misc_RNA (1)...(19): siRNA sense strand
ucagugacuuucuuuacuc

SEQ ID NO: 1904668 - RNA, 19 nt, Homo sapiens
  misc_RNA (1)...(19): siRNA sense strand
ucaaguaugaugugaaucu

SEQ ID NO: 1904669 - RNA, 19 nt, Homo sapiens
  misc_RNA (1)...(19): siRNA sense strand
cuucauaggcuuuaucauc

SEQ ID NO: 1904670 - RNA, 19 nt, Homo sapiens
  misc_RNA (1)...(19): siRNA sense strand
guugcaguaugaugucuau

SEQ ID NO: 1904671 - RNA, 19 nt, Homo sapiens
  misc_RNA (1)...(19): siRNA sense strand
cuaccacauuccuccauug

SEQ ID NO: 1904672 - RNA, 19 nt, Homo sapiens
  misc_RNA (1)...(19): siRNA sense strand
ugggaaaccuaaagauuuu

SEQ ID NO: 1904673 - RNA, 19 nt, Homo sapiens
  misc_RNA (1)...(19): siRNA sense strand
cauaggcuuuaucaucaug

SEQ ID NO: 1904674 - RNA, 19 nt, Homo sapiens
  misc_RNA (1)...(19): siRNA sense strand
ggagaggguaguugugcuu

SEQ ID NO: 1904675 - RNA, 19 nt, Homo sapiens
  misc_RNA (1)...(19): siRNA sense strand
agacaaguguuuccuucuc

SEQ ID NO: 1904676 - RNA, 19 nt, Homo sapiens
  misc_RNA (1)...(19): siRNA sense strand
cuaaugauaagacaagugu

SEQ ID NO: 1904677 - RNA, 19 nt, Homo sapiens
  misc_RNA (1)...(19): siRNA sense strand
gaguucgauuuagauauug

SEQ ID NO: 1904678 - RNA, 19 nt, Homo sapiens
  misc_RNA (1)...(19): siRNA sense strand
uauccucauuccaguaguu

SEQ ID NO: 1904679 - RNA, 19 nt, Homo sapiens
  misc_RNA (1)...(19): siRNA sense strand
uuagauacuucgagcucaa

SEQ ID NO: 1904680 - RNA, 19 nt, Homo sapiens
  misc_RNA (1)...(19): siRNA sense strand
caugcucuguguuggacua

SEQ ID NO: 1904681 - RNA, 19 nt, Homo sapiens
  misc_RNA (1)...(19): siRNA sense strand
gcaugauauuucaagcaau

SEQ ID NO: 1904682 - RNA, 19 nt, Homo sapiens
  misc_RNA (1)...(19): siRNA sense strand
ccuaagaauacugaacaua

SEQ ID NO: 1904683 - RNA, 19 nt, Homo sapiens
  misc_RNA (1)...(19): siRNA sense strand
caaguaugaugugaaucug

SEQ ID NO: 1904684 - RNA, 19 nt, Homo sapiens
  misc_RNA (1)...(19): siRNA sense strand
guuugggacccguuucuaa

SEQ ID NO: 1904685 - RNA, 19 nt, Homo sapiens
  misc_RNA (1)...(19): siRNA sense strand
agagagaacgccuuugcuu

SEQ ID NO: 1904686 - RNA, 19 nt, Homo sapiens
  misc_RNA (1)...(19): siRNA sense strand
ucaagagagcgcucaacaa

SEQ ID NO: 1904687 - RNA, 19 nt, Homo sapiens
  misc_RNA (1)...(19): siRNA sense strand
uaguugugcuucccuagga

SEQ ID NO: 1904688 - RNA, 19 nt, Homo sapiens
  misc_RNA (1)...(19): siRNA sense strand
uaacagcuaaugauaagac

SEQ ID NO: 1904689 - RNA, 19 nt, Homo sapiens
  misc_RNA (1)...(19): siRNA sense strand
uuuccuacaucacuuugaa

SEQ ID NO: 1904690 - RNA, 19 nt, Homo sapiens
  misc_RNA (1)...(19): siRNA sense strand
uuccucaucucgucaguga

SEQ ID NO: 1904691 - RNA, 19 nt, Homo sapiens
  misc_RNA (1)...(19): siRNA sense strand
gcuuuaucaucaugggauu

SEQ ID NO: 1904692 - RNA, 19 nt, Homo sapiens
  misc_RNA (1)...(19): siRNA sense strand
gggacccguuucuaaauac

SEQ ID NO: 1904693 - RNA, 19 nt, Homo sapiens
  misc_RNA (1)...(19): siRNA sense strand
cacaagccuuuccuacauc

SEQ ID NO: 1904694 - RNA, 19 nt, Homo sapiens
  misc_RNA (1)...(19): siRNA sense strand
gggcagaacucuuugagaa

SEQ ID NO: 1904695 - RNA, 19 nt, Homo sapiens
  misc_RNA (1)...(19): siRNA sense strand
ggaggaggcuacagagauu

SEQ ID NO: 1904696 - RNA, 19 nt, Homo sapiens
  misc_RNA (1)...(19): siRNA sense strand
ggaagcggauggcugagaa

SEQ ID NO: 1904697 - RNA, 19 nt, Homo sapiens
  misc_RNA (1)...(19): siRNA sense strand
gaccaagacugcccagaug

SEQ ID NO: 1904698 - RNA, 19 nt, Homo sapiens
  misc_RNA (1)...(19): siRNA sense strand
ccaucggccugaagcauua

SEQ ID NO: 1904699 - RNA, 19 nt, Homo sapiens
  misc_RNA (1)...(19): siRNA sense strand
gcucaucacucacccagau

SEQ ID NO: 1904700 - RNA, 19 nt, Homo sapiens
  misc_RNA (1)...(19): siRNA sense strand
ucaaugcccucaagagcuu

SEQ ID NO: 1904701 - RNA, 19 nt, Homo sapiens
  misc_RNA (1)...(19): siRNA sense strand
ggccaaagccuacaguguu

SEQ ID NO: 1904702 - RNA, 19 nt, Homo sapiens
  misc_RNA (1)...(19): siRNA sense strand
gagggaagagggagaagaa

SEQ ID NO: 1904703 - RNA, 19 nt, Homo sapiens
  misc_RNA (1)...(19): siRNA sense strand
gccaaagccuacaguguuc

SEQ ID NO: 1904704 - RNA, 19 nt, Homo sapiens
  misc_RNA (1)...(19): siRNA sense strand
gugcucagcuggugaaguc

SEQ ID NO: 1904705 - RNA, 19 nt, Homo sapiens
  misc_RNA (1)...(19): siRNA sense strand
gaaggguuccucacagaug

SEQ ID NO: 1904706 - RNA, 19 nt, Homo sapiens
  misc_RNA (1)...(19): siRNA sense strand
caaaaguacuugcaaagau

SEQ ID NO: 1904707 - RNA, 19 nt, Homo sapiens
  misc_RNA (1)...(19): siRNA sense strand
agaggaggcugguggaugu

SEQ ID NO: 1904708 - RNA, 19 nt, Homo sapiens
  misc_RNA (1)...(19): siRNA sense strand
ggaccaagacugcccagau

SEQ ID NO: 1904709 - RNA, 19 nt, Homo sapiens
  misc_RNA (1)...(19): siRNA sense strand
aaucacaaccuccauauca

SEQ ID NO: 1904710 - RNA, 19 nt, Homo sapiens
  misc_RNA (1)...(19): siRNA sense strand
ugcggaagcuggaccauau

SEQ ID NO: 1904711 - RNA, 19 nt, Homo sapiens
  misc_RNA (1)...(19): siRNA sense strand
uagugcagcugaucuggaa

SEQ ID NO: 1904712 - RNA, 19 nt, Homo sapiens
  misc_RNA (1)...(19): siRNA sense strand
gccagaaggcgaccaauca

SEQ ID NO: 1904713 - RNA, 19 nt, Homo sapiens
  misc_RNA (1)...(19): siRNA sense strand
ggaagagggagaagaagca

SEQ ID NO: 1904714 - RNA, 19 nt, Homo sapiens
  misc_RNA (1)...(19): siRNA sense strand
gagaauggucagcaacaga

SEQ ID NO: 1904715 - RNA, 19 nt, Homo sapiens
  misc_RNA (1)...(19): siRNA sense strand
gaagcuggaccauaucagu

SEQ ID NO: 1904716 - RNA, 19 nt, Homo sapiens
  misc_RNA (1)...(19): siRNA sense strand
augaaggcauggacuauga

SEQ ID NO: 1904717 - RNA, 19 nt, Homo sapiens
  misc_RNA (1)...(19): siRNA sense strand
gagcagacaguccagaaag

SEQ ID NO: 1904718 - RNA, 19 nt, Homo sapiens
  misc_RNA (1)...(19): siRNA sense strand
gcuggaaguucuggccaaa

SEQ ID NO: 1904719 - RNA, 19 nt, Homo sapiens
  misc_RNA (1)...(19): siRNA sense strand
gaagcagauuguucagcau

SEQ ID NO: 1904720 - RNA, 19 nt, Homo sapiens
  misc_RNA (1)...(19): siRNA sense strand
caccggcucugcacacuuc

SEQ ID NO: 1904721 - RNA, 19 nt, Homo sapiens
  misc_RNA (1)...(19): siRNA sense strand
gagcucuucuccaacaucu

SEQ ID NO: 1904722 - RNA, 19 nt, Homo sapiens
  misc_RNA (1)...(19): siRNA sense strand
ucacagagaagcuggaagu

SEQ ID NO: 1904723 - RNA, 19 nt, Homo sapiens
  misc_RNA (1)...(19): siRNA sense strand
gggaggaggcuacagagau

SEQ ID NO: 1904724 - RNA, 19 nt, Homo sapiens
  misc_RNA (1)...(19): siRNA sense strand
gaaaauucaugcugaugca

SEQ ID NO: 1904725 - RNA, 19 nt, Homo sapiens
  misc_RNA (1)...(19): siRNA sense strand
acucugggcugcugugugu

SEQ ID NO: 1904726 - RNA, 19 nt, Homo sapiens
  misc_RNA (1)...(19): siRNA sense strand
ccaggugucacucacauug

SEQ ID NO: 1904727 - RNA, 19 nt, Homo sapiens
  misc_RNA (1)...(19): siRNA sense strand
gccugaagcauuacaguga

SEQ ID NO: 1904728 - RNA, 19 nt, Homo sapiens
  misc_RNA (1)...(19): siRNA sense strand
ggccaucaaugcccucaag

SEQ ID NO: 1904729 - RNA, 19 nt, Homo sapiens
  misc_RNA (1)...(19): siRNA sense strand
caucaaaaguacuugcaaa

SEQ ID NO: 1904730 - RNA, 19 nt, Homo sapiens
  misc_RNA (1)...(19): siRNA sense strand
ccugugcccugcucuacuu

SEQ ID NO: 1904731 - RNA, 19 nt, Homo sapiens
  misc_RNA (1)...(19): siRNA sense strand
ggagaauggucagcaacag

SEQ ID NO: 1904732 - RNA, 19 nt, Homo sapiens
  misc_RNA (1)...(19): siRNA sense strand
aagcagcccaggccuuuaa

SEQ ID NO: 1904733 - RNA, 19 nt, Homo sapiens
  misc_RNA (1)...(19): siRNA sense strand
agacugcccagauguggua

SEQ ID NO: 1904734 - RNA, 19 nt, Homo sapiens
  misc_RNA (1)...(19): siRNA sense strand
ccaaucacaaccuccauau

SEQ ID NO: 1904735 - RNA, 19 nt, Homo sapiens
  misc_RNA (1)...(19): siRNA sense strand
gaugaugaagccagugaug

SEQ ID NO: 1904736 - RNA, 19 nt, Homo sapiens
  misc_RNA (1)...(19): siRNA sense strand
caugaggcccugcuucaga

SEQ ID NO: 1904737 - RNA, 19 nt, Homo sapiens
  misc_RNA (1)...(19): siRNA sense strand
ccacugagaaggaugucuu

SEQ ID NO: 1904738 - RNA, 19 nt, Homo sapiens
  misc_RNA (1)...(19): siRNA sense strand
auaagccugucaccucgua

SEQ ID NO: 1904739 - RNA, 19 nt, Homo sapiens
  misc_RNA (1)...(19): siRNA sense strand
ggaugaaggcauggacuau

SEQ ID NO: 1904740 - RNA, 19 nt, Homo sapiens
  misc_RNA (1)...(19): siRNA sense strand
aaggguuccucacagauga

SEQ ID NO: 1904741 - RNA, 19 nt, Homo sapiens
  misc_RNA (1)...(19): siRNA sense strand
guacuugcaaagauuccua

SEQ ID NO: 1904742 - RNA, 19 nt, Homo sapiens
  misc_RNA (1)...(19): siRNA sense strand
gaugaaggcauggacuaug

SEQ ID NO: 1904743 - RNA, 19 nt, Homo sapiens
  misc_RNA (1)...(19): siRNA sense strand
gcagaaaauucaugcugau

SEQ ID NO: 1904744 - RNA, 19 nt, Homo sapiens
  misc_RNA (1)...(19): siRNA sense strand
gggagaagaagcagaagag

SEQ ID NO: 1904745 - RNA, 19 nt, Homo sapiens
  misc_RNA (1)...(19): siRNA sense strand
ccagggaggaggcuacaga

SEQ ID NO: 1904746 - RNA, 19 nt, Homo sapiens
  misc_RNA (1)...(19): siRNA sense strand
gaucuggaagcccucauca

SEQ ID NO: 1904747 - RNA, 19 nt, Homo sapiens
  misc_RNA (1)...(19): siRNA sense strand
agaauggucagcaacagaa

SEQ ID NO: 1904748 - RNA, 19 nt, Homo sapiens
  misc_RNA (1)...(19): siRNA sense strand
gaagcggauggcugagaaa

SEQ ID NO: 1904749 - RNA, 19 nt, Homo sapiens
  misc_RNA (1)...(19): siRNA sense strand
agaggagaauggucagcaa

SEQ ID NO: 1904750 - RNA, 19 nt, Homo sapiens
  misc_RNA (1)...(19): siRNA sense strand
gcccaggugucacucacau

SEQ ID NO: 1904751 - RNA, 19 nt, Homo sapiens
  misc_RNA (1)...(19): siRNA sense strand
gccaucggccugaagcauu

SEQ ID NO: 1904752 - RNA, 19 nt, Homo sapiens
  misc_RNA (1)...(19): siRNA sense strand
agaaggcgaccaaucacaa

SEQ ID NO: 1904753 - RNA, 19 nt, Homo sapiens
  misc_RNA (1)...(19): siRNA sense strand
gcagacaguccagaaagca

SEQ ID NO: 1904754 - RNA, 19 nt, Homo sapiens
  misc_RNA (1)...(19): siRNA sense strand
agagggagaagaagcagaa

SEQ ID NO: 1904755 - RNA, 19 nt, Homo sapiens
  misc_RNA (1)...(19): siRNA sense strand
aagcccagcccaucucuga

SEQ ID NO: 1904756 - RNA, 19 nt, Homo sapiens
  misc_RNA (1)...(19): siRNA sense strand
ggagggaagagggagaaga

SEQ ID NO: 1904757 - RNA, 19 nt, Homo sapiens
  misc_RNA (1)...(19): siRNA sense strand
gcggauggcugagaaaauc

SEQ ID NO: 1904758 - RNA, 19 nt, Homo sapiens
  misc_RNA (1)...(19): siRNA sense strand
ggaugucuucaggcucuua

SEQ ID NO: 1904759 - RNA, 19 nt, Homo sapiens
  misc_RNA (1)...(19): siRNA sense strand
ggugcccuauagcgaguuu

SEQ ID NO: 1904760 - RNA, 19 nt, Homo sapiens
  misc_RNA (1)...(19): siRNA sense strand
ucgacgugcucaucacuca

SEQ ID NO: 1904761 - RNA, 19 nt, Homo sapiens
  misc_RNA (1)...(19): siRNA sense strand
ucacaaccuccauaucaca

SEQ ID NO: 1904762 - RNA, 19 nt, Homo sapiens
  misc_RNA (1)...(19): siRNA sense strand
ccaagacugcccagaugug

SEQ ID NO: 1904763 - RNA, 19 nt, Homo sapiens
  misc_RNA (1)...(19): siRNA sense strand
cugcuguccuggauaagug

SEQ ID NO: 1904764 - RNA, 19 nt, Homo sapiens
  misc_RNA (1)...(19): siRNA sense strand
ugagagcgugccugucuug

SEQ ID NO: 1904765 - RNA, 19 nt, Homo sapiens
  misc_RNA (1)...(19): siRNA sense strand
gcccucaagagcuuccaua

SEQ ID NO: 1904766 - RNA, 19 nt, Homo sapiens
  misc_RNA (1)...(19): siRNA sense strand
gaaggcgaccaaucacaac

SEQ ID NO: 1904767 - RNA, 19 nt, Homo sapiens
  misc_RNA (1)...(19): siRNA sense strand
gugagagcgugccugucuu

SEQ ID NO: 1904768 - RNA, 19 nt, Homo sapiens
  misc_RNA (1)...(19): siRNA sense strand
ccacucccacugagaagga

SEQ ID NO: 1904769 - RNA, 19 nt, Homo sapiens
  misc_RNA (1)...(19): siRNA sense strand
guuccucacagaugacuug

SEQ ID NO: 1904770 - RNA, 19 nt, Homo sapiens
  misc_RNA (1)...(19): siRNA sense strand
ucuggaagcccucaucagu

SEQ ID NO: 1904771 - RNA, 19 nt, Homo sapiens
  misc_RNA (1)...(19): siRNA sense strand
aaaccaagggcaugagucu

SEQ ID NO: 1904772 - RNA, 19 nt, Homo sapiens
  misc_RNA (1)...(19): siRNA sense strand
ugagcagacaguccagaaa

SEQ ID NO: 1904773 - RNA, 19 nt, Homo sapiens
  misc_RNA (1)...(19): siRNA sense strand
gcaaaagaggcaccaaaca

SEQ ID NO: 1904774 - RNA, 19 nt, Homo sapiens
  misc_RNA (1)...(19): siRNA sense strand
ugacagucuucggcaggaa

SEQ ID NO: 1904775 - RNA, 19 nt, Homo sapiens
  misc_RNA (1)...(19): siRNA sense strand
gggaagcggauggcugaga

SEQ ID NO: 1904776 - RNA, 19 nt, Homo sapiens
  misc_RNA (1)...(19): siRNA sense strand
ggagaagaagcagaagagu

SEQ ID NO: 1904777 - RNA, 19 nt, Homo sapiens
  misc_RNA (1)...(19): siRNA sense strand
acagagaagcuggaaguuc

SEQ ID NO: 1904778 - RNA, 19 nt, Homo sapiens
  misc_RNA (1)...(19): siRNA sense strand
uugagaagcagauuguuca

SEQ ID NO: 1904779 - RNA, 19 nt, Homo sapiens
  misc_RNA (1)...(19): siRNA sense strand
gcaaagaccucaucacauu

SEQ ID NO: 1904780 - RNA, 19 nt, Homo sapiens
  misc_RNA (1)...(19): siRNA sense strand
guaucaaccugacuucuuu

SEQ ID NO: 1904781 - RNA, 19 nt, Homo sapiens
  misc_RNA (1)...(19): siRNA sense strand
ccacagagcuggauuucuc

SEQ ID NO: 1904782 - RNA, 19 nt, Homo sapiens
  misc_RNA (1)...(19): siRNA sense strand
caacagggcugcaucaaaa

SEQ ID NO: 1904783 - RNA, 19 nt, Homo sapiens
  misc_RNA (1)...(19): siRNA sense strand
gaggaaagcuuuuggauuc

SEQ ID NO: 1904784 - RNA, 19 nt, Homo sapiens
  misc_RNA (1)...(19): siRNA sense strand
gagcuggauuucucccuuu

SEQ ID NO: 1904785 - RNA, 19 nt, Homo sapiens
  misc_RNA (1)...(19): siRNA sense strand
gagcgaagaagguaaugaa

SEQ ID NO: 1904786 - RNA, 19 nt, Homo sapiens
  misc_RNA (1)...(19): siRNA sense strand
cgaagaagguaaugaacuc

SEQ ID NO: 1904787 - RNA, 19 nt, Homo sapiens
  misc_RNA (1)...(19): siRNA sense strand
ccaggaagaucagaggaaa

SEQ ID NO: 1904788 - RNA, 19 nt, Homo sapiens
  misc_RNA (1)...(19): siRNA sense strand
gagcaccacuaugcaaaga

SEQ ID NO: 1904789 - RNA, 19 nt, Homo sapiens
  misc_RNA (1)...(19): siRNA sense strand
gaagaucagaggaaagcuu

SEQ ID NO: 1904790 - RNA, 19 nt, Homo sapiens
  misc_RNA (1)...(19): siRNA sense strand
gguaaugaacuccuacuuc

SEQ ID NO: 1904791 - RNA, 19 nt, Homo sapiens
  misc_RNA (1)...(19): siRNA sense strand
gaacuccuacuucauagca

SEQ ID NO: 1904792 - RNA, 19 nt, Homo sapiens
  misc_RNA (1)...(19): siRNA sense strand
agaagguaaugaacuccua

SEQ ID NO: 1904793 - RNA, 19 nt, Homo sapiens
  misc_RNA (1)...(19): siRNA sense strand
aggcaagguuucaguauca

SEQ ID NO: 1904794 - RNA, 19 nt, Homo sapiens
  misc_RNA (1)...(19): siRNA sense strand
ggauuucucccuuucuuca

SEQ ID NO: 1904795 - RNA, 19 nt, Homo sapiens
  misc_RNA (1)...(19): siRNA sense strand
gcaggugcucaauaaauau

SEQ ID NO: 1904796 - RNA, 19 nt, Homo sapiens
  misc_RNA (1)...(19): siRNA sense strand
ggauuccugccacaccuua

SEQ ID NO: 1904797 - RNA, 19 nt, Homo sapiens
  misc_RNA (1)...(19): siRNA sense strand
gcuacuacgcugucucuug

SEQ ID NO: 1904798 - RNA, 19 nt, Homo sapiens
  misc_RNA (1)...(19): siRNA sense strand
acaagucuuuggaccaugu

SEQ ID NO: 1904799 - RNA, 19 nt, Homo sapiens
  misc_RNA (1)...(19): siRNA sense strand
gggagcaccacuaugcaaa

SEQ ID NO: 1904800 - RNA, 19 nt, Homo sapiens
  misc_RNA (1)...(19): siRNA sense strand
acacagggagcaccacuau

SEQ ID NO: 1904801 - RNA, 19 nt, Homo sapiens
  misc_RNA (1)...(19): siRNA sense strand
uacgcugucucuugguuaa

SEQ ID NO: 1904802 - RNA, 19 nt, Homo sapiens
  misc_RNA (1)...(19): siRNA sense strand
caaccugacuucuuuugga

SEQ ID NO: 1904803 - RNA, 19 nt, Homo sapiens
  misc_RNA (1)...(19): siRNA sense strand
uaaggcaagguuucaguau

SEQ ID NO: 1904804 - RNA, 19 nt, Homo sapiens
  misc_RNA (1)...(19): siRNA sense strand
acaacagggcugcaucaaa

SEQ ID NO: 1904805 - RNA, 19 nt, Homo sapiens
  misc_RNA (1)...(19): siRNA sense strand
caaagaccucaucacauuc

SEQ ID NO: 1904806 - RNA, 19 nt, Homo sapiens
  misc_RNA (1)...(19): siRNA sense strand
gagggagccaggaagauca

SEQ ID NO: 1904807 - RNA, 19 nt, Homo sapiens
  misc_RNA (1)...(19): siRNA sense strand
gcgaagaagguaaugaacu

SEQ ID NO: 1904808 - RNA, 19 nt, Homo sapiens
  misc_RNA (1)...(19): siRNA sense strand
aagaucagaggaaagcuuu

SEQ ID NO: 1904809 - RNA, 19 nt, Homo sapiens
  misc_RNA (1)...(19): siRNA sense strand
aaagaccucaucacauuca

SEQ ID NO: 1904810 - RNA, 19 nt, Homo sapiens
  misc_RNA (1)...(19): siRNA sense strand
uuaaggcaagguuucagua

SEQ ID NO: 1904811 - RNA, 19 nt, Homo sapiens
  misc_RNA (1)...(19): siRNA sense strand
caccuuacauuagcaacau

SEQ ID NO: 1904812 - RNA, 19 nt, Homo sapiens
  misc_RNA (1)...(19): siRNA sense strand
ggagcgaagaagguaauga

SEQ ID NO: 1904813 - RNA, 19 nt, Homo sapiens
  misc_RNA (1)...(19): siRNA sense strand
ccugccacaccuuacauua

SEQ ID NO: 1904814 - RNA, 19 nt, Homo sapiens
  misc_RNA (1)...(19): siRNA sense strand
ggcaagguuucaguaucaa

SEQ ID NO: 1904815 - RNA, 19 nt, Homo sapiens
  misc_RNA (1)...(19): siRNA sense strand
aaggcaagguuucaguauc

SEQ ID NO: 1904816 - RNA, 19 nt, Homo sapiens
  misc_RNA (1)...(19): siRNA sense strand
gccaggaagaucagaggaa

SEQ ID NO: 1904817 - RNA, 19 nt, Homo sapiens
  misc_RNA (1)...(19): siRNA sense strand
cuacgcugucucuugguua

SEQ ID NO: 1904818 - RNA, 19 nt, Homo sapiens
  misc_RNA (1)...(19): siRNA sense strand
caaaugacugaaugcaucu

SEQ ID NO: 1904819 - RNA, 19 nt, Homo sapiens
  misc_RNA (1)...(19): siRNA sense strand
caacucaagaggauacaac

SEQ ID NO: 1904820 - RNA, 19 nt, Homo sapiens
  misc_RNA (1)...(19): siRNA sense strand
caagaccuggagcgaagaa

SEQ ID NO: 1904821 - RNA, 19 nt, Homo sapiens
  misc_RNA (1)...(19): siRNA sense strand
ggagcaccacuaugcaaag

SEQ ID NO: 1904822 - RNA, 19 nt, Homo sapiens
  misc_RNA (1)...(19): siRNA sense strand
acagggagcaccacuaugc

SEQ ID NO: 1904823 - RNA, 19 nt, Homo sapiens
  misc_RNA (1)...(19): siRNA sense strand
cuggauuucucccuuucuu

SEQ ID NO: 1904824 - RNA, 19 nt, Homo sapiens
  misc_RNA (1)...(19): siRNA sense strand
gaaagugccuccagaaaga

SEQ ID NO: 1904825 - RNA, 19 nt, Homo sapiens
  misc_RNA (1)...(19): siRNA sense strand
gagaagacccgcaagguua

SEQ ID NO: 1904826 - RNA, 19 nt, Homo sapiens
  misc_RNA (1)...(19): siRNA sense strand
gaaaggaugugguuacuac

SEQ ID NO: 1904827 - RNA, 19 nt, Homo sapiens
  misc_RNA (1)...(19): siRNA sense strand
ugacucgucucuauaaaua

SEQ ID NO: 1904828 - RNA, 19 nt, Homo sapiens
  misc_RNA (1)...(19): siRNA sense strand
gaacuuggaucucuugucu

SEQ ID NO: 1904829 - RNA, 19 nt, Homo sapiens
  misc_RNA (1)...(19): siRNA sense strand
gaucacagauaucauugaa

SEQ ID NO: 1904830 - RNA, 19 nt, Homo sapiens
  misc_RNA (1)...(19): siRNA sense strand
agaaagaucuugccauuca

SEQ ID NO: 1904831 - RNA, 19 nt, Homo sapiens
  misc_RNA (1)...(19): siRNA sense strand
gaaagagucgagaagauaa

SEQ ID NO: 1904832 - RNA, 19 nt, Homo sapiens
  misc_RNA (1)...(19): siRNA sense strand
gauaauggaucagauugaa

SEQ ID NO: 1904833 - RNA, 19 nt, Homo sapiens
  misc_RNA (1)...(19): siRNA sense strand
gaggauggcuacuauuuca

SEQ ID NO: 1904834 - RNA, 19 nt, Homo sapiens
  misc_RNA (1)...(19): siRNA sense strand
caucaugacucgucucuau

SEQ ID NO: 1904835 - RNA, 19 nt, Homo sapiens
  misc_RNA (1)...(19): siRNA sense strand
gcaaauguauaagaacuug

SEQ ID NO: 1904836 - RNA, 19 nt, Homo sapiens
  misc_RNA (1)...(19): siRNA sense strand
cuaaggaguucauagaauu

SEQ ID NO: 1904837 - RNA, 19 nt, Homo sapiens
  misc_RNA (1)...(19): siRNA sense strand
gccaagaaaucuauaaaca

SEQ ID NO: 1904838 - RNA, 19 nt, Homo sapiens
  misc_RNA (1)...(19): siRNA sense strand
gaagauaauggaucagauu

SEQ ID NO: 1904839 - RNA, 19 nt, Homo sapiens
  misc_RNA (1)...(19): siRNA sense strand
gaucaaagaaggaaauuca

SEQ ID NO: 1904840 - RNA, 19 nt, Homo sapiens
  misc_RNA (1)...(19): siRNA sense strand
gagaggauggcuacuauuu

SEQ ID NO: 1904841 - RNA, 19 nt, Homo sapiens
  misc_RNA (1)...(19): siRNA sense strand
gaaauuaagccuccgaauc

SEQ ID NO: 1904842 - RNA, 19 nt, Homo sapiens
  misc_RNA (1)...(19): siRNA sense strand
gaaauacccacuggaaauu

SEQ ID NO: 1904843 - RNA, 19 nt, Homo sapiens
  misc_RNA (1)...(19): siRNA sense strand
gaugcaaacucgugggaaa

SEQ ID NO: 1904844 - RNA, 19 nt, Homo sapiens
  misc_RNA (1)...(19): siRNA sense strand
ugaaggcgaucacagauau

SEQ ID NO: 1904845 - RNA, 19 nt, Homo sapiens
  misc_RNA (1)...(19): siRNA sense strand
caagagaaguucaagacau

SEQ ID NO: 1904846 - RNA, 19 nt, Homo sapiens
  misc_RNA (1)...(19): siRNA sense strand
gcaagcacaucuucaaugc

SEQ ID NO: 1904847 - RNA, 19 nt, Homo sapiens
  misc_RNA (1)...(19): siRNA sense strand
caagaaaggaucaugaaug

SEQ ID NO: 1904848 - RNA, 19 nt, Homo sapiens
  misc_RNA (1)...(19): siRNA sense strand
gaauucauguggaucaauc

SEQ ID NO: 1904849 - RNA, 19 nt, Homo sapiens
  misc_RNA (1)...(19): siRNA sense strand
ggaaggaaugcauuacaaa

SEQ ID NO: 1904850 - RNA, 19 nt, Homo sapiens
  misc_RNA (1)...(19): siRNA sense strand
gagacaagcuggccugcau

SEQ ID NO: 1904851 - RNA, 19 nt, Homo sapiens
  misc_RNA (1)...(19): siRNA sense strand
caaaagggaucuaagcauu

SEQ ID NO: 1904852 - RNA, 19 nt, Homo sapiens
  misc_RNA (1)...(19): siRNA sense strand
ccaucaagaucaccaagaa

SEQ ID NO: 1904853 - RNA, 19 nt, Homo sapiens
  misc_RNA (1)...(19): siRNA sense strand
gaaagaucuugccauucaa

SEQ ID NO: 1904854 - RNA, 19 nt, Homo sapiens
  misc_RNA (1)...(19): siRNA sense strand
ggaaagugccuccagaaag

SEQ ID NO: 1904855 - RNA, 19 nt, Homo sapiens
  misc_RNA (1)...(19): siRNA sense strand
aaauuaagccuccgaauca

SEQ ID NO: 1904856 - RNA, 19 nt, Homo sapiens
  misc_RNA (1)...(19): siRNA sense strand
gaagacaucccagaagugu

SEQ ID NO: 1904857 - RNA, 19 nt, Homo sapiens
  misc_RNA (1)...(19): siRNA sense strand
gaaggaaauucaggaagca

SEQ ID NO: 1904858 - RNA, 19 nt, Homo sapiens
  misc_RNA (1)...(19): siRNA sense strand
gagaaauacccacuggaaa

SEQ ID NO: 1904859 - RNA, 19 nt, Homo sapiens
  misc_RNA (1)...(19): siRNA sense strand
cagaaagagucgagaagau

SEQ ID NO: 1904860 - RNA, 19 nt, Homo sapiens
  misc_RNA (1)...(19): siRNA sense strand
aaagggaucuaagcauuga

SEQ ID NO: 1904861 - RNA, 19 nt, Homo sapiens
  misc_RNA (1)...(19): siRNA sense strand
caagacaggccaagaaauc

SEQ ID NO: 1904862 - RNA, 19 nt, Homo sapiens
  misc_RNA (1)...(19): siRNA sense strand
gagggaagaguaccacaaa

SEQ ID NO: 1904863 - RNA, 19 nt, Homo sapiens
  misc_RNA (1)...(19): siRNA sense strand
ccacaagacaggccaagaa

SEQ ID NO: 1904864 - RNA, 19 nt, Homo sapiens
  misc_RNA (1)...(19): siRNA sense strand
ucaaguuuaugcaggauga

SEQ ID NO: 1904865 - RNA, 19 nt, Homo sapiens
  misc_RNA (1)...(19): siRNA sense strand
gcaagaaaggaugugguua

SEQ ID NO: 1904866 - RNA, 19 nt, Homo sapiens
  misc_RNA (1)...(19): siRNA sense strand
uauaagaacuuggaucucu

SEQ ID NO: 1904867 - RNA, 19 nt, Homo sapiens
  misc_RNA (1)...(19): siRNA sense strand
agaaagagucgagaagaua

SEQ ID NO: 1904868 - RNA, 19 nt, Homo sapiens
  misc_RNA (1)...(19): siRNA sense strand
cagauggaauugcaagaga

SEQ ID NO: 1904869 - RNA, 19 nt, Homo sapiens
  misc_RNA (1)...(19): siRNA sense strand
ccacugcaaccucaaguuu

SEQ ID NO: 1904870 - RNA, 19 nt, Homo sapiens
  misc_RNA (1)...(19): siRNA sense strand
uuaccacagugaagaaauu

SEQ ID NO: 1904871 - RNA, 19 nt, Homo sapiens
  misc_RNA (1)...(19): siRNA sense strand
cagaaacuacugaugauga

SEQ ID NO: 1904872 - RNA, 19 nt, Homo sapiens
  misc_RNA (1)...(19): siRNA sense strand
aaucggaucuccugugcaa

SEQ ID NO: 1904873 - RNA, 19 nt, Homo sapiens
  misc_RNA (1)...(19): siRNA sense strand
gacaagaaaggaucaugaa

SEQ ID NO: 1904874 - RNA, 19 nt, Homo sapiens
  misc_RNA (1)...(19): siRNA sense strand
gaacgccgaggaauucaug

SEQ ID NO: 1904875 - RNA, 19 nt, Homo sapiens
  misc_RNA (1)...(19): siRNA sense strand
gcagcaagcacaucuucaa

SEQ ID NO: 1904876 - RNA, 19 nt, Homo sapiens
  misc_RNA (1)...(19): siRNA sense strand
cucaagaccuuccacaaga

SEQ ID NO: 1904877 - RNA, 19 nt, Homo sapiens
  misc_RNA (1)...(19): siRNA sense strand
cgacaagaaaggaucauga

SEQ ID NO: 1904878 - RNA, 19 nt, Homo sapiens
  misc_RNA (1)...(19): siRNA sense strand
gcccagucuuugaaucuaa

SEQ ID NO: 1904879 - RNA, 19 nt, Homo sapiens
  misc_RNA (1)...(19): siRNA sense strand
cggcaaaccagcauugaaa

SEQ ID NO: 1904880 - RNA, 19 nt, Homo sapiens
  misc_RNA (1)...(19): siRNA sense strand
aauacccacuggaaauuaa

SEQ ID NO: 1904881 - RNA, 19 nt, Homo sapiens
  misc_RNA (1)...(19): siRNA sense strand
gggaaagugccuccagaaa

SEQ ID NO: 1904882 - RNA, 19 nt, Homo sapiens
  misc_RNA (1)...(19): siRNA sense strand
uggaaggaaugcauuacaa

SEQ ID NO: 1904883 - RNA, 19 nt, Homo sapiens
  misc_RNA (1)...(19): siRNA sense strand
agaaauacccacuggaaau

SEQ ID NO: 1904884 - RNA, 19 nt, Homo sapiens
  misc_RNA (1)...(19): siRNA sense strand
ucgagaagauaauggauca

SEQ ID NO: 1904885 - RNA, 19 nt, Homo sapiens
  misc_RNA (1)...(19): siRNA sense strand
gagaagauaauggaucaga

SEQ ID NO: 1904886 - RNA, 19 nt, Homo sapiens
  misc_RNA (1)...(19): siRNA sense strand
ugagaaauacccacuggaa

SEQ ID NO: 1904887 - RNA, 19 nt, Homo sapiens
  misc_RNA (1)...(19): siRNA sense strand
ccucauagauuggacagau

SEQ ID NO: 1904888 - RNA, 19 nt, Homo sapiens
  misc_RNA (1)...(19): siRNA sense strand
gaaugaagccaagaaacug

SEQ ID NO: 1904889 - RNA, 19 nt, Homo sapiens
  misc_RNA (1)...(19): siRNA sense strand
gaacgacaagaaaggauca

SEQ ID NO: 1904890 - RNA, 19 nt, Homo sapiens
  misc_RNA (1)...(19): siRNA sense strand
ggaggaagaagaggccuuu

SEQ ID NO: 1904891 - RNA, 19 nt, Homo sapiens
  misc_RNA (1)...(19): siRNA sense strand
gcuacuauuucaccaaucu

SEQ ID NO: 1904892 - RNA, 19 nt, Homo sapiens
  misc_RNA (1)...(19): siRNA sense strand
uggagaggauggcuacuau

SEQ ID NO: 1904893 - RNA, 19 nt, Homo sapiens
  misc_RNA (1)...(19): siRNA sense strand
aagacaucguugagaaaua

SEQ ID NO: 1904894 - RNA, 19 nt, Homo sapiens
  misc_RNA (1)...(19): siRNA sense strand
gaucucuugucucaguuga

SEQ ID NO: 1904895 - RNA, 19 nt, Homo sapiens
  misc_RNA (1)...(19): siRNA sense strand
gcgucaagcaaauguauaa

SEQ ID NO: 1904896 - RNA, 19 nt, Homo sapiens
  misc_RNA (1)...(19): siRNA sense strand
cgagaagacccgcaagguu

SEQ ID NO: 1904897 - RNA, 19 nt, Homo sapiens
  misc_RNA (1)...(19): siRNA sense strand
aagagaaguucaagacauc

SEQ ID NO: 1904898 - RNA, 19 nt, Homo sapiens
  misc_RNA (1)...(19): siRNA sense strand
gaagcaagaagcugagagu

SEQ ID NO: 1904899 - RNA, 19 nt, Homo sapiens
  misc_RNA (1)...(19): siRNA sense strand
aauccaagccgacugauga

SEQ ID NO: 1904900 - RNA, 19 nt, Homo sapiens
  misc_RNA (1)...(19): siRNA sense strand
guccagaaacuacugauga

SEQ ID NO: 1904901 - RNA, 19 nt, Homo sapiens
  misc_RNA (1)...(19): siRNA sense strand
ucaugacucgucucuauaa

SEQ ID NO: 1904902 - RNA, 19 nt, Homo sapiens
  misc_RNA (1)...(19): siRNA sense strand
gaucuccugugcaagaaag

SEQ ID NO: 1904903 - RNA, 19 nt, Homo sapiens
  misc_RNA (1)...(19): siRNA sense strand
ucaguugaaugaacgacaa

SEQ ID NO: 1904904 - RNA, 19 nt, Homo sapiens
  misc_RNA (1)...(19): siRNA sense strand
caagaaaggaugugguuac

SEQ ID NO: 1904905 - RNA, 19 nt, Homo sapiens
  misc_RNA (1)...(19): siRNA sense strand
cagagugugcucaggauuu

SEQ ID NO: 1904906 - RNA, 19 nt, Homo sapiens
  misc_RNA (1)...(19): siRNA sense strand
gaaucuaagucaggaggau

SEQ ID NO: 1904907 - RNA, 19 nt, Homo sapiens
  misc_RNA (1)...(19): siRNA sense strand
cuacugaugaugagaagaa

SEQ ID NO: 1904908 - RNA, 19 nt, Homo sapiens
  misc_RNA (1)...(19): siRNA sense strand
gcaaacucgugggaaagug

SEQ ID NO: 1904909 - RNA, 19 nt, Homo sapiens
  misc_RNA (1)...(19): siRNA sense strand
caucuucaaugccaucaag

SEQ ID NO: 1904910 - RNA, 19 nt, Homo sapiens
  misc_RNA (1)...(19): siRNA sense strand
agacaucguugagaaauac

SEQ ID NO: 1904911 - RNA, 19 nt, Homo sapiens
  misc_RNA (1)...(19): siRNA sense strand
gcaagagaaguucaagaca

SEQ ID NO: 1904912 - RNA, 19 nt, Homo sapiens
  misc_RNA (1)...(19): siRNA sense strand
gaaggaaugcauuacaaaa

SEQ ID NO: 1904913 - RNA, 19 nt, Homo sapiens
  misc_RNA (1)...(19): siRNA sense strand
cugaaaacguugaaaauga

SEQ ID NO: 1904914 - RNA, 19 nt, Homo sapiens
  misc_RNA (1)...(19): siRNA sense strand
ucaagaucaccaagaauga

SEQ ID NO: 1904915 - RNA, 19 nt, Homo sapiens
  misc_RNA (1)...(19): siRNA sense strand
ugucugauaugguggugaa

SEQ ID NO: 1904916 - RNA, 19 nt, Homo sapiens
  misc_RNA (1)...(19): siRNA sense strand
gugugucccuguuaaugaa

SEQ ID NO: 1904917 - RNA, 19 nt, Homo sapiens
  misc_RNA (1)...(19): siRNA sense strand
caggauuucuaccacaaug

SEQ ID NO: 1904918 - RNA, 19 nt, Homo sapiens
  misc_RNA (1)...(19): siRNA sense strand
gaucuaagcauugaagaac

SEQ ID NO: 1904919 - RNA, 19 nt, Homo sapiens
  misc_RNA (1)...(19): siRNA sense strand
gcauugaaacggauagagu

SEQ ID NO: 1904920 - RNA, 19 nt, Homo sapiens
  misc_RNA (1)...(19): siRNA sense strand
aaauacccacuggaaauua

SEQ ID NO: 1904921 - RNA, 19 nt, Homo sapiens
  misc_RNA (1)...(19): siRNA sense strand
gcuguggcuuucauugaga

SEQ ID NO: 1904922 - RNA, 19 nt, Homo sapiens
  misc_RNA (1)...(19): siRNA sense strand
ggaucuaagcauugaagaa

SEQ ID NO: 1904923 - RNA, 19 nt, Homo sapiens
  misc_RNA (1)...(19): siRNA sense strand
ugaaacggauagagugucu

SEQ ID NO: 1904924 - RNA, 19 nt, Homo sapiens
  misc_RNA (1)...(19): siRNA sense strand
ggagaaagcugcaaugaau

SEQ ID NO: 1904925 - RNA, 19 nt, Homo sapiens
  misc_RNA (1)...(19): siRNA sense strand
acaaagaacuggaaugaaa

SEQ ID NO: 1904926 - RNA, 19 nt, Homo sapiens
  misc_RNA (1)...(19): siRNA sense strand
ggaaugaaaugacagaguu

SEQ ID NO: 1904927 - RNA, 19 nt, Homo sapiens
  misc_RNA (1)...(19): siRNA sense strand
gcauugagauguuugauga

SEQ ID NO: 1904928 - RNA, 19 nt, Homo sapiens
  misc_RNA (1)...(19): siRNA sense strand
gaaugccucucaccacuua

SEQ ID NO: 1904929 - RNA, 19 nt, Homo sapiens
  misc_RNA (1)...(19): siRNA sense strand
gaaguuuccugcagaguuu

SEQ ID NO: 1904930 - RNA, 19 nt, Homo sapiens
  misc_RNA (1)...(19): siRNA sense strand
gaagucaucacaaaguuua

SEQ ID NO: 1904931 - RNA, 19 nt, Homo sapiens
  misc_RNA (1)...(19): siRNA sense strand
gaucuugguuugauucgua

SEQ ID NO: 1904932 - RNA, 19 nt, Homo sapiens
  misc_RNA (1)...(19): siRNA sense strand
gcaaagaccuccugguucu

SEQ ID NO: 1904933 - RNA, 19 nt, Homo sapiens
  misc_RNA (1)...(19): siRNA sense strand
gggcagaagucaucacaaa

SEQ ID NO: 1904934 - RNA, 19 nt, Homo sapiens
  misc_RNA (1)...(19): siRNA sense strand
gaacuggaaugaaaugaca

SEQ ID NO: 1904935 - RNA, 19 nt, Homo sapiens
  misc_RNA (1)...(19): siRNA sense strand
gcacuugcauugagauguu

SEQ ID NO: 1904936 - RNA, 19 nt, Homo sapiens
  misc_RNA (1)...(19): siRNA sense strand
aagaugaaaugauggcuua

SEQ ID NO: 1904937 - RNA, 19 nt, Homo sapiens
  misc_RNA (1)...(19): siRNA sense strand
cgacugcgauggcuucaaa

SEQ ID NO: 1904938 - RNA, 19 nt, Homo sapiens
  misc_RNA (1)...(19): siRNA sense strand
uuaaagaucugcuacuuca

SEQ ID NO: 1904939 - RNA, 19 nt, Homo sapiens
  misc_RNA (1)...(19): siRNA sense strand
ggaaauuaguggagucugu

SEQ ID NO: 1904940 - RNA, 19 nt, Homo sapiens
  misc_RNA (1)...(19): siRNA sense strand
caggauggccuaauuagua

SEQ ID NO: 1904941 - RNA, 19 nt, Homo sapiens
  misc_RNA (1)...(19): siRNA sense strand
guauuuaucuuccacugaa

SEQ ID NO: 1904942 - RNA, 19 nt, Homo sapiens
  misc_RNA (1)...(19): siRNA sense strand
gaucaggauggccuaauua

SEQ ID NO: 1904943 - RNA, 19 nt, Homo sapiens
  misc_RNA (1)...(19): siRNA sense strand
ggacagaggagaacaaagu

SEQ ID NO: 1904944 - RNA, 19 nt, Homo sapiens
  misc_RNA (1)...(19): siRNA sense strand
gauuaaagaucugcuacuu

SEQ ID NO: 1904945 - RNA, 19 nt, Homo sapiens
  misc_RNA (1)...(19): siRNA sense strand
ggaucucauucacugauua

SEQ ID NO: 1904946 - RNA, 19 nt, Homo sapiens
  misc_RNA (1)...(19): siRNA sense strand
gaaagcagcaacauuagau

SEQ ID NO: 1904947 - RNA, 19 nt, Homo sapiens
  misc_RNA (1)...(19): siRNA sense strand
gguacuggauucugaaguu

SEQ ID NO: 1904948 - RNA, 19 nt, Homo sapiens
  misc_RNA (1)...(19): siRNA sense strand
gcaaagggcagaagucauc

SEQ ID NO: 1904949 - RNA, 19 nt, Homo sapiens
  misc_RNA (1)...(19): siRNA sense strand
ugggaaagcagcaacauua

SEQ ID NO: 1904950 - RNA, 19 nt, Homo sapiens
  misc_RNA (1)...(19): siRNA sense strand
gaaaguauagcugccaauu

SEQ ID NO: 1904951 - RNA, 19 nt, Homo sapiens
  misc_RNA (1)...(19): siRNA sense strand
gcaaggauacaaaugcaaa

SEQ ID NO: 1904952 - RNA, 19 nt, Homo sapiens
  misc_RNA (1)...(19): siRNA sense strand
ggaguacacuugaaagacu

SEQ ID NO: 1904953 - RNA, 19 nt, Homo sapiens
  misc_RNA (1)...(19): siRNA sense strand
gaaauuaguggagucugua

SEQ ID NO: 1904954 - RNA, 19 nt, Homo sapiens
  misc_RNA (1)...(19): siRNA sense strand
gcacauaaggaaauuagug

SEQ ID NO: 1904955 - RNA, 19 nt, Homo sapiens
  misc_RNA (1)...(19): siRNA sense strand
uaauuuggaucuugguuug

SEQ ID NO: 1904956 - RNA, 19 nt, Homo sapiens
  misc_RNA (1)...(19): siRNA sense strand
caacggcaauuacugcaau

SEQ ID NO: 1904957 - RNA, 19 nt, Homo sapiens
  misc_RNA (1)...(19): siRNA sense strand
guacuggauucugaaguuu

SEQ ID NO: 1904958 - RNA, 19 nt, Homo sapiens
  misc_RNA (1)...(19): siRNA sense strand
caacauggauuugaucaac

SEQ ID NO: 1904959 - RNA, 19 nt, Homo sapiens
  misc_RNA (1)...(19): siRNA sense strand
gagaacaaagugaacauug

SEQ ID NO: 1904960 - RNA, 19 nt, Homo sapiens
  misc_RNA (1)...(19): siRNA sense strand
ggaccucuaucacacugaa

SEQ ID NO: 1904961 - RNA, 19 nt, Homo sapiens
  misc_RNA (1)...(19): siRNA sense strand
aaacuucucugcauguauc

SEQ ID NO: 1904962 - RNA, 19 nt, Homo sapiens
  misc_RNA (1)...(19): siRNA sense strand
caaagacuguggagccaau

SEQ ID NO: 1904963 - RNA, 19 nt, Homo sapiens
  misc_RNA (1)...(19): siRNA sense strand
cagaagucaucacaaaguu

SEQ ID NO: 1904964 - RNA, 19 nt, Homo sapiens
  misc_RNA (1)...(19): siRNA sense strand
gcagaagucaucacaaagu

SEQ ID NO: 1904965 - RNA, 19 nt, Homo sapiens
  misc_RNA (1)...(19): siRNA sense strand
ggaaagcagcaacauuaga

SEQ ID NO: 1904966 - RNA, 19 nt, Homo sapiens
  misc_RNA (1)...(19): siRNA sense strand
caaagugaacauugugaaa

SEQ ID NO: 1904967 - RNA, 19 nt, Homo sapiens
  misc_RNA (1)...(19): siRNA sense strand
caaguuccaugacaaagca

SEQ ID NO: 1904968 - RNA, 19 nt, Homo sapiens
  misc_RNA (1)...(19): siRNA sense strand
gagagcuggauaauaguua

SEQ ID NO: 1904969 - RNA, 19 nt, Homo sapiens
  misc_RNA (1)...(19): siRNA sense strand
caacaagcacauaaggaaa

SEQ ID NO: 1904970 - RNA, 19 nt, Homo sapiens
  misc_RNA (1)...(19): siRNA sense strand
auggagagcuggauaauag

SEQ ID NO: 1904971 - RNA, 19 nt, Homo sapiens
  misc_RNA (1)...(19): siRNA sense strand
gauguuugaugacaaugga

SEQ ID NO: 1904972 - RNA, 19 nt, Homo sapiens
  misc_RNA (1)...(19): siRNA sense strand
ccaaagcuaugucauccau

SEQ ID NO: 1904973 - RNA, 19 nt, Homo sapiens
  misc_RNA (1)...(19): siRNA sense strand
agaaagcugcaaugaauuu

SEQ ID NO: 1904974 - RNA, 19 nt, Homo sapiens
  misc_RNA (1)...(19): siRNA sense strand
guugaugguucuuagcaaa

SEQ ID NO: 1904975 - RNA, 19 nt, Homo sapiens
  misc_RNA (1)...(19): siRNA sense strand
ugaccaggaugaaggagaa

SEQ ID NO: 1904976 - RNA, 19 nt, Homo sapiens
  misc_RNA (1)...(19): siRNA sense strand
gaauaguucuacugaugca

SEQ ID NO: 1904977 - RNA, 19 nt, Homo sapiens
  misc_RNA (1)...(19): siRNA sense strand
ugaggaauuucgggaagua

SEQ ID NO: 1904978 - RNA, 19 nt, Homo sapiens
  misc_RNA (1)...(19): siRNA sense strand
ggauacaaaugcaaagacu

SEQ ID NO: 1904979 - RNA, 19 nt, Homo sapiens
  misc_RNA (1)...(19): siRNA sense strand
uuaguggagucuguauuua

SEQ ID NO: 1904980 - RNA, 19 nt, Homo sapiens
  misc_RNA (1)...(19): siRNA sense strand
ucaacaagcacauaaggaa

SEQ ID NO: 1904981 - RNA, 19 nt, Homo sapiens
  misc_RNA (1)...(19): siRNA sense strand
gaacccaacauggauuuga

SEQ ID NO: 1904982 - RNA, 19 nt, Homo sapiens
  misc_RNA (1)...(19): siRNA sense strand
uuaauggaaucucuaagug

SEQ ID NO: 1904983 - RNA, 19 nt, Homo sapiens
  misc_RNA (1)...(19): siRNA sense strand
aggaugagguguuugaguu

SEQ ID NO: 1904984 - RNA, 19 nt, Homo sapiens
  misc_RNA (1)...(19): siRNA sense strand
gugcaaagaccuccugguu

SEQ ID NO: 1904985 - RNA, 19 nt, Homo sapiens
  misc_RNA (1)...(19): siRNA sense strand
ccacuuagaacccaacaug

SEQ ID NO: 1904986 - RNA, 19 nt, Homo sapiens
  misc_RNA (1)...(19): siRNA sense strand
gaguuuaauuuggaucuug

SEQ ID NO: 1904987 - RNA, 19 nt, Homo sapiens
  misc_RNA (1)...(19): siRNA sense strand
aggauggccuaauuaguaa

SEQ ID NO: 1904988 - RNA, 19 nt, Homo sapiens
  misc_RNA (1)...(19): siRNA sense strand
uuacaaagaacuggaauga

SEQ ID NO: 1904989 - RNA, 19 nt, Homo sapiens
  misc_RNA (1)...(19): siRNA sense strand
gugggaggccucagucaua

SEQ ID NO: 1904990 - RNA, 19 nt, Homo sapiens
  misc_RNA (1)...(19): siRNA sense strand
gagaaagcugcaaugaauu

SEQ ID NO: 1904991 - RNA, 19 nt, Homo sapiens
  misc_RNA (1)...(19): siRNA sense strand
ugagauguuugaugacaau

SEQ ID NO: 1904992 - RNA, 19 nt, Homo sapiens
  misc_RNA (1)...(19): siRNA sense strand
cugcagaguuuaauuugga

SEQ ID NO: 1904993 - RNA, 19 nt, Homo sapiens
  misc_RNA (1)...(19): siRNA sense strand
aaguauagcugccaauuuu

SEQ ID NO: 1904994 - RNA, 19 nt, Homo sapiens
  misc_RNA (1)...(19): siRNA sense strand
ucguaugacugaggaauuu

SEQ ID NO: 1904995 - RNA, 19 nt, Homo sapiens
  misc_RNA (1)...(19): siRNA sense strand
ugaaauccaaguuccauga

SEQ ID NO: 1904996 - RNA, 19 nt, Homo sapiens
  misc_RNA (1)...(19): siRNA sense strand
ggacacagggauuuagaca

SEQ ID NO: 1904997 - RNA, 19 nt, Homo sapiens
  misc_RNA (1)...(19): siRNA sense strand
cuugauagcuguccauguc

SEQ ID NO: 1904998 - RNA, 19 nt, Homo sapiens
  misc_RNA (1)...(19): siRNA sense strand
caaagaacuggaaugaaau

SEQ ID NO: 1904999 - RNA, 19 nt, Homo sapiens
  misc_RNA (1)...(19): siRNA sense strand
ggagagcuggauaauaguu

SEQ ID NO: 1905000 - RNA, 19 nt, Homo sapiens
  misc_RNA (1)...(19): siRNA sense strand
cuaaguggguccaguugau

SEQ ID NO: 1905001 - RNA, 19 nt, Homo sapiens
  misc_RNA (1)...(19): siRNA sense strand
gacaauggagagcuggaua

SEQ ID NO: 1905002 - RNA, 19 nt, Homo sapiens
  misc_RNA (1)...(19): siRNA sense strand
caaagcagcaaaggacaaa

SEQ ID NO: 1905003 - RNA, 19 nt, Homo sapiens
  misc_RNA (1)...(19): siRNA sense strand
cgaacacugugcgggauuu

SEQ ID NO: 1905004 - RNA, 19 nt, Homo sapiens
  misc_RNA (1)...(19): siRNA sense strand
aagccugucugcuguuuga

SEQ ID NO: 1905005 - RNA, 19 nt, Homo sapiens
  misc_RNA (1)...(19): siRNA sense strand
ggagaacaaagugaacauu

SEQ ID NO: 1905006 - RNA, 19 nt, Homo sapiens
  misc_RNA (1)...(19): siRNA sense strand
acacuugaaagacuugaua

SEQ ID NO: 1905007 - RNA, 19 nt, Homo sapiens
  misc_RNA (1)...(19): siRNA sense strand
gaguacacuugaaagacuu

SEQ ID NO: 1905008 - RNA, 19 nt, Homo sapiens
  misc_RNA (1)...(19): siRNA sense strand
gcaccgaugguauuuaucu

SEQ ID NO: 1905009 - RNA, 19 nt, Homo sapiens
  misc_RNA (1)...(19): siRNA sense strand
acaagcacauaaggaaauu

SEQ ID NO: 1905010 - RNA, 19 nt, Homo sapiens
  misc_RNA (1)...(19): siRNA sense strand
cgaaaugccacuggagaaa

SEQ ID NO: 1905011 - RNA, 19 nt, Homo sapiens
  misc_RNA (1)...(19): siRNA sense strand
aaaguauagcugccaauuu

SEQ ID NO: 1905012 - RNA, 19 nt, Homo sapiens
  misc_RNA (1)...(19): siRNA sense strand
gaagagucacacagaggaa

SEQ ID NO: 1905013 - RNA, 19 nt, Homo sapiens
  misc_RNA (1)...(19): siRNA sense strand
agaucaggauggccuaauu

SEQ ID NO: 1905014 - RNA, 19 nt, Homo sapiens
  misc_RNA (1)...(19): siRNA sense strand
ggaggccucagucauaguu

SEQ ID NO: 1905015 - RNA, 19 nt, Homo sapiens
  misc_RNA (1)...(19): siRNA sense strand
ucacuuuucuggagcauaa

SEQ ID NO: 1905016 - RNA, 19 nt, Homo sapiens
  misc_RNA (1)...(19): siRNA sense strand
gcauaaucaagcaaggaua

SEQ ID NO: 1905017 - RNA, 19 nt, Homo sapiens
  misc_RNA (1)...(19): siRNA sense strand
ggucaucaacaagcacaua

SEQ ID NO: 1905018 - RNA, 19 nt, Homo sapiens
  misc_RNA (1)...(19): siRNA sense strand
aaagaucugcuacuucaug

SEQ ID NO: 1905019 - RNA, 19 nt, Homo sapiens
  misc_RNA (1)...(19): siRNA sense strand
gaaugaaaugacagaguug

SEQ ID NO: 1905020 - RNA, 19 nt, Homo sapiens
  misc_RNA (1)...(19): siRNA sense strand
uuggaaagaucgauugcuu

SEQ ID NO: 1905021 - RNA, 19 nt, Homo sapiens
  misc_RNA (1)...(19): siRNA sense strand
ccacugaauuggcagaaaa

SEQ ID NO: 1905022 - RNA, 19 nt, Homo sapiens
  misc_RNA (1)...(19): siRNA sense strand
gaacuugaccaggaugaag

SEQ ID NO: 1905023 - RNA, 19 nt, Homo sapiens
  misc_RNA (1)...(19): siRNA sense strand
guucuggccugcaggagau

SEQ ID NO: 1905024 - RNA, 19 nt, Homo sapiens
  misc_RNA (1)...(19): siRNA sense strand
ggagaaagcugcaaugaau

SEQ ID NO: 1905025 - RNA, 19 nt, Homo sapiens
  misc_RNA (1)...(19): siRNA sense strand
acaaagaacuggaaugaaa

SEQ ID NO: 1905026 - RNA, 19 nt, Homo sapiens
  misc_RNA (1)...(19): siRNA sense strand
ggaaugaaaugacagaguu

SEQ ID NO: 1905027 - RNA, 19 nt, Homo sapiens
  misc_RNA (1)...(19): siRNA sense strand
gcauugagauguuugauga

SEQ ID NO: 1905028 - RNA, 19 nt, Homo sapiens
  misc_RNA (1)...(19): siRNA sense strand
gaaugccucucaccacuua

SEQ ID NO: 1905029 - RNA, 19 nt, Homo sapiens
  misc_RNA (1)...(19): siRNA sense strand
gaaguuuccugcagaguuu

SEQ ID NO: 1905030 - RNA, 19 nt, Homo sapiens
  misc_RNA (1)...(19): siRNA sense strand
gaagucaucacaaaguuua

SEQ ID NO: 1905031 - RNA, 19 nt, Homo sapiens
  misc_RNA (1)...(19): siRNA sense strand
gaucuugguuugauucgua

SEQ ID NO: 1905032 - RNA, 19 nt, Homo sapiens
  misc_RNA (1)...(19): siRNA sense strand
gcaaagaccuccugguucu

SEQ ID NO: 1905033 - RNA, 19 nt, Homo sapiens
  misc_RNA (1)...(19): siRNA sense strand
gggcagaagucaucacaaa

SEQ ID NO: 1905034 - RNA, 19 nt, Homo sapiens
  misc_RNA (1)...(19): siRNA sense strand
gaacuggaaugaaaugaca

SEQ ID NO: 1905035 - RNA, 19 nt, Homo sapiens
  misc_RNA (1)...(19): siRNA sense strand
gcacuugcauugagauguu

SEQ ID NO: 1905036 - RNA, 19 nt, Homo sapiens
  misc_RNA (1)...(19): siRNA sense strand
aagaugaaaugauggcuua

SEQ ID NO: 1905037 - RNA, 19 nt, Homo sapiens
  misc_RNA (1)...(19): siRNA sense strand
cgacugcgauggcuucaaa

SEQ ID NO: 1905038 - RNA, 19 nt, Homo sapiens
  misc_RNA (1)...(19): siRNA sense strand
uuaaagaucugcuacuuca

SEQ ID NO: 1905039 - RNA, 19 nt, Homo sapiens
  misc_RNA (1)...(19): siRNA sense strand
ggaaauuaguggagucugu

SEQ ID NO: 1905040 - RNA, 19 nt, Homo sapiens
  misc_RNA (1)...(19): siRNA sense strand
caggauggccuaauuagua

SEQ ID NO: 1905041 - RNA, 19 nt, Homo sapiens
  misc_RNA (1)...(19): siRNA sense strand
guauuuaucuuccacugaa

SEQ ID NO: 1905042 - RNA, 19 nt, Homo sapiens
  misc_RNA (1)...(19): siRNA sense strand
gaucaggauggccuaauua

SEQ ID NO: 1905043 - RNA, 19 nt, Homo sapiens
  misc_RNA (1)...(19): siRNA sense strand
ggacagaggagaacaaagu

SEQ ID NO: 1905044 - RNA, 19 nt, Homo sapiens
  misc_RNA (1)...(19): siRNA sense strand
gauuaaagaucugcuacuu

SEQ ID NO: 1905045 - RNA, 19 nt, Homo sapiens
  misc_RNA (1)...(19): siRNA sense strand
ggaucucauucacugauua

SEQ ID NO: 1905046 - RNA, 19 nt, Homo sapiens
  misc_RNA (1)...(19): siRNA sense strand
gaaagcagcaacauuagau

SEQ ID NO: 1905047 - RNA, 19 nt, Homo sapiens
  misc_RNA (1)...(19): siRNA sense strand
gguacuggauucugaaguu

SEQ ID NO: 1905048 - RNA, 19 nt, Homo sapiens
  misc_RNA (1)...(19): siRNA sense strand
gcaaagggcagaagucauc

SEQ ID NO: 1905049 - RNA, 19 nt, Homo sapiens
  misc_RNA (1)...(19): siRNA sense strand
ugggaaagcagcaacauua

SEQ ID NO: 1905050 - RNA, 19 nt, Homo sapiens
  misc_RNA (1)...(19): siRNA sense strand
gaaaguauagcugccaauu

SEQ ID NO: 1905051 - RNA, 19 nt, Homo sapiens
  misc_RNA (1)...(19): siRNA sense strand
gcaaggauacaaaugcaaa

SEQ ID NO: 1905052 - RNA, 19 nt, Homo sapiens
  misc_RNA (1)...(19): siRNA sense strand
ggaguacacuugaaagacu

SEQ ID NO: 1905053 - RNA, 19 nt, Homo sapiens
  misc_RNA (1)...(19): siRNA sense strand
gaaauuaguggagucugua

SEQ ID NO: 1905054 - RNA, 19 nt, Homo sapiens
  misc_RNA (1)...(19): siRNA sense strand
gcacauaaggaaauuagug

SEQ ID NO: 1905055 - RNA, 19 nt, Homo sapiens
  misc_RNA (1)...(19): siRNA sense strand
uaauuuggaucuugguuug

SEQ ID NO: 1905056 - RNA, 19 nt, Homo sapiens
  misc_RNA (1)...(19): siRNA sense strand
caacggcaauuacugcaau

SEQ ID NO: 1905057 - RNA, 19 nt, Homo sapiens
  misc_RNA (1)...(19): siRNA sense strand
guacuggauucugaaguuu

SEQ ID NO: 1905058 - RNA, 19 nt, Homo sapiens
  misc_RNA (1)...(19): siRNA sense strand
caacauggauuugaucaac

SEQ ID NO: 1905059 - RNA, 19 nt, Homo sapiens
  misc_RNA (1)...(19): siRNA sense strand
gagaacaaagugaacauug

SEQ ID NO: 1905060 - RNA, 19 nt, Homo sapiens
  misc_RNA (1)...(19): siRNA sense strand
ggaccucuaucacacugaa

SEQ ID NO: 1905061 - RNA, 19 nt, Homo sapiens
  misc_RNA (1)...(19): siRNA sense strand
aaacuucucugcauguauc

SEQ ID NO: 1905062 - RNA, 19 nt, Homo sapiens
  misc_RNA (1)...(19): siRNA sense strand
caaagacuguggagccaau

SEQ ID NO: 1905063 - RNA, 19 nt, Homo sapiens
  misc_RNA (1)...(19): siRNA sense strand
cagaagucaucacaaaguu

SEQ ID NO: 1905064 - RNA, 19 nt, Homo sapiens
  misc_RNA (1)...(19): siRNA sense strand
gcagaagucaucacaaagu

SEQ ID NO: 1905065 - RNA, 19 nt, Homo sapiens
  misc_RNA (1)...(19): siRNA sense strand
ggaaagcagcaacauuaga

SEQ ID NO: 1905066 - RNA, 19 nt, Homo sapiens
  misc_RNA (1)...(19): siRNA sense strand
caaagugaacauugugaaa

SEQ ID NO: 1905067 - RNA, 19 nt, Homo sapiens
  misc_RNA (1)...(19): siRNA sense strand
caaguuccaugacaaagca

SEQ ID NO: 1905068 - RNA, 19 nt, Homo sapiens
  misc_RNA (1)...(19): siRNA sense strand
gagagcuggauaauaguua

SEQ ID NO: 1905069 - RNA, 19 nt, Homo sapiens
  misc_RNA (1)...(19): siRNA sense strand
caacaagcacauaaggaaa

SEQ ID NO: 1905070 - RNA, 19 nt, Homo sapiens
  misc_RNA (1)...(19): siRNA sense strand
auggagagcuggauaauag

SEQ ID NO: 1905071 - RNA, 19 nt, Homo sapiens
  misc_RNA (1)...(19): siRNA sense strand
gauguuugaugacaaugga

SEQ ID NO: 1905072 - RNA, 19 nt, Homo sapiens
  misc_RNA (1)...(19): siRNA sense strand
ccaaagcuaugucauccau

SEQ ID NO: 1905073 - RNA, 19 nt, Homo sapiens
  misc_RNA (1)...(19): siRNA sense strand
agaaagcugcaaugaauuu

SEQ ID NO: 1905074 - RNA, 19 nt, Homo sapiens
  misc_RNA (1)...(19): siRNA sense strand
guugaugguucuuagcaaa

SEQ ID NO: 1905075 - RNA, 19 nt, Homo sapiens
  misc_RNA (1)...(19): siRNA sense strand
ugaccaggaugaaggagaa

SEQ ID NO: 1905076 - RNA, 19 nt, Homo sapiens
  misc_RNA (1)...(19): siRNA sense strand
gaauaguucuacugaugca

SEQ ID NO: 1905077 - RNA, 19 nt, Homo sapiens
  misc_RNA (1)...(19): siRNA sense strand
ugaggaauuucgggaagua

SEQ ID NO: 1905078 - RNA, 19 nt, Homo sapiens
  misc_RNA (1)...(19): siRNA sense strand
ggauacaaaugcaaagacu

SEQ ID NO: 1905079 - RNA, 19 nt, Homo sapiens
  misc_RNA (1)...(19): siRNA sense strand
uuaguggagucuguauuua

SEQ ID NO: 1905080 - RNA, 19 nt, Homo sapiens
  misc_RNA (1)...(19): siRNA sense strand
ucaacaagcacauaaggaa

SEQ ID NO: 1905081 - RNA, 19 nt, Homo sapiens
  misc_RNA (1)...(19): siRNA sense strand
gaacccaacauggauuuga

SEQ ID NO: 1905082 - RNA, 19 nt, Homo sapiens
  misc_RNA (1)...(19): siRNA sense strand
uuaauggaaucucuaagug

SEQ ID NO: 1905083 - RNA, 19 nt, Homo sapiens
  misc_RNA (1)...(19): siRNA sense strand
aggaugagguguuugaguu

SEQ ID NO: 1905084 - RNA, 19 nt, Homo sapiens
  misc_RNA (1)...(19): siRNA sense strand
gugcaaagaccuccugguu

SEQ ID NO: 1905085 - RNA, 19 nt, Homo sapiens
  misc_RNA (1)...(19): siRNA sense strand
ccacuuagaacccaacaug

SEQ ID NO: 1905086 - RNA, 19 nt, Homo sapiens
  misc_RNA (1)...(19): siRNA sense strand
gaguuuaauuuggaucuug

SEQ ID NO: 1905087 - RNA, 19 nt, Homo sapiens
  misc_RNA (1)...(19): siRNA sense strand
aggauggccuaauuaguaa

SEQ ID NO: 1905088 - RNA, 19 nt, Homo sapiens
  misc_RNA (1)...(19): siRNA sense strand
uuacaaagaacuggaauga

SEQ ID NO: 1905089 - RNA, 19 nt, Homo sapiens
  misc_RNA (1)...(19): siRNA sense strand
gugggaggccucagucaua

SEQ ID NO: 1905090 - RNA, 19 nt, Homo sapiens
  misc_RNA (1)...(19): siRNA sense strand
gagaaagcugcaaugaauu

SEQ ID NO: 1905091 - RNA, 19 nt, Homo sapiens
  misc_RNA (1)...(19): siRNA sense strand
ugagauguuugaugacaau

SEQ ID NO: 1905092 - RNA, 19 nt, Homo sapiens
  misc_RNA (1)...(19): siRNA sense strand
cugcagaguuuaauuugga

SEQ ID NO: 1905093 - RNA, 19 nt, Homo sapiens
  misc_RNA (1)...(19): siRNA sense strand
aaguauagcugccaauuuu

SEQ ID NO: 1905094 - RNA, 19 nt, Homo sapiens
  misc_RNA (1)...(19): siRNA sense strand
ucguaugacugaggaauuu

SEQ ID NO: 1905095 - RNA, 19 nt, Homo sapiens
  misc_RNA (1)...(19): siRNA sense strand
ugaaauccaaguuccauga

SEQ ID NO: 1905096 - RNA, 19 nt, Homo sapiens
  misc_RNA (1)...(19): siRNA sense strand
ggacacagggauuuagaca

SEQ ID NO: 1905097 - RNA, 19 nt, Homo sapiens
  misc_RNA (1)...(19): siRNA sense strand
cuugauagcuguccauguc

SEQ ID NO: 1905098 - RNA, 19 nt, Homo sapiens
  misc_RNA (1)...(19): siRNA sense strand
caaagaacuggaaugaaau

SEQ ID NO: 1905099 - RNA, 19 nt, Homo sapiens
  misc_RNA (1)...(19): siRNA sense strand
ggagagcuggauaauaguu

SEQ ID NO: 1905100 - RNA, 19 nt, Homo sapiens
  misc_RNA (1)...(19): siRNA sense strand
cuaaguggguccaguugau

SEQ ID NO: 1905101 - RNA, 19 nt, Homo sapiens
  misc_RNA (1)...(19): siRNA sense strand
gacaauggagagcuggaua

SEQ ID NO: 1905102 - RNA, 19 nt, Homo sapiens
  misc_RNA (1)...(19): siRNA sense strand
caaagcagcaaaggacaaa

SEQ ID NO: 1905103 - RNA, 19 nt, Homo sapiens
  misc_RNA (1)...(19): siRNA sense strand
cgaacacugugcgggauuu

SEQ ID NO: 1905104 - RNA, 19 nt, Homo sapiens
  misc_RNA (1)...(19): siRNA sense strand
aagccugucugcuguuuga

SEQ ID NO: 1905105 - RNA, 19 nt, Homo sapiens
  misc_RNA (1)...(19): siRNA sense strand
ggagaacaaagugaacauu

SEQ ID NO: 1905106 - RNA, 19 nt, Homo sapiens
  misc_RNA (1)...(19): siRNA sense strand
acacuugaaagacuugaua

SEQ ID NO: 1905107 - RNA, 19 nt, Homo sapiens
  misc_RNA (1)...(19): siRNA sense strand
gaguacacuugaaagacuu

SEQ ID NO: 1905108 - RNA, 19 nt, Homo sapiens
  misc_RNA (1)...(19): siRNA sense strand
gcaccgaugguauuuaucu

SEQ ID NO: 1905109 - RNA, 19 nt, Homo sapiens
  misc_RNA (1)...(19): siRNA sense strand
acaagcacauaaggaaauu

SEQ ID NO: 1905110 - RNA, 19 nt, Homo sapiens
  misc_RNA (1)...(19): siRNA sense strand
cgaaaugccacuggagaaa

SEQ ID NO: 1905111 - RNA, 19 nt, Homo sapiens
  misc_RNA (1)...(19): siRNA sense strand
aaaguauagcugccaauuu

SEQ ID NO: 1905112 - RNA, 19 nt, Homo sapiens
  misc_RNA (1)...(19): siRNA sense strand
gaagagucacacagaggaa

SEQ ID NO: 1905113 - RNA, 19 nt, Homo sapiens
  misc_RNA (1)...(19): siRNA sense strand
agaucaggauggccuaauu

SEQ ID NO: 1905114 - RNA, 19 nt, Homo sapiens
  misc_RNA (1)...(19): siRNA sense strand
ggaggccucagucauaguu

SEQ ID NO: 1905115 - RNA, 19 nt, Homo sapiens
  misc_RNA (1)...(19): siRNA sense strand
ucacuuuucuggagcauaa

SEQ ID NO: 1905116 - RNA, 19 nt, Homo sapiens
  misc_RNA (1)...(19): siRNA sense strand
gcauaaucaagcaaggaua

SEQ ID NO: 1905117 - RNA, 19 nt, Homo sapiens
  misc_RNA (1)...(19): siRNA sense strand
ggucaucaacaagcacaua

SEQ ID NO: 1905118 - RNA, 19 nt, Homo sapiens
  misc_RNA (1)...(19): siRNA sense strand
aaagaucugcuacuucaug

SEQ ID NO: 1905119 - RNA, 19 nt, Homo sapiens
  misc_RNA (1)...(19): siRNA sense strand
gaaugaaaugacagaguug

SEQ ID NO: 1905120 - RNA, 19 nt, Homo sapiens
  misc_RNA (1)...(19): siRNA sense strand
uuggaaagaucgauugcuu

SEQ ID NO: 1905121 - RNA, 19 nt, Homo sapiens
  misc_RNA (1)...(19): siRNA sense strand
ccacugaauuggcagaaaa

SEQ ID NO: 1905122 - RNA, 19 nt, Homo sapiens
  misc_RNA (1)...(19): siRNA sense strand
gaacuugaccaggaugaag

SEQ ID NO: 1905123 - RNA, 19 nt, Homo sapiens
  misc_RNA (1)...(19): siRNA sense strand
guucuggccugcaggagau

SEQ ID NO: 1905124 - RNA, 19 nt, Homo sapiens
  misc_RNA (1)...(19): siRNA sense strand
acaagaacaucaugagcaa

SEQ ID NO: 1905125 - RNA, 19 nt, Homo sapiens
  misc_RNA (1)...(19): siRNA sense strand
gaaaggcagcggacagauc

SEQ ID NO: 1905126 - RNA, 19 nt, Homo sapiens
  misc_RNA (1)...(19): siRNA sense strand
caacaugaacuacgacaag

SEQ ID NO: 1905127 - RNA, 19 nt, Homo sapiens
  misc_RNA (1)...(19): siRNA sense strand
gcaagcccaacaugaacua

SEQ ID NO: 1905128 - RNA, 19 nt, Homo sapiens
  misc_RNA (1)...(19): siRNA sense strand
agagcaagcccaacaugaa

SEQ ID NO: 1905129 - RNA, 19 nt, Homo sapiens
  misc_RNA (1)...(19): siRNA sense strand
caagagcaagcccaacaug

SEQ ID NO: 1905130 - RNA, 19 nt, Homo sapiens
  misc_RNA (1)...(19): siRNA sense strand
gagcaagcccaacaugaac

SEQ ID NO: 1905131 - RNA, 19 nt, Homo sapiens
  misc_RNA (1)...(19): siRNA sense strand
gcaagagcaagcccaacau

SEQ ID NO: 1905132 - RNA, 19 nt, Homo sapiens
  misc_RNA (1)...(19): siRNA sense strand
caacauguaccugccagau

SEQ ID NO: 1905133 - RNA, 19 nt, Homo sapiens
  misc_RNA (1)...(19): siRNA sense strand
cagaaaggcagcggacaga

SEQ ID NO: 1905134 - RNA, 19 nt, Homo sapiens
  misc_RNA (1)...(19): siRNA sense strand
gcuacuacuacgacaagaa

SEQ ID NO: 1905135 - RNA, 19 nt, Homo sapiens
  misc_RNA (1)...(19): siRNA sense strand
aagagcaagcccaacauga

SEQ ID NO: 1905136 - RNA, 19 nt, Homo sapiens
  misc_RNA (1)...(19): siRNA sense strand
gcgcuacuacuacgacaag

SEQ ID NO: 1905137 - RNA, 19 nt, Homo sapiens
  misc_RNA (1)...(19): siRNA sense strand
ucuccaaacucaaccucau

SEQ ID NO: 1905138 - RNA, 19 nt, Homo sapiens
  misc_RNA (1)...(19): siRNA sense strand
gaucauagcuccuuuguuu

SEQ ID NO: 1905139 - RNA, 19 nt, Homo sapiens
  misc_RNA (1)...(19): siRNA sense strand
gaacaugcaucuuuaaguu

SEQ ID NO: 1905140 - RNA, 19 nt, Homo sapiens
  misc_RNA (1)...(19): siRNA sense strand
gaaauggacuucuuugaga

SEQ ID NO: 1905141 - RNA, 19 nt, Homo sapiens
  misc_RNA (1)...(19): siRNA sense strand
gaacagagcccaagaaauc

SEQ ID NO: 1905142 - RNA, 19 nt, Homo sapiens
  misc_RNA (1)...(19): siRNA sense strand
ggagagcucugaccaaauu

SEQ ID NO: 1905143 - RNA, 19 nt, Homo sapiens
  misc_RNA (1)...(19): siRNA sense strand
gaaacaggcuaaugagaaa

SEQ ID NO: 1905144 - RNA, 19 nt, Homo sapiens
  misc_RNA (1)...(19): siRNA sense strand
gaauauacaugcaagaguu

SEQ ID NO: 1905145 - RNA, 19 nt, Homo sapiens
  misc_RNA (1)...(19): siRNA sense strand
gagaaagacuauagagaaa

SEQ ID NO: 1905146 - RNA, 19 nt, Homo sapiens
  misc_RNA (1)...(19): siRNA sense strand
ggacauaguugaugaccuu

SEQ ID NO: 1905147 - RNA, 19 nt, Homo sapiens
  misc_RNA (1)...(19): siRNA sense strand
cagcaacugugaaugauua

SEQ ID NO: 1905148 - RNA, 19 nt, Homo sapiens
  misc_RNA (1)...(19): siRNA sense strand
gcaaaggaguuagaaauau

SEQ ID NO: 1905149 - RNA, 19 nt, Homo sapiens
  misc_RNA (1)...(19): siRNA sense strand
gcagaucuauuuccuauuc

SEQ ID NO: 1905150 - RNA, 19 nt, Homo sapiens
  misc_RNA (1)...(19): siRNA sense strand
gagcagaucuauuuccuau

SEQ ID NO: 1905151 - RNA, 19 nt, Homo sapiens
  misc_RNA (1)...(19): siRNA sense strand
ccacaauacuuuccuguuu

SEQ ID NO: 1905152 - RNA, 19 nt, Homo sapiens
  misc_RNA (1)...(19): siRNA sense strand
agaauuacaucaugccuua

SEQ ID NO: 1905153 - RNA, 19 nt, Homo sapiens
  misc_RNA (1)...(19): siRNA sense strand
gcacacuccuggcucauaa

SEQ ID NO: 1905154 - RNA, 19 nt, Homo sapiens
  misc_RNA (1)...(19): siRNA sense strand
gauguuaacuaccuaauuc

SEQ ID NO: 1905155 - RNA, 19 nt, Homo sapiens
  misc_RNA (1)...(19): siRNA sense strand
ggaggaagauuaauucuac

SEQ ID NO: 1905156 - RNA, 19 nt, Homo sapiens
  misc_RNA (1)...(19): siRNA sense strand
acaagaagcuuuagaagau

SEQ ID NO: 1905157 - RNA, 19 nt, Homo sapiens
  misc_RNA (1)...(19): siRNA sense strand
caacuaccauggauguuaa

SEQ ID NO: 1905158 - RNA, 19 nt, Homo sapiens
  misc_RNA (1)...(19): siRNA sense strand
gaaagacuauagagaaauc

SEQ ID NO: 1905159 - RNA, 19 nt, Homo sapiens
  misc_RNA (1)...(19): siRNA sense strand
ucaaagaucagcaaguuua

SEQ ID NO: 1905160 - RNA, 19 nt, Homo sapiens
  misc_RNA (1)...(19): siRNA sense strand
ggaagaacaagaagcuuua

SEQ ID NO: 1905161 - RNA, 19 nt, Homo sapiens
  misc_RNA (1)...(19): siRNA sense strand
gaggagagcugcagcaaag

SEQ ID NO: 1905162 - RNA, 19 nt, Homo sapiens
  misc_RNA (1)...(19): siRNA sense strand
agaaggaacuacagaauga

SEQ ID NO: 1905163 - RNA, 19 nt, Homo sapiens
  misc_RNA (1)...(19): siRNA sense strand
ggacucuuguuuagauaua

SEQ ID NO: 1905164 - RNA, 19 nt, Homo sapiens
  misc_RNA (1)...(19): siRNA sense strand
guaaagagcuuggcauucu

SEQ ID NO: 1905165 - RNA, 19 nt, Homo sapiens
  misc_RNA (1)...(19): siRNA sense strand
caaaggaguuagaaauaug

SEQ ID NO: 1905166 - RNA, 19 nt, Homo sapiens
  misc_RNA (1)...(19): siRNA sense strand
ggaaggcccuggaguuugu

SEQ ID NO: 1905167 - RNA, 19 nt, Homo sapiens
  misc_RNA (1)...(19): siRNA sense strand
agucaaagguugugaauga

SEQ ID NO: 1905168 - RNA, 19 nt, Homo sapiens
  misc_RNA (1)...(19): siRNA sense strand
gcgcauaccugccgaagau

SEQ ID NO: 1905169 - RNA, 19 nt, Homo sapiens
  misc_RNA (1)...(19): siRNA sense strand
gaauaagacugggaguaaa

SEQ ID NO: 1905170 - RNA, 19 nt, Homo sapiens
  misc_RNA (1)...(19): siRNA sense strand
gguguuaccucauauuaga

SEQ ID NO: 1905171 - RNA, 19 nt, Homo sapiens
  misc_RNA (1)...(19): siRNA sense strand
cacaauacuuuccuguuua

SEQ ID NO: 1905172 - RNA, 19 nt, Homo sapiens
  misc_RNA (1)...(19): siRNA sense strand
cagccaaagucuuguauuu

SEQ ID NO: 1905173 - RNA, 19 nt, Homo sapiens
  misc_RNA (1)...(19): siRNA sense strand
gaucuggacucuuguuuag

SEQ ID NO: 1905174 - RNA, 19 nt, Homo sapiens
  misc_RNA (1)...(19): siRNA sense strand
agaaugauaugacagauga

SEQ ID NO: 1905175 - RNA, 19 nt, Homo sapiens
  misc_RNA (1)...(19): siRNA sense strand
gccauagccugaaagauuu

SEQ ID NO: 1905176 - RNA, 19 nt, Homo sapiens
  misc_RNA (1)...(19): siRNA sense strand
gcaaaguuguucugucuuc

SEQ ID NO: 1905177 - RNA, 19 nt, Homo sapiens
  misc_RNA (1)...(19): siRNA sense strand
caucaccucuuacauuaaa

SEQ ID NO: 1905178 - RNA, 19 nt, Homo sapiens
  misc_RNA (1)...(19): siRNA sense strand
gcugguaacuggaugugua

SEQ ID NO: 1905179 - RNA, 19 nt, Homo sapiens
  misc_RNA (1)...(19): siRNA sense strand
agaaauugaugcuguguuu

SEQ ID NO: 1905180 - RNA, 19 nt, Homo sapiens
  misc_RNA (1)...(19): siRNA sense strand
ccaggaggcuuuaauggaa

SEQ ID NO: 1905181 - RNA, 19 nt, Homo sapiens
  misc_RNA (1)...(19): siRNA sense strand
ggucagcguauauguauua

SEQ ID NO: 1905182 - RNA, 19 nt, Homo sapiens
  misc_RNA (1)...(19): siRNA sense strand
gcaauucucucagcgaaga

SEQ ID NO: 1905183 - RNA, 19 nt, Homo sapiens
  misc_RNA (1)...(19): siRNA sense strand
ggaaacauaccuuauacuu

SEQ ID NO: 1905184 - RNA, 19 nt, Homo sapiens
  misc_RNA (1)...(19): siRNA sense strand
ggacauuuaugauacuuca

SEQ ID NO: 1905185 - RNA, 19 nt, Homo sapiens
  misc_RNA (1)...(19): siRNA sense strand
caagaugaauccucacaga

SEQ ID NO: 1905186 - RNA, 19 nt, Homo sapiens
  misc_RNA (1)...(19): siRNA sense strand
acacagaguuguuagaaug

SEQ ID NO: 1905187 - RNA, 19 nt, Homo sapiens
  misc_RNA (1)...(19): siRNA sense strand
gaggaggacauuuaugaua

SEQ ID NO: 1905188 - RNA, 19 nt, Homo sapiens
  misc_RNA (1)...(19): siRNA sense strand
agucaagucuuaccagaua

SEQ ID NO: 1905189 - RNA, 19 nt, Homo sapiens
  misc_RNA (1)...(19): siRNA sense strand
acagugggauuaauuguaa

SEQ ID NO: 1905190 - RNA, 19 nt, Homo sapiens
  misc_RNA (1)...(19): siRNA sense strand
gcuaaucugccaaguauuu

SEQ ID NO: 1905191 - RNA, 19 nt, Homo sapiens
  misc_RNA (1)...(19): siRNA sense strand
gaacaucagcuaaagaauc

SEQ ID NO: 1905192 - RNA, 19 nt, Homo sapiens
  misc_RNA (1)...(19): siRNA sense strand
gcaugugccugaugaguau

SEQ ID NO: 1905193 - RNA, 19 nt, Homo sapiens
  misc_RNA (1)...(19): siRNA sense strand
ccaccgagcagaucuauuu

SEQ ID NO: 1905194 - RNA, 19 nt, Homo sapiens
  misc_RNA (1)...(19): siRNA sense strand
ugaguuauaucuucaguug

SEQ ID NO: 1905195 - RNA, 19 nt, Homo sapiens
  misc_RNA (1)...(19): siRNA sense strand
uauuagaccucuugagaaa

SEQ ID NO: 1905196 - RNA, 19 nt, Homo sapiens
  misc_RNA (1)...(19): siRNA sense strand
gaaaagaucagguuacaaa

SEQ ID NO: 1905197 - RNA, 19 nt, Homo sapiens
  misc_RNA (1)...(19): siRNA sense strand
caaagguugugaaugauga

SEQ ID NO: 1905198 - RNA, 19 nt, Homo sapiens
  misc_RNA (1)...(19): siRNA sense strand
gagcagaaacgcaagauau

SEQ ID NO: 1905199 - RNA, 19 nt, Homo sapiens
  misc_RNA (1)...(19): siRNA sense strand
ggaaucauaucaguuuaga

SEQ ID NO: 1905200 - RNA, 19 nt, Homo sapiens
  misc_RNA (1)...(19): siRNA sense strand
gaaaugugcaaaggaguua

SEQ ID NO: 1905201 - RNA, 19 nt, Homo sapiens
  misc_RNA (1)...(19): siRNA sense strand
aagauuggcuguuugauau

SEQ ID NO: 1905202 - RNA, 19 nt, Homo sapiens
  misc_RNA (1)...(19): siRNA sense strand
aaaccaacaugcacauauu

SEQ ID NO: 1905203 - RNA, 19 nt, Homo sapiens
  misc_RNA (1)...(19): siRNA sense strand
aaacucauccuuccauuaa

SEQ ID NO: 1905204 - RNA, 19 nt, Homo sapiens
  misc_RNA (1)...(19): siRNA sense strand
ugguacaacuuacucauua

SEQ ID NO: 1905205 - RNA, 19 nt, Homo sapiens
  misc_RNA (1)...(19): siRNA sense strand
gagaguggguuaaaauaua

SEQ ID NO: 1905206 - RNA, 19 nt, Homo sapiens
  misc_RNA (1)...(19): siRNA sense strand
acaaaguucuguacucauu

SEQ ID NO: 1905207 - RNA, 19 nt, Homo sapiens
  misc_RNA (1)...(19): siRNA sense strand
gagcacaagucaguaaaga

SEQ ID NO: 1905208 - RNA, 19 nt, Homo sapiens
  misc_RNA (1)...(19): siRNA sense strand
cacaauaggaggaagauua

SEQ ID NO: 1905209 - RNA, 19 nt, Homo sapiens
  misc_RNA (1)...(19): siRNA sense strand
gaucugagagucaauauuc

SEQ ID NO: 1905210 - RNA, 19 nt, Homo sapiens
  misc_RNA (1)...(19): siRNA sense strand
cagaaucaauggaggauga

SEQ ID NO: 1905211 - RNA, 19 nt, Homo sapiens
  misc_RNA (1)...(19): siRNA sense strand
cuacuuaccuuucacaauc

SEQ ID NO: 1905212 - RNA, 19 nt, Homo sapiens
  misc_RNA (1)...(19): siRNA sense strand
gaaacauaccuuauacuug

SEQ ID NO: 1905213 - RNA, 19 nt, Homo sapiens
  misc_RNA (1)...(19): siRNA sense strand
agacucaccugcaaguuaa

SEQ ID NO: 1905214 - RNA, 19 nt, Homo sapiens
  misc_RNA (1)...(19): siRNA sense strand
gcaaagaagagaaagauag

SEQ ID NO: 1905215 - RNA, 19 nt, Homo sapiens
  misc_RNA (1)...(19): siRNA sense strand
gaacucaacagcaccuauu

SEQ ID NO: 1905216 - RNA, 19 nt, Homo sapiens
  misc_RNA (1)...(19): siRNA sense strand
gaacuuuauugugaggaua

SEQ ID NO: 1905217 - RNA, 19 nt, Homo sapiens
  misc_RNA (1)...(19): siRNA sense strand
gaaaugaucgccuaucucu

SEQ ID NO: 1905218 - RNA, 19 nt, Homo sapiens
  misc_RNA (1)...(19): siRNA sense strand
cagcguauauguauuacuu

SEQ ID NO: 1905219 - RNA, 19 nt, Homo sapiens
  misc_RNA (1)...(19): siRNA sense strand
caaaccaacuggaauucaa

SEQ ID NO: 1905220 - RNA, 19 nt, Homo sapiens
  misc_RNA (1)...(19): siRNA sense strand
gcaggauuauaccacaaua

SEQ ID NO: 1905221 - RNA, 19 nt, Homo sapiens
  misc_RNA (1)...(19): siRNA sense strand
gaauagagcacaagucagu

SEQ ID NO: 1905222 - RNA, 19 nt, Homo sapiens
  misc_RNA (1)...(19): siRNA sense strand
ggagauccagauauucuua

SEQ ID NO: 1905223 - RNA, 19 nt, Homo sapiens
  misc_RNA (1)...(19): siRNA sense strand
gaagagauagugcauuuua

SEQ ID NO: 1905224 - RNA, 19 nt, Homo sapiens
  misc_RNA (1)...(19): siRNA sense strand
gaugaauccucacagaaga

SEQ ID NO: 1905225 - RNA, 19 nt, Homo sapiens
  misc_RNA (1)...(19): siRNA sense strand
caaauucccagaaagagua

SEQ ID NO: 1905226 - RNA, 19 nt, Homo sapiens
  misc_RNA (1)...(19): siRNA sense strand
ggauuugguuguacaguug

SEQ ID NO: 1905227 - RNA, 19 nt, Homo sapiens
  misc_RNA (1)...(19): siRNA sense strand
ccugaaagauuuagcaaug

SEQ ID NO: 1905228 - RNA, 19 nt, Homo sapiens
  misc_RNA (1)...(19): siRNA sense strand
uaaagcagauccucuccaa

SEQ ID NO: 1905229 - RNA, 19 nt, Homo sapiens
  misc_RNA (1)...(19): siRNA sense strand
aagcuaaucugccaaguau

SEQ ID NO: 1905230 - RNA, 19 nt, Homo sapiens
  misc_RNA (1)...(19): siRNA sense strand
gaagcuaaucugccaagua

SEQ ID NO: 1905231 - RNA, 19 nt, Homo sapiens
  misc_RNA (1)...(19): siRNA sense strand
guuagaagcauuccacuuu

SEQ ID NO: 1905232 - RNA, 19 nt, Homo sapiens
  misc_RNA (1)...(19): siRNA sense strand
guuaggagauaugaguuua

SEQ ID NO: 1905233 - RNA, 19 nt, Homo sapiens
  misc_RNA (1)...(19): siRNA sense strand
gcagaaacgcaagauauuu

SEQ ID NO: 1905234 - RNA, 19 nt, Homo sapiens
  misc_RNA (1)...(19): siRNA sense strand
caagcuuucugucauauau

SEQ ID NO: 1905235 - RNA, 19 nt, Homo sapiens
  misc_RNA (1)...(19): siRNA sense strand
ggugucaguuugcuaguaa

SEQ ID NO: 1905236 - RNA, 19 nt, Homo sapiens
  misc_RNA (1)...(19): siRNA sense strand
ggagucaugugcauucuca

SEQ ID NO: 1905237 - RNA, 19 nt, Homo sapiens
  misc_RNA (1)...(19): siRNA sense strand
gaaagugugugcccuacuc

SEQ ID NO: 1905238 - RNA, 19 nt, Homo sapiens
  misc_RNA (1)...(19): siRNA sense strand
gcaagaagcugccuaacaa

SEQ ID NO: 1905239 - RNA, 19 nt, Homo sapiens
  misc_RNA (1)...(19): siRNA sense strand
gcucuucgcucgugucugu

SEQ ID NO: 1905240 - RNA, 19 nt, Homo sapiens
  misc_RNA (1)...(19): siRNA sense strand
aaagagggcaagaucauua

SEQ ID NO: 1905241 - RNA, 19 nt, Homo sapiens
  misc_RNA (1)...(19): siRNA sense strand
ggaucuguccuuucucuua

SEQ ID NO: 1905242 - RNA, 19 nt, Homo sapiens
  misc_RNA (1)...(19): siRNA sense strand
ugaaggagaucaccaacug

SEQ ID NO: 1905243 - RNA, 19 nt, Homo sapiens
  misc_RNA (1)...(19): siRNA sense strand
caagaaggcagccaaguug

SEQ ID NO: 1905244 - RNA, 19 nt, Homo sapiens
  misc_RNA (1)...(19): siRNA sense strand
gaaccaaaucuguuucuuc

SEQ ID NO: 1905245 - RNA, 19 nt, Homo sapiens
  misc_RNA (1)...(19): siRNA sense strand
gcacggagucugucuggaa

SEQ ID NO: 1905246 - RNA, 19 nt, Homo sapiens
  misc_RNA (1)...(19): siRNA sense strand
gagugugcccucaguguua

SEQ ID NO: 1905247 - RNA, 19 nt, Homo sapiens
  misc_RNA (1)...(19): siRNA sense strand
gagaggagggcaccaagaa

SEQ ID NO: 1905248 - RNA, 19 nt, Homo sapiens
  misc_RNA (1)...(19): siRNA sense strand
ccaaaucuguuucuuccau

SEQ ID NO: 1905249 - RNA, 19 nt, Homo sapiens
  misc_RNA (1)...(19): siRNA sense strand
gaucuguccuuucucuuag

SEQ ID NO: 1905250 - RNA, 19 nt, Homo sapiens
  misc_RNA (1)...(19): siRNA sense strand
caacaacaucucuacaaga

SEQ ID NO: 1905251 - RNA, 19 nt, Homo sapiens
  misc_RNA (1)...(19): siRNA sense strand
ggugggaucuguccuuucu

SEQ ID NO: 1905252 - RNA, 19 nt, Homo sapiens
  misc_RNA (1)...(19): siRNA sense strand
ccaacaacaucucuacaag

SEQ ID NO: 1905253 - RNA, 19 nt, Homo sapiens
  misc_RNA (1)...(19): siRNA sense strand
guagguggaguuaguauau

SEQ ID NO: 1905254 - RNA, 19 nt, Homo sapiens
  misc_RNA (1)...(19): siRNA sense strand
ggacugggcaccaacaaca

SEQ ID NO: 1905255 - RNA, 19 nt, Homo sapiens
  misc_RNA (1)...(19): siRNA sense strand
cuacacggcuccugacaag

SEQ ID NO: 1905256 - RNA, 19 nt, Homo sapiens
  misc_RNA (1)...(19): siRNA sense strand
aaacuaggcaugucugaga

SEQ ID NO: 1905257 - RNA, 19 nt, Homo sapiens
  misc_RNA (1)...(19): siRNA sense strand
agaaagacaccaaggagaa

SEQ ID NO: 1905258 - RNA, 19 nt, Homo sapiens
  misc_RNA (1)...(19): siRNA sense strand
gugaugacaugaaggagau

SEQ ID NO: 1905259 - RNA, 19 nt, Homo sapiens
  misc_RNA (1)...(19): siRNA sense strand
ugacaaagagggcaagauc

SEQ ID NO: 1905260 - RNA, 19 nt, Homo sapiens
  misc_RNA (1)...(19): siRNA sense strand
uagguggaguuaguauaua

SEQ ID NO: 1905261 - RNA, 19 nt, Homo sapiens
  misc_RNA (1)...(19): siRNA sense strand
uacaagaggugaacaagac

SEQ ID NO: 1905262 - RNA, 19 nt, Homo sapiens
  misc_RNA (1)...(19): siRNA sense strand
gagucugucuggaaacuag

SEQ ID NO: 1905263 - RNA, 19 nt, Homo sapiens
  misc_RNA (1)...(19): siRNA sense strand
ccaaguauggcucaccaaa

SEQ ID NO: 1905264 - RNA, 19 nt, Homo sapiens
  misc_RNA (1)...(19): siRNA sense strand
caaagagggcaagaucauu

SEQ ID NO: 1905265 - RNA, 19 nt, Homo sapiens
  misc_RNA (1)...(19): siRNA sense strand
acaagaaggcagccaaguu

SEQ ID NO: 1905266 - RNA, 19 nt, Homo sapiens
  misc_RNA (1)...(19): siRNA sense strand
ggaaacuaggcaugucuga

SEQ ID NO: 1905267 - RNA, 19 nt, Homo sapiens
  misc_RNA (1)...(19): siRNA sense strand
cuuaguagguggaguuagu

SEQ ID NO: 1905268 - RNA, 19 nt, Homo sapiens
  misc_RNA (1)...(19): siRNA sense strand
guaggugggugggaucugu

SEQ ID NO: 1905269 - RNA, 19 nt, Homo sapiens
  misc_RNA (1)...(19): siRNA sense strand
caacccugccuuuggcuuu

SEQ ID NO: 1905270 - RNA, 19 nt, Homo sapiens
  misc_RNA (1)...(19): siRNA sense strand
cacggagucugucuggaaa

SEQ ID NO: 1905271 - RNA, 19 nt, Homo sapiens
  misc_RNA (1)...(19): siRNA sense strand
ccacagccaagcccaaaga

SEQ ID NO: 1905272 - RNA, 19 nt, Homo sapiens
  misc_RNA (1)...(19): siRNA sense strand
gaaagacaccaaggagaag

SEQ ID NO: 1905273 - RNA, 19 nt, Homo sapiens
  misc_RNA (1)...(19): siRNA sense strand
gcauccgagucuacuauag

SEQ ID NO: 1905274 - RNA, 19 nt, Homo sapiens
  misc_RNA (1)...(19): siRNA sense strand
agguggaguuaguauauaa

SEQ ID NO: 1905275 - RNA, 19 nt, Homo sapiens
  misc_RNA (1)...(19): siRNA sense strand
ggagaggagggcaccaaga

SEQ ID NO: 1905276 - RNA, 19 nt, Homo sapiens
  misc_RNA (1)...(19): siRNA sense strand
guacggcauugugcaggaa

SEQ ID NO: 1905277 - RNA, 19 nt, Homo sapiens
  misc_RNA (1)...(19): siRNA sense strand
gaauucuuccguaaugugu

SEQ ID NO: 1905278 - RNA, 19 nt, Homo sapiens
  misc_RNA (1)...(19): siRNA sense strand
gggcauccgagucuacuau

SEQ ID NO: 1905279 - RNA, 19 nt, Homo sapiens
  misc_RNA (1)...(19): siRNA sense strand
gcaccaacaacaucucuac

SEQ ID NO: 1905280 - RNA, 19 nt, Homo sapiens
  misc_RNA (1)...(19): siRNA sense strand
cugcaugacuuugagaugu

SEQ ID NO: 1905281 - RNA, 19 nt, Homo sapiens
  misc_RNA (1)...(19): siRNA sense strand
caggcaacaugagugauga

SEQ ID NO: 1905282 - RNA, 19 nt, Homo sapiens
  misc_RNA (1)...(19): siRNA sense strand
gacaaagagggcaagauca

SEQ ID NO: 1905283 - RNA, 19 nt, Homo sapiens
  misc_RNA (1)...(19): siRNA sense strand
gaaggagaucaccaacugu

SEQ ID NO: 1905284 - RNA, 19 nt, Homo sapiens
  misc_RNA (1)...(19): siRNA sense strand
cuacaagaggugaacaaga

SEQ ID NO: 1905285 - RNA, 19 nt, Homo sapiens
  misc_RNA (1)...(19): siRNA sense strand
cagagaaagacaccaagga

SEQ ID NO: 1905286 - RNA, 19 nt, Homo sapiens
  misc_RNA (1)...(19): siRNA sense strand
gcagugaggaggucagacu

SEQ ID NO: 1905287 - RNA, 19 nt, Homo sapiens
  misc_RNA (1)...(19): siRNA sense strand
gagucccugugguucauga

SEQ ID NO: 1905288 - RNA, 19 nt, Homo sapiens
  misc_RNA (1)...(19): siRNA sense strand
gcauugugcaggaauucuu

SEQ ID NO: 1905289 - RNA, 19 nt, Homo sapiens
  misc_RNA (1)...(19): siRNA sense strand
acaaagagggcaagaucau

SEQ ID NO: 1905290 - RNA, 19 nt, Homo sapiens
  misc_RNA (1)...(19): siRNA sense strand
ugagugaugacaugaagga

SEQ ID NO: 1905291 - RNA, 19 nt, Homo sapiens
  misc_RNA (1)...(19): siRNA sense strand
ucuguccuuucucuuagua

SEQ ID NO: 1905292 - RNA, 19 nt, Homo sapiens
  misc_RNA (1)...(19): siRNA sense strand
ccgugguccuucccaauga

SEQ ID NO: 1905293 - RNA, 19 nt, Homo sapiens
  misc_RNA (1)...(19): siRNA sense strand
cagaggguguggccaggau

SEQ ID NO: 1905294 - RNA, 19 nt, Homo sapiens
  misc_RNA (1)...(19): siRNA sense strand
ggaaagugaagagcacauc

SEQ ID NO: 1905295 - RNA, 19 nt, Homo sapiens
  misc_RNA (1)...(19): siRNA sense strand
uuucuuccaugucugaguu

SEQ ID NO: 1905296 - RNA, 19 nt, Homo sapiens
  misc_RNA (1)...(19): siRNA sense strand
ucuccagccucuucagugu

SEQ ID NO: 1905297 - RNA, 19 nt, Homo sapiens
  misc_RNA (1)...(19): siRNA sense strand
aaguauggcucaccaaagc

SEQ ID NO: 1905298 - RNA, 19 nt, Homo sapiens
  misc_RNA (1)...(19): siRNA sense strand
ggcauccgagucuacuaua

SEQ ID NO: 1905299 - RNA, 19 nt, Homo sapiens
  misc_RNA (1)...(19): siRNA sense strand
ucaggcaacaugagugaug

SEQ ID NO: 1905300 - RNA, 19 nt, Homo sapiens
  misc_RNA (1)...(19): siRNA sense strand
agcccgagccucccaagua

SEQ ID NO: 1905301 - RNA, 19 nt, Homo sapiens
  misc_RNA (1)...(19): siRNA sense strand
caaguauggcucaccaaag

SEQ ID NO: 1905302 - RNA, 19 nt, Homo sapiens
  misc_RNA (1)...(19): siRNA sense strand
cuaacaacccugccuuugg

SEQ ID NO: 1905303 - RNA, 19 nt, Homo sapiens
  misc_RNA (1)...(19): siRNA sense strand
gccaggggauccagagaaa

SEQ ID NO: 1905304 - RNA, 19 nt, Homo sapiens
  misc_RNA (1)...(19): siRNA sense strand
ccggcucacuggagaggaa

SEQ ID NO: 1905305 - RNA, 19 nt, Homo sapiens
  misc_RNA (1)...(19): siRNA sense strand
uuaccuugcuggcggagau

SEQ ID NO: 1905306 - RNA, 19 nt, Homo sapiens
  misc_RNA (1)...(19): siRNA sense strand
gucgguggcucugcaacuu

SEQ ID NO: 1905307 - RNA, 19 nt, Homo sapiens
  misc_RNA (1)...(19): siRNA sense strand
ugggugggaucuguccuuu

SEQ ID NO: 1905308 - RNA, 19 nt, Homo sapiens
  misc_RNA (1)...(19): siRNA sense strand
gcuacacggcuccugacaa

SEQ ID NO: 1905309 - RNA, 19 nt, Homo sapiens
  misc_RNA (1)...(19): siRNA sense strand
gguccuucccaaugaggua

SEQ ID NO: 1905310 - RNA, 19 nt, Homo sapiens
  misc_RNA (1)...(19): siRNA sense strand
uuccaugucugaguuugaa

SEQ ID NO: 1905311 - RNA, 19 nt, Homo sapiens
  misc_RNA (1)...(19): siRNA sense strand
ccuaacaacccugccuuug

SEQ ID NO: 1905312 - RNA, 19 nt, Homo sapiens
  misc_RNA (1)...(19): siRNA sense strand
gcugaugggcuggcugaga

SEQ ID NO: 1905313 - RNA, 19 nt, Homo sapiens
  misc_RNA (1)...(19): siRNA sense strand
ccucggagucccugugguu

SEQ ID NO: 1905314 - RNA, 19 nt, Homo sapiens
  misc_RNA (1)...(19): siRNA sense strand
aaaucuguuucuuccaugu

SEQ ID NO: 1905315 - RNA, 19 nt, Homo sapiens
  misc_RNA (1)...(19): siRNA sense strand
ccuccucccuggacaaggu

SEQ ID NO: 1905316 - RNA, 19 nt, Homo sapiens
  misc_RNA (1)...(19): siRNA sense strand
guccuucgcagaaccaaau

SEQ ID NO: 1905317 - RNA, 19 nt, Homo sapiens
  misc_RNA (1)...(19): siRNA sense strand
gcaagaagcugccuaacaa

SEQ ID NO: 1905318 - RNA, 19 nt, Homo sapiens
  misc_RNA (1)...(19): siRNA sense strand
gcucuucgcucgugucugu

SEQ ID NO: 1905319 - RNA, 19 nt, Homo sapiens
  misc_RNA (1)...(19): siRNA sense strand
aaagagggcaagaucauua

SEQ ID NO: 1905320 - RNA, 19 nt, Homo sapiens
  misc_RNA (1)...(19): siRNA sense strand
ggaucuguccuuucucuua

SEQ ID NO: 1905321 - RNA, 19 nt, Homo sapiens
  misc_RNA (1)...(19): siRNA sense strand
ugaaggagaucaccaacug

SEQ ID NO: 1905322 - RNA, 19 nt, Homo sapiens
  misc_RNA (1)...(19): siRNA sense strand
caagaaggcagccaaguug

SEQ ID NO: 1905323 - RNA, 19 nt, Homo sapiens
  misc_RNA (1)...(19): siRNA sense strand
gaaccaaaucuguuucuuc

SEQ ID NO: 1905324 - RNA, 19 nt, Homo sapiens
  misc_RNA (1)...(19): siRNA sense strand
gcacggagucugucuggaa

SEQ ID NO: 1905325 - RNA, 19 nt, Homo sapiens
  misc_RNA (1)...(19): siRNA sense strand
gagugugcccucaguguua

SEQ ID NO: 1905326 - RNA, 19 nt, Homo sapiens
  misc_RNA (1)...(19): siRNA sense strand
gagaggagggcaccaagaa

SEQ ID NO: 1905327 - RNA, 19 nt, Homo sapiens
  misc_RNA (1)...(19): siRNA sense strand
ccaaaucuguuucuuccau

SEQ ID NO: 1905328 - RNA, 19 nt, Homo sapiens
  misc_RNA (1)...(19): siRNA sense strand
gaucuguccuuucucuuag

SEQ ID NO: 1905329 - RNA, 19 nt, Homo sapiens
  misc_RNA (1)...(19): siRNA sense strand
caacaacaucucuacaaga

SEQ ID NO: 1905330 - RNA, 19 nt, Homo sapiens
  misc_RNA (1)...(19): siRNA sense strand
ggugggaucuguccuuucu

SEQ ID NO: 1905331 - RNA, 19 nt, Homo sapiens
  misc_RNA (1)...(19): siRNA sense strand
ccaacaacaucucuacaag

SEQ ID NO: 1905332 - RNA, 19 nt, Homo sapiens
  misc_RNA (1)...(19): siRNA sense strand
guagguggaguuaguauau

SEQ ID NO: 1905333 - RNA, 19 nt, Homo sapiens
  misc_RNA (1)...(19): siRNA sense strand
ggacugggcaccaacaaca

SEQ ID NO: 1905334 - RNA, 19 nt, Homo sapiens
  misc_RNA (1)...(19): siRNA sense strand
cuacacggcuccugacaag

SEQ ID NO: 1905335 - RNA, 19 nt, Homo sapiens
  misc_RNA (1)...(19): siRNA sense strand
aaacuaggcaugucugaga

SEQ ID NO: 1905336 - RNA, 19 nt, Homo sapiens
  misc_RNA (1)...(19): siRNA sense strand
agaaagacaccaaggagaa

SEQ ID NO: 1905337 - RNA, 19 nt, Homo sapiens
  misc_RNA (1)...(19): siRNA sense strand
gugaugacaugaaggagau

SEQ ID NO: 1905338 - RNA, 19 nt, Homo sapiens
  misc_RNA (1)...(19): siRNA sense strand
ugacaaagagggcaagauc

SEQ ID NO: 1905339 - RNA, 19 nt, Homo sapiens
  misc_RNA (1)...(19): siRNA sense strand
uagguggaguuaguauaua

SEQ ID NO: 1905340 - RNA, 19 nt, Homo sapiens
  misc_RNA (1)...(19): siRNA sense strand
uacaagaggugaacaagac

SEQ ID NO: 1905341 - RNA, 19 nt, Homo sapiens
  misc_RNA (1)...(19): siRNA sense strand
gagucugucuggaaacuag

SEQ ID NO: 1905342 - RNA, 19 nt, Homo sapiens
  misc_RNA (1)...(19): siRNA sense strand
ccaaguauggcucaccaaa

SEQ ID NO: 1905343 - RNA, 19 nt, Homo sapiens
  misc_RNA (1)...(19): siRNA sense strand
caaagagggcaagaucauu

SEQ ID NO: 1905344 - RNA, 19 nt, Homo sapiens
  misc_RNA (1)...(19): siRNA sense strand
acaagaaggcagccaaguu

SEQ ID NO: 1905345 - RNA, 19 nt, Homo sapiens
  misc_RNA (1)...(19): siRNA sense strand
ggaaacuaggcaugucuga

SEQ ID NO: 1905346 - RNA, 19 nt, Homo sapiens
  misc_RNA (1)...(19): siRNA sense strand
cuuaguagguggaguuagu

SEQ ID NO: 1905347 - RNA, 19 nt, Homo sapiens
  misc_RNA (1)...(19): siRNA sense strand
guaggugggugggaucugu

SEQ ID NO: 1905348 - RNA, 19 nt, Homo sapiens
  misc_RNA (1)...(19): siRNA sense strand
caacccugccuuuggcuuu

SEQ ID NO: 1905349 - RNA, 19 nt, Homo sapiens
  misc_RNA (1)...(19): siRNA sense strand
cacggagucugucuggaaa

SEQ ID NO: 1905350 - RNA, 19 nt, Homo sapiens
  misc_RNA (1)...(19): siRNA sense strand
ccacagccaagcccaaaga

SEQ ID NO: 1905351 - RNA, 19 nt, Homo sapiens
  misc_RNA (1)...(19): siRNA sense strand
gaaagacaccaaggagaag

SEQ ID NO: 1905352 - RNA, 19 nt, Homo sapiens
  misc_RNA (1)...(19): siRNA sense strand
gcauccgagucuacuauag

SEQ ID NO: 1905353 - RNA, 19 nt, Homo sapiens
  misc_RNA (1)...(19): siRNA sense strand
agguggaguuaguauauaa

SEQ ID NO: 1905354 - RNA, 19 nt, Homo sapiens
  misc_RNA (1)...(19): siRNA sense strand
ggagaggagggcaccaaga

SEQ ID NO: 1905355 - RNA, 19 nt, Homo sapiens
  misc_RNA (1)...(19): siRNA sense strand
guacggcauugugcaggaa

SEQ ID NO: 1905356 - RNA, 19 nt, Homo sapiens
  misc_RNA (1)...(19): siRNA sense strand
gaauucuuccguaaugugu

SEQ ID NO: 1905357 - RNA, 19 nt, Homo sapiens
  misc_RNA (1)...(19): siRNA sense strand
gggcauccgagucuacuau

SEQ ID NO: 1905358 - RNA, 19 nt, Homo sapiens
  misc_RNA (1)...(19): siRNA sense strand
gcaccaacaacaucucuac

SEQ ID NO: 1905359 - RNA, 19 nt, Homo sapiens
  misc_RNA (1)...(19): siRNA sense strand
cugcaugacuuugagaugu

SEQ ID NO: 1905360 - RNA, 19 nt, Homo sapiens
  misc_RNA (1)...(19): siRNA sense strand
caggcaacaugagugauga

SEQ ID NO: 1905361 - RNA, 19 nt, Homo sapiens
  misc_RNA (1)...(19): siRNA sense strand
gacaaagagggcaagauca

SEQ ID NO: 1905362 - RNA, 19 nt, Homo sapiens
  misc_RNA (1)...(19): siRNA sense strand
gaaggagaucaccaacugu

SEQ ID NO: 1905363 - RNA, 19 nt, Homo sapiens
  misc_RNA (1)...(19): siRNA sense strand
cuacaagaggugaacaaga

SEQ ID NO: 1905364 - RNA, 19 nt, Homo sapiens
  misc_RNA (1)...(19): siRNA sense strand
cagagaaagacaccaagga

SEQ ID NO: 1905365 - RNA, 19 nt, Homo sapiens
  misc_RNA (1)...(19): siRNA sense strand
gcagugaggaggucagacu

SEQ ID NO: 1905366 - RNA, 19 nt, Homo sapiens
  misc_RNA (1)...(19): siRNA sense strand
gagucccugugguucauga

SEQ ID NO: 1905367 - RNA, 19 nt, Homo sapiens
  misc_RNA (1)...(19): siRNA sense strand
gcauugugcaggaauucuu

SEQ ID NO: 1905368 - RNA, 19 nt, Homo sapiens
  misc_RNA (1)...(19): siRNA sense strand
acaaagagggcaagaucau

SEQ ID NO: 1905369 - RNA, 19 nt, Homo sapiens
  misc_RNA (1)...(19): siRNA sense strand
ugagugaugacaugaagga

SEQ ID NO: 1905370 - RNA, 19 nt, Homo sapiens
  misc_RNA (1)...(19): siRNA sense strand
ucuguccuuucucuuagua

SEQ ID NO: 1905371 - RNA, 19 nt, Homo sapiens
  misc_RNA (1)...(19): siRNA sense strand
ccgugguccuucccaauga

SEQ ID NO: 1905372 - RNA, 19 nt, Homo sapiens
  misc_RNA (1)...(19): siRNA sense strand
cagaggguguggccaggau

SEQ ID NO: 1905373 - RNA, 19 nt, Homo sapiens
  misc_RNA (1)...(19): siRNA sense strand
ggaaagugaagagcacauc

SEQ ID NO: 1905374 - RNA, 19 nt, Homo sapiens
  misc_RNA (1)...(19): siRNA sense strand
uuucuuccaugucugaguu

SEQ ID NO: 1905375 - RNA, 19 nt, Homo sapiens
  misc_RNA (1)...(19): siRNA sense strand
ucuccagccucuucagugu

SEQ ID NO: 1905376 - RNA, 19 nt, Homo sapiens
  misc_RNA (1)...(19): siRNA sense strand
aaguauggcucaccaaagc

SEQ ID NO: 1905377 - RNA, 19 nt, Homo sapiens
  misc_RNA (1)...(19): siRNA sense strand
ggcauccgagucuacuaua

SEQ ID NO: 1905378 - RNA, 19 nt, Homo sapiens
  misc_RNA (1)...(19): siRNA sense strand
ucaggcaacaugagugaug

SEQ ID NO: 1905379 - RNA, 19 nt, Homo sapiens
  misc_RNA (1)...(19): siRNA sense strand
agcccgagccucccaagua

SEQ ID NO: 1905380 - RNA, 19 nt, Homo sapiens
  misc_RNA (1)...(19): siRNA sense strand
caaguauggcucaccaaag

SEQ ID NO: 1905381 - RNA, 19 nt, Homo sapiens
  misc_RNA (1)...(19): siRNA sense strand
cuaacaacccugccuuugg

SEQ ID NO: 1905382 - RNA, 19 nt, Homo sapiens
  misc_RNA (1)...(19): siRNA sense strand
gccaggggauccagagaaa

SEQ ID NO: 1905383 - RNA, 19 nt, Homo sapiens
  misc_RNA (1)...(19): siRNA sense strand
ccggcucacuggagaggaa

SEQ ID NO: 1905384 - RNA, 19 nt, Homo sapiens
  misc_RNA (1)...(19): siRNA sense strand
uuaccuugcuggcggagau

SEQ ID NO: 1905385 - RNA, 19 nt, Homo sapiens
  misc_RNA (1)...(19): siRNA sense strand
gucgguggcucugcaacuu

SEQ ID NO: 1905386 - RNA, 19 nt, Homo sapiens
  misc_RNA (1)...(19): siRNA sense strand
ugggugggaucuguccuuu

SEQ ID NO: 1905387 - RNA, 19 nt, Homo sapiens
  misc_RNA (1)...(19): siRNA sense strand
gcuacacggcuccugacaa

SEQ ID NO: 1905388 - RNA, 19 nt, Homo sapiens
  misc_RNA (1)...(19): siRNA sense strand
gguccuucccaaugaggua

SEQ ID NO: 1905389 - RNA, 19 nt, Homo sapiens
  misc_RNA (1)...(19): siRNA sense strand
uuccaugucugaguuugaa

SEQ ID NO: 1905390 - RNA, 19 nt, Homo sapiens
  misc_RNA (1)...(19): siRNA sense strand
ccuaacaacccugccuuug

SEQ ID NO: 1905391 - RNA, 19 nt, Homo sapiens
  misc_RNA (1)...(19): siRNA sense strand
gcugaugggcuggcugaga

SEQ ID NO: 1905392 - RNA, 19 nt, Homo sapiens
  misc_RNA (1)...(19): siRNA sense strand
ccucggagucccugugguu

SEQ ID NO: 1905393 - RNA, 19 nt, Homo sapiens
  misc_RNA (1)...(19): siRNA sense strand
aaaucuguuucuuccaugu

SEQ ID NO: 1905394 - RNA, 19 nt, Homo sapiens
  misc_RNA (1)...(19): siRNA sense strand
ccuccucccuggacaaggu

SEQ ID NO: 1905395 - RNA, 19 nt, Homo sapiens
  misc_RNA (1)...(19): siRNA sense strand
guccuucgcagaaccaaau

SEQ ID NO: 1905396 - RNA, 19 nt, Homo sapiens
  misc_RNA (1)...(19): siRNA sense strand
ccaagaacauuguggagaa

SEQ ID NO: 1905397 - RNA, 19 nt, Homo sapiens
  misc_RNA (1)...(19): siRNA sense strand
uggagaagauugacuuuga

SEQ ID NO: 1905398 - RNA, 19 nt, Homo sapiens
  misc_RNA (1)...(19): siRNA sense strand
ucaaggguaucgacaggua

SEQ ID NO: 1905399 - RNA, 19 nt, Homo sapiens
  misc_RNA (1)...(19): siRNA sense strand
caaccuggcuguccugaag

SEQ ID NO: 1905400 - RNA, 19 nt, Homo sapiens
  misc_RNA (1)...(19): siRNA sense strand
ugaaggcccucaccaacuu

SEQ ID NO: 1905401 - RNA, 19 nt, Homo sapiens
  misc_RNA (1)...(19): siRNA sense strand
gaaaguuuaucugccaugu

SEQ ID NO: 1905402 - RNA, 19 nt, Homo sapiens
  misc_RNA (1)...(19): siRNA sense strand
ccaggcacaucaagaagaa

SEQ ID NO: 1905403 - RNA, 19 nt, Homo sapiens
  misc_RNA (1)...(19): siRNA sense strand
aaacauggaccucuuggaa

SEQ ID NO: 1905404 - RNA, 19 nt, Homo sapiens
  misc_RNA (1)...(19): siRNA sense strand
gaagauugacuuugacagu

SEQ ID NO: 1905405 - RNA, 19 nt, Homo sapiens
  misc_RNA (1)...(19): siRNA sense strand
ucacuuaccagcacauuga

SEQ ID NO: 1905406 - RNA, 19 nt, Homo sapiens
  misc_RNA (1)...(19): siRNA sense strand
ugaagacucuguccgaaag

SEQ ID NO: 1905407 - RNA, 19 nt, Homo sapiens
  misc_RNA (1)...(19): siRNA sense strand
gcauuaaacccaagaacau

SEQ ID NO: 1905408 - RNA, 19 nt, Homo sapiens
  misc_RNA (1)...(19): siRNA sense strand
ccaagaagagagcauuaaa

SEQ ID NO: 1905409 - RNA, 19 nt, Homo sapiens
  misc_RNA (1)...(19): siRNA sense strand
aaguuuaucugccauguug

SEQ ID NO: 1905410 - RNA, 19 nt, Homo sapiens
  misc_RNA (1)...(19): siRNA sense strand
gagccaacgugggcaaguu

SEQ ID NO: 1905411 - RNA, 19 nt, Homo sapiens
  misc_RNA (1)...(19): siRNA sense strand
guucaacccagccuucuuu

SEQ ID NO: 1905412 - RNA, 19 nt, Homo sapiens
  misc_RNA (1)...(19): siRNA sense strand
gaacauuguggagaagauu

SEQ ID NO: 1905413 - RNA, 19 nt, Homo sapiens
  misc_RNA (1)...(19): siRNA sense strand
gaacggccaauccgacaga

SEQ ID NO: 1905414 - RNA, 19 nt, Homo sapiens
  misc_RNA (1)...(19): siRNA sense strand
cgaccaggcacaucaagaa

SEQ ID NO: 1905415 - RNA, 19 nt, Homo sapiens
  misc_RNA (1)...(19): siRNA sense strand
agguauaacuggcuuugaa

SEQ ID NO: 1905416 - RNA, 19 nt, Homo sapiens
  misc_RNA (1)...(19): siRNA sense strand
gaagguauaacuggcuuug

SEQ ID NO: 1905417 - RNA, 19 nt, Homo sapiens
  misc_RNA (1)...(19): siRNA sense strand
ggagaagauugacuuugac

SEQ ID NO: 1905418 - RNA, 19 nt, Homo sapiens
  misc_RNA (1)...(19): siRNA sense strand
cagcuaaagguguggauga

SEQ ID NO: 1905419 - RNA, 19 nt, Homo sapiens
  misc_RNA (1)...(19): siRNA sense strand
ggcaagcccuggaugaaaa

SEQ ID NO: 1905420 - RNA, 19 nt, Homo sapiens
  misc_RNA (1)...(19): siRNA sense strand
gacucuguccgaaaguuua

SEQ ID NO: 1905421 - RNA, 19 nt, Homo sapiens
  misc_RNA (1)...(19): siRNA sense strand
gccaagaagagagcauuaa

SEQ ID NO: 1905422 - RNA, 19 nt, Homo sapiens
  misc_RNA (1)...(19): siRNA sense strand
cuucaucuguagccaagaa

SEQ ID NO: 1905423 - RNA, 19 nt, Homo sapiens
  misc_RNA (1)...(19): siRNA sense strand
caagaacauuguggagaag

SEQ ID NO: 1905424 - RNA, 19 nt, Homo sapiens
  misc_RNA (1)...(19): siRNA sense strand
uccugaagcuguaccaguu

SEQ ID NO: 1905425 - RNA, 19 nt, Homo sapiens
  misc_RNA (1)...(19): siRNA sense strand
caaggaaaaugccuaugau

SEQ ID NO: 1905426 - RNA, 19 nt, Homo sapiens
  misc_RNA (1)...(19): siRNA sense strand
gagaagauugacuuugaca

SEQ ID NO: 1905427 - RNA, 19 nt, Homo sapiens
  misc_RNA (1)...(19): siRNA sense strand
caagaagagagcauuaaac

SEQ ID NO: 1905428 - RNA, 19 nt, Homo sapiens
  misc_RNA (1)...(19): siRNA sense strand
uggcuguccugaagcugua

SEQ ID NO: 1905429 - RNA, 19 nt, Homo sapiens
  misc_RNA (1)...(19): siRNA sense strand
aaaugccuaugaucuggaa

SEQ ID NO: 1905430 - RNA, 19 nt, Homo sapiens
  misc_RNA (1)...(19): siRNA sense strand
guauaacuggcuuugaaga

SEQ ID NO: 1905431 - RNA, 19 nt, Homo sapiens
  misc_RNA (1)...(19): siRNA sense strand
gcuggagaccugccauuuc

SEQ ID NO: 1905432 - RNA, 19 nt, Homo sapiens
  misc_RNA (1)...(19): siRNA sense strand
ccaacuugccgcacacaga

SEQ ID NO: 1905433 - RNA, 19 nt, Homo sapiens
  misc_RNA (1)...(19): siRNA sense strand
cauuaaacccaagaacauu

SEQ ID NO: 1905434 - RNA, 19 nt, Homo sapiens
  misc_RNA (1)...(19): siRNA sense strand
agauugacuuugacagugu

SEQ ID NO: 1905435 - RNA, 19 nt, Homo sapiens
  misc_RNA (1)...(19): siRNA sense strand
caacccagccuucuuucag

SEQ ID NO: 1905436 - RNA, 19 nt, Homo sapiens
  misc_RNA (1)...(19): siRNA sense strand
cauggccuccucccaguaa

SEQ ID NO: 1905437 - RNA, 19 nt, Homo sapiens
  misc_RNA (1)...(19): siRNA sense strand
agguguggaugagcaaaua

SEQ ID NO: 1905438 - RNA, 19 nt, Homo sapiens
  misc_RNA (1)...(19): siRNA sense strand
ggaaaaugccuaugaucug

SEQ ID NO: 1905439 - RNA, 19 nt, Homo sapiens
  misc_RNA (1)...(19): siRNA sense strand
uagagacgcaggccaagga

SEQ ID NO: 1905440 - RNA, 19 nt, Homo sapiens
  misc_RNA (1)...(19): siRNA sense strand
aacccagccuucuuucaga

SEQ ID NO: 1905441 - RNA, 19 nt, Homo sapiens
  misc_RNA (1)...(19): siRNA sense strand
ccaaggaaaaugccuauga

SEQ ID NO: 1905442 - RNA, 19 nt, Homo sapiens
  misc_RNA (1)...(19): siRNA sense strand
gaaggcccucaccaacuug

SEQ ID NO: 1905443 - RNA, 19 nt, Homo sapiens
  misc_RNA (1)...(19): siRNA sense strand
gaucgaccaggcacaucaa

SEQ ID NO: 1905444 - RNA, 19 nt, Homo sapiens
  misc_RNA (1)...(19): siRNA sense strand
caagaagaacggccaaucc

SEQ ID NO: 1905445 - RNA, 19 nt, Homo sapiens
  misc_RNA (1)...(19): siRNA sense strand
agaacauuguggagaagau

SEQ ID NO: 1905446 - RNA, 19 nt, Homo sapiens
  misc_RNA (1)...(19): siRNA sense strand
ccgcccagauccugcugaa

SEQ ID NO: 1905447 - RNA, 19 nt, Homo sapiens
  misc_RNA (1)...(19): siRNA sense strand
ggaagguauaacuggcuuu

SEQ ID NO: 1905448 - RNA, 19 nt, Homo sapiens
  misc_RNA (1)...(19): siRNA sense strand
uggcaagcccuggaugaaa

SEQ ID NO: 1905449 - RNA, 19 nt, Homo sapiens
  misc_RNA (1)...(19): siRNA sense strand
cuggagcgcuauguagaga

SEQ ID NO: 1905450 - RNA, 19 nt, Homo sapiens
  misc_RNA (1)...(19): siRNA sense strand
gguauaacuggcuuugaag

SEQ ID NO: 1905451 - RNA, 19 nt, Homo sapiens
  misc_RNA (1)...(19): siRNA sense strand
gcaucuuccuggccaucau

SEQ ID NO: 1905452 - RNA, 19 nt, Homo sapiens
  misc_RNA (1)...(19): siRNA sense strand
ccaaagacaagaaguauaa

SEQ ID NO: 1905453 - RNA, 19 nt, Homo sapiens
  misc_RNA (1)...(19): siRNA sense strand
ggaaaucuacugucauuau

SEQ ID NO: 1905454 - RNA, 19 nt, Homo sapiens
  misc_RNA (1)...(19): siRNA sense strand
uaaagcagccuaugacauu

SEQ ID NO: 1905455 - RNA, 19 nt, Homo sapiens
  misc_RNA (1)...(19): siRNA sense strand
gacaagaaguauaaacaga

SEQ ID NO: 1905456 - RNA, 19 nt, Homo sapiens
  misc_RNA (1)...(19): siRNA sense strand
gaaaguucaucaaagaaag

SEQ ID NO: 1905457 - RNA, 19 nt, Homo sapiens
  misc_RNA (1)...(19): siRNA sense strand
ggagaaaugccggugguua

SEQ ID NO: 1905458 - RNA, 19 nt, Homo sapiens
  misc_RNA (1)...(19): siRNA sense strand
gaaagauguucguccaaag

SEQ ID NO: 1905459 - RNA, 19 nt, Homo sapiens
  misc_RNA (1)...(19): siRNA sense strand
gagauaaagcagccuauga

SEQ ID NO: 1905460 - RNA, 19 nt, Homo sapiens
  misc_RNA (1)...(19): siRNA sense strand
aaagggaaaucuacuguca

SEQ ID NO: 1905461 - RNA, 19 nt, Homo sapiens
  misc_RNA (1)...(19): siRNA sense strand
gauuuccucuucauucuga

SEQ ID NO: 1905462 - RNA, 19 nt, Homo sapiens
  misc_RNA (1)...(19): siRNA sense strand
auaaacagauuuccucuuc

SEQ ID NO: 1905463 - RNA, 19 nt, Homo sapiens
  misc_RNA (1)...(19): siRNA sense strand
gaaagcaccaagaagcaaa

SEQ ID NO: 1905464 - RNA, 19 nt, Homo sapiens
  misc_RNA (1)...(19): siRNA sense strand
agaaagauguucguccaaa

SEQ ID NO: 1905465 - RNA, 19 nt, Homo sapiens
  misc_RNA (1)...(19): siRNA sense strand
ucaaagaaagcaccaagaa

SEQ ID NO: 1905466 - RNA, 19 nt, Homo sapiens
  misc_RNA (1)...(19): siRNA sense strand
ggagcgcccuguugagugu

SEQ ID NO: 1905467 - RNA, 19 nt, Homo sapiens
  misc_RNA (1)...(19): siRNA sense strand
aaacagauuuccucuucau

SEQ ID NO: 1905468 - RNA, 19 nt, Homo sapiens
  misc_RNA (1)...(19): siRNA sense strand
uaaauguuguccagacuca

SEQ ID NO: 1905469 - RNA, 19 nt, Homo sapiens
  misc_RNA (1)...(19): siRNA sense strand
uaaaucaacaucaggagaa

SEQ ID NO: 1905470 - RNA, 19 nt, Homo sapiens
  misc_RNA (1)...(19): siRNA sense strand
agggaaaucuacugucauu

SEQ ID NO: 1905471 - RNA, 19 nt, Homo sapiens
  misc_RNA (1)...(19): siRNA sense strand
cuucaucucuuccaaguca

SEQ ID NO: 1905472 - RNA, 19 nt, Homo sapiens
  misc_RNA (1)...(19): siRNA sense strand
ccaaggcuguggccaguuc

SEQ ID NO: 1905473 - RNA, 19 nt, Homo sapiens
  misc_RNA (1)...(19): siRNA sense strand
gugguuagcuucaucaaaa

SEQ ID NO: 1905474 - RNA, 19 nt, Homo sapiens
  misc_RNA (1)...(19): siRNA sense strand
gagaaaugccggugguuag

SEQ ID NO: 1905475 - RNA, 19 nt, Homo sapiens
  misc_RNA (1)...(19): siRNA sense strand
cagcagagcaugcagaagu

SEQ ID NO: 1905476 - RNA, 19 nt, Homo sapiens
  misc_RNA (1)...(19): siRNA sense strand
ggaaaacaagugagaaauu

SEQ ID NO: 1905477 - RNA, 19 nt, Homo sapiens
  misc_RNA (1)...(19): siRNA sense strand
gauccuaaaucaacaucag

SEQ ID NO: 1905478 - RNA, 19 nt, Homo sapiens
  misc_RNA (1)...(19): siRNA sense strand
uguagucucugccaacuuc

SEQ ID NO: 1905479 - RNA, 19 nt, Homo sapiens
  misc_RNA (1)...(19): siRNA sense strand
cagguuggguguacgaugu

SEQ ID NO: 1905480 - RNA, 19 nt, Homo sapiens
  misc_RNA (1)...(19): siRNA sense strand
ccauauggguaaauguugu

SEQ ID NO: 1905481 - RNA, 19 nt, Homo sapiens
  misc_RNA (1)...(19): siRNA sense strand
gaaguccucgcuggaguuu

SEQ ID NO: 1905482 - RNA, 19 nt, Homo sapiens
  misc_RNA (1)...(19): siRNA sense strand
gaguguaaguucugcaaac

SEQ ID NO: 1905483 - RNA, 19 nt, Homo sapiens
  misc_RNA (1)...(19): siRNA sense strand
uaaacagauuuccucuuca

SEQ ID NO: 1905484 - RNA, 19 nt, Homo sapiens
  misc_RNA (1)...(19): siRNA sense strand
cagauuuccucuucauucu

SEQ ID NO: 1905485 - RNA, 19 nt, Homo sapiens
  misc_RNA (1)...(19): siRNA sense strand
caaagaaagcaccaagaag

SEQ ID NO: 1905486 - RNA, 19 nt, Homo sapiens
  misc_RNA (1)...(19): siRNA sense strand
gauaaagcagccuaugaca

SEQ ID NO: 1905487 - RNA, 19 nt, Homo sapiens
  misc_RNA (1)...(19): siRNA sense strand
caacuucacccuccaugag

SEQ ID NO: 1905488 - RNA, 19 nt, Homo sapiens
  misc_RNA (1)...(19): siRNA sense strand
aaagauguucguccaaaga

SEQ ID NO: 1905489 - RNA, 19 nt, Homo sapiens
  misc_RNA (1)...(19): siRNA sense strand
gaaauucuuccuucaucuc

SEQ ID NO: 1905490 - RNA, 19 nt, Homo sapiens
  misc_RNA (1)...(19): siRNA sense strand
ccaaaugauuccagaaaau

SEQ ID NO: 1905491 - RNA, 19 nt, Homo sapiens
  misc_RNA (1)...(19): siRNA sense strand
aaaucaacaucaggagaaa

SEQ ID NO: 1905492 - RNA, 19 nt, Homo sapiens
  misc_RNA (1)...(19): siRNA sense strand
gguaaauguuguccagacu

SEQ ID NO: 1905493 - RNA, 19 nt, Homo sapiens
  misc_RNA (1)...(19): siRNA sense strand
ggagauaaagcagccuaug

SEQ ID NO: 1905494 - RNA, 19 nt, Homo sapiens
  misc_RNA (1)...(19): siRNA sense strand
caccauauggguaaauguu

SEQ ID NO: 1905495 - RNA, 19 nt, Homo sapiens
  misc_RNA (1)...(19): siRNA sense strand
ugaaagggaaaucuacugu

SEQ ID NO: 1905496 - RNA, 19 nt, Homo sapiens
  misc_RNA (1)...(19): siRNA sense strand
gauguucguccaaagacaa

SEQ ID NO: 1905497 - RNA, 19 nt, Homo sapiens
  misc_RNA (1)...(19): siRNA sense strand
ggaggagcacugcaagcuu

SEQ ID NO: 1905498 - RNA, 19 nt, Homo sapiens
  misc_RNA (1)...(19): siRNA sense strand
aguccucgcuggaguuuca

SEQ ID NO: 1905499 - RNA, 19 nt, Homo sapiens
  misc_RNA (1)...(19): siRNA sense strand
cguccaaagacaagaagua

SEQ ID NO: 1905500 - RNA, 19 nt, Homo sapiens
  misc_RNA (1)...(19): siRNA sense strand
gagaaagauguucguccaa

SEQ ID NO: 1905501 - RNA, 19 nt, Homo sapiens
  misc_RNA (1)...(19): siRNA sense strand
aaccaaaugauuccagaaa

SEQ ID NO: 1905502 - RNA, 19 nt, Homo sapiens
  misc_RNA (1)...(19): siRNA sense strand
acagauuuccucuucauuc

SEQ ID NO: 1905503 - RNA, 19 nt, Homo sapiens
  misc_RNA (1)...(19): siRNA sense strand
gggaaaucuacugucauua

SEQ ID NO: 1905504 - RNA, 19 nt, Homo sapiens
  misc_RNA (1)...(19): siRNA sense strand
ugucauuauugcaaccaaa

SEQ ID NO: 1905505 - RNA, 19 nt, Homo sapiens
  misc_RNA (1)...(19): siRNA sense strand
gggaaaggggaaagaauuu

SEQ ID NO: 1905506 - RNA, 19 nt, Homo sapiens
  misc_RNA (1)...(19): siRNA sense strand
aaaugccggugguuagcuu

SEQ ID NO: 1905507 - RNA, 19 nt, Homo sapiens
  misc_RNA (1)...(19): siRNA sense strand
guccaaagacaagaaguau

SEQ ID NO: 1905508 - RNA, 19 nt, Homo sapiens
  misc_RNA (1)...(19): siRNA sense strand
caaccaaaugauuccagaa

SEQ ID NO: 1905509 - RNA, 19 nt, Homo sapiens
  misc_RNA (1)...(19): siRNA sense strand
aaucuacugucauuauugc

SEQ ID NO: 1905510 - RNA, 19 nt, Homo sapiens
  misc_RNA (1)...(19): siRNA sense strand
ggugguuagcuucaucaaa

SEQ ID NO: 1905511 - RNA, 19 nt, Homo sapiens
  misc_RNA (1)...(19): siRNA sense strand
aaagcagccuaugacauuc

SEQ ID NO: 1905512 - RNA, 19 nt, Homo sapiens
  misc_RNA (1)...(19): siRNA sense strand
ccaagucaagcugcugaaa

SEQ ID NO: 1905513 - RNA, 19 nt, Homo sapiens
  misc_RNA (1)...(19): siRNA sense strand
ccacgauggagaaagaugu

SEQ ID NO: 1905514 - RNA, 19 nt, Homo sapiens
  misc_RNA (1)...(19): siRNA sense strand
ucgcuggaguuucauaagg

SEQ ID NO: 1905515 - RNA, 19 nt, Homo sapiens
  misc_RNA (1)...(19): siRNA sense strand
uccaaagacaagaaguaua

SEQ ID NO: 1905516 - RNA, 19 nt, Homo sapiens
  misc_RNA (1)...(19): siRNA sense strand
ggaguuucauaaggccaau

SEQ ID NO: 1905517 - RNA, 19 nt, Homo sapiens
  misc_RNA (1)...(19): siRNA sense strand
ccaacuucacccuccauga

SEQ ID NO: 1905518 - RNA, 19 nt, Homo sapiens
  misc_RNA (1)...(19): siRNA sense strand
gcaaauguauuaccaauug

SEQ ID NO: 1905519 - RNA, 19 nt, Homo sapiens
  misc_RNA (1)...(19): siRNA sense strand
gaaaugagaccaugaauau

SEQ ID NO: 1905520 - RNA, 19 nt, Homo sapiens
  misc_RNA (1)...(19): siRNA sense strand
aaagaaggcuuacucauuu

SEQ ID NO: 1905521 - RNA, 19 nt, Homo sapiens
  misc_RNA (1)...(19): siRNA sense strand
guauauggcuccugaagua

SEQ ID NO: 1905522 - RNA, 19 nt, Homo sapiens
  misc_RNA (1)...(19): siRNA sense strand
caacaucccaacauuauua

SEQ ID NO: 1905523 - RNA, 19 nt, Homo sapiens
  misc_RNA (1)...(19): siRNA sense strand
guauacugcugaacaaaua

SEQ ID NO: 1905524 - RNA, 19 nt, Homo sapiens
  misc_RNA (1)...(19): siRNA sense strand
uuaaagcacucauggauaa

SEQ ID NO: 1905525 - RNA, 19 nt, Homo sapiens
  misc_RNA (1)...(19): siRNA sense strand
ggacaacaucccaacauua

SEQ ID NO: 1905526 - RNA, 19 nt, Homo sapiens
  misc_RNA (1)...(19): siRNA sense strand
ugaaggaguuguuaaagaa

SEQ ID NO: 1905527 - RNA, 19 nt, Homo sapiens
  misc_RNA (1)...(19): siRNA sense strand
ccaaagagguucuguuuac

SEQ ID NO: 1905528 - RNA, 19 nt, Homo sapiens
  misc_RNA (1)...(19): siRNA sense strand
gaagggaaacuguacuuaa

SEQ ID NO: 1905529 - RNA, 19 nt, Homo sapiens
  misc_RNA (1)...(19): siRNA sense strand
gcacaaagucuucuaagga

SEQ ID NO: 1905530 - RNA, 19 nt, Homo sapiens
  misc_RNA (1)...(19): siRNA sense strand
ugaaggaugucuuugauga

SEQ ID NO: 1905531 - RNA, 19 nt, Homo sapiens
  misc_RNA (1)...(19): siRNA sense strand
cgagguaaauggucuuaaa

SEQ ID NO: 1905532 - RNA, 19 nt, Homo sapiens
  misc_RNA (1)...(19): siRNA sense strand
guagauauguuuaccuugu

SEQ ID NO: 1905533 - RNA, 19 nt, Homo sapiens
  misc_RNA (1)...(19): siRNA sense strand
aaagagaaaugauguguca

SEQ ID NO: 1905534 - RNA, 19 nt, Homo sapiens
  misc_RNA (1)...(19): siRNA sense strand
gguggaaacugggacaaua

SEQ ID NO: 1905535 - RNA, 19 nt, Homo sapiens
  misc_RNA (1)...(19): siRNA sense strand
ggacuucucuuaacuccau

SEQ ID NO: 1905536 - RNA, 19 nt, Homo sapiens
  misc_RNA (1)...(19): siRNA sense strand
uaucacaagugcaaaugua

SEQ ID NO: 1905537 - RNA, 19 nt, Homo sapiens
  misc_RNA (1)...(19): siRNA sense strand
gaacgggaggcuagugaua

SEQ ID NO: 1905538 - RNA, 19 nt, Homo sapiens
  misc_RNA (1)...(19): siRNA sense strand
gaaggaggauauugguguu

SEQ ID NO: 1905539 - RNA, 19 nt, Homo sapiens
  misc_RNA (1)...(19): siRNA sense strand
gagaccaguugccaaauga

SEQ ID NO: 1905540 - RNA, 19 nt, Homo sapiens
  misc_RNA (1)...(19): siRNA sense strand
ggaaugccucaauuucuua

SEQ ID NO: 1905541 - RNA, 19 nt, Homo sapiens
  misc_RNA (1)...(19): siRNA sense strand
gauaugaugcugcuuguga

SEQ ID NO: 1905542 - RNA, 19 nt, Homo sapiens
  misc_RNA (1)...(19): siRNA sense strand
gaaaauggacuucucuuaa

SEQ ID NO: 1905543 - RNA, 19 nt, Homo sapiens
  misc_RNA (1)...(19): siRNA sense strand
gcaaauagauugggaucag

SEQ ID NO: 1905544 - RNA, 19 nt, Homo sapiens
  misc_RNA (1)...(19): siRNA sense strand
uaaggaaggcuaugagaaa

SEQ ID NO: 1905545 - RNA, 19 nt, Homo sapiens
  misc_RNA (1)...(19): siRNA sense strand
gcaaauauugacugggaua

SEQ ID NO: 1905546 - RNA, 19 nt, Homo sapiens
  misc_RNA (1)...(19): siRNA sense strand
guaagacaguugacuaucu

SEQ ID NO: 1905547 - RNA, 19 nt, Homo sapiens
  misc_RNA (1)...(19): siRNA sense strand
gagaguuacuugaccguau

SEQ ID NO: 1905548 - RNA, 19 nt, Homo sapiens
  misc_RNA (1)...(19): siRNA sense strand
gggcagcucuaugcaauga

SEQ ID NO: 1905549 - RNA, 19 nt, Homo sapiens
  misc_RNA (1)...(19): siRNA sense strand
gacaacaucccaacauuau

SEQ ID NO: 1905550 - RNA, 19 nt, Homo sapiens
  misc_RNA (1)...(19): siRNA sense strand
uaaagauucucccgguuug

SEQ ID NO: 1905551 - RNA, 19 nt, Homo sapiens
  misc_RNA (1)...(19): siRNA sense strand
caaauugcacuaugccuuu

SEQ ID NO: 1905552 - RNA, 19 nt, Homo sapiens
  misc_RNA (1)...(19): siRNA sense strand
gaacaucaacuggccugua

SEQ ID NO: 1905553 - RNA, 19 nt, Homo sapiens
  misc_RNA (1)...(19): siRNA sense strand
gaaaggaggagaguuacuu

SEQ ID NO: 1905554 - RNA, 19 nt, Homo sapiens
  misc_RNA (1)...(19): siRNA sense strand
caucagcucuucaaaggau

SEQ ID NO: 1905555 - RNA, 19 nt, Homo sapiens
  misc_RNA (1)...(19): siRNA sense strand
agaaggaguugaagaaauc

SEQ ID NO: 1905556 - RNA, 19 nt, Homo sapiens
  misc_RNA (1)...(19): siRNA sense strand
gaugaaauaggacauauca

SEQ ID NO: 1905557 - RNA, 19 nt, Homo sapiens
  misc_RNA (1)...(19): siRNA sense strand
cagaaggaguugaagaaau

SEQ ID NO: 1905558 - RNA, 19 nt, Homo sapiens
  misc_RNA (1)...(19): siRNA sense strand
ggauucagcuuuguugcaa

SEQ ID NO: 1905559 - RNA, 19 nt, Homo sapiens
  misc_RNA (1)...(19): siRNA sense strand
gaagcagauucuugucaug

SEQ ID NO: 1905560 - RNA, 19 nt, Homo sapiens
  misc_RNA (1)...(19): siRNA sense strand
gaugaugguagauauguuu

SEQ ID NO: 1905561 - RNA, 19 nt, Homo sapiens
  misc_RNA (1)...(19): siRNA sense strand
aggaagaugugaaauucua

SEQ ID NO: 1905562 - RNA, 19 nt, Homo sapiens
  misc_RNA (1)...(19): siRNA sense strand
ucacaagauuauccaaaga

SEQ ID NO: 1905563 - RNA, 19 nt, Homo sapiens
  misc_RNA (1)...(19): siRNA sense strand
ggaaacugggacaauauuu

SEQ ID NO: 1905564 - RNA, 19 nt, Homo sapiens
  misc_RNA (1)...(19): siRNA sense strand
ugugauaucuggaguuuag

SEQ ID NO: 1905565 - RNA, 19 nt, Homo sapiens
  misc_RNA (1)...(19): siRNA sense strand
aaugaaaggaggagaguua

SEQ ID NO: 1905566 - RNA, 19 nt, Homo sapiens
  misc_RNA (1)...(19): siRNA sense strand
ggacauaucaaauuaacag

SEQ ID NO: 1905567 - RNA, 19 nt, Homo sapiens
  misc_RNA (1)...(19): siRNA sense strand
gggaaacuguacuuaauac

SEQ ID NO: 1905568 - RNA, 19 nt, Homo sapiens
  misc_RNA (1)...(19): siRNA sense strand
gcagauucuugucaugaug

SEQ ID NO: 1905569 - RNA, 19 nt, Homo sapiens
  misc_RNA (1)...(19): siRNA sense strand
cacaagugcaaauguauua

SEQ ID NO: 1905570 - RNA, 19 nt, Homo sapiens
  misc_RNA (1)...(19): siRNA sense strand
gaaguucaaccuccuuuca

SEQ ID NO: 1905571 - RNA, 19 nt, Homo sapiens
  misc_RNA (1)...(19): siRNA sense strand
gaaacuguacuuaauacug

SEQ ID NO: 1905572 - RNA, 19 nt, Homo sapiens
  misc_RNA (1)...(19): siRNA sense strand
uaaguaagacaguugacua

SEQ ID NO: 1905573 - RNA, 19 nt, Homo sapiens
  misc_RNA (1)...(19): siRNA sense strand
agaggaagaugugaaauuc

SEQ ID NO: 1905574 - RNA, 19 nt, Homo sapiens
  misc_RNA (1)...(19): siRNA sense strand
uggaucaucugcaccaauu

SEQ ID NO: 1905575 - RNA, 19 nt, Homo sapiens
  misc_RNA (1)...(19): siRNA sense strand
aacaucaacuggccuguaa

SEQ ID NO: 1905576 - RNA, 19 nt, Homo sapiens
  misc_RNA (1)...(19): siRNA sense strand
ugauacuccugaagagaua

SEQ ID NO: 1905577 - RNA, 19 nt, Homo sapiens
  misc_RNA (1)...(19): siRNA sense strand
ccaaugauacuccugaaga

SEQ ID NO: 1905578 - RNA, 19 nt, Homo sapiens
  misc_RNA (1)...(19): siRNA sense strand
acaguugacuaucuucauu

SEQ ID NO: 1905579 - RNA, 19 nt, Homo sapiens
  misc_RNA (1)...(19): siRNA sense strand
gaaggaguuguuaaagaaa

SEQ ID NO: 1905580 - RNA, 19 nt, Homo sapiens
  misc_RNA (1)...(19): siRNA sense strand
gauccugaauuuacugcaa

SEQ ID NO: 1905581 - RNA, 19 nt, Homo sapiens
  misc_RNA (1)...(19): siRNA sense strand
cacaaagucuucuaaggau

SEQ ID NO: 1905582 - RNA, 19 nt, Homo sapiens
  misc_RNA (1)...(19): siRNA sense strand
gguaaagacagaaaugaga

SEQ ID NO: 1905583 - RNA, 19 nt, Homo sapiens
  misc_RNA (1)...(19): siRNA sense strand
gcaaggagucaguagauca

SEQ ID NO: 1905584 - RNA, 19 nt, Homo sapiens
  misc_RNA (1)...(19): siRNA sense strand
aagggaaacuguacuuaau

SEQ ID NO: 1905585 - RNA, 19 nt, Homo sapiens
  misc_RNA (1)...(19): siRNA sense strand
caaaugaucagccaaagag

SEQ ID NO: 1905586 - RNA, 19 nt, Homo sapiens
  misc_RNA (1)...(19): siRNA sense strand
ggaaggcuaugagaaagca

SEQ ID NO: 1905587 - RNA, 19 nt, Homo sapiens
  misc_RNA (1)...(19): siRNA sense strand
gcuaauggccccaaugaua

SEQ ID NO: 1905588 - RNA, 19 nt, Homo sapiens
  misc_RNA (1)...(19): siRNA sense strand
gugcaaauguauuaccaau

SEQ ID NO: 1905589 - RNA, 19 nt, Homo sapiens
  misc_RNA (1)...(19): siRNA sense strand
aaugagaccaugaauauga

SEQ ID NO: 1905590 - RNA, 19 nt, Homo sapiens
  misc_RNA (1)...(19): siRNA sense strand
agaaaugagaccaugaaua

SEQ ID NO: 1905591 - RNA, 19 nt, Homo sapiens
  misc_RNA (1)...(19): siRNA sense strand
gcugauugguggucauaug

SEQ ID NO: 1905592 - RNA, 19 nt, Homo sapiens
  misc_RNA (1)...(19): siRNA sense strand
guaaauaggagaggccauu

SEQ ID NO: 1905593 - RNA, 19 nt, Homo sapiens
  misc_RNA (1)...(19): siRNA sense strand
aaagaaaucccuauuacuc

SEQ ID NO: 1905594 - RNA, 19 nt, Homo sapiens
  misc_RNA (1)...(19): siRNA sense strand
guaauaaguaagacaguug

SEQ ID NO: 1905595 - RNA, 19 nt, Homo sapiens
  misc_RNA (1)...(19): siRNA sense strand
caacuaccaacauggaauu

SEQ ID NO: 1905596 - RNA, 19 nt, Homo sapiens
  misc_RNA (1)...(19): siRNA sense strand
caaauagauugggaucaga

SEQ ID NO: 1905597 - RNA, 19 nt, Homo sapiens
  misc_RNA (1)...(19): siRNA sense strand
uggaaugccucaauuucuu

SEQ ID NO: 1905598 - RNA, 19 nt, Homo sapiens
  misc_RNA (1)...(19): siRNA sense strand
caaagagguucuguuuaca

SEQ ID NO: 1905599 - RNA, 19 nt, Homo sapiens
  misc_RNA (1)...(19): siRNA sense strand
cagugaagaucauugacaa

SEQ ID NO: 1905600 - RNA, 19 nt, Homo sapiens
  misc_RNA (1)...(19): siRNA sense strand
uaaaaucacuccuaucaca

SEQ ID NO: 1905601 - RNA, 19 nt, Homo sapiens
  misc_RNA (1)...(19): siRNA sense strand
gaagaccgguccugaugcu

SEQ ID NO: 1905602 - RNA, 19 nt, Homo sapiens
  misc_RNA (1)...(19): siRNA sense strand
ggauuugcuuucccauaug

SEQ ID NO: 1905603 - RNA, 19 nt, Homo sapiens
  misc_RNA (1)...(19): siRNA sense strand
gaccguauucucaaacaaa

SEQ ID NO: 1905604 - RNA, 19 nt, Homo sapiens
  misc_RNA (1)...(19): siRNA sense strand
gaucagaaggaguugaaga

SEQ ID NO: 1905605 - RNA, 19 nt, Homo sapiens
  misc_RNA (1)...(19): siRNA sense strand
ggucauaugguguucuuau

SEQ ID NO: 1905606 - RNA, 19 nt, Homo sapiens
  misc_RNA (1)...(19): siRNA sense strand
cagaggaagaugugaaauu

SEQ ID NO: 1905607 - RNA, 19 nt, Homo sapiens
  misc_RNA (1)...(19): siRNA sense strand
ggagucaguagaucaagaa

SEQ ID NO: 1905608 - RNA, 19 nt, Homo sapiens
  misc_RNA (1)...(19): siRNA sense strand
gaagaucauugacaaaagu

SEQ ID NO: 1905609 - RNA, 19 nt, Homo sapiens
  misc_RNA (1)...(19): siRNA sense strand
ggugaaguauaugaauuga

SEQ ID NO: 1905610 - RNA, 19 nt, Homo sapiens
  misc_RNA (1)...(19): siRNA sense strand
cuaaagauucucccgguuu

SEQ ID NO: 1905611 - RNA, 19 nt, Homo sapiens
  misc_RNA (1)...(19): siRNA sense strand
gagaggccauucccagagu

SEQ ID NO: 1905612 - RNA, 19 nt, Homo sapiens
  misc_RNA (1)...(19): siRNA sense strand
gagacagaguucggacaaa

SEQ ID NO: 1905613 - RNA, 19 nt, Homo sapiens
  misc_RNA (1)...(19): siRNA sense strand
gcgguauacugcugaacaa

SEQ ID NO: 1905614 - RNA, 19 nt, Homo sapiens
  misc_RNA (1)...(19): siRNA sense strand
augcuacacugcaaacuuu

SEQ ID NO: 1905615 - RNA, 19 nt, Homo sapiens
  misc_RNA (1)...(19): siRNA sense strand
gauaugugauuuuggguuu

SEQ ID NO: 1905616 - RNA, 19 nt, Homo sapiens
  misc_RNA (1)...(19): siRNA sense strand
aaaggaauccagcaaauag

SEQ ID NO: 1905617 - RNA, 19 nt, Homo sapiens
  misc_RNA (1)...(19): siRNA sense strand
caaaaggaauccagcaaau

SEQ ID NO: 1905618 - RNA, 19 nt, Homo sapiens
  misc_RNA (1)...(19): siRNA sense strand
gaaagggccugaagucuug

SEQ ID NO: 1905619 - RNA, 19 nt, Homo sapiens
  misc_RNA (1)...(19): siRNA sense strand
gaaagggccugaagucuug

SEQ ID NO: 1905620 - RNA, 19 nt, Homo sapiens
  misc_RNA (1)...(19): siRNA sense strand
ggaggaugcuguacacauu

SEQ ID NO: 1905621 - RNA, 19 nt, Homo sapiens
  misc_RNA (1)...(19): siRNA sense strand
cagcacauuucacucauua

SEQ ID NO: 1905622 - RNA, 19 nt, Homo sapiens
  misc_RNA (1)...(19): siRNA sense strand
ugacauggaugaaauugaa

SEQ ID NO: 1905623 - RNA, 19 nt, Homo sapiens
  misc_RNA (1)...(19): siRNA sense strand
ugacauggaugaaauugaa

SEQ ID NO: 1905624 - RNA, 19 nt, Homo sapiens
  misc_RNA (1)...(19): siRNA sense strand
cugcauggcuguugacaua

SEQ ID NO: 1905625 - RNA, 19 nt, Homo sapiens
  misc_RNA (1)...(19): siRNA sense strand
gcagugcuguuuacucauu

SEQ ID NO: 1905626 - RNA, 19 nt, Homo sapiens
  misc_RNA (1)...(19): siRNA sense strand
gcagugcuguuuacucauu

SEQ ID NO: 1905627 - RNA, 19 nt, Homo sapiens
  misc_RNA (1)...(19): siRNA sense strand
ugacaacgaugacgaugaa

SEQ ID NO: 1905628 - RNA, 19 nt, Homo sapiens
  misc_RNA (1)...(19): siRNA sense strand
gccaucacuuguucaaaua

SEQ ID NO: 1905629 - RNA, 19 nt, Homo sapiens
  misc_RNA (1)...(19): siRNA sense strand
ggagucauauucccacaau

SEQ ID NO: 1905630 - RNA, 19 nt, Homo sapiens
  misc_RNA (1)...(19): siRNA sense strand
ugaaagugaugaugaggaa

SEQ ID NO: 1905631 - RNA, 19 nt, Homo sapiens
  misc_RNA (1)...(19): siRNA sense strand
ggauagauguuauucaacu

SEQ ID NO: 1905632 - RNA, 19 nt, Homo sapiens
  misc_RNA (1)...(19): siRNA sense strand
ggauagauguuauucaacu

SEQ ID NO: 1905633 - RNA, 19 nt, Homo sapiens
  misc_RNA (1)...(19): siRNA sense strand
ggauagauguuauucaacu

SEQ ID NO: 1905634 - RNA, 19 nt, Homo sapiens
  misc_RNA (1)...(19): siRNA sense strand
ggauagauguuauucaacu

SEQ ID NO: 1905635 - RNA, 19 nt, Homo sapiens
  misc_RNA (1)...(19): siRNA sense strand
gaggagcucaggcaauaua

SEQ ID NO: 1905636 - RNA, 19 nt, Homo sapiens
  misc_RNA (1)...(19): siRNA sense strand
gcagaaggcugaagaaaag

SEQ ID NO: 1905637 - RNA, 19 nt, Homo sapiens
  misc_RNA (1)...(19): siRNA sense strand
ggaaugagcgacaguucaa

SEQ ID NO: 1905638 - RNA, 19 nt, Homo sapiens
  misc_RNA (1)...(19): siRNA sense strand
gcacauuucacucauuaga

SEQ ID NO: 1905639 - RNA, 19 nt, Homo sapiens
  misc_RNA (1)...(19): siRNA sense strand
gaucaaagaaggaaagaag

SEQ ID NO: 1905640 - RNA, 19 nt, Homo sapiens
  misc_RNA (1)...(19): siRNA sense strand
gaucaaagaaggaaagaag

SEQ ID NO: 1905641 - RNA, 19 nt, Homo sapiens
  misc_RNA (1)...(19): siRNA sense strand
gcacagcaccuuguccaaa

SEQ ID NO: 1905642 - RNA, 19 nt, Homo sapiens
  misc_RNA (1)...(19): siRNA sense strand
gcagcacauuucacucauu

SEQ ID NO: 1905643 - RNA, 19 nt, Homo sapiens
  misc_RNA (1)...(19): siRNA sense strand
gaggaugcuguacacauua

SEQ ID NO: 1905644 - RNA, 19 nt, Homo sapiens
  misc_RNA (1)...(19): siRNA sense strand
ggaggaaugugccaucacu

SEQ ID NO: 1905645 - RNA, 19 nt, Homo sapiens
  misc_RNA (1)...(19): siRNA sense strand
uggcuuggcuguuaacaug

SEQ ID NO: 1905646 - RNA, 19 nt, Homo sapiens
  misc_RNA (1)...(19): siRNA sense strand
caaauagccauggcccuua

SEQ ID NO: 1905647 - RNA, 19 nt, Homo sapiens
  misc_RNA (1)...(19): siRNA sense strand
ggcaggaccuccaagaaca

SEQ ID NO: 1905648 - RNA, 19 nt, Homo sapiens
  misc_RNA (1)...(19): siRNA sense strand
aacgagagcugacccaguu

SEQ ID NO: 1905649 - RNA, 19 nt, Homo sapiens
  misc_RNA (1)...(19): siRNA sense strand
uugcaggacucacuggaua

SEQ ID NO: 1905650 - RNA, 19 nt, Homo sapiens
  misc_RNA (1)...(19): siRNA sense strand
uugcaggacucacuggaua

SEQ ID NO: 1905651 - RNA, 19 nt, Homo sapiens
  misc_RNA (1)...(19): siRNA sense strand
uugcaggacucacuggaua

SEQ ID NO: 1905652 - RNA, 19 nt, Homo sapiens
  misc_RNA (1)...(19): siRNA sense strand
cgaugacgaugaagauguu

SEQ ID NO: 1905653 - RNA, 19 nt, Homo sapiens
  misc_RNA (1)...(19): siRNA sense strand
cuggauagauguuauucaa

SEQ ID NO: 1905654 - RNA, 19 nt, Homo sapiens
  misc_RNA (1)...(19): siRNA sense strand
gaagaagaucaaagaagga

SEQ ID NO: 1905655 - RNA, 19 nt, Homo sapiens
  misc_RNA (1)...(19): siRNA sense strand
cuggauagauguuauucaa

SEQ ID NO: 1905656 - RNA, 19 nt, Homo sapiens
  misc_RNA (1)...(19): siRNA sense strand
uggcuuggcuguugacaug

SEQ ID NO: 1905657 - RNA, 19 nt, Homo sapiens
  misc_RNA (1)...(19): siRNA sense strand
uggcuuggcuguugacaug

SEQ ID NO: 1905658 - RNA, 19 nt, Homo sapiens
  misc_RNA (1)...(19): siRNA sense strand
cuggauagauguuauucaa

SEQ ID NO: 1905659 - RNA, 19 nt, Homo sapiens
  misc_RNA (1)...(19): siRNA sense strand
gaagaagaucaaagaagga

SEQ ID NO: 1905660 - RNA, 19 nt, Homo sapiens
  misc_RNA (1)...(19): siRNA sense strand
cuggauagauguuauucaa

SEQ ID NO: 1905661 - RNA, 19 nt, Homo sapiens
  misc_RNA (1)...(19): siRNA sense strand
gaagaucaaagaaggaaag

SEQ ID NO: 1905662 - RNA, 19 nt, Homo sapiens
  misc_RNA (1)...(19): siRNA sense strand
gaagaucaaagaaggaaag

SEQ ID NO: 1905663 - RNA, 19 nt, Homo sapiens
  misc_RNA (1)...(19): siRNA sense strand
gaaugugccaucacuuguu

SEQ ID NO: 1905664 - RNA, 19 nt, Homo sapiens
  misc_RNA (1)...(19): siRNA sense strand
ucaaagaaggaaagaagaa

SEQ ID NO: 1905665 - RNA, 19 nt, Homo sapiens
  misc_RNA (1)...(19): siRNA sense strand
ucaaagaaggaaagaagaa

SEQ ID NO: 1905666 - RNA, 19 nt, Homo sapiens
  misc_RNA (1)...(19): siRNA sense strand
ggaaucugcaggagucuga

SEQ ID NO: 1905667 - RNA, 19 nt, Homo sapiens
  misc_RNA (1)...(19): siRNA sense strand
aaagucgacucaacucuca

SEQ ID NO: 1905668 - RNA, 19 nt, Homo sapiens
  misc_RNA (1)...(19): siRNA sense strand
ggaccaagaagaggaagaa

SEQ ID NO: 1905669 - RNA, 19 nt, Homo sapiens
  misc_RNA (1)...(19): siRNA sense strand
ggaccaagaagaggaagaa

SEQ ID NO: 1905670 - RNA, 19 nt, Homo sapiens
  misc_RNA (1)...(19): siRNA sense strand
ugagguggcugagaaagug

SEQ ID NO: 1905671 - RNA, 19 nt, Homo sapiens
  misc_RNA (1)...(19): siRNA sense strand
gaaguguguuuuacucauu

SEQ ID NO: 1905672 - RNA, 19 nt, Homo sapiens
  misc_RNA (1)...(19): siRNA sense strand
gaaaagaaggggaagaaga

SEQ ID NO: 1905673 - RNA, 19 nt, Homo sapiens
  misc_RNA (1)...(19): siRNA sense strand
gaaaagaaggggaagaaga

SEQ ID NO: 1905674 - RNA, 19 nt, Homo sapiens
  misc_RNA (1)...(19): siRNA sense strand
aauauaaaguccugguuca

SEQ ID NO: 1905675 - RNA, 19 nt, Homo sapiens
  misc_RNA (1)...(19): siRNA sense strand
gaaaagaaggggaagaaga

SEQ ID NO: 1905676 - RNA, 19 nt, Homo sapiens
  misc_RNA (1)...(19): siRNA sense strand
gaaaagaaggggaagaaga

SEQ ID NO: 1905677 - RNA, 19 nt, Homo sapiens
  misc_RNA (1)...(19): siRNA sense strand
aguagagccugaagucuug

SEQ ID NO: 1905678 - RNA, 19 nt, Homo sapiens
  misc_RNA (1)...(19): siRNA sense strand
ccagaugggagucauauuc

SEQ ID NO: 1905679 - RNA, 19 nt, Homo sapiens
  misc_RNA (1)...(19): siRNA sense strand
aguagagccugaagucuug

SEQ ID NO: 1905680 - RNA, 19 nt, Homo sapiens
  misc_RNA (1)...(19): siRNA sense strand
ugccaucacuuguucaaau

SEQ ID NO: 1905681 - RNA, 19 nt, Homo sapiens
  misc_RNA (1)...(19): siRNA sense strand
ggaagacaaagucgacuca

SEQ ID NO: 1905682 - RNA, 19 nt, Homo sapiens
  misc_RNA (1)...(19): siRNA sense strand
caacgaugacgaugaagau

SEQ ID NO: 1905683 - RNA, 19 nt, Homo sapiens
  misc_RNA (1)...(19): siRNA sense strand
gaaguuccuuuuaugcauu

SEQ ID NO: 1905684 - RNA, 19 nt, Homo sapiens
  misc_RNA (1)...(19): siRNA sense strand
gaaguuccuuuuaugcauu

SEQ ID NO: 1905685 - RNA, 19 nt, Homo sapiens
  misc_RNA (1)...(19): siRNA sense strand
gaagguuauucgacucucu

SEQ ID NO: 1905686 - RNA, 19 nt, Homo sapiens
  misc_RNA (1)...(19): siRNA sense strand
ggaaugugccaucacuugu

SEQ ID NO: 1905687 - RNA, 19 nt, Homo sapiens
  misc_RNA (1)...(19): siRNA sense strand
gagcucaggcaauauaaag

SEQ ID NO: 1905688 - RNA, 19 nt, Homo sapiens
  misc_RNA (1)...(19): siRNA sense strand
aaauagccauggcccuuau

SEQ ID NO: 1905689 - RNA, 19 nt, Homo sapiens
  misc_RNA (1)...(19): siRNA sense strand
cugagaaagugcagaaauc

SEQ ID NO: 1905690 - RNA, 19 nt, Homo sapiens
  misc_RNA (1)...(19): siRNA sense strand
uaccuuggcuuggcucuug

SEQ ID NO: 1905691 - RNA, 19 nt, Homo sapiens
  misc_RNA (1)...(19): siRNA sense strand
uugcaggagucacuggaua

SEQ ID NO: 1905692 - RNA, 19 nt, Homo sapiens
  misc_RNA (1)...(19): siRNA sense strand
uaccuuggcuuggcucuug

SEQ ID NO: 1905693 - RNA, 19 nt, Homo sapiens
  misc_RNA (1)...(19): siRNA sense strand
ucggugggaucaagugaaa

SEQ ID NO: 1905694 - RNA, 19 nt, Homo sapiens
  misc_RNA (1)...(19): siRNA sense strand
caaccagccacauaggaaa

SEQ ID NO: 1905695 - RNA, 19 nt, Homo sapiens
  misc_RNA (1)...(19): siRNA sense strand
cauguuggcuuuucucuug

SEQ ID NO: 1905696 - RNA, 19 nt, Homo sapiens
  misc_RNA (1)...(19): siRNA sense strand
agaaagggccugaagucuu

SEQ ID NO: 1905697 - RNA, 19 nt, Homo sapiens
  misc_RNA (1)...(19): siRNA sense strand
cauguuggcuuuucucuug

SEQ ID NO: 1905698 - RNA, 19 nt, Homo sapiens
  misc_RNA (1)...(19): siRNA sense strand
agaaagggccugaagucuu

SEQ ID NO: 1905699 - RNA, 19 nt, Homo sapiens
  misc_RNA (1)...(19): siRNA sense strand
guccugggaugaagguuau

SEQ ID NO: 1905700 - RNA, 19 nt, Homo sapiens
  misc_RNA (1)...(19): siRNA sense strand
gcaauauaaaguccugguu

SEQ ID NO: 1905701 - RNA, 19 nt, Homo sapiens
  misc_RNA (1)...(19): siRNA sense strand
accaagaaguggaagaaga

SEQ ID NO: 1905702 - RNA, 19 nt, Homo sapiens
  misc_RNA (1)...(19): siRNA sense strand
guaccaagaaguggaagaa

SEQ ID NO: 1905703 - RNA, 19 nt, Homo sapiens
  misc_RNA (1)...(19): siRNA sense strand
accaagaaguggaagaaga

SEQ ID NO: 1905704 - RNA, 19 nt, Homo sapiens
  misc_RNA (1)...(19): siRNA sense strand
guaccaagaaguggaagaa

SEQ ID NO: 1905705 - RNA, 19 nt, Homo sapiens
  misc_RNA (1)...(19): siRNA sense strand
accaagaaguggaagaaga

SEQ ID NO: 1905706 - RNA, 19 nt, Homo sapiens
  misc_RNA (1)...(19): siRNA sense strand
guaccaagaaguggaagaa

SEQ ID NO: 1905707 - RNA, 19 nt, Homo sapiens
  misc_RNA (1)...(19): siRNA sense strand
gcuguuaacauggaugaaa

SEQ ID NO: 1905708 - RNA, 19 nt, Homo sapiens
  misc_RNA (1)...(19): siRNA sense strand
uuauucgacucucucaauu

SEQ ID NO: 1905709 - RNA, 19 nt, Homo sapiens
  misc_RNA (1)...(19): siRNA sense strand
gaaagaagaaggggaagaa

SEQ ID NO: 1905710 - RNA, 19 nt, Homo sapiens
  misc_RNA (1)...(19): siRNA sense strand
gggaagaagaucaaagaag

SEQ ID NO: 1905711 - RNA, 19 nt, Homo sapiens
  misc_RNA (1)...(19): siRNA sense strand
aggagucacuggauagaug

SEQ ID NO: 1905712 - RNA, 19 nt, Homo sapiens
  misc_RNA (1)...(19): siRNA sense strand
gaaagaagaaggggaagaa

SEQ ID NO: 1905713 - RNA, 19 nt, Homo sapiens
  misc_RNA (1)...(19): siRNA sense strand
gggaagaagaucaaagaag

SEQ ID NO: 1905714 - RNA, 19 nt, Homo sapiens
  misc_RNA (1)...(19): siRNA sense strand
cagcagcacauuucacuca

SEQ ID NO: 1905715 - RNA, 19 nt, Homo sapiens
  misc_RNA (1)...(19): siRNA sense strand
ggagcucaggcaauauaaa

SEQ ID NO: 1905716 - RNA, 19 nt, Homo sapiens
  misc_RNA (1)...(19): siRNA sense strand
aaguugagguggcugagaa

SEQ ID NO: 1905717 - RNA, 19 nt, Homo sapiens
  misc_RNA (1)...(19): siRNA sense strand
gguaguagagccugaaguc

SEQ ID NO: 1905718 - RNA, 19 nt, Homo sapiens
  misc_RNA (1)...(19): siRNA sense strand
guaaagcacauucgauaaa

SEQ ID NO: 1905719 - RNA, 19 nt, Homo sapiens
  misc_RNA (1)...(19): siRNA sense strand
gggcauaucagacuugaaa

SEQ ID NO: 1905720 - RNA, 19 nt, Homo sapiens
  misc_RNA (1)...(19): siRNA sense strand
gcacaaagggcaagaugga

SEQ ID NO: 1905721 - RNA, 19 nt, Homo sapiens
  misc_RNA (1)...(19): siRNA sense strand
uaucauaccuccucugucu

SEQ ID NO: 1905722 - RNA, 19 nt, Homo sapiens
  misc_RNA (1)...(19): siRNA sense strand
gaaaggagagcgcgacauc

SEQ ID NO: 1905723 - RNA, 19 nt, Homo sapiens
  misc_RNA (1)...(19): siRNA sense strand
gcacauucgauaaaggaua

SEQ ID NO: 1905724 - RNA, 19 nt, Homo sapiens
  misc_RNA (1)...(19): siRNA sense strand
aaucucagcucucaaagug

SEQ ID NO: 1905725 - RNA, 19 nt, Homo sapiens
  misc_RNA (1)...(19): siRNA sense strand
gcagcaaucucagcucuca

SEQ ID NO: 1905726 - RNA, 19 nt, Homo sapiens
  misc_RNA (1)...(19): siRNA sense strand
gcauaucagacuugaaauu

SEQ ID NO: 1905727 - RNA, 19 nt, Homo sapiens
  misc_RNA (1)...(19): siRNA sense strand
ccauggaucugugcuaaga

SEQ ID NO: 1905728 - RNA, 19 nt, Homo sapiens
  misc_RNA (1)...(19): siRNA sense strand
ggacgcaguuuuagaaaga

SEQ ID NO: 1905729 - RNA, 19 nt, Homo sapiens
  misc_RNA (1)...(19): siRNA sense strand
uaaagcacauucgauaaag

SEQ ID NO: 1905730 - RNA, 19 nt, Homo sapiens
  misc_RNA (1)...(19): siRNA sense strand
cacauucgauaaaggauau

SEQ ID NO: 1905731 - RNA, 19 nt, Homo sapiens
  misc_RNA (1)...(19): siRNA sense strand
ggaagaauaggcguaguug

SEQ ID NO: 1905732 - RNA, 19 nt, Homo sapiens
  misc_RNA (1)...(19): siRNA sense strand
agggcaagauggaagaaua

SEQ ID NO: 1905733 - RNA, 19 nt, Homo sapiens
  misc_RNA (1)...(19): siRNA sense strand
guaugacgcugugcucaga

SEQ ID NO: 1905734 - RNA, 19 nt, Homo sapiens
  misc_RNA (1)...(19): siRNA sense strand
cauaucagacuugaaauug

SEQ ID NO: 1905735 - RNA, 19 nt, Homo sapiens
  misc_RNA (1)...(19): siRNA sense strand
aagaauaggcguaguugga

SEQ ID NO: 1905736 - RNA, 19 nt, Homo sapiens
  misc_RNA (1)...(19): siRNA sense strand
cguaaagcacauucgauaa

SEQ ID NO: 1905737 - RNA, 19 nt, Homo sapiens
  misc_RNA (1)...(19): siRNA sense strand
caaagggcaagauggaaga

SEQ ID NO: 1905738 - RNA, 19 nt, Homo sapiens
  misc_RNA (1)...(19): siRNA sense strand
cuuugcagcuggugagaaa

SEQ ID NO: 1905739 - RNA, 19 nt, Homo sapiens
  misc_RNA (1)...(19): siRNA sense strand
acguaaagcacauucgaua

SEQ ID NO: 1905740 - RNA, 19 nt, Homo sapiens
  misc_RNA (1)...(19): siRNA sense strand
ggugagaaauaucauaccu

SEQ ID NO: 1905741 - RNA, 19 nt, Homo sapiens
  misc_RNA (1)...(19): siRNA sense strand
uaucagacuugaaauugac

SEQ ID NO: 1905742 - RNA, 19 nt, Homo sapiens
  misc_RNA (1)...(19): siRNA sense strand
gcgcggucguugucgcauu

SEQ ID NO: 1905743 - RNA, 19 nt, Homo sapiens
  misc_RNA (1)...(19): siRNA sense strand
agacuugucccacguguuc

SEQ ID NO: 1905744 - RNA, 19 nt, Homo sapiens
  misc_RNA (1)...(19): siRNA sense strand
gaucguccacccaguucuu

SEQ ID NO: 1905745 - RNA, 19 nt, Homo sapiens
  misc_RNA (1)...(19): siRNA sense strand
gcuggugagaaauaucaua

SEQ ID NO: 1905746 - RNA, 19 nt, Homo sapiens
  misc_RNA (1)...(19): siRNA sense strand
ugacggugguccagaaagg

SEQ ID NO: 1905747 - RNA, 19 nt, Homo sapiens
  misc_RNA (1)...(19): siRNA sense strand
gggcaagauggaagaauag

SEQ ID NO: 1905748 - RNA, 19 nt, Homo sapiens
  misc_RNA (1)...(19): siRNA sense strand
gcugaucguccacccaguu

SEQ ID NO: 1905749 - RNA, 19 nt, Homo sapiens
  misc_RNA (1)...(19): siRNA sense strand
uugcagcuggugagaaaua

SEQ ID NO: 1905750 - RNA, 19 nt, Homo sapiens
  misc_RNA (1)...(19): siRNA sense strand
cagcuggugagaaauauca

SEQ ID NO: 1905751 - RNA, 19 nt, Homo sapiens
  misc_RNA (1)...(19): siRNA sense strand
agccauggaucugugcuaa

SEQ ID NO: 1905752 - RNA, 19 nt, Homo sapiens
  misc_RNA (1)...(19): siRNA sense strand
cgauaaaggauauggaaaa

SEQ ID NO: 1905753 - RNA, 19 nt, Homo sapiens
  misc_RNA (1)...(19): siRNA sense strand
ggaucugugcuaagacuca

SEQ ID NO: 1905754 - RNA, 19 nt, Homo sapiens
  misc_RNA (1)...(19): siRNA sense strand
guagagaugaugcgcuucu

SEQ ID NO: 1905755 - RNA, 19 nt, Homo sapiens
  misc_RNA (1)...(19): siRNA sense strand
ggccgcaccugugauuaag

SEQ ID NO: 1905756 - RNA, 19 nt, Homo sapiens
  misc_RNA (1)...(19): siRNA sense strand
ucauaccuccucugucuuc

SEQ ID NO: 1905757 - RNA, 19 nt, Homo sapiens
  misc_RNA (1)...(19): siRNA sense strand
gagauugaaacaggaguca

SEQ ID NO: 1905758 - RNA, 19 nt, Homo sapiens
  misc_RNA (1)...(19): siRNA sense strand
gaugacagccauggaucug

SEQ ID NO: 1905759 - RNA, 19 nt, Homo sapiens
  misc_RNA (1)...(19): siRNA sense strand
uggaagaauaggcguaguu

SEQ ID NO: 1905760 - RNA, 19 nt, Homo sapiens
  misc_RNA (1)...(19): siRNA sense strand
aaagcacauucgauaaagg

SEQ ID NO: 1905761 - RNA, 19 nt, Homo sapiens
  misc_RNA (1)...(19): siRNA sense strand
aagcacauucgauaaagga

SEQ ID NO: 1905762 - RNA, 19 nt, Homo sapiens
  misc_RNA (1)...(19): siRNA sense strand
ggaguacacuguugucuua

SEQ ID NO: 1905763 - RNA, 19 nt, Homo sapiens
  misc_RNA (1)...(19): siRNA sense strand
cagcggcucuucaucauca

SEQ ID NO: 1905764 - RNA, 19 nt, Homo sapiens
  misc_RNA (1)...(19): siRNA sense strand
ggcgcuggcugucuacuuu

SEQ ID NO: 1905765 - RNA, 19 nt, Homo sapiens
  misc_RNA (1)...(19): siRNA sense strand
ggacuucaccauccacgaa

SEQ ID NO: 1905766 - RNA, 19 nt, Homo sapiens
  misc_RNA (1)...(19): siRNA sense strand
ggaaacagcggcucuucau

SEQ ID NO: 1905767 - RNA, 19 nt, Homo sapiens
  misc_RNA (1)...(19): siRNA sense strand
aaacagcggcucuucauca

SEQ ID NO: 1905768 - RNA, 19 nt, Homo sapiens
  misc_RNA (1)...(19): siRNA sense strand
gaccaagaagcacacagua

SEQ ID NO: 1905769 - RNA, 19 nt, Homo sapiens
  misc_RNA (1)...(19): siRNA sense strand
gaaccucgcguugcuagug

SEQ ID NO: 1905770 - RNA, 19 nt, Homo sapiens
  misc_RNA (1)...(19): siRNA sense strand
ccaagaagcacacaguaag

SEQ ID NO: 1905771 - RNA, 19 nt, Homo sapiens
  misc_RNA (1)...(19): siRNA sense strand
caacuucaucuccuucuuc

SEQ ID NO: 1905772 - RNA, 19 nt, Homo sapiens
  misc_RNA (1)...(19): siRNA sense strand
ucucggcgcuggcugucua

SEQ ID NO: 1905773 - RNA, 19 nt, Homo sapiens
  misc_RNA (1)...(19): siRNA sense strand
caacuucggccucaauguc

SEQ ID NO: 1905774 - RNA, 19 nt, Homo sapiens
  misc_RNA (1)...(19): siRNA sense strand
uaaccaacauggcguucca

SEQ ID NO: 1905775 - RNA, 19 nt, Homo sapiens
  misc_RNA (1)...(19): siRNA sense strand
caagaagcacacaguaagu

SEQ ID NO: 1905776 - RNA, 19 nt, Homo sapiens
  misc_RNA (1)...(19): siRNA sense strand
ggaguguacaccaucuuug

SEQ ID NO: 1905777 - RNA, 19 nt, Homo sapiens
  misc_RNA (1)...(19): siRNA sense strand
ggucugcuguccacuuguc

SEQ ID NO: 1905778 - RNA, 19 nt, Homo sapiens
  misc_RNA (1)...(19): siRNA sense strand
gaaacagcggcucuucauc

SEQ ID NO: 1905779 - RNA, 19 nt, Homo sapiens
  misc_RNA (1)...(19): siRNA sense strand
gacaacggccacacacugu

SEQ ID NO: 1905780 - RNA, 19 nt, Homo sapiens
  misc_RNA (1)...(19): siRNA sense strand
acacuguugucuuaaccaa

SEQ ID NO: 1905781 - RNA, 19 nt, Homo sapiens
  misc_RNA (1)...(19): siRNA sense strand
ugcauucucuggcgguuga

SEQ ID NO: 1905782 - RNA, 19 nt, Homo sapiens
  misc_RNA (1)...(19): siRNA sense strand
ggucccugcucuuccacuu

SEQ ID NO: 1905783 - RNA, 19 nt, Homo sapiens
  misc_RNA (1)...(19): siRNA sense strand
ggagaaccucgcguugcua

SEQ ID NO: 1905784 - RNA, 19 nt, Homo sapiens
  misc_RNA (1)...(19): siRNA sense strand
aguacacgguggccacuga

SEQ ID NO: 1905785 - RNA, 19 nt, Homo sapiens
  misc_RNA (1)...(19): siRNA sense strand
ggugggacuucgggaacaa

SEQ ID NO: 1905786 - RNA, 19 nt, Homo sapiens
  misc_RNA (1)...(19): siRNA sense strand
gcucugccgccucaacuuc

SEQ ID NO: 1905787 - RNA, 19 nt, Homo sapiens
  misc_RNA (1)...(19): siRNA sense strand
ucaacuucaucuccuucuu

SEQ ID NO: 1905788 - RNA, 19 nt, Homo sapiens
  misc_RNA (1)...(19): siRNA sense strand
ucuuugccauccuggagua

SEQ ID NO: 1905789 - RNA, 19 nt, Homo sapiens
  misc_RNA (1)...(19): siRNA sense strand
ucuggugggccaucacuuu

SEQ ID NO: 1905790 - RNA, 19 nt, Homo sapiens
  misc_RNA (1)...(19): siRNA sense strand
guacacuguugucuuaacc

SEQ ID NO: 1905791 - RNA, 19 nt, Homo sapiens
  misc_RNA (1)...(19): siRNA sense strand
gccucaaugucguggagaa

SEQ ID NO: 1905792 - RNA, 19 nt, Homo sapiens
  misc_RNA (1)...(19): siRNA sense strand
cacaguaagucaggaggau

SEQ ID NO: 1905793 - RNA, 19 nt, Homo sapiens
  misc_RNA (1)...(19): siRNA sense strand
ucccugcucuuccacuuca

SEQ ID NO: 1905794 - RNA, 19 nt, Homo sapiens
  misc_RNA (1)...(19): siRNA sense strand
ucaucaacuucaucuccuu

SEQ ID NO: 1905795 - RNA, 19 nt, Homo sapiens
  misc_RNA (1)...(19): siRNA sense strand
accaagaagcacacaguaa

SEQ ID NO: 1905796 - RNA, 19 nt, Homo sapiens
  misc_RNA (1)...(19): siRNA sense strand
uggagaaccucgcguugcu

SEQ ID NO: 1905797 - RNA, 19 nt, Homo sapiens
  misc_RNA (1)...(19): siRNA sense strand
gcuggaguguacaccaucu

SEQ ID NO: 1905798 - RNA, 19 nt, Homo sapiens
  misc_RNA (1)...(19): siRNA sense strand
ugaccaagaagcacacagu

SEQ ID NO: 1905799 - RNA, 19 nt, Homo sapiens
  misc_RNA (1)...(19): siRNA sense strand
gaacagagaugaugauuca

SEQ ID NO: 1905800 - RNA, 19 nt, Homo sapiens
  misc_RNA (1)...(19): siRNA sense strand
gaagagcacucaggacuua

SEQ ID NO: 1905801 - RNA, 19 nt, Homo sapiens
  misc_RNA (1)...(19): siRNA sense strand
gaucagaacugguaugaag

SEQ ID NO: 1905802 - RNA, 19 nt, Homo sapiens
  misc_RNA (1)...(19): siRNA sense strand
gaacugguaugaaggagaa

SEQ ID NO: 1905803 - RNA, 19 nt, Homo sapiens
  misc_RNA (1)...(19): siRNA sense strand
gagaagcuauugcuaaguu

SEQ ID NO: 1905804 - RNA, 19 nt, Homo sapiens
  misc_RNA (1)...(19): siRNA sense strand
ccaagagcauuuacgaaua

SEQ ID NO: 1905805 - RNA, 19 nt, Homo sapiens
  misc_RNA (1)...(19): siRNA sense strand
guagaaauguccuucagaa

SEQ ID NO: 1905806 - RNA, 19 nt, Homo sapiens
  misc_RNA (1)...(19): siRNA sense strand
gaagggagauauuguuuac

SEQ ID NO: 1905807 - RNA, 19 nt, Homo sapiens
  misc_RNA (1)...(19): siRNA sense strand
gagccaaauuugacuuuaa

SEQ ID NO: 1905808 - RNA, 19 nt, Homo sapiens
  misc_RNA (1)...(19): siRNA sense strand
caagagcauuuacgaauau

SEQ ID NO: 1905809 - RNA, 19 nt, Homo sapiens
  misc_RNA (1)...(19): siRNA sense strand
ggaauccacggaagaauuu

SEQ ID NO: 1905810 - RNA, 19 nt, Homo sapiens
  misc_RNA (1)...(19): siRNA sense strand
gacgauggaugguuuguug

SEQ ID NO: 1905811 - RNA, 19 nt, Homo sapiens
  misc_RNA (1)...(19): siRNA sense strand
agucaaaccucacaagauu

SEQ ID NO: 1905812 - RNA, 19 nt, Homo sapiens
  misc_RNA (1)...(19): siRNA sense strand
gguacaagacuauguuuaa

SEQ ID NO: 1905813 - RNA, 19 nt, Homo sapiens
  misc_RNA (1)...(19): siRNA sense strand
aaacagauccacaaacuga

SEQ ID NO: 1905814 - RNA, 19 nt, Homo sapiens
  misc_RNA (1)...(19): siRNA sense strand
gaagucaagcucagaaaga

SEQ ID NO: 1905815 - RNA, 19 nt, Homo sapiens
  misc_RNA (1)...(19): siRNA sense strand
ucaaaccucacaagauuua

SEQ ID NO: 1905816 - RNA, 19 nt, Homo sapiens
  misc_RNA (1)...(19): siRNA sense strand
uauaccagcugauuacuug

SEQ ID NO: 1905817 - RNA, 19 nt, Homo sapiens
  misc_RNA (1)...(19): siRNA sense strand
gaagcuauugcuaaguuua

SEQ ID NO: 1905818 - RNA, 19 nt, Homo sapiens
  misc_RNA (1)...(19): siRNA sense strand
gcaaugggcaagacaaaga

SEQ ID NO: 1905819 - RNA, 19 nt, Homo sapiens
  misc_RNA (1)...(19): siRNA sense strand
gauccugucucagaaagaa

SEQ ID NO: 1905820 - RNA, 19 nt, Homo sapiens
  misc_RNA (1)...(19): siRNA sense strand
gagcaaaggaugacaguag

SEQ ID NO: 1905821 - RNA, 19 nt, Homo sapiens
  misc_RNA (1)...(19): siRNA sense strand
ucacuagcuuggagaauga

SEQ ID NO: 1905822 - RNA, 19 nt, Homo sapiens
  misc_RNA (1)...(19): siRNA sense strand
gaaaugcccagcccucuuc

SEQ ID NO: 1905823 - RNA, 19 nt, Homo sapiens
  misc_RNA (1)...(19): siRNA sense strand
ccaguccucuacuaaauga

SEQ ID NO: 1905824 - RNA, 19 nt, Homo sapiens
  misc_RNA (1)...(19): siRNA sense strand
gagcaggacucagcaccaa

SEQ ID NO: 1905825 - RNA, 19 nt, Homo sapiens
  misc_RNA (1)...(19): siRNA sense strand
gcagaagggagauauuguu

SEQ ID NO: 1905826 - RNA, 19 nt, Homo sapiens
  misc_RNA (1)...(19): siRNA sense strand
agagacuccuggauauaua

SEQ ID NO: 1905827 - RNA, 19 nt, Homo sapiens
  misc_RNA (1)...(19): siRNA sense strand
gcagagcccaagagcauuu

SEQ ID NO: 1905828 - RNA, 19 nt, Homo sapiens
  misc_RNA (1)...(19): siRNA sense strand
acagaaugaugaugaguug

SEQ ID NO: 1905829 - RNA, 19 nt, Homo sapiens
  misc_RNA (1)...(19): siRNA sense strand
ggagauaucguugauguca

SEQ ID NO: 1905830 - RNA, 19 nt, Homo sapiens
  misc_RNA (1)...(19): siRNA sense strand
uaauggugauacacaagua

SEQ ID NO: 1905831 - RNA, 19 nt, Homo sapiens
  misc_RNA (1)...(19): siRNA sense strand
uuaaacagauccacaaacu

SEQ ID NO: 1905832 - RNA, 19 nt, Homo sapiens
  misc_RNA (1)...(19): siRNA sense strand
gaaugaugaugaguuggaa

SEQ ID NO: 1905833 - RNA, 19 nt, Homo sapiens
  misc_RNA (1)...(19): siRNA sense strand
gauggaugguuuguuggua

SEQ ID NO: 1905834 - RNA, 19 nt, Homo sapiens
  misc_RNA (1)...(19): siRNA sense strand
gcaccuacaucgagcuucu

SEQ ID NO: 1905835 - RNA, 19 nt, Homo sapiens
  misc_RNA (1)...(19): siRNA sense strand
cagaaucgccaagacauuu

SEQ ID NO: 1905836 - RNA, 19 nt, Homo sapiens
  misc_RNA (1)...(19): siRNA sense strand
gcaacuauguaaaaccuuu

SEQ ID NO: 1905837 - RNA, 19 nt, Homo sapiens
  misc_RNA (1)...(19): siRNA sense strand
caagaaggacaaagcaguu

SEQ ID NO: 1905838 - RNA, 19 nt, Homo sapiens
  misc_RNA (1)...(19): siRNA sense strand
gggagauauuguuuacauu

SEQ ID NO: 1905839 - RNA, 19 nt, Homo sapiens
  misc_RNA (1)...(19): siRNA sense strand
uaagcgauguuuccaugga

SEQ ID NO: 1905840 - RNA, 19 nt, Homo sapiens
  misc_RNA (1)...(19): siRNA sense strand
aaauugaucagaacuggua

SEQ ID NO: 1905841 - RNA, 19 nt, Homo sapiens
  misc_RNA (1)...(19): siRNA sense strand
cuucagagacuccuggaua

SEQ ID NO: 1905842 - RNA, 19 nt, Homo sapiens
  misc_RNA (1)...(19): siRNA sense strand
caagaggucggccacacua

SEQ ID NO: 1905843 - RNA, 19 nt, Homo sapiens
  misc_RNA (1)...(19): siRNA sense strand
ucaaaagacugguacaaga

SEQ ID NO: 1905844 - RNA, 19 nt, Homo sapiens
  misc_RNA (1)...(19): siRNA sense strand
ggagucaaaccucacaaga

SEQ ID NO: 1905845 - RNA, 19 nt, Homo sapiens
  misc_RNA (1)...(19): siRNA sense strand
cagaagggagauauuguuu

SEQ ID NO: 1905846 - RNA, 19 nt, Homo sapiens
  misc_RNA (1)...(19): siRNA sense strand
gcaacacaaucgagaacag

SEQ ID NO: 1905847 - RNA, 19 nt, Homo sapiens
  misc_RNA (1)...(19): siRNA sense strand
cagcucugcuuccacuaaa

SEQ ID NO: 1905848 - RNA, 19 nt, Homo sapiens
  misc_RNA (1)...(19): siRNA sense strand
aaacgacucaguagccuuu

SEQ ID NO: 1905849 - RNA, 19 nt, Homo sapiens
  misc_RNA (1)...(19): siRNA sense strand
caaccuuccuucugacaag

SEQ ID NO: 1905850 - RNA, 19 nt, Homo sapiens
  misc_RNA (1)...(19): siRNA sense strand
uaucguugaugucauggaa

SEQ ID NO: 1905851 - RNA, 19 nt, Homo sapiens
  misc_RNA (1)...(19): siRNA sense strand
gcuauauaccacagaauga

SEQ ID NO: 1905852 - RNA, 19 nt, Homo sapiens
  misc_RNA (1)...(19): siRNA sense strand
cuuuaaagcucagacacua

SEQ ID NO: 1905853 - RNA, 19 nt, Homo sapiens
  misc_RNA (1)...(19): siRNA sense strand
agacauggauccuacaaaa

SEQ ID NO: 1905854 - RNA, 19 nt, Homo sapiens
  misc_RNA (1)...(19): siRNA sense strand
aaagugagaugagcuacau

SEQ ID NO: 1905855 - RNA, 19 nt, Homo sapiens
  misc_RNA (1)...(19): siRNA sense strand
ggaaaugcccagcccucuu

SEQ ID NO: 1905856 - RNA, 19 nt, Homo sapiens
  misc_RNA (1)...(19): siRNA sense strand
agaagggagauauuguuua

SEQ ID NO: 1905857 - RNA, 19 nt, Homo sapiens
  misc_RNA (1)...(19): siRNA sense strand
gaugaugauucagaucugu

SEQ ID NO: 1905858 - RNA, 19 nt, Homo sapiens
  misc_RNA (1)...(19): siRNA sense strand
cagagaugaugauucagau

SEQ ID NO: 1905859 - RNA, 19 nt, Homo sapiens
  misc_RNA (1)...(19): siRNA sense strand
agauaucguugaugucaug

SEQ ID NO: 1905860 - RNA, 19 nt, Homo sapiens
  misc_RNA (1)...(19): siRNA sense strand
agaaauguccuucagaaag

SEQ ID NO: 1905861 - RNA, 19 nt, Homo sapiens
  misc_RNA (1)...(19): siRNA sense strand
aaagacugguacaagacua

SEQ ID NO: 1905862 - RNA, 19 nt, Homo sapiens
  misc_RNA (1)...(19): siRNA sense strand
uuaaagcucagacacuaaa

SEQ ID NO: 1905863 - RNA, 19 nt, Homo sapiens
  misc_RNA (1)...(19): siRNA sense strand
gugcagagcccaagagcau

SEQ ID NO: 1905864 - RNA, 19 nt, Homo sapiens
  misc_RNA (1)...(19): siRNA sense strand
gaaacccggcaacacgaaa

SEQ ID NO: 1905865 - RNA, 19 nt, Homo sapiens
  misc_RNA (1)...(19): siRNA sense strand
uggagaagcuauugcuaag

SEQ ID NO: 1905866 - RNA, 19 nt, Homo sapiens
  misc_RNA (1)...(19): siRNA sense strand
ggaaacccggcaacacgaa

SEQ ID NO: 1905867 - RNA, 19 nt, Homo sapiens
  misc_RNA (1)...(19): siRNA sense strand
agagccaaauuugacuuua

SEQ ID NO: 1905868 - RNA, 19 nt, Homo sapiens
  misc_RNA (1)...(19): siRNA sense strand
gcaagacaaagacauggau

SEQ ID NO: 1905869 - RNA, 19 nt, Homo sapiens
  misc_RNA (1)...(19): siRNA sense strand
cagagacuccuggauauau

SEQ ID NO: 1905870 - RNA, 19 nt, Homo sapiens
  misc_RNA (1)...(19): siRNA sense strand
ucagagacuccuggauaua

SEQ ID NO: 1905871 - RNA, 19 nt, Homo sapiens
  misc_RNA (1)...(19): siRNA sense strand
aaacugaacagagaugaug

SEQ ID NO: 1905872 - RNA, 19 nt, Homo sapiens
  misc_RNA (1)...(19): siRNA sense strand
uccacaaacugaacagaga

SEQ ID NO: 1905873 - RNA, 19 nt, Homo sapiens
  misc_RNA (1)...(19): siRNA sense strand
ggacuuaagcgauguuucc

SEQ ID NO: 1905874 - RNA, 19 nt, Homo sapiens
  misc_RNA (1)...(19): siRNA sense strand
gacaaagacauggauccua

SEQ ID NO: 1905875 - RNA, 19 nt, Homo sapiens
  misc_RNA (1)...(19): siRNA sense strand
uuucagauccugucucaga

SEQ ID NO: 1905876 - RNA, 19 nt, Homo sapiens
  misc_RNA (1)...(19): siRNA sense strand
gagucaaaccucacaagau

SEQ ID NO: 1905877 - RNA, 19 nt, Homo sapiens
  misc_RNA (1)...(19): siRNA sense strand
agaagcuauugcuaaguuu

SEQ ID NO: 1905878 - RNA, 19 nt, Homo sapiens
  misc_RNA (1)...(19): siRNA sense strand
aagucaagcucagaaagaa

SEQ ID NO: 1905879 - RNA, 19 nt, Homo sapiens
  misc_RNA (1)...(19): siRNA sense strand
gugcugaugccaauggaaa

SEQ ID NO: 1905880 - RNA, 19 nt, Homo sapiens
  misc_RNA (1)...(19): siRNA sense strand
caaaaucuccccuuucugu

SEQ ID NO: 1905881 - RNA, 19 nt, Homo sapiens
  misc_RNA (1)...(19): siRNA sense strand
uggcaagucuuccguucug

SEQ ID NO: 1905882 - RNA, 19 nt, Homo sapiens
  misc_RNA (1)...(19): siRNA sense strand
caaggcaucuuccccauca

SEQ ID NO: 1905883 - RNA, 19 nt, Homo sapiens
  misc_RNA (1)...(19): siRNA sense strand
ggugauacacaaguagaaa

SEQ ID NO: 1905884 - RNA, 19 nt, Homo sapiens
  misc_RNA (1)...(19): siRNA sense strand
agggagauauuguuuacau

SEQ ID NO: 1905885 - RNA, 19 nt, Homo sapiens
  misc_RNA (1)...(19): siRNA sense strand
gccuaucccuccacaacga

SEQ ID NO: 1905886 - RNA, 19 nt, Homo sapiens
  misc_RNA (1)...(19): siRNA sense strand
uaccacagaaugaugauga

SEQ ID NO: 1905887 - RNA, 19 nt, Homo sapiens
  misc_RNA (1)...(19): siRNA sense strand
uagaaauguccuucagaaa

SEQ ID NO: 1905888 - RNA, 19 nt, Homo sapiens
  misc_RNA (1)...(19): siRNA sense strand
uaagcaaauugaucagaac

SEQ ID NO: 1905889 - RNA, 19 nt, Homo sapiens
  misc_RNA (1)...(19): siRNA sense strand
acagagaugaugauucaga

SEQ ID NO: 1905890 - RNA, 19 nt, Homo sapiens
  misc_RNA (1)...(19): siRNA sense strand
guaggcggguggugaagag

SEQ ID NO: 1905891 - RNA, 19 nt, Homo sapiens
  misc_RNA (1)...(19): siRNA sense strand
ggaagggagcggugacucu

SEQ ID NO: 1905892 - RNA, 19 nt, Homo sapiens
  misc_RNA (1)...(19): siRNA sense strand
gagauaucguugaugucau

SEQ ID NO: 1905893 - RNA, 19 nt, Homo sapiens
  misc_RNA (1)...(19): siRNA sense strand
cagcaaugggcaagacaaa

SEQ ID NO: 1905894 - RNA, 19 nt, Homo sapiens
  misc_RNA (1)...(19): siRNA sense strand
gauuccaguccucuacuaa

SEQ ID NO: 1905895 - RNA, 19 nt, Homo sapiens
  misc_RNA (1)...(19): siRNA sense strand
ucagaaagggugagaggau

SEQ ID NO: 1905896 - RNA, 19 nt, Homo sapiens
  misc_RNA (1)...(19): siRNA sense strand
cccaagagcauuuacgaau

SEQ ID NO: 1905897 - RNA, 19 nt, Homo sapiens
  misc_RNA (1)...(19): siRNA sense strand
gacacaaaaucuccccuuu

SEQ ID NO: 1905898 - RNA, 19 nt, Homo sapiens
  misc_RNA (1)...(19): siRNA sense strand
ccggaacacugagagauca

SEQ ID NO: 1905899 - RNA, 19 nt, Homo sapiens
  misc_RNA (1)...(19): siRNA sense strand
gaacagagaugaugauuca

SEQ ID NO: 1905900 - RNA, 19 nt, Homo sapiens
  misc_RNA (1)...(19): siRNA sense strand
gaagagcacucaggacuua

SEQ ID NO: 1905901 - RNA, 19 nt, Homo sapiens
  misc_RNA (1)...(19): siRNA sense strand
gaucagaacugguaugaag

SEQ ID NO: 1905902 - RNA, 19 nt, Homo sapiens
  misc_RNA (1)...(19): siRNA sense strand
gaacugguaugaaggagaa

SEQ ID NO: 1905903 - RNA, 19 nt, Homo sapiens
  misc_RNA (1)...(19): siRNA sense strand
gagaagcuauugcuaaguu

SEQ ID NO: 1905904 - RNA, 19 nt, Homo sapiens
  misc_RNA (1)...(19): siRNA sense strand
ccaagagcauuuacgaaua

SEQ ID NO: 1905905 - RNA, 19 nt, Homo sapiens
  misc_RNA (1)...(19): siRNA sense strand
guagaaauguccuucagaa

SEQ ID NO: 1905906 - RNA, 19 nt, Homo sapiens
  misc_RNA (1)...(19): siRNA sense strand
gaagggagauauuguuuac

SEQ ID NO: 1905907 - RNA, 19 nt, Homo sapiens
  misc_RNA (1)...(19): siRNA sense strand
gagccaaauuugacuuuaa

SEQ ID NO: 1905908 - RNA, 19 nt, Homo sapiens
  misc_RNA (1)...(19): siRNA sense strand
caagagcauuuacgaauau

SEQ ID NO: 1905909 - RNA, 19 nt, Homo sapiens
  misc_RNA (1)...(19): siRNA sense strand
ggaauccacggaagaauuu

SEQ ID NO: 1905910 - RNA, 19 nt, Homo sapiens
  misc_RNA (1)...(19): siRNA sense strand
gacgauggaugguuuguug

SEQ ID NO: 1905911 - RNA, 19 nt, Homo sapiens
  misc_RNA (1)...(19): siRNA sense strand
agucaaaccucacaagauu

SEQ ID NO: 1905912 - RNA, 19 nt, Homo sapiens
  misc_RNA (1)...(19): siRNA sense strand
gguacaagacuauguuuaa

SEQ ID NO: 1905913 - RNA, 19 nt, Homo sapiens
  misc_RNA (1)...(19): siRNA sense strand
aaacagauccacaaacuga

SEQ ID NO: 1905914 - RNA, 19 nt, Homo sapiens
  misc_RNA (1)...(19): siRNA sense strand
gaagucaagcucagaaaga

SEQ ID NO: 1905915 - RNA, 19 nt, Homo sapiens
  misc_RNA (1)...(19): siRNA sense strand
ucaaaccucacaagauuua

SEQ ID NO: 1905916 - RNA, 19 nt, Homo sapiens
  misc_RNA (1)...(19): siRNA sense strand
uauaccagcugauuacuug

SEQ ID NO: 1905917 - RNA, 19 nt, Homo sapiens
  misc_RNA (1)...(19): siRNA sense strand
gaagcuauugcuaaguuua

SEQ ID NO: 1905918 - RNA, 19 nt, Homo sapiens
  misc_RNA (1)...(19): siRNA sense strand
gcaaugggcaagacaaaga

SEQ ID NO: 1905919 - RNA, 19 nt, Homo sapiens
  misc_RNA (1)...(19): siRNA sense strand
gauccugucucagaaagaa

SEQ ID NO: 1905920 - RNA, 19 nt, Homo sapiens
  misc_RNA (1)...(19): siRNA sense strand
gagcaaaggaugacaguag

SEQ ID NO: 1905921 - RNA, 19 nt, Homo sapiens
  misc_RNA (1)...(19): siRNA sense strand
ucacuagcuuggagaauga

SEQ ID NO: 1905922 - RNA, 19 nt, Homo sapiens
  misc_RNA (1)...(19): siRNA sense strand
gaaaugcccagcccucuuc

SEQ ID NO: 1905923 - RNA, 19 nt, Homo sapiens
  misc_RNA (1)...(19): siRNA sense strand
ccaguccucuacuaaauga

SEQ ID NO: 1905924 - RNA, 19 nt, Homo sapiens
  misc_RNA (1)...(19): siRNA sense strand
gagcaggacucagcaccaa

SEQ ID NO: 1905925 - RNA, 19 nt, Homo sapiens
  misc_RNA (1)...(19): siRNA sense strand
gcagaagggagauauuguu

SEQ ID NO: 1905926 - RNA, 19 nt, Homo sapiens
  misc_RNA (1)...(19): siRNA sense strand
agagacuccuggauauaua

SEQ ID NO: 1905927 - RNA, 19 nt, Homo sapiens
  misc_RNA (1)...(19): siRNA sense strand
gcagagcccaagagcauuu

SEQ ID NO: 1905928 - RNA, 19 nt, Homo sapiens
  misc_RNA (1)...(19): siRNA sense strand
acagaaugaugaugaguug

SEQ ID NO: 1905929 - RNA, 19 nt, Homo sapiens
  misc_RNA (1)...(19): siRNA sense strand
ggagauaucguugauguca

SEQ ID NO: 1905930 - RNA, 19 nt, Homo sapiens
  misc_RNA (1)...(19): siRNA sense strand
uaauggugauacacaagua

SEQ ID NO: 1905931 - RNA, 19 nt, Homo sapiens
  misc_RNA (1)...(19): siRNA sense strand
uuaaacagauccacaaacu

SEQ ID NO: 1905932 - RNA, 19 nt, Homo sapiens
  misc_RNA (1)...(19): siRNA sense strand
gaaugaugaugaguuggaa

SEQ ID NO: 1905933 - RNA, 19 nt, Homo sapiens
  misc_RNA (1)...(19): siRNA sense strand
gauggaugguuuguuggua

SEQ ID NO: 1905934 - RNA, 19 nt, Homo sapiens
  misc_RNA (1)...(19): siRNA sense strand
gcaccuacaucgagcuucu

SEQ ID NO: 1905935 - RNA, 19 nt, Homo sapiens
  misc_RNA (1)...(19): siRNA sense strand
cagaaucgccaagacauuu

SEQ ID NO: 1905936 - RNA, 19 nt, Homo sapiens
  misc_RNA (1)...(19): siRNA sense strand
gcaacuauguaaaaccuuu

SEQ ID NO: 1905937 - RNA, 19 nt, Homo sapiens
  misc_RNA (1)...(19): siRNA sense strand
caagaaggacaaagcaguu

SEQ ID NO: 1905938 - RNA, 19 nt, Homo sapiens
  misc_RNA (1)...(19): siRNA sense strand
gggagauauuguuuacauu

SEQ ID NO: 1905939 - RNA, 19 nt, Homo sapiens
  misc_RNA (1)...(19): siRNA sense strand
uaagcgauguuuccaugga

SEQ ID NO: 1905940 - RNA, 19 nt, Homo sapiens
  misc_RNA (1)...(19): siRNA sense strand
aaauugaucagaacuggua

SEQ ID NO: 1905941 - RNA, 19 nt, Homo sapiens
  misc_RNA (1)...(19): siRNA sense strand
cuucagagacuccuggaua

SEQ ID NO: 1905942 - RNA, 19 nt, Homo sapiens
  misc_RNA (1)...(19): siRNA sense strand
caagaggucggccacacua

SEQ ID NO: 1905943 - RNA, 19 nt, Homo sapiens
  misc_RNA (1)...(19): siRNA sense strand
ucaaaagacugguacaaga

SEQ ID NO: 1905944 - RNA, 19 nt, Homo sapiens
  misc_RNA (1)...(19): siRNA sense strand
ggagucaaaccucacaaga

SEQ ID NO: 1905945 - RNA, 19 nt, Homo sapiens
  misc_RNA (1)...(19): siRNA sense strand
cagaagggagauauuguuu

SEQ ID NO: 1905946 - RNA, 19 nt, Homo sapiens
  misc_RNA (1)...(19): siRNA sense strand
gcaacacaaucgagaacag

SEQ ID NO: 1905947 - RNA, 19 nt, Homo sapiens
  misc_RNA (1)...(19): siRNA sense strand
cagcucugcuuccacuaaa

SEQ ID NO: 1905948 - RNA, 19 nt, Homo sapiens
  misc_RNA (1)...(19): siRNA sense strand
aaacgacucaguagccuuu

SEQ ID NO: 1905949 - RNA, 19 nt, Homo sapiens
  misc_RNA (1)...(19): siRNA sense strand
caaccuuccuucugacaag

SEQ ID NO: 1905950 - RNA, 19 nt, Homo sapiens
  misc_RNA (1)...(19): siRNA sense strand
uaucguugaugucauggaa

SEQ ID NO: 1905951 - RNA, 19 nt, Homo sapiens
  misc_RNA (1)...(19): siRNA sense strand
gcuauauaccacagaauga

SEQ ID NO: 1905952 - RNA, 19 nt, Homo sapiens
  misc_RNA (1)...(19): siRNA sense strand
cuuuaaagcucagacacua

SEQ ID NO: 1905953 - RNA, 19 nt, Homo sapiens
  misc_RNA (1)...(19): siRNA sense strand
agacauggauccuacaaaa

SEQ ID NO: 1905954 - RNA, 19 nt, Homo sapiens
  misc_RNA (1)...(19): siRNA sense strand
aaagugagaugagcuacau

SEQ ID NO: 1905955 - RNA, 19 nt, Homo sapiens
  misc_RNA (1)...(19): siRNA sense strand
ggaaaugcccagcccucuu

SEQ ID NO: 1905956 - RNA, 19 nt, Homo sapiens
  misc_RNA (1)...(19): siRNA sense strand
agaagggagauauuguuua

SEQ ID NO: 1905957 - RNA, 19 nt, Homo sapiens
  misc_RNA (1)...(19): siRNA sense strand
gaugaugauucagaucugu

SEQ ID NO: 1905958 - RNA, 19 nt, Homo sapiens
  misc_RNA (1)...(19): siRNA sense strand
cagagaugaugauucagau

SEQ ID NO: 1905959 - RNA, 19 nt, Homo sapiens
  misc_RNA (1)...(19): siRNA sense strand
agauaucguugaugucaug

SEQ ID NO: 1905960 - RNA, 19 nt, Homo sapiens
  misc_RNA (1)...(19): siRNA sense strand
agaaauguccuucagaaag

SEQ ID NO: 1905961 - RNA, 19 nt, Homo sapiens
  misc_RNA (1)...(19): siRNA sense strand
aaagacugguacaagacua

SEQ ID NO: 1905962 - RNA, 19 nt, Homo sapiens
  misc_RNA (1)...(19): siRNA sense strand
uuaaagcucagacacuaaa

SEQ ID NO: 1905963 - RNA, 19 nt, Homo sapiens
  misc_RNA (1)...(19): siRNA sense strand
gugcagagcccaagagcau

SEQ ID NO: 1905964 - RNA, 19 nt, Homo sapiens
  misc_RNA (1)...(19): siRNA sense strand
gaaacccggcaacacgaaa

SEQ ID NO: 1905965 - RNA, 19 nt, Homo sapiens
  misc_RNA (1)...(19): siRNA sense strand
uggagaagcuauugcuaag

SEQ ID NO: 1905966 - RNA, 19 nt, Homo sapiens
  misc_RNA (1)...(19): siRNA sense strand
ggaaacccggcaacacgaa

SEQ ID NO: 1905967 - RNA, 19 nt, Homo sapiens
  misc_RNA (1)...(19): siRNA sense strand
agagccaaauuugacuuua

SEQ ID NO: 1905968 - RNA, 19 nt, Homo sapiens
  misc_RNA (1)...(19): siRNA sense strand
gcaagacaaagacauggau

SEQ ID NO: 1905969 - RNA, 19 nt, Homo sapiens
  misc_RNA (1)...(19): siRNA sense strand
cagagacuccuggauauau

SEQ ID NO: 1905970 - RNA, 19 nt, Homo sapiens
  misc_RNA (1)...(19): siRNA sense strand
ucagagacuccuggauaua

SEQ ID NO: 1905971 - RNA, 19 nt, Homo sapiens
  misc_RNA (1)...(19): siRNA sense strand
aaacugaacagagaugaug

SEQ ID NO: 1905972 - RNA, 19 nt, Homo sapiens
  misc_RNA (1)...(19): siRNA sense strand
uccacaaacugaacagaga

SEQ ID NO: 1905973 - RNA, 19 nt, Homo sapiens
  misc_RNA (1)...(19): siRNA sense strand
ggacuuaagcgauguuucc

SEQ ID NO: 1905974 - RNA, 19 nt, Homo sapiens
  misc_RNA (1)...(19): siRNA sense strand
gacaaagacauggauccua

SEQ ID NO: 1905975 - RNA, 19 nt, Homo sapiens
  misc_RNA (1)...(19): siRNA sense strand
uuucagauccugucucaga

SEQ ID NO: 1905976 - RNA, 19 nt, Homo sapiens
  misc_RNA (1)...(19): siRNA sense strand
gagucaaaccucacaagau

SEQ ID NO: 1905977 - RNA, 19 nt, Homo sapiens
  misc_RNA (1)...(19): siRNA sense strand
agaagcuauugcuaaguuu

SEQ ID NO: 1905978 - RNA, 19 nt, Homo sapiens
  misc_RNA (1)...(19): siRNA sense strand
aagucaagcucagaaagaa

SEQ ID NO: 1905979 - RNA, 19 nt, Homo sapiens
  misc_RNA (1)...(19): siRNA sense strand
gugcugaugccaauggaaa

SEQ ID NO: 1905980 - RNA, 19 nt, Homo sapiens
  misc_RNA (1)...(19): siRNA sense strand
caaaaucuccccuuucugu

SEQ ID NO: 1905981 - RNA, 19 nt, Homo sapiens
  misc_RNA (1)...(19): siRNA sense strand
uggcaagucuuccguucug

SEQ ID NO: 1905982 - RNA, 19 nt, Homo sapiens
  misc_RNA (1)...(19): siRNA sense strand
caaggcaucuuccccauca

SEQ ID NO: 1905983 - RNA, 19 nt, Homo sapiens
  misc_RNA (1)...(19): siRNA sense strand
ggugauacacaaguagaaa

SEQ ID NO: 1905984 - RNA, 19 nt, Homo sapiens
  misc_RNA (1)...(19): siRNA sense strand
agggagauauuguuuacau

SEQ ID NO: 1905985 - RNA, 19 nt, Homo sapiens
  misc_RNA (1)...(19): siRNA sense strand
gccuaucccuccacaacga

SEQ ID NO: 1905986 - RNA, 19 nt, Homo sapiens
  misc_RNA (1)...(19): siRNA sense strand
uaccacagaaugaugauga

SEQ ID NO: 1905987 - RNA, 19 nt, Homo sapiens
  misc_RNA (1)...(19): siRNA sense strand
uagaaauguccuucagaaa

SEQ ID NO: 1905988 - RNA, 19 nt, Homo sapiens
  misc_RNA (1)...(19): siRNA sense strand
uaagcaaauugaucagaac

SEQ ID NO: 1905989 - RNA, 19 nt, Homo sapiens
  misc_RNA (1)...(19): siRNA sense strand
acagagaugaugauucaga

SEQ ID NO: 1905990 - RNA, 19 nt, Homo sapiens
  misc_RNA (1)...(19): siRNA sense strand
guaggcggguggugaagag

SEQ ID NO: 1905991 - RNA, 19 nt, Homo sapiens
  misc_RNA (1)...(19): siRNA sense strand
ggaagggagcggugacucu

SEQ ID NO: 1905992 - RNA, 19 nt, Homo sapiens
  misc_RNA (1)...(19): siRNA sense strand
gagauaucguugaugucau

SEQ ID NO: 1905993 - RNA, 19 nt, Homo sapiens
  misc_RNA (1)...(19): siRNA sense strand
cagcaaugggcaagacaaa

SEQ ID NO: 1905994 - RNA, 19 nt, Homo sapiens
  misc_RNA (1)...(19): siRNA sense strand
gauuccaguccucuacuaa

SEQ ID NO: 1905995 - RNA, 19 nt, Homo sapiens
  misc_RNA (1)...(19): siRNA sense strand
ucagaaagggugagaggau

SEQ ID NO: 1905996 - RNA, 19 nt, Homo sapiens
  misc_RNA (1)...(19): siRNA sense strand
cccaagagcauuuacgaau

SEQ ID NO: 1905997 - RNA, 19 nt, Homo sapiens
  misc_RNA (1)...(19): siRNA sense strand
gacacaaaaucuccccuuu

SEQ ID NO: 1905998 - RNA, 19 nt, Homo sapiens
  misc_RNA (1)...(19): siRNA sense strand
ccggaacacugagagauca

SEQ ID NO: 1905999 - RNA, 19 nt, Homo sapiens
  misc_RNA (1)...(19): siRNA sense strand
guacucaacucacauauuu

SEQ ID NO: 1906000 - RNA, 19 nt, Homo sapiens
  misc_RNA (1)...(19): siRNA sense strand
caaugaagauccuaguaua

SEQ ID NO: 1906001 - RNA, 19 nt, Homo sapiens
  misc_RNA (1)...(19): siRNA sense strand
caaagacacucuagacaau

SEQ ID NO: 1906002 - RNA, 19 nt, Homo sapiens
  misc_RNA (1)...(19): siRNA sense strand
ggaggaggaucuucucaug

SEQ ID NO: 1906003 - RNA, 19 nt, Homo sapiens
  misc_RNA (1)...(19): siRNA sense strand
gaugacaccuuggaagaaa

SEQ ID NO: 1906004 - RNA, 19 nt, Homo sapiens
  misc_RNA (1)...(19): siRNA sense strand
agaggaagcugauaacaau

SEQ ID NO: 1906005 - RNA, 19 nt, Homo sapiens
  misc_RNA (1)...(19): siRNA sense strand
ggaauaccaucgccuagau

SEQ ID NO: 1906006 - RNA, 19 nt, Homo sapiens
  misc_RNA (1)...(19): siRNA sense strand
gaaauugaacagucaguga

SEQ ID NO: 1906007 - RNA, 19 nt, Homo sapiens
  misc_RNA (1)...(19): siRNA sense strand
caaaccaaaccuucuauuu

SEQ ID NO: 1906008 - RNA, 19 nt, Homo sapiens
  misc_RNA (1)...(19): siRNA sense strand
caauggcgauuauggagaa

SEQ ID NO: 1906009 - RNA, 19 nt, Homo sapiens
  misc_RNA (1)...(19): siRNA sense strand
ggaagcugauaacaaugaa

SEQ ID NO: 1906010 - RNA, 19 nt, Homo sapiens
  misc_RNA (1)...(19): siRNA sense strand
ccaaagacacucuagacaa

SEQ ID NO: 1906011 - RNA, 19 nt, Homo sapiens
  misc_RNA (1)...(19): siRNA sense strand
aaaccaaaccuucuauuuc

SEQ ID NO: 1906012 - RNA, 19 nt, Homo sapiens
  misc_RNA (1)...(19): siRNA sense strand
cuuugaagauuaccaauga

SEQ ID NO: 1906013 - RNA, 19 nt, Homo sapiens
  misc_RNA (1)...(19): siRNA sense strand
gcauugcuguuguuuacau

SEQ ID NO: 1906014 - RNA, 19 nt, Homo sapiens
  misc_RNA (1)...(19): siRNA sense strand
gugaaugcuuuaacacaug

SEQ ID NO: 1906015 - RNA, 19 nt, Homo sapiens
  misc_RNA (1)...(19): siRNA sense strand
cuacuccucugucucaaga

SEQ ID NO: 1906016 - RNA, 19 nt, Homo sapiens
  misc_RNA (1)...(19): siRNA sense strand
ugaaugcuuuaacacauga

SEQ ID NO: 1906017 - RNA, 19 nt, Homo sapiens
  misc_RNA (1)...(19): siRNA sense strand
gaacagucagugaaaucuu

SEQ ID NO: 1906018 - RNA, 19 nt, Homo sapiens
  misc_RNA (1)...(19): siRNA sense strand
caaccguacucaacucaca

SEQ ID NO: 1906019 - RNA, 19 nt, Homo sapiens
  misc_RNA (1)...(19): siRNA sense strand
aacagucagugaaaucuuu

SEQ ID NO: 1906020 - RNA, 19 nt, Homo sapiens
  misc_RNA (1)...(19): siRNA sense strand
cauggaaauugaacaguca

SEQ ID NO: 1906021 - RNA, 19 nt, Homo sapiens
  misc_RNA (1)...(19): siRNA sense strand
ccacgacgaguaccaagaa

SEQ ID NO: 1906022 - RNA, 19 nt, Homo sapiens
  misc_RNA (1)...(19): siRNA sense strand
gaagaggaagacagccauu

SEQ ID NO: 1906023 - RNA, 19 nt, Homo sapiens
  misc_RNA (1)...(19): siRNA sense strand
aaacagggguuacauggaa

SEQ ID NO: 1906024 - RNA, 19 nt, Homo sapiens
  misc_RNA (1)...(19): siRNA sense strand
gaauguuaaugaggcaaug

SEQ ID NO: 1906025 - RNA, 19 nt, Homo sapiens
  misc_RNA (1)...(19): siRNA sense strand
gaucuucucaugcugaaca

SEQ ID NO: 1906026 - RNA, 19 nt, Homo sapiens
  misc_RNA (1)...(19): siRNA sense strand
gccuagaucagaauguuaa

SEQ ID NO: 1906027 - RNA, 19 nt, Homo sapiens
  misc_RNA (1)...(19): siRNA sense strand
ucuagacaauggcgauuau

SEQ ID NO: 1906028 - RNA, 19 nt, Homo sapiens
  misc_RNA (1)...(19): siRNA sense strand
acaaugaagauccuaguau

SEQ ID NO: 1906029 - RNA, 19 nt, Homo sapiens
  misc_RNA (1)...(19): siRNA sense strand
gggguuacauggaaauuga

SEQ ID NO: 1906030 - RNA, 19 nt, Homo sapiens
  misc_RNA (1)...(19): siRNA sense strand
ccaaaugugaaugcuuuaa

SEQ ID NO: 1906031 - RNA, 19 nt, Homo sapiens
  misc_RNA (1)...(19): siRNA sense strand
ugaagauccuaguauagag

SEQ ID NO: 1906032 - RNA, 19 nt, Homo sapiens
  misc_RNA (1)...(19): siRNA sense strand
ccucaucccucgccuacuc

SEQ ID NO: 1906033 - RNA, 19 nt, Homo sapiens
  misc_RNA (1)...(19): siRNA sense strand
gugauggccuuuguuccaa

SEQ ID NO: 1906034 - RNA, 19 nt, Homo sapiens
  misc_RNA (1)...(19): siRNA sense strand
ucuauccaguguuguauca

SEQ ID NO: 1906035 - RNA, 19 nt, Homo sapiens
  misc_RNA (1)...(19): siRNA sense strand
aaccaaaccuucuauuucc

SEQ ID NO: 1906036 - RNA, 19 nt, Homo sapiens
  misc_RNA (1)...(19): siRNA sense strand
ccaaaccaaaccuucuauu

SEQ ID NO: 1906037 - RNA, 19 nt, Homo sapiens
  misc_RNA (1)...(19): siRNA sense strand
uugcauugcuguuguuuac

SEQ ID NO: 1906038 - RNA, 19 nt, Homo sapiens
  misc_RNA (1)...(19): siRNA sense strand
gaggaagacagccauuucu

SEQ ID NO: 1906039 - RNA, 19 nt, Homo sapiens
  misc_RNA (1)...(19): siRNA sense strand
aagaggaagcugauaacaa

SEQ ID NO: 1906040 - RNA, 19 nt, Homo sapiens
  misc_RNA (1)...(19): siRNA sense strand
ggucuuggcgcuccugcuu

SEQ ID NO: 1906041 - RNA, 19 nt, Homo sapiens
  misc_RNA (1)...(19): siRNA sense strand
guauagaggaggaggaucu

SEQ ID NO: 1906042 - RNA, 19 nt, Homo sapiens
  misc_RNA (1)...(19): siRNA sense strand
aaauugaacagucagugaa

SEQ ID NO: 1906043 - RNA, 19 nt, Homo sapiens
  misc_RNA (1)...(19): siRNA sense strand
ucgccuagaucagaauguu

SEQ ID NO: 1906044 - RNA, 19 nt, Homo sapiens
  misc_RNA (1)...(19): siRNA sense strand
uaacaaugaagauccuagu

SEQ ID NO: 1906045 - RNA, 19 nt, Homo sapiens
  misc_RNA (1)...(19): siRNA sense strand
gccgcucuauccaguguug

SEQ ID NO: 1906046 - RNA, 19 nt, Homo sapiens
  misc_RNA (1)...(19): siRNA sense strand
ccccaaaugugaaugcuuu

SEQ ID NO: 1906047 - RNA, 19 nt, Homo sapiens
  misc_RNA (1)...(19): siRNA sense strand
agacaauggcgauuaugga

SEQ ID NO: 1906048 - RNA, 19 nt, Homo sapiens
  misc_RNA (1)...(19): siRNA sense strand
gccaaagacacucuagaca

SEQ ID NO: 1906049 - RNA, 19 nt, Homo sapiens
  misc_RNA (1)...(19): siRNA sense strand
aggaagcugauaacaauga

SEQ ID NO: 1906050 - RNA, 19 nt, Homo sapiens
  misc_RNA (1)...(19): siRNA sense strand
uaccaucgccuagaucaga

SEQ ID NO: 1906051 - RNA, 19 nt, Homo sapiens
  misc_RNA (1)...(19): siRNA sense strand
aagcugauaacaaugaaga

SEQ ID NO: 1906052 - RNA, 19 nt, Homo sapiens
  misc_RNA (1)...(19): siRNA sense strand
caagaggaagcugauaaca

SEQ ID NO: 1906053 - RNA, 19 nt, Homo sapiens
  misc_RNA (1)...(19): siRNA sense strand
gaauaccaucgccuagauc

SEQ ID NO: 1906054 - RNA, 19 nt, Homo sapiens
  misc_RNA (1)...(19): siRNA sense strand
gcuguuguuuacauuacau

SEQ ID NO: 1906055 - RNA, 19 nt, Homo sapiens
  misc_RNA (1)...(19): siRNA sense strand
agaggaagacagccauuuc

SEQ ID NO: 1906056 - RNA, 19 nt, Homo sapiens
  misc_RNA (1)...(19): siRNA sense strand
caaauauagaagaggaaga

SEQ ID NO: 1906057 - RNA, 19 nt, Homo sapiens
  misc_RNA (1)...(19): siRNA sense strand
ggacgacgacgagucugau

SEQ ID NO: 1906058 - RNA, 19 nt, Homo sapiens
  misc_RNA (1)...(19): siRNA sense strand
gggacgacgacgagucuga

SEQ ID NO: 1906059 - RNA, 19 nt, Homo sapiens
  misc_RNA (1)...(19): siRNA sense strand
aagacacucuagacaaugg

SEQ ID NO: 1906060 - RNA, 19 nt, Homo sapiens
  misc_RNA (1)...(19): siRNA sense strand
caaaugugaaugcuuuaac

SEQ ID NO: 1906061 - RNA, 19 nt, Homo sapiens
  misc_RNA (1)...(19): siRNA sense strand
aaccaaaccaaaccuucua

SEQ ID NO: 1906062 - RNA, 19 nt, Homo sapiens
  misc_RNA (1)...(19): siRNA sense strand
auggagaaccagacuauga

SEQ ID NO: 1906063 - RNA, 19 nt, Homo sapiens
  misc_RNA (1)...(19): siRNA sense strand
cucaagaggaagcugauaa

SEQ ID NO: 1906064 - RNA, 19 nt, Homo sapiens
  misc_RNA (1)...(19): siRNA sense strand
cacgacgaguaccaagaaa

SEQ ID NO: 1906065 - RNA, 19 nt, Homo sapiens
  misc_RNA (1)...(19): siRNA sense strand
gauaacaaugaagauccua

SEQ ID NO: 1906066 - RNA, 19 nt, Homo sapiens
  misc_RNA (1)...(19): siRNA sense strand
ccaaaacaguggaauacca

SEQ ID NO: 1906067 - RNA, 19 nt, Homo sapiens
  misc_RNA (1)...(19): siRNA sense strand
agcaggaaauggcgugaug

SEQ ID NO: 1906068 - RNA, 19 nt, Homo sapiens
  misc_RNA (1)...(19): siRNA sense strand
gaagaaaacagggguuaca

SEQ ID NO: 1906069 - RNA, 19 nt, Homo sapiens
  misc_RNA (1)...(19): siRNA sense strand
gcugauaacaaugaagauc

SEQ ID NO: 1906070 - RNA, 19 nt, Homo sapiens
  misc_RNA (1)...(19): siRNA sense strand
gcccaaccguacucaacuc

SEQ ID NO: 1906071 - RNA, 19 nt, Homo sapiens
  misc_RNA (1)...(19): siRNA sense strand
cauugcuguuguuuacauu

SEQ ID NO: 1906072 - RNA, 19 nt, Homo sapiens
  misc_RNA (1)...(19): siRNA sense strand
ucaacucacauauuucuac

SEQ ID NO: 1906073 - RNA, 19 nt, Homo sapiens
  misc_RNA (1)...(19): siRNA sense strand
cguacucaacucacauauu

SEQ ID NO: 1906074 - RNA, 19 nt, Homo sapiens
  misc_RNA (1)...(19): siRNA sense strand
aaaccaaaccaaaccuucu

SEQ ID NO: 1906075 - RNA, 19 nt, Homo sapiens
  misc_RNA (1)...(19): siRNA sense strand
uuauggagaaccagacuau

SEQ ID NO: 1906076 - RNA, 19 nt, Homo sapiens
  misc_RNA (1)...(19): siRNA sense strand
aggaggaucuucucaugcu

SEQ ID NO: 1906077 - RNA, 19 nt, Homo sapiens
  misc_RNA (1)...(19): siRNA sense strand
gaggaggaggaucuucuca

SEQ ID NO: 1906078 - RNA, 19 nt, Homo sapiens
  misc_RNA (1)...(19): siRNA sense strand
aacaaugaagauccuagua

SEQ ID NO: 1906079 - RNA, 19 nt, Homo sapiens
  misc_RNA (1)...(19): siRNA sense strand
gagcccaaccguacucaac

SEQ ID NO: 1906080 - RNA, 19 nt, Homo sapiens
  misc_RNA (1)...(19): siRNA sense strand
ccaaagacaugcaccacua

SEQ ID NO: 1906081 - RNA, 19 nt, Homo sapiens
  misc_RNA (1)...(19): siRNA sense strand
ccaaguagcugggaccaaa

SEQ ID NO: 1906082 - RNA, 19 nt, Homo sapiens
  misc_RNA (1)...(19): siRNA sense strand
gaagugcaguggugugauc

SEQ ID NO: 1906083 - RNA, 19 nt, Homo sapiens
  misc_RNA (1)...(19): siRNA sense strand
cacuacaccuggcuaauuu

SEQ ID NO: 1906084 - RNA, 19 nt, Homo sapiens
  misc_RNA (1)...(19): siRNA sense strand
ggagugcaauggccaaauc

SEQ ID NO: 1906085 - RNA, 19 nt, Homo sapiens
  misc_RNA (1)...(19): siRNA sense strand
caccacgccuagcuaauuu

SEQ ID NO: 1906086 - RNA, 19 nt, Homo sapiens
  misc_RNA (1)...(19): siRNA sense strand
ggagugcaauggcgcaauc

SEQ ID NO: 1906087 - RNA, 19 nt, Homo sapiens
  misc_RNA (1)...(19): siRNA sense strand
ccaaagugcugggauuaca

SEQ ID NO: 1906088 - RNA, 19 nt, Homo sapiens
  misc_RNA (1)...(19): siRNA sense strand
ccaaagugcugggauuaca

SEQ ID NO: 1906089 - RNA, 19 nt, Homo sapiens
  misc_RNA (1)...(19): siRNA sense strand
ggagugcaguggcgcaauc

SEQ ID NO: 1906090 - RNA, 19 nt, Homo sapiens
  misc_RNA (1)...(19): siRNA sense strand
ccacuacaccuggcuaauu

SEQ ID NO: 1906091 - RNA, 19 nt, Homo sapiens
  misc_RNA (1)...(19): siRNA sense strand
aauggaaucucacucuguu

SEQ ID NO: 1906092 - RNA, 19 nt, Homo sapiens
  misc_RNA (1)...(19): siRNA sense strand
ggcucugccuggcuaauuu

SEQ ID NO: 1906093 - RNA, 19 nt, Homo sapiens
  misc_RNA (1)...(19): siRNA sense strand
ccaccacgccuagcuaauu

SEQ ID NO: 1906094 - RNA, 19 nt, Homo sapiens
  misc_RNA (1)...(19): siRNA sense strand
uaguagagauggaguuucu

SEQ ID NO: 1906095 - RNA, 19 nt, Homo sapiens
  misc_RNA (1)...(19): siRNA sense strand
cacccacgcucggcuaauu

SEQ ID NO: 1906096 - RNA, 19 nt, Homo sapiens
  misc_RNA (1)...(19): siRNA sense strand
ucacugaugugcccaagcu

SEQ ID NO: 1906097 - RNA, 19 nt, Homo sapiens
  misc_RNA (1)...(19): siRNA sense strand
gaacucccgaccucagaug

SEQ ID NO: 1906098 - RNA, 19 nt, Homo sapiens
  misc_RNA (1)...(19): siRNA sense strand
ugccucagccucccaagua

SEQ ID NO: 1906099 - RNA, 19 nt, Homo sapiens
  misc_RNA (1)...(19): siRNA sense strand
ggccaaaucucggcucacu

SEQ ID NO: 1906100 - RNA, 19 nt, Homo sapiens
  misc_RNA (1)...(19): siRNA sense strand
ugaaauggaaucucacucu

SEQ ID NO: 1906101 - RNA, 19 nt, Homo sapiens
  misc_RNA (1)...(19): siRNA sense strand
auacaggacuggccaccau

SEQ ID NO: 1906102 - RNA, 19 nt, Homo sapiens
  misc_RNA (1)...(19): siRNA sense strand
aagcgauucuccugucuca

SEQ ID NO: 1906103 - RNA, 19 nt, Homo sapiens
  misc_RNA (1)...(19): siRNA sense strand
uguuugaaauggaaucuca

SEQ ID NO: 1906104 - RNA, 19 nt, Homo sapiens
  misc_RNA (1)...(19): siRNA sense strand
ccaagcagcugggauuacg

SEQ ID NO: 1906105 - RNA, 19 nt, Homo sapiens
  misc_RNA (1)...(19): siRNA sense strand
gugcaguggcgcaaucuug

SEQ ID NO: 1906106 - RNA, 19 nt, Homo sapiens
  misc_RNA (1)...(19): siRNA sense strand
cuugaucucuggaccuugu

SEQ ID NO: 1906107 - RNA, 19 nt, Homo sapiens
  misc_RNA (1)...(19): siRNA sense strand
cacaggugucccacucuua

SEQ ID NO: 1906108 - RNA, 19 nt, Homo sapiens
  misc_RNA (1)...(19): siRNA sense strand
gccuucaacuccugagauc

SEQ ID NO: 1906109 - RNA, 19 nt, Homo sapiens
  misc_RNA (1)...(19): siRNA sense strand
gcccaccacgccuagcuaa

SEQ ID NO: 1906110 - RNA, 19 nt, Homo sapiens
  misc_RNA (1)...(19): siRNA sense strand
ucaccauguucgccagguu

SEQ ID NO: 1906111 - RNA, 19 nt, Homo sapiens
  misc_RNA (1)...(19): siRNA sense strand
gugcaauggcgcaaucuca

SEQ ID NO: 1906112 - RNA, 19 nt, Homo sapiens
  misc_RNA (1)...(19): siRNA sense strand
cuucaacuccugagaucaa

SEQ ID NO: 1906113 - RNA, 19 nt, Homo sapiens
  misc_RNA (1)...(19): siRNA sense strand
gguuucaccauauuuguca

SEQ ID NO: 1906114 - RNA, 19 nt, Homo sapiens
  misc_RNA (1)...(19): siRNA sense strand
caccacaccccgcuaauuu

SEQ ID NO: 1906115 - RNA, 19 nt, Homo sapiens
  misc_RNA (1)...(19): siRNA sense strand
ccacucuuacccaggauga

SEQ ID NO: 1906116 - RNA, 19 nt, Homo sapiens
  misc_RNA (1)...(19): siRNA sense strand
ccucccggguucaaguuau

SEQ ID NO: 1906117 - RNA, 19 nt, Homo sapiens
  misc_RNA (1)...(19): siRNA sense strand
gaaggcauauguuuguauu

SEQ ID NO: 1906118 - RNA, 19 nt, Homo sapiens
  misc_RNA (1)...(19): siRNA sense strand
ggacaagaauuuauuagag

SEQ ID NO: 1906119 - RNA, 19 nt, Homo sapiens
  misc_RNA (1)...(19): siRNA sense strand
gucacaagauuccacauua

SEQ ID NO: 1906120 - RNA, 19 nt, Homo sapiens
  misc_RNA (1)...(19): siRNA sense strand
ucacaagauuccacauuaa

SEQ ID NO: 1906121 - RNA, 19 nt, Homo sapiens
  misc_RNA (1)...(19): siRNA sense strand
agaguuggcuauuauguaa

SEQ ID NO: 1906122 - RNA, 19 nt, Homo sapiens
  misc_RNA (1)...(19): siRNA sense strand
gcagagagcaguaauccaa

SEQ ID NO: 1906123 - RNA, 19 nt, Homo sapiens
  misc_RNA (1)...(19): siRNA sense strand
gcuaauuacuuguaccuau

SEQ ID NO: 1906124 - RNA, 19 nt, Homo sapiens
  misc_RNA (1)...(19): siRNA sense strand
gagcaguaauccaaaucua

SEQ ID NO: 1906125 - RNA, 19 nt, Homo sapiens
  misc_RNA (1)...(19): siRNA sense strand
ggauaacccuucuccuuuc

SEQ ID NO: 1906126 - RNA, 19 nt, Homo sapiens
  misc_RNA (1)...(19): siRNA sense strand
gaagaauacgaucaaguuu

SEQ ID NO: 1906127 - RNA, 19 nt, Homo sapiens
  misc_RNA (1)...(19): siRNA sense strand
uuucuaagcuucaaaggaa

SEQ ID NO: 1906128 - RNA, 19 nt, Homo sapiens
  misc_RNA (1)...(19): siRNA sense strand
gagacagaauuaagggaaa

SEQ ID NO: 1906129 - RNA, 19 nt, Homo sapiens
  misc_RNA (1)...(19): siRNA sense strand
caagauuccacauuaauug

SEQ ID NO: 1906130 - RNA, 19 nt, Homo sapiens
  misc_RNA (1)...(19): siRNA sense strand
ugaagaauacgaucaaguu

SEQ ID NO: 1906131 - RNA, 19 nt, Homo sapiens
  misc_RNA (1)...(19): siRNA sense strand
ucagaaaacucacuaaaug

SEQ ID NO: 1906132 - RNA, 19 nt, Homo sapiens
  misc_RNA (1)...(19): siRNA sense strand
aaucuacagucacuucuuu

SEQ ID NO: 1906133 - RNA, 19 nt, Homo sapiens
  misc_RNA (1)...(19): siRNA sense strand
gcaggaaggcauauguuug

SEQ ID NO: 1906134 - RNA, 19 nt, Homo sapiens
  misc_RNA (1)...(19): siRNA sense strand
gaagaugcagagagcagua

SEQ ID NO: 1906135 - RNA, 19 nt, Homo sapiens
  misc_RNA (1)...(19): siRNA sense strand
guaacuguugugcuaauua

SEQ ID NO: 1906136 - RNA, 19 nt, Homo sapiens
  misc_RNA (1)...(19): siRNA sense strand
ucgaggaccugucugaaga

SEQ ID NO: 1906137 - RNA, 19 nt, Homo sapiens
  misc_RNA (1)...(19): siRNA sense strand
cucacuaaaugucauguua

SEQ ID NO: 1906138 - RNA, 19 nt, Homo sapiens
  misc_RNA (1)...(19): siRNA sense strand
cgaggacaagaauuuauua

SEQ ID NO: 1906139 - RNA, 19 nt, Homo sapiens
  misc_RNA (1)...(19): siRNA sense strand
aggcguaacuguugugcua

SEQ ID NO: 1906140 - RNA, 19 nt, Homo sapiens
  misc_RNA (1)...(19): siRNA sense strand
cacauuaauugggaagaua

SEQ ID NO: 1906141 - RNA, 19 nt, Homo sapiens
  misc_RNA (1)...(19): siRNA sense strand
ucaaagggaugguccacau

SEQ ID NO: 1906142 - RNA, 19 nt, Homo sapiens
  misc_RNA (1)...(19): siRNA sense strand
gcaguaauccaaaucuaca

SEQ ID NO: 1906143 - RNA, 19 nt, Homo sapiens
  misc_RNA (1)...(19): siRNA sense strand
ucacuucuuucaacagaug

SEQ ID NO: 1906144 - RNA, 19 nt, Homo sapiens
  misc_RNA (1)...(19): siRNA sense strand
uaugugggcucugcagaaa

SEQ ID NO: 1906145 - RNA, 19 nt, Homo sapiens
  misc_RNA (1)...(19): siRNA sense strand
ugcauuaccuucagcauca

SEQ ID NO: 1906146 - RNA, 19 nt, Homo sapiens
  misc_RNA (1)...(19): siRNA sense strand
ugaauauacugagacagaa

SEQ ID NO: 1906147 - RNA, 19 nt, Homo sapiens
  misc_RNA (1)...(19): siRNA sense strand
uggauaacccuucuccuuu

SEQ ID NO: 1906148 - RNA, 19 nt, Homo sapiens
  misc_RNA (1)...(19): siRNA sense strand
ggaauauuuuggcaucuaa

SEQ ID NO: 1906149 - RNA, 19 nt, Homo sapiens
  misc_RNA (1)...(19): siRNA sense strand
uaacuguugugcuaauuac

SEQ ID NO: 1906150 - RNA, 19 nt, Homo sapiens
  misc_RNA (1)...(19): siRNA sense strand
ggaaggcauauguuuguau

SEQ ID NO: 1906151 - RNA, 19 nt, Homo sapiens
  misc_RNA (1)...(19): siRNA sense strand
gacuuggaauggaaaauua

SEQ ID NO: 1906152 - RNA, 19 nt, Homo sapiens
  misc_RNA (1)...(19): siRNA sense strand
ggucacaagauuccacauu

SEQ ID NO: 1906153 - RNA, 19 nt, Homo sapiens
  misc_RNA (1)...(19): siRNA sense strand
cugcagaaagugaagaaua

SEQ ID NO: 1906154 - RNA, 19 nt, Homo sapiens
  misc_RNA (1)...(19): siRNA sense strand
cuaauuacuuguaccuauc

SEQ ID NO: 1906155 - RNA, 19 nt, Homo sapiens
  misc_RNA (1)...(19): siRNA sense strand
cugaagacuuggaauggaa

SEQ ID NO: 1906156 - RNA, 19 nt, Homo sapiens
  misc_RNA (1)...(19): siRNA sense strand
ccacauuaauugggaagau

SEQ ID NO: 1906157 - RNA, 19 nt, Homo sapiens
  misc_RNA (1)...(19): siRNA sense strand
gauaacccuucuccuuucu

SEQ ID NO: 1906158 - RNA, 19 nt, Homo sapiens
  misc_RNA (1)...(19): siRNA sense strand
ggaaaauccaccaguaaaa

SEQ ID NO: 1906159 - RNA, 19 nt, Homo sapiens
  misc_RNA (1)...(19): siRNA sense strand
ggcauauguuuguauuuca

SEQ ID NO: 1906160 - RNA, 19 nt, Homo sapiens
  misc_RNA (1)...(19): siRNA sense strand
ccaaaucuacagucacuuc

SEQ ID NO: 1906161 - RNA, 19 nt, Homo sapiens
  misc_RNA (1)...(19): siRNA sense strand
gaauauacugagacagaau

SEQ ID NO: 1906162 - RNA, 19 nt, Homo sapiens
  misc_RNA (1)...(19): siRNA sense strand
caggaaggcauauguuugu

SEQ ID NO: 1906163 - RNA, 19 nt, Homo sapiens
  misc_RNA (1)...(19): siRNA sense strand
uaauccaaaucuacaguca

SEQ ID NO: 1906164 - RNA, 19 nt, Homo sapiens
  misc_RNA (1)...(19): siRNA sense strand
uaucgaggacaagaauuua

SEQ ID NO: 1906165 - RNA, 19 nt, Homo sapiens
  misc_RNA (1)...(19): siRNA sense strand
gcauauguuuguauuucag

SEQ ID NO: 1906166 - RNA, 19 nt, Homo sapiens
  misc_RNA (1)...(19): siRNA sense strand
aggcauauguuuguauuuc

SEQ ID NO: 1906167 - RNA, 19 nt, Homo sapiens
  misc_RNA (1)...(19): siRNA sense strand
uagaguuggcuauuaugua

SEQ ID NO: 1906168 - RNA, 19 nt, Homo sapiens
  misc_RNA (1)...(19): siRNA sense strand
gcaucgaggaccugucuga

SEQ ID NO: 1906169 - RNA, 19 nt, Homo sapiens
  misc_RNA (1)...(19): siRNA sense strand
gcagaugcaguaggcguaa

SEQ ID NO: 1906170 - RNA, 19 nt, Homo sapiens
  misc_RNA (1)...(19): siRNA sense strand
agagagcaguaauccaaau

SEQ ID NO: 1906171 - RNA, 19 nt, Homo sapiens
  misc_RNA (1)...(19): siRNA sense strand
gcguaacuguugugcuaau

SEQ ID NO: 1906172 - RNA, 19 nt, Homo sapiens
  misc_RNA (1)...(19): siRNA sense strand
cuacaacccguuccaguuc

SEQ ID NO: 1906173 - RNA, 19 nt, Homo sapiens
  misc_RNA (1)...(19): siRNA sense strand
cuaucgaggacaagaauuu

SEQ ID NO: 1906174 - RNA, 19 nt, Homo sapiens
  misc_RNA (1)...(19): siRNA sense strand
ugcagaaagugaagaauac

SEQ ID NO: 1906175 - RNA, 19 nt, Homo sapiens
  misc_RNA (1)...(19): siRNA sense strand
cacaagauuccacauuaau

SEQ ID NO: 1906176 - RNA, 19 nt, Homo sapiens
  misc_RNA (1)...(19): siRNA sense strand
uacagucacuucuuucaac

SEQ ID NO: 1906177 - RNA, 19 nt, Homo sapiens
  misc_RNA (1)...(19): siRNA sense strand
uaacccuucuccuuucuac

SEQ ID NO: 1906178 - RNA, 19 nt, Homo sapiens
  misc_RNA (1)...(19): siRNA sense strand
ucuuucaacagaugcauua

SEQ ID NO: 1906179 - RNA, 19 nt, Homo sapiens
  misc_RNA (1)...(19): siRNA sense strand
agucacuucuuucaacaga

SEQ ID NO: 1906180 - RNA, 19 nt, Homo sapiens
  misc_RNA (1)...(19): siRNA sense strand
ccaggacucauuccagaug

SEQ ID NO: 1906181 - RNA, 19 nt, Homo sapiens
  misc_RNA (1)...(19): siRNA sense strand
uugggaagauaacacagaa

SEQ ID NO: 1906182 - RNA, 19 nt, Homo sapiens
  misc_RNA (1)...(19): siRNA sense strand
gaggacaagaauuuauuag

SEQ ID NO: 1906183 - RNA, 19 nt, Homo sapiens
  misc_RNA (1)...(19): siRNA sense strand
cguaacuguugugcuaauu

SEQ ID NO: 1906184 - RNA, 19 nt, Homo sapiens
  misc_RNA (1)...(19): siRNA sense strand
ucgaggacaagaauuuauu

SEQ ID NO: 1906185 - RNA, 19 nt, Homo sapiens
  misc_RNA (1)...(19): siRNA sense strand
ucuaagcuucaaaggaaua

SEQ ID NO: 1906186 - RNA, 19 nt, Homo sapiens
  misc_RNA (1)...(19): siRNA sense strand
ugugggcucugcagaaagu

SEQ ID NO: 1906187 - RNA, 19 nt, Homo sapiens
  misc_RNA (1)...(19): siRNA sense strand
gggaaaauccaccaguaaa

SEQ ID NO: 1906188 - RNA, 19 nt, Homo sapiens
  misc_RNA (1)...(19): siRNA sense strand
gcauuaccuucagcaucaa

SEQ ID NO: 1906189 - RNA, 19 nt, Homo sapiens
  misc_RNA (1)...(19): siRNA sense strand
gggaagauaacacagaaaa

SEQ ID NO: 1906190 - RNA, 19 nt, Homo sapiens
  misc_RNA (1)...(19): siRNA sense strand
aggaaggcauauguuugua

SEQ ID NO: 1906191 - RNA, 19 nt, Homo sapiens
  misc_RNA (1)...(19): siRNA sense strand
gagagcaguaauccaaauc

SEQ ID NO: 1906192 - RNA, 19 nt, Homo sapiens
  misc_RNA (1)...(19): siRNA sense strand
guugugcuaauuacuugua

SEQ ID NO: 1906193 - RNA, 19 nt, Homo sapiens
  misc_RNA (1)...(19): siRNA sense strand
gcaccuaauccaggacuca

SEQ ID NO: 1906194 - RNA, 19 nt, Homo sapiens
  misc_RNA (1)...(19): siRNA sense strand
ucugaagacuuggaaugga

SEQ ID NO: 1906195 - RNA, 19 nt, Homo sapiens
  misc_RNA (1)...(19): siRNA sense strand
cgcaggaaggcauauguuu

SEQ ID NO: 1906196 - RNA, 19 nt, Homo sapiens
  misc_RNA (1)...(19): siRNA sense strand
gaaaacucacuaaauguca

SEQ ID NO: 1906197 - RNA, 19 nt, Homo sapiens
  misc_RNA (1)...(19): siRNA sense strand
acagucacuucuuucaaca

SEQ ID NO: 1906198 - RNA, 19 nt, Homo sapiens
  misc_RNA (1)...(19): siRNA sense strand
augaauauacugagacaga

SEQ ID NO: 1906199 - RNA, 19 nt, Homo sapiens
  misc_RNA (1)...(19): siRNA sense strand
ucuacaacccguuccaguu

SEQ ID NO: 1906200 - RNA, 19 nt, Homo sapiens
  misc_RNA (1)...(19): siRNA sense strand
aaagugaagaauacgauca

SEQ ID NO: 1906201 - RNA, 19 nt, Homo sapiens
  misc_RNA (1)...(19): siRNA sense strand
cagagagcaguaauccaaa

SEQ ID NO: 1906202 - RNA, 19 nt, Homo sapiens
  misc_RNA (1)...(19): siRNA sense strand
cuggauaacccuucuccuu

SEQ ID NO: 1906203 - RNA, 19 nt, Homo sapiens
  misc_RNA (1)...(19): siRNA sense strand
acagaugcauuaccuucag

SEQ ID NO: 1906204 - RNA, 19 nt, Homo sapiens
  misc_RNA (1)...(19): siRNA sense strand
guaccuaucgaggacaaga

SEQ ID NO: 1906205 - RNA, 19 nt, Homo sapiens
  misc_RNA (1)...(19): siRNA sense strand
cuacagucacuucuuucaa

SEQ ID NO: 1906206 - RNA, 19 nt, Homo sapiens
  misc_RNA (1)...(19): siRNA sense strand
uaauugggaagauaacaca

SEQ ID NO: 1906207 - RNA, 19 nt, Homo sapiens
  misc_RNA (1)...(19): siRNA sense strand
cuguugugcuaauuacuug

SEQ ID NO: 1906208 - RNA, 19 nt, Homo sapiens
  misc_RNA (1)...(19): siRNA sense strand
ugaagacuuggaauggaaa

SEQ ID NO: 1906209 - RNA, 19 nt, Homo sapiens
  misc_RNA (1)...(19): siRNA sense strand
auacugagacagaauuaag

SEQ ID NO: 1906210 - RNA, 19 nt, Homo sapiens
  misc_RNA (1)...(19): siRNA sense strand
gaaaagcccuucaaaugua

SEQ ID NO: 1906211 - RNA, 19 nt, Homo sapiens
  misc_RNA (1)...(19): siRNA sense strand
ggaaaguccuucagccaaa

SEQ ID NO: 1906212 - RNA, 19 nt, Homo sapiens
  misc_RNA (1)...(19): siRNA sense strand
ggaaaguccuucagccaaa

SEQ ID NO: 1906213 - RNA, 19 nt, Homo sapiens
  misc_RNA (1)...(19): siRNA sense strand
gauccaaacuuauuacaca

SEQ ID NO: 1906214 - RNA, 19 nt, Homo sapiens
  misc_RNA (1)...(19): siRNA sense strand
ggaaaccucuucagucaca

SEQ ID NO: 1906215 - RNA, 19 nt, Homo sapiens
  misc_RNA (1)...(19): siRNA sense strand
gagaaacccuaugaaugua

SEQ ID NO: 1906216 - RNA, 19 nt, Homo sapiens
  misc_RNA (1)...(19): siRNA sense strand
gaucagagcaaccaguuaa

SEQ ID NO: 1906217 - RNA, 19 nt, Homo sapiens
  misc_RNA (1)...(19): siRNA sense strand
gagagaaaccguacgauug

SEQ ID NO: 1906218 - RNA, 19 nt, Homo sapiens
  misc_RNA (1)...(19): siRNA sense strand
acccagagauccaaacuua

SEQ ID NO: 1906219 - RNA, 19 nt, Homo sapiens
  misc_RNA (1)...(19): siRNA sense strand
gaaaagcccuucgaaugua

SEQ ID NO: 1906220 - RNA, 19 nt, Homo sapiens
  misc_RNA (1)...(19): siRNA sense strand
gggagaagccguacaaaug

SEQ ID NO: 1906221 - RNA, 19 nt, Homo sapiens
  misc_RNA (1)...(19): siRNA sense strand
guacaucagagaauucaua

SEQ ID NO: 1906222 - RNA, 19 nt, Homo sapiens
  misc_RNA (1)...(19): siRNA sense strand
gagagaaacccuaugaaug

SEQ ID NO: 1906223 - RNA, 19 nt, Homo sapiens
  misc_RNA (1)...(19): siRNA sense strand
gaaguaugaccuuguugua

SEQ ID NO: 1906224 - RNA, 19 nt, Homo sapiens
  misc_RNA (1)...(19): siRNA sense strand
gaacagaagccagugcauu

SEQ ID NO: 1906225 - RNA, 19 nt, Homo sapiens
  misc_RNA (1)...(19): siRNA sense strand
ggaaaagccuucaaucgaa

SEQ ID NO: 1906226 - RNA, 19 nt, Homo sapiens
  misc_RNA (1)...(19): siRNA sense strand
gaagaaaagugaugacugu

SEQ ID NO: 1906227 - RNA, 19 nt, Homo sapiens
  misc_RNA (1)...(19): siRNA sense strand
ggagagaaaccguacgauu

SEQ ID NO: 1906228 - RNA, 19 nt, Homo sapiens
  misc_RNA (1)...(19): siRNA sense strand
ccaaagcuaugaguuaguu

SEQ ID NO: 1906229 - RNA, 19 nt, Homo sapiens
  misc_RNA (1)...(19): siRNA sense strand
ggagagaaacccuaugaau

SEQ ID NO: 1906230 - RNA, 19 nt, Homo sapiens
  misc_RNA (1)...(19): siRNA sense strand
ggaaauccuucagauggaa

SEQ ID NO: 1906231 - RNA, 19 nt, Homo sapiens
  misc_RNA (1)...(19): siRNA sense strand
gaaaagcccuaugaaugua

SEQ ID NO: 1906232 - RNA, 19 nt, Homo sapiens
  misc_RNA (1)...(19): siRNA sense strand
ggaaaccuguucugagagu

SEQ ID NO: 1906233 - RNA, 19 nt, Homo sapiens
  misc_RNA (1)...(19): siRNA sense strand
ccaaagcuaucgguuaguu

SEQ ID NO: 1906234 - RNA, 19 nt, Homo sapiens
  misc_RNA (1)...(19): siRNA sense strand
gagaaaagcccuucaaaug

SEQ ID NO: 1906235 - RNA, 19 nt, Homo sapiens
  misc_RNA (1)...(19): siRNA sense strand
ccagagauccaaacuuauu

SEQ ID NO: 1906236 - RNA, 19 nt, Homo sapiens
  misc_RNA (1)...(19): siRNA sense strand
gagaagccaucugugugua

SEQ ID NO: 1906237 - RNA, 19 nt, Homo sapiens
  misc_RNA (1)...(19): siRNA sense strand
gaguaaacuuggaaacguu

SEQ ID NO: 1906238 - RNA, 19 nt, Homo sapiens
  misc_RNA (1)...(19): siRNA sense strand
gaacucuaaccucgucaua

SEQ ID NO: 1906239 - RNA, 19 nt, Homo sapiens
  misc_RNA (1)...(19): siRNA sense strand
ccagaaguaugaccuuguu

SEQ ID NO: 1906240 - RNA, 19 nt, Homo sapiens
  misc_RNA (1)...(19): siRNA sense strand
gagccacccucuuugguau

SEQ ID NO: 1906241 - RNA, 19 nt, Homo sapiens
  misc_RNA (1)...(19): siRNA sense strand
gaacucuaaccucauugua

SEQ ID NO: 1906242 - RNA, 19 nt, Homo sapiens
  misc_RNA (1)...(19): siRNA sense strand
agagaaacccuaugaaugu

SEQ ID NO: 1906243 - RNA, 19 nt, Homo sapiens
  misc_RNA (1)...(19): siRNA sense strand
cgucauacaucagagaauu

SEQ ID NO: 1906244 - RNA, 19 nt, Homo sapiens
  misc_RNA (1)...(19): siRNA sense strand
gggaaauccuucagaugga

SEQ ID NO: 1906245 - RNA, 19 nt, Homo sapiens
  misc_RNA (1)...(19): siRNA sense strand
cagccaaagcuaugaguua

SEQ ID NO: 1906246 - RNA, 19 nt, Homo sapiens
  misc_RNA (1)...(19): siRNA sense strand
gagaaaagcccuaugaaug

SEQ ID NO: 1906247 - RNA, 19 nt, Homo sapiens
  misc_RNA (1)...(19): siRNA sense strand
gaaaauccuucacguggaa

SEQ ID NO: 1906248 - RNA, 19 nt, Homo sapiens
  misc_RNA (1)...(19): siRNA sense strand
ggagagaaaccguaugagu

SEQ ID NO: 1906249 - RNA, 19 nt, Homo sapiens
  misc_RNA (1)...(19): siRNA sense strand
guggaacucuaaccucauu

SEQ ID NO: 1906250 - RNA, 19 nt, Homo sapiens
  misc_RNA (1)...(19): siRNA sense strand
ccuucuaccuacaacauua

SEQ ID NO: 1906251 - RNA, 19 nt, Homo sapiens
  misc_RNA (1)...(19): siRNA sense strand
gugcaucggcggacacaua

SEQ ID NO: 1906252 - RNA, 19 nt, Homo sapiens
  misc_RNA (1)...(19): siRNA sense strand
gcuaugaguuaguuacaca

SEQ ID NO: 1906253 - RNA, 19 nt, Homo sapiens
  misc_RNA (1)...(19): siRNA sense strand
ggagccacccucuuuggua

SEQ ID NO: 1906254 - RNA, 19 nt, Homo sapiens
  misc_RNA (1)...(19): siRNA sense strand
gacacauacuggagagaaa

SEQ ID NO: 1906255 - RNA, 19 nt, Homo sapiens
  misc_RNA (1)...(19): siRNA sense strand
ccaaacuuauuacacauca

SEQ ID NO: 1906256 - RNA, 19 nt, Homo sapiens
  misc_RNA (1)...(19): siRNA sense strand
gagaaaagcccuucgaaug

SEQ ID NO: 1906257 - RNA, 19 nt, Homo sapiens
  misc_RNA (1)...(19): siRNA sense strand
gaagccaucuguguguaau

SEQ ID NO: 1906258 - RNA, 19 nt, Homo sapiens
  misc_RNA (1)...(19): siRNA sense strand
gccacccucuuugguauua

SEQ ID NO: 1906259 - RNA, 19 nt, Homo sapiens
  misc_RNA (1)...(19): siRNA sense strand
ucucucagcuggagcaaga

SEQ ID NO: 1906260 - RNA, 19 nt, Homo sapiens
  misc_RNA (1)...(19): siRNA sense strand
gaauguaacgaguguggaa

SEQ ID NO: 1906261 - RNA, 19 nt, Homo sapiens
  misc_RNA (1)...(19): siRNA sense strand
ggagagaagcccuaugagu

SEQ ID NO: 1906262 - RNA, 19 nt, Homo sapiens
  misc_RNA (1)...(19): siRNA sense strand
ggagagaagcccuaugagu

SEQ ID NO: 1906263 - RNA, 19 nt, Homo sapiens
  misc_RNA (1)...(19): siRNA sense strand
aaucugaugugaucucuca

SEQ ID NO: 1906264 - RNA, 19 nt, Homo sapiens
  misc_RNA (1)...(19): siRNA sense strand
gaaacccuaugaauguagu

SEQ ID NO: 1906265 - RNA, 19 nt, Homo sapiens
  misc_RNA (1)...(19): siRNA sense strand
gagagucugugccuuguac

SEQ ID NO: 1906266 - RNA, 19 nt, Homo sapiens
  misc_RNA (1)...(19): siRNA sense strand
caacauuaccuacaaguac

SEQ ID NO: 1906267 - RNA, 19 nt, Homo sapiens
  misc_RNA (1)...(19): siRNA sense strand
agggaaaccuguucugaga

SEQ ID NO: 1906268 - RNA, 19 nt, Homo sapiens
  misc_RNA (1)...(19): siRNA sense strand
ggacacauacuggagagaa

SEQ ID NO: 1906269 - RNA, 19 nt, Homo sapiens
  misc_RNA (1)...(19): siRNA sense strand
ccaaacuuauuacgcauca

SEQ ID NO: 1906270 - RNA, 19 nt, Homo sapiens
  misc_RNA (1)...(19): siRNA sense strand
guacaaacagaaagaagug

SEQ ID NO: 1906271 - RNA, 19 nt, Homo sapiens
  misc_RNA (1)...(19): siRNA sense strand
gugaugacuguaaggauua

SEQ ID NO: 1906272 - RNA, 19 nt, Homo sapiens
  misc_RNA (1)...(19): siRNA sense strand
gcuccuaccuugugaugca

SEQ ID NO: 1906273 - RNA, 19 nt, Homo sapiens
  misc_RNA (1)...(19): siRNA sense strand
ggauguggcuauggcauuc

SEQ ID NO: 1906274 - RNA, 19 nt, Homo sapiens
  misc_RNA (1)...(19): siRNA sense strand
gaaaguccuucagccaaag

SEQ ID NO: 1906275 - RNA, 19 nt, Homo sapiens
  misc_RNA (1)...(19): siRNA sense strand
gaaaguccuucagccaaag

SEQ ID NO: 1906276 - RNA, 19 nt, Homo sapiens
  misc_RNA (1)...(19): siRNA sense strand
cagagauccaaacuuauua

SEQ ID NO: 1906277 - RNA, 19 nt, Homo sapiens
  misc_RNA (1)...(19): siRNA sense strand
cagccaaagcuaucgguua

SEQ ID NO: 1906278 - RNA, 19 nt, Homo sapiens
  misc_RNA (1)...(19): siRNA sense strand
ucgguuaguugcacauaaa

SEQ ID NO: 1906279 - RNA, 19 nt, Homo sapiens
  misc_RNA (1)...(19): siRNA sense strand
ucucuaccuucuacuuuaa

SEQ ID NO: 1906280 - RNA, 19 nt, Homo sapiens
  misc_RNA (1)...(19): siRNA sense strand
gagaagccguacaaaugca

SEQ ID NO: 1906281 - RNA, 19 nt, Homo sapiens
  misc_RNA (1)...(19): siRNA sense strand
gaggagaauggguugaauu

SEQ ID NO: 1906282 - RNA, 19 nt, Homo sapiens
  misc_RNA (1)...(19): siRNA sense strand
caucagagaauucauacug

SEQ ID NO: 1906283 - RNA, 19 nt, Homo sapiens
  misc_RNA (1)...(19): siRNA sense strand
ggacacacacuggagagaa

SEQ ID NO: 1906284 - RNA, 19 nt, Homo sapiens
  misc_RNA (1)...(19): siRNA sense strand
caucagagaauucauacug

SEQ ID NO: 1906285 - RNA, 19 nt, Homo sapiens
  misc_RNA (1)...(19): siRNA sense strand
ggacacacacuggagagaa

SEQ ID NO: 1906286 - RNA, 19 nt, Homo sapiens
  misc_RNA (1)...(19): siRNA sense strand
ccuacaacauuaccuacaa

SEQ ID NO: 1906287 - RNA, 19 nt, Homo sapiens
  misc_RNA (1)...(19): siRNA sense strand
uaagggaacaccaggagaa

SEQ ID NO: 1906288 - RNA, 19 nt, Homo sapiens
  misc_RNA (1)...(19): siRNA sense strand
ugagaaaccuuuugagugu

SEQ ID NO: 1906289 - RNA, 19 nt, Homo sapiens
  misc_RNA (1)...(19): siRNA sense strand
gaaaagugaugacuguaag

SEQ ID NO: 1906290 - RNA, 19 nt, Homo sapiens
  misc_RNA (1)...(19): siRNA sense strand
agugaugacuguaaggauu

SEQ ID NO: 1906291 - RNA, 19 nt, Homo sapiens
  misc_RNA (1)...(19): siRNA sense strand
ggagaagccguacaaaugc

SEQ ID NO: 1906292 - RNA, 19 nt, Homo sapiens
  misc_RNA (1)...(19): siRNA sense strand
gagaacacacacuggagaa

SEQ ID NO: 1906293 - RNA, 19 nt, Homo sapiens
  misc_RNA (1)...(19): siRNA sense strand
caaguacagguuucccuaa

SEQ ID NO: 1906294 - RNA, 19 nt, Homo sapiens
  misc_RNA (1)...(19): siRNA sense strand
acucuaaccucgucauaca

SEQ ID NO: 1906295 - RNA, 19 nt, Homo sapiens
  misc_RNA (1)...(19): siRNA sense strand
gacuguaacaucauacuga

SEQ ID NO: 1906296 - RNA, 19 nt, Homo sapiens
  misc_RNA (1)...(19): siRNA sense strand
aacagaagccagugcauuu

SEQ ID NO: 1906297 - RNA, 19 nt, Homo sapiens
  misc_RNA (1)...(19): siRNA sense strand
gugacucucucaacuaugg

SEQ ID NO: 1906298 - RNA, 19 nt, Homo sapiens
  misc_RNA (1)...(19): siRNA sense strand
guuauucucuaccuucuac

SEQ ID NO: 1906299 - RNA, 19 nt, Homo sapiens
  misc_RNA (1)...(19): siRNA sense strand
gacacacacuggagagaag

SEQ ID NO: 1906300 - RNA, 19 nt, Homo sapiens
  misc_RNA (1)...(19): siRNA sense strand
cauuguacaucagagaauu

SEQ ID NO: 1906301 - RNA, 19 nt, Homo sapiens
  misc_RNA (1)...(19): siRNA sense strand
gacacacacuggagagaag

SEQ ID NO: 1906302 - RNA, 19 nt, Homo sapiens
  misc_RNA (1)...(19): siRNA sense strand
ccagagcuaugaccuuguc

SEQ ID NO: 1906303 - RNA, 19 nt, Homo sapiens
  misc_RNA (1)...(19): siRNA sense strand
cuggagaccugggagcaua

SEQ ID NO: 1906304 - RNA, 19 nt, Homo sapiens
  misc_RNA (1)...(19): siRNA sense strand
ggaacauugugagcuugaa

SEQ ID NO: 1906305 - RNA, 19 nt, Homo sapiens
  misc_RNA (1)...(19): siRNA sense strand
cuucaaauguacucagugu

SEQ ID NO: 1906306 - RNA, 19 nt, Homo sapiens
  misc_RNA (1)...(19): siRNA sense strand
gaccuugucauacaucaga

SEQ ID NO: 1906307 - RNA, 19 nt, Homo sapiens
  misc_RNA (1)...(19): siRNA sense strand
uuccaaaucugaugugauc

SEQ ID NO: 1906308 - RNA, 19 nt, Homo sapiens
  misc_RNA (1)...(19): siRNA sense strand
acucuaaccucauuguaca

SEQ ID NO: 1906309 - RNA, 19 nt, Homo sapiens
  misc_RNA (1)...(19): siRNA sense strand
aguaugaccuuguuguaca

SEQ ID NO: 1906310 - RNA, 19 nt, Homo sapiens
  misc_RNA (1)...(19): siRNA sense strand
ggaaucaucuguagcgaaa

SEQ ID NO: 1906311 - RNA, 19 nt, Homo sapiens
  misc_RNA (1)...(19): siRNA sense strand
guggaaguaugaacauuua

SEQ ID NO: 1906312 - RNA, 19 nt, Homo sapiens
  misc_RNA (1)...(19): siRNA sense strand
gcgcaggauuucuauaauu

SEQ ID NO: 1906313 - RNA, 19 nt, Homo sapiens
  misc_RNA (1)...(19): siRNA sense strand
gcaccaaggcgcaggauuu

SEQ ID NO: 1906314 - RNA, 19 nt, Homo sapiens
  misc_RNA (1)...(19): siRNA sense strand
ccagauacuugcacucaaa

SEQ ID NO: 1906315 - RNA, 19 nt, Homo sapiens
  misc_RNA (1)...(19): siRNA sense strand
gaagguguguggaaguaug

SEQ ID NO: 1906316 - RNA, 19 nt, Homo sapiens
  misc_RNA (1)...(19): siRNA sense strand
gaugaauccuuugaugaaa

SEQ ID NO: 1906317 - RNA, 19 nt, Homo sapiens
  misc_RNA (1)...(19): siRNA sense strand
gaaauggacaguacacuag

SEQ ID NO: 1906318 - RNA, 19 nt, Homo sapiens
  misc_RNA (1)...(19): siRNA sense strand
uaaauggacuugcugucaa

SEQ ID NO: 1906319 - RNA, 19 nt, Homo sapiens
  misc_RNA (1)...(19): siRNA sense strand
gacagcaacugaacaaugg

SEQ ID NO: 1906320 - RNA, 19 nt, Homo sapiens
  misc_RNA (1)...(19): siRNA sense strand
cagaauauuucacaugcuu

SEQ ID NO: 1906321 - RNA, 19 nt, Homo sapiens
  misc_RNA (1)...(19): siRNA sense strand
gaacauaagagcagauugc

SEQ ID NO: 1906322 - RNA, 19 nt, Homo sapiens
  misc_RNA (1)...(19): siRNA sense strand
gaaacuaggaucaguaugc

SEQ ID NO: 1906323 - RNA, 19 nt, Homo sapiens
  misc_RNA (1)...(19): siRNA sense strand
gauacuugcacucaaauga

SEQ ID NO: 1906324 - RNA, 19 nt, Homo sapiens
  misc_RNA (1)...(19): siRNA sense strand
gcaacugaacaauggauuu

SEQ ID NO: 1906325 - RNA, 19 nt, Homo sapiens
  misc_RNA (1)...(19): siRNA sense strand
ugucaucgguuuacuaagu

SEQ ID NO: 1906326 - RNA, 19 nt, Homo sapiens
  misc_RNA (1)...(19): siRNA sense strand
ccaaggcgcaggauuucua

SEQ ID NO: 1906327 - RNA, 19 nt, Homo sapiens
  misc_RNA (1)...(19): siRNA sense strand
cgcaggauuucuauaauug

SEQ ID NO: 1906328 - RNA, 19 nt, Homo sapiens
  misc_RNA (1)...(19): siRNA sense strand
cauaaaggaaucaucugua

SEQ ID NO: 1906329 - RNA, 19 nt, Homo sapiens
  misc_RNA (1)...(19): siRNA sense strand
ugaaauggacaguacacua

SEQ ID NO: 1906330 - RNA, 19 nt, Homo sapiens
  misc_RNA (1)...(19): siRNA sense strand
cguaggauuuacagaauau

SEQ ID NO: 1906331 - RNA, 19 nt, Homo sapiens
  misc_RNA (1)...(19): siRNA sense strand
aaauggacuugcugucaaa

SEQ ID NO: 1906332 - RNA, 19 nt, Homo sapiens
  misc_RNA (1)...(19): siRNA sense strand
auaaaggaaucaucuguag

SEQ ID NO: 1906333 - RNA, 19 nt, Homo sapiens
  misc_RNA (1)...(19): siRNA sense strand
ucaguaugccguaggauuu

SEQ ID NO: 1906334 - RNA, 19 nt, Homo sapiens
  misc_RNA (1)...(19): siRNA sense strand
ugaauccuuugaugaaaug

SEQ ID NO: 1906335 - RNA, 19 nt, Homo sapiens
  misc_RNA (1)...(19): siRNA sense strand
gcauaaaggaaucaucugu

SEQ ID NO: 1906336 - RNA, 19 nt, Homo sapiens
  misc_RNA (1)...(19): siRNA sense strand
cggcagauauuugaugaau

SEQ ID NO: 1906337 - RNA, 19 nt, Homo sapiens
  misc_RNA (1)...(19): siRNA sense strand
gccguaggauuuacagaau

SEQ ID NO: 1906338 - RNA, 19 nt, Homo sapiens
  misc_RNA (1)...(19): siRNA sense strand
caucaucggcagauauuug

SEQ ID NO: 1906339 - RNA, 19 nt, Homo sapiens
  misc_RNA (1)...(19): siRNA sense strand
ugaugaauccuuugaugaa

SEQ ID NO: 1906340 - RNA, 19 nt, Homo sapiens
  misc_RNA (1)...(19): siRNA sense strand
ccguaggauuuacagaaua

SEQ ID NO: 1906341 - RNA, 19 nt, Homo sapiens
  misc_RNA (1)...(19): siRNA sense strand
ggaaguaugaacauuuaag

SEQ ID NO: 1906342 - RNA, 19 nt, Homo sapiens
  misc_RNA (1)...(19): siRNA sense strand
ccugaugaauccuuugaug

SEQ ID NO: 1906343 - RNA, 19 nt, Homo sapiens
  misc_RNA (1)...(19): siRNA sense strand
ggaucaguaugccguagga

SEQ ID NO: 1906344 - RNA, 19 nt, Homo sapiens
  misc_RNA (1)...(19): siRNA sense strand
ugacagcaacugaacaaug

SEQ ID NO: 1906345 - RNA, 19 nt, Homo sapiens
  misc_RNA (1)...(19): siRNA sense strand
ucaaaugacagcaacugaa

SEQ ID NO: 1906346 - RNA, 19 nt, Homo sapiens
  misc_RNA (1)...(19): siRNA sense strand
gcgaaacuaggaucaguau

SEQ ID NO: 1906347 - RNA, 19 nt, Homo sapiens
  misc_RNA (1)...(19): siRNA sense strand
cagcaggguuagcauaaag

SEQ ID NO: 1906348 - RNA, 19 nt, Homo sapiens
  misc_RNA (1)...(19): siRNA sense strand
gaaguaugaacauuuaagg

SEQ ID NO: 1906349 - RNA, 19 nt, Homo sapiens
  misc_RNA (1)...(19): siRNA sense strand
ccagcaggguuagcauaaa

SEQ ID NO: 1906350 - RNA, 19 nt, Homo sapiens
  misc_RNA (1)...(19): siRNA sense strand
ccaaaagaguguccugcua

SEQ ID NO: 1906351 - RNA, 19 nt, Homo sapiens
  misc_RNA (1)...(19): siRNA sense strand
aaaagaguguccugcuaua

SEQ ID NO: 1906352 - RNA, 19 nt, Homo sapiens
  misc_RNA (1)...(19): siRNA sense strand
ggugcugcauguccucuga

SEQ ID NO: 1906353 - RNA, 19 nt, Homo sapiens
  misc_RNA (1)...(19): siRNA sense strand
cauguccucugaauagcaa

SEQ ID NO: 1906354 - RNA, 19 nt, Homo sapiens
  misc_RNA (1)...(19): siRNA sense strand
ggacuugcugucaaacuuc

SEQ ID NO: 1906355 - RNA, 19 nt, Homo sapiens
  misc_RNA (1)...(19): siRNA sense strand
gcuccaauauugacaaaau

SEQ ID NO: 1906356 - RNA, 19 nt, Homo sapiens
  misc_RNA (1)...(19): siRNA sense strand
gucaucgguuuacuaaguu

SEQ ID NO: 1906357 - RNA, 19 nt, Homo sapiens
  misc_RNA (1)...(19): siRNA sense strand
uaauuggccugaugaaucc

SEQ ID NO: 1906358 - RNA, 19 nt, Homo sapiens
  misc_RNA (1)...(19): siRNA sense strand
caacaguauauucaacaga

SEQ ID NO: 1906359 - RNA, 19 nt, Homo sapiens
  misc_RNA (1)...(19): siRNA sense strand
caaaugacagcaacugaac

SEQ ID NO: 1906360 - RNA, 19 nt, Homo sapiens
  misc_RNA (1)...(19): siRNA sense strand
ugaaugccauccagauacu

SEQ ID NO: 1906361 - RNA, 19 nt, Homo sapiens
  misc_RNA (1)...(19): siRNA sense strand
guucaacaguauauucaac

SEQ ID NO: 1906362 - RNA, 19 nt, Homo sapiens
  misc_RNA (1)...(19): siRNA sense strand
ggcgcaggauuucuauaau

SEQ ID NO: 1906363 - RNA, 19 nt, Homo sapiens
  misc_RNA (1)...(19): siRNA sense strand
auaauuggccugaugaauc

SEQ ID NO: 1906364 - RNA, 19 nt, Homo sapiens
  misc_RNA (1)...(19): siRNA sense strand
caguaugccguaggauuua

SEQ ID NO: 1906365 - RNA, 19 nt, Homo sapiens
  misc_RNA (1)...(19): siRNA sense strand
uauacuagacacacacuug

SEQ ID NO: 1906366 - RNA, 19 nt, Homo sapiens
  misc_RNA (1)...(19): siRNA sense strand
cuaaauggacuugcuguca

SEQ ID NO: 1906367 - RNA, 19 nt, Homo sapiens
  misc_RNA (1)...(19): siRNA sense strand
cugucaaacuucagaguga

SEQ ID NO: 1906368 - RNA, 19 nt, Homo sapiens
  misc_RNA (1)...(19): siRNA sense strand
uggacuugcugucaaacuu

SEQ ID NO: 1906369 - RNA, 19 nt, Homo sapiens
  misc_RNA (1)...(19): siRNA sense strand
agacuauacuagacacaca

SEQ ID NO: 1906370 - RNA, 19 nt, Homo sapiens
  misc_RNA (1)...(19): siRNA sense strand
cugcauguccucugaauag

SEQ ID NO: 1906371 - RNA, 19 nt, Homo sapiens
  misc_RNA (1)...(19): siRNA sense strand
aggcgcaggauuucuauaa

SEQ ID NO: 1906372 - RNA, 19 nt, Homo sapiens
  misc_RNA (1)...(19): siRNA sense strand
uagcgaaacuaggaucagu

SEQ ID NO: 1906373 - RNA, 19 nt, Homo sapiens
  misc_RNA (1)...(19): siRNA sense strand
ucauaaaacuccaaaagag

SEQ ID NO: 1906374 - RNA, 19 nt, Homo sapiens
  misc_RNA (1)...(19): siRNA sense strand
augaagguguguggaagua

SEQ ID NO: 1906375 - RNA, 19 nt, Homo sapiens
  misc_RNA (1)...(19): siRNA sense strand
aagaguguccugcuauaga

SEQ ID NO: 1906376 - RNA, 19 nt, Homo sapiens
  misc_RNA (1)...(19): siRNA sense strand
gacuugcugucaaacuuca

SEQ ID NO: 1906377 - RNA, 19 nt, Homo sapiens
  misc_RNA (1)...(19): siRNA sense strand
uguggaaguaugaacauuu

SEQ ID NO: 1906378 - RNA, 19 nt, Homo sapiens
  misc_RNA (1)...(19): siRNA sense strand
ugugucaucgguuuacuaa

SEQ ID NO: 1906379 - RNA, 19 nt, Homo sapiens
  misc_RNA (1)...(19): siRNA sense strand
uagcauaaaggaaucaucu

SEQ ID NO: 1906380 - RNA, 19 nt, Homo sapiens
  misc_RNA (1)...(19): siRNA sense strand
uugaugaaauggacaguac

SEQ ID NO: 1906381 - RNA, 19 nt, Homo sapiens
  misc_RNA (1)...(19): siRNA sense strand
caaaagaguguccugcuau

SEQ ID NO: 1906382 - RNA, 19 nt, Homo sapiens
  misc_RNA (1)...(19): siRNA sense strand
gcaggguuagcauaaagga

SEQ ID NO: 1906383 - RNA, 19 nt, Homo sapiens
  misc_RNA (1)...(19): siRNA sense strand
guucugccuugagcuaaau

SEQ ID NO: 1906384 - RNA, 19 nt, Homo sapiens
  misc_RNA (1)...(19): siRNA sense strand
ucaucgguuuacuaaguuu

SEQ ID NO: 1906385 - RNA, 19 nt, Homo sapiens
  misc_RNA (1)...(19): siRNA sense strand
cagaacauaagagcagauu

SEQ ID NO: 1906386 - RNA, 19 nt, Homo sapiens
  misc_RNA (1)...(19): siRNA sense strand
aaucaucuguagcgaaacu

SEQ ID NO: 1906387 - RNA, 19 nt, Homo sapiens
  misc_RNA (1)...(19): siRNA sense strand
gaugaagguguguggaagu

SEQ ID NO: 1906388 - RNA, 19 nt, Homo sapiens
  misc_RNA (1)...(19): siRNA sense strand
caccugaaggccaagauga

SEQ ID NO: 1906389 - RNA, 19 nt, Homo sapiens
  misc_RNA (1)...(19): siRNA sense strand
caacugaacaauggauuuu

SEQ ID NO: 1906390 - RNA, 19 nt, Homo sapiens
  misc_RNA (1)...(19): siRNA sense strand
agugaaugccauccagaua

SEQ ID NO: 1906391 - RNA, 19 nt, Homo sapiens
  misc_RNA (1)...(19): siRNA sense strand
gagugaaugccauccagau

SEQ ID NO: 1906392 - RNA, 19 nt, Homo sapiens
  misc_RNA (1)...(19): siRNA sense strand
gugaaugccauccagauac

SEQ ID NO: 1906393 - RNA, 19 nt, Homo sapiens
  misc_RNA (1)...(19): siRNA sense strand
cugaugaauccuuugauga

SEQ ID NO: 1906394 - RNA, 19 nt, Homo sapiens
  misc_RNA (1)...(19): siRNA sense strand
ugacaaaauucuugaacca

SEQ ID NO: 1906395 - RNA, 19 nt, Homo sapiens
  misc_RNA (1)...(19): siRNA sense strand
ggccugaugaauccuuuga

SEQ ID NO: 1906396 - RNA, 19 nt, Homo sapiens
  misc_RNA (1)...(19): siRNA sense strand
caaggcgcaggauuucuau

SEQ ID NO: 1906397 - RNA, 19 nt, Homo sapiens
  misc_RNA (1)...(19): siRNA sense strand
ccucugaauagcaauaaau

SEQ ID NO: 1906398 - RNA, 19 nt, Homo sapiens
  misc_RNA (1)...(19): siRNA sense strand
auacuagacacacacuuga

SEQ ID NO: 1906399 - RNA, 19 nt, Homo sapiens
  misc_RNA (1)...(19): siRNA sense strand
guguggaaguaugaacauu

SEQ ID NO: 1906400 - RNA, 19 nt, Homo sapiens
  misc_RNA (1)...(19): siRNA sense strand
ucaacaguauauucaacag

SEQ ID NO: 1906401 - RNA, 19 nt, Homo sapiens
  misc_RNA (1)...(19): siRNA sense strand
ggguuagcauaaaggaauc

SEQ ID NO: 1906402 - RNA, 19 nt, Homo sapiens
  misc_RNA (1)...(19): siRNA sense strand
cccagcaggguuagcauaa

SEQ ID NO: 1906403 - RNA, 19 nt, Homo sapiens
  misc_RNA (1)...(19): siRNA sense strand
gcugcauguccucugaaua

SEQ ID NO: 1906404 - RNA, 19 nt, Homo sapiens
  misc_RNA (1)...(19): siRNA sense strand
aaugacagcaacugaacaa

SEQ ID NO: 1906405 - RNA, 19 nt, Homo sapiens
  misc_RNA (1)...(19): siRNA sense strand
aagaugaagguguguggaa

SEQ ID NO: 1906406 - RNA, 19 nt, Homo sapiens
  misc_RNA (1)...(19): siRNA sense strand
uacuugcacucaaaugaca

SEQ ID NO: 1906407 - RNA, 19 nt, Homo sapiens
  misc_RNA (1)...(19): siRNA sense strand
gcaggaaccuaucuuggua

SEQ ID NO: 1906408 - RNA, 19 nt, Homo sapiens
  misc_RNA (1)...(19): siRNA sense strand
gcaccuuccuggccucuuu

SEQ ID NO: 1906409 - RNA, 19 nt, Homo sapiens
  misc_RNA (1)...(19): siRNA sense strand
caaaugaccacagcagcuu

SEQ ID NO: 1906410 - RNA, 19 nt, Homo sapiens
  misc_RNA (1)...(19): siRNA sense strand
aggaaccuaucuugguaaa

SEQ ID NO: 1906411 - RNA, 19 nt, Homo sapiens
  misc_RNA (1)...(19): siRNA sense strand
ugugggugcuuccugcauu

SEQ ID NO: 1906412 - RNA, 19 nt, Homo sapiens
  misc_RNA (1)...(19): siRNA sense strand
cuucagguguggcccuuau

SEQ ID NO: 1906413 - RNA, 19 nt, Homo sapiens
  misc_RNA (1)...(19): siRNA sense strand
gugggugcuuccugcauug

SEQ ID NO: 1906414 - RNA, 19 nt, Homo sapiens
  misc_RNA (1)...(19): siRNA sense strand
ccuggcaccuggacuccuu

SEQ ID NO: 1906415 - RNA, 19 nt, Homo sapiens
  misc_RNA (1)...(19): siRNA sense strand
caggaaccuaucuugguaa

SEQ ID NO: 1906416 - RNA, 19 nt, Homo sapiens
  misc_RNA (1)...(19): siRNA sense strand
gaacucaaguccaagaaau

SEQ ID NO: 1906417 - RNA, 19 nt, Homo sapiens
  misc_RNA (1)...(19): siRNA sense strand
caaagaagaggcccaagaa

SEQ ID NO: 1906418 - RNA, 19 nt, Homo sapiens
  misc_RNA (1)...(19): siRNA sense strand
agaaggaacucaaguccaa

SEQ ID NO: 1906419 - RNA, 19 nt, Homo sapiens
  misc_RNA (1)...(19): siRNA sense strand
aaacagugccugcaauaaa

SEQ ID NO: 1906420 - RNA, 19 nt, Homo sapiens
  misc_RNA (1)...(19): siRNA sense strand
gcaaagaagaggcccaaga

SEQ ID NO: 1906421 - RNA, 19 nt, Homo sapiens
  misc_RNA (1)...(19): siRNA sense strand
gaaauucacgagucuacaa

SEQ ID NO: 1906422 - RNA, 19 nt, Homo sapiens
  misc_RNA (1)...(19): siRNA sense strand
gcaaugccacggaaagaaa

SEQ ID NO: 1906423 - RNA, 19 nt, Homo sapiens
  misc_RNA (1)...(19): siRNA sense strand
gagcggaaccgucugagaa

SEQ ID NO: 1906424 - RNA, 19 nt, Homo sapiens
  misc_RNA (1)...(19): siRNA sense strand
gcucaguguuccaaagauu

SEQ ID NO: 1906425 - RNA, 19 nt, Homo sapiens
  misc_RNA (1)...(19): siRNA sense strand
aggaauggguggcgaaauu

SEQ ID NO: 1906426 - RNA, 19 nt, Homo sapiens
  misc_RNA (1)...(19): siRNA sense strand
gcauauagagccugagguu

SEQ ID NO: 1906427 - RNA, 19 nt, Homo sapiens
  misc_RNA (1)...(19): siRNA sense strand
cagcaggguuuccaagaug

SEQ ID NO: 1906428 - RNA, 19 nt, Homo sapiens
  misc_RNA (1)...(19): siRNA sense strand
gaaaacagugccugcaaua

SEQ ID NO: 1906429 - RNA, 19 nt, Homo sapiens
  misc_RNA (1)...(19): siRNA sense strand
caagaugcaagaugagaaa

SEQ ID NO: 1906430 - RNA, 19 nt, Homo sapiens
  misc_RNA (1)...(19): siRNA sense strand
cgagucaucuucauuaagc

SEQ ID NO: 1906431 - RNA, 19 nt, Homo sapiens
  misc_RNA (1)...(19): siRNA sense strand
gaugcaagaugagaaacug

SEQ ID NO: 1906432 - RNA, 19 nt, Homo sapiens
  misc_RNA (1)...(19): siRNA sense strand
auucacgagucuacaaaua

SEQ ID NO: 1906433 - RNA, 19 nt, Homo sapiens
  misc_RNA (1)...(19): siRNA sense strand
ggaacucaaguccaagaaa

SEQ ID NO: 1906434 - RNA, 19 nt, Homo sapiens
  misc_RNA (1)...(19): siRNA sense strand
uuuccaagaugcaagauga

SEQ ID NO: 1906435 - RNA, 19 nt, Homo sapiens
  misc_RNA (1)...(19): siRNA sense strand
acucaaguccaagaaauua

SEQ ID NO: 1906436 - RNA, 19 nt, Homo sapiens
  misc_RNA (1)...(19): siRNA sense strand
ggaaagaaaagcauauaga

SEQ ID NO: 1906437 - RNA, 19 nt, Homo sapiens
  misc_RNA (1)...(19): siRNA sense strand
ggaaaacagugccugcaau

SEQ ID NO: 1906438 - RNA, 19 nt, Homo sapiens
  misc_RNA (1)...(19): siRNA sense strand
cagagcagccugugagcaa

SEQ ID NO: 1906439 - RNA, 19 nt, Homo sapiens
  misc_RNA (1)...(19): siRNA sense strand
ggaugaggaacaaggagaa

SEQ ID NO: 1906440 - RNA, 19 nt, Homo sapiens
  misc_RNA (1)...(19): siRNA sense strand
uccaagaacugcauaagcu

SEQ ID NO: 1906441 - RNA, 19 nt, Homo sapiens
  misc_RNA (1)...(19): siRNA sense strand
cccaagaacagcaggguuu

SEQ ID NO: 1906442 - RNA, 19 nt, Homo sapiens
  misc_RNA (1)...(19): siRNA sense strand
aagaagaggcccaagaaca

SEQ ID NO: 1906443 - RNA, 19 nt, Homo sapiens
  misc_RNA (1)...(19): siRNA sense strand
cccgagucaucuucauuaa

SEQ ID NO: 1906444 - RNA, 19 nt, Homo sapiens
  misc_RNA (1)...(19): siRNA sense strand
gaaagaaaagcauauagag

SEQ ID NO: 1906445 - RNA, 19 nt, Homo sapiens
  misc_RNA (1)...(19): siRNA sense strand
ccaagaugcaagaugagaa

SEQ ID NO: 1906446 - RNA, 19 nt, Homo sapiens
  misc_RNA (1)...(19): siRNA sense strand
ucacuugaaaugccuaugu

SEQ ID NO: 1906447 - RNA, 19 nt, Homo sapiens
  misc_RNA (1)...(19): siRNA sense strand
acagcaggguuuccaagau

SEQ ID NO: 1906448 - RNA, 19 nt, Homo sapiens
  misc_RNA (1)...(19): siRNA sense strand
ucaaguccaagaaauuaga

SEQ ID NO: 1906449 - RNA, 19 nt, Homo sapiens
  misc_RNA (1)...(19): siRNA sense strand
caaaagguguuggcauuca

SEQ ID NO: 1906450 - RNA, 19 nt, Homo sapiens
  misc_RNA (1)...(19): siRNA sense strand
aaacuugucgcucuugaag

SEQ ID NO: 1906451 - RNA, 19 nt, Homo sapiens
  misc_RNA (1)...(19): siRNA sense strand
gaaacugcgggacgagaca

SEQ ID NO: 1906452 - RNA, 19 nt, Homo sapiens
  misc_RNA (1)...(19): siRNA sense strand
gaugaggaacaaggagaaa

SEQ ID NO: 1906453 - RNA, 19 nt, Homo sapiens
  misc_RNA (1)...(19): siRNA sense strand
agucagggaugaggaacaa

SEQ ID NO: 1906454 - RNA, 19 nt, Homo sapiens
  misc_RNA (1)...(19): siRNA sense strand
ggaggaauggguggcgaaa

SEQ ID NO: 1906455 - RNA, 19 nt, Homo sapiens
  misc_RNA (1)...(19): siRNA sense strand
caggugcagucagggauga

SEQ ID NO: 1906456 - RNA, 19 nt, Homo sapiens
  misc_RNA (1)...(19): siRNA sense strand
augaagaguuccaggagau

SEQ ID NO: 1906457 - RNA, 19 nt, Homo sapiens
  misc_RNA (1)...(19): siRNA sense strand
agaagaggcccaagaacag

SEQ ID NO: 1906458 - RNA, 19 nt, Homo sapiens
  misc_RNA (1)...(19): siRNA sense strand
cacuugaaaugccuaugug

SEQ ID NO: 1906459 - RNA, 19 nt, Homo sapiens
  misc_RNA (1)...(19): siRNA sense strand
ccugugagcaaaguaauug

SEQ ID NO: 1906460 - RNA, 19 nt, Homo sapiens
  misc_RNA (1)...(19): siRNA sense strand
aacagugccugcaauaaaa

SEQ ID NO: 1906461 - RNA, 19 nt, Homo sapiens
  misc_RNA (1)...(19): siRNA sense strand
ggauccaagaacugcauaa

SEQ ID NO: 1906462 - RNA, 19 nt, Homo sapiens
  misc_RNA (1)...(19): siRNA sense strand
gcgaaauucacgagucuac

SEQ ID NO: 1906463 - RNA, 19 nt, Homo sapiens
  misc_RNA (1)...(19): siRNA sense strand
gaucgcgccaucagcugaa

SEQ ID NO: 1906464 - RNA, 19 nt, Homo sapiens
  misc_RNA (1)...(19): siRNA sense strand
cgucugagaacgguguuaa

SEQ ID NO: 1906465 - RNA, 19 nt, Homo sapiens
  misc_RNA (1)...(19): siRNA sense strand
cagccugugagcaaaguaa

SEQ ID NO: 1906466 - RNA, 19 nt, Homo sapiens
  misc_RNA (1)...(19): siRNA sense strand
aaauucacgagucuacaaa

SEQ ID NO: 1906467 - RNA, 19 nt, Homo sapiens
  misc_RNA (1)...(19): siRNA sense strand
gauccaagaacugcauaag

SEQ ID NO: 1906468 - RNA, 19 nt, Homo sapiens
  misc_RNA (1)...(19): siRNA sense strand
uucacgagucuacaaauaa

SEQ ID NO: 1906469 - RNA, 19 nt, Homo sapiens
  misc_RNA (1)...(19): siRNA sense strand
uggcgaaauucacgagucu

SEQ ID NO: 1906470 - RNA, 19 nt, Homo sapiens
  misc_RNA (1)...(19): siRNA sense strand
agagcagccugugagcaaa

SEQ ID NO: 1906471 - RNA, 19 nt, Homo sapiens
  misc_RNA (1)...(19): siRNA sense strand
caacaucucugcuuccuaa

SEQ ID NO: 1906472 - RNA, 19 nt, Homo sapiens
  misc_RNA (1)...(19): siRNA sense strand
aaccauagcuccacuguga

SEQ ID NO: 1906473 - RNA, 19 nt, Homo sapiens
  misc_RNA (1)...(19): siRNA sense strand
cuaagaacauuuccauaga

SEQ ID NO: 1906474 - RNA, 19 nt, Homo sapiens
  misc_RNA (1)...(19): siRNA sense strand
caacggcacucacaacaac

SEQ ID NO: 1906475 - RNA, 19 nt, Homo sapiens
  misc_RNA (1)...(19): siRNA sense strand
caucucugcuuccuaagaa

SEQ ID NO: 1906476 - RNA, 19 nt, Homo sapiens
  misc_RNA (1)...(19): siRNA sense strand
ggaguccacuuaacaacca

SEQ ID NO: 1906477 - RNA, 19 nt, Homo sapiens
  misc_RNA (1)...(19): siRNA sense strand
uaagaacauuuccauagag

SEQ ID NO: 1906478 - RNA, 19 nt, Homo sapiens
  misc_RNA (1)...(19): siRNA sense strand
caggcaaagugauguguga

SEQ ID NO: 1906479 - RNA, 19 nt, Homo sapiens
  misc_RNA (1)...(19): siRNA sense strand
caucagcuccuuugucugu

SEQ ID NO: 1906480 - RNA, 19 nt, Homo sapiens
  misc_RNA (1)...(19): siRNA sense strand
ccuaagaacauuuccauag

SEQ ID NO: 1906481 - RNA, 19 nt, Homo sapiens
  misc_RNA (1)...(19): siRNA sense strand
ggagacaccaccaccuuuc

SEQ ID NO: 1906482 - RNA, 19 nt, Homo sapiens
  misc_RNA (1)...(19): siRNA sense strand
uacaucagcuccuuugucu

SEQ ID NO: 1906483 - RNA, 19 nt, Homo sapiens
  misc_RNA (1)...(19): siRNA sense strand
ugugugagcucauagacau

SEQ ID NO: 1906484 - RNA, 19 nt, Homo sapiens
  misc_RNA (1)...(19): siRNA sense strand
ucagcuccuuugucuguuu

SEQ ID NO: 1906485 - RNA, 19 nt, Homo sapiens
  misc_RNA (1)...(19): siRNA sense strand
gagaucaccagcccagguu

SEQ ID NO: 1906486 - RNA, 19 nt, Homo sapiens
  misc_RNA (1)...(19): siRNA sense strand
gauggaggguacagagucu

SEQ ID NO: 1906487 - RNA, 19 nt, Homo sapiens
  misc_RNA (1)...(19): siRNA sense strand
guccagcucugaccacaca

SEQ ID NO: 1906488 - RNA, 19 nt, Homo sapiens
  misc_RNA (1)...(19): siRNA sense strand
cgacuaccaucuggacuag

SEQ ID NO: 1906489 - RNA, 19 nt, Homo sapiens
  misc_RNA (1)...(19): siRNA sense strand
gaagcaggcguggcagcua

SEQ ID NO: 1906490 - RNA, 19 nt, Homo sapiens
  misc_RNA (1)...(19): siRNA sense strand
aagaacauuuccauagagu

SEQ ID NO: 1906491 - RNA, 19 nt, Homo sapiens
  misc_RNA (1)...(19): siRNA sense strand
agugaugugugagcucaua

SEQ ID NO: 1906492 - RNA, 19 nt, Homo sapiens
  misc_RNA (1)...(19): siRNA sense strand
cuguuucucuuccgacaaa

SEQ ID NO: 1906493 - RNA, 19 nt, Homo sapiens
  misc_RNA (1)...(19): siRNA sense strand
gggaaggcacaaacacaga

SEQ ID NO: 1906494 - RNA, 19 nt, Homo sapiens
  misc_RNA (1)...(19): siRNA sense strand
aaacacugaugcagacacu

SEQ ID NO: 1906495 - RNA, 19 nt, Homo sapiens
  misc_RNA (1)...(19): siRNA sense strand
gcucccaguuacagcauca

SEQ ID NO: 1906496 - RNA, 19 nt, Homo sapiens
  misc_RNA (1)...(19): siRNA sense strand
gcucuuugcaucuuaacug

SEQ ID NO: 1906497 - RNA, 19 nt, Homo sapiens
  misc_RNA (1)...(19): siRNA sense strand
gcucauagacauggagaca

SEQ ID NO: 1906498 - RNA, 19 nt, Homo sapiens
  misc_RNA (1)...(19): siRNA sense strand
ucaucacccucaucccuau

SEQ ID NO: 1906499 - RNA, 19 nt, Homo sapiens
  misc_RNA (1)...(19): siRNA sense strand
ccacacacccacuucacau

SEQ ID NO: 1906500 - RNA, 19 nt, Homo sapiens
  misc_RNA (1)...(19): siRNA sense strand
gaauugggaaggcacaaac

SEQ ID NO: 1906501 - RNA, 19 nt, Homo sapiens
  misc_RNA (1)...(19): siRNA sense strand
ccaacggcacucacaacaa

SEQ ID NO: 1906502 - RNA, 19 nt, Homo sapiens
  misc_RNA (1)...(19): siRNA sense strand
ccauagaguccagagaaga

SEQ ID NO: 1906503 - RNA, 19 nt, Homo sapiens
  misc_RNA (1)...(19): siRNA sense strand
cuucgcucuuugcaucuua

SEQ ID NO: 1906504 - RNA, 19 nt, Homo sapiens
  misc_RNA (1)...(19): siRNA sense strand
ccgacuaccaucuggacua

SEQ ID NO: 1906505 - RNA, 19 nt, Homo sapiens
  misc_RNA (1)...(19): siRNA sense strand
ucuggguucucgucaacaa

SEQ ID NO: 1906506 - RNA, 19 nt, Homo sapiens
  misc_RNA (1)...(19): siRNA sense strand
ggacuagcucuccacaaaa

SEQ ID NO: 1906507 - RNA, 19 nt, Homo sapiens
  misc_RNA (1)...(19): siRNA sense strand
cagcuccuuugucuguuuc

SEQ ID NO: 1906508 - RNA, 19 nt, Homo sapiens
  misc_RNA (1)...(19): siRNA sense strand
cuacaucagcuccuuuguc

SEQ ID NO: 1906509 - RNA, 19 nt, Homo sapiens
  misc_RNA (1)...(19): siRNA sense strand
cgaauugggaaggcacaaa

SEQ ID NO: 1906510 - RNA, 19 nt, Homo sapiens
  misc_RNA (1)...(19): siRNA sense strand
aaacaaagcuccaguauuu

SEQ ID NO: 1906511 - RNA, 19 nt, Homo sapiens
  misc_RNA (1)...(19): siRNA sense strand
ggaagaagcuggaagaaga

SEQ ID NO: 1906512 - RNA, 19 nt, Homo sapiens
  misc_RNA (1)...(19): siRNA sense strand
ggaagaaacugaaagagaa

SEQ ID NO: 1906513 - RNA, 19 nt, Homo sapiens
  misc_RNA (1)...(19): siRNA sense strand
ggaagaaacugaaagagaa

SEQ ID NO: 1906514 - RNA, 19 nt, Homo sapiens
  misc_RNA (1)...(19): siRNA sense strand
ggaagaaacugaaagagaa

SEQ ID NO: 1906515 - RNA, 19 nt, Homo sapiens
  misc_RNA (1)...(19): siRNA sense strand
cagcagagauuaauacuaa

SEQ ID NO: 1906516 - RNA, 19 nt, Homo sapiens
  misc_RNA (1)...(19): siRNA sense strand
ggaagaaacuggaagaaga

SEQ ID NO: 1906517 - RNA, 19 nt, Homo sapiens
  misc_RNA (1)...(19): siRNA sense strand
ggaagaaacuggaagaaga

SEQ ID NO: 1906518 - RNA, 19 nt, Homo sapiens
  misc_RNA (1)...(19): siRNA sense strand
gaagagcaauaucucaaua

SEQ ID NO: 1906519 - RNA, 19 nt, Homo sapiens
  misc_RNA (1)...(19): siRNA sense strand
ggagagaaauuuccucaaa

SEQ ID NO: 1906520 - RNA, 19 nt, Homo sapiens
  misc_RNA (1)...(19): siRNA sense strand
agaggaagaugucauauua

SEQ ID NO: 1906521 - RNA, 19 nt, Homo sapiens
  misc_RNA (1)...(19): siRNA sense strand
ccaacaggcuugaugauua

SEQ ID NO: 1906522 - RNA, 19 nt, Homo sapiens
  misc_RNA (1)...(19): siRNA sense strand
gagagaaacuguaagacua

SEQ ID NO: 1906523 - RNA, 19 nt, Homo sapiens
  misc_RNA (1)...(19): siRNA sense strand
gagcaaggauagaaauuaa

SEQ ID NO: 1906524 - RNA, 19 nt, Homo sapiens
  misc_RNA (1)...(19): siRNA sense strand
gaaguaaaccuaacugaaa

SEQ ID NO: 1906525 - RNA, 19 nt, Homo sapiens
  misc_RNA (1)...(19): siRNA sense strand
gaacagaagccacuugaaa

SEQ ID NO: 1906526 - RNA, 19 nt, Homo sapiens
  misc_RNA (1)...(19): siRNA sense strand
gaagaacgauauuaccaaa

SEQ ID NO: 1906527 - RNA, 19 nt, Homo sapiens
  misc_RNA (1)...(19): siRNA sense strand
ggaaauugaucaaacagaa

SEQ ID NO: 1906528 - RNA, 19 nt, Homo sapiens
  misc_RNA (1)...(19): siRNA sense strand
gaaagaaacuggaaaagaa

SEQ ID NO: 1906529 - RNA, 19 nt, Homo sapiens
  misc_RNA (1)...(19): siRNA sense strand
gaaaugaaggaaaguguua

SEQ ID NO: 1906530 - RNA, 19 nt, Homo sapiens
  misc_RNA (1)...(19): siRNA sense strand
gaauaaaugucaggcuaua

SEQ ID NO: 1906531 - RNA, 19 nt, Homo sapiens
  misc_RNA (1)...(19): siRNA sense strand
gaacacagaauguaugaaa

SEQ ID NO: 1906532 - RNA, 19 nt, Homo sapiens
  misc_RNA (1)...(19): siRNA sense strand
gaagagaucuguguuacug

SEQ ID NO: 1906533 - RNA, 19 nt, Homo sapiens
  misc_RNA (1)...(19): siRNA sense strand
gaaggaaaguguuauccaa

SEQ ID NO: 1906534 - RNA, 19 nt, Homo sapiens
  misc_RNA (1)...(19): siRNA sense strand
ggaaagaucucagaaggau

SEQ ID NO: 1906535 - RNA, 19 nt, Homo sapiens
  misc_RNA (1)...(19): siRNA sense strand
ccaaacugcucgacaagua

SEQ ID NO: 1906536 - RNA, 19 nt, Homo sapiens
  misc_RNA (1)...(19): siRNA sense strand
ggagacagauuugaaagaa

SEQ ID NO: 1906537 - RNA, 19 nt, Homo sapiens
  misc_RNA (1)...(19): siRNA sense strand
gaaguagaccuaaaucaaa

SEQ ID NO: 1906538 - RNA, 19 nt, Homo sapiens
  misc_RNA (1)...(19): siRNA sense strand
gaagaucaaucgcguaaag

SEQ ID NO: 1906539 - RNA, 19 nt, Homo sapiens
  misc_RNA (1)...(19): siRNA sense strand
gaaacaaucagacaugaaa

SEQ ID NO: 1906540 - RNA, 19 nt, Homo sapiens
  misc_RNA (1)...(19): siRNA sense strand
gaaaguaucaggaaagaug

SEQ ID NO: 1906541 - RNA, 19 nt, Homo sapiens
  misc_RNA (1)...(19): siRNA sense strand
aaacauagauggcauugug

SEQ ID NO: 1906542 - RNA, 19 nt, Homo sapiens
  misc_RNA (1)...(19): siRNA sense strand
aaagauggcuguuguugaa

SEQ ID NO: 1906543 - RNA, 19 nt, Homo sapiens
  misc_RNA (1)...(19): siRNA sense strand
gaaagcaacuggaaaugag

SEQ ID NO: 1906544 - RNA, 19 nt, Homo sapiens
  misc_RNA (1)...(19): siRNA sense strand
agaaagaaauguugaccua

SEQ ID NO: 1906545 - RNA, 19 nt, Homo sapiens
  misc_RNA (1)...(19): siRNA sense strand
agacaaaggugaagccaaa

SEQ ID NO: 1906546 - RNA, 19 nt, Homo sapiens
  misc_RNA (1)...(19): siRNA sense strand
gaagagagauuugucuaag

SEQ ID NO: 1906547 - RNA, 19 nt, Homo sapiens
  misc_RNA (1)...(19): siRNA sense strand
cgaaacaaguuacucuaaa

SEQ ID NO: 1906548 - RNA, 19 nt, Homo sapiens
  misc_RNA (1)...(19): siRNA sense strand
gaaacugagggaaauguua

SEQ ID NO: 1906549 - RNA, 19 nt, Homo sapiens
  misc_RNA (1)...(19): siRNA sense strand
ggucaagccuguagguaaa

SEQ ID NO: 1906550 - RNA, 19 nt, Homo sapiens
  misc_RNA (1)...(19): siRNA sense strand
ggucaagccuguagaugaa

SEQ ID NO: 1906551 - RNA, 19 nt, Homo sapiens
  misc_RNA (1)...(19): siRNA sense strand
ggucaagccuguagaugaa

SEQ ID NO: 1906552 - RNA, 19 nt, Homo sapiens
  misc_RNA (1)...(19): siRNA sense strand
gaagcaagauggagcuaau

SEQ ID NO: 1906553 - RNA, 19 nt, Homo sapiens
  misc_RNA (1)...(19): siRNA sense strand
ucuaaaccauggucaaaua

SEQ ID NO: 1906554 - RNA, 19 nt, Homo sapiens
  misc_RNA (1)...(19): siRNA sense strand
gaauaaggaucagagcaaa

SEQ ID NO: 1906555 - RNA, 19 nt, Homo sapiens
  misc_RNA (1)...(19): siRNA sense strand
caacaggcuugaugauuau

SEQ ID NO: 1906556 - RNA, 19 nt, Homo sapiens
  misc_RNA (1)...(19): siRNA sense strand
gaaguuggaccaucaagaa

SEQ ID NO: 1906557 - RNA, 19 nt, Homo sapiens
  misc_RNA (1)...(19): siRNA sense strand
gugaaggagugaauaauga

SEQ ID NO: 1906558 - RNA, 19 nt, Homo sapiens
  misc_RNA (1)...(19): siRNA sense strand
gggcagaaauggaaacuca

SEQ ID NO: 1906559 - RNA, 19 nt, Homo sapiens
  misc_RNA (1)...(19): siRNA sense strand
gaagccaaaggcauaauua

SEQ ID NO: 1906560 - RNA, 19 nt, Homo sapiens
  misc_RNA (1)...(19): siRNA sense strand
ugaugaagcuucccuaaug

SEQ ID NO: 1906561 - RNA, 19 nt, Homo sapiens
  misc_RNA (1)...(19): siRNA sense strand
gagagagacuacagaauca

SEQ ID NO: 1906562 - RNA, 19 nt, Homo sapiens
  misc_RNA (1)...(19): siRNA sense strand
ggagauugauuugaaagaa

SEQ ID NO: 1906563 - RNA, 19 nt, Homo sapiens
  misc_RNA (1)...(19): siRNA sense strand
cuaaagaaaugcagucaga

SEQ ID NO: 1906564 - RNA, 19 nt, Homo sapiens
  misc_RNA (1)...(19): siRNA sense strand
ugacaaugauguugaagaa

SEQ ID NO: 1906565 - RNA, 19 nt, Homo sapiens
  misc_RNA (1)...(19): siRNA sense strand
acaaauggauggagaauag

SEQ ID NO: 1906566 - RNA, 19 nt, Homo sapiens
  misc_RNA (1)...(19): siRNA sense strand
gaacaugagcuaccaaaca

SEQ ID NO: 1906567 - RNA, 19 nt, Homo sapiens
  misc_RNA (1)...(19): siRNA sense strand
gaugaagcuucccuaauga

SEQ ID NO: 1906568 - RNA, 19 nt, Homo sapiens
  misc_RNA (1)...(19): siRNA sense strand
gaacauuagcagugaagua

SEQ ID NO: 1906569 - RNA, 19 nt, Homo sapiens
  misc_RNA (1)...(19): siRNA sense strand
agacaaagaucuggaagaa

SEQ ID NO: 1906570 - RNA, 19 nt, Homo sapiens
  misc_RNA (1)...(19): siRNA sense strand
gaagaaagcgaauaucaag

SEQ ID NO: 1906571 - RNA, 19 nt, Homo sapiens
  misc_RNA (1)...(19): siRNA sense strand
gcugugauauugccaugua

SEQ ID NO: 1906572 - RNA, 19 nt, Homo sapiens
  misc_RNA (1)...(19): siRNA sense strand
ggaggcagauuugaaagaa

SEQ ID NO: 1906573 - RNA, 19 nt, Homo sapiens
  misc_RNA (1)...(19): siRNA sense strand
gagaaaguaucaggaaaga

SEQ ID NO: 1906574 - RNA, 19 nt, Homo sapiens
  misc_RNA (1)...(19): siRNA sense strand
ccaaagaccuaaacccaau

SEQ ID NO: 1906575 - RNA, 19 nt, Homo sapiens
  misc_RNA (1)...(19): siRNA sense strand
caagagagcaagaagguaa

SEQ ID NO: 1906576 - RNA, 19 nt, Homo sapiens
  misc_RNA (1)...(19): siRNA sense strand
ggaagaagaugaugaugcu

SEQ ID NO: 1906577 - RNA, 19 nt, Homo sapiens
  misc_RNA (1)...(19): siRNA sense strand
gaagccacuugaaauuaaa

SEQ ID NO: 1906578 - RNA, 19 nt, Homo sapiens
  misc_RNA (1)...(19): siRNA sense strand
gaaaccaaagccaaauaua

SEQ ID NO: 1906579 - RNA, 19 nt, Homo sapiens
  misc_RNA (1)...(19): siRNA sense strand
ggaagggagucaacuaaag

SEQ ID NO: 1906580 - RNA, 19 nt, Homo sapiens
  misc_RNA (1)...(19): siRNA sense strand
gaagaaacuggaagaagaa

SEQ ID NO: 1906581 - RNA, 19 nt, Homo sapiens
  misc_RNA (1)...(19): siRNA sense strand
gauaaaggacucuaaagga

SEQ ID NO: 1906582 - RNA, 19 nt, Homo sapiens
  misc_RNA (1)...(19): siRNA sense strand
ggacagaggcaaauaguag

SEQ ID NO: 1906583 - RNA, 19 nt, Homo sapiens
  misc_RNA (1)...(19): siRNA sense strand
agaagccacuugaaauuaa

SEQ ID NO: 1906584 - RNA, 19 nt, Homo sapiens
  misc_RNA (1)...(19): siRNA sense strand
gagaagaaauccaccaaac

SEQ ID NO: 1906585 - RNA, 19 nt, Homo sapiens
  misc_RNA (1)...(19): siRNA sense strand
ggaccaguauuucuucaga

SEQ ID NO: 1906586 - RNA, 19 nt, Homo sapiens
  misc_RNA (1)...(19): siRNA sense strand
gcacaaaugacaagaagga

SEQ ID NO: 1906587 - RNA, 19 nt, Homo sapiens
  misc_RNA (1)...(19): siRNA sense strand
guagaaaaccuucauguua

SEQ ID NO: 1906588 - RNA, 19 nt, Homo sapiens
  misc_RNA (1)...(19): siRNA sense strand
ggaaggaagaacgauauua

SEQ ID NO: 1906589 - RNA, 19 nt, Homo sapiens
  misc_RNA (1)...(19): siRNA sense strand
gaagagagagacuacagaa

SEQ ID NO: 1906590 - RNA, 19 nt, Homo sapiens
  misc_RNA (1)...(19): siRNA sense strand
gaaggaugcucagacaguu

SEQ ID NO: 1906591 - RNA, 19 nt, Homo sapiens
  misc_RNA (1)...(19): siRNA sense strand
agagauagauuuggaagaa

SEQ ID NO: 1906592 - RNA, 19 nt, Homo sapiens
  misc_RNA (1)...(19): siRNA sense strand
gugaacauauccaagauga

SEQ ID NO: 1906593 - RNA, 19 nt, Homo sapiens
  misc_RNA (1)...(19): siRNA sense strand
ggugaaaggagaagucaua

SEQ ID NO: 1906594 - RNA, 19 nt, Homo sapiens
  misc_RNA (1)...(19): siRNA sense strand
gcuaugccuucacuagaua

SEQ ID NO: 1906595 - RNA, 19 nt, Homo sapiens
  misc_RNA (1)...(19): siRNA sense strand
ucagacagauaccgaauau

SEQ ID NO: 1906596 - RNA, 19 nt, Homo sapiens
  misc_RNA (1)...(19): siRNA sense strand
aaugggagaucuaguauug

SEQ ID NO: 1906597 - RNA, 19 nt, Homo sapiens
  misc_RNA (1)...(19): siRNA sense strand
gagaagaaagcgaauauca

SEQ ID NO: 1906598 - RNA, 19 nt, Homo sapiens
  misc_RNA (1)...(19): siRNA sense strand
gaaacuggaagaagagaaa

SEQ ID NO: 1906599 - RNA, 19 nt, Homo sapiens
  misc_RNA (1)...(19): siRNA sense strand
ggucaagccucuaggugaa

SEQ ID NO: 1906600 - RNA, 19 nt, Homo sapiens
  misc_RNA (1)...(19): siRNA sense strand
ggaagagagauuugucuaa

SEQ ID NO: 1906601 - RNA, 19 nt, Homo sapiens
  misc_RNA (1)...(19): siRNA sense strand
gcagguugcauuagaagua

SEQ ID NO: 1906602 - RNA, 19 nt, Homo sapiens
  misc_RNA (1)...(19): siRNA sense strand
ggaacugacuuuucuauga

SEQ ID NO: 1906603 - RNA, 19 nt, Homo sapiens
  misc_RNA (1)...(19): siRNA sense strand
gaaaggagaagucauaaaa

SEQ ID NO: 1906604 - RNA, 19 nt, Homo sapiens
  misc_RNA (1)...(19): siRNA sense strand
ggaauuagaagaaguugga

SEQ ID NO: 1906605 - RNA, 19 nt, Homo sapiens
  misc_RNA (1)...(19): siRNA sense strand
guacacagacugaaaggaa

SEQ ID NO: 1906606 - RNA, 19 nt, Homo sapiens
  misc_RNA (1)...(19): siRNA sense strand
gauugaugcugcugaggua

SEQ ID NO: 1906607 - RNA, 19 nt, Homo sapiens
  misc_RNA (1)...(19): siRNA sense strand
guaaagcugcugaaagaaa

SEQ ID NO: 1906608 - RNA, 19 nt, Homo sapiens
  misc_RNA (1)...(19): siRNA sense strand
ccaaaggcauaauuaagga

SEQ ID NO: 1906609 - RNA, 19 nt, Homo sapiens
  misc_RNA (1)...(19): siRNA sense strand
ugacaucucuggagguuuc

SEQ ID NO: 1906610 - RNA, 19 nt, Homo sapiens
  misc_RNA (1)...(19): siRNA sense strand
guacucagaugacaauauu

SEQ ID NO: 1906611 - RNA, 19 nt, Homo sapiens
  misc_RNA (1)...(19): siRNA sense strand
gaacacaagcauaauauuc

SEQ ID NO: 1906612 - RNA, 19 nt, Homo sapiens
  misc_RNA (1)...(19): siRNA sense strand
gauuguacaugcucaguuu

SEQ ID NO: 1906613 - RNA, 19 nt, Homo sapiens
  misc_RNA (1)...(19): siRNA sense strand
gggagaaacucacuuaugg

SEQ ID NO: 1906614 - RNA, 19 nt, Homo sapiens
  misc_RNA (1)...(19): siRNA sense strand
gaaaguccauggcgguuca

SEQ ID NO: 1906615 - RNA, 19 nt, Homo sapiens
  misc_RNA (1)...(19): siRNA sense strand
gaacuacuuugaacacaag

SEQ ID NO: 1906616 - RNA, 19 nt, Homo sapiens
  misc_RNA (1)...(19): siRNA sense strand
ggaacuacuuugaacacaa

SEQ ID NO: 1906617 - RNA, 19 nt, Homo sapiens
  misc_RNA (1)...(19): siRNA sense strand
guacaugcucaguuuaaua

SEQ ID NO: 1906618 - RNA, 19 nt, Homo sapiens
  misc_RNA (1)...(19): siRNA sense strand
gcccaaaccuuucgugauc

SEQ ID NO: 1906619 - RNA, 19 nt, Homo sapiens
  misc_RNA (1)...(19): siRNA sense strand
cuuauggucuccacaagua

SEQ ID NO: 1906620 - RNA, 19 nt, Homo sapiens
  misc_RNA (1)...(19): siRNA sense strand
ggacgggaacuacuuugaa

SEQ ID NO: 1906621 - RNA, 19 nt, Homo sapiens
  misc_RNA (1)...(19): siRNA sense strand
gagcuccggugacgaaagu

SEQ ID NO: 1906622 - RNA, 19 nt, Homo sapiens
  misc_RNA (1)...(19): siRNA sense strand
uaauacaccuaugcaguug

SEQ ID NO: 1906623 - RNA, 19 nt, Homo sapiens
  misc_RNA (1)...(19): siRNA sense strand
aaagggcuacuucuucaua

SEQ ID NO: 1906624 - RNA, 19 nt, Homo sapiens
  misc_RNA (1)...(19): siRNA sense strand
caaaagggcuacuucuuca

SEQ ID NO: 1906625 - RNA, 19 nt, Homo sapiens
  misc_RNA (1)...(19): siRNA sense strand
caacuuagaaucagaacca

SEQ ID NO: 1906626 - RNA, 19 nt, Homo sapiens
  misc_RNA (1)...(19): siRNA sense strand
ucagagugcuccagggaau

SEQ ID NO: 1906627 - RNA, 19 nt, Homo sapiens
  misc_RNA (1)...(19): siRNA sense strand
caaccuguguccuggagau

SEQ ID NO: 1906628 - RNA, 19 nt, Homo sapiens
  misc_RNA (1)...(19): siRNA sense strand
uuaauacaccuaugcaguu

SEQ ID NO: 1906629 - RNA, 19 nt, Homo sapiens
  misc_RNA (1)...(19): siRNA sense strand
gcaaaagggcuacuucuuc

SEQ ID NO: 1906630 - RNA, 19 nt, Homo sapiens
  misc_RNA (1)...(19): siRNA sense strand
gcgcaggacaggauuaaag

SEQ ID NO: 1906631 - RNA, 19 nt, Homo sapiens
  misc_RNA (1)...(19): siRNA sense strand
ggaugccgcucugugacaa

SEQ ID NO: 1906632 - RNA, 19 nt, Homo sapiens
  misc_RNA (1)...(19): siRNA sense strand
cggcuaagcuggccccuaa

SEQ ID NO: 1906633 - RNA, 19 nt, Homo sapiens
  misc_RNA (1)...(19): siRNA sense strand
gacgggaacuacuuugaac

SEQ ID NO: 1906634 - RNA, 19 nt, Homo sapiens
  misc_RNA (1)...(19): siRNA sense strand
ugagagcuccggugacgaa

SEQ ID NO: 1906635 - RNA, 19 nt, Homo sapiens
  misc_RNA (1)...(19): siRNA sense strand
gcuggaacgcggaguguga

SEQ ID NO: 1906636 - RNA, 19 nt, Homo sapiens
  misc_RNA (1)...(19): siRNA sense strand
caaaugugggaguggcaua

SEQ ID NO: 1906637 - RNA, 19 nt, Homo sapiens
  misc_RNA (1)...(19): siRNA sense strand
gggaacuacuuugaacaca

SEQ ID NO: 1906638 - RNA, 19 nt, Homo sapiens
  misc_RNA (1)...(19): siRNA sense strand
gguggacgauggcucugau

SEQ ID NO: 1906639 - RNA, 19 nt, Homo sapiens
  misc_RNA (1)...(19): siRNA sense strand
cagaugacaauauuaugga

SEQ ID NO: 1906640 - RNA, 19 nt, Homo sapiens
  misc_RNA (1)...(19): siRNA sense strand
cuaugcaguuguacucaga

SEQ ID NO: 1906641 - RNA, 19 nt, Homo sapiens
  misc_RNA (1)...(19): siRNA sense strand
gcauaauauucggcccaaa

SEQ ID NO: 1906642 - RNA, 19 nt, Homo sapiens
  misc_RNA (1)...(19): siRNA sense strand
ggagaaacucacuuauggu

SEQ ID NO: 1906643 - RNA, 19 nt, Homo sapiens
  misc_RNA (1)...(19): siRNA sense strand
caaccucaaccucaagcaa

SEQ ID NO: 1906644 - RNA, 19 nt, Homo sapiens
  misc_RNA (1)...(19): siRNA sense strand
ucacuuauggucuccacaa

SEQ ID NO: 1906645 - RNA, 19 nt, Homo sapiens
  misc_RNA (1)...(19): siRNA sense strand
ucagaugacaauauuaugg

SEQ ID NO: 1906646 - RNA, 19 nt, Homo sapiens
  misc_RNA (1)...(19): siRNA sense strand
gaugcgcaggacaggauua

SEQ ID NO: 1906647 - RNA, 19 nt, Homo sapiens
  misc_RNA (1)...(19): siRNA sense strand
uugcccaggugacuugaaa

SEQ ID NO: 1906648 - RNA, 19 nt, Homo sapiens
  misc_RNA (1)...(19): siRNA sense strand
gcucaccagcugugucuca

SEQ ID NO: 1906649 - RNA, 19 nt, Homo sapiens
  misc_RNA (1)...(19): siRNA sense strand
gccgcucugugacaaaugu

SEQ ID NO: 1906650 - RNA, 19 nt, Homo sapiens
  misc_RNA (1)...(19): siRNA sense strand
ggucuccacaaguaucuga

SEQ ID NO: 1906651 - RNA, 19 nt, Homo sapiens
  misc_RNA (1)...(19): siRNA sense strand
acuuugaacacaagcauaa

SEQ ID NO: 1906652 - RNA, 19 nt, Homo sapiens
  misc_RNA (1)...(19): siRNA sense strand
ccagcugugucucaaaauu

SEQ ID NO: 1906653 - RNA, 19 nt, Homo sapiens
  misc_RNA (1)...(19): siRNA sense strand
cauaauauucggcccaaac

SEQ ID NO: 1906654 - RNA, 19 nt, Homo sapiens
  misc_RNA (1)...(19): siRNA sense strand
cucuguaucccaaagcuua

SEQ ID NO: 1906655 - RNA, 19 nt, Homo sapiens
  misc_RNA (1)...(19): siRNA sense strand
ccacgacaaucggaaugag

SEQ ID NO: 1906656 - RNA, 19 nt, Homo sapiens
  misc_RNA (1)...(19): siRNA sense strand
caccagcugugucucaaaa

SEQ ID NO: 1906657 - RNA, 19 nt, Homo sapiens
  misc_RNA (1)...(19): siRNA sense strand
ucaguuuaauacaccuaug

SEQ ID NO: 1906658 - RNA, 19 nt, Homo sapiens
  misc_RNA (1)...(19): siRNA sense strand
gcccauccuuucaaaauca

SEQ ID NO: 1906659 - RNA, 19 nt, Homo sapiens
  misc_RNA (1)...(19): siRNA sense strand
ccagucgggcuccuucaga

SEQ ID NO: 1906660 - RNA, 19 nt, Homo sapiens
  misc_RNA (1)...(19): siRNA sense strand
gcaguuguacucagaugac

SEQ ID NO: 1906661 - RNA, 19 nt, Homo sapiens
  misc_RNA (1)...(19): siRNA sense strand
ggucaucaccaggauuaca

SEQ ID NO: 1906662 - RNA, 19 nt, Homo sapiens
  misc_RNA (1)...(19): siRNA sense strand
acaggacgggaacuacuuu

SEQ ID NO: 1906663 - RNA, 19 nt, Homo sapiens
  misc_RNA (1)...(19): siRNA sense strand
gcaaagaucuguuucauuc

SEQ ID NO: 1906664 - RNA, 19 nt, Homo sapiens
  misc_RNA (1)...(19): siRNA sense strand
gcaaagauguucccuugua

SEQ ID NO: 1906665 - RNA, 19 nt, Homo sapiens
  misc_RNA (1)...(19): siRNA sense strand
gcgaagcuguacugucuuu

SEQ ID NO: 1906666 - RNA, 19 nt, Homo sapiens
  misc_RNA (1)...(19): siRNA sense strand
gcacguauguaaguaaucu

SEQ ID NO: 1906667 - RNA, 19 nt, Homo sapiens
  misc_RNA (1)...(19): siRNA sense strand
guaaccgucuucacaaugu

SEQ ID NO: 1906668 - RNA, 19 nt, Homo sapiens
  misc_RNA (1)...(19): siRNA sense strand
caaagauguucccuuguag

SEQ ID NO: 1906669 - RNA, 19 nt, Homo sapiens
  misc_RNA (1)...(19): siRNA sense strand
ggagauguagggagaagaa

SEQ ID NO: 1906670 - RNA, 19 nt, Homo sapiens
  misc_RNA (1)...(19): siRNA sense strand
caagagagugcacccguuu

SEQ ID NO: 1906671 - RNA, 19 nt, Homo sapiens
  misc_RNA (1)...(19): siRNA sense strand
ggaagaagcaaagaucugu

SEQ ID NO: 1906672 - RNA, 19 nt, Homo sapiens
  misc_RNA (1)...(19): siRNA sense strand
gcaugcacguauguaagua

SEQ ID NO: 1906673 - RNA, 19 nt, Homo sapiens
  misc_RNA (1)...(19): siRNA sense strand
gaagcaaagaucuguuuca

SEQ ID NO: 1906674 - RNA, 19 nt, Homo sapiens
  misc_RNA (1)...(19): siRNA sense strand
gagcaucagccgcuucuca

SEQ ID NO: 1906675 - RNA, 19 nt, Homo sapiens
  misc_RNA (1)...(19): siRNA sense strand
uaaccgucuucacaaugua

SEQ ID NO: 1906676 - RNA, 19 nt, Homo sapiens
  misc_RNA (1)...(19): siRNA sense strand
ggccggagcucagguuaca

SEQ ID NO: 1906677 - RNA, 19 nt, Homo sapiens
  misc_RNA (1)...(19): siRNA sense strand
gaagcuguacugucuuugu

SEQ ID NO: 1906678 - RNA, 19 nt, Homo sapiens
  misc_RNA (1)...(19): siRNA sense strand
gaagaagcaaagaucuguu

SEQ ID NO: 1906679 - RNA, 19 nt, Homo sapiens
  misc_RNA (1)...(19): siRNA sense strand
uaaguaaucuggggaagaa

SEQ ID NO: 1906680 - RNA, 19 nt, Homo sapiens
  misc_RNA (1)...(19): siRNA sense strand
aagcaaagaucuguuucau

SEQ ID NO: 1906681 - RNA, 19 nt, Homo sapiens
  misc_RNA (1)...(19): siRNA sense strand
ggacccuguuucuuacugu

SEQ ID NO: 1906682 - RNA, 19 nt, Homo sapiens
  misc_RNA (1)...(19): siRNA sense strand
aagaagcaaagaucuguuu

SEQ ID NO: 1906683 - RNA, 19 nt, Homo sapiens
  misc_RNA (1)...(19): siRNA sense strand
ucagguaaccgucuucaca

SEQ ID NO: 1906684 - RNA, 19 nt, Homo sapiens
  misc_RNA (1)...(19): siRNA sense strand
caccacuccuucguccuua

SEQ ID NO: 1906685 - RNA, 19 nt, Homo sapiens
  misc_RNA (1)...(19): siRNA sense strand
cccuggacccuguuucuua

SEQ ID NO: 1906686 - RNA, 19 nt, Homo sapiens
  misc_RNA (1)...(19): siRNA sense strand
gguaaccgucuucacaaug

SEQ ID NO: 1906687 - RNA, 19 nt, Homo sapiens
  misc_RNA (1)...(19): siRNA sense strand
gauguagggagaagaaucu

SEQ ID NO: 1906688 - RNA, 19 nt, Homo sapiens
  misc_RNA (1)...(19): siRNA sense strand
gggaagaagcaaagaucug

SEQ ID NO: 1906689 - RNA, 19 nt, Homo sapiens
  misc_RNA (1)...(19): siRNA sense strand
guaggccccuuucagguaa

SEQ ID NO: 1906690 - RNA, 19 nt, Homo sapiens
  misc_RNA (1)...(19): siRNA sense strand
aagcuguacugucuuugug

SEQ ID NO: 1906691 - RNA, 19 nt, Homo sapiens
  misc_RNA (1)...(19): siRNA sense strand
aaauaaacguguccccauu

SEQ ID NO: 1906692 - RNA, 19 nt, Homo sapiens
  misc_RNA (1)...(19): siRNA sense strand
cagguaaccgucuucacaa

SEQ ID NO: 1906693 - RNA, 19 nt, Homo sapiens
  misc_RNA (1)...(19): siRNA sense strand
ggcaugcacguauguaagu

SEQ ID NO: 1906694 - RNA, 19 nt, Homo sapiens
  misc_RNA (1)...(19): siRNA sense strand
caucagccgcuucucaagu

SEQ ID NO: 1906695 - RNA, 19 nt, Homo sapiens
  misc_RNA (1)...(19): siRNA sense strand
aagagagugcacccguuua

SEQ ID NO: 1906696 - RNA, 19 nt, Homo sapiens
  misc_RNA (1)...(19): siRNA sense strand
uuucaucacaguuuaagga

SEQ ID NO: 1906697 - RNA, 19 nt, Homo sapiens
  misc_RNA (1)...(19): siRNA sense strand
ccuggacccuguuucuuac

SEQ ID NO: 1906698 - RNA, 19 nt, Homo sapiens
  misc_RNA (1)...(19): siRNA sense strand
ggauaccagcagcaagaga

SEQ ID NO: 1906699 - RNA, 19 nt, Homo sapiens
  misc_RNA (1)...(19): siRNA sense strand
caugcacguauguaaguaa

SEQ ID NO: 1906700 - RNA, 19 nt, Homo sapiens
  misc_RNA (1)...(19): siRNA sense strand
caacauggcugugaauuau

SEQ ID NO: 1906701 - RNA, 19 nt, Homo sapiens
  misc_RNA (1)...(19): siRNA sense strand
gcagaggacugucuuuaug

SEQ ID NO: 1906702 - RNA, 19 nt, Homo sapiens
  misc_RNA (1)...(19): siRNA sense strand
ggaaagggaucguggaaca

SEQ ID NO: 1906703 - RNA, 19 nt, Homo sapiens
  misc_RNA (1)...(19): siRNA sense strand
gcaaagauaagaucaguga

SEQ ID NO: 1906704 - RNA, 19 nt, Homo sapiens
  misc_RNA (1)...(19): siRNA sense strand
ugaagaaacugaaggaaag

SEQ ID NO: 1906705 - RNA, 19 nt, Homo sapiens
  misc_RNA (1)...(19): siRNA sense strand
ugaaguacauugagacaga

SEQ ID NO: 1906706 - RNA, 19 nt, Homo sapiens
  misc_RNA (1)...(19): siRNA sense strand
agacagagcuaaagaagag

SEQ ID NO: 1906707 - RNA, 19 nt, Homo sapiens
  misc_RNA (1)...(19): siRNA sense strand
ggaugaggaugcagacaug

SEQ ID NO: 1906708 - RNA, 19 nt, Homo sapiens
  misc_RNA (1)...(19): siRNA sense strand
ccaacauggcugugaauua

SEQ ID NO: 1906709 - RNA, 19 nt, Homo sapiens
  misc_RNA (1)...(19): siRNA sense strand
augcagacaugaugaagua

SEQ ID NO: 1906710 - RNA, 19 nt, Homo sapiens
  misc_RNA (1)...(19): siRNA sense strand
ggacugucuuuaugaacuu

SEQ ID NO: 1906711 - RNA, 19 nt, Homo sapiens
  misc_RNA (1)...(19): siRNA sense strand
caaagaagaccgaggagau

SEQ ID NO: 1906712 - RNA, 19 nt, Homo sapiens
  misc_RNA (1)...(19): siRNA sense strand
gggcaaagauaagaucagu

SEQ ID NO: 1906713 - RNA, 19 nt, Homo sapiens
  misc_RNA (1)...(19): siRNA sense strand
ccgaggagaugcuuuccaa

SEQ ID NO: 1906714 - RNA, 19 nt, Homo sapiens
  misc_RNA (1)...(19): siRNA sense strand
caugaggaacagaaaguua

SEQ ID NO: 1906715 - RNA, 19 nt, Homo sapiens
  misc_RNA (1)...(19): siRNA sense strand
gaaaguuaagccaaagaau

SEQ ID NO: 1906716 - RNA, 19 nt, Homo sapiens
  misc_RNA (1)...(19): siRNA sense strand
cagagcagcagaacaagaa

SEQ ID NO: 1906717 - RNA, 19 nt, Homo sapiens
  misc_RNA (1)...(19): siRNA sense strand
gaucguggaacaugaggaa

SEQ ID NO: 1906718 - RNA, 19 nt, Homo sapiens
  misc_RNA (1)...(19): siRNA sense strand
aaaguuaagccaaagaaug

SEQ ID NO: 1906719 - RNA, 19 nt, Homo sapiens
  misc_RNA (1)...(19): siRNA sense strand
aacagaaaguuaagccaaa

SEQ ID NO: 1906720 - RNA, 19 nt, Homo sapiens
  misc_RNA (1)...(19): siRNA sense strand
gaacaugaggaacagaaag

SEQ ID NO: 1906721 - RNA, 19 nt, Homo sapiens
  misc_RNA (1)...(19): siRNA sense strand
gaggaaagggaucguggaa

SEQ ID NO: 1906722 - RNA, 19 nt, Homo sapiens
  misc_RNA (1)...(19): siRNA sense strand
agaggacugucuuuaugaa

SEQ ID NO: 1906723 - RNA, 19 nt, Homo sapiens
  misc_RNA (1)...(19): siRNA sense strand
ggaacaugaggaacagaaa

SEQ ID NO: 1906724 - RNA, 19 nt, Homo sapiens
  misc_RNA (1)...(19): siRNA sense strand
gcagagcagcagaacaaga

SEQ ID NO: 1906725 - RNA, 19 nt, Homo sapiens
  misc_RNA (1)...(19): siRNA sense strand
cuaccaacauggcugugaa

SEQ ID NO: 1906726 - RNA, 19 nt, Homo sapiens
  misc_RNA (1)...(19): siRNA sense strand
uggcagagcagcagaacaa

SEQ ID NO: 1906727 - RNA, 19 nt, Homo sapiens
  misc_RNA (1)...(19): siRNA sense strand
cagaggacugucuuuauga

SEQ ID NO: 1906728 - RNA, 19 nt, Homo sapiens
  misc_RNA (1)...(19): siRNA sense strand
gacaugaugaaguacauug

SEQ ID NO: 1906729 - RNA, 19 nt, Homo sapiens
  misc_RNA (1)...(19): siRNA sense strand
gagacagagcuaaagaaga

SEQ ID NO: 1906730 - RNA, 19 nt, Homo sapiens
  misc_RNA (1)...(19): siRNA sense strand
guacauugagacagagcua

SEQ ID NO: 1906731 - RNA, 19 nt, Homo sapiens
  misc_RNA (1)...(19): siRNA sense strand
caacagauuuuaucaugag

SEQ ID NO: 1906732 - RNA, 19 nt, Homo sapiens
  misc_RNA (1)...(19): siRNA sense strand
gaggaugcagacaugauga

SEQ ID NO: 1906733 - RNA, 19 nt, Homo sapiens
  misc_RNA (1)...(19): siRNA sense strand
cacaacagauuuuaucaug

SEQ ID NO: 1906734 - RNA, 19 nt, Homo sapiens
  misc_RNA (1)...(19): siRNA sense strand
gagcagcagaacaagaaga

SEQ ID NO: 1906735 - RNA, 19 nt, Homo sapiens
  misc_RNA (1)...(19): siRNA sense strand
gcagacaugaugaaguaca

SEQ ID NO: 1906736 - RNA, 19 nt, Homo sapiens
  misc_RNA (1)...(19): siRNA sense strand
gaugaaguacauugagaca

SEQ ID NO: 1906737 - RNA, 19 nt, Homo sapiens
  misc_RNA (1)...(19): siRNA sense strand
cagcagaacaagaagaaag

SEQ ID NO: 1906738 - RNA, 19 nt, Homo sapiens
  misc_RNA (1)...(19): siRNA sense strand
gaaugcagaggacugucuu

SEQ ID NO: 1906739 - RNA, 19 nt, Homo sapiens
  misc_RNA (1)...(19): siRNA sense strand
aaagaagaccgaggagaug

SEQ ID NO: 1906740 - RNA, 19 nt, Homo sapiens
  misc_RNA (1)...(19): siRNA sense strand
cagacaugaugaaguacau

SEQ ID NO: 1906741 - RNA, 19 nt, Homo sapiens
  misc_RNA (1)...(19): siRNA sense strand
guggauaugaagaaacuga

SEQ ID NO: 1906742 - RNA, 19 nt, Homo sapiens
  misc_RNA (1)...(19): siRNA sense strand
agaaaguuaagccaaagaa

SEQ ID NO: 1906743 - RNA, 19 nt, Homo sapiens
  misc_RNA (1)...(19): siRNA sense strand
gaagaccgaggagaugcuu

SEQ ID NO: 1906744 - RNA, 19 nt, Homo sapiens
  misc_RNA (1)...(19): siRNA sense strand
gaaaggggcaaagauaaga

SEQ ID NO: 1906745 - RNA, 19 nt, Homo sapiens
  misc_RNA (1)...(19): siRNA sense strand
gagcuaaagaagaggaaag

SEQ ID NO: 1906746 - RNA, 19 nt, Homo sapiens
  misc_RNA (1)...(19): siRNA sense strand
gaaagggaucguggaacau

SEQ ID NO: 1906747 - RNA, 19 nt, Homo sapiens
  misc_RNA (1)...(19): siRNA sense strand
acagaaaguuaagccaaag

SEQ ID NO: 1906748 - RNA, 19 nt, Homo sapiens
  misc_RNA (1)...(19): siRNA sense strand
cuucgugccuaccaacaug

SEQ ID NO: 1906749 - RNA, 19 nt, Homo sapiens
  misc_RNA (1)...(19): siRNA sense strand
augaugaaguacauugaga

SEQ ID NO: 1906750 - RNA, 19 nt, Homo sapiens
  misc_RNA (1)...(19): siRNA sense strand
caaccgaagggaugaggau

SEQ ID NO: 1906751 - RNA, 19 nt, Homo sapiens
  misc_RNA (1)...(19): siRNA sense strand
ugagacagagcuaaagaag

SEQ ID NO: 1906752 - RNA, 19 nt, Homo sapiens
  misc_RNA (1)...(19): siRNA sense strand
gggaugaggaugcagacau

SEQ ID NO: 1906753 - RNA, 19 nt, Homo sapiens
  misc_RNA (1)...(19): siRNA sense strand
augaagaaacugaaggaaa

SEQ ID NO: 1906754 - RNA, 19 nt, Homo sapiens
  misc_RNA (1)...(19): siRNA sense strand
augaggaacagaaaguuaa

SEQ ID NO: 1906755 - RNA, 19 nt, Homo sapiens
  misc_RNA (1)...(19): siRNA sense strand
aaagggaucguggaacaug

SEQ ID NO: 1906756 - RNA, 19 nt, Homo sapiens
  misc_RNA (1)...(19): siRNA sense strand
cguguuuccucagcaaaga

SEQ ID NO: 1906757 - RNA, 19 nt, Homo sapiens
  misc_RNA (1)...(19): siRNA sense strand
gaagaaacugaaggaaagg

SEQ ID NO: 1906758 - RNA, 19 nt, Homo sapiens
  misc_RNA (1)...(19): siRNA sense strand
acauugagacagagcuaaa

SEQ ID NO: 1906759 - RNA, 19 nt, Homo sapiens
  misc_RNA (1)...(19): siRNA sense strand
ugaggaugcagacaugaug

SEQ ID NO: 1906760 - RNA, 19 nt, Homo sapiens
  misc_RNA (1)...(19): siRNA sense strand
aagggaucguggaacauga

SEQ ID NO: 1906761 - RNA, 19 nt, Homo sapiens
  misc_RNA (1)...(19): siRNA sense strand
ggauaugaagaaacugaag

SEQ ID NO: 1906762 - RNA, 19 nt, Homo sapiens
  misc_RNA (1)...(19): siRNA sense strand
gcagcagaacaagaagaaa

SEQ ID NO: 1906763 - RNA, 19 nt, Homo sapiens
  misc_RNA (1)...(19): siRNA sense strand
gaaggaaaggggcaaagau

SEQ ID NO: 1906764 - RNA, 19 nt, Homo sapiens
  misc_RNA (1)...(19): siRNA sense strand
cagaaaguuaagccaaaga

SEQ ID NO: 1906765 - RNA, 19 nt, Homo sapiens
  misc_RNA (1)...(19): siRNA sense strand
ccgaagggaugaggaugca

SEQ ID NO: 1906766 - RNA, 19 nt, Homo sapiens
  misc_RNA (1)...(19): siRNA sense strand
guacagaacuugaggaaga

SEQ ID NO: 1906767 - RNA, 19 nt, Homo sapiens
  misc_RNA (1)...(19): siRNA sense strand
gaaggcaacugaugacuau

SEQ ID NO: 1906768 - RNA, 19 nt, Homo sapiens
  misc_RNA (1)...(19): siRNA sense strand
caacauggcugugaauuau

SEQ ID NO: 1906769 - RNA, 19 nt, Homo sapiens
  misc_RNA (1)...(19): siRNA sense strand
gaugaucccuuucagauga

SEQ ID NO: 1906770 - RNA, 19 nt, Homo sapiens
  misc_RNA (1)...(19): siRNA sense strand
gcagaggacugucuuuaug

SEQ ID NO: 1906771 - RNA, 19 nt, Homo sapiens
  misc_RNA (1)...(19): siRNA sense strand
ggaaagggaucguggaaca

SEQ ID NO: 1906772 - RNA, 19 nt, Homo sapiens
  misc_RNA (1)...(19): siRNA sense strand
gcaaagauaagaucaguga

SEQ ID NO: 1906773 - RNA, 19 nt, Homo sapiens
  misc_RNA (1)...(19): siRNA sense strand
ugaagaaacugaaggaaag

SEQ ID NO: 1906774 - RNA, 19 nt, Homo sapiens
  misc_RNA (1)...(19): siRNA sense strand
ugaaguacauugagacaga

SEQ ID NO: 1906775 - RNA, 19 nt, Homo sapiens
  misc_RNA (1)...(19): siRNA sense strand
agacagagcuaaagaagag

SEQ ID NO: 1906776 - RNA, 19 nt, Homo sapiens
  misc_RNA (1)...(19): siRNA sense strand
cagaggagguucgauuaaa

SEQ ID NO: 1906777 - RNA, 19 nt, Homo sapiens
  misc_RNA (1)...(19): siRNA sense strand
ggaugaggaugcagacaug

SEQ ID NO: 1906778 - RNA, 19 nt, Homo sapiens
  misc_RNA (1)...(19): siRNA sense strand
ccaacauggcugugaauua

SEQ ID NO: 1906779 - RNA, 19 nt, Homo sapiens
  misc_RNA (1)...(19): siRNA sense strand
augcagacaugaugaagua

SEQ ID NO: 1906780 - RNA, 19 nt, Homo sapiens
  misc_RNA (1)...(19): siRNA sense strand
ggacugucuuuaugaacuu

SEQ ID NO: 1906781 - RNA, 19 nt, Homo sapiens
  misc_RNA (1)...(19): siRNA sense strand
caaagaagaccgaggagau

SEQ ID NO: 1906782 - RNA, 19 nt, Homo sapiens
  misc_RNA (1)...(19): siRNA sense strand
gggcaaagauaagaucagu

SEQ ID NO: 1906783 - RNA, 19 nt, Homo sapiens
  misc_RNA (1)...(19): siRNA sense strand
ccgaggagaugcuuuccaa

SEQ ID NO: 1906784 - RNA, 19 nt, Homo sapiens
  misc_RNA (1)...(19): siRNA sense strand
caugaggaacagaaaguua

SEQ ID NO: 1906785 - RNA, 19 nt, Homo sapiens
  misc_RNA (1)...(19): siRNA sense strand
gaaaguuaagccaaagaau

SEQ ID NO: 1906786 - RNA, 19 nt, Homo sapiens
  misc_RNA (1)...(19): siRNA sense strand
cagagcagcagaacaagaa

SEQ ID NO: 1906787 - RNA, 19 nt, Homo sapiens
  misc_RNA (1)...(19): siRNA sense strand
gaucguggaacaugaggaa

SEQ ID NO: 1906788 - RNA, 19 nt, Homo sapiens
  misc_RNA (1)...(19): siRNA sense strand
aaaguuaagccaaagaaug

SEQ ID NO: 1906789 - RNA, 19 nt, Homo sapiens
  misc_RNA (1)...(19): siRNA sense strand
aacagaaaguuaagccaaa

SEQ ID NO: 1906790 - RNA, 19 nt, Homo sapiens
  misc_RNA (1)...(19): siRNA sense strand
gaacaugaggaacagaaag

SEQ ID NO: 1906791 - RNA, 19 nt, Homo sapiens
  misc_RNA (1)...(19): siRNA sense strand
gaggaaagggaucguggaa

SEQ ID NO: 1906792 - RNA, 19 nt, Homo sapiens
  misc_RNA (1)...(19): siRNA sense strand
gcaagcguccugcuaacga

SEQ ID NO: 1906793 - RNA, 19 nt, Homo sapiens
  misc_RNA (1)...(19): siRNA sense strand
agaggacugucuuuaugaa

SEQ ID NO: 1906794 - RNA, 19 nt, Homo sapiens
  misc_RNA (1)...(19): siRNA sense strand
ggaacaugaggaacagaaa

SEQ ID NO: 1906795 - RNA, 19 nt, Homo sapiens
  misc_RNA (1)...(19): siRNA sense strand
gcagagcagcagaacaaga

SEQ ID NO: 1906796 - RNA, 19 nt, Homo sapiens
  misc_RNA (1)...(19): siRNA sense strand
cuaccaacauggcugugaa

SEQ ID NO: 1906797 - RNA, 19 nt, Homo sapiens
  misc_RNA (1)...(19): siRNA sense strand
ucagaggagguucgauuaa

SEQ ID NO: 1906798 - RNA, 19 nt, Homo sapiens
  misc_RNA (1)...(19): siRNA sense strand
uggcagagcagcagaacaa

SEQ ID NO: 1906799 - RNA, 19 nt, Homo sapiens
  misc_RNA (1)...(19): siRNA sense strand
cagaggacugucuuuauga

SEQ ID NO: 1906800 - RNA, 19 nt, Homo sapiens
  misc_RNA (1)...(19): siRNA sense strand
gacaugaugaaguacauug

SEQ ID NO: 1906801 - RNA, 19 nt, Homo sapiens
  misc_RNA (1)...(19): siRNA sense strand
gagacagagcuaaagaaga

SEQ ID NO: 1906802 - RNA, 19 nt, Homo sapiens
  misc_RNA (1)...(19): siRNA sense strand
guacauugagacagagcua

SEQ ID NO: 1906803 - RNA, 19 nt, Homo sapiens
  misc_RNA (1)...(19): siRNA sense strand
caacagauuuuaucaugag

SEQ ID NO: 1906804 - RNA, 19 nt, Homo sapiens
  misc_RNA (1)...(19): siRNA sense strand
gugguaugguggauaugaa

SEQ ID NO: 1906805 - RNA, 19 nt, Homo sapiens
  misc_RNA (1)...(19): siRNA sense strand
cuaacgagaaggcaacuga

SEQ ID NO: 1906806 - RNA, 19 nt, Homo sapiens
  misc_RNA (1)...(19): siRNA sense strand
gaggaugcagacaugauga

SEQ ID NO: 1906807 - RNA, 19 nt, Homo sapiens
  misc_RNA (1)...(19): siRNA sense strand
cacaacagauuuuaucaug

SEQ ID NO: 1906808 - RNA, 19 nt, Homo sapiens
  misc_RNA (1)...(19): siRNA sense strand
uaugguggauaugaagaaa

SEQ ID NO: 1906809 - RNA, 19 nt, Homo sapiens
  misc_RNA (1)...(19): siRNA sense strand
gagcagcagaacaagaaga

SEQ ID NO: 1906810 - RNA, 19 nt, Homo sapiens
  misc_RNA (1)...(19): siRNA sense strand
gcagacaugaugaaguaca

SEQ ID NO: 1906811 - RNA, 19 nt, Homo sapiens
  misc_RNA (1)...(19): siRNA sense strand
agaaggcaacugaugacua

SEQ ID NO: 1906812 - RNA, 19 nt, Homo sapiens
  misc_RNA (1)...(19): siRNA sense strand
gaugaaguacauugagaca

SEQ ID NO: 1906813 - RNA, 19 nt, Homo sapiens
  misc_RNA (1)...(19): siRNA sense strand
cagcagaacaagaagaaag

SEQ ID NO: 1906814 - RNA, 19 nt, Homo sapiens
  misc_RNA (1)...(19): siRNA sense strand
gaaugcagaggacugucuu

SEQ ID NO: 1906815 - RNA, 19 nt, Homo sapiens
  misc_RNA (1)...(19): siRNA sense strand
aaagaagaccgaggagaug

SEQ ID NO: 1906816 - RNA, 19 nt, Homo sapiens
  misc_RNA (1)...(19): siRNA sense strand
cagacaugaugaaguacau

SEQ ID NO: 1906817 - RNA, 19 nt, Homo sapiens
  misc_RNA (1)...(19): siRNA sense strand
guggauaugaagaaacuga

SEQ ID NO: 1906818 - RNA, 19 nt, Homo sapiens
  misc_RNA (1)...(19): siRNA sense strand
agaaaguuaagccaaagaa

SEQ ID NO: 1906819 - RNA, 19 nt, Homo sapiens
  misc_RNA (1)...(19): siRNA sense strand
gaagaccgaggagaugcuu

SEQ ID NO: 1906820 - RNA, 19 nt, Homo sapiens
  misc_RNA (1)...(19): siRNA sense strand
gaaaggggcaaagauaaga

SEQ ID NO: 1906821 - RNA, 19 nt, Homo sapiens
  misc_RNA (1)...(19): siRNA sense strand
gagcuaaagaagaggaaag

SEQ ID NO: 1906822 - RNA, 19 nt, Homo sapiens
  misc_RNA (1)...(19): siRNA sense strand
gcaggacucagaggagguu

SEQ ID NO: 1906823 - RNA, 19 nt, Homo sapiens
  misc_RNA (1)...(19): siRNA sense strand
gaaagggaucguggaacau

SEQ ID NO: 1906824 - RNA, 19 nt, Homo sapiens
  misc_RNA (1)...(19): siRNA sense strand
acagaaaguuaagccaaag

SEQ ID NO: 1906825 - RNA, 19 nt, Homo sapiens
  misc_RNA (1)...(19): siRNA sense strand
ggagucagaggaagaugag

SEQ ID NO: 1906826 - RNA, 19 nt, Homo sapiens
  misc_RNA (1)...(19): siRNA sense strand
cuucgugccuaccaacaug

SEQ ID NO: 1906827 - RNA, 19 nt, Homo sapiens
  misc_RNA (1)...(19): siRNA sense strand
caaccgaagggaugaggau

SEQ ID NO: 1906828 - RNA, 19 nt, Homo sapiens
  misc_RNA (1)...(19): siRNA sense strand
guaugguggauaugaagaa

SEQ ID NO: 1906829 - RNA, 19 nt, Homo sapiens
  misc_RNA (1)...(19): siRNA sense strand
ugagacagagcuaaagaag

SEQ ID NO: 1906830 - RNA, 19 nt, Homo sapiens
  misc_RNA (1)...(19): siRNA sense strand
acucagaggagguucgauu

SEQ ID NO: 1906831 - RNA, 19 nt, Homo sapiens
  misc_RNA (1)...(19): siRNA sense strand
augaugaaguacauugaga

SEQ ID NO: 1906832 - RNA, 19 nt, Homo sapiens
  misc_RNA (1)...(19): siRNA sense strand
agaggagguucgauuaaaa

SEQ ID NO: 1906833 - RNA, 19 nt, Homo sapiens
  misc_RNA (1)...(19): siRNA sense strand
gggaugaggaugcagacau

SEQ ID NO: 1906834 - RNA, 19 nt, Homo sapiens
  misc_RNA (1)...(19): siRNA sense strand
aaagggaucguggaacaug

SEQ ID NO: 1906835 - RNA, 19 nt, Homo sapiens
  misc_RNA (1)...(19): siRNA sense strand
gagaaguucaagaaaauga

SEQ ID NO: 1906836 - RNA, 19 nt, Homo sapiens
  misc_RNA (1)...(19): siRNA sense strand
acgagaaggcaacugauga

SEQ ID NO: 1906837 - RNA, 19 nt, Homo sapiens
  misc_RNA (1)...(19): siRNA sense strand
cucagaggagguucgauua

SEQ ID NO: 1906838 - RNA, 19 nt, Homo sapiens
  misc_RNA (1)...(19): siRNA sense strand
augaagaaacugaaggaaa

SEQ ID NO: 1906839 - RNA, 19 nt, Homo sapiens
  misc_RNA (1)...(19): siRNA sense strand
augaggaacagaaaguuaa

SEQ ID NO: 1906840 - RNA, 19 nt, Homo sapiens
  misc_RNA (1)...(19): siRNA sense strand
cguguuuccucagcaaaga

SEQ ID NO: 1906841 - RNA, 19 nt, Homo sapiens
  misc_RNA (1)...(19): siRNA sense strand
gaagaaacugaaggaaagg

SEQ ID NO: 1906842 - RNA, 19 nt, Homo sapiens
  misc_RNA (1)...(19): siRNA sense strand
acauugagacagagcuaaa

SEQ ID NO: 1906843 - RNA, 19 nt, Homo sapiens
  misc_RNA (1)...(19): siRNA sense strand
ugaggaugcagacaugaug

SEQ ID NO: 1906844 - RNA, 19 nt, Homo sapiens
  misc_RNA (1)...(19): siRNA sense strand
aagggaucguggaacauga

SEQ ID NO: 1906845 - RNA, 19 nt, Homo sapiens
  misc_RNA (1)...(19): siRNA sense strand
gguaugguggauaugaaga

SEQ ID NO: 1906846 - RNA, 19 nt, Homo sapiens
  misc_RNA (1)...(19): siRNA sense strand
ccgaagggaugaggaugca

SEQ ID NO: 1906847 - RNA, 19 nt, Homo sapiens
  misc_RNA (1)...(19): siRNA sense strand
ggauaugaagaaacugaag

SEQ ID NO: 1906848 - RNA, 19 nt, Homo sapiens
  misc_RNA (1)...(19): siRNA sense strand
gcagcagaacaagaagaaa

SEQ ID NO: 1906849 - RNA, 19 nt, Homo sapiens
  misc_RNA (1)...(19): siRNA sense strand
gaaggaaaggggcaaagau

SEQ ID NO: 1906850 - RNA, 19 nt, Homo sapiens
  misc_RNA (1)...(19): siRNA sense strand
cagaaaguuaagccaaaga

SEQ ID NO: 1906851 - RNA, 19 nt, Homo sapiens
  misc_RNA (1)...(19): siRNA sense strand
ggacucagaggagguucga

SEQ ID NO: 1906852 - RNA, 19 nt, Homo sapiens
  misc_RNA (1)...(19): siRNA sense strand
gaagaucacucgucgcuau

SEQ ID NO: 1906853 - RNA, 19 nt, Homo sapiens
  misc_RNA (1)...(19): siRNA sense strand
cauaagaaguaccauggau

SEQ ID NO: 1906854 - RNA, 19 nt, Homo sapiens
  misc_RNA (1)...(19): siRNA sense strand
uaugucaccuucgccguua

SEQ ID NO: 1906855 - RNA, 19 nt, Homo sapiens
  misc_RNA (1)...(19): siRNA sense strand
gcagugugccaccgucauu

SEQ ID NO: 1906856 - RNA, 19 nt, Homo sapiens
  misc_RNA (1)...(19): siRNA sense strand
uguguagucucuccgcuuu

SEQ ID NO: 1906857 - RNA, 19 nt, Homo sapiens
  misc_RNA (1)...(19): siRNA sense strand
cggaccugcugaaagauuu

SEQ ID NO: 1906858 - RNA, 19 nt, Homo sapiens
  misc_RNA (1)...(19): siRNA sense strand
acccggaccugcugaaaga

SEQ ID NO: 1906859 - RNA, 19 nt, Homo sapiens
  misc_RNA (1)...(19): siRNA sense strand
gucauuggcuuuucuuauu

SEQ ID NO: 1906860 - RNA, 19 nt, Homo sapiens
  misc_RNA (1)...(19): siRNA sense strand
ccgcuuuccuucuggaugu

SEQ ID NO: 1906861 - RNA, 19 nt, Homo sapiens
  misc_RNA (1)...(19): siRNA sense strand
gcauaagaaguaccaugga

SEQ ID NO: 1906862 - RNA, 19 nt, Homo sapiens
  misc_RNA (1)...(19): siRNA sense strand
uuauugggcuucugaacuc

SEQ ID NO: 1906863 - RNA, 19 nt, Homo sapiens
  misc_RNA (1)...(19): siRNA sense strand
cagcagcagcagcauaaga

SEQ ID NO: 1906864 - RNA, 19 nt, Homo sapiens
  misc_RNA (1)...(19): siRNA sense strand
cccagcagcagcagcauaa

SEQ ID NO: 1906865 - RNA, 19 nt, Homo sapiens
  misc_RNA (1)...(19): siRNA sense strand
agcagcagcauaagaagua

SEQ ID NO: 1906866 - RNA, 19 nt, Homo sapiens
  misc_RNA (1)...(19): siRNA sense strand
ccauggaucccaggucuau

SEQ ID NO: 1906867 - RNA, 19 nt, Homo sapiens
  misc_RNA (1)...(19): siRNA sense strand
gcacccggaccugcugaaa

SEQ ID NO: 1906868 - RNA, 19 nt, Homo sapiens
  misc_RNA (1)...(19): siRNA sense strand
ucucuccgcuuuccuucug

SEQ ID NO: 1906869 - RNA, 19 nt, Homo sapiens
  misc_RNA (1)...(19): siRNA sense strand
gcccagcagcagcagcaua

SEQ ID NO: 1906870 - RNA, 19 nt, Homo sapiens
  misc_RNA (1)...(19): siRNA sense strand
ugccuucgcccauauccua

SEQ ID NO: 1906871 - RNA, 19 nt, Homo sapiens
  misc_RNA (1)...(19): siRNA sense strand
agagaggucuuuccagaua

SEQ ID NO: 1906872 - RNA, 19 nt, Homo sapiens
  misc_RNA (1)...(19): siRNA sense strand
guaacaacaucuacaauca

SEQ ID NO: 1906873 - RNA, 19 nt, Homo sapiens
  misc_RNA (1)...(19): siRNA sense strand
ugaccaagcucaucagaga

SEQ ID NO: 1906874 - RNA, 19 nt, Homo sapiens
  misc_RNA (1)...(19): siRNA sense strand
uggaaacccuggcuuagua

SEQ ID NO: 1906875 - RNA, 19 nt, Homo sapiens
  misc_RNA (1)...(19): siRNA sense strand
guccaucgcucucuucaaa

SEQ ID NO: 1906876 - RNA, 19 nt, Homo sapiens
  misc_RNA (1)...(19): siRNA sense strand
gaagcaucaucgcgucaua

SEQ ID NO: 1906877 - RNA, 19 nt, Homo sapiens
  misc_RNA (1)...(19): siRNA sense strand
gaaguaacaacaucuacaa

SEQ ID NO: 1906878 - RNA, 19 nt, Homo sapiens
  misc_RNA (1)...(19): siRNA sense strand
caacaccaaucuguacuau

SEQ ID NO: 1906879 - RNA, 19 nt, Homo sapiens
  misc_RNA (1)...(19): siRNA sense strand
acaccaaucuguacuauac

SEQ ID NO: 1906880 - RNA, 19 nt, Homo sapiens
  misc_RNA (1)...(19): siRNA sense strand
agaggcagcuguacuggaa

SEQ ID NO: 1906881 - RNA, 19 nt, Homo sapiens
  misc_RNA (1)...(19): siRNA sense strand
caucaacuccuccaucuau

SEQ ID NO: 1906882 - RNA, 19 nt, Homo sapiens
  misc_RNA (1)...(19): siRNA sense strand
gcugggagcucgaguacca

SEQ ID NO: 1906883 - RNA, 19 nt, Homo sapiens
  misc_RNA (1)...(19): siRNA sense strand
gagccagacuucauucucu

SEQ ID NO: 1906884 - RNA, 19 nt, Homo sapiens
  misc_RNA (1)...(19): siRNA sense strand
gcugaccgaugcauccaaa

SEQ ID NO: 1906885 - RNA, 19 nt, Homo sapiens
  misc_RNA (1)...(19): siRNA sense strand
gcuuucggaugcucuauga

SEQ ID NO: 1906886 - RNA, 19 nt, Homo sapiens
  misc_RNA (1)...(19): siRNA sense strand
ucgcugaccugcaccuuga

SEQ ID NO: 1906887 - RNA, 19 nt, Homo sapiens
  misc_RNA (1)...(19): siRNA sense strand
ggaaacccuggcuuaguaa

SEQ ID NO: 1906888 - RNA, 19 nt, Homo sapiens
  misc_RNA (1)...(19): siRNA sense strand
ggaaguaacaacaucuaca

SEQ ID NO: 1906889 - RNA, 19 nt, Homo sapiens
  misc_RNA (1)...(19): siRNA sense strand
cagcuguacuggaaauugu

SEQ ID NO: 1906890 - RNA, 19 nt, Homo sapiens
  misc_RNA (1)...(19): siRNA sense strand
aacaacaucuacaaucaga

SEQ ID NO: 1906891 - RNA, 19 nt, Homo sapiens
  misc_RNA (1)...(19): siRNA sense strand
gcuacuacgucuauaacuc

SEQ ID NO: 1906892 - RNA, 19 nt, Homo sapiens
  misc_RNA (1)...(19): siRNA sense strand
ccauccggguguucgaaua

SEQ ID NO: 1906893 - RNA, 19 nt, Homo sapiens
  misc_RNA (1)...(19): siRNA sense strand
gacccugacuacaagguau

SEQ ID NO: 1906894 - RNA, 19 nt, Homo sapiens
  misc_RNA (1)...(19): siRNA sense strand
gcacacugcagcgcuacua

SEQ ID NO: 1906895 - RNA, 19 nt, Homo sapiens
  misc_RNA (1)...(19): siRNA sense strand
ggacauggugaccuacuuc

SEQ ID NO: 1906896 - RNA, 19 nt, Homo sapiens
  misc_RNA (1)...(19): siRNA sense strand
ccaccacaccgacagcuuu

SEQ ID NO: 1906897 - RNA, 19 nt, Homo sapiens
  misc_RNA (1)...(19): siRNA sense strand
gugacuaccucugugauuc

SEQ ID NO: 1906898 - RNA, 19 nt, Homo sapiens
  misc_RNA (1)...(19): siRNA sense strand
acuacaagguauccaaaga

SEQ ID NO: 1906899 - RNA, 19 nt, Homo sapiens
  misc_RNA (1)...(19): siRNA sense strand
cuauggaaacccuggcuua

SEQ ID NO: 1906900 - RNA, 19 nt, Homo sapiens
  misc_RNA (1)...(19): siRNA sense strand
gggacaugguguacauugu

SEQ ID NO: 1906901 - RNA, 19 nt, Homo sapiens
  misc_RNA (1)...(19): siRNA sense strand
aacccuggcuuaguaauga

SEQ ID NO: 1906902 - RNA, 19 nt, Homo sapiens
  misc_RNA (1)...(19): siRNA sense strand
cugcucgccuggcugauuu

SEQ ID NO: 1906903 - RNA, 19 nt, Homo sapiens
  misc_RNA (1)...(19): siRNA sense strand
agguggacauugacgcuua

SEQ ID NO: 1906904 - RNA, 19 nt, Homo sapiens
  misc_RNA (1)...(19): siRNA sense strand
gaauugugguccucaacac

SEQ ID NO: 1906905 - RNA, 19 nt, Homo sapiens
  misc_RNA (1)...(19): siRNA sense strand
gcagcgcuacuacgucuau

SEQ ID NO: 1906906 - RNA, 19 nt, Homo sapiens
  misc_RNA (1)...(19): siRNA sense strand
gcagcuguacuggaaauug

SEQ ID NO: 1906907 - RNA, 19 nt, Homo sapiens
  misc_RNA (1)...(19): siRNA sense strand
gcucaucagagaggucuuu

SEQ ID NO: 1906908 - RNA, 19 nt, Homo sapiens
  misc_RNA (1)...(19): siRNA sense strand
gggcugaaccagggaaguu

SEQ ID NO: 1906909 - RNA, 19 nt, Homo sapiens
  misc_RNA (1)...(19): siRNA sense strand
cuacuacgucuauaacuca

SEQ ID NO: 1906910 - RNA, 19 nt, Homo sapiens
  misc_RNA (1)...(19): siRNA sense strand
gaugcucuaugaugaugca

SEQ ID NO: 1906911 - RNA, 19 nt, Homo sapiens
  misc_RNA (1)...(19): siRNA sense strand
gagaggucuuuccagauac

SEQ ID NO: 1906912 - RNA, 19 nt, Homo sapiens
  misc_RNA (1)...(19): siRNA sense strand
ggucuuuccagauacuaaa

SEQ ID NO: 1906913 - RNA, 19 nt, Homo sapiens
  misc_RNA (1)...(19): siRNA sense strand
gccagagccagacuucauu

SEQ ID NO: 1906914 - RNA, 19 nt, Homo sapiens
  misc_RNA (1)...(19): siRNA sense strand
ggagucaccccauggaaaa

SEQ ID NO: 1906915 - RNA, 19 nt, Homo sapiens
  misc_RNA (1)...(19): siRNA sense strand
ugacuacaagguauccaaa

SEQ ID NO: 1906916 - RNA, 19 nt, Homo sapiens
  misc_RNA (1)...(19): siRNA sense strand
acaaucagauagcagaacu

SEQ ID NO: 1906917 - RNA, 19 nt, Homo sapiens
  misc_RNA (1)...(19): siRNA sense strand
ggugacuaccucugugauu

SEQ ID NO: 1906918 - RNA, 19 nt, Homo sapiens
  misc_RNA (1)...(19): siRNA sense strand
gggagaggcagcuguacug

SEQ ID NO: 1906919 - RNA, 19 nt, Homo sapiens
  misc_RNA (1)...(19): siRNA sense strand
cgucauagcagggcaguuc

SEQ ID NO: 1906920 - RNA, 19 nt, Homo sapiens
  misc_RNA (1)...(19): siRNA sense strand
auggugaccuacuucauga

SEQ ID NO: 1906921 - RNA, 19 nt, Homo sapiens
  misc_RNA (1)...(19): siRNA sense strand
ucaacaccaaucuguacua

SEQ ID NO: 1906922 - RNA, 19 nt, Homo sapiens
  misc_RNA (1)...(19): siRNA sense strand
cggaugcucuaugaugaug

SEQ ID NO: 1906923 - RNA, 19 nt, Homo sapiens
  misc_RNA (1)...(19): siRNA sense strand
ucuaugccaugaaggagau

SEQ ID NO: 1906924 - RNA, 19 nt, Homo sapiens
  misc_RNA (1)...(19): siRNA sense strand
cauaagcgccauguucauc

SEQ ID NO: 1906925 - RNA, 19 nt, Homo sapiens
  misc_RNA (1)...(19): siRNA sense strand
gaaacccuggcuuaguaau

SEQ ID NO: 1906926 - RNA, 19 nt, Homo sapiens
  misc_RNA (1)...(19): siRNA sense strand
caucagagaggucuuucca

SEQ ID NO: 1906927 - RNA, 19 nt, Homo sapiens
  misc_RNA (1)...(19): siRNA sense strand
gcaccuugacccugacuac

SEQ ID NO: 1906928 - RNA, 19 nt, Homo sapiens
  misc_RNA (1)...(19): siRNA sense strand
uaccuggaguggucaaugg

SEQ ID NO: 1906929 - RNA, 19 nt, Homo sapiens
  misc_RNA (1)...(19): siRNA sense strand
uccagauacuaaagucuau

SEQ ID NO: 1906930 - RNA, 19 nt, Homo sapiens
  misc_RNA (1)...(19): siRNA sense strand
uaacaacaucuacaaucag

SEQ ID NO: 1906931 - RNA, 19 nt, Homo sapiens
  misc_RNA (1)...(19): siRNA sense strand
uagcagaacuauggaaacc

SEQ ID NO: 1906932 - RNA, 19 nt, Homo sapiens
  misc_RNA (1)...(19): siRNA sense strand
cagcgcuacuacgucuaua

SEQ ID NO: 1906933 - RNA, 19 nt, Homo sapiens
  misc_RNA (1)...(19): siRNA sense strand
uucggaugcucuaugauga

SEQ ID NO: 1906934 - RNA, 19 nt, Homo sapiens
  misc_RNA (1)...(19): siRNA sense strand
cgaauugugguccucaaca

SEQ ID NO: 1906935 - RNA, 19 nt, Homo sapiens
  misc_RNA (1)...(19): siRNA sense strand
ccaucuaugccaugaagga

SEQ ID NO: 1906936 - RNA, 19 nt, Homo sapiens
  misc_RNA (1)...(19): siRNA sense strand
gccaggcucaccauucuuc

SEQ ID NO: 1906937 - RNA, 19 nt, Homo sapiens
  misc_RNA (1)...(19): siRNA sense strand
gcuuacaccaccugucugu

SEQ ID NO: 1906938 - RNA, 19 nt, Homo sapiens
  misc_RNA (1)...(19): siRNA sense strand
cccauaagcgccauguuca

SEQ ID NO: 1906939 - RNA, 19 nt, Homo sapiens
  misc_RNA (1)...(19): siRNA sense strand
gcaggagccucucagcuuu

SEQ ID NO: 1906940 - RNA, 19 nt, Homo sapiens
  misc_RNA (1)...(19): siRNA sense strand
gcaggucccagaacaguuu

SEQ ID NO: 1906941 - RNA, 19 nt, Homo sapiens
  misc_RNA (1)...(19): siRNA sense strand
gggcuccaauuaugaaaug

SEQ ID NO: 1906942 - RNA, 19 nt, Homo sapiens
  misc_RNA (1)...(19): siRNA sense strand
ggagucuguuugcuguuaa

SEQ ID NO: 1906943 - RNA, 19 nt, Homo sapiens
  misc_RNA (1)...(19): siRNA sense strand
gagauauaaccaagaacua

SEQ ID NO: 1906944 - RNA, 19 nt, Homo sapiens
  misc_RNA (1)...(19): siRNA sense strand
aagcuaaagcacacaaaua

SEQ ID NO: 1906945 - RNA, 19 nt, Homo sapiens
  misc_RNA (1)...(19): siRNA sense strand
uggagucuguuugcuguua

SEQ ID NO: 1906946 - RNA, 19 nt, Homo sapiens
  misc_RNA (1)...(19): siRNA sense strand
aaacuuagcacagcucaau

SEQ ID NO: 1906947 - RNA, 19 nt, Homo sapiens
  misc_RNA (1)...(19): siRNA sense strand
uuugauggcuacaggguuu

SEQ ID NO: 1906948 - RNA, 19 nt, Homo sapiens
  misc_RNA (1)...(19): siRNA sense strand
ggagauauaaccaagaacu

SEQ ID NO: 1906949 - RNA, 19 nt, Homo sapiens
  misc_RNA (1)...(19): siRNA sense strand
ucuguuugcuguuaauuuc

SEQ ID NO: 1906950 - RNA, 19 nt, Homo sapiens
  misc_RNA (1)...(19): siRNA sense strand
guuggugugugcuggauug

SEQ ID NO: 1906951 - RNA, 19 nt, Homo sapiens
  misc_RNA (1)...(19): siRNA sense strand
ggguuuauuuggucaagau

SEQ ID NO: 1906952 - RNA, 19 nt, Homo sapiens
  misc_RNA (1)...(19): siRNA sense strand
gcuacaggguuuauuuggu

SEQ ID NO: 1906953 - RNA, 19 nt, Homo sapiens
  misc_RNA (1)...(19): siRNA sense strand
gugcuggauuggcugauau

SEQ ID NO: 1906954 - RNA, 19 nt, Homo sapiens
  misc_RNA (1)...(19): siRNA sense strand
agcuaaagcacacaaauaa

SEQ ID NO: 1906955 - RNA, 19 nt, Homo sapiens
  misc_RNA (1)...(19): siRNA sense strand
agaaauugaggccguugua

SEQ ID NO: 1906956 - RNA, 19 nt, Homo sapiens
  misc_RNA (1)...(19): siRNA sense strand
gaugcugcccgagaaauug

SEQ ID NO: 1906957 - RNA, 19 nt, Homo sapiens
  misc_RNA (1)...(19): siRNA sense strand
gaaauugaggccguuguac

SEQ ID NO: 1906958 - RNA, 19 nt, Homo sapiens
  misc_RNA (1)...(19): siRNA sense strand
ucgauaaaguggagcugau

SEQ ID NO: 1906959 - RNA, 19 nt, Homo sapiens
  misc_RNA (1)...(19): siRNA sense strand
ugugcuggauuggcugaua

SEQ ID NO: 1906960 - RNA, 19 nt, Homo sapiens
  misc_RNA (1)...(19): siRNA sense strand
gagucuguuugcuguuaau

SEQ ID NO: 1906961 - RNA, 19 nt, Homo sapiens
  misc_RNA (1)...(19): siRNA sense strand
accaccggcuccucgauaa

SEQ ID NO: 1906962 - RNA, 19 nt, Homo sapiens
  misc_RNA (1)...(19): siRNA sense strand
uaccaccggcuccucgaua

SEQ ID NO: 1906963 - RNA, 19 nt, Homo sapiens
  misc_RNA (1)...(19): siRNA sense strand
ugaugcugcccgagaaauu

SEQ ID NO: 1906964 - RNA, 19 nt, Homo sapiens
  misc_RNA (1)...(19): siRNA sense strand
aaauugaggccguuguaca

SEQ ID NO: 1906965 - RNA, 19 nt, Homo sapiens
  misc_RNA (1)...(19): siRNA sense strand
aaagcuaaagcacacaaau

SEQ ID NO: 1906966 - RNA, 19 nt, Homo sapiens
  misc_RNA (1)...(19): siRNA sense strand
accaagaacuaaaagcuaa

SEQ ID NO: 1906967 - RNA, 19 nt, Homo sapiens
  misc_RNA (1)...(19): siRNA sense strand
ggaccuuccucaacuacua

SEQ ID NO: 1906968 - RNA, 19 nt, Homo sapiens
  misc_RNA (1)...(19): siRNA sense strand
gaacgccucuguguuugaa

SEQ ID NO: 1906969 - RNA, 19 nt, Homo sapiens
  misc_RNA (1)...(19): siRNA sense strand
ggccagaacuuauugaaag

SEQ ID NO: 1906970 - RNA, 19 nt, Homo sapiens
  misc_RNA (1)...(19): siRNA sense strand
ggaauucuacucucucaaa

SEQ ID NO: 1906971 - RNA, 19 nt, Homo sapiens
  misc_RNA (1)...(19): siRNA sense strand
cggaagagaugcuguggaa

SEQ ID NO: 1906972 - RNA, 19 nt, Homo sapiens
  misc_RNA (1)...(19): siRNA sense strand
gaagagaugcuguggaauc

SEQ ID NO: 1906973 - RNA, 19 nt, Homo sapiens
  misc_RNA (1)...(19): siRNA sense strand
gaacuacacccgcuucgau

SEQ ID NO: 1906974 - RNA, 19 nt, Homo sapiens
  misc_RNA (1)...(19): siRNA sense strand
gccagaggcugaaggaaga

SEQ ID NO: 1906975 - RNA, 19 nt, Homo sapiens
  misc_RNA (1)...(19): siRNA sense strand
ggacuuugauauugaugug

SEQ ID NO: 1906976 - RNA, 19 nt, Homo sapiens
  misc_RNA (1)...(19): siRNA sense strand
cgagagggcuacccacuuc

SEQ ID NO: 1906977 - RNA, 19 nt, Homo sapiens
  misc_RNA (1)...(19): siRNA sense strand
ugggagagccggucagaua

SEQ ID NO: 1906978 - RNA, 19 nt, Homo sapiens
  misc_RNA (1)...(19): siRNA sense strand
ccacuucggccagaacuua

SEQ ID NO: 1906979 - RNA, 19 nt, Homo sapiens
  misc_RNA (1)...(19): siRNA sense strand
ccauguuccuagaguauaa

SEQ ID NO: 1906980 - RNA, 19 nt, Homo sapiens
  misc_RNA (1)...(19): siRNA sense strand
caaccaacuucauccacaa

SEQ ID NO: 1906981 - RNA, 19 nt, Homo sapiens
  misc_RNA (1)...(19): siRNA sense strand
cuggacaccuugcugauuu

SEQ ID NO: 1906982 - RNA, 19 nt, Homo sapiens
  misc_RNA (1)...(19): siRNA sense strand
gaggaagccugccaaacag

SEQ ID NO: 1906983 - RNA, 19 nt, Homo sapiens
  misc_RNA (1)...(19): siRNA sense strand
gagccucauuggagacauu

SEQ ID NO: 1906984 - RNA, 19 nt, Homo sapiens
  misc_RNA (1)...(19): siRNA sense strand
caagguggagugcggauuu

SEQ ID NO: 1906985 - RNA, 19 nt, Homo sapiens
  misc_RNA (1)...(19): siRNA sense strand
ccaaagagugguugaagug

SEQ ID NO: 1906986 - RNA, 19 nt, Homo sapiens
  misc_RNA (1)...(19): siRNA sense strand
caacauuccucagggauac

SEQ ID NO: 1906987 - RNA, 19 nt, Homo sapiens
  misc_RNA (1)...(19): siRNA sense strand
acaaagccauccggaacua

SEQ ID NO: 1906988 - RNA, 19 nt, Homo sapiens
  misc_RNA (1)...(19): siRNA sense strand
gcguggacuuugauauuga

SEQ ID NO: 1906989 - RNA, 19 nt, Homo sapiens
  misc_RNA (1)...(19): siRNA sense strand
ugugaacgccucuguguuu

SEQ ID NO: 1906990 - RNA, 19 nt, Homo sapiens
  misc_RNA (1)...(19): siRNA sense strand
cagcguggacuuugauauu

SEQ ID NO: 1906991 - RNA, 19 nt, Homo sapiens
  misc_RNA (1)...(19): siRNA sense strand
uggccgagacugugaaaua

SEQ ID NO: 1906992 - RNA, 19 nt, Homo sapiens
  misc_RNA (1)...(19): siRNA sense strand
gaugugaacgccucugugu

SEQ ID NO: 1906993 - RNA, 19 nt, Homo sapiens
  misc_RNA (1)...(19): siRNA sense strand
agaggaagccugccaaaca

SEQ ID NO: 1906994 - RNA, 19 nt, Homo sapiens
  misc_RNA (1)...(19): siRNA sense strand
gcucaucugcucuccaaga

SEQ ID NO: 1906995 - RNA, 19 nt, Homo sapiens
  misc_RNA (1)...(19): siRNA sense strand
ggaagccugccaaacagaa

SEQ ID NO: 1906996 - RNA, 19 nt, Homo sapiens
  misc_RNA (1)...(19): siRNA sense strand
guuccuagaguauaacaaa

SEQ ID NO: 1906997 - RNA, 19 nt, Homo sapiens
  misc_RNA (1)...(19): siRNA sense strand
ggcguggacuccuacuuug

SEQ ID NO: 1906998 - RNA, 19 nt, Homo sapiens
  misc_RNA (1)...(19): siRNA sense strand
aacaaacauucgaguggua

SEQ ID NO: 1906999 - RNA, 19 nt, Homo sapiens
  misc_RNA (1)...(19): siRNA sense strand
ggagaggaagccugccaaa

SEQ ID NO: 1907000 - RNA, 19 nt, Homo sapiens
  misc_RNA (1)...(19): siRNA sense strand
gaauucuacucucucaaac

SEQ ID NO: 1907001 - RNA, 19 nt, Homo sapiens
  misc_RNA (1)...(19): siRNA sense strand
ggagguggaggacuugaug

SEQ ID NO: 1907002 - RNA, 19 nt, Homo sapiens
  misc_RNA (1)...(19): siRNA sense strand
ggauugggaccuucauugu

SEQ ID NO: 1907003 - RNA, 19 nt, Homo sapiens
  misc_RNA (1)...(19): siRNA sense strand
ggacagcguggacuuugau

SEQ ID NO: 1907004 - RNA, 19 nt, Homo sapiens
  misc_RNA (1)...(19): siRNA sense strand
gcaggucgaaauuucagaa

SEQ ID NO: 1907005 - RNA, 19 nt, Homo sapiens
  misc_RNA (1)...(19): siRNA sense strand
caacuucauccacaacaau

SEQ ID NO: 1907006 - RNA, 19 nt, Homo sapiens
  misc_RNA (1)...(19): siRNA sense strand
gggauugggaccuucauug

SEQ ID NO: 1907007 - RNA, 19 nt, Homo sapiens
  misc_RNA (1)...(19): siRNA sense strand
gauugggaccuucauuguu

SEQ ID NO: 1907008 - RNA, 19 nt, Homo sapiens
  misc_RNA (1)...(19): siRNA sense strand
guacaucuucaacacagaa

SEQ ID NO: 1907009 - RNA, 19 nt, Homo sapiens
  misc_RNA (1)...(19): siRNA sense strand
ccaacuucauccacaacaa

SEQ ID NO: 1907010 - RNA, 19 nt, Homo sapiens
  misc_RNA (1)...(19): siRNA sense strand
auugggaccuucauuguug

SEQ ID NO: 1907011 - RNA, 19 nt, Homo sapiens
  misc_RNA (1)...(19): siRNA sense strand
ucucagaauuccaaagagu

SEQ ID NO: 1907012 - RNA, 19 nt, Homo sapiens
  misc_RNA (1)...(19): siRNA sense strand
gcccuucaccuccaaguug

SEQ ID NO: 1907013 - RNA, 19 nt, Homo sapiens
  misc_RNA (1)...(19): siRNA sense strand
gagucaaggccauguucua

SEQ ID NO: 1907014 - RNA, 19 nt, Homo sapiens
  misc_RNA (1)...(19): siRNA sense strand
ucgaagauguggccagagu

SEQ ID NO: 1907015 - RNA, 19 nt, Homo sapiens
  misc_RNA (1)...(19): siRNA sense strand
gaggcuggauggcccuguu

SEQ ID NO: 1907016 - RNA, 19 nt, Homo sapiens
  misc_RNA (1)...(19): siRNA sense strand
caagaaggcugggguggaa

SEQ ID NO: 1907017 - RNA, 19 nt, Homo sapiens
  misc_RNA (1)...(19): siRNA sense strand
gugaacgccucuguguuug

SEQ ID NO: 1907018 - RNA, 19 nt, Homo sapiens
  misc_RNA (1)...(19): siRNA sense strand
ucaaggccauguucuacca

SEQ ID NO: 1907019 - RNA, 19 nt, Homo sapiens
  misc_RNA (1)...(19): siRNA sense strand
gggagagccggucagauau

SEQ ID NO: 1907020 - RNA, 19 nt, Homo sapiens
  misc_RNA (1)...(19): siRNA sense strand
ggacuccugucugcucauc

SEQ ID NO: 1907021 - RNA, 19 nt, Homo sapiens
  misc_RNA (1)...(19): siRNA sense strand
acagcuaccuggagaaugc

SEQ ID NO: 1907022 - RNA, 19 nt, Homo sapiens
  misc_RNA (1)...(19): siRNA sense strand
gcauuacugggacagguuu

SEQ ID NO: 1907023 - RNA, 19 nt, Homo sapiens
  misc_RNA (1)...(19): siRNA sense strand
ugagggaauucuacucucu

SEQ ID NO: 1907024 - RNA, 19 nt, Homo sapiens
  misc_RNA (1)...(19): siRNA sense strand
gaugagggaauucuacucu

SEQ ID NO: 1907025 - RNA, 19 nt, Homo sapiens
  misc_RNA (1)...(19): siRNA sense strand
ggccgagacugugaaauac

SEQ ID NO: 1907026 - RNA, 19 nt, Homo sapiens
  misc_RNA (1)...(19): siRNA sense strand
ggagugcggauuugcaaca

SEQ ID NO: 1907027 - RNA, 19 nt, Homo sapiens
  misc_RNA (1)...(19): siRNA sense strand
gaaugccuuucccuucgau

SEQ ID NO: 1907028 - RNA, 19 nt, Homo sapiens
  misc_RNA (1)...(19): siRNA sense strand
gccaggaacacucuucuca

SEQ ID NO: 1907029 - RNA, 19 nt, Homo sapiens
  misc_RNA (1)...(19): siRNA sense strand
uggcguggacuccuacuuu

SEQ ID NO: 1907030 - RNA, 19 nt, Homo sapiens
  misc_RNA (1)...(19): siRNA sense strand
ggagagccggucagauauc

SEQ ID NO: 1907031 - RNA, 19 nt, Homo sapiens
  misc_RNA (1)...(19): siRNA sense strand
uuuccuagacuccucauaa

SEQ ID NO: 1907032 - RNA, 19 nt, Homo sapiens
  misc_RNA (1)...(19): siRNA sense strand
cugcucaucugcucuccaa

SEQ ID NO: 1907033 - RNA, 19 nt, Homo sapiens
  misc_RNA (1)...(19): siRNA sense strand
cuagaacucggaagagaug

SEQ ID NO: 1907034 - RNA, 19 nt, Homo sapiens
  misc_RNA (1)...(19): siRNA sense strand
ggucuucagagccucauug

SEQ ID NO: 1907035 - RNA, 19 nt, Homo sapiens
  misc_RNA (1)...(19): siRNA sense strand
gagagccggucagauaucg

SEQ ID NO: 1907036 - RNA, 19 nt, Homo sapiens
  misc_RNA (1)...(19): siRNA sense strand
gagugcggauuugcaacaa

SEQ ID NO: 1907037 - RNA, 19 nt, Homo sapiens
  misc_RNA (1)...(19): siRNA sense strand
acaacauuccucagggaua

SEQ ID NO: 1907038 - RNA, 19 nt, Homo sapiens
  misc_RNA (1)...(19): siRNA sense strand
aaacggugcaggucgaaau

SEQ ID NO: 1907039 - RNA, 19 nt, Homo sapiens
  misc_RNA (1)...(19): siRNA sense strand
gcgagagggcuacccacuu

SEQ ID NO: 1907040 - RNA, 19 nt, Homo sapiens
  misc_RNA (1)...(19): siRNA sense strand
auauggaacagugaacuua

SEQ ID NO: 1907041 - RNA, 19 nt, Homo sapiens
  misc_RNA (1)...(19): siRNA sense strand
gcaaggccaggaacacucu

SEQ ID NO: 1907042 - RNA, 19 nt, Homo sapiens
  misc_RNA (1)...(19): siRNA sense strand
gguacaucuucaacacaga

SEQ ID NO: 1907043 - RNA, 19 nt, Homo sapiens
  misc_RNA (1)...(19): siRNA sense strand
ggaucccacccuccuagaa

SEQ ID NO: 1907044 - RNA, 19 nt, Homo sapiens
  misc_RNA (1)...(19): siRNA sense strand
cuacuggccuggucuucag

SEQ ID NO: 1907045 - RNA, 19 nt, Homo sapiens
  misc_RNA (1)...(19): siRNA sense strand
ggccauguuccuagaguau

SEQ ID NO: 1907046 - RNA, 19 nt, Homo sapiens
  misc_RNA (1)...(19): siRNA sense strand
gugacccgguguucgaaga

SEQ ID NO: 1907047 - RNA, 19 nt, Homo sapiens
  misc_RNA (1)...(19): siRNA sense strand
ggaacagugaacuuacuuc

SEQ ID NO: 1907048 - RNA, 19 nt, Homo sapiens
  misc_RNA (1)...(19): siRNA sense strand
caguuucucucugacucua

SEQ ID NO: 1907049 - RNA, 19 nt, Homo sapiens
  misc_RNA (1)...(19): siRNA sense strand
cggugcaggucgaaauuuc

SEQ ID NO: 1907050 - RNA, 19 nt, Homo sapiens
  misc_RNA (1)...(19): siRNA sense strand
uugcaacaaucaaagaucu

SEQ ID NO: 1907051 - RNA, 19 nt, Homo sapiens
  misc_RNA (1)...(19): siRNA sense strand
ugucucagaauuccaaaga

SEQ ID NO: 1907052 - RNA, 19 nt, Homo sapiens
  misc_RNA (1)...(19): siRNA sense strand
cggcagggauugggaccuu

SEQ ID NO: 1907053 - RNA, 19 nt, Homo sapiens
  misc_RNA (1)...(19): siRNA sense strand
cgacagcuaccuggagaau

SEQ ID NO: 1907054 - RNA, 19 nt, Homo sapiens
  misc_RNA (1)...(19): siRNA sense strand
uugaugcacuggacaccuu

SEQ ID NO: 1907055 - RNA, 19 nt, Homo sapiens
  misc_RNA (1)...(19): siRNA sense strand
gcagggauugggaccuuca

SEQ ID NO: 1907056 - RNA, 19 nt, Homo sapiens
  misc_RNA (1)...(19): siRNA sense strand
agugggagguggaggacuu

SEQ ID NO: 1907057 - RNA, 19 nt, Homo sapiens
  misc_RNA (1)...(19): siRNA sense strand
cucaucugcucuccaagaa

SEQ ID NO: 1907058 - RNA, 19 nt, Homo sapiens
  misc_RNA (1)...(19): siRNA sense strand
ccaggacagcguggacuuu

SEQ ID NO: 1907059 - RNA, 19 nt, Homo sapiens
  misc_RNA (1)...(19): siRNA sense strand
uccaaagagugguugaagu

SEQ ID NO: 1907060 - RNA, 19 nt, Homo sapiens
  misc_RNA (1)...(19): siRNA sense strand
acaaugccaugaggaccuu

SEQ ID NO: 1907061 - RNA, 19 nt, Homo sapiens
  misc_RNA (1)...(19): siRNA sense strand
gccauguuccuagaguaua

SEQ ID NO: 1907062 - RNA, 19 nt, Homo sapiens
  misc_RNA (1)...(19): siRNA sense strand
cauauggaacagugaacuu

SEQ ID NO: 1907063 - RNA, 19 nt, Homo sapiens
  misc_RNA (1)...(19): siRNA sense strand
gacagcguggacuuugaua

SEQ ID NO: 1907064 - RNA, 19 nt, Homo sapiens
  misc_RNA (1)...(19): siRNA sense strand
ggacagguuuuccuagacu

SEQ ID NO: 1907065 - RNA, 19 nt, Homo sapiens
  misc_RNA (1)...(19): siRNA sense strand
agaaugccuuucccuucga

SEQ ID NO: 1907066 - RNA, 19 nt, Homo sapiens
  misc_RNA (1)...(19): siRNA sense strand
gagguggaggacuugauga

SEQ ID NO: 1907067 - RNA, 19 nt, Homo sapiens
  misc_RNA (1)...(19): siRNA sense strand
gcacugaugggcucacaua

SEQ ID NO: 1907068 - RNA, 19 nt, Homo sapiens
  misc_RNA (1)...(19): siRNA sense strand
caagaaugcccaucuguga

SEQ ID NO: 1907069 - RNA, 19 nt, Homo sapiens
  misc_RNA (1)...(19): siRNA sense strand
caugaaagauggcaaaugc

SEQ ID NO: 1907070 - RNA, 19 nt, Homo sapiens
  misc_RNA (1)...(19): siRNA sense strand
ucacauauacgaaugaaug

SEQ ID NO: 1907071 - RNA, 19 nt, Homo sapiens
  misc_RNA (1)...(19): siRNA sense strand
ggacauccagaucaugaaa

SEQ ID NO: 1907072 - RNA, 19 nt, Homo sapiens
  misc_RNA (1)...(19): siRNA sense strand
gaucaugaaagauggcaaa

SEQ ID NO: 1907073 - RNA, 19 nt, Homo sapiens
  misc_RNA (1)...(19): siRNA sense strand
aaacaggacauccagauca

SEQ ID NO: 1907074 - RNA, 19 nt, Homo sapiens
  misc_RNA (1)...(19): siRNA sense strand
cugaugggcucacauauac

SEQ ID NO: 1907075 - RNA, 19 nt, Homo sapiens
  misc_RNA (1)...(19): siRNA sense strand
gcucacauauacgaaugaa

SEQ ID NO: 1907076 - RNA, 19 nt, Homo sapiens
  misc_RNA (1)...(19): siRNA sense strand
gggcucacauauacgaaug

SEQ ID NO: 1907077 - RNA, 19 nt, Homo sapiens
  misc_RNA (1)...(19): siRNA sense strand
acauccagaucaugaaaga

SEQ ID NO: 1907078 - RNA, 19 nt, Homo sapiens
  misc_RNA (1)...(19): siRNA sense strand
caggacauccagaucauga

SEQ ID NO: 1907079 - RNA, 19 nt, Homo sapiens
  misc_RNA (1)...(19): siRNA sense strand
ccaaacaggacauccagau

SEQ ID NO: 1907080 - RNA, 19 nt, Homo sapiens
  misc_RNA (1)...(19): siRNA sense strand
acugaugggcucacauaua

SEQ ID NO: 1907081 - RNA, 19 nt, Homo sapiens
  misc_RNA (1)...(19): siRNA sense strand
gaugggcucacauauacga

SEQ ID NO: 1907082 - RNA, 19 nt, Homo sapiens
  misc_RNA (1)...(19): siRNA sense strand
gaaugcccaucugugaaca

SEQ ID NO: 1907083 - RNA, 19 nt, Homo sapiens
  misc_RNA (1)...(19): siRNA sense strand
caaacaggacauccagauc

SEQ ID NO: 1907084 - RNA, 19 nt, Homo sapiens
  misc_RNA (1)...(19): siRNA sense strand
uggcugcccuccuuguugu

SEQ ID NO: 1907085 - RNA, 19 nt, Homo sapiens
  misc_RNA (1)...(19): siRNA sense strand
ucucaagaaugcccaucug

SEQ ID NO: 1907086 - RNA, 19 nt, Homo sapiens
  misc_RNA (1)...(19): siRNA sense strand
uagagucuccaaccuguuc

SEQ ID NO: 1907087 - RNA, 19 nt, Homo sapiens
  misc_RNA (1)...(19): siRNA sense strand
aagaaugcccaucugugaa

SEQ ID NO: 1907088 - RNA, 19 nt, Homo sapiens
  misc_RNA (1)...(19): siRNA sense strand
ggacagagagcguuucaca

SEQ ID NO: 1907089 - RNA, 19 nt, Homo sapiens
  misc_RNA (1)...(19): siRNA sense strand
gcaguucacccaucucgaa

SEQ ID NO: 1907090 - RNA, 19 nt, Homo sapiens
  misc_RNA (1)...(19): siRNA sense strand
ggaaacagaccuucuacgu

SEQ ID NO: 1907091 - RNA, 19 nt, Homo sapiens
  misc_RNA (1)...(19): siRNA sense strand
cgacugaaguuggcacaga

SEQ ID NO: 1907092 - RNA, 19 nt, Homo sapiens
  misc_RNA (1)...(19): siRNA sense strand
acgcagagacugagaaauu

SEQ ID NO: 1907093 - RNA, 19 nt, Homo sapiens
  misc_RNA (1)...(19): siRNA sense strand
guugguauccuguaucuga

SEQ ID NO: 1907094 - RNA, 19 nt, Homo sapiens
  misc_RNA (1)...(19): siRNA sense strand
ccaccaggcuauuacuugu

SEQ ID NO: 1907095 - RNA, 19 nt, Homo sapiens
  misc_RNA (1)...(19): siRNA sense strand
cgaaggagaaacuaccaaa

SEQ ID NO: 1907096 - RNA, 19 nt, Homo sapiens
  misc_RNA (1)...(19): siRNA sense strand
uggaugagcuauuucuuac

SEQ ID NO: 1907097 - RNA, 19 nt, Homo sapiens
  misc_RNA (1)...(19): siRNA sense strand
guucacccaucucgaagga

SEQ ID NO: 1907098 - RNA, 19 nt, Homo sapiens
  misc_RNA (1)...(19): siRNA sense strand
acagagagcguuucacaca

SEQ ID NO: 1907099 - RNA, 19 nt, Homo sapiens
  misc_RNA (1)...(19): siRNA sense strand
cuggaugagcuauuucuua

SEQ ID NO: 1907100 - RNA, 19 nt, Homo sapiens
  misc_RNA (1)...(19): siRNA sense strand
gguauccuguaucugaaug

SEQ ID NO: 1907101 - RNA, 19 nt, Homo sapiens
  misc_RNA (1)...(19): siRNA sense strand
uuacggagacugguuggua

SEQ ID NO: 1907102 - RNA, 19 nt, Homo sapiens
  misc_RNA (1)...(19): siRNA sense strand
gcuggcggcaggacacaua

SEQ ID NO: 1907103 - RNA, 19 nt, Homo sapiens
  misc_RNA (1)...(19): siRNA sense strand
ggagauguuugugcguauc

SEQ ID NO: 1907104 - RNA, 19 nt, Homo sapiens
  misc_RNA (1)...(19): siRNA sense strand
aaacgcagagacugagaaa

SEQ ID NO: 1907105 - RNA, 19 nt, Homo sapiens
  misc_RNA (1)...(19): siRNA sense strand
cgcagagacugagaaauuc

SEQ ID NO: 1907106 - RNA, 19 nt, Homo sapiens
  misc_RNA (1)...(19): siRNA sense strand
ugugcuggaugagcuauuu

SEQ ID NO: 1907107 - RNA, 19 nt, Homo sapiens
  misc_RNA (1)...(19): siRNA sense strand
gugggaaacagaccuucua

SEQ ID NO: 1907108 - RNA, 19 nt, Homo sapiens
  misc_RNA (1)...(19): siRNA sense strand
gaaggagaaacuaccaaac

SEQ ID NO: 1907109 - RNA, 19 nt, Homo sapiens
  misc_RNA (1)...(19): siRNA sense strand
uacggagacugguugguau

SEQ ID NO: 1907110 - RNA, 19 nt, Homo sapiens
  misc_RNA (1)...(19): siRNA sense strand
ggguuccugucacgacuga

SEQ ID NO: 1907111 - RNA, 19 nt, Homo sapiens
  misc_RNA (1)...(19): siRNA sense strand
gacgcauccuggacagaga

SEQ ID NO: 1907112 - RNA, 19 nt, Homo sapiens
  misc_RNA (1)...(19): siRNA sense strand
caaacgcagagacugagaa

SEQ ID NO: 1907113 - RNA, 19 nt, Homo sapiens
  misc_RNA (1)...(19): siRNA sense strand
ucccauggcagaugugauu

SEQ ID NO: 1907114 - RNA, 19 nt, Homo sapiens
  misc_RNA (1)...(19): siRNA sense strand
gccaccaggcuauuacuug

SEQ ID NO: 1907115 - RNA, 19 nt, Homo sapiens
  misc_RNA (1)...(19): siRNA sense strand
uaccaaacgcagagacuga

SEQ ID NO: 1907116 - RNA, 19 nt, Homo sapiens
  misc_RNA (1)...(19): siRNA sense strand
ggcagcaguucacccaucu

SEQ ID NO: 1907117 - RNA, 19 nt, Homo sapiens
  misc_RNA (1)...(19): siRNA sense strand
caccaggcuauuacuugua

SEQ ID NO: 1907118 - RNA, 19 nt, Homo sapiens
  misc_RNA (1)...(19): siRNA sense strand
accaugcugugcuggauga

SEQ ID NO: 1907119 - RNA, 19 nt, Homo sapiens
  misc_RNA (1)...(19): siRNA sense strand
ugaccaugcugugcuggau

SEQ ID NO: 1907120 - RNA, 19 nt, Homo sapiens
  misc_RNA (1)...(19): siRNA sense strand
ggagaucacuguagaauug

SEQ ID NO: 1907121 - RNA, 19 nt, Homo sapiens
  misc_RNA (1)...(19): siRNA sense strand
cgacagcaguccaggauua

SEQ ID NO: 1907122 - RNA, 19 nt, Homo sapiens
  misc_RNA (1)...(19): siRNA sense strand
gaugaagucuccagcuuug

SEQ ID NO: 1907123 - RNA, 19 nt, Homo sapiens
  misc_RNA (1)...(19): siRNA sense strand
gaacagugauuaacaagcu

SEQ ID NO: 1907124 - RNA, 19 nt, Homo sapiens
  misc_RNA (1)...(19): siRNA sense strand
cagacauccugaagaauua

SEQ ID NO: 1907125 - RNA, 19 nt, Homo sapiens
  misc_RNA (1)...(19): siRNA sense strand
gaagaagaugugcaaagua

SEQ ID NO: 1907126 - RNA, 19 nt, Homo sapiens
  misc_RNA (1)...(19): siRNA sense strand
gcacaaccgcguagaaaug

SEQ ID NO: 1907127 - RNA, 19 nt, Homo sapiens
  misc_RNA (1)...(19): siRNA sense strand
aagaagaugugcaaaguau

SEQ ID NO: 1907128 - RNA, 19 nt, Homo sapiens
  misc_RNA (1)...(19): siRNA sense strand
gaagcagacaugcccuuua

SEQ ID NO: 1907129 - RNA, 19 nt, Homo sapiens
  misc_RNA (1)...(19): siRNA sense strand
ggaauaaaaucacucaaga

SEQ ID NO: 1907130 - RNA, 19 nt, Homo sapiens
  misc_RNA (1)...(19): siRNA sense strand
caacguggcauaccucuau

SEQ ID NO: 1907131 - RNA, 19 nt, Homo sapiens
  misc_RNA (1)...(19): siRNA sense strand
acacaagaauccuuugaga

SEQ ID NO: 1907132 - RNA, 19 nt, Homo sapiens
  misc_RNA (1)...(19): siRNA sense strand
caaccugggugacaagugu

SEQ ID NO: 1907133 - RNA, 19 nt, Homo sapiens
  misc_RNA (1)...(19): siRNA sense strand
ugaagaagaugugcaaagu

SEQ ID NO: 1907134 - RNA, 19 nt, Homo sapiens
  misc_RNA (1)...(19): siRNA sense strand
uaaaaucacucaagacaug

SEQ ID NO: 1907135 - RNA, 19 nt, Homo sapiens
  misc_RNA (1)...(19): siRNA sense strand
gauggugccuugcuguguu

SEQ ID NO: 1907136 - RNA, 19 nt, Homo sapiens
  misc_RNA (1)...(19): siRNA sense strand
guagaauuguaguggauga

SEQ ID NO: 1907137 - RNA, 19 nt, Homo sapiens
  misc_RNA (1)...(19): siRNA sense strand
caacaacagcuacgaguca

SEQ ID NO: 1907138 - RNA, 19 nt, Homo sapiens
  misc_RNA (1)...(19): siRNA sense strand
acaagaauccuuugagaug

SEQ ID NO: 1907139 - RNA, 19 nt, Homo sapiens
  misc_RNA (1)...(19): siRNA sense strand
gaagaugugcaaaguaugg

SEQ ID NO: 1907140 - RNA, 19 nt, Homo sapiens
  misc_RNA (1)...(19): siRNA sense strand
gaguguuucugcugucuga

SEQ ID NO: 1907141 - RNA, 19 nt, Homo sapiens
  misc_RNA (1)...(19): siRNA sense strand
guggaacagugauuaacaa

SEQ ID NO: 1907142 - RNA, 19 nt, Homo sapiens
  misc_RNA (1)...(19): siRNA sense strand
ccagagguuugacauggaa

SEQ ID NO: 1907143 - RNA, 19 nt, Homo sapiens
  misc_RNA (1)...(19): siRNA sense strand
caagugauccucccaccuu

SEQ ID NO: 1907144 - RNA, 19 nt, Homo sapiens
  misc_RNA (1)...(19): siRNA sense strand
gcugaagguuguuaagaag

SEQ ID NO: 1907145 - RNA, 19 nt, Homo sapiens
  misc_RNA (1)...(19): siRNA sense strand
gcaguguccugaguacaga

SEQ ID NO: 1907146 - RNA, 19 nt, Homo sapiens
  misc_RNA (1)...(19): siRNA sense strand
gugaugaagucuccagcuu

SEQ ID NO: 1907147 - RNA, 19 nt, Homo sapiens
  misc_RNA (1)...(19): siRNA sense strand
uccgugagcugaccuauca

SEQ ID NO: 1907148 - RNA, 19 nt, Homo sapiens
  misc_RNA (1)...(19): siRNA sense strand
agacaagagucgcagugaa

SEQ ID NO: 1907149 - RNA, 19 nt, Homo sapiens
  misc_RNA (1)...(19): siRNA sense strand
gacaugcccuuuacagacu

SEQ ID NO: 1907150 - RNA, 19 nt, Homo sapiens
  misc_RNA (1)...(19): siRNA sense strand
agaaugaaccggaacacaa

SEQ ID NO: 1907151 - RNA, 19 nt, Homo sapiens
  misc_RNA (1)...(19): siRNA sense strand
guauggaugccaggaauaa

SEQ ID NO: 1907152 - RNA, 19 nt, Homo sapiens
  misc_RNA (1)...(19): siRNA sense strand
gauaccagcaccaguggaa

SEQ ID NO: 1907153 - RNA, 19 nt, Homo sapiens
  misc_RNA (1)...(19): siRNA sense strand
uguuucugcugucugauua

SEQ ID NO: 1907154 - RNA, 19 nt, Homo sapiens
  misc_RNA (1)...(19): siRNA sense strand
aagcagacaugcccuuuac

SEQ ID NO: 1907155 - RNA, 19 nt, Homo sapiens
  misc_RNA (1)...(19): siRNA sense strand
gaaugaaccggaacacaac

SEQ ID NO: 1907156 - RNA, 19 nt, Homo sapiens
  misc_RNA (1)...(19): siRNA sense strand
gacaagagucgcagugaag

SEQ ID NO: 1907157 - RNA, 19 nt, Homo sapiens
  misc_RNA (1)...(19): siRNA sense strand
acagaaagacugcguccuu

SEQ ID NO: 1907158 - RNA, 19 nt, Homo sapiens
  misc_RNA (1)...(19): siRNA sense strand
ucaaucauaucugugaaca

SEQ ID NO: 1907159 - RNA, 19 nt, Homo sapiens
  misc_RNA (1)...(19): siRNA sense strand
ugaagguuguuaagaagca

SEQ ID NO: 1907160 - RNA, 19 nt, Homo sapiens
  misc_RNA (1)...(19): siRNA sense strand
ccaguggaacagugauuaa

SEQ ID NO: 1907161 - RNA, 19 nt, Homo sapiens
  misc_RNA (1)...(19): siRNA sense strand
ggaagaaugaaccggaaca

SEQ ID NO: 1907162 - RNA, 19 nt, Homo sapiens
  misc_RNA (1)...(19): siRNA sense strand
gaauuguaguggaugaaaa

SEQ ID NO: 1907163 - RNA, 19 nt, Homo sapiens
  misc_RNA (1)...(19): siRNA sense strand
caggugacacuggaagaua

SEQ ID NO: 1907164 - RNA, 19 nt, Homo sapiens
  misc_RNA (1)...(19): siRNA sense strand
ugaugaagucuccagcuuu

SEQ ID NO: 1907165 - RNA, 19 nt, Homo sapiens
  misc_RNA (1)...(19): siRNA sense strand
ugacacaagaauccuuuga

SEQ ID NO: 1907166 - RNA, 19 nt, Homo sapiens
  misc_RNA (1)...(19): siRNA sense strand
gcaaggcaugacacaagaa

SEQ ID NO: 1907167 - RNA, 19 nt, Homo sapiens
  misc_RNA (1)...(19): siRNA sense strand
gcagacaugcccuuuacag

SEQ ID NO: 1907168 - RNA, 19 nt, Homo sapiens
  misc_RNA (1)...(19): siRNA sense strand
caugacacaagaauccuuu

SEQ ID NO: 1907169 - RNA, 19 nt, Homo sapiens
  misc_RNA (1)...(19): siRNA sense strand
ccguggagcggaucuguaa

SEQ ID NO: 1907170 - RNA, 19 nt, Homo sapiens
  misc_RNA (1)...(19): siRNA sense strand
gaggagacgcugacaugca

SEQ ID NO: 1907171 - RNA, 19 nt, Homo sapiens
  misc_RNA (1)...(19): siRNA sense strand
cccaggaucaggaggauuu

SEQ ID NO: 1907172 - RNA, 19 nt, Homo sapiens
  misc_RNA (1)...(19): siRNA sense strand
cccaaaguauugugauuac

SEQ ID NO: 1907173 - RNA, 19 nt, Homo sapiens
  misc_RNA (1)...(19): siRNA sense strand
ucccaaaguauugugauua

SEQ ID NO: 1907174 - RNA, 19 nt, Homo sapiens
  misc_RNA (1)...(19): siRNA sense strand
caagagucgcagugaagaa

SEQ ID NO: 1907175 - RNA, 19 nt, Homo sapiens
  misc_RNA (1)...(19): siRNA sense strand
caaaguauugugauuacag

SEQ ID NO: 1907176 - RNA, 19 nt, Homo sapiens
  misc_RNA (1)...(19): siRNA sense strand
ccaaaguauugugauuaca

SEQ ID NO: 1907177 - RNA, 19 nt, Homo sapiens
  misc_RNA (1)...(19): siRNA sense strand
gagucgcagugaagaagau

SEQ ID NO: 1907178 - RNA, 19 nt, Homo sapiens
  misc_RNA (1)...(19): siRNA sense strand
agcugaagguuguuaagaa

SEQ ID NO: 1907179 - RNA, 19 nt, Homo sapiens
  misc_RNA (1)...(19): siRNA sense strand
gaccugaacgggcaguugu

SEQ ID NO: 1907180 - RNA, 19 nt, Homo sapiens
  misc_RNA (1)...(19): siRNA sense strand
gcucaccacgccaugaaau

SEQ ID NO: 1907181 - RNA, 19 nt, Homo sapiens
  misc_RNA (1)...(19): siRNA sense strand
caaggcaugacacaagaau

SEQ ID NO: 1907182 - RNA, 19 nt, Homo sapiens
  misc_RNA (1)...(19): siRNA sense strand
gacgacagcaguccaggau

SEQ ID NO: 1907183 - RNA, 19 nt, Homo sapiens
  misc_RNA (1)...(19): siRNA sense strand
cggaacacaacguggcaua

SEQ ID NO: 1907184 - RNA, 19 nt, Homo sapiens
  misc_RNA (1)...(19): siRNA sense strand
cagacaugcccuuuacaga

SEQ ID NO: 1907185 - RNA, 19 nt, Homo sapiens
  misc_RNA (1)...(19): siRNA sense strand
uggaggagacgcugacaug

SEQ ID NO: 1907186 - RNA, 19 nt, Homo sapiens
  misc_RNA (1)...(19): siRNA sense strand
gagcucaaccugggugaca

SEQ ID NO: 1907187 - RNA, 19 nt, Homo sapiens
  misc_RNA (1)...(19): siRNA sense strand
aaguauggaugccaggaau

SEQ ID NO: 1907188 - RNA, 19 nt, Homo sapiens
  misc_RNA (1)...(19): siRNA sense strand
gugaagaagaugugcaaag

SEQ ID NO: 1907189 - RNA, 19 nt, Homo sapiens
  misc_RNA (1)...(19): siRNA sense strand
ccucaacaaccucguggaa

SEQ ID NO: 1907190 - RNA, 19 nt, Homo sapiens
  misc_RNA (1)...(19): siRNA sense strand
aggagacgcugacaugcau

SEQ ID NO: 1907191 - RNA, 19 nt, Homo sapiens
  misc_RNA (1)...(19): siRNA sense strand
agcaaggcaugacacaaga

SEQ ID NO: 1907192 - RNA, 19 nt, Homo sapiens
  misc_RNA (1)...(19): siRNA sense strand
agaucacuguagaauugua

SEQ ID NO: 1907193 - RNA, 19 nt, Homo sapiens
  misc_RNA (1)...(19): siRNA sense strand
ggaagccagacaagaugga

SEQ ID NO: 1907194 - RNA, 19 nt, Homo sapiens
  misc_RNA (1)...(19): siRNA sense strand
gcguagaaaugcccaaacc

SEQ ID NO: 1907195 - RNA, 19 nt, Homo sapiens
  misc_RNA (1)...(19): siRNA sense strand
gucccucuguggcaaguga

SEQ ID NO: 1907196 - RNA, 19 nt, Homo sapiens
  misc_RNA (1)...(19): siRNA sense strand
aagcaaggcaugacacaag

SEQ ID NO: 1907197 - RNA, 19 nt, Homo sapiens
  misc_RNA (1)...(19): siRNA sense strand
gacauuagccagccauacg

SEQ ID NO: 1907198 - RNA, 19 nt, Homo sapiens
  misc_RNA (1)...(19): siRNA sense strand
cauccagcauccagacaag

SEQ ID NO: 1907199 - RNA, 19 nt, Homo sapiens
  misc_RNA (1)...(19): siRNA sense strand
acgcugacaugcaucaucu

SEQ ID NO: 1907200 - RNA, 19 nt, Homo sapiens
  misc_RNA (1)...(19): siRNA sense strand
gagaggagauggggaccuu

SEQ ID NO: 1907201 - RNA, 19 nt, Homo sapiens
  misc_RNA (1)...(19): siRNA sense strand
gcaugacacaagaauccuu

SEQ ID NO: 1907202 - RNA, 19 nt, Homo sapiens
  misc_RNA (1)...(19): siRNA sense strand
ucaccacgccaugaaauuc

SEQ ID NO: 1907203 - RNA, 19 nt, Homo sapiens
  misc_RNA (1)...(19): siRNA sense strand
gaucacuguagaauuguag

SEQ ID NO: 1907204 - RNA, 19 nt, Homo sapiens
  misc_RNA (1)...(19): siRNA sense strand
cguggaagcauaccucauc

SEQ ID NO: 1907205 - RNA, 19 nt, Homo sapiens
  misc_RNA (1)...(19): siRNA sense strand
acaaccucguggaagcaua

SEQ ID NO: 1907206 - RNA, 19 nt, Homo sapiens
  misc_RNA (1)...(19): siRNA sense strand
ucuacuugguguacaggaa

SEQ ID NO: 1907207 - RNA, 19 nt, Homo sapiens
  misc_RNA (1)...(19): siRNA sense strand
cacaagaauccuuugagau

SEQ ID NO: 1907208 - RNA, 19 nt, Homo sapiens
  misc_RNA (1)...(19): siRNA sense strand
gaacacaacguggcauacc

SEQ ID NO: 1907209 - RNA, 19 nt, Homo sapiens
  misc_RNA (1)...(19): siRNA sense strand
ucgcacaaccgcguagaaa

SEQ ID NO: 1907210 - RNA, 19 nt, Homo sapiens
  misc_RNA (1)...(19): siRNA sense strand
aagaauccuuugagauggu

SEQ ID NO: 1907211 - RNA, 19 nt, Homo sapiens
  misc_RNA (1)...(19): siRNA sense strand
cauuccugcuuccgaguug

SEQ ID NO: 1907212 - RNA, 19 nt, Homo sapiens
  misc_RNA (1)...(19): siRNA sense strand
gaaauugacugcucgagua

SEQ ID NO: 1907213 - RNA, 19 nt, Homo sapiens
  misc_RNA (1)...(19): siRNA sense strand
gaggaaaucuucacauuca

SEQ ID NO: 1907214 - RNA, 19 nt, Homo sapiens
  misc_RNA (1)...(19): siRNA sense strand
gagagcaugugauucguua

SEQ ID NO: 1907215 - RNA, 19 nt, Homo sapiens
  misc_RNA (1)...(19): siRNA sense strand
gcacuaccauucaucacua

SEQ ID NO: 1907216 - RNA, 19 nt, Homo sapiens
  misc_RNA (1)...(19): siRNA sense strand
gaugaaagcuacaaugaag

SEQ ID NO: 1907217 - RNA, 19 nt, Homo sapiens
  misc_RNA (1)...(19): siRNA sense strand
guugugagcucuccuguga

SEQ ID NO: 1907218 - RNA, 19 nt, Homo sapiens
  misc_RNA (1)...(19): siRNA sense strand
ccgaugguguuauacauua

SEQ ID NO: 1907219 - RNA, 19 nt, Homo sapiens
  misc_RNA (1)...(19): siRNA sense strand
caaauggagugcuucuuga

SEQ ID NO: 1907220 - RNA, 19 nt, Homo sapiens
  misc_RNA (1)...(19): siRNA sense strand
gaaagauucugcugauggu

SEQ ID NO: 1907221 - RNA, 19 nt, Homo sapiens
  misc_RNA (1)...(19): siRNA sense strand
ggaaggaggucggugcaau

SEQ ID NO: 1907222 - RNA, 19 nt, Homo sapiens
  misc_RNA (1)...(19): siRNA sense strand
ggugaaagauucugcugau

SEQ ID NO: 1907223 - RNA, 19 nt, Homo sapiens
  misc_RNA (1)...(19): siRNA sense strand
ccgaggaaaucuucacauu

SEQ ID NO: 1907224 - RNA, 19 nt, Homo sapiens
  misc_RNA (1)...(19): siRNA sense strand
ggaaaucuucacauucauu

SEQ ID NO: 1907225 - RNA, 19 nt, Homo sapiens
  misc_RNA (1)...(19): siRNA sense strand
gaaaucuucacauucauug

SEQ ID NO: 1907226 - RNA, 19 nt, Homo sapiens
  misc_RNA (1)...(19): siRNA sense strand
gcacuuacaccugcacaaa

SEQ ID NO: 1907227 - RNA, 19 nt, Homo sapiens
  misc_RNA (1)...(19): siRNA sense strand
ugaaagcuacaaugaagua

SEQ ID NO: 1907228 - RNA, 19 nt, Homo sapiens
  misc_RNA (1)...(19): siRNA sense strand
ccaccaaucugugcuccua

SEQ ID NO: 1907229 - RNA, 19 nt, Homo sapiens
  misc_RNA (1)...(19): siRNA sense strand
cgaaggagagcaugugauu

SEQ ID NO: 1907230 - RNA, 19 nt, Homo sapiens
  misc_RNA (1)...(19): siRNA sense strand
gaugagaugccacgcacua

SEQ ID NO: 1907231 - RNA, 19 nt, Homo sapiens
  misc_RNA (1)...(19): siRNA sense strand
ucucuuggaucaauucuau

SEQ ID NO: 1907232 - RNA, 19 nt, Homo sapiens
  misc_RNA (1)...(19): siRNA sense strand
gugcuccuaugaagauuaa

SEQ ID NO: 1907233 - RNA, 19 nt, Homo sapiens
  misc_RNA (1)...(19): siRNA sense strand
ggaugaaagcuacaaugaa

SEQ ID NO: 1907234 - RNA, 19 nt, Homo sapiens
  misc_RNA (1)...(19): siRNA sense strand
ucgaggagcucaggcaauu

SEQ ID NO: 1907235 - RNA, 19 nt, Homo sapiens
  misc_RNA (1)...(19): siRNA sense strand
ccagucagcuaacucaaag

SEQ ID NO: 1907236 - RNA, 19 nt, Homo sapiens
  misc_RNA (1)...(19): siRNA sense strand
aaacagcgacuccucauca

SEQ ID NO: 1907237 - RNA, 19 nt, Homo sapiens
  misc_RNA (1)...(19): siRNA sense strand
gaaggaggucggugcaaug

SEQ ID NO: 1907238 - RNA, 19 nt, Homo sapiens
  misc_RNA (1)...(19): siRNA sense strand
ccacugugauggcgguuau

SEQ ID NO: 1907239 - RNA, 19 nt, Homo sapiens
  misc_RNA (1)...(19): siRNA sense strand
acaaauggagugcuucuug

SEQ ID NO: 1907240 - RNA, 19 nt, Homo sapiens
  misc_RNA (1)...(19): siRNA sense strand
cuaugaagauuaacgucaa

SEQ ID NO: 1907241 - RNA, 19 nt, Homo sapiens
  misc_RNA (1)...(19): siRNA sense strand
gcagagccagagaaauuga

SEQ ID NO: 1907242 - RNA, 19 nt, Homo sapiens
  misc_RNA (1)...(19): siRNA sense strand
gcagaucucuaugcuacag

SEQ ID NO: 1907243 - RNA, 19 nt, Homo sapiens
  misc_RNA (1)...(19): siRNA sense strand
gaggagcucaggcaauuuc

SEQ ID NO: 1907244 - RNA, 19 nt, Homo sapiens
  misc_RNA (1)...(19): siRNA sense strand
gugagacgcugcccaacuc

SEQ ID NO: 1907245 - RNA, 19 nt, Homo sapiens
  misc_RNA (1)...(19): siRNA sense strand
cggaugaaagcuacaauga

SEQ ID NO: 1907246 - RNA, 19 nt, Homo sapiens
  misc_RNA (1)...(19): siRNA sense strand
gcaugugaccaucauugaa

SEQ ID NO: 1907247 - RNA, 19 nt, Homo sapiens
  misc_RNA (1)...(19): siRNA sense strand
gcuggucucuuggaucaau

SEQ ID NO: 1907248 - RNA, 19 nt, Homo sapiens
  misc_RNA (1)...(19): siRNA sense strand
ggcuuucgauugauuggaa

SEQ ID NO: 1907249 - RNA, 19 nt, Homo sapiens
  misc_RNA (1)...(19): siRNA sense strand
cgaugguguuauacauuaa

SEQ ID NO: 1907250 - RNA, 19 nt, Homo sapiens
  misc_RNA (1)...(19): siRNA sense strand
acuuacaccugcacaaaug

SEQ ID NO: 1907251 - RNA, 19 nt, Homo sapiens
  misc_RNA (1)...(19): siRNA sense strand
gcuacuauccggaugaaag

SEQ ID NO: 1907252 - RNA, 19 nt, Homo sapiens
  misc_RNA (1)...(19): siRNA sense strand
gagcaugugauucguuaca

SEQ ID NO: 1907253 - RNA, 19 nt, Homo sapiens
  misc_RNA (1)...(19): siRNA sense strand
ggagagcaugugauucguu

SEQ ID NO: 1907254 - RNA, 19 nt, Homo sapiens
  misc_RNA (1)...(19): siRNA sense strand
caccgaagggaggaaauua

SEQ ID NO: 1907255 - RNA, 19 nt, Homo sapiens
  misc_RNA (1)...(19): siRNA sense strand
uuucugcuguucuuccuaa

SEQ ID NO: 1907256 - RNA, 19 nt, Homo sapiens
  misc_RNA (1)...(19): siRNA sense strand
cugcuggucucuuggauca

SEQ ID NO: 1907257 - RNA, 19 nt, Homo sapiens
  misc_RNA (1)...(19): siRNA sense strand
aaucugugcuccuaugaag

SEQ ID NO: 1907258 - RNA, 19 nt, Homo sapiens
  misc_RNA (1)...(19): siRNA sense strand
ggugaucgcagccgaaucu

SEQ ID NO: 1907259 - RNA, 19 nt, Homo sapiens
  misc_RNA (1)...(19): siRNA sense strand
cgaggaaaucuucacauuc

SEQ ID NO: 1907260 - RNA, 19 nt, Homo sapiens
  misc_RNA (1)...(19): siRNA sense strand
ugaccgagaccgcuacaug

SEQ ID NO: 1907261 - RNA, 19 nt, Homo sapiens
  misc_RNA (1)...(19): siRNA sense strand
gaaacagcgacuccucauc

SEQ ID NO: 1907262 - RNA, 19 nt, Homo sapiens
  misc_RNA (1)...(19): siRNA sense strand
gccagucagcuaacucaaa

SEQ ID NO: 1907263 - RNA, 19 nt, Homo sapiens
  misc_RNA (1)...(19): siRNA sense strand
gugaaagauucugcugaug

SEQ ID NO: 1907264 - RNA, 19 nt, Homo sapiens
  misc_RNA (1)...(19): siRNA sense strand
cuuccaaccgauauuauaa

SEQ ID NO: 1907265 - RNA, 19 nt, Homo sapiens
  misc_RNA (1)...(19): siRNA sense strand
uuggaucaauucuaugaga

SEQ ID NO: 1907266 - RNA, 19 nt, Homo sapiens
  misc_RNA (1)...(19): siRNA sense strand
gagccuguauguguagaca

SEQ ID NO: 1907267 - RNA, 19 nt, Homo sapiens
  misc_RNA (1)...(19): siRNA sense strand
auugaugacuaccuacuga

SEQ ID NO: 1907268 - RNA, 19 nt, Homo sapiens
  misc_RNA (1)...(19): siRNA sense strand
gaaggagagcaugugauuc

SEQ ID NO: 1907269 - RNA, 19 nt, Homo sapiens
  misc_RNA (1)...(19): siRNA sense strand
gaaagcuacaaugaaguau

SEQ ID NO: 1907270 - RNA, 19 nt, Homo sapiens
  misc_RNA (1)...(19): siRNA sense strand
ggcaugugaccaucauuga

SEQ ID NO: 1907271 - RNA, 19 nt, Homo sapiens
  misc_RNA (1)...(19): siRNA sense strand
gcaugugauucguuacacu

SEQ ID NO: 1907272 - RNA, 19 nt, Homo sapiens
  misc_RNA (1)...(19): siRNA sense strand
cgaagggaggaaauuauca

SEQ ID NO: 1907273 - RNA, 19 nt, Homo sapiens
  misc_RNA (1)...(19): siRNA sense strand
gcuccuacuucaacauggu

SEQ ID NO: 1907274 - RNA, 19 nt, Homo sapiens
  misc_RNA (1)...(19): siRNA sense strand
ggagaagccacaugcuacu

SEQ ID NO: 1907275 - RNA, 19 nt, Homo sapiens
  misc_RNA (1)...(19): siRNA sense strand
gaagggaggaaauuaucac

SEQ ID NO: 1907276 - RNA, 19 nt, Homo sapiens
  misc_RNA (1)...(19): siRNA sense strand
ccuuccaaccgauauuaua

SEQ ID NO: 1907277 - RNA, 19 nt, Homo sapiens
  misc_RNA (1)...(19): siRNA sense strand
agacgcugcccaacucuga

SEQ ID NO: 1907278 - RNA, 19 nt, Homo sapiens
  misc_RNA (1)...(19): siRNA sense strand
gagcucucuuucugcuguu

SEQ ID NO: 1907279 - RNA, 19 nt, Homo sapiens
  misc_RNA (1)...(19): siRNA sense strand
ggagcaaagggacauaugc

SEQ ID NO: 1907280 - RNA, 19 nt, Homo sapiens
  misc_RNA (1)...(19): siRNA sense strand
cagcgacuccucaucaucu

SEQ ID NO: 1907281 - RNA, 19 nt, Homo sapiens
  misc_RNA (1)...(19): siRNA sense strand
cgggccagcugcaaguuca

SEQ ID NO: 1907282 - RNA, 19 nt, Homo sapiens
  misc_RNA (1)...(19): siRNA sense strand
ugcagguucuggcuacuau

SEQ ID NO: 1907283 - RNA, 19 nt, Homo sapiens
  misc_RNA (1)...(19): siRNA sense strand
ggcagagccagagaaauug

SEQ ID NO: 1907284 - RNA, 19 nt, Homo sapiens
  misc_RNA (1)...(19): siRNA sense strand
gggagcaaagggacauaug

SEQ ID NO: 1907285 - RNA, 19 nt, Homo sapiens
  misc_RNA (1)...(19): siRNA sense strand
cggcaugugaccaucauug

SEQ ID NO: 1907286 - RNA, 19 nt, Homo sapiens
  misc_RNA (1)...(19): siRNA sense strand
aaaugcagaucucuaugcu

SEQ ID NO: 1907287 - RNA, 19 nt, Homo sapiens
  misc_RNA (1)...(19): siRNA sense strand
ggucuggaacugccuacug

SEQ ID NO: 1907288 - RNA, 19 nt, Homo sapiens
  misc_RNA (1)...(19): siRNA sense strand
ccaaucugugcuccuauga

SEQ ID NO: 1907289 - RNA, 19 nt, Homo sapiens
  misc_RNA (1)...(19): siRNA sense strand
gagaugccacgcacuacca

SEQ ID NO: 1907290 - RNA, 19 nt, Homo sapiens
  misc_RNA (1)...(19): siRNA sense strand
ccgaagggaggaaauuauc

SEQ ID NO: 1907291 - RNA, 19 nt, Homo sapiens
  misc_RNA (1)...(19): siRNA sense strand
ucaccgaagggaggaaauu

SEQ ID NO: 1907292 - RNA, 19 nt, Homo sapiens
  misc_RNA (1)...(19): siRNA sense strand
gauccuuccaaccgauauu

SEQ ID NO: 1907293 - RNA, 19 nt, Homo sapiens
  misc_RNA (1)...(19): siRNA sense strand
caaucugugcuccuaugaa

SEQ ID NO: 1907294 - RNA, 19 nt, Homo sapiens
  misc_RNA (1)...(19): siRNA sense strand
ugugaaaguacaagugaga

SEQ ID NO: 1907295 - RNA, 19 nt, Homo sapiens
  misc_RNA (1)...(19): siRNA sense strand
gcacuaugaugacgaggaa

SEQ ID NO: 1907296 - RNA, 19 nt, Homo sapiens
  misc_RNA (1)...(19): siRNA sense strand
ggaagaagaggaugaugaa

SEQ ID NO: 1907297 - RNA, 19 nt, Homo sapiens
  misc_RNA (1)...(19): siRNA sense strand
ucaaugagguggacaugga

SEQ ID NO: 1907298 - RNA, 19 nt, Homo sapiens
  misc_RNA (1)...(19): siRNA sense strand
caucaggccuggcuccaaa

SEQ ID NO: 1907299 - RNA, 19 nt, Homo sapiens
  misc_RNA (1)...(19): siRNA sense strand
cgagaugaaugacuacaau

SEQ ID NO: 1907300 - RNA, 19 nt, Homo sapiens
  misc_RNA (1)...(19): siRNA sense strand
ggacauggaaggcaacgaa

SEQ ID NO: 1907301 - RNA, 19 nt, Homo sapiens
  misc_RNA (1)...(19): siRNA sense strand
ccucagagcacuaugauga

SEQ ID NO: 1907302 - RNA, 19 nt, Homo sapiens
  misc_RNA (1)...(19): siRNA sense strand
gaucaggaccaguggauga

SEQ ID NO: 1907303 - RNA, 19 nt, Homo sapiens
  misc_RNA (1)...(19): siRNA sense strand
agaagaggaugaugaagau

SEQ ID NO: 1907304 - RNA, 19 nt, Homo sapiens
  misc_RNA (1)...(19): siRNA sense strand
gagacucugugguuuaauc

SEQ ID NO: 1907305 - RNA, 19 nt, Homo sapiens
  misc_RNA (1)...(19): siRNA sense strand
ggacauggacgagaugaau

SEQ ID NO: 1907306 - RNA, 19 nt, Homo sapiens
  misc_RNA (1)...(19): siRNA sense strand
ugacugagacucugugguu

SEQ ID NO: 1907307 - RNA, 19 nt, Homo sapiens
  misc_RNA (1)...(19): siRNA sense strand
uggacgagaugaaugacua

SEQ ID NO: 1907308 - RNA, 19 nt, Homo sapiens
  misc_RNA (1)...(19): siRNA sense strand
ugaugaagaugaugaggau

SEQ ID NO: 1907309 - RNA, 19 nt, Homo sapiens
  misc_RNA (1)...(19): siRNA sense strand
ggaucgacccuguguggaa

SEQ ID NO: 1907310 - RNA, 19 nt, Homo sapiens
  misc_RNA (1)...(19): siRNA sense strand
cugagacucugugguuuaa

SEQ ID NO: 1907311 - RNA, 19 nt, Homo sapiens
  misc_RNA (1)...(19): siRNA sense strand
aagaagaggaugaugaaga

SEQ ID NO: 1907312 - RNA, 19 nt, Homo sapiens
  misc_RNA (1)...(19): siRNA sense strand
ggaaggcaacgaacaggau

SEQ ID NO: 1907313 - RNA, 19 nt, Homo sapiens
  misc_RNA (1)...(19): siRNA sense strand
gacugagacucugugguuu

SEQ ID NO: 1907314 - RNA, 19 nt, Homo sapiens
  misc_RNA (1)...(19): siRNA sense strand
cagaggaugaugaggauau

SEQ ID NO: 1907315 - RNA, 19 nt, Homo sapiens
  misc_RNA (1)...(19): siRNA sense strand
acaaugagucaccggauga

SEQ ID NO: 1907316 - RNA, 19 nt, Homo sapiens
  misc_RNA (1)...(19): siRNA sense strand
gagaugaaugacuacaaug

SEQ ID NO: 1907317 - RNA, 19 nt, Homo sapiens
  misc_RNA (1)...(19): siRNA sense strand
agaugaaugacuacaauga

SEQ ID NO: 1907318 - RNA, 19 nt, Homo sapiens
  misc_RNA (1)...(19): siRNA sense strand
aagaggaugaugaagauga

SEQ ID NO: 1907319 - RNA, 19 nt, Homo sapiens
  misc_RNA (1)...(19): siRNA sense strand
ugaagaggacucagaggau

SEQ ID NO: 1907320 - RNA, 19 nt, Homo sapiens
  misc_RNA (1)...(19): siRNA sense strand
aagaugaugaggauaguga

SEQ ID NO: 1907321 - RNA, 19 nt, Homo sapiens
  misc_RNA (1)...(19): siRNA sense strand
gaugaaugacuacaaugag

SEQ ID NO: 1907322 - RNA, 19 nt, Homo sapiens
  misc_RNA (1)...(19): siRNA sense strand
uccaaagcaucgcggagaa

SEQ ID NO: 1907323 - RNA, 19 nt, Homo sapiens
  misc_RNA (1)...(19): siRNA sense strand
acugagacucugugguuua

SEQ ID NO: 1907324 - RNA, 19 nt, Homo sapiens
  misc_RNA (1)...(19): siRNA sense strand
ugaagaugaugaggauagu

SEQ ID NO: 1907325 - RNA, 19 nt, Homo sapiens
  misc_RNA (1)...(19): siRNA sense strand
agaggaugaugaagaugau

SEQ ID NO: 1907326 - RNA, 19 nt, Homo sapiens
  misc_RNA (1)...(19): siRNA sense strand
ccaaagcaucgcggagaaa

SEQ ID NO: 1907327 - RNA, 19 nt, Homo sapiens
  misc_RNA (1)...(19): siRNA sense strand
aggaagaagaggaugauga

SEQ ID NO: 1907328 - RNA, 19 nt, Homo sapiens
  misc_RNA (1)...(19): siRNA sense strand
gacauggacgagaugaaug

SEQ ID NO: 1907329 - RNA, 19 nt, Homo sapiens
  misc_RNA (1)...(19): siRNA sense strand
acauggacgagaugaauga

SEQ ID NO: 1907330 - RNA, 19 nt, Homo sapiens
  misc_RNA (1)...(19): siRNA sense strand
ugaugaggauagugaagag

SEQ ID NO: 1907331 - RNA, 19 nt, Homo sapiens
  misc_RNA (1)...(19): siRNA sense strand
gaagaggaugaugaagaug

SEQ ID NO: 1907332 - RNA, 19 nt, Homo sapiens
  misc_RNA (1)...(19): siRNA sense strand
augaaugacuacaaugagu

SEQ ID NO: 1907333 - RNA, 19 nt, Homo sapiens
  misc_RNA (1)...(19): siRNA sense strand
gaagaugaugaggauagug

SEQ ID NO: 1907334 - RNA, 19 nt, Homo sapiens
  misc_RNA (1)...(19): siRNA sense strand
gaagaagaggaugaugaag

SEQ ID NO: 1907335 - RNA, 19 nt, Homo sapiens
  misc_RNA (1)...(19): siRNA sense strand
caggaccaguggaugaucu

SEQ ID NO: 1907336 - RNA, 19 nt, Homo sapiens
  misc_RNA (1)...(19): siRNA sense strand
gcaggacauggacgagaug

SEQ ID NO: 1907337 - RNA, 19 nt, Homo sapiens
  misc_RNA (1)...(19): siRNA sense strand
caaagcaucgcggagaaag

SEQ ID NO: 1907338 - RNA, 19 nt, Homo sapiens
  misc_RNA (1)...(19): siRNA sense strand
ugacgaggaagaagaggau

SEQ ID NO: 1907339 - RNA, 19 nt, Homo sapiens
  misc_RNA (1)...(19): siRNA sense strand
caaugagguggacauggaa

SEQ ID NO: 1907340 - RNA, 19 nt, Homo sapiens
  misc_RNA (1)...(19): siRNA sense strand
agaggaugaugaggauaug

SEQ ID NO: 1907341 - RNA, 19 nt, Homo sapiens
  misc_RNA (1)...(19): siRNA sense strand
gcuuugccauuguguauua

SEQ ID NO: 1907342 - RNA, 19 nt, Homo sapiens
  misc_RNA (1)...(19): siRNA sense strand
caacauccauuaucucaag

SEQ ID NO: 1907343 - RNA, 19 nt, Homo sapiens
  misc_RNA (1)...(19): siRNA sense strand
aaacggugaugaagugaaa

SEQ ID NO: 1907344 - RNA, 19 nt, Homo sapiens
  misc_RNA (1)...(19): siRNA sense strand
ggaaaacggugaugaagug

SEQ ID NO: 1907345 - RNA, 19 nt, Homo sapiens
  misc_RNA (1)...(19): siRNA sense strand
ggcuuuauauuacaaguug

SEQ ID NO: 1907346 - RNA, 19 nt, Homo sapiens
  misc_RNA (1)...(19): siRNA sense strand
gaugccaaguugaagauuc

SEQ ID NO: 1907347 - RNA, 19 nt, Homo sapiens
  misc_RNA (1)...(19): siRNA sense strand
gcagauuccuguguucaag

SEQ ID NO: 1907348 - RNA, 19 nt, Homo sapiens
  misc_RNA (1)...(19): siRNA sense strand
gucaaugccucugggagua

SEQ ID NO: 1907349 - RNA, 19 nt, Homo sapiens
  misc_RNA (1)...(19): siRNA sense strand
caaggauggucagcagauu

SEQ ID NO: 1907350 - RNA, 19 nt, Homo sapiens
  misc_RNA (1)...(19): siRNA sense strand
cauuguguauuaccucauu

SEQ ID NO: 1907351 - RNA, 19 nt, Homo sapiens
  misc_RNA (1)...(19): siRNA sense strand
gcaggaagcaggcggucaa

SEQ ID NO: 1907352 - RNA, 19 nt, Homo sapiens
  misc_RNA (1)...(19): siRNA sense strand
ggaagcaggcggucaaugc

SEQ ID NO: 1907353 - RNA, 19 nt, Homo sapiens
  misc_RNA (1)...(19): siRNA sense strand
gggcuuugccauuguguau

SEQ ID NO: 1907354 - RNA, 19 nt, Homo sapiens
  misc_RNA (1)...(19): siRNA sense strand
cauuguugaugccaaguug

SEQ ID NO: 1907355 - RNA, 19 nt, Homo sapiens
  misc_RNA (1)...(19): siRNA sense strand
ccagggcuuuauauuacaa

SEQ ID NO: 1907356 - RNA, 19 nt, Homo sapiens
  misc_RNA (1)...(19): siRNA sense strand
gucagcagauuccuguguu

SEQ ID NO: 1907357 - RNA, 19 nt, Homo sapiens
  misc_RNA (1)...(19): siRNA sense strand
auuccagggcuuuauauua

SEQ ID NO: 1907358 - RNA, 19 nt, Homo sapiens
  misc_RNA (1)...(19): siRNA sense strand
uuccagggcuuuauauuac

SEQ ID NO: 1907359 - RNA, 19 nt, Homo sapiens
  misc_RNA (1)...(19): siRNA sense strand
aaacuucguggacauuguu

SEQ ID NO: 1907360 - RNA, 19 nt, Homo sapiens
  misc_RNA (1)...(19): siRNA sense strand
guguauuaccucauucaaa

SEQ ID NO: 1907361 - RNA, 19 nt, Homo sapiens
  misc_RNA (1)...(19): siRNA sense strand
ggucagcagauuccugugu

SEQ ID NO: 1907362 - RNA, 19 nt, Homo sapiens
  misc_RNA (1)...(19): siRNA sense strand
uccauuaucucaagcucau

SEQ ID NO: 1907363 - RNA, 19 nt, Homo sapiens
  misc_RNA (1)...(19): siRNA sense strand
guugaagauuccugucucu

SEQ ID NO: 1907364 - RNA, 19 nt, Homo sapiens
  misc_RNA (1)...(19): siRNA sense strand
caaaucagagggccuucuc

SEQ ID NO: 1907365 - RNA, 19 nt, Homo sapiens
  misc_RNA (1)...(19): siRNA sense strand
ucagcagauuccuguguuc

SEQ ID NO: 1907366 - RNA, 19 nt, Homo sapiens
  misc_RNA (1)...(19): siRNA sense strand
ucaaggauggucagcagau

SEQ ID NO: 1907367 - RNA, 19 nt, Homo sapiens
  misc_RNA (1)...(19): siRNA sense strand
ucaaugccucugggaguaa

SEQ ID NO: 1907368 - RNA, 19 nt, Homo sapiens
  misc_RNA (1)...(19): siRNA sense strand
gaagagggaucaguaauua

SEQ ID NO: 1907369 - RNA, 19 nt, Homo sapiens
  misc_RNA (1)...(19): siRNA sense strand
caacgaaacugagauaaug

SEQ ID NO: 1907370 - RNA, 19 nt, Homo sapiens
  misc_RNA (1)...(19): siRNA sense strand
ggacagcaauggaaauguu

SEQ ID NO: 1907371 - RNA, 19 nt, Homo sapiens
  misc_RNA (1)...(19): siRNA sense strand
gcaagguacucgauucaaa

SEQ ID NO: 1907372 - RNA, 19 nt, Homo sapiens
  misc_RNA (1)...(19): siRNA sense strand
gggcaauacuguagaaauu

SEQ ID NO: 1907373 - RNA, 19 nt, Homo sapiens
  misc_RNA (1)...(19): siRNA sense strand
gggaaugacuuuagaagau

SEQ ID NO: 1907374 - RNA, 19 nt, Homo sapiens
  misc_RNA (1)...(19): siRNA sense strand
ucaaagauggucaacauua

SEQ ID NO: 1907375 - RNA, 19 nt, Homo sapiens
  misc_RNA (1)...(19): siRNA sense strand
caaagauggucaacauuau

SEQ ID NO: 1907376 - RNA, 19 nt, Homo sapiens
  misc_RNA (1)...(19): siRNA sense strand
gagcaugaaugaaaugaca

SEQ ID NO: 1907377 - RNA, 19 nt, Homo sapiens
  misc_RNA (1)...(19): siRNA sense strand
gaauggcuauuucaggauu

SEQ ID NO: 1907378 - RNA, 19 nt, Homo sapiens
  misc_RNA (1)...(19): siRNA sense strand
ggauggagaagcaguauuu

SEQ ID NO: 1907379 - RNA, 19 nt, Homo sapiens
  misc_RNA (1)...(19): siRNA sense strand
gcacaagggcagaaagaaa

SEQ ID NO: 1907380 - RNA, 19 nt, Homo sapiens
  misc_RNA (1)...(19): siRNA sense strand
ugaaaugacagcuucuuua

SEQ ID NO: 1907381 - RNA, 19 nt, Homo sapiens
  misc_RNA (1)...(19): siRNA sense strand
ggaaugacuuuagaagaug

SEQ ID NO: 1907382 - RNA, 19 nt, Homo sapiens
  misc_RNA (1)...(19): siRNA sense strand
gcacagaauuacagccaau

SEQ ID NO: 1907383 - RNA, 19 nt, Homo sapiens
  misc_RNA (1)...(19): siRNA sense strand
ucucuuaucuuacuacaga

SEQ ID NO: 1907384 - RNA, 19 nt, Homo sapiens
  misc_RNA (1)...(19): siRNA sense strand
gcacaaauaaagaaucaga

SEQ ID NO: 1907385 - RNA, 19 nt, Homo sapiens
  misc_RNA (1)...(19): siRNA sense strand
gagaaaacguggacuggua

SEQ ID NO: 1907386 - RNA, 19 nt, Homo sapiens
  misc_RNA (1)...(19): siRNA sense strand
cauguuaccagcacaaaua

SEQ ID NO: 1907387 - RNA, 19 nt, Homo sapiens
  misc_RNA (1)...(19): siRNA sense strand
ucagacacaugcagucaaa

SEQ ID NO: 1907388 - RNA, 19 nt, Homo sapiens
  misc_RNA (1)...(19): siRNA sense strand
aaagagaaguggaccuaga

SEQ ID NO: 1907389 - RNA, 19 nt, Homo sapiens
  misc_RNA (1)...(19): siRNA sense strand
cagcacaaauaaagaauca

SEQ ID NO: 1907390 - RNA, 19 nt, Homo sapiens
  misc_RNA (1)...(19): siRNA sense strand
gaaauguucccagcaugua

SEQ ID NO: 1907391 - RNA, 19 nt, Homo sapiens
  misc_RNA (1)...(19): siRNA sense strand
gauggacagcacagaauua

SEQ ID NO: 1907392 - RNA, 19 nt, Homo sapiens
  misc_RNA (1)...(19): siRNA sense strand
gaagcaguauuuaucucaa

SEQ ID NO: 1907393 - RNA, 19 nt, Homo sapiens
  misc_RNA (1)...(19): siRNA sense strand
gaaaugacagcuucuuuac

SEQ ID NO: 1907394 - RNA, 19 nt, Homo sapiens
  misc_RNA (1)...(19): siRNA sense strand
caagggcaauacuguagaa

SEQ ID NO: 1907395 - RNA, 19 nt, Homo sapiens
  misc_RNA (1)...(19): siRNA sense strand
cgucauggaugcaauagug

SEQ ID NO: 1907396 - RNA, 19 nt, Homo sapiens
  misc_RNA (1)...(19): siRNA sense strand
gugcuacugugauaaauuc

SEQ ID NO: 1907397 - RNA, 19 nt, Homo sapiens
  misc_RNA (1)...(19): siRNA sense strand
gggauauacagacauguua

SEQ ID NO: 1907398 - RNA, 19 nt, Homo sapiens
  misc_RNA (1)...(19): siRNA sense strand
ggaccuagaggcuuauuuc

SEQ ID NO: 1907399 - RNA, 19 nt, Homo sapiens
  misc_RNA (1)...(19): siRNA sense strand
gggagagaauggcuauuuc

SEQ ID NO: 1907400 - RNA, 19 nt, Homo sapiens
  misc_RNA (1)...(19): siRNA sense strand
gcguugugcuacugugaua

SEQ ID NO: 1907401 - RNA, 19 nt, Homo sapiens
  misc_RNA (1)...(19): siRNA sense strand
cuaacaggaucuaucaaug

SEQ ID NO: 1907402 - RNA, 19 nt, Homo sapiens
  misc_RNA (1)...(19): siRNA sense strand
cuucaaagauggucaacau

SEQ ID NO: 1907403 - RNA, 19 nt, Homo sapiens
  misc_RNA (1)...(19): siRNA sense strand
uaacaggaucuaucaaugu

SEQ ID NO: 1907404 - RNA, 19 nt, Homo sapiens
  misc_RNA (1)...(19): siRNA sense strand
ugaagagggaucaguaauu

SEQ ID NO: 1907405 - RNA, 19 nt, Homo sapiens
  misc_RNA (1)...(19): siRNA sense strand
gaaccgucauggaugcaau

SEQ ID NO: 1907406 - RNA, 19 nt, Homo sapiens
  misc_RNA (1)...(19): siRNA sense strand
gagcacaagggcagaaaga

SEQ ID NO: 1907407 - RNA, 19 nt, Homo sapiens
  misc_RNA (1)...(19): siRNA sense strand
ggagagaauggcuauuuca

SEQ ID NO: 1907408 - RNA, 19 nt, Homo sapiens
  misc_RNA (1)...(19): siRNA sense strand
caauaaaggagacuaugga

SEQ ID NO: 1907409 - RNA, 19 nt, Homo sapiens
  misc_RNA (1)...(19): siRNA sense strand
agacagggauauacagaca

SEQ ID NO: 1907410 - RNA, 19 nt, Homo sapiens
  misc_RNA (1)...(19): siRNA sense strand
ggacagcacagaauuacag

SEQ ID NO: 1907411 - RNA, 19 nt, Homo sapiens
  misc_RNA (1)...(19): siRNA sense strand
aaguggaccuagaggcuua

SEQ ID NO: 1907412 - RNA, 19 nt, Homo sapiens
  misc_RNA (1)...(19): siRNA sense strand
ggagaagcaguauuuaucu

SEQ ID NO: 1907413 - RNA, 19 nt, Homo sapiens
  misc_RNA (1)...(19): siRNA sense strand
agaauggccuccucacaca

SEQ ID NO: 1907414 - RNA, 19 nt, Homo sapiens
  misc_RNA (1)...(19): siRNA sense strand
agagggaucaguaauuaaa

SEQ ID NO: 1907415 - RNA, 19 nt, Homo sapiens
  misc_RNA (1)...(19): siRNA sense strand
ccuagaggcuuauuucacu

SEQ ID NO: 1907416 - RNA, 19 nt, Homo sapiens
  misc_RNA (1)...(19): siRNA sense strand
ggauggacagcacagaauu

SEQ ID NO: 1907417 - RNA, 19 nt, Homo sapiens
  misc_RNA (1)...(19): siRNA sense strand
gcucaggacagcaauggaa

SEQ ID NO: 1907418 - RNA, 19 nt, Homo sapiens
  misc_RNA (1)...(19): siRNA sense strand
ugugauaaauucugugaca

SEQ ID NO: 1907419 - RNA, 19 nt, Homo sapiens
  misc_RNA (1)...(19): siRNA sense strand
ccuuguucguccagaauua

SEQ ID NO: 1907420 - RNA, 19 nt, Homo sapiens
  misc_RNA (1)...(19): siRNA sense strand
ucaaagagaaguggaccua

SEQ ID NO: 1907421 - RNA, 19 nt, Homo sapiens
  misc_RNA (1)...(19): siRNA sense strand
ucaauguucuccuccauac

SEQ ID NO: 1907422 - RNA, 19 nt, Homo sapiens
  misc_RNA (1)...(19): siRNA sense strand
gaagccaugucccaacaac

SEQ ID NO: 1907423 - RNA, 19 nt, Homo sapiens
  misc_RNA (1)...(19): siRNA sense strand
gauggagaagcaguauuua

SEQ ID NO: 1907424 - RNA, 19 nt, Homo sapiens
  misc_RNA (1)...(19): siRNA sense strand
gccaagaaccgucauggau

SEQ ID NO: 1907425 - RNA, 19 nt, Homo sapiens
  misc_RNA (1)...(19): siRNA sense strand
gaaacugagauaaugaaag

SEQ ID NO: 1907426 - RNA, 19 nt, Homo sapiens
  misc_RNA (1)...(19): siRNA sense strand
ggcaauacuguagaaauuu

SEQ ID NO: 1907427 - RNA, 19 nt, Homo sapiens
  misc_RNA (1)...(19): siRNA sense strand
ccucagaauuugaucucuu

SEQ ID NO: 1907428 - RNA, 19 nt, Homo sapiens
  misc_RNA (1)...(19): siRNA sense strand
cuacugugauaaauucugu

SEQ ID NO: 1907429 - RNA, 19 nt, Homo sapiens
  misc_RNA (1)...(19): siRNA sense strand
acagggauauacagacaug

SEQ ID NO: 1907430 - RNA, 19 nt, Homo sapiens
  misc_RNA (1)...(19): siRNA sense strand
ccaacgaaacugagauaau

SEQ ID NO: 1907431 - RNA, 19 nt, Homo sapiens
  misc_RNA (1)...(19): siRNA sense strand
gaaaacggcaugccacgaa

SEQ ID NO: 1907432 - RNA, 19 nt, Homo sapiens
  misc_RNA (1)...(19): siRNA sense strand
cuagaggcuuauuucacua

SEQ ID NO: 1907433 - RNA, 19 nt, Homo sapiens
  misc_RNA (1)...(19): siRNA sense strand
caggauucuucgaggagua

SEQ ID NO: 1907434 - RNA, 19 nt, Homo sapiens
  misc_RNA (1)...(19): siRNA sense strand
uaagacagggauauacaga

SEQ ID NO: 1907435 - RNA, 19 nt, Homo sapiens
  misc_RNA (1)...(19): siRNA sense strand
gcacuuugccaccuagucu

SEQ ID NO: 1907436 - RNA, 19 nt, Homo sapiens
  misc_RNA (1)...(19): siRNA sense strand
uguggcugcugaccgaaua

SEQ ID NO: 1907437 - RNA, 19 nt, Homo sapiens
  misc_RNA (1)...(19): siRNA sense strand
ccaaaaugcuaccaacaau

SEQ ID NO: 1907438 - RNA, 19 nt, Homo sapiens
  misc_RNA (1)...(19): siRNA sense strand
aaugacagcuucuuuaccu

SEQ ID NO: 1907439 - RNA, 19 nt, Homo sapiens
  misc_RNA (1)...(19): siRNA sense strand
caggaucuaucaauguucu

SEQ ID NO: 1907440 - RNA, 19 nt, Homo sapiens
  misc_RNA (1)...(19): siRNA sense strand
aggcuuauuucacuaggaa

SEQ ID NO: 1907441 - RNA, 19 nt, Homo sapiens
  misc_RNA (1)...(19): siRNA sense strand
gcgaaugcguugugcuacu

SEQ ID NO: 1907442 - RNA, 19 nt, Homo sapiens
  misc_RNA (1)...(19): siRNA sense strand
uggaccaguucaagccaua

SEQ ID NO: 1907443 - RNA, 19 nt, Homo sapiens
  misc_RNA (1)...(19): siRNA sense strand
guccagaauuaauugaaca

SEQ ID NO: 1907444 - RNA, 19 nt, Homo sapiens
  misc_RNA (1)...(19): siRNA sense strand
uaugaagagggaucaguaa

SEQ ID NO: 1907445 - RNA, 19 nt, Homo sapiens
  misc_RNA (1)...(19): siRNA sense strand
cgaaugcguugugcuacug

SEQ ID NO: 1907446 - RNA, 19 nt, Homo sapiens
  misc_RNA (1)...(19): siRNA sense strand
agggaucaguaauuaaaga

SEQ ID NO: 1907447 - RNA, 19 nt, Homo sapiens
  misc_RNA (1)...(19): siRNA sense strand
uggagaagcaguauuuauc

SEQ ID NO: 1907448 - RNA, 19 nt, Homo sapiens
  misc_RNA (1)...(19): siRNA sense strand
aauaguggaagcaucgaua

SEQ ID NO: 1907449 - RNA, 19 nt, Homo sapiens
  misc_RNA (1)...(19): siRNA sense strand
cucagaauuugaucucuug

SEQ ID NO: 1907450 - RNA, 19 nt, Homo sapiens
  misc_RNA (1)...(19): siRNA sense strand
gggaucaguaauuaaagaa

SEQ ID NO: 1907451 - RNA, 19 nt, Homo sapiens
  misc_RNA (1)...(19): siRNA sense strand
aaagauggucaacauuaug

SEQ ID NO: 1907452 - RNA, 19 nt, Homo sapiens
  misc_RNA (1)...(19): siRNA sense strand
cgaaacugagauaaugaaa

SEQ ID NO: 1907453 - RNA, 19 nt, Homo sapiens
  misc_RNA (1)...(19): siRNA sense strand
aaucuaacaggaucuauca

SEQ ID NO: 1907454 - RNA, 19 nt, Homo sapiens
  misc_RNA (1)...(19): siRNA sense strand
guagaaauuuuggcuguug

SEQ ID NO: 1907455 - RNA, 19 nt, Homo sapiens
  misc_RNA (1)...(19): siRNA sense strand
ggucaauaaaggagacuau

SEQ ID NO: 1907456 - RNA, 19 nt, Homo sapiens
  misc_RNA (1)...(19): siRNA sense strand
gcaguauuuaucucaaaga

SEQ ID NO: 1907457 - RNA, 19 nt, Homo sapiens
  misc_RNA (1)...(19): siRNA sense strand
aagauggucaacauuauga

SEQ ID NO: 1907458 - RNA, 19 nt, Homo sapiens
  misc_RNA (1)...(19): siRNA sense strand
aucgaaagcuucagacaca

SEQ ID NO: 1907459 - RNA, 19 nt, Homo sapiens
  misc_RNA (1)...(19): siRNA sense strand
cuccugagcaugaaugaaa

SEQ ID NO: 1907460 - RNA, 19 nt, Homo sapiens
  misc_RNA (1)...(19): siRNA sense strand
uuaugaagagggaucagua

SEQ ID NO: 1907461 - RNA, 19 nt, Homo sapiens
  misc_RNA (1)...(19): siRNA sense strand
cggcgaaugcguugugcua

SEQ ID NO: 1907462 - RNA, 19 nt, Homo sapiens
  misc_RNA (1)...(19): siRNA sense strand
ucuuauaaauggccuggau

SEQ ID NO: 1907463 - RNA, 19 nt, Homo sapiens
  misc_RNA (1)...(19): siRNA sense strand
aaaucuggauggagaagca

SEQ ID NO: 1907464 - RNA, 19 nt, Homo sapiens
  misc_RNA (1)...(19): siRNA sense strand
aaaggagacuauggaugga

SEQ ID NO: 1907465 - RNA, 19 nt, Homo sapiens
  misc_RNA (1)...(19): siRNA sense strand
ucacacacagccuugguau

SEQ ID NO: 1907466 - RNA, 19 nt, Homo sapiens
  misc_RNA (1)...(19): siRNA sense strand
guugugcuacugugauaaa

SEQ ID NO: 1907467 - RNA, 19 nt, Homo sapiens
  misc_RNA (1)...(19): siRNA sense strand
acacaugcagucaaacuca

SEQ ID NO: 1907468 - RNA, 19 nt, Homo sapiens
  misc_RNA (1)...(19): siRNA sense strand
gaaugaagcucguaaauua

SEQ ID NO: 1907469 - RNA, 19 nt, Homo sapiens
  misc_RNA (1)...(19): siRNA sense strand
caagaaagcugaaagauuc

SEQ ID NO: 1907470 - RNA, 19 nt, Homo sapiens
  misc_RNA (1)...(19): siRNA sense strand
gaucaaaccugacauggaa

SEQ ID NO: 1907471 - RNA, 19 nt, Homo sapiens
  misc_RNA (1)...(19): siRNA sense strand
gcagauaucgacuacauua

SEQ ID NO: 1907472 - RNA, 19 nt, Homo sapiens
  misc_RNA (1)...(19): siRNA sense strand
gaacagagacugcgcaaau

SEQ ID NO: 1907473 - RNA, 19 nt, Homo sapiens
  misc_RNA (1)...(19): siRNA sense strand
gaaauacacagcugaaauu

SEQ ID NO: 1907474 - RNA, 19 nt, Homo sapiens
  misc_RNA (1)...(19): siRNA sense strand
ggagacguccuuauaauga

SEQ ID NO: 1907475 - RNA, 19 nt, Homo sapiens
  misc_RNA (1)...(19): siRNA sense strand
ggagaucagugcagaagau

SEQ ID NO: 1907476 - RNA, 19 nt, Homo sapiens
  misc_RNA (1)...(19): siRNA sense strand
gauaucgacuacauuaaug

SEQ ID NO: 1907477 - RNA, 19 nt, Homo sapiens
  misc_RNA (1)...(19): siRNA sense strand
ggaaugaagcucguaaauu

SEQ ID NO: 1907478 - RNA, 19 nt, Homo sapiens
  misc_RNA (1)...(19): siRNA sense strand
cagcugaaauuaaacagaa

SEQ ID NO: 1907479 - RNA, 19 nt, Homo sapiens
  misc_RNA (1)...(19): siRNA sense strand
ggaagaagauaaaagacua

SEQ ID NO: 1907480 - RNA, 19 nt, Homo sapiens
  misc_RNA (1)...(19): siRNA sense strand
ggaaauacacagcugaaau

SEQ ID NO: 1907481 - RNA, 19 nt, Homo sapiens
  misc_RNA (1)...(19): siRNA sense strand
gaaagauucuaugggaaau

SEQ ID NO: 1907482 - RNA, 19 nt, Homo sapiens
  misc_RNA (1)...(19): siRNA sense strand
caacaagaaagcugaaaga

SEQ ID NO: 1907483 - RNA, 19 nt, Homo sapiens
  misc_RNA (1)...(19): siRNA sense strand
aaccugacauggaaacaua

SEQ ID NO: 1907484 - RNA, 19 nt, Homo sapiens
  misc_RNA (1)...(19): siRNA sense strand
uaugagagacugagagaaa

SEQ ID NO: 1907485 - RNA, 19 nt, Homo sapiens
  misc_RNA (1)...(19): siRNA sense strand
ccaggaaguuguggaagaa

SEQ ID NO: 1907486 - RNA, 19 nt, Homo sapiens
  misc_RNA (1)...(19): siRNA sense strand
ggagaagacuaugagaaag

SEQ ID NO: 1907487 - RNA, 19 nt, Homo sapiens
  misc_RNA (1)...(19): siRNA sense strand
cagaggaaauugacaggau

SEQ ID NO: 1907488 - RNA, 19 nt, Homo sapiens
  misc_RNA (1)...(19): siRNA sense strand
ugaaagauucuaugggaaa

SEQ ID NO: 1907489 - RNA, 19 nt, Homo sapiens
  misc_RNA (1)...(19): siRNA sense strand
acaagaaagcugaaagauu

SEQ ID NO: 1907490 - RNA, 19 nt, Homo sapiens
  misc_RNA (1)...(19): siRNA sense strand
ggaacuaaaggaagaggaa

SEQ ID NO: 1907491 - RNA, 19 nt, Homo sapiens
  misc_RNA (1)...(19): siRNA sense strand
gaggagaagacuaugagaa

SEQ ID NO: 1907492 - RNA, 19 nt, Homo sapiens
  misc_RNA (1)...(19): siRNA sense strand
ggagugggaacuaaaggaa

SEQ ID NO: 1907493 - RNA, 19 nt, Homo sapiens
  misc_RNA (1)...(19): siRNA sense strand
aaacagaauuuggaaagag

SEQ ID NO: 1907494 - RNA, 19 nt, Homo sapiens
  misc_RNA (1)...(19): siRNA sense strand
gagacguccuuauaaugau

SEQ ID NO: 1907495 - RNA, 19 nt, Homo sapiens
  misc_RNA (1)...(19): siRNA sense strand
ggcaagaggagaagacuau

SEQ ID NO: 1907496 - RNA, 19 nt, Homo sapiens
  misc_RNA (1)...(19): siRNA sense strand
gaacuaaaggaagaggaaa

SEQ ID NO: 1907497 - RNA, 19 nt, Homo sapiens
  misc_RNA (1)...(19): siRNA sense strand
gagaagacuaugagaaagu

SEQ ID NO: 1907498 - RNA, 19 nt, Homo sapiens
  misc_RNA (1)...(19): siRNA sense strand
gaaguuguggaagaagaua

SEQ ID NO: 1907499 - RNA, 19 nt, Homo sapiens
  misc_RNA (1)...(19): siRNA sense strand
aagaggaacagcugucuaa

SEQ ID NO: 1907500 - RNA, 19 nt, Homo sapiens
  misc_RNA (1)...(19): siRNA sense strand
ccggagacguccuuauaau

SEQ ID NO: 1907501 - RNA, 19 nt, Homo sapiens
  misc_RNA (1)...(19): siRNA sense strand
gcagaucaaaccugacaug

SEQ ID NO: 1907502 - RNA, 19 nt, Homo sapiens
  misc_RNA (1)...(19): siRNA sense strand
caagaggagaagacuauga

SEQ ID NO: 1907503 - RNA, 19 nt, Homo sapiens
  misc_RNA (1)...(19): siRNA sense strand
uuaugcugcugcccaguua

SEQ ID NO: 1907504 - RNA, 19 nt, Homo sapiens
  misc_RNA (1)...(19): siRNA sense strand
aaaggaaugugcggcaaga

SEQ ID NO: 1907505 - RNA, 19 nt, Homo sapiens
  misc_RNA (1)...(19): siRNA sense strand
gaaagcugaaagauucuau

SEQ ID NO: 1907506 - RNA, 19 nt, Homo sapiens
  misc_RNA (1)...(19): siRNA sense strand
aggagaagacuaugagaaa

SEQ ID NO: 1907507 - RNA, 19 nt, Homo sapiens
  misc_RNA (1)...(19): siRNA sense strand
cauggaaacauaugagaga

SEQ ID NO: 1907508 - RNA, 19 nt, Homo sapiens
  misc_RNA (1)...(19): siRNA sense strand
cagaagaugcagaaagaug

SEQ ID NO: 1907509 - RNA, 19 nt, Homo sapiens
  misc_RNA (1)...(19): siRNA sense strand
uaaugaugaugcagauauc

SEQ ID NO: 1907510 - RNA, 19 nt, Homo sapiens
  misc_RNA (1)...(19): siRNA sense strand
uaaaucaccaggaaguugu

SEQ ID NO: 1907511 - RNA, 19 nt, Homo sapiens
  misc_RNA (1)...(19): siRNA sense strand
gccggagacguccuuauaa

SEQ ID NO: 1907512 - RNA, 19 nt, Homo sapiens
  misc_RNA (1)...(19): siRNA sense strand
agaagacuaugagaaagug

SEQ ID NO: 1907513 - RNA, 19 nt, Homo sapiens
  misc_RNA (1)...(19): siRNA sense strand
aacagagacugcgcaaauu

SEQ ID NO: 1907514 - RNA, 19 nt, Homo sapiens
  misc_RNA (1)...(19): siRNA sense strand
gaaagaggaacagcugucu

SEQ ID NO: 1907515 - RNA, 19 nt, Homo sapiens
  misc_RNA (1)...(19): siRNA sense strand
ugaaguugcuggagaucag

SEQ ID NO: 1907516 - RNA, 19 nt, Homo sapiens
  misc_RNA (1)...(19): siRNA sense strand
gcucagaagcgcgaacaga

SEQ ID NO: 1907517 - RNA, 19 nt, Homo sapiens
  misc_RNA (1)...(19): siRNA sense strand
cgacuacauuaaugaaagg

SEQ ID NO: 1907518 - RNA, 19 nt, Homo sapiens
  misc_RNA (1)...(19): siRNA sense strand
caauagucuucuucaugga

SEQ ID NO: 1907519 - RNA, 19 nt, Homo sapiens
  misc_RNA (1)...(19): siRNA sense strand
agugggaacuaaaggaaga

SEQ ID NO: 1907520 - RNA, 19 nt, Homo sapiens
  misc_RNA (1)...(19): siRNA sense strand
cauaugagagacugagaga

SEQ ID NO: 1907521 - RNA, 19 nt, Homo sapiens
  misc_RNA (1)...(19): siRNA sense strand
ggaaguuguggaagaagau

SEQ ID NO: 1907522 - RNA, 19 nt, Homo sapiens
  misc_RNA (1)...(19): siRNA sense strand
gaagcucguaaauuaaauc

SEQ ID NO: 1907523 - RNA, 19 nt, Homo sapiens
  misc_RNA (1)...(19): siRNA sense strand
aaacccugaucugggauuu

SEQ ID NO: 1907524 - RNA, 19 nt, Homo sapiens
  misc_RNA (1)...(19): siRNA sense strand
gaauuuggaaagaggaaca

SEQ ID NO: 1907525 - RNA, 19 nt, Homo sapiens
  misc_RNA (1)...(19): siRNA sense strand
ucgacuacauuaaugaaag

SEQ ID NO: 1907526 - RNA, 19 nt, Homo sapiens
  misc_RNA (1)...(19): siRNA sense strand
agacguccuuauaaugaug

SEQ ID NO: 1907527 - RNA, 19 nt, Homo sapiens
  misc_RNA (1)...(19): siRNA sense strand
gacauggaaacauaugaga

SEQ ID NO: 1907528 - RNA, 19 nt, Homo sapiens
  misc_RNA (1)...(19): siRNA sense strand
agccggagacguccuuaua

SEQ ID NO: 1907529 - RNA, 19 nt, Homo sapiens
  misc_RNA (1)...(19): siRNA sense strand
gggaaauacacagcugaaa

SEQ ID NO: 1907530 - RNA, 19 nt, Homo sapiens
  misc_RNA (1)...(19): siRNA sense strand
ucagaagcgcgaacagaga

SEQ ID NO: 1907531 - RNA, 19 nt, Homo sapiens
  misc_RNA (1)...(19): siRNA sense strand
cagauaucgacuacauuaa

SEQ ID NO: 1907532 - RNA, 19 nt, Homo sapiens
  misc_RNA (1)...(19): siRNA sense strand
gacaggauggucauagauc

SEQ ID NO: 1907533 - RNA, 19 nt, Homo sapiens
  misc_RNA (1)...(19): siRNA sense strand
augcagauaucgacuacau

SEQ ID NO: 1907534 - RNA, 19 nt, Homo sapiens
  misc_RNA (1)...(19): siRNA sense strand
uuaaaucaccaggaaguug

SEQ ID NO: 1907535 - RNA, 19 nt, Homo sapiens
  misc_RNA (1)...(19): siRNA sense strand
agacuaaaauuaccugcaa

SEQ ID NO: 1907536 - RNA, 19 nt, Homo sapiens
  misc_RNA (1)...(19): siRNA sense strand
uccaauagucuucuucaug

SEQ ID NO: 1907537 - RNA, 19 nt, Homo sapiens
  misc_RNA (1)...(19): siRNA sense strand
accaggaaguuguggaaga

SEQ ID NO: 1907538 - RNA, 19 nt, Homo sapiens
  misc_RNA (1)...(19): siRNA sense strand
gaagacuaugagaaaguga

SEQ ID NO: 1907539 - RNA, 19 nt, Homo sapiens
  misc_RNA (1)...(19): siRNA sense strand
uaaaggaagaggaaaagaa

SEQ ID NO: 1907540 - RNA, 19 nt, Homo sapiens
  misc_RNA (1)...(19): siRNA sense strand
aaugccaaauucaacaaga

SEQ ID NO: 1907541 - RNA, 19 nt, Homo sapiens
  misc_RNA (1)...(19): siRNA sense strand
cggagacguccuuauaaug

SEQ ID NO: 1907542 - RNA, 19 nt, Homo sapiens
  misc_RNA (1)...(19): siRNA sense strand
gaaacauaugagagacuga

SEQ ID NO: 1907543 - RNA, 19 nt, Homo sapiens
  misc_RNA (1)...(19): siRNA sense strand
aggaaguuguggaagaaga

SEQ ID NO: 1907544 - RNA, 19 nt, Homo sapiens
  misc_RNA (1)...(19): siRNA sense strand
agaaagaugggagaggaaa

SEQ ID NO: 1907545 - RNA, 19 nt, Homo sapiens
  misc_RNA (1)...(19): siRNA sense strand
cggaaugaagcucguaaau

SEQ ID NO: 1907546 - RNA, 19 nt, Homo sapiens
  misc_RNA (1)...(19): siRNA sense strand
aagauucuaugggaaauac

SEQ ID NO: 1907547 - RNA, 19 nt, Homo sapiens
  misc_RNA (1)...(19): siRNA sense strand
augaaaggaaugccaaauu

SEQ ID NO: 1907548 - RNA, 19 nt, Homo sapiens
  misc_RNA (1)...(19): siRNA sense strand
acaggauggucauagaucu

SEQ ID NO: 1907549 - RNA, 19 nt, Homo sapiens
  misc_RNA (1)...(19): siRNA sense strand
ugaugcagauaucgacuac

SEQ ID NO: 1907550 - RNA, 19 nt, Homo sapiens
  misc_RNA (1)...(19): siRNA sense strand
acagagacugcgcaaauuc

SEQ ID NO: 1907551 - RNA, 19 nt, Homo sapiens
  misc_RNA (1)...(19): siRNA sense strand
gcaagaggagaagacuaug

SEQ ID NO: 1907552 - RNA, 19 nt, Homo sapiens
  misc_RNA (1)...(19): siRNA sense strand
aaagaggaacagcugucua

SEQ ID NO: 1907553 - RNA, 19 nt, Homo sapiens
  misc_RNA (1)...(19): siRNA sense strand
gcggaaugaagcucguaaa

SEQ ID NO: 1907554 - RNA, 19 nt, Homo sapiens
  misc_RNA (1)...(19): siRNA sense strand
uaaugaaaggaaugccaaa

SEQ ID NO: 1907555 - RNA, 19 nt, Homo sapiens
  misc_RNA (1)...(19): siRNA sense strand
ucaccaggaaguuguggaa

SEQ ID NO: 1907556 - RNA, 19 nt, Homo sapiens
  misc_RNA (1)...(19): siRNA sense strand
aaaggaagaggaaaagaaa

SEQ ID NO: 1907557 - RNA, 19 nt, Homo sapiens
  misc_RNA (1)...(19): siRNA sense strand
augccaaauucaacaagaa

SEQ ID NO: 1907558 - RNA, 19 nt, Homo sapiens
  misc_RNA (1)...(19): siRNA sense strand
acuaugagaaagugaaguu

SEQ ID NO: 1907559 - RNA, 19 nt, Homo sapiens
  misc_RNA (1)...(19): siRNA sense strand
gagaucagugcagaagaug

SEQ ID NO: 1907560 - RNA, 19 nt, Homo sapiens
  misc_RNA (1)...(19): siRNA sense strand
acacagcugaaauuaaaca

SEQ ID NO: 1907561 - RNA, 19 nt, Homo sapiens
  misc_RNA (1)...(19): siRNA sense strand
cguuuggagugggaacuaa

SEQ ID NO: 1907562 - RNA, 19 nt, Homo sapiens
  misc_RNA (1)...(19): siRNA sense strand
gauggucauagaucuggaa

SEQ ID NO: 1907563 - RNA, 19 nt, Homo sapiens
  misc_RNA (1)...(19): siRNA sense strand
gcagaagaugcagaaagau

SEQ ID NO: 1907564 - RNA, 19 nt, Homo sapiens
  misc_RNA (1)...(19): siRNA sense strand
gaagaaacauaugaagaga

SEQ ID NO: 1907565 - RNA, 19 nt, Homo sapiens
  misc_RNA (1)...(19): siRNA sense strand
gaagaaacugugacuacua

SEQ ID NO: 1907566 - RNA, 19 nt, Homo sapiens
  misc_RNA (1)...(19): siRNA sense strand
gcagauuacaugcuuauga

SEQ ID NO: 1907567 - RNA, 19 nt, Homo sapiens
  misc_RNA (1)...(19): siRNA sense strand
gcaacaaacuaccaacacu

SEQ ID NO: 1907568 - RNA, 19 nt, Homo sapiens
  misc_RNA (1)...(19): siRNA sense strand
gaugagcgaauuuauguga

SEQ ID NO: 1907569 - RNA, 19 nt, Homo sapiens
  misc_RNA (1)...(19): siRNA sense strand
ggaagaaacugugacuacu

SEQ ID NO: 1907570 - RNA, 19 nt, Homo sapiens
  misc_RNA (1)...(19): siRNA sense strand
cagauuacaugcuuaugau

SEQ ID NO: 1907571 - RNA, 19 nt, Homo sapiens
  misc_RNA (1)...(19): siRNA sense strand
aagaaacugugacuacuau

SEQ ID NO: 1907572 - RNA, 19 nt, Homo sapiens
  misc_RNA (1)...(19): siRNA sense strand
cgaggcagauuacaugcuu

SEQ ID NO: 1907573 - RNA, 19 nt, Homo sapiens
  misc_RNA (1)...(19): siRNA sense strand
gaaacugugacuacuauag

SEQ ID NO: 1907574 - RNA, 19 nt, Homo sapiens
  misc_RNA (1)...(19): siRNA sense strand
ugagcgaauuuaugugaaa

SEQ ID NO: 1907575 - RNA, 19 nt, Homo sapiens
  misc_RNA (1)...(19): siRNA sense strand
cagccuagaugagcgaauu

SEQ ID NO: 1907576 - RNA, 19 nt, Homo sapiens
  misc_RNA (1)...(19): siRNA sense strand
gaggcagauuacaugcuua

SEQ ID NO: 1907577 - RNA, 19 nt, Homo sapiens
  misc_RNA (1)...(19): siRNA sense strand
uagaugagcgaauuuaugu

SEQ ID NO: 1907578 - RNA, 19 nt, Homo sapiens
  misc_RNA (1)...(19): siRNA sense strand
ucaacgaaacggaauauuc

SEQ ID NO: 1907579 - RNA, 19 nt, Homo sapiens
  misc_RNA (1)...(19): siRNA sense strand
ugaagaaacauaugaagag

SEQ ID NO: 1907580 - RNA, 19 nt, Homo sapiens
  misc_RNA (1)...(19): siRNA sense strand
gagaaaugaccgagagcuu

SEQ ID NO: 1907581 - RNA, 19 nt, Homo sapiens
  misc_RNA (1)...(19): siRNA sense strand
gauuacaugcuuaugauca

SEQ ID NO: 1907582 - RNA, 19 nt, Homo sapiens
  misc_RNA (1)...(19): siRNA sense strand
cgacguagaccagcaacaa

SEQ ID NO: 1907583 - RNA, 19 nt, Homo sapiens
  misc_RNA (1)...(19): siRNA sense strand
aaacugugacuacuauaga

SEQ ID NO: 1907584 - RNA, 19 nt, Homo sapiens
  misc_RNA (1)...(19): siRNA sense strand
gaauauuccaaugcucuuu

SEQ ID NO: 1907585 - RNA, 19 nt, Homo sapiens
  misc_RNA (1)...(19): siRNA sense strand
guagaccagcaacaaacua

SEQ ID NO: 1907586 - RNA, 19 nt, Homo sapiens
  misc_RNA (1)...(19): siRNA sense strand
gacguagaccagcaacaaa

SEQ ID NO: 1907587 - RNA, 19 nt, Homo sapiens
  misc_RNA (1)...(19): siRNA sense strand
gaugaagaaacauaugaag

SEQ ID NO: 1907588 - RNA, 19 nt, Homo sapiens
  misc_RNA (1)...(19): siRNA sense strand
cuagaugagcgaauuuaug

SEQ ID NO: 1907589 - RNA, 19 nt, Homo sapiens
  misc_RNA (1)...(19): siRNA sense strand
ggacgacguagaccagcaa

SEQ ID NO: 1907590 - RNA, 19 nt, Homo sapiens
  misc_RNA (1)...(19): siRNA sense strand
cuugggagauguggaagaa

SEQ ID NO: 1907591 - RNA, 19 nt, Homo sapiens
  misc_RNA (1)...(19): siRNA sense strand
uaaaucaacgaaacggaau

SEQ ID NO: 1907592 - RNA, 19 nt, Homo sapiens
  misc_RNA (1)...(19): siRNA sense strand
gagcuucgaggcagauuac

SEQ ID NO: 1907593 - RNA, 19 nt, Homo sapiens
  misc_RNA (1)...(19): siRNA sense strand
gccuagaugagcgaauuua

SEQ ID NO: 1907594 - RNA, 19 nt, Homo sapiens
  misc_RNA (1)...(19): siRNA sense strand
gauguggaagaaacuguga

SEQ ID NO: 1907595 - RNA, 19 nt, Homo sapiens
  misc_RNA (1)...(19): siRNA sense strand
gaggagccccuggaucuua

SEQ ID NO: 1907596 - RNA, 19 nt, Homo sapiens
  misc_RNA (1)...(19): siRNA sense strand
gagcgaauuuaugugaaaa

SEQ ID NO: 1907597 - RNA, 19 nt, Homo sapiens
  misc_RNA (1)...(19): siRNA sense strand
ugggagauguggaagaaac

SEQ ID NO: 1907598 - RNA, 19 nt, Homo sapiens
  misc_RNA (1)...(19): siRNA sense strand
uggaagaaacugugacuac

SEQ ID NO: 1907599 - RNA, 19 nt, Homo sapiens
  misc_RNA (1)...(19): siRNA sense strand
aacugugacuacuauagaa

SEQ ID NO: 1907600 - RNA, 19 nt, Homo sapiens
  misc_RNA (1)...(19): siRNA sense strand
agauggcguuguccugguu

SEQ ID NO: 1907601 - RNA, 19 nt, Homo sapiens
  misc_RNA (1)...(19): siRNA sense strand
cagcaacaaacuaccaaca

SEQ ID NO: 1907602 - RNA, 19 nt, Homo sapiens
  misc_RNA (1)...(19): siRNA sense strand
acaaacuaccaacacugua

SEQ ID NO: 1907603 - RNA, 19 nt, Homo sapiens
  misc_RNA (1)...(19): siRNA sense strand
aaaucaacgaaacggaaua

SEQ ID NO: 1907604 - RNA, 19 nt, Homo sapiens
  misc_RNA (1)...(19): siRNA sense strand
gagauguggaagaaacugu

SEQ ID NO: 1907605 - RNA, 19 nt, Homo sapiens
  misc_RNA (1)...(19): siRNA sense strand
ggaaaugacugaagaaaug

SEQ ID NO: 1907606 - RNA, 19 nt, Homo sapiens
  misc_RNA (1)...(19): siRNA sense strand
gaagauggcuggagcaaug

SEQ ID NO: 1907607 - RNA, 19 nt, Homo sapiens
  misc_RNA (1)...(19): siRNA sense strand
uaaggaagcuugcaaaguu

SEQ ID NO: 1907608 - RNA, 19 nt, Homo sapiens
  misc_RNA (1)...(19): siRNA sense strand
ggaacagaaucgagaguua

SEQ ID NO: 1907609 - RNA, 19 nt, Homo sapiens
  misc_RNA (1)...(19): siRNA sense strand
gaagaaagccaggauauug

SEQ ID NO: 1907610 - RNA, 19 nt, Homo sapiens
  misc_RNA (1)...(19): siRNA sense strand
cugaagaaaugaucaauga

SEQ ID NO: 1907611 - RNA, 19 nt, Homo sapiens
  misc_RNA (1)...(19): siRNA sense strand
gcucgaagcuuaccaucug

SEQ ID NO: 1907612 - RNA, 19 nt, Homo sapiens
  misc_RNA (1)...(19): siRNA sense strand
gaagaagaaagccaggaua

SEQ ID NO: 1907613 - RNA, 19 nt, Homo sapiens
  misc_RNA (1)...(19): siRNA sense strand
gugaugaauucccaaauga

SEQ ID NO: 1907614 - RNA, 19 nt, Homo sapiens
  misc_RNA (1)...(19): siRNA sense strand
ucgagcagcuuuagagaaa

SEQ ID NO: 1907615 - RNA, 19 nt, Homo sapiens
  misc_RNA (1)...(19): siRNA sense strand
gccaggauauugugaauca

SEQ ID NO: 1907616 - RNA, 19 nt, Homo sapiens
  misc_RNA (1)...(19): siRNA sense strand
aaccguggaugauguaaua

SEQ ID NO: 1907617 - RNA, 19 nt, Homo sapiens
  misc_RNA (1)...(19): siRNA sense strand
caagauugguaauaaggaa

SEQ ID NO: 1907618 - RNA, 19 nt, Homo sapiens
  misc_RNA (1)...(19): siRNA sense strand
gcuguaaguucaaaaguua

SEQ ID NO: 1907619 - RNA, 19 nt, Homo sapiens
  misc_RNA (1)...(19): siRNA sense strand
acagagggcuauaaucaga

SEQ ID NO: 1907620 - RNA, 19 nt, Homo sapiens
  misc_RNA (1)...(19): siRNA sense strand
gaagauggauccacaaaag

SEQ ID NO: 1907621 - RNA, 19 nt, Homo sapiens
  misc_RNA (1)...(19): siRNA sense strand
aaauggaaaugacugaaga

SEQ ID NO: 1907622 - RNA, 19 nt, Homo sapiens
  misc_RNA (1)...(19): siRNA sense strand
aaacaaugcaggcaguuaa

SEQ ID NO: 1907623 - RNA, 19 nt, Homo sapiens
  misc_RNA (1)...(19): siRNA sense strand
gaaaugacugaagaaauga

SEQ ID NO: 1907624 - RNA, 19 nt, Homo sapiens
  misc_RNA (1)...(19): siRNA sense strand
acacagagggcuauaauca

SEQ ID NO: 1907625 - RNA, 19 nt, Homo sapiens
  misc_RNA (1)...(19): siRNA sense strand
gagcagcuuuagagaaaca

SEQ ID NO: 1907626 - RNA, 19 nt, Homo sapiens
  misc_RNA (1)...(19): siRNA sense strand
gacgagaacuuuugcugua

SEQ ID NO: 1907627 - RNA, 19 nt, Homo sapiens
  misc_RNA (1)...(19): siRNA sense strand
ugacgguucugaugacgaa

SEQ ID NO: 1907628 - RNA, 19 nt, Homo sapiens
  misc_RNA (1)...(19): siRNA sense strand
guacacagagggcuauaau

SEQ ID NO: 1907629 - RNA, 19 nt, Homo sapiens
  misc_RNA (1)...(19): siRNA sense strand
aaucgagaguuacgaggua

SEQ ID NO: 1907630 - RNA, 19 nt, Homo sapiens
  misc_RNA (1)...(19): siRNA sense strand
aaacagaagacgagaacuu

SEQ ID NO: 1907631 - RNA, 19 nt, Homo sapiens
  misc_RNA (1)...(19): siRNA sense strand
aaggaagcuugcaaaguuu

SEQ ID NO: 1907632 - RNA, 19 nt, Homo sapiens
  misc_RNA (1)...(19): siRNA sense strand
gaaagccaggauauuguga

SEQ ID NO: 1907633 - RNA, 19 nt, Homo sapiens
  misc_RNA (1)...(19): siRNA sense strand
gcaggcaguuaacaagaag

SEQ ID NO: 1907634 - RNA, 19 nt, Homo sapiens
  misc_RNA (1)...(19): siRNA sense strand
ggaaacagaagacgagaac

SEQ ID NO: 1907635 - RNA, 19 nt, Homo sapiens
  misc_RNA (1)...(19): siRNA sense strand
gaacagaaucgagaguuac

SEQ ID NO: 1907636 - RNA, 19 nt, Homo sapiens
  misc_RNA (1)...(19): siRNA sense strand
gagauugaacggcaacuca

SEQ ID NO: 1907637 - RNA, 19 nt, Homo sapiens
  misc_RNA (1)...(19): siRNA sense strand
uggaugauguaauaaagga

SEQ ID NO: 1907638 - RNA, 19 nt, Homo sapiens
  misc_RNA (1)...(19): siRNA sense strand
guaauaaggaagcuugcaa

SEQ ID NO: 1907639 - RNA, 19 nt, Homo sapiens
  misc_RNA (1)...(19): siRNA sense strand
ucagagaucgagcagcuuu

SEQ ID NO: 1907640 - RNA, 19 nt, Homo sapiens
  misc_RNA (1)...(19): siRNA sense strand
uuacuucuaugucuacaca

SEQ ID NO: 1907641 - RNA, 19 nt, Homo sapiens
  misc_RNA (1)...(19): siRNA sense strand
caaaggcuacaaucucaga

SEQ ID NO: 1907642 - RNA, 19 nt, Homo sapiens
  misc_RNA (1)...(19): siRNA sense strand
aaacagcuggaauuagaaa

SEQ ID NO: 1907643 - RNA, 19 nt, Homo sapiens
  misc_RNA (1)...(19): siRNA sense strand
uaauaaggaagcuugcaaa

SEQ ID NO: 1907644 - RNA, 19 nt, Homo sapiens
  misc_RNA (1)...(19): siRNA sense strand
agugaugaauucccaaaug

SEQ ID NO: 1907645 - RNA, 19 nt, Homo sapiens
  misc_RNA (1)...(19): siRNA sense strand
gaugaauucccaaaugaag

SEQ ID NO: 1907646 - RNA, 19 nt, Homo sapiens
  misc_RNA (1)...(19): siRNA sense strand
gaucgagcagcuuuagaga

SEQ ID NO: 1907647 - RNA, 19 nt, Homo sapiens
  misc_RNA (1)...(19): siRNA sense strand
gcaacucaaggcuuuagga

SEQ ID NO: 1907648 - RNA, 19 nt, Homo sapiens
  misc_RNA (1)...(19): siRNA sense strand
guaauaaaggaacagaauc

SEQ ID NO: 1907649 - RNA, 19 nt, Homo sapiens
  misc_RNA (1)...(19): siRNA sense strand
caaugcagaauuuccagaa

SEQ ID NO: 1907650 - RNA, 19 nt, Homo sapiens
  misc_RNA (1)...(19): siRNA sense strand
gaaaaccguggaugaugua

SEQ ID NO: 1907651 - RNA, 19 nt, Homo sapiens
  misc_RNA (1)...(19): siRNA sense strand
aacggcaacucaaggcuuu

SEQ ID NO: 1907652 - RNA, 19 nt, Homo sapiens
  misc_RNA (1)...(19): siRNA sense strand
uucaaaggcuacaaucuca

SEQ ID NO: 1907653 - RNA, 19 nt, Homo sapiens
  misc_RNA (1)...(19): siRNA sense strand
aagaagaaagccaggauau

SEQ ID NO: 1907654 - RNA, 19 nt, Homo sapiens
  misc_RNA (1)...(19): siRNA sense strand
gugcaucuacggaaacaga

SEQ ID NO: 1907655 - RNA, 19 nt, Homo sapiens
  misc_RNA (1)...(19): siRNA sense strand
ccaucugccucuacuucaa

SEQ ID NO: 1907656 - RNA, 19 nt, Homo sapiens
  misc_RNA (1)...(19): siRNA sense strand
gauauugugaaucaaguuc

SEQ ID NO: 1907657 - RNA, 19 nt, Homo sapiens
  misc_RNA (1)...(19): siRNA sense strand
ugacaucuuugacgguucu

SEQ ID NO: 1907658 - RNA, 19 nt, Homo sapiens
  misc_RNA (1)...(19): siRNA sense strand
ccacaaaagacauuacaaa

SEQ ID NO: 1907659 - RNA, 19 nt, Homo sapiens
  misc_RNA (1)...(19): siRNA sense strand
caaugucuaccacagcaaa

SEQ ID NO: 1907660 - RNA, 19 nt, Homo sapiens
  misc_RNA (1)...(19): siRNA sense strand
agaagaaagccaggauauu

SEQ ID NO: 1907661 - RNA, 19 nt, Homo sapiens
  misc_RNA (1)...(19): siRNA sense strand
ugcaggcaguuaacaagaa

SEQ ID NO: 1907662 - RNA, 19 nt, Homo sapiens
  misc_RNA (1)...(19): siRNA sense strand
cguggaugauguaauaaag

SEQ ID NO: 1907663 - RNA, 19 nt, Homo sapiens
  misc_RNA (1)...(19): siRNA sense strand
caaugcaggcaguuaacaa

SEQ ID NO: 1907664 - RNA, 19 nt, Homo sapiens
  misc_RNA (1)...(19): siRNA sense strand
agagggcuauaaucagaga

SEQ ID NO: 1907665 - RNA, 19 nt, Homo sapiens
  misc_RNA (1)...(19): siRNA sense strand
gaagaaaaccguggaugau

SEQ ID NO: 1907666 - RNA, 19 nt, Homo sapiens
  misc_RNA (1)...(19): siRNA sense strand
aacagaagacgagaacuuu

SEQ ID NO: 1907667 - RNA, 19 nt, Homo sapiens
  misc_RNA (1)...(19): siRNA sense strand
caucugccucuacuucaaa

SEQ ID NO: 1907668 - RNA, 19 nt, Homo sapiens
  misc_RNA (1)...(19): siRNA sense strand
ugaauucccaaaugaagau

SEQ ID NO: 1907669 - RNA, 19 nt, Homo sapiens
  misc_RNA (1)...(19): siRNA sense strand
ggauauugugaaucaaguu

SEQ ID NO: 1907670 - RNA, 19 nt, Homo sapiens
  misc_RNA (1)...(19): siRNA sense strand
cgaagaagaaagccaggau

SEQ ID NO: 1907671 - RNA, 19 nt, Homo sapiens
  misc_RNA (1)...(19): siRNA sense strand
aagaagauggauccacaaa

SEQ ID NO: 1907672 - RNA, 19 nt, Homo sapiens
  misc_RNA (1)...(19): siRNA sense strand
aaacaaugcagaauuucca

SEQ ID NO: 1907673 - RNA, 19 nt, Homo sapiens
  misc_RNA (1)...(19): siRNA sense strand
gaguuacgagguacacaga

SEQ ID NO: 1907674 - RNA, 19 nt, Homo sapiens
  misc_RNA (1)...(19): siRNA sense strand
cuggaaagauggccaaagc

SEQ ID NO: 1907675 - RNA, 19 nt, Homo sapiens
  misc_RNA (1)...(19): siRNA sense strand
aagaaagccaggauauugu

SEQ ID NO: 1907676 - RNA, 19 nt, Homo sapiens
  misc_RNA (1)...(19): siRNA sense strand
ugcagaauuuccagaagga

SEQ ID NO: 1907677 - RNA, 19 nt, Homo sapiens
  misc_RNA (1)...(19): siRNA sense strand
aaagugaugaauucccaaa

SEQ ID NO: 1907678 - RNA, 19 nt, Homo sapiens
  misc_RNA (1)...(19): siRNA sense strand
caagaagauggauccacaa

SEQ ID NO: 1907679 - RNA, 19 nt, Homo sapiens
  misc_RNA (1)...(19): siRNA sense strand
uaauaaaggaacagaaucg

SEQ ID NO: 1907680 - RNA, 19 nt, Homo sapiens
  misc_RNA (1)...(19): siRNA sense strand
aagccaggauauugugaau

SEQ ID NO: 1907681 - RNA, 19 nt, Homo sapiens
  misc_RNA (1)...(19): siRNA sense strand
acuucuaugucuacacaaa

SEQ ID NO: 1907682 - RNA, 19 nt, Homo sapiens
  misc_RNA (1)...(19): siRNA sense strand
cagagaucgagcagcuuua

SEQ ID NO: 1907683 - RNA, 19 nt, Homo sapiens
  misc_RNA (1)...(19): siRNA sense strand
uuaagaaaauggccaagau

SEQ ID NO: 1907684 - RNA, 19 nt, Homo sapiens
  misc_RNA (1)...(19): siRNA sense strand
ugacugaagaaaugaucaa

SEQ ID NO: 1907685 - RNA, 19 nt, Homo sapiens
  misc_RNA (1)...(19): siRNA sense strand
gaaggaaaacaugaaaaug

SEQ ID NO: 1907686 - RNA, 19 nt, Homo sapiens
  misc_RNA (1)...(19): siRNA sense strand
ugaugaauucccaaaugaa

SEQ ID NO: 1907687 - RNA, 19 nt, Homo sapiens
  misc_RNA (1)...(19): siRNA sense strand
gagaucgagcagcuuuaga

SEQ ID NO: 1907688 - RNA, 19 nt, Homo sapiens
  misc_RNA (1)...(19): siRNA sense strand
uggaaaugacugaagaaau

SEQ ID NO: 1907689 - RNA, 19 nt, Homo sapiens
  misc_RNA (1)...(19): siRNA sense strand
caucuacggaaacagaaga

SEQ ID NO: 1907690 - RNA, 19 nt, Homo sapiens
  misc_RNA (1)...(19): siRNA sense strand
agaaaaccguggaugaugu

SEQ ID NO: 1907691 - RNA, 19 nt, Homo sapiens
  misc_RNA (1)...(19): siRNA sense strand
gauguaauaaaggaacaga

SEQ ID NO: 1907692 - RNA, 19 nt, Homo sapiens
  misc_RNA (1)...(19): siRNA sense strand
gguacacagagggcuauaa

SEQ ID NO: 1907693 - RNA, 19 nt, Homo sapiens
  misc_RNA (1)...(19): siRNA sense strand
agaaagccaggauauugug

SEQ ID NO: 1907694 - RNA, 19 nt, Homo sapiens
  misc_RNA (1)...(19): siRNA sense strand
caacagguauaacuacaua

SEQ ID NO: 1907695 - RNA, 19 nt, Homo sapiens
  misc_RNA (1)...(19): siRNA sense strand
ucacuacccuguuuaagua

SEQ ID NO: 1907696 - RNA, 19 nt, Homo sapiens
  misc_RNA (1)...(19): siRNA sense strand
cgacaucgacuuugacaua

SEQ ID NO: 1907697 - RNA, 19 nt, Homo sapiens
  misc_RNA (1)...(19): siRNA sense strand
ccaaugaguucaaggugua

SEQ ID NO: 1907698 - RNA, 19 nt, Homo sapiens
  misc_RNA (1)...(19): siRNA sense strand
caagcuaccuaacuaagaa

SEQ ID NO: 1907699 - RNA, 19 nt, Homo sapiens
  misc_RNA (1)...(19): siRNA sense strand
gaagagccaugaagacagu

SEQ ID NO: 1907700 - RNA, 19 nt, Homo sapiens
  misc_RNA (1)...(19): siRNA sense strand
gaaggugguuggcaaguuc

SEQ ID NO: 1907701 - RNA, 19 nt, Homo sapiens
  misc_RNA (1)...(19): siRNA sense strand
caggaucgcuacauuaaga

SEQ ID NO: 1907702 - RNA, 19 nt, Homo sapiens
  misc_RNA (1)...(19): siRNA sense strand
caacaaagaccuccauucu

SEQ ID NO: 1907703 - RNA, 19 nt, Homo sapiens
  misc_RNA (1)...(19): siRNA sense strand
gagguucgacugaugauaa

SEQ ID NO: 1907704 - RNA, 19 nt, Homo sapiens
  misc_RNA (1)...(19): siRNA sense strand
gcgagcaggucacaagcua

SEQ ID NO: 1907705 - RNA, 19 nt, Homo sapiens
  misc_RNA (1)...(19): siRNA sense strand
gaagaagaccgugugcauu

SEQ ID NO: 1907706 - RNA, 19 nt, Homo sapiens
  misc_RNA (1)...(19): siRNA sense strand
ggaaggugguuggcaaguu

SEQ ID NO: 1907707 - RNA, 19 nt, Homo sapiens
  misc_RNA (1)...(19): siRNA sense strand
caagaaagacauccucaug

SEQ ID NO: 1907708 - RNA, 19 nt, Homo sapiens
  misc_RNA (1)...(19): siRNA sense strand
uuaaggauguggacuaugu

SEQ ID NO: 1907709 - RNA, 19 nt, Homo sapiens
  misc_RNA (1)...(19): siRNA sense strand
agaagaccgugugcauuua

SEQ ID NO: 1907710 - RNA, 19 nt, Homo sapiens
  misc_RNA (1)...(19): siRNA sense strand
gucacaagcuaccuaacua

SEQ ID NO: 1907711 - RNA, 19 nt, Homo sapiens
  misc_RNA (1)...(19): siRNA sense strand
gaaagaagaagcccugcau

SEQ ID NO: 1907712 - RNA, 19 nt, Homo sapiens
  misc_RNA (1)...(19): siRNA sense strand
guacgacgacaucgacuuu

SEQ ID NO: 1907713 - RNA, 19 nt, Homo sapiens
  misc_RNA (1)...(19): siRNA sense strand
gagaagagaggcgaaauca

SEQ ID NO: 1907714 - RNA, 19 nt, Homo sapiens
  misc_RNA (1)...(19): siRNA sense strand
aagaagaccgugugcauuu

SEQ ID NO: 1907715 - RNA, 19 nt, Homo sapiens
  misc_RNA (1)...(19): siRNA sense strand
uagaggaguuugccaagga

SEQ ID NO: 1907716 - RNA, 19 nt, Homo sapiens
  misc_RNA (1)...(19): siRNA sense strand
agaaagacauccucaugca

SEQ ID NO: 1907717 - RNA, 19 nt, Homo sapiens
  misc_RNA (1)...(19): siRNA sense strand
gagaagagccaugaagaca

SEQ ID NO: 1907718 - RNA, 19 nt, Homo sapiens
  misc_RNA (1)...(19): siRNA sense strand
gaaaagcucaacagguaua

SEQ ID NO: 1907719 - RNA, 19 nt, Homo sapiens
  misc_RNA (1)...(19): siRNA sense strand
uuaagaaacucgcaaaaug

SEQ ID NO: 1907720 - RNA, 19 nt, Homo sapiens
  misc_RNA (1)...(19): siRNA sense strand
aaaucaggaucgcuacauu

SEQ ID NO: 1907721 - RNA, 19 nt, Homo sapiens
  misc_RNA (1)...(19): siRNA sense strand
aaucaggaucgcuacauua

SEQ ID NO: 1907722 - RNA, 19 nt, Homo sapiens
  misc_RNA (1)...(19): siRNA sense strand
gggagaagagccaugaaga

SEQ ID NO: 1907723 - RNA, 19 nt, Homo sapiens
  misc_RNA (1)...(19): siRNA sense strand
gcaacaaagaccuccauuc

SEQ ID NO: 1907724 - RNA, 19 nt, Homo sapiens
  misc_RNA (1)...(19): siRNA sense strand
guacauagaugaaaaucag

SEQ ID NO: 1907725 - RNA, 19 nt, Homo sapiens
  misc_RNA (1)...(19): siRNA sense strand
ucucccagcugaaggacua

SEQ ID NO: 1907726 - RNA, 19 nt, Homo sapiens
  misc_RNA (1)...(19): siRNA sense strand
ggcgaaaucaggaggauga

SEQ ID NO: 1907727 - RNA, 19 nt, Homo sapiens
  misc_RNA (1)...(19): siRNA sense strand
ggcccucacuacccuguuu

SEQ ID NO: 1907728 - RNA, 19 nt, Homo sapiens
  misc_RNA (1)...(19): siRNA sense strand
gacuaugucugcauuucug

SEQ ID NO: 1907729 - RNA, 19 nt, Homo sapiens
  misc_RNA (1)...(19): siRNA sense strand
ucaggaggaugauggaagu

SEQ ID NO: 1907730 - RNA, 19 nt, Homo sapiens
  misc_RNA (1)...(19): siRNA sense strand
ucacaagcuaccuaacuaa

SEQ ID NO: 1907731 - RNA, 19 nt, Homo sapiens
  misc_RNA (1)...(19): siRNA sense strand
ccuggaagcguaucagaaa

SEQ ID NO: 1907732 - RNA, 19 nt, Homo sapiens
  misc_RNA (1)...(19): siRNA sense strand
ggagaagagaggcgaaauc

SEQ ID NO: 1907733 - RNA, 19 nt, Homo sapiens
  misc_RNA (1)...(19): siRNA sense strand
augaaaagcucaacaggua

SEQ ID NO: 1907734 - RNA, 19 nt, Homo sapiens
  misc_RNA (1)...(19): siRNA sense strand
aagaggagcacaagcugua

SEQ ID NO: 1907735 - RNA, 19 nt, Homo sapiens
  misc_RNA (1)...(19): siRNA sense strand
gagguggagugcagcaaca

SEQ ID NO: 1907736 - RNA, 19 nt, Homo sapiens
  misc_RNA (1)...(19): siRNA sense strand
gaaaacaggccaggagauu

SEQ ID NO: 1907737 - RNA, 19 nt, Homo sapiens
  misc_RNA (1)...(19): siRNA sense strand
gacaucgacuuugacauag

SEQ ID NO: 1907738 - RNA, 19 nt, Homo sapiens
  misc_RNA (1)...(19): siRNA sense strand
gcuccgacccacagaagaa

SEQ ID NO: 1907739 - RNA, 19 nt, Homo sapiens
  misc_RNA (1)...(19): siRNA sense strand
gaacuacgcagccccaaug

SEQ ID NO: 1907740 - RNA, 19 nt, Homo sapiens
  misc_RNA (1)...(19): siRNA sense strand
cuguggaacugguggauau

SEQ ID NO: 1907741 - RNA, 19 nt, Homo sapiens
  misc_RNA (1)...(19): siRNA sense strand
gcaguauucccgugaccuu

SEQ ID NO: 1907742 - RNA, 19 nt, Homo sapiens
  misc_RNA (1)...(19): siRNA sense strand
guuggcaaguucuccauca

SEQ ID NO: 1907743 - RNA, 19 nt, Homo sapiens
  misc_RNA (1)...(19): siRNA sense strand
acgacgacaucgacuuuga

SEQ ID NO: 1907744 - RNA, 19 nt, Homo sapiens
  misc_RNA (1)...(19): siRNA sense strand
ggagaagagccaugaagac

SEQ ID NO: 1907745 - RNA, 19 nt, Homo sapiens
  misc_RNA (1)...(19): siRNA sense strand
uuaccuggcugggagaaga

SEQ ID NO: 1907746 - RNA, 19 nt, Homo sapiens
  misc_RNA (1)...(19): siRNA sense strand
gaagaccgugugcauuuac

SEQ ID NO: 1907747 - RNA, 19 nt, Homo sapiens
  misc_RNA (1)...(19): siRNA sense strand
gagcccacucccagaauga

SEQ ID NO: 1907748 - RNA, 19 nt, Homo sapiens
  misc_RNA (1)...(19): siRNA sense strand
cagggaaggcggcaguauu

SEQ ID NO: 1907749 - RNA, 19 nt, Homo sapiens
  misc_RNA (1)...(19): siRNA sense strand
aagaagaagcccugcauca

SEQ ID NO: 1907750 - RNA, 19 nt, Homo sapiens
  misc_RNA (1)...(19): siRNA sense strand
ggacuaugucugcauuucu

SEQ ID NO: 1907751 - RNA, 19 nt, Homo sapiens
  misc_RNA (1)...(19): siRNA sense strand
caucgacuuugacauagag

SEQ ID NO: 1907752 - RNA, 19 nt, Homo sapiens
  misc_RNA (1)...(19): siRNA sense strand
caaaauggguggcuaucca

SEQ ID NO: 1907753 - RNA, 19 nt, Homo sapiens
  misc_RNA (1)...(19): siRNA sense strand
ggucacaagcuaccuaacu

SEQ ID NO: 1907754 - RNA, 19 nt, Homo sapiens
  misc_RNA (1)...(19): siRNA sense strand
cugcauuucugacaauuac

SEQ ID NO: 1907755 - RNA, 19 nt, Homo sapiens
  misc_RNA (1)...(19): siRNA sense strand
gggccuagacgagcugauu

SEQ ID NO: 1907756 - RNA, 19 nt, Homo sapiens
  misc_RNA (1)...(19): siRNA sense strand
cccgugaccuugaccuuuc

SEQ ID NO: 1907757 - RNA, 19 nt, Homo sapiens
  misc_RNA (1)...(19): siRNA sense strand
gagaucccgcucccuccua

SEQ ID NO: 1907758 - RNA, 19 nt, Homo sapiens
  misc_RNA (1)...(19): siRNA sense strand
gcucaacagguauaacuac

SEQ ID NO: 1907759 - RNA, 19 nt, Homo sapiens
  misc_RNA (1)...(19): siRNA sense strand
ggaucgcuacauuaagaaa

SEQ ID NO: 1907760 - RNA, 19 nt, Homo sapiens
  misc_RNA (1)...(19): siRNA sense strand
ggccuagacgagcugauuu

SEQ ID NO: 1907761 - RNA, 19 nt, Homo sapiens
  misc_RNA (1)...(19): siRNA sense strand
agaagaagaccgugugcau

SEQ ID NO: 1907762 - RNA, 19 nt, Homo sapiens
  misc_RNA (1)...(19): siRNA sense strand
acagguauaacuacauaga

SEQ ID NO: 1907763 - RNA, 19 nt, Homo sapiens
  misc_RNA (1)...(19): siRNA sense strand
ggguggcuauccagagugu

SEQ ID NO: 1907764 - RNA, 19 nt, Homo sapiens
  misc_RNA (1)...(19): siRNA sense strand
gaggcgaaaucaggaggau

SEQ ID NO: 1907765 - RNA, 19 nt, Homo sapiens
  misc_RNA (1)...(19): siRNA sense strand
acaagcuaccuaacuaaga

SEQ ID NO: 1907766 - RNA, 19 nt, Homo sapiens
  misc_RNA (1)...(19): siRNA sense strand
uguggacuaugucugcauu

SEQ ID NO: 1907767 - RNA, 19 nt, Homo sapiens
  misc_RNA (1)...(19): siRNA sense strand
ggagguucgacugaugaua

SEQ ID NO: 1907768 - RNA, 19 nt, Homo sapiens
  misc_RNA (1)...(19): siRNA sense strand
gcauuucugacaauuacug

SEQ ID NO: 1907769 - RNA, 19 nt, Homo sapiens
  misc_RNA (1)...(19): siRNA sense strand
gcugggagaagagccauga

SEQ ID NO: 1907770 - RNA, 19 nt, Homo sapiens
  misc_RNA (1)...(19): siRNA sense strand
aaacaaaagcucccugaug

SEQ ID NO: 1907771 - RNA, 19 nt, Homo sapiens
  misc_RNA (1)...(19): siRNA sense strand
agacacauucuuuaaggau

SEQ ID NO: 1907772 - RNA, 19 nt, Homo sapiens
  misc_RNA (1)...(19): siRNA sense strand
acaucgacuuugacauaga

SEQ ID NO: 1907773 - RNA, 19 nt, Homo sapiens
  misc_RNA (1)...(19): siRNA sense strand
ucacggaagaggagcacaa

SEQ ID NO: 1907774 - RNA, 19 nt, Homo sapiens
  misc_RNA (1)...(19): siRNA sense strand
cuuuaaggauguggacuau

SEQ ID NO: 1907775 - RNA, 19 nt, Homo sapiens
  misc_RNA (1)...(19): siRNA sense strand
acaauuacuggcugggaaa

SEQ ID NO: 1907776 - RNA, 19 nt, Homo sapiens
  misc_RNA (1)...(19): siRNA sense strand
auuacuggcugggaaagaa

SEQ ID NO: 1907777 - RNA, 19 nt, Homo sapiens
  misc_RNA (1)...(19): siRNA sense strand
gcccucacuacccuguuua

SEQ ID NO: 1907778 - RNA, 19 nt, Homo sapiens
  misc_RNA (1)...(19): siRNA sense strand
ugacugaucucauuuugcu

SEQ ID NO: 1907779 - RNA, 19 nt, Homo sapiens
  misc_RNA (1)...(19): siRNA sense strand
gguggagugcagcaacaaa

SEQ ID NO: 1907780 - RNA, 19 nt, Homo sapiens
  misc_RNA (1)...(19): siRNA sense strand
gcaaguauccauugaagaa

SEQ ID NO: 1907781 - RNA, 19 nt, Homo sapiens
  misc_RNA (1)...(19): siRNA sense strand
gagcagauacucuugauga

SEQ ID NO: 1907782 - RNA, 19 nt, Homo sapiens
  misc_RNA (1)...(19): siRNA sense strand
cgagauggaaggacacuua

SEQ ID NO: 1907783 - RNA, 19 nt, Homo sapiens
  misc_RNA (1)...(19): siRNA sense strand
ggagaaauagacuuggaaa

SEQ ID NO: 1907784 - RNA, 19 nt, Homo sapiens
  misc_RNA (1)...(19): siRNA sense strand
gauggaaggacacuuauag

SEQ ID NO: 1907785 - RNA, 19 nt, Homo sapiens
  misc_RNA (1)...(19): siRNA sense strand
caaacuuagugcuacauca

SEQ ID NO: 1907786 - RNA, 19 nt, Homo sapiens
  misc_RNA (1)...(19): siRNA sense strand
cagcaaguauccauugaag

SEQ ID NO: 1907787 - RNA, 19 nt, Homo sapiens
  misc_RNA (1)...(19): siRNA sense strand
gaaauagacuuggaaaagg

SEQ ID NO: 1907788 - RNA, 19 nt, Homo sapiens
  misc_RNA (1)...(19): siRNA sense strand
gcacuugguucugcuucga

SEQ ID NO: 1907789 - RNA, 19 nt, Homo sapiens
  misc_RNA (1)...(19): siRNA sense strand
ugauauuccucgagggauu

SEQ ID NO: 1907790 - RNA, 19 nt, Homo sapiens
  misc_RNA (1)...(19): siRNA sense strand
uaggagaaauagacuugga

SEQ ID NO: 1907791 - RNA, 19 nt, Homo sapiens
  misc_RNA (1)...(19): siRNA sense strand
ggaagcagagaaguugaaa

SEQ ID NO: 1907792 - RNA, 19 nt, Homo sapiens
  misc_RNA (1)...(19): siRNA sense strand
gcuggaagcagagaaguug

SEQ ID NO: 1907793 - RNA, 19 nt, Homo sapiens
  misc_RNA (1)...(19): siRNA sense strand
caucgaggacauugacaaa

SEQ ID NO: 1907794 - RNA, 19 nt, Homo sapiens
  misc_RNA (1)...(19): siRNA sense strand
gauauuccucgagggauuu

SEQ ID NO: 1907795 - RNA, 19 nt, Homo sapiens
  misc_RNA (1)...(19): siRNA sense strand
aagcagagaaguugaaagu

SEQ ID NO: 1907796 - RNA, 19 nt, Homo sapiens
  misc_RNA (1)...(19): siRNA sense strand
gagauggaaggacacuuau

SEQ ID NO: 1907797 - RNA, 19 nt, Homo sapiens
  misc_RNA (1)...(19): siRNA sense strand
gaaaaugugguccuacuag

SEQ ID NO: 1907798 - RNA, 19 nt, Homo sapiens
  misc_RNA (1)...(19): siRNA sense strand
caaguauccauugaagaaa

SEQ ID NO: 1907799 - RNA, 19 nt, Homo sapiens
  misc_RNA (1)...(19): siRNA sense strand
ucaauuugcaaacuuagug

SEQ ID NO: 1907800 - RNA, 19 nt, Homo sapiens
  misc_RNA (1)...(19): siRNA sense strand
aaggacacuuauaggcuuu

SEQ ID NO: 1907801 - RNA, 19 nt, Homo sapiens
  misc_RNA (1)...(19): siRNA sense strand
gcaaacuuagugcuacauc

SEQ ID NO: 1907802 - RNA, 19 nt, Homo sapiens
  misc_RNA (1)...(19): siRNA sense strand
gagaaaaugugguccuacu

SEQ ID NO: 1907803 - RNA, 19 nt, Homo sapiens
  misc_RNA (1)...(19): siRNA sense strand
ccagcaaguauccauugaa

SEQ ID NO: 1907804 - RNA, 19 nt, Homo sapiens
  misc_RNA (1)...(19): siRNA sense strand
aaauagacuuggaaaagga

SEQ ID NO: 1907805 - RNA, 19 nt, Homo sapiens
  misc_RNA (1)...(19): siRNA sense strand
ucgagcagauacucuugau

SEQ ID NO: 1907806 - RNA, 19 nt, Homo sapiens
  misc_RNA (1)...(19): siRNA sense strand
uccagcaaguauccauuga

SEQ ID NO: 1907807 - RNA, 19 nt, Homo sapiens
  misc_RNA (1)...(19): siRNA sense strand
agauggaaggacacuuaua

SEQ ID NO: 1907808 - RNA, 19 nt, Homo sapiens
  misc_RNA (1)...(19): siRNA sense strand
gaucaauuugcaaacuuag

SEQ ID NO: 1907809 - RNA, 19 nt, Homo sapiens
  misc_RNA (1)...(19): siRNA sense strand
gaucaaaacucauucgaaa

SEQ ID NO: 1907810 - RNA, 19 nt, Homo sapiens
  misc_RNA (1)...(19): siRNA sense strand
uaaagaggcaccauucgua

SEQ ID NO: 1907811 - RNA, 19 nt, Homo sapiens
  misc_RNA (1)...(19): siRNA sense strand
guguuucccuuccuucaua

SEQ ID NO: 1907812 - RNA, 19 nt, Homo sapiens
  misc_RNA (1)...(19): siRNA sense strand
gcccaaggcuuuguuguag

SEQ ID NO: 1907813 - RNA, 19 nt, Homo sapiens
  misc_RNA (1)...(19): siRNA sense strand
ccaaggcuuuguuguagga

SEQ ID NO: 1907814 - RNA, 19 nt, Homo sapiens
  misc_RNA (1)...(19): siRNA sense strand
gggcaaaaccugagccuua

SEQ ID NO: 1907815 - RNA, 19 nt, Homo sapiens
  misc_RNA (1)...(19): siRNA sense strand
gagcaaugacuguugguau

SEQ ID NO: 1907816 - RNA, 19 nt, Homo sapiens
  misc_RNA (1)...(19): siRNA sense strand
ccauucaucugauccacau

SEQ ID NO: 1907817 - RNA, 19 nt, Homo sapiens
  misc_RNA (1)...(19): siRNA sense strand
ggagcaaugacuguuggua

SEQ ID NO: 1907818 - RNA, 19 nt, Homo sapiens
  misc_RNA (1)...(19): siRNA sense strand
guaggagcaaugacuguug

SEQ ID NO: 1907819 - RNA, 19 nt, Homo sapiens
  misc_RNA (1)...(19): siRNA sense strand
agcaaugacuguugguaug

SEQ ID NO: 1907820 - RNA, 19 nt, Homo sapiens
  misc_RNA (1)...(19): siRNA sense strand
gcaaugacuguugguaugg

SEQ ID NO: 1907821 - RNA, 19 nt, Homo sapiens
  misc_RNA (1)...(19): siRNA sense strand
caggggaaauacuaaaaug

SEQ ID NO: 1907822 - RNA, 19 nt, Homo sapiens
  misc_RNA (1)...(19): siRNA sense strand
gaagucaccuuaaagagaa

SEQ ID NO: 1907823 - RNA, 19 nt, Homo sapiens
  misc_RNA (1)...(19): siRNA sense strand
gcuaugggcucaagucuga

SEQ ID NO: 1907824 - RNA, 19 nt, Homo sapiens
  misc_RNA (1)...(19): siRNA sense strand
caagaagccgaacgugaua

SEQ ID NO: 1907825 - RNA, 19 nt, Homo sapiens
  misc_RNA (1)...(19): siRNA sense strand
ugaagucaccuuaaagaga

SEQ ID NO: 1907826 - RNA, 19 nt, Homo sapiens
  misc_RNA (1)...(19): siRNA sense strand
agucugaagucaccuuaaa

SEQ ID NO: 1907827 - RNA, 19 nt, Homo sapiens
  misc_RNA (1)...(19): siRNA sense strand
ucaagaagccgaacgugau

SEQ ID NO: 1907828 - RNA, 19 nt, Homo sapiens
  misc_RNA (1)...(19): siRNA sense strand
ugacuuugguuccuucauc

SEQ ID NO: 1907829 - RNA, 19 nt, Homo sapiens
  misc_RNA (1)...(19): siRNA sense strand
gaacgugauaggagaugga

SEQ ID NO: 1907830 - RNA, 19 nt, Homo sapiens
  misc_RNA (1)...(19): siRNA sense strand
caagucugaagucaccuua

SEQ ID NO: 1907831 - RNA, 19 nt, Homo sapiens
  misc_RNA (1)...(19): siRNA sense strand
gacuuugguuccuucauca

SEQ ID NO: 1907832 - RNA, 19 nt, Homo sapiens
  misc_RNA (1)...(19): siRNA sense strand
gggcucaagucugaaguca

SEQ ID NO: 1907833 - RNA, 19 nt, Homo sapiens
  misc_RNA (1)...(19): siRNA sense strand
uuucuguucuccuucauug

SEQ ID NO: 1907834 - RNA, 19 nt, Homo sapiens
  misc_RNA (1)...(19): siRNA sense strand
cuaccuuucuguucuccuu

SEQ ID NO: 1907835 - RNA, 19 nt, Homo sapiens
  misc_RNA (1)...(19): siRNA sense strand
ggucagaggcaggacaugu

SEQ ID NO: 1907836 - RNA, 19 nt, Homo sapiens
  misc_RNA (1)...(19): siRNA sense strand
ucugaagucaccuuaaaga

SEQ ID NO: 1907837 - RNA, 19 nt, Homo sapiens
  misc_RNA (1)...(19): siRNA sense strand
ccagggaaggacucaagaa

SEQ ID NO: 1907838 - RNA, 19 nt, Homo sapiens
  misc_RNA (1)...(19): siRNA sense strand
ucucugcccugacuuuggu

SEQ ID NO: 1907839 - RNA, 19 nt, Homo sapiens
  misc_RNA (1)...(19): siRNA sense strand
gcccugacuuugguuccuu

SEQ ID NO: 1907840 - RNA, 19 nt, Homo sapiens
  misc_RNA (1)...(19): siRNA sense strand
gaucguagcuuuaaaguuu

SEQ ID NO: 1907841 - RNA, 19 nt, Homo sapiens
  misc_RNA (1)...(19): siRNA sense strand
gcaaauggaugggccguua

SEQ ID NO: 1907842 - RNA, 19 nt, Homo sapiens
  misc_RNA (1)...(19): siRNA sense strand
gaacuuggcauuagaauuc

SEQ ID NO: 1907843 - RNA, 19 nt, Homo sapiens
  misc_RNA (1)...(19): siRNA sense strand
ccaaguggcucaaugguuu

SEQ ID NO: 1907844 - RNA, 19 nt, Homo sapiens
  misc_RNA (1)...(19): siRNA sense strand
cauagaccuuggcuuauua

SEQ ID NO: 1907845 - RNA, 19 nt, Homo sapiens
  misc_RNA (1)...(19): siRNA sense strand
acagaugcaugcuuuauuu

SEQ ID NO: 1907846 - RNA, 19 nt, Homo sapiens
  misc_RNA (1)...(19): siRNA sense strand
gcacaaagauguugauacc

SEQ ID NO: 1907847 - RNA, 19 nt, Homo sapiens
  misc_RNA (1)...(19): siRNA sense strand
uaagaggugucccuucaaa

SEQ ID NO: 1907848 - RNA, 19 nt, Homo sapiens
  misc_RNA (1)...(19): siRNA sense strand
gaaauuaaccagcuauugg

SEQ ID NO: 1907849 - RNA, 19 nt, Homo sapiens
  misc_RNA (1)...(19): siRNA sense strand
gcccauagaccuuggcuua

SEQ ID NO: 1907850 - RNA, 19 nt, Homo sapiens
  misc_RNA (1)...(19): siRNA sense strand
gaaccugcauguaaaugau

SEQ ID NO: 1907851 - RNA, 19 nt, Homo sapiens
  misc_RNA (1)...(19): siRNA sense strand
guccagaaauucauuguga

SEQ ID NO: 1907852 - RNA, 19 nt, Homo sapiens
  misc_RNA (1)...(19): siRNA sense strand
ccauagaccuuggcuuauu

SEQ ID NO: 1907853 - RNA, 19 nt, Homo sapiens
  misc_RNA (1)...(19): siRNA sense strand
ucaaagaugugagagagaa

SEQ ID NO: 1907854 - RNA, 19 nt, Homo sapiens
  misc_RNA (1)...(19): siRNA sense strand
ggaacuauauucacugcau

SEQ ID NO: 1907855 - RNA, 19 nt, Homo sapiens
  misc_RNA (1)...(19): siRNA sense strand
guaagugauucuuucuuug

SEQ ID NO: 1907856 - RNA, 19 nt, Homo sapiens
  misc_RNA (1)...(19): siRNA sense strand
gcucaaugguuuagagaau

SEQ ID NO: 1907857 - RNA, 19 nt, Homo sapiens
  misc_RNA (1)...(19): siRNA sense strand
aaagauuucucuagacaug

SEQ ID NO: 1907858 - RNA, 19 nt, Homo sapiens
  misc_RNA (1)...(19): siRNA sense strand
gccauuacccgcuauauga

SEQ ID NO: 1907859 - RNA, 19 nt, Homo sapiens
  misc_RNA (1)...(19): siRNA sense strand
cugagaagguucauguuaa

SEQ ID NO: 1907860 - RNA, 19 nt, Homo sapiens
  misc_RNA (1)...(19): siRNA sense strand
uauauucacugcauguuug

SEQ ID NO: 1907861 - RNA, 19 nt, Homo sapiens
  misc_RNA (1)...(19): siRNA sense strand
ggaauugguacaugcagua

SEQ ID NO: 1907862 - RNA, 19 nt, Homo sapiens
  misc_RNA (1)...(19): siRNA sense strand
gcaagcagaacuccuuuau

SEQ ID NO: 1907863 - RNA, 19 nt, Homo sapiens
  misc_RNA (1)...(19): siRNA sense strand
gcuggucccuugcggaauu

SEQ ID NO: 1907864 - RNA, 19 nt, Homo sapiens
  misc_RNA (1)...(19): siRNA sense strand
caauggcaaugcacaaaga

SEQ ID NO: 1907865 - RNA, 19 nt, Homo sapiens
  misc_RNA (1)...(19): siRNA sense strand
gauacuaguuauggcuaua

SEQ ID NO: 1907866 - RNA, 19 nt, Homo sapiens
  misc_RNA (1)...(19): siRNA sense strand
ucagacgggcuuucaaaua

SEQ ID NO: 1907867 - RNA, 19 nt, Homo sapiens
  misc_RNA (1)...(19): siRNA sense strand
aagcagaacuccuuuaugc

SEQ ID NO: 1907868 - RNA, 19 nt, Homo sapiens
  misc_RNA (1)...(19): siRNA sense strand
gaucaugguuauucuuugg

SEQ ID NO: 1907869 - RNA, 19 nt, Homo sapiens
  misc_RNA (1)...(19): siRNA sense strand
gauuaugacuauggugaaa

SEQ ID NO: 1907870 - RNA, 19 nt, Homo sapiens
  misc_RNA (1)...(19): siRNA sense strand
uagaauuccucgaccacua

SEQ ID NO: 1907871 - RNA, 19 nt, Homo sapiens
  misc_RNA (1)...(19): siRNA sense strand
cauguuaaucugcuucuua

SEQ ID NO: 1907872 - RNA, 19 nt, Homo sapiens
  misc_RNA (1)...(19): siRNA sense strand
ugagaagguucauguuaau

SEQ ID NO: 1907873 - RNA, 19 nt, Homo sapiens
  misc_RNA (1)...(19): siRNA sense strand
gagagaguauguuugucuu

SEQ ID NO: 1907874 - RNA, 19 nt, Homo sapiens
  misc_RNA (1)...(19): siRNA sense strand
ggacagggaccaagcagau

SEQ ID NO: 1907875 - RNA, 19 nt, Homo sapiens
  misc_RNA (1)...(19): siRNA sense strand
cagacgggcuuucaaauac

SEQ ID NO: 1907876 - RNA, 19 nt, Homo sapiens
  misc_RNA (1)...(19): siRNA sense strand
ggaagaucaugguuauucu

SEQ ID NO: 1907877 - RNA, 19 nt, Homo sapiens
  misc_RNA (1)...(19): siRNA sense strand
uuagugaaccugcauguaa

SEQ ID NO: 1907878 - RNA, 19 nt, Homo sapiens
  misc_RNA (1)...(19): siRNA sense strand
caucagugcuccuacuuag

SEQ ID NO: 1907879 - RNA, 19 nt, Homo sapiens
  misc_RNA (1)...(19): siRNA sense strand
gcucaucugcuuaugcuuu

SEQ ID NO: 1907880 - RNA, 19 nt, Homo sapiens
  misc_RNA (1)...(19): siRNA sense strand
gaaagaaacaccucaucgu

SEQ ID NO: 1907881 - RNA, 19 nt, Homo sapiens
  misc_RNA (1)...(19): siRNA sense strand
gaagguucauguuaaucug

SEQ ID NO: 1907882 - RNA, 19 nt, Homo sapiens
  misc_RNA (1)...(19): siRNA sense strand
gcacagaugcaugcuuuau

SEQ ID NO: 1907883 - RNA, 19 nt, Homo sapiens
  misc_RNA (1)...(19): siRNA sense strand
ucuaagaggugucccuuca

SEQ ID NO: 1907884 - RNA, 19 nt, Homo sapiens
  misc_RNA (1)...(19): siRNA sense strand
cagcagagauucaacuacu

SEQ ID NO: 1907885 - RNA, 19 nt, Homo sapiens
  misc_RNA (1)...(19): siRNA sense strand
ccaggaacuuggcauuaga

SEQ ID NO: 1907886 - RNA, 19 nt, Homo sapiens
  misc_RNA (1)...(19): siRNA sense strand
gggaagaucaugguuauuc

SEQ ID NO: 1907887 - RNA, 19 nt, Homo sapiens
  misc_RNA (1)...(19): siRNA sense strand
uuacaggaaugucgagaug

SEQ ID NO: 1907888 - RNA, 19 nt, Homo sapiens
  misc_RNA (1)...(19): siRNA sense strand
acgcacagaugcaugcuuu

SEQ ID NO: 1907889 - RNA, 19 nt, Homo sapiens
  misc_RNA (1)...(19): siRNA sense strand
aauaauggcugcggcaaga

SEQ ID NO: 1907890 - RNA, 19 nt, Homo sapiens
  misc_RNA (1)...(19): siRNA sense strand
aaagagagaguauguuugu

SEQ ID NO: 1907891 - RNA, 19 nt, Homo sapiens
  misc_RNA (1)...(19): siRNA sense strand
acaggaaugucgagaugaa

SEQ ID NO: 1907892 - RNA, 19 nt, Homo sapiens
  misc_RNA (1)...(19): siRNA sense strand
uagugaaccugcauguaaa

SEQ ID NO: 1907893 - RNA, 19 nt, Homo sapiens
  misc_RNA (1)...(19): siRNA sense strand
uaucgucacuacauuggaa

SEQ ID NO: 1907894 - RNA, 19 nt, Homo sapiens
  misc_RNA (1)...(19): siRNA sense strand
gaacuccuuuaugcucuga

SEQ ID NO: 1907895 - RNA, 19 nt, Homo sapiens
  misc_RNA (1)...(19): siRNA sense strand
gcugggaagaucaugguua

SEQ ID NO: 1907896 - RNA, 19 nt, Homo sapiens
  misc_RNA (1)...(19): siRNA sense strand
uauagaagcuaggaugcaa

SEQ ID NO: 1907897 - RNA, 19 nt, Homo sapiens
  misc_RNA (1)...(19): siRNA sense strand
gcaauuuggaacuauauuc

SEQ ID NO: 1907898 - RNA, 19 nt, Homo sapiens
  misc_RNA (1)...(19): siRNA sense strand
caucagacgggcuuucaaa

SEQ ID NO: 1907899 - RNA, 19 nt, Homo sapiens
  misc_RNA (1)...(19): siRNA sense strand
ucugagaagguucauguua

SEQ ID NO: 1907900 - RNA, 19 nt, Homo sapiens
  misc_RNA (1)...(19): siRNA sense strand
gagaguauguuugucuucu

SEQ ID NO: 1907901 - RNA, 19 nt, Homo sapiens
  misc_RNA (1)...(19): siRNA sense strand
gguugaagcccucauggaa

SEQ ID NO: 1907902 - RNA, 19 nt, Homo sapiens
  misc_RNA (1)...(19): siRNA sense strand
gcuuugggccguuuggaua

SEQ ID NO: 1907903 - RNA, 19 nt, Homo sapiens
  misc_RNA (1)...(19): siRNA sense strand
gcuacuugcucaucugcuu

SEQ ID NO: 1907904 - RNA, 19 nt, Homo sapiens
  misc_RNA (1)...(19): siRNA sense strand
gaauuuaggagaacuuaac

SEQ ID NO: 1907905 - RNA, 19 nt, Homo sapiens
  misc_RNA (1)...(19): siRNA sense strand
guuaaucugcuucuuauag

SEQ ID NO: 1907906 - RNA, 19 nt, Homo sapiens
  misc_RNA (1)...(19): siRNA sense strand
caagcacucugagaagguu

SEQ ID NO: 1907907 - RNA, 19 nt, Homo sapiens
  misc_RNA (1)...(19): siRNA sense strand
gcagagauucaacuacuag

SEQ ID NO: 1907908 - RNA, 19 nt, Homo sapiens
  misc_RNA (1)...(19): siRNA sense strand
gcaacuacugcaucuguga

SEQ ID NO: 1907909 - RNA, 19 nt, Homo sapiens
  misc_RNA (1)...(19): siRNA sense strand
gaacacauugagggacuuu

SEQ ID NO: 1907910 - RNA, 19 nt, Homo sapiens
  misc_RNA (1)...(19): siRNA sense strand
agagauggcuucacguuuu

SEQ ID NO: 1907911 - RNA, 19 nt, Homo sapiens
  misc_RNA (1)...(19): siRNA sense strand
ugggacaguugauugauga

SEQ ID NO: 1907912 - RNA, 19 nt, Homo sapiens
  misc_RNA (1)...(19): siRNA sense strand
ggauacuaguuauggcuau

SEQ ID NO: 1907913 - RNA, 19 nt, Homo sapiens
  misc_RNA (1)...(19): siRNA sense strand
ggaacuuggcauuagaauu

SEQ ID NO: 1907914 - RNA, 19 nt, Homo sapiens
  misc_RNA (1)...(19): siRNA sense strand
gcuauaaagauuucucuag

SEQ ID NO: 1907915 - RNA, 19 nt, Homo sapiens
  misc_RNA (1)...(19): siRNA sense strand
ggaaugucgagaugaagaa

SEQ ID NO: 1907916 - RNA, 19 nt, Homo sapiens
  misc_RNA (1)...(19): siRNA sense strand
gagugaagacgcacagaug

SEQ ID NO: 1907917 - RNA, 19 nt, Homo sapiens
  misc_RNA (1)...(19): siRNA sense strand
ccaaaagaauguaugauag

SEQ ID NO: 1907918 - RNA, 19 nt, Homo sapiens
  misc_RNA (1)...(19): siRNA sense strand
gcaaugcacaaagauguug

SEQ ID NO: 1907919 - RNA, 19 nt, Homo sapiens
  misc_RNA (1)...(19): siRNA sense strand
gaugugggacaguugauug

SEQ ID NO: 1907920 - RNA, 19 nt, Homo sapiens
  misc_RNA (1)...(19): siRNA sense strand
gcagauucaucccagaaaa

SEQ ID NO: 1907921 - RNA, 19 nt, Homo sapiens
  misc_RNA (1)...(19): siRNA sense strand
cugcauguuuggaauaaga

SEQ ID NO: 1907922 - RNA, 19 nt, Homo sapiens
  misc_RNA (1)...(19): siRNA sense strand
gacgggcaauuuggaacua

SEQ ID NO: 1907923 - RNA, 19 nt, Homo sapiens
  misc_RNA (1)...(19): siRNA sense strand
ucaugguuauucuuuggua

SEQ ID NO: 1907924 - RNA, 19 nt, Homo sapiens
  misc_RNA (1)...(19): siRNA sense strand
gaagaaguuacaccagcaa

SEQ ID NO: 1907925 - RNA, 19 nt, Homo sapiens
  misc_RNA (1)...(19): siRNA sense strand
gaugguggccacacauuca

SEQ ID NO: 1907926 - RNA, 19 nt, Homo sapiens
  misc_RNA (1)...(19): siRNA sense strand
caaguggcucaaugguuua

SEQ ID NO: 1907927 - RNA, 19 nt, Homo sapiens
  misc_RNA (1)...(19): siRNA sense strand
gaugcaagcagaacuccuu

SEQ ID NO: 1907928 - RNA, 19 nt, Homo sapiens
  misc_RNA (1)...(19): siRNA sense strand
ggacaguugauugaugaaa

SEQ ID NO: 1907929 - RNA, 19 nt, Homo sapiens
  misc_RNA (1)...(19): siRNA sense strand
gaaguuacaccagcaagag

SEQ ID NO: 1907930 - RNA, 19 nt, Homo sapiens
  misc_RNA (1)...(19): siRNA sense strand
uacugcaucugugacauua

SEQ ID NO: 1907931 - RNA, 19 nt, Homo sapiens
  misc_RNA (1)...(19): siRNA sense strand
caagacaucagugcuccua

SEQ ID NO: 1907932 - RNA, 19 nt, Homo sapiens
  misc_RNA (1)...(19): siRNA sense strand
ugacuauggugaaauuaac

SEQ ID NO: 1907933 - RNA, 19 nt, Homo sapiens
  misc_RNA (1)...(19): siRNA sense strand
cugggaagaucaugguuau

SEQ ID NO: 1907934 - RNA, 19 nt, Homo sapiens
  misc_RNA (1)...(19): siRNA sense strand
ugucuucucuucagaugau

SEQ ID NO: 1907935 - RNA, 19 nt, Homo sapiens
  misc_RNA (1)...(19): siRNA sense strand
gaguauguuugucuucucu

SEQ ID NO: 1907936 - RNA, 19 nt, Homo sapiens
  misc_RNA (1)...(19): siRNA sense strand
gaaaagguuaccaaaagaa

SEQ ID NO: 1907937 - RNA, 19 nt, Homo sapiens
  misc_RNA (1)...(19): siRNA sense strand
gagagaaugaagugagaug

SEQ ID NO: 1907938 - RNA, 19 nt, Homo sapiens
  misc_RNA (1)...(19): siRNA sense strand
ucacugcauguuuggaaua

SEQ ID NO: 1907939 - RNA, 19 nt, Homo sapiens
  misc_RNA (1)...(19): siRNA sense strand
guauguuugucuucucuuc

SEQ ID NO: 1907940 - RNA, 19 nt, Homo sapiens
  misc_RNA (1)...(19): siRNA sense strand
ucaaagagcuucaguuuua

SEQ ID NO: 1907941 - RNA, 19 nt, Homo sapiens
  misc_RNA (1)...(19): siRNA sense strand
gagauggccugucugauaa

SEQ ID NO: 1907942 - RNA, 19 nt, Homo sapiens
  misc_RNA (1)...(19): siRNA sense strand
gguccuaaccugauuauaa

SEQ ID NO: 1907943 - RNA, 19 nt, Homo sapiens
  misc_RNA (1)...(19): siRNA sense strand
guccuaaccugauuauaaa

SEQ ID NO: 1907944 - RNA, 19 nt, Homo sapiens
  misc_RNA (1)...(19): siRNA sense strand
gagaaggaccagauuauug

SEQ ID NO: 1907945 - RNA, 19 nt, Homo sapiens
  misc_RNA (1)...(19): siRNA sense strand
gcaggcagaguaugaauuu

SEQ ID NO: 1907946 - RNA, 19 nt, Homo sapiens
  misc_RNA (1)...(19): siRNA sense strand
ugagauggccugucugaua

SEQ ID NO: 1907947 - RNA, 19 nt, Homo sapiens
  misc_RNA (1)...(19): siRNA sense strand
caucaaagagcuucaguuu

SEQ ID NO: 1907948 - RNA, 19 nt, Homo sapiens
  misc_RNA (1)...(19): siRNA sense strand
ugacaggauuggacauuga

SEQ ID NO: 1907949 - RNA, 19 nt, Homo sapiens
  misc_RNA (1)...(19): siRNA sense strand
gaauaugaauuugcaccaa

SEQ ID NO: 1907950 - RNA, 19 nt, Homo sapiens
  misc_RNA (1)...(19): siRNA sense strand
gaaggagaguacaauuaca

SEQ ID NO: 1907951 - RNA, 19 nt, Homo sapiens
  misc_RNA (1)...(19): siRNA sense strand
gugaaggagaguacaauua

SEQ ID NO: 1907952 - RNA, 19 nt, Homo sapiens
  misc_RNA (1)...(19): siRNA sense strand
gauuggacauugagaagga

SEQ ID NO: 1907953 - RNA, 19 nt, Homo sapiens
  misc_RNA (1)...(19): siRNA sense strand
ccagggcucuguccacuug

SEQ ID NO: 1907954 - RNA, 19 nt, Homo sapiens
  misc_RNA (1)...(19): siRNA sense strand
gaauuucuguccuuuguac

SEQ ID NO: 1907955 - RNA, 19 nt, Homo sapiens
  misc_RNA (1)...(19): siRNA sense strand
gaaguuucuugacaaauac

SEQ ID NO: 1907956 - RNA, 19 nt, Homo sapiens
  misc_RNA (1)...(19): siRNA sense strand
ugugagcacuguuaaagaa

SEQ ID NO: 1907957 - RNA, 19 nt, Homo sapiens
  misc_RNA (1)...(19): siRNA sense strand
gcaggaaauucaguucaug

SEQ ID NO: 1907958 - RNA, 19 nt, Homo sapiens
  misc_RNA (1)...(19): siRNA sense strand
agaaggaccagauuauuga

SEQ ID NO: 1907959 - RNA, 19 nt, Homo sapiens
  misc_RNA (1)...(19): siRNA sense strand
ugacucugaucucaacauu

SEQ ID NO: 1907960 - RNA, 19 nt, Homo sapiens
  misc_RNA (1)...(19): siRNA sense strand
ccagaagaauaugaauuug

SEQ ID NO: 1907961 - RNA, 19 nt, Homo sapiens
  misc_RNA (1)...(19): siRNA sense strand
ggaccagauuauugagaug

SEQ ID NO: 1907962 - RNA, 19 nt, Homo sapiens
  misc_RNA (1)...(19): siRNA sense strand
guaugaauuucuguccuuu

SEQ ID NO: 1907963 - RNA, 19 nt, Homo sapiens
  misc_RNA (1)...(19): siRNA sense strand
cacgggaggucuggccuua

SEQ ID NO: 1907964 - RNA, 19 nt, Homo sapiens
  misc_RNA (1)...(19): siRNA sense strand
ucugauaacugacucugau

SEQ ID NO: 1907965 - RNA, 19 nt, Homo sapiens
  misc_RNA (1)...(19): siRNA sense strand
uggccugucugauaacuga

SEQ ID NO: 1907966 - RNA, 19 nt, Homo sapiens
  misc_RNA (1)...(19): siRNA sense strand
gaugugagcacuguuaaag

SEQ ID NO: 1907967 - RNA, 19 nt, Homo sapiens
  misc_RNA (1)...(19): siRNA sense strand
uaauugaugugagcacugu

SEQ ID NO: 1907968 - RNA, 19 nt, Homo sapiens
  misc_RNA (1)...(19): siRNA sense strand
acucugaucucaacauuuu

SEQ ID NO: 1907969 - RNA, 19 nt, Homo sapiens
  misc_RNA (1)...(19): siRNA sense strand
uuaccgaaauaacaucuuc

SEQ ID NO: 1907970 - RNA, 19 nt, Homo sapiens
  misc_RNA (1)...(19): siRNA sense strand
gaugacaggauuggacauu

SEQ ID NO: 1907971 - RNA, 19 nt, Homo sapiens
  misc_RNA (1)...(19): siRNA sense strand
gcagugaaggagaguacaa

SEQ ID NO: 1907972 - RNA, 19 nt, Homo sapiens
  misc_RNA (1)...(19): siRNA sense strand
gaaaauggggaaaaugaga

SEQ ID NO: 1907973 - RNA, 19 nt, Homo sapiens
  misc_RNA (1)...(19): siRNA sense strand
ugagaaggaccagauuauu

SEQ ID NO: 1907974 - RNA, 19 nt, Homo sapiens
  misc_RNA (1)...(19): siRNA sense strand
ugaaggagaguacaauuac

SEQ ID NO: 1907975 - RNA, 19 nt, Homo sapiens
  misc_RNA (1)...(19): siRNA sense strand
acaaauacaugccccaguu

SEQ ID NO: 1907976 - RNA, 19 nt, Homo sapiens
  misc_RNA (1)...(19): siRNA sense strand
gagcacuguuaaagaacug

SEQ ID NO: 1907977 - RNA, 19 nt, Homo sapiens
  misc_RNA (1)...(19): siRNA sense strand
uaacugacucugaucucaa

SEQ ID NO: 1907978 - RNA, 19 nt, Homo sapiens
  misc_RNA (1)...(19): siRNA sense strand
caggaaauucaguucauga

SEQ ID NO: 1907979 - RNA, 19 nt, Homo sapiens
  misc_RNA (1)...(19): siRNA sense strand
ucucauagggcacuugaug

SEQ ID NO: 1907980 - RNA, 19 nt, Homo sapiens
  misc_RNA (1)...(19): siRNA sense strand
uagggcacuugaugacauu

SEQ ID NO: 1907981 - RNA, 19 nt, Homo sapiens
  misc_RNA (1)...(19): siRNA sense strand
uuauugagauggccugucu

SEQ ID NO: 1907982 - RNA, 19 nt, Homo sapiens
  misc_RNA (1)...(19): siRNA sense strand
gacauuagugaaagcauca

SEQ ID NO: 1907983 - RNA, 19 nt, Homo sapiens
  misc_RNA (1)...(19): siRNA sense strand
uuagugaaagcaucaaaga

SEQ ID NO: 1907984 - RNA, 19 nt, Homo sapiens
  misc_RNA (1)...(19): siRNA sense strand
gcaugucagauugguguaa

SEQ ID NO: 1907985 - RNA, 19 nt, Homo sapiens
  misc_RNA (1)...(19): siRNA sense strand
ugagaagaccgugaguuga

SEQ ID NO: 1907986 - RNA, 19 nt, Homo sapiens
  misc_RNA (1)...(19): siRNA sense strand
gcaucaaagagcuucaguu

SEQ ID NO: 1907987 - RNA, 19 nt, Homo sapiens
  misc_RNA (1)...(19): siRNA sense strand
aguaugaauuucuguccuu

SEQ ID NO: 1907988 - RNA, 19 nt, Homo sapiens
  misc_RNA (1)...(19): siRNA sense strand
gcagcaggcagaguaugaa

SEQ ID NO: 1907989 - RNA, 19 nt, Homo sapiens
  misc_RNA (1)...(19): siRNA sense strand
cauugcagcaggcagagua

SEQ ID NO: 1907990 - RNA, 19 nt, Homo sapiens
  misc_RNA (1)...(19): siRNA sense strand
uaaaacaaccagaugaguu

SEQ ID NO: 1907991 - RNA, 19 nt, Homo sapiens
  misc_RNA (1)...(19): siRNA sense strand
cuugaugacauuagugaaa

SEQ ID NO: 1907992 - RNA, 19 nt, Homo sapiens
  misc_RNA (1)...(19): siRNA sense strand
augaauuucuguccuuugu

SEQ ID NO: 1907993 - RNA, 19 nt, Homo sapiens
  misc_RNA (1)...(19): siRNA sense strand
ucuguccacuugcaggaaa

SEQ ID NO: 1907994 - RNA, 19 nt, Homo sapiens
  misc_RNA (1)...(19): siRNA sense strand
gguauccagaagaauauga

SEQ ID NO: 1907995 - RNA, 19 nt, Homo sapiens
  misc_RNA (1)...(19): siRNA sense strand
ggaggucuggccuuaccaa

SEQ ID NO: 1907996 - RNA, 19 nt, Homo sapiens
  misc_RNA (1)...(19): siRNA sense strand
auaacugacucugaucuca

SEQ ID NO: 1907997 - RNA, 19 nt, Homo sapiens
  misc_RNA (1)...(19): siRNA sense strand
ggguggaccuggagaugac

SEQ ID NO: 1907998 - RNA, 19 nt, Homo sapiens
  misc_RNA (1)...(19): siRNA sense strand
uagaaaauggggaaaauga

SEQ ID NO: 1907999 - RNA, 19 nt, Homo sapiens
  misc_RNA (1)...(19): siRNA sense strand
guauccagaagaauaugaa

SEQ ID NO: 1908000 - RNA, 19 nt, Homo sapiens
  misc_RNA (1)...(19): siRNA sense strand
ggcacuugaugacauuagu

SEQ ID NO: 1908001 - RNA, 19 nt, Homo sapiens
  misc_RNA (1)...(19): siRNA sense strand
auagggcacuugaugacau

SEQ ID NO: 1908002 - RNA, 19 nt, Homo sapiens
  misc_RNA (1)...(19): siRNA sense strand
augagaagaccgugaguug

SEQ ID NO: 1908003 - RNA, 19 nt, Homo sapiens
  misc_RNA (1)...(19): siRNA sense strand
aggaccagauuauugagau

SEQ ID NO: 1908004 - RNA, 19 nt, Homo sapiens
  misc_RNA (1)...(19): siRNA sense strand
gaaggaccagauuauugag

SEQ ID NO: 1908005 - RNA, 19 nt, Homo sapiens
  misc_RNA (1)...(19): siRNA sense strand
ugaauuucuguccuuugua

SEQ ID NO: 1908006 - RNA, 19 nt, Homo sapiens
  misc_RNA (1)...(19): siRNA sense strand
gaagagggcucaugcuuug

SEQ ID NO: 1908007 - RNA, 19 nt, Homo sapiens
  misc_RNA (1)...(19): siRNA sense strand
ggagaaguauugcuguuua

SEQ ID NO: 1908008 - RNA, 19 nt, Homo sapiens
  misc_RNA (1)...(19): siRNA sense strand
gaugaaauccuuagugaua

SEQ ID NO: 1908009 - RNA, 19 nt, Homo sapiens
  misc_RNA (1)...(19): siRNA sense strand
gaagggaacuuuagcuuuu

SEQ ID NO: 1908010 - RNA, 19 nt, Homo sapiens
  misc_RNA (1)...(19): siRNA sense strand
gcuaagauaucugaugaaa

SEQ ID NO: 1908011 - RNA, 19 nt, Homo sapiens
  misc_RNA (1)...(19): siRNA sense strand
gagaugauauuucugaaca

SEQ ID NO: 1908012 - RNA, 19 nt, Homo sapiens
  misc_RNA (1)...(19): siRNA sense strand
gaaacuggagguuggaaua

SEQ ID NO: 1908013 - RNA, 19 nt, Homo sapiens
  misc_RNA (1)...(19): siRNA sense strand
cagcuaagauaucugauga

SEQ ID NO: 1908014 - RNA, 19 nt, Homo sapiens
  misc_RNA (1)...(19): siRNA sense strand
ugggauuccuuaccaauua

SEQ ID NO: 1908015 - RNA, 19 nt, Homo sapiens
  misc_RNA (1)...(19): siRNA sense strand
uaaacaacaugucacaguu

SEQ ID NO: 1908016 - RNA, 19 nt, Homo sapiens
  misc_RNA (1)...(19): siRNA sense strand
ccaccggacuccaggauuu

SEQ ID NO: 1908017 - RNA, 19 nt, Homo sapiens
  misc_RNA (1)...(19): siRNA sense strand
ugggaugucucagauauua

SEQ ID NO: 1908018 - RNA, 19 nt, Homo sapiens
  misc_RNA (1)...(19): siRNA sense strand
uaaaccauauguccaagaa

SEQ ID NO: 1908019 - RNA, 19 nt, Homo sapiens
  misc_RNA (1)...(19): siRNA sense strand
guuuauugcuggaaucuuu

SEQ ID NO: 1908020 - RNA, 19 nt, Homo sapiens
  misc_RNA (1)...(19): siRNA sense strand
ucaaaugcuuggacuuauu

SEQ ID NO: 1908021 - RNA, 19 nt, Homo sapiens
  misc_RNA (1)...(19): siRNA sense strand
gcuguugacuauuccuaua

SEQ ID NO: 1908022 - RNA, 19 nt, Homo sapiens
  misc_RNA (1)...(19): siRNA sense strand
gaugguaccuauuuacagu

SEQ ID NO: 1908023 - RNA, 19 nt, Homo sapiens
  misc_RNA (1)...(19): siRNA sense strand
guggauaccugcagagaau

SEQ ID NO: 1908024 - RNA, 19 nt, Homo sapiens
  misc_RNA (1)...(19): siRNA sense strand
gugcaaacuagguguauua

SEQ ID NO: 1908025 - RNA, 19 nt, Homo sapiens
  misc_RNA (1)...(19): siRNA sense strand
uaacuaaccgguauccaaa

SEQ ID NO: 1908026 - RNA, 19 nt, Homo sapiens
  misc_RNA (1)...(19): siRNA sense strand
ggugauauugcaacacuua

SEQ ID NO: 1908027 - RNA, 19 nt, Homo sapiens
  misc_RNA (1)...(19): siRNA sense strand
caucguugcuuuaaucugu

SEQ ID NO: 1908028 - RNA, 19 nt, Homo sapiens
  misc_RNA (1)...(19): siRNA sense strand
guauccaaaucugguauua

SEQ ID NO: 1908029 - RNA, 19 nt, Homo sapiens
  misc_RNA (1)...(19): siRNA sense strand
caguuuagauaguuggaua

SEQ ID NO: 1908030 - RNA, 19 nt, Homo sapiens
  misc_RNA (1)...(19): siRNA sense strand
gagaaugcuaugaagcuua

SEQ ID NO: 1908031 - RNA, 19 nt, Homo sapiens
  misc_RNA (1)...(19): siRNA sense strand
agccaaagaucaacagaaa

SEQ ID NO: 1908032 - RNA, 19 nt, Homo sapiens
  misc_RNA (1)...(19): siRNA sense strand
gacaguggauucgaccuuu

SEQ ID NO: 1908033 - RNA, 19 nt, Homo sapiens
  misc_RNA (1)...(19): siRNA sense strand
gguaaaaguuggcguuauu

SEQ ID NO: 1908034 - RNA, 19 nt, Homo sapiens
  misc_RNA (1)...(19): siRNA sense strand
ccaaagaucaacagaaaca

SEQ ID NO: 1908035 - RNA, 19 nt, Homo sapiens
  misc_RNA (1)...(19): siRNA sense strand
cugaugaaauccuuaguga

SEQ ID NO: 1908036 - RNA, 19 nt, Homo sapiens
  misc_RNA (1)...(19): siRNA sense strand
uuagauaguuggauagcuu

SEQ ID NO: 1908037 - RNA, 19 nt, Homo sapiens
  misc_RNA (1)...(19): siRNA sense strand
gauaucugaugaaauccuu

SEQ ID NO: 1908038 - RNA, 19 nt, Homo sapiens
  misc_RNA (1)...(19): siRNA sense strand
guuauugcuuuguugguaa

SEQ ID NO: 1908039 - RNA, 19 nt, Homo sapiens
  misc_RNA (1)...(19): siRNA sense strand
gcuuggacuuauuugguua

SEQ ID NO: 1908040 - RNA, 19 nt, Homo sapiens
  misc_RNA (1)...(19): siRNA sense strand
ucugugagcugcuugguau

SEQ ID NO: 1908041 - RNA, 19 nt, Homo sapiens
  misc_RNA (1)...(19): siRNA sense strand
gagaaguauugcuguuuag

SEQ ID NO: 1908042 - RNA, 19 nt, Homo sapiens
  misc_RNA (1)...(19): siRNA sense strand
aaacauuucccuccuuuau

SEQ ID NO: 1908043 - RNA, 19 nt, Homo sapiens
  misc_RNA (1)...(19): siRNA sense strand
agaaugcuaugaagcuuau

SEQ ID NO: 1908044 - RNA, 19 nt, Homo sapiens
  misc_RNA (1)...(19): siRNA sense strand
gcucaugcuuugauuccuu

SEQ ID NO: 1908045 - RNA, 19 nt, Homo sapiens
  misc_RNA (1)...(19): siRNA sense strand
gaaauaucccggaauugca

SEQ ID NO: 1908046 - RNA, 19 nt, Homo sapiens
  misc_RNA (1)...(19): siRNA sense strand
ccacagcuaagauaucuga

SEQ ID NO: 1908047 - RNA, 19 nt, Homo sapiens
  misc_RNA (1)...(19): siRNA sense strand
gaugauauuucugaacaag

SEQ ID NO: 1908048 - RNA, 19 nt, Homo sapiens
  misc_RNA (1)...(19): siRNA sense strand
cgaagggaacuuuagcuuu

SEQ ID NO: 1908049 - RNA, 19 nt, Homo sapiens
  misc_RNA (1)...(19): siRNA sense strand
uacacaaccugaacuacaa

SEQ ID NO: 1908050 - RNA, 19 nt, Homo sapiens
  misc_RNA (1)...(19): siRNA sense strand
acaguggauucgaccuuua

SEQ ID NO: 1908051 - RNA, 19 nt, Homo sapiens
  misc_RNA (1)...(19): siRNA sense strand
caccaucguugcuuuaauc

SEQ ID NO: 1908052 - RNA, 19 nt, Homo sapiens
  misc_RNA (1)...(19): siRNA sense strand
ucaccaccaucguugcuuu

SEQ ID NO: 1908053 - RNA, 19 nt, Homo sapiens
  misc_RNA (1)...(19): siRNA sense strand
guaccuauuuacaguuuag

SEQ ID NO: 1908054 - RNA, 19 nt, Homo sapiens
  misc_RNA (1)...(19): siRNA sense strand
uuugaaauaucccggaauu

SEQ ID NO: 1908055 - RNA, 19 nt, Homo sapiens
  misc_RNA (1)...(19): siRNA sense strand
gugagcugcuugguauaua

SEQ ID NO: 1908056 - RNA, 19 nt, Homo sapiens
  misc_RNA (1)...(19): siRNA sense strand
guauuacaguacacaguug

SEQ ID NO: 1908057 - RNA, 19 nt, Homo sapiens
  misc_RNA (1)...(19): siRNA sense strand
ggaauggcaaacuguagaa

SEQ ID NO: 1908058 - RNA, 19 nt, Homo sapiens
  misc_RNA (1)...(19): siRNA sense strand
gcuaugaagcuuauguaau

SEQ ID NO: 1908059 - RNA, 19 nt, Homo sapiens
  misc_RNA (1)...(19): siRNA sense strand
ggaugucucagauauuaga

SEQ ID NO: 1908060 - RNA, 19 nt, Homo sapiens
  misc_RNA (1)...(19): siRNA sense strand
gggauuccuuaccaauuau

SEQ ID NO: 1908061 - RNA, 19 nt, Homo sapiens
  misc_RNA (1)...(19): siRNA sense strand
ucaucuaccuggugucaau

SEQ ID NO: 1908062 - RNA, 19 nt, Homo sapiens
  misc_RNA (1)...(19): siRNA sense strand
aagaagaacugagcccaau

SEQ ID NO: 1908063 - RNA, 19 nt, Homo sapiens
  misc_RNA (1)...(19): siRNA sense strand
agaagagggcucaugcuuu

SEQ ID NO: 1908064 - RNA, 19 nt, Homo sapiens
  misc_RNA (1)...(19): siRNA sense strand
ugugggaugucucagauau

SEQ ID NO: 1908065 - RNA, 19 nt, Homo sapiens
  misc_RNA (1)...(19): siRNA sense strand
gguaccuauuuacaguuua

SEQ ID NO: 1908066 - RNA, 19 nt, Homo sapiens
  misc_RNA (1)...(19): siRNA sense strand
uuucaaaugcuuggacuua

SEQ ID NO: 1908067 - RNA, 19 nt, Homo sapiens
  misc_RNA (1)...(19): siRNA sense strand
ucccggaauugcaauauau

SEQ ID NO: 1908068 - RNA, 19 nt, Homo sapiens
  misc_RNA (1)...(19): siRNA sense strand
caugugggaugucucagau

SEQ ID NO: 1908069 - RNA, 19 nt, Homo sapiens
  misc_RNA (1)...(19): siRNA sense strand
gagggcucaugcuuugauu

SEQ ID NO: 1908070 - RNA, 19 nt, Homo sapiens
  misc_RNA (1)...(19): siRNA sense strand
gggaauggcaaacuguaga

SEQ ID NO: 1908071 - RNA, 19 nt, Homo sapiens
  misc_RNA (1)...(19): siRNA sense strand
cacaguuguuugccaugua

SEQ ID NO: 1908072 - RNA, 19 nt, Homo sapiens
  misc_RNA (1)...(19): siRNA sense strand
ugagcugcuugguauauau

SEQ ID NO: 1908073 - RNA, 19 nt, Homo sapiens
  misc_RNA (1)...(19): siRNA sense strand
gggagaaguauugcuguuu

SEQ ID NO: 1908074 - RNA, 19 nt, Homo sapiens
  misc_RNA (1)...(19): siRNA sense strand
uaaccgguauccaaaucug

SEQ ID NO: 1908075 - RNA, 19 nt, Homo sapiens
  misc_RNA (1)...(19): siRNA sense strand
gcacuuguaccuggaggaa

SEQ ID NO: 1908076 - RNA, 19 nt, Homo sapiens
  misc_RNA (1)...(19): siRNA sense strand
cagaagagggcucaugcuu

SEQ ID NO: 1908077 - RNA, 19 nt, Homo sapiens
  misc_RNA (1)...(19): siRNA sense strand
gaaguauugcuguuuaggu

SEQ ID NO: 1908078 - RNA, 19 nt, Homo sapiens
  misc_RNA (1)...(19): siRNA sense strand
guuggauagcuuugaaaua

SEQ ID NO: 1908079 - RNA, 19 nt, Homo sapiens
  misc_RNA (1)...(19): siRNA sense strand
gcucaucauuacacauucu

SEQ ID NO: 1908080 - RNA, 19 nt, Homo sapiens
  misc_RNA (1)...(19): siRNA sense strand
acaguuguuugccauguau

SEQ ID NO: 1908081 - RNA, 19 nt, Homo sapiens
  misc_RNA (1)...(19): siRNA sense strand
acacaguugucagaccuuu

SEQ ID NO: 1908082 - RNA, 19 nt, Homo sapiens
  misc_RNA (1)...(19): siRNA sense strand
cuaacuaaccgguauccaa

SEQ ID NO: 1908083 - RNA, 19 nt, Homo sapiens
  misc_RNA (1)...(19): siRNA sense strand
ggugcaaacuagguguauu

SEQ ID NO: 1908084 - RNA, 19 nt, Homo sapiens
  misc_RNA (1)...(19): siRNA sense strand
ugguaccuauuuacaguuu

SEQ ID NO: 1908085 - RNA, 19 nt, Homo sapiens
  misc_RNA (1)...(19): siRNA sense strand
uaccacagcuaagauaucu

SEQ ID NO: 1908086 - RNA, 19 nt, Homo sapiens
  misc_RNA (1)...(19): siRNA sense strand
auaguuggauagcuuugaa

SEQ ID NO: 1908087 - RNA, 19 nt, Homo sapiens
  misc_RNA (1)...(19): siRNA sense strand
cuacaccuaccacagcuaa

SEQ ID NO: 1908088 - RNA, 19 nt, Homo sapiens
  misc_RNA (1)...(19): siRNA sense strand
caguaguuauugcuuuguu

SEQ ID NO: 1908089 - RNA, 19 nt, Homo sapiens
  misc_RNA (1)...(19): siRNA sense strand
ccaccaucguugcuuuaau

SEQ ID NO: 1908090 - RNA, 19 nt, Homo sapiens
  misc_RNA (1)...(19): siRNA sense strand
uuuggaugguaccuauuua

SEQ ID NO: 1908091 - RNA, 19 nt, Homo sapiens
  misc_RNA (1)...(19): siRNA sense strand
ccuguuggcaaauuucuuu

SEQ ID NO: 1908092 - RNA, 19 nt, Homo sapiens
  misc_RNA (1)...(19): siRNA sense strand
uguauugucuccugcucuu

SEQ ID NO: 1908093 - RNA, 19 nt, Homo sapiens
  misc_RNA (1)...(19): siRNA sense strand
ucacaguuguuugccaugu

SEQ ID NO: 1908094 - RNA, 19 nt, Homo sapiens
  misc_RNA (1)...(19): siRNA sense strand
ugaaauaucccggaauugc

SEQ ID NO: 1908095 - RNA, 19 nt, Homo sapiens
  misc_RNA (1)...(19): siRNA sense strand
cuuagugcauuauacacaa

SEQ ID NO: 1908096 - RNA, 19 nt, Homo sapiens
  misc_RNA (1)...(19): siRNA sense strand
ggacuccaggauuuuauua

SEQ ID NO: 1908097 - RNA, 19 nt, Homo sapiens
  misc_RNA (1)...(19): siRNA sense strand
gauaguuggauagcuuuga

SEQ ID NO: 1908098 - RNA, 19 nt, Homo sapiens
  misc_RNA (1)...(19): siRNA sense strand
ugccauugcucaucauuac

SEQ ID NO: 1908099 - RNA, 19 nt, Homo sapiens
  misc_RNA (1)...(19): siRNA sense strand
aaguuggcguuauuucuga

SEQ ID NO: 1908100 - RNA, 19 nt, Homo sapiens
  misc_RNA (1)...(19): siRNA sense strand
aguuauugcuuuguuggua

SEQ ID NO: 1908101 - RNA, 19 nt, Homo sapiens
  misc_RNA (1)...(19): siRNA sense strand
gaagaacugagcccaaucc

SEQ ID NO: 1908102 - RNA, 19 nt, Homo sapiens
  misc_RNA (1)...(19): siRNA sense strand
cugcagagaaugcuaugaa

SEQ ID NO: 1908103 - RNA, 19 nt, Homo sapiens
  misc_RNA (1)...(19): siRNA sense strand
gaagccaaagaucaacaga

SEQ ID NO: 1908104 - RNA, 19 nt, Homo sapiens
  misc_RNA (1)...(19): siRNA sense strand
aaaguuggcguuauuucug

SEQ ID NO: 1908105 - RNA, 19 nt, Homo sapiens
  misc_RNA (1)...(19): siRNA sense strand
guguaaggcuggugguuuu

SEQ ID NO: 1908106 - RNA, 19 nt, Homo sapiens
  misc_RNA (1)...(19): siRNA sense strand
gaaaaucauugcagacauu

SEQ ID NO: 1908107 - RNA, 19 nt, Homo sapiens
  misc_RNA (1)...(19): siRNA sense strand
gaacagacagcugaaguug

SEQ ID NO: 1908108 - RNA, 19 nt, Homo sapiens
  misc_RNA (1)...(19): siRNA sense strand
aggaggagaugaugaauga

SEQ ID NO: 1908109 - RNA, 19 nt, Homo sapiens
  misc_RNA (1)...(19): siRNA sense strand
aggcagagaucauggauau

SEQ ID NO: 1908110 - RNA, 19 nt, Homo sapiens
  misc_RNA (1)...(19): siRNA sense strand
gcgcaaguuuguauugaug

SEQ ID NO: 1908111 - RNA, 19 nt, Homo sapiens
  misc_RNA (1)...(19): siRNA sense strand
uuaagaagauggccaagca

SEQ ID NO: 1908112 - RNA, 19 nt, Homo sapiens
  misc_RNA (1)...(19): siRNA sense strand
cagaugagcugucgaaccu

SEQ ID NO: 1908113 - RNA, 19 nt, Homo sapiens
  misc_RNA (1)...(19): siRNA sense strand
gaggagaugaugaaugaug

SEQ ID NO: 1908114 - RNA, 19 nt, Homo sapiens
  misc_RNA (1)...(19): siRNA sense strand
uugcagacauuaagaagau

SEQ ID NO: 1908115 - RNA, 19 nt, Homo sapiens
  misc_RNA (1)...(19): siRNA sense strand
ugaaggaggagaugaugaa

SEQ ID NO: 1908116 - RNA, 19 nt, Homo sapiens
  misc_RNA (1)...(19): siRNA sense strand
ggaccgcgagcgacagaaa

SEQ ID NO: 1908117 - RNA, 19 nt, Homo sapiens
  misc_RNA (1)...(19): siRNA sense strand
gugcgcaaguuuguauuga

SEQ ID NO: 1908118 - RNA, 19 nt, Homo sapiens
  misc_RNA (1)...(19): siRNA sense strand
gaagaucaugauggaguuu

SEQ ID NO: 1908119 - RNA, 19 nt, Homo sapiens
  misc_RNA (1)...(19): siRNA sense strand
agaagaucaugauggaguu

SEQ ID NO: 1908120 - RNA, 19 nt, Homo sapiens
  misc_RNA (1)...(19): siRNA sense strand
gaagacgccagaggagcua

SEQ ID NO: 1908121 - RNA, 19 nt, Homo sapiens
  misc_RNA (1)...(19): siRNA sense strand
ugccaugggugaugaggaa

SEQ ID NO: 1908122 - RNA, 19 nt, Homo sapiens
  misc_RNA (1)...(19): siRNA sense strand
uggaugagcugggacuuag

SEQ ID NO: 1908123 - RNA, 19 nt, Homo sapiens
  misc_RNA (1)...(19): siRNA sense strand
uggaggaacggcuuaagaa

SEQ ID NO: 1908124 - RNA, 19 nt, Homo sapiens
  misc_RNA (1)...(19): siRNA sense strand
ugaacagacagcugaaguu

SEQ ID NO: 1908125 - RNA, 19 nt, Homo sapiens
  misc_RNA (1)...(19): siRNA sense strand
gauaugaaggaggagauga

SEQ ID NO: 1908126 - RNA, 19 nt, Homo sapiens
  misc_RNA (1)...(19): siRNA sense strand
gcuaugugcgcaaguuugu

SEQ ID NO: 1908127 - RNA, 19 nt, Homo sapiens
  misc_RNA (1)...(19): siRNA sense strand
uagagacccaggagaagaa

SEQ ID NO: 1908128 - RNA, 19 nt, Homo sapiens
  misc_RNA (1)...(19): siRNA sense strand
gaaggaggagaugaugaau

SEQ ID NO: 1908129 - RNA, 19 nt, Homo sapiens
  misc_RNA (1)...(19): siRNA sense strand
acacucaaguccaacaacu

SEQ ID NO: 1908130 - RNA, 19 nt, Homo sapiens
  misc_RNA (1)...(19): siRNA sense strand
gugaugaggaagaugaaga

SEQ ID NO: 1908131 - RNA, 19 nt, Homo sapiens
  misc_RNA (1)...(19): siRNA sense strand
gaugaugccaugggugaug

SEQ ID NO: 1908132 - RNA, 19 nt, Homo sapiens
  misc_RNA (1)...(19): siRNA sense strand
uccagacacucaaguccaa

SEQ ID NO: 1908133 - RNA, 19 nt, Homo sapiens
  misc_RNA (1)...(19): siRNA sense strand
ggaggaacggcuuaagaac

SEQ ID NO: 1908134 - RNA, 19 nt, Homo sapiens
  misc_RNA (1)...(19): siRNA sense strand
gaccuggaggaacggcuua

SEQ ID NO: 1908135 - RNA, 19 nt, Homo sapiens
  misc_RNA (1)...(19): siRNA sense strand
aagaugaagaggagaguga

SEQ ID NO: 1908136 - RNA, 19 nt, Homo sapiens
  misc_RNA (1)...(19): siRNA sense strand
caacaacucgauggcacaa

SEQ ID NO: 1908137 - RNA, 19 nt, Homo sapiens
  misc_RNA (1)...(19): siRNA sense strand
agaucaugauggaguuuga

SEQ ID NO: 1908138 - RNA, 19 nt, Homo sapiens
  misc_RNA (1)...(19): siRNA sense strand
gagcgacagaaacuagaga

SEQ ID NO: 1908139 - RNA, 19 nt, Homo sapiens
  misc_RNA (1)...(19): siRNA sense strand
gaugaagaggagagugaug

SEQ ID NO: 1908140 - RNA, 19 nt, Homo sapiens
  misc_RNA (1)...(19): siRNA sense strand
caggcugugucccucaaga

SEQ ID NO: 1908141 - RNA, 19 nt, Homo sapiens
  misc_RNA (1)...(19): siRNA sense strand
uaugugcgcaaguuuguau

SEQ ID NO: 1908142 - RNA, 19 nt, Homo sapiens
  misc_RNA (1)...(19): siRNA sense strand
gcaggcagagaucauggau

SEQ ID NO: 1908143 - RNA, 19 nt, Homo sapiens
  misc_RNA (1)...(19): siRNA sense strand
cuagagacccaggagaaga

SEQ ID NO: 1908144 - RNA, 19 nt, Homo sapiens
  misc_RNA (1)...(19): siRNA sense strand
ggauaugaaggaggagaug

SEQ ID NO: 1908145 - RNA, 19 nt, Homo sapiens
  misc_RNA (1)...(19): siRNA sense strand
gaaaaucauugcagacauu

SEQ ID NO: 1908146 - RNA, 19 nt, Homo sapiens
  misc_RNA (1)...(19): siRNA sense strand
gaacagacagcugaaguug

SEQ ID NO: 1908147 - RNA, 19 nt, Homo sapiens
  misc_RNA (1)...(19): siRNA sense strand
aggaggagaugaugaauga

SEQ ID NO: 1908148 - RNA, 19 nt, Homo sapiens
  misc_RNA (1)...(19): siRNA sense strand
aggcagagaucauggauau

SEQ ID NO: 1908149 - RNA, 19 nt, Homo sapiens
  misc_RNA (1)...(19): siRNA sense strand
gcgcaaguuuguauugaug

SEQ ID NO: 1908150 - RNA, 19 nt, Homo sapiens
  misc_RNA (1)...(19): siRNA sense strand
uuaagaagauggccaagca

SEQ ID NO: 1908151 - RNA, 19 nt, Homo sapiens
  misc_RNA (1)...(19): siRNA sense strand
cagaugagcugucgaaccu

SEQ ID NO: 1908152 - RNA, 19 nt, Homo sapiens
  misc_RNA (1)...(19): siRNA sense strand
gaggagaugaugaaugaug

SEQ ID NO: 1908153 - RNA, 19 nt, Homo sapiens
  misc_RNA (1)...(19): siRNA sense strand
uugcagacauuaagaagau

SEQ ID NO: 1908154 - RNA, 19 nt, Homo sapiens
  misc_RNA (1)...(19): siRNA sense strand
ugaaggaggagaugaugaa

SEQ ID NO: 1908155 - RNA, 19 nt, Homo sapiens
  misc_RNA (1)...(19): siRNA sense strand
ggaccgcgagcgacagaaa

SEQ ID NO: 1908156 - RNA, 19 nt, Homo sapiens
  misc_RNA (1)...(19): siRNA sense strand
gugcgcaaguuuguauuga

SEQ ID NO: 1908157 - RNA, 19 nt, Homo sapiens
  misc_RNA (1)...(19): siRNA sense strand
gaagaucaugauggaguuu

SEQ ID NO: 1908158 - RNA, 19 nt, Homo sapiens
  misc_RNA (1)...(19): siRNA sense strand
agaagaucaugauggaguu

SEQ ID NO: 1908159 - RNA, 19 nt, Homo sapiens
  misc_RNA (1)...(19): siRNA sense strand
gaagacgccagaggagcua

SEQ ID NO: 1908160 - RNA, 19 nt, Homo sapiens
  misc_RNA (1)...(19): siRNA sense strand
ugccaugggugaugaggaa

SEQ ID NO: 1908161 - RNA, 19 nt, Homo sapiens
  misc_RNA (1)...(19): siRNA sense strand
uggaugagcugggacuuag

SEQ ID NO: 1908162 - RNA, 19 nt, Homo sapiens
  misc_RNA (1)...(19): siRNA sense strand
uggaggaacggcuuaagaa

SEQ ID NO: 1908163 - RNA, 19 nt, Homo sapiens
  misc_RNA (1)...(19): siRNA sense strand
ugaacagacagcugaaguu

SEQ ID NO: 1908164 - RNA, 19 nt, Homo sapiens
  misc_RNA (1)...(19): siRNA sense strand
gauaugaaggaggagauga

SEQ ID NO: 1908165 - RNA, 19 nt, Homo sapiens
  misc_RNA (1)...(19): siRNA sense strand
gcuaugugcgcaaguuugu

SEQ ID NO: 1908166 - RNA, 19 nt, Homo sapiens
  misc_RNA (1)...(19): siRNA sense strand
uagagacccaggagaagaa

SEQ ID NO: 1908167 - RNA, 19 nt, Homo sapiens
  misc_RNA (1)...(19): siRNA sense strand
gaaggaggagaugaugaau

SEQ ID NO: 1908168 - RNA, 19 nt, Homo sapiens
  misc_RNA (1)...(19): siRNA sense strand
acacucaaguccaacaacu

SEQ ID NO: 1908169 - RNA, 19 nt, Homo sapiens
  misc_RNA (1)...(19): siRNA sense strand
gugaugaggaagaugaaga

SEQ ID NO: 1908170 - RNA, 19 nt, Homo sapiens
  misc_RNA (1)...(19): siRNA sense strand
gaugaugccaugggugaug

SEQ ID NO: 1908171 - RNA, 19 nt, Homo sapiens
  misc_RNA (1)...(19): siRNA sense strand
uccagacacucaaguccaa

SEQ ID NO: 1908172 - RNA, 19 nt, Homo sapiens
  misc_RNA (1)...(19): siRNA sense strand
ggaggaacggcuuaagaac

SEQ ID NO: 1908173 - RNA, 19 nt, Homo sapiens
  misc_RNA (1)...(19): siRNA sense strand
gaccuggaggaacggcuua

SEQ ID NO: 1908174 - RNA, 19 nt, Homo sapiens
  misc_RNA (1)...(19): siRNA sense strand
aagaugaagaggagaguga

SEQ ID NO: 1908175 - RNA, 19 nt, Homo sapiens
  misc_RNA (1)...(19): siRNA sense strand
caacaacucgauggcacaa

SEQ ID NO: 1908176 - RNA, 19 nt, Homo sapiens
  misc_RNA (1)...(19): siRNA sense strand
agaucaugauggaguuuga

SEQ ID NO: 1908177 - RNA, 19 nt, Homo sapiens
  misc_RNA (1)...(19): siRNA sense strand
gagcgacagaaacuagaga

SEQ ID NO: 1908178 - RNA, 19 nt, Homo sapiens
  misc_RNA (1)...(19): siRNA sense strand
gaugaagaggagagugaug

SEQ ID NO: 1908179 - RNA, 19 nt, Homo sapiens
  misc_RNA (1)...(19): siRNA sense strand
caggcugugucccucaaga

SEQ ID NO: 1908180 - RNA, 19 nt, Homo sapiens
  misc_RNA (1)...(19): siRNA sense strand
uaugugcgcaaguuuguau

SEQ ID NO: 1908181 - RNA, 19 nt, Homo sapiens
  misc_RNA (1)...(19): siRNA sense strand
gcaggcagagaucauggau

SEQ ID NO: 1908182 - RNA, 19 nt, Homo sapiens
  misc_RNA (1)...(19): siRNA sense strand
cuagagacccaggagaaga

SEQ ID NO: 1908183 - RNA, 19 nt, Homo sapiens
  misc_RNA (1)...(19): siRNA sense strand
ggauaugaaggaggagaug

SEQ ID NO: 1908184 - RNA, 19 nt, Homo sapiens
  misc_RNA (1)...(19): siRNA sense strand
gaagaaagcagaagaacua

SEQ ID NO: 1908185 - RNA, 19 nt, Homo sapiens
  misc_RNA (1)...(19): siRNA sense strand
gaacaacuauuccucaaga

SEQ ID NO: 1908186 - RNA, 19 nt, Homo sapiens
  misc_RNA (1)...(19): siRNA sense strand
gaaaagaucuaugcaguua

SEQ ID NO: 1908187 - RNA, 19 nt, Homo sapiens
  misc_RNA (1)...(19): siRNA sense strand
gaauagaaguuuccacaga

SEQ ID NO: 1908188 - RNA, 19 nt, Homo sapiens
  misc_RNA (1)...(19): siRNA sense strand
gaauggaucuucuaaccaa

SEQ ID NO: 1908189 - RNA, 19 nt, Homo sapiens
  misc_RNA (1)...(19): siRNA sense strand
caacaaagaugcuaaagac

SEQ ID NO: 1908190 - RNA, 19 nt, Homo sapiens
  misc_RNA (1)...(19): siRNA sense strand
gaacucagggcagaaauua

SEQ ID NO: 1908191 - RNA, 19 nt, Homo sapiens
  misc_RNA (1)...(19): siRNA sense strand
gcagaaauggauaaaguua

SEQ ID NO: 1908192 - RNA, 19 nt, Homo sapiens
  misc_RNA (1)...(19): siRNA sense strand
gaaauuacacauccaaaga

SEQ ID NO: 1908193 - RNA, 19 nt, Homo sapiens
  misc_RNA (1)...(19): siRNA sense strand
cagcucaucuugaaauaaa

SEQ ID NO: 1908194 - RNA, 19 nt, Homo sapiens
  misc_RNA (1)...(19): siRNA sense strand
gcaguuagaucaguuguuc

SEQ ID NO: 1908195 - RNA, 19 nt, Homo sapiens
  misc_RNA (1)...(19): siRNA sense strand
gaacuaaagagacucacua

SEQ ID NO: 1908196 - RNA, 19 nt, Homo sapiens
  misc_RNA (1)...(19): siRNA sense strand
gauaucgcgucaugauuaa

SEQ ID NO: 1908197 - RNA, 19 nt, Homo sapiens
  misc_RNA (1)...(19): siRNA sense strand
uuacacaacugcaucauug

SEQ ID NO: 1908198 - RNA, 19 nt, Homo sapiens
  misc_RNA (1)...(19): siRNA sense strand
ucacuaaccuugccaguca

SEQ ID NO: 1908199 - RNA, 19 nt, Homo sapiens
  misc_RNA (1)...(19): siRNA sense strand
gaaaagaggcccaaauauu

SEQ ID NO: 1908200 - RNA, 19 nt, Homo sapiens
  misc_RNA (1)...(19): siRNA sense strand
gaaauuaagcacuuuguca

SEQ ID NO: 1908201 - RNA, 19 nt, Homo sapiens
  misc_RNA (1)...(19): siRNA sense strand
gggcagaaauuaagcacuu

SEQ ID NO: 1908202 - RNA, 19 nt, Homo sapiens
  misc_RNA (1)...(19): siRNA sense strand
cagaugaguuggcaaagaa

SEQ ID NO: 1908203 - RNA, 19 nt, Homo sapiens
  misc_RNA (1)...(19): siRNA sense strand
gcccaaauauugagaaauc

SEQ ID NO: 1908204 - RNA, 19 nt, Homo sapiens
  misc_RNA (1)...(19): siRNA sense strand
gaaagcagaagaacuaaag

SEQ ID NO: 1908205 - RNA, 19 nt, Homo sapiens
  misc_RNA (1)...(19): siRNA sense strand
cagaaacuauccuuagaug

SEQ ID NO: 1908206 - RNA, 19 nt, Homo sapiens
  misc_RNA (1)...(19): siRNA sense strand
aaacaaaggcggugccaaa

SEQ ID NO: 1908207 - RNA, 19 nt, Homo sapiens
  misc_RNA (1)...(19): siRNA sense strand
aaccaaagacggagauuua

SEQ ID NO: 1908208 - RNA, 19 nt, Homo sapiens
  misc_RNA (1)...(19): siRNA sense strand
caacagaaacuauccuuag

SEQ ID NO: 1908209 - RNA, 19 nt, Homo sapiens
  misc_RNA (1)...(19): siRNA sense strand
caaagaugcuaaagacaag

SEQ ID NO: 1908210 - RNA, 19 nt, Homo sapiens
  misc_RNA (1)...(19): siRNA sense strand
gcaacagaaacuauccuua

SEQ ID NO: 1908211 - RNA, 19 nt, Homo sapiens
  misc_RNA (1)...(19): siRNA sense strand
gcaacaaagaugcuaaaga

SEQ ID NO: 1908212 - RNA, 19 nt, Homo sapiens
  misc_RNA (1)...(19): siRNA sense strand
gaacucaauacucauguga

SEQ ID NO: 1908213 - RNA, 19 nt, Homo sapiens
  misc_RNA (1)...(19): siRNA sense strand
agauaucgcgucaugauua

SEQ ID NO: 1908214 - RNA, 19 nt, Homo sapiens
  misc_RNA (1)...(19): siRNA sense strand
uaaagaagaagccauggaa

SEQ ID NO: 1908215 - RNA, 19 nt, Homo sapiens
  misc_RNA (1)...(19): siRNA sense strand
gcaacagacuacugcaaca

SEQ ID NO: 1908216 - RNA, 19 nt, Homo sapiens
  misc_RNA (1)...(19): siRNA sense strand
gaaauaaagccagaugagu

SEQ ID NO: 1908217 - RNA, 19 nt, Homo sapiens
  misc_RNA (1)...(19): siRNA sense strand
cagaagaacuaaagagacu

SEQ ID NO: 1908218 - RNA, 19 nt, Homo sapiens
  misc_RNA (1)...(19): siRNA sense strand
aaauaaagccagaugaguu

SEQ ID NO: 1908219 - RNA, 19 nt, Homo sapiens
  misc_RNA (1)...(19): siRNA sense strand
aaucauccacucacaauaa

SEQ ID NO: 1908220 - RNA, 19 nt, Homo sapiens
  misc_RNA (1)...(19): siRNA sense strand
gcugaaggcccaaaucaug

SEQ ID NO: 1908221 - RNA, 19 nt, Homo sapiens
  misc_RNA (1)...(19): siRNA sense strand
ucagcgagcguaaauauga

SEQ ID NO: 1908222 - RNA, 19 nt, Homo sapiens
  misc_RNA (1)...(19): siRNA sense strand
uggcagaaauggauaaagu

SEQ ID NO: 1908223 - RNA, 19 nt, Homo sapiens
  misc_RNA (1)...(19): siRNA sense strand
ccagaugaguuggcaaaga

SEQ ID NO: 1908224 - RNA, 19 nt, Homo sapiens
  misc_RNA (1)...(19): siRNA sense strand
cauaacaacaggcuaaaug

SEQ ID NO: 1908225 - RNA, 19 nt, Homo sapiens
  misc_RNA (1)...(19): siRNA sense strand
uaaagagacucacuaaccu

SEQ ID NO: 1908226 - RNA, 19 nt, Homo sapiens
  misc_RNA (1)...(19): siRNA sense strand
uaaaugggccugccaaguc

SEQ ID NO: 1908227 - RNA, 19 nt, Homo sapiens
  misc_RNA (1)...(19): siRNA sense strand
gcagugcaauucaaguucu

SEQ ID NO: 1908228 - RNA, 19 nt, Homo sapiens
  misc_RNA (1)...(19): siRNA sense strand
uaucauaacaacaggcuaa

SEQ ID NO: 1908229 - RNA, 19 nt, Homo sapiens
  misc_RNA (1)...(19): siRNA sense strand
ggauggcagugcaauucaa

SEQ ID NO: 1908230 - RNA, 19 nt, Homo sapiens
  misc_RNA (1)...(19): siRNA sense strand
gaagaacuaaagagacuca

SEQ ID NO: 1908231 - RNA, 19 nt, Homo sapiens
  misc_RNA (1)...(19): siRNA sense strand
aggaagaaguggauaguuc

SEQ ID NO: 1908232 - RNA, 19 nt, Homo sapiens
  misc_RNA (1)...(19): siRNA sense strand
aaagaggcccaaauauuga

SEQ ID NO: 1908233 - RNA, 19 nt, Homo sapiens
  misc_RNA (1)...(19): siRNA sense strand
gaacaacagagaggucaga

SEQ ID NO: 1908234 - RNA, 19 nt, Homo sapiens
  misc_RNA (1)...(19): siRNA sense strand
ccuuaucccucgugagaaa

SEQ ID NO: 1908235 - RNA, 19 nt, Homo sapiens
  misc_RNA (1)...(19): siRNA sense strand
aauggaauaugacaggaaa

SEQ ID NO: 1908236 - RNA, 19 nt, Homo sapiens
  misc_RNA (1)...(19): siRNA sense strand
acaaagaugcuaaagacaa

SEQ ID NO: 1908237 - RNA, 19 nt, Homo sapiens
  misc_RNA (1)...(19): siRNA sense strand
ccagucagauggcagagau

SEQ ID NO: 1908238 - RNA, 19 nt, Homo sapiens
  misc_RNA (1)...(19): siRNA sense strand
ucaauacucaugugaaugu

SEQ ID NO: 1908239 - RNA, 19 nt, Homo sapiens
  misc_RNA (1)...(19): siRNA sense strand
ggagaaauuacacauccaa

SEQ ID NO: 1908240 - RNA, 19 nt, Homo sapiens
  misc_RNA (1)...(19): siRNA sense strand
aacagaaacuauccuuaga

SEQ ID NO: 1908241 - RNA, 19 nt, Homo sapiens
  misc_RNA (1)...(19): siRNA sense strand
gcagggcagugggaaugaa

SEQ ID NO: 1908242 - RNA, 19 nt, Homo sapiens
  misc_RNA (1)...(19): siRNA sense strand
ccacgagaauagaaguuuc

SEQ ID NO: 1908243 - RNA, 19 nt, Homo sapiens
  misc_RNA (1)...(19): siRNA sense strand
aauagaaguuuccacagau

SEQ ID NO: 1908244 - RNA, 19 nt, Homo sapiens
  misc_RNA (1)...(19): siRNA sense strand
gaauggaauaugacaggaa

SEQ ID NO: 1908245 - RNA, 19 nt, Homo sapiens
  misc_RNA (1)...(19): siRNA sense strand
gguagugucgguaggguuu

SEQ ID NO: 1908246 - RNA, 19 nt, Homo sapiens
  misc_RNA (1)...(19): siRNA sense strand
uaagcccucugaaggcaaa

SEQ ID NO: 1908247 - RNA, 19 nt, Homo sapiens
  misc_RNA (1)...(19): siRNA sense strand
aaaagaggcccaaauauug

SEQ ID NO: 1908248 - RNA, 19 nt, Homo sapiens
  misc_RNA (1)...(19): siRNA sense strand
gcccuuaucccucgugaga

SEQ ID NO: 1908249 - RNA, 19 nt, Homo sapiens
  misc_RNA (1)...(19): siRNA sense strand
gcagaaauuaagcacuuug

SEQ ID NO: 1908250 - RNA, 19 nt, Homo sapiens
  misc_RNA (1)...(19): siRNA sense strand
ggucacagaaggcaacaga

SEQ ID NO: 1908251 - RNA, 19 nt, Homo sapiens
  misc_RNA (1)...(19): siRNA sense strand
gcaaguccaagcagcauca

SEQ ID NO: 1908252 - RNA, 19 nt, Homo sapiens
  misc_RNA (1)...(19): siRNA sense strand
ggcagaaauuaagcacuuu

SEQ ID NO: 1908253 - RNA, 19 nt, Homo sapiens
  misc_RNA (1)...(19): siRNA sense strand
cugcaucauugacaaagaa

SEQ ID NO: 1908254 - RNA, 19 nt, Homo sapiens
  misc_RNA (1)...(19): siRNA sense strand
caacugcaucauugacaaa

SEQ ID NO: 1908255 - RNA, 19 nt, Homo sapiens
  misc_RNA (1)...(19): siRNA sense strand
gaauuacacaacugcauca

SEQ ID NO: 1908256 - RNA, 19 nt, Homo sapiens
  misc_RNA (1)...(19): siRNA sense strand
guggauaguuccgugaaga

SEQ ID NO: 1908257 - RNA, 19 nt, Homo sapiens
  misc_RNA (1)...(19): siRNA sense strand
gaggucagauggccuacag

SEQ ID NO: 1908258 - RNA, 19 nt, Homo sapiens
  misc_RNA (1)...(19): siRNA sense strand
ucaugugaaugucaaggaa

SEQ ID NO: 1908259 - RNA, 19 nt, Homo sapiens
  misc_RNA (1)...(19): siRNA sense strand
ccaaagacggagauuuaau

SEQ ID NO: 1908260 - RNA, 19 nt, Homo sapiens
  misc_RNA (1)...(19): siRNA sense strand
aagaacaacuauuccucaa

SEQ ID NO: 1908261 - RNA, 19 nt, Homo sapiens
  misc_RNA (1)...(19): siRNA sense strand
gagaaauuacacauccaaa

SEQ ID NO: 1908262 - RNA, 19 nt, Homo sapiens
  misc_RNA (1)...(19): siRNA sense strand
acucaauacucaugugaau

SEQ ID NO: 1908263 - RNA, 19 nt, Homo sapiens
  misc_RNA (1)...(19): siRNA sense strand
gcagcaaccucugggaaac

SEQ ID NO: 1908264 - RNA, 19 nt, Homo sapiens
  misc_RNA (1)...(19): siRNA sense strand
uuacacauccaaagaacaa

SEQ ID NO: 1908265 - RNA, 19 nt, Homo sapiens
  misc_RNA (1)...(19): siRNA sense strand
caucauugacaaagaaguu

SEQ ID NO: 1908266 - RNA, 19 nt, Homo sapiens
  misc_RNA (1)...(19): siRNA sense strand
gauaguuccgugaagaaga

SEQ ID NO: 1908267 - RNA, 19 nt, Homo sapiens
  misc_RNA (1)...(19): siRNA sense strand
aauaaagccagaugaguug

SEQ ID NO: 1908268 - RNA, 19 nt, Homo sapiens
  misc_RNA (1)...(19): siRNA sense strand
gcagcucaucuugaaauaa

SEQ ID NO: 1908269 - RNA, 19 nt, Homo sapiens
  misc_RNA (1)...(19): siRNA sense strand
acagacuacugcaacagaa

SEQ ID NO: 1908270 - RNA, 19 nt, Homo sapiens
  misc_RNA (1)...(19): siRNA sense strand
aagaagaagccauggaaau

SEQ ID NO: 1908271 - RNA, 19 nt, Homo sapiens
  misc_RNA (1)...(19): siRNA sense strand
uaaccaaagacggagauuu

SEQ ID NO: 1908272 - RNA, 19 nt, Homo sapiens
  misc_RNA (1)...(19): siRNA sense strand
ucagaagaaagcagaagaa

SEQ ID NO: 1908273 - RNA, 19 nt, Homo sapiens
  misc_RNA (1)...(19): siRNA sense strand
caucuccuguuaaguccaa

SEQ ID NO: 1908274 - RNA, 19 nt, Homo sapiens
  misc_RNA (1)...(19): siRNA sense strand
gaacagcugaaggcccaaa

SEQ ID NO: 1908275 - RNA, 19 nt, Homo sapiens
  misc_RNA (1)...(19): siRNA sense strand
ugucagcgagcguaaauau

SEQ ID NO: 1908276 - RNA, 19 nt, Homo sapiens
  misc_RNA (1)...(19): siRNA sense strand
acaacugcaucauugacaa

SEQ ID NO: 1908277 - RNA, 19 nt, Homo sapiens
  misc_RNA (1)...(19): siRNA sense strand
aagcugccuuugcugaauu

SEQ ID NO: 1908278 - RNA, 19 nt, Homo sapiens
  misc_RNA (1)...(19): siRNA sense strand
gacagcucguccacagauu

SEQ ID NO: 1908279 - RNA, 19 nt, Homo sapiens
  misc_RNA (1)...(19): siRNA sense strand
agaagaagccauggaaauc

SEQ ID NO: 1908280 - RNA, 19 nt, Homo sapiens
  misc_RNA (1)...(19): siRNA sense strand
aagaaaagaggcccaaaua

SEQ ID NO: 1908281 - RNA, 19 nt, Homo sapiens
  misc_RNA (1)...(19): siRNA sense strand
gcaucaaggcaacaaagau

SEQ ID NO: 1908282 - RNA, 19 nt, Homo sapiens
  misc_RNA (1)...(19): siRNA sense strand
cagcugaaggcccaaauca

SEQ ID NO: 1908283 - RNA, 19 nt, Homo sapiens
  misc_RNA (1)...(19): siRNA sense strand
caacuauuccucaagaacu

SEQ ID NO: 1908284 - RNA, 19 nt, Homo sapiens
  misc_RNA (1)...(19): siRNA sense strand
gaaagaagcugaacuuaag

SEQ ID NO: 1908285 - RNA, 19 nt, Homo sapiens
  misc_RNA (1)...(19): siRNA sense strand
caagaggaauugaagauua

SEQ ID NO: 1908286 - RNA, 19 nt, Homo sapiens
  misc_RNA (1)...(19): siRNA sense strand
gaaagcagcggcucaguua

SEQ ID NO: 1908287 - RNA, 19 nt, Homo sapiens
  misc_RNA (1)...(19): siRNA sense strand
agaaugaacugcacaaauu

SEQ ID NO: 1908288 - RNA, 19 nt, Homo sapiens
  misc_RNA (1)...(19): siRNA sense strand
agaaagagcuucacgagaa

SEQ ID NO: 1908289 - RNA, 19 nt, Homo sapiens
  misc_RNA (1)...(19): siRNA sense strand
gaagaaagaagaagaaaug

SEQ ID NO: 1908290 - RNA, 19 nt, Homo sapiens
  misc_RNA (1)...(19): siRNA sense strand
gaaagaagaagaaaugaga

SEQ ID NO: 1908291 - RNA, 19 nt, Homo sapiens
  misc_RNA (1)...(19): siRNA sense strand
gagauuaacgcaacaauga

SEQ ID NO: 1908292 - RNA, 19 nt, Homo sapiens
  misc_RNA (1)...(19): siRNA sense strand
gaagaaaugagacaaaugu

SEQ ID NO: 1908293 - RNA, 19 nt, Homo sapiens
  misc_RNA (1)...(19): siRNA sense strand
agaguaagaucaugaguga

SEQ ID NO: 1908294 - RNA, 19 nt, Homo sapiens
  misc_RNA (1)...(19): siRNA sense strand
gaaagacaaggauaagaaa

SEQ ID NO: 1908295 - RNA, 19 nt, Homo sapiens
  misc_RNA (1)...(19): siRNA sense strand
gcuguaagcuugaagagau

SEQ ID NO: 1908296 - RNA, 19 nt, Homo sapiens
  misc_RNA (1)...(19): siRNA sense strand
gauuaaacguucucucuuc

SEQ ID NO: 1908297 - RNA, 19 nt, Homo sapiens
  misc_RNA (1)...(19): siRNA sense strand
gaagaagaaaugagacaaa

SEQ ID NO: 1908298 - RNA, 19 nt, Homo sapiens
  misc_RNA (1)...(19): siRNA sense strand
gagaccagauaaauaaaga

SEQ ID NO: 1908299 - RNA, 19 nt, Homo sapiens
  misc_RNA (1)...(19): siRNA sense strand
gcaaugggguccagauaua

SEQ ID NO: 1908300 - RNA, 19 nt, Homo sapiens
  misc_RNA (1)...(19): siRNA sense strand
guuaugagcuucaggaaag

SEQ ID NO: 1908301 - RNA, 19 nt, Homo sapiens
  misc_RNA (1)...(19): siRNA sense strand
ggagaaagaagcugaacuu

SEQ ID NO: 1908302 - RNA, 19 nt, Homo sapiens
  misc_RNA (1)...(19): siRNA sense strand
gugaacaucauuccaauaa

SEQ ID NO: 1908303 - RNA, 19 nt, Homo sapiens
  misc_RNA (1)...(19): siRNA sense strand
ccacguuaauggacacuuu

SEQ ID NO: 1908304 - RNA, 19 nt, Homo sapiens
  misc_RNA (1)...(19): siRNA sense strand
gaacugcacaaauucaaga

SEQ ID NO: 1908305 - RNA, 19 nt, Homo sapiens
  misc_RNA (1)...(19): siRNA sense strand
ugggagaacugcagaagaa

SEQ ID NO: 1908306 - RNA, 19 nt, Homo sapiens
  misc_RNA (1)...(19): siRNA sense strand
gagaaagaagcugaacuua

SEQ ID NO: 1908307 - RNA, 19 nt, Homo sapiens
  misc_RNA (1)...(19): siRNA sense strand
ccaagaaagacaaggauaa

SEQ ID NO: 1908308 - RNA, 19 nt, Homo sapiens
  misc_RNA (1)...(19): siRNA sense strand
agaaagaagcugaacuuaa

SEQ ID NO: 1908309 - RNA, 19 nt, Homo sapiens
  misc_RNA (1)...(19): siRNA sense strand
ugagugaacuggucagcaa

SEQ ID NO: 1908310 - RNA, 19 nt, Homo sapiens
  misc_RNA (1)...(19): siRNA sense strand
gcagaagaaagaagaagaa

SEQ ID NO: 1908311 - RNA, 19 nt, Homo sapiens
  misc_RNA (1)...(19): siRNA sense strand
gaguguccaucucccauuu

SEQ ID NO: 1908312 - RNA, 19 nt, Homo sapiens
  misc_RNA (1)...(19): siRNA sense strand
cggcugaaguuaaccauug

SEQ ID NO: 1908313 - RNA, 19 nt, Homo sapiens
  misc_RNA (1)...(19): siRNA sense strand
gaagaaaguggaagacaag

SEQ ID NO: 1908314 - RNA, 19 nt, Homo sapiens
  misc_RNA (1)...(19): siRNA sense strand
ggagacauaugaagcaaaa

SEQ ID NO: 1908315 - RNA, 19 nt, Homo sapiens
  misc_RNA (1)...(19): siRNA sense strand
agaagaaaguggaagacaa

SEQ ID NO: 1908316 - RNA, 19 nt, Homo sapiens
  misc_RNA (1)...(19): siRNA sense strand
gaaaguggaagacaagaag

SEQ ID NO: 1908317 - RNA, 19 nt, Homo sapiens
  misc_RNA (1)...(19): siRNA sense strand
ucucaaggauucuguuuca

SEQ ID NO: 1908318 - RNA, 19 nt, Homo sapiens
  misc_RNA (1)...(19): siRNA sense strand
ccgaagaggugaagauugg

SEQ ID NO: 1908319 - RNA, 19 nt, Homo sapiens
  misc_RNA (1)...(19): siRNA sense strand
gaaacgguggcagagauua

SEQ ID NO: 1908320 - RNA, 19 nt, Homo sapiens
  misc_RNA (1)...(19): siRNA sense strand
cugcacaaauucaagagua

SEQ ID NO: 1908321 - RNA, 19 nt, Homo sapiens
  misc_RNA (1)...(19): siRNA sense strand
acaccaaauuugaaaguga

SEQ ID NO: 1908322 - RNA, 19 nt, Homo sapiens
  misc_RNA (1)...(19): siRNA sense strand
gcaagaggaauugaagauu

SEQ ID NO: 1908323 - RNA, 19 nt, Homo sapiens
  misc_RNA (1)...(19): siRNA sense strand
cuucgaaacuugucuuugu

SEQ ID NO: 1908324 - RNA, 19 nt, Homo sapiens
  misc_RNA (1)...(19): siRNA sense strand
gaagauuggcaacaagaug

SEQ ID NO: 1908325 - RNA, 19 nt, Homo sapiens
  misc_RNA (1)...(19): siRNA sense strand
gcaauguacggcugaaguu

SEQ ID NO: 1908326 - RNA, 19 nt, Homo sapiens
  misc_RNA (1)...(19): siRNA sense strand
agaaagacaaggauaagaa

SEQ ID NO: 1908327 - RNA, 19 nt, Homo sapiens
  misc_RNA (1)...(19): siRNA sense strand
gagaacugcagaagaaaga

SEQ ID NO: 1908328 - RNA, 19 nt, Homo sapiens
  misc_RNA (1)...(19): siRNA sense strand
ugacagcuauaagccgaua

SEQ ID NO: 1908329 - RNA, 19 nt, Homo sapiens
  misc_RNA (1)...(19): siRNA sense strand
auaagccgauaguagaaua

SEQ ID NO: 1908330 - RNA, 19 nt, Homo sapiens
  misc_RNA (1)...(19): siRNA sense strand
gaagaaacgguggcagaga

SEQ ID NO: 1908331 - RNA, 19 nt, Homo sapiens
  misc_RNA (1)...(19): siRNA sense strand
ugacccagcuacucacaau

SEQ ID NO: 1908332 - RNA, 19 nt, Homo sapiens
  misc_RNA (1)...(19): siRNA sense strand
gaauuguaccgacgcugua

SEQ ID NO: 1908333 - RNA, 19 nt, Homo sapiens
  misc_RNA (1)...(19): siRNA sense strand
gaaguuaaccauuguugac

SEQ ID NO: 1908334 - RNA, 19 nt, Homo sapiens
  misc_RNA (1)...(19): siRNA sense strand
aggaggaggugaacaacuu

SEQ ID NO: 1908335 - RNA, 19 nt, Homo sapiens
  misc_RNA (1)...(19): siRNA sense strand
caauguacggcugaaguua

SEQ ID NO: 1908336 - RNA, 19 nt, Homo sapiens
  misc_RNA (1)...(19): siRNA sense strand
cagcaaacccuucagucuu

SEQ ID NO: 1908337 - RNA, 19 nt, Homo sapiens
  misc_RNA (1)...(19): siRNA sense strand
acaguaaggugaacaucau

SEQ ID NO: 1908338 - RNA, 19 nt, Homo sapiens
  misc_RNA (1)...(19): siRNA sense strand
aacguucucucuucaacua

SEQ ID NO: 1908339 - RNA, 19 nt, Homo sapiens
  misc_RNA (1)...(19): siRNA sense strand
uuggagaccagauaaauaa

SEQ ID NO: 1908340 - RNA, 19 nt, Homo sapiens
  misc_RNA (1)...(19): siRNA sense strand
ggauuuggagaccagauaa

SEQ ID NO: 1908341 - RNA, 19 nt, Homo sapiens
  misc_RNA (1)...(19): siRNA sense strand
ccagauaaauaaagaugac

SEQ ID NO: 1908342 - RNA, 19 nt, Homo sapiens
  misc_RNA (1)...(19): siRNA sense strand
gaaagugacccagcuacuc

SEQ ID NO: 1908343 - RNA, 19 nt, Homo sapiens
  misc_RNA (1)...(19): siRNA sense strand
gaaggagaaagaagcugaa

SEQ ID NO: 1908344 - RNA, 19 nt, Homo sapiens
  misc_RNA (1)...(19): siRNA sense strand
aagaaacgguggcagagau

SEQ ID NO: 1908345 - RNA, 19 nt, Homo sapiens
  misc_RNA (1)...(19): siRNA sense strand
gaccagauaaauaaagaug

SEQ ID NO: 1908346 - RNA, 19 nt, Homo sapiens
  misc_RNA (1)...(19): siRNA sense strand
gggauuuggagaccagaua

SEQ ID NO: 1908347 - RNA, 19 nt, Homo sapiens
  misc_RNA (1)...(19): siRNA sense strand
gaacuuaaggaggcagaga

SEQ ID NO: 1908348 - RNA, 19 nt, Homo sapiens
  misc_RNA (1)...(19): siRNA sense strand
guccagauauaucaguuuc

SEQ ID NO: 1908349 - RNA, 19 nt, Homo sapiens
  misc_RNA (1)...(19): siRNA sense strand
gccgauaguagaauauauu

SEQ ID NO: 1908350 - RNA, 19 nt, Homo sapiens
  misc_RNA (1)...(19): siRNA sense strand
caacaccaaauuugaaagu

SEQ ID NO: 1908351 - RNA, 19 nt, Homo sapiens
  misc_RNA (1)...(19): siRNA sense strand
ggugaacaucauuccaaua

SEQ ID NO: 1908352 - RNA, 19 nt, Homo sapiens
  misc_RNA (1)...(19): siRNA sense strand
gcggacacaccaagaagaa

SEQ ID NO: 1908353 - RNA, 19 nt, Homo sapiens
  misc_RNA (1)...(19): siRNA sense strand
uuaaggaggcagagaaaga

SEQ ID NO: 1908354 - RNA, 19 nt, Homo sapiens
  misc_RNA (1)...(19): siRNA sense strand
gcaaacccuucagucuuca

SEQ ID NO: 1908355 - RNA, 19 nt, Homo sapiens
  misc_RNA (1)...(19): siRNA sense strand
ugacaccauugccaagaau

SEQ ID NO: 1908356 - RNA, 19 nt, Homo sapiens
  misc_RNA (1)...(19): siRNA sense strand
aaaugcaagcuucacauaa

SEQ ID NO: 1908357 - RNA, 19 nt, Homo sapiens
  misc_RNA (1)...(19): siRNA sense strand
agacaggcauuggcaaauc

SEQ ID NO: 1908358 - RNA, 19 nt, Homo sapiens
  misc_RNA (1)...(19): siRNA sense strand
acacugacccugacagcaa

SEQ ID NO: 1908359 - RNA, 19 nt, Homo sapiens
  misc_RNA (1)...(19): siRNA sense strand
uggugcagguugagaauga

SEQ ID NO: 1908360 - RNA, 19 nt, Homo sapiens
  misc_RNA (1)...(19): siRNA sense strand
gacaguaaggugaacauca

SEQ ID NO: 1908361 - RNA, 19 nt, Homo sapiens
  misc_RNA (1)...(19): siRNA sense strand
guuaauggacacuuuguuc

SEQ ID NO: 1908362 - RNA, 19 nt, Homo sapiens
  misc_RNA (1)...(19): siRNA sense strand
ggagaccagauaaauaaag

SEQ ID NO: 1908363 - RNA, 19 nt, Homo sapiens
  misc_RNA (1)...(19): siRNA sense strand
caagaaagacaaggauaag

SEQ ID NO: 1908364 - RNA, 19 nt, Homo sapiens
  misc_RNA (1)...(19): siRNA sense strand
gcgugaacauggaggacuu

SEQ ID NO: 1908365 - RNA, 19 nt, Homo sapiens
  misc_RNA (1)...(19): siRNA sense strand
ugugaaacuucgagagaug

SEQ ID NO: 1908366 - RNA, 19 nt, Homo sapiens
  misc_RNA (1)...(19): siRNA sense strand
aaacgguggcagagauuaa

SEQ ID NO: 1908367 - RNA, 19 nt, Homo sapiens
  misc_RNA (1)...(19): siRNA sense strand
ugcacaaauucaagaguaa

SEQ ID NO: 1908368 - RNA, 19 nt, Homo sapiens
  misc_RNA (1)...(19): siRNA sense strand
uaaacguucucucuucaac

SEQ ID NO: 1908369 - RNA, 19 nt, Homo sapiens
  misc_RNA (1)...(19): siRNA sense strand
cuacuggacauucacuaaa

SEQ ID NO: 1908370 - RNA, 19 nt, Homo sapiens
  misc_RNA (1)...(19): siRNA sense strand
gaacugcagaagaaagaag

SEQ ID NO: 1908371 - RNA, 19 nt, Homo sapiens
  misc_RNA (1)...(19): siRNA sense strand
agcaaacccuucagucuuc

SEQ ID NO: 1908372 - RNA, 19 nt, Homo sapiens
  misc_RNA (1)...(19): siRNA sense strand
ggugaagauuggcaacaag

SEQ ID NO: 1908373 - RNA, 19 nt, Homo sapiens
  misc_RNA (1)...(19): siRNA sense strand
aaagugacccagcuacuca

SEQ ID NO: 1908374 - RNA, 19 nt, Homo sapiens
  misc_RNA (1)...(19): siRNA sense strand
caacaaugaguguccaucu

SEQ ID NO: 1908375 - RNA, 19 nt, Homo sapiens
  misc_RNA (1)...(19): siRNA sense strand
uaauggacacuuuguucaa

SEQ ID NO: 1908376 - RNA, 19 nt, Homo sapiens
  misc_RNA (1)...(19): siRNA sense strand
cagcaaaccaagaaagaca

SEQ ID NO: 1908377 - RNA, 19 nt, Homo sapiens
  misc_RNA (1)...(19): siRNA sense strand
ggacacaccaagaagaaaa

SEQ ID NO: 1908378 - RNA, 19 nt, Homo sapiens
  misc_RNA (1)...(19): siRNA sense strand
ggagaacugcagaagaaag

SEQ ID NO: 1908379 - RNA, 19 nt, Homo sapiens
  misc_RNA (1)...(19): siRNA sense strand
caagaaugaacugcacaaa

SEQ ID NO: 1908380 - RNA, 19 nt, Homo sapiens
  misc_RNA (1)...(19): siRNA sense strand
ugcaaaagcugacaccauu

SEQ ID NO: 1908381 - RNA, 19 nt, Homo sapiens
  misc_RNA (1)...(19): siRNA sense strand
guucgaggccuaccugcaa

SEQ ID NO: 1908382 - RNA, 19 nt, Homo sapiens
  misc_RNA (1)...(19): siRNA sense strand
guaccgacgcuguaagcuu

SEQ ID NO: 1908383 - RNA, 19 nt, Homo sapiens
  misc_RNA (1)...(19): siRNA sense strand
gagagugaaggagaaagaa

SEQ ID NO: 1908384 - RNA, 19 nt, Homo sapiens
  misc_RNA (1)...(19): siRNA sense strand
cagaggaggugaugugcua

SEQ ID NO: 1908385 - RNA, 19 nt, Homo sapiens
  misc_RNA (1)...(19): siRNA sense strand
ggagcucuaugccucagua

SEQ ID NO: 1908386 - RNA, 19 nt, Homo sapiens
  misc_RNA (1)...(19): siRNA sense strand
gaagaggucccgcuguaug

SEQ ID NO: 1908387 - RNA, 19 nt, Homo sapiens
  misc_RNA (1)...(19): siRNA sense strand
uggaagaggucccgcugua

SEQ ID NO: 1908388 - RNA, 19 nt, Homo sapiens
  misc_RNA (1)...(19): siRNA sense strand
gaaccugcauuaucuacag

SEQ ID NO: 1908389 - RNA, 19 nt, Homo sapiens
  misc_RNA (1)...(19): siRNA sense strand
caggacggcugucucaaga

SEQ ID NO: 1908390 - RNA, 19 nt, Homo sapiens
  misc_RNA (1)...(19): siRNA sense strand
gaggugaugugcuauacca

SEQ ID NO: 1908391 - RNA, 19 nt, Homo sapiens
  misc_RNA (1)...(19): siRNA sense strand
gcucuaugccucaguaugu

SEQ ID NO: 1908392 - RNA, 19 nt, Homo sapiens
  misc_RNA (1)...(19): siRNA sense strand
gaucaggccuaugccaaca

SEQ ID NO: 1908393 - RNA, 19 nt, Homo sapiens
  misc_RNA (1)...(19): siRNA sense strand
gaggaggugaugugcuaua

SEQ ID NO: 1908394 - RNA, 19 nt, Homo sapiens
  misc_RNA (1)...(19): siRNA sense strand
uguaugggaaccugcauua

SEQ ID NO: 1908395 - RNA, 19 nt, Homo sapiens
  misc_RNA (1)...(19): siRNA sense strand
ggaagaggucccgcuguau

SEQ ID NO: 1908396 - RNA, 19 nt, Homo sapiens
  misc_RNA (1)...(19): siRNA sense strand
gcugugacgcugcuauuuc

SEQ ID NO: 1908397 - RNA, 19 nt, Homo sapiens
  misc_RNA (1)...(19): siRNA sense strand
caacugcacggaucuacuc

SEQ ID NO: 1908398 - RNA, 19 nt, Homo sapiens
  misc_RNA (1)...(19): siRNA sense strand
ccagcaggauccaacucuu

SEQ ID NO: 1908399 - RNA, 19 nt, Homo sapiens
  misc_RNA (1)...(19): siRNA sense strand
cagcaggauccaacucuug

SEQ ID NO: 1908400 - RNA, 19 nt, Homo sapiens
  misc_RNA (1)...(19): siRNA sense strand
uaugggaaccugcauuauc

SEQ ID NO: 1908401 - RNA, 19 nt, Homo sapiens
  misc_RNA (1)...(19): siRNA sense strand
gcuggacucugagccaaag

SEQ ID NO: 1908402 - RNA, 19 nt, Homo sapiens
  misc_RNA (1)...(19): siRNA sense strand
gggcugugacgcugcuauu

SEQ ID NO: 1908403 - RNA, 19 nt, Homo sapiens
  misc_RNA (1)...(19): siRNA sense strand
augggaaccugcauuaucu

SEQ ID NO: 1908404 - RNA, 19 nt, Homo sapiens
  misc_RNA (1)...(19): siRNA sense strand
cgacaacugcacggaucua

SEQ ID NO: 1908405 - RNA, 19 nt, Homo sapiens
  misc_RNA (1)...(19): siRNA sense strand
ggacaaagacaaagcgaaa

SEQ ID NO: 1908406 - RNA, 19 nt, Homo sapiens
  misc_RNA (1)...(19): siRNA sense strand
uggaaaggauccuaaagaa

SEQ ID NO: 1908407 - RNA, 19 nt, Homo sapiens
  misc_RNA (1)...(19): siRNA sense strand
aaagucagcuggacgaagu

SEQ ID NO: 1908408 - RNA, 19 nt, Homo sapiens
  misc_RNA (1)...(19): siRNA sense strand
gagaagcggcaaauggaaa

SEQ ID NO: 1908409 - RNA, 19 nt, Homo sapiens
  misc_RNA (1)...(19): siRNA sense strand
caaauggaaaggauccuaa

SEQ ID NO: 1908410 - RNA, 19 nt, Homo sapiens
  misc_RNA (1)...(19): siRNA sense strand
ugaccaagcggaagaagaa

SEQ ID NO: 1908411 - RNA, 19 nt, Homo sapiens
  misc_RNA (1)...(19): siRNA sense strand
aaagaaggacaaagacaaa

SEQ ID NO: 1908412 - RNA, 19 nt, Homo sapiens
  misc_RNA (1)...(19): siRNA sense strand
ggaaaggauccuaaagaag

SEQ ID NO: 1908413 - RNA, 19 nt, Homo sapiens
  misc_RNA (1)...(19): siRNA sense strand
cgaaacuccuggaagcaau

SEQ ID NO: 1908414 - RNA, 19 nt, Homo sapiens
  misc_RNA (1)...(19): siRNA sense strand
gcaaauggaaaggauccua

SEQ ID NO: 1908415 - RNA, 19 nt, Homo sapiens
  misc_RNA (1)...(19): siRNA sense strand
ggagaagcggcaaauggaa

SEQ ID NO: 1908416 - RNA, 19 nt, Homo sapiens
  misc_RNA (1)...(19): siRNA sense strand
ggagugaccaagcggaaga

SEQ ID NO: 1908417 - RNA, 19 nt, Homo sapiens
  misc_RNA (1)...(19): siRNA sense strand
caacagacaccuggacaca

SEQ ID NO: 1908418 - RNA, 19 nt, Homo sapiens
  misc_RNA (1)...(19): siRNA sense strand
gcauuacgacauucccaaa

SEQ ID NO: 1908419 - RNA, 19 nt, Homo sapiens
  misc_RNA (1)...(19): siRNA sense strand
gcagagaguggaggacuuc

SEQ ID NO: 1908420 - RNA, 19 nt, Homo sapiens
  misc_RNA (1)...(19): siRNA sense strand
cacggagcauuacgacauu

SEQ ID NO: 1908421 - RNA, 19 nt, Homo sapiens
  misc_RNA (1)...(19): siRNA sense strand
ucacggagcauuacgacau

SEQ ID NO: 1908422 - RNA, 19 nt, Homo sapiens
  misc_RNA (1)...(19): siRNA sense strand
acacacucacggagcauua

SEQ ID NO: 1908423 - RNA, 19 nt, Homo sapiens
  misc_RNA (1)...(19): siRNA sense strand
gaaacuccuggaagcaaug

SEQ ID NO: 1908424 - RNA, 19 nt, Homo sapiens
  misc_RNA (1)...(19): siRNA sense strand
acagacaccuggacacacu

SEQ ID NO: 1908425 - RNA, 19 nt, Homo sapiens
  misc_RNA (1)...(19): siRNA sense strand
gcgaaacuccuggaagcaa

SEQ ID NO: 1908426 - RNA, 19 nt, Homo sapiens
  misc_RNA (1)...(19): siRNA sense strand
gcaaugggaacgagcaaaa

SEQ ID NO: 1908427 - RNA, 19 nt, Homo sapiens
  misc_RNA (1)...(19): siRNA sense strand
caggagaagcggcaaaugg

SEQ ID NO: 1908428 - RNA, 19 nt, Homo sapiens
  misc_RNA (1)...(19): siRNA sense strand
caaagcgaaacuccuggaa

SEQ ID NO: 1908429 - RNA, 19 nt, Homo sapiens
  misc_RNA (1)...(19): siRNA sense strand
aaauggaaaggauccuaaa

SEQ ID NO: 1908430 - RNA, 19 nt, Homo sapiens
  misc_RNA (1)...(19): siRNA sense strand
uuacgacauucccaaaguc

SEQ ID NO: 1908431 - RNA, 19 nt, Homo sapiens
  misc_RNA (1)...(19): siRNA sense strand
uggaggacuucaacagaca

SEQ ID NO: 1908432 - RNA, 19 nt, Homo sapiens
  misc_RNA (1)...(19): siRNA sense strand
ccuaaagaaggcauccaaa

SEQ ID NO: 1908433 - RNA, 19 nt, Homo sapiens
  misc_RNA (1)...(19): siRNA sense strand
gagaguggaggacuucaac

SEQ ID NO: 1908434 - RNA, 19 nt, Homo sapiens
  misc_RNA (1)...(19): siRNA sense strand
gcaggagaagcggcaaaug

SEQ ID NO: 1908435 - RNA, 19 nt, Homo sapiens
  misc_RNA (1)...(19): siRNA sense strand
ccagguagaugaucauuua

SEQ ID NO: 1908436 - RNA, 19 nt, Homo sapiens
  misc_RNA (1)...(19): siRNA sense strand
aaacagauauugccuagaa

SEQ ID NO: 1908437 - RNA, 19 nt, Homo sapiens
  misc_RNA (1)...(19): siRNA sense strand
ugaaggaacugacaugaaa

SEQ ID NO: 1908438 - RNA, 19 nt, Homo sapiens
  misc_RNA (1)...(19): siRNA sense strand
gcucgaagcugaagcaguu

SEQ ID NO: 1908439 - RNA, 19 nt, Homo sapiens
  misc_RNA (1)...(19): siRNA sense strand
gauguucucuuugcuguua

SEQ ID NO: 1908440 - RNA, 19 nt, Homo sapiens
  misc_RNA (1)...(19): siRNA sense strand
gaacugacaugaaagacau

SEQ ID NO: 1908441 - RNA, 19 nt, Homo sapiens
  misc_RNA (1)...(19): siRNA sense strand
gaaaagagauggacaguca

SEQ ID NO: 1908442 - RNA, 19 nt, Homo sapiens
  misc_RNA (1)...(19): siRNA sense strand
caacauguuugucucgaaa

SEQ ID NO: 1908443 - RNA, 19 nt, Homo sapiens
  misc_RNA (1)...(19): siRNA sense strand
gaaacgcacugcuucaaag

SEQ ID NO: 1908444 - RNA, 19 nt, Homo sapiens
  misc_RNA (1)...(19): siRNA sense strand
caaaggaaagaaacagaua

SEQ ID NO: 1908445 - RNA, 19 nt, Homo sapiens
  misc_RNA (1)...(19): siRNA sense strand
gaaacagucuacuccuugu

SEQ ID NO: 1908446 - RNA, 19 nt, Homo sapiens
  misc_RNA (1)...(19): siRNA sense strand
uaaaugauguucucuuugc

SEQ ID NO: 1908447 - RNA, 19 nt, Homo sapiens
  misc_RNA (1)...(19): siRNA sense strand
cggaugauguggccuauau

SEQ ID NO: 1908448 - RNA, 19 nt, Homo sapiens
  misc_RNA (1)...(19): siRNA sense strand
ggaaacgcacugcuucaaa

SEQ ID NO: 1908449 - RNA, 19 nt, Homo sapiens
  misc_RNA (1)...(19): siRNA sense strand
gauguggccuauaucaaug

SEQ ID NO: 1908450 - RNA, 19 nt, Homo sapiens
  misc_RNA (1)...(19): siRNA sense strand
cugaagcaguuguaaauga

SEQ ID NO: 1908451 - RNA, 19 nt, Homo sapiens
  misc_RNA (1)...(19): siRNA sense strand
gaaacaaaggaaagaaaca

SEQ ID NO: 1908452 - RNA, 19 nt, Homo sapiens
  misc_RNA (1)...(19): siRNA sense strand
ggaaagaaacagauauugc

SEQ ID NO: 1908453 - RNA, 19 nt, Homo sapiens
  misc_RNA (1)...(19): siRNA sense strand
ugaagcaguuguaaaugau

SEQ ID NO: 1908454 - RNA, 19 nt, Homo sapiens
  misc_RNA (1)...(19): siRNA sense strand
ccauggagcuaagcaguau

SEQ ID NO: 1908455 - RNA, 19 nt, Homo sapiens
  misc_RNA (1)...(19): siRNA sense strand
uaagcaguaugucaggauu

SEQ ID NO: 1908456 - RNA, 19 nt, Homo sapiens
  misc_RNA (1)...(19): siRNA sense strand
cagacucccuaccaugaaa

SEQ ID NO: 1908457 - RNA, 19 nt, Homo sapiens
  misc_RNA (1)...(19): siRNA sense strand
guaaaugauguucucuuug

SEQ ID NO: 1908458 - RNA, 19 nt, Homo sapiens
  misc_RNA (1)...(19): siRNA sense strand
ggaaacaaaggaaagaaac

SEQ ID NO: 1908459 - RNA, 19 nt, Homo sapiens
  misc_RNA (1)...(19): siRNA sense strand
ggaacugacaugaaagaca

SEQ ID NO: 1908460 - RNA, 19 nt, Homo sapiens
  misc_RNA (1)...(19): siRNA sense strand
gguagaugaucauuuacag

SEQ ID NO: 1908461 - RNA, 19 nt, Homo sapiens
  misc_RNA (1)...(19): siRNA sense strand
gaagcugaagcaguuguaa

SEQ ID NO: 1908462 - RNA, 19 nt, Homo sapiens
  misc_RNA (1)...(19): siRNA sense strand
ggagcuaagcaguauguca

SEQ ID NO: 1908463 - RNA, 19 nt, Homo sapiens
  misc_RNA (1)...(19): siRNA sense strand
guaaucccauggagcuaag

SEQ ID NO: 1908464 - RNA, 19 nt, Homo sapiens
  misc_RNA (1)...(19): siRNA sense strand
gcugaacgguuuugaagga

SEQ ID NO: 1908465 - RNA, 19 nt, Homo sapiens
  misc_RNA (1)...(19): siRNA sense strand
guagaugaucauuuacaga

SEQ ID NO: 1908466 - RNA, 19 nt, Homo sapiens
  misc_RNA (1)...(19): siRNA sense strand
gaagcaguuguaaaugaug

SEQ ID NO: 1908467 - RNA, 19 nt, Homo sapiens
  misc_RNA (1)...(19): siRNA sense strand
uacagacucccuaccauga

SEQ ID NO: 1908468 - RNA, 19 nt, Homo sapiens
  misc_RNA (1)...(19): siRNA sense strand
ucucuuugcuguuaacaac

SEQ ID NO: 1908469 - RNA, 19 nt, Homo sapiens
  misc_RNA (1)...(19): siRNA sense strand
ggcuggugcugguacagaa

SEQ ID NO: 1908470 - RNA, 19 nt, Homo sapiens
  misc_RNA (1)...(19): siRNA sense strand
agacuggaaagcuuugaaa

SEQ ID NO: 1908471 - RNA, 19 nt, Homo sapiens
  misc_RNA (1)...(19): siRNA sense strand
uucaaagacuggaaagcuu

SEQ ID NO: 1908472 - RNA, 19 nt, Homo sapiens
  misc_RNA (1)...(19): siRNA sense strand
gcucaaggugguaggcuau

SEQ ID NO: 1908473 - RNA, 19 nt, Homo sapiens
  misc_RNA (1)...(19): siRNA sense strand
cuauaucaauguggaaaca

SEQ ID NO: 1908474 - RNA, 19 nt, Homo sapiens
  misc_RNA (1)...(19): siRNA sense strand
uaugucaggauuugaagaa

SEQ ID NO: 1908475 - RNA, 19 nt, Homo sapiens
  misc_RNA (1)...(19): siRNA sense strand
gaaggaacugacaugaaag

SEQ ID NO: 1908476 - RNA, 19 nt, Homo sapiens
  misc_RNA (1)...(19): siRNA sense strand
uggaaacaaaggaaagaaa

SEQ ID NO: 1908477 - RNA, 19 nt, Homo sapiens
  misc_RNA (1)...(19): siRNA sense strand
aaagagauggacagucaug

SEQ ID NO: 1908478 - RNA, 19 nt, Homo sapiens
  misc_RNA (1)...(19): siRNA sense strand
gucaggauuugaagaaggu

SEQ ID NO: 1908479 - RNA, 19 nt, Homo sapiens
  misc_RNA (1)...(19): siRNA sense strand
cgaagcugaagcaguugua

SEQ ID NO: 1908480 - RNA, 19 nt, Homo sapiens
  misc_RNA (1)...(19): siRNA sense strand
aaacgcacugcuucaaaga

SEQ ID NO: 1908481 - RNA, 19 nt, Homo sapiens
  misc_RNA (1)...(19): siRNA sense strand
gucuacuccuuguuggaua

SEQ ID NO: 1908482 - RNA, 19 nt, Homo sapiens
  misc_RNA (1)...(19): siRNA sense strand
caguaugucaggauuugaa

SEQ ID NO: 1908483 - RNA, 19 nt, Homo sapiens
  misc_RNA (1)...(19): siRNA sense strand
aagcaguuguaaaugaugu

SEQ ID NO: 1908484 - RNA, 19 nt, Homo sapiens
  misc_RNA (1)...(19): siRNA sense strand
caauguggaaacaaaggaa

SEQ ID NO: 1908485 - RNA, 19 nt, Homo sapiens
  misc_RNA (1)...(19): siRNA sense strand
ccgagaagcauuuggaaac

SEQ ID NO: 1908486 - RNA, 19 nt, Homo sapiens
  misc_RNA (1)...(19): siRNA sense strand
cgagaagcauuuggaaacg

SEQ ID NO: 1908487 - RNA, 19 nt, Homo sapiens
  misc_RNA (1)...(19): siRNA sense strand
acaaaggaaagaaacagau

SEQ ID NO: 1908488 - RNA, 19 nt, Homo sapiens
  misc_RNA (1)...(19): siRNA sense strand
gcugaagcaguuguaaaug

SEQ ID NO: 1908489 - RNA, 19 nt, Homo sapiens
  misc_RNA (1)...(19): siRNA sense strand
augaaacagucuacuccuu

SEQ ID NO: 1908490 - RNA, 19 nt, Homo sapiens
  misc_RNA (1)...(19): siRNA sense strand
ggugguaggcuaugcuuuu

SEQ ID NO: 1908491 - RNA, 19 nt, Homo sapiens
  misc_RNA (1)...(19): siRNA sense strand
gaaagacaugaggcucgaa

SEQ ID NO: 1908492 - RNA, 19 nt, Homo sapiens
  misc_RNA (1)...(19): siRNA sense strand
gugcugguacagaauguug

SEQ ID NO: 1908493 - RNA, 19 nt, Homo sapiens
  misc_RNA (1)...(19): siRNA sense strand
agcaguaugucaggauuug

SEQ ID NO: 1908494 - RNA, 19 nt, Homo sapiens
  misc_RNA (1)...(19): siRNA sense strand
cuaccgagaagcauuugga

SEQ ID NO: 1908495 - RNA, 19 nt, Homo sapiens
  misc_RNA (1)...(19): siRNA sense strand
aagcugaagcaguuguaaa

SEQ ID NO: 1908496 - RNA, 19 nt, Homo sapiens
  misc_RNA (1)...(19): siRNA sense strand
gcaaagagguccagguuau

SEQ ID NO: 1908497 - RNA, 19 nt, Homo sapiens
  misc_RNA (1)...(19): siRNA sense strand
gacaauaggugcagguaua

SEQ ID NO: 1908498 - RNA, 19 nt, Homo sapiens
  misc_RNA (1)...(19): siRNA sense strand
ucacaaagcuucuccaaga

SEQ ID NO: 1908499 - RNA, 19 nt, Homo sapiens
  misc_RNA (1)...(19): siRNA sense strand
gcacaagcguuuacagaaa

SEQ ID NO: 1908500 - RNA, 19 nt, Homo sapiens
  misc_RNA (1)...(19): siRNA sense strand
aaggaaaccucuaucauua

SEQ ID NO: 1908501 - RNA, 19 nt, Homo sapiens
  misc_RNA (1)...(19): siRNA sense strand
acaaugagcuucuggauga

SEQ ID NO: 1908502 - RNA, 19 nt, Homo sapiens
  misc_RNA (1)...(19): siRNA sense strand
ucaauaagcugcuggaaga

SEQ ID NO: 1908503 - RNA, 19 nt, Homo sapiens
  misc_RNA (1)...(19): siRNA sense strand
gaaugaaguuccuguguga

SEQ ID NO: 1908504 - RNA, 19 nt, Homo sapiens
  misc_RNA (1)...(19): siRNA sense strand
ggaagcaacugguagaaau

SEQ ID NO: 1908505 - RNA, 19 nt, Homo sapiens
  misc_RNA (1)...(19): siRNA sense strand
gauccugugugaacaaaua

SEQ ID NO: 1908506 - RNA, 19 nt, Homo sapiens
  misc_RNA (1)...(19): siRNA sense strand
ggaccuuuguuccauauuu

SEQ ID NO: 1908507 - RNA, 19 nt, Homo sapiens
  misc_RNA (1)...(19): siRNA sense strand
uaacguaucugacccuuca

SEQ ID NO: 1908508 - RNA, 19 nt, Homo sapiens
  misc_RNA (1)...(19): siRNA sense strand
gaaauaucccugcacuuaa

SEQ ID NO: 1908509 - RNA, 19 nt, Homo sapiens
  misc_RNA (1)...(19): siRNA sense strand
gagugaagaugcuguuuga

SEQ ID NO: 1908510 - RNA, 19 nt, Homo sapiens
  misc_RNA (1)...(19): siRNA sense strand
ucacaagacuguaacguau

SEQ ID NO: 1908511 - RNA, 19 nt, Homo sapiens
  misc_RNA (1)...(19): siRNA sense strand
aaucaagccuguuguguuu

SEQ ID NO: 1908512 - RNA, 19 nt, Homo sapiens
  misc_RNA (1)...(19): siRNA sense strand
gaagagagccaaggaguug

SEQ ID NO: 1908513 - RNA, 19 nt, Homo sapiens
  misc_RNA (1)...(19): siRNA sense strand
gaaaggccuucuucucaug

SEQ ID NO: 1908514 - RNA, 19 nt, Homo sapiens
  misc_RNA (1)...(19): siRNA sense strand
ggaccuugcugcuguguug

SEQ ID NO: 1908515 - RNA, 19 nt, Homo sapiens
  misc_RNA (1)...(19): siRNA sense strand
gcaaugaccaggaugauau

SEQ ID NO: 1908516 - RNA, 19 nt, Homo sapiens
  misc_RNA (1)...(19): siRNA sense strand
agaaauaucccugcacuua

SEQ ID NO: 1908517 - RNA, 19 nt, Homo sapiens
  misc_RNA (1)...(19): siRNA sense strand
aaauaucccugcacuuaaa

SEQ ID NO: 1908518 - RNA, 19 nt, Homo sapiens
  misc_RNA (1)...(19): siRNA sense strand
ugaccaggaugauauguuu

SEQ ID NO: 1908519 - RNA, 19 nt, Homo sapiens
  misc_RNA (1)...(19): siRNA sense strand
gcacuuaaaugcaguagac

SEQ ID NO: 1908520 - RNA, 19 nt, Homo sapiens
  misc_RNA (1)...(19): siRNA sense strand
ggugauggcucaguucaaa

SEQ ID NO: 1908521 - RNA, 19 nt, Homo sapiens
  misc_RNA (1)...(19): siRNA sense strand
ggaugagggugcuaaguug

SEQ ID NO: 1908522 - RNA, 19 nt, Homo sapiens
  misc_RNA (1)...(19): siRNA sense strand
gaacaaauagccucugaca

SEQ ID NO: 1908523 - RNA, 19 nt, Homo sapiens
  misc_RNA (1)...(19): siRNA sense strand
ggaaaccacugugcaacuu

SEQ ID NO: 1908524 - RNA, 19 nt, Homo sapiens
  misc_RNA (1)...(19): siRNA sense strand
ccacaacugauuauugaua

SEQ ID NO: 1908525 - RNA, 19 nt, Homo sapiens
  misc_RNA (1)...(19): siRNA sense strand
aaaggaaaccucuaucauu

SEQ ID NO: 1908526 - RNA, 19 nt, Homo sapiens
  misc_RNA (1)...(19): siRNA sense strand
gaaagaacgaccaccucua

SEQ ID NO: 1908527 - RNA, 19 nt, Homo sapiens
  misc_RNA (1)...(19): siRNA sense strand
gaauguaaccugcgauauc

SEQ ID NO: 1908528 - RNA, 19 nt, Homo sapiens
  misc_RNA (1)...(19): siRNA sense strand
ggacggaccuuuguuccau

SEQ ID NO: 1908529 - RNA, 19 nt, Homo sapiens
  misc_RNA (1)...(19): siRNA sense strand
gaaacgaaaggaaauguca

SEQ ID NO: 1908530 - RNA, 19 nt, Homo sapiens
  misc_RNA (1)...(19): siRNA sense strand
ggaaaccucuaucauuagg

SEQ ID NO: 1908531 - RNA, 19 nt, Homo sapiens
  misc_RNA (1)...(19): siRNA sense strand
gcguaaaccucuccgacaa

SEQ ID NO: 1908532 - RNA, 19 nt, Homo sapiens
  misc_RNA (1)...(19): siRNA sense strand
guaaaccucuccgacaaug

SEQ ID NO: 1908533 - RNA, 19 nt, Homo sapiens
  misc_RNA (1)...(19): siRNA sense strand
acaagaugcugaucccauu

SEQ ID NO: 1908534 - RNA, 19 nt, Homo sapiens
  misc_RNA (1)...(19): siRNA sense strand
gugaagaugcuguuugaaa

SEQ ID NO: 1908535 - RNA, 19 nt, Homo sapiens
  misc_RNA (1)...(19): siRNA sense strand
ggacaucaaacaggaauug

SEQ ID NO: 1908536 - RNA, 19 nt, Homo sapiens
  misc_RNA (1)...(19): siRNA sense strand
gggugaaguuucuguguga

SEQ ID NO: 1908537 - RNA, 19 nt, Homo sapiens
  misc_RNA (1)...(19): siRNA sense strand
gcagguauauauugaagac

SEQ ID NO: 1908538 - RNA, 19 nt, Homo sapiens
  misc_RNA (1)...(19): siRNA sense strand
gaaauccucaccacccauu

SEQ ID NO: 1908539 - RNA, 19 nt, Homo sapiens
  misc_RNA (1)...(19): siRNA sense strand
gaaugucacugcgucugaa

SEQ ID NO: 1908540 - RNA, 19 nt, Homo sapiens
  misc_RNA (1)...(19): siRNA sense strand
ggaggagccgaucuacaua

SEQ ID NO: 1908541 - RNA, 19 nt, Homo sapiens
  misc_RNA (1)...(19): siRNA sense strand
gugaacaaauagccucuga

SEQ ID NO: 1908542 - RNA, 19 nt, Homo sapiens
  misc_RNA (1)...(19): siRNA sense strand
gaccuuuguuccauauuug

SEQ ID NO: 1908543 - RNA, 19 nt, Homo sapiens
  misc_RNA (1)...(19): siRNA sense strand
aggaggagcuggugaagga

SEQ ID NO: 1908544 - RNA, 19 nt, Homo sapiens
  misc_RNA (1)...(19): siRNA sense strand
gaugcgacauaaguuguaa

SEQ ID NO: 1908545 - RNA, 19 nt, Homo sapiens
  misc_RNA (1)...(19): siRNA sense strand
uuugaaaccuugacauguu

SEQ ID NO: 1908546 - RNA, 19 nt, Homo sapiens
  misc_RNA (1)...(19): siRNA sense strand
uaguaaggauccuguguga

SEQ ID NO: 1908547 - RNA, 19 nt, Homo sapiens
  misc_RNA (1)...(19): siRNA sense strand
cacacgagcuccagaagau

SEQ ID NO: 1908548 - RNA, 19 nt, Homo sapiens
  misc_RNA (1)...(19): siRNA sense strand
ggacaaccucauccacaaa

SEQ ID NO: 1908549 - RNA, 19 nt, Homo sapiens
  misc_RNA (1)...(19): siRNA sense strand
uuacagaaacgaaaggaaa

SEQ ID NO: 1908550 - RNA, 19 nt, Homo sapiens
  misc_RNA (1)...(19): siRNA sense strand
acccacaacugauuauuga

SEQ ID NO: 1908551 - RNA, 19 nt, Homo sapiens
  misc_RNA (1)...(19): siRNA sense strand
gaggagccgaucuacauaa

SEQ ID NO: 1908552 - RNA, 19 nt, Homo sapiens
  misc_RNA (1)...(19): siRNA sense strand
ggccacaccugggacauug

SEQ ID NO: 1908553 - RNA, 19 nt, Homo sapiens
  misc_RNA (1)...(19): siRNA sense strand
cugcagaccuuggugcuuu

SEQ ID NO: 1908554 - RNA, 19 nt, Homo sapiens
  misc_RNA (1)...(19): siRNA sense strand
gcacacgagcuccagaaga

SEQ ID NO: 1908555 - RNA, 19 nt, Homo sapiens
  misc_RNA (1)...(19): siRNA sense strand
ggagugaagaugcuguuug

SEQ ID NO: 1908556 - RNA, 19 nt, Homo sapiens
  misc_RNA (1)...(19): siRNA sense strand
aaaccacugugcaacuuga

SEQ ID NO: 1908557 - RNA, 19 nt, Homo sapiens
  misc_RNA (1)...(19): siRNA sense strand
guaaggauccugugugaac

SEQ ID NO: 1908558 - RNA, 19 nt, Homo sapiens
  misc_RNA (1)...(19): siRNA sense strand
gacggaccuuuguuccaua

SEQ ID NO: 1908559 - RNA, 19 nt, Homo sapiens
  misc_RNA (1)...(19): siRNA sense strand
uaaaugcaguagacguugu

SEQ ID NO: 1908560 - RNA, 19 nt, Homo sapiens
  misc_RNA (1)...(19): siRNA sense strand
ggaaaacugucaccuuaca

SEQ ID NO: 1908561 - RNA, 19 nt, Homo sapiens
  misc_RNA (1)...(19): siRNA sense strand
gguauauauugaagacgaa

SEQ ID NO: 1908562 - RNA, 19 nt, Homo sapiens
  misc_RNA (1)...(19): siRNA sense strand
ucucagugccucccuagua

SEQ ID NO: 1908563 - RNA, 19 nt, Homo sapiens
  misc_RNA (1)...(19): siRNA sense strand
gagggccuauuuccugaga

SEQ ID NO: 1908564 - RNA, 19 nt, Homo sapiens
  misc_RNA (1)...(19): siRNA sense strand
ugagcaaguucaaguaucu

SEQ ID NO: 1908565 - RNA, 19 nt, Homo sapiens
  misc_RNA (1)...(19): siRNA sense strand
ugaaucacauaggaguuaa

SEQ ID NO: 1908566 - RNA, 19 nt, Homo sapiens
  misc_RNA (1)...(19): siRNA sense strand
caaaggaugaagucagaga

SEQ ID NO: 1908567 - RNA, 19 nt, Homo sapiens
  misc_RNA (1)...(19): siRNA sense strand
gaaaccacugugcaacuug

SEQ ID NO: 1908568 - RNA, 19 nt, Homo sapiens
  misc_RNA (1)...(19): siRNA sense strand
cagaauguaaccugcgaua

SEQ ID NO: 1908569 - RNA, 19 nt, Homo sapiens
  misc_RNA (1)...(19): siRNA sense strand
ugauauguuucccgcauug

SEQ ID NO: 1908570 - RNA, 19 nt, Homo sapiens
  misc_RNA (1)...(19): siRNA sense strand
gaaaaugucacugcaggua

SEQ ID NO: 1908571 - RNA, 19 nt, Homo sapiens
  misc_RNA (1)...(19): siRNA sense strand
gauccaagcaggcuacuac

SEQ ID NO: 1908572 - RNA, 19 nt, Homo sapiens
  misc_RNA (1)...(19): siRNA sense strand
guucgugauugacggcuuu

SEQ ID NO: 1908573 - RNA, 19 nt, Homo sapiens
  misc_RNA (1)...(19): siRNA sense strand
gagcuggccuggagauagc

SEQ ID NO: 1908574 - RNA, 19 nt, Homo sapiens
  misc_RNA (1)...(19): siRNA sense strand
gcuggaagaaauagaagaa

SEQ ID NO: 1908575 - RNA, 19 nt, Homo sapiens
  misc_RNA (1)...(19): siRNA sense strand
ugagaugucugugguugug

SEQ ID NO: 1908576 - RNA, 19 nt, Homo sapiens
  misc_RNA (1)...(19): siRNA sense strand
ggaguuaagggaaugaagu

SEQ ID NO: 1908577 - RNA, 19 nt, Homo sapiens
  misc_RNA (1)...(19): siRNA sense strand
ucaaggcaaugaccaggau

SEQ ID NO: 1908578 - RNA, 19 nt, Homo sapiens
  misc_RNA (1)...(19): siRNA sense strand
cucagugccucccuaguaa

SEQ ID NO: 1908579 - RNA, 19 nt, Homo sapiens
  misc_RNA (1)...(19): siRNA sense strand
aaaugucacugcagguaau

SEQ ID NO: 1908580 - RNA, 19 nt, Homo sapiens
  misc_RNA (1)...(19): siRNA sense strand
gcaggcuacuacuccuuug

SEQ ID NO: 1908581 - RNA, 19 nt, Homo sapiens
  misc_RNA (1)...(19): siRNA sense strand
gguuauggcugagagauac

SEQ ID NO: 1908582 - RNA, 19 nt, Homo sapiens
  misc_RNA (1)...(19): siRNA sense strand
uagcaaagagguccagguu

SEQ ID NO: 1908583 - RNA, 19 nt, Homo sapiens
  misc_RNA (1)...(19): siRNA sense strand
aaagaacgaccaccucuag

SEQ ID NO: 1908584 - RNA, 19 nt, Homo sapiens
  misc_RNA (1)...(19): siRNA sense strand
gaucugaugggucuagcaa

SEQ ID NO: 1908585 - RNA, 19 nt, Homo sapiens
  misc_RNA (1)...(19): siRNA sense strand
gaagcaacugguagaaauc

SEQ ID NO: 1908586 - RNA, 19 nt, Homo sapiens
  misc_RNA (1)...(19): siRNA sense strand
gaguuaagggaaugaaguu

SEQ ID NO: 1908587 - RNA, 19 nt, Homo sapiens
  misc_RNA (1)...(19): siRNA sense strand
uuacagaagccaauugcaa

SEQ ID NO: 1908588 - RNA, 19 nt, Homo sapiens
  misc_RNA (1)...(19): siRNA sense strand
caggaugaguugagcaagu

SEQ ID NO: 1908589 - RNA, 19 nt, Homo sapiens
  misc_RNA (1)...(19): siRNA sense strand
agcaaaggaugaagucaga

SEQ ID NO: 1908590 - RNA, 19 nt, Homo sapiens
  misc_RNA (1)...(19): siRNA sense strand
ggcaaugaccaggaugaua

SEQ ID NO: 1908591 - RNA, 19 nt, Homo sapiens
  misc_RNA (1)...(19): siRNA sense strand
gucacaagacuguaacgua

SEQ ID NO: 1908592 - RNA, 19 nt, Homo sapiens
  misc_RNA (1)...(19): siRNA sense strand
ugaaucagacgccgagguu

SEQ ID NO: 1908593 - RNA, 19 nt, Homo sapiens
  misc_RNA (1)...(19): siRNA sense strand
cccagaaacuaaugcuaga

SEQ ID NO: 1908594 - RNA, 19 nt, Homo sapiens
  misc_RNA (1)...(19): siRNA sense strand
gaagagcuggccuggagau

SEQ ID NO: 1908595 - RNA, 19 nt, Homo sapiens
  misc_RNA (1)...(19): siRNA sense strand
gugcagguauauauugaag

SEQ ID NO: 1908596 - RNA, 19 nt, Homo sapiens
  misc_RNA (1)...(19): siRNA sense strand
caguauaccuugcauaaua

SEQ ID NO: 1908597 - RNA, 19 nt, Homo sapiens
  misc_RNA (1)...(19): siRNA sense strand
ggacuuacuucuauacaaa

SEQ ID NO: 1908598 - RNA, 19 nt, Homo sapiens
  misc_RNA (1)...(19): siRNA sense strand
gaagaaccaucuaguccua

SEQ ID NO: 1908599 - RNA, 19 nt, Homo sapiens
  misc_RNA (1)...(19): siRNA sense strand
gagauugggugcagaauau

SEQ ID NO: 1908600 - RNA, 19 nt, Homo sapiens
  misc_RNA (1)...(19): siRNA sense strand
gaaacaagcuauggaacaa

SEQ ID NO: 1908601 - RNA, 19 nt, Homo sapiens
  misc_RNA (1)...(19): siRNA sense strand
ggauuuaucuucaguguca

SEQ ID NO: 1908602 - RNA, 19 nt, Homo sapiens
  misc_RNA (1)...(19): siRNA sense strand
gaacuuacuuguugaccuu

SEQ ID NO: 1908603 - RNA, 19 nt, Homo sapiens
  misc_RNA (1)...(19): siRNA sense strand
gaaccaaacauccaguaua

SEQ ID NO: 1908604 - RNA, 19 nt, Homo sapiens
  misc_RNA (1)...(19): siRNA sense strand
gaccaggauuuaucuauuu

SEQ ID NO: 1908605 - RNA, 19 nt, Homo sapiens
  misc_RNA (1)...(19): siRNA sense strand
ggacaggcagaaauuauua

SEQ ID NO: 1908606 - RNA, 19 nt, Homo sapiens
  misc_RNA (1)...(19): siRNA sense strand
gaacccagaugaacaagau

SEQ ID NO: 1908607 - RNA, 19 nt, Homo sapiens
  misc_RNA (1)...(19): siRNA sense strand
caacagaccaugauaguga

SEQ ID NO: 1908608 - RNA, 19 nt, Homo sapiens
  misc_RNA (1)...(19): siRNA sense strand
ccaacugguucuaaucuua

SEQ ID NO: 1908609 - RNA, 19 nt, Homo sapiens
  misc_RNA (1)...(19): siRNA sense strand
gaacugccaagucaaauuu

SEQ ID NO: 1908610 - RNA, 19 nt, Homo sapiens
  misc_RNA (1)...(19): siRNA sense strand
guuuagaccuuaaggauaa

SEQ ID NO: 1908611 - RNA, 19 nt, Homo sapiens
  misc_RNA (1)...(19): siRNA sense strand
ggaccaggauuuaucuauu

SEQ ID NO: 1908612 - RNA, 19 nt, Homo sapiens
  misc_RNA (1)...(19): siRNA sense strand
gaacuucauugcucccaaa

SEQ ID NO: 1908613 - RNA, 19 nt, Homo sapiens
  misc_RNA (1)...(19): siRNA sense strand
gaaauuaccaguauaccuu

SEQ ID NO: 1908614 - RNA, 19 nt, Homo sapiens
  misc_RNA (1)...(19): siRNA sense strand
gaaauccagccguuauaua

SEQ ID NO: 1908615 - RNA, 19 nt, Homo sapiens
  misc_RNA (1)...(19): siRNA sense strand
caggagauauuacaagaaa

SEQ ID NO: 1908616 - RNA, 19 nt, Homo sapiens
  misc_RNA (1)...(19): siRNA sense strand
gaccaagagugcguuaaua

SEQ ID NO: 1908617 - RNA, 19 nt, Homo sapiens
  misc_RNA (1)...(19): siRNA sense strand
gaaacuugaugaucucuca

SEQ ID NO: 1908618 - RNA, 19 nt, Homo sapiens
  misc_RNA (1)...(19): siRNA sense strand
ggaaagucaugguauuaau

SEQ ID NO: 1908619 - RNA, 19 nt, Homo sapiens
  misc_RNA (1)...(19): siRNA sense strand
gcaaaugaaucagauagau

SEQ ID NO: 1908620 - RNA, 19 nt, Homo sapiens
  misc_RNA (1)...(19): siRNA sense strand
guacuaaauucuuccaaug

SEQ ID NO: 1908621 - RNA, 19 nt, Homo sapiens
  misc_RNA (1)...(19): siRNA sense strand
ucaagggacuuacuucuau

SEQ ID NO: 1908622 - RNA, 19 nt, Homo sapiens
  misc_RNA (1)...(19): siRNA sense strand
guaguaaaccuaucuguga

SEQ ID NO: 1908623 - RNA, 19 nt, Homo sapiens
  misc_RNA (1)...(19): siRNA sense strand
acacugauaugguugaauu

SEQ ID NO: 1908624 - RNA, 19 nt, Homo sapiens
  misc_RNA (1)...(19): siRNA sense strand
guaccgagguguucuacuu

SEQ ID NO: 1908625 - RNA, 19 nt, Homo sapiens
  misc_RNA (1)...(19): siRNA sense strand
gagaauacguggauaucug

SEQ ID NO: 1908626 - RNA, 19 nt, Homo sapiens
  misc_RNA (1)...(19): siRNA sense strand
acaaguaugucugcaauaa

SEQ ID NO: 1908627 - RNA, 19 nt, Homo sapiens
  misc_RNA (1)...(19): siRNA sense strand
cagguuagcuucaacucua

SEQ ID NO: 1908628 - RNA, 19 nt, Homo sapiens
  misc_RNA (1)...(19): siRNA sense strand
gacaggagauauuacaaga

SEQ ID NO: 1908629 - RNA, 19 nt, Homo sapiens
  misc_RNA (1)...(19): siRNA sense strand
gauggaagacagaaagaua

SEQ ID NO: 1908630 - RNA, 19 nt, Homo sapiens
  misc_RNA (1)...(19): siRNA sense strand
ggacaucuucagacuauuu

SEQ ID NO: 1908631 - RNA, 19 nt, Homo sapiens
  misc_RNA (1)...(19): siRNA sense strand
caacaaggguuaccuacca

SEQ ID NO: 1908632 - RNA, 19 nt, Homo sapiens
  misc_RNA (1)...(19): siRNA sense strand
uaguaaagcucaggcauuu

SEQ ID NO: 1908633 - RNA, 19 nt, Homo sapiens
  misc_RNA (1)...(19): siRNA sense strand
uaacaaguaugucugcaau

SEQ ID NO: 1908634 - RNA, 19 nt, Homo sapiens
  misc_RNA (1)...(19): siRNA sense strand
gaaggacuauguuccaaag

SEQ ID NO: 1908635 - RNA, 19 nt, Homo sapiens
  misc_RNA (1)...(19): siRNA sense strand
caagggacuuacuucuaua

SEQ ID NO: 1908636 - RNA, 19 nt, Homo sapiens
  misc_RNA (1)...(19): siRNA sense strand
caguagaccugagagaaua

SEQ ID NO: 1908637 - RNA, 19 nt, Homo sapiens
  misc_RNA (1)...(19): siRNA sense strand
gcggcuagcuuuacgagaa

SEQ ID NO: 1908638 - RNA, 19 nt, Homo sapiens
  misc_RNA (1)...(19): siRNA sense strand
uguggugucuguuguaaua

SEQ ID NO: 1908639 - RNA, 19 nt, Homo sapiens
  misc_RNA (1)...(19): siRNA sense strand
gcagauuccuugauuggau

SEQ ID NO: 1908640 - RNA, 19 nt, Homo sapiens
  misc_RNA (1)...(19): siRNA sense strand
uaaugcagauuccuugauu

SEQ ID NO: 1908641 - RNA, 19 nt, Homo sapiens
  misc_RNA (1)...(19): siRNA sense strand
uaacaggacuugaucuucu

SEQ ID NO: 1908642 - RNA, 19 nt, Homo sapiens
  misc_RNA (1)...(19): siRNA sense strand
aaaccuaucugugaucuga

SEQ ID NO: 1908643 - RNA, 19 nt, Homo sapiens
  misc_RNA (1)...(19): siRNA sense strand
gagguguucuacuuucuaa

SEQ ID NO: 1908644 - RNA, 19 nt, Homo sapiens
  misc_RNA (1)...(19): siRNA sense strand
gauggaauaucauuacaag

SEQ ID NO: 1908645 - RNA, 19 nt, Homo sapiens
  misc_RNA (1)...(19): siRNA sense strand
caaaggaguuaucaguuca

SEQ ID NO: 1908646 - RNA, 19 nt, Homo sapiens
  misc_RNA (1)...(19): siRNA sense strand
gaaaguugaugcaguagac

SEQ ID NO: 1908647 - RNA, 19 nt, Homo sapiens
  misc_RNA (1)...(19): siRNA sense strand
gagcaugucauuagcauug

SEQ ID NO: 1908648 - RNA, 19 nt, Homo sapiens
  misc_RNA (1)...(19): siRNA sense strand
gaucucucauuaccaagua

SEQ ID NO: 1908649 - RNA, 19 nt, Homo sapiens
  misc_RNA (1)...(19): siRNA sense strand
acaaacuccuugaugauuu

SEQ ID NO: 1908650 - RNA, 19 nt, Homo sapiens
  misc_RNA (1)...(19): siRNA sense strand
gaacccagcacagcagaua

SEQ ID NO: 1908651 - RNA, 19 nt, Homo sapiens
  misc_RNA (1)...(19): siRNA sense strand
uuacaaggauuuccaagug

SEQ ID NO: 1908652 - RNA, 19 nt, Homo sapiens
  misc_RNA (1)...(19): siRNA sense strand
ggagaaauaggacacacua

SEQ ID NO: 1908653 - RNA, 19 nt, Homo sapiens
  misc_RNA (1)...(19): siRNA sense strand
guaaagcucaggcauuuga

SEQ ID NO: 1908654 - RNA, 19 nt, Homo sapiens
  misc_RNA (1)...(19): siRNA sense strand
gaagguggaucuaguuucg

SEQ ID NO: 1908655 - RNA, 19 nt, Homo sapiens
  misc_RNA (1)...(19): siRNA sense strand
gacuugaucuucuuucuuc

SEQ ID NO: 1908656 - RNA, 19 nt, Homo sapiens
  misc_RNA (1)...(19): siRNA sense strand
auacaacacuuucagauuc

SEQ ID NO: 1908657 - RNA, 19 nt, Homo sapiens
  misc_RNA (1)...(19): siRNA sense strand
gcauacuccuucagucauu

SEQ ID NO: 1908658 - RNA, 19 nt, Homo sapiens
  misc_RNA (1)...(19): siRNA sense strand
ggagauauuacaagaaaug

SEQ ID NO: 1908659 - RNA, 19 nt, Homo sapiens
  misc_RNA (1)...(19): siRNA sense strand
ucugugaucugauaaguga

SEQ ID NO: 1908660 - RNA, 19 nt, Homo sapiens
  misc_RNA (1)...(19): siRNA sense strand
gaacagaacccagaugaac

SEQ ID NO: 1908661 - RNA, 19 nt, Homo sapiens
  misc_RNA (1)...(19): siRNA sense strand
ggaauaucauuacaaggau

SEQ ID NO: 1908662 - RNA, 19 nt, Homo sapiens
  misc_RNA (1)...(19): siRNA sense strand
cuacuggugucuuaguuaa

SEQ ID NO: 1908663 - RNA, 19 nt, Homo sapiens
  misc_RNA (1)...(19): siRNA sense strand
gaaaggaugaugaguccaa

SEQ ID NO: 1908664 - RNA, 19 nt, Homo sapiens
  misc_RNA (1)...(19): siRNA sense strand
ggccagaccuaagcaauug

SEQ ID NO: 1908665 - RNA, 19 nt, Homo sapiens
  misc_RNA (1)...(19): siRNA sense strand
gaagagggcaagacaagug

SEQ ID NO: 1908666 - RNA, 19 nt, Homo sapiens
  misc_RNA (1)...(19): siRNA sense strand
caagagugcguuaauaguu

SEQ ID NO: 1908667 - RNA, 19 nt, Homo sapiens
  misc_RNA (1)...(19): siRNA sense strand
ggugggaccuccaacucua

SEQ ID NO: 1908668 - RNA, 19 nt, Homo sapiens
  misc_RNA (1)...(19): siRNA sense strand
gcugugcccucaccugaaa

SEQ ID NO: 1908669 - RNA, 19 nt, Homo sapiens
  misc_RNA (1)...(19): siRNA sense strand
acaaaggaguuaucaguuc

SEQ ID NO: 1908670 - RNA, 19 nt, Homo sapiens
  misc_RNA (1)...(19): siRNA sense strand
guacaaauaacuccagaga

SEQ ID NO: 1908671 - RNA, 19 nt, Homo sapiens
  misc_RNA (1)...(19): siRNA sense strand
gauacaacacuuucagauu

SEQ ID NO: 1908672 - RNA, 19 nt, Homo sapiens
  misc_RNA (1)...(19): siRNA sense strand
gcaagacuuagauuacuuu

SEQ ID NO: 1908673 - RNA, 19 nt, Homo sapiens
  misc_RNA (1)...(19): siRNA sense strand
ggaaguguaaacugcaaua

SEQ ID NO: 1908674 - RNA, 19 nt, Homo sapiens
  misc_RNA (1)...(19): siRNA sense strand
uccaaucacuugugcuaua

SEQ ID NO: 1908675 - RNA, 19 nt, Homo sapiens
  misc_RNA (1)...(19): siRNA sense strand
gagccagccauguggauua

SEQ ID NO: 1908676 - RNA, 19 nt, Homo sapiens
  misc_RNA (1)...(19): siRNA sense strand
ugggaaaguugaugcagua

SEQ ID NO: 1908677 - RNA, 19 nt, Homo sapiens
  misc_RNA (1)...(19): siRNA sense strand
gaucauucccauucuacua

SEQ ID NO: 1908678 - RNA, 19 nt, Homo sapiens
  misc_RNA (1)...(19): siRNA sense strand
uaacaugucaucugcuuug

SEQ ID NO: 1908679 - RNA, 19 nt, Homo sapiens
  misc_RNA (1)...(19): siRNA sense strand
gaguuuccauugacacuga

SEQ ID NO: 1908680 - RNA, 19 nt, Homo sapiens
  misc_RNA (1)...(19): siRNA sense strand
ugaaaccgaugagaagauu

SEQ ID NO: 1908681 - RNA, 19 nt, Homo sapiens
  misc_RNA (1)...(19): siRNA sense strand
gaagaacauccaucucaug

SEQ ID NO: 1908682 - RNA, 19 nt, Homo sapiens
  misc_RNA (1)...(19): siRNA sense strand
aagauguucugaagacuuu

SEQ ID NO: 1908683 - RNA, 19 nt, Homo sapiens
  misc_RNA (1)...(19): siRNA sense strand
uguaugaacugccaaguca

SEQ ID NO: 1908684 - RNA, 19 nt, Homo sapiens
  misc_RNA (1)...(19): siRNA sense strand
cuacuuggguuccugauuc

SEQ ID NO: 1908685 - RNA, 19 nt, Homo sapiens
  misc_RNA (1)...(19): siRNA sense strand
ugaaaacacuugcaaagaa

SEQ ID NO: 1908686 - RNA, 19 nt, Homo sapiens
  misc_RNA (1)...(19): siRNA sense strand
gaacuugaugccuuucuga

SEQ ID NO: 1908687 - RNA, 19 nt, Homo sapiens
  misc_RNA (1)...(19): siRNA sense strand
cgacaaaguuccaaaaugu

SEQ ID NO: 1908688 - RNA, 19 nt, Homo sapiens
  misc_RNA (1)...(19): siRNA sense strand
gguauucaauggagcucua

SEQ ID NO: 1908689 - RNA, 19 nt, Homo sapiens
  misc_RNA (1)...(19): siRNA sense strand
aaggacaucuucagacuau

SEQ ID NO: 1908690 - RNA, 19 nt, Homo sapiens
  misc_RNA (1)...(19): siRNA sense strand
uggacaaacuccuugauga

SEQ ID NO: 1908691 - RNA, 19 nt, Homo sapiens
  misc_RNA (1)...(19): siRNA sense strand
uaaacacaguggaucauuc

SEQ ID NO: 1908692 - RNA, 19 nt, Homo sapiens
  misc_RNA (1)...(19): siRNA sense strand
ggacaaacuccuugaugau

SEQ ID NO: 1908693 - RNA, 19 nt, Homo sapiens
  misc_RNA (1)...(19): siRNA sense strand
gaagcaagaguauguguag

SEQ ID NO: 1908694 - RNA, 19 nt, Homo sapiens
  misc_RNA (1)...(19): siRNA sense strand
cagauacaauagaaaguga

SEQ ID NO: 1908695 - RNA, 19 nt, Homo sapiens
  misc_RNA (1)...(19): siRNA sense strand
gacucuaaaucgcaaauga

SEQ ID NO: 1908696 - RNA, 19 nt, Homo sapiens
  misc_RNA (1)...(19): siRNA sense strand
uaagaaggauuucagcaaa

SEQ ID NO: 1908697 - RNA, 19 nt, Homo sapiens
  misc_RNA (1)...(19): siRNA sense strand
gauaauggaguuggucuua

SEQ ID NO: 1908698 - RNA, 19 nt, Homo sapiens
  misc_RNA (1)...(19): siRNA sense strand
ugagaguccugccuuaauu

SEQ ID NO: 1908699 - RNA, 19 nt, Homo sapiens
  misc_RNA (1)...(19): siRNA sense strand
gcagggcuguuugcucuuu

SEQ ID NO: 1908700 - RNA, 19 nt, Homo sapiens
  misc_RNA (1)...(19): siRNA sense strand
gaggacgacuucaacuaug

SEQ ID NO: 1908701 - RNA, 19 nt, Homo sapiens
  misc_RNA (1)...(19): siRNA sense strand
acagugacuucaacaguuu

SEQ ID NO: 1908702 - RNA, 19 nt, Homo sapiens
  misc_RNA (1)...(19): siRNA sense strand
cacacucacugaugcauaa

SEQ ID NO: 1908703 - RNA, 19 nt, Homo sapiens
  misc_RNA (1)...(19): siRNA sense strand
cuacuuggauaucaucaau

SEQ ID NO: 1908704 - RNA, 19 nt, Homo sapiens
  misc_RNA (1)...(19): siRNA sense strand
gagaguccugccuuaauuu

SEQ ID NO: 1908705 - RNA, 19 nt, Homo sapiens
  misc_RNA (1)...(19): siRNA sense strand
cauaaacugucaccugaag

SEQ ID NO: 1908706 - RNA, 19 nt, Homo sapiens
  misc_RNA (1)...(19): siRNA sense strand
uaacuacagugacuucaac

SEQ ID NO: 1908707 - RNA, 19 nt, Homo sapiens
  misc_RNA (1)...(19): siRNA sense strand
uggcaguuguuguuacuuu

SEQ ID NO: 1908708 - RNA, 19 nt, Homo sapiens
  misc_RNA (1)...(19): siRNA sense strand
uacagugacuucaacaguu

SEQ ID NO: 1908709 - RNA, 19 nt, Homo sapiens
  misc_RNA (1)...(19): siRNA sense strand
ccgaauggccuuucugaga

SEQ ID NO: 1908710 - RNA, 19 nt, Homo sapiens
  misc_RNA (1)...(19): siRNA sense strand
guuguuacuuucuaugaug

SEQ ID NO: 1908711 - RNA, 19 nt, Homo sapiens
  misc_RNA (1)...(19): siRNA sense strand
acaugagaguccugccuua

SEQ ID NO: 1908712 - RNA, 19 nt, Homo sapiens
  misc_RNA (1)...(19): siRNA sense strand
ugucaggauucuugaaguu

SEQ ID NO: 1908713 - RNA, 19 nt, Homo sapiens
  misc_RNA (1)...(19): siRNA sense strand
auagugagauaauggaguu

SEQ ID NO: 1908714 - RNA, 19 nt, Homo sapiens
  misc_RNA (1)...(19): siRNA sense strand
cgaggacgacuucaacuau

SEQ ID NO: 1908715 - RNA, 19 nt, Homo sapiens
  misc_RNA (1)...(19): siRNA sense strand
ucuggaagcaguuaauaaa

SEQ ID NO: 1908716 - RNA, 19 nt, Homo sapiens
  misc_RNA (1)...(19): siRNA sense strand
ccucggaucucuggguuug

SEQ ID NO: 1908717 - RNA, 19 nt, Homo sapiens
  misc_RNA (1)...(19): siRNA sense strand
ucugcaagcuuucauacug

SEQ ID NO: 1908718 - RNA, 19 nt, Homo sapiens
  misc_RNA (1)...(19): siRNA sense strand
ugacacacacucacugaug

SEQ ID NO: 1908719 - RNA, 19 nt, Homo sapiens
  misc_RNA (1)...(19): siRNA sense strand
ggauaucaucaaucuauuc

SEQ ID NO: 1908720 - RNA, 19 nt, Homo sapiens
  misc_RNA (1)...(19): siRNA sense strand
cugcaagcuuucauacuga

SEQ ID NO: 1908721 - RNA, 19 nt, Homo sapiens
  misc_RNA (1)...(19): siRNA sense strand
gaguguaggcucccacguu

SEQ ID NO: 1908722 - RNA, 19 nt, Homo sapiens
  misc_RNA (1)...(19): siRNA sense strand
gagaaaagucuacagcauu

SEQ ID NO: 1908723 - RNA, 19 nt, Homo sapiens
  misc_RNA (1)...(19): siRNA sense strand
cuaagaaggauuucagcaa

SEQ ID NO: 1908724 - RNA, 19 nt, Homo sapiens
  misc_RNA (1)...(19): siRNA sense strand
cagguucucuuaacuacag

SEQ ID NO: 1908725 - RNA, 19 nt, Homo sapiens
  misc_RNA (1)...(19): siRNA sense strand
cuuaaccuguaccuacuuu

SEQ ID NO: 1908726 - RNA, 19 nt, Homo sapiens
  misc_RNA (1)...(19): siRNA sense strand
ucacugaugcauaaacugu

SEQ ID NO: 1908727 - RNA, 19 nt, Homo sapiens
  misc_RNA (1)...(19): siRNA sense strand
ggaucucuggguuugauuu

SEQ ID NO: 1908728 - RNA, 19 nt, Homo sapiens
  misc_RNA (1)...(19): siRNA sense strand
gcauaaacugucaccugaa

SEQ ID NO: 1908729 - RNA, 19 nt, Homo sapiens
  misc_RNA (1)...(19): siRNA sense strand
gcuuucauacugacuacua

SEQ ID NO: 1908730 - RNA, 19 nt, Homo sapiens
  misc_RNA (1)...(19): siRNA sense strand
gaucgaggacgacuucaac

SEQ ID NO: 1908731 - RNA, 19 nt, Homo sapiens
  misc_RNA (1)...(19): siRNA sense strand
gcacauccgaauggccuuu

SEQ ID NO: 1908732 - RNA, 19 nt, Homo sapiens
  misc_RNA (1)...(19): siRNA sense strand
caugagaguccugccuuaa

SEQ ID NO: 1908733 - RNA, 19 nt, Homo sapiens
  misc_RNA (1)...(19): siRNA sense strand
ccaucagccucuacuugga

SEQ ID NO: 1908734 - RNA, 19 nt, Homo sapiens
  misc_RNA (1)...(19): siRNA sense strand
ucucuuaacuacagugacu

SEQ ID NO: 1908735 - RNA, 19 nt, Homo sapiens
  misc_RNA (1)...(19): siRNA sense strand
agaaaagucuacagcauuc

SEQ ID NO: 1908736 - RNA, 19 nt, Homo sapiens
  misc_RNA (1)...(19): siRNA sense strand
gguagcuguugccaucaug

SEQ ID NO: 1908737 - RNA, 19 nt, Homo sapiens
  misc_RNA (1)...(19): siRNA sense strand
uaauggaguuggucuuagc

SEQ ID NO: 1908738 - RNA, 19 nt, Homo sapiens
  misc_RNA (1)...(19): siRNA sense strand
caguuguuguuacuuucua

SEQ ID NO: 1908739 - RNA, 19 nt, Homo sapiens
  misc_RNA (1)...(19): siRNA sense strand
ggcaguuguuguuacuuuc

SEQ ID NO: 1908740 - RNA, 19 nt, Homo sapiens
  misc_RNA (1)...(19): siRNA sense strand
caagcuuucauacugacua

SEQ ID NO: 1908741 - RNA, 19 nt, Homo sapiens
  misc_RNA (1)...(19): siRNA sense strand
uacggacauuuguacauga

SEQ ID NO: 1908742 - RNA, 19 nt, Homo sapiens
  misc_RNA (1)...(19): siRNA sense strand
ucaggauucuugaaguuuu

SEQ ID NO: 1908743 - RNA, 19 nt, Homo sapiens
  misc_RNA (1)...(19): siRNA sense strand
accugaagaguacguauua

SEQ ID NO: 1908744 - RNA, 19 nt, Homo sapiens
  misc_RNA (1)...(19): siRNA sense strand
cuacagugacuucaacagu

SEQ ID NO: 1908745 - RNA, 19 nt, Homo sapiens
  misc_RNA (1)...(19): siRNA sense strand
acacacucacugaugcaua

SEQ ID NO: 1908746 - RNA, 19 nt, Homo sapiens
  misc_RNA (1)...(19): siRNA sense strand
gcugcaggagcccuucuuu

SEQ ID NO: 1908747 - RNA, 19 nt, Homo sapiens
  misc_RNA (1)...(19): siRNA sense strand
ucgaggacgacuucaacua

SEQ ID NO: 1908748 - RNA, 19 nt, Homo sapiens
  misc_RNA (1)...(19): siRNA sense strand
uaaacugucaccugaagag

SEQ ID NO: 1908749 - RNA, 19 nt, Homo sapiens
  misc_RNA (1)...(19): siRNA sense strand
ucuguggauucaucaucua

SEQ ID NO: 1908750 - RNA, 19 nt, Homo sapiens
  misc_RNA (1)...(19): siRNA sense strand
ggguagcuguugccaucau

SEQ ID NO: 1908751 - RNA, 19 nt, Homo sapiens
  misc_RNA (1)...(19): siRNA sense strand
ucuauuccugcaccuguua

SEQ ID NO: 1908752 - RNA, 19 nt, Homo sapiens
  misc_RNA (1)...(19): siRNA sense strand
uaugacacacacucacuga

SEQ ID NO: 1908753 - RNA, 19 nt, Homo sapiens
  misc_RNA (1)...(19): siRNA sense strand
gagucuguacggacauuug

SEQ ID NO: 1908754 - RNA, 19 nt, Homo sapiens
  misc_RNA (1)...(19): siRNA sense strand
acuuggauaucaucaaucu

SEQ ID NO: 1908755 - RNA, 19 nt, Homo sapiens
  misc_RNA (1)...(19): siRNA sense strand
caccugaagaguacguauu

SEQ ID NO: 1908756 - RNA, 19 nt, Homo sapiens
  misc_RNA (1)...(19): siRNA sense strand
acugaugcauaaacuguca

SEQ ID NO: 1908757 - RNA, 19 nt, Homo sapiens
  misc_RNA (1)...(19): siRNA sense strand
gcaguuguuguuacuuucu

SEQ ID NO: 1908758 - RNA, 19 nt, Homo sapiens
  misc_RNA (1)...(19): siRNA sense strand
cugcagguucucuuaacua

SEQ ID NO: 1908759 - RNA, 19 nt, Homo sapiens
  misc_RNA (1)...(19): siRNA sense strand
uaaacagacauaaguaucc

SEQ ID NO: 1908760 - RNA, 19 nt, Homo sapiens
  misc_RNA (1)...(19): siRNA sense strand
caaagaggguguuauugaa

SEQ ID NO: 1908761 - RNA, 19 nt, Homo sapiens
  misc_RNA (1)...(19): siRNA sense strand
gaaauuccagugacuagua

SEQ ID NO: 1908762 - RNA, 19 nt, Homo sapiens
  misc_RNA (1)...(19): siRNA sense strand
gcaaugauguuucugucaa

SEQ ID NO: 1908763 - RNA, 19 nt, Homo sapiens
  misc_RNA (1)...(19): siRNA sense strand
gaacagacacuuaaacagu

SEQ ID NO: 1908764 - RNA, 19 nt, Homo sapiens
  misc_RNA (1)...(19): siRNA sense strand
ucucauggcuuugacaaua

SEQ ID NO: 1908765 - RNA, 19 nt, Homo sapiens
  misc_RNA (1)...(19): siRNA sense strand
ccaaagaggguguuauuga

SEQ ID NO: 1908766 - RNA, 19 nt, Homo sapiens
  misc_RNA (1)...(19): siRNA sense strand
caaacacucugccaaagau

SEQ ID NO: 1908767 - RNA, 19 nt, Homo sapiens
  misc_RNA (1)...(19): siRNA sense strand
gaacuugaagcucagauug

SEQ ID NO: 1908768 - RNA, 19 nt, Homo sapiens
  misc_RNA (1)...(19): siRNA sense strand
gaaagugccaggauugaau

SEQ ID NO: 1908769 - RNA, 19 nt, Homo sapiens
  misc_RNA (1)...(19): siRNA sense strand
uaaguguacucgacagauu

SEQ ID NO: 1908770 - RNA, 19 nt, Homo sapiens
  misc_RNA (1)...(19): siRNA sense strand
ggacuuggucucucagaaa

SEQ ID NO: 1908771 - RNA, 19 nt, Homo sapiens
  misc_RNA (1)...(19): siRNA sense strand
ugaacacuuuggugaauaa

SEQ ID NO: 1908772 - RNA, 19 nt, Homo sapiens
  misc_RNA (1)...(19): siRNA sense strand
gugccaggauugaauauga

SEQ ID NO: 1908773 - RNA, 19 nt, Homo sapiens
  misc_RNA (1)...(19): siRNA sense strand
gcaaacacucugccaaaga

SEQ ID NO: 1908774 - RNA, 19 nt, Homo sapiens
  misc_RNA (1)...(19): siRNA sense strand
gcacugauuuggaagaacu

SEQ ID NO: 1908775 - RNA, 19 nt, Homo sapiens
  misc_RNA (1)...(19): siRNA sense strand
guaugaaagugccaggauu

SEQ ID NO: 1908776 - RNA, 19 nt, Homo sapiens
  misc_RNA (1)...(19): siRNA sense strand
ugauguuucugucaaauug

SEQ ID NO: 1908777 - RNA, 19 nt, Homo sapiens
  misc_RNA (1)...(19): siRNA sense strand
caugaagaauuuggcuaua

SEQ ID NO: 1908778 - RNA, 19 nt, Homo sapiens
  misc_RNA (1)...(19): siRNA sense strand
aauuacaucucauggcuuu

SEQ ID NO: 1908779 - RNA, 19 nt, Homo sapiens
  misc_RNA (1)...(19): siRNA sense strand
caaugauguuucugucaaa

SEQ ID NO: 1908780 - RNA, 19 nt, Homo sapiens
  misc_RNA (1)...(19): siRNA sense strand
gugaacacuuuggugaaua

SEQ ID NO: 1908781 - RNA, 19 nt, Homo sapiens
  misc_RNA (1)...(19): siRNA sense strand
aaacccaaauuacaucuca

SEQ ID NO: 1908782 - RNA, 19 nt, Homo sapiens
  misc_RNA (1)...(19): siRNA sense strand
cuuaaacaguuccauauca

SEQ ID NO: 1908783 - RNA, 19 nt, Homo sapiens
  misc_RNA (1)...(19): siRNA sense strand
ggccguggcucaagaacug

SEQ ID NO: 1908784 - RNA, 19 nt, Homo sapiens
  misc_RNA (1)...(19): siRNA sense strand
acaguuccauaucaaauug

SEQ ID NO: 1908785 - RNA, 19 nt, Homo sapiens
  misc_RNA (1)...(19): siRNA sense strand
aaauuccagugacuaguaa

SEQ ID NO: 1908786 - RNA, 19 nt, Homo sapiens
  misc_RNA (1)...(19): siRNA sense strand
gaagaauuuggcuauaaug

SEQ ID NO: 1908787 - RNA, 19 nt, Homo sapiens
  misc_RNA (1)...(19): siRNA sense strand
gcaacuuggagaugcauuu

SEQ ID NO: 1908788 - RNA, 19 nt, Homo sapiens
  misc_RNA (1)...(19): siRNA sense strand
gcagaaauuccagugacua

SEQ ID NO: 1908789 - RNA, 19 nt, Homo sapiens
  misc_RNA (1)...(19): siRNA sense strand
gcuaggccguggcucaaga

SEQ ID NO: 1908790 - RNA, 19 nt, Homo sapiens
  misc_RNA (1)...(19): siRNA sense strand
gaaaaccccuggaguggau

SEQ ID NO: 1908791 - RNA, 19 nt, Homo sapiens
  misc_RNA (1)...(19): siRNA sense strand
aaaacuggcucaaacauug

SEQ ID NO: 1908792 - RNA, 19 nt, Homo sapiens
  misc_RNA (1)...(19): siRNA sense strand
acacuuaaacaguuccaua

SEQ ID NO: 1908793 - RNA, 19 nt, Homo sapiens
  misc_RNA (1)...(19): siRNA sense strand
cagcuugaacagacacuua

SEQ ID NO: 1908794 - RNA, 19 nt, Homo sapiens
  misc_RNA (1)...(19): siRNA sense strand
aacagacacuuaaacaguu

SEQ ID NO: 1908795 - RNA, 19 nt, Homo sapiens
  misc_RNA (1)...(19): siRNA sense strand
uauugaagcaggagcauuu

SEQ ID NO: 1908796 - RNA, 19 nt, Homo sapiens
  misc_RNA (1)...(19): siRNA sense strand
acaaucagcugguccuuuu

SEQ ID NO: 1908797 - RNA, 19 nt, Homo sapiens
  misc_RNA (1)...(19): siRNA sense strand
gcucaagaaucucccaaaa

SEQ ID NO: 1908798 - RNA, 19 nt, Homo sapiens
  misc_RNA (1)...(19): siRNA sense strand
gacuaguaauggagaaguu

SEQ ID NO: 1908799 - RNA, 19 nt, Homo sapiens
  misc_RNA (1)...(19): siRNA sense strand
uaccaaagaggguguuauu

SEQ ID NO: 1908800 - RNA, 19 nt, Homo sapiens
  misc_RNA (1)...(19): siRNA sense strand
ucagaaacccaaauuacau

SEQ ID NO: 1908801 - RNA, 19 nt, Homo sapiens
  misc_RNA (1)...(19): siRNA sense strand
aaagugccaggauugaaua

SEQ ID NO: 1908802 - RNA, 19 nt, Homo sapiens
  misc_RNA (1)...(19): siRNA sense strand
ggagucuaaacaccuauaa

SEQ ID NO: 1908803 - RNA, 19 nt, Homo sapiens
  misc_RNA (1)...(19): siRNA sense strand
uaaugccgauacccagaaa

SEQ ID NO: 1908804 - RNA, 19 nt, Homo sapiens
  misc_RNA (1)...(19): siRNA sense strand
gaagcucagauugauauau

SEQ ID NO: 1908805 - RNA, 19 nt, Homo sapiens
  misc_RNA (1)...(19): siRNA sense strand
guugaugacucucgugaac

SEQ ID NO: 1908806 - RNA, 19 nt, Homo sapiens
  misc_RNA (1)...(19): siRNA sense strand
guaauggagaaguugauga

SEQ ID NO: 1908807 - RNA, 19 nt, Homo sapiens
  misc_RNA (1)...(19): siRNA sense strand
gauaaaaugcgcaaugaug

SEQ ID NO: 1908808 - RNA, 19 nt, Homo sapiens
  misc_RNA (1)...(19): siRNA sense strand
aauggagucuaaacaccua

SEQ ID NO: 1908809 - RNA, 19 nt, Homo sapiens
  misc_RNA (1)...(19): siRNA sense strand
gugaacauagcuuuaauag

SEQ ID NO: 1908810 - RNA, 19 nt, Homo sapiens
  misc_RNA (1)...(19): siRNA sense strand
augcauaucgcacugauuu

SEQ ID NO: 1908811 - RNA, 19 nt, Homo sapiens
  misc_RNA (1)...(19): siRNA sense strand
ugaugacucucgugaacau

SEQ ID NO: 1908812 - RNA, 19 nt, Homo sapiens
  misc_RNA (1)...(19): siRNA sense strand
uaauagggauuugaagcau

SEQ ID NO: 1908813 - RNA, 19 nt, Homo sapiens
  misc_RNA (1)...(19): siRNA sense strand
gcagcagaaauuccaguga

SEQ ID NO: 1908814 - RNA, 19 nt, Homo sapiens
  misc_RNA (1)...(19): siRNA sense strand
gcagucacagcaucucuuc

SEQ ID NO: 1908815 - RNA, 19 nt, Homo sapiens
  misc_RNA (1)...(19): siRNA sense strand
cgugaacauagcuuuaaua

SEQ ID NO: 1908816 - RNA, 19 nt, Homo sapiens
  misc_RNA (1)...(19): siRNA sense strand
aauagggauuugaagcauu

SEQ ID NO: 1908817 - RNA, 19 nt, Homo sapiens
  misc_RNA (1)...(19): siRNA sense strand
ggccagagaacacagacaa

SEQ ID NO: 1908818 - RNA, 19 nt, Homo sapiens
  misc_RNA (1)...(19): siRNA sense strand
gaagcaggagcauuucaag

SEQ ID NO: 1908819 - RNA, 19 nt, Homo sapiens
  misc_RNA (1)...(19): siRNA sense strand
uggagaaguugaugacucu

SEQ ID NO: 1908820 - RNA, 19 nt, Homo sapiens
  misc_RNA (1)...(19): siRNA sense strand
uaugaaagugccaggauug

SEQ ID NO: 1908821 - RNA, 19 nt, Homo sapiens
  misc_RNA (1)...(19): siRNA sense strand
gugaaacaguaugaaagug

SEQ ID NO: 1908822 - RNA, 19 nt, Homo sapiens
  misc_RNA (1)...(19): siRNA sense strand
caguuauucuagcagauga

SEQ ID NO: 1908823 - RNA, 19 nt, Homo sapiens
  misc_RNA (1)...(19): siRNA sense strand
ugccauugccgcuuacuuu

SEQ ID NO: 1908824 - RNA, 19 nt, Homo sapiens
  misc_RNA (1)...(19): siRNA sense strand
auagggauuugaagcauuc

SEQ ID NO: 1908825 - RNA, 19 nt, Homo sapiens
  misc_RNA (1)...(19): siRNA sense strand
caacuuggagaugcauuug

SEQ ID NO: 1908826 - RNA, 19 nt, Homo sapiens
  misc_RNA (1)...(19): siRNA sense strand
caaaggcaacuuggagaug

SEQ ID NO: 1908827 - RNA, 19 nt, Homo sapiens
  misc_RNA (1)...(19): siRNA sense strand
cuguggaccuugaacuuga

SEQ ID NO: 1908828 - RNA, 19 nt, Homo sapiens
  misc_RNA (1)...(19): siRNA sense strand
uugcugaccugaguuugaa

SEQ ID NO: 1908829 - RNA, 19 nt, Homo sapiens
  misc_RNA (1)...(19): siRNA sense strand
acagacacuuaaacaguuc

SEQ ID NO: 1908830 - RNA, 19 nt, Homo sapiens
  misc_RNA (1)...(19): siRNA sense strand
gaacacuuuggugaauaaa

SEQ ID NO: 1908831 - RNA, 19 nt, Homo sapiens
  misc_RNA (1)...(19): siRNA sense strand
ugugaacacuuuggugaau

SEQ ID NO: 1908832 - RNA, 19 nt, Homo sapiens
  misc_RNA (1)...(19): siRNA sense strand
gaacuguggaccuugaacu

SEQ ID NO: 1908833 - RNA, 19 nt, Homo sapiens
  misc_RNA (1)...(19): siRNA sense strand
gcauaucgcacugauuugg

SEQ ID NO: 1908834 - RNA, 19 nt, Homo sapiens
  misc_RNA (1)...(19): siRNA sense strand
gaguuugaagucacuagaa

SEQ ID NO: 1908835 - RNA, 19 nt, Homo sapiens
  misc_RNA (1)...(19): siRNA sense strand
uuacaucucauggcuuuga

SEQ ID NO: 1908836 - RNA, 19 nt, Homo sapiens
  misc_RNA (1)...(19): siRNA sense strand
gauacauuaaugacuguga

SEQ ID NO: 1908837 - RNA, 19 nt, Homo sapiens
  misc_RNA (1)...(19): siRNA sense strand
ucaugaagaauuuggcuau

SEQ ID NO: 1908838 - RNA, 19 nt, Homo sapiens
  misc_RNA (1)...(19): siRNA sense strand
ucauuaccaucuggacuug

SEQ ID NO: 1908839 - RNA, 19 nt, Homo sapiens
  misc_RNA (1)...(19): siRNA sense strand
gcuuuaauagggauuugaa

SEQ ID NO: 1908840 - RNA, 19 nt, Homo sapiens
  misc_RNA (1)...(19): siRNA sense strand
gccaaagauugagcaguca

SEQ ID NO: 1908841 - RNA, 19 nt, Homo sapiens
  misc_RNA (1)...(19): siRNA sense strand
gacuuggucucucagaaac

SEQ ID NO: 1908842 - RNA, 19 nt, Homo sapiens
  misc_RNA (1)...(19): siRNA sense strand
aaguguacucgacagauua

SEQ ID NO: 1908843 - RNA, 19 nt, Homo sapiens
  misc_RNA (1)...(19): siRNA sense strand
gaagcauucauuaccaucu

SEQ ID NO: 1908844 - RNA, 19 nt, Homo sapiens
  misc_RNA (1)...(19): siRNA sense strand
cagaaacccaaauuacauc

SEQ ID NO: 1908845 - RNA, 19 nt, Homo sapiens
  misc_RNA (1)...(19): siRNA sense strand
ucucagaaacccaaauuac

SEQ ID NO: 1908846 - RNA, 19 nt, Homo sapiens
  misc_RNA (1)...(19): siRNA sense strand
ucucgugaacauagcuuua

SEQ ID NO: 1908847 - RNA, 19 nt, Homo sapiens
  misc_RNA (1)...(19): siRNA sense strand
acgcaaacacucugccaaa

SEQ ID NO: 1908848 - RNA, 19 nt, Homo sapiens
  misc_RNA (1)...(19): siRNA sense strand
ugaaagugccaggauugaa

SEQ ID NO: 1908849 - RNA, 19 nt, Homo sapiens
  misc_RNA (1)...(19): siRNA sense strand
cucaagaacuguggaccuu

SEQ ID NO: 1908850 - RNA, 19 nt, Homo sapiens
  misc_RNA (1)...(19): siRNA sense strand
cagaaauuccagugacuag

SEQ ID NO: 1908851 - RNA, 19 nt, Homo sapiens
  misc_RNA (1)...(19): siRNA sense strand
gccauugccgcuuacuuug

SEQ ID NO: 1908852 - RNA, 19 nt, Homo sapiens
  misc_RNA (1)...(19): siRNA sense strand
agucuaaacaccuauaagu

SEQ ID NO: 1908853 - RNA, 19 nt, Homo sapiens
  misc_RNA (1)...(19): siRNA sense strand
cacuuaaacaguuccauau

SEQ ID NO: 1908854 - RNA, 19 nt, Homo sapiens
  misc_RNA (1)...(19): siRNA sense strand
cgacccagcuuuuccagau

SEQ ID NO: 1908855 - RNA, 19 nt, Homo sapiens
  misc_RNA (1)...(19): siRNA sense strand
uugaagcucagauugauau

SEQ ID NO: 1908856 - RNA, 19 nt, Homo sapiens
  misc_RNA (1)...(19): siRNA sense strand
auaucgcacugauuuggaa

SEQ ID NO: 1908857 - RNA, 19 nt, Homo sapiens
  misc_RNA (1)...(19): siRNA sense strand
acacucugccaaagauuga

SEQ ID NO: 1908858 - RNA, 19 nt, Homo sapiens
  misc_RNA (1)...(19): siRNA sense strand
ucgcacugauuuggaagaa

SEQ ID NO: 1908859 - RNA, 19 nt, Homo sapiens
  misc_RNA (1)...(19): siRNA sense strand
aagcauucauuaccaucug

SEQ ID NO: 1908860 - RNA, 19 nt, Homo sapiens
  misc_RNA (1)...(19): siRNA sense strand
caagagagcugcagaagua

SEQ ID NO: 1908861 - RNA, 19 nt, Homo sapiens
  misc_RNA (1)...(19): siRNA sense strand
guaucaggcucuuugcuua

SEQ ID NO: 1908862 - RNA, 19 nt, Homo sapiens
  misc_RNA (1)...(19): siRNA sense strand
gaugugauccgaagaguuu

SEQ ID NO: 1908863 - RNA, 19 nt, Homo sapiens
  misc_RNA (1)...(19): siRNA sense strand
gggaagaaauaaagaaauc

SEQ ID NO: 1908864 - RNA, 19 nt, Homo sapiens
  misc_RNA (1)...(19): siRNA sense strand
gaaggaagggaagaaauaa

SEQ ID NO: 1908865 - RNA, 19 nt, Homo sapiens
  misc_RNA (1)...(19): siRNA sense strand
cagguuggcugaaggcuuu

SEQ ID NO: 1908866 - RNA, 19 nt, Homo sapiens
  misc_RNA (1)...(19): siRNA sense strand
cagaaguacuccagugauu

SEQ ID NO: 1908867 - RNA, 19 nt, Homo sapiens
  misc_RNA (1)...(19): siRNA sense strand
gaagggaagaaauaaagaa

SEQ ID NO: 1908868 - RNA, 19 nt, Homo sapiens
  misc_RNA (1)...(19): siRNA sense strand
gucagaagcuggaggaguu

SEQ ID NO: 1908869 - RNA, 19 nt, Homo sapiens
  misc_RNA (1)...(19): siRNA sense strand
gcugaaggcuuugauguca

SEQ ID NO: 1908870 - RNA, 19 nt, Homo sapiens
  misc_RNA (1)...(19): siRNA sense strand
agaaggaagggaagaaaua

SEQ ID NO: 1908871 - RNA, 19 nt, Homo sapiens
  misc_RNA (1)...(19): siRNA sense strand
gaacuuccuguacagaauu

SEQ ID NO: 1908872 - RNA, 19 nt, Homo sapiens
  misc_RNA (1)...(19): siRNA sense strand
ugaaagugauagagucaga

SEQ ID NO: 1908873 - RNA, 19 nt, Homo sapiens
  misc_RNA (1)...(19): siRNA sense strand
ucacagcacagcuuugaaa

SEQ ID NO: 1908874 - RNA, 19 nt, Homo sapiens
  misc_RNA (1)...(19): siRNA sense strand
gacacucacaggacaaaua

SEQ ID NO: 1908875 - RNA, 19 nt, Homo sapiens
  misc_RNA (1)...(19): siRNA sense strand
acaaauacaccaaggagaa

SEQ ID NO: 1908876 - RNA, 19 nt, Homo sapiens
  misc_RNA (1)...(19): siRNA sense strand
caaaucacagcacagcuuu

SEQ ID NO: 1908877 - RNA, 19 nt, Homo sapiens
  misc_RNA (1)...(19): siRNA sense strand
ggaagggaagaaauaaaga

SEQ ID NO: 1908878 - RNA, 19 nt, Homo sapiens
  misc_RNA (1)...(19): siRNA sense strand
cagaggagccagauaacuu

SEQ ID NO: 1908879 - RNA, 19 nt, Homo sapiens
  misc_RNA (1)...(19): siRNA sense strand
gggaagccauggagcagau

SEQ ID NO: 1908880 - RNA, 19 nt, Homo sapiens
  misc_RNA (1)...(19): siRNA sense strand
ggagaaggaagggaagaaa

SEQ ID NO: 1908881 - RNA, 19 nt, Homo sapiens
  misc_RNA (1)...(19): siRNA sense strand
gaaguacuccagugauucu

SEQ ID NO: 1908882 - RNA, 19 nt, Homo sapiens
  misc_RNA (1)...(19): siRNA sense strand
gagaaggaagggaagaaau

SEQ ID NO: 1908883 - RNA, 19 nt, Homo sapiens
  misc_RNA (1)...(19): siRNA sense strand
ccaaaucacagcacagcuu

SEQ ID NO: 1908884 - RNA, 19 nt, Homo sapiens
  misc_RNA (1)...(19): siRNA sense strand
caucuaaagacccaaauca

SEQ ID NO: 1908885 - RNA, 19 nt, Homo sapiens
  misc_RNA (1)...(19): siRNA sense strand
gguauuuacaugaggaauu

SEQ ID NO: 1908886 - RNA, 19 nt, Homo sapiens
  misc_RNA (1)...(19): siRNA sense strand
ggagagcuuugugccuguu

SEQ ID NO: 1908887 - RNA, 19 nt, Homo sapiens
  misc_RNA (1)...(19): siRNA sense strand
gagaguucuuugacagcaa

SEQ ID NO: 1908888 - RNA, 19 nt, Homo sapiens
  misc_RNA (1)...(19): siRNA sense strand
gcucuggaaauaccucaaa

SEQ ID NO: 1908889 - RNA, 19 nt, Homo sapiens
  misc_RNA (1)...(19): siRNA sense strand
aggcagaggagccagauaa

SEQ ID NO: 1908890 - RNA, 19 nt, Homo sapiens
  misc_RNA (1)...(19): siRNA sense strand
gcagaaguacuccagugau

SEQ ID NO: 1908891 - RNA, 19 nt, Homo sapiens
  misc_RNA (1)...(19): siRNA sense strand
ggccgagaguucuuugaca

SEQ ID NO: 1908892 - RNA, 19 nt, Homo sapiens
  misc_RNA (1)...(19): siRNA sense strand
ggaccuggaggagagcuuu

SEQ ID NO: 1908893 - RNA, 19 nt, Homo sapiens
  misc_RNA (1)...(19): siRNA sense strand
cagauaacuucagcagcaa

SEQ ID NO: 1908894 - RNA, 19 nt, Homo sapiens
  misc_RNA (1)...(19): siRNA sense strand
ucuaaagacccaaaucaca

SEQ ID NO: 1908895 - RNA, 19 nt, Homo sapiens
  misc_RNA (1)...(19): siRNA sense strand
aaucacagcacagcuuuga

SEQ ID NO: 1908896 - RNA, 19 nt, Homo sapiens
  misc_RNA (1)...(19): siRNA sense strand
caaauacaccaaggagaag

SEQ ID NO: 1908897 - RNA, 19 nt, Homo sapiens
  misc_RNA (1)...(19): siRNA sense strand
gauccgaagaguuuuaaaa

SEQ ID NO: 1908898 - RNA, 19 nt, Homo sapiens
  misc_RNA (1)...(19): siRNA sense strand
ggaagccauggagcagaua

SEQ ID NO: 1908899 - RNA, 19 nt, Homo sapiens
  misc_RNA (1)...(19): siRNA sense strand
ccaagagagcugcagaagu

SEQ ID NO: 1908900 - RNA, 19 nt, Homo sapiens
  misc_RNA (1)...(19): siRNA sense strand
cauuggagcagaagcugaa

SEQ ID NO: 1908901 - RNA, 19 nt, Homo sapiens
  misc_RNA (1)...(19): siRNA sense strand
gaaggcagaggagccagau

SEQ ID NO: 1908902 - RNA, 19 nt, Homo sapiens
  misc_RNA (1)...(19): siRNA sense strand
gauaacuucagcagcaaag

SEQ ID NO: 1908903 - RNA, 19 nt, Homo sapiens
  misc_RNA (1)...(19): siRNA sense strand
gcagaggagccagauaacu

SEQ ID NO: 1908904 - RNA, 19 nt, Homo sapiens
  misc_RNA (1)...(19): siRNA sense strand
uaucaggcucuuugcuuau

SEQ ID NO: 1908905 - RNA, 19 nt, Homo sapiens
  misc_RNA (1)...(19): siRNA sense strand
ugacagcaacgggaacuuc

SEQ ID NO: 1908906 - RNA, 19 nt, Homo sapiens
  misc_RNA (1)...(19): siRNA sense strand
gcaggccacucuguaucag

SEQ ID NO: 1908907 - RNA, 19 nt, Homo sapiens
  misc_RNA (1)...(19): siRNA sense strand
gcaccucccuggaucuuug

SEQ ID NO: 1908908 - RNA, 19 nt, Homo sapiens
  misc_RNA (1)...(19): siRNA sense strand
gcucauuguugaaucguuu

SEQ ID NO: 1908909 - RNA, 19 nt, Homo sapiens
  misc_RNA (1)...(19): siRNA sense strand
caacgcagcuguggaacga

SEQ ID NO: 1908910 - RNA, 19 nt, Homo sapiens
  misc_RNA (1)...(19): siRNA sense strand
gggcaaauuucauucaucu

SEQ ID NO: 1908911 - RNA, 19 nt, Homo sapiens
  misc_RNA (1)...(19): siRNA sense strand
gaacuauucagggcaaauu

SEQ ID NO: 1908912 - RNA, 19 nt, Homo sapiens
  misc_RNA (1)...(19): siRNA sense strand
ggaauuggaacccuguuug

SEQ ID NO: 1908913 - RNA, 19 nt, Homo sapiens
  misc_RNA (1)...(19): siRNA sense strand
gcacaaagaauggaauagu

SEQ ID NO: 1908914 - RNA, 19 nt, Homo sapiens
  misc_RNA (1)...(19): siRNA sense strand
cacaaagaauggaauagug

SEQ ID NO: 1908915 - RNA, 19 nt, Homo sapiens
  misc_RNA (1)...(19): siRNA sense strand
ucucuaaaguguucucaga

SEQ ID NO: 1908916 - RNA, 19 nt, Homo sapiens
  misc_RNA (1)...(19): siRNA sense strand
acgggaaacuucacaauca

SEQ ID NO: 1908917 - RNA, 19 nt, Homo sapiens
  misc_RNA (1)...(19): siRNA sense strand
cuacuccucucuaaagugu

SEQ ID NO: 1908918 - RNA, 19 nt, Homo sapiens
  misc_RNA (1)...(19): siRNA sense strand
ucacuuacaugggauaugg

SEQ ID NO: 1908919 - RNA, 19 nt, Homo sapiens
  misc_RNA (1)...(19): siRNA sense strand
caugggauauggaauugga

SEQ ID NO: 1908920 - RNA, 19 nt, Homo sapiens
  misc_RNA (1)...(19): siRNA sense strand
gauaagcucauuguugaau

SEQ ID NO: 1908921 - RNA, 19 nt, Homo sapiens
  misc_RNA (1)...(19): siRNA sense strand
acaaagaauggaauaguga

SEQ ID NO: 1908922 - RNA, 19 nt, Homo sapiens
  misc_RNA (1)...(19): siRNA sense strand
uuacaugggauauggaauu

SEQ ID NO: 1908923 - RNA, 19 nt, Homo sapiens
  misc_RNA (1)...(19): siRNA sense strand
gaaacugcacaaagaaugg

SEQ ID NO: 1908924 - RNA, 19 nt, Homo sapiens
  misc_RNA (1)...(19): siRNA sense strand
gaaggaagcccagcaaaau

SEQ ID NO: 1908925 - RNA, 19 nt, Homo sapiens
  misc_RNA (1)...(19): siRNA sense strand
ggaaacuucacaaucacaa

SEQ ID NO: 1908926 - RNA, 19 nt, Homo sapiens
  misc_RNA (1)...(19): siRNA sense strand
agaauggaauagugaagga

SEQ ID NO: 1908927 - RNA, 19 nt, Homo sapiens
  misc_RNA (1)...(19): siRNA sense strand
caaagaauggaauagugaa

SEQ ID NO: 1908928 - RNA, 19 nt, Homo sapiens
  misc_RNA (1)...(19): siRNA sense strand
caacuacuauuugccacau

SEQ ID NO: 1908929 - RNA, 19 nt, Homo sapiens
  misc_RNA (1)...(19): siRNA sense strand
agcaauggcucacaaagca

SEQ ID NO: 1908930 - RNA, 19 nt, Homo sapiens
  misc_RNA (1)...(19): siRNA sense strand
gaggugcucaggaacuauu

SEQ ID NO: 1908931 - RNA, 19 nt, Homo sapiens
  misc_RNA (1)...(19): siRNA sense strand
caacgggaaacuucacaau

SEQ ID NO: 1908932 - RNA, 19 nt, Homo sapiens
  misc_RNA (1)...(19): siRNA sense strand
aaacuucacaaucacaaga

SEQ ID NO: 1908933 - RNA, 19 nt, Homo sapiens
  misc_RNA (1)...(19): siRNA sense strand
ucucagaaguggugaugca

SEQ ID NO: 1908934 - RNA, 19 nt, Homo sapiens
  misc_RNA (1)...(19): siRNA sense strand
uacaugggauauggaauug

SEQ ID NO: 1908935 - RNA, 19 nt, Homo sapiens
  misc_RNA (1)...(19): siRNA sense strand
gaauuggaacccuguuugg

SEQ ID NO: 1908936 - RNA, 19 nt, Homo sapiens
  misc_RNA (1)...(19): siRNA sense strand
acgcagcuguggaacgaaa

SEQ ID NO: 1908937 - RNA, 19 nt, Homo sapiens
  misc_RNA (1)...(19): siRNA sense strand
cacaagaaacagagcaaug

SEQ ID NO: 1908938 - RNA, 19 nt, Homo sapiens
  misc_RNA (1)...(19): siRNA sense strand
caugggcaacuacuauuug

SEQ ID NO: 1908939 - RNA, 19 nt, Homo sapiens
  misc_RNA (1)...(19): siRNA sense strand
ucaugggcaacuacuauuu

SEQ ID NO: 1908940 - RNA, 19 nt, Homo sapiens
  misc_RNA (1)...(19): siRNA sense strand
cagaaacugcacaaagaau

SEQ ID NO: 1908941 - RNA, 19 nt, Homo sapiens
  misc_RNA (1)...(19): siRNA sense strand
gaacccuguuuggcuaucu

SEQ ID NO: 1908942 - RNA, 19 nt, Homo sapiens
  misc_RNA (1)...(19): siRNA sense strand
gaauggaauagugaaggaa

SEQ ID NO: 1908943 - RNA, 19 nt, Homo sapiens
  misc_RNA (1)...(19): siRNA sense strand
agaaacugcacaaagaaug

SEQ ID NO: 1908944 - RNA, 19 nt, Homo sapiens
  misc_RNA (1)...(19): siRNA sense strand
gcaacgggaaacuucacaa

SEQ ID NO: 1908945 - RNA, 19 nt, Homo sapiens
  misc_RNA (1)...(19): siRNA sense strand
cagggcaaauuucauucau

SEQ ID NO: 1908946 - RNA, 19 nt, Homo sapiens
  misc_RNA (1)...(19): siRNA sense strand
gagguggugcuguuugcaa

SEQ ID NO: 1908947 - RNA, 19 nt, Homo sapiens
  misc_RNA (1)...(19): siRNA sense strand
ucucaugggcaacuacuau

SEQ ID NO: 1908948 - RNA, 19 nt, Homo sapiens
  misc_RNA (1)...(19): siRNA sense strand
gaaacuucacaaucacaag

SEQ ID NO: 1908949 - RNA, 19 nt, Homo sapiens
  misc_RNA (1)...(19): siRNA sense strand
cacaaucacaagaaacaga

SEQ ID NO: 1908950 - RNA, 19 nt, Homo sapiens
  misc_RNA (1)...(19): siRNA sense strand
gaaacuggggaauagaaaa

SEQ ID NO: 1908951 - RNA, 19 nt, Homo sapiens
  misc_RNA (1)...(19): siRNA sense strand
uuaagaaacuggggaauag

SEQ ID NO: 1908952 - RNA, 19 nt, Homo sapiens
  misc_RNA (1)...(19): siRNA sense strand
uaagcucauuguugaaucg

SEQ ID NO: 1908953 - RNA, 19 nt, Homo sapiens
  misc_RNA (1)...(19): siRNA sense strand
acaagaaacagagcaaugg

SEQ ID NO: 1908954 - RNA, 19 nt, Homo sapiens
  misc_RNA (1)...(19): siRNA sense strand
gugaaggaagcccagcaaa

SEQ ID NO: 1908955 - RNA, 19 nt, Homo sapiens
  misc_RNA (1)...(19): siRNA sense strand
aaugccuacuccucucuaa

SEQ ID NO: 1908956 - RNA, 19 nt, Homo sapiens
  misc_RNA (1)...(19): siRNA sense strand
cugcacaaagaauggaaua

SEQ ID NO: 1908957 - RNA, 19 nt, Homo sapiens
  misc_RNA (1)...(19): siRNA sense strand
ggaacccuguuuggcuauc

SEQ ID NO: 1908958 - RNA, 19 nt, Homo sapiens
  misc_RNA (1)...(19): siRNA sense strand
gagcagcccgcagaaguuu

SEQ ID NO: 1908959 - RNA, 19 nt, Homo sapiens
  misc_RNA (1)...(19): siRNA sense strand
gaaccgcucccaggaauca

SEQ ID NO: 1908960 - RNA, 19 nt, Homo sapiens
  misc_RNA (1)...(19): siRNA sense strand
ucagagcccugcccaacug

SEQ ID NO: 1908961 - RNA, 19 nt, Homo sapiens
  misc_RNA (1)...(19): siRNA sense strand
gcaagaccacgcugaccaa

SEQ ID NO: 1908962 - RNA, 19 nt, Homo sapiens
  misc_RNA (1)...(19): siRNA sense strand
uggaagacauucagaacuc

SEQ ID NO: 1908963 - RNA, 19 nt, Homo sapiens
  misc_RNA (1)...(19): siRNA sense strand
ggccaacgguguggaagug

SEQ ID NO: 1908964 - RNA, 19 nt, Homo sapiens
  misc_RNA (1)...(19): siRNA sense strand
gcuggagucucuggacaug

SEQ ID NO: 1908965 - RNA, 19 nt, Homo sapiens
  misc_RNA (1)...(19): siRNA sense strand
uggagucucuggacaugga

SEQ ID NO: 1908966 - RNA, 19 nt, Homo sapiens
  misc_RNA (1)...(19): siRNA sense strand
gugaaguccuggaagacau

SEQ ID NO: 1908967 - RNA, 19 nt, Homo sapiens
  misc_RNA (1)...(19): siRNA sense strand
ccacauccuccuccuggaa

SEQ ID NO: 1908968 - RNA, 19 nt, Homo sapiens
  misc_RNA (1)...(19): siRNA sense strand
gggacgugcuggagucucu

SEQ ID NO: 1908969 - RNA, 19 nt, Homo sapiens
  misc_RNA (1)...(19): siRNA sense strand
agaccacgcugaccaacag

SEQ ID NO: 1908970 - RNA, 19 nt, Homo sapiens
  misc_RNA (1)...(19): siRNA sense strand
cugaaccgcucccaggaau

SEQ ID NO: 1908971 - RNA, 19 nt, Homo sapiens
  misc_RNA (1)...(19): siRNA sense strand
ggaggccaacgguguggaa

SEQ ID NO: 1908972 - RNA, 19 nt, Homo sapiens
  misc_RNA (1)...(19): siRNA sense strand
gcugaaccgcucccaggaa

SEQ ID NO: 1908973 - RNA, 19 nt, Homo sapiens
  misc_RNA (1)...(19): siRNA sense strand
gcuuccugcucuacagcua

SEQ ID NO: 1908974 - RNA, 19 nt, Homo sapiens
  misc_RNA (1)...(19): siRNA sense strand
ugagcagcccgcagaaguu

SEQ ID NO: 1908975 - RNA, 19 nt, Homo sapiens
  misc_RNA (1)...(19): siRNA sense strand
caagaccaaauagcaguug

SEQ ID NO: 1908976 - RNA, 19 nt, Homo sapiens
  misc_RNA (1)...(19): siRNA sense strand
ugaaguccuggaagacauu

SEQ ID NO: 1908977 - RNA, 19 nt, Homo sapiens
  misc_RNA (1)...(19): siRNA sense strand
ccaagaccaaauagcaguu

SEQ ID NO: 1908978 - RNA, 19 nt, Homo sapiens
  misc_RNA (1)...(19): siRNA sense strand
uccgugaaguccuggaaga

SEQ ID NO: 1908979 - RNA, 19 nt, Homo sapiens
  misc_RNA (1)...(19): siRNA sense strand
gaccaacagccugcucaga

SEQ ID NO: 1908980 - RNA, 19 nt, Homo sapiens
  misc_RNA (1)...(19): siRNA sense strand
ccagcaggacagcauguga

SEQ ID NO: 1908981 - RNA, 19 nt, Homo sapiens
  misc_RNA (1)...(19): siRNA sense strand
gagcagcccgcagaaguuu

SEQ ID NO: 1908982 - RNA, 19 nt, Homo sapiens
  misc_RNA (1)...(19): siRNA sense strand
gaaccgcucccaggaauca

SEQ ID NO: 1908983 - RNA, 19 nt, Homo sapiens
  misc_RNA (1)...(19): siRNA sense strand
ucagagcccugcccaacug

SEQ ID NO: 1908984 - RNA, 19 nt, Homo sapiens
  misc_RNA (1)...(19): siRNA sense strand
gcaagaccacgcugaccaa

SEQ ID NO: 1908985 - RNA, 19 nt, Homo sapiens
  misc_RNA (1)...(19): siRNA sense strand
uggaagacauucagaacuc

SEQ ID NO: 1908986 - RNA, 19 nt, Homo sapiens
  misc_RNA (1)...(19): siRNA sense strand
ggccaacgguguggaagug

SEQ ID NO: 1908987 - RNA, 19 nt, Homo sapiens
  misc_RNA (1)...(19): siRNA sense strand
gcuggagucucuggacaug

SEQ ID NO: 1908988 - RNA, 19 nt, Homo sapiens
  misc_RNA (1)...(19): siRNA sense strand
uggagucucuggacaugga

SEQ ID NO: 1908989 - RNA, 19 nt, Homo sapiens
  misc_RNA (1)...(19): siRNA sense strand
gugaaguccuggaagacau

SEQ ID NO: 1908990 - RNA, 19 nt, Homo sapiens
  misc_RNA (1)...(19): siRNA sense strand
ccacauccuccuccuggaa

SEQ ID NO: 1908991 - RNA, 19 nt, Homo sapiens
  misc_RNA (1)...(19): siRNA sense strand
gggacgugcuggagucucu

SEQ ID NO: 1908992 - RNA, 19 nt, Homo sapiens
  misc_RNA (1)...(19): siRNA sense strand
agaccacgcugaccaacag

SEQ ID NO: 1908993 - RNA, 19 nt, Homo sapiens
  misc_RNA (1)...(19): siRNA sense strand
cugaaccgcucccaggaau

SEQ ID NO: 1908994 - RNA, 19 nt, Homo sapiens
  misc_RNA (1)...(19): siRNA sense strand
ggaggccaacgguguggaa

SEQ ID NO: 1908995 - RNA, 19 nt, Homo sapiens
  misc_RNA (1)...(19): siRNA sense strand
gcugaaccgcucccaggaa

SEQ ID NO: 1908996 - RNA, 19 nt, Homo sapiens
  misc_RNA (1)...(19): siRNA sense strand
gcuuccugcucuacagcua

SEQ ID NO: 1908997 - RNA, 19 nt, Homo sapiens
  misc_RNA (1)...(19): siRNA sense strand
ugagcagcccgcagaaguu

SEQ ID NO: 1908998 - RNA, 19 nt, Homo sapiens
  misc_RNA (1)...(19): siRNA sense strand
caagaccaaauagcaguug

SEQ ID NO: 1908999 - RNA, 19 nt, Homo sapiens
  misc_RNA (1)...(19): siRNA sense strand
ugaaguccuggaagacauu

SEQ ID NO: 1909000 - RNA, 19 nt, Homo sapiens
  misc_RNA (1)...(19): siRNA sense strand
ccaagaccaaauagcaguu

SEQ ID NO: 1909001 - RNA, 19 nt, Homo sapiens
  misc_RNA (1)...(19): siRNA sense strand
uccgugaaguccuggaaga

SEQ ID NO: 1909002 - RNA, 19 nt, Homo sapiens
  misc_RNA (1)...(19): siRNA sense strand
gaccaacagccugcucaga

SEQ ID NO: 1909003 - RNA, 19 nt, Homo sapiens
  misc_RNA (1)...(19): siRNA sense strand
ccagcaggacagcauguga

SEQ ID NO: 1909004 - RNA, 19 nt, Homo sapiens
  misc_RNA (1)...(19): siRNA sense strand
gaagaugccucgggucuca

SEQ ID NO: 1909005 - RNA, 19 nt, Homo sapiens
  misc_RNA (1)...(19): siRNA sense strand
gaaugaagacuggaucgaa

SEQ ID NO: 1909006 - RNA, 19 nt, Homo sapiens
  misc_RNA (1)...(19): siRNA sense strand
ccacugcauugccaucuug

SEQ ID NO: 1909007 - RNA, 19 nt, Homo sapiens
  misc_RNA (1)...(19): siRNA sense strand
aggaaugccugccaucuga

SEQ ID NO: 1909008 - RNA, 19 nt, Homo sapiens
  misc_RNA (1)...(19): siRNA sense strand
gaagcuuguugccaugaca

SEQ ID NO: 1909009 - RNA, 19 nt, Homo sapiens
  misc_RNA (1)...(19): siRNA sense strand
caggguggaugauguugug

SEQ ID NO: 1909010 - RNA, 19 nt, Homo sapiens
  misc_RNA (1)...(19): siRNA sense strand
uggaugauguugugaaguc

SEQ ID NO: 1909011 - RNA, 19 nt, Homo sapiens
  misc_RNA (1)...(19): siRNA sense strand
gcagcgcuaugauucuaag

SEQ ID NO: 1909012 - RNA, 19 nt, Homo sapiens
  misc_RNA (1)...(19): siRNA sense strand
cugcagcgcuaugauucua

SEQ ID NO: 1909013 - RNA, 19 nt, Homo sapiens
  misc_RNA (1)...(19): siRNA sense strand
agucugagcccucugaguu

SEQ ID NO: 1909014 - RNA, 19 nt, Homo sapiens
  misc_RNA (1)...(19): siRNA sense strand
gguggaugauguugugaag

SEQ ID NO: 1909015 - RNA, 19 nt, Homo sapiens
  misc_RNA (1)...(19): siRNA sense strand
ucucaugucccacugcauu

SEQ ID NO: 1909016 - RNA, 19 nt, Homo sapiens
  misc_RNA (1)...(19): siRNA sense strand
ggugauuguugccauaggu

SEQ ID NO: 1909017 - RNA, 19 nt, Homo sapiens
  misc_RNA (1)...(19): siRNA sense strand
gagacuguggugauuguug

SEQ ID NO: 1909018 - RNA, 19 nt, Homo sapiens
  misc_RNA (1)...(19): siRNA sense strand
uguggugauuguugccaua

SEQ ID NO: 1909019 - RNA, 19 nt, Homo sapiens
  misc_RNA (1)...(19): siRNA sense strand
cgauguacccuccguugga

SEQ ID NO: 1909020 - RNA, 19 nt, Homo sapiens
  misc_RNA (1)...(19): siRNA sense strand
gucugagcccucugaguua

SEQ ID NO: 1909021 - RNA, 19 nt, Homo sapiens
  misc_RNA (1)...(19): siRNA sense strand
gagaagcuuguugccauga

SEQ ID NO: 1909022 - RNA, 19 nt, Homo sapiens
  misc_RNA (1)...(19): siRNA sense strand
ccaucuuucuggcuucguu

SEQ ID NO: 1909023 - RNA, 19 nt, Homo sapiens
  misc_RNA (1)...(19): siRNA sense strand
ugagcccucugaguuagaa

SEQ ID NO: 1909024 - RNA, 19 nt, Homo sapiens
  misc_RNA (1)...(19): siRNA sense strand
gcccugcuccugucuguca

SEQ ID NO: 1909025 - RNA, 19 nt, Homo sapiens
  misc_RNA (1)...(19): siRNA sense strand
gaagacuggaucgaagaug

SEQ ID NO: 1909026 - RNA, 19 nt, Homo sapiens
  misc_RNA (1)...(19): siRNA sense strand
uguccuggccaccaucuuu

SEQ ID NO: 1909027 - RNA, 19 nt, Homo sapiens
  misc_RNA (1)...(19): siRNA sense strand
gcaaggaccuggagcagau

SEQ ID NO: 1909028 - RNA, 19 nt, Homo sapiens
  misc_RNA (1)...(19): siRNA sense strand
aggaagaaauugccaaaua

SEQ ID NO: 1909029 - RNA, 19 nt, Homo sapiens
  misc_RNA (1)...(19): siRNA sense strand
ggaagaaauugccaaauac

SEQ ID NO: 1909030 - RNA, 19 nt, Homo sapiens
  misc_RNA (1)...(19): siRNA sense strand
gcaagaaggucauguccau

SEQ ID NO: 1909031 - RNA, 19 nt, Homo sapiens
  misc_RNA (1)...(19): siRNA sense strand
gcaagccgcugauuaucuu

SEQ ID NO: 1909032 - RNA, 19 nt, Homo sapiens
  misc_RNA (1)...(19): siRNA sense strand
cgggaaagguguacuauga

SEQ ID NO: 1909033 - RNA, 19 nt, Homo sapiens
  misc_RNA (1)...(19): siRNA sense strand
gcgccuaucuuccauguga

SEQ ID NO: 1909034 - RNA, 19 nt, Homo sapiens
  misc_RNA (1)...(19): siRNA sense strand
ggacgugugugccuaugaa

SEQ ID NO: 1909035 - RNA, 19 nt, Homo sapiens
  misc_RNA (1)...(19): siRNA sense strand
gaaagguuccugcagauga

SEQ ID NO: 1909036 - RNA, 19 nt, Homo sapiens
  misc_RNA (1)...(19): siRNA sense strand
ggaaaugguccucagagaa

SEQ ID NO: 1909037 - RNA, 19 nt, Homo sapiens
  misc_RNA (1)...(19): siRNA sense strand
gagcagaucucuccauucc

SEQ ID NO: 1909038 - RNA, 19 nt, Homo sapiens
  misc_RNA (1)...(19): siRNA sense strand
gaaaugguccucagagaag

SEQ ID NO: 1909039 - RNA, 19 nt, Homo sapiens
  misc_RNA (1)...(19): siRNA sense strand
ggaccaagaccagcaaauu

SEQ ID NO: 1909040 - RNA, 19 nt, Homo sapiens
  misc_RNA (1)...(19): siRNA sense strand
ccaagugggugcggcauaa

SEQ ID NO: 1909041 - RNA, 19 nt, Homo sapiens
  misc_RNA (1)...(19): siRNA sense strand
cugauuaucuucacaccua

SEQ ID NO: 1909042 - RNA, 19 nt, Homo sapiens
  misc_RNA (1)...(19): siRNA sense strand
ggagggcugugaagugaug

SEQ ID NO: 1909043 - RNA, 19 nt, Homo sapiens
  misc_RNA (1)...(19): siRNA sense strand
gauugagaaugucaucuug

SEQ ID NO: 1909044 - RNA, 19 nt, Homo sapiens
  misc_RNA (1)...(19): siRNA sense strand
gugcggacaugaccaagaa

SEQ ID NO: 1909045 - RNA, 19 nt, Homo sapiens
  misc_RNA (1)...(19): siRNA sense strand
gaccaagaccagcaaauug

SEQ ID NO: 1909046 - RNA, 19 nt, Homo sapiens
  misc_RNA (1)...(19): siRNA sense strand
gcgcacggcccauauggua

SEQ ID NO: 1909047 - RNA, 19 nt, Homo sapiens
  misc_RNA (1)...(19): siRNA sense strand
gcaacuggaucguggucaa

SEQ ID NO: 1909048 - RNA, 19 nt, Homo sapiens
  misc_RNA (1)...(19): siRNA sense strand
ucacaaccauugauaaacu

SEQ ID NO: 1909049 - RNA, 19 nt, Homo sapiens
  misc_RNA (1)...(19): siRNA sense strand
gaacaugggcuacuaugac

SEQ ID NO: 1909050 - RNA, 19 nt, Homo sapiens
  misc_RNA (1)...(19): siRNA sense strand
cgacaaauccagcgagaug

SEQ ID NO: 1909051 - RNA, 19 nt, Homo sapiens
  misc_RNA (1)...(19): siRNA sense strand
cagaggcugugauauaugu

SEQ ID NO: 1909052 - RNA, 19 nt, Homo sapiens
  misc_RNA (1)...(19): siRNA sense strand
acaagaacaugggcuacua

SEQ ID NO: 1909053 - RNA, 19 nt, Homo sapiens
  misc_RNA (1)...(19): siRNA sense strand
gccagggcgugguauauga

SEQ ID NO: 1909054 - RNA, 19 nt, Homo sapiens
  misc_RNA (1)...(19): siRNA sense strand
uauggcagguccaaggaua

SEQ ID NO: 1909055 - RNA, 19 nt, Homo sapiens
  misc_RNA (1)...(19): siRNA sense strand
ggaguuugaggaagaaauu

SEQ ID NO: 1909056 - RNA, 19 nt, Homo sapiens
  misc_RNA (1)...(19): siRNA sense strand
uugauaaacuggccuucua

SEQ ID NO: 1909057 - RNA, 19 nt, Homo sapiens
  misc_RNA (1)...(19): siRNA sense strand
gcacgggaaagguguacua

SEQ ID NO: 1909058 - RNA, 19 nt, Homo sapiens
  misc_RNA (1)...(19): siRNA sense strand
gaagaaguacgcagacaag

SEQ ID NO: 1909059 - RNA, 19 nt, Homo sapiens
  misc_RNA (1)...(19): siRNA sense strand
ccaguuacauggaggagau

SEQ ID NO: 1909060 - RNA, 19 nt, Homo sapiens
  misc_RNA (1)...(19): siRNA sense strand
gaugauuccugcccucaag

SEQ ID NO: 1909061 - RNA, 19 nt, Homo sapiens
  misc_RNA (1)...(19): siRNA sense strand
acuaugaccuggugaagga

SEQ ID NO: 1909062 - RNA, 19 nt, Homo sapiens
  misc_RNA (1)...(19): siRNA sense strand
gcaggaguuugaggaagaa

SEQ ID NO: 1909063 - RNA, 19 nt, Homo sapiens
  misc_RNA (1)...(19): siRNA sense strand
ucaagaccaucaucgacaa

SEQ ID NO: 1909064 - RNA, 19 nt, Homo sapiens
  misc_RNA (1)...(19): siRNA sense strand
gggcuacuaugacuacauc

SEQ ID NO: 1909065 - RNA, 19 nt, Homo sapiens
  misc_RNA (1)...(19): siRNA sense strand
ugccugugcugaagaagua

SEQ ID NO: 1909066 - RNA, 19 nt, Homo sapiens
  misc_RNA (1)...(19): siRNA sense strand
guacuucgccugguuggaa

SEQ ID NO: 1909067 - RNA, 19 nt, Homo sapiens
  misc_RNA (1)...(19): siRNA sense strand
ucacccagccgcucaugua

SEQ ID NO: 1909068 - RNA, 19 nt, Homo sapiens
  misc_RNA (1)...(19): siRNA sense strand
gauccacacuggccucucu

SEQ ID NO: 1909069 - RNA, 19 nt, Homo sapiens
  misc_RNA (1)...(19): siRNA sense strand
acaagcagauccacagaca

SEQ ID NO: 1909070 - RNA, 19 nt, Homo sapiens
  misc_RNA (1)...(19): siRNA sense strand
cccagaggcugugauauau

SEQ ID NO: 1909071 - RNA, 19 nt, Homo sapiens
  misc_RNA (1)...(19): siRNA sense strand
cagaguacauggccuuugg

SEQ ID NO: 1909072 - RNA, 19 nt, Homo sapiens
  misc_RNA (1)...(19): siRNA sense strand
ggauugagaaugucaucuu

SEQ ID NO: 1909073 - RNA, 19 nt, Homo sapiens
  misc_RNA (1)...(19): siRNA sense strand
cggaaaugguccucagaga

SEQ ID NO: 1909074 - RNA, 19 nt, Homo sapiens
  misc_RNA (1)...(19): siRNA sense strand
agacaaaggcagagcaguu

SEQ ID NO: 1909075 - RNA, 19 nt, Homo sapiens
  misc_RNA (1)...(19): siRNA sense strand
ggucauguccauccugguu

SEQ ID NO: 1909076 - RNA, 19 nt, Homo sapiens
  misc_RNA (1)...(19): siRNA sense strand
caaaggcagagcaguucua

SEQ ID NO: 1909077 - RNA, 19 nt, Homo sapiens
  misc_RNA (1)...(19): siRNA sense strand
acccagaggcugugauaua

SEQ ID NO: 1909078 - RNA, 19 nt, Homo sapiens
  misc_RNA (1)...(19): siRNA sense strand
ggucaaugcgccuaucuuc

SEQ ID NO: 1909079 - RNA, 19 nt, Homo sapiens
  misc_RNA (1)...(19): siRNA sense strand
gauaaacuggccuucuaug

SEQ ID NO: 1909080 - RNA, 19 nt, Homo sapiens
  misc_RNA (1)...(19): siRNA sense strand
cagcgaggcccgaaagguu

SEQ ID NO: 1909081 - RNA, 19 nt, Homo sapiens
  misc_RNA (1)...(19): siRNA sense strand
guacggaguccugggcuuu

SEQ ID NO: 1909082 - RNA, 19 nt, Homo sapiens
  misc_RNA (1)...(19): siRNA sense strand
gcagccgaauggagaaaca

SEQ ID NO: 1909083 - RNA, 19 nt, Homo sapiens
  misc_RNA (1)...(19): siRNA sense strand
ugauauaugugugcagugu

SEQ ID NO: 1909084 - RNA, 19 nt, Homo sapiens
  misc_RNA (1)...(19): siRNA sense strand
caacaaccagauuggauuc

SEQ ID NO: 1909085 - RNA, 19 nt, Homo sapiens
  misc_RNA (1)...(19): siRNA sense strand
ucaacaaccagauuggauu

SEQ ID NO: 1909086 - RNA, 19 nt, Homo sapiens
  misc_RNA (1)...(19): siRNA sense strand
gcacauuggccuggaguuc

SEQ ID NO: 1909087 - RNA, 19 nt, Homo sapiens
  misc_RNA (1)...(19): siRNA sense strand
gaggccaaguccagcuuug

SEQ ID NO: 1909088 - RNA, 19 nt, Homo sapiens
  misc_RNA (1)...(19): siRNA sense strand
ccacaccggccaacuacuu

SEQ ID NO: 1909089 - RNA, 19 nt, Homo sapiens
  misc_RNA (1)...(19): siRNA sense strand
caaauacgaccggaucugu

SEQ ID NO: 1909090 - RNA, 19 nt, Homo sapiens
  misc_RNA (1)...(19): siRNA sense strand
gacuugaucacaaccauug

SEQ ID NO: 1909091 - RNA, 19 nt, Homo sapiens
  misc_RNA (1)...(19): siRNA sense strand
gcuccacaccggccaacua

SEQ ID NO: 1909092 - RNA, 19 nt, Homo sapiens
  misc_RNA (1)...(19): siRNA sense strand
cuggagggcugugaaguga

SEQ ID NO: 1909093 - RNA, 19 nt, Homo sapiens
  misc_RNA (1)...(19): siRNA sense strand
gcuuugagcugggcuaugc

SEQ ID NO: 1909094 - RNA, 19 nt, Homo sapiens
  misc_RNA (1)...(19): siRNA sense strand
ugacccagaggcugugaua

SEQ ID NO: 1909095 - RNA, 19 nt, Homo sapiens
  misc_RNA (1)...(19): siRNA sense strand
ccaugagguuugaagacuu

SEQ ID NO: 1909096 - RNA, 19 nt, Homo sapiens
  misc_RNA (1)...(19): siRNA sense strand
caagaacaugggcuacuau

SEQ ID NO: 1909097 - RNA, 19 nt, Homo sapiens
  misc_RNA (1)...(19): siRNA sense strand
ccgaauggagaaacacuuu

SEQ ID NO: 1909098 - RNA, 19 nt, Homo sapiens
  misc_RNA (1)...(19): siRNA sense strand
gacaaaggcagagcaguuc

SEQ ID NO: 1909099 - RNA, 19 nt, Homo sapiens
  misc_RNA (1)...(19): siRNA sense strand
augcagaccuggacuccuu

SEQ ID NO: 1909100 - RNA, 19 nt, Homo sapiens
  misc_RNA (1)...(19): siRNA sense strand
uggugucacugaagaaguu

SEQ ID NO: 1909101 - RNA, 19 nt, Homo sapiens
  misc_RNA (1)...(19): siRNA sense strand
ccgaaagguuccugcagau

SEQ ID NO: 1909102 - RNA, 19 nt, Homo sapiens
  misc_RNA (1)...(19): siRNA sense strand
gaagaaauugccaaauacg

SEQ ID NO: 1909103 - RNA, 19 nt, Homo sapiens
  misc_RNA (1)...(19): siRNA sense strand
cacaugacgucccgguguu

SEQ ID NO: 1909104 - RNA, 19 nt, Homo sapiens
  misc_RNA (1)...(19): siRNA sense strand
cgacaaccaccuucauugg

SEQ ID NO: 1909105 - RNA, 19 nt, Homo sapiens
  misc_RNA (1)...(19): siRNA sense strand
ugcaggaguuugaggaaga

SEQ ID NO: 1909106 - RNA, 19 nt, Homo sapiens
  misc_RNA (1)...(19): siRNA sense strand
guacgcagacaagcugauu

SEQ ID NO: 1909107 - RNA, 19 nt, Homo sapiens
  misc_RNA (1)...(19): siRNA sense strand
guacaagcagauccacaga

SEQ ID NO: 1909108 - RNA, 19 nt, Homo sapiens
  misc_RNA (1)...(19): siRNA sense strand
cccagccgcucauguacaa

SEQ ID NO: 1909109 - RNA, 19 nt, Homo sapiens
  misc_RNA (1)...(19): siRNA sense strand
ggccuggaguucauguuca

SEQ ID NO: 1909110 - RNA, 19 nt, Homo sapiens
  misc_RNA (1)...(19): siRNA sense strand
gcaguucuaccguggagau

SEQ ID NO: 1909111 - RNA, 19 nt, Homo sapiens
  misc_RNA (1)...(19): siRNA sense strand
caucagcccacgcuucaug

SEQ ID NO: 1909112 - RNA, 19 nt, Homo sapiens
  misc_RNA (1)...(19): siRNA sense strand
ucacgcgccuggagcagau

SEQ ID NO: 1909113 - RNA, 19 nt, Homo sapiens
  misc_RNA (1)...(19): siRNA sense strand
cagggaagccagcgaggaa

SEQ ID NO: 1909114 - RNA, 19 nt, Homo sapiens
  misc_RNA (1)...(19): siRNA sense strand
gccaguggauccggcagaa

SEQ ID NO: 1909115 - RNA, 19 nt, Homo sapiens
  misc_RNA (1)...(19): siRNA sense strand
gcuccuggcugcacaugac

SEQ ID NO: 1909116 - RNA, 19 nt, Homo sapiens
  misc_RNA (1)...(19): siRNA sense strand
ccucagacuugaucacaac

SEQ ID NO: 1909117 - RNA, 19 nt, Homo sapiens
  misc_RNA (1)...(19): siRNA sense strand
ggaucugugaggaggcuua

SEQ ID NO: 1909118 - RNA, 19 nt, Homo sapiens
  misc_RNA (1)...(19): siRNA sense strand
ugagcgacuugcccuccua

SEQ ID NO: 1909119 - RNA, 19 nt, Homo sapiens
  misc_RNA (1)...(19): siRNA sense strand
ggauccggcagaaguuuga

SEQ ID NO: 1909120 - RNA, 19 nt, Homo sapiens
  misc_RNA (1)...(19): siRNA sense strand
gcgggugauuccugaagau

SEQ ID NO: 1909121 - RNA, 19 nt, Homo sapiens
  misc_RNA (1)...(19): siRNA sense strand
ugaggaagaaauugccaaa

SEQ ID NO: 1909122 - RNA, 19 nt, Homo sapiens
  misc_RNA (1)...(19): siRNA sense strand
gcacgucgucgucaacaac

SEQ ID NO: 1909123 - RNA, 19 nt, Homo sapiens
  misc_RNA (1)...(19): siRNA sense strand
gcugugaagugaugauucc

SEQ ID NO: 1909124 - RNA, 19 nt, Homo sapiens
  misc_RNA (1)...(19): siRNA sense strand
auaaacuggccuucuauga

SEQ ID NO: 1909125 - RNA, 19 nt, Homo sapiens
  misc_RNA (1)...(19): siRNA sense strand
caggaaacaggaacacuca

SEQ ID NO: 1909126 - RNA, 19 nt, Homo sapiens
  misc_RNA (1)...(19): siRNA sense strand
ucaagcaggaggcagagaa

SEQ ID NO: 1909127 - RNA, 19 nt, Homo sapiens
  misc_RNA (1)...(19): siRNA sense strand
acaaauaccugacguguaa

SEQ ID NO: 1909128 - RNA, 19 nt, Homo sapiens
  misc_RNA (1)...(19): siRNA sense strand
caaagaaacugcagauuca

SEQ ID NO: 1909129 - RNA, 19 nt, Homo sapiens
  misc_RNA (1)...(19): siRNA sense strand
gaagggcgauuacaaauac

SEQ ID NO: 1909130 - RNA, 19 nt, Homo sapiens
  misc_RNA (1)...(19): siRNA sense strand
gcugaaggcuacauguuga

SEQ ID NO: 1909131 - RNA, 19 nt, Homo sapiens
  misc_RNA (1)...(19): siRNA sense strand
guacacagaugauauucca

SEQ ID NO: 1909132 - RNA, 19 nt, Homo sapiens
  misc_RNA (1)...(19): siRNA sense strand
ccaaagagcaccucagugu

SEQ ID NO: 1909133 - RNA, 19 nt, Homo sapiens
  misc_RNA (1)...(19): siRNA sense strand
aaagagcaccucaguguuu

SEQ ID NO: 1909134 - RNA, 19 nt, Homo sapiens
  misc_RNA (1)...(19): siRNA sense strand
ggaguacacagaugauauu

SEQ ID NO: 1909135 - RNA, 19 nt, Homo sapiens
  misc_RNA (1)...(19): siRNA sense strand
cagaugauauuccacuguu

SEQ ID NO: 1909136 - RNA, 19 nt, Homo sapiens
  misc_RNA (1)...(19): siRNA sense strand
gaaaccagccauggagauu

SEQ ID NO: 1909137 - RNA, 19 nt, Homo sapiens
  misc_RNA (1)...(19): siRNA sense strand
uaaagacacccacacauca

SEQ ID NO: 1909138 - RNA, 19 nt, Homo sapiens
  misc_RNA (1)...(19): siRNA sense strand
ugaagggcgauuacaaaua

SEQ ID NO: 1909139 - RNA, 19 nt, Homo sapiens
  misc_RNA (1)...(19): siRNA sense strand
gaugauauuccacuguuga

SEQ ID NO: 1909140 - RNA, 19 nt, Homo sapiens
  misc_RNA (1)...(19): siRNA sense strand
gcugaagucuuuccaucau

SEQ ID NO: 1909141 - RNA, 19 nt, Homo sapiens
  misc_RNA (1)...(19): siRNA sense strand
agagaacagugacauacaa

SEQ ID NO: 1909142 - RNA, 19 nt, Homo sapiens
  misc_RNA (1)...(19): siRNA sense strand
acaaagaaacugcagauuc

SEQ ID NO: 1909143 - RNA, 19 nt, Homo sapiens
  misc_RNA (1)...(19): siRNA sense strand
caggcagugucaucgaaua

SEQ ID NO: 1909144 - RNA, 19 nt, Homo sapiens
  misc_RNA (1)...(19): siRNA sense strand
gagaacagugacauacaaa

SEQ ID NO: 1909145 - RNA, 19 nt, Homo sapiens
  misc_RNA (1)...(19): siRNA sense strand
caacuggcacacaaagaaa

SEQ ID NO: 1909146 - RNA, 19 nt, Homo sapiens
  misc_RNA (1)...(19): siRNA sense strand
ccaacuggcacacaaagaa

SEQ ID NO: 1909147 - RNA, 19 nt, Homo sapiens
  misc_RNA (1)...(19): siRNA sense strand
guaagaauggcgaguggaa

SEQ ID NO: 1909148 - RNA, 19 nt, Homo sapiens
  misc_RNA (1)...(19): siRNA sense strand
ggauaaagacacccacaca

SEQ ID NO: 1909149 - RNA, 19 nt, Homo sapiens
  misc_RNA (1)...(19): siRNA sense strand
ugaagucuuuccaucauag

SEQ ID NO: 1909150 - RNA, 19 nt, Homo sapiens
  misc_RNA (1)...(19): siRNA sense strand
guugaagggcgauuacaaa

SEQ ID NO: 1909151 - RNA, 19 nt, Homo sapiens
  misc_RNA (1)...(19): siRNA sense strand
uaccugacguguaagaaug

SEQ ID NO: 1909152 - RNA, 19 nt, Homo sapiens
  misc_RNA (1)...(19): siRNA sense strand
gaacagugacauacaaagc

SEQ ID NO: 1909153 - RNA, 19 nt, Homo sapiens
  misc_RNA (1)...(19): siRNA sense strand
ucagaggaguacacagaug

SEQ ID NO: 1909154 - RNA, 19 nt, Homo sapiens
  misc_RNA (1)...(19): siRNA sense strand
gauaaagacacccacacau

SEQ ID NO: 1909155 - RNA, 19 nt, Homo sapiens
  misc_RNA (1)...(19): siRNA sense strand
gauauuccacuguugaaag

SEQ ID NO: 1909156 - RNA, 19 nt, Homo sapiens
  misc_RNA (1)...(19): siRNA sense strand
caaagagcaccucaguguu

SEQ ID NO: 1909157 - RNA, 19 nt, Homo sapiens
  misc_RNA (1)...(19): siRNA sense strand
gaggaguacacagaugaua

SEQ ID NO: 1909158 - RNA, 19 nt, Homo sapiens
  misc_RNA (1)...(19): siRNA sense strand
ggaaaccagccauggagau

SEQ ID NO: 1909159 - RNA, 19 nt, Homo sapiens
  misc_RNA (1)...(19): siRNA sense strand
cugaagucuuuccaucaua

SEQ ID NO: 1909160 - RNA, 19 nt, Homo sapiens
  misc_RNA (1)...(19): siRNA sense strand
aaaccagccauggagauua

SEQ ID NO: 1909161 - RNA, 19 nt, Homo sapiens
  misc_RNA (1)...(19): siRNA sense strand
gaaacugcagauucagaga

SEQ ID NO: 1909162 - RNA, 19 nt, Homo sapiens
  misc_RNA (1)...(19): siRNA sense strand
cagaggaguacacagauga

SEQ ID NO: 1909163 - RNA, 19 nt, Homo sapiens
  misc_RNA (1)...(19): siRNA sense strand
gaauaccugugugcugaag

SEQ ID NO: 1909164 - RNA, 19 nt, Homo sapiens
  misc_RNA (1)...(19): siRNA sense strand
cgucagaggaguacacaga

SEQ ID NO: 1909165 - RNA, 19 nt, Homo sapiens
  misc_RNA (1)...(19): siRNA sense strand
cgugggacauggaguguuc

SEQ ID NO: 1909166 - RNA, 19 nt, Homo sapiens
  misc_RNA (1)...(19): siRNA sense strand
agagaaugguggcuacauc

SEQ ID NO: 1909167 - RNA, 19 nt, Homo sapiens
  misc_RNA (1)...(19): siRNA sense strand
auauuccacuguugaaaga

SEQ ID NO: 1909168 - RNA, 19 nt, Homo sapiens
  misc_RNA (1)...(19): siRNA sense strand
ggcaggauagcaccaaaga

SEQ ID NO: 1909169 - RNA, 19 nt, Homo sapiens
  misc_RNA (1)...(19): siRNA sense strand
aaacugcagauucagagaa

SEQ ID NO: 1909170 - RNA, 19 nt, Homo sapiens
  misc_RNA (1)...(19): siRNA sense strand
aagagcaccucaguguuug

SEQ ID NO: 1909171 - RNA, 19 nt, Homo sapiens
  misc_RNA (1)...(19): siRNA sense strand
gagaaugguggcuacaucu

SEQ ID NO: 1909172 - RNA, 19 nt, Homo sapiens
  misc_RNA (1)...(19): siRNA sense strand
cagauucagagaacaguga

SEQ ID NO: 1909173 - RNA, 19 nt, Homo sapiens
  misc_RNA (1)...(19): siRNA sense strand
agguugcacuaccaucaua

SEQ ID NO: 1909174 - RNA, 19 nt, Homo sapiens
  misc_RNA (1)...(19): siRNA sense strand
acacaaagaaacugcagau

SEQ ID NO: 1909175 - RNA, 19 nt, Homo sapiens
  misc_RNA (1)...(19): siRNA sense strand
aaccagccauggagauuag

SEQ ID NO: 1909176 - RNA, 19 nt, Homo sapiens
  misc_RNA (1)...(19): siRNA sense strand
auaaagacacccacacauc

SEQ ID NO: 1909177 - RNA, 19 nt, Homo sapiens
  misc_RNA (1)...(19): siRNA sense strand
ccucagagacugugauggu

SEQ ID NO: 1909178 - RNA, 19 nt, Homo sapiens
  misc_RNA (1)...(19): siRNA sense strand
caccggagccagagaaugg

SEQ ID NO: 1909179 - RNA, 19 nt, Homo sapiens
  misc_RNA (1)...(19): siRNA sense strand
gcagugucaucgaauaccu

SEQ ID NO: 1909180 - RNA, 19 nt, Homo sapiens
  misc_RNA (1)...(19): siRNA sense strand
uaagaauggcgaguggaaa

SEQ ID NO: 1909181 - RNA, 19 nt, Homo sapiens
  misc_RNA (1)...(19): siRNA sense strand
gugcugaaggcuacauguu

SEQ ID NO: 1909182 - RNA, 19 nt, Homo sapiens
  misc_RNA (1)...(19): siRNA sense strand
ccagguugcacuaccauca

SEQ ID NO: 1909183 - RNA, 19 nt, Homo sapiens
  misc_RNA (1)...(19): siRNA sense strand
gcaggcagugucaucgaau

SEQ ID NO: 1909184 - RNA, 19 nt, Homo sapiens
  misc_RNA (1)...(19): siRNA sense strand
caccaaagagcaccucagu

SEQ ID NO: 1909185 - RNA, 19 nt, Homo sapiens
  misc_RNA (1)...(19): siRNA sense strand
cagagaacagugacauaca

SEQ ID NO: 1909186 - RNA, 19 nt, Homo sapiens
  misc_RNA (1)...(19): siRNA sense strand
gaguguuccuuccgcuagu

SEQ ID NO: 1909187 - RNA, 19 nt, Homo sapiens
  misc_RNA (1)...(19): siRNA sense strand
ucagagaacagugacauac

SEQ ID NO: 1909188 - RNA, 19 nt, Homo sapiens
  misc_RNA (1)...(19): siRNA sense strand
ugucaucgaauaccugugu

SEQ ID NO: 1909189 - RNA, 19 nt, Homo sapiens
  misc_RNA (1)...(19): siRNA sense strand
gaacacaccugaaacuaga

SEQ ID NO: 1909190 - RNA, 19 nt, Homo sapiens
  misc_RNA (1)...(19): siRNA sense strand
aaucacagcugaagaaaug

SEQ ID NO: 1909191 - RNA, 19 nt, Homo sapiens
  misc_RNA (1)...(19): siRNA sense strand
cagcuuauguggucuauga

SEQ ID NO: 1909192 - RNA, 19 nt, Homo sapiens
  misc_RNA (1)...(19): siRNA sense strand
gaaugcaugugaucaccua

SEQ ID NO: 1909193 - RNA, 19 nt, Homo sapiens
  misc_RNA (1)...(19): siRNA sense strand
gaagaaggaggaacaguug

SEQ ID NO: 1909194 - RNA, 19 nt, Homo sapiens
  misc_RNA (1)...(19): siRNA sense strand
ugaaguaaaucggauauug

SEQ ID NO: 1909195 - RNA, 19 nt, Homo sapiens
  misc_RNA (1)...(19): siRNA sense strand
ggagaaauauggcaucaac

SEQ ID NO: 1909196 - RNA, 19 nt, Homo sapiens
  misc_RNA (1)...(19): siRNA sense strand
uaacagauaccuugugguu

SEQ ID NO: 1909197 - RNA, 19 nt, Homo sapiens
  misc_RNA (1)...(19): siRNA sense strand
caacacagauccaccaaaa

SEQ ID NO: 1909198 - RNA, 19 nt, Homo sapiens
  misc_RNA (1)...(19): siRNA sense strand
gaaguaaaucggauauugu

SEQ ID NO: 1909199 - RNA, 19 nt, Homo sapiens
  misc_RNA (1)...(19): siRNA sense strand
gaaacuagaggaacagcuu

SEQ ID NO: 1909200 - RNA, 19 nt, Homo sapiens
  misc_RNA (1)...(19): siRNA sense strand
caacagggcauuucagaag

SEQ ID NO: 1909201 - RNA, 19 nt, Homo sapiens
  misc_RNA (1)...(19): siRNA sense strand
gaagauggacacaaagaag

SEQ ID NO: 1909202 - RNA, 19 nt, Homo sapiens
  misc_RNA (1)...(19): siRNA sense strand
gcugaagaaauguaugaua

SEQ ID NO: 1909203 - RNA, 19 nt, Homo sapiens
  misc_RNA (1)...(19): siRNA sense strand
ggaccuauucgucaaauca

SEQ ID NO: 1909204 - RNA, 19 nt, Homo sapiens
  misc_RNA (1)...(19): siRNA sense strand
ggaacacaccugaaacuag

SEQ ID NO: 1909205 - RNA, 19 nt, Homo sapiens
  misc_RNA (1)...(19): siRNA sense strand
caaagaagaaggaggaaca

SEQ ID NO: 1909206 - RNA, 19 nt, Homo sapiens
  misc_RNA (1)...(19): siRNA sense strand
gaacagcuuauguggucua

SEQ ID NO: 1909207 - RNA, 19 nt, Homo sapiens
  misc_RNA (1)...(19): siRNA sense strand
acagauaccuugugguuuu

SEQ ID NO: 1909208 - RNA, 19 nt, Homo sapiens
  misc_RNA (1)...(19): siRNA sense strand
cuaucgggauucaauguuu

SEQ ID NO: 1909209 - RNA, 19 nt, Homo sapiens
  misc_RNA (1)...(19): siRNA sense strand
gaaauauggcaucaacaca

SEQ ID NO: 1909210 - RNA, 19 nt, Homo sapiens
  misc_RNA (1)...(19): siRNA sense strand
gugaucaccuaucgggauu

SEQ ID NO: 1909211 - RNA, 19 nt, Homo sapiens
  misc_RNA (1)...(19): siRNA sense strand
gaucaccuaucgggauuca

SEQ ID NO: 1909212 - RNA, 19 nt, Homo sapiens
  misc_RNA (1)...(19): siRNA sense strand
uucagaagauggacacaaa

SEQ ID NO: 1909213 - RNA, 19 nt, Homo sapiens
  misc_RNA (1)...(19): siRNA sense strand
acacagauccaccaaaaua

SEQ ID NO: 1909214 - RNA, 19 nt, Homo sapiens
  misc_RNA (1)...(19): siRNA sense strand
aauauggcaucaacacaga

SEQ ID NO: 1909215 - RNA, 19 nt, Homo sapiens
  misc_RNA (1)...(19): siRNA sense strand
ggucuaugaggacaucuuu

SEQ ID NO: 1909216 - RNA, 19 nt, Homo sapiens
  misc_RNA (1)...(19): siRNA sense strand
gaacaguugaagcuucuca

SEQ ID NO: 1909217 - RNA, 19 nt, Homo sapiens
  misc_RNA (1)...(19): siRNA sense strand
gggaacacaccugaaacua

SEQ ID NO: 1909218 - RNA, 19 nt, Homo sapiens
  misc_RNA (1)...(19): siRNA sense strand
cagcugaagaaauguauga

SEQ ID NO: 1909219 - RNA, 19 nt, Homo sapiens
  misc_RNA (1)...(19): siRNA sense strand
caaaaucacagcugaagaa

SEQ ID NO: 1909220 - RNA, 19 nt, Homo sapiens
  misc_RNA (1)...(19): siRNA sense strand
aaacuagaggaacagcuua

SEQ ID NO: 1909221 - RNA, 19 nt, Homo sapiens
  misc_RNA (1)...(19): siRNA sense strand
gccaagagggcgaacauuc

SEQ ID NO: 1909222 - RNA, 19 nt, Homo sapiens
  misc_RNA (1)...(19): siRNA sense strand
agaagaaggaggaacaguu

SEQ ID NO: 1909223 - RNA, 19 nt, Homo sapiens
  misc_RNA (1)...(19): siRNA sense strand
cagaagauggacacaaaga

SEQ ID NO: 1909224 - RNA, 19 nt, Homo sapiens
  misc_RNA (1)...(19): siRNA sense strand
uaucgggauucaauguuug

SEQ ID NO: 1909225 - RNA, 19 nt, Homo sapiens
  misc_RNA (1)...(19): siRNA sense strand
ucuaugaggacaucuuuga

SEQ ID NO: 1909226 - RNA, 19 nt, Homo sapiens
  misc_RNA (1)...(19): siRNA sense strand
gggauucaauguuuguaac

SEQ ID NO: 1909227 - RNA, 19 nt, Homo sapiens
  misc_RNA (1)...(19): siRNA sense strand
ucacagcugaagaaaugua

SEQ ID NO: 1909228 - RNA, 19 nt, Homo sapiens
  misc_RNA (1)...(19): siRNA sense strand
ucaccuaucgggauucaau

SEQ ID NO: 1909229 - RNA, 19 nt, Homo sapiens
  misc_RNA (1)...(19): siRNA sense strand
gccaacagggcauuucaga

SEQ ID NO: 1909230 - RNA, 19 nt, Homo sapiens
  misc_RNA (1)...(19): siRNA sense strand
uagaggaacagcuuaugug

SEQ ID NO: 1909231 - RNA, 19 nt, Homo sapiens
  misc_RNA (1)...(19): siRNA sense strand
gaaggaggaacaguugaag

SEQ ID NO: 1909232 - RNA, 19 nt, Homo sapiens
  misc_RNA (1)...(19): siRNA sense strand
ccaacagggcauuucagaa

SEQ ID NO: 1909233 - RNA, 19 nt, Homo sapiens
  misc_RNA (1)...(19): siRNA sense strand
agaaggaggaacaguugaa

SEQ ID NO: 1909234 - RNA, 19 nt, Homo sapiens
  misc_RNA (1)...(19): siRNA sense strand
aacagggcauuucagaaga

SEQ ID NO: 1909235 - RNA, 19 nt, Homo sapiens
  misc_RNA (1)...(19): siRNA sense strand
gggcauuucagaagaugga

SEQ ID NO: 1909236 - RNA, 19 nt, Homo sapiens
  misc_RNA (1)...(19): siRNA sense strand
ccaagaaugcaugugauca

SEQ ID NO: 1909237 - RNA, 19 nt, Homo sapiens
  misc_RNA (1)...(19): siRNA sense strand
ggaggaacaguugaagcuu

SEQ ID NO: 1909238 - RNA, 19 nt, Homo sapiens
  misc_RNA (1)...(19): siRNA sense strand
agaagauggacacaaagaa

SEQ ID NO: 1909239 - RNA, 19 nt, Homo sapiens
  misc_RNA (1)...(19): siRNA sense strand
acagggcauuucagaagau

SEQ ID NO: 1909240 - RNA, 19 nt, Homo sapiens
  misc_RNA (1)...(19): siRNA sense strand
aaggagaaauauggcauca

SEQ ID NO: 1909241 - RNA, 19 nt, Homo sapiens
  misc_RNA (1)...(19): siRNA sense strand
aagauggacacaaagaaga

SEQ ID NO: 1909242 - RNA, 19 nt, Homo sapiens
  misc_RNA (1)...(19): siRNA sense strand
cuagaggaacagcuuaugu

SEQ ID NO: 1909243 - RNA, 19 nt, Homo sapiens
  misc_RNA (1)...(19): siRNA sense strand
guacaaagauccacaagau

SEQ ID NO: 1909244 - RNA, 19 nt, Homo sapiens
  misc_RNA (1)...(19): siRNA sense strand
gcagaaagguuuagguuca

SEQ ID NO: 1909245 - RNA, 19 nt, Homo sapiens
  misc_RNA (1)...(19): siRNA sense strand
gcaacucagugugaauuua

SEQ ID NO: 1909246 - RNA, 19 nt, Homo sapiens
  misc_RNA (1)...(19): siRNA sense strand
gaacugcuaucuacugcuu

SEQ ID NO: 1909247 - RNA, 19 nt, Homo sapiens
  misc_RNA (1)...(19): siRNA sense strand
ugacagaacuuggguguga

SEQ ID NO: 1909248 - RNA, 19 nt, Homo sapiens
  misc_RNA (1)...(19): siRNA sense strand
cagccaaguuuaaagauuu

SEQ ID NO: 1909249 - RNA, 19 nt, Homo sapiens
  misc_RNA (1)...(19): siRNA sense strand
cgagagaacugcuaucuac

SEQ ID NO: 1909250 - RNA, 19 nt, Homo sapiens
  misc_RNA (1)...(19): siRNA sense strand
gaaggacacagccaaguuu

SEQ ID NO: 1909251 - RNA, 19 nt, Homo sapiens
  misc_RNA (1)...(19): siRNA sense strand
ggaacgcuguggacaagaa

SEQ ID NO: 1909252 - RNA, 19 nt, Homo sapiens
  misc_RNA (1)...(19): siRNA sense strand
ggacacagccaaguuuaaa

SEQ ID NO: 1909253 - RNA, 19 nt, Homo sapiens
  misc_RNA (1)...(19): siRNA sense strand
gacaagguccgccaguuua

SEQ ID NO: 1909254 - RNA, 19 nt, Homo sapiens
  misc_RNA (1)...(19): siRNA sense strand
gaauuuagcagaaaggaau

SEQ ID NO: 1909255 - RNA, 19 nt, Homo sapiens
  misc_RNA (1)...(19): siRNA sense strand
acaaagauccacaagauga

SEQ ID NO: 1909256 - RNA, 19 nt, Homo sapiens
  misc_RNA (1)...(19): siRNA sense strand
gugaaagcuuuacaucauu

SEQ ID NO: 1909257 - RNA, 19 nt, Homo sapiens
  misc_RNA (1)...(19): siRNA sense strand
ugugaaagcuuuacaucau

SEQ ID NO: 1909258 - RNA, 19 nt, Homo sapiens
  misc_RNA (1)...(19): siRNA sense strand
cagaaugaguggagacuag

SEQ ID NO: 1909259 - RNA, 19 nt, Homo sapiens
  misc_RNA (1)...(19): siRNA sense strand
aagcuuaaaucgucucaga

SEQ ID NO: 1909260 - RNA, 19 nt, Homo sapiens
  misc_RNA (1)...(19): siRNA sense strand
ggucauagcguggaaguuc

SEQ ID NO: 1909261 - RNA, 19 nt, Homo sapiens
  misc_RNA (1)...(19): siRNA sense strand
acggacagcuucuuccaaa

SEQ ID NO: 1909262 - RNA, 19 nt, Homo sapiens
  misc_RNA (1)...(19): siRNA sense strand
cgaugggauucaacaguuu

SEQ ID NO: 1909263 - RNA, 19 nt, Homo sapiens
  misc_RNA (1)...(19): siRNA sense strand
gggcagcaacucaguguga

SEQ ID NO: 1909264 - RNA, 19 nt, Homo sapiens
  misc_RNA (1)...(19): siRNA sense strand
gggcagaaagguuuagguu

SEQ ID NO: 1909265 - RNA, 19 nt, Homo sapiens
  misc_RNA (1)...(19): siRNA sense strand
ucgaugggauucaacaguu

SEQ ID NO: 1909266 - RNA, 19 nt, Homo sapiens
  misc_RNA (1)...(19): siRNA sense strand
caaagauccacaagaugaa

SEQ ID NO: 1909267 - RNA, 19 nt, Homo sapiens
  misc_RNA (1)...(19): siRNA sense strand
gcggaacgcuguggacaag

SEQ ID NO: 1909268 - RNA, 19 nt, Homo sapiens
  misc_RNA (1)...(19): siRNA sense strand
acagccaaguuuaaagauu

SEQ ID NO: 1909269 - RNA, 19 nt, Homo sapiens
  misc_RNA (1)...(19): siRNA sense strand
caacucagugugaauuuag

SEQ ID NO: 1909270 - RNA, 19 nt, Homo sapiens
  misc_RNA (1)...(19): siRNA sense strand
gcgagagaacugcuaucua

SEQ ID NO: 1909271 - RNA, 19 nt, Homo sapiens
  misc_RNA (1)...(19): siRNA sense strand
ugaaggacacagccaaguu

SEQ ID NO: 1909272 - RNA, 19 nt, Homo sapiens
  misc_RNA (1)...(19): siRNA sense strand
acacagccaaguuuaaaga

SEQ ID NO: 1909273 - RNA, 19 nt, Homo sapiens
  misc_RNA (1)...(19): siRNA sense strand
cagugugaauuuagcagaa

SEQ ID NO: 1909274 - RNA, 19 nt, Homo sapiens
  misc_RNA (1)...(19): siRNA sense strand
uuaaaucgucucagaagga

SEQ ID NO: 1909275 - RNA, 19 nt, Homo sapiens
  misc_RNA (1)...(19): siRNA sense strand
uaagaacccagggcagaaa

SEQ ID NO: 1909276 - RNA, 19 nt, Homo sapiens
  misc_RNA (1)...(19): siRNA sense strand
cagcaacucagugugaauu

SEQ ID NO: 1909277 - RNA, 19 nt, Homo sapiens
  misc_RNA (1)...(19): siRNA sense strand
ggcagcaacucagugugaa

SEQ ID NO: 1909278 - RNA, 19 nt, Homo sapiens
  misc_RNA (1)...(19): siRNA sense strand
acugcuaucuacugcuuaa

SEQ ID NO: 1909279 - RNA, 19 nt, Homo sapiens
  misc_RNA (1)...(19): siRNA sense strand
gcagaaugaguggagacua

SEQ ID NO: 1909280 - RNA, 19 nt, Homo sapiens
  misc_RNA (1)...(19): siRNA sense strand
gcuuaaaucgucucagaag

SEQ ID NO: 1909281 - RNA, 19 nt, Homo sapiens
  misc_RNA (1)...(19): siRNA sense strand
gguacaaagauccacaaga

SEQ ID NO: 1909282 - RNA, 19 nt, Homo sapiens
  misc_RNA (1)...(19): siRNA sense strand
aaacaaaauuggagucgau

SEQ ID NO: 1909283 - RNA, 19 nt, Homo sapiens
  misc_RNA (1)...(19): siRNA sense strand
ggugugacagcauggagaa

SEQ ID NO: 1909284 - RNA, 19 nt, Homo sapiens
  misc_RNA (1)...(19): siRNA sense strand
aaggacacagccaaguuua

SEQ ID NO: 1909285 - RNA, 19 nt, Homo sapiens
  misc_RNA (1)...(19): siRNA sense strand
aaagauccacaagaugaaa

SEQ ID NO: 1909286 - RNA, 19 nt, Homo sapiens
  misc_RNA (1)...(19): siRNA sense strand
gaauuucuagauggcauga

SEQ ID NO: 1909287 - RNA, 19 nt, Homo sapiens
  misc_RNA (1)...(19): siRNA sense strand
gucauagcguggaaguuca

SEQ ID NO: 1909288 - RNA, 19 nt, Homo sapiens
  misc_RNA (1)...(19): siRNA sense strand
uagauggcaugacagaacu

SEQ ID NO: 1909289 - RNA, 19 nt, Homo sapiens
  misc_RNA (1)...(19): siRNA sense strand
gacuggagcaggagcugaa

SEQ ID NO: 1909290 - RNA, 19 nt, Homo sapiens
  misc_RNA (1)...(19): siRNA sense strand
gacagcauggagaagcuaa

SEQ ID NO: 1909291 - RNA, 19 nt, Homo sapiens
  misc_RNA (1)...(19): siRNA sense strand
gcagcaacucagugugaau

SEQ ID NO: 1909292 - RNA, 19 nt, Homo sapiens
  misc_RNA (1)...(19): siRNA sense strand
gaacccagggcagaaaggu

SEQ ID NO: 1909293 - RNA, 19 nt, Homo sapiens
  misc_RNA (1)...(19): siRNA sense strand
cuaagaacccagggcagaa

SEQ ID NO: 1909294 - RNA, 19 nt, Homo sapiens
  misc_RNA (1)...(19): siRNA sense strand
ggauucaacaguuuuguga

SEQ ID NO: 1909295 - RNA, 19 nt, Homo sapiens
  misc_RNA (1)...(19): siRNA sense strand
cacucaggcuggcgagaga

SEQ ID NO: 1909296 - RNA, 19 nt, Homo sapiens
  misc_RNA (1)...(19): siRNA sense strand
agagaacugcuaucuacug

SEQ ID NO: 1909297 - RNA, 19 nt, Homo sapiens
  misc_RNA (1)...(19): siRNA sense strand
cuagauggcaugacagaac

SEQ ID NO: 1909298 - RNA, 19 nt, Homo sapiens
  misc_RNA (1)...(19): siRNA sense strand
agugugaauuuagcagaaa

SEQ ID NO: 1909299 - RNA, 19 nt, Homo sapiens
  misc_RNA (1)...(19): siRNA sense strand
gagauuacccaaagaaaua

SEQ ID NO: 1909300 - RNA, 19 nt, Homo sapiens
  misc_RNA (1)...(19): siRNA sense strand
gaggaaaucacaagaauug

SEQ ID NO: 1909301 - RNA, 19 nt, Homo sapiens
  misc_RNA (1)...(19): siRNA sense strand
ccagaaacaugaaggagaa

SEQ ID NO: 1909302 - RNA, 19 nt, Homo sapiens
  misc_RNA (1)...(19): siRNA sense strand
guccugagcuaucgaguaa

SEQ ID NO: 1909303 - RNA, 19 nt, Homo sapiens
  misc_RNA (1)...(19): siRNA sense strand
caaaucggguccugagcua

SEQ ID NO: 1909304 - RNA, 19 nt, Homo sapiens
  misc_RNA (1)...(19): siRNA sense strand
gagaguugauagugagauu

SEQ ID NO: 1909305 - RNA, 19 nt, Homo sapiens
  misc_RNA (1)...(19): siRNA sense strand
uaucugagguccugauuuc

SEQ ID NO: 1909306 - RNA, 19 nt, Homo sapiens
  misc_RNA (1)...(19): siRNA sense strand
gaaaagaugugcuaaacuc

SEQ ID NO: 1909307 - RNA, 19 nt, Homo sapiens
  misc_RNA (1)...(19): siRNA sense strand
ugacagaggagaagagaaa

SEQ ID NO: 1909308 - RNA, 19 nt, Homo sapiens
  misc_RNA (1)...(19): siRNA sense strand
uaaacucccucgcuaagug

SEQ ID NO: 1909309 - RNA, 19 nt, Homo sapiens
  misc_RNA (1)...(19): siRNA sense strand
ggauaugauugccguuaga

SEQ ID NO: 1909310 - RNA, 19 nt, Homo sapiens
  misc_RNA (1)...(19): siRNA sense strand
ggacaagugguuagaugaa

SEQ ID NO: 1909311 - RNA, 19 nt, Homo sapiens
  misc_RNA (1)...(19): siRNA sense strand
caucucagcuauaaacaca

SEQ ID NO: 1909312 - RNA, 19 nt, Homo sapiens
  misc_RNA (1)...(19): siRNA sense strand
acaaggagacgaugagaaa

SEQ ID NO: 1909313 - RNA, 19 nt, Homo sapiens
  misc_RNA (1)...(19): siRNA sense strand
caagaauuguaguuaagga

SEQ ID NO: 1909314 - RNA, 19 nt, Homo sapiens
  misc_RNA (1)...(19): siRNA sense strand
aaagcgaccggcaauauaa

SEQ ID NO: 1909315 - RNA, 19 nt, Homo sapiens
  misc_RNA (1)...(19): siRNA sense strand
gaaacaugaaggagaaguu

SEQ ID NO: 1909316 - RNA, 19 nt, Homo sapiens
  misc_RNA (1)...(19): siRNA sense strand
ggaucuagagcaaagagua

SEQ ID NO: 1909317 - RNA, 19 nt, Homo sapiens
  misc_RNA (1)...(19): siRNA sense strand
gaauuguaguuaaggagau

SEQ ID NO: 1909318 - RNA, 19 nt, Homo sapiens
  misc_RNA (1)...(19): siRNA sense strand
cagcaguccuccugacaug

SEQ ID NO: 1909319 - RNA, 19 nt, Homo sapiens
  misc_RNA (1)...(19): siRNA sense strand
gugguuagaugaacuggau

SEQ ID NO: 1909320 - RNA, 19 nt, Homo sapiens
  misc_RNA (1)...(19): siRNA sense strand
cgaccggcaauauaaauuu

SEQ ID NO: 1909321 - RNA, 19 nt, Homo sapiens
  misc_RNA (1)...(19): siRNA sense strand
gaggauuccagaaacauga

SEQ ID NO: 1909322 - RNA, 19 nt, Homo sapiens
  misc_RNA (1)...(19): siRNA sense strand
guuagaagccuuguugaug

SEQ ID NO: 1909323 - RNA, 19 nt, Homo sapiens
  misc_RNA (1)...(19): siRNA sense strand
ugcuagagcugucugaaga

SEQ ID NO: 1909324 - RNA, 19 nt, Homo sapiens
  misc_RNA (1)...(19): siRNA sense strand
agacaagccucuccuaagc

SEQ ID NO: 1909325 - RNA, 19 nt, Homo sapiens
  misc_RNA (1)...(19): siRNA sense strand
gaaaagcgaccggcaauau

SEQ ID NO: 1909326 - RNA, 19 nt, Homo sapiens
  misc_RNA (1)...(19): siRNA sense strand
guaucuggcuacccuugaa

SEQ ID NO: 1909327 - RNA, 19 nt, Homo sapiens
  misc_RNA (1)...(19): siRNA sense strand
aaaucaagauaucggagaa

SEQ ID NO: 1909328 - RNA, 19 nt, Homo sapiens
  misc_RNA (1)...(19): siRNA sense strand
gaagagaaaagaugugcua

SEQ ID NO: 1909329 - RNA, 19 nt, Homo sapiens
  misc_RNA (1)...(19): siRNA sense strand
cuccugacauggacuauga

SEQ ID NO: 1909330 - RNA, 19 nt, Homo sapiens
  misc_RNA (1)...(19): siRNA sense strand
ugaaggaccaggugaaauc

SEQ ID NO: 1909331 - RNA, 19 nt, Homo sapiens
  misc_RNA (1)...(19): siRNA sense strand
gaucuagagcaaagaguau

SEQ ID NO: 1909332 - RNA, 19 nt, Homo sapiens
  misc_RNA (1)...(19): siRNA sense strand
ggcaggaucuagagcaaag

SEQ ID NO: 1909333 - RNA, 19 nt, Homo sapiens
  misc_RNA (1)...(19): siRNA sense strand
gauagugagauuacccaaa

SEQ ID NO: 1909334 - RNA, 19 nt, Homo sapiens
  misc_RNA (1)...(19): siRNA sense strand
gggauaugauugccguuag

SEQ ID NO: 1909335 - RNA, 19 nt, Homo sapiens
  misc_RNA (1)...(19): siRNA sense strand
guucggaggauuccagaaa

SEQ ID NO: 1909336 - RNA, 19 nt, Homo sapiens
  misc_RNA (1)...(19): siRNA sense strand
gaaacucuggagacgguaa

SEQ ID NO: 1909337 - RNA, 19 nt, Homo sapiens
  misc_RNA (1)...(19): siRNA sense strand
auagugagauuacccaaag

SEQ ID NO: 1909338 - RNA, 19 nt, Homo sapiens
  misc_RNA (1)...(19): siRNA sense strand
cuaccucugucucuuccua

SEQ ID NO: 1909339 - RNA, 19 nt, Homo sapiens
  misc_RNA (1)...(19): siRNA sense strand
gagaaaagaugugcuaaac

SEQ ID NO: 1909340 - RNA, 19 nt, Homo sapiens
  misc_RNA (1)...(19): siRNA sense strand
gaucaauuaauacgagaga

SEQ ID NO: 1909341 - RNA, 19 nt, Homo sapiens
  misc_RNA (1)...(19): siRNA sense strand
gggcuuccaccaucagaaa

SEQ ID NO: 1909342 - RNA, 19 nt, Homo sapiens
  misc_RNA (1)...(19): siRNA sense strand
caaaagccauucuggacuu

SEQ ID NO: 1909343 - RNA, 19 nt, Homo sapiens
  misc_RNA (1)...(19): siRNA sense strand
gaacuacccuuuucauucc

SEQ ID NO: 1909344 - RNA, 19 nt, Homo sapiens
  misc_RNA (1)...(19): siRNA sense strand
ggaacuacccuuuucauuc

SEQ ID NO: 1909345 - RNA, 19 nt, Homo sapiens
  misc_RNA (1)...(19): siRNA sense strand
gaguuucaaauucuggaua

SEQ ID NO: 1909346 - RNA, 19 nt, Homo sapiens
  misc_RNA (1)...(19): siRNA sense strand
uggaggacauggagagugu

SEQ ID NO: 1909347 - RNA, 19 nt, Homo sapiens
  misc_RNA (1)...(19): siRNA sense strand
uugaggaaaucacaagaau

SEQ ID NO: 1909348 - RNA, 19 nt, Homo sapiens
  misc_RNA (1)...(19): siRNA sense strand
ucagggccaucucagcuau

SEQ ID NO: 1909349 - RNA, 19 nt, Homo sapiens
  misc_RNA (1)...(19): siRNA sense strand
uaaaggaggaaacccugaa

SEQ ID NO: 1909350 - RNA, 19 nt, Homo sapiens
  misc_RNA (1)...(19): siRNA sense strand
gggacaagugguuagauga

SEQ ID NO: 1909351 - RNA, 19 nt, Homo sapiens
  misc_RNA (1)...(19): siRNA sense strand
gauaugauugccguuagaa

SEQ ID NO: 1909352 - RNA, 19 nt, Homo sapiens
  misc_RNA (1)...(19): siRNA sense strand
ccugagcuaucgaguaaag

SEQ ID NO: 1909353 - RNA, 19 nt, Homo sapiens
  misc_RNA (1)...(19): siRNA sense strand
ugagauuacccaaagaaau

SEQ ID NO: 1909354 - RNA, 19 nt, Homo sapiens
  misc_RNA (1)...(19): siRNA sense strand
caaauucuggauaauguag

SEQ ID NO: 1909355 - RNA, 19 nt, Homo sapiens
  misc_RNA (1)...(19): siRNA sense strand
ucugugcgcuguauguugu

SEQ ID NO: 1909356 - RNA, 19 nt, Homo sapiens
  misc_RNA (1)...(19): siRNA sense strand
gcaguccuccugacaugga

SEQ ID NO: 1909357 - RNA, 19 nt, Homo sapiens
  misc_RNA (1)...(19): siRNA sense strand
cugaagagcagcaguuugu

SEQ ID NO: 1909358 - RNA, 19 nt, Homo sapiens
  misc_RNA (1)...(19): siRNA sense strand
gcuaaacucccucgcuaag

SEQ ID NO: 1909359 - RNA, 19 nt, Homo sapiens
  misc_RNA (1)...(19): siRNA sense strand
ggaggauuccagaaacaug

SEQ ID NO: 1909360 - RNA, 19 nt, Homo sapiens
  misc_RNA (1)...(19): siRNA sense strand
ucaaaaggcugaguuucaa

SEQ ID NO: 1909361 - RNA, 19 nt, Homo sapiens
  misc_RNA (1)...(19): siRNA sense strand
gguccugagcuaucgagua

SEQ ID NO: 1909362 - RNA, 19 nt, Homo sapiens
  misc_RNA (1)...(19): siRNA sense strand
gaccggcaauauaaauuuu

SEQ ID NO: 1909363 - RNA, 19 nt, Homo sapiens
  misc_RNA (1)...(19): siRNA sense strand
gaaaacaggaagcugaaga

SEQ ID NO: 1909364 - RNA, 19 nt, Homo sapiens
  misc_RNA (1)...(19): siRNA sense strand
caacaaggagacgaugaga

SEQ ID NO: 1909365 - RNA, 19 nt, Homo sapiens
  misc_RNA (1)...(19): siRNA sense strand
uguauguuguugucucuau

SEQ ID NO: 1909366 - RNA, 19 nt, Homo sapiens
  misc_RNA (1)...(19): siRNA sense strand
aaacaugaaggagaaguug

SEQ ID NO: 1909367 - RNA, 19 nt, Homo sapiens
  misc_RNA (1)...(19): siRNA sense strand
gccguuagaagccuuguug

SEQ ID NO: 1909368 - RNA, 19 nt, Homo sapiens
  misc_RNA (1)...(19): siRNA sense strand
gggccuaccucugucucuu

SEQ ID NO: 1909369 - RNA, 19 nt, Homo sapiens
  misc_RNA (1)...(19): siRNA sense strand
gguagaagcgcgugcaaaa

SEQ ID NO: 1909370 - RNA, 19 nt, Homo sapiens
  misc_RNA (1)...(19): siRNA sense strand
gcgaccggcaauauaaauu

SEQ ID NO: 1909371 - RNA, 19 nt, Homo sapiens
  misc_RNA (1)...(19): siRNA sense strand
gacaagugguuagaugaac

SEQ ID NO: 1909372 - RNA, 19 nt, Homo sapiens
  misc_RNA (1)...(19): siRNA sense strand
ggacccuuccucuguugaa

SEQ ID NO: 1909373 - RNA, 19 nt, Homo sapiens
  misc_RNA (1)...(19): siRNA sense strand
ugaggaaaucacaagaauu

SEQ ID NO: 1909374 - RNA, 19 nt, Homo sapiens
  misc_RNA (1)...(19): siRNA sense strand
aggcugaguuucaaauucu

SEQ ID NO: 1909375 - RNA, 19 nt, Homo sapiens
  misc_RNA (1)...(19): siRNA sense strand
aaggcugaguuucaaauuc

SEQ ID NO: 1909376 - RNA, 19 nt, Homo sapiens
  misc_RNA (1)...(19): siRNA sense strand
uguugaugcugauagauuc

SEQ ID NO: 1909377 - RNA, 19 nt, Homo sapiens
  misc_RNA (1)...(19): siRNA sense strand
cagacaagccucuccuaag

SEQ ID NO: 1909378 - RNA, 19 nt, Homo sapiens
  misc_RNA (1)...(19): siRNA sense strand
guucagcguauuugaggaa

SEQ ID NO: 1909379 - RNA, 19 nt, Homo sapiens
  misc_RNA (1)...(19): siRNA sense strand
ccggauaucccagcaguau

SEQ ID NO: 1909380 - RNA, 19 nt, Homo sapiens
  misc_RNA (1)...(19): siRNA sense strand
acgggagaguugauaguga

SEQ ID NO: 1909381 - RNA, 19 nt, Homo sapiens
  misc_RNA (1)...(19): siRNA sense strand
guugaaggaccaggugaaa

SEQ ID NO: 1909382 - RNA, 19 nt, Homo sapiens
  misc_RNA (1)...(19): siRNA sense strand
cauggagaguguccucaag

SEQ ID NO: 1909383 - RNA, 19 nt, Homo sapiens
  misc_RNA (1)...(19): siRNA sense strand
ucucagcuauaaacacaag

SEQ ID NO: 1909384 - RNA, 19 nt, Homo sapiens
  misc_RNA (1)...(19): siRNA sense strand
aaaggcugaguuucaaauu

SEQ ID NO: 1909385 - RNA, 19 nt, Homo sapiens
  misc_RNA (1)...(19): siRNA sense strand
gcuguauguuguugucucu

SEQ ID NO: 1909386 - RNA, 19 nt, Homo sapiens
  misc_RNA (1)...(19): siRNA sense strand
gaaggaccaggugaaaucu

SEQ ID NO: 1909387 - RNA, 19 nt, Homo sapiens
  misc_RNA (1)...(19): siRNA sense strand
cuuccuggaugcccugcua

SEQ ID NO: 1909388 - RNA, 19 nt, Homo sapiens
  misc_RNA (1)...(19): siRNA sense strand
gauauucggcaggaucuag

SEQ ID NO: 1909389 - RNA, 19 nt, Homo sapiens
  misc_RNA (1)...(19): siRNA sense strand
agggccaucucagcuauaa

SEQ ID NO: 1909390 - RNA, 19 nt, Homo sapiens
  misc_RNA (1)...(19): siRNA sense strand
aaaggaggaaacccugaaa

SEQ ID NO: 1909391 - RNA, 19 nt, Homo sapiens
  misc_RNA (1)...(19): siRNA sense strand
gugagauuacccaaagaaa

SEQ ID NO: 1909392 - RNA, 19 nt, Homo sapiens
  misc_RNA (1)...(19): siRNA sense strand
uaacaauuucaggcaguuu

SEQ ID NO: 1909393 - RNA, 19 nt, Homo sapiens
  misc_RNA (1)...(19): siRNA sense strand
uggcugaggcccuggagaa

SEQ ID NO: 1909394 - RNA, 19 nt, Homo sapiens
  misc_RNA (1)...(19): siRNA sense strand
ggccaucucagcuauaaac

SEQ ID NO: 1909395 - RNA, 19 nt, Homo sapiens
  misc_RNA (1)...(19): siRNA sense strand
aaaccuguaucuggugaca

SEQ ID NO: 1909396 - RNA, 19 nt, Homo sapiens
  misc_RNA (1)...(19): siRNA sense strand
guauguuguugucucuauc

SEQ ID NO: 1909397 - RNA, 19 nt, Homo sapiens
  misc_RNA (1)...(19): siRNA sense strand
gauggacauucuggacaca

SEQ ID NO: 1909398 - RNA, 19 nt, Homo sapiens
  misc_RNA (1)...(19): siRNA sense strand
aaaagcgaccggcaauaua

SEQ ID NO: 1909399 - RNA, 19 nt, Homo sapiens
  misc_RNA (1)...(19): siRNA sense strand
ggaccaaacuccuucaaua

SEQ ID NO: 1909400 - RNA, 19 nt, Homo sapiens
  misc_RNA (1)...(19): siRNA sense strand
caacaaagccuacaaagau

SEQ ID NO: 1909401 - RNA, 19 nt, Homo sapiens
  misc_RNA (1)...(19): siRNA sense strand
cuacaaagaucuccaaguu

SEQ ID NO: 1909402 - RNA, 19 nt, Homo sapiens
  misc_RNA (1)...(19): siRNA sense strand
gcgaucagcugaagaagaa

SEQ ID NO: 1909403 - RNA, 19 nt, Homo sapiens
  misc_RNA (1)...(19): siRNA sense strand
ggaaaugccuccagaagca

SEQ ID NO: 1909404 - RNA, 19 nt, Homo sapiens
  misc_RNA (1)...(19): siRNA sense strand
uaaagaaacuguuccaacu

SEQ ID NO: 1909405 - RNA, 19 nt, Homo sapiens
  misc_RNA (1)...(19): siRNA sense strand
gaccaaacuccuucaauaa

SEQ ID NO: 1909406 - RNA, 19 nt, Homo sapiens
  misc_RNA (1)...(19): siRNA sense strand
gcaaagaugaggaugaaga

SEQ ID NO: 1909407 - RNA, 19 nt, Homo sapiens
  misc_RNA (1)...(19): siRNA sense strand
cggaggaccugaagaagaa

SEQ ID NO: 1909408 - RNA, 19 nt, Homo sapiens
  misc_RNA (1)...(19): siRNA sense strand
gaagcgaucagcugaagaa

SEQ ID NO: 1909409 - RNA, 19 nt, Homo sapiens
  misc_RNA (1)...(19): siRNA sense strand
ucaaguaagccuaaagaaa

SEQ ID NO: 1909410 - RNA, 19 nt, Homo sapiens
  misc_RNA (1)...(19): siRNA sense strand
caaguaagccuaaagaaac

SEQ ID NO: 1909411 - RNA, 19 nt, Homo sapiens
  misc_RNA (1)...(19): siRNA sense strand
gaucaaguaagccuaaaga

SEQ ID NO: 1909412 - RNA, 19 nt, Homo sapiens
  misc_RNA (1)...(19): siRNA sense strand
gaagcaaagaugaggauga

SEQ ID NO: 1909413 - RNA, 19 nt, Homo sapiens
  misc_RNA (1)...(19): siRNA sense strand
guagucagacgacaaagaa

SEQ ID NO: 1909414 - RNA, 19 nt, Homo sapiens
  misc_RNA (1)...(19): siRNA sense strand
agaugaggaugaagaauau

SEQ ID NO: 1909415 - RNA, 19 nt, Homo sapiens
  misc_RNA (1)...(19): siRNA sense strand
aagcaaagaugaggaugaa

SEQ ID NO: 1909416 - RNA, 19 nt, Homo sapiens
  misc_RNA (1)...(19): siRNA sense strand
gagaagcgaucagcugaag

SEQ ID NO: 1909417 - RNA, 19 nt, Homo sapiens
  misc_RNA (1)...(19): siRNA sense strand
gaaacuguuccaacucuug

SEQ ID NO: 1909418 - RNA, 19 nt, Homo sapiens
  misc_RNA (1)...(19): siRNA sense strand
aagaugaggaugaagaaua

SEQ ID NO: 1909419 - RNA, 19 nt, Homo sapiens
  misc_RNA (1)...(19): siRNA sense strand
ccaacaaagccuacaaaga

SEQ ID NO: 1909420 - RNA, 19 nt, Homo sapiens
  misc_RNA (1)...(19): siRNA sense strand
caaagaugaggaugaagaa

SEQ ID NO: 1909421 - RNA, 19 nt, Homo sapiens
  misc_RNA (1)...(19): siRNA sense strand
gaagggauacaccaacauc

SEQ ID NO: 1909422 - RNA, 19 nt, Homo sapiens
  misc_RNA (1)...(19): siRNA sense strand
caaguuuggauuugccaua

SEQ ID NO: 1909423 - RNA, 19 nt, Homo sapiens
  misc_RNA (1)...(19): siRNA sense strand
caacaucagcuggaccaaa

SEQ ID NO: 1909424 - RNA, 19 nt, Homo sapiens
  misc_RNA (1)...(19): siRNA sense strand
cugccgaccucccaacaaa

SEQ ID NO: 1909425 - RNA, 19 nt, Homo sapiens
  misc_RNA (1)...(19): siRNA sense strand
aagaaacuguuccaacucu

SEQ ID NO: 1909426 - RNA, 19 nt, Homo sapiens
  misc_RNA (1)...(19): siRNA sense strand
ggaaggcgggagacgagaa

SEQ ID NO: 1909427 - RNA, 19 nt, Homo sapiens
  misc_RNA (1)...(19): siRNA sense strand
aagaauauuggaagggaua

SEQ ID NO: 1909428 - RNA, 19 nt, Homo sapiens
  misc_RNA (1)...(19): siRNA sense strand
uuccaacucuugcuccaaa

SEQ ID NO: 1909429 - RNA, 19 nt, Homo sapiens
  misc_RNA (1)...(19): siRNA sense strand
gguagucagacgacaaaga

SEQ ID NO: 1909430 - RNA, 19 nt, Homo sapiens
  misc_RNA (1)...(19): siRNA sense strand
gauagugaaccagaggaaa

SEQ ID NO: 1909431 - RNA, 19 nt, Homo sapiens
  misc_RNA (1)...(19): siRNA sense strand
aacaaagccuacaaagauc

SEQ ID NO: 1909432 - RNA, 19 nt, Homo sapiens
  misc_RNA (1)...(19): siRNA sense strand
gaaaugccuccagaagcaa

SEQ ID NO: 1909433 - RNA, 19 nt, Homo sapiens
  misc_RNA (1)...(19): siRNA sense strand
gaagaugaagauagugaac

SEQ ID NO: 1909434 - RNA, 19 nt, Homo sapiens
  misc_RNA (1)...(19): siRNA sense strand
uacaaagaucuccaaguuu

SEQ ID NO: 1909435 - RNA, 19 nt, Homo sapiens
  misc_RNA (1)...(19): siRNA sense strand
uggaagggauacaccaaca

SEQ ID NO: 1909436 - RNA, 19 nt, Homo sapiens
  misc_RNA (1)...(19): siRNA sense strand
accaaacuccuucaauaaa

SEQ ID NO: 1909437 - RNA, 19 nt, Homo sapiens
  misc_RNA (1)...(19): siRNA sense strand
ggagacgagaagccugaaa

SEQ ID NO: 1909438 - RNA, 19 nt, Homo sapiens
  misc_RNA (1)...(19): siRNA sense strand
aacaucagcuggaccaaac

SEQ ID NO: 1909439 - RNA, 19 nt, Homo sapiens
  misc_RNA (1)...(19): siRNA sense strand
ggagcgaaauauaaaaucu

SEQ ID NO: 1909440 - RNA, 19 nt, Homo sapiens
  misc_RNA (1)...(19): siRNA sense strand
ccggaggaccugaagaaga

SEQ ID NO: 1909441 - RNA, 19 nt, Homo sapiens
  misc_RNA (1)...(19): siRNA sense strand
agaugaagauagugaacca

SEQ ID NO: 1909442 - RNA, 19 nt, Homo sapiens
  misc_RNA (1)...(19): siRNA sense strand
uagguagucagacgacaaa

SEQ ID NO: 1909443 - RNA, 19 nt, Homo sapiens
  misc_RNA (1)...(19): siRNA sense strand
gaggaugaagaauauugga

SEQ ID NO: 1909444 - RNA, 19 nt, Homo sapiens
  misc_RNA (1)...(19): siRNA sense strand
gaaggcgggagacgagaag

SEQ ID NO: 1909445 - RNA, 19 nt, Homo sapiens
  misc_RNA (1)...(19): siRNA sense strand
ggaagggauacaccaacau

SEQ ID NO: 1909446 - RNA, 19 nt, Homo sapiens
  misc_RNA (1)...(19): siRNA sense strand
cagcagcuuuuaaugaaga

SEQ ID NO: 1909447 - RNA, 19 nt, Homo sapiens
  misc_RNA (1)...(19): siRNA sense strand
gauuugccauagguaguca

SEQ ID NO: 1909448 - RNA, 19 nt, Homo sapiens
  misc_RNA (1)...(19): siRNA sense strand
ugaagaugaagauagugaa

SEQ ID NO: 1909449 - RNA, 19 nt, Homo sapiens
  misc_RNA (1)...(19): siRNA sense strand
agaaacuguuccaacucuu

SEQ ID NO: 1909450 - RNA, 19 nt, Homo sapiens
  misc_RNA (1)...(19): siRNA sense strand
aaguaagccuaaagaaacu

SEQ ID NO: 1909451 - RNA, 19 nt, Homo sapiens
  misc_RNA (1)...(19): siRNA sense strand
gaacugcucuuggcucuga

SEQ ID NO: 1909452 - RNA, 19 nt, Homo sapiens
  misc_RNA (1)...(19): siRNA sense strand
gagcaucucuggaaguuga

SEQ ID NO: 1909453 - RNA, 19 nt, Homo sapiens
  misc_RNA (1)...(19): siRNA sense strand
gcaagcaccucaagucgaa

SEQ ID NO: 1909454 - RNA, 19 nt, Homo sapiens
  misc_RNA (1)...(19): siRNA sense strand
ugacacagcucaacacaug

SEQ ID NO: 1909455 - RNA, 19 nt, Homo sapiens
  misc_RNA (1)...(19): siRNA sense strand
gcaaucaaguggcgccuaa

SEQ ID NO: 1909456 - RNA, 19 nt, Homo sapiens
  misc_RNA (1)...(19): siRNA sense strand
gaaccagacugaugcaauc

SEQ ID NO: 1909457 - RNA, 19 nt, Homo sapiens
  misc_RNA (1)...(19): siRNA sense strand
ggaaguugaugguagaaga

SEQ ID NO: 1909458 - RNA, 19 nt, Homo sapiens
  misc_RNA (1)...(19): siRNA sense strand
uggauaaucuucaguacua

SEQ ID NO: 1909459 - RNA, 19 nt, Homo sapiens
  misc_RNA (1)...(19): siRNA sense strand
gaaacagucuacaaacaca

SEQ ID NO: 1909460 - RNA, 19 nt, Homo sapiens
  misc_RNA (1)...(19): siRNA sense strand
ggaccagcaugaagaauuc

SEQ ID NO: 1909461 - RNA, 19 nt, Homo sapiens
  misc_RNA (1)...(19): siRNA sense strand
caagguggguuacauggaa

SEQ ID NO: 1909462 - RNA, 19 nt, Homo sapiens
  misc_RNA (1)...(19): siRNA sense strand
caacuacuguuacgacuag

SEQ ID NO: 1909463 - RNA, 19 nt, Homo sapiens
  misc_RNA (1)...(19): siRNA sense strand
ugagagaacugcaggacuu

SEQ ID NO: 1909464 - RNA, 19 nt, Homo sapiens
  misc_RNA (1)...(19): siRNA sense strand
gcucaauccuuuauccuau

SEQ ID NO: 1909465 - RNA, 19 nt, Homo sapiens
  misc_RNA (1)...(19): siRNA sense strand
uaacugagcaugaugugaa

SEQ ID NO: 1909466 - RNA, 19 nt, Homo sapiens
  misc_RNA (1)...(19): siRNA sense strand
uaagaaaucacauggcauu

SEQ ID NO: 1909467 - RNA, 19 nt, Homo sapiens
  misc_RNA (1)...(19): siRNA sense strand
ugaaugaaauccuagaucu

SEQ ID NO: 1909468 - RNA, 19 nt, Homo sapiens
  misc_RNA (1)...(19): siRNA sense strand
uauauucgcuucacugagu

SEQ ID NO: 1909469 - RNA, 19 nt, Homo sapiens
  misc_RNA (1)...(19): siRNA sense strand
ucaguacuaucuccaggua

SEQ ID NO: 1909470 - RNA, 19 nt, Homo sapiens
  misc_RNA (1)...(19): siRNA sense strand
caccaucucugaagcaguu

SEQ ID NO: 1909471 - RNA, 19 nt, Homo sapiens
  misc_RNA (1)...(19): siRNA sense strand
uaucacaugucaacuacuu

SEQ ID NO: 1909472 - RNA, 19 nt, Homo sapiens
  misc_RNA (1)...(19): siRNA sense strand
gaaccuaggcccacuggau

SEQ ID NO: 1909473 - RNA, 19 nt, Homo sapiens
  misc_RNA (1)...(19): siRNA sense strand
ggaguggccugcagguauc

SEQ ID NO: 1909474 - RNA, 19 nt, Homo sapiens
  misc_RNA (1)...(19): siRNA sense strand
ggucagcugaagaucauua

SEQ ID NO: 1909475 - RNA, 19 nt, Homo sapiens
  misc_RNA (1)...(19): siRNA sense strand
ggaaaggagcacaaagaug

SEQ ID NO: 1909476 - RNA, 19 nt, Homo sapiens
  misc_RNA (1)...(19): siRNA sense strand
gcacuugacaaucgaguau

SEQ ID NO: 1909477 - RNA, 19 nt, Homo sapiens
  misc_RNA (1)...(19): siRNA sense strand
ucaaguggcgccuaagaaa

SEQ ID NO: 1909478 - RNA, 19 nt, Homo sapiens
  misc_RNA (1)...(19): siRNA sense strand
caacucagauuuggcucaa

SEQ ID NO: 1909479 - RNA, 19 nt, Homo sapiens
  misc_RNA (1)...(19): siRNA sense strand
caucagaucaacucagauu

SEQ ID NO: 1909480 - RNA, 19 nt, Homo sapiens
  misc_RNA (1)...(19): siRNA sense strand
gaaguugaugguagaagaa

SEQ ID NO: 1909481 - RNA, 19 nt, Homo sapiens
  misc_RNA (1)...(19): siRNA sense strand
ucaagauucucuccagugu

SEQ ID NO: 1909482 - RNA, 19 nt, Homo sapiens
  misc_RNA (1)...(19): siRNA sense strand
cacaagguauugcuagaug

SEQ ID NO: 1909483 - RNA, 19 nt, Homo sapiens
  misc_RNA (1)...(19): siRNA sense strand
aagauucucuccaguguuc

SEQ ID NO: 1909484 - RNA, 19 nt, Homo sapiens
  misc_RNA (1)...(19): siRNA sense strand
gcuagaugaugacaaccuu

SEQ ID NO: 1909485 - RNA, 19 nt, Homo sapiens
  misc_RNA (1)...(19): siRNA sense strand
ccauaucacaugucaacua

SEQ ID NO: 1909486 - RNA, 19 nt, Homo sapiens
  misc_RNA (1)...(19): siRNA sense strand
gaauguggccuuucaacag

SEQ ID NO: 1909487 - RNA, 19 nt, Homo sapiens
  misc_RNA (1)...(19): siRNA sense strand
ugugaugguuguaguagaa

SEQ ID NO: 1909488 - RNA, 19 nt, Homo sapiens
  misc_RNA (1)...(19): siRNA sense strand
gaaccugacuagaaaagga

SEQ ID NO: 1909489 - RNA, 19 nt, Homo sapiens
  misc_RNA (1)...(19): siRNA sense strand
uggaaacagucuacaaaca

SEQ ID NO: 1909490 - RNA, 19 nt, Homo sapiens
  misc_RNA (1)...(19): siRNA sense strand
ggaaucaucagaucaacuc

SEQ ID NO: 1909491 - RNA, 19 nt, Homo sapiens
  misc_RNA (1)...(19): siRNA sense strand
cauaucacaugucaacuac

SEQ ID NO: 1909492 - RNA, 19 nt, Homo sapiens
  misc_RNA (1)...(19): siRNA sense strand
ucagaucaacucagauuug

SEQ ID NO: 1909493 - RNA, 19 nt, Homo sapiens
  misc_RNA (1)...(19): siRNA sense strand
ucacuccuguucaagauuc

SEQ ID NO: 1909494 - RNA, 19 nt, Homo sapiens
  misc_RNA (1)...(19): siRNA sense strand
gaccaguuccagcuucuuu

SEQ ID NO: 1909495 - RNA, 19 nt, Homo sapiens
  misc_RNA (1)...(19): siRNA sense strand
gaaaacaacugagagaacu

SEQ ID NO: 1909496 - RNA, 19 nt, Homo sapiens
  misc_RNA (1)...(19): siRNA sense strand
agauuuggcucaacuacug

SEQ ID NO: 1909497 - RNA, 19 nt, Homo sapiens
  misc_RNA (1)...(19): siRNA sense strand
gcucggcacagacuauauu

SEQ ID NO: 1909498 - RNA, 19 nt, Homo sapiens
  misc_RNA (1)...(19): siRNA sense strand
aaugugaaccugacuagaa

SEQ ID NO: 1909499 - RNA, 19 nt, Homo sapiens
  misc_RNA (1)...(19): siRNA sense strand
ggaaacagucuacaaacac

SEQ ID NO: 1909500 - RNA, 19 nt, Homo sapiens
  misc_RNA (1)...(19): siRNA sense strand
acagucagcacacaaggua

SEQ ID NO: 1909501 - RNA, 19 nt, Homo sapiens
  misc_RNA (1)...(19): siRNA sense strand
ggauaaucuucaguacuau

SEQ ID NO: 1909502 - RNA, 19 nt, Homo sapiens
  misc_RNA (1)...(19): siRNA sense strand
gcagguaucgcaggacuuc

SEQ ID NO: 1909503 - RNA, 19 nt, Homo sapiens
  misc_RNA (1)...(19): siRNA sense strand
ucucccagcugcuucauca

SEQ ID NO: 1909504 - RNA, 19 nt, Homo sapiens
  misc_RNA (1)...(19): siRNA sense strand
ucgcuucacugaguucauu

SEQ ID NO: 1909505 - RNA, 19 nt, Homo sapiens
  misc_RNA (1)...(19): siRNA sense strand
cgaggaggaucugggcauu

SEQ ID NO: 1909506 - RNA, 19 nt, Homo sapiens
  misc_RNA (1)...(19): siRNA sense strand
gaacaugcuggcaccaucu

SEQ ID NO: 1909507 - RNA, 19 nt, Homo sapiens
  misc_RNA (1)...(19): siRNA sense strand
cagaucaacucagauuugg

SEQ ID NO: 1909508 - RNA, 19 nt, Homo sapiens
  misc_RNA (1)...(19): siRNA sense strand
guacacgggccaugugcaa

SEQ ID NO: 1909509 - RNA, 19 nt, Homo sapiens
  misc_RNA (1)...(19): siRNA sense strand
gccacuacauauucucuuc

SEQ ID NO: 1909510 - RNA, 19 nt, Homo sapiens
  misc_RNA (1)...(19): siRNA sense strand
acaagguauugcuagauga

SEQ ID NO: 1909511 - RNA, 19 nt, Homo sapiens
  misc_RNA (1)...(19): siRNA sense strand
aaagauucaugguugucaa

SEQ ID NO: 1909512 - RNA, 19 nt, Homo sapiens
  misc_RNA (1)...(19): siRNA sense strand
ugagaccaguguccugaau

SEQ ID NO: 1909513 - RNA, 19 nt, Homo sapiens
  misc_RNA (1)...(19): siRNA sense strand
gaccacuuccugagcaauu

SEQ ID NO: 1909514 - RNA, 19 nt, Homo sapiens
  misc_RNA (1)...(19): siRNA sense strand
gcacugcugggcccuacaa

SEQ ID NO: 1909515 - RNA, 19 nt, Homo sapiens
  misc_RNA (1)...(19): siRNA sense strand
ucagcuugguggacuuuga

SEQ ID NO: 1909516 - RNA, 19 nt, Homo sapiens
  misc_RNA (1)...(19): siRNA sense strand
aauccuauuuguuggagaa

SEQ ID NO: 1909517 - RNA, 19 nt, Homo sapiens
  misc_RNA (1)...(19): siRNA sense strand
uuucaggccuucauugaca

SEQ ID NO: 1909518 - RNA, 19 nt, Homo sapiens
  misc_RNA (1)...(19): siRNA sense strand
ccuggaaacagucuacaaa

SEQ ID NO: 1909519 - RNA, 19 nt, Homo sapiens
  misc_RNA (1)...(19): siRNA sense strand
aguacuaucuccagguaga

SEQ ID NO: 1909520 - RNA, 19 nt, Homo sapiens
  misc_RNA (1)...(19): siRNA sense strand
caaguggcgccuaagaaau

SEQ ID NO: 1909521 - RNA, 19 nt, Homo sapiens
  misc_RNA (1)...(19): siRNA sense strand
ggacguggagaacuguuuc

SEQ ID NO: 1909522 - RNA, 19 nt, Homo sapiens
  misc_RNA (1)...(19): siRNA sense strand
gucaaauccuggaaacagu

SEQ ID NO: 1909523 - RNA, 19 nt, Homo sapiens
  misc_RNA (1)...(19): siRNA sense strand
agucuucacuccuguucaa

SEQ ID NO: 1909524 - RNA, 19 nt, Homo sapiens
  misc_RNA (1)...(19): siRNA sense strand
gcuggucagucagaaccua

SEQ ID NO: 1909525 - RNA, 19 nt, Homo sapiens
  misc_RNA (1)...(19): siRNA sense strand
uuugcuggcucaauccuuu

SEQ ID NO: 1909526 - RNA, 19 nt, Homo sapiens
  misc_RNA (1)...(19): siRNA sense strand
caauucuacccgagacuuu

SEQ ID NO: 1909527 - RNA, 19 nt, Homo sapiens
  misc_RNA (1)...(19): siRNA sense strand
cagcuguccuggaaaagua

SEQ ID NO: 1909528 - RNA, 19 nt, Homo sapiens
  misc_RNA (1)...(19): siRNA sense strand
cacacaagguauugcuaga

SEQ ID NO: 1909529 - RNA, 19 nt, Homo sapiens
  misc_RNA (1)...(19): siRNA sense strand
agcugaagaucauuaaaga

SEQ ID NO: 1909530 - RNA, 19 nt, Homo sapiens
  misc_RNA (1)...(19): siRNA sense strand
guccagauguuugagaauc

SEQ ID NO: 1909531 - RNA, 19 nt, Homo sapiens
  misc_RNA (1)...(19): siRNA sense strand
gcacuguggcugagcaucu

SEQ ID NO: 1909532 - RNA, 19 nt, Homo sapiens
  misc_RNA (1)...(19): siRNA sense strand
gggccaagguggguuacau

SEQ ID NO: 1909533 - RNA, 19 nt, Homo sapiens
  misc_RNA (1)...(19): siRNA sense strand
gcugagcauucucgugaag

SEQ ID NO: 1909534 - RNA, 19 nt, Homo sapiens
  misc_RNA (1)...(19): siRNA sense strand
uuuguucgcuggucaguca

SEQ ID NO: 1909535 - RNA, 19 nt, Homo sapiens
  misc_RNA (1)...(19): siRNA sense strand
uggcugagcaucucuggaa

SEQ ID NO: 1909536 - RNA, 19 nt, Homo sapiens
  misc_RNA (1)...(19): siRNA sense strand
ccagugaggguugcugaaa

SEQ ID NO: 1909537 - RNA, 19 nt, Homo sapiens
  misc_RNA (1)...(19): siRNA sense strand
cagcugaagaucauuaaag

SEQ ID NO: 1909538 - RNA, 19 nt, Homo sapiens
  misc_RNA (1)...(19): siRNA sense strand
ucuggaaguugaugguaga

SEQ ID NO: 1909539 - RNA, 19 nt, Homo sapiens
  misc_RNA (1)...(19): siRNA sense strand
cugagcaucucuggaaguu

SEQ ID NO: 1909540 - RNA, 19 nt, Homo sapiens
  misc_RNA (1)...(19): siRNA sense strand
augugaaccugacuagaaa

SEQ ID NO: 1909541 - RNA, 19 nt, Homo sapiens
  misc_RNA (1)...(19): siRNA sense strand
aauguggccuuucaacagu

SEQ ID NO: 1909542 - RNA, 19 nt, Homo sapiens
  misc_RNA (1)...(19): siRNA sense strand
gcauccgauuggcucauga

SEQ ID NO: 1909543 - RNA, 19 nt, Homo sapiens
  misc_RNA (1)...(19): siRNA sense strand
uagauguguuggagucuca

SEQ ID NO: 1909544 - RNA, 19 nt, Homo sapiens
  misc_RNA (1)...(19): siRNA sense strand
cugcugggcccuacaaaug

SEQ ID NO: 1909545 - RNA, 19 nt, Homo sapiens
  misc_RNA (1)...(19): siRNA sense strand
gaaugaaauccuagaucuc

SEQ ID NO: 1909546 - RNA, 19 nt, Homo sapiens
  misc_RNA (1)...(19): siRNA sense strand
uaucgcaggacuucccuuu

SEQ ID NO: 1909547 - RNA, 19 nt, Homo sapiens
  misc_RNA (1)...(19): siRNA sense strand
cggaguggccugcagguau

SEQ ID NO: 1909548 - RNA, 19 nt, Homo sapiens
  misc_RNA (1)...(19): siRNA sense strand
agguauugcuagaugauga

SEQ ID NO: 1909549 - RNA, 19 nt, Homo sapiens
  misc_RNA (1)...(19): siRNA sense strand
ugaugugaauguggccuuu

SEQ ID NO: 1909550 - RNA, 19 nt, Homo sapiens
  misc_RNA (1)...(19): siRNA sense strand
cuacuguuacgacuagauu

SEQ ID NO: 1909551 - RNA, 19 nt, Homo sapiens
  misc_RNA (1)...(19): siRNA sense strand
ucacagagcucgaaagaga

SEQ ID NO: 1909552 - RNA, 19 nt, Homo sapiens
  misc_RNA (1)...(19): siRNA sense strand
agaauaagcucaucaaguu

SEQ ID NO: 1909553 - RNA, 19 nt, Homo sapiens
  misc_RNA (1)...(19): siRNA sense strand
gaaacgaugcccaaucuua

SEQ ID NO: 1909554 - RNA, 19 nt, Homo sapiens
  misc_RNA (1)...(19): siRNA sense strand
caauggauuugcaggauua

SEQ ID NO: 1909555 - RNA, 19 nt, Homo sapiens
  misc_RNA (1)...(19): siRNA sense strand
ccacuuagaucacaaucaa

SEQ ID NO: 1909556 - RNA, 19 nt, Homo sapiens
  misc_RNA (1)...(19): siRNA sense strand
ugagagagcuucaccuaga

SEQ ID NO: 1909557 - RNA, 19 nt, Homo sapiens
  misc_RNA (1)...(19): siRNA sense strand
ggauuugcaggauuaauua

SEQ ID NO: 1909558 - RNA, 19 nt, Homo sapiens
  misc_RNA (1)...(19): siRNA sense strand
gaauaagcucaucaaguua

SEQ ID NO: 1909559 - RNA, 19 nt, Homo sapiens
  misc_RNA (1)...(19): siRNA sense strand
gugcugcccucccacuuua

SEQ ID NO: 1909560 - RNA, 19 nt, Homo sapiens
  misc_RNA (1)...(19): siRNA sense strand
uuacuuggcuccacuuaga

SEQ ID NO: 1909561 - RNA, 19 nt, Homo sapiens
  misc_RNA (1)...(19): siRNA sense strand
gcucgaaagagaucaauuu

SEQ ID NO: 1909562 - RNA, 19 nt, Homo sapiens
  misc_RNA (1)...(19): siRNA sense strand
gacuggaaaugaaaucaaa

SEQ ID NO: 1909563 - RNA, 19 nt, Homo sapiens
  misc_RNA (1)...(19): siRNA sense strand
gcagcaauauaugcaauga

SEQ ID NO: 1909564 - RNA, 19 nt, Homo sapiens
  misc_RNA (1)...(19): siRNA sense strand
uaaacagccuugauuccaa

SEQ ID NO: 1909565 - RNA, 19 nt, Homo sapiens
  misc_RNA (1)...(19): siRNA sense strand
acaaagaaaucccaacuac

SEQ ID NO: 1909566 - RNA, 19 nt, Homo sapiens
  misc_RNA (1)...(19): siRNA sense strand
gaucuuaaacucccugaga

SEQ ID NO: 1909567 - RNA, 19 nt, Homo sapiens
  misc_RNA (1)...(19): siRNA sense strand
gaccguauaaugaauauga

SEQ ID NO: 1909568 - RNA, 19 nt, Homo sapiens
  misc_RNA (1)...(19): siRNA sense strand
gaccaaggaccguauaaug

SEQ ID NO: 1909569 - RNA, 19 nt, Homo sapiens
  misc_RNA (1)...(19): siRNA sense strand
ccaaggagaggauauucua

SEQ ID NO: 1909570 - RNA, 19 nt, Homo sapiens
  misc_RNA (1)...(19): siRNA sense strand
aaacgaugcccaaucuuaa

SEQ ID NO: 1909571 - RNA, 19 nt, Homo sapiens
  misc_RNA (1)...(19): siRNA sense strand
ccaaggaccguauaaugaa

SEQ ID NO: 1909572 - RNA, 19 nt, Homo sapiens
  misc_RNA (1)...(19): siRNA sense strand
uuaaucagcugucaucucu

SEQ ID NO: 1909573 - RNA, 19 nt, Homo sapiens
  misc_RNA (1)...(19): siRNA sense strand
aaagaaaucccaacuacug

SEQ ID NO: 1909574 - RNA, 19 nt, Homo sapiens
  misc_RNA (1)...(19): siRNA sense strand
gauccaaccacugaauaua

SEQ ID NO: 1909575 - RNA, 19 nt, Homo sapiens
  misc_RNA (1)...(19): siRNA sense strand
gagauccaaccacugaaua

SEQ ID NO: 1909576 - RNA, 19 nt, Homo sapiens
  misc_RNA (1)...(19): siRNA sense strand
aaucaaagccaucgacuug

SEQ ID NO: 1909577 - RNA, 19 nt, Homo sapiens
  misc_RNA (1)...(19): siRNA sense strand
ugucauggcuacaacuuau

SEQ ID NO: 1909578 - RNA, 19 nt, Homo sapiens
  misc_RNA (1)...(19): siRNA sense strand
caaacacgacuccauaugu

SEQ ID NO: 1909579 - RNA, 19 nt, Homo sapiens
  misc_RNA (1)...(19): siRNA sense strand
acaaccagcugacgaagau

SEQ ID NO: 1909580 - RNA, 19 nt, Homo sapiens
  misc_RNA (1)...(19): siRNA sense strand
ggacccuucaucaucauua

SEQ ID NO: 1909581 - RNA, 19 nt, Homo sapiens
  misc_RNA (1)...(19): siRNA sense strand
aaacacgacuccauauguc

SEQ ID NO: 1909582 - RNA, 19 nt, Homo sapiens
  misc_RNA (1)...(19): siRNA sense strand
gcucauuuccuacggcuaa

SEQ ID NO: 1909583 - RNA, 19 nt, Homo sapiens
  misc_RNA (1)...(19): siRNA sense strand
gagaucaauuugccagcuu

SEQ ID NO: 1909584 - RNA, 19 nt, Homo sapiens
  misc_RNA (1)...(19): siRNA sense strand
gacccuucaucaucauuaa

SEQ ID NO: 1909585 - RNA, 19 nt, Homo sapiens
  misc_RNA (1)...(19): siRNA sense strand
caaggaccguauaaugaau

SEQ ID NO: 1909586 - RNA, 19 nt, Homo sapiens
  misc_RNA (1)...(19): siRNA sense strand
acccagagcucuucuaugg

SEQ ID NO: 1909587 - RNA, 19 nt, Homo sapiens
  misc_RNA (1)...(19): siRNA sense strand
gacaaagaaaucccaacua

SEQ ID NO: 1909588 - RNA, 19 nt, Homo sapiens
  misc_RNA (1)...(19): siRNA sense strand
agaccugacuggaaaugaa

SEQ ID NO: 1909589 - RNA, 19 nt, Homo sapiens
  misc_RNA (1)...(19): siRNA sense strand
cgggaacaauggcuuuauu

SEQ ID NO: 1909590 - RNA, 19 nt, Homo sapiens
  misc_RNA (1)...(19): siRNA sense strand
aauaugaacccacccauga

SEQ ID NO: 1909591 - RNA, 19 nt, Homo sapiens
  misc_RNA (1)...(19): siRNA sense strand
aaacaugucagaccaagga

SEQ ID NO: 1909592 - RNA, 19 nt, Homo sapiens
  misc_RNA (1)...(19): siRNA sense strand
acaaugccaucuucacuca

SEQ ID NO: 1909593 - RNA, 19 nt, Homo sapiens
  misc_RNA (1)...(19): siRNA sense strand
caucauuaaugguuaugga

SEQ ID NO: 1909594 - RNA, 19 nt, Homo sapiens
  misc_RNA (1)...(19): siRNA sense strand
caucacagagcucgaaaga

SEQ ID NO: 1909595 - RNA, 19 nt, Homo sapiens
  misc_RNA (1)...(19): siRNA sense strand
gcagcugccauacaaagaa

SEQ ID NO: 1909596 - RNA, 19 nt, Homo sapiens
  misc_RNA (1)...(19): siRNA sense strand
guaauuacgggaacaaugg

SEQ ID NO: 1909597 - RNA, 19 nt, Homo sapiens
  misc_RNA (1)...(19): siRNA sense strand
gcacccagagcucuucuau

SEQ ID NO: 1909598 - RNA, 19 nt, Homo sapiens
  misc_RNA (1)...(19): siRNA sense strand
gcaauauaugcaaugagua

SEQ ID NO: 1909599 - RNA, 19 nt, Homo sapiens
  misc_RNA (1)...(19): siRNA sense strand
gaacaaaaucagcaacuug

SEQ ID NO: 1909600 - RNA, 19 nt, Homo sapiens
  misc_RNA (1)...(19): siRNA sense strand
uagaugcaguccauggauu

SEQ ID NO: 1909601 - RNA, 19 nt, Homo sapiens
  misc_RNA (1)...(19): siRNA sense strand
gcacacgcucuucuuacaa

SEQ ID NO: 1909602 - RNA, 19 nt, Homo sapiens
  misc_RNA (1)...(19): siRNA sense strand
ccaacucccugcggacuau

SEQ ID NO: 1909603 - RNA, 19 nt, Homo sapiens
  misc_RNA (1)...(19): siRNA sense strand
ggcuacaacuuauagagau

SEQ ID NO: 1909604 - RNA, 19 nt, Homo sapiens
  misc_RNA (1)...(19): siRNA sense strand
gcaggauuaauuaaacuga

SEQ ID NO: 1909605 - RNA, 19 nt, Homo sapiens
  misc_RNA (1)...(19): siRNA sense strand
gucuggaguuucuggauuu

SEQ ID NO: 1909606 - RNA, 19 nt, Homo sapiens
  misc_RNA (1)...(19): siRNA sense strand
gagagagcuucaccuagag

SEQ ID NO: 1909607 - RNA, 19 nt, Homo sapiens
  misc_RNA (1)...(19): siRNA sense strand
ugggaacacuccauccuau

SEQ ID NO: 1909608 - RNA, 19 nt, Homo sapiens
  misc_RNA (1)...(19): siRNA sense strand
gccaucgacuugacagugu

SEQ ID NO: 1909609 - RNA, 19 nt, Homo sapiens
  misc_RNA (1)...(19): siRNA sense strand
gaauuaggcagugcucaau

SEQ ID NO: 1909610 - RNA, 19 nt, Homo sapiens
  misc_RNA (1)...(19): siRNA sense strand
ccuccuggcugggcaguuu

SEQ ID NO: 1909611 - RNA, 19 nt, Homo sapiens
  misc_RNA (1)...(19): siRNA sense strand
ggagaggauauucuagaug

SEQ ID NO: 1909612 - RNA, 19 nt, Homo sapiens
  misc_RNA (1)...(19): siRNA sense strand
cagcugacgaagauuaauu

SEQ ID NO: 1909613 - RNA, 19 nt, Homo sapiens
  misc_RNA (1)...(19): siRNA sense strand
gguaauuacgggaacaaug

SEQ ID NO: 1909614 - RNA, 19 nt, Homo sapiens
  misc_RNA (1)...(19): siRNA sense strand
cacacgcucuucuuacaau

SEQ ID NO: 1909615 - RNA, 19 nt, Homo sapiens
  misc_RNA (1)...(19): siRNA sense strand
gaccugacuggaaaugaaa

SEQ ID NO: 1909616 - RNA, 19 nt, Homo sapiens
  misc_RNA (1)...(19): siRNA sense strand
cagcugccauacaaagaau

SEQ ID NO: 1909617 - RNA, 19 nt, Homo sapiens
  misc_RNA (1)...(19): siRNA sense strand
ccaaacacgacuccauaug

SEQ ID NO: 1909618 - RNA, 19 nt, Homo sapiens
  misc_RNA (1)...(19): siRNA sense strand
auagagauccaaccacuga

SEQ ID NO: 1909619 - RNA, 19 nt, Homo sapiens
  misc_RNA (1)...(19): siRNA sense strand
gaggcacaaucacaucaca

SEQ ID NO: 1909620 - RNA, 19 nt, Homo sapiens
  misc_RNA (1)...(19): siRNA sense strand
gaugcccaaucuuaaaaua

SEQ ID NO: 1909621 - RNA, 19 nt, Homo sapiens
  misc_RNA (1)...(19): siRNA sense strand
caacugauuaaccugcaaa

SEQ ID NO: 1909622 - RNA, 19 nt, Homo sapiens
  misc_RNA (1)...(19): siRNA sense strand
gcucaucaaguuaccaugu

SEQ ID NO: 1909623 - RNA, 19 nt, Homo sapiens
  misc_RNA (1)...(19): siRNA sense strand
uugaaacgaugcccaaucu

SEQ ID NO: 1909624 - RNA, 19 nt, Homo sapiens
  misc_RNA (1)...(19): siRNA sense strand
gcuacaacuuauagagauc

SEQ ID NO: 1909625 - RNA, 19 nt, Homo sapiens
  misc_RNA (1)...(19): siRNA sense strand
cccaacuacugcaggcaua

SEQ ID NO: 1909626 - RNA, 19 nt, Homo sapiens
  misc_RNA (1)...(19): siRNA sense strand
agcaauauaugcaaugagu

SEQ ID NO: 1909627 - RNA, 19 nt, Homo sapiens
  misc_RNA (1)...(19): siRNA sense strand
accaaggaccguauaauga

SEQ ID NO: 1909628 - RNA, 19 nt, Homo sapiens
  misc_RNA (1)...(19): siRNA sense strand
gcaggcauagcaguuacua

SEQ ID NO: 1909629 - RNA, 19 nt, Homo sapiens
  misc_RNA (1)...(19): siRNA sense strand
caaccacugaauauacaaa

SEQ ID NO: 1909630 - RNA, 19 nt, Homo sapiens
  misc_RNA (1)...(19): siRNA sense strand
ggaacaaaaucagcaacuu

SEQ ID NO: 1909631 - RNA, 19 nt, Homo sapiens
  misc_RNA (1)...(19): siRNA sense strand
uggauuugcaggauuaauu

SEQ ID NO: 1909632 - RNA, 19 nt, Homo sapiens
  misc_RNA (1)...(19): siRNA sense strand
aagaauaagcucaucaagu

SEQ ID NO: 1909633 - RNA, 19 nt, Homo sapiens
  misc_RNA (1)...(19): siRNA sense strand
gcaaugaguaugguuuuaa

SEQ ID NO: 1909634 - RNA, 19 nt, Homo sapiens
  misc_RNA (1)...(19): siRNA sense strand
ucccaaacacgacuccaua

SEQ ID NO: 1909635 - RNA, 19 nt, Homo sapiens
  misc_RNA (1)...(19): siRNA sense strand
ucacucagcggguaauuac

SEQ ID NO: 1909636 - RNA, 19 nt, Homo sapiens
  misc_RNA (1)...(19): siRNA sense strand
aaccagcugacgaagauua

SEQ ID NO: 1909637 - RNA, 19 nt, Homo sapiens
  misc_RNA (1)...(19): siRNA sense strand
caaccacugucacugucau

SEQ ID NO: 1909638 - RNA, 19 nt, Homo sapiens
  misc_RNA (1)...(19): siRNA sense strand
ggaauuugucaaccacugu

SEQ ID NO: 1909639 - RNA, 19 nt, Homo sapiens
  misc_RNA (1)...(19): siRNA sense strand
ggaacacuccauccuaugc

SEQ ID NO: 1909640 - RNA, 19 nt, Homo sapiens
  misc_RNA (1)...(19): siRNA sense strand
ugacgaagauuaauuuugc

SEQ ID NO: 1909641 - RNA, 19 nt, Homo sapiens
  misc_RNA (1)...(19): siRNA sense strand
gaaguuuggcucgcaaugg

SEQ ID NO: 1909642 - RNA, 19 nt, Homo sapiens
  misc_RNA (1)...(19): siRNA sense strand
ccucccacuuuaagaagaa

SEQ ID NO: 1909643 - RNA, 19 nt, Homo sapiens
  misc_RNA (1)...(19): siRNA sense strand
ccaaaugccgcugcgagaa

SEQ ID NO: 1909644 - RNA, 19 nt, Homo sapiens
  misc_RNA (1)...(19): siRNA sense strand
cagcuucagucaacuuacu

SEQ ID NO: 1909645 - RNA, 19 nt, Homo sapiens
  misc_RNA (1)...(19): siRNA sense strand
gcugggcaguuuccaaggu

SEQ ID NO: 1909646 - RNA, 19 nt, Homo sapiens
  misc_RNA (1)...(19): siRNA sense strand
gacuugacaguguuugaaa

SEQ ID NO: 1909647 - RNA, 19 nt, Homo sapiens
  misc_RNA (1)...(19): siRNA sense strand
caaaugccgcugcgagaag

SEQ ID NO: 1909648 - RNA, 19 nt, Homo sapiens
  misc_RNA (1)...(19): siRNA sense strand
aaguuuggcucgcaaugga

SEQ ID NO: 1909649 - RNA, 19 nt, Homo sapiens
  misc_RNA (1)...(19): siRNA sense strand
acucauggauaacaacaag

SEQ ID NO: 1909650 - RNA, 19 nt, Homo sapiens
  misc_RNA (1)...(19): siRNA sense strand
ucauggauaacaacaaguu

SEQ ID NO: 1909651 - RNA, 19 nt, Homo sapiens
  misc_RNA (1)...(19): siRNA sense strand
gcaaggaguucaugcaagu

SEQ ID NO: 1909652 - RNA, 19 nt, Homo sapiens
  misc_RNA (1)...(19): siRNA sense strand
gcaguccucuucaacauca

SEQ ID NO: 1909653 - RNA, 19 nt, Homo sapiens
  misc_RNA (1)...(19): siRNA sense strand
ccugacagcuguguacuuu

SEQ ID NO: 1909654 - RNA, 19 nt, Homo sapiens
  misc_RNA (1)...(19): siRNA sense strand
gagacuagcagcaguguug

SEQ ID NO: 1909655 - RNA, 19 nt, Homo sapiens
  misc_RNA (1)...(19): siRNA sense strand
guacugcuacuucuauaaa

SEQ ID NO: 1909656 - RNA, 19 nt, Homo sapiens
  misc_RNA (1)...(19): siRNA sense strand
ggacagauggacuucaaau

SEQ ID NO: 1909657 - RNA, 19 nt, Homo sapiens
  misc_RNA (1)...(19): siRNA sense strand
gcuguccuaugaccucuuu

SEQ ID NO: 1909658 - RNA, 19 nt, Homo sapiens
  misc_RNA (1)...(19): siRNA sense strand
ggauauugcaguccucuuc

SEQ ID NO: 1909659 - RNA, 19 nt, Homo sapiens
  misc_RNA (1)...(19): siRNA sense strand
ucucagaacugcuccaaaa

SEQ ID NO: 1909660 - RNA, 19 nt, Homo sapiens
  misc_RNA (1)...(19): siRNA sense strand
ugacagcuguguacuuugc

SEQ ID NO: 1909661 - RNA, 19 nt, Homo sapiens
  misc_RNA (1)...(19): siRNA sense strand
ccaaaagacuccugucauc

SEQ ID NO: 1909662 - RNA, 19 nt, Homo sapiens
  misc_RNA (1)...(19): siRNA sense strand
ucaaccuccuauuccauaa

SEQ ID NO: 1909663 - RNA, 19 nt, Homo sapiens
  misc_RNA (1)...(19): siRNA sense strand
gucaaccuccuauuccaua

SEQ ID NO: 1909664 - RNA, 19 nt, Homo sapiens
  misc_RNA (1)...(19): siRNA sense strand
aaacuccaacagcuucaua

SEQ ID NO: 1909665 - RNA, 19 nt, Homo sapiens
  misc_RNA (1)...(19): siRNA sense strand
cagauggacuucaaaugcu

SEQ ID NO: 1909666 - RNA, 19 nt, Homo sapiens
  misc_RNA (1)...(19): siRNA sense strand
gcgcaaggaguucaugcaa

SEQ ID NO: 1909667 - RNA, 19 nt, Homo sapiens
  misc_RNA (1)...(19): siRNA sense strand
acuaggcgauccucacuuc

SEQ ID NO: 1909668 - RNA, 19 nt, Homo sapiens
  misc_RNA (1)...(19): siRNA sense strand
ccuauuccauaaguucaaa

SEQ ID NO: 1909669 - RNA, 19 nt, Homo sapiens
  misc_RNA (1)...(19): siRNA sense strand
gauauugcaguccucuuca

SEQ ID NO: 1909670 - RNA, 19 nt, Homo sapiens
  misc_RNA (1)...(19): siRNA sense strand
gacagauggacuucaaaug

SEQ ID NO: 1909671 - RNA, 19 nt, Homo sapiens
  misc_RNA (1)...(19): siRNA sense strand
cagcaucucccuucauguc

SEQ ID NO: 1909672 - RNA, 19 nt, Homo sapiens
  misc_RNA (1)...(19): siRNA sense strand
ucauccagcuugugcucuu

SEQ ID NO: 1909673 - RNA, 19 nt, Homo sapiens
  misc_RNA (1)...(19): siRNA sense strand
cuucaacaccuucgucuuc

SEQ ID NO: 1909674 - RNA, 19 nt, Homo sapiens
  misc_RNA (1)...(19): siRNA sense strand
cagcuugugcucuucauca

SEQ ID NO: 1909675 - RNA, 19 nt, Homo sapiens
  misc_RNA (1)...(19): siRNA sense strand
ggugcucucucugcaguuc

SEQ ID NO: 1909676 - RNA, 19 nt, Homo sapiens
  misc_RNA (1)...(19): siRNA sense strand
uaggcgauccucacuucua

SEQ ID NO: 1909677 - RNA, 19 nt, Homo sapiens
  misc_RNA (1)...(19): siRNA sense strand
acagauggacuucaaaugc

SEQ ID NO: 1909678 - RNA, 19 nt, Homo sapiens
  misc_RNA (1)...(19): siRNA sense strand
guucaaagggaccaucauc

SEQ ID NO: 1909679 - RNA, 19 nt, Homo sapiens
  misc_RNA (1)...(19): siRNA sense strand
cauauggacagauggacuu

SEQ ID NO: 1909680 - RNA, 19 nt, Homo sapiens
  misc_RNA (1)...(19): siRNA sense strand
cucagcaucucccuucaug

SEQ ID NO: 1909681 - RNA, 19 nt, Homo sapiens
  misc_RNA (1)...(19): siRNA sense strand
guuguacugcuacuucuau

SEQ ID NO: 1909682 - RNA, 19 nt, Homo sapiens
  misc_RNA (1)...(19): siRNA sense strand
gacuagcagcaguguugua

SEQ ID NO: 1909683 - RNA, 19 nt, Homo sapiens
  misc_RNA (1)...(19): siRNA sense strand
caucaucauuuuccucaug

SEQ ID NO: 1909684 - RNA, 19 nt, Homo sapiens
  misc_RNA (1)...(19): siRNA sense strand
gcaaacagccaguuccuua

SEQ ID NO: 1909685 - RNA, 19 nt, Homo sapiens
  misc_RNA (1)...(19): siRNA sense strand
cagaacugcucccuuauua

SEQ ID NO: 1909686 - RNA, 19 nt, Homo sapiens
  misc_RNA (1)...(19): siRNA sense strand
gcaagcaaaucuacuguga

SEQ ID NO: 1909687 - RNA, 19 nt, Homo sapiens
  misc_RNA (1)...(19): siRNA sense strand
gcaaaccugucuucugaaa

SEQ ID NO: 1909688 - RNA, 19 nt, Homo sapiens
  misc_RNA (1)...(19): siRNA sense strand
caagggacaugaggauuua

SEQ ID NO: 1909689 - RNA, 19 nt, Homo sapiens
  misc_RNA (1)...(19): siRNA sense strand
ggaagcacauuuacaagug

SEQ ID NO: 1909690 - RNA, 19 nt, Homo sapiens
  misc_RNA (1)...(19): siRNA sense strand
cuucagaacugcucccuua

SEQ ID NO: 1909691 - RNA, 19 nt, Homo sapiens
  misc_RNA (1)...(19): siRNA sense strand
gugaagaccuggaaacaga

SEQ ID NO: 1909692 - RNA, 19 nt, Homo sapiens
  misc_RNA (1)...(19): siRNA sense strand
ucaaggagcucuacaagca

SEQ ID NO: 1909693 - RNA, 19 nt, Homo sapiens
  misc_RNA (1)...(19): siRNA sense strand
gcaagggacaugaggauuu

SEQ ID NO: 1909694 - RNA, 19 nt, Homo sapiens
  misc_RNA (1)...(19): siRNA sense strand
uaaugaugcuggacucuaa

SEQ ID NO: 1909695 - RNA, 19 nt, Homo sapiens
  misc_RNA (1)...(19): siRNA sense strand
ucaguaagcucaagcacuu

SEQ ID NO: 1909696 - RNA, 19 nt, Homo sapiens
  misc_RNA (1)...(19): siRNA sense strand
ggaguucuguugaauggaa

SEQ ID NO: 1909697 - RNA, 19 nt, Homo sapiens
  misc_RNA (1)...(19): siRNA sense strand
gaagcacauuuacaaguga

SEQ ID NO: 1909698 - RNA, 19 nt, Homo sapiens
  misc_RNA (1)...(19): siRNA sense strand
ggaaaggagccugguauuu

SEQ ID NO: 1909699 - RNA, 19 nt, Homo sapiens
  misc_RNA (1)...(19): siRNA sense strand
caucaaacauugugagcaa

SEQ ID NO: 1909700 - RNA, 19 nt, Homo sapiens
  misc_RNA (1)...(19): siRNA sense strand
gcaacaaguagcuuaauga

SEQ ID NO: 1909701 - RNA, 19 nt, Homo sapiens
  misc_RNA (1)...(19): siRNA sense strand
gagaaggcauucaaacagu

SEQ ID NO: 1909702 - RNA, 19 nt, Homo sapiens
  misc_RNA (1)...(19): siRNA sense strand
cuacaccagugcaaauuaa

SEQ ID NO: 1909703 - RNA, 19 nt, Homo sapiens
  misc_RNA (1)...(19): siRNA sense strand
gcuaagauaucauuaagcu

SEQ ID NO: 1909704 - RNA, 19 nt, Homo sapiens
  misc_RNA (1)...(19): siRNA sense strand
gaaaggagccugguauuuu

SEQ ID NO: 1909705 - RNA, 19 nt, Homo sapiens
  misc_RNA (1)...(19): siRNA sense strand
gauggaagcacauuuacaa

SEQ ID NO: 1909706 - RNA, 19 nt, Homo sapiens
  misc_RNA (1)...(19): siRNA sense strand
gcacugaggugaaaagaga

SEQ ID NO: 1909707 - RNA, 19 nt, Homo sapiens
  misc_RNA (1)...(19): siRNA sense strand
gcgaggagacgguguauug

SEQ ID NO: 1909708 - RNA, 19 nt, Homo sapiens
  misc_RNA (1)...(19): siRNA sense strand
gcaaguacuucaccugucu

SEQ ID NO: 1909709 - RNA, 19 nt, Homo sapiens
  misc_RNA (1)...(19): siRNA sense strand
caacaaauuggaaaugcua

SEQ ID NO: 1909710 - RNA, 19 nt, Homo sapiens
  misc_RNA (1)...(19): siRNA sense strand
uagcuaacaugaaagagaa

SEQ ID NO: 1909711 - RNA, 19 nt, Homo sapiens
  misc_RNA (1)...(19): siRNA sense strand
caaucagaaugcacaagua

SEQ ID NO: 1909712 - RNA, 19 nt, Homo sapiens
  misc_RNA (1)...(19): siRNA sense strand
ucagauggaagcacauuua

SEQ ID NO: 1909713 - RNA, 19 nt, Homo sapiens
  misc_RNA (1)...(19): siRNA sense strand
ucaccugucuuccuuaaug

SEQ ID NO: 1909714 - RNA, 19 nt, Homo sapiens
  misc_RNA (1)...(19): siRNA sense strand
ccaguggaguuauccuuaa

SEQ ID NO: 1909715 - RNA, 19 nt, Homo sapiens
  misc_RNA (1)...(19): siRNA sense strand
ccacuggccuccucauuag

SEQ ID NO: 1909716 - RNA, 19 nt, Homo sapiens
  misc_RNA (1)...(19): siRNA sense strand
ucaaaguccuccagaguuc

SEQ ID NO: 1909717 - RNA, 19 nt, Homo sapiens
  misc_RNA (1)...(19): siRNA sense strand
gcaaaucuacugugacauc

SEQ ID NO: 1909718 - RNA, 19 nt, Homo sapiens
  misc_RNA (1)...(19): siRNA sense strand
gagggucuguagugacuuu

SEQ ID NO: 1909719 - RNA, 19 nt, Homo sapiens
  misc_RNA (1)...(19): siRNA sense strand
gguaauaucucaguaagcu

SEQ ID NO: 1909720 - RNA, 19 nt, Homo sapiens
  misc_RNA (1)...(19): siRNA sense strand
augcaaaccugucuucuga

SEQ ID NO: 1909721 - RNA, 19 nt, Homo sapiens
  misc_RNA (1)...(19): siRNA sense strand
gagagcaaagcaacaagua

SEQ ID NO: 1909722 - RNA, 19 nt, Homo sapiens
  misc_RNA (1)...(19): siRNA sense strand
gaacugcucccuuauuacu

SEQ ID NO: 1909723 - RNA, 19 nt, Homo sapiens
  misc_RNA (1)...(19): siRNA sense strand
gauggagggucuguaguga

SEQ ID NO: 1909724 - RNA, 19 nt, Homo sapiens
  misc_RNA (1)...(19): siRNA sense strand
ugucuuagauggcaugguu

SEQ ID NO: 1909725 - RNA, 19 nt, Homo sapiens
  misc_RNA (1)...(19): siRNA sense strand
gagcuaaaccgcgacauug

SEQ ID NO: 1909726 - RNA, 19 nt, Homo sapiens
  misc_RNA (1)...(19): siRNA sense strand
gauuaaaugugggaaauac

SEQ ID NO: 1909727 - RNA, 19 nt, Homo sapiens
  misc_RNA (1)...(19): siRNA sense strand
guauacacgguuccuaaua

SEQ ID NO: 1909728 - RNA, 19 nt, Homo sapiens
  misc_RNA (1)...(19): siRNA sense strand
caagguaauaucucaguaa

SEQ ID NO: 1909729 - RNA, 19 nt, Homo sapiens
  misc_RNA (1)...(19): siRNA sense strand
gaaacaggaaggcuuggaa

SEQ ID NO: 1909730 - RNA, 19 nt, Homo sapiens
  misc_RNA (1)...(19): siRNA sense strand
gaagauaugcaagacuuau

SEQ ID NO: 1909731 - RNA, 19 nt, Homo sapiens
  misc_RNA (1)...(19): siRNA sense strand
aggagacgguguauuguuu

SEQ ID NO: 1909732 - RNA, 19 nt, Homo sapiens
  misc_RNA (1)...(19): siRNA sense strand
aagcaaaucuacugugaca

SEQ ID NO: 1909733 - RNA, 19 nt, Homo sapiens
  misc_RNA (1)...(19): siRNA sense strand
caggaaggcuuggaaagga

SEQ ID NO: 1909734 - RNA, 19 nt, Homo sapiens
  misc_RNA (1)...(19): siRNA sense strand
caacuccacucggaacuuc

SEQ ID NO: 1909735 - RNA, 19 nt, Homo sapiens
  misc_RNA (1)...(19): siRNA sense strand
gaaaagagaaggcauucaa

SEQ ID NO: 1909736 - RNA, 19 nt, Homo sapiens
  misc_RNA (1)...(19): siRNA sense strand
caaacagccaguuccuuaa

SEQ ID NO: 1909737 - RNA, 19 nt, Homo sapiens
  misc_RNA (1)...(19): siRNA sense strand
ccagcuggaugaagauaug

SEQ ID NO: 1909738 - RNA, 19 nt, Homo sapiens
  misc_RNA (1)...(19): siRNA sense strand
ggauuaaaugugggaaaua

SEQ ID NO: 1909739 - RNA, 19 nt, Homo sapiens
  misc_RNA (1)...(19): siRNA sense strand
gacuauaggaucugugaaa

SEQ ID NO: 1909740 - RNA, 19 nt, Homo sapiens
  misc_RNA (1)...(19): siRNA sense strand
cagugcaaauuaaccagua

SEQ ID NO: 1909741 - RNA, 19 nt, Homo sapiens
  misc_RNA (1)...(19): siRNA sense strand
gucagcaacugguucaaga

SEQ ID NO: 1909742 - RNA, 19 nt, Homo sapiens
  misc_RNA (1)...(19): siRNA sense strand
gucaagaccuauugucagu

SEQ ID NO: 1909743 - RNA, 19 nt, Homo sapiens
  misc_RNA (1)...(19): siRNA sense strand
gccgauagccaaccaaugu

SEQ ID NO: 1909744 - RNA, 19 nt, Homo sapiens
  misc_RNA (1)...(19): siRNA sense strand
gaggagacgguguauuguu

SEQ ID NO: 1909745 - RNA, 19 nt, Homo sapiens
  misc_RNA (1)...(19): siRNA sense strand
caacaaguagcuuaaugau

SEQ ID NO: 1909746 - RNA, 19 nt, Homo sapiens
  misc_RNA (1)...(19): siRNA sense strand
cagcaacacuaacuaugca

SEQ ID NO: 1909747 - RNA, 19 nt, Homo sapiens
  misc_RNA (1)...(19): siRNA sense strand
gcaacaaauuggaaaugcu

SEQ ID NO: 1909748 - RNA, 19 nt, Homo sapiens
  misc_RNA (1)...(19): siRNA sense strand
guagcuaacaugaaagaga

SEQ ID NO: 1909749 - RNA, 19 nt, Homo sapiens
  misc_RNA (1)...(19): siRNA sense strand
guuaauguaucuccaacuc

SEQ ID NO: 1909750 - RNA, 19 nt, Homo sapiens
  misc_RNA (1)...(19): siRNA sense strand
gagacgguguauuguuuca

SEQ ID NO: 1909751 - RNA, 19 nt, Homo sapiens
  misc_RNA (1)...(19): siRNA sense strand
gcaacgagagccugcugaa

SEQ ID NO: 1909752 - RNA, 19 nt, Homo sapiens
  misc_RNA (1)...(19): siRNA sense strand
cagcaguacaucaggauuu

SEQ ID NO: 1909753 - RNA, 19 nt, Homo sapiens
  misc_RNA (1)...(19): siRNA sense strand
acaagguaauaucucagua

SEQ ID NO: 1909754 - RNA, 19 nt, Homo sapiens
  misc_RNA (1)...(19): siRNA sense strand
cccaggacgugaaggaauu

SEQ ID NO: 1909755 - RNA, 19 nt, Homo sapiens
  misc_RNA (1)...(19): siRNA sense strand
caagauggagggucuguag

SEQ ID NO: 1909756 - RNA, 19 nt, Homo sapiens
  misc_RNA (1)...(19): siRNA sense strand
ucagaaugcacaaguaaau

SEQ ID NO: 1909757 - RNA, 19 nt, Homo sapiens
  misc_RNA (1)...(19): siRNA sense strand
uauacacgguuccuaauac

SEQ ID NO: 1909758 - RNA, 19 nt, Homo sapiens
  misc_RNA (1)...(19): siRNA sense strand
auuaagcucuucuggaguu

SEQ ID NO: 1909759 - RNA, 19 nt, Homo sapiens
  misc_RNA (1)...(19): siRNA sense strand
uuagauggcaugguugaua

SEQ ID NO: 1909760 - RNA, 19 nt, Homo sapiens
  misc_RNA (1)...(19): siRNA sense strand
uaauacaggccagacuaua

SEQ ID NO: 1909761 - RNA, 19 nt, Homo sapiens
  misc_RNA (1)...(19): siRNA sense strand
aacaguggcuucccaagau

SEQ ID NO: 1909762 - RNA, 19 nt, Homo sapiens
  misc_RNA (1)...(19): siRNA sense strand
guauauccaugacugacau

SEQ ID NO: 1909763 - RNA, 19 nt, Homo sapiens
  misc_RNA (1)...(19): siRNA sense strand
aaacaguggcuucccaaga

SEQ ID NO: 1909764 - RNA, 19 nt, Homo sapiens
  misc_RNA (1)...(19): siRNA sense strand
ucagaacugcucccuuauu

SEQ ID NO: 1909765 - RNA, 19 nt, Homo sapiens
  misc_RNA (1)...(19): siRNA sense strand
uaucuccaacucacaauuu

SEQ ID NO: 1909766 - RNA, 19 nt, Homo sapiens
  misc_RNA (1)...(19): siRNA sense strand
aaucagaaugcacaaguaa

SEQ ID NO: 1909767 - RNA, 19 nt, Homo sapiens
  misc_RNA (1)...(19): siRNA sense strand
caaauuggaaaugcuaaga

SEQ ID NO: 1909768 - RNA, 19 nt, Homo sapiens
  misc_RNA (1)...(19): siRNA sense strand
caagugagucuaccacagu

SEQ ID NO: 1909769 - RNA, 19 nt, Homo sapiens
  misc_RNA (1)...(19): siRNA sense strand
gcugggagccguagacaag

SEQ ID NO: 1909770 - RNA, 19 nt, Homo sapiens
  misc_RNA (1)...(19): siRNA sense strand
uggaaaugcuaagauauca

SEQ ID NO: 1909771 - RNA, 19 nt, Homo sapiens
  misc_RNA (1)...(19): siRNA sense strand
ucaccaaccucagccuuuc

SEQ ID NO: 1909772 - RNA, 19 nt, Homo sapiens
  misc_RNA (1)...(19): siRNA sense strand
aaucuacugugacaucugu

SEQ ID NO: 1909773 - RNA, 19 nt, Homo sapiens
  misc_RNA (1)...(19): siRNA sense strand
aaacaggaaggcuuggaaa

SEQ ID NO: 1909774 - RNA, 19 nt, Homo sapiens
  misc_RNA (1)...(19): siRNA sense strand
gacgguguauuguuucaag

SEQ ID NO: 1909775 - RNA, 19 nt, Homo sapiens
  misc_RNA (1)...(19): siRNA sense strand
uaaccaguauggcauuguc

SEQ ID NO: 1909776 - RNA, 19 nt, Homo sapiens
  misc_RNA (1)...(19): siRNA sense strand
cagugucccugucucauuc

SEQ ID NO: 1909777 - RNA, 19 nt, Homo sapiens
  misc_RNA (1)...(19): siRNA sense strand
gccaguauauaugcaacaa

SEQ ID NO: 1909778 - RNA, 19 nt, Homo sapiens
  misc_RNA (1)...(19): siRNA sense strand
uaaaugcaaaccugucuuc

SEQ ID NO: 1909779 - RNA, 19 nt, Homo sapiens
  misc_RNA (1)...(19): siRNA sense strand
cuucaccugucuuccuuaa

SEQ ID NO: 1909780 - RNA, 19 nt, Homo sapiens
  misc_RNA (1)...(19): siRNA sense strand
ugggagccguagacaagua

SEQ ID NO: 1909781 - RNA, 19 nt, Homo sapiens
  misc_RNA (1)...(19): siRNA sense strand
ggaugaagauaugcaagac

SEQ ID NO: 1909782 - RNA, 19 nt, Homo sapiens
  misc_RNA (1)...(19): siRNA sense strand
ugaagauaugcaagacuua

SEQ ID NO: 1909783 - RNA, 19 nt, Homo sapiens
  misc_RNA (1)...(19): siRNA sense strand
augaagauaugcaagacuu

SEQ ID NO: 1909784 - RNA, 19 nt, Homo sapiens
  misc_RNA (1)...(19): siRNA sense strand
gggagaagcugcuggaguu

SEQ ID NO: 1909785 - RNA, 19 nt, Homo sapiens
  misc_RNA (1)...(19): siRNA sense strand
aggaggagcucuuugaaua

SEQ ID NO: 1909786 - RNA, 19 nt, Homo sapiens
  misc_RNA (1)...(19): siRNA sense strand
gaacaggagcagaaaguau

SEQ ID NO: 1909787 - RNA, 19 nt, Homo sapiens
  misc_RNA (1)...(19): siRNA sense strand
caacucggcugcccauguc

SEQ ID NO: 1909788 - RNA, 19 nt, Homo sapiens
  misc_RNA (1)...(19): siRNA sense strand
gaacuucuggagguuuaua

SEQ ID NO: 1909789 - RNA, 19 nt, Homo sapiens
  misc_RNA (1)...(19): siRNA sense strand
gauugaguuugacaucuug

SEQ ID NO: 1909790 - RNA, 19 nt, Homo sapiens
  misc_RNA (1)...(19): siRNA sense strand
ggaacaggagcagaaagua

SEQ ID NO: 1909791 - RNA, 19 nt, Homo sapiens
  misc_RNA (1)...(19): siRNA sense strand
gagaagcgggacugucuga

SEQ ID NO: 1909792 - RNA, 19 nt, Homo sapiens
  misc_RNA (1)...(19): siRNA sense strand
ugauugaguuugacaucuu

SEQ ID NO: 1909793 - RNA, 19 nt, Homo sapiens
  misc_RNA (1)...(19): siRNA sense strand
gaacuccuggccugucuau

SEQ ID NO: 1909794 - RNA, 19 nt, Homo sapiens
  misc_RNA (1)...(19): siRNA sense strand
gaggagcucuuugaauacu

SEQ ID NO: 1909795 - RNA, 19 nt, Homo sapiens
  misc_RNA (1)...(19): siRNA sense strand
aacaggagcagaaaguaua

SEQ ID NO: 1909796 - RNA, 19 nt, Homo sapiens
  misc_RNA (1)...(19): siRNA sense strand
gauauuuguuugugcaacu

SEQ ID NO: 1909797 - RNA, 19 nt, Homo sapiens
  misc_RNA (1)...(19): siRNA sense strand
ccuccucgcugcugacuca

SEQ ID NO: 1909798 - RNA, 19 nt, Homo sapiens
  misc_RNA (1)...(19): siRNA sense strand
gugauguggugcugauuca

SEQ ID NO: 1909799 - RNA, 19 nt, Homo sapiens
  misc_RNA (1)...(19): siRNA sense strand
gccaggaggagcucuuuga

SEQ ID NO: 1909800 - RNA, 19 nt, Homo sapiens
  misc_RNA (1)...(19): siRNA sense strand
gggaacaggagcagaaagu

SEQ ID NO: 1909801 - RNA, 19 nt, Homo sapiens
  misc_RNA (1)...(19): siRNA sense strand
ucaacuucguggccaagaa

SEQ ID NO: 1909802 - RNA, 19 nt, Homo sapiens
  misc_RNA (1)...(19): siRNA sense strand
cggaagcccugauguccau

SEQ ID NO: 1909803 - RNA, 19 nt, Homo sapiens
  misc_RNA (1)...(19): siRNA sense strand
ccaggacguucggcugauu

SEQ ID NO: 1909804 - RNA, 19 nt, Homo sapiens
  misc_RNA (1)...(19): siRNA sense strand
cugacaacaugaagaacuu

SEQ ID NO: 1909805 - RNA, 19 nt, Homo sapiens
  misc_RNA (1)...(19): siRNA sense strand
caaguucacccugcuguuc

SEQ ID NO: 1909806 - RNA, 19 nt, Homo sapiens
  misc_RNA (1)...(19): siRNA sense strand
ggaggagcucuuugaauac

SEQ ID NO: 1909807 - RNA, 19 nt, Homo sapiens
  misc_RNA (1)...(19): siRNA sense strand
uagcacccaugaucuccaa

SEQ ID NO: 1909808 - RNA, 19 nt, Homo sapiens
  misc_RNA (1)...(19): siRNA sense strand
ccucauacgccaaguucaa

SEQ ID NO: 1909809 - RNA, 19 nt, Homo sapiens
  misc_RNA (1)...(19): siRNA sense strand
ggaggugcucugugacuuc

SEQ ID NO: 1909810 - RNA, 19 nt, Homo sapiens
  misc_RNA (1)...(19): siRNA sense strand
gagcuggggucgcuugugu

SEQ ID NO: 1909811 - RNA, 19 nt, Homo sapiens
  misc_RNA (1)...(19): siRNA sense strand
ccgccagggugcauacuuc

SEQ ID NO: 1909812 - RNA, 19 nt, Homo sapiens
  misc_RNA (1)...(19): siRNA sense strand
ccaggaggagcucuuugaa

SEQ ID NO: 1909813 - RNA, 19 nt, Homo sapiens
  misc_RNA (1)...(19): siRNA sense strand
guuccagacucgccucaag

SEQ ID NO: 1909814 - RNA, 19 nt, Homo sapiens
  misc_RNA (1)...(19): siRNA sense strand
gcagauccucguggcugua

SEQ ID NO: 1909815 - RNA, 19 nt, Homo sapiens
  misc_RNA (1)...(19): siRNA sense strand
gagaagcugcuggaguuca

SEQ ID NO: 1909816 - RNA, 19 nt, Homo sapiens
  misc_RNA (1)...(19): siRNA sense strand
agguuuauauuccggaaga

SEQ ID NO: 1909817 - RNA, 19 nt, Homo sapiens
  misc_RNA (1)...(19): siRNA sense strand
gggacugucugacccucau

SEQ ID NO: 1909818 - RNA, 19 nt, Homo sapiens
  misc_RNA (1)...(19): siRNA sense strand
uccuggaggugcucuguga

SEQ ID NO: 1909819 - RNA, 19 nt, Homo sapiens
  misc_RNA (1)...(19): siRNA sense strand
ccaacucggcugcccaugu

SEQ ID NO: 1909820 - RNA, 19 nt, Homo sapiens
  misc_RNA (1)...(19): siRNA sense strand
ggugauguggugcugauuc

SEQ ID NO: 1909821 - RNA, 19 nt, Homo sapiens
  misc_RNA (1)...(19): siRNA sense strand
caggaggagcucuuugaau

SEQ ID NO: 1909822 - RNA, 19 nt, Homo sapiens
  misc_RNA (1)...(19): siRNA sense strand
ggagcagaaaguauaugug

SEQ ID NO: 1909823 - RNA, 19 nt, Homo sapiens
  misc_RNA (1)...(19): siRNA sense strand
gacguucggcugauugagu

SEQ ID NO: 1909824 - RNA, 19 nt, Homo sapiens
  misc_RNA (1)...(19): siRNA sense strand
agacuggaaacuucuuguu

SEQ ID NO: 1909825 - RNA, 19 nt, Homo sapiens
  misc_RNA (1)...(19): siRNA sense strand
gcugggcuccuguuacaua

SEQ ID NO: 1909826 - RNA, 19 nt, Homo sapiens
  misc_RNA (1)...(19): siRNA sense strand
gcaagcugggcuccuguua

SEQ ID NO: 1909827 - RNA, 19 nt, Homo sapiens
  misc_RNA (1)...(19): siRNA sense strand
aagcugggcuccuguuaca

SEQ ID NO: 1909828 - RNA, 19 nt, Homo sapiens
  misc_RNA (1)...(19): siRNA sense strand
ccacagaccuacgcuacca

SEQ ID NO: 1909829 - RNA, 19 nt, Homo sapiens
  misc_RNA (1)...(19): siRNA sense strand
ccagccaacuacaucauuc

SEQ ID NO: 1909830 - RNA, 19 nt, Homo sapiens
  misc_RNA (1)...(19): siRNA sense strand
gggcuccuguuacauacug

SEQ ID NO: 1909831 - RNA, 19 nt, Homo sapiens
  misc_RNA (1)...(19): siRNA sense strand
gacuguggcuccuagugau

SEQ ID NO: 1909832 - RNA, 19 nt, Homo sapiens
  misc_RNA (1)...(19): siRNA sense strand
ccagacugccagccaacua

SEQ ID NO: 1909833 - RNA, 19 nt, Homo sapiens
  misc_RNA (1)...(19): siRNA sense strand
agacuguggcuccuaguga

SEQ ID NO: 1909834 - RNA, 19 nt, Homo sapiens
  misc_RNA (1)...(19): siRNA sense strand
ccacugccaucgccaucca

SEQ ID NO: 1909835 - RNA, 19 nt, Homo sapiens
  misc_RNA (1)...(19): siRNA sense strand
caccgcaucucaccaacag

SEQ ID NO: 1909836 - RNA, 19 nt, Homo sapiens
  misc_RNA (1)...(19): siRNA sense strand
gccagccaacuacaucauu

SEQ ID NO: 1909837 - RNA, 19 nt, Homo sapiens
  misc_RNA (1)...(19): siRNA sense strand
auucaugccugcagguuua

SEQ ID NO: 1909838 - RNA, 19 nt, Homo sapiens
  misc_RNA (1)...(19): siRNA sense strand
uaccuuggcuggcauuaug

SEQ ID NO: 1909839 - RNA, 19 nt, Homo sapiens
  misc_RNA (1)...(19): siRNA sense strand
gaucauuggcuauguaaaa

SEQ ID NO: 1909840 - RNA, 19 nt, Homo sapiens
  misc_RNA (1)...(19): siRNA sense strand
gcugauggucgccaaaguu

SEQ ID NO: 1909841 - RNA, 19 nt, Homo sapiens
  misc_RNA (1)...(19): siRNA sense strand
ugggaucauuggcuaugua

SEQ ID NO: 1909842 - RNA, 19 nt, Homo sapiens
  misc_RNA (1)...(19): siRNA sense strand
gggaucauuggcuauguaa

SEQ ID NO: 1909843 - RNA, 19 nt, Homo sapiens
  misc_RNA (1)...(19): siRNA sense strand
caguagugccuuugcauug

SEQ ID NO: 1909844 - RNA, 19 nt, Homo sapiens
  misc_RNA (1)...(19): siRNA sense strand
gugcuuaccagcugucuca

SEQ ID NO: 1909845 - RNA, 19 nt, Homo sapiens
  misc_RNA (1)...(19): siRNA sense strand
gcucaguagugccuuugca

SEQ ID NO: 1909846 - RNA, 19 nt, Homo sapiens
  misc_RNA (1)...(19): siRNA sense strand
caaggaacguuuggguuuu

SEQ ID NO: 1909847 - RNA, 19 nt, Homo sapiens
  misc_RNA (1)...(19): siRNA sense strand
uaauugcaggugccaguuu

SEQ ID NO: 1909848 - RNA, 19 nt, Homo sapiens
  misc_RNA (1)...(19): siRNA sense strand
guagugccuuugcauuggu

SEQ ID NO: 1909849 - RNA, 19 nt, Homo sapiens
  misc_RNA (1)...(19): siRNA sense strand
ucaguagugccuuugcauu

SEQ ID NO: 1909850 - RNA, 19 nt, Homo sapiens
  misc_RNA (1)...(19): siRNA sense strand
cuaccacucuggaaaauuc

SEQ ID NO: 1909851 - RNA, 19 nt, Homo sapiens
  misc_RNA (1)...(19): siRNA sense strand
caggauccaaggaacguuu

SEQ ID NO: 1909852 - RNA, 19 nt, Homo sapiens
  misc_RNA (1)...(19): siRNA sense strand
aauugcaggugccaguuug

SEQ ID NO: 1909853 - RNA, 19 nt, Homo sapiens
  misc_RNA (1)...(19): siRNA sense strand
uggcuggcauuaugggaau

SEQ ID NO: 1909854 - RNA, 19 nt, Homo sapiens
  misc_RNA (1)...(19): siRNA sense strand
cagcagcucuucauuauua

SEQ ID NO: 1909855 - RNA, 19 nt, Homo sapiens
  misc_RNA (1)...(19): siRNA sense strand
ggagugaacugcuuucuuu

SEQ ID NO: 1909856 - RNA, 19 nt, Homo sapiens
  misc_RNA (1)...(19): siRNA sense strand
gaaaugaggcuuccugaua

SEQ ID NO: 1909857 - RNA, 19 nt, Homo sapiens
  misc_RNA (1)...(19): siRNA sense strand
ugaaagagcuaguucgaua

SEQ ID NO: 1909858 - RNA, 19 nt, Homo sapiens
  misc_RNA (1)...(19): siRNA sense strand
gaacgaaagcuacuuguug

SEQ ID NO: 1909859 - RNA, 19 nt, Homo sapiens
  misc_RNA (1)...(19): siRNA sense strand
gaguaaaucugugcauuaa

SEQ ID NO: 1909860 - RNA, 19 nt, Homo sapiens
  misc_RNA (1)...(19): siRNA sense strand
guucaaaucuguagugugu

SEQ ID NO: 1909861 - RNA, 19 nt, Homo sapiens
  misc_RNA (1)...(19): siRNA sense strand
gaaagcuacuuguugauca

SEQ ID NO: 1909862 - RNA, 19 nt, Homo sapiens
  misc_RNA (1)...(19): siRNA sense strand
guacgaggcuaucuggaaa

SEQ ID NO: 1909863 - RNA, 19 nt, Homo sapiens
  misc_RNA (1)...(19): siRNA sense strand
uggcagaguuaguuuaaua

SEQ ID NO: 1909864 - RNA, 19 nt, Homo sapiens
  misc_RNA (1)...(19): siRNA sense strand
ggaaaugauggcagaguua

SEQ ID NO: 1909865 - RNA, 19 nt, Homo sapiens
  misc_RNA (1)...(19): siRNA sense strand
gaagaucugcaguauguuu

SEQ ID NO: 1909866 - RNA, 19 nt, Homo sapiens
  misc_RNA (1)...(19): siRNA sense strand
ucagagaaauugacuacaa

SEQ ID NO: 1909867 - RNA, 19 nt, Homo sapiens
  misc_RNA (1)...(19): siRNA sense strand
guuagagcaucaacuuaua

SEQ ID NO: 1909868 - RNA, 19 nt, Homo sapiens
  misc_RNA (1)...(19): siRNA sense strand
guaaaucugugcauuaaac

SEQ ID NO: 1909869 - RNA, 19 nt, Homo sapiens
  misc_RNA (1)...(19): siRNA sense strand
ccaggcagauauuuacuuu

SEQ ID NO: 1909870 - RNA, 19 nt, Homo sapiens
  misc_RNA (1)...(19): siRNA sense strand
uggaagaucugcaguaugu

SEQ ID NO: 1909871 - RNA, 19 nt, Homo sapiens
  misc_RNA (1)...(19): siRNA sense strand
gguguuauccugggaauua

SEQ ID NO: 1909872 - RNA, 19 nt, Homo sapiens
  misc_RNA (1)...(19): siRNA sense strand
gcagauauuuacuuugcaa

SEQ ID NO: 1909873 - RNA, 19 nt, Homo sapiens
  misc_RNA (1)...(19): siRNA sense strand
ggaaguuguuguucaaauc

SEQ ID NO: 1909874 - RNA, 19 nt, Homo sapiens
  misc_RNA (1)...(19): siRNA sense strand
gcugaacacauuucuauuu

SEQ ID NO: 1909875 - RNA, 19 nt, Homo sapiens
  misc_RNA (1)...(19): siRNA sense strand
uauuacagcugaacacauu

SEQ ID NO: 1909876 - RNA, 19 nt, Homo sapiens
  misc_RNA (1)...(19): siRNA sense strand
cagagaaauugacuacaaa

SEQ ID NO: 1909877 - RNA, 19 nt, Homo sapiens
  misc_RNA (1)...(19): siRNA sense strand
gaagagauccccuagagua

SEQ ID NO: 1909878 - RNA, 19 nt, Homo sapiens
  misc_RNA (1)...(19): siRNA sense strand
aaaugaggcuuccugauau

SEQ ID NO: 1909879 - RNA, 19 nt, Homo sapiens
  misc_RNA (1)...(19): siRNA sense strand
guugaaagaugaagaacga

SEQ ID NO: 1909880 - RNA, 19 nt, Homo sapiens
  misc_RNA (1)...(19): siRNA sense strand
ggaauguguugccuuuaug

SEQ ID NO: 1909881 - RNA, 19 nt, Homo sapiens
  misc_RNA (1)...(19): siRNA sense strand
ugaggaauguguugccuuu

SEQ ID NO: 1909882 - RNA, 19 nt, Homo sapiens
  misc_RNA (1)...(19): siRNA sense strand
gcucuuugcugcuuguuug

SEQ ID NO: 1909883 - RNA, 19 nt, Homo sapiens
  misc_RNA (1)...(19): siRNA sense strand
gcauuaaaccuguaacuuc

SEQ ID NO: 1909884 - RNA, 19 nt, Homo sapiens
  misc_RNA (1)...(19): siRNA sense strand
gaagaacgaaagcuacuug

SEQ ID NO: 1909885 - RNA, 19 nt, Homo sapiens
  misc_RNA (1)...(19): siRNA sense strand
ugucaacauuggucaguua

SEQ ID NO: 1909886 - RNA, 19 nt, Homo sapiens
  misc_RNA (1)...(19): siRNA sense strand
gcaguacuguuaaggacuu

SEQ ID NO: 1909887 - RNA, 19 nt, Homo sapiens
  misc_RNA (1)...(19): siRNA sense strand
cauuaaaccuguaacuuca

SEQ ID NO: 1909888 - RNA, 19 nt, Homo sapiens
  misc_RNA (1)...(19): siRNA sense strand
uuaaaucucugcaagaaca

SEQ ID NO: 1909889 - RNA, 19 nt, Homo sapiens
  misc_RNA (1)...(19): siRNA sense strand
gaaucuacguuagguauca

SEQ ID NO: 1909890 - RNA, 19 nt, Homo sapiens
  misc_RNA (1)...(19): siRNA sense strand
cauccgaccuuauaaguag

SEQ ID NO: 1909891 - RNA, 19 nt, Homo sapiens
  misc_RNA (1)...(19): siRNA sense strand
ucagaguaauccauaugua

SEQ ID NO: 1909892 - RNA, 19 nt, Homo sapiens
  misc_RNA (1)...(19): siRNA sense strand
gaacaaaacagucaugaug

SEQ ID NO: 1909893 - RNA, 19 nt, Homo sapiens
  misc_RNA (1)...(19): siRNA sense strand
gagcaucaacuuauauugu

SEQ ID NO: 1909894 - RNA, 19 nt, Homo sapiens
  misc_RNA (1)...(19): siRNA sense strand
guuuaaaucucugcaagaa

SEQ ID NO: 1909895 - RNA, 19 nt, Homo sapiens
  misc_RNA (1)...(19): siRNA sense strand
gauggcagaguuaguuuaa

SEQ ID NO: 1909896 - RNA, 19 nt, Homo sapiens
  misc_RNA (1)...(19): siRNA sense strand
gaacugcuuucuuuuauca

SEQ ID NO: 1909897 - RNA, 19 nt, Homo sapiens
  misc_RNA (1)...(19): siRNA sense strand
ugaaugagauguugcuuuu

SEQ ID NO: 1909898 - RNA, 19 nt, Homo sapiens
  misc_RNA (1)...(19): siRNA sense strand
gcacaaacgaggaaaugau

SEQ ID NO: 1909899 - RNA, 19 nt, Homo sapiens
  misc_RNA (1)...(19): siRNA sense strand
guucugacuucuuuaacaa

SEQ ID NO: 1909900 - RNA, 19 nt, Homo sapiens
  misc_RNA (1)...(19): siRNA sense strand
cagaguaauccauauguaa

SEQ ID NO: 1909901 - RNA, 19 nt, Homo sapiens
  misc_RNA (1)...(19): siRNA sense strand
gaaagagcuaguucgauau

SEQ ID NO: 1909902 - RNA, 19 nt, Homo sapiens
  misc_RNA (1)...(19): siRNA sense strand
gggaaguuguuguucaaau

SEQ ID NO: 1909903 - RNA, 19 nt, Homo sapiens
  misc_RNA (1)...(19): siRNA sense strand
agaguaaaucugugcauua

SEQ ID NO: 1909904 - RNA, 19 nt, Homo sapiens
  misc_RNA (1)...(19): siRNA sense strand
aacgaaagcuacuuguuga

SEQ ID NO: 1909905 - RNA, 19 nt, Homo sapiens
  misc_RNA (1)...(19): siRNA sense strand
cugaacacauuucuauuug

SEQ ID NO: 1909906 - RNA, 19 nt, Homo sapiens
  misc_RNA (1)...(19): siRNA sense strand
uugcgaaacuucacaaugu

SEQ ID NO: 1909907 - RNA, 19 nt, Homo sapiens
  misc_RNA (1)...(19): siRNA sense strand
uguguugccuuuauguuaa

SEQ ID NO: 1909908 - RNA, 19 nt, Homo sapiens
  misc_RNA (1)...(19): siRNA sense strand
gcacugcaguacuguuaag

SEQ ID NO: 1909909 - RNA, 19 nt, Homo sapiens
  misc_RNA (1)...(19): siRNA sense strand
ugaauuacaugguaugacu

SEQ ID NO: 1909910 - RNA, 19 nt, Homo sapiens
  misc_RNA (1)...(19): siRNA sense strand
gauauuuacuuugcaacga

SEQ ID NO: 1909911 - RNA, 19 nt, Homo sapiens
  misc_RNA (1)...(19): siRNA sense strand
aaagagcuaguucgauaua

SEQ ID NO: 1909912 - RNA, 19 nt, Homo sapiens
  misc_RNA (1)...(19): siRNA sense strand
caacauuggucaguuagag

SEQ ID NO: 1909913 - RNA, 19 nt, Homo sapiens
  misc_RNA (1)...(19): siRNA sense strand
auacagaccagguaauaaa

SEQ ID NO: 1909914 - RNA, 19 nt, Homo sapiens
  misc_RNA (1)...(19): siRNA sense strand
cagcugaacacauuucuau

SEQ ID NO: 1909915 - RNA, 19 nt, Homo sapiens
  misc_RNA (1)...(19): siRNA sense strand
gaggcuaucuggaaaugag

SEQ ID NO: 1909916 - RNA, 19 nt, Homo sapiens
  misc_RNA (1)...(19): siRNA sense strand
caauccagaagaaguguua

SEQ ID NO: 1909917 - RNA, 19 nt, Homo sapiens
  misc_RNA (1)...(19): siRNA sense strand
ggauauucauacacacgaa

SEQ ID NO: 1909918 - RNA, 19 nt, Homo sapiens
  misc_RNA (1)...(19): siRNA sense strand
aaacagucaugaugcuaug

SEQ ID NO: 1909919 - RNA, 19 nt, Homo sapiens
  misc_RNA (1)...(19): siRNA sense strand
gcagcuacaugcaaagaac

SEQ ID NO: 1909920 - RNA, 19 nt, Homo sapiens
  misc_RNA (1)...(19): siRNA sense strand
gaacuuccaggcccuaaag

SEQ ID NO: 1909921 - RNA, 19 nt, Homo sapiens
  misc_RNA (1)...(19): siRNA sense strand
acagagggaaucuacguua

SEQ ID NO: 1909922 - RNA, 19 nt, Homo sapiens
  misc_RNA (1)...(19): siRNA sense strand
guuggaagaucugcaguau

SEQ ID NO: 1909923 - RNA, 19 nt, Homo sapiens
  misc_RNA (1)...(19): siRNA sense strand
uagaguaaaucugugcauu

SEQ ID NO: 1909924 - RNA, 19 nt, Homo sapiens
  misc_RNA (1)...(19): siRNA sense strand
guuguucuuugcugaauug

SEQ ID NO: 1909925 - RNA, 19 nt, Homo sapiens
  misc_RNA (1)...(19): siRNA sense strand
guagacggacugccaaaga

SEQ ID NO: 1909926 - RNA, 19 nt, Homo sapiens
  misc_RNA (1)...(19): siRNA sense strand
gaaagaugaagaacgaaag

SEQ ID NO: 1909927 - RNA, 19 nt, Homo sapiens
  misc_RNA (1)...(19): siRNA sense strand
gaucagaugaggaagagau

SEQ ID NO: 1909928 - RNA, 19 nt, Homo sapiens
  misc_RNA (1)...(19): siRNA sense strand
cagcaagugucaacauugg

SEQ ID NO: 1909929 - RNA, 19 nt, Homo sapiens
  misc_RNA (1)...(19): siRNA sense strand
gagagaaaaugaauaccuu

SEQ ID NO: 1909930 - RNA, 19 nt, Homo sapiens
  misc_RNA (1)...(19): siRNA sense strand
uggaauacuugacuuaucu

SEQ ID NO: 1909931 - RNA, 19 nt, Homo sapiens
  misc_RNA (1)...(19): siRNA sense strand
ccacucguuuugacuauua

SEQ ID NO: 1909932 - RNA, 19 nt, Homo sapiens
  misc_RNA (1)...(19): siRNA sense strand
gcaucaacuuauauuguca

SEQ ID NO: 1909933 - RNA, 19 nt, Homo sapiens
  misc_RNA (1)...(19): siRNA sense strand
gaaauugacuacaaaacag

SEQ ID NO: 1909934 - RNA, 19 nt, Homo sapiens
  misc_RNA (1)...(19): siRNA sense strand
uacguuagguaucauguau

SEQ ID NO: 1909935 - RNA, 19 nt, Homo sapiens
  misc_RNA (1)...(19): siRNA sense strand
gggaaucuacguuagguau

SEQ ID NO: 1909936 - RNA, 19 nt, Homo sapiens
  misc_RNA (1)...(19): siRNA sense strand
aggaauguguugccuuuau

SEQ ID NO: 1909937 - RNA, 19 nt, Homo sapiens
  misc_RNA (1)...(19): siRNA sense strand
uguguguucugacuucuuu

SEQ ID NO: 1909938 - RNA, 19 nt, Homo sapiens
  misc_RNA (1)...(19): siRNA sense strand
cuaguucgauauacacuca

SEQ ID NO: 1909939 - RNA, 19 nt, Homo sapiens
  misc_RNA (1)...(19): siRNA sense strand
gaaaugauggcagaguuag

SEQ ID NO: 1909940 - RNA, 19 nt, Homo sapiens
  misc_RNA (1)...(19): siRNA sense strand
acuccaaguuccugcauuu

SEQ ID NO: 1909941 - RNA, 19 nt, Homo sapiens
  misc_RNA (1)...(19): siRNA sense strand
aguuauagcugaggaaugu

SEQ ID NO: 1909942 - RNA, 19 nt, Homo sapiens
  misc_RNA (1)...(19): siRNA sense strand
gagggaaucuacguuaggu

SEQ ID NO: 1909943 - RNA, 19 nt, Homo sapiens
  misc_RNA (1)...(19): siRNA sense strand
uaucccagcuucagcaagu

SEQ ID NO: 1909944 - RNA, 19 nt, Homo sapiens
  misc_RNA (1)...(19): siRNA sense strand
ugcaagcaauccagaagaa

SEQ ID NO: 1909945 - RNA, 19 nt, Homo sapiens
  misc_RNA (1)...(19): siRNA sense strand
ugaaagaugaagaacgaaa

SEQ ID NO: 1909946 - RNA, 19 nt, Homo sapiens
  misc_RNA (1)...(19): siRNA sense strand
guuuggaguugguaacaga

SEQ ID NO: 1909947 - RNA, 19 nt, Homo sapiens
  misc_RNA (1)...(19): siRNA sense strand
uucagcagcucuucauuau

SEQ ID NO: 1909948 - RNA, 19 nt, Homo sapiens
  misc_RNA (1)...(19): siRNA sense strand
gaaguuguuguucaaaucu

SEQ ID NO: 1909949 - RNA, 19 nt, Homo sapiens
  misc_RNA (1)...(19): siRNA sense strand
caggagcuguguguucuga

SEQ ID NO: 1909950 - RNA, 19 nt, Homo sapiens
  misc_RNA (1)...(19): siRNA sense strand
gcaguauguuuucaugauu

SEQ ID NO: 1909951 - RNA, 19 nt, Homo sapiens
  misc_RNA (1)...(19): siRNA sense strand
gaaugcaagcaauccagaa

SEQ ID NO: 1909952 - RNA, 19 nt, Homo sapiens
  misc_RNA (1)...(19): siRNA sense strand
aaagaggagaaacagauaa

SEQ ID NO: 1909953 - RNA, 19 nt, Homo sapiens
  misc_RNA (1)...(19): siRNA sense strand
uuauacagaccagguaaua

SEQ ID NO: 1909954 - RNA, 19 nt, Homo sapiens
  misc_RNA (1)...(19): siRNA sense strand
ggaguggagugcugucaua

SEQ ID NO: 1909955 - RNA, 19 nt, Homo sapiens
  misc_RNA (1)...(19): siRNA sense strand
aauauaagcucggaguuug

SEQ ID NO: 1909956 - RNA, 19 nt, Homo sapiens
  misc_RNA (1)...(19): siRNA sense strand
ucaggucaguaucuaauau

SEQ ID NO: 1909957 - RNA, 19 nt, Homo sapiens
  misc_RNA (1)...(19): siRNA sense strand
uaauauaagcucggaguuu

SEQ ID NO: 1909958 - RNA, 19 nt, Homo sapiens
  misc_RNA (1)...(19): siRNA sense strand
ggacagugaggacuucuuc

SEQ ID NO: 1909959 - RNA, 19 nt, Homo sapiens
  misc_RNA (1)...(19): siRNA sense strand
guggagugcugucauaugg

SEQ ID NO: 1909960 - RNA, 19 nt, Homo sapiens
  misc_RNA (1)...(19): siRNA sense strand
ucuacgggcucuacucuau

SEQ ID NO: 1909961 - RNA, 19 nt, Homo sapiens
  misc_RNA (1)...(19): siRNA sense strand
ccgccuccauuccuacuaa

SEQ ID NO: 1909962 - RNA, 19 nt, Homo sapiens
  misc_RNA (1)...(19): siRNA sense strand
uacgggcucuacucuauga

SEQ ID NO: 1909963 - RNA, 19 nt, Homo sapiens
  misc_RNA (1)...(19): siRNA sense strand
caggucaguaucuaauaua

SEQ ID NO: 1909964 - RNA, 19 nt, Homo sapiens
  misc_RNA (1)...(19): siRNA sense strand
gucaguaucuaauauaagc

SEQ ID NO: 1909965 - RNA, 19 nt, Homo sapiens
  misc_RNA (1)...(19): siRNA sense strand
ugucaaagccacauucuac

SEQ ID NO: 1909966 - RNA, 19 nt, Homo sapiens
  misc_RNA (1)...(19): siRNA sense strand
ggaugacacgugccugaug

SEQ ID NO: 1909967 - RNA, 19 nt, Homo sapiens
  misc_RNA (1)...(19): siRNA sense strand
gauucaccuuugacgugua

SEQ ID NO: 1909968 - RNA, 19 nt, Homo sapiens
  misc_RNA (1)...(19): siRNA sense strand
uaugaguugugacuuucaa

SEQ ID NO: 1909969 - RNA, 19 nt, Homo sapiens
  misc_RNA (1)...(19): siRNA sense strand
gaccuuuccgugucuguga

SEQ ID NO: 1909970 - RNA, 19 nt, Homo sapiens
  misc_RNA (1)...(19): siRNA sense strand
cucuaugaguugugacuuu

SEQ ID NO: 1909971 - RNA, 19 nt, Homo sapiens
  misc_RNA (1)...(19): siRNA sense strand
cauauguugcugggaauuu

SEQ ID NO: 1909972 - RNA, 19 nt, Homo sapiens
  misc_RNA (1)...(19): siRNA sense strand
ucuaugaguugugacuuuc

SEQ ID NO: 1909973 - RNA, 19 nt, Homo sapiens
  misc_RNA (1)...(19): siRNA sense strand
gaguugugacuuucaagga

SEQ ID NO: 1909974 - RNA, 19 nt, Homo sapiens
  misc_RNA (1)...(19): siRNA sense strand
uggagacccuacugcugaa

SEQ ID NO: 1909975 - RNA, 19 nt, Homo sapiens
  misc_RNA (1)...(19): siRNA sense strand
ccuuugacguguacaagca

SEQ ID NO: 1909976 - RNA, 19 nt, Homo sapiens
  misc_RNA (1)...(19): siRNA sense strand
gccauauguugcugggaau

SEQ ID NO: 1909977 - RNA, 19 nt, Homo sapiens
  misc_RNA (1)...(19): siRNA sense strand
gugauguucuguagucaua

SEQ ID NO: 1909978 - RNA, 19 nt, Homo sapiens
  misc_RNA (1)...(19): siRNA sense strand
caagacacagcgaauauaa

SEQ ID NO: 1909979 - RNA, 19 nt, Homo sapiens
  misc_RNA (1)...(19): siRNA sense strand
uuucagcccugguauauga

SEQ ID NO: 1909980 - RNA, 19 nt, Homo sapiens
  misc_RNA (1)...(19): siRNA sense strand
ccagguagguuggaauguu

SEQ ID NO: 1909981 - RNA, 19 nt, Homo sapiens
  misc_RNA (1)...(19): siRNA sense strand
guuggaauguucagugaug

SEQ ID NO: 1909982 - RNA, 19 nt, Homo sapiens
  misc_RNA (1)...(19): siRNA sense strand
ucagugauguucuguaguc

SEQ ID NO: 1909983 - RNA, 19 nt, Homo sapiens
  misc_RNA (1)...(19): siRNA sense strand
guucagugauguucuguag

SEQ ID NO: 1909984 - RNA, 19 nt, Homo sapiens
  misc_RNA (1)...(19): siRNA sense strand
ccaagacacagcgaauaua

SEQ ID NO: 1909985 - RNA, 19 nt, Homo sapiens
  misc_RNA (1)...(19): siRNA sense strand
uuuccucacucucccaaua

SEQ ID NO: 1909986 - RNA, 19 nt, Homo sapiens
  misc_RNA (1)...(19): siRNA sense strand
gauguucuguagucauauc

SEQ ID NO: 1909987 - RNA, 19 nt, Homo sapiens
  misc_RNA (1)...(19): siRNA sense strand
caauagcaguuacccaaac

SEQ ID NO: 1909988 - RNA, 19 nt, Homo sapiens
  misc_RNA (1)...(19): siRNA sense strand
agacacagcgaauauaauc

SEQ ID NO: 1909989 - RNA, 19 nt, Homo sapiens
  misc_RNA (1)...(19): siRNA sense strand
cagguagguuggaauguuc

SEQ ID NO: 1909990 - RNA, 19 nt, Homo sapiens
  misc_RNA (1)...(19): siRNA sense strand
ccaauagcaguuacccaaa

SEQ ID NO: 1909991 - RNA, 19 nt, Homo sapiens
  misc_RNA (1)...(19): siRNA sense strand
ggaauguucagugauguuc

SEQ ID NO: 1909992 - RNA, 19 nt, Homo sapiens
  misc_RNA (1)...(19): siRNA sense strand
uuccguaacuuaggacaaa

SEQ ID NO: 1909993 - RNA, 19 nt, Homo sapiens
  misc_RNA (1)...(19): siRNA sense strand
cagacaguguuaucacagu

SEQ ID NO: 1909994 - RNA, 19 nt, Homo sapiens
  misc_RNA (1)...(19): siRNA sense strand
gagccucacaugccacuca

SEQ ID NO: 1909995 - RNA, 19 nt, Homo sapiens
  misc_RNA (1)...(19): siRNA sense strand
gaugccagguagguuggaa

SEQ ID NO: 1909996 - RNA, 19 nt, Homo sapiens
  misc_RNA (1)...(19): siRNA sense strand
caacgccacuuuuccagau

SEQ ID NO: 1909997 - RNA, 19 nt, Homo sapiens
  misc_RNA (1)...(19): siRNA sense strand
agucauaucagacaguguu

SEQ ID NO: 1909998 - RNA, 19 nt, Homo sapiens
  misc_RNA (1)...(19): siRNA sense strand
cauaucagacaguguuauc

SEQ ID NO: 1909999 - RNA, 19 nt, Homo sapiens
  misc_RNA (1)...(19): siRNA sense strand
uaucacagugucacggaaa

SEQ ID NO: 1910000 - RNA, 19 nt, Homo sapiens
  misc_RNA (1)...(19): siRNA sense strand
uccaagacacagcgaauau

SEQ ID NO: 1910001 - RNA, 19 nt, Homo sapiens
  misc_RNA (1)...(19): siRNA sense strand
gaagaacgauuuaaaggua

SEQ ID NO: 1910002 - RNA, 19 nt, Homo sapiens
  misc_RNA (1)...(19): siRNA sense strand
gcaacguguuuauguauua

SEQ ID NO: 1910003 - RNA, 19 nt, Homo sapiens
  misc_RNA (1)...(19): siRNA sense strand
cagcugacauuaccauuua

SEQ ID NO: 1910004 - RNA, 19 nt, Homo sapiens
  misc_RNA (1)...(19): siRNA sense strand
caaguuguaucgucuuaua

SEQ ID NO: 1910005 - RNA, 19 nt, Homo sapiens
  misc_RNA (1)...(19): siRNA sense strand
acaauuacccuguacauua

SEQ ID NO: 1910006 - RNA, 19 nt, Homo sapiens
  misc_RNA (1)...(19): siRNA sense strand
caacaaagccugugaacug

SEQ ID NO: 1910007 - RNA, 19 nt, Homo sapiens
  misc_RNA (1)...(19): siRNA sense strand
caauuacccuguacauuau

SEQ ID NO: 1910008 - RNA, 19 nt, Homo sapiens
  misc_RNA (1)...(19): siRNA sense strand
ucgaagaaaugaagacaaa

SEQ ID NO: 1910009 - RNA, 19 nt, Homo sapiens
  misc_RNA (1)...(19): siRNA sense strand
caucaucggucucaucuuc

SEQ ID NO: 1910010 - RNA, 19 nt, Homo sapiens
  misc_RNA (1)...(19): siRNA sense strand
cggaugaucuugagcacua

SEQ ID NO: 1910011 - RNA, 19 nt, Homo sapiens
  misc_RNA (1)...(19): siRNA sense strand
gaaaugaagacaaaccaau

SEQ ID NO: 1910012 - RNA, 19 nt, Homo sapiens
  misc_RNA (1)...(19): siRNA sense strand
gcaaugauucuuauccuau

SEQ ID NO: 1910013 - RNA, 19 nt, Homo sapiens
  misc_RNA (1)...(19): siRNA sense strand
ggauaacacggccuucaaa

SEQ ID NO: 1910014 - RNA, 19 nt, Homo sapiens
  misc_RNA (1)...(19): siRNA sense strand
ggcaaugauucuuauccua

SEQ ID NO: 1910015 - RNA, 19 nt, Homo sapiens
  misc_RNA (1)...(19): siRNA sense strand
caaccuggaagaacgauuu

SEQ ID NO: 1910016 - RNA, 19 nt, Homo sapiens
  misc_RNA (1)...(19): siRNA sense strand
gaaugugaaccuuaucgaa

SEQ ID NO: 1910017 - RNA, 19 nt, Homo sapiens
  misc_RNA (1)...(19): siRNA sense strand
ggaagaacgauuuaaaggu

SEQ ID NO: 1910018 - RNA, 19 nt, Homo sapiens
  misc_RNA (1)...(19): siRNA sense strand
ggcaacguguuuauguauu

SEQ ID NO: 1910019 - RNA, 19 nt, Homo sapiens
  misc_RNA (1)...(19): siRNA sense strand
ucaacuaaauggagauucu

SEQ ID NO: 1910020 - RNA, 19 nt, Homo sapiens
  misc_RNA (1)...(19): siRNA sense strand
ggaugugacaccuugcuuu

SEQ ID NO: 1910021 - RNA, 19 nt, Homo sapiens
  misc_RNA (1)...(19): siRNA sense strand
ggccgauacucuuugaaug

SEQ ID NO: 1910022 - RNA, 19 nt, Homo sapiens
  misc_RNA (1)...(19): siRNA sense strand
gaaaacggaugaucuugag

SEQ ID NO: 1910023 - RNA, 19 nt, Homo sapiens
  misc_RNA (1)...(19): siRNA sense strand
gaaccuuaucgaagaaaug

SEQ ID NO: 1910024 - RNA, 19 nt, Homo sapiens
  misc_RNA (1)...(19): siRNA sense strand
gaaaagugauuuacaucca

SEQ ID NO: 1910025 - RNA, 19 nt, Homo sapiens
  misc_RNA (1)...(19): siRNA sense strand
cgcaaguuguaucgucuua

SEQ ID NO: 1910026 - RNA, 19 nt, Homo sapiens
  misc_RNA (1)...(19): siRNA sense strand
caguuuacaugcuggauuc

SEQ ID NO: 1910027 - RNA, 19 nt, Homo sapiens
  misc_RNA (1)...(19): siRNA sense strand
gaggagacaaccuggaaga

SEQ ID NO: 1910028 - RNA, 19 nt, Homo sapiens
  misc_RNA (1)...(19): siRNA sense strand
gcgagaucgagauugauua

SEQ ID NO: 1910029 - RNA, 19 nt, Homo sapiens
  misc_RNA (1)...(19): siRNA sense strand
ccugugaacuggcuuaaac

SEQ ID NO: 1910030 - RNA, 19 nt, Homo sapiens
  misc_RNA (1)...(19): siRNA sense strand
gauucuagugcuuugcuua

SEQ ID NO: 1910031 - RNA, 19 nt, Homo sapiens
  misc_RNA (1)...(19): siRNA sense strand
gggcaacguguuuauguau

SEQ ID NO: 1910032 - RNA, 19 nt, Homo sapiens
  misc_RNA (1)...(19): siRNA sense strand
gagggcaacguguuuaugu

SEQ ID NO: 1910033 - RNA, 19 nt, Homo sapiens
  misc_RNA (1)...(19): siRNA sense strand
uccagucccuguaauaaau

SEQ ID NO: 1910034 - RNA, 19 nt, Homo sapiens
  misc_RNA (1)...(19): siRNA sense strand
agaucgagauugauuauac

SEQ ID NO: 1910035 - RNA, 19 nt, Homo sapiens
  misc_RNA (1)...(19): siRNA sense strand
uaacacggccuucaaacag

SEQ ID NO: 1910036 - RNA, 19 nt, Homo sapiens
  misc_RNA (1)...(19): siRNA sense strand
caaaccaauugcuccuugu

SEQ ID NO: 1910037 - RNA, 19 nt, Homo sapiens
  misc_RNA (1)...(19): siRNA sense strand
gcuggccgauacucuuuga

SEQ ID NO: 1910038 - RNA, 19 nt, Homo sapiens
  misc_RNA (1)...(19): siRNA sense strand
guuguaucgucuuauagaa

SEQ ID NO: 1910039 - RNA, 19 nt, Homo sapiens
  misc_RNA (1)...(19): siRNA sense strand
ugacccagauaauaaugga

SEQ ID NO: 1910040 - RNA, 19 nt, Homo sapiens
  misc_RNA (1)...(19): siRNA sense strand
guacaacaaagccugugaa

SEQ ID NO: 1910041 - RNA, 19 nt, Homo sapiens
  misc_RNA (1)...(19): siRNA sense strand
ucugggaguuguacugcua

SEQ ID NO: 1910042 - RNA, 19 nt, Homo sapiens
  misc_RNA (1)...(19): siRNA sense strand
cgagaucgagauugauuau

SEQ ID NO: 1910043 - RNA, 19 nt, Homo sapiens
  misc_RNA (1)...(19): siRNA sense strand
gaucuugagcacuauuuca

SEQ ID NO: 1910044 - RNA, 19 nt, Homo sapiens
  misc_RNA (1)...(19): siRNA sense strand
caacuaaauggagauucua

SEQ ID NO: 1910045 - RNA, 19 nt, Homo sapiens
  misc_RNA (1)...(19): siRNA sense strand
cagcauguuuaaugauaca

SEQ ID NO: 1910046 - RNA, 19 nt, Homo sapiens
  misc_RNA (1)...(19): siRNA sense strand
caacaacauccgcgagauc

SEQ ID NO: 1910047 - RNA, 19 nt, Homo sapiens
  misc_RNA (1)...(19): siRNA sense strand
uggacugucuaauuucuau

SEQ ID NO: 1910048 - RNA, 19 nt, Homo sapiens
  misc_RNA (1)...(19): siRNA sense strand
gagaucgagauugauuaua

SEQ ID NO: 1910049 - RNA, 19 nt, Homo sapiens
  misc_RNA (1)...(19): siRNA sense strand
ccuggaagaacgauuuaaa

SEQ ID NO: 1910050 - RNA, 19 nt, Homo sapiens
  misc_RNA (1)...(19): siRNA sense strand
uuuacaugcuggauucuga

SEQ ID NO: 1910051 - RNA, 19 nt, Homo sapiens
  misc_RNA (1)...(19): siRNA sense strand
cugcagcauuaccuacuuu

SEQ ID NO: 1910052 - RNA, 19 nt, Homo sapiens
  misc_RNA (1)...(19): siRNA sense strand
cuaaauggagauucuagug

SEQ ID NO: 1910053 - RNA, 19 nt, Homo sapiens
  misc_RNA (1)...(19): siRNA sense strand
gccgauacucuuugaaugu

SEQ ID NO: 1910054 - RNA, 19 nt, Homo sapiens
  misc_RNA (1)...(19): siRNA sense strand
uguaucgucuuauagaaag

SEQ ID NO: 1910055 - RNA, 19 nt, Homo sapiens
  misc_RNA (1)...(19): siRNA sense strand
cuauaccuaucgcuuugaa

SEQ ID NO: 1910056 - RNA, 19 nt, Homo sapiens
  misc_RNA (1)...(19): siRNA sense strand
gaagaaaugaagacaaacc

SEQ ID NO: 1910057 - RNA, 19 nt, Homo sapiens
  misc_RNA (1)...(19): siRNA sense strand
agggcaacguguuuaugua

SEQ ID NO: 1910058 - RNA, 19 nt, Homo sapiens
  misc_RNA (1)...(19): siRNA sense strand
cagcuggccgauacucuuu

SEQ ID NO: 1910059 - RNA, 19 nt, Homo sapiens
  misc_RNA (1)...(19): siRNA sense strand
cgauuuaaagguacaacaa

SEQ ID NO: 1910060 - RNA, 19 nt, Homo sapiens
  misc_RNA (1)...(19): siRNA sense strand
ggaaugugaaccuuaucga

SEQ ID NO: 1910061 - RNA, 19 nt, Homo sapiens
  misc_RNA (1)...(19): siRNA sense strand
ggagacaaccuggaagaac

SEQ ID NO: 1910062 - RNA, 19 nt, Homo sapiens
  misc_RNA (1)...(19): siRNA sense strand
ccaacaacauccgcgagau

SEQ ID NO: 1910063 - RNA, 19 nt, Homo sapiens
  misc_RNA (1)...(19): siRNA sense strand
aaugaagacaaaccaauug

SEQ ID NO: 1910064 - RNA, 19 nt, Homo sapiens
  misc_RNA (1)...(19): siRNA sense strand
gcuuggcagcccauccuua

SEQ ID NO: 1910065 - RNA, 19 nt, Homo sapiens
  misc_RNA (1)...(19): siRNA sense strand
gugauuuacauccaacauu

SEQ ID NO: 1910066 - RNA, 19 nt, Homo sapiens
  misc_RNA (1)...(19): siRNA sense strand
gaacuauaacgcgaaggau

SEQ ID NO: 1910067 - RNA, 19 nt, Homo sapiens
  misc_RNA (1)...(19): siRNA sense strand
acuauaacgcgaaggauga

SEQ ID NO: 1910068 - RNA, 19 nt, Homo sapiens
  misc_RNA (1)...(19): siRNA sense strand
acagcugacauuaccauuu

SEQ ID NO: 1910069 - RNA, 19 nt, Homo sapiens
  misc_RNA (1)...(19): siRNA sense strand
ugagcacuauuucauggau

SEQ ID NO: 1910070 - RNA, 19 nt, Homo sapiens
  misc_RNA (1)...(19): siRNA sense strand
ucuagugcuuugcuuaauc

SEQ ID NO: 1910071 - RNA, 19 nt, Homo sapiens
  misc_RNA (1)...(19): siRNA sense strand
uauggacugucuaauuucu

SEQ ID NO: 1910072 - RNA, 19 nt, Homo sapiens
  misc_RNA (1)...(19): siRNA sense strand
uguauuauggacugucuaa

SEQ ID NO: 1910073 - RNA, 19 nt, Homo sapiens
  misc_RNA (1)...(19): siRNA sense strand
uccgcgagaucgagauuga

SEQ ID NO: 1910074 - RNA, 19 nt, Homo sapiens
  misc_RNA (1)...(19): siRNA sense strand
ugugaaccuuaucgaagaa

SEQ ID NO: 1910075 - RNA, 19 nt, Homo sapiens
  misc_RNA (1)...(19): siRNA sense strand
ugaacuauaacgcgaagga

SEQ ID NO: 1910076 - RNA, 19 nt, Homo sapiens
  misc_RNA (1)...(19): siRNA sense strand
gauaacacggccuucaaac

SEQ ID NO: 1910077 - RNA, 19 nt, Homo sapiens
  misc_RNA (1)...(19): siRNA sense strand
uccuauaccuaucgcuuug

SEQ ID NO: 1910078 - RNA, 19 nt, Homo sapiens
  misc_RNA (1)...(19): siRNA sense strand
gaucgagauugauuauacc

SEQ ID NO: 1910079 - RNA, 19 nt, Homo sapiens
  misc_RNA (1)...(19): siRNA sense strand
augugaaccuuaucgaaga

SEQ ID NO: 1910080 - RNA, 19 nt, Homo sapiens
  misc_RNA (1)...(19): siRNA sense strand
ggaugaucuugagcacuau

SEQ ID NO: 1910081 - RNA, 19 nt, Homo sapiens
  misc_RNA (1)...(19): siRNA sense strand
ccgauacucuuugaauguc

SEQ ID NO: 1910082 - RNA, 19 nt, Homo sapiens
  misc_RNA (1)...(19): siRNA sense strand
gaugugacaccuugcuuuu

SEQ ID NO: 1910083 - RNA, 19 nt, Homo sapiens
  misc_RNA (1)...(19): siRNA sense strand
gguacaacaaagccuguga

SEQ ID NO: 1910084 - RNA, 19 nt, Homo sapiens
  misc_RNA (1)...(19): siRNA sense strand
gcuauugccaacagcaugu

SEQ ID NO: 1910085 - RNA, 19 nt, Homo sapiens
  misc_RNA (1)...(19): siRNA sense strand
uggagauucuagugcuuug

SEQ ID NO: 1910086 - RNA, 19 nt, Homo sapiens
  misc_RNA (1)...(19): siRNA sense strand
ccaucgucguuacgugaaa

SEQ ID NO: 1910087 - RNA, 19 nt, Homo sapiens
  misc_RNA (1)...(19): siRNA sense strand
ugaaccuuaucgaagaaau

SEQ ID NO: 1910088 - RNA, 19 nt, Homo sapiens
  misc_RNA (1)...(19): siRNA sense strand
guaguaauacagcugacau

SEQ ID NO: 1910089 - RNA, 19 nt, Homo sapiens
  misc_RNA (1)...(19): siRNA sense strand
guggagcuauugccaacag

SEQ ID NO: 1910090 - RNA, 19 nt, Homo sapiens
  misc_RNA (1)...(19): siRNA sense strand
caucgucguuacgugaaau

SEQ ID NO: 1910091 - RNA, 19 nt, Homo sapiens
  misc_RNA (1)...(19): siRNA sense strand
gagccuuccagucccugua

SEQ ID NO: 1910092 - RNA, 19 nt, Homo sapiens
  misc_RNA (1)...(19): siRNA sense strand
gaugaucuugagcacuauu

SEQ ID NO: 1910093 - RNA, 19 nt, Homo sapiens
  misc_RNA (1)...(19): siRNA sense strand
ggacgaaaacggaugaucu

SEQ ID NO: 1910094 - RNA, 19 nt, Homo sapiens
  misc_RNA (1)...(19): siRNA sense strand
uaacgcgaaggaugaagug

SEQ ID NO: 1910095 - RNA, 19 nt, Homo sapiens
  misc_RNA (1)...(19): siRNA sense strand
cgauacucuuugaauguca

SEQ ID NO: 1910096 - RNA, 19 nt, Homo sapiens
  misc_RNA (1)...(19): siRNA sense strand
gggaaucagugucucauua

SEQ ID NO: 1910097 - RNA, 19 nt, Homo sapiens
  misc_RNA (1)...(19): siRNA sense strand
uaacaagcauugccuuuaa

SEQ ID NO: 1910098 - RNA, 19 nt, Homo sapiens
  misc_RNA (1)...(19): siRNA sense strand
ugaagaaacuaacaaggaa

SEQ ID NO: 1910099 - RNA, 19 nt, Homo sapiens
  misc_RNA (1)...(19): siRNA sense strand
caaaggagccucuaugaag

SEQ ID NO: 1910100 - RNA, 19 nt, Homo sapiens
  misc_RNA (1)...(19): siRNA sense strand
gcacacaggguuccucauu

SEQ ID NO: 1910101 - RNA, 19 nt, Homo sapiens
  misc_RNA (1)...(19): siRNA sense strand
ggaagagccagacccauuu

SEQ ID NO: 1910102 - RNA, 19 nt, Homo sapiens
  misc_RNA (1)...(19): siRNA sense strand
aaaggagccucuaugaaga

SEQ ID NO: 1910103 - RNA, 19 nt, Homo sapiens
  misc_RNA (1)...(19): siRNA sense strand
ggauauguauuugcuggaa

SEQ ID NO: 1910104 - RNA, 19 nt, Homo sapiens
  misc_RNA (1)...(19): siRNA sense strand
gauaacaagcauugccuuu

SEQ ID NO: 1910105 - RNA, 19 nt, Homo sapiens
  misc_RNA (1)...(19): siRNA sense strand
gaagaaacuaacaaggaaa

SEQ ID NO: 1910106 - RNA, 19 nt, Homo sapiens
  misc_RNA (1)...(19): siRNA sense strand
ggaaucagugucucauuau

SEQ ID NO: 1910107 - RNA, 19 nt, Homo sapiens
  misc_RNA (1)...(19): siRNA sense strand
acacaggguuccucauuca

SEQ ID NO: 1910108 - RNA, 19 nt, Homo sapiens
  misc_RNA (1)...(19): siRNA sense strand
gaaucagugucucauuauc

SEQ ID NO: 1910109 - RNA, 19 nt, Homo sapiens
  misc_RNA (1)...(19): siRNA sense strand
gagccagacccauuuguga

SEQ ID NO: 1910110 - RNA, 19 nt, Homo sapiens
  misc_RNA (1)...(19): siRNA sense strand
ggacaaggaaggucuaugc

SEQ ID NO: 1910111 - RNA, 19 nt, Homo sapiens
  misc_RNA (1)...(19): siRNA sense strand
gaagagccagacccauuug

SEQ ID NO: 1910112 - RNA, 19 nt, Homo sapiens
  misc_RNA (1)...(19): siRNA sense strand
agggagauguggcaggaua

SEQ ID NO: 1910113 - RNA, 19 nt, Homo sapiens
  misc_RNA (1)...(19): siRNA sense strand
aaacuaacaaggaaacaug

SEQ ID NO: 1910114 - RNA, 19 nt, Homo sapiens
  misc_RNA (1)...(19): siRNA sense strand
ucaaaggagccucuaugaa

SEQ ID NO: 1910115 - RNA, 19 nt, Homo sapiens
  misc_RNA (1)...(19): siRNA sense strand
gagauguggcaggauaaua

SEQ ID NO: 1910116 - RNA, 19 nt, Homo sapiens
  misc_RNA (1)...(19): siRNA sense strand
gagccucuaugaagaaacu

SEQ ID NO: 1910117 - RNA, 19 nt, Homo sapiens
  misc_RNA (1)...(19): siRNA sense strand
uggaagagccagacccauu

SEQ ID NO: 1910118 - RNA, 19 nt, Homo sapiens
  misc_RNA (1)...(19): siRNA sense strand
auaacaagcauugccuuua

SEQ ID NO: 1910119 - RNA, 19 nt, Homo sapiens
  misc_RNA (1)...(19): siRNA sense strand
gaaacuaacaaggaaacau

SEQ ID NO: 1910120 - RNA, 19 nt, Homo sapiens
  misc_RNA (1)...(19): siRNA sense strand
guucaaaggagccucuaug

SEQ ID NO: 1910121 - RNA, 19 nt, Homo sapiens
  misc_RNA (1)...(19): siRNA sense strand
cacacaggguuccucauuc

SEQ ID NO: 1910122 - RNA, 19 nt, Homo sapiens
  misc_RNA (1)...(19): siRNA sense strand
cucauuaucucuaccaucu

SEQ ID NO: 1910123 - RNA, 19 nt, Homo sapiens
  misc_RNA (1)...(19): siRNA sense strand
cauuaucucuaccaucucu

SEQ ID NO: 1910124 - RNA, 19 nt, Homo sapiens
  misc_RNA (1)...(19): siRNA sense strand
gagacaagggaaucagugu

SEQ ID NO: 1910125 - RNA, 19 nt, Homo sapiens
  misc_RNA (1)...(19): siRNA sense strand
gccugugggauauguauuu

SEQ ID NO: 1910126 - RNA, 19 nt, Homo sapiens
  misc_RNA (1)...(19): siRNA sense strand
caagggaaucagugucuca

SEQ ID NO: 1910127 - RNA, 19 nt, Homo sapiens
  misc_RNA (1)...(19): siRNA sense strand
cagauguugaugcugauaa

SEQ ID NO: 1910128 - RNA, 19 nt, Homo sapiens
  misc_RNA (1)...(19): siRNA sense strand
gggagauguggcaggauaa

SEQ ID NO: 1910129 - RNA, 19 nt, Homo sapiens
  misc_RNA (1)...(19): siRNA sense strand
ggagauguggcaggauaau

SEQ ID NO: 1910130 - RNA, 19 nt, Homo sapiens
  misc_RNA (1)...(19): siRNA sense strand
gcugaaugaugggaucucu

SEQ ID NO: 1910131 - RNA, 19 nt, Homo sapiens
  misc_RNA (1)...(19): siRNA sense strand
gccagacccauuugugaga

SEQ ID NO: 1910132 - RNA, 19 nt, Homo sapiens
  misc_RNA (1)...(19): siRNA sense strand
ccugugggauauguauuug

SEQ ID NO: 1910133 - RNA, 19 nt, Homo sapiens
  misc_RNA (1)...(19): siRNA sense strand
augaagaaacuaacaagga

SEQ ID NO: 1910134 - RNA, 19 nt, Homo sapiens
  misc_RNA (1)...(19): siRNA sense strand
agauguggcaggauaauag

SEQ ID NO: 1910135 - RNA, 19 nt, Homo sapiens
  misc_RNA (1)...(19): siRNA sense strand
ucuaccaucucuaccaucu

SEQ ID NO: 1910136 - RNA, 19 nt, Homo sapiens
  misc_RNA (1)...(19): siRNA sense strand
ugaaugaugggaucucucu

SEQ ID NO: 1910137 - RNA, 19 nt, Homo sapiens
  misc_RNA (1)...(19): siRNA sense strand
ccucaagggcacuggaaga

SEQ ID NO: 1910138 - RNA, 19 nt, Homo sapiens
  misc_RNA (1)...(19): siRNA sense strand
gaagaagacucgacccaua

SEQ ID NO: 1910139 - RNA, 19 nt, Homo sapiens
  misc_RNA (1)...(19): siRNA sense strand
ggaccaagcuucucucaaa

SEQ ID NO: 1910140 - RNA, 19 nt, Homo sapiens
  misc_RNA (1)...(19): siRNA sense strand
ccaauaagcugaagcacua

SEQ ID NO: 1910141 - RNA, 19 nt, Homo sapiens
  misc_RNA (1)...(19): siRNA sense strand
uggaagagcuggugaauuu

SEQ ID NO: 1910142 - RNA, 19 nt, Homo sapiens
  misc_RNA (1)...(19): siRNA sense strand
gaaagugucuuaugucucu

SEQ ID NO: 1910143 - RNA, 19 nt, Homo sapiens
  misc_RNA (1)...(19): siRNA sense strand
gcaaugugcucaaauucaa

SEQ ID NO: 1910144 - RNA, 19 nt, Homo sapiens
  misc_RNA (1)...(19): siRNA sense strand
gaggugaacucugcccuua

SEQ ID NO: 1910145 - RNA, 19 nt, Homo sapiens
  misc_RNA (1)...(19): siRNA sense strand
gaaacuguauugccuguca

SEQ ID NO: 1910146 - RNA, 19 nt, Homo sapiens
  misc_RNA (1)...(19): siRNA sense strand
gagaagaugcuauacaaug

SEQ ID NO: 1910147 - RNA, 19 nt, Homo sapiens
  misc_RNA (1)...(19): siRNA sense strand
gaaagcgggugagcgauga

SEQ ID NO: 1910148 - RNA, 19 nt, Homo sapiens
  misc_RNA (1)...(19): siRNA sense strand
ugacagggcuuacccagau

SEQ ID NO: 1910149 - RNA, 19 nt, Homo sapiens
  misc_RNA (1)...(19): siRNA sense strand
gagaaagugucuuaugucu

SEQ ID NO: 1910150 - RNA, 19 nt, Homo sapiens
  misc_RNA (1)...(19): siRNA sense strand
gaacucugcccuuaguaaa

SEQ ID NO: 1910151 - RNA, 19 nt, Homo sapiens
  misc_RNA (1)...(19): siRNA sense strand
gugcucgggucauguauuu

SEQ ID NO: 1910152 - RNA, 19 nt, Homo sapiens
  misc_RNA (1)...(19): siRNA sense strand
ggauggaccucaugaucga

SEQ ID NO: 1910153 - RNA, 19 nt, Homo sapiens
  misc_RNA (1)...(19): siRNA sense strand
ggacuggacaugacuucua

SEQ ID NO: 1910154 - RNA, 19 nt, Homo sapiens
  misc_RNA (1)...(19): siRNA sense strand
caugcaaugugcucaaauu

SEQ ID NO: 1910155 - RNA, 19 nt, Homo sapiens
  misc_RNA (1)...(19): siRNA sense strand
uaagguguaucuuccagaa

SEQ ID NO: 1910156 - RNA, 19 nt, Homo sapiens
  misc_RNA (1)...(19): siRNA sense strand
uggagaagaugcuauacaa

SEQ ID NO: 1910157 - RNA, 19 nt, Homo sapiens
  misc_RNA (1)...(19): siRNA sense strand
ugacuucuacccucaauuu

SEQ ID NO: 1910158 - RNA, 19 nt, Homo sapiens
  misc_RNA (1)...(19): siRNA sense strand
agacggagcuaauagaucu

SEQ ID NO: 1910159 - RNA, 19 nt, Homo sapiens
  misc_RNA (1)...(19): siRNA sense strand
ggucauguauuuguggauu

SEQ ID NO: 1910160 - RNA, 19 nt, Homo sapiens
  misc_RNA (1)...(19): siRNA sense strand
ugccagagcucgcagauuc

SEQ ID NO: 1910161 - RNA, 19 nt, Homo sapiens
  misc_RNA (1)...(19): siRNA sense strand
caaaucaaccaccauuaug

SEQ ID NO: 1910162 - RNA, 19 nt, Homo sapiens
  misc_RNA (1)...(19): siRNA sense strand
ggagugcucgggucaugua

SEQ ID NO: 1910163 - RNA, 19 nt, Homo sapiens
  misc_RNA (1)...(19): siRNA sense strand
ggugaacucugcccuuagu

SEQ ID NO: 1910164 - RNA, 19 nt, Homo sapiens
  misc_RNA (1)...(19): siRNA sense strand
ucaaaucaaccaccauuau

SEQ ID NO: 1910165 - RNA, 19 nt, Homo sapiens
  misc_RNA (1)...(19): siRNA sense strand
gaauggaggaaacguguug

SEQ ID NO: 1910166 - RNA, 19 nt, Homo sapiens
  misc_RNA (1)...(19): siRNA sense strand
ucucaaggaugcaguggaa

SEQ ID NO: 1910167 - RNA, 19 nt, Homo sapiens
  misc_RNA (1)...(19): siRNA sense strand
uggagugccuauaucagua

SEQ ID NO: 1910168 - RNA, 19 nt, Homo sapiens
  misc_RNA (1)...(19): siRNA sense strand
cauaucaucugcgacaaug

SEQ ID NO: 1910169 - RNA, 19 nt, Homo sapiens
  misc_RNA (1)...(19): siRNA sense strand
ccaaagauaacaagcacuu

SEQ ID NO: 1910170 - RNA, 19 nt, Homo sapiens
  misc_RNA (1)...(19): siRNA sense strand
acgagaaagugucuuaugu

SEQ ID NO: 1910171 - RNA, 19 nt, Homo sapiens
  misc_RNA (1)...(19): siRNA sense strand
gugcucaaauucaaaucaa

SEQ ID NO: 1910172 - RNA, 19 nt, Homo sapiens
  misc_RNA (1)...(19): siRNA sense strand
gggaaaaucuagucucaau

SEQ ID NO: 1910173 - RNA, 19 nt, Homo sapiens
  misc_RNA (1)...(19): siRNA sense strand
cuucuggagugaucuauga

SEQ ID NO: 1910174 - RNA, 19 nt, Homo sapiens
  misc_RNA (1)...(19): siRNA sense strand
acaaacagaguaaggugua

SEQ ID NO: 1910175 - RNA, 19 nt, Homo sapiens
  misc_RNA (1)...(19): siRNA sense strand
ugacguaccagacugcaaa

SEQ ID NO: 1910176 - RNA, 19 nt, Homo sapiens
  misc_RNA (1)...(19): siRNA sense strand
gagcucauucagaccaaua

SEQ ID NO: 1910177 - RNA, 19 nt, Homo sapiens
  misc_RNA (1)...(19): siRNA sense strand
ccucugagcucuggcuaug

SEQ ID NO: 1910178 - RNA, 19 nt, Homo sapiens
  misc_RNA (1)...(19): siRNA sense strand
ggugagcgaugacguacca

SEQ ID NO: 1910179 - RNA, 19 nt, Homo sapiens
  misc_RNA (1)...(19): siRNA sense strand
ggacauucagaggcuguua

SEQ ID NO: 1910180 - RNA, 19 nt, Homo sapiens
  misc_RNA (1)...(19): siRNA sense strand
ucuggauccuccuugcuua

SEQ ID NO: 1910181 - RNA, 19 nt, Homo sapiens
  misc_RNA (1)...(19): siRNA sense strand
caaacagaguaagguguau

SEQ ID NO: 1910182 - RNA, 19 nt, Homo sapiens
  misc_RNA (1)...(19): siRNA sense strand
guccucaaauucuuacaga

SEQ ID NO: 1910183 - RNA, 19 nt, Homo sapiens
  misc_RNA (1)...(19): siRNA sense strand
gagacgcucauccagauug

SEQ ID NO: 1910184 - RNA, 19 nt, Homo sapiens
  misc_RNA (1)...(19): siRNA sense strand
ggagaagaugcuauacaau

SEQ ID NO: 1910185 - RNA, 19 nt, Homo sapiens
  misc_RNA (1)...(19): siRNA sense strand
ucauccagauugaagaaga

SEQ ID NO: 1910186 - RNA, 19 nt, Homo sapiens
  misc_RNA (1)...(19): siRNA sense strand
aaacgucgguacgagaaga

SEQ ID NO: 1910187 - RNA, 19 nt, Homo sapiens
  misc_RNA (1)...(19): siRNA sense strand
ugaacucugcccuuaguaa

SEQ ID NO: 1910188 - RNA, 19 nt, Homo sapiens
  misc_RNA (1)...(19): siRNA sense strand
agaagaugcuauacaaugc

SEQ ID NO: 1910189 - RNA, 19 nt, Homo sapiens
  misc_RNA (1)...(19): siRNA sense strand
agacuucuccuaccuggaa

SEQ ID NO: 1910190 - RNA, 19 nt, Homo sapiens
  misc_RNA (1)...(19): siRNA sense strand
gaacuucauccagguguca

SEQ ID NO: 1910191 - RNA, 19 nt, Homo sapiens
  misc_RNA (1)...(19): siRNA sense strand
ugaaggauggaaaugcuuu

SEQ ID NO: 1910192 - RNA, 19 nt, Homo sapiens
  misc_RNA (1)...(19): siRNA sense strand
gaaaaucuagucucaauac

SEQ ID NO: 1910193 - RNA, 19 nt, Homo sapiens
  misc_RNA (1)...(19): siRNA sense strand
gaucauccagucucauuac

SEQ ID NO: 1910194 - RNA, 19 nt, Homo sapiens
  misc_RNA (1)...(19): siRNA sense strand
gaagacucgacccauauca

SEQ ID NO: 1910195 - RNA, 19 nt, Homo sapiens
  misc_RNA (1)...(19): siRNA sense strand
gcucauccagauugaagaa

SEQ ID NO: 1910196 - RNA, 19 nt, Homo sapiens
  misc_RNA (1)...(19): siRNA sense strand
gcacaccaaagauaacaag

SEQ ID NO: 1910197 - RNA, 19 nt, Homo sapiens
  misc_RNA (1)...(19): siRNA sense strand
gaagaugcuauacaaugca

SEQ ID NO: 1910198 - RNA, 19 nt, Homo sapiens
  misc_RNA (1)...(19): siRNA sense strand
gacuggacaugacuucuac

SEQ ID NO: 1910199 - RNA, 19 nt, Homo sapiens
  misc_RNA (1)...(19): siRNA sense strand
gaccuuguccucaaauucu

SEQ ID NO: 1910200 - RNA, 19 nt, Homo sapiens
  misc_RNA (1)...(19): siRNA sense strand
gcucgggucauguauuugu

SEQ ID NO: 1910201 - RNA, 19 nt, Homo sapiens
  misc_RNA (1)...(19): siRNA sense strand
ucaaacgucgguacgagaa

SEQ ID NO: 1910202 - RNA, 19 nt, Homo sapiens
  misc_RNA (1)...(19): siRNA sense strand
cagaguaagguguaucuuc

SEQ ID NO: 1910203 - RNA, 19 nt, Homo sapiens
  misc_RNA (1)...(19): siRNA sense strand
cggcaggcuucucauggaa

SEQ ID NO: 1910204 - RNA, 19 nt, Homo sapiens
  misc_RNA (1)...(19): siRNA sense strand
gaugcuauacaaugcaaga

SEQ ID NO: 1910205 - RNA, 19 nt, Homo sapiens
  misc_RNA (1)...(19): siRNA sense strand
guggaagaauaaggacauu

SEQ ID NO: 1910206 - RNA, 19 nt, Homo sapiens
  misc_RNA (1)...(19): siRNA sense strand
gccaugaaaugcaucuacu

SEQ ID NO: 1910207 - RNA, 19 nt, Homo sapiens
  misc_RNA (1)...(19): siRNA sense strand
gucccaggcuguccaaucu

SEQ ID NO: 1910208 - RNA, 19 nt, Homo sapiens
  misc_RNA (1)...(19): siRNA sense strand
aaucaaccaccauuauguu

SEQ ID NO: 1910209 - RNA, 19 nt, Homo sapiens
  misc_RNA (1)...(19): siRNA sense strand
agacuucagcaacgacuuu

SEQ ID NO: 1910210 - RNA, 19 nt, Homo sapiens
  misc_RNA (1)...(19): siRNA sense strand
gaaccaccuuuuccucaug

SEQ ID NO: 1910211 - RNA, 19 nt, Homo sapiens
  misc_RNA (1)...(19): siRNA sense strand
gcucugacaguccggaaug

SEQ ID NO: 1910212 - RNA, 19 nt, Homo sapiens
  misc_RNA (1)...(19): siRNA sense strand
gaccaagcuucucucaaaa

SEQ ID NO: 1910213 - RNA, 19 nt, Homo sapiens
  misc_RNA (1)...(19): siRNA sense strand
ccagagacggagcuaauag

SEQ ID NO: 1910214 - RNA, 19 nt, Homo sapiens
  misc_RNA (1)...(19): siRNA sense strand
aagaagacucgacccauau

SEQ ID NO: 1910215 - RNA, 19 nt, Homo sapiens
  misc_RNA (1)...(19): siRNA sense strand
cacccaaccuuaccaugca

SEQ ID NO: 1910216 - RNA, 19 nt, Homo sapiens
  misc_RNA (1)...(19): siRNA sense strand
cagcauccacggagacuuc

SEQ ID NO: 1910217 - RNA, 19 nt, Homo sapiens
  misc_RNA (1)...(19): siRNA sense strand
ugucacaacaaacagagua

SEQ ID NO: 1910218 - RNA, 19 nt, Homo sapiens
  misc_RNA (1)...(19): siRNA sense strand
ggacugcggacuggacaug

SEQ ID NO: 1910219 - RNA, 19 nt, Homo sapiens
  misc_RNA (1)...(19): siRNA sense strand
caguagaugugauucucau

SEQ ID NO: 1910220 - RNA, 19 nt, Homo sapiens
  misc_RNA (1)...(19): siRNA sense strand
agacgcucauccagauuga

SEQ ID NO: 1910221 - RNA, 19 nt, Homo sapiens
  misc_RNA (1)...(19): siRNA sense strand
gcgggugagcgaugacgua

SEQ ID NO: 1910222 - RNA, 19 nt, Homo sapiens
  misc_RNA (1)...(19): siRNA sense strand
aaaucaaccaccauuaugu

SEQ ID NO: 1910223 - RNA, 19 nt, Homo sapiens
  misc_RNA (1)...(19): siRNA sense strand
gcaucuccuuggcaacugu

SEQ ID NO: 1910224 - RNA, 19 nt, Homo sapiens
  misc_RNA (1)...(19): siRNA sense strand
cgagaaagugucuuauguc

SEQ ID NO: 1910225 - RNA, 19 nt, Homo sapiens
  misc_RNA (1)...(19): siRNA sense strand
gaucggcaggcuucucaug

SEQ ID NO: 1910226 - RNA, 19 nt, Homo sapiens
  misc_RNA (1)...(19): siRNA sense strand
ugauucucaucucuaacua

SEQ ID NO: 1910227 - RNA, 19 nt, Homo sapiens
  misc_RNA (1)...(19): siRNA sense strand
cagagacggagcuaauaga

SEQ ID NO: 1910228 - RNA, 19 nt, Homo sapiens
  misc_RNA (1)...(19): siRNA sense strand
ggaauggaggaaacguguu

SEQ ID NO: 1910229 - RNA, 19 nt, Homo sapiens
  misc_RNA (1)...(19): siRNA sense strand
ggaacccaccguccagauc

SEQ ID NO: 1910230 - RNA, 19 nt, Homo sapiens
  misc_RNA (1)...(19): siRNA sense strand
uaccagagacggagcuaau

SEQ ID NO: 1910231 - RNA, 19 nt, Homo sapiens
  misc_RNA (1)...(19): siRNA sense strand
uggcuucagugauauuaag

SEQ ID NO: 1910232 - RNA, 19 nt, Homo sapiens
  misc_RNA (1)...(19): siRNA sense strand
caggauggaccucaugauc

SEQ ID NO: 1910233 - RNA, 19 nt, Homo sapiens
  misc_RNA (1)...(19): siRNA sense strand
ggaaaaucuagucucaaua

SEQ ID NO: 1910234 - RNA, 19 nt, Homo sapiens
  misc_RNA (1)...(19): siRNA sense strand
ucccagaucuuugcugagu

SEQ ID NO: 1910235 - RNA, 19 nt, Homo sapiens
  misc_RNA (1)...(19): siRNA sense strand
aagaugcuauacaaugcaa

SEQ ID NO: 1910236 - RNA, 19 nt, Homo sapiens
  misc_RNA (1)...(19): siRNA sense strand
gucagggcacccaaccuua

SEQ ID NO: 1910237 - RNA, 19 nt, Homo sapiens
  misc_RNA (1)...(19): siRNA sense strand
ccuccuugcuuaccacaca

SEQ ID NO: 1910238 - RNA, 19 nt, Homo sapiens
  misc_RNA (1)...(19): siRNA sense strand
gggaauagcuacacugaua

SEQ ID NO: 1910239 - RNA, 19 nt, Homo sapiens
  misc_RNA (1)...(19): siRNA sense strand
gagaagaacuguaggcaaa

SEQ ID NO: 1910240 - RNA, 19 nt, Homo sapiens
  misc_RNA (1)...(19): siRNA sense strand
ugacagaucuaguucguua

SEQ ID NO: 1910241 - RNA, 19 nt, Homo sapiens
  misc_RNA (1)...(19): siRNA sense strand
ugagaaagcuguauacuau

SEQ ID NO: 1910242 - RNA, 19 nt, Homo sapiens
  misc_RNA (1)...(19): siRNA sense strand
gcagagccauacaaaguua

SEQ ID NO: 1910243 - RNA, 19 nt, Homo sapiens
  misc_RNA (1)...(19): siRNA sense strand
gaaaguaguuccagugaca

SEQ ID NO: 1910244 - RNA, 19 nt, Homo sapiens
  misc_RNA (1)...(19): siRNA sense strand
gaugacagguacccacuua

SEQ ID NO: 1910245 - RNA, 19 nt, Homo sapiens
  misc_RNA (1)...(19): siRNA sense strand
aaacagaaccuuccaaauu

SEQ ID NO: 1910246 - RNA, 19 nt, Homo sapiens
  misc_RNA (1)...(19): siRNA sense strand
caacgaauguucucuccua

SEQ ID NO: 1910247 - RNA, 19 nt, Homo sapiens
  misc_RNA (1)...(19): siRNA sense strand
gcaagugguucuucaguga

SEQ ID NO: 1910248 - RNA, 19 nt, Homo sapiens
  misc_RNA (1)...(19): siRNA sense strand
gcacucaacucaaucuuuc

SEQ ID NO: 1910249 - RNA, 19 nt, Homo sapiens
  misc_RNA (1)...(19): siRNA sense strand
gaaaucaagggaaaucaua

SEQ ID NO: 1910250 - RNA, 19 nt, Homo sapiens
  misc_RNA (1)...(19): siRNA sense strand
ggagacagaucuauaccaa

SEQ ID NO: 1910251 - RNA, 19 nt, Homo sapiens
  misc_RNA (1)...(19): siRNA sense strand
gaacaggauugugauaaga

SEQ ID NO: 1910252 - RNA, 19 nt, Homo sapiens
  misc_RNA (1)...(19): siRNA sense strand
gaaacgguccucaggcuua

SEQ ID NO: 1910253 - RNA, 19 nt, Homo sapiens
  misc_RNA (1)...(19): siRNA sense strand
ggaaguaacucugaaccuu

SEQ ID NO: 1910254 - RNA, 19 nt, Homo sapiens
  misc_RNA (1)...(19): siRNA sense strand
caaggaaacccaauauaaa

SEQ ID NO: 1910255 - RNA, 19 nt, Homo sapiens
  misc_RNA (1)...(19): siRNA sense strand
ccaaguagcuccucuaacu

SEQ ID NO: 1910256 - RNA, 19 nt, Homo sapiens
  misc_RNA (1)...(19): siRNA sense strand
ggaaagccuuacaaagaaa

SEQ ID NO: 1910257 - RNA, 19 nt, Homo sapiens
  misc_RNA (1)...(19): siRNA sense strand
aacagaaccuuccaaauuu

SEQ ID NO: 1910258 - RNA, 19 nt, Homo sapiens
  misc_RNA (1)...(19): siRNA sense strand
caaaugggcaccagucuaa

SEQ ID NO: 1910259 - RNA, 19 nt, Homo sapiens
  misc_RNA (1)...(19): siRNA sense strand
caaaguuacuagcaaagaa

SEQ ID NO: 1910260 - RNA, 19 nt, Homo sapiens
  misc_RNA (1)...(19): siRNA sense strand
ucaaggaaacccaauauaa

SEQ ID NO: 1910261 - RNA, 19 nt, Homo sapiens
  misc_RNA (1)...(19): siRNA sense strand
aaccaaagcuguccucuga

SEQ ID NO: 1910262 - RNA, 19 nt, Homo sapiens
  misc_RNA (1)...(19): siRNA sense strand
gaaagcagcucuggaucug

SEQ ID NO: 1910263 - RNA, 19 nt, Homo sapiens
  misc_RNA (1)...(19): siRNA sense strand
gaacaucaacgcuccaaau

SEQ ID NO: 1910264 - RNA, 19 nt, Homo sapiens
  misc_RNA (1)...(19): siRNA sense strand
cgguggaucucaucaaaua

SEQ ID NO: 1910265 - RNA, 19 nt, Homo sapiens
  misc_RNA (1)...(19): siRNA sense strand
gagagaggcucagaaacaa

SEQ ID NO: 1910266 - RNA, 19 nt, Homo sapiens
  misc_RNA (1)...(19): siRNA sense strand
caggaaagccuuacaaaga

SEQ ID NO: 1910267 - RNA, 19 nt, Homo sapiens
  misc_RNA (1)...(19): siRNA sense strand
ccaauucaauguuacagaa

SEQ ID NO: 1910268 - RNA, 19 nt, Homo sapiens
  misc_RNA (1)...(19): siRNA sense strand
ugacagagcaccugaagaa

SEQ ID NO: 1910269 - RNA, 19 nt, Homo sapiens
  misc_RNA (1)...(19): siRNA sense strand
gaaaauaccuucccaacca

SEQ ID NO: 1910270 - RNA, 19 nt, Homo sapiens
  misc_RNA (1)...(19): siRNA sense strand
gggcagcacucaacucaau

SEQ ID NO: 1910271 - RNA, 19 nt, Homo sapiens
  misc_RNA (1)...(19): siRNA sense strand
ggaaugcauuagagaagaa

SEQ ID NO: 1910272 - RNA, 19 nt, Homo sapiens
  misc_RNA (1)...(19): siRNA sense strand
ggaaugugcugcguaugaa

SEQ ID NO: 1910273 - RNA, 19 nt, Homo sapiens
  misc_RNA (1)...(19): siRNA sense strand
gaucagaacacuccaaauc

SEQ ID NO: 1910274 - RNA, 19 nt, Homo sapiens
  misc_RNA (1)...(19): siRNA sense strand
caaauacacuaugaagcua

SEQ ID NO: 1910275 - RNA, 19 nt, Homo sapiens
  misc_RNA (1)...(19): siRNA sense strand
ggaggaagaagauagcuuu

SEQ ID NO: 1910276 - RNA, 19 nt, Homo sapiens
  misc_RNA (1)...(19): siRNA sense strand
acaaacaaauggcaacuug

SEQ ID NO: 1910277 - RNA, 19 nt, Homo sapiens
  misc_RNA (1)...(19): siRNA sense strand
uaccaaagcuuguugcaau

SEQ ID NO: 1910278 - RNA, 19 nt, Homo sapiens
  misc_RNA (1)...(19): siRNA sense strand
cagagcaccugaagaauuc

SEQ ID NO: 1910279 - RNA, 19 nt, Homo sapiens
  misc_RNA (1)...(19): siRNA sense strand
gcucugaaguacucaaaga

SEQ ID NO: 1910280 - RNA, 19 nt, Homo sapiens
  misc_RNA (1)...(19): siRNA sense strand
ggaacaggauugugauaag

SEQ ID NO: 1910281 - RNA, 19 nt, Homo sapiens
  misc_RNA (1)...(19): siRNA sense strand
gcaagaggaagcauaagaa

SEQ ID NO: 1910282 - RNA, 19 nt, Homo sapiens
  misc_RNA (1)...(19): siRNA sense strand
ggaaugaucaccauagcaa

SEQ ID NO: 1910283 - RNA, 19 nt, Homo sapiens
  misc_RNA (1)...(19): siRNA sense strand
gaacccacauaaaguguca

SEQ ID NO: 1910284 - RNA, 19 nt, Homo sapiens
  misc_RNA (1)...(19): siRNA sense strand
gaaacuacgaugaaaugaa

SEQ ID NO: 1910285 - RNA, 19 nt, Homo sapiens
  misc_RNA (1)...(19): siRNA sense strand
aaguaaaucuucccagaaa

SEQ ID NO: 1910286 - RNA, 19 nt, Homo sapiens
  misc_RNA (1)...(19): siRNA sense strand
uaaaagagaugacgcauuc

SEQ ID NO: 1910287 - RNA, 19 nt, Homo sapiens
  misc_RNA (1)...(19): siRNA sense strand
gaaacccacugccuaugug

SEQ ID NO: 1910288 - RNA, 19 nt, Homo sapiens
  misc_RNA (1)...(19): siRNA sense strand
aaacuacgaugaaaugaag

SEQ ID NO: 1910289 - RNA, 19 nt, Homo sapiens
  misc_RNA (1)...(19): siRNA sense strand
gacgguggaucucaucaaa

SEQ ID NO: 1910290 - RNA, 19 nt, Homo sapiens
  misc_RNA (1)...(19): siRNA sense strand
gcauaagaaugaagaugau

SEQ ID NO: 1910291 - RNA, 19 nt, Homo sapiens
  misc_RNA (1)...(19): siRNA sense strand
agacagaucuauaccaaag

SEQ ID NO: 1910292 - RNA, 19 nt, Homo sapiens
  misc_RNA (1)...(19): siRNA sense strand
caccaacucuugauucuuc

SEQ ID NO: 1910293 - RNA, 19 nt, Homo sapiens
  misc_RNA (1)...(19): siRNA sense strand
ccaccuagcucuccucucu

SEQ ID NO: 1910294 - RNA, 19 nt, Homo sapiens
  misc_RNA (1)...(19): siRNA sense strand
gaaaucuccugcacagagu

SEQ ID NO: 1910295 - RNA, 19 nt, Homo sapiens
  misc_RNA (1)...(19): siRNA sense strand
gagcagggcacugggaaua

SEQ ID NO: 1910296 - RNA, 19 nt, Homo sapiens
  misc_RNA (1)...(19): siRNA sense strand
aauggcaacuugauaauug

SEQ ID NO: 1910297 - RNA, 19 nt, Homo sapiens
  misc_RNA (1)...(19): siRNA sense strand
gcaccagucuaaaucuaug

SEQ ID NO: 1910298 - RNA, 19 nt, Homo sapiens
  misc_RNA (1)...(19): siRNA sense strand
gaaccuucacaccauaaua

SEQ ID NO: 1910299 - RNA, 19 nt, Homo sapiens
  misc_RNA (1)...(19): siRNA sense strand
agaggaagcauaagaauga

SEQ ID NO: 1910300 - RNA, 19 nt, Homo sapiens
  misc_RNA (1)...(19): siRNA sense strand
aggaaagccuuacaaagaa

SEQ ID NO: 1910301 - RNA, 19 nt, Homo sapiens
  misc_RNA (1)...(19): siRNA sense strand
ggaaacccaauauaaagaa

SEQ ID NO: 1910302 - RNA, 19 nt, Homo sapiens
  misc_RNA (1)...(19): siRNA sense strand
cauggaggcucucaucaga

SEQ ID NO: 1910303 - RNA, 19 nt, Homo sapiens
  misc_RNA (1)...(19): siRNA sense strand
acaaauggcaacuugauaa

SEQ ID NO: 1910304 - RNA, 19 nt, Homo sapiens
  misc_RNA (1)...(19): siRNA sense strand
gcaaagcacaucucaccaa

SEQ ID NO: 1910305 - RNA, 19 nt, Homo sapiens
  misc_RNA (1)...(19): siRNA sense strand
caagucguauucagaguau

SEQ ID NO: 1910306 - RNA, 19 nt, Homo sapiens
  misc_RNA (1)...(19): siRNA sense strand
gcugugguaucuuucauug

SEQ ID NO: 1910307 - RNA, 19 nt, Homo sapiens
  misc_RNA (1)...(19): siRNA sense strand
ccaaggagguuaaggaaaa

SEQ ID NO: 1910308 - RNA, 19 nt, Homo sapiens
  misc_RNA (1)...(19): siRNA sense strand
caagggaaaucauagaaac

SEQ ID NO: 1910309 - RNA, 19 nt, Homo sapiens
  misc_RNA (1)...(19): siRNA sense strand
gggcaccagucuaaaucua

SEQ ID NO: 1910310 - RNA, 19 nt, Homo sapiens
  misc_RNA (1)...(19): siRNA sense strand
gaagaaugcucaggaaucc

SEQ ID NO: 1910311 - RNA, 19 nt, Homo sapiens
  misc_RNA (1)...(19): siRNA sense strand
acacaaagcagccaccaaa

SEQ ID NO: 1910312 - RNA, 19 nt, Homo sapiens
  misc_RNA (1)...(19): siRNA sense strand
cuugauaauuggcugaaua

SEQ ID NO: 1910313 - RNA, 19 nt, Homo sapiens
  misc_RNA (1)...(19): siRNA sense strand
ccaggcuguuucuucauua

SEQ ID NO: 1910314 - RNA, 19 nt, Homo sapiens
  misc_RNA (1)...(19): siRNA sense strand
ugaacuggauaaaguaaug

SEQ ID NO: 1910315 - RNA, 19 nt, Homo sapiens
  misc_RNA (1)...(19): siRNA sense strand
uaaagugaacccacauaaa

SEQ ID NO: 1910316 - RNA, 19 nt, Homo sapiens
  misc_RNA (1)...(19): siRNA sense strand
uuacagaguggacauagua

SEQ ID NO: 1910317 - RNA, 19 nt, Homo sapiens
  misc_RNA (1)...(19): siRNA sense strand
gauaaacgacucacaguac

SEQ ID NO: 1910318 - RNA, 19 nt, Homo sapiens
  misc_RNA (1)...(19): siRNA sense strand
cgaauguucucuccuaugg

SEQ ID NO: 1910319 - RNA, 19 nt, Homo sapiens
  misc_RNA (1)...(19): siRNA sense strand
ccucuucaguggacaguaa

SEQ ID NO: 1910320 - RNA, 19 nt, Homo sapiens
  misc_RNA (1)...(19): siRNA sense strand
gauaauuggcugaauaaag

SEQ ID NO: 1910321 - RNA, 19 nt, Homo sapiens
  misc_RNA (1)...(19): siRNA sense strand
gaccgugagucauauaaca

SEQ ID NO: 1910322 - RNA, 19 nt, Homo sapiens
  misc_RNA (1)...(19): siRNA sense strand
gaaaggcggaaucaggaaa

SEQ ID NO: 1910323 - RNA, 19 nt, Homo sapiens
  misc_RNA (1)...(19): siRNA sense strand
gggaaugcauuagagaaga

SEQ ID NO: 1910324 - RNA, 19 nt, Homo sapiens
  misc_RNA (1)...(19): siRNA sense strand
aaacggaggacaagaauuc

SEQ ID NO: 1910325 - RNA, 19 nt, Homo sapiens
  misc_RNA (1)...(19): siRNA sense strand
cgagagaggcucagaaaca

SEQ ID NO: 1910326 - RNA, 19 nt, Homo sapiens
  misc_RNA (1)...(19): siRNA sense strand
guggaggccugaagauaga

SEQ ID NO: 1910327 - RNA, 19 nt, Homo sapiens
  misc_RNA (1)...(19): siRNA sense strand
gaagcuaaagaauuacuug

SEQ ID NO: 1910328 - RNA, 19 nt, Homo sapiens
  misc_RNA (1)...(19): siRNA sense strand
caacagagagucaucuaag

SEQ ID NO: 1910329 - RNA, 19 nt, Homo sapiens
  misc_RNA (1)...(19): siRNA sense strand
gcaacagagagucaucuaa

SEQ ID NO: 1910330 - RNA, 19 nt, Homo sapiens
  misc_RNA (1)...(19): siRNA sense strand
ggaagcauaagaaugaaga

SEQ ID NO: 1910331 - RNA, 19 nt, Homo sapiens
  misc_RNA (1)...(19): siRNA sense strand
cauacaaaguuacuagcaa

SEQ ID NO: 1910332 - RNA, 19 nt, Homo sapiens
  misc_RNA (1)...(19): siRNA sense strand
caucaugacagaucuaguu

SEQ ID NO: 1910333 - RNA, 19 nt, Homo sapiens
  misc_RNA (1)...(19): siRNA sense strand
ccucucaucuuuaaugcaa

SEQ ID NO: 1910334 - RNA, 19 nt, Homo sapiens
  misc_RNA (1)...(19): siRNA sense strand
aaugggcccucucaucuuu

SEQ ID NO: 1910335 - RNA, 19 nt, Homo sapiens
  misc_RNA (1)...(19): siRNA sense strand
gaaacccaauauaaagaag

SEQ ID NO: 1910336 - RNA, 19 nt, Homo sapiens
  misc_RNA (1)...(19): siRNA sense strand
gaucucaucaaauacacua

SEQ ID NO: 1910337 - RNA, 19 nt, Homo sapiens
  misc_RNA (1)...(19): siRNA sense strand
gcaagcaucaugacagauc

SEQ ID NO: 1910338 - RNA, 19 nt, Homo sapiens
  misc_RNA (1)...(19): siRNA sense strand
gcaaggacuuucaucagaa

SEQ ID NO: 1910339 - RNA, 19 nt, Homo sapiens
  misc_RNA (1)...(19): siRNA sense strand
agagaaaccuuacaaaugu

SEQ ID NO: 1910340 - RNA, 19 nt, Homo sapiens
  misc_RNA (1)...(19): siRNA sense strand
caacgaugcuuucucaguu

SEQ ID NO: 1910341 - RNA, 19 nt, Homo sapiens
  misc_RNA (1)...(19): siRNA sense strand
gagagaaaccuuacaaaug

SEQ ID NO: 1910342 - RNA, 19 nt, Homo sapiens
  misc_RNA (1)...(19): siRNA sense strand
ugaagaaugugacaaaguu

SEQ ID NO: 1910343 - RNA, 19 nt, Homo sapiens
  misc_RNA (1)...(19): siRNA sense strand
gcaaauacaugcaagucau

SEQ ID NO: 1910344 - RNA, 19 nt, Homo sapiens
  misc_RNA (1)...(19): siRNA sense strand
aaugguagcucacucuuaa

SEQ ID NO: 1910345 - RNA, 19 nt, Homo sapiens
  misc_RNA (1)...(19): siRNA sense strand
gaaguacacacaagagaaa

SEQ ID NO: 1910346 - RNA, 19 nt, Homo sapiens
  misc_RNA (1)...(19): siRNA sense strand
agagaaaccuuacaagugu

SEQ ID NO: 1910347 - RNA, 19 nt, Homo sapiens
  misc_RNA (1)...(19): siRNA sense strand
aaucaaaccuugcauguca

SEQ ID NO: 1910348 - RNA, 19 nt, Homo sapiens
  misc_RNA (1)...(19): siRNA sense strand
agagaaaccuuacaagugu

SEQ ID NO: 1910349 - RNA, 19 nt, Homo sapiens
  misc_RNA (1)...(19): siRNA sense strand
agagaaaccuuacaagugu

SEQ ID NO: 1910350 - RNA, 19 nt, Homo sapiens
  misc_RNA (1)...(19): siRNA sense strand
ccaaaugcaugaugaagau

SEQ ID NO: 1910351 - RNA, 19 nt, Homo sapiens
  misc_RNA (1)...(19): siRNA sense strand
gagagaaaccuuacaagug

SEQ ID NO: 1910352 - RNA, 19 nt, Homo sapiens
  misc_RNA (1)...(19): siRNA sense strand
gagagaaaccuuacaagug

SEQ ID NO: 1910353 - RNA, 19 nt, Homo sapiens
  misc_RNA (1)...(19): siRNA sense strand
gagagaaaccuuacaagug

SEQ ID NO: 1910354 - RNA, 19 nt, Homo sapiens
  misc_RNA (1)...(19): siRNA sense strand
gagagaaaccauacaaaug

SEQ ID NO: 1910355 - RNA, 19 nt, Homo sapiens
  misc_RNA (1)...(19): siRNA sense strand
gcuggaaacaaaccuauua

SEQ ID NO: 1910356 - RNA, 19 nt, Homo sapiens
  misc_RNA (1)...(19): siRNA sense strand
ggagagaaaccauacaaau

SEQ ID NO: 1910357 - RNA, 19 nt, Homo sapiens
  misc_RNA (1)...(19): siRNA sense strand
ggagagaaaccuuacaaau

SEQ ID NO: 1910358 - RNA, 19 nt, Homo sapiens
  misc_RNA (1)...(19): siRNA sense strand
ugaaacaaauggccaugaa

SEQ ID NO: 1910359 - RNA, 19 nt, Homo sapiens
  misc_RNA (1)...(19): siRNA sense strand
ggcaaggacuuucaucaga

SEQ ID NO: 1910360 - RNA, 19 nt, Homo sapiens
  misc_RNA (1)...(19): siRNA sense strand
guacagagcgacaugauca

SEQ ID NO: 1910361 - RNA, 19 nt, Homo sapiens
  misc_RNA (1)...(19): siRNA sense strand
guauaaaugugauguaugc

SEQ ID NO: 1910362 - RNA, 19 nt, Homo sapiens
  misc_RNA (1)...(19): siRNA sense strand
caaaucacaccuugaaaga

SEQ ID NO: 1910363 - RNA, 19 nt, Homo sapiens
  misc_RNA (1)...(19): siRNA sense strand
gagagaaacguuacaagug

SEQ ID NO: 1910364 - RNA, 19 nt, Homo sapiens
  misc_RNA (1)...(19): siRNA sense strand
ugaaagacauaggagaauu

SEQ ID NO: 1910365 - RNA, 19 nt, Homo sapiens
  misc_RNA (1)...(19): siRNA sense strand
ggaaguacacacaagagaa

SEQ ID NO: 1910366 - RNA, 19 nt, Homo sapiens
  misc_RNA (1)...(19): siRNA sense strand
agagaaacguuacaagugu

SEQ ID NO: 1910367 - RNA, 19 nt, Homo sapiens
  misc_RNA (1)...(19): siRNA sense strand
gacauucagucacaauuca

SEQ ID NO: 1910368 - RNA, 19 nt, Homo sapiens
  misc_RNA (1)...(19): siRNA sense strand
uaaugaauguggcaagguu

SEQ ID NO: 1910369 - RNA, 19 nt, Homo sapiens
  misc_RNA (1)...(19): siRNA sense strand
ggagagaaaccuuacaagu

SEQ ID NO: 1910370 - RNA, 19 nt, Homo sapiens
  misc_RNA (1)...(19): siRNA sense strand
uaaugaauguggcaagguu

SEQ ID NO: 1910371 - RNA, 19 nt, Homo sapiens
  misc_RNA (1)...(19): siRNA sense strand
ggagagaaacguuacaagu

SEQ ID NO: 1910372 - RNA, 19 nt, Homo sapiens
  misc_RNA (1)...(19): siRNA sense strand
ggagagaaaccuuacaagu

SEQ ID NO: 1910373 - RNA, 19 nt, Homo sapiens
  misc_RNA (1)...(19): siRNA sense strand
gcaaaucacaccuugaaag

SEQ ID NO: 1910374 - RNA, 19 nt, Homo sapiens
  misc_RNA (1)...(19): siRNA sense strand
uaaugaauguggcaagguu

SEQ ID NO: 1910375 - RNA, 19 nt, Homo sapiens
  misc_RNA (1)...(19): siRNA sense strand
ggagagaaaccuuacaagu

SEQ ID NO: 1910376 - RNA, 19 nt, Homo sapiens
  misc_RNA (1)...(19): siRNA sense strand
ucacaauucagcccuguua

SEQ ID NO: 1910377 - RNA, 19 nt, Homo sapiens
  misc_RNA (1)...(19): siRNA sense strand
gaaagacauaggagaauuc

SEQ ID NO: 1910378 - RNA, 19 nt, Homo sapiens
  misc_RNA (1)...(19): siRNA sense strand
ggcaagacauucagucaca

SEQ ID NO: 1910379 - RNA, 19 nt, Homo sapiens
  misc_RNA (1)...(19): siRNA sense strand
caucauagacuucauacug

SEQ ID NO: 1910380 - RNA, 19 nt, Homo sapiens
  misc_RNA (1)...(19): siRNA sense strand
ggauaccucuuccaaaugc

SEQ ID NO: 1910381 - RNA, 19 nt, Homo sapiens
  misc_RNA (1)...(19): siRNA sense strand
gaagaaugugacaaaguuu

SEQ ID NO: 1910382 - RNA, 19 nt, Homo sapiens
  misc_RNA (1)...(19): siRNA sense strand
ggacaaggcaauacagaag

SEQ ID NO: 1910383 - RNA, 19 nt, Homo sapiens
  misc_RNA (1)...(19): siRNA sense strand
ggcacaacauacuguaauu

SEQ ID NO: 1910384 - RNA, 19 nt, Homo sapiens
  misc_RNA (1)...(19): siRNA sense strand
aaucacaccuugaaagaca

SEQ ID NO: 1910385 - RNA, 19 nt, Homo sapiens
  misc_RNA (1)...(19): siRNA sense strand
ggauguggccauagaauuc

SEQ ID NO: 1910386 - RNA, 19 nt, Homo sapiens
  misc_RNA (1)...(19): siRNA sense strand
gagaaaccuuacaaaugug

SEQ ID NO: 1910387 - RNA, 19 nt, Homo sapiens
  misc_RNA (1)...(19): siRNA sense strand
ucagggauguggccauaga

SEQ ID NO: 1910388 - RNA, 19 nt, Homo sapiens
  misc_RNA (1)...(19): siRNA sense strand
caaaucaaaccuugcaugu

SEQ ID NO: 1910389 - RNA, 19 nt, Homo sapiens
  misc_RNA (1)...(19): siRNA sense strand
agagaaaccauacaaaugu

SEQ ID NO: 1910390 - RNA, 19 nt, Homo sapiens
  misc_RNA (1)...(19): siRNA sense strand
acgugaugcuggagaauua

SEQ ID NO: 1910391 - RNA, 19 nt, Homo sapiens
  misc_RNA (1)...(19): siRNA sense strand
caacauacuguaauucaca

SEQ ID NO: 1910392 - RNA, 19 nt, Homo sapiens
  misc_RNA (1)...(19): siRNA sense strand
gaucaaaggcaugcuggaa

SEQ ID NO: 1910393 - RNA, 19 nt, Homo sapiens
  misc_RNA (1)...(19): siRNA sense strand
guucacaaggcaauucaua

SEQ ID NO: 1910394 - RNA, 19 nt, Homo sapiens
  misc_RNA (1)...(19): siRNA sense strand
gagacgugaugcuggagaa

SEQ ID NO: 1910395 - RNA, 19 nt, Homo sapiens
  misc_RNA (1)...(19): siRNA sense strand
gcaagacauucagucacaa

SEQ ID NO: 1910396 - RNA, 19 nt, Homo sapiens
  misc_RNA (1)...(19): siRNA sense strand
caucauagaguucauacug

SEQ ID NO: 1910397 - RNA, 19 nt, Homo sapiens
  misc_RNA (1)...(19): siRNA sense strand
acagggacauugcaaauac

SEQ ID NO: 1910398 - RNA, 19 nt, Homo sapiens
  misc_RNA (1)...(19): siRNA sense strand
uccaggaaauugagaaaga

SEQ ID NO: 1910399 - RNA, 19 nt, Homo sapiens
  misc_RNA (1)...(19): siRNA sense strand
ugagaaagauauucaugac

SEQ ID NO: 1910400 - RNA, 19 nt, Homo sapiens
  misc_RNA (1)...(19): siRNA sense strand
caauucagcccuguuaguu

SEQ ID NO: 1910401 - RNA, 19 nt, Homo sapiens
  misc_RNA (1)...(19): siRNA sense strand
aaccuggucucccuggaua

SEQ ID NO: 1910402 - RNA, 19 nt, Homo sapiens
  misc_RNA (1)...(19): siRNA sense strand
caucagauaauccauuuag

SEQ ID NO: 1910403 - RNA, 19 nt, Homo sapiens
  misc_RNA (1)...(19): siRNA sense strand
ucagauaauccauuuagga

SEQ ID NO: 1910404 - RNA, 19 nt, Homo sapiens
  misc_RNA (1)...(19): siRNA sense strand
ucaaaggcaugcuggaaac

SEQ ID NO: 1910405 - RNA, 19 nt, Homo sapiens
  misc_RNA (1)...(19): siRNA sense strand
gcacaacauacuguaauuc

SEQ ID NO: 1910406 - RNA, 19 nt, Homo sapiens
  misc_RNA (1)...(19): siRNA sense strand
agacauaggagaauucaca

SEQ ID NO: 1910407 - RNA, 19 nt, Homo sapiens
  misc_RNA (1)...(19): siRNA sense strand
caaggacuuucaucagaag

SEQ ID NO: 1910408 - RNA, 19 nt, Homo sapiens
  misc_RNA (1)...(19): siRNA sense strand
ugccugaagugcacauauu

SEQ ID NO: 1910409 - RNA, 19 nt, Homo sapiens
  misc_RNA (1)...(19): siRNA sense strand
uaaugguagcucacucuua

SEQ ID NO: 1910410 - RNA, 19 nt, Homo sapiens
  misc_RNA (1)...(19): siRNA sense strand
acaugcaagucaucacauu

SEQ ID NO: 1910411 - RNA, 19 nt, Homo sapiens
  misc_RNA (1)...(19): siRNA sense strand
caucucuuguaaugcauaa

SEQ ID NO: 1910412 - RNA, 19 nt, Homo sapiens
  misc_RNA (1)...(19): siRNA sense strand
guucaaaauucaucucuug

SEQ ID NO: 1910413 - RNA, 19 nt, Homo sapiens
  misc_RNA (1)...(19): siRNA sense strand
ucacaccuggcacaacaua

SEQ ID NO: 1910414 - RNA, 19 nt, Homo sapiens
  misc_RNA (1)...(19): siRNA sense strand
gggauguggccauagaauu

SEQ ID NO: 1910415 - RNA, 19 nt, Homo sapiens
  misc_RNA (1)...(19): siRNA sense strand
auaauuuccuccagucuuc

SEQ ID NO: 1910416 - RNA, 19 nt, Homo sapiens
  misc_RNA (1)...(19): siRNA sense strand
ccaggaaauugagaaagau

SEQ ID NO: 1910417 - RNA, 19 nt, Homo sapiens
  misc_RNA (1)...(19): siRNA sense strand
caggaaauugagaaagaua

SEQ ID NO: 1910418 - RNA, 19 nt, Homo sapiens
  misc_RNA (1)...(19): siRNA sense strand
cauaaggucauucauacug

SEQ ID NO: 1910419 - RNA, 19 nt, Homo sapiens
  misc_RNA (1)...(19): siRNA sense strand
ugcauaaggucauucauac

SEQ ID NO: 1910420 - RNA, 19 nt, Homo sapiens
  misc_RNA (1)...(19): siRNA sense strand
acacuggagagaaaccuua

SEQ ID NO: 1910421 - RNA, 19 nt, Homo sapiens
  misc_RNA (1)...(19): siRNA sense strand
acaaggcaauacagaagug

SEQ ID NO: 1910422 - RNA, 19 nt, Homo sapiens
  misc_RNA (1)...(19): siRNA sense strand
acacuggugagaauccuua

SEQ ID NO: 1910423 - RNA, 19 nt, Homo sapiens
  misc_RNA (1)...(19): siRNA sense strand
cagaagcgauaccuugcau

SEQ ID NO: 1910424 - RNA, 19 nt, Homo sapiens
  misc_RNA (1)...(19): siRNA sense strand
gaaacaaauggccaugaag

SEQ ID NO: 1910425 - RNA, 19 nt, Homo sapiens
  misc_RNA (1)...(19): siRNA sense strand
ucgcaaaucacaccuugaa

SEQ ID NO: 1910426 - RNA, 19 nt, Homo sapiens
  misc_RNA (1)...(19): siRNA sense strand
uaaugaguguggcaagaca

SEQ ID NO: 1910427 - RNA, 19 nt, Homo sapiens
  misc_RNA (1)...(19): siRNA sense strand
gaaccuggucucccuggau

SEQ ID NO: 1910428 - RNA, 19 nt, Homo sapiens
  misc_RNA (1)...(19): siRNA sense strand
aaggcaugcuggaaacaaa

SEQ ID NO: 1910429 - RNA, 19 nt, Homo sapiens
  misc_RNA (1)...(19): siRNA sense strand
guaauucacacuggagaga

SEQ ID NO: 1910430 - RNA, 19 nt, Homo sapiens
  misc_RNA (1)...(19): siRNA sense strand
gcacgucaucauagaguuc

SEQ ID NO: 1910431 - RNA, 19 nt, Homo sapiens
  misc_RNA (1)...(19): siRNA sense strand
gggaaguacacacaagaga

SEQ ID NO: 1910432 - RNA, 19 nt, Homo sapiens
  misc_RNA (1)...(19): siRNA sense strand
aacgaugcuuucucaguuu

SEQ ID NO: 1910433 - RNA, 19 nt, Homo sapiens
  misc_RNA (1)...(19): siRNA sense strand
gaauucacacuggagagaa

SEQ ID NO: 1910434 - RNA, 19 nt, Homo sapiens
  misc_RNA (1)...(19): siRNA sense strand
cacaacauacuguaauuca

SEQ ID NO: 1910435 - RNA, 19 nt, Homo sapiens
  misc_RNA (1)...(19): siRNA sense strand
cacagggacauugcaaaua

SEQ ID NO: 1910436 - RNA, 19 nt, Homo sapiens
  misc_RNA (1)...(19): siRNA sense strand
ucacaaaucaaaccuugca

SEQ ID NO: 1910437 - RNA, 19 nt, Homo sapiens
  misc_RNA (1)...(19): siRNA sense strand
augcauaaggucauucaua

SEQ ID NO: 1910438 - RNA, 19 nt, Homo sapiens
  misc_RNA (1)...(19): siRNA sense strand
gggccugucuugcaaagua

SEQ ID NO: 1910439 - RNA, 19 nt, Homo sapiens
  misc_RNA (1)...(19): siRNA sense strand
gauaaggagugugaaguug

SEQ ID NO: 1910440 - RNA, 19 nt, Homo sapiens
  misc_RNA (1)...(19): siRNA sense strand
gcaaaccagugcuccauca

SEQ ID NO: 1910441 - RNA, 19 nt, Homo sapiens
  misc_RNA (1)...(19): siRNA sense strand
ggaagucuguaccaaacaa

SEQ ID NO: 1910442 - RNA, 19 nt, Homo sapiens
  misc_RNA (1)...(19): siRNA sense strand
gggcaggccuacccuugua

SEQ ID NO: 1910443 - RNA, 19 nt, Homo sapiens
  misc_RNA (1)...(19): siRNA sense strand
gcaauaauggcaucuguau

SEQ ID NO: 1910444 - RNA, 19 nt, Homo sapiens
  misc_RNA (1)...(19): siRNA sense strand
aaacucaacuccaucaagu

SEQ ID NO: 1910445 - RNA, 19 nt, Homo sapiens
  misc_RNA (1)...(19): siRNA sense strand
cgaagggccugucuugcaa

SEQ ID NO: 1910446 - RNA, 19 nt, Homo sapiens
  misc_RNA (1)...(19): siRNA sense strand
gcagugauaaggaguguga

SEQ ID NO: 1910447 - RNA, 19 nt, Homo sapiens
  misc_RNA (1)...(19): siRNA sense strand
ggaaagaugccaccuacuc

SEQ ID NO: 1910448 - RNA, 19 nt, Homo sapiens
  misc_RNA (1)...(19): siRNA sense strand
aaaccacggucauuacuca

SEQ ID NO: 1910449 - RNA, 19 nt, Homo sapiens
  misc_RNA (1)...(19): siRNA sense strand
gaagaccacacacuaagau

SEQ ID NO: 1910450 - RNA, 19 nt, Homo sapiens
  misc_RNA (1)...(19): siRNA sense strand
gcucacagaucggcaguuc

SEQ ID NO: 1910451 - RNA, 19 nt, Homo sapiens
  misc_RNA (1)...(19): siRNA sense strand
ggaagaccacacacuaaga

SEQ ID NO: 1910452 - RNA, 19 nt, Homo sapiens
  misc_RNA (1)...(19): siRNA sense strand
gaucgaaaccacggucauu

SEQ ID NO: 1910453 - RNA, 19 nt, Homo sapiens
  misc_RNA (1)...(19): siRNA sense strand
gggccaaacucaacuccau

SEQ ID NO: 1910454 - RNA, 19 nt, Homo sapiens
  misc_RNA (1)...(19): siRNA sense strand
agacugcauugaaggguuu

SEQ ID NO: 1910455 - RNA, 19 nt, Homo sapiens
  misc_RNA (1)...(19): siRNA sense strand
cccaguacccgcugcaaua

SEQ ID NO: 1910456 - RNA, 19 nt, Homo sapiens
  misc_RNA (1)...(19): siRNA sense strand
cuaggaagaccacacacua

SEQ ID NO: 1910457 - RNA, 19 nt, Homo sapiens
  misc_RNA (1)...(19): siRNA sense strand
uaggaagaccacacacuaa

SEQ ID NO: 1910458 - RNA, 19 nt, Homo sapiens
  misc_RNA (1)...(19): siRNA sense strand
gcgaagggccugucuugca

SEQ ID NO: 1910459 - RNA, 19 nt, Homo sapiens
  misc_RNA (1)...(19): siRNA sense strand
gaucaucagacugcauuga

SEQ ID NO: 1910460 - RNA, 19 nt, Homo sapiens
  misc_RNA (1)...(19): siRNA sense strand
ucucaugggcuggaaauuu

SEQ ID NO: 1910461 - RNA, 19 nt, Homo sapiens
  misc_RNA (1)...(19): siRNA sense strand
ccaguacccgcugcaauaa

SEQ ID NO: 1910462 - RNA, 19 nt, Homo sapiens
  misc_RNA (1)...(19): siRNA sense strand
ugcaaaguauggaaagaug

SEQ ID NO: 1910463 - RNA, 19 nt, Homo sapiens
  misc_RNA (1)...(19): siRNA sense strand
ugauaaggagugugaaguu

SEQ ID NO: 1910464 - RNA, 19 nt, Homo sapiens
  misc_RNA (1)...(19): siRNA sense strand
gaagggccugucuugcaaa

SEQ ID NO: 1910465 - RNA, 19 nt, Homo sapiens
  misc_RNA (1)...(19): siRNA sense strand
ggaugguacucggcacaga

SEQ ID NO: 1910466 - RNA, 19 nt, Homo sapiens
  misc_RNA (1)...(19): siRNA sense strand
uuacucaaaccaugacuug

SEQ ID NO: 1910467 - RNA, 19 nt, Homo sapiens
  misc_RNA (1)...(19): siRNA sense strand
gugcgaagggccugucuug

SEQ ID NO: 1910468 - RNA, 19 nt, Homo sapiens
  misc_RNA (1)...(19): siRNA sense strand
gacuugggauggcagaauc

SEQ ID NO: 1910469 - RNA, 19 nt, Homo sapiens
  misc_RNA (1)...(19): siRNA sense strand
aguacccgcugcaauaaug

SEQ ID NO: 1910470 - RNA, 19 nt, Homo sapiens
  misc_RNA (1)...(19): siRNA sense strand
uggcaucuguaucccaguu

SEQ ID NO: 1910471 - RNA, 19 nt, Homo sapiens
  misc_RNA (1)...(19): siRNA sense strand
guaccaaacaacgcaagaa

SEQ ID NO: 1910472 - RNA, 19 nt, Homo sapiens
  misc_RNA (1)...(19): siRNA sense strand
caaacucaacuccaucaag

SEQ ID NO: 1910473 - RNA, 19 nt, Homo sapiens
  misc_RNA (1)...(19): siRNA sense strand
gaaaccacggucauuacuc

SEQ ID NO: 1910474 - RNA, 19 nt, Homo sapiens
  misc_RNA (1)...(19): siRNA sense strand
ccacggucauuacucaaac

SEQ ID NO: 1910475 - RNA, 19 nt, Homo sapiens
  misc_RNA (1)...(19): siRNA sense strand
uugcugugcucgucauuuc

SEQ ID NO: 1910476 - RNA, 19 nt, Homo sapiens
  misc_RNA (1)...(19): siRNA sense strand
gcaucuguaucccaguuac

SEQ ID NO: 1910477 - RNA, 19 nt, Homo sapiens
  misc_RNA (1)...(19): siRNA sense strand
gaccacacacuaagauguc

SEQ ID NO: 1910478 - RNA, 19 nt, Homo sapiens
  misc_RNA (1)...(19): siRNA sense strand
ucaucagacugcauugaag

SEQ ID NO: 1910479 - RNA, 19 nt, Homo sapiens
  misc_RNA (1)...(19): siRNA sense strand
ggccugucuugcaaaguau

SEQ ID NO: 1910480 - RNA, 19 nt, Homo sapiens
  misc_RNA (1)...(19): siRNA sense strand
cgucauuucuggaccaaaa

SEQ ID NO: 1910481 - RNA, 19 nt, Homo sapiens
  misc_RNA (1)...(19): siRNA sense strand
agugugaaguugggaggua

SEQ ID NO: 1910482 - RNA, 19 nt, Homo sapiens
  misc_RNA (1)...(19): siRNA sense strand
guaccaaggacuggcauuc

SEQ ID NO: 1910483 - RNA, 19 nt, Homo sapiens
  misc_RNA (1)...(19): siRNA sense strand
gaagcgcugccaccgagau

SEQ ID NO: 1910484 - RNA, 19 nt, Homo sapiens
  misc_RNA (1)...(19): siRNA sense strand
gccaaacucaacuccauca

SEQ ID NO: 1910485 - RNA, 19 nt, Homo sapiens
  misc_RNA (1)...(19): siRNA sense strand
ggagaccccugccuacgau

SEQ ID NO: 1910486 - RNA, 19 nt, Homo sapiens
  misc_RNA (1)...(19): siRNA sense strand
cugcaauaauggcaucugu

SEQ ID NO: 1910487 - RNA, 19 nt, Homo sapiens
  misc_RNA (1)...(19): siRNA sense strand
gaucaucggccugcauggu

SEQ ID NO: 1910488 - RNA, 19 nt, Homo sapiens
  misc_RNA (1)...(19): siRNA sense strand
gaucugcgggcauguacca

SEQ ID NO: 1910489 - RNA, 19 nt, Homo sapiens
  misc_RNA (1)...(19): siRNA sense strand
cucaugggcuggaaauuuu

SEQ ID NO: 1910490 - RNA, 19 nt, Homo sapiens
  misc_RNA (1)...(19): siRNA sense strand
ccaaagccagacuccaugu

SEQ ID NO: 1910491 - RNA, 19 nt, Homo sapiens
  misc_RNA (1)...(19): siRNA sense strand
aauaauggcaucuguaucc

SEQ ID NO: 1910492 - RNA, 19 nt, Homo sapiens
  misc_RNA (1)...(19): siRNA sense strand
aaagccagacuccaugugu

SEQ ID NO: 1910493 - RNA, 19 nt, Homo sapiens
  misc_RNA (1)...(19): siRNA sense strand
uauggaaagaugccaccua

SEQ ID NO: 1910494 - RNA, 19 nt, Homo sapiens
  misc_RNA (1)...(19): siRNA sense strand
uagcagugauaaggagugu

SEQ ID NO: 1910495 - RNA, 19 nt, Homo sapiens
  misc_RNA (1)...(19): siRNA sense strand
guuacugaaagcaucuuaa

SEQ ID NO: 1910496 - RNA, 19 nt, Homo sapiens
  misc_RNA (1)...(19): siRNA sense strand
ggagaaggaugcugaguug

SEQ ID NO: 1910497 - RNA, 19 nt, Homo sapiens
  misc_RNA (1)...(19): siRNA sense strand
ggaagaggaugaagaaugg

SEQ ID NO: 1910498 - RNA, 19 nt, Homo sapiens
  misc_RNA (1)...(19): siRNA sense strand
uaagaaagcugaacuugag

SEQ ID NO: 1910499 - RNA, 19 nt, Homo sapiens
  misc_RNA (1)...(19): siRNA sense strand
gaagaugaaugaggagaug

SEQ ID NO: 1910500 - RNA, 19 nt, Homo sapiens
  misc_RNA (1)...(19): siRNA sense strand
gaagaccgaugggauguuc

SEQ ID NO: 1910501 - RNA, 19 nt, Homo sapiens
  misc_RNA (1)...(19): siRNA sense strand
gggcagugcuggagacaug

SEQ ID NO: 1910502 - RNA, 19 nt, Homo sapiens
  misc_RNA (1)...(19): siRNA sense strand
gugaagagguggagcugaa

SEQ ID NO: 1910503 - RNA, 19 nt, Homo sapiens
  misc_RNA (1)...(19): siRNA sense strand
guaagaaagcugaacuuga

SEQ ID NO: 1910504 - RNA, 19 nt, Homo sapiens
  misc_RNA (1)...(19): siRNA sense strand
ggacauaagugaggaugag

SEQ ID NO: 1910505 - RNA, 19 nt, Homo sapiens
  misc_RNA (1)...(19): siRNA sense strand
uggagaagaucgccgagua

SEQ ID NO: 1910506 - RNA, 19 nt, Homo sapiens
  misc_RNA (1)...(19): siRNA sense strand
ggcagaacauugagaagau

SEQ ID NO: 1910507 - RNA, 19 nt, Homo sapiens
  misc_RNA (1)...(19): siRNA sense strand
gggaagaggaugaagaaug

SEQ ID NO: 1910508 - RNA, 19 nt, Homo sapiens
  misc_RNA (1)...(19): siRNA sense strand
ugaggaagaccguaagaaa

SEQ ID NO: 1910509 - RNA, 19 nt, Homo sapiens
  misc_RNA (1)...(19): siRNA sense strand
gcagaacauugagaagaug

SEQ ID NO: 1910510 - RNA, 19 nt, Homo sapiens
  misc_RNA (1)...(19): siRNA sense strand
gaagagguggagcugaauu

SEQ ID NO: 1910511 - RNA, 19 nt, Homo sapiens
  misc_RNA (1)...(19): siRNA sense strand
cagccacacucgauuugaa

SEQ ID NO: 1910512 - RNA, 19 nt, Homo sapiens
  misc_RNA (1)...(19): siRNA sense strand
gagaagaaccuggguccuu

SEQ ID NO: 1910513 - RNA, 19 nt, Homo sapiens
  misc_RNA (1)...(19): siRNA sense strand
gaagaucgccgaguaugag

SEQ ID NO: 1910514 - RNA, 19 nt, Homo sapiens
  misc_RNA (1)...(19): siRNA sense strand
gcaggcagaacauugagaa

SEQ ID NO: 1910515 - RNA, 19 nt, Homo sapiens
  misc_RNA (1)...(19): siRNA sense strand
gaugaccgcugggagacaa

SEQ ID NO: 1910516 - RNA, 19 nt, Homo sapiens
  misc_RNA (1)...(19): siRNA sense strand
ccgaugggauguucaagga

SEQ ID NO: 1910517 - RNA, 19 nt, Homo sapiens
  misc_RNA (1)...(19): siRNA sense strand
gcaguggagucggagaaga

SEQ ID NO: 1910518 - RNA, 19 nt, Homo sapiens
  misc_RNA (1)...(19): siRNA sense strand
uaagugaggaugaggaaga

SEQ ID NO: 1910519 - RNA, 19 nt, Homo sapiens
  misc_RNA (1)...(19): siRNA sense strand
ugaaugaggagauggagaa

SEQ ID NO: 1910520 - RNA, 19 nt, Homo sapiens
  misc_RNA (1)...(19): siRNA sense strand
gaggaagaccguaagaaag

SEQ ID NO: 1910521 - RNA, 19 nt, Homo sapiens
  misc_RNA (1)...(19): siRNA sense strand
ggagaucgagguggaagaa

SEQ ID NO: 1910522 - RNA, 19 nt, Homo sapiens
  misc_RNA (1)...(19): siRNA sense strand
ggagaagaucgccgaguau

SEQ ID NO: 1910523 - RNA, 19 nt, Homo sapiens
  misc_RNA (1)...(19): siRNA sense strand
gaagaaugggaggacauaa

SEQ ID NO: 1910524 - RNA, 19 nt, Homo sapiens
  misc_RNA (1)...(19): siRNA sense strand
cucaaucucugaccguaaa

SEQ ID NO: 1910525 - RNA, 19 nt, Homo sapiens
  misc_RNA (1)...(19): siRNA sense strand
gagaagaucgccgaguaug

SEQ ID NO: 1910526 - RNA, 19 nt, Homo sapiens
  misc_RNA (1)...(19): siRNA sense strand
gaacauugagaagaugaau

SEQ ID NO: 1910527 - RNA, 19 nt, Homo sapiens
  misc_RNA (1)...(19): siRNA sense strand
ugaagaaugggaggacaua

SEQ ID NO: 1910528 - RNA, 19 nt, Homo sapiens
  misc_RNA (1)...(19): siRNA sense strand
cgagugggaugccgagaag

SEQ ID NO: 1910529 - RNA, 19 nt, Homo sapiens
  misc_RNA (1)...(19): siRNA sense strand
cggaguaccugcgcuggaa

SEQ ID NO: 1910530 - RNA, 19 nt, Homo sapiens
  misc_RNA (1)...(19): siRNA sense strand
aaucaaaggaggagaagga

SEQ ID NO: 1910531 - RNA, 19 nt, Homo sapiens
  misc_RNA (1)...(19): siRNA sense strand
ugaaaucaaaggaggagaa

SEQ ID NO: 1910532 - RNA, 19 nt, Homo sapiens
  misc_RNA (1)...(19): siRNA sense strand
accaggagauugaggaaga

SEQ ID NO: 1910533 - RNA, 19 nt, Homo sapiens
  misc_RNA (1)...(19): siRNA sense strand
ggaagcaggagagggagaa

SEQ ID NO: 1910534 - RNA, 19 nt, Homo sapiens
  misc_RNA (1)...(19): siRNA sense strand
gagaagaccgaugggaugu

SEQ ID NO: 1910535 - RNA, 19 nt, Homo sapiens
  misc_RNA (1)...(19): siRNA sense strand
augaggagauggagaagau

SEQ ID NO: 1910536 - RNA, 19 nt, Homo sapiens
  misc_RNA (1)...(19): siRNA sense strand
gaaaucaaaggaggagaag

SEQ ID NO: 1910537 - RNA, 19 nt, Homo sapiens
  misc_RNA (1)...(19): siRNA sense strand
gaugcugaguuggacaaga

SEQ ID NO: 1910538 - RNA, 19 nt, Homo sapiens
  misc_RNA (1)...(19): siRNA sense strand
ggaggaaccagcccaagac

SEQ ID NO: 1910539 - RNA, 19 nt, Homo sapiens
  misc_RNA (1)...(19): siRNA sense strand
cccagucccugcccaugaa

SEQ ID NO: 1910540 - RNA, 19 nt, Homo sapiens
  misc_RNA (1)...(19): siRNA sense strand
ggccuacagugaccaugau

SEQ ID NO: 1910541 - RNA, 19 nt, Homo sapiens
  misc_RNA (1)...(19): siRNA sense strand
agaaggaugcugaguugga

SEQ ID NO: 1910542 - RNA, 19 nt, Homo sapiens
  misc_RNA (1)...(19): siRNA sense strand
cauaagugaggaugaggaa

SEQ ID NO: 1910543 - RNA, 19 nt, Homo sapiens
  misc_RNA (1)...(19): siRNA sense strand
gggccuacagugaccauga

SEQ ID NO: 1910544 - RNA, 19 nt, Homo sapiens
  misc_RNA (1)...(19): siRNA sense strand
gcucaguggagaaggagaa

SEQ ID NO: 1910545 - RNA, 19 nt, Homo sapiens
  misc_RNA (1)...(19): siRNA sense strand
ggaagaccguaagaaagcu

SEQ ID NO: 1910546 - RNA, 19 nt, Homo sapiens
  misc_RNA (1)...(19): siRNA sense strand
aaugggaggacauaaguga

SEQ ID NO: 1910547 - RNA, 19 nt, Homo sapiens
  misc_RNA (1)...(19): siRNA sense strand
agaaggugaugaggaggaa

SEQ ID NO: 1910548 - RNA, 19 nt, Homo sapiens
  misc_RNA (1)...(19): siRNA sense strand
gagcuggagacaccucaau

SEQ ID NO: 1910549 - RNA, 19 nt, Homo sapiens
  misc_RNA (1)...(19): siRNA sense strand
gaaccaucccaccgcuaug

SEQ ID NO: 1910550 - RNA, 19 nt, Homo sapiens
  misc_RNA (1)...(19): siRNA sense strand
gcgagugggaugccgagaa

SEQ ID NO: 1910551 - RNA, 19 nt, Homo sapiens
  misc_RNA (1)...(19): siRNA sense strand
agaagaucgccgaguauga

SEQ ID NO: 1910552 - RNA, 19 nt, Homo sapiens
  misc_RNA (1)...(19): siRNA sense strand
cguaagaaagcugaacuug

SEQ ID NO: 1910553 - RNA, 19 nt, Homo sapiens
  misc_RNA (1)...(19): siRNA sense strand
ccaaggagacacccaugca

SEQ ID NO: 1910554 - RNA, 19 nt, Homo sapiens
  misc_RNA (1)...(19): siRNA sense strand
ugaaccaucccaccgcuau

SEQ ID NO: 1910555 - RNA, 19 nt, Homo sapiens
  misc_RNA (1)...(19): siRNA sense strand
gcagccacacucgauuuga

SEQ ID NO: 1910556 - RNA, 19 nt, Homo sapiens
  misc_RNA (1)...(19): siRNA sense strand
gaaugggaggacauaagug

SEQ ID NO: 1910557 - RNA, 19 nt, Homo sapiens
  misc_RNA (1)...(19): siRNA sense strand
agaaugggaggacauaagu

SEQ ID NO: 1910558 - RNA, 19 nt, Homo sapiens
  misc_RNA (1)...(19): siRNA sense strand
caguggagucggagaagaa

SEQ ID NO: 1910559 - RNA, 19 nt, Homo sapiens
  misc_RNA (1)...(19): siRNA sense strand
ucucugaccguaaauccaa

SEQ ID NO: 1910560 - RNA, 19 nt, Homo sapiens
  misc_RNA (1)...(19): siRNA sense strand
cagaacauugagaagauga

SEQ ID NO: 1910561 - RNA, 19 nt, Homo sapiens
  misc_RNA (1)...(19): siRNA sense strand
gaucgagguggaagaaggu

SEQ ID NO: 1910562 - RNA, 19 nt, Homo sapiens
  misc_RNA (1)...(19): siRNA sense strand
gaucggagcggcuuacaaa

SEQ ID NO: 1910563 - RNA, 19 nt, Homo sapiens
  misc_RNA (1)...(19): siRNA sense strand
gcaagucuuuguaccugaa

SEQ ID NO: 1910564 - RNA, 19 nt, Homo sapiens
  misc_RNA (1)...(19): siRNA sense strand
gaucaucagccagguguaa

SEQ ID NO: 1910565 - RNA, 19 nt, Homo sapiens
  misc_RNA (1)...(19): siRNA sense strand
ggaagaggaaucccaagug

SEQ ID NO: 1910566 - RNA, 19 nt, Homo sapiens
  misc_RNA (1)...(19): siRNA sense strand
gcaaaugccgaaguuaaau

SEQ ID NO: 1910567 - RNA, 19 nt, Homo sapiens
  misc_RNA (1)...(19): siRNA sense strand
gaagauggccuggacaaac

SEQ ID NO: 1910568 - RNA, 19 nt, Homo sapiens
  misc_RNA (1)...(19): siRNA sense strand
aagauggccuggacaaaca

SEQ ID NO: 1910569 - RNA, 19 nt, Homo sapiens
  misc_RNA (1)...(19): siRNA sense strand
gcaccuugccagcggagua

SEQ ID NO: 1910570 - RNA, 19 nt, Homo sapiens
  misc_RNA (1)...(19): siRNA sense strand
gcucugacgucuccagcau

SEQ ID NO: 1910571 - RNA, 19 nt, Homo sapiens
  misc_RNA (1)...(19): siRNA sense strand
ggaagauggccuggacaaa

SEQ ID NO: 1910572 - RNA, 19 nt, Homo sapiens
  misc_RNA (1)...(19): siRNA sense strand
gcuccaggcuaccuacaca

SEQ ID NO: 1910573 - RNA, 19 nt, Homo sapiens
  misc_RNA (1)...(19): siRNA sense strand
ccauggagaguaaggauga

SEQ ID NO: 1910574 - RNA, 19 nt, Homo sapiens
  misc_RNA (1)...(19): siRNA sense strand
caaaugccgaaguuaaaug

SEQ ID NO: 1910575 - RNA, 19 nt, Homo sapiens
  misc_RNA (1)...(19): siRNA sense strand
cugcaaaugccgaaguuaa

SEQ ID NO: 1910576 - RNA, 19 nt, Homo sapiens
  misc_RNA (1)...(19): siRNA sense strand
cggagcggcuuacaaacug

SEQ ID NO: 1910577 - RNA, 19 nt, Homo sapiens
  misc_RNA (1)...(19): siRNA sense strand
gagaagcccaggaagucuu

SEQ ID NO: 1910578 - RNA, 19 nt, Homo sapiens
  misc_RNA (1)...(19): siRNA sense strand
gggaagauggccuggacaa

SEQ ID NO: 1910579 - RNA, 19 nt, Homo sapiens
  misc_RNA (1)...(19): siRNA sense strand
ugacugggccuugcacaga

SEQ ID NO: 1910580 - RNA, 19 nt, Homo sapiens
  misc_RNA (1)...(19): siRNA sense strand
augccgaaguuaaaugaaa

SEQ ID NO: 1910581 - RNA, 19 nt, Homo sapiens
  misc_RNA (1)...(19): siRNA sense strand
ugcaaaugccgaaguuaaa

SEQ ID NO: 1910582 - RNA, 19 nt, Homo sapiens
  misc_RNA (1)...(19): siRNA sense strand
ggaagcuccaggcuaccua

SEQ ID NO: 1910583 - RNA, 19 nt, Homo sapiens
  misc_RNA (1)...(19): siRNA sense strand
gaacagccccuggaaggaa

SEQ ID NO: 1910584 - RNA, 19 nt, Homo sapiens
  misc_RNA (1)...(19): siRNA sense strand
gccgaaguuaaaugaaaua

SEQ ID NO: 1910585 - RNA, 19 nt, Homo sapiens
  misc_RNA (1)...(19): siRNA sense strand
ggcugugccuggaggagaa

SEQ ID NO: 1910586 - RNA, 19 nt, Homo sapiens
  misc_RNA (1)...(19): siRNA sense strand
ccuaugagaagcccaggaa

SEQ ID NO: 1910587 - RNA, 19 nt, Homo sapiens
  misc_RNA (1)...(19): siRNA sense strand
aaaugccgaaguuaaauga

SEQ ID NO: 1910588 - RNA, 19 nt, Homo sapiens
  misc_RNA (1)...(19): siRNA sense strand
ugccgaaguuaaaugaaau

SEQ ID NO: 1910589 - RNA, 19 nt, Homo sapiens
  misc_RNA (1)...(19): siRNA sense strand
gcugccgccuggcuauuuc

SEQ ID NO: 1910590 - RNA, 19 nt, Homo sapiens
  misc_RNA (1)...(19): siRNA sense strand
gcccucuccuuccagaaau

SEQ ID NO: 1910591 - RNA, 19 nt, Homo sapiens
  misc_RNA (1)...(19): siRNA sense strand
caccgacaguggcaucauc

SEQ ID NO: 1910592 - RNA, 19 nt, Homo sapiens
  misc_RNA (1)...(19): siRNA sense strand
agugccagauuccugcuuu

SEQ ID NO: 1910593 - RNA, 19 nt, Homo sapiens
  misc_RNA (1)...(19): siRNA sense strand
gcaggaucggagcggcuua

SEQ ID NO: 1910594 - RNA, 19 nt, Homo sapiens
  misc_RNA (1)...(19): siRNA sense strand
ggucagcgacaccgacagu

SEQ ID NO: 1910595 - RNA, 19 nt, Homo sapiens
  misc_RNA (1)...(19): siRNA sense strand
cuguggagaucgccugaug

SEQ ID NO: 1910596 - RNA, 19 nt, Homo sapiens
  misc_RNA (1)...(19): siRNA sense strand
uggaggagcugaggagacu

SEQ ID NO: 1910597 - RNA, 19 nt, Homo sapiens
  misc_RNA (1)...(19): siRNA sense strand
uaugagaagcccaggaagu

SEQ ID NO: 1910598 - RNA, 19 nt, Homo sapiens
  misc_RNA (1)...(19): siRNA sense strand
gacauaagcugguuaacag

SEQ ID NO: 1910599 - RNA, 19 nt, Homo sapiens
  misc_RNA (1)...(19): siRNA sense strand
ggacauaagcugguuaaca

SEQ ID NO: 1910600 - RNA, 19 nt, Homo sapiens
  misc_RNA (1)...(19): siRNA sense strand
gacguggacuuccucauca

SEQ ID NO: 1910601 - RNA, 19 nt, Homo sapiens
  misc_RNA (1)...(19): siRNA sense strand
ggacugcgaaccuuagaug

SEQ ID NO: 1910602 - RNA, 19 nt, Homo sapiens
  misc_RNA (1)...(19): siRNA sense strand
gugaggagguggagagagu

SEQ ID NO: 1910603 - RNA, 19 nt, Homo sapiens
  misc_RNA (1)...(19): siRNA sense strand
gagaguggacuugguaguu

SEQ ID NO: 1910604 - RNA, 19 nt, Homo sapiens
  misc_RNA (1)...(19): siRNA sense strand
ucagacaccugggccuuga

SEQ ID NO: 1910605 - RNA, 19 nt, Homo sapiens
  misc_RNA (1)...(19): siRNA sense strand
ggaaguugcagggccauga

SEQ ID NO: 1910606 - RNA, 19 nt, Homo sapiens
  misc_RNA (1)...(19): siRNA sense strand
agaguggacuugguaguug

SEQ ID NO: 1910607 - RNA, 19 nt, Homo sapiens
  misc_RNA (1)...(19): siRNA sense strand
gcuggagcauggagugugu

SEQ ID NO: 1910608 - RNA, 19 nt, Homo sapiens
  misc_RNA (1)...(19): siRNA sense strand
gagagguaccagaccauga

SEQ ID NO: 1910609 - RNA, 19 nt, Homo sapiens
  misc_RNA (1)...(19): siRNA sense strand
cgaggcagcaggcuuugaa

SEQ ID NO: 1910610 - RNA, 19 nt, Homo sapiens
  misc_RNA (1)...(19): siRNA sense strand
gggcugcugccuagaguga

SEQ ID NO: 1910611 - RNA, 19 nt, Homo sapiens
  misc_RNA (1)...(19): siRNA sense strand
gagcagccccagaaacuaa

SEQ ID NO: 1910612 - RNA, 19 nt, Homo sapiens
  misc_RNA (1)...(19): siRNA sense strand
cccagaaacuaacccaaca

SEQ ID NO: 1910613 - RNA, 19 nt, Homo sapiens
  misc_RNA (1)...(19): siRNA sense strand
gcugcugccuagagugaug

SEQ ID NO: 1910614 - RNA, 19 nt, Homo sapiens
  misc_RNA (1)...(19): siRNA sense strand
ugacguggacuuccucauc

SEQ ID NO: 1910615 - RNA, 19 nt, Homo sapiens
  misc_RNA (1)...(19): siRNA sense strand
cgugagaguggacuuggua

SEQ ID NO: 1910616 - RNA, 19 nt, Homo sapiens
  misc_RNA (1)...(19): siRNA sense strand
cauggacgcuuuugagaga

SEQ ID NO: 1910617 - RNA, 19 nt, Homo sapiens
  misc_RNA (1)...(19): siRNA sense strand
agagccacauggacgcuuu

SEQ ID NO: 1910618 - RNA, 19 nt, Homo sapiens
  misc_RNA (1)...(19): siRNA sense strand
agagguaccagaccaugaa

SEQ ID NO: 1910619 - RNA, 19 nt, Homo sapiens
  misc_RNA (1)...(19): siRNA sense strand
agaagggccuguggcugaa

SEQ ID NO: 1910620 - RNA, 19 nt, Homo sapiens
  misc_RNA (1)...(19): siRNA sense strand
gcucuucacccagaucuuc

SEQ ID NO: 1910621 - RNA, 19 nt, Homo sapiens
  misc_RNA (1)...(19): siRNA sense strand
auaagcugguuaacagaga

SEQ ID NO: 1910622 - RNA, 19 nt, Homo sapiens
  misc_RNA (1)...(19): siRNA sense strand
gcuccgaagcgacacaugu

SEQ ID NO: 1910623 - RNA, 19 nt, Homo sapiens
  misc_RNA (1)...(19): siRNA sense strand
ccgaggcucuggagauacu

SEQ ID NO: 1910624 - RNA, 19 nt, Homo sapiens
  misc_RNA (1)...(19): siRNA sense strand
agaguucggcgcucagaga

SEQ ID NO: 1910625 - RNA, 19 nt, Homo sapiens
  misc_RNA (1)...(19): siRNA sense strand
acccggagcagaagacauu

SEQ ID NO: 1910626 - RNA, 19 nt, Homo sapiens
  misc_RNA (1)...(19): siRNA sense strand
ccucugagcccagcaugga

SEQ ID NO: 1910627 - RNA, 19 nt, Homo sapiens
  misc_RNA (1)...(19): siRNA sense strand
ccucaaagaugggaaauuu

SEQ ID NO: 1910628 - RNA, 19 nt, Homo sapiens
  misc_RNA (1)...(19): siRNA sense strand
ccacagcaaagaauacauu

SEQ ID NO: 1910629 - RNA, 19 nt, Homo sapiens
  misc_RNA (1)...(19): siRNA sense strand
caaagaauacauugacauc

SEQ ID NO: 1910630 - RNA, 19 nt, Homo sapiens
  misc_RNA (1)...(19): siRNA sense strand
gcaaagaauacauugacau

SEQ ID NO: 1910631 - RNA, 19 nt, Homo sapiens
  misc_RNA (1)...(19): siRNA sense strand
cgaagaagcaugacaucca

SEQ ID NO: 1910632 - RNA, 19 nt, Homo sapiens
  misc_RNA (1)...(19): siRNA sense strand
gaagcaugacauccaguuc

SEQ ID NO: 1910633 - RNA, 19 nt, Homo sapiens
  misc_RNA (1)...(19): siRNA sense strand
guuuguggaucugcugaaa

SEQ ID NO: 1910634 - RNA, 19 nt, Homo sapiens
  misc_RNA (1)...(19): siRNA sense strand
cccuggagcucuacaugga

SEQ ID NO: 1910635 - RNA, 19 nt, Homo sapiens
  misc_RNA (1)...(19): siRNA sense strand
cagcaaagaauacauugac

SEQ ID NO: 1910636 - RNA, 19 nt, Homo sapiens
  misc_RNA (1)...(19): siRNA sense strand
cuacauggaccugcuguca

SEQ ID NO: 1910637 - RNA, 19 nt, Homo sapiens
  misc_RNA (1)...(19): siRNA sense strand
caaagaugggaaauuuauc

SEQ ID NO: 1910638 - RNA, 19 nt, Homo sapiens
  misc_RNA (1)...(19): siRNA sense strand
gccgugccgucuacaucuu

SEQ ID NO: 1910639 - RNA, 19 nt, Homo sapiens
  misc_RNA (1)...(19): siRNA sense strand
gggaaauuuaucuuaagug

SEQ ID NO: 1910640 - RNA, 19 nt, Homo sapiens
  misc_RNA (1)...(19): siRNA sense strand
cucaaagaugggaaauuua

SEQ ID NO: 1910641 - RNA, 19 nt, Homo sapiens
  misc_RNA (1)...(19): siRNA sense strand
ccgucuacaucuucucgaa

SEQ ID NO: 1910642 - RNA, 19 nt, Homo sapiens
  misc_RNA (1)...(19): siRNA sense strand
agcaugacauccaguucaa

SEQ ID NO: 1910643 - RNA, 19 nt, Homo sapiens
  misc_RNA (1)...(19): siRNA sense strand
aaaccuuugucacauguua

SEQ ID NO: 1910644 - RNA, 19 nt, Homo sapiens
  misc_RNA (1)...(19): siRNA sense strand
gacggcaacuacagcuuua

SEQ ID NO: 1910645 - RNA, 19 nt, Homo sapiens
  misc_RNA (1)...(19): siRNA sense strand
gcaacuacagcuuuaggua

SEQ ID NO: 1910646 - RNA, 19 nt, Homo sapiens
  misc_RNA (1)...(19): siRNA sense strand
ugucacauguuacacaauu

SEQ ID NO: 1910647 - RNA, 19 nt, Homo sapiens
  misc_RNA (1)...(19): siRNA sense strand
ggaaaaccuuugucacaug

SEQ ID NO: 1910648 - RNA, 19 nt, Homo sapiens
  misc_RNA (1)...(19): siRNA sense strand
gaaaaccuuugucacaugu

SEQ ID NO: 1910649 - RNA, 19 nt, Homo sapiens
  misc_RNA (1)...(19): siRNA sense strand
uagguagaauuucaacuuc

SEQ ID NO: 1910650 - RNA, 19 nt, Homo sapiens
  misc_RNA (1)...(19): siRNA sense strand
ugacggcaacuacagcuuu

SEQ ID NO: 1910651 - RNA, 19 nt, Homo sapiens
  misc_RNA (1)...(19): siRNA sense strand
ucacauguuacacaauuga

SEQ ID NO: 1910652 - RNA, 19 nt, Homo sapiens
  misc_RNA (1)...(19): siRNA sense strand
gggaaaaccuuugucacau

SEQ ID NO: 1910653 - RNA, 19 nt, Homo sapiens
  misc_RNA (1)...(19): siRNA sense strand
gcccugaacucaagucuua

SEQ ID NO: 1910654 - RNA, 19 nt, Homo sapiens
  misc_RNA (1)...(19): siRNA sense strand
acacauaggacaaaguuua

SEQ ID NO: 1910655 - RNA, 19 nt, Homo sapiens
  misc_RNA (1)...(19): siRNA sense strand
ggaccagccugcggguuua

SEQ ID NO: 1910656 - RNA, 19 nt, Homo sapiens
  misc_RNA (1)...(19): siRNA sense strand
gcacagacacccucaguca

SEQ ID NO: 1910657 - RNA, 19 nt, Homo sapiens
  misc_RNA (1)...(19): siRNA sense strand
ggacuccucgcucuauaua

SEQ ID NO: 1910658 - RNA, 19 nt, Homo sapiens
  misc_RNA (1)...(19): siRNA sense strand
cgaaagagaauacgagaga

SEQ ID NO: 1910659 - RNA, 19 nt, Homo sapiens
  misc_RNA (1)...(19): siRNA sense strand
gagcaccagugaguucuuu

SEQ ID NO: 1910660 - RNA, 19 nt, Homo sapiens
  misc_RNA (1)...(19): siRNA sense strand
acaauguggucuaccgaua

SEQ ID NO: 1910661 - RNA, 19 nt, Homo sapiens
  misc_RNA (1)...(19): siRNA sense strand
cuaccugucugccugcuuu

SEQ ID NO: 1910662 - RNA, 19 nt, Homo sapiens
  misc_RNA (1)...(19): siRNA sense strand
gcaauaauaacugugaaug

SEQ ID NO: 1910663 - RNA, 19 nt, Homo sapiens
  misc_RNA (1)...(19): siRNA sense strand
ucacgaugcugguauuugg

SEQ ID NO: 1910664 - RNA, 19 nt, Homo sapiens
  misc_RNA (1)...(19): siRNA sense strand
acucaagucuuacgcuuug

SEQ ID NO: 1910665 - RNA, 19 nt, Homo sapiens
  misc_RNA (1)...(19): siRNA sense strand
uggaugcggucuucauuga

SEQ ID NO: 1910666 - RNA, 19 nt, Homo sapiens
  misc_RNA (1)...(19): siRNA sense strand
gaugcggucuucauugaca

SEQ ID NO: 1910667 - RNA, 19 nt, Homo sapiens
  misc_RNA (1)...(19): siRNA sense strand
caaguaaccuggacaucac

SEQ ID NO: 1910668 - RNA, 19 nt, Homo sapiens
  misc_RNA (1)...(19): siRNA sense strand
cuucuucucuucccucuug

SEQ ID NO: 1910669 - RNA, 19 nt, Homo sapiens
  misc_RNA (1)...(19): siRNA sense strand
ucucuucccucuugauguu

SEQ ID NO: 1910670 - RNA, 19 nt, Homo sapiens
  misc_RNA (1)...(19): siRNA sense strand
ccaaaccgauuccuucacu

SEQ ID NO: 1910671 - RNA, 19 nt, Homo sapiens
  misc_RNA (1)...(19): siRNA sense strand
cuauaaacgcuacaucaaa

SEQ ID NO: 1910672 - RNA, 19 nt, Homo sapiens
  misc_RNA (1)...(19): siRNA sense strand
gcaaaccagacacauagga

SEQ ID NO: 1910673 - RNA, 19 nt, Homo sapiens
  misc_RNA (1)...(19): siRNA sense strand
ugacccaccaguacaagua

SEQ ID NO: 1910674 - RNA, 19 nt, Homo sapiens
  misc_RNA (1)...(19): siRNA sense strand
gcucugcggugccuuacuc

SEQ ID NO: 1910675 - RNA, 19 nt, Homo sapiens
  misc_RNA (1)...(19): siRNA sense strand
ggacggcuaccaacaugau

SEQ ID NO: 1910676 - RNA, 19 nt, Homo sapiens
  misc_RNA (1)...(19): siRNA sense strand
ccaucgcgcucaaauccuu

SEQ ID NO: 1910677 - RNA, 19 nt, Homo sapiens
  misc_RNA (1)...(19): siRNA sense strand
uacucgcccugcaauaaua

SEQ ID NO: 1910678 - RNA, 19 nt, Homo sapiens
  misc_RNA (1)...(19): siRNA sense strand
ggucuucauugacacaagu

SEQ ID NO: 1910679 - RNA, 19 nt, Homo sapiens
  misc_RNA (1)...(19): siRNA sense strand
aaaagaagguguccugcuu

SEQ ID NO: 1910680 - RNA, 19 nt, Homo sapiens
  misc_RNA (1)...(19): siRNA sense strand
agacacauaggacaaaguu

SEQ ID NO: 1910681 - RNA, 19 nt, Homo sapiens
  misc_RNA (1)...(19): siRNA sense strand
gggcugagcaccagugagu

SEQ ID NO: 1910682 - RNA, 19 nt, Homo sapiens
  misc_RNA (1)...(19): siRNA sense strand
cuacguggaugcggucuuc

SEQ ID NO: 1910683 - RNA, 19 nt, Homo sapiens
  misc_RNA (1)...(19): siRNA sense strand
cuacgucuccuuccucuuc

SEQ ID NO: 1910684 - RNA, 19 nt, Homo sapiens
  misc_RNA (1)...(19): siRNA sense strand
ggauggccaugcucgucaa

SEQ ID NO: 1910685 - RNA, 19 nt, Homo sapiens
  misc_RNA (1)...(19): siRNA sense strand
gguuuauccugggcucuuu

SEQ ID NO: 1910686 - RNA, 19 nt, Homo sapiens
  misc_RNA (1)...(19): siRNA sense strand
ccgcaaaccagacacauag

SEQ ID NO: 1910687 - RNA, 19 nt, Homo sapiens
  misc_RNA (1)...(19): siRNA sense strand
ucaaauccuucgccuucau

SEQ ID NO: 1910688 - RNA, 19 nt, Homo sapiens
  misc_RNA (1)...(19): siRNA sense strand
gcccugcaauaauaacugu

SEQ ID NO: 1910689 - RNA, 19 nt, Homo sapiens
  misc_RNA (1)...(19): siRNA sense strand
ugagagugaucccgaaggu

SEQ ID NO: 1910690 - RNA, 19 nt, Homo sapiens
  misc_RNA (1)...(19): siRNA sense strand
acaaguaaccuggacauca

SEQ ID NO: 1910691 - RNA, 19 nt, Homo sapiens
  misc_RNA (1)...(19): siRNA sense strand
ccuacucgcccugcaauaa

SEQ ID NO: 1910692 - RNA, 19 nt, Homo sapiens
  misc_RNA (1)...(19): siRNA sense strand
gcucucaaacccuguguuc

SEQ ID NO: 1910693 - RNA, 19 nt, Homo sapiens
  misc_RNA (1)...(19): siRNA sense strand
gugcuugucuggguaucuu

SEQ ID NO: 1910694 - RNA, 19 nt, Homo sapiens
  misc_RNA (1)...(19): siRNA sense strand
cagcagugccuccuguuuc

SEQ ID NO: 1910695 - RNA, 19 nt, Homo sapiens
  misc_RNA (1)...(19): siRNA sense strand
ccggacggcuaccaacaug

SEQ ID NO: 1910696 - RNA, 19 nt, Homo sapiens
  misc_RNA (1)...(19): siRNA sense strand
gcugagcaccagugaguuc

SEQ ID NO: 1910697 - RNA, 19 nt, Homo sapiens
  misc_RNA (1)...(19): siRNA sense strand
cgacuccaccugccuguuc

SEQ ID NO: 1910698 - RNA, 19 nt, Homo sapiens
  misc_RNA (1)...(19): siRNA sense strand
cagacacccucagucauca

SEQ ID NO: 1910699 - RNA, 19 nt, Homo sapiens
  misc_RNA (1)...(19): siRNA sense strand
ggguuacuguucccuaugg

SEQ ID NO: 1910700 - RNA, 19 nt, Homo sapiens
  misc_RNA (1)...(19): siRNA sense strand
auccugggcucuuucugua

SEQ ID NO: 1910701 - RNA, 19 nt, Homo sapiens
  misc_RNA (1)...(19): siRNA sense strand
guaccuggagcagcaguuu

SEQ ID NO: 1910702 - RNA, 19 nt, Homo sapiens
  misc_RNA (1)...(19): siRNA sense strand
cacauaggacaaaguuuau

SEQ ID NO: 1910703 - RNA, 19 nt, Homo sapiens
  misc_RNA (1)...(19): siRNA sense strand
gcaaccggacggcuaccaa

SEQ ID NO: 1910704 - RNA, 19 nt, Homo sapiens
  misc_RNA (1)...(19): siRNA sense strand
ucagucaucauccucauca

SEQ ID NO: 1910705 - RNA, 19 nt, Homo sapiens
  misc_RNA (1)...(19): siRNA sense strand
gaagaagcucagccugucu

SEQ ID NO: 1910706 - RNA, 19 nt, Homo sapiens
  misc_RNA (1)...(19): siRNA sense strand
ucccgaaggucaccaagca

SEQ ID NO: 1910707 - RNA, 19 nt, Homo sapiens
  misc_RNA (1)...(19): siRNA sense strand
gccuuacucuucuucucuu

SEQ ID NO: 1910708 - RNA, 19 nt, Homo sapiens
  misc_RNA (1)...(19): siRNA sense strand
acagacacccucagucauc

SEQ ID NO: 1910709 - RNA, 19 nt, Homo sapiens
  misc_RNA (1)...(19): siRNA sense strand
cuuccucacuuuccucugu

SEQ ID NO: 1910710 - RNA, 19 nt, Homo sapiens
  misc_RNA (1)...(19): siRNA sense strand
ggccaugcucuccgaaaga

SEQ ID NO: 1910711 - RNA, 19 nt, Homo sapiens
  misc_RNA (1)...(19): siRNA sense strand
gcgcugacgugggugugau

SEQ ID NO: 1910712 - RNA, 19 nt, Homo sapiens
  misc_RNA (1)...(19): siRNA sense strand
cuacucgcccugcaauaau

SEQ ID NO: 1910713 - RNA, 19 nt, Homo sapiens
  misc_RNA (1)...(19): siRNA sense strand
ccagacacauaggacaaag

SEQ ID NO: 1910714 - RNA, 19 nt, Homo sapiens
  misc_RNA (1)...(19): siRNA sense strand
caauaauaacugugaaugc

SEQ ID NO: 1910715 - RNA, 19 nt, Homo sapiens
  misc_RNA (1)...(19): siRNA sense strand
uuuccaacaucaagaucuu

SEQ ID NO: 1910716 - RNA, 19 nt, Homo sapiens
  misc_RNA (1)...(19): siRNA sense strand
cauaggacaaaguuuaucu

SEQ ID NO: 1910717 - RNA, 19 nt, Homo sapiens
  misc_RNA (1)...(19): siRNA sense strand
acuauaaacgcuacaucaa

SEQ ID NO: 1910718 - RNA, 19 nt, Homo sapiens
  misc_RNA (1)...(19): siRNA sense strand
gcaucgccaucgcgcucaa

SEQ ID NO: 1910719 - RNA, 19 nt, Homo sapiens
  misc_RNA (1)...(19): siRNA sense strand
cuacgacaauguggucuac

SEQ ID NO: 1910720 - RNA, 19 nt, Homo sapiens
  misc_RNA (1)...(19): siRNA sense strand
caccgucccugcugagaac

SEQ ID NO: 1910721 - RNA, 19 nt, Homo sapiens
  misc_RNA (1)...(19): siRNA sense strand
uggaccagccugcggguuu

SEQ ID NO: 1910722 - RNA, 19 nt, Homo sapiens
  misc_RNA (1)...(19): siRNA sense strand
gucuuacgcuuugggaguu

SEQ ID NO: 1910723 - RNA, 19 nt, Homo sapiens
  misc_RNA (1)...(19): siRNA sense strand
ugcaacagcacgaaucuca

SEQ ID NO: 1910724 - RNA, 19 nt, Homo sapiens
  misc_RNA (1)...(19): siRNA sense strand
aagaagguguccugcuuuu

SEQ ID NO: 1910725 - RNA, 19 nt, Homo sapiens
  misc_RNA (1)...(19): siRNA sense strand
guaaggaacccauuaauug

SEQ ID NO: 1910726 - RNA, 19 nt, Homo sapiens
  misc_RNA (1)...(19): siRNA sense strand
ggacagauaugcugaacau

SEQ ID NO: 1910727 - RNA, 19 nt, Homo sapiens
  misc_RNA (1)...(19): siRNA sense strand
caagaaauggcccaaguua

SEQ ID NO: 1910728 - RNA, 19 nt, Homo sapiens
  misc_RNA (1)...(19): siRNA sense strand
gugcaaagcagaacauuaa

SEQ ID NO: 1910729 - RNA, 19 nt, Homo sapiens
  misc_RNA (1)...(19): siRNA sense strand
gacaguccaucuuauuaaa

SEQ ID NO: 1910730 - RNA, 19 nt, Homo sapiens
  misc_RNA (1)...(19): siRNA sense strand
ggcggcaacugaagaauaa

SEQ ID NO: 1910731 - RNA, 19 nt, Homo sapiens
  misc_RNA (1)...(19): siRNA sense strand
caaggacgauucagugaug

SEQ ID NO: 1910732 - RNA, 19 nt, Homo sapiens
  misc_RNA (1)...(19): siRNA sense strand
agaaauggcccaaguuaaa

SEQ ID NO: 1910733 - RNA, 19 nt, Homo sapiens
  misc_RNA (1)...(19): siRNA sense strand
gaacaugugcaaagcagaa

SEQ ID NO: 1910734 - RNA, 19 nt, Homo sapiens
  misc_RNA (1)...(19): siRNA sense strand
guaaagaaaguucaaagga

SEQ ID NO: 1910735 - RNA, 19 nt, Homo sapiens
  misc_RNA (1)...(19): siRNA sense strand
cgacaguccaucuuauuaa

SEQ ID NO: 1910736 - RNA, 19 nt, Homo sapiens
  misc_RNA (1)...(19): siRNA sense strand
gcaaggccauuaaacaaaa

SEQ ID NO: 1910737 - RNA, 19 nt, Homo sapiens
  misc_RNA (1)...(19): siRNA sense strand
ggacugcuauguggacuca

SEQ ID NO: 1910738 - RNA, 19 nt, Homo sapiens
  misc_RNA (1)...(19): siRNA sense strand
gcaaagcagaacauuaaug

SEQ ID NO: 1910739 - RNA, 19 nt, Homo sapiens
  misc_RNA (1)...(19): siRNA sense strand
gggcaaggccauuaaacaa

SEQ ID NO: 1910740 - RNA, 19 nt, Homo sapiens
  misc_RNA (1)...(19): siRNA sense strand
gcaggaggcaucagagaga

SEQ ID NO: 1910741 - RNA, 19 nt, Homo sapiens
  misc_RNA (1)...(19): siRNA sense strand
cagauaugcugaacaugug

SEQ ID NO: 1910742 - RNA, 19 nt, Homo sapiens
  misc_RNA (1)...(19): siRNA sense strand
caucagagagaguaaagaa

SEQ ID NO: 1910743 - RNA, 19 nt, Homo sapiens
  misc_RNA (1)...(19): siRNA sense strand
ccaaugcuguggaauccuu

SEQ ID NO: 1910744 - RNA, 19 nt, Homo sapiens
  misc_RNA (1)...(19): siRNA sense strand
cagcaucccuaucuaugga

SEQ ID NO: 1910745 - RNA, 19 nt, Homo sapiens
  misc_RNA (1)...(19): siRNA sense strand
gaaaagaaacuucaucagu

SEQ ID NO: 1910746 - RNA, 19 nt, Homo sapiens
  misc_RNA (1)...(19): siRNA sense strand
gagcugggcaaggccauua

SEQ ID NO: 1910747 - RNA, 19 nt, Homo sapiens
  misc_RNA (1)...(19): siRNA sense strand
gaaauggcccaaguuaaag

SEQ ID NO: 1910748 - RNA, 19 nt, Homo sapiens
  misc_RNA (1)...(19): siRNA sense strand
ggcaaggccauuaaacaaa

SEQ ID NO: 1910749 - RNA, 19 nt, Homo sapiens
  misc_RNA (1)...(19): siRNA sense strand
ccaccaccaugcaaguuug

SEQ ID NO: 1910750 - RNA, 19 nt, Homo sapiens
  misc_RNA (1)...(19): siRNA sense strand
cgaggagccuguacucaag

SEQ ID NO: 1910751 - RNA, 19 nt, Homo sapiens
  misc_RNA (1)...(19): siRNA sense strand
gggaggcucuuugcaguca

SEQ ID NO: 1910752 - RNA, 19 nt, Homo sapiens
  misc_RNA (1)...(19): siRNA sense strand
ccgacaguccaucuuauua

SEQ ID NO: 1910753 - RNA, 19 nt, Homo sapiens
  misc_RNA (1)...(19): siRNA sense strand
caaagcagaacauuaaugc

SEQ ID NO: 1910754 - RNA, 19 nt, Homo sapiens
  misc_RNA (1)...(19): siRNA sense strand
uguaaggaacccauuaauu

SEQ ID NO: 1910755 - RNA, 19 nt, Homo sapiens
  misc_RNA (1)...(19): siRNA sense strand
ggaggcaucagagagagua

SEQ ID NO: 1910756 - RNA, 19 nt, Homo sapiens
  misc_RNA (1)...(19): siRNA sense strand
cagagagaguaaagaaagu

SEQ ID NO: 1910757 - RNA, 19 nt, Homo sapiens
  misc_RNA (1)...(19): siRNA sense strand
cgaagagauuaaagcacaa

SEQ ID NO: 1910758 - RNA, 19 nt, Homo sapiens
  misc_RNA (1)...(19): siRNA sense strand
acagauaugcugaacaugu

SEQ ID NO: 1910759 - RNA, 19 nt, Homo sapiens
  misc_RNA (1)...(19): siRNA sense strand
ucagagagaguaaagaaag

SEQ ID NO: 1910760 - RNA, 19 nt, Homo sapiens
  misc_RNA (1)...(19): siRNA sense strand
gaaggaaaacucucgaaga

SEQ ID NO: 1910761 - RNA, 19 nt, Homo sapiens
  misc_RNA (1)...(19): siRNA sense strand
gagaguaaagaaaguucaa

SEQ ID NO: 1910762 - RNA, 19 nt, Homo sapiens
  misc_RNA (1)...(19): siRNA sense strand
guuguaaggaacccauuaa

SEQ ID NO: 1910763 - RNA, 19 nt, Homo sapiens
  misc_RNA (1)...(19): siRNA sense strand
gaguguugcuuccugaaac

SEQ ID NO: 1910764 - RNA, 19 nt, Homo sapiens
  misc_RNA (1)...(19): siRNA sense strand
cuugggaaguuguaaggaa

SEQ ID NO: 1910765 - RNA, 19 nt, Homo sapiens
  misc_RNA (1)...(19): siRNA sense strand
uaaagcacaaggacgauuc

SEQ ID NO: 1910766 - RNA, 19 nt, Homo sapiens
  misc_RNA (1)...(19): siRNA sense strand
aagaaauggcccaaguuaa

SEQ ID NO: 1910767 - RNA, 19 nt, Homo sapiens
  misc_RNA (1)...(19): siRNA sense strand
ucaagaaauggcccaaguu

SEQ ID NO: 1910768 - RNA, 19 nt, Homo sapiens
  misc_RNA (1)...(19): siRNA sense strand
gagccaaugcuguggaauc

SEQ ID NO: 1910769 - RNA, 19 nt, Homo sapiens
  misc_RNA (1)...(19): siRNA sense strand
cagcuaccacuuccucuug

SEQ ID NO: 1910770 - RNA, 19 nt, Homo sapiens
  misc_RNA (1)...(19): siRNA sense strand
gagccuguacucaagaaau

SEQ ID NO: 1910771 - RNA, 19 nt, Homo sapiens
  misc_RNA (1)...(19): siRNA sense strand
gaguaaagaaaguucaaag

SEQ ID NO: 1910772 - RNA, 19 nt, Homo sapiens
  misc_RNA (1)...(19): siRNA sense strand
ggccagaacaugugcaaag

SEQ ID NO: 1910773 - RNA, 19 nt, Homo sapiens
  misc_RNA (1)...(19): siRNA sense strand
uaaggaacccauuaauugc

SEQ ID NO: 1910774 - RNA, 19 nt, Homo sapiens
  misc_RNA (1)...(19): siRNA sense strand
caccggcucucaccaacau

SEQ ID NO: 1910775 - RNA, 19 nt, Homo sapiens
  misc_RNA (1)...(19): siRNA sense strand
gagagaguaaagaaaguuc

SEQ ID NO: 1910776 - RNA, 19 nt, Homo sapiens
  misc_RNA (1)...(19): siRNA sense strand
gaggacagauaugcugaac

SEQ ID NO: 1910777 - RNA, 19 nt, Homo sapiens
  misc_RNA (1)...(19): siRNA sense strand
ggcccaaguuaaagagcaa

SEQ ID NO: 1910778 - RNA, 19 nt, Homo sapiens
  misc_RNA (1)...(19): siRNA sense strand
gcaaguuuggagaaggaaa

SEQ ID NO: 1910779 - RNA, 19 nt, Homo sapiens
  misc_RNA (1)...(19): siRNA sense strand
cacaaggacgauucaguga

SEQ ID NO: 1910780 - RNA, 19 nt, Homo sapiens
  misc_RNA (1)...(19): siRNA sense strand
uaacaguccgccaagaucu

SEQ ID NO: 1910781 - RNA, 19 nt, Homo sapiens
  misc_RNA (1)...(19): siRNA sense strand
cucaagaaauggcccaagu

SEQ ID NO: 1910782 - RNA, 19 nt, Homo sapiens
  misc_RNA (1)...(19): siRNA sense strand
caaaagagacagcaguugu

SEQ ID NO: 1910783 - RNA, 19 nt, Homo sapiens
  misc_RNA (1)...(19): siRNA sense strand
gaagagauuaaagcacaag

SEQ ID NO: 1910784 - RNA, 19 nt, Homo sapiens
  misc_RNA (1)...(19): siRNA sense strand
ugugcaaagcagaacauua

SEQ ID NO: 1910785 - RNA, 19 nt, Homo sapiens
  misc_RNA (1)...(19): siRNA sense strand
cgaguguugcuuccugaaa

SEQ ID NO: 1910786 - RNA, 19 nt, Homo sapiens
  misc_RNA (1)...(19): siRNA sense strand
gcacccaaucaaugugaga

SEQ ID NO: 1910787 - RNA, 19 nt, Homo sapiens
  misc_RNA (1)...(19): siRNA sense strand
aggcggcaacugaagaaua

SEQ ID NO: 1910788 - RNA, 19 nt, Homo sapiens
  misc_RNA (1)...(19): siRNA sense strand
agccuguacucaagaaaug

SEQ ID NO: 1910789 - RNA, 19 nt, Homo sapiens
  misc_RNA (1)...(19): siRNA sense strand
gaggagccuguacucaaga

SEQ ID NO: 1910790 - RNA, 19 nt, Homo sapiens
  misc_RNA (1)...(19): siRNA sense strand
acuccgacaguccaucuua

SEQ ID NO: 1910791 - RNA, 19 nt, Homo sapiens
  misc_RNA (1)...(19): siRNA sense strand
gcugggcaaggccauuaaa

SEQ ID NO: 1910792 - RNA, 19 nt, Homo sapiens
  misc_RNA (1)...(19): siRNA sense strand
acgaggagccuguacucaa

SEQ ID NO: 1910793 - RNA, 19 nt, Homo sapiens
  misc_RNA (1)...(19): siRNA sense strand
ggaccuacaucauucauua

SEQ ID NO: 1910794 - RNA, 19 nt, Homo sapiens
  misc_RNA (1)...(19): siRNA sense strand
caaggaagcuucaggauau

SEQ ID NO: 1910795 - RNA, 19 nt, Homo sapiens
  misc_RNA (1)...(19): siRNA sense strand
gcaaagaacuucccucagu

SEQ ID NO: 1910796 - RNA, 19 nt, Homo sapiens
  misc_RNA (1)...(19): siRNA sense strand
gcagauuugucuucucuua

SEQ ID NO: 1910797 - RNA, 19 nt, Homo sapiens
  misc_RNA (1)...(19): siRNA sense strand
gagcaacgcugcccaguau

SEQ ID NO: 1910798 - RNA, 19 nt, Homo sapiens
  misc_RNA (1)...(19): siRNA sense strand
gcuaaagacuucauuguug

SEQ ID NO: 1910799 - RNA, 19 nt, Homo sapiens
  misc_RNA (1)...(19): siRNA sense strand
ggaauuggaagcauuaaua

SEQ ID NO: 1910800 - RNA, 19 nt, Homo sapiens
  misc_RNA (1)...(19): siRNA sense strand
gaacggcuaugcaauuguu

SEQ ID NO: 1910801 - RNA, 19 nt, Homo sapiens
  misc_RNA (1)...(19): siRNA sense strand
agaaaucucugaccaagaa

SEQ ID NO: 1910802 - RNA, 19 nt, Homo sapiens
  misc_RNA (1)...(19): siRNA sense strand
acagagacauguucuuuaa

SEQ ID NO: 1910803 - RNA, 19 nt, Homo sapiens
  misc_RNA (1)...(19): siRNA sense strand
gcaccagucuuaacuuaug

SEQ ID NO: 1910804 - RNA, 19 nt, Homo sapiens
  misc_RNA (1)...(19): siRNA sense strand
ccaagaagauguuccuaug

SEQ ID NO: 1910805 - RNA, 19 nt, Homo sapiens
  misc_RNA (1)...(19): siRNA sense strand
guggaugacuccuugguua

SEQ ID NO: 1910806 - RNA, 19 nt, Homo sapiens
  misc_RNA (1)...(19): siRNA sense strand
ggacagagacauguucuuu

SEQ ID NO: 1910807 - RNA, 19 nt, Homo sapiens
  misc_RNA (1)...(19): siRNA sense strand
gaaaacagccucuucguaa

SEQ ID NO: 1910808 - RNA, 19 nt, Homo sapiens
  misc_RNA (1)...(19): siRNA sense strand
cauagagccuguuguagaa

SEQ ID NO: 1910809 - RNA, 19 nt, Homo sapiens
  misc_RNA (1)...(19): siRNA sense strand
ugaaauacauggagagcaa

SEQ ID NO: 1910810 - RNA, 19 nt, Homo sapiens
  misc_RNA (1)...(19): siRNA sense strand
agacaaagaccgcagauuu

SEQ ID NO: 1910811 - RNA, 19 nt, Homo sapiens
  misc_RNA (1)...(19): siRNA sense strand
ggaaugguauacugcuaaa

SEQ ID NO: 1910812 - RNA, 19 nt, Homo sapiens
  misc_RNA (1)...(19): siRNA sense strand
agaccuaaaucgaggaaua

SEQ ID NO: 1910813 - RNA, 19 nt, Homo sapiens
  misc_RNA (1)...(19): siRNA sense strand
gcaggaauuggaagcauua

SEQ ID NO: 1910814 - RNA, 19 nt, Homo sapiens
  misc_RNA (1)...(19): siRNA sense strand
gccaaggaauugaguuaaa

SEQ ID NO: 1910815 - RNA, 19 nt, Homo sapiens
  misc_RNA (1)...(19): siRNA sense strand
gaaagcaagcaaacugaaa

SEQ ID NO: 1910816 - RNA, 19 nt, Homo sapiens
  misc_RNA (1)...(19): siRNA sense strand
acaaacagguccuucgauu

SEQ ID NO: 1910817 - RNA, 19 nt, Homo sapiens
  misc_RNA (1)...(19): siRNA sense strand
acaaggugcuucguuauuu

SEQ ID NO: 1910818 - RNA, 19 nt, Homo sapiens
  misc_RNA (1)...(19): siRNA sense strand
caacauucgugaggcauuu

SEQ ID NO: 1910819 - RNA, 19 nt, Homo sapiens
  misc_RNA (1)...(19): siRNA sense strand
ggacuaaaguuguuaaacc

SEQ ID NO: 1910820 - RNA, 19 nt, Homo sapiens
  misc_RNA (1)...(19): siRNA sense strand
caagcaauuucucaccuuu

SEQ ID NO: 1910821 - RNA, 19 nt, Homo sapiens
  misc_RNA (1)...(19): siRNA sense strand
cagcauguauggugaaugu

SEQ ID NO: 1910822 - RNA, 19 nt, Homo sapiens
  misc_RNA (1)...(19): siRNA sense strand
gaaaacagccuuccacaga

SEQ ID NO: 1910823 - RNA, 19 nt, Homo sapiens
  misc_RNA (1)...(19): siRNA sense strand
agaagcaacugaaagauca

SEQ ID NO: 1910824 - RNA, 19 nt, Homo sapiens
  misc_RNA (1)...(19): siRNA sense strand
gcacucgcgucaauucaga

SEQ ID NO: 1910825 - RNA, 19 nt, Homo sapiens
  misc_RNA (1)...(19): siRNA sense strand
cagaagcacucgcgucaau

SEQ ID NO: 1910826 - RNA, 19 nt, Homo sapiens
  misc_RNA (1)...(19): siRNA sense strand
aaagaucacucaugcaaag

SEQ ID NO: 1910827 - RNA, 19 nt, Homo sapiens
  misc_RNA (1)...(19): siRNA sense strand
agauggcucuugauccuua

SEQ ID NO: 1910828 - RNA, 19 nt, Homo sapiens
  misc_RNA (1)...(19): siRNA sense strand
gacagagacauguucuuua

SEQ ID NO: 1910829 - RNA, 19 nt, Homo sapiens
  misc_RNA (1)...(19): siRNA sense strand
caggauauguggacagaga

SEQ ID NO: 1910830 - RNA, 19 nt, Homo sapiens
  misc_RNA (1)...(19): siRNA sense strand
gugcauggcuugcccuuuc

SEQ ID NO: 1910831 - RNA, 19 nt, Homo sapiens
  misc_RNA (1)...(19): siRNA sense strand
caaggugcuucguuauuug

SEQ ID NO: 1910832 - RNA, 19 nt, Homo sapiens
  misc_RNA (1)...(19): siRNA sense strand
gcagaaagcaagcaaacug

SEQ ID NO: 1910833 - RNA, 19 nt, Homo sapiens
  misc_RNA (1)...(19): siRNA sense strand
cagcaugucugucauagag

SEQ ID NO: 1910834 - RNA, 19 nt, Homo sapiens
  misc_RNA (1)...(19): siRNA sense strand
gaaagaucacucaugcaaa

SEQ ID NO: 1910835 - RNA, 19 nt, Homo sapiens
  misc_RNA (1)...(19): siRNA sense strand
uggaugaguuggccaguaa

SEQ ID NO: 1910836 - RNA, 19 nt, Homo sapiens
  misc_RNA (1)...(19): siRNA sense strand
ggaaccaccuccaguaaaa

SEQ ID NO: 1910837 - RNA, 19 nt, Homo sapiens
  misc_RNA (1)...(19): siRNA sense strand
caucacaauuuauggcaaa

SEQ ID NO: 1910838 - RNA, 19 nt, Homo sapiens
  misc_RNA (1)...(19): siRNA sense strand
uaacuuauggccaaccuaa

SEQ ID NO: 1910839 - RNA, 19 nt, Homo sapiens
  misc_RNA (1)...(19): siRNA sense strand
ugucuucucuuacuuucua

SEQ ID NO: 1910840 - RNA, 19 nt, Homo sapiens
  misc_RNA (1)...(19): siRNA sense strand
ccaaggaauugaguuaaau

SEQ ID NO: 1910841 - RNA, 19 nt, Homo sapiens
  misc_RNA (1)...(19): siRNA sense strand
aggcugagcuggaugaguu

SEQ ID NO: 1910842 - RNA, 19 nt, Homo sapiens
  misc_RNA (1)...(19): siRNA sense strand
uaugcaaucugggaugaua

SEQ ID NO: 1910843 - RNA, 19 nt, Homo sapiens
  misc_RNA (1)...(19): siRNA sense strand
cuaccgacaugaucaguau

SEQ ID NO: 1910844 - RNA, 19 nt, Homo sapiens
  misc_RNA (1)...(19): siRNA sense strand
ccaauucacacagguauuu

SEQ ID NO: 1910845 - RNA, 19 nt, Homo sapiens
  misc_RNA (1)...(19): siRNA sense strand
ugaaagaucacucaugcaa

SEQ ID NO: 1910846 - RNA, 19 nt, Homo sapiens
  misc_RNA (1)...(19): siRNA sense strand
ucgcaauucugguaucauu

SEQ ID NO: 1910847 - RNA, 19 nt, Homo sapiens
  misc_RNA (1)...(19): siRNA sense strand
gacaugaucaguaucuuug

SEQ ID NO: 1910848 - RNA, 19 nt, Homo sapiens
  misc_RNA (1)...(19): siRNA sense strand
aggcaccagucuuaacuua

SEQ ID NO: 1910849 - RNA, 19 nt, Homo sapiens
  misc_RNA (1)...(19): siRNA sense strand
ggaagucacucacuauccu

SEQ ID NO: 1910850 - RNA, 19 nt, Homo sapiens
  misc_RNA (1)...(19): siRNA sense strand
uccgucaggugaacauuua

SEQ ID NO: 1910851 - RNA, 19 nt, Homo sapiens
  misc_RNA (1)...(19): siRNA sense strand
acaaggaagcuucaggaua

SEQ ID NO: 1910852 - RNA, 19 nt, Homo sapiens
  misc_RNA (1)...(19): siRNA sense strand
gaagcacucgcgucaauuc

SEQ ID NO: 1910853 - RNA, 19 nt, Homo sapiens
  misc_RNA (1)...(19): siRNA sense strand
gagaccggcuccaguucaa

SEQ ID NO: 1910854 - RNA, 19 nt, Homo sapiens
  misc_RNA (1)...(19): siRNA sense strand
guugggaagucacucacua

SEQ ID NO: 1910855 - RNA, 19 nt, Homo sapiens
  misc_RNA (1)...(19): siRNA sense strand
ucauagagccuguuguaga

SEQ ID NO: 1910856 - RNA, 19 nt, Homo sapiens
  misc_RNA (1)...(19): siRNA sense strand
uuauuuggcuguacuggaa

SEQ ID NO: 1910857 - RNA, 19 nt, Homo sapiens
  misc_RNA (1)...(19): siRNA sense strand
uuaaaaugcuggugaauga

SEQ ID NO: 1910858 - RNA, 19 nt, Homo sapiens
  misc_RNA (1)...(19): siRNA sense strand
gaucaacucaagcaauuuc

SEQ ID NO: 1910859 - RNA, 19 nt, Homo sapiens
  misc_RNA (1)...(19): siRNA sense strand
cuucaaggcaaguuaauaa

SEQ ID NO: 1910860 - RNA, 19 nt, Homo sapiens
  misc_RNA (1)...(19): siRNA sense strand
gaauuggaagcauuaauag

SEQ ID NO: 1910861 - RNA, 19 nt, Homo sapiens
  misc_RNA (1)...(19): siRNA sense strand
cccagugacuucuucauug

SEQ ID NO: 1910862 - RNA, 19 nt, Homo sapiens
  misc_RNA (1)...(19): siRNA sense strand
aagaaguguuggaauggua

SEQ ID NO: 1910863 - RNA, 19 nt, Homo sapiens
  misc_RNA (1)...(19): siRNA sense strand
gaccuaaaucgaggaauaa

SEQ ID NO: 1910864 - RNA, 19 nt, Homo sapiens
  misc_RNA (1)...(19): siRNA sense strand
gacuaaaguuguuaaacca

SEQ ID NO: 1910865 - RNA, 19 nt, Homo sapiens
  misc_RNA (1)...(19): siRNA sense strand
cgacaugaucaguaucuuu

SEQ ID NO: 1910866 - RNA, 19 nt, Homo sapiens
  misc_RNA (1)...(19): siRNA sense strand
gauaacaaggugcuucguu

SEQ ID NO: 1910867 - RNA, 19 nt, Homo sapiens
  misc_RNA (1)...(19): siRNA sense strand
gaagauguuccuaugucaa

SEQ ID NO: 1910868 - RNA, 19 nt, Homo sapiens
  misc_RNA (1)...(19): siRNA sense strand
uaacuuuguucgugcuuuc

SEQ ID NO: 1910869 - RNA, 19 nt, Homo sapiens
  misc_RNA (1)...(19): siRNA sense strand
guauacugcuaaagacuuc

SEQ ID NO: 1910870 - RNA, 19 nt, Homo sapiens
  misc_RNA (1)...(19): siRNA sense strand
uuagaaagccaaggaauug

SEQ ID NO: 1910871 - RNA, 19 nt, Homo sapiens
  misc_RNA (1)...(19): siRNA sense strand
ugucauagagccuguugua

SEQ ID NO: 1910872 - RNA, 19 nt, Homo sapiens
  misc_RNA (1)...(19): siRNA sense strand
aagaagauguuccuauguc

SEQ ID NO: 1910873 - RNA, 19 nt, Homo sapiens
  misc_RNA (1)...(19): siRNA sense strand
aaaugcuggugaaugauaa

SEQ ID NO: 1910874 - RNA, 19 nt, Homo sapiens
  misc_RNA (1)...(19): siRNA sense strand
ucacugauuuaccacguau

SEQ ID NO: 1910875 - RNA, 19 nt, Homo sapiens
  misc_RNA (1)...(19): siRNA sense strand
cuaaaucgaggaauaaaca

SEQ ID NO: 1910876 - RNA, 19 nt, Homo sapiens
  misc_RNA (1)...(19): siRNA sense strand
gaucacucaugcaaagaca

SEQ ID NO: 1910877 - RNA, 19 nt, Homo sapiens
  misc_RNA (1)...(19): siRNA sense strand
gcaacgcugcccaguauuc

SEQ ID NO: 1910878 - RNA, 19 nt, Homo sapiens
  misc_RNA (1)...(19): siRNA sense strand
caggaacggcuaugcaauu

SEQ ID NO: 1910879 - RNA, 19 nt, Homo sapiens
  misc_RNA (1)...(19): siRNA sense strand
uggcaggacuaaaguuguu

SEQ ID NO: 1910880 - RNA, 19 nt, Homo sapiens
  misc_RNA (1)...(19): siRNA sense strand
ugucggaccuacaucauuc

SEQ ID NO: 1910881 - RNA, 19 nt, Homo sapiens
  misc_RNA (1)...(19): siRNA sense strand
gccagcggcuagccaagaa

SEQ ID NO: 1910882 - RNA, 19 nt, Homo sapiens
  misc_RNA (1)...(19): siRNA sense strand
gcauuaauagacacaauuc

SEQ ID NO: 1910883 - RNA, 19 nt, Homo sapiens
  misc_RNA (1)...(19): siRNA sense strand
cuucauuggugcugugauu

SEQ ID NO: 1910884 - RNA, 19 nt, Homo sapiens
  misc_RNA (1)...(19): siRNA sense strand
aaacagguccuucgauucu

SEQ ID NO: 1910885 - RNA, 19 nt, Homo sapiens
  misc_RNA (1)...(19): siRNA sense strand
caacucaagcaauuucuca

SEQ ID NO: 1910886 - RNA, 19 nt, Homo sapiens
  misc_RNA (1)...(19): siRNA sense strand
gggaaccaccuccaguaaa

SEQ ID NO: 1910887 - RNA, 19 nt, Homo sapiens
  misc_RNA (1)...(19): siRNA sense strand
gcgggaaccaccuccagua

SEQ ID NO: 1910888 - RNA, 19 nt, Homo sapiens
  misc_RNA (1)...(19): siRNA sense strand
gaugauacgguggaaauuc

SEQ ID NO: 1910889 - RNA, 19 nt, Homo sapiens
  misc_RNA (1)...(19): siRNA sense strand
agaagcgccugcuccagaa

SEQ ID NO: 1910890 - RNA, 19 nt, Homo sapiens
  misc_RNA (1)...(19): siRNA sense strand
ucagaaccauguccgaaag

SEQ ID NO: 1910891 - RNA, 19 nt, Homo sapiens
  misc_RNA (1)...(19): siRNA sense strand
ccagugacuucuucauugg

SEQ ID NO: 1910892 - RNA, 19 nt, Homo sapiens
  misc_RNA (1)...(19): siRNA sense strand
gauccuuucccacuccuaa

SEQ ID NO: 1910893 - RNA, 19 nt, Homo sapiens
  misc_RNA (1)...(19): siRNA sense strand
gcgagaagcuggucuuauu

SEQ ID NO: 1910894 - RNA, 19 nt, Homo sapiens
  misc_RNA (1)...(19): siRNA sense strand
gaaacaaccaccaaacauu

SEQ ID NO: 1910895 - RNA, 19 nt, Homo sapiens
  misc_RNA (1)...(19): siRNA sense strand
gauuucaacuccuagcuuu

SEQ ID NO: 1910896 - RNA, 19 nt, Homo sapiens
  misc_RNA (1)...(19): siRNA sense strand
gaacaaguuaucacagaaa

SEQ ID NO: 1910897 - RNA, 19 nt, Homo sapiens
  misc_RNA (1)...(19): siRNA sense strand
ggaaaccucuagaacaagu

SEQ ID NO: 1910898 - RNA, 19 nt, Homo sapiens
  misc_RNA (1)...(19): siRNA sense strand
ucacagaaacugcaaagaa

SEQ ID NO: 1910899 - RNA, 19 nt, Homo sapiens
  misc_RNA (1)...(19): siRNA sense strand
gcgcuacgcugaguacuug

SEQ ID NO: 1910900 - RNA, 19 nt, Homo sapiens
  misc_RNA (1)...(19): siRNA sense strand
uagaacaaguuaucacaga

SEQ ID NO: 1910901 - RNA, 19 nt, Homo sapiens
  misc_RNA (1)...(19): siRNA sense strand
cauaggagagucaugauuu

SEQ ID NO: 1910902 - RNA, 19 nt, Homo sapiens
  misc_RNA (1)...(19): siRNA sense strand
aagaagauuucaacuccua

SEQ ID NO: 1910903 - RNA, 19 nt, Homo sapiens
  misc_RNA (1)...(19): siRNA sense strand
ggacugguaagaaguuuga

SEQ ID NO: 1910904 - RNA, 19 nt, Homo sapiens
  misc_RNA (1)...(19): siRNA sense strand
aaacaaccaccaaacauug

SEQ ID NO: 1910905 - RNA, 19 nt, Homo sapiens
  misc_RNA (1)...(19): siRNA sense strand
gcaaagaagauuucaacuc

SEQ ID NO: 1910906 - RNA, 19 nt, Homo sapiens
  misc_RNA (1)...(19): siRNA sense strand
gaaacugcaaagaagauuu

SEQ ID NO: 1910907 - RNA, 19 nt, Homo sapiens
  misc_RNA (1)...(19): siRNA sense strand
gcaggucgcuacgcauuuc

SEQ ID NO: 1910908 - RNA, 19 nt, Homo sapiens
  misc_RNA (1)...(19): siRNA sense strand
cuggaaaccucuagaacaa

SEQ ID NO: 1910909 - RNA, 19 nt, Homo sapiens
  misc_RNA (1)...(19): siRNA sense strand
cacagaaacugcaaagaag

SEQ ID NO: 1910910 - RNA, 19 nt, Homo sapiens
  misc_RNA (1)...(19): siRNA sense strand
gaacagcucauaggagagu

SEQ ID NO: 1910911 - RNA, 19 nt, Homo sapiens
  misc_RNA (1)...(19): siRNA sense strand
aaaggaggauuugaacaga

SEQ ID NO: 1910912 - RNA, 19 nt, Homo sapiens
  misc_RNA (1)...(19): siRNA sense strand
gguaagaaguuugauagcu

SEQ ID NO: 1910913 - RNA, 19 nt, Homo sapiens
  misc_RNA (1)...(19): siRNA sense strand
gaucuggaaaccucuagaa

SEQ ID NO: 1910914 - RNA, 19 nt, Homo sapiens
  misc_RNA (1)...(19): siRNA sense strand
agaacaaguuaucacagaa

SEQ ID NO: 1910915 - RNA, 19 nt, Homo sapiens
  misc_RNA (1)...(19): siRNA sense strand
cgagaagcuggucuuauuu

SEQ ID NO: 1910916 - RNA, 19 nt, Homo sapiens
  misc_RNA (1)...(19): siRNA sense strand
gcuggcaaggcuaagauua

SEQ ID NO: 1910917 - RNA, 19 nt, Homo sapiens
  misc_RNA (1)...(19): siRNA sense strand
gcuagaaacaaccaccaaa

SEQ ID NO: 1910918 - RNA, 19 nt, Homo sapiens
  misc_RNA (1)...(19): siRNA sense strand
aggaggauuugaacagaaa

SEQ ID NO: 1910919 - RNA, 19 nt, Homo sapiens
  misc_RNA (1)...(19): siRNA sense strand
uuacguagcagccaaaaua

SEQ ID NO: 1910920 - RNA, 19 nt, Homo sapiens
  misc_RNA (1)...(19): siRNA sense strand
agguggaucuccuuacgua

SEQ ID NO: 1910921 - RNA, 19 nt, Homo sapiens
  misc_RNA (1)...(19): siRNA sense strand
aaaccucuagaacaaguua

SEQ ID NO: 1910922 - RNA, 19 nt, Homo sapiens
  misc_RNA (1)...(19): siRNA sense strand
gaaaaugaguaggcgagaa

SEQ ID NO: 1910923 - RNA, 19 nt, Homo sapiens
  misc_RNA (1)...(19): siRNA sense strand
uaaaggaggauuugaacag

SEQ ID NO: 1910924 - RNA, 19 nt, Homo sapiens
  misc_RNA (1)...(19): siRNA sense strand
aagauuagaacagcucaua

SEQ ID NO: 1910925 - RNA, 19 nt, Homo sapiens
  misc_RNA (1)...(19): siRNA sense strand
cuauaaaggaggauuugaa

SEQ ID NO: 1910926 - RNA, 19 nt, Homo sapiens
  misc_RNA (1)...(19): siRNA sense strand
ggagagucaugauuuugaa

SEQ ID NO: 1910927 - RNA, 19 nt, Homo sapiens
  misc_RNA (1)...(19): siRNA sense strand
cagcagggacugguaagaa

SEQ ID NO: 1910928 - RNA, 19 nt, Homo sapiens
  misc_RNA (1)...(19): siRNA sense strand
ggucuuauuuuagguguaa

SEQ ID NO: 1910929 - RNA, 19 nt, Homo sapiens
  misc_RNA (1)...(19): siRNA sense strand
agaagcuggucuuauuuua

SEQ ID NO: 1910930 - RNA, 19 nt, Homo sapiens
  misc_RNA (1)...(19): siRNA sense strand
uagaaacaaccaccaaaca

SEQ ID NO: 1910931 - RNA, 19 nt, Homo sapiens
  misc_RNA (1)...(19): siRNA sense strand
caaaagacuugcuagaaac

SEQ ID NO: 1910932 - RNA, 19 nt, Homo sapiens
  misc_RNA (1)...(19): siRNA sense strand
aaacugcaaagaagauuuc

SEQ ID NO: 1910933 - RNA, 19 nt, Homo sapiens
  misc_RNA (1)...(19): siRNA sense strand
aaggaggauuugaacagaa

SEQ ID NO: 1910934 - RNA, 19 nt, Homo sapiens
  misc_RNA (1)...(19): siRNA sense strand
gagaagcuggucuuauuuu

SEQ ID NO: 1910935 - RNA, 19 nt, Homo sapiens
  misc_RNA (1)...(19): siRNA sense strand
ggugucaucgcuccaguug

SEQ ID NO: 1910936 - RNA, 19 nt, Homo sapiens
  misc_RNA (1)...(19): siRNA sense strand
gauuagaacagcucauagg

SEQ ID NO: 1910937 - RNA, 19 nt, Homo sapiens
  misc_RNA (1)...(19): siRNA sense strand
agaaacaaccaccaaacau

SEQ ID NO: 1910938 - RNA, 19 nt, Homo sapiens
  misc_RNA (1)...(19): siRNA sense strand
cagaaacugcaaagaagau

SEQ ID NO: 1910939 - RNA, 19 nt, Homo sapiens
  misc_RNA (1)...(19): siRNA sense strand
gaaucacccagauaaaggu

SEQ ID NO: 1910940 - RNA, 19 nt, Homo sapiens
  misc_RNA (1)...(19): siRNA sense strand
cuacuauaaaggaggauuu

SEQ ID NO: 1910941 - RNA, 19 nt, Homo sapiens
  misc_RNA (1)...(19): siRNA sense strand
acagaaacugcaaagaaga

SEQ ID NO: 1910942 - RNA, 19 nt, Homo sapiens
  misc_RNA (1)...(19): siRNA sense strand
ugaaucacccagauaaagg

SEQ ID NO: 1910943 - RNA, 19 nt, Homo sapiens
  misc_RNA (1)...(19): siRNA sense strand
caucugcuggcaaggcuaa

SEQ ID NO: 1910944 - RNA, 19 nt, Homo sapiens
  misc_RNA (1)...(19): siRNA sense strand
gcagggacugguaagaagu

SEQ ID NO: 1910945 - RNA, 19 nt, Homo sapiens
  misc_RNA (1)...(19): siRNA sense strand
gaaaccucuagaacaaguu

SEQ ID NO: 1910946 - RNA, 19 nt, Homo sapiens
  misc_RNA (1)...(19): siRNA sense strand
gcuguaggacuggguguug

SEQ ID NO: 1910947 - RNA, 19 nt, Homo sapiens
  misc_RNA (1)...(19): siRNA sense strand
uauaaaggaggauuugaac

SEQ ID NO: 1910948 - RNA, 19 nt, Homo sapiens
  misc_RNA (1)...(19): siRNA sense strand
ucuggaaaccucuagaaca

SEQ ID NO: 1910949 - RNA, 19 nt, Homo sapiens
  misc_RNA (1)...(19): siRNA sense strand
ccaaaucucuccugcugaa

SEQ ID NO: 1910950 - RNA, 19 nt, Homo sapiens
  misc_RNA (1)...(19): siRNA sense strand
gagaggagccuugcuguuu

SEQ ID NO: 1910951 - RNA, 19 nt, Homo sapiens
  misc_RNA (1)...(19): siRNA sense strand
gagccuugcuguuuccaaa

SEQ ID NO: 1910952 - RNA, 19 nt, Homo sapiens
  misc_RNA (1)...(19): siRNA sense strand
guucgaaguuugauaccuu

SEQ ID NO: 1910953 - RNA, 19 nt, Homo sapiens
  misc_RNA (1)...(19): siRNA sense strand
ggagaggagccuugcuguu

SEQ ID NO: 1910954 - RNA, 19 nt, Homo sapiens
  misc_RNA (1)...(19): siRNA sense strand
cggcuaguuucaccuggua

SEQ ID NO: 1910955 - RNA, 19 nt, Homo sapiens
  misc_RNA (1)...(19): siRNA sense strand
agaggagccuugcuguuuc

SEQ ID NO: 1910956 - RNA, 19 nt, Homo sapiens
  misc_RNA (1)...(19): siRNA sense strand
gaacucccggaacgguuga

SEQ ID NO: 1910957 - RNA, 19 nt, Homo sapiens
  misc_RNA (1)...(19): siRNA sense strand
ugaagagacauuggagcua

SEQ ID NO: 1910958 - RNA, 19 nt, Homo sapiens
  misc_RNA (1)...(19): siRNA sense strand
gccuugcuguuuccaaauc

SEQ ID NO: 1910959 - RNA, 19 nt, Homo sapiens
  misc_RNA (1)...(19): siRNA sense strand
ugucauguucgaaguuuga

SEQ ID NO: 1910960 - RNA, 19 nt, Homo sapiens
  misc_RNA (1)...(19): siRNA sense strand
cuugucauguucgaaguuu

SEQ ID NO: 1910961 - RNA, 19 nt, Homo sapiens
  misc_RNA (1)...(19): siRNA sense strand
uccucgagcugcaggcuuu

SEQ ID NO: 1910962 - RNA, 19 nt, Homo sapiens
  misc_RNA (1)...(19): siRNA sense strand
ggaccagacaccagaacuc

SEQ ID NO: 1910963 - RNA, 19 nt, Homo sapiens
  misc_RNA (1)...(19): siRNA sense strand
gaggagccuugcuguuucc

SEQ ID NO: 1910964 - RNA, 19 nt, Homo sapiens
  misc_RNA (1)...(19): siRNA sense strand
aguuucaccugguaauugu

SEQ ID NO: 1910965 - RNA, 19 nt, Homo sapiens
  misc_RNA (1)...(19): siRNA sense strand
ccaaaucucuccugcugaa

SEQ ID NO: 1910966 - RNA, 19 nt, Homo sapiens
  misc_RNA (1)...(19): siRNA sense strand
gagaggagccuugcuguuu

SEQ ID NO: 1910967 - RNA, 19 nt, Homo sapiens
  misc_RNA (1)...(19): siRNA sense strand
gagccuugcuguuuccaaa

SEQ ID NO: 1910968 - RNA, 19 nt, Homo sapiens
  misc_RNA (1)...(19): siRNA sense strand
guucgaaguuugauaccuu

SEQ ID NO: 1910969 - RNA, 19 nt, Homo sapiens
  misc_RNA (1)...(19): siRNA sense strand
ggagaggagccuugcuguu

SEQ ID NO: 1910970 - RNA, 19 nt, Homo sapiens
  misc_RNA (1)...(19): siRNA sense strand
cggcuaguuucaccuggua

SEQ ID NO: 1910971 - RNA, 19 nt, Homo sapiens
  misc_RNA (1)...(19): siRNA sense strand
agaggagccuugcuguuuc

SEQ ID NO: 1910972 - RNA, 19 nt, Homo sapiens
  misc_RNA (1)...(19): siRNA sense strand
gaacucccggaacgguuga

SEQ ID NO: 1910973 - RNA, 19 nt, Homo sapiens
  misc_RNA (1)...(19): siRNA sense strand
ugaagagacauuggagcua

SEQ ID NO: 1910974 - RNA, 19 nt, Homo sapiens
  misc_RNA (1)...(19): siRNA sense strand
gccuugcuguuuccaaauc

SEQ ID NO: 1910975 - RNA, 19 nt, Homo sapiens
  misc_RNA (1)...(19): siRNA sense strand
ugucauguucgaaguuuga

SEQ ID NO: 1910976 - RNA, 19 nt, Homo sapiens
  misc_RNA (1)...(19): siRNA sense strand
cuugucauguucgaaguuu

SEQ ID NO: 1910977 - RNA, 19 nt, Homo sapiens
  misc_RNA (1)...(19): siRNA sense strand
uccucgagcugcaggcuuu

SEQ ID NO: 1910978 - RNA, 19 nt, Homo sapiens
  misc_RNA (1)...(19): siRNA sense strand
ggaccagacaccagaacuc

SEQ ID NO: 1910979 - RNA, 19 nt, Homo sapiens
  misc_RNA (1)...(19): siRNA sense strand
gaggagccuugcuguuucc

SEQ ID NO: 1910980 - RNA, 19 nt, Homo sapiens
  misc_RNA (1)...(19): siRNA sense strand
aguuucaccugguaauugu

SEQ ID NO: 1910981 - RNA, 19 nt, Homo sapiens
  misc_RNA (1)...(19): siRNA sense strand
gcacagacccugccaaguu

SEQ ID NO: 1910982 - RNA, 19 nt, Homo sapiens
  misc_RNA (1)...(19): siRNA sense strand
ggauaaagccaauggauac

SEQ ID NO: 1910983 - RNA, 19 nt, Homo sapiens
  misc_RNA (1)...(19): siRNA sense strand
caugaugucugccgcaaug

SEQ ID NO: 1910984 - RNA, 19 nt, Homo sapiens
  misc_RNA (1)...(19): siRNA sense strand
uaaagccaauggauacugu

SEQ ID NO: 1910985 - RNA, 19 nt, Homo sapiens
  misc_RNA (1)...(19): siRNA sense strand
gcucagggaagaccacgua

SEQ ID NO: 1910986 - RNA, 19 nt, Homo sapiens
  misc_RNA (1)...(19): siRNA sense strand
caaguucauuucaguacug

SEQ ID NO: 1910987 - RNA, 19 nt, Homo sapiens
  misc_RNA (1)...(19): siRNA sense strand
caaccuccuuuccaagaug

SEQ ID NO: 1910988 - RNA, 19 nt, Homo sapiens
  misc_RNA (1)...(19): siRNA sense strand
ggacuacuacacagagguu

SEQ ID NO: 1910989 - RNA, 19 nt, Homo sapiens
  misc_RNA (1)...(19): siRNA sense strand
uagugcagcucaucgaaga

SEQ ID NO: 1910990 - RNA, 19 nt, Homo sapiens
  misc_RNA (1)...(19): siRNA sense strand
cacagacccugccaaguuc

SEQ ID NO: 1910991 - RNA, 19 nt, Homo sapiens
  misc_RNA (1)...(19): siRNA sense strand
ccuucaaccuggacuacua

SEQ ID NO: 1910992 - RNA, 19 nt, Homo sapiens
  misc_RNA (1)...(19): siRNA sense strand
ggaccucuccuaccugcuu

SEQ ID NO: 1910993 - RNA, 19 nt, Homo sapiens
  misc_RNA (1)...(19): siRNA sense strand
uggauaaagccaauggaua

SEQ ID NO: 1910994 - RNA, 19 nt, Homo sapiens
  misc_RNA (1)...(19): siRNA sense strand
ggagccgacuuccauuucu

SEQ ID NO: 1910995 - RNA, 19 nt, Homo sapiens
  misc_RNA (1)...(19): siRNA sense strand
cgcagcaucuucucccaaa

SEQ ID NO: 1910996 - RNA, 19 nt, Homo sapiens
  misc_RNA (1)...(19): siRNA sense strand
caaccuggacuacuacaca

SEQ ID NO: 1910997 - RNA, 19 nt, Homo sapiens
  misc_RNA (1)...(19): siRNA sense strand
cuauagccuugucuccuuu

SEQ ID NO: 1910998 - RNA, 19 nt, Homo sapiens
  misc_RNA (1)...(19): siRNA sense strand
guaccucccuggccaccau

SEQ ID NO: 1910999 - RNA, 19 nt, Homo sapiens
  misc_RNA (1)...(19): siRNA sense strand
ccucguggauucucacuac

SEQ ID NO: 1911000 - RNA, 19 nt, Homo sapiens
  misc_RNA (1)...(19): siRNA sense strand
aggaagccaugcagcugua

SEQ ID NO: 1911001 - RNA, 19 nt, Homo sapiens
  misc_RNA (1)...(19): siRNA sense strand
acaucaaccuccuuuccaa

SEQ ID NO: 1911002 - RNA, 19 nt, Homo sapiens
  misc_RNA (1)...(19): siRNA sense strand
cagcaucuucucccaaaug

SEQ ID NO: 1911003 - RNA, 19 nt, Homo sapiens
  misc_RNA (1)...(19): siRNA sense strand
acuauagccuugucuccuu

SEQ ID NO: 1911004 - RNA, 19 nt, Homo sapiens
  misc_RNA (1)...(19): siRNA sense strand
cgaagacuauagccuuguc

SEQ ID NO: 1911005 - RNA, 19 nt, Homo sapiens
  misc_RNA (1)...(19): siRNA sense strand
ccaagauggaccucauuga

SEQ ID NO: 1911006 - RNA, 19 nt, Homo sapiens
  misc_RNA (1)...(19): siRNA sense strand
gccaauggauacuguuucg

SEQ ID NO: 1911007 - RNA, 19 nt, Homo sapiens
  misc_RNA (1)...(19): siRNA sense strand
ccugcaggcuguggauaaa

SEQ ID NO: 1911008 - RNA, 19 nt, Homo sapiens
  misc_RNA (1)...(19): siRNA sense strand
gcagcaucuucucccaaau

SEQ ID NO: 1911009 - RNA, 19 nt, Homo sapiens
  misc_RNA (1)...(19): siRNA sense strand
gagccgacuuccauuucuc

SEQ ID NO: 1911010 - RNA, 19 nt, Homo sapiens
  misc_RNA (1)...(19): siRNA sense strand
gcagcucaucgaagacuau

SEQ ID NO: 1911011 - RNA, 19 nt, Homo sapiens
  misc_RNA (1)...(19): siRNA sense strand
gacccugccaaguucauuu

SEQ ID NO: 1911012 - RNA, 19 nt, Homo sapiens
  misc_RNA (1)...(19): siRNA sense strand
ucaaccuccuuuccaagau

SEQ ID NO: 1911013 - RNA, 19 nt, Homo sapiens
  misc_RNA (1)...(19): siRNA sense strand
uugaccaccuggcuucuga

SEQ ID NO: 1911014 - RNA, 19 nt, Homo sapiens
  misc_RNA (1)...(19): siRNA sense strand
gggagccgacuuccauuuc

SEQ ID NO: 1911015 - RNA, 19 nt, Homo sapiens
  misc_RNA (1)...(19): siRNA sense strand
cagggaagaccacguacug

SEQ ID NO: 1911016 - RNA, 19 nt, Homo sapiens
  misc_RNA (1)...(19): siRNA sense strand
ccaaguucauuucaguacu

SEQ ID NO: 1911017 - RNA, 19 nt, Homo sapiens
  misc_RNA (1)...(19): siRNA sense strand
cuuuaucccucucaacauc

SEQ ID NO: 1911018 - RNA, 19 nt, Homo sapiens
  misc_RNA (1)...(19): siRNA sense strand
gcuagugcagcucaucgaa

SEQ ID NO: 1911019 - RNA, 19 nt, Homo sapiens
  misc_RNA (1)...(19): siRNA sense strand
guucauuucaguacugugu

SEQ ID NO: 1911020 - RNA, 19 nt, Homo sapiens
  misc_RNA (1)...(19): siRNA sense strand
cugccaaguucauuucagu

SEQ ID NO: 1911021 - RNA, 19 nt, Homo sapiens
  misc_RNA (1)...(19): siRNA sense strand
gagcauacggcaccaauua

SEQ ID NO: 1911022 - RNA, 19 nt, Homo sapiens
  misc_RNA (1)...(19): siRNA sense strand
gaacaaggcaaagcaauaa

SEQ ID NO: 1911023 - RNA, 19 nt, Homo sapiens
  misc_RNA (1)...(19): siRNA sense strand
gcagauccaugcaaauugu

SEQ ID NO: 1911024 - RNA, 19 nt, Homo sapiens
  misc_RNA (1)...(19): siRNA sense strand
agaagacgcugggaauuaa

SEQ ID NO: 1911025 - RNA, 19 nt, Homo sapiens
  misc_RNA (1)...(19): siRNA sense strand
gaaugugcgucgucgcuuu

SEQ ID NO: 1911026 - RNA, 19 nt, Homo sapiens
  misc_RNA (1)...(19): siRNA sense strand
gguacuagaugacaagaau

SEQ ID NO: 1911027 - RNA, 19 nt, Homo sapiens
  misc_RNA (1)...(19): siRNA sense strand
gaauuaaacuuccuuuccu

SEQ ID NO: 1911028 - RNA, 19 nt, Homo sapiens
  misc_RNA (1)...(19): siRNA sense strand
gcaagccucugcaaaucug

SEQ ID NO: 1911029 - RNA, 19 nt, Homo sapiens
  misc_RNA (1)...(19): siRNA sense strand
guaagcaccacauauauca

SEQ ID NO: 1911030 - RNA, 19 nt, Homo sapiens
  misc_RNA (1)...(19): siRNA sense strand
aagaagacgcugggaauua

SEQ ID NO: 1911031 - RNA, 19 nt, Homo sapiens
  misc_RNA (1)...(19): siRNA sense strand
cagacagacucuacucaga

SEQ ID NO: 1911032 - RNA, 19 nt, Homo sapiens
  misc_RNA (1)...(19): siRNA sense strand
cagcaagccucugcaaauc

SEQ ID NO: 1911033 - RNA, 19 nt, Homo sapiens
  misc_RNA (1)...(19): siRNA sense strand
aaacuuccuuuccuuguca

SEQ ID NO: 1911034 - RNA, 19 nt, Homo sapiens
  misc_RNA (1)...(19): siRNA sense strand
agaacaaggcaaagcaaua

SEQ ID NO: 1911035 - RNA, 19 nt, Homo sapiens
  misc_RNA (1)...(19): siRNA sense strand
gaagugcagguacuagaug

SEQ ID NO: 1911036 - RNA, 19 nt, Homo sapiens
  misc_RNA (1)...(19): siRNA sense strand
gagauugaagggacaaaug

SEQ ID NO: 1911037 - RNA, 19 nt, Homo sapiens
  misc_RNA (1)...(19): siRNA sense strand
ccaagaagacgcugggaau

SEQ ID NO: 1911038 - RNA, 19 nt, Homo sapiens
  misc_RNA (1)...(19): siRNA sense strand
gaagacgcugggaauuaaa

SEQ ID NO: 1911039 - RNA, 19 nt, Homo sapiens
  misc_RNA (1)...(19): siRNA sense strand
gacagacucuacucagaag

SEQ ID NO: 1911040 - RNA, 19 nt, Homo sapiens
  misc_RNA (1)...(19): siRNA sense strand
gauugaagggacaaaugua

SEQ ID NO: 1911041 - RNA, 19 nt, Homo sapiens
  misc_RNA (1)...(19): siRNA sense strand
caagaagacgcugggaauu

SEQ ID NO: 1911042 - RNA, 19 nt, Homo sapiens
  misc_RNA (1)...(19): siRNA sense strand
uaaacuuccuuuccuuguc

SEQ ID NO: 1911043 - RNA, 19 nt, Homo sapiens
  misc_RNA (1)...(19): siRNA sense strand
agacagacucuacucagaa

SEQ ID NO: 1911044 - RNA, 19 nt, Homo sapiens
  misc_RNA (1)...(19): siRNA sense strand
gagcaccacccgggucaaa

SEQ ID NO: 1911045 - RNA, 19 nt, Homo sapiens
  misc_RNA (1)...(19): siRNA sense strand
gcauacggcaccaauuaca

SEQ ID NO: 1911046 - RNA, 19 nt, Homo sapiens
  misc_RNA (1)...(19): siRNA sense strand
guacggaauggccacauca

SEQ ID NO: 1911047 - RNA, 19 nt, Homo sapiens
  misc_RNA (1)...(19): siRNA sense strand
gguacggaauggccacauc

SEQ ID NO: 1911048 - RNA, 19 nt, Homo sapiens
  misc_RNA (1)...(19): siRNA sense strand
gcaccacauauaucacaug

SEQ ID NO: 1911049 - RNA, 19 nt, Homo sapiens
  misc_RNA (1)...(19): siRNA sense strand
gcagguacuagaugacaag

SEQ ID NO: 1911050 - RNA, 19 nt, Homo sapiens
  misc_RNA (1)...(19): siRNA sense strand
cgaagugcagguacuagau

SEQ ID NO: 1911051 - RNA, 19 nt, Homo sapiens
  misc_RNA (1)...(19): siRNA sense strand
aagugcagguacuagauga

SEQ ID NO: 1911052 - RNA, 19 nt, Homo sapiens
  misc_RNA (1)...(19): siRNA sense strand
gaagggacaaauguaagca

SEQ ID NO: 1911053 - RNA, 19 nt, Homo sapiens
  misc_RNA (1)...(19): siRNA sense strand
ccgacggguuuacuucuca

SEQ ID NO: 1911054 - RNA, 19 nt, Homo sapiens
  misc_RNA (1)...(19): siRNA sense strand
caacuugcuagacuucaca

SEQ ID NO: 1911055 - RNA, 19 nt, Homo sapiens
  misc_RNA (1)...(19): siRNA sense strand
cugcaaaucugggacaaaa

SEQ ID NO: 1911056 - RNA, 19 nt, Homo sapiens
  misc_RNA (1)...(19): siRNA sense strand
cggguuuacuucucagaca

SEQ ID NO: 1911057 - RNA, 19 nt, Homo sapiens
  misc_RNA (1)...(19): siRNA sense strand
agacucuacucagaagaug

SEQ ID NO: 1911058 - RNA, 19 nt, Homo sapiens
  misc_RNA (1)...(19): siRNA sense strand
ggaauggccacaucaaaag

SEQ ID NO: 1911059 - RNA, 19 nt, Homo sapiens
  misc_RNA (1)...(19): siRNA sense strand
cagaacaaggcaaagcaau

SEQ ID NO: 1911060 - RNA, 19 nt, Homo sapiens
  misc_RNA (1)...(19): siRNA sense strand
guacuagaugacaagaaug

SEQ ID NO: 1911061 - RNA, 19 nt, Homo sapiens
  misc_RNA (1)...(19): siRNA sense strand
gagaacaacuccucuaauu

SEQ ID NO: 1911062 - RNA, 19 nt, Homo sapiens
  misc_RNA (1)...(19): siRNA sense strand
ugacauaccuggaggacua

SEQ ID NO: 1911063 - RNA, 19 nt, Homo sapiens
  misc_RNA (1)...(19): siRNA sense strand
cagaaacgcugcugaguga

SEQ ID NO: 1911064 - RNA, 19 nt, Homo sapiens
  misc_RNA (1)...(19): siRNA sense strand
gaacaacuccucuaauucu

SEQ ID NO: 1911065 - RNA, 19 nt, Homo sapiens
  misc_RNA (1)...(19): siRNA sense strand
cgacaacucuggacaaguc

SEQ ID NO: 1911066 - RNA, 19 nt, Homo sapiens
  misc_RNA (1)...(19): siRNA sense strand
ggaauacccuggaaucacu

SEQ ID NO: 1911067 - RNA, 19 nt, Homo sapiens
  misc_RNA (1)...(19): siRNA sense strand
caacugaaccuacugaagu

SEQ ID NO: 1911068 - RNA, 19 nt, Homo sapiens
  misc_RNA (1)...(19): siRNA sense strand
ucugagagcuuaccugugu

SEQ ID NO: 1911069 - RNA, 19 nt, Homo sapiens
  misc_RNA (1)...(19): siRNA sense strand
gaaagcagcaacaacugaa

SEQ ID NO: 1911070 - RNA, 19 nt, Homo sapiens
  misc_RNA (1)...(19): siRNA sense strand
gcaagucuauacugcuguu

SEQ ID NO: 1911071 - RNA, 19 nt, Homo sapiens
  misc_RNA (1)...(19): siRNA sense strand
gagagaagagugagaacaa

SEQ ID NO: 1911072 - RNA, 19 nt, Homo sapiens
  misc_RNA (1)...(19): siRNA sense strand
gcacuggaacccacagaaa

SEQ ID NO: 1911073 - RNA, 19 nt, Homo sapiens
  misc_RNA (1)...(19): siRNA sense strand
caagggaaccugacacaga

SEQ ID NO: 1911074 - RNA, 19 nt, Homo sapiens
  misc_RNA (1)...(19): siRNA sense strand
cagaagugaucacaguuga

SEQ ID NO: 1911075 - RNA, 19 nt, Homo sapiens
  misc_RNA (1)...(19): siRNA sense strand
gcaagaggcacuuccugaa

SEQ ID NO: 1911076 - RNA, 19 nt, Homo sapiens
  misc_RNA (1)...(19): siRNA sense strand
gaagugaucacaguugaga

SEQ ID NO: 1911077 - RNA, 19 nt, Homo sapiens
  misc_RNA (1)...(19): siRNA sense strand
acacagaagugaucacagu

SEQ ID NO: 1911078 - RNA, 19 nt, Homo sapiens
  misc_RNA (1)...(19): siRNA sense strand
ggaagagagccuuguggaa

SEQ ID NO: 1911079 - RNA, 19 nt, Homo sapiens
  misc_RNA (1)...(19): siRNA sense strand
gcacuguguuuagucuuga

SEQ ID NO: 1911080 - RNA, 19 nt, Homo sapiens
  misc_RNA (1)...(19): siRNA sense strand
uggaaucacugcagaagau

SEQ ID NO: 1911081 - RNA, 19 nt, Homo sapiens
  misc_RNA (1)...(19): siRNA sense strand
gaggaggaauacccuggaa

SEQ ID NO: 1911082 - RNA, 19 nt, Homo sapiens
  misc_RNA (1)...(19): siRNA sense strand
acagaaagccugccagugu

SEQ ID NO: 1911083 - RNA, 19 nt, Homo sapiens
  misc_RNA (1)...(19): siRNA sense strand
gaaacgcugcugagugaga

SEQ ID NO: 1911084 - RNA, 19 nt, Homo sapiens
  misc_RNA (1)...(19): siRNA sense strand
uguagaacuugaugaagaa

SEQ ID NO: 1911085 - RNA, 19 nt, Homo sapiens
  misc_RNA (1)...(19): siRNA sense strand
ugcaauggauccugaagaa

SEQ ID NO: 1911086 - RNA, 19 nt, Homo sapiens
  misc_RNA (1)...(19): siRNA sense strand
aagggaaccugacacagaa

SEQ ID NO: 1911087 - RNA, 19 nt, Homo sapiens
  misc_RNA (1)...(19): siRNA sense strand
gaaccugacacagaaguga

SEQ ID NO: 1911088 - RNA, 19 nt, Homo sapiens
  misc_RNA (1)...(19): siRNA sense strand
caacaacugaaccuacuga

SEQ ID NO: 1911089 - RNA, 19 nt, Homo sapiens
  misc_RNA (1)...(19): siRNA sense strand
aagagagccuuguggaaga

SEQ ID NO: 1911090 - RNA, 19 nt, Homo sapiens
  misc_RNA (1)...(19): siRNA sense strand
ggaggaauacccuggaauc

SEQ ID NO: 1911091 - RNA, 19 nt, Homo sapiens
  misc_RNA (1)...(19): siRNA sense strand
ugagugagaaggagauaaa

SEQ ID NO: 1911092 - RNA, 19 nt, Homo sapiens
  misc_RNA (1)...(19): siRNA sense strand
ggcagcagauugcaaugga

SEQ ID NO: 1911093 - RNA, 19 nt, Homo sapiens
  misc_RNA (1)...(19): siRNA sense strand
agucagaggaggaggaaua

SEQ ID NO: 1911094 - RNA, 19 nt, Homo sapiens
  misc_RNA (1)...(19): siRNA sense strand
uuguagaacuugaugaaga

SEQ ID NO: 1911095 - RNA, 19 nt, Homo sapiens
  misc_RNA (1)...(19): siRNA sense strand
gagaaauccagcccugcua

SEQ ID NO: 1911096 - RNA, 19 nt, Homo sapiens
  misc_RNA (1)...(19): siRNA sense strand
gugagaacaacuccucuaa

SEQ ID NO: 1911097 - RNA, 19 nt, Homo sapiens
  misc_RNA (1)...(19): siRNA sense strand
caauggauccugaagaagu

SEQ ID NO: 1911098 - RNA, 19 nt, Homo sapiens
  misc_RNA (1)...(19): siRNA sense strand
ggaaucacugcagaagaua

SEQ ID NO: 1911099 - RNA, 19 nt, Homo sapiens
  misc_RNA (1)...(19): siRNA sense strand
ggcacuguguuuagucuug

SEQ ID NO: 1911100 - RNA, 19 nt, Homo sapiens
  misc_RNA (1)...(19): siRNA sense strand
uaucaggcauuucgggaau

SEQ ID NO: 1911101 - RNA, 19 nt, Homo sapiens
  misc_RNA (1)...(19): siRNA sense strand
gaucacaguugagaaaucc

SEQ ID NO: 1911102 - RNA, 19 nt, Homo sapiens
  misc_RNA (1)...(19): siRNA sense strand
ugaaagcagcaacaacuga

SEQ ID NO: 1911103 - RNA, 19 nt, Homo sapiens
  misc_RNA (1)...(19): siRNA sense strand
guacaucauucagcaaggu

SEQ ID NO: 1911104 - RNA, 19 nt, Homo sapiens
  misc_RNA (1)...(19): siRNA sense strand
gagcuggagagaagaguga

SEQ ID NO: 1911105 - RNA, 19 nt, Homo sapiens
  misc_RNA (1)...(19): siRNA sense strand
ugagccagccagugacaua

SEQ ID NO: 1911106 - RNA, 19 nt, Homo sapiens
  misc_RNA (1)...(19): siRNA sense strand
aaacgcugcugagugagaa

SEQ ID NO: 1911107 - RNA, 19 nt, Homo sapiens
  misc_RNA (1)...(19): siRNA sense strand
ggugaaagcagcaacaacu

SEQ ID NO: 1911108 - RNA, 19 nt, Homo sapiens
  misc_RNA (1)...(19): siRNA sense strand
gccagccagugacauauca

SEQ ID NO: 1911109 - RNA, 19 nt, Homo sapiens
  misc_RNA (1)...(19): siRNA sense strand
gcagcagauugcaauggau

SEQ ID NO: 1911110 - RNA, 19 nt, Homo sapiens
  misc_RNA (1)...(19): siRNA sense strand
ugacauaucaggcauuucg

SEQ ID NO: 1911111 - RNA, 19 nt, Homo sapiens
  misc_RNA (1)...(19): siRNA sense strand
gaggaauacccuggaauca

SEQ ID NO: 1911112 - RNA, 19 nt, Homo sapiens
  misc_RNA (1)...(19): siRNA sense strand
gaaauccagcccugcuaca

SEQ ID NO: 1911113 - RNA, 19 nt, Homo sapiens
  misc_RNA (1)...(19): siRNA sense strand
uguuuagucuugagucaga

SEQ ID NO: 1911114 - RNA, 19 nt, Homo sapiens
  misc_RNA (1)...(19): siRNA sense strand
ggagagaagagugagaaca

SEQ ID NO: 1911115 - RNA, 19 nt, Homo sapiens
  misc_RNA (1)...(19): siRNA sense strand
ggacuauucggcagaguac

SEQ ID NO: 1911116 - RNA, 19 nt, Homo sapiens
  misc_RNA (1)...(19): siRNA sense strand
ccugcuacaucucuguuug

SEQ ID NO: 1911117 - RNA, 19 nt, Homo sapiens
  misc_RNA (1)...(19): siRNA sense strand
gcacguggagaaagaagag

SEQ ID NO: 1911118 - RNA, 19 nt, Homo sapiens
  misc_RNA (1)...(19): siRNA sense strand
agugacauaucaggcauuu

SEQ ID NO: 1911119 - RNA, 19 nt, Homo sapiens
  misc_RNA (1)...(19): siRNA sense strand
gcagaagauagcaaugaca

SEQ ID NO: 1911120 - RNA, 19 nt, Homo sapiens
  misc_RNA (1)...(19): siRNA sense strand
gacaagggaaccugacaca

SEQ ID NO: 1911121 - RNA, 19 nt, Homo sapiens
  misc_RNA (1)...(19): siRNA sense strand
aauggauccugaagaagug

SEQ ID NO: 1911122 - RNA, 19 nt, Homo sapiens
  misc_RNA (1)...(19): siRNA sense strand
gauaaacgcaagggaagag

SEQ ID NO: 1911123 - RNA, 19 nt, Homo sapiens
  misc_RNA (1)...(19): siRNA sense strand
agaacaacuccucuaauuc

SEQ ID NO: 1911124 - RNA, 19 nt, Homo sapiens
  misc_RNA (1)...(19): siRNA sense strand
cggcagaguacaucauuca

SEQ ID NO: 1911125 - RNA, 19 nt, Homo sapiens
  misc_RNA (1)...(19): siRNA sense strand
ugucugagggcaagucuau

SEQ ID NO: 1911126 - RNA, 19 nt, Homo sapiens
  misc_RNA (1)...(19): siRNA sense strand
agaacuugaugaagaagag

SEQ ID NO: 1911127 - RNA, 19 nt, Homo sapiens
  misc_RNA (1)...(19): siRNA sense strand
ugaucacaguugagaaauc

SEQ ID NO: 1911128 - RNA, 19 nt, Homo sapiens
  misc_RNA (1)...(19): siRNA sense strand
gagaagagugagaacaacu

SEQ ID NO: 1911129 - RNA, 19 nt, Homo sapiens
  misc_RNA (1)...(19): siRNA sense strand
cagaagauagcaaugacau

SEQ ID NO: 1911130 - RNA, 19 nt, Homo sapiens
  misc_RNA (1)...(19): siRNA sense strand
ugagaacaacuccucuaau

SEQ ID NO: 1911131 - RNA, 19 nt, Homo sapiens
  misc_RNA (1)...(19): siRNA sense strand
gcagcaacaacugaaccua

SEQ ID NO: 1911132 - RNA, 19 nt, Homo sapiens
  misc_RNA (1)...(19): siRNA sense strand
acagaagugaucacaguug

SEQ ID NO: 1911133 - RNA, 19 nt, Homo sapiens
  misc_RNA (1)...(19): siRNA sense strand
guuuguagaacuugaugaa

SEQ ID NO: 1911134 - RNA, 19 nt, Homo sapiens
  misc_RNA (1)...(19): siRNA sense strand
gaaucacugcagaagauag

SEQ ID NO: 1911135 - RNA, 19 nt, Homo sapiens
  misc_RNA (1)...(19): siRNA sense strand
gaggugaaagcagcaacaa

SEQ ID NO: 1911136 - RNA, 19 nt, Homo sapiens
  misc_RNA (1)...(19): siRNA sense strand
ugaagaagaggugaaagca

SEQ ID NO: 1911137 - RNA, 19 nt, Homo sapiens
  misc_RNA (1)...(19): siRNA sense strand
ccucuaauucugacauugu

SEQ ID NO: 1911138 - RNA, 19 nt, Homo sapiens
  misc_RNA (1)...(19): siRNA sense strand
ccacuuccuggcagucuga

SEQ ID NO: 1911139 - RNA, 19 nt, Homo sapiens
  misc_RNA (1)...(19): siRNA sense strand
cuccaacugugaccacuuc

SEQ ID NO: 1911140 - RNA, 19 nt, Homo sapiens
  misc_RNA (1)...(19): siRNA sense strand
ccagagucuccaacuguga

SEQ ID NO: 1911141 - RNA, 19 nt, Homo sapiens
  misc_RNA (1)...(19): siRNA sense strand
cgucugagggcaagucuag

SEQ ID NO: 1911142 - RNA, 19 nt, Homo sapiens
  misc_RNA (1)...(19): siRNA sense strand
gaagaggugaaagcagcaa

SEQ ID NO: 1911143 - RNA, 19 nt, Homo sapiens
  misc_RNA (1)...(19): siRNA sense strand
ugaugaagaagaggugaaa

SEQ ID NO: 1911144 - RNA, 19 nt, Homo sapiens
  misc_RNA (1)...(19): siRNA sense strand
agugaucacaguugagaaa

SEQ ID NO: 1911145 - RNA, 19 nt, Homo sapiens
  misc_RNA (1)...(19): siRNA sense strand
gaagugaaaagcuuagaca

SEQ ID NO: 1911146 - RNA, 19 nt, Homo sapiens
  misc_RNA (1)...(19): siRNA sense strand
cagaguuggcacacagaaa

SEQ ID NO: 1911147 - RNA, 19 nt, Homo sapiens
  misc_RNA (1)...(19): siRNA sense strand
cuggcagucugagagcuua

SEQ ID NO: 1911148 - RNA, 19 nt, Homo sapiens
  misc_RNA (1)...(19): siRNA sense strand
cugcagaagauagcaauga

SEQ ID NO: 1911149 - RNA, 19 nt, Homo sapiens
  misc_RNA (1)...(19): siRNA sense strand
gagccagccagugacauau

SEQ ID NO: 1911150 - RNA, 19 nt, Homo sapiens
  misc_RNA (1)...(19): siRNA sense strand
gagaaagacugaacaggaa

SEQ ID NO: 1911151 - RNA, 19 nt, Homo sapiens
  misc_RNA (1)...(19): siRNA sense strand
ggagaaacccuaugaaugu

SEQ ID NO: 1911152 - RNA, 19 nt, Homo sapiens
  misc_RNA (1)...(19): siRNA sense strand
gagagaagcgagaaauaua

SEQ ID NO: 1911153 - RNA, 19 nt, Homo sapiens
  misc_RNA (1)...(19): siRNA sense strand
gaauguagcaagagcuuua

SEQ ID NO: 1911154 - RNA, 19 nt, Homo sapiens
  misc_RNA (1)...(19): siRNA sense strand
gagaaacccuaugaaugua

SEQ ID NO: 1911155 - RNA, 19 nt, Homo sapiens
  misc_RNA (1)...(19): siRNA sense strand
ggauguagcuguguacuuc

SEQ ID NO: 1911156 - RNA, 19 nt, Homo sapiens
  misc_RNA (1)...(19): siRNA sense strand
uaaagaagccuaugaacga

SEQ ID NO: 1911157 - RNA, 19 nt, Homo sapiens
  misc_RNA (1)...(19): siRNA sense strand
agccagagcucacaccuua

SEQ ID NO: 1911158 - RNA, 19 nt, Homo sapiens
  misc_RNA (1)...(19): siRNA sense strand
gaagcgagaaauauaauga

SEQ ID NO: 1911159 - RNA, 19 nt, Homo sapiens
  misc_RNA (1)...(19): siRNA sense strand
gagagagaagcgagaaaua

SEQ ID NO: 1911160 - RNA, 19 nt, Homo sapiens
  misc_RNA (1)...(19): siRNA sense strand
agcaggagcucaacccuua

SEQ ID NO: 1911161 - RNA, 19 nt, Homo sapiens
  misc_RNA (1)...(19): siRNA sense strand
gaaaagcccuaugaaugua

SEQ ID NO: 1911162 - RNA, 19 nt, Homo sapiens
  misc_RNA (1)...(19): siRNA sense strand
agcaagagcuuuaaucgaa

SEQ ID NO: 1911163 - RNA, 19 nt, Homo sapiens
  misc_RNA (1)...(19): siRNA sense strand
gagaugugaugcuggagaa

SEQ ID NO: 1911164 - RNA, 19 nt, Homo sapiens
  misc_RNA (1)...(19): siRNA sense strand
ggaaggaguggaagcguuu

SEQ ID NO: 1911165 - RNA, 19 nt, Homo sapiens
  misc_RNA (1)...(19): siRNA sense strand
gaaacccuaugaauguaau

SEQ ID NO: 1911166 - RNA, 19 nt, Homo sapiens
  misc_RNA (1)...(19): siRNA sense strand
gggaaaaccuucagcugua

SEQ ID NO: 1911167 - RNA, 19 nt, Homo sapiens
  misc_RNA (1)...(19): siRNA sense strand
ccauaagugugaugaaugu

SEQ ID NO: 1911168 - RNA, 19 nt, Homo sapiens
  misc_RNA (1)...(19): siRNA sense strand
gggagaaacccuaugaaug

SEQ ID NO: 1911169 - RNA, 19 nt, Homo sapiens
  misc_RNA (1)...(19): siRNA sense strand
gaacuucagaccuuauuca

SEQ ID NO: 1911170 - RNA, 19 nt, Homo sapiens
  misc_RNA (1)...(19): siRNA sense strand
gaagacacaagaucacaug

SEQ ID NO: 1911171 - RNA, 19 nt, Homo sapiens
  misc_RNA (1)...(19): siRNA sense strand
cuucagaccuuauucaaca

SEQ ID NO: 1911172 - RNA, 19 nt, Homo sapiens
  misc_RNA (1)...(19): siRNA sense strand
aaccuuaucucacaucaga

SEQ ID NO: 1911173 - RNA, 19 nt, Homo sapiens
  misc_RNA (1)...(19): siRNA sense strand
ggucucaaguuuaaagaag

SEQ ID NO: 1911174 - RNA, 19 nt, Homo sapiens
  misc_RNA (1)...(19): siRNA sense strand
uaaucgaacuucagaccuu

SEQ ID NO: 1911175 - RNA, 19 nt, Homo sapiens
  misc_RNA (1)...(19): siRNA sense strand
gagcuuuaaucgaacuuca

SEQ ID NO: 1911176 - RNA, 19 nt, Homo sapiens
  misc_RNA (1)...(19): siRNA sense strand
ggaaaagcccuaugaaugu

SEQ ID NO: 1911177 - RNA, 19 nt, Homo sapiens
  misc_RNA (1)...(19): siRNA sense strand
gagaagcgagaaauauaau

SEQ ID NO: 1911178 - RNA, 19 nt, Homo sapiens
  misc_RNA (1)...(19): siRNA sense strand
aggcugaucucguaucuca

SEQ ID NO: 1911179 - RNA, 19 nt, Homo sapiens
  misc_RNA (1)...(19): siRNA sense strand
cucagggucucaaguuuaa

SEQ ID NO: 1911180 - RNA, 19 nt, Homo sapiens
  misc_RNA (1)...(19): siRNA sense strand
aauccacacuggugagaaa

SEQ ID NO: 1911181 - RNA, 19 nt, Homo sapiens
  misc_RNA (1)...(19): siRNA sense strand
ccagagcucacaccuuauu

SEQ ID NO: 1911182 - RNA, 19 nt, Homo sapiens
  misc_RNA (1)...(19): siRNA sense strand
aaucgaacuucagaccuua

SEQ ID NO: 1911183 - RNA, 19 nt, Homo sapiens
  misc_RNA (1)...(19): siRNA sense strand
agagaagcgagaaauauaa

SEQ ID NO: 1911184 - RNA, 19 nt, Homo sapiens
  misc_RNA (1)...(19): siRNA sense strand
ggagagagaagcgagaaau

SEQ ID NO: 1911185 - RNA, 19 nt, Homo sapiens
  misc_RNA (1)...(19): siRNA sense strand
ccuuaugaauguagugauu

SEQ ID NO: 1911186 - RNA, 19 nt, Homo sapiens
  misc_RNA (1)...(19): siRNA sense strand
acugugaauuccaaccuua

SEQ ID NO: 1911187 - RNA, 19 nt, Homo sapiens
  misc_RNA (1)...(19): siRNA sense strand
gggaaaagcccuaugaaug

SEQ ID NO: 1911188 - RNA, 19 nt, Homo sapiens
  misc_RNA (1)...(19): siRNA sense strand
gagaauuacgggaaugugu

SEQ ID NO: 1911189 - RNA, 19 nt, Homo sapiens
  misc_RNA (1)...(19): siRNA sense strand
gguaaccuuugaggaugua

SEQ ID NO: 1911190 - RNA, 19 nt, Homo sapiens
  misc_RNA (1)...(19): siRNA sense strand
augugaugcuggagaauua

SEQ ID NO: 1911191 - RNA, 19 nt, Homo sapiens
  misc_RNA (1)...(19): siRNA sense strand
ucucagggucucaaguuua

SEQ ID NO: 1911192 - RNA, 19 nt, Homo sapiens
  misc_RNA (1)...(19): siRNA sense strand
cuacugggaagauuucaaa

SEQ ID NO: 1911193 - RNA, 19 nt, Homo sapiens
  misc_RNA (1)...(19): siRNA sense strand
gaugugaugcuggagaauu

SEQ ID NO: 1911194 - RNA, 19 nt, Homo sapiens
  misc_RNA (1)...(19): siRNA sense strand
ugugaugaauguagcaaga

SEQ ID NO: 1911195 - RNA, 19 nt, Homo sapiens
  misc_RNA (1)...(19): siRNA sense strand
agaagccuaugaacgagaa

SEQ ID NO: 1911196 - RNA, 19 nt, Homo sapiens
  misc_RNA (1)...(19): siRNA sense strand
gcugguaaccuuugaggau

SEQ ID NO: 1911197 - RNA, 19 nt, Homo sapiens
  misc_RNA (1)...(19): siRNA sense strand
gaauuccaaccuuaucuca

SEQ ID NO: 1911198 - RNA, 19 nt, Homo sapiens
  misc_RNA (1)...(19): siRNA sense strand
gaauuacgggaauguguuc

SEQ ID NO: 1911199 - RNA, 19 nt, Homo sapiens
  misc_RNA (1)...(19): siRNA sense strand
cgugagaccaggacugaaa

SEQ ID NO: 1911200 - RNA, 19 nt, Homo sapiens
  misc_RNA (1)...(19): siRNA sense strand
gcuggagaauuacgggaau

SEQ ID NO: 1911201 - RNA, 19 nt, Homo sapiens
  misc_RNA (1)...(19): siRNA sense strand
agagagaagcgagaaauau

SEQ ID NO: 1911202 - RNA, 19 nt, Homo sapiens
  misc_RNA (1)...(19): siRNA sense strand
ggaguggaagcguuuggaa

SEQ ID NO: 1911203 - RNA, 19 nt, Homo sapiens
  misc_RNA (1)...(19): siRNA sense strand
caacccuuauucaccauca

SEQ ID NO: 1911204 - RNA, 19 nt, Homo sapiens
  misc_RNA (1)...(19): siRNA sense strand
cuaugaauguaaugagugu

SEQ ID NO: 1911205 - RNA, 19 nt, Homo sapiens
  misc_RNA (1)...(19): siRNA sense strand
cuaugaauguaaugagugu

SEQ ID NO: 1911206 - RNA, 19 nt, Homo sapiens
  misc_RNA (1)...(19): siRNA sense strand
gaccaggacugaaaaugau

SEQ ID NO: 1911207 - RNA, 19 nt, Homo sapiens
  misc_RNA (1)...(19): siRNA sense strand
ggagcucaacccuuauuca

SEQ ID NO: 1911208 - RNA, 19 nt, Homo sapiens
  misc_RNA (1)...(19): siRNA sense strand
caagagcuuuaaucgaacu

SEQ ID NO: 1911209 - RNA, 19 nt, Homo sapiens
  misc_RNA (1)...(19): siRNA sense strand
guuuaaagaagccuaugaa

SEQ ID NO: 1911210 - RNA, 19 nt, Homo sapiens
  misc_RNA (1)...(19): siRNA sense strand
cuguagcucugcccucauu

SEQ ID NO: 1911211 - RNA, 19 nt, Homo sapiens
  misc_RNA (1)...(19): siRNA sense strand
ggacugaaaaugaucaaga

SEQ ID NO: 1911212 - RNA, 19 nt, Homo sapiens
  misc_RNA (1)...(19): siRNA sense strand
gaccuuauucaacaucaga

SEQ ID NO: 1911213 - RNA, 19 nt, Homo sapiens
  misc_RNA (1)...(19): siRNA sense strand
gguccuacugggaagauuu

SEQ ID NO: 1911214 - RNA, 19 nt, Homo sapiens
  misc_RNA (1)...(19): siRNA sense strand
gacugaaaaugaucaagaa

SEQ ID NO: 1911215 - RNA, 19 nt, Homo sapiens
  misc_RNA (1)...(19): siRNA sense strand
uguaaugagugugggaaga

SEQ ID NO: 1911216 - RNA, 19 nt, Homo sapiens
  misc_RNA (1)...(19): siRNA sense strand
gggaagauuucaaaaggau

SEQ ID NO: 1911217 - RNA, 19 nt, Homo sapiens
  misc_RNA (1)...(19): siRNA sense strand
uugaggauguagcugugua

SEQ ID NO: 1911218 - RNA, 19 nt, Homo sapiens
  misc_RNA (1)...(19): siRNA sense strand
gaaacccuacgccugcaau

SEQ ID NO: 1911219 - RNA, 19 nt, Homo sapiens
  misc_RNA (1)...(19): siRNA sense strand
agaaacccuaugaauguaa

SEQ ID NO: 1911220 - RNA, 19 nt, Homo sapiens
  misc_RNA (1)...(19): siRNA sense strand
uuacgggaauguguucuca

SEQ ID NO: 1911221 - RNA, 19 nt, Homo sapiens
  misc_RNA (1)...(19): siRNA sense strand
gaauguguucucacuggau

SEQ ID NO: 1911222 - RNA, 19 nt, Homo sapiens
  misc_RNA (1)...(19): siRNA sense strand
gcuuuaaucgaacuucaga

SEQ ID NO: 1911223 - RNA, 19 nt, Homo sapiens
  misc_RNA (1)...(19): siRNA sense strand
ccaaccuuaucucacauca

SEQ ID NO: 1911224 - RNA, 19 nt, Homo sapiens
  misc_RNA (1)...(19): siRNA sense strand
agaauuacgggaauguguu

SEQ ID NO: 1911225 - RNA, 19 nt, Homo sapiens
  misc_RNA (1)...(19): siRNA sense strand
guagcaagagcuuuaaucg

SEQ ID NO: 1911226 - RNA, 19 nt, Homo sapiens
  misc_RNA (1)...(19): siRNA sense strand
gaaagacugaacaggaaaa

SEQ ID NO: 1911227 - RNA, 19 nt, Homo sapiens
  misc_RNA (1)...(19): siRNA sense strand
caggagcucaacccuuauu

SEQ ID NO: 1911228 - RNA, 19 nt, Homo sapiens
  misc_RNA (1)...(19): siRNA sense strand
ggagacagaccccauaagu

SEQ ID NO: 1911229 - RNA, 19 nt, Homo sapiens
  misc_RNA (1)...(19): siRNA sense strand
auuccaaccuuaucucaca

SEQ ID NO: 1911230 - RNA, 19 nt, Homo sapiens
  misc_RNA (1)...(19): siRNA sense strand
ggaaaaccuucagcuguag

SEQ ID NO: 1911231 - RNA, 19 nt, Homo sapiens
  misc_RNA (1)...(19): siRNA sense strand
caaguuuaaagaagccuau

SEQ ID NO: 1911232 - RNA, 19 nt, Homo sapiens
  misc_RNA (1)...(19): siRNA sense strand
gagcucaacccuuauucac

SEQ ID NO: 1911233 - RNA, 19 nt, Homo sapiens
  misc_RNA (1)...(19): siRNA sense strand
agaaagacugaacaggaaa

SEQ ID NO: 1911234 - RNA, 19 nt, Homo sapiens
  misc_RNA (1)...(19): siRNA sense strand
uagcaagagcuuuaaucga

SEQ ID NO: 1911235 - RNA, 19 nt, Homo sapiens
  misc_RNA (1)...(19): siRNA sense strand
aaagcccuaugaauguaau

SEQ ID NO: 1911236 - RNA, 19 nt, Homo sapiens
  misc_RNA (1)...(19): siRNA sense strand
agacagaccccauaagugu

SEQ ID NO: 1911237 - RNA, 19 nt, Homo sapiens
  misc_RNA (1)...(19): siRNA sense strand
gagaaagacugaacaggaa

SEQ ID NO: 1911238 - RNA, 19 nt, Homo sapiens
  misc_RNA (1)...(19): siRNA sense strand
ggagaaacccuaugaaugu

SEQ ID NO: 1911239 - RNA, 19 nt, Homo sapiens
  misc_RNA (1)...(19): siRNA sense strand
gagagaagcgagaaauaua

SEQ ID NO: 1911240 - RNA, 19 nt, Homo sapiens
  misc_RNA (1)...(19): siRNA sense strand
gaauguagcaagagcuuua

SEQ ID NO: 1911241 - RNA, 19 nt, Homo sapiens
  misc_RNA (1)...(19): siRNA sense strand
gagaaacccuaugaaugua

SEQ ID NO: 1911242 - RNA, 19 nt, Homo sapiens
  misc_RNA (1)...(19): siRNA sense strand
ggauguagcuguguacuuc

SEQ ID NO: 1911243 - RNA, 19 nt, Homo sapiens
  misc_RNA (1)...(19): siRNA sense strand
uaaagaagccuaugaacga

SEQ ID NO: 1911244 - RNA, 19 nt, Homo sapiens
  misc_RNA (1)...(19): siRNA sense strand
agccagagcucacaccuua

SEQ ID NO: 1911245 - RNA, 19 nt, Homo sapiens
  misc_RNA (1)...(19): siRNA sense strand
gaagcgagaaauauaauga

SEQ ID NO: 1911246 - RNA, 19 nt, Homo sapiens
  misc_RNA (1)...(19): siRNA sense strand
gagagagaagcgagaaaua

SEQ ID NO: 1911247 - RNA, 19 nt, Homo sapiens
  misc_RNA (1)...(19): siRNA sense strand
agcaggagcucaacccuua

SEQ ID NO: 1911248 - RNA, 19 nt, Homo sapiens
  misc_RNA (1)...(19): siRNA sense strand
gaaaagcccuaugaaugua

SEQ ID NO: 1911249 - RNA, 19 nt, Homo sapiens
  misc_RNA (1)...(19): siRNA sense strand
agcaagagcuuuaaucgaa

SEQ ID NO: 1911250 - RNA, 19 nt, Homo sapiens
  misc_RNA (1)...(19): siRNA sense strand
gagaugugaugcuggagaa

SEQ ID NO: 1911251 - RNA, 19 nt, Homo sapiens
  misc_RNA (1)...(19): siRNA sense strand
ggaaggaguggaagcguuu

SEQ ID NO: 1911252 - RNA, 19 nt, Homo sapiens
  misc_RNA (1)...(19): siRNA sense strand
gaaacccuaugaauguaau

SEQ ID NO: 1911253 - RNA, 19 nt, Homo sapiens
  misc_RNA (1)...(19): siRNA sense strand
gggaaaaccuucagcugua

SEQ ID NO: 1911254 - RNA, 19 nt, Homo sapiens
  misc_RNA (1)...(19): siRNA sense strand
ccauaagugugaugaaugu

SEQ ID NO: 1911255 - RNA, 19 nt, Homo sapiens
  misc_RNA (1)...(19): siRNA sense strand
gggagaaacccuaugaaug

SEQ ID NO: 1911256 - RNA, 19 nt, Homo sapiens
  misc_RNA (1)...(19): siRNA sense strand
gaacuucagaccuuauuca

SEQ ID NO: 1911257 - RNA, 19 nt, Homo sapiens
  misc_RNA (1)...(19): siRNA sense strand
gaagacacaagaucacaug

SEQ ID NO: 1911258 - RNA, 19 nt, Homo sapiens
  misc_RNA (1)...(19): siRNA sense strand
cuucagaccuuauucaaca

SEQ ID NO: 1911259 - RNA, 19 nt, Homo sapiens
  misc_RNA (1)...(19): siRNA sense strand
aaccuuaucucacaucaga

SEQ ID NO: 1911260 - RNA, 19 nt, Homo sapiens
  misc_RNA (1)...(19): siRNA sense strand
ggucucaaguuuaaagaag

SEQ ID NO: 1911261 - RNA, 19 nt, Homo sapiens
  misc_RNA (1)...(19): siRNA sense strand
uaaucgaacuucagaccuu

SEQ ID NO: 1911262 - RNA, 19 nt, Homo sapiens
  misc_RNA (1)...(19): siRNA sense strand
gagcuuuaaucgaacuuca

SEQ ID NO: 1911263 - RNA, 19 nt, Homo sapiens
  misc_RNA (1)...(19): siRNA sense strand
ggaaaagcccuaugaaugu

SEQ ID NO: 1911264 - RNA, 19 nt, Homo sapiens
  misc_RNA (1)...(19): siRNA sense strand
gagaagcgagaaauauaau

SEQ ID NO: 1911265 - RNA, 19 nt, Homo sapiens
  misc_RNA (1)...(19): siRNA sense strand
cucagggucucaaguuuaa

SEQ ID NO: 1911266 - RNA, 19 nt, Homo sapiens
  misc_RNA (1)...(19): siRNA sense strand
aauccacacuggugagaaa

SEQ ID NO: 1911267 - RNA, 19 nt, Homo sapiens
  misc_RNA (1)...(19): siRNA sense strand
ccagagcucacaccuuauu

SEQ ID NO: 1911268 - RNA, 19 nt, Homo sapiens
  misc_RNA (1)...(19): siRNA sense strand
aaucgaacuucagaccuua

SEQ ID NO: 1911269 - RNA, 19 nt, Homo sapiens
  misc_RNA (1)...(19): siRNA sense strand
agagaagcgagaaauauaa

SEQ ID NO: 1911270 - RNA, 19 nt, Homo sapiens
  misc_RNA (1)...(19): siRNA sense strand
ggagagagaagcgagaaau

SEQ ID NO: 1911271 - RNA, 19 nt, Homo sapiens
  misc_RNA (1)...(19): siRNA sense strand
ccuuaugaauguagugauu

SEQ ID NO: 1911272 - RNA, 19 nt, Homo sapiens
  misc_RNA (1)...(19): siRNA sense strand
acugugaauuccaaccuua

SEQ ID NO: 1911273 - RNA, 19 nt, Homo sapiens
  misc_RNA (1)...(19): siRNA sense strand
gggaaaagcccuaugaaug

SEQ ID NO: 1911274 - RNA, 19 nt, Homo sapiens
  misc_RNA (1)...(19): siRNA sense strand
gagaauuacgggaaugugu

SEQ ID NO: 1911275 - RNA, 19 nt, Homo sapiens
  misc_RNA (1)...(19): siRNA sense strand
gguaaccuuugaggaugua

SEQ ID NO: 1911276 - RNA, 19 nt, Homo sapiens
  misc_RNA (1)...(19): siRNA sense strand
ucucagggucucaaguuua

SEQ ID NO: 1911277 - RNA, 19 nt, Homo sapiens
  misc_RNA (1)...(19): siRNA sense strand
augugaugcuggagaauua

SEQ ID NO: 1911278 - RNA, 19 nt, Homo sapiens
  misc_RNA (1)...(19): siRNA sense strand
cuacugggaagauuucaaa

SEQ ID NO: 1911279 - RNA, 19 nt, Homo sapiens
  misc_RNA (1)...(19): siRNA sense strand
gaugugaugcuggagaauu

SEQ ID NO: 1911280 - RNA, 19 nt, Homo sapiens
  misc_RNA (1)...(19): siRNA sense strand
ugugaugaauguagcaaga

SEQ ID NO: 1911281 - RNA, 19 nt, Homo sapiens
  misc_RNA (1)...(19): siRNA sense strand
gcugguaaccuuugaggau

SEQ ID NO: 1911282 - RNA, 19 nt, Homo sapiens
  misc_RNA (1)...(19): siRNA sense strand
gaauuccaaccuuaucuca

SEQ ID NO: 1911283 - RNA, 19 nt, Homo sapiens
  misc_RNA (1)...(19): siRNA sense strand
agaagccuaugaacgagaa

SEQ ID NO: 1911284 - RNA, 19 nt, Homo sapiens
  misc_RNA (1)...(19): siRNA sense strand
gaauuacgggaauguguuc

SEQ ID NO: 1911285 - RNA, 19 nt, Homo sapiens
  misc_RNA (1)...(19): siRNA sense strand
cgugagaccaggacugaaa

SEQ ID NO: 1911286 - RNA, 19 nt, Homo sapiens
  misc_RNA (1)...(19): siRNA sense strand
gcuggagaauuacgggaau

SEQ ID NO: 1911287 - RNA, 19 nt, Homo sapiens
  misc_RNA (1)...(19): siRNA sense strand
agagagaagcgagaaauau

SEQ ID NO: 1911288 - RNA, 19 nt, Homo sapiens
  misc_RNA (1)...(19): siRNA sense strand
ggaguggaagcguuuggaa

SEQ ID NO: 1911289 - RNA, 19 nt, Homo sapiens
  misc_RNA (1)...(19): siRNA sense strand
caacccuuauucaccauca

SEQ ID NO: 1911290 - RNA, 19 nt, Homo sapiens
  misc_RNA (1)...(19): siRNA sense strand
cuaugaauguaaugagugu

SEQ ID NO: 1911291 - RNA, 19 nt, Homo sapiens
  misc_RNA (1)...(19): siRNA sense strand
cuaugaauguaaugagugu

SEQ ID NO: 1911292 - RNA, 19 nt, Homo sapiens
  misc_RNA (1)...(19): siRNA sense strand
guuuaaagaagccuaugaa

SEQ ID NO: 1911293 - RNA, 19 nt, Homo sapiens
  misc_RNA (1)...(19): siRNA sense strand
ggagcucaacccuuauuca

SEQ ID NO: 1911294 - RNA, 19 nt, Homo sapiens
  misc_RNA (1)...(19): siRNA sense strand
caagagcuuuaaucgaacu

SEQ ID NO: 1911295 - RNA, 19 nt, Homo sapiens
  misc_RNA (1)...(19): siRNA sense strand
gaccaggacugaaaaugau

SEQ ID NO: 1911296 - RNA, 19 nt, Homo sapiens
  misc_RNA (1)...(19): siRNA sense strand
cuguagcucugcccucauu

SEQ ID NO: 1911297 - RNA, 19 nt, Homo sapiens
  misc_RNA (1)...(19): siRNA sense strand
ggacugaaaaugaucaaga

SEQ ID NO: 1911298 - RNA, 19 nt, Homo sapiens
  misc_RNA (1)...(19): siRNA sense strand
gaccuuauucaacaucaga

SEQ ID NO: 1911299 - RNA, 19 nt, Homo sapiens
  misc_RNA (1)...(19): siRNA sense strand
gguccuacugggaagauuu

SEQ ID NO: 1911300 - RNA, 19 nt, Homo sapiens
  misc_RNA (1)...(19): siRNA sense strand
gacugaaaaugaucaagaa

SEQ ID NO: 1911301 - RNA, 19 nt, Homo sapiens
  misc_RNA (1)...(19): siRNA sense strand
uguaaugagugugggaaga

SEQ ID NO: 1911302 - RNA, 19 nt, Homo sapiens
  misc_RNA (1)...(19): siRNA sense strand
gggaagauuucaaaaggau

SEQ ID NO: 1911303 - RNA, 19 nt, Homo sapiens
  misc_RNA (1)...(19): siRNA sense strand
uugaggauguagcugugua

SEQ ID NO: 1911304 - RNA, 19 nt, Homo sapiens
  misc_RNA (1)...(19): siRNA sense strand
gaaacccuacgccugcaau

SEQ ID NO: 1911305 - RNA, 19 nt, Homo sapiens
  misc_RNA (1)...(19): siRNA sense strand
agaaacccuaugaauguaa

SEQ ID NO: 1911306 - RNA, 19 nt, Homo sapiens
  misc_RNA (1)...(19): siRNA sense strand
gaauguguucucacuggau

SEQ ID NO: 1911307 - RNA, 19 nt, Homo sapiens
  misc_RNA (1)...(19): siRNA sense strand
gcuuuaaucgaacuucaga

SEQ ID NO: 1911308 - RNA, 19 nt, Homo sapiens
  misc_RNA (1)...(19): siRNA sense strand
ccaaccuuaucucacauca

SEQ ID NO: 1911309 - RNA, 19 nt, Homo sapiens
  misc_RNA (1)...(19): siRNA sense strand
uuacgggaauguguucuca

SEQ ID NO: 1911310 - RNA, 19 nt, Homo sapiens
  misc_RNA (1)...(19): siRNA sense strand
agaauuacgggaauguguu

SEQ ID NO: 1911311 - RNA, 19 nt, Homo sapiens
  misc_RNA (1)...(19): siRNA sense strand
guagcaagagcuuuaaucg

SEQ ID NO: 1911312 - RNA, 19 nt, Homo sapiens
  misc_RNA (1)...(19): siRNA sense strand
gaaagacugaacaggaaaa

SEQ ID NO: 1911313 - RNA, 19 nt, Homo sapiens
  misc_RNA (1)...(19): siRNA sense strand
caggagcucaacccuuauu

SEQ ID NO: 1911314 - RNA, 19 nt, Homo sapiens
  misc_RNA (1)...(19): siRNA sense strand
ggagacagaccccauaagu

SEQ ID NO: 1911315 - RNA, 19 nt, Homo sapiens
  misc_RNA (1)...(19): siRNA sense strand
auuccaaccuuaucucaca

SEQ ID NO: 1911316 - RNA, 19 nt, Homo sapiens
  misc_RNA (1)...(19): siRNA sense strand
ggaaaaccuucagcuguag

SEQ ID NO: 1911317 - RNA, 19 nt, Homo sapiens
  misc_RNA (1)...(19): siRNA sense strand
caaguuuaaagaagccuau

SEQ ID NO: 1911318 - RNA, 19 nt, Homo sapiens
  misc_RNA (1)...(19): siRNA sense strand
gagcucaacccuuauucac

SEQ ID NO: 1911319 - RNA, 19 nt, Homo sapiens
  misc_RNA (1)...(19): siRNA sense strand
agaaagacugaacaggaaa

SEQ ID NO: 1911320 - RNA, 19 nt, Homo sapiens
  misc_RNA (1)...(19): siRNA sense strand
uagcaagagcuuuaaucga

SEQ ID NO: 1911321 - RNA, 19 nt, Homo sapiens
  misc_RNA (1)...(19): siRNA sense strand
aaagcccuaugaauguaau

SEQ ID NO: 1911322 - RNA, 19 nt, Homo sapiens
  misc_RNA (1)...(19): siRNA sense strand
agacagaccccauaagugu

SEQ ID NO: 1911323 - RNA, 19 nt, Homo sapiens
  misc_RNA (1)...(19): siRNA sense strand
ggaaguagcucacggcaaa

SEQ ID NO: 1911324 - RNA, 19 nt, Homo sapiens
  misc_RNA (1)...(19): siRNA sense strand
gcaaagaucauccauauau

SEQ ID NO: 1911325 - RNA, 19 nt, Homo sapiens
  misc_RNA (1)...(19): siRNA sense strand
uguaauggcuucacaauug

SEQ ID NO: 1911326 - RNA, 19 nt, Homo sapiens
  misc_RNA (1)...(19): siRNA sense strand
gaaaugaccgguuaagaga

SEQ ID NO: 1911327 - RNA, 19 nt, Homo sapiens
  misc_RNA (1)...(19): siRNA sense strand
gaagaugagcucuguguuu

SEQ ID NO: 1911328 - RNA, 19 nt, Homo sapiens
  misc_RNA (1)...(19): siRNA sense strand
ggaaggagcccugcaauau

SEQ ID NO: 1911329 - RNA, 19 nt, Homo sapiens
  misc_RNA (1)...(19): siRNA sense strand
cggcaaagaucauccauau

SEQ ID NO: 1911330 - RNA, 19 nt, Homo sapiens
  misc_RNA (1)...(19): siRNA sense strand
ggaauguucucccaugguu

SEQ ID NO: 1911331 - RNA, 19 nt, Homo sapiens
  misc_RNA (1)...(19): siRNA sense strand
ugacauagcugcucuccau

SEQ ID NO: 1911332 - RNA, 19 nt, Homo sapiens
  misc_RNA (1)...(19): siRNA sense strand
aaucacaucuggauaaguu

SEQ ID NO: 1911333 - RNA, 19 nt, Homo sapiens
  misc_RNA (1)...(19): siRNA sense strand
agauagaaaugaccgguua

SEQ ID NO: 1911334 - RNA, 19 nt, Homo sapiens
  misc_RNA (1)...(19): siRNA sense strand
aaagaaggauuguccaaau

SEQ ID NO: 1911335 - RNA, 19 nt, Homo sapiens
  misc_RNA (1)...(19): siRNA sense strand
guaauggcuucacaauuga

SEQ ID NO: 1911336 - RNA, 19 nt, Homo sapiens
  misc_RNA (1)...(19): siRNA sense strand
agucagagcuguacaggaa

SEQ ID NO: 1911337 - RNA, 19 nt, Homo sapiens
  misc_RNA (1)...(19): siRNA sense strand
gaaagaaggauuguccaaa

SEQ ID NO: 1911338 - RNA, 19 nt, Homo sapiens
  misc_RNA (1)...(19): siRNA sense strand
gaagaaggccauugcaauc

SEQ ID NO: 1911339 - RNA, 19 nt, Homo sapiens
  misc_RNA (1)...(19): siRNA sense strand
ucauuaagcccuacaguaa

SEQ ID NO: 1911340 - RNA, 19 nt, Homo sapiens
  misc_RNA (1)...(19): siRNA sense strand
cgaauucccugacaaugau

SEQ ID NO: 1911341 - RNA, 19 nt, Homo sapiens
  misc_RNA (1)...(19): siRNA sense strand
gaaggagcccugcaauaug

SEQ ID NO: 1911342 - RNA, 19 nt, Homo sapiens
  misc_RNA (1)...(19): siRNA sense strand
ugacaaugauagccucgua

SEQ ID NO: 1911343 - RNA, 19 nt, Homo sapiens
  misc_RNA (1)...(19): siRNA sense strand
caacgucauugaagaguuc

SEQ ID NO: 1911344 - RNA, 19 nt, Homo sapiens
  misc_RNA (1)...(19): siRNA sense strand
ugaaggaguuugaaucaca

SEQ ID NO: 1911345 - RNA, 19 nt, Homo sapiens
  misc_RNA (1)...(19): siRNA sense strand
acaaugagaagaaggauuu

SEQ ID NO: 1911346 - RNA, 19 nt, Homo sapiens
  misc_RNA (1)...(19): siRNA sense strand
gaagaaggauuugauucag

SEQ ID NO: 1911347 - RNA, 19 nt, Homo sapiens
  misc_RNA (1)...(19): siRNA sense strand
gaaggauuguccaaaugug

SEQ ID NO: 1911348 - RNA, 19 nt, Homo sapiens
  misc_RNA (1)...(19): siRNA sense strand
ggagaaagcccugaagaag

SEQ ID NO: 1911349 - RNA, 19 nt, Homo sapiens
  misc_RNA (1)...(19): siRNA sense strand
uggauaaguuagacaauga

SEQ ID NO: 1911350 - RNA, 19 nt, Homo sapiens
  misc_RNA (1)...(19): siRNA sense strand
gaucauccauauauuucug

SEQ ID NO: 1911351 - RNA, 19 nt, Homo sapiens
  misc_RNA (1)...(19): siRNA sense strand
cuagugagcugcuggagau

SEQ ID NO: 1911352 - RNA, 19 nt, Homo sapiens
  misc_RNA (1)...(19): siRNA sense strand
caaggauucuggccaaaca

SEQ ID NO: 1911353 - RNA, 19 nt, Homo sapiens
  misc_RNA (1)...(19): siRNA sense strand
gggaaggagcccugcaaua

SEQ ID NO: 1911354 - RNA, 19 nt, Homo sapiens
  misc_RNA (1)...(19): siRNA sense strand
gagagaacaccuucggaaa

SEQ ID NO: 1911355 - RNA, 19 nt, Homo sapiens
  misc_RNA (1)...(19): siRNA sense strand
gauguugcauugaugaauc

SEQ ID NO: 1911356 - RNA, 19 nt, Homo sapiens
  misc_RNA (1)...(19): siRNA sense strand
gaaggccauugcaaucaug

SEQ ID NO: 1911357 - RNA, 19 nt, Homo sapiens
  misc_RNA (1)...(19): siRNA sense strand
aagaugagcucuguguuug

SEQ ID NO: 1911358 - RNA, 19 nt, Homo sapiens
  misc_RNA (1)...(19): siRNA sense strand
ggagggccaagcacuauaa

SEQ ID NO: 1911359 - RNA, 19 nt, Homo sapiens
  misc_RNA (1)...(19): siRNA sense strand
gcaacgucauugaagaguu

SEQ ID NO: 1911360 - RNA, 19 nt, Homo sapiens
  misc_RNA (1)...(19): siRNA sense strand
caacggaagauagaaauga

SEQ ID NO: 1911361 - RNA, 19 nt, Homo sapiens
  misc_RNA (1)...(19): siRNA sense strand
gaaggaguuugaaucacau

SEQ ID NO: 1911362 - RNA, 19 nt, Homo sapiens
  misc_RNA (1)...(19): siRNA sense strand
ccaccaaggacaaggauaa

SEQ ID NO: 1911363 - RNA, 19 nt, Homo sapiens
  misc_RNA (1)...(19): siRNA sense strand
gauauuuccugauguugca

SEQ ID NO: 1911364 - RNA, 19 nt, Homo sapiens
  misc_RNA (1)...(19): siRNA sense strand
acaguaacguguacauguu

SEQ ID NO: 1911365 - RNA, 19 nt, Homo sapiens
  misc_RNA (1)...(19): siRNA sense strand
acaguaagcacuauccuuu

SEQ ID NO: 1911366 - RNA, 19 nt, Homo sapiens
  misc_RNA (1)...(19): siRNA sense strand
ggaaagaaggauuguccaa

SEQ ID NO: 1911367 - RNA, 19 nt, Homo sapiens
  misc_RNA (1)...(19): siRNA sense strand
ggaaauugaaagccacuga

SEQ ID NO: 1911368 - RNA, 19 nt, Homo sapiens
  misc_RNA (1)...(19): siRNA sense strand
gagaagaaggauuugauuc

SEQ ID NO: 1911369 - RNA, 19 nt, Homo sapiens
  misc_RNA (1)...(19): siRNA sense strand
gggagaaagcccugaagaa

SEQ ID NO: 1911370 - RNA, 19 nt, Homo sapiens
  misc_RNA (1)...(19): siRNA sense strand
gagaagaugagcucugugu

SEQ ID NO: 1911371 - RNA, 19 nt, Homo sapiens
  misc_RNA (1)...(19): siRNA sense strand
uccgagacauggucagaua

SEQ ID NO: 1911372 - RNA, 19 nt, Homo sapiens
  misc_RNA (1)...(19): siRNA sense strand
gacaguaacguguacaugu

SEQ ID NO: 1911373 - RNA, 19 nt, Homo sapiens
  misc_RNA (1)...(19): siRNA sense strand
aagaaggauuguccaaaug

SEQ ID NO: 1911374 - RNA, 19 nt, Homo sapiens
  misc_RNA (1)...(19): siRNA sense strand
gggccaagcacuauaaauc

SEQ ID NO: 1911375 - RNA, 19 nt, Homo sapiens
  misc_RNA (1)...(19): siRNA sense strand
aaugaccgguuaagagauu

SEQ ID NO: 1911376 - RNA, 19 nt, Homo sapiens
  misc_RNA (1)...(19): siRNA sense strand
uagcugcucuccaucacuu

SEQ ID NO: 1911377 - RNA, 19 nt, Homo sapiens
  misc_RNA (1)...(19): siRNA sense strand
uaacuguaauggcuucaca

SEQ ID NO: 1911378 - RNA, 19 nt, Homo sapiens
  misc_RNA (1)...(19): siRNA sense strand
aagaaggauuugauucaga

SEQ ID NO: 1911379 - RNA, 19 nt, Homo sapiens
  misc_RNA (1)...(19): siRNA sense strand
ugaagaaggccauugcaau

SEQ ID NO: 1911380 - RNA, 19 nt, Homo sapiens
  misc_RNA (1)...(19): siRNA sense strand
gcacgcaacgucauugaag

SEQ ID NO: 1911381 - RNA, 19 nt, Homo sapiens
  misc_RNA (1)...(19): siRNA sense strand
agaagaaggauuugauuca

SEQ ID NO: 1911382 - RNA, 19 nt, Homo sapiens
  misc_RNA (1)...(19): siRNA sense strand
ccauauauuucugagauca

SEQ ID NO: 1911383 - RNA, 19 nt, Homo sapiens
  misc_RNA (1)...(19): siRNA sense strand
gaugagcucuguguuugag

SEQ ID NO: 1911384 - RNA, 19 nt, Homo sapiens
  misc_RNA (1)...(19): siRNA sense strand
ugcacaagcuggaauguuc

SEQ ID NO: 1911385 - RNA, 19 nt, Homo sapiens
  misc_RNA (1)...(19): siRNA sense strand
gcagaagccauccgagaca

SEQ ID NO: 1911386 - RNA, 19 nt, Homo sapiens
  misc_RNA (1)...(19): siRNA sense strand
ccugcaauauggacagaaa

SEQ ID NO: 1911387 - RNA, 19 nt, Homo sapiens
  misc_RNA (1)...(19): siRNA sense strand
gaaaauccacccagagaga

SEQ ID NO: 1911388 - RNA, 19 nt, Homo sapiens
  misc_RNA (1)...(19): siRNA sense strand
guaagcacuauccuuugua

SEQ ID NO: 1911389 - RNA, 19 nt, Homo sapiens
  misc_RNA (1)...(19): siRNA sense strand
caauguggagugucagaaa

SEQ ID NO: 1911390 - RNA, 19 nt, Homo sapiens
  misc_RNA (1)...(19): siRNA sense strand
aaggagcccugcaauaugg

SEQ ID NO: 1911391 - RNA, 19 nt, Homo sapiens
  misc_RNA (1)...(19): siRNA sense strand
gauagaaaugaccgguuaa

SEQ ID NO: 1911392 - RNA, 19 nt, Homo sapiens
  misc_RNA (1)...(19): siRNA sense strand
ucagagcuguacaggaaau

SEQ ID NO: 1911393 - RNA, 19 nt, Homo sapiens
  misc_RNA (1)...(19): siRNA sense strand
uaaguuagacaaugagaag

SEQ ID NO: 1911394 - RNA, 19 nt, Homo sapiens
  misc_RNA (1)...(19): siRNA sense strand
ugagaagaaggauuugauu

SEQ ID NO: 1911395 - RNA, 19 nt, Homo sapiens
  misc_RNA (1)...(19): siRNA sense strand
gagaucaaacaggaaauug

SEQ ID NO: 1911396 - RNA, 19 nt, Homo sapiens
  misc_RNA (1)...(19): siRNA sense strand
aggauuugauucagaguga

SEQ ID NO: 1911397 - RNA, 19 nt, Homo sapiens
  misc_RNA (1)...(19): siRNA sense strand
aguaagcacuauccuuugu

SEQ ID NO: 1911398 - RNA, 19 nt, Homo sapiens
  misc_RNA (1)...(19): siRNA sense strand
ggauaaggccaagguggaa

SEQ ID NO: 1911399 - RNA, 19 nt, Homo sapiens
  misc_RNA (1)...(19): siRNA sense strand
agaaaugaccgguuaagag

SEQ ID NO: 1911400 - RNA, 19 nt, Homo sapiens
  misc_RNA (1)...(19): siRNA sense strand
ucgaauucccugacaauga

SEQ ID NO: 1911401 - RNA, 19 nt, Homo sapiens
  misc_RNA (1)...(19): siRNA sense strand
caaugauagccucguagua

SEQ ID NO: 1911402 - RNA, 19 nt, Homo sapiens
  misc_RNA (1)...(19): siRNA sense strand
ggcaaagaucauccauaua

SEQ ID NO: 1911403 - RNA, 19 nt, Homo sapiens
  misc_RNA (1)...(19): siRNA sense strand
uaagcacuauccuuuguac

SEQ ID NO: 1911404 - RNA, 19 nt, Homo sapiens
  misc_RNA (1)...(19): siRNA sense strand
uugaaucacaucuggauaa

SEQ ID NO: 1911405 - RNA, 19 nt, Homo sapiens
  misc_RNA (1)...(19): siRNA sense strand
ggacaguaacguguacaug

SEQ ID NO: 1911406 - RNA, 19 nt, Homo sapiens
  misc_RNA (1)...(19): siRNA sense strand
guacccaacggaagauaga

SEQ ID NO: 1911407 - RNA, 19 nt, Homo sapiens
  misc_RNA (1)...(19): siRNA sense strand
gagcucagccaggagaaga

SEQ ID NO: 1911408 - RNA, 19 nt, Homo sapiens
  misc_RNA (1)...(19): siRNA sense strand
cuccaagcaucucgaauuc

SEQ ID NO: 1911409 - RNA, 19 nt, Homo sapiens
  misc_RNA (1)...(19): siRNA sense strand
ccaugggugucugcuugua

SEQ ID NO: 1911410 - RNA, 19 nt, Homo sapiens
  misc_RNA (1)...(19): siRNA sense strand
ugaaucacaucuggauaag

SEQ ID NO: 1911411 - RNA, 19 nt, Homo sapiens
  misc_RNA (1)...(19): siRNA sense strand
gaagcuagggagacucuac

SEQ ID NO: 1911412 - RNA, 19 nt, Homo sapiens
  misc_RNA (1)...(19): siRNA sense strand
gauaaguuagacaaugaga

SEQ ID NO: 1911413 - RNA, 19 nt, Homo sapiens
  misc_RNA (1)...(19): siRNA sense strand
cuggauaaguuagacaaug

SEQ ID NO: 1911414 - RNA, 19 nt, Homo sapiens
  misc_RNA (1)...(19): siRNA sense strand
cacgcaacgucauugaaga

SEQ ID NO: 1911415 - RNA, 19 nt, Homo sapiens
  misc_RNA (1)...(19): siRNA sense strand
gauaaggccaagguggaaa

SEQ ID NO: 1911416 - RNA, 19 nt, Homo sapiens
  misc_RNA (1)...(19): siRNA sense strand
cauuugggaucagcgauau

SEQ ID NO: 1911417 - RNA, 19 nt, Homo sapiens
  misc_RNA (1)...(19): siRNA sense strand
cacaauugaagaugaagaa

SEQ ID NO: 1911418 - RNA, 19 nt, Homo sapiens
  misc_RNA (1)...(19): siRNA sense strand
agacuaacagcaaggauuc

SEQ ID NO: 1911419 - RNA, 19 nt, Homo sapiens
  misc_RNA (1)...(19): siRNA sense strand
cgagacauggucagauaug

SEQ ID NO: 1911420 - RNA, 19 nt, Homo sapiens
  misc_RNA (1)...(19): siRNA sense strand
ugagaucaaacaggaaauu

SEQ ID NO: 1911421 - RNA, 19 nt, Homo sapiens
  misc_RNA (1)...(19): siRNA sense strand
agaaggccauugcaaucau

SEQ ID NO: 1911422 - RNA, 19 nt, Homo sapiens
  misc_RNA (1)...(19): siRNA sense strand
aagauuggcccaugcacaa

SEQ ID NO: 1911423 - RNA, 19 nt, Homo sapiens
  misc_RNA (1)...(19): siRNA sense strand
gggagaagaucuaccugua

SEQ ID NO: 1911424 - RNA, 19 nt, Homo sapiens
  misc_RNA (1)...(19): siRNA sense strand
acaagaagcugugcaauga

SEQ ID NO: 1911425 - RNA, 19 nt, Homo sapiens
  misc_RNA (1)...(19): siRNA sense strand
gagaagaucuaccuguaca

SEQ ID NO: 1911426 - RNA, 19 nt, Homo sapiens
  misc_RNA (1)...(19): siRNA sense strand
acaaagcgaucucccacua

SEQ ID NO: 1911427 - RNA, 19 nt, Homo sapiens
  misc_RNA (1)...(19): siRNA sense strand
gcaaauggccacugaguag

SEQ ID NO: 1911428 - RNA, 19 nt, Homo sapiens
  misc_RNA (1)...(19): siRNA sense strand
gggagugguuugcucgaua

SEQ ID NO: 1911429 - RNA, 19 nt, Homo sapiens
  misc_RNA (1)...(19): siRNA sense strand
gaagagacccuggcacuca

SEQ ID NO: 1911430 - RNA, 19 nt, Homo sapiens
  misc_RNA (1)...(19): siRNA sense strand
ccaagaaccucaugaccau

SEQ ID NO: 1911431 - RNA, 19 nt, Homo sapiens
  misc_RNA (1)...(19): siRNA sense strand
gaagaagcaggcugugauu

SEQ ID NO: 1911432 - RNA, 19 nt, Homo sapiens
  misc_RNA (1)...(19): siRNA sense strand
caaccuggaugaagagcaa

SEQ ID NO: 1911433 - RNA, 19 nt, Homo sapiens
  misc_RNA (1)...(19): siRNA sense strand
guucuggaaugcagccuuu

SEQ ID NO: 1911434 - RNA, 19 nt, Homo sapiens
  misc_RNA (1)...(19): siRNA sense strand
ggaggagaaagccaaguuu

SEQ ID NO: 1911435 - RNA, 19 nt, Homo sapiens
  misc_RNA (1)...(19): siRNA sense strand
ccgagcggcugcugaagaa

SEQ ID NO: 1911436 - RNA, 19 nt, Homo sapiens
  misc_RNA (1)...(19): siRNA sense strand
caucgacuccuaccugaaa

SEQ ID NO: 1911437 - RNA, 19 nt, Homo sapiens
  misc_RNA (1)...(19): siRNA sense strand
gaggagaaagccaaguuug

SEQ ID NO: 1911438 - RNA, 19 nt, Homo sapiens
  misc_RNA (1)...(19): siRNA sense strand
acucugagguucuggaaug

SEQ ID NO: 1911439 - RNA, 19 nt, Homo sapiens
  misc_RNA (1)...(19): siRNA sense strand
acacgcaccugaagcaaca

SEQ ID NO: 1911440 - RNA, 19 nt, Homo sapiens
  misc_RNA (1)...(19): siRNA sense strand
ggagugguuugcucgauac

SEQ ID NO: 1911441 - RNA, 19 nt, Homo sapiens
  misc_RNA (1)...(19): siRNA sense strand
ccuuuggacugaacaagaa

SEQ ID NO: 1911442 - RNA, 19 nt, Homo sapiens
  misc_RNA (1)...(19): siRNA sense strand
cgaggaagacgagaacaaa

SEQ ID NO: 1911443 - RNA, 19 nt, Homo sapiens
  misc_RNA (1)...(19): siRNA sense strand
ggaacgaggaagacgagaa

SEQ ID NO: 1911444 - RNA, 19 nt, Homo sapiens
  misc_RNA (1)...(19): siRNA sense strand
gaacgaggaagacgagaac

SEQ ID NO: 1911445 - RNA, 19 nt, Homo sapiens
  misc_RNA (1)...(19): siRNA sense strand
ggacagugagaaugacaug

SEQ ID NO: 1911446 - RNA, 19 nt, Homo sapiens
  misc_RNA (1)...(19): siRNA sense strand
gagcaaauggccacugagu

SEQ ID NO: 1911447 - RNA, 19 nt, Homo sapiens
  misc_RNA (1)...(19): siRNA sense strand
gaacaagaagcugugcaau

SEQ ID NO: 1911448 - RNA, 19 nt, Homo sapiens
  misc_RNA (1)...(19): siRNA sense strand
ccaugugcuucaccuacua

SEQ ID NO: 1911449 - RNA, 19 nt, Homo sapiens
  misc_RNA (1)...(19): siRNA sense strand
ggaugaagagcaauacaag

SEQ ID NO: 1911450 - RNA, 19 nt, Homo sapiens
  misc_RNA (1)...(19): siRNA sense strand
gcacauucacgcacaacau

SEQ ID NO: 1911451 - RNA, 19 nt, Homo sapiens
  misc_RNA (1)...(19): siRNA sense strand
gagaggaggaggagaagag

SEQ ID NO: 1911452 - RNA, 19 nt, Homo sapiens
  misc_RNA (1)...(19): siRNA sense strand
ggacggugcaucagagagu

SEQ ID NO: 1911453 - RNA, 19 nt, Homo sapiens
  misc_RNA (1)...(19): siRNA sense strand
gacgacagccuccgguuca

SEQ ID NO: 1911454 - RNA, 19 nt, Homo sapiens
  misc_RNA (1)...(19): siRNA sense strand
gaaugucaagggcuucuuc

SEQ ID NO: 1911455 - RNA, 19 nt, Homo sapiens
  misc_RNA (1)...(19): siRNA sense strand
ugaagaagcaggcugugau

SEQ ID NO: 1911456 - RNA, 19 nt, Homo sapiens
  misc_RNA (1)...(19): siRNA sense strand
ggagaagaucuaccuguac

SEQ ID NO: 1911457 - RNA, 19 nt, Homo sapiens
  misc_RNA (1)...(19): siRNA sense strand
gcacaacaugcuggccuuu

SEQ ID NO: 1911458 - RNA, 19 nt, Homo sapiens
  misc_RNA (1)...(19): siRNA sense strand
ucucagaggcaaccuucua

SEQ ID NO: 1911459 - RNA, 19 nt, Homo sapiens
  misc_RNA (1)...(19): siRNA sense strand
gaacaaaccccaggagaag

SEQ ID NO: 1911460 - RNA, 19 nt, Homo sapiens
  misc_RNA (1)...(19): siRNA sense strand
gugaccacauugagcaaau

SEQ ID NO: 1911461 - RNA, 19 nt, Homo sapiens
  misc_RNA (1)...(19): siRNA sense strand
gcugcuuagugaccacauu

SEQ ID NO: 1911462 - RNA, 19 nt, Homo sapiens
  misc_RNA (1)...(19): siRNA sense strand
gagcggcugcugaagaaca

SEQ ID NO: 1911463 - RNA, 19 nt, Homo sapiens
  misc_RNA (1)...(19): siRNA sense strand
uugagcaaauggccacuga

SEQ ID NO: 1911464 - RNA, 19 nt, Homo sapiens
  misc_RNA (1)...(19): siRNA sense strand
acaacaugcuggccuuugg

SEQ ID NO: 1911465 - RNA, 19 nt, Homo sapiens
  misc_RNA (1)...(19): siRNA sense strand
ggccaggacugagaauguc

SEQ ID NO: 1911466 - RNA, 19 nt, Homo sapiens
  misc_RNA (1)...(19): siRNA sense strand
guggcuacguggagaagau

SEQ ID NO: 1911467 - RNA, 19 nt, Homo sapiens
  misc_RNA (1)...(19): siRNA sense strand
ugaacaagaagcugugcaa

SEQ ID NO: 1911468 - RNA, 19 nt, Homo sapiens
  misc_RNA (1)...(19): siRNA sense strand
caacaugcuggccuuugga

SEQ ID NO: 1911469 - RNA, 19 nt, Homo sapiens
  misc_RNA (1)...(19): siRNA sense strand
caacuccaagugugucuca

SEQ ID NO: 1911470 - RNA, 19 nt, Homo sapiens
  misc_RNA (1)...(19): siRNA sense strand
ucgggcagcugggcacauu

SEQ ID NO: 1911471 - RNA, 19 nt, Homo sapiens
  misc_RNA (1)...(19): siRNA sense strand
ucaacgagaacaucaccuu

SEQ ID NO: 1911472 - RNA, 19 nt, Homo sapiens
  misc_RNA (1)...(19): siRNA sense strand
uaccugaaauccgcaaaca

SEQ ID NO: 1911473 - RNA, 19 nt, Homo sapiens
  misc_RNA (1)...(19): siRNA sense strand
gcgcugcaacuccaagugu

SEQ ID NO: 1911474 - RNA, 19 nt, Homo sapiens
  misc_RNA (1)...(19): siRNA sense strand
aagaagcugugcaaugacu

SEQ ID NO: 1911475 - RNA, 19 nt, Homo sapiens
  misc_RNA (1)...(19): siRNA sense strand
aacaagaagcugugcaaug

SEQ ID NO: 1911476 - RNA, 19 nt, Homo sapiens
  misc_RNA (1)...(19): siRNA sense strand
ccaggaggaacgaggaaga

SEQ ID NO: 1911477 - RNA, 19 nt, Homo sapiens
  misc_RNA (1)...(19): siRNA sense strand
uuggcaaccuggaugaaga

SEQ ID NO: 1911478 - RNA, 19 nt, Homo sapiens
  misc_RNA (1)...(19): siRNA sense strand
gggcagcugggcacauuca

SEQ ID NO: 1911479 - RNA, 19 nt, Homo sapiens
  misc_RNA (1)...(19): siRNA sense strand
ccuacuaccacaucggaaa

SEQ ID NO: 1911480 - RNA, 19 nt, Homo sapiens
  misc_RNA (1)...(19): siRNA sense strand
cugcggacagugagaauga

SEQ ID NO: 1911481 - RNA, 19 nt, Homo sapiens
  misc_RNA (1)...(19): siRNA sense strand
caccgagucuacccaggau

SEQ ID NO: 1911482 - RNA, 19 nt, Homo sapiens
  misc_RNA (1)...(19): siRNA sense strand
ccgagucuacccaggauga

SEQ ID NO: 1911483 - RNA, 19 nt, Homo sapiens
  misc_RNA (1)...(19): siRNA sense strand
cacauucacgcacaacaug

SEQ ID NO: 1911484 - RNA, 19 nt, Homo sapiens
  misc_RNA (1)...(19): siRNA sense strand
agaagcaggcugugauugg

SEQ ID NO: 1911485 - RNA, 19 nt, Homo sapiens
  misc_RNA (1)...(19): siRNA sense strand
ggacaaugauggagaucga

SEQ ID NO: 1911486 - RNA, 19 nt, Homo sapiens
  misc_RNA (1)...(19): siRNA sense strand
gaaaaugagcugaugcuua

SEQ ID NO: 1911487 - RNA, 19 nt, Homo sapiens
  misc_RNA (1)...(19): siRNA sense strand
ccaaagaacagaucaagug

SEQ ID NO: 1911488 - RNA, 19 nt, Homo sapiens
  misc_RNA (1)...(19): siRNA sense strand
aaaaugagcugaugcuuau

SEQ ID NO: 1911489 - RNA, 19 nt, Homo sapiens
  misc_RNA (1)...(19): siRNA sense strand
ggaugaaauuguagaugga

SEQ ID NO: 1911490 - RNA, 19 nt, Homo sapiens
  misc_RNA (1)...(19): siRNA sense strand
ugaaauugcccucuuggaa

SEQ ID NO: 1911491 - RNA, 19 nt, Homo sapiens
  misc_RNA (1)...(19): siRNA sense strand
ugucaaagccauccugauu

SEQ ID NO: 1911492 - RNA, 19 nt, Homo sapiens
  misc_RNA (1)...(19): siRNA sense strand
guucuuggcuguggaugaa

SEQ ID NO: 1911493 - RNA, 19 nt, Homo sapiens
  misc_RNA (1)...(19): siRNA sense strand
ucaaagccauccugauucu

SEQ ID NO: 1911494 - RNA, 19 nt, Homo sapiens
  misc_RNA (1)...(19): siRNA sense strand
ggcuguggaugaaauugua

SEQ ID NO: 1911495 - RNA, 19 nt, Homo sapiens
  misc_RNA (1)...(19): siRNA sense strand
gaucucuauuucuauguga

SEQ ID NO: 1911496 - RNA, 19 nt, Homo sapiens
  misc_RNA (1)...(19): siRNA sense strand
gaaccuucccuguauacug

SEQ ID NO: 1911497 - RNA, 19 nt, Homo sapiens
  misc_RNA (1)...(19): siRNA sense strand
gaagaacauuuucaacaag

SEQ ID NO: 1911498 - RNA, 19 nt, Homo sapiens
  misc_RNA (1)...(19): siRNA sense strand
gaacugucucuucgacuca

SEQ ID NO: 1911499 - RNA, 19 nt, Homo sapiens
  misc_RNA (1)...(19): siRNA sense strand
ugagccagaugcugaggaa

SEQ ID NO: 1911500 - RNA, 19 nt, Homo sapiens
  misc_RNA (1)...(19): siRNA sense strand
cagugaaauugcccucuug

SEQ ID NO: 1911501 - RNA, 19 nt, Homo sapiens
  misc_RNA (1)...(19): siRNA sense strand
auuggcagcuccuaugaaa

SEQ ID NO: 1911502 - RNA, 19 nt, Homo sapiens
  misc_RNA (1)...(19): siRNA sense strand
acagugaaauugcccucuu

SEQ ID NO: 1911503 - RNA, 19 nt, Homo sapiens
  misc_RNA (1)...(19): siRNA sense strand
gcagucagccaaagaacag

SEQ ID NO: 1911504 - RNA, 19 nt, Homo sapiens
  misc_RNA (1)...(19): siRNA sense strand
aaccuucccuguauacugu

SEQ ID NO: 1911505 - RNA, 19 nt, Homo sapiens
  misc_RNA (1)...(19): siRNA sense strand
gagaagaacauuuucaaca

SEQ ID NO: 1911506 - RNA, 19 nt, Homo sapiens
  misc_RNA (1)...(19): siRNA sense strand
ggaaggccugacaguggua

SEQ ID NO: 1911507 - RNA, 19 nt, Homo sapiens
  misc_RNA (1)...(19): siRNA sense strand
gggugauccuagagaguga

SEQ ID NO: 1911508 - RNA, 19 nt, Homo sapiens
  misc_RNA (1)...(19): siRNA sense strand
gccugacagugguauacaa

SEQ ID NO: 1911509 - RNA, 19 nt, Homo sapiens
  misc_RNA (1)...(19): siRNA sense strand
aaugauggagaucgacuuu

SEQ ID NO: 1911510 - RNA, 19 nt, Homo sapiens
  misc_RNA (1)...(19): siRNA sense strand
gauuggcagcuccuaugaa

SEQ ID NO: 1911511 - RNA, 19 nt, Homo sapiens
  misc_RNA (1)...(19): siRNA sense strand
gugauuggcagcuccuaug

SEQ ID NO: 1911512 - RNA, 19 nt, Homo sapiens
  misc_RNA (1)...(19): siRNA sense strand
gucaaagccauccugauuc

SEQ ID NO: 1911513 - RNA, 19 nt, Homo sapiens
  misc_RNA (1)...(19): siRNA sense strand
ccugacagugguauacaaa

SEQ ID NO: 1911514 - RNA, 19 nt, Homo sapiens
  misc_RNA (1)...(19): siRNA sense strand
gaaaugagcuacauaaucu

SEQ ID NO: 1911515 - RNA, 19 nt, Homo sapiens
  misc_RNA (1)...(19): siRNA sense strand
gauagaagcuucccgaaau

SEQ ID NO: 1911516 - RNA, 19 nt, Homo sapiens
  misc_RNA (1)...(19): siRNA sense strand
gaaauuugcugcuauucaa

SEQ ID NO: 1911517 - RNA, 19 nt, Homo sapiens
  misc_RNA (1)...(19): siRNA sense strand
gcagaggagucaaugcuau

SEQ ID NO: 1911518 - RNA, 19 nt, Homo sapiens
  misc_RNA (1)...(19): siRNA sense strand
aaagguaacgucacaauaa

SEQ ID NO: 1911519 - RNA, 19 nt, Homo sapiens
  misc_RNA (1)...(19): siRNA sense strand
gagaaacagcuaauugaaa

SEQ ID NO: 1911520 - RNA, 19 nt, Homo sapiens
  misc_RNA (1)...(19): siRNA sense strand
gaagguaacuaaagguaac

SEQ ID NO: 1911521 - RNA, 19 nt, Homo sapiens
  misc_RNA (1)...(19): siRNA sense strand
acagugggcuucaacauga

SEQ ID NO: 1911522 - RNA, 19 nt, Homo sapiens
  misc_RNA (1)...(19): siRNA sense strand
gaugagaaacagcuaauug

SEQ ID NO: 1911523 - RNA, 19 nt, Homo sapiens
  misc_RNA (1)...(19): siRNA sense strand
aaaugaaucugucugcuau

SEQ ID NO: 1911524 - RNA, 19 nt, Homo sapiens
  misc_RNA (1)...(19): siRNA sense strand
caugauagaugcugcagau

SEQ ID NO: 1911525 - RNA, 19 nt, Homo sapiens
  misc_RNA (1)...(19): siRNA sense strand
agagagaucuuccuaaugc

SEQ ID NO: 1911526 - RNA, 19 nt, Homo sapiens
  misc_RNA (1)...(19): siRNA sense strand
gcuauucaauuucuugcaa

SEQ ID NO: 1911527 - RNA, 19 nt, Homo sapiens
  misc_RNA (1)...(19): siRNA sense strand
ggaagguaacuaaagguaa

SEQ ID NO: 1911528 - RNA, 19 nt, Homo sapiens
  misc_RNA (1)...(19): siRNA sense strand
uaaagguaacgucacaaua

SEQ ID NO: 1911529 - RNA, 19 nt, Homo sapiens
  misc_RNA (1)...(19): siRNA sense strand
agagaaauuugcugcuauu

SEQ ID NO: 1911530 - RNA, 19 nt, Homo sapiens
  misc_RNA (1)...(19): siRNA sense strand
acaaggaauuccagugcua

SEQ ID NO: 1911531 - RNA, 19 nt, Homo sapiens
  misc_RNA (1)...(19): siRNA sense strand
aagguaacgucacaauaaa

SEQ ID NO: 1911532 - RNA, 19 nt, Homo sapiens
  misc_RNA (1)...(19): siRNA sense strand
cgaaaugagcuacauaauc

SEQ ID NO: 1911533 - RNA, 19 nt, Homo sapiens
  misc_RNA (1)...(19): siRNA sense strand
auaaagaucugggacauag

SEQ ID NO: 1911534 - RNA, 19 nt, Homo sapiens
  misc_RNA (1)...(19): siRNA sense strand
caauaaagaucugggacau

SEQ ID NO: 1911535 - RNA, 19 nt, Homo sapiens
  misc_RNA (1)...(19): siRNA sense strand
aaaccacaguuacaaggaa

SEQ ID NO: 1911536 - RNA, 19 nt, Homo sapiens
  misc_RNA (1)...(19): siRNA sense strand
gguaacgucacaauaaaga

SEQ ID NO: 1911537 - RNA, 19 nt, Homo sapiens
  misc_RNA (1)...(19): siRNA sense strand
uagagaaauuugcugcuau

SEQ ID NO: 1911538 - RNA, 19 nt, Homo sapiens
  misc_RNA (1)...(19): siRNA sense strand
gauagaugcugcagaucgu

SEQ ID NO: 1911539 - RNA, 19 nt, Homo sapiens
  misc_RNA (1)...(19): siRNA sense strand
ccuaaugccuuggaugaga

SEQ ID NO: 1911540 - RNA, 19 nt, Homo sapiens
  misc_RNA (1)...(19): siRNA sense strand
ugaggaagguaacuaaagg

SEQ ID NO: 1911541 - RNA, 19 nt, Homo sapiens
  misc_RNA (1)...(19): siRNA sense strand
ugagcuacauaaucuucua

SEQ ID NO: 1911542 - RNA, 19 nt, Homo sapiens
  misc_RNA (1)...(19): siRNA sense strand
caagaccaccuucgucaau

SEQ ID NO: 1911543 - RNA, 19 nt, Homo sapiens
  misc_RNA (1)...(19): siRNA sense strand
ugagaaacagcuaauugaa

SEQ ID NO: 1911544 - RNA, 19 nt, Homo sapiens
  misc_RNA (1)...(19): siRNA sense strand
auagagaaauuugcugcua

SEQ ID NO: 1911545 - RNA, 19 nt, Homo sapiens
  misc_RNA (1)...(19): siRNA sense strand
cuaaugccuuggaugagaa

SEQ ID NO: 1911546 - RNA, 19 nt, Homo sapiens
  misc_RNA (1)...(19): siRNA sense strand
ggacaaccccgauuucgaa

SEQ ID NO: 1911547 - RNA, 19 nt, Homo sapiens
  misc_RNA (1)...(19): siRNA sense strand
gauaaaccacaguuacaag

SEQ ID NO: 1911548 - RNA, 19 nt, Homo sapiens
  misc_RNA (1)...(19): siRNA sense strand
gcaagaccaccuucgucaa

SEQ ID NO: 1911549 - RNA, 19 nt, Homo sapiens
  misc_RNA (1)...(19): siRNA sense strand
uaacgucacaauaaagauc

SEQ ID NO: 1911550 - RNA, 19 nt, Homo sapiens
  misc_RNA (1)...(19): siRNA sense strand
auagaagcuucccgaaaug

SEQ ID NO: 1911551 - RNA, 19 nt, Homo sapiens
  misc_RNA (1)...(19): siRNA sense strand
uagauaaaccacaguuaca

SEQ ID NO: 1911552 - RNA, 19 nt, Homo sapiens
  misc_RNA (1)...(19): siRNA sense strand
uccguucgcucuucuggaa

SEQ ID NO: 1911553 - RNA, 19 nt, Homo sapiens
  misc_RNA (1)...(19): siRNA sense strand
cagaggagucaaugcuauu

SEQ ID NO: 1911554 - RNA, 19 nt, Homo sapiens
  misc_RNA (1)...(19): siRNA sense strand
ggaugagaaacagcuaauu

SEQ ID NO: 1911555 - RNA, 19 nt, Homo sapiens
  misc_RNA (1)...(19): siRNA sense strand
aaagaucugggacauagga

SEQ ID NO: 1911556 - RNA, 19 nt, Homo sapiens
  misc_RNA (1)...(19): siRNA sense strand
agauagaagcuucccgaaa

SEQ ID NO: 1911557 - RNA, 19 nt, Homo sapiens
  misc_RNA (1)...(19): siRNA sense strand
cuaaagguaacgucacaau

SEQ ID NO: 1911558 - RNA, 19 nt, Homo sapiens
  misc_RNA (1)...(19): siRNA sense strand
agaaauuugcugcuauuca

SEQ ID NO: 1911559 - RNA, 19 nt, Homo sapiens
  misc_RNA (1)...(19): siRNA sense strand
uaaaccacaguuacaagga

SEQ ID NO: 1911560 - RNA, 19 nt, Homo sapiens
  misc_RNA (1)...(19): siRNA sense strand
cccgaaaugagcuacauaa

SEQ ID NO: 1911561 - RNA, 19 nt, Homo sapiens
  misc_RNA (1)...(19): siRNA sense strand
cgucaggucaauucaguga

SEQ ID NO: 1911562 - RNA, 19 nt, Homo sapiens
  misc_RNA (1)...(19): siRNA sense strand
gcaugugggagcgguauug

SEQ ID NO: 1911563 - RNA, 19 nt, Homo sapiens
  misc_RNA (1)...(19): siRNA sense strand
agaccaccuucgucaaugu

SEQ ID NO: 1911564 - RNA, 19 nt, Homo sapiens
  misc_RNA (1)...(19): siRNA sense strand
acaugaggaagguaacuaa

SEQ ID NO: 1911565 - RNA, 19 nt, Homo sapiens
  misc_RNA (1)...(19): siRNA sense strand
aauaaagaucugggacaua

SEQ ID NO: 1911566 - RNA, 19 nt, Homo sapiens
  misc_RNA (1)...(19): siRNA sense strand
caugaggaagguaacuaaa

SEQ ID NO: 1911567 - RNA, 19 nt, Homo sapiens
  misc_RNA (1)...(19): siRNA sense strand
cuagauaaaccacaguuac

SEQ ID NO: 1911568 - RNA, 19 nt, Homo sapiens
  misc_RNA (1)...(19): siRNA sense strand
ucuagauaaaccacaguua

SEQ ID NO: 1911569 - RNA, 19 nt, Homo sapiens
  misc_RNA (1)...(19): siRNA sense strand
auagauaucacacuucagu

SEQ ID NO: 1911570 - RNA, 19 nt, Homo sapiens
  misc_RNA (1)...(19): siRNA sense strand
augagaaacagcuaauuga

SEQ ID NO: 1911571 - RNA, 19 nt, Homo sapiens
  misc_RNA (1)...(19): siRNA sense strand
cacagugggcuucaacaug

SEQ ID NO: 1911572 - RNA, 19 nt, Homo sapiens
  misc_RNA (1)...(19): siRNA sense strand
uagaagcuucccgaaauga

SEQ ID NO: 1911573 - RNA, 19 nt, Homo sapiens
  misc_RNA (1)...(19): siRNA sense strand
aggaagguaacuaaaggua

SEQ ID NO: 1911574 - RNA, 19 nt, Homo sapiens
  misc_RNA (1)...(19): siRNA sense strand
caucgcgucaggucaauuc

SEQ ID NO: 1911575 - RNA, 19 nt, Homo sapiens
  misc_RNA (1)...(19): siRNA sense strand
agauaaaccacaguuacaa

SEQ ID NO: 1911576 - RNA, 19 nt, Homo sapiens
  misc_RNA (1)...(19): siRNA sense strand
aacuaaagguaacgucaca

SEQ ID NO: 1911577 - RNA, 19 nt, Homo sapiens
  misc_RNA (1)...(19): siRNA sense strand
gcugcuauucaauuucuug

SEQ ID NO: 1911578 - RNA, 19 nt, Homo sapiens
  misc_RNA (1)...(19): siRNA sense strand
aagaccaccuucgucaaug

SEQ ID NO: 1911579 - RNA, 19 nt, Homo sapiens
  misc_RNA (1)...(19): siRNA sense strand
gcaagcugauaaauaguuu

SEQ ID NO: 1911580 - RNA, 19 nt, Homo sapiens
  misc_RNA (1)...(19): siRNA sense strand
gcaaaucucccaguuccua

SEQ ID NO: 1911581 - RNA, 19 nt, Homo sapiens
  misc_RNA (1)...(19): siRNA sense strand
ggagaccuauggugucaga

SEQ ID NO: 1911582 - RNA, 19 nt, Homo sapiens
  misc_RNA (1)...(19): siRNA sense strand
gcagugcgccgaggacaua

SEQ ID NO: 1911583 - RNA, 19 nt, Homo sapiens
  misc_RNA (1)...(19): siRNA sense strand
ggagagccauccugguuuc

SEQ ID NO: 1911584 - RNA, 19 nt, Homo sapiens
  misc_RNA (1)...(19): siRNA sense strand
gccgagaggugcaggagaa

SEQ ID NO: 1911585 - RNA, 19 nt, Homo sapiens
  misc_RNA (1)...(19): siRNA sense strand
gaagaucgagcagaaguau

SEQ ID NO: 1911586 - RNA, 19 nt, Homo sapiens
  misc_RNA (1)...(19): siRNA sense strand
agaaauaguuagucaccuu

SEQ ID NO: 1911587 - RNA, 19 nt, Homo sapiens
  misc_RNA (1)...(19): siRNA sense strand
ugugcaagcugauaaauag

SEQ ID NO: 1911588 - RNA, 19 nt, Homo sapiens
  misc_RNA (1)...(19): siRNA sense strand
guagagaggacgaauguuc

SEQ ID NO: 1911589 - RNA, 19 nt, Homo sapiens
  misc_RNA (1)...(19): siRNA sense strand
agaggacccugauggcuuu

SEQ ID NO: 1911590 - RNA, 19 nt, Homo sapiens
  misc_RNA (1)...(19): siRNA sense strand
caaggaugauggcugcuau

SEQ ID NO: 1911591 - RNA, 19 nt, Homo sapiens
  misc_RNA (1)...(19): siRNA sense strand
uuaagcagauggagcaaau

SEQ ID NO: 1911592 - RNA, 19 nt, Homo sapiens
  misc_RNA (1)...(19): siRNA sense strand
cagaaccaccgacaucuuu

SEQ ID NO: 1911593 - RNA, 19 nt, Homo sapiens
  misc_RNA (1)...(19): siRNA sense strand
caagagcccauacccaaga

SEQ ID NO: 1911594 - RNA, 19 nt, Homo sapiens
  misc_RNA (1)...(19): siRNA sense strand
gccaccuccuguucauuua

SEQ ID NO: 1911595 - RNA, 19 nt, Homo sapiens
  misc_RNA (1)...(19): siRNA sense strand
aggagaagaucgagcagaa

SEQ ID NO: 1911596 - RNA, 19 nt, Homo sapiens
  misc_RNA (1)...(19): siRNA sense strand
ggaaagcccagcagaaucg

SEQ ID NO: 1911597 - RNA, 19 nt, Homo sapiens
  misc_RNA (1)...(19): siRNA sense strand
ccagggacagaacguaaua

SEQ ID NO: 1911598 - RNA, 19 nt, Homo sapiens
  misc_RNA (1)...(19): siRNA sense strand
gcggagaccuaugguguca

SEQ ID NO: 1911599 - RNA, 19 nt, Homo sapiens
  misc_RNA (1)...(19): siRNA sense strand
gagaagaucgagcagaagu

SEQ ID NO: 1911600 - RNA, 19 nt, Homo sapiens
  misc_RNA (1)...(19): siRNA sense strand
gaccuucuccucuuucuca

SEQ ID NO: 1911601 - RNA, 19 nt, Homo sapiens
  misc_RNA (1)...(19): siRNA sense strand
ggcccgagcuauggcuuaa

SEQ ID NO: 1911602 - RNA, 19 nt, Homo sapiens
  misc_RNA (1)...(19): siRNA sense strand
gaaccaccgacaucuuuca

SEQ ID NO: 1911603 - RNA, 19 nt, Homo sapiens
  misc_RNA (1)...(19): siRNA sense strand
gagccauccugguuucaca

SEQ ID NO: 1911604 - RNA, 19 nt, Homo sapiens
  misc_RNA (1)...(19): siRNA sense strand
gggagagccauccugguuu

SEQ ID NO: 1911605 - RNA, 19 nt, Homo sapiens
  misc_RNA (1)...(19): siRNA sense strand
ccaggcagaucauguuagg

SEQ ID NO: 1911606 - RNA, 19 nt, Homo sapiens
  misc_RNA (1)...(19): siRNA sense strand
caggaaagcccagcagaau

SEQ ID NO: 1911607 - RNA, 19 nt, Homo sapiens
  misc_RNA (1)...(19): siRNA sense strand
caaaucucccaguuccuaa

SEQ ID NO: 1911608 - RNA, 19 nt, Homo sapiens
  misc_RNA (1)...(19): siRNA sense strand
gcccaggcagaucauguua

SEQ ID NO: 1911609 - RNA, 19 nt, Homo sapiens
  misc_RNA (1)...(19): siRNA sense strand
gcagaugggcagcaacaag

SEQ ID NO: 1911610 - RNA, 19 nt, Homo sapiens
  misc_RNA (1)...(19): siRNA sense strand
agaucgagcagaaguauga

SEQ ID NO: 1911611 - RNA, 19 nt, Homo sapiens
  misc_RNA (1)...(19): siRNA sense strand
cuucugaccuucuccucuu

SEQ ID NO: 1911612 - RNA, 19 nt, Homo sapiens
  misc_RNA (1)...(19): siRNA sense strand
gagaggugcaggagaagau

SEQ ID NO: 1911613 - RNA, 19 nt, Homo sapiens
  misc_RNA (1)...(19): siRNA sense strand
augcggaccuggagaacaa

SEQ ID NO: 1911614 - RNA, 19 nt, Homo sapiens
  misc_RNA (1)...(19): siRNA sense strand
acaccauggucucuacgaa

SEQ ID NO: 1911615 - RNA, 19 nt, Homo sapiens
  misc_RNA (1)...(19): siRNA sense strand
cccaagaucucagagucaa

SEQ ID NO: 1911616 - RNA, 19 nt, Homo sapiens
  misc_RNA (1)...(19): siRNA sense strand
gcguugcagucaccaagga

SEQ ID NO: 1911617 - RNA, 19 nt, Homo sapiens
  misc_RNA (1)...(19): siRNA sense strand
cguaauaggccugcagaug

SEQ ID NO: 1911618 - RNA, 19 nt, Homo sapiens
  misc_RNA (1)...(19): siRNA sense strand
caccuccuguucauuuaga

SEQ ID NO: 1911619 - RNA, 19 nt, Homo sapiens
  misc_RNA (1)...(19): siRNA sense strand
gaauccgcguugccuacug

SEQ ID NO: 1911620 - RNA, 19 nt, Homo sapiens
  misc_RNA (1)...(19): siRNA sense strand
uuagaacuaugcaaagacu

SEQ ID NO: 1911621 - RNA, 19 nt, Homo sapiens
  misc_RNA (1)...(19): siRNA sense strand
caagaucucagagucaaag

SEQ ID NO: 1911622 - RNA, 19 nt, Homo sapiens
  misc_RNA (1)...(19): siRNA sense strand
caccauggucucuacgaaa

SEQ ID NO: 1911623 - RNA, 19 nt, Homo sapiens
  misc_RNA (1)...(19): siRNA sense strand
gcagaaucggagaggcuuu

SEQ ID NO: 1911624 - RNA, 19 nt, Homo sapiens
  misc_RNA (1)...(19): siRNA sense strand
gcccauacccaagaucuca

SEQ ID NO: 1911625 - RNA, 19 nt, Homo sapiens
  misc_RNA (1)...(19): siRNA sense strand
ccaaggaugauggcugcua

SEQ ID NO: 1911626 - RNA, 19 nt, Homo sapiens
  misc_RNA (1)...(19): siRNA sense strand
ggacccugauggcuuuagg

SEQ ID NO: 1911627 - RNA, 19 nt, Homo sapiens
  misc_RNA (1)...(19): siRNA sense strand
acaggaaagcccagcagaa

SEQ ID NO: 1911628 - RNA, 19 nt, Homo sapiens
  misc_RNA (1)...(19): siRNA sense strand
ugccaccuccuguucauuu

SEQ ID NO: 1911629 - RNA, 19 nt, Homo sapiens
  misc_RNA (1)...(19): siRNA sense strand
agaagaucgagcagaagua

SEQ ID NO: 1911630 - RNA, 19 nt, Homo sapiens
  misc_RNA (1)...(19): siRNA sense strand
ucagaaccaccgacaucuu

SEQ ID NO: 1911631 - RNA, 19 nt, Homo sapiens
  misc_RNA (1)...(19): siRNA sense strand
gcugccaccuccuguucau

SEQ ID NO: 1911632 - RNA, 19 nt, Homo sapiens
  misc_RNA (1)...(19): siRNA sense strand
gacgaauguuccacaccau

SEQ ID NO: 1911633 - RNA, 19 nt, Homo sapiens
  misc_RNA (1)...(19): siRNA sense strand
uaaaagcugcggagaccua

SEQ ID NO: 1911634 - RNA, 19 nt, Homo sapiens
  misc_RNA (1)...(19): siRNA sense strand
gaagaugucugugauuauu

SEQ ID NO: 1911635 - RNA, 19 nt, Homo sapiens
  misc_RNA (1)...(19): siRNA sense strand
gaagauuggucgagacaaa

SEQ ID NO: 1911636 - RNA, 19 nt, Homo sapiens
  misc_RNA (1)...(19): siRNA sense strand
gaccauagacuccuuauug

SEQ ID NO: 1911637 - RNA, 19 nt, Homo sapiens
  misc_RNA (1)...(19): siRNA sense strand
guacauggcauuagaauag

SEQ ID NO: 1911638 - RNA, 19 nt, Homo sapiens
  misc_RNA (1)...(19): siRNA sense strand
gagcuaugcugaauaccuu

SEQ ID NO: 1911639 - RNA, 19 nt, Homo sapiens
  misc_RNA (1)...(19): siRNA sense strand
acaaagcuccgauuacuaa

SEQ ID NO: 1911640 - RNA, 19 nt, Homo sapiens
  misc_RNA (1)...(19): siRNA sense strand
gaggaaaggaggauacaaa

SEQ ID NO: 1911641 - RNA, 19 nt, Homo sapiens
  misc_RNA (1)...(19): siRNA sense strand
uuacguggaugcauaggua

SEQ ID NO: 1911642 - RNA, 19 nt, Homo sapiens
  misc_RNA (1)...(19): siRNA sense strand
ggauacaaagcuccgauua

SEQ ID NO: 1911643 - RNA, 19 nt, Homo sapiens
  misc_RNA (1)...(19): siRNA sense strand
aagauuacguggaugcaua

SEQ ID NO: 1911644 - RNA, 19 nt, Homo sapiens
  misc_RNA (1)...(19): siRNA sense strand
aaacugaccagguaucgua

SEQ ID NO: 1911645 - RNA, 19 nt, Homo sapiens
  misc_RNA (1)...(19): siRNA sense strand
uugaagaugucugugauua

SEQ ID NO: 1911646 - RNA, 19 nt, Homo sapiens
  misc_RNA (1)...(19): siRNA sense strand
gcucuacugucaccuguau

SEQ ID NO: 1911647 - RNA, 19 nt, Homo sapiens
  misc_RNA (1)...(19): siRNA sense strand
ucacuaacuuugaagaugu

SEQ ID NO: 1911648 - RNA, 19 nt, Homo sapiens
  misc_RNA (1)...(19): siRNA sense strand
ccagugcccuuaaagauag

SEQ ID NO: 1911649 - RNA, 19 nt, Homo sapiens
  misc_RNA (1)...(19): siRNA sense strand
gaaaggaggauacaaagcu

SEQ ID NO: 1911650 - RNA, 19 nt, Homo sapiens
  misc_RNA (1)...(19): siRNA sense strand
gaccagguaucguagugaa

SEQ ID NO: 1911651 - RNA, 19 nt, Homo sapiens
  misc_RNA (1)...(19): siRNA sense strand
ccauaaaacugaccaggua

SEQ ID NO: 1911652 - RNA, 19 nt, Homo sapiens
  misc_RNA (1)...(19): siRNA sense strand
uaccggagguugcaaagga

SEQ ID NO: 1911653 - RNA, 19 nt, Homo sapiens
  misc_RNA (1)...(19): siRNA sense strand
ggguguacauggcauuaga

SEQ ID NO: 1911654 - RNA, 19 nt, Homo sapiens
  misc_RNA (1)...(19): siRNA sense strand
gacaaaagauuacguggau

SEQ ID NO: 1911655 - RNA, 19 nt, Homo sapiens
  misc_RNA (1)...(19): siRNA sense strand
gaugagcugccacggcuuu

SEQ ID NO: 1911656 - RNA, 19 nt, Homo sapiens
  misc_RNA (1)...(19): siRNA sense strand
acugucaccuguauggaua

SEQ ID NO: 1911657 - RNA, 19 nt, Homo sapiens
  misc_RNA (1)...(19): siRNA sense strand
auacaaagcuccgauuacu

SEQ ID NO: 1911658 - RNA, 19 nt, Homo sapiens
  misc_RNA (1)...(19): siRNA sense strand
agaugucugugauuauuug

SEQ ID NO: 1911659 - RNA, 19 nt, Homo sapiens
  misc_RNA (1)...(19): siRNA sense strand
gaccauauacagaccauag

SEQ ID NO: 1911660 - RNA, 19 nt, Homo sapiens
  misc_RNA (1)...(19): siRNA sense strand
accauagacuccuuauuga

SEQ ID NO: 1911661 - RNA, 19 nt, Homo sapiens
  misc_RNA (1)...(19): siRNA sense strand
gcucaucgccagcaucauc

SEQ ID NO: 1911662 - RNA, 19 nt, Homo sapiens
  misc_RNA (1)...(19): siRNA sense strand
ucgaugugcucuacuguca

SEQ ID NO: 1911663 - RNA, 19 nt, Homo sapiens
  misc_RNA (1)...(19): siRNA sense strand
ggucuaaccggaggaggua

SEQ ID NO: 1911664 - RNA, 19 nt, Homo sapiens
  misc_RNA (1)...(19): siRNA sense strand
uuuguaacauggaagauug

SEQ ID NO: 1911665 - RNA, 19 nt, Homo sapiens
  misc_RNA (1)...(19): siRNA sense strand
guggaugcauagguacuuu

SEQ ID NO: 1911666 - RNA, 19 nt, Homo sapiens
  misc_RNA (1)...(19): siRNA sense strand
ccugagcuaugcugaauac

SEQ ID NO: 1911667 - RNA, 19 nt, Homo sapiens
  misc_RNA (1)...(19): siRNA sense strand
gauacaaagcuccgauuac

SEQ ID NO: 1911668 - RNA, 19 nt, Homo sapiens
  misc_RNA (1)...(19): siRNA sense strand
ggacugggaggugggugua

SEQ ID NO: 1911669 - RNA, 19 nt, Homo sapiens
  misc_RNA (1)...(19): siRNA sense strand
uaacuuugaagaugucugu

SEQ ID NO: 1911670 - RNA, 19 nt, Homo sapiens
  misc_RNA (1)...(19): siRNA sense strand
gugaagaagcagaaacugu

SEQ ID NO: 1911671 - RNA, 19 nt, Homo sapiens
  misc_RNA (1)...(19): siRNA sense strand
ugucucugcucacuaacuu

SEQ ID NO: 1911672 - RNA, 19 nt, Homo sapiens
  misc_RNA (1)...(19): siRNA sense strand
cucagggaguacacacuua

SEQ ID NO: 1911673 - RNA, 19 nt, Homo sapiens
  misc_RNA (1)...(19): siRNA sense strand
ugaagaugucugugauuau

SEQ ID NO: 1911674 - RNA, 19 nt, Homo sapiens
  misc_RNA (1)...(19): siRNA sense strand
aaagaugacccugagcuau

SEQ ID NO: 1911675 - RNA, 19 nt, Homo sapiens
  misc_RNA (1)...(19): siRNA sense strand
aagaugacccugagcuaug

SEQ ID NO: 1911676 - RNA, 19 nt, Homo sapiens
  misc_RNA (1)...(19): siRNA sense strand
accagugcccuuaaagaua

SEQ ID NO: 1911677 - RNA, 19 nt, Homo sapiens
  misc_RNA (1)...(19): siRNA sense strand
cgccauacaaccauuauuc

SEQ ID NO: 1911678 - RNA, 19 nt, Homo sapiens
  misc_RNA (1)...(19): siRNA sense strand
uaccagugcccuuaaagau

SEQ ID NO: 1911679 - RNA, 19 nt, Homo sapiens
  misc_RNA (1)...(19): siRNA sense strand
gcuucgaugugcucuacug

SEQ ID NO: 1911680 - RNA, 19 nt, Homo sapiens
  misc_RNA (1)...(19): siRNA sense strand
gaauucaggaaaaccauaa

SEQ ID NO: 1911681 - RNA, 19 nt, Homo sapiens
  misc_RNA (1)...(19): siRNA sense strand
uacaaagcuccgauuacua

SEQ ID NO: 1911682 - RNA, 19 nt, Homo sapiens
  misc_RNA (1)...(19): siRNA sense strand
ggaaaggaggauacaaagc

SEQ ID NO: 1911683 - RNA, 19 nt, Homo sapiens
  misc_RNA (1)...(19): siRNA sense strand
uacauggcauuagaauaga

SEQ ID NO: 1911684 - RNA, 19 nt, Homo sapiens
  misc_RNA (1)...(19): siRNA sense strand
ccagcaucaucauuuccaa

SEQ ID NO: 1911685 - RNA, 19 nt, Homo sapiens
  misc_RNA (1)...(19): siRNA sense strand
cagcaucaucauuuccaaa

SEQ ID NO: 1911686 - RNA, 19 nt, Homo sapiens
  misc_RNA (1)...(19): siRNA sense strand
gcucacuaacuuugaagau

SEQ ID NO: 1911687 - RNA, 19 nt, Homo sapiens
  misc_RNA (1)...(19): siRNA sense strand
gguggugucagcagagaug

SEQ ID NO: 1911688 - RNA, 19 nt, Homo sapiens
  misc_RNA (1)...(19): siRNA sense strand
acauggcauuagaauagaa

SEQ ID NO: 1911689 - RNA, 19 nt, Homo sapiens
  misc_RNA (1)...(19): siRNA sense strand
ggaguggggacccuacuuu

SEQ ID NO: 1911690 - RNA, 19 nt, Homo sapiens
  misc_RNA (1)...(19): siRNA sense strand
ucugcucacuaacuuugaa

SEQ ID NO: 1911691 - RNA, 19 nt, Homo sapiens
  misc_RNA (1)...(19): siRNA sense strand
ucgccagcaucaucauuuc

SEQ ID NO: 1911692 - RNA, 19 nt, Homo sapiens
  misc_RNA (1)...(19): siRNA sense strand
cucacuaacuuugaagaug

SEQ ID NO: 1911693 - RNA, 19 nt, Homo sapiens
  misc_RNA (1)...(19): siRNA sense strand
guacagagaugacauuaca

SEQ ID NO: 1911694 - RNA, 19 nt, Homo sapiens
  misc_RNA (1)...(19): siRNA sense strand
cgacugauauugauguuaa

SEQ ID NO: 1911695 - RNA, 19 nt, Homo sapiens
  misc_RNA (1)...(19): siRNA sense strand
gaacugagcaggaucuaug

SEQ ID NO: 1911696 - RNA, 19 nt, Homo sapiens
  misc_RNA (1)...(19): siRNA sense strand
uaaggaggcucuaauuaau

SEQ ID NO: 1911697 - RNA, 19 nt, Homo sapiens
  misc_RNA (1)...(19): siRNA sense strand
gcauccaaauuguacuuua

SEQ ID NO: 1911698 - RNA, 19 nt, Homo sapiens
  misc_RNA (1)...(19): siRNA sense strand
guucaauucucauguugua

SEQ ID NO: 1911699 - RNA, 19 nt, Homo sapiens
  misc_RNA (1)...(19): siRNA sense strand
caaucaagcugccugcaaa

SEQ ID NO: 1911700 - RNA, 19 nt, Homo sapiens
  misc_RNA (1)...(19): siRNA sense strand
gauguaaaguucaaaugga

SEQ ID NO: 1911701 - RNA, 19 nt, Homo sapiens
  misc_RNA (1)...(19): siRNA sense strand
guaaggaggcauccaaauu

SEQ ID NO: 1911702 - RNA, 19 nt, Homo sapiens
  misc_RNA (1)...(19): siRNA sense strand
gcaaguuggugauccuaau

SEQ ID NO: 1911703 - RNA, 19 nt, Homo sapiens
  misc_RNA (1)...(19): siRNA sense strand
guuaaggaggcucuaauua

SEQ ID NO: 1911704 - RNA, 19 nt, Homo sapiens
  misc_RNA (1)...(19): siRNA sense strand
gauuaaggccacaggauaa

SEQ ID NO: 1911705 - RNA, 19 nt, Homo sapiens
  misc_RNA (1)...(19): siRNA sense strand
gaacuagaacggcugaaau

SEQ ID NO: 1911706 - RNA, 19 nt, Homo sapiens
  misc_RNA (1)...(19): siRNA sense strand
ccaaguuuauuccuccuaa

SEQ ID NO: 1911707 - RNA, 19 nt, Homo sapiens
  misc_RNA (1)...(19): siRNA sense strand
uaaggaggcauccaaauug

SEQ ID NO: 1911708 - RNA, 19 nt, Homo sapiens
  misc_RNA (1)...(19): siRNA sense strand
ggccaagagugucgugaaa

SEQ ID NO: 1911709 - RNA, 19 nt, Homo sapiens
  misc_RNA (1)...(19): siRNA sense strand
gcccagaccaguugaauga

SEQ ID NO: 1911710 - RNA, 19 nt, Homo sapiens
  misc_RNA (1)...(19): siRNA sense strand
agacuuugcuagagauuga

SEQ ID NO: 1911711 - RNA, 19 nt, Homo sapiens
  misc_RNA (1)...(19): siRNA sense strand
guaccuaacuggcaugcau

SEQ ID NO: 1911712 - RNA, 19 nt, Homo sapiens
  misc_RNA (1)...(19): siRNA sense strand
ccaguugaaugacaaugaa

SEQ ID NO: 1911713 - RNA, 19 nt, Homo sapiens
  misc_RNA (1)...(19): siRNA sense strand
gaaacaggaucggcugcuu

SEQ ID NO: 1911714 - RNA, 19 nt, Homo sapiens
  misc_RNA (1)...(19): siRNA sense strand
ccaagagugucgugaaaca

SEQ ID NO: 1911715 - RNA, 19 nt, Homo sapiens
  misc_RNA (1)...(19): siRNA sense strand
uagaacggcugaaauugga

SEQ ID NO: 1911716 - RNA, 19 nt, Homo sapiens
  misc_RNA (1)...(19): siRNA sense strand
ccuuaaagcuaaugaauac

SEQ ID NO: 1911717 - RNA, 19 nt, Homo sapiens
  misc_RNA (1)...(19): siRNA sense strand
gcucgaauguacagagaug

SEQ ID NO: 1911718 - RNA, 19 nt, Homo sapiens
  misc_RNA (1)...(19): siRNA sense strand
cagucacgcugucuaauga

SEQ ID NO: 1911719 - RNA, 19 nt, Homo sapiens
  misc_RNA (1)...(19): siRNA sense strand
caugagacuuugcuagaga

SEQ ID NO: 1911720 - RNA, 19 nt, Homo sapiens
  misc_RNA (1)...(19): siRNA sense strand
ggacagaugcauggccuuu

SEQ ID NO: 1911721 - RNA, 19 nt, Homo sapiens
  misc_RNA (1)...(19): siRNA sense strand
cgauuaaggccacaggaua

SEQ ID NO: 1911722 - RNA, 19 nt, Homo sapiens
  misc_RNA (1)...(19): siRNA sense strand
ucaguucaauucucauguu

SEQ ID NO: 1911723 - RNA, 19 nt, Homo sapiens
  misc_RNA (1)...(19): siRNA sense strand
gaaaggagaaccaaaaugu

SEQ ID NO: 1911724 - RNA, 19 nt, Homo sapiens
  misc_RNA (1)...(19): siRNA sense strand
ccacaaugcucaaaaugaa

SEQ ID NO: 1911725 - RNA, 19 nt, Homo sapiens
  misc_RNA (1)...(19): siRNA sense strand
ggauaaguuucugguguug

SEQ ID NO: 1911726 - RNA, 19 nt, Homo sapiens
  misc_RNA (1)...(19): siRNA sense strand
gacaaugaauauaccaagu

SEQ ID NO: 1911727 - RNA, 19 nt, Homo sapiens
  misc_RNA (1)...(19): siRNA sense strand
uuuaacagcuugaggacuu

SEQ ID NO: 1911728 - RNA, 19 nt, Homo sapiens
  misc_RNA (1)...(19): siRNA sense strand
ucacacaccuccuuaucuc

SEQ ID NO: 1911729 - RNA, 19 nt, Homo sapiens
  misc_RNA (1)...(19): siRNA sense strand
gcagucacgcugucuaaug

SEQ ID NO: 1911730 - RNA, 19 nt, Homo sapiens
  misc_RNA (1)...(19): siRNA sense strand
ccucacaccuccacaaguc

SEQ ID NO: 1911731 - RNA, 19 nt, Homo sapiens
  misc_RNA (1)...(19): siRNA sense strand
gaucaugagcgccucucua

SEQ ID NO: 1911732 - RNA, 19 nt, Homo sapiens
  misc_RNA (1)...(19): siRNA sense strand
gucaauagcauccuuaaag

SEQ ID NO: 1911733 - RNA, 19 nt, Homo sapiens
  misc_RNA (1)...(19): siRNA sense strand
caaggaaggagauaugcuu

SEQ ID NO: 1911734 - RNA, 19 nt, Homo sapiens
  misc_RNA (1)...(19): siRNA sense strand
gcaaucaagcugccugcaa

SEQ ID NO: 1911735 - RNA, 19 nt, Homo sapiens
  misc_RNA (1)...(19): siRNA sense strand
caagucaauagcauccuua

SEQ ID NO: 1911736 - RNA, 19 nt, Homo sapiens
  misc_RNA (1)...(19): siRNA sense strand
uuauauugcuggcucuuug

SEQ ID NO: 1911737 - RNA, 19 nt, Homo sapiens
  misc_RNA (1)...(19): siRNA sense strand
gcagcaacccaucucauuc

SEQ ID NO: 1911738 - RNA, 19 nt, Homo sapiens
  misc_RNA (1)...(19): siRNA sense strand
gauugugggugaguaccua

SEQ ID NO: 1911739 - RNA, 19 nt, Homo sapiens
  misc_RNA (1)...(19): siRNA sense strand
auaaugacaucuccuugga

SEQ ID NO: 1911740 - RNA, 19 nt, Homo sapiens
  misc_RNA (1)...(19): siRNA sense strand
gugagucgacugauauuga

SEQ ID NO: 1911741 - RNA, 19 nt, Homo sapiens
  misc_RNA (1)...(19): siRNA sense strand
ggaaucccagucagaaguu

SEQ ID NO: 1911742 - RNA, 19 nt, Homo sapiens
  misc_RNA (1)...(19): siRNA sense strand
agagaugacauuacaauca

SEQ ID NO: 1911743 - RNA, 19 nt, Homo sapiens
  misc_RNA (1)...(19): siRNA sense strand
ggcaggaugugguuaggau

SEQ ID NO: 1911744 - RNA, 19 nt, Homo sapiens
  misc_RNA (1)...(19): siRNA sense strand
gaagaggacggcucauggu

SEQ ID NO: 1911745 - RNA, 19 nt, Homo sapiens
  misc_RNA (1)...(19): siRNA sense strand
ucuauggcacugcauguua

SEQ ID NO: 1911746 - RNA, 19 nt, Homo sapiens
  misc_RNA (1)...(19): siRNA sense strand
acagaugcauggccuuuua

SEQ ID NO: 1911747 - RNA, 19 nt, Homo sapiens
  misc_RNA (1)...(19): siRNA sense strand
gacaggagaaugugugugu

SEQ ID NO: 1911748 - RNA, 19 nt, Homo sapiens
  misc_RNA (1)...(19): siRNA sense strand
caaaagagagugauagaau

SEQ ID NO: 1911749 - RNA, 19 nt, Homo sapiens
  misc_RNA (1)...(19): siRNA sense strand
uuucaaagugccagaauuu

SEQ ID NO: 1911750 - RNA, 19 nt, Homo sapiens
  misc_RNA (1)...(19): siRNA sense strand
ucaauagcauccuuaaagc

SEQ ID NO: 1911751 - RNA, 19 nt, Homo sapiens
  misc_RNA (1)...(19): siRNA sense strand
ccagaccaguugaaugaca

SEQ ID NO: 1911752 - RNA, 19 nt, Homo sapiens
  misc_RNA (1)...(19): siRNA sense strand
ggagauguaaaguucaaau

SEQ ID NO: 1911753 - RNA, 19 nt, Homo sapiens
  misc_RNA (1)...(19): siRNA sense strand
gcaccccaaugauuacuuu

SEQ ID NO: 1911754 - RNA, 19 nt, Homo sapiens
  misc_RNA (1)...(19): siRNA sense strand
guaguucaguucaauucuc

SEQ ID NO: 1911755 - RNA, 19 nt, Homo sapiens
  misc_RNA (1)...(19): siRNA sense strand
gaaugacaaugaauauacc

SEQ ID NO: 1911756 - RNA, 19 nt, Homo sapiens
  misc_RNA (1)...(19): siRNA sense strand
caaguuggugauccuaauu

SEQ ID NO: 1911757 - RNA, 19 nt, Homo sapiens
  misc_RNA (1)...(19): siRNA sense strand
ugagucgacugauauugau

SEQ ID NO: 1911758 - RNA, 19 nt, Homo sapiens
  misc_RNA (1)...(19): siRNA sense strand
ccacaccacagaaauuuua

SEQ ID NO: 1911759 - RNA, 19 nt, Homo sapiens
  misc_RNA (1)...(19): siRNA sense strand
gagauguaaaguucaaaug

SEQ ID NO: 1911760 - RNA, 19 nt, Homo sapiens
  misc_RNA (1)...(19): siRNA sense strand
cgaauuggaaucccaguca

SEQ ID NO: 1911761 - RNA, 19 nt, Homo sapiens
  misc_RNA (1)...(19): siRNA sense strand
uuggugauccuaauucuuu

SEQ ID NO: 1911762 - RNA, 19 nt, Homo sapiens
  misc_RNA (1)...(19): siRNA sense strand
guuucaaagugccagaauu

SEQ ID NO: 1911763 - RNA, 19 nt, Homo sapiens
  misc_RNA (1)...(19): siRNA sense strand
acacaccucauccagcaua

SEQ ID NO: 1911764 - RNA, 19 nt, Homo sapiens
  misc_RNA (1)...(19): siRNA sense strand
uagggcauuuggagaugua

SEQ ID NO: 1911765 - RNA, 19 nt, Homo sapiens
  misc_RNA (1)...(19): siRNA sense strand
uuaacagcuugaggacuua

SEQ ID NO: 1911766 - RNA, 19 nt, Homo sapiens
  misc_RNA (1)...(19): siRNA sense strand
ggaggcauccaaauuguac

SEQ ID NO: 1911767 - RNA, 19 nt, Homo sapiens
  misc_RNA (1)...(19): siRNA sense strand
aaaugucaguucuauccuu

SEQ ID NO: 1911768 - RNA, 19 nt, Homo sapiens
  misc_RNA (1)...(19): siRNA sense strand
acuggugagucgacugaua

SEQ ID NO: 1911769 - RNA, 19 nt, Homo sapiens
  misc_RNA (1)...(19): siRNA sense strand
caacgaguuugggacuguu

SEQ ID NO: 1911770 - RNA, 19 nt, Homo sapiens
  misc_RNA (1)...(19): siRNA sense strand
gaacgcagcaacccaucuc

SEQ ID NO: 1911771 - RNA, 19 nt, Homo sapiens
  misc_RNA (1)...(19): siRNA sense strand
uaacagaaaggagaaccaa

SEQ ID NO: 1911772 - RNA, 19 nt, Homo sapiens
  misc_RNA (1)...(19): siRNA sense strand
aggauaaguuucugguguu

SEQ ID NO: 1911773 - RNA, 19 nt, Homo sapiens
  misc_RNA (1)...(19): siRNA sense strand
cagaccaguugaaugacaa

SEQ ID NO: 1911774 - RNA, 19 nt, Homo sapiens
  misc_RNA (1)...(19): siRNA sense strand
caaguuuauuccuccuaau

SEQ ID NO: 1911775 - RNA, 19 nt, Homo sapiens
  misc_RNA (1)...(19): siRNA sense strand
acaagucaauagcauccuu

SEQ ID NO: 1911776 - RNA, 19 nt, Homo sapiens
  misc_RNA (1)...(19): siRNA sense strand
caguucaauucucauguug

SEQ ID NO: 1911777 - RNA, 19 nt, Homo sapiens
  misc_RNA (1)...(19): siRNA sense strand
agcaccaacucaacuguuu

SEQ ID NO: 1911778 - RNA, 19 nt, Homo sapiens
  misc_RNA (1)...(19): siRNA sense strand
aaggaggcauccaaauugu

SEQ ID NO: 1911779 - RNA, 19 nt, Homo sapiens
  misc_RNA (1)...(19): siRNA sense strand
acaagcaccccaaugauua

SEQ ID NO: 1911780 - RNA, 19 nt, Homo sapiens
  misc_RNA (1)...(19): siRNA sense strand
uaaggccacaggauaaguu

SEQ ID NO: 1911781 - RNA, 19 nt, Homo sapiens
  misc_RNA (1)...(19): siRNA sense strand
gcauaggcaggaugugguu

SEQ ID NO: 1911782 - RNA, 19 nt, Homo sapiens
  misc_RNA (1)...(19): siRNA sense strand
gggcacugcuacccauucu

SEQ ID NO: 1911783 - RNA, 19 nt, Homo sapiens
  misc_RNA (1)...(19): siRNA sense strand
acagagaugacauuacaau

SEQ ID NO: 1911784 - RNA, 19 nt, Homo sapiens
  misc_RNA (1)...(19): siRNA sense strand
caugagcgccucucuaaaa

SEQ ID NO: 1911785 - RNA, 19 nt, Homo sapiens
  misc_RNA (1)...(19): siRNA sense strand
guuccagccugccacuguu

SEQ ID NO: 1911786 - RNA, 19 nt, Homo sapiens
  misc_RNA (1)...(19): siRNA sense strand
gauccuaauucuuuucuca

SEQ ID NO: 1911787 - RNA, 19 nt, Homo sapiens
  misc_RNA (1)...(19): siRNA sense strand
gagcuuauagaccucaaca

SEQ ID NO: 1911788 - RNA, 19 nt, Homo sapiens
  misc_RNA (1)...(19): siRNA sense strand
uaguucaguucaauucuca

SEQ ID NO: 1911789 - RNA, 19 nt, Homo sapiens
  misc_RNA (1)...(19): siRNA sense strand
agagugaggccaagagugu

SEQ ID NO: 1911790 - RNA, 19 nt, Homo sapiens
  misc_RNA (1)...(19): siRNA sense strand
uaauuaaugccuucaagag

SEQ ID NO: 1911791 - RNA, 19 nt, Homo sapiens
  misc_RNA (1)...(19): siRNA sense strand
cuaauuaaugccuucaaga

SEQ ID NO: 1911792 - RNA, 19 nt, Homo sapiens
  misc_RNA (1)...(19): siRNA sense strand
gauguuaaggaggcucuaa

SEQ ID NO: 1911793 - RNA, 19 nt, Homo sapiens
  misc_RNA (1)...(19): siRNA sense strand
ugaagaagcugaaauauuc

SEQ ID NO: 1911794 - RNA, 19 nt, Homo sapiens
  misc_RNA (1)...(19): siRNA sense strand
caaggaugauucugauuua

SEQ ID NO: 1911795 - RNA, 19 nt, Homo sapiens
  misc_RNA (1)...(19): siRNA sense strand
guacuaaugccaugauuua

SEQ ID NO: 1911796 - RNA, 19 nt, Homo sapiens
  misc_RNA (1)...(19): siRNA sense strand
gaaggaaucuggaggaaag

SEQ ID NO: 1911797 - RNA, 19 nt, Homo sapiens
  misc_RNA (1)...(19): siRNA sense strand
gcaaguaacuccaggugau

SEQ ID NO: 1911798 - RNA, 19 nt, Homo sapiens
  misc_RNA (1)...(19): siRNA sense strand
ccagagaccauuuauuaua

SEQ ID NO: 1911799 - RNA, 19 nt, Homo sapiens
  misc_RNA (1)...(19): siRNA sense strand
gcaauaauuuagagagaga

SEQ ID NO: 1911800 - RNA, 19 nt, Homo sapiens
  misc_RNA (1)...(19): siRNA sense strand
caagugaccaauaaucuua

SEQ ID NO: 1911801 - RNA, 19 nt, Homo sapiens
  misc_RNA (1)...(19): siRNA sense strand
gcaaggaugauucugauuu

SEQ ID NO: 1911802 - RNA, 19 nt, Homo sapiens
  misc_RNA (1)...(19): siRNA sense strand
gagaccagguggagaauga

SEQ ID NO: 1911803 - RNA, 19 nt, Homo sapiens
  misc_RNA (1)...(19): siRNA sense strand
acaaagauaugcuugaaga

SEQ ID NO: 1911804 - RNA, 19 nt, Homo sapiens
  misc_RNA (1)...(19): siRNA sense strand
aaccagagaccauuuauua

SEQ ID NO: 1911805 - RNA, 19 nt, Homo sapiens
  misc_RNA (1)...(19): siRNA sense strand
gcugaaauauuccagaaga

SEQ ID NO: 1911806 - RNA, 19 nt, Homo sapiens
  misc_RNA (1)...(19): siRNA sense strand
gaacagucagugcgaauuu

SEQ ID NO: 1911807 - RNA, 19 nt, Homo sapiens
  misc_RNA (1)...(19): siRNA sense strand
gaacaugaucugucucuug

SEQ ID NO: 1911808 - RNA, 19 nt, Homo sapiens
  misc_RNA (1)...(19): siRNA sense strand
gcaagaagcacaagaagca

SEQ ID NO: 1911809 - RNA, 19 nt, Homo sapiens
  misc_RNA (1)...(19): siRNA sense strand
gaagaugaaggccauacua

SEQ ID NO: 1911810 - RNA, 19 nt, Homo sapiens
  misc_RNA (1)...(19): siRNA sense strand
gaacaagugaccaauaauc

SEQ ID NO: 1911811 - RNA, 19 nt, Homo sapiens
  misc_RNA (1)...(19): siRNA sense strand
gcuacuccaugaucauuaa

SEQ ID NO: 1911812 - RNA, 19 nt, Homo sapiens
  misc_RNA (1)...(19): siRNA sense strand
caaacaagaagaaguagaa

SEQ ID NO: 1911813 - RNA, 19 nt, Homo sapiens
  misc_RNA (1)...(19): siRNA sense strand
cugaacaagugaccaauaa

SEQ ID NO: 1911814 - RNA, 19 nt, Homo sapiens
  misc_RNA (1)...(19): siRNA sense strand
gaagcugguccucaaagua

SEQ ID NO: 1911815 - RNA, 19 nt, Homo sapiens
  misc_RNA (1)...(19): siRNA sense strand
cauuaugacuccacauuug

SEQ ID NO: 1911816 - RNA, 19 nt, Homo sapiens
  misc_RNA (1)...(19): siRNA sense strand
cacaagcucuuuagccaaa

SEQ ID NO: 1911817 - RNA, 19 nt, Homo sapiens
  misc_RNA (1)...(19): siRNA sense strand
uuauaaagcugcaaagaag

SEQ ID NO: 1911818 - RNA, 19 nt, Homo sapiens
  misc_RNA (1)...(19): siRNA sense strand
gcugaaagcaguaacaaau

SEQ ID NO: 1911819 - RNA, 19 nt, Homo sapiens
  misc_RNA (1)...(19): siRNA sense strand
aaagaaauggagcagauua

SEQ ID NO: 1911820 - RNA, 19 nt, Homo sapiens
  misc_RNA (1)...(19): siRNA sense strand
acucugaucuuccaaguga

SEQ ID NO: 1911821 - RNA, 19 nt, Homo sapiens
  misc_RNA (1)...(19): siRNA sense strand
gaaaggagagaagcagauu

SEQ ID NO: 1911822 - RNA, 19 nt, Homo sapiens
  misc_RNA (1)...(19): siRNA sense strand
gcuccuggcuacuccauga

SEQ ID NO: 1911823 - RNA, 19 nt, Homo sapiens
  misc_RNA (1)...(19): siRNA sense strand
agacaaagauaugcuugaa

SEQ ID NO: 1911824 - RNA, 19 nt, Homo sapiens
  misc_RNA (1)...(19): siRNA sense strand
cuaaugccaugauuuacaa

SEQ ID NO: 1911825 - RNA, 19 nt, Homo sapiens
  misc_RNA (1)...(19): siRNA sense strand
ggagcagauuacagaagua

SEQ ID NO: 1911826 - RNA, 19 nt, Homo sapiens
  misc_RNA (1)...(19): siRNA sense strand
ugucauggcagauaguuua

SEQ ID NO: 1911827 - RNA, 19 nt, Homo sapiens
  misc_RNA (1)...(19): siRNA sense strand
ugagacaauugcagagaaa

SEQ ID NO: 1911828 - RNA, 19 nt, Homo sapiens
  misc_RNA (1)...(19): siRNA sense strand
gaugaaggccauacuagga

SEQ ID NO: 1911829 - RNA, 19 nt, Homo sapiens
  misc_RNA (1)...(19): siRNA sense strand
gaaagacaaagauaugcuu

SEQ ID NO: 1911830 - RNA, 19 nt, Homo sapiens
  misc_RNA (1)...(19): siRNA sense strand
gaacuaaaggauaacuuca

SEQ ID NO: 1911831 - RNA, 19 nt, Homo sapiens
  misc_RNA (1)...(19): siRNA sense strand
gaucaagaacaaugacuau

SEQ ID NO: 1911832 - RNA, 19 nt, Homo sapiens
  misc_RNA (1)...(19): siRNA sense strand
gugccaagauuauccguau

SEQ ID NO: 1911833 - RNA, 19 nt, Homo sapiens
  misc_RNA (1)...(19): siRNA sense strand
gacagaagacacugaagaa

SEQ ID NO: 1911834 - RNA, 19 nt, Homo sapiens
  misc_RNA (1)...(19): siRNA sense strand
agaaaugcaucuugcugaa

SEQ ID NO: 1911835 - RNA, 19 nt, Homo sapiens
  misc_RNA (1)...(19): siRNA sense strand
uuaaacacccaauggauuu

SEQ ID NO: 1911836 - RNA, 19 nt, Homo sapiens
  misc_RNA (1)...(19): siRNA sense strand
gcauuaugacuccacauuu

SEQ ID NO: 1911837 - RNA, 19 nt, Homo sapiens
  misc_RNA (1)...(19): siRNA sense strand
gugcgaauuugaaagaaga

SEQ ID NO: 1911838 - RNA, 19 nt, Homo sapiens
  misc_RNA (1)...(19): siRNA sense strand
gaaaagaucaagaacaaug

SEQ ID NO: 1911839 - RNA, 19 nt, Homo sapiens
  misc_RNA (1)...(19): siRNA sense strand
cagcaaggaugauucugau

SEQ ID NO: 1911840 - RNA, 19 nt, Homo sapiens
  misc_RNA (1)...(19): siRNA sense strand
ggaacgaagucaccgaacu

SEQ ID NO: 1911841 - RNA, 19 nt, Homo sapiens
  misc_RNA (1)...(19): siRNA sense strand
caaaagaaauggagcagau

SEQ ID NO: 1911842 - RNA, 19 nt, Homo sapiens
  misc_RNA (1)...(19): siRNA sense strand
gaaagaaaggagagaagca

SEQ ID NO: 1911843 - RNA, 19 nt, Homo sapiens
  misc_RNA (1)...(19): siRNA sense strand
caagaacaaugacuaucag

SEQ ID NO: 1911844 - RNA, 19 nt, Homo sapiens
  misc_RNA (1)...(19): siRNA sense strand
gcugaacaagugaccaaua

SEQ ID NO: 1911845 - RNA, 19 nt, Homo sapiens
  misc_RNA (1)...(19): siRNA sense strand
ucaagaacaaugacuauca

SEQ ID NO: 1911846 - RNA, 19 nt, Homo sapiens
  misc_RNA (1)...(19): siRNA sense strand
gcacguauggaguucgaaa

SEQ ID NO: 1911847 - RNA, 19 nt, Homo sapiens
  misc_RNA (1)...(19): siRNA sense strand
uacaagagauggagauguc

SEQ ID NO: 1911848 - RNA, 19 nt, Homo sapiens
  misc_RNA (1)...(19): siRNA sense strand
caagaguuaaggaggauaa

SEQ ID NO: 1911849 - RNA, 19 nt, Homo sapiens
  misc_RNA (1)...(19): siRNA sense strand
caaguaacuccaggugaua

SEQ ID NO: 1911850 - RNA, 19 nt, Homo sapiens
  misc_RNA (1)...(19): siRNA sense strand
agucuggagugaauacuuu

SEQ ID NO: 1911851 - RNA, 19 nt, Homo sapiens
  misc_RNA (1)...(19): siRNA sense strand
gcacgacuccagccucuuc

SEQ ID NO: 1911852 - RNA, 19 nt, Homo sapiens
  misc_RNA (1)...(19): siRNA sense strand
gaacgaagucaccgaacuc

SEQ ID NO: 1911853 - RNA, 19 nt, Homo sapiens
  misc_RNA (1)...(19): siRNA sense strand
ugacagaagacacugaaga

SEQ ID NO: 1911854 - RNA, 19 nt, Homo sapiens
  misc_RNA (1)...(19): siRNA sense strand
aagcugaaauauuccagaa

SEQ ID NO: 1911855 - RNA, 19 nt, Homo sapiens
  misc_RNA (1)...(19): siRNA sense strand
aaugacaacuggaagacuu

SEQ ID NO: 1911856 - RNA, 19 nt, Homo sapiens
  misc_RNA (1)...(19): siRNA sense strand
ggaacagacaccucacaga

SEQ ID NO: 1911857 - RNA, 19 nt, Homo sapiens
  misc_RNA (1)...(19): siRNA sense strand
aaaugcaucuugcugaaca

SEQ ID NO: 1911858 - RNA, 19 nt, Homo sapiens
  misc_RNA (1)...(19): siRNA sense strand
ccaggaagcccagaaugaa

SEQ ID NO: 1911859 - RNA, 19 nt, Homo sapiens
  misc_RNA (1)...(19): siRNA sense strand
aaauggagcagauuacaga

SEQ ID NO: 1911860 - RNA, 19 nt, Homo sapiens
  misc_RNA (1)...(19): siRNA sense strand
caaaguaggagggaacgaa

SEQ ID NO: 1911861 - RNA, 19 nt, Homo sapiens
  misc_RNA (1)...(19): siRNA sense strand
agacuugccuccugagaag

SEQ ID NO: 1911862 - RNA, 19 nt, Homo sapiens
  misc_RNA (1)...(19): siRNA sense strand
gaaauauuccagaagaaac

SEQ ID NO: 1911863 - RNA, 19 nt, Homo sapiens
  misc_RNA (1)...(19): siRNA sense strand
caagagucccagcaaagaa

SEQ ID NO: 1911864 - RNA, 19 nt, Homo sapiens
  misc_RNA (1)...(19): siRNA sense strand
cugaagaagcugaaauauu

SEQ ID NO: 1911865 - RNA, 19 nt, Homo sapiens
  misc_RNA (1)...(19): siRNA sense strand
caauaaaccagagaccauu

SEQ ID NO: 1911866 - RNA, 19 nt, Homo sapiens
  misc_RNA (1)...(19): siRNA sense strand
gcucauagcgcugaaagca

SEQ ID NO: 1911867 - RNA, 19 nt, Homo sapiens
  misc_RNA (1)...(19): siRNA sense strand
gagaugucauugccugaag

SEQ ID NO: 1911868 - RNA, 19 nt, Homo sapiens
  misc_RNA (1)...(19): siRNA sense strand
caaauaucagcaaggauga

SEQ ID NO: 1911869 - RNA, 19 nt, Homo sapiens
  misc_RNA (1)...(19): siRNA sense strand
ggauaacuucaaacuaaug

SEQ ID NO: 1911870 - RNA, 19 nt, Homo sapiens
  misc_RNA (1)...(19): siRNA sense strand
cagaagaaacuugaugaga

SEQ ID NO: 1911871 - RNA, 19 nt, Homo sapiens
  misc_RNA (1)...(19): siRNA sense strand
gauaguuuacuggauguuu

SEQ ID NO: 1911872 - RNA, 19 nt, Homo sapiens
  misc_RNA (1)...(19): siRNA sense strand
cgaggaguauguagagaag

SEQ ID NO: 1911873 - RNA, 19 nt, Homo sapiens
  misc_RNA (1)...(19): siRNA sense strand
gacaagaguuaaggaggau

SEQ ID NO: 1911874 - RNA, 19 nt, Homo sapiens
  misc_RNA (1)...(19): siRNA sense strand
cauuuccugugacugauuu

SEQ ID NO: 1911875 - RNA, 19 nt, Homo sapiens
  misc_RNA (1)...(19): siRNA sense strand
gcucagggaacuccaggaa

SEQ ID NO: 1911876 - RNA, 19 nt, Homo sapiens
  misc_RNA (1)...(19): siRNA sense strand
gugaaggaaucuggaggaa

SEQ ID NO: 1911877 - RNA, 19 nt, Homo sapiens
  misc_RNA (1)...(19): siRNA sense strand
gagagcaggagcagcuuga

SEQ ID NO: 1911878 - RNA, 19 nt, Homo sapiens
  misc_RNA (1)...(19): siRNA sense strand
acaaacacaaggacagaaa

SEQ ID NO: 1911879 - RNA, 19 nt, Homo sapiens
  misc_RNA (1)...(19): siRNA sense strand
guaagcacguauggaguuc

SEQ ID NO: 1911880 - RNA, 19 nt, Homo sapiens
  misc_RNA (1)...(19): siRNA sense strand
gaaauggagcagauuacag

SEQ ID NO: 1911881 - RNA, 19 nt, Homo sapiens
  misc_RNA (1)...(19): siRNA sense strand
ccaggacccuacaagagau

SEQ ID NO: 1911882 - RNA, 19 nt, Homo sapiens
  misc_RNA (1)...(19): siRNA sense strand
gaaagaagaaaaccagaug

SEQ ID NO: 1911883 - RNA, 19 nt, Homo sapiens
  misc_RNA (1)...(19): siRNA sense strand
gcacaagucggacaaacac

SEQ ID NO: 1911884 - RNA, 19 nt, Homo sapiens
  misc_RNA (1)...(19): siRNA sense strand
cuucaagagucccagcaaa

SEQ ID NO: 1911885 - RNA, 19 nt, Homo sapiens
  misc_RNA (1)...(19): siRNA sense strand
cauagaagaacuaaaggau

SEQ ID NO: 1911886 - RNA, 19 nt, Homo sapiens
  misc_RNA (1)...(19): siRNA sense strand
gaacagacaccccuucaag

SEQ ID NO: 1911887 - RNA, 19 nt, Homo sapiens
  misc_RNA (1)...(19): siRNA sense strand
gcagauuacagaaguagag

SEQ ID NO: 1911888 - RNA, 19 nt, Homo sapiens
  misc_RNA (1)...(19): siRNA sense strand
gggaaugacaacuggaaga

SEQ ID NO: 1911889 - RNA, 19 nt, Homo sapiens
  misc_RNA (1)...(19): siRNA sense strand
ucagugcgaauuugaaaga

SEQ ID NO: 1911890 - RNA, 19 nt, Homo sapiens
  misc_RNA (1)...(19): siRNA sense strand
ucaagagucccagcaaaga

SEQ ID NO: 1911891 - RNA, 19 nt, Homo sapiens
  misc_RNA (1)...(19): siRNA sense strand
gaugagaccaccagauugc

SEQ ID NO: 1911892 - RNA, 19 nt, Homo sapiens
  misc_RNA (1)...(19): siRNA sense strand
ggagaugucauugccugaa

SEQ ID NO: 1911893 - RNA, 19 nt, Homo sapiens
  misc_RNA (1)...(19): siRNA sense strand
ggagagauuuaaagcaauu

SEQ ID NO: 1911894 - RNA, 19 nt, Homo sapiens
  misc_RNA (1)...(19): siRNA sense strand
gaaguuauuugccgaggau

SEQ ID NO: 1911895 - RNA, 19 nt, Homo sapiens
  misc_RNA (1)...(19): siRNA sense strand
ucauacaccuacugugaua

SEQ ID NO: 1911896 - RNA, 19 nt, Homo sapiens
  misc_RNA (1)...(19): siRNA sense strand
gaggaucugaugacgauua

SEQ ID NO: 1911897 - RNA, 19 nt, Homo sapiens
  misc_RNA (1)...(19): siRNA sense strand
ccaaagcgcaaagaaguua

SEQ ID NO: 1911898 - RNA, 19 nt, Homo sapiens
  misc_RNA (1)...(19): siRNA sense strand
aaggagagauuuaaagcaa

SEQ ID NO: 1911899 - RNA, 19 nt, Homo sapiens
  misc_RNA (1)...(19): siRNA sense strand
gaagggagagacugugaau

SEQ ID NO: 1911900 - RNA, 19 nt, Homo sapiens
  misc_RNA (1)...(19): siRNA sense strand
acaccaaccuaauucaaau

SEQ ID NO: 1911901 - RNA, 19 nt, Homo sapiens
  misc_RNA (1)...(19): siRNA sense strand
gacugugaauacaacaaua

SEQ ID NO: 1911902 - RNA, 19 nt, Homo sapiens
  misc_RNA (1)...(19): siRNA sense strand
ggagagacugugaauacaa

SEQ ID NO: 1911903 - RNA, 19 nt, Homo sapiens
  misc_RNA (1)...(19): siRNA sense strand
gagagacugugaauacaac

SEQ ID NO: 1911904 - RNA, 19 nt, Homo sapiens
  misc_RNA (1)...(19): siRNA sense strand
caauaucauucuccuucaa

SEQ ID NO: 1911905 - RNA, 19 nt, Homo sapiens
  misc_RNA (1)...(19): siRNA sense strand
ccgaggaucugaugacgau

SEQ ID NO: 1911906 - RNA, 19 nt, Homo sapiens
  misc_RNA (1)...(19): siRNA sense strand
gggagagacugugaauaca

SEQ ID NO: 1911907 - RNA, 19 nt, Homo sapiens
  misc_RNA (1)...(19): siRNA sense strand
gaauugaaaggauccaaag

SEQ ID NO: 1911908 - RNA, 19 nt, Homo sapiens
  misc_RNA (1)...(19): siRNA sense strand
caaauguguuguugaagcu

SEQ ID NO: 1911909 - RNA, 19 nt, Homo sapiens
  misc_RNA (1)...(19): siRNA sense strand
caaaggauuauugcacauu

SEQ ID NO: 1911910 - RNA, 19 nt, Homo sapiens
  misc_RNA (1)...(19): siRNA sense strand
caccaugaaucuuccaaag

SEQ ID NO: 1911911 - RNA, 19 nt, Homo sapiens
  misc_RNA (1)...(19): siRNA sense strand
ccgaugcaaguauuucaua

SEQ ID NO: 1911912 - RNA, 19 nt, Homo sapiens
  misc_RNA (1)...(19): siRNA sense strand
ccaaaggauuauugcacau

SEQ ID NO: 1911913 - RNA, 19 nt, Homo sapiens
  misc_RNA (1)...(19): siRNA sense strand
uuucauacaccuacuguga

SEQ ID NO: 1911914 - RNA, 19 nt, Homo sapiens
  misc_RNA (1)...(19): siRNA sense strand
gaucugaugacgauuacuc

SEQ ID NO: 1911915 - RNA, 19 nt, Homo sapiens
  misc_RNA (1)...(19): siRNA sense strand
acaauaucauucuccuuca

SEQ ID NO: 1911916 - RNA, 19 nt, Homo sapiens
  misc_RNA (1)...(19): siRNA sense strand
aagcucagaagcaguauug

SEQ ID NO: 1911917 - RNA, 19 nt, Homo sapiens
  misc_RNA (1)...(19): siRNA sense strand
cugaugacgauuacucuuu

SEQ ID NO: 1911918 - RNA, 19 nt, Homo sapiens
  misc_RNA (1)...(19): siRNA sense strand
ccuguuuucuuccauauuu

SEQ ID NO: 1911919 - RNA, 19 nt, Homo sapiens
  misc_RNA (1)...(19): siRNA sense strand
uacaccaaccuaauucaaa

SEQ ID NO: 1911920 - RNA, 19 nt, Homo sapiens
  misc_RNA (1)...(19): siRNA sense strand
ugcaauacccaauuucaau

SEQ ID NO: 1911921 - RNA, 19 nt, Homo sapiens
  misc_RNA (1)...(19): siRNA sense strand
ggaaaauacaaauguguug

SEQ ID NO: 1911922 - RNA, 19 nt, Homo sapiens
  misc_RNA (1)...(19): siRNA sense strand
auacaccuacugugauaaa

SEQ ID NO: 1911923 - RNA, 19 nt, Homo sapiens
  misc_RNA (1)...(19): siRNA sense strand
gucaacaccaugaaucuuc

SEQ ID NO: 1911924 - RNA, 19 nt, Homo sapiens
  misc_RNA (1)...(19): siRNA sense strand
caaggagagauuuaaagca

SEQ ID NO: 1911925 - RNA, 19 nt, Homo sapiens
  misc_RNA (1)...(19): siRNA sense strand
agaauugaaaggauccaaa

SEQ ID NO: 1911926 - RNA, 19 nt, Homo sapiens
  misc_RNA (1)...(19): siRNA sense strand
gaagcucagaagcaguauu

SEQ ID NO: 1911927 - RNA, 19 nt, Homo sapiens
  misc_RNA (1)...(19): siRNA sense strand
ugaugacgauuacucuuuu

SEQ ID NO: 1911928 - RNA, 19 nt, Homo sapiens
  misc_RNA (1)...(19): siRNA sense strand
ccaaggagagauuuaaagc

SEQ ID NO: 1911929 - RNA, 19 nt, Homo sapiens
  misc_RNA (1)...(19): siRNA sense strand
caacaauaucauucuccuu

SEQ ID NO: 1911930 - RNA, 19 nt, Homo sapiens
  misc_RNA (1)...(19): siRNA sense strand
guuaaccccuguauagaau

SEQ ID NO: 1911931 - RNA, 19 nt, Homo sapiens
  misc_RNA (1)...(19): siRNA sense strand
cuacaccaaccuaauucaa

SEQ ID NO: 1911932 - RNA, 19 nt, Homo sapiens
  misc_RNA (1)...(19): siRNA sense strand
uaacugucaacaccaugaa

SEQ ID NO: 1911933 - RNA, 19 nt, Homo sapiens
  misc_RNA (1)...(19): siRNA sense strand
guauugggucugcaacuca

SEQ ID NO: 1911934 - RNA, 19 nt, Homo sapiens
  misc_RNA (1)...(19): siRNA sense strand
agggagagacugugaauac

SEQ ID NO: 1911935 - RNA, 19 nt, Homo sapiens
  misc_RNA (1)...(19): siRNA sense strand
gaacagcugugccgauuaa

SEQ ID NO: 1911936 - RNA, 19 nt, Homo sapiens
  misc_RNA (1)...(19): siRNA sense strand
gaaccgaucucaagcacaa

SEQ ID NO: 1911937 - RNA, 19 nt, Homo sapiens
  misc_RNA (1)...(19): siRNA sense strand
gaagaagcaugcacagaga

SEQ ID NO: 1911938 - RNA, 19 nt, Homo sapiens
  misc_RNA (1)...(19): siRNA sense strand
uaacauggacugugguuua

SEQ ID NO: 1911939 - RNA, 19 nt, Homo sapiens
  misc_RNA (1)...(19): siRNA sense strand
gcagauaagucucguugga

SEQ ID NO: 1911940 - RNA, 19 nt, Homo sapiens
  misc_RNA (1)...(19): siRNA sense strand
gaaguugacucccaaugug

SEQ ID NO: 1911941 - RNA, 19 nt, Homo sapiens
  misc_RNA (1)...(19): siRNA sense strand
caauggagauggagagauu

SEQ ID NO: 1911942 - RNA, 19 nt, Homo sapiens
  misc_RNA (1)...(19): siRNA sense strand
ugaagaaguuggugauuau

SEQ ID NO: 1911943 - RNA, 19 nt, Homo sapiens
  misc_RNA (1)...(19): siRNA sense strand
ucaguuagaucuucaugaa

SEQ ID NO: 1911944 - RNA, 19 nt, Homo sapiens
  misc_RNA (1)...(19): siRNA sense strand
caucagaacuuaaucuaca

SEQ ID NO: 1911945 - RNA, 19 nt, Homo sapiens
  misc_RNA (1)...(19): siRNA sense strand
gaagacgccuuaaaaugua

SEQ ID NO: 1911946 - RNA, 19 nt, Homo sapiens
  misc_RNA (1)...(19): siRNA sense strand
guuaacaacugcuucauca

SEQ ID NO: 1911947 - RNA, 19 nt, Homo sapiens
  misc_RNA (1)...(19): siRNA sense strand
aaaguagacuggacucuga

SEQ ID NO: 1911948 - RNA, 19 nt, Homo sapiens
  misc_RNA (1)...(19): siRNA sense strand
guacaaagacuucaguuag

SEQ ID NO: 1911949 - RNA, 19 nt, Homo sapiens
  misc_RNA (1)...(19): siRNA sense strand
gaauucagcuuugcgacaa

SEQ ID NO: 1911950 - RNA, 19 nt, Homo sapiens
  misc_RNA (1)...(19): siRNA sense strand
gaagaacggccgacaagug

SEQ ID NO: 1911951 - RNA, 19 nt, Homo sapiens
  misc_RNA (1)...(19): siRNA sense strand
guucaucucuggacgaaga

SEQ ID NO: 1911952 - RNA, 19 nt, Homo sapiens
  misc_RNA (1)...(19): siRNA sense strand
gaagcuaaacuaaaccaaa

SEQ ID NO: 1911953 - RNA, 19 nt, Homo sapiens
  misc_RNA (1)...(19): siRNA sense strand
gcacuucaggacuuaauaa

SEQ ID NO: 1911954 - RNA, 19 nt, Homo sapiens
  misc_RNA (1)...(19): siRNA sense strand
uuacauggaugaacucuca

SEQ ID NO: 1911955 - RNA, 19 nt, Homo sapiens
  misc_RNA (1)...(19): siRNA sense strand
agaguuccuugauauguua

SEQ ID NO: 1911956 - RNA, 19 nt, Homo sapiens
  misc_RNA (1)...(19): siRNA sense strand
cagcuuagccuggcauaua

SEQ ID NO: 1911957 - RNA, 19 nt, Homo sapiens
  misc_RNA (1)...(19): siRNA sense strand
gagagaaacaccagaugaa

SEQ ID NO: 1911958 - RNA, 19 nt, Homo sapiens
  misc_RNA (1)...(19): siRNA sense strand
gcaacacaaucugcaagaa

SEQ ID NO: 1911959 - RNA, 19 nt, Homo sapiens
  misc_RNA (1)...(19): siRNA sense strand
cgacaaugauaucuacuuc

SEQ ID NO: 1911960 - RNA, 19 nt, Homo sapiens
  misc_RNA (1)...(19): siRNA sense strand
uacaaagacuucaguuaga

SEQ ID NO: 1911961 - RNA, 19 nt, Homo sapiens
  misc_RNA (1)...(19): siRNA sense strand
cagcagauaugccaaaguc

SEQ ID NO: 1911962 - RNA, 19 nt, Homo sapiens
  misc_RNA (1)...(19): siRNA sense strand
gaugaugggccuauaaugu

SEQ ID NO: 1911963 - RNA, 19 nt, Homo sapiens
  misc_RNA (1)...(19): siRNA sense strand
aaacaaccaccauuucaaa

SEQ ID NO: 1911964 - RNA, 19 nt, Homo sapiens
  misc_RNA (1)...(19): siRNA sense strand
ccaccugcaucagaacuua

SEQ ID NO: 1911965 - RNA, 19 nt, Homo sapiens
  misc_RNA (1)...(19): siRNA sense strand
guagaugaagcuaaacuaa

SEQ ID NO: 1911966 - RNA, 19 nt, Homo sapiens
  misc_RNA (1)...(19): siRNA sense strand
guggguagaugaagcuaaa

SEQ ID NO: 1911967 - RNA, 19 nt, Homo sapiens
  misc_RNA (1)...(19): siRNA sense strand
gacgaucaaugaaugaaau

SEQ ID NO: 1911968 - RNA, 19 nt, Homo sapiens
  misc_RNA (1)...(19): siRNA sense strand
guuagaagaaucaccauuu

SEQ ID NO: 1911969 - RNA, 19 nt, Homo sapiens
  misc_RNA (1)...(19): siRNA sense strand
agacgacgaucaaugaaug

SEQ ID NO: 1911970 - RNA, 19 nt, Homo sapiens
  misc_RNA (1)...(19): siRNA sense strand
ccgcaucaguaaagaaauu

SEQ ID NO: 1911971 - RNA, 19 nt, Homo sapiens
  misc_RNA (1)...(19): siRNA sense strand
caagaacauucaaccacuu

SEQ ID NO: 1911972 - RNA, 19 nt, Homo sapiens
  misc_RNA (1)...(19): siRNA sense strand
ggguuugacuggcagagua

SEQ ID NO: 1911973 - RNA, 19 nt, Homo sapiens
  misc_RNA (1)...(19): siRNA sense strand
gacuagagcucaugcugau

SEQ ID NO: 1911974 - RNA, 19 nt, Homo sapiens
  misc_RNA (1)...(19): siRNA sense strand
caggaacauucuauucgua

SEQ ID NO: 1911975 - RNA, 19 nt, Homo sapiens
  misc_RNA (1)...(19): siRNA sense strand
ggacaaauaaauagcacuu

SEQ ID NO: 1911976 - RNA, 19 nt, Homo sapiens
  misc_RNA (1)...(19): siRNA sense strand
caacuuuauucaugaggaa

SEQ ID NO: 1911977 - RNA, 19 nt, Homo sapiens
  misc_RNA (1)...(19): siRNA sense strand
guacaaacaccuuuuauga

SEQ ID NO: 1911978 - RNA, 19 nt, Homo sapiens
  misc_RNA (1)...(19): siRNA sense strand
gaugaucccuacagcagau

SEQ ID NO: 1911979 - RNA, 19 nt, Homo sapiens
  misc_RNA (1)...(19): siRNA sense strand
gaacagaugaucccuacag

SEQ ID NO: 1911980 - RNA, 19 nt, Homo sapiens
  misc_RNA (1)...(19): siRNA sense strand
aaauagcacuucaggacuu

SEQ ID NO: 1911981 - RNA, 19 nt, Homo sapiens
  misc_RNA (1)...(19): siRNA sense strand
augaagaaguuggugauua

SEQ ID NO: 1911982 - RNA, 19 nt, Homo sapiens
  misc_RNA (1)...(19): siRNA sense strand
cagcugugccgauuaaauu

SEQ ID NO: 1911983 - RNA, 19 nt, Homo sapiens
  misc_RNA (1)...(19): siRNA sense strand
cagaguuccuugauauguu

SEQ ID NO: 1911984 - RNA, 19 nt, Homo sapiens
  misc_RNA (1)...(19): siRNA sense strand
ccagagagccgaugauuuu

SEQ ID NO: 1911985 - RNA, 19 nt, Homo sapiens
  misc_RNA (1)...(19): siRNA sense strand
gaguacggcugcuguugga

SEQ ID NO: 1911986 - RNA, 19 nt, Homo sapiens
  misc_RNA (1)...(19): siRNA sense strand
gugauuauuucccagaguu

SEQ ID NO: 1911987 - RNA, 19 nt, Homo sapiens
  misc_RNA (1)...(19): siRNA sense strand
ggaagacgccuuaaaaugu

SEQ ID NO: 1911988 - RNA, 19 nt, Homo sapiens
  misc_RNA (1)...(19): siRNA sense strand
ucagaagacucagccuauu

SEQ ID NO: 1911989 - RNA, 19 nt, Homo sapiens
  misc_RNA (1)...(19): siRNA sense strand
gagauucagcuguuaacaa

SEQ ID NO: 1911990 - RNA, 19 nt, Homo sapiens
  misc_RNA (1)...(19): siRNA sense strand
ccgcgaaguucucuuugaa

SEQ ID NO: 1911991 - RNA, 19 nt, Homo sapiens
  misc_RNA (1)...(19): siRNA sense strand
agaaguuggugauuauuuc

SEQ ID NO: 1911992 - RNA, 19 nt, Homo sapiens
  misc_RNA (1)...(19): siRNA sense strand
cugaggaguuucuugcuuu

SEQ ID NO: 1911993 - RNA, 19 nt, Homo sapiens
  misc_RNA (1)...(19): siRNA sense strand
uuacugauguuguacaaag

SEQ ID NO: 1911994 - RNA, 19 nt, Homo sapiens
  misc_RNA (1)...(19): siRNA sense strand
gcauggagcggcugcuuau

SEQ ID NO: 1911995 - RNA, 19 nt, Homo sapiens
  misc_RNA (1)...(19): siRNA sense strand
gcuaaacuaaaccaaauga

SEQ ID NO: 1911996 - RNA, 19 nt, Homo sapiens
  misc_RNA (1)...(19): siRNA sense strand
uuagaagaaucaccauuuc

SEQ ID NO: 1911997 - RNA, 19 nt, Homo sapiens
  misc_RNA (1)...(19): siRNA sense strand
agcaguagaugaagaaguu

SEQ ID NO: 1911998 - RNA, 19 nt, Homo sapiens
  misc_RNA (1)...(19): siRNA sense strand
gcaagaaagauauugaaac

SEQ ID NO: 1911999 - RNA, 19 nt, Homo sapiens
  misc_RNA (1)...(19): siRNA sense strand
caacugcuucaucaucuuu

SEQ ID NO: 1912000 - RNA, 19 nt, Homo sapiens
  misc_RNA (1)...(19): siRNA sense strand
uaacaacugcuucaucauc

SEQ ID NO: 1912001 - RNA, 19 nt, Homo sapiens
  misc_RNA (1)...(19): siRNA sense strand
ucccagaguuccuugauau

SEQ ID NO: 1912002 - RNA, 19 nt, Homo sapiens
  misc_RNA (1)...(19): siRNA sense strand
gguccuaugcggcagauaa

SEQ ID NO: 1912003 - RNA, 19 nt, Homo sapiens
  misc_RNA (1)...(19): siRNA sense strand
ggaaagcgagaauuagaag

SEQ ID NO: 1912004 - RNA, 19 nt, Homo sapiens
  misc_RNA (1)...(19): siRNA sense strand
gaagaaguuggugauuauu

SEQ ID NO: 1912005 - RNA, 19 nt, Homo sapiens
  misc_RNA (1)...(19): siRNA sense strand
gcacaaggacaagcaggaa

SEQ ID NO: 1912006 - RNA, 19 nt, Homo sapiens
  misc_RNA (1)...(19): siRNA sense strand
agaugaagcuaaacuaaac

SEQ ID NO: 1912007 - RNA, 19 nt, Homo sapiens
  misc_RNA (1)...(19): siRNA sense strand
acaaagacuucaguuagau

SEQ ID NO: 1912008 - RNA, 19 nt, Homo sapiens
  misc_RNA (1)...(19): siRNA sense strand
ugaaagcuguacaauuugg

SEQ ID NO: 1912009 - RNA, 19 nt, Homo sapiens
  misc_RNA (1)...(19): siRNA sense strand
gaaacaccgagaagacaug

SEQ ID NO: 1912010 - RNA, 19 nt, Homo sapiens
  misc_RNA (1)...(19): siRNA sense strand
ggauuuuacugauguugua

SEQ ID NO: 1912011 - RNA, 19 nt, Homo sapiens
  misc_RNA (1)...(19): siRNA sense strand
gccaaagucacccuucaaa

SEQ ID NO: 1912012 - RNA, 19 nt, Homo sapiens
  misc_RNA (1)...(19): siRNA sense strand
cugcuuaucucccagacuu

SEQ ID NO: 1912013 - RNA, 19 nt, Homo sapiens
  misc_RNA (1)...(19): siRNA sense strand
ggaaguacaaaccgucugu

SEQ ID NO: 1912014 - RNA, 19 nt, Homo sapiens
  misc_RNA (1)...(19): siRNA sense strand
ggcaagaaagauauugaaa

SEQ ID NO: 1912015 - RNA, 19 nt, Homo sapiens
  misc_RNA (1)...(19): siRNA sense strand
gaggaacaccaguccaaug

SEQ ID NO: 1912016 - RNA, 19 nt, Homo sapiens
  misc_RNA (1)...(19): siRNA sense strand
aauagcacuucaggacuua

SEQ ID NO: 1912017 - RNA, 19 nt, Homo sapiens
  misc_RNA (1)...(19): siRNA sense strand
gggcaagaaagauauugaa

SEQ ID NO: 1912018 - RNA, 19 nt, Homo sapiens
  misc_RNA (1)...(19): siRNA sense strand
aaagcgagaauuagaaguu

SEQ ID NO: 1912019 - RNA, 19 nt, Homo sapiens
  misc_RNA (1)...(19): siRNA sense strand
aacauggacugugguuuaa

SEQ ID NO: 1912020 - RNA, 19 nt, Homo sapiens
  misc_RNA (1)...(19): siRNA sense strand
gcgaggaagacgccuuaaa

SEQ ID NO: 1912021 - RNA, 19 nt, Homo sapiens
  misc_RNA (1)...(19): siRNA sense strand
gguagaugaagcuaaacua

SEQ ID NO: 1912022 - RNA, 19 nt, Homo sapiens
  misc_RNA (1)...(19): siRNA sense strand
caagagagaaacaccagau

SEQ ID NO: 1912023 - RNA, 19 nt, Homo sapiens
  misc_RNA (1)...(19): siRNA sense strand
gcucuuguccuucaugcuu

SEQ ID NO: 1912024 - RNA, 19 nt, Homo sapiens
  misc_RNA (1)...(19): siRNA sense strand
cgagaagacaugcgaggaa

SEQ ID NO: 1912025 - RNA, 19 nt, Homo sapiens
  misc_RNA (1)...(19): siRNA sense strand
gacugugguuuaacuggaa

SEQ ID NO: 1912026 - RNA, 19 nt, Homo sapiens
  misc_RNA (1)...(19): siRNA sense strand
cagcuuugcgacaaugaua

SEQ ID NO: 1912027 - RNA, 19 nt, Homo sapiens
  misc_RNA (1)...(19): siRNA sense strand
ggaguuucuugcuuugaca

SEQ ID NO: 1912028 - RNA, 19 nt, Homo sapiens
  misc_RNA (1)...(19): siRNA sense strand
ccaggaacauucuauucgu

SEQ ID NO: 1912029 - RNA, 19 nt, Homo sapiens
  misc_RNA (1)...(19): siRNA sense strand
uaaauuuggguaugcaaga

SEQ ID NO: 1912030 - RNA, 19 nt, Homo sapiens
  misc_RNA (1)...(19): siRNA sense strand
aggaggagccggacaaaga

SEQ ID NO: 1912031 - RNA, 19 nt, Homo sapiens
  misc_RNA (1)...(19): siRNA sense strand
gagugaugaugggccuaua

SEQ ID NO: 1912032 - RNA, 19 nt, Homo sapiens
  misc_RNA (1)...(19): siRNA sense strand
gaacauucaaccacuucug

SEQ ID NO: 1912033 - RNA, 19 nt, Homo sapiens
  misc_RNA (1)...(19): siRNA sense strand
uguacaaagacuucaguua

SEQ ID NO: 1912034 - RNA, 19 nt, Homo sapiens
  misc_RNA (1)...(19): siRNA sense strand
caaccucgcauaaccaaag

SEQ ID NO: 1912035 - RNA, 19 nt, Homo sapiens
  misc_RNA (1)...(19): siRNA sense strand
gaaaggagcuggaaaauuu

SEQ ID NO: 1912036 - RNA, 19 nt, Homo sapiens
  misc_RNA (1)...(19): siRNA sense strand
ggaagcaacuuggaauuua

SEQ ID NO: 1912037 - RNA, 19 nt, Homo sapiens
  misc_RNA (1)...(19): siRNA sense strand
ccaggaugcugauaauuua

SEQ ID NO: 1912038 - RNA, 19 nt, Homo sapiens
  misc_RNA (1)...(19): siRNA sense strand
caaagaagaucuaugauac

SEQ ID NO: 1912039 - RNA, 19 nt, Homo sapiens
  misc_RNA (1)...(19): siRNA sense strand
gaaaguaucagcugagaga

SEQ ID NO: 1912040 - RNA, 19 nt, Homo sapiens
  misc_RNA (1)...(19): siRNA sense strand
gcugagagauuuacagaug

SEQ ID NO: 1912041 - RNA, 19 nt, Homo sapiens
  misc_RNA (1)...(19): siRNA sense strand
gauaucagauguucaguca

SEQ ID NO: 1912042 - RNA, 19 nt, Homo sapiens
  misc_RNA (1)...(19): siRNA sense strand
uugaugagcuggagaauuu

SEQ ID NO: 1912043 - RNA, 19 nt, Homo sapiens
  misc_RNA (1)...(19): siRNA sense strand
gaggagagcucaucauguc

SEQ ID NO: 1912044 - RNA, 19 nt, Homo sapiens
  misc_RNA (1)...(19): siRNA sense strand
gaagcaacuuggaauuuau

SEQ ID NO: 1912045 - RNA, 19 nt, Homo sapiens
  misc_RNA (1)...(19): siRNA sense strand
ucagaaugcucucaaugua

SEQ ID NO: 1912046 - RNA, 19 nt, Homo sapiens
  misc_RNA (1)...(19): siRNA sense strand
gaaauacgaccaucacuag

SEQ ID NO: 1912047 - RNA, 19 nt, Homo sapiens
  misc_RNA (1)...(19): siRNA sense strand
gaauuuagaggaagacaaa

SEQ ID NO: 1912048 - RNA, 19 nt, Homo sapiens
  misc_RNA (1)...(19): siRNA sense strand
gaauauugcuuuagacaac

SEQ ID NO: 1912049 - RNA, 19 nt, Homo sapiens
  misc_RNA (1)...(19): siRNA sense strand
ggaguaauacccugaauau

SEQ ID NO: 1912050 - RNA, 19 nt, Homo sapiens
  misc_RNA (1)...(19): siRNA sense strand
ggaaauacgaccaucacua

SEQ ID NO: 1912051 - RNA, 19 nt, Homo sapiens
  misc_RNA (1)...(19): siRNA sense strand
gcauacaacugaugugauc

SEQ ID NO: 1912052 - RNA, 19 nt, Homo sapiens
  misc_RNA (1)...(19): siRNA sense strand
caacugaugugaucuaugc

SEQ ID NO: 1912053 - RNA, 19 nt, Homo sapiens
  misc_RNA (1)...(19): siRNA sense strand
gacaacauguguaagaaga

SEQ ID NO: 1912054 - RNA, 19 nt, Homo sapiens
  misc_RNA (1)...(19): siRNA sense strand
caaccaagaucauccgaau

SEQ ID NO: 1912055 - RNA, 19 nt, Homo sapiens
  misc_RNA (1)...(19): siRNA sense strand
cacaagggauccagaauau

SEQ ID NO: 1912056 - RNA, 19 nt, Homo sapiens
  misc_RNA (1)...(19): siRNA sense strand
caagggauccagaauauga

SEQ ID NO: 1912057 - RNA, 19 nt, Homo sapiens
  misc_RNA (1)...(19): siRNA sense strand
ccaggaagcuacaguuuua

SEQ ID NO: 1912058 - RNA, 19 nt, Homo sapiens
  misc_RNA (1)...(19): siRNA sense strand
cgggugaaauggacaguua

SEQ ID NO: 1912059 - RNA, 19 nt, Homo sapiens
  misc_RNA (1)...(19): siRNA sense strand
uaucagauguucagucaug

SEQ ID NO: 1912060 - RNA, 19 nt, Homo sapiens
  misc_RNA (1)...(19): siRNA sense strand
gaagaugucaacaagugua

SEQ ID NO: 1912061 - RNA, 19 nt, Homo sapiens
  misc_RNA (1)...(19): siRNA sense strand
gaaugaaggcuccugcaaa

SEQ ID NO: 1912062 - RNA, 19 nt, Homo sapiens
  misc_RNA (1)...(19): siRNA sense strand
ugaggaaguucgcaaagaa

SEQ ID NO: 1912063 - RNA, 19 nt, Homo sapiens
  misc_RNA (1)...(19): siRNA sense strand
guugugauguggagaauga

SEQ ID NO: 1912064 - RNA, 19 nt, Homo sapiens
  misc_RNA (1)...(19): siRNA sense strand
gccaagaacauguguauga

SEQ ID NO: 1912065 - RNA, 19 nt, Homo sapiens
  misc_RNA (1)...(19): siRNA sense strand
cagaggaacuggaggaugu

SEQ ID NO: 1912066 - RNA, 19 nt, Homo sapiens
  misc_RNA (1)...(19): siRNA sense strand
gaaacgccuugaagccauu

SEQ ID NO: 1912067 - RNA, 19 nt, Homo sapiens
  misc_RNA (1)...(19): siRNA sense strand
ugaauguguuggaugauaa

SEQ ID NO: 1912068 - RNA, 19 nt, Homo sapiens
  misc_RNA (1)...(19): siRNA sense strand
gguguaaugagaaauguua

SEQ ID NO: 1912069 - RNA, 19 nt, Homo sapiens
  misc_RNA (1)...(19): siRNA sense strand
cauugaagcugcuaagaau

SEQ ID NO: 1912070 - RNA, 19 nt, Homo sapiens
  misc_RNA (1)...(19): siRNA sense strand
caagagaccuucgcagaca

SEQ ID NO: 1912071 - RNA, 19 nt, Homo sapiens
  misc_RNA (1)...(19): siRNA sense strand
ucagagagaugaaauugca

SEQ ID NO: 1912072 - RNA, 19 nt, Homo sapiens
  misc_RNA (1)...(19): siRNA sense strand
ucacaagggauccagaaua

SEQ ID NO: 1912073 - RNA, 19 nt, Homo sapiens
  misc_RNA (1)...(19): siRNA sense strand
guacaugggagaaucauau

SEQ ID NO: 1912074 - RNA, 19 nt, Homo sapiens
  misc_RNA (1)...(19): siRNA sense strand
guggacaucucaaagaaga

SEQ ID NO: 1912075 - RNA, 19 nt, Homo sapiens
  misc_RNA (1)...(19): siRNA sense strand
uaagcuggaugcugagauu

SEQ ID NO: 1912076 - RNA, 19 nt, Homo sapiens
  misc_RNA (1)...(19): siRNA sense strand
gaagguguaaugagaaaug

SEQ ID NO: 1912077 - RNA, 19 nt, Homo sapiens
  misc_RNA (1)...(19): siRNA sense strand
gcaacgacaucauuguucu

SEQ ID NO: 1912078 - RNA, 19 nt, Homo sapiens
  misc_RNA (1)...(19): siRNA sense strand
ggauguuucugaccuugaa

SEQ ID NO: 1912079 - RNA, 19 nt, Homo sapiens
  misc_RNA (1)...(19): siRNA sense strand
aagugaagcucugaaagua

SEQ ID NO: 1912080 - RNA, 19 nt, Homo sapiens
  misc_RNA (1)...(19): siRNA sense strand
ugaaagccauaucuuggaa

SEQ ID NO: 1912081 - RNA, 19 nt, Homo sapiens
  misc_RNA (1)...(19): siRNA sense strand
ucucaaagaagaucuauga

SEQ ID NO: 1912082 - RNA, 19 nt, Homo sapiens
  misc_RNA (1)...(19): siRNA sense strand
agacgaggcucagcaaaga

SEQ ID NO: 1912083 - RNA, 19 nt, Homo sapiens
  misc_RNA (1)...(19): siRNA sense strand
gcaaaggaccacuaaagca

SEQ ID NO: 1912084 - RNA, 19 nt, Homo sapiens
  misc_RNA (1)...(19): siRNA sense strand
gggcuaagaugacucaacu

SEQ ID NO: 1912085 - RNA, 19 nt, Homo sapiens
  misc_RNA (1)...(19): siRNA sense strand
agaaugcucucaauguaau

SEQ ID NO: 1912086 - RNA, 19 nt, Homo sapiens
  misc_RNA (1)...(19): siRNA sense strand
uggaagaugucaacaagug

SEQ ID NO: 1912087 - RNA, 19 nt, Homo sapiens
  misc_RNA (1)...(19): siRNA sense strand
aaaagaauaugcugcgaua

SEQ ID NO: 1912088 - RNA, 19 nt, Homo sapiens
  misc_RNA (1)...(19): siRNA sense strand
gaaaagagccaguguccuu

SEQ ID NO: 1912089 - RNA, 19 nt, Homo sapiens
  misc_RNA (1)...(19): siRNA sense strand
gcuaaucagugcccagauc

SEQ ID NO: 1912090 - RNA, 19 nt, Homo sapiens
  misc_RNA (1)...(19): siRNA sense strand
gugaagcucugaaaguauc

SEQ ID NO: 1912091 - RNA, 19 nt, Homo sapiens
  misc_RNA (1)...(19): siRNA sense strand
gcaagucaugagugaauuu

SEQ ID NO: 1912092 - RNA, 19 nt, Homo sapiens
  misc_RNA (1)...(19): siRNA sense strand
aguaucagcugagagauuu

SEQ ID NO: 1912093 - RNA, 19 nt, Homo sapiens
  misc_RNA (1)...(19): siRNA sense strand
ugauguugcuucccucaaa

SEQ ID NO: 1912094 - RNA, 19 nt, Homo sapiens
  misc_RNA (1)...(19): siRNA sense strand
aagaacauguguaugauca

SEQ ID NO: 1912095 - RNA, 19 nt, Homo sapiens
  misc_RNA (1)...(19): siRNA sense strand
gagaaauguuaacuuccuu

SEQ ID NO: 1912096 - RNA, 19 nt, Homo sapiens
  misc_RNA (1)...(19): siRNA sense strand
gggagaaucauauacaugu

SEQ ID NO: 1912097 - RNA, 19 nt, Homo sapiens
  misc_RNA (1)...(19): siRNA sense strand
gagcuuacggcuucacuug

SEQ ID NO: 1912098 - RNA, 19 nt, Homo sapiens
  misc_RNA (1)...(19): siRNA sense strand
aaucugcagucaaguuaaa

SEQ ID NO: 1912099 - RNA, 19 nt, Homo sapiens
  misc_RNA (1)...(19): siRNA sense strand
cacggaagguguaaugaga

SEQ ID NO: 1912100 - RNA, 19 nt, Homo sapiens
  misc_RNA (1)...(19): siRNA sense strand
uuacaagcauugaugacuu

SEQ ID NO: 1912101 - RNA, 19 nt, Homo sapiens
  misc_RNA (1)...(19): siRNA sense strand
ucacugaagccguagauga

SEQ ID NO: 1912102 - RNA, 19 nt, Homo sapiens
  misc_RNA (1)...(19): siRNA sense strand
gcaagcaaggacacaguuu

SEQ ID NO: 1912103 - RNA, 19 nt, Homo sapiens
  misc_RNA (1)...(19): siRNA sense strand
gauaucagaaucaggauca

SEQ ID NO: 1912104 - RNA, 19 nt, Homo sapiens
  misc_RNA (1)...(19): siRNA sense strand
ccaagaacauguguaugau

SEQ ID NO: 1912105 - RNA, 19 nt, Homo sapiens
  misc_RNA (1)...(19): siRNA sense strand
gauacgacagucccucuuu

SEQ ID NO: 1912106 - RNA, 19 nt, Homo sapiens
  misc_RNA (1)...(19): siRNA sense strand
cagaaugcucucaauguaa

SEQ ID NO: 1912107 - RNA, 19 nt, Homo sapiens
  misc_RNA (1)...(19): siRNA sense strand
caagucaugagugaauuua

SEQ ID NO: 1912108 - RNA, 19 nt, Homo sapiens
  misc_RNA (1)...(19): siRNA sense strand
ugauggagaugacagacuu

SEQ ID NO: 1912109 - RNA, 19 nt, Homo sapiens
  misc_RNA (1)...(19): siRNA sense strand
cggaagguguaaugagaaa

SEQ ID NO: 1912110 - RNA, 19 nt, Homo sapiens
  misc_RNA (1)...(19): siRNA sense strand
gagaccaggaugcugauaa

SEQ ID NO: 1912111 - RNA, 19 nt, Homo sapiens
  misc_RNA (1)...(19): siRNA sense strand
caacauguguaagaagaca

SEQ ID NO: 1912112 - RNA, 19 nt, Homo sapiens
  misc_RNA (1)...(19): siRNA sense strand
gaaagugaagcucugaaag

SEQ ID NO: 1912113 - RNA, 19 nt, Homo sapiens
  misc_RNA (1)...(19): siRNA sense strand
gggcaaaggaccacuaaag

SEQ ID NO: 1912114 - RNA, 19 nt, Homo sapiens
  misc_RNA (1)...(19): siRNA sense strand
ggaggaagcaacuuggaau

SEQ ID NO: 1912115 - RNA, 19 nt, Homo sapiens
  misc_RNA (1)...(19): siRNA sense strand
gaucaugugucagacucuu

SEQ ID NO: 1912116 - RNA, 19 nt, Homo sapiens
  misc_RNA (1)...(19): siRNA sense strand
uacauugccucaaccaaga

SEQ ID NO: 1912117 - RNA, 19 nt, Homo sapiens
  misc_RNA (1)...(19): siRNA sense strand
ggaggauguuucugaccuu

SEQ ID NO: 1912118 - RNA, 19 nt, Homo sapiens
  misc_RNA (1)...(19): siRNA sense strand
gaggaaguucgcaaagaaa

SEQ ID NO: 1912119 - RNA, 19 nt, Homo sapiens
  misc_RNA (1)...(19): siRNA sense strand
caaaggaccacuaaagcau

SEQ ID NO: 1912120 - RNA, 19 nt, Homo sapiens
  misc_RNA (1)...(19): siRNA sense strand
gucaacaaguguaucauag

SEQ ID NO: 1912121 - RNA, 19 nt, Homo sapiens
  misc_RNA (1)...(19): siRNA sense strand
caacaaaugaagauggaau

SEQ ID NO: 1912122 - RNA, 19 nt, Homo sapiens
  misc_RNA (1)...(19): siRNA sense strand
gaugagcuggagaauuuaa

SEQ ID NO: 1912123 - RNA, 19 nt, Homo sapiens
  misc_RNA (1)...(19): siRNA sense strand
gaaguucgcaaagaaagug

SEQ ID NO: 1912124 - RNA, 19 nt, Homo sapiens
  misc_RNA (1)...(19): siRNA sense strand
agucaugagugaauuuaga

SEQ ID NO: 1912125 - RNA, 19 nt, Homo sapiens
  misc_RNA (1)...(19): siRNA sense strand
gagagaagccagaggaaac

SEQ ID NO: 1912126 - RNA, 19 nt, Homo sapiens
  misc_RNA (1)...(19): siRNA sense strand
gaggaagcaacuuggaauu

SEQ ID NO: 1912127 - RNA, 19 nt, Homo sapiens
  misc_RNA (1)...(19): siRNA sense strand
cacuaaagcauacaacuga

SEQ ID NO: 1912128 - RNA, 19 nt, Homo sapiens
  misc_RNA (1)...(19): siRNA sense strand
ggagaaucauauacauguc

SEQ ID NO: 1912129 - RNA, 19 nt, Homo sapiens
  misc_RNA (1)...(19): siRNA sense strand
gagugaauuuagaggaaga

SEQ ID NO: 1912130 - RNA, 19 nt, Homo sapiens
  misc_RNA (1)...(19): siRNA sense strand
aaugaaugcuguagugcaa

SEQ ID NO: 1912131 - RNA, 19 nt, Homo sapiens
  misc_RNA (1)...(19): siRNA sense strand
aaaggaccacuaaagcaua

SEQ ID NO: 1912132 - RNA, 19 nt, Homo sapiens
  misc_RNA (1)...(19): siRNA sense strand
gagaugacagacuucacua

SEQ ID NO: 1912133 - RNA, 19 nt, Homo sapiens
  misc_RNA (1)...(19): siRNA sense strand
uagaugacauuacaagcau

SEQ ID NO: 1912134 - RNA, 19 nt, Homo sapiens
  misc_RNA (1)...(19): siRNA sense strand
guagaugacauuacaagca

SEQ ID NO: 1912135 - RNA, 19 nt, Homo sapiens
  misc_RNA (1)...(19): siRNA sense strand
gaacuugccaucuuucuua

SEQ ID NO: 1912136 - RNA, 19 nt, Homo sapiens
  misc_RNA (1)...(19): siRNA sense strand
gaugugcccuuccaauaua

SEQ ID NO: 1912137 - RNA, 19 nt, Homo sapiens
  misc_RNA (1)...(19): siRNA sense strand
guaaggaacuugccaucuu

SEQ ID NO: 1912138 - RNA, 19 nt, Homo sapiens
  misc_RNA (1)...(19): siRNA sense strand
gaguaacgcuuguaaggaa

SEQ ID NO: 1912139 - RNA, 19 nt, Homo sapiens
  misc_RNA (1)...(19): siRNA sense strand
uaaggaacuugccaucuuu

SEQ ID NO: 1912140 - RNA, 19 nt, Homo sapiens
  misc_RNA (1)...(19): siRNA sense strand
gaagauuaguggaugauac

SEQ ID NO: 1912141 - RNA, 19 nt, Homo sapiens
  misc_RNA (1)...(19): siRNA sense strand
caagaagauuaguggauga

SEQ ID NO: 1912142 - RNA, 19 nt, Homo sapiens
  misc_RNA (1)...(19): siRNA sense strand
cugcauagcaagaagauua

SEQ ID NO: 1912143 - RNA, 19 nt, Homo sapiens
  misc_RNA (1)...(19): siRNA sense strand
ggaaacacagucaucuuug

SEQ ID NO: 1912144 - RNA, 19 nt, Homo sapiens
  misc_RNA (1)...(19): siRNA sense strand
gaaacacagucaucuuugc

SEQ ID NO: 1912145 - RNA, 19 nt, Homo sapiens
  misc_RNA (1)...(19): siRNA sense strand
ggaugugcccuuccaauau

SEQ ID NO: 1912146 - RNA, 19 nt, Homo sapiens
  misc_RNA (1)...(19): siRNA sense strand
auacagaugcuaugaguaa

SEQ ID NO: 1912147 - RNA, 19 nt, Homo sapiens
  misc_RNA (1)...(19): siRNA sense strand
gcauugucgugucagcuuu

SEQ ID NO: 1912148 - RNA, 19 nt, Homo sapiens
  misc_RNA (1)...(19): siRNA sense strand
acagucaucuuugcaacua

SEQ ID NO: 1912149 - RNA, 19 nt, Homo sapiens
  misc_RNA (1)...(19): siRNA sense strand
uggacucccuauuguauuu

SEQ ID NO: 1912150 - RNA, 19 nt, Homo sapiens
  misc_RNA (1)...(19): siRNA sense strand
uuacauccuuucaccuauu

SEQ ID NO: 1912151 - RNA, 19 nt, Homo sapiens
  misc_RNA (1)...(19): siRNA sense strand
ugauacagaugcuaugagu

SEQ ID NO: 1912152 - RNA, 19 nt, Homo sapiens
  misc_RNA (1)...(19): siRNA sense strand
gcacuuguucucacaggaa

SEQ ID NO: 1912153 - RNA, 19 nt, Homo sapiens
  misc_RNA (1)...(19): siRNA sense strand
agucaucuuugcaacuaua

SEQ ID NO: 1912154 - RNA, 19 nt, Homo sapiens
  misc_RNA (1)...(19): siRNA sense strand
ggagcaaucggacugaugu

SEQ ID NO: 1912155 - RNA, 19 nt, Homo sapiens
  misc_RNA (1)...(19): siRNA sense strand
gaugauacagaugcuauga

SEQ ID NO: 1912156 - RNA, 19 nt, Homo sapiens
  misc_RNA (1)...(19): siRNA sense strand
uugauuaguuuguccuuug

SEQ ID NO: 1912157 - RNA, 19 nt, Homo sapiens
  misc_RNA (1)...(19): siRNA sense strand
ggaacuugccaucuuucuu

SEQ ID NO: 1912158 - RNA, 19 nt, Homo sapiens
  misc_RNA (1)...(19): siRNA sense strand
caucuuugcaacuauacua

SEQ ID NO: 1912159 - RNA, 19 nt, Homo sapiens
  misc_RNA (1)...(19): siRNA sense strand
aggaaacacagucaucuuu

SEQ ID NO: 1912160 - RNA, 19 nt, Homo sapiens
  misc_RNA (1)...(19): siRNA sense strand
gauacagaugcuaugagua

SEQ ID NO: 1912161 - RNA, 19 nt, Homo sapiens
  misc_RNA (1)...(19): siRNA sense strand
gcaaucggacugauguuuu

SEQ ID NO: 1912162 - RNA, 19 nt, Homo sapiens
  misc_RNA (1)...(19): siRNA sense strand
gaggagcaaucggacugau

SEQ ID NO: 1912163 - RNA, 19 nt, Homo sapiens
  misc_RNA (1)...(19): siRNA sense strand
gggagcuugugcacuuguu

SEQ ID NO: 1912164 - RNA, 19 nt, Homo sapiens
  misc_RNA (1)...(19): siRNA sense strand
gauuaguggaugauacaga

SEQ ID NO: 1912165 - RNA, 19 nt, Homo sapiens
  misc_RNA (1)...(19): siRNA sense strand
cuugccaucuuucuuacaa

SEQ ID NO: 1912166 - RNA, 19 nt, Homo sapiens
  misc_RNA (1)...(19): siRNA sense strand
gcuaugaguaacgcuugua

SEQ ID NO: 1912167 - RNA, 19 nt, Homo sapiens
  misc_RNA (1)...(19): siRNA sense strand
ggaggagcaaucggacuga

SEQ ID NO: 1912168 - RNA, 19 nt, Homo sapiens
  misc_RNA (1)...(19): siRNA sense strand
uacauccuuucaccuauuc

SEQ ID NO: 1912169 - RNA, 19 nt, Homo sapiens
  misc_RNA (1)...(19): siRNA sense strand
caggaaacacagucaucuu

SEQ ID NO: 1912170 - RNA, 19 nt, Homo sapiens
  misc_RNA (1)...(19): siRNA sense strand
ugaguaacgcuuguaagga

SEQ ID NO: 1912171 - RNA, 19 nt, Homo sapiens
  misc_RNA (1)...(19): siRNA sense strand
auuaguggaugauacagau

SEQ ID NO: 1912172 - RNA, 19 nt, Homo sapiens
  misc_RNA (1)...(19): siRNA sense strand
guggggagcuugugcacuu

SEQ ID NO: 1912173 - RNA, 19 nt, Homo sapiens
  misc_RNA (1)...(19): siRNA sense strand
aaacacagucaucuuugca

SEQ ID NO: 1912174 - RNA, 19 nt, Homo sapiens
  misc_RNA (1)...(19): siRNA sense strand
cacuuguucucacaggaaa

SEQ ID NO: 1912175 - RNA, 19 nt, Homo sapiens
  misc_RNA (1)...(19): siRNA sense strand
ggaugauacagaugcuaug

SEQ ID NO: 1912176 - RNA, 19 nt, Homo sapiens
  misc_RNA (1)...(19): siRNA sense strand
gcaacuauacuaggcuuuu

SEQ ID NO: 1912177 - RNA, 19 nt, Homo sapiens
  misc_RNA (1)...(19): siRNA sense strand
caaauacuggccccucuuu

SEQ ID NO: 1912178 - RNA, 19 nt, Homo sapiens
  misc_RNA (1)...(19): siRNA sense strand
ggucagagcuuccuucuuu

SEQ ID NO: 1912179 - RNA, 19 nt, Homo sapiens
  misc_RNA (1)...(19): siRNA sense strand
gauguugucgccagacuuu

SEQ ID NO: 1912180 - RNA, 19 nt, Homo sapiens
  misc_RNA (1)...(19): siRNA sense strand
ggcaaacauuccacccuaa

SEQ ID NO: 1912181 - RNA, 19 nt, Homo sapiens
  misc_RNA (1)...(19): siRNA sense strand
caaaaucagccuucaaauu

SEQ ID NO: 1912182 - RNA, 19 nt, Homo sapiens
  misc_RNA (1)...(19): siRNA sense strand
caggauuucucccaacauc

SEQ ID NO: 1912183 - RNA, 19 nt, Homo sapiens
  misc_RNA (1)...(19): siRNA sense strand
cgccagacuuucagccaaa

SEQ ID NO: 1912184 - RNA, 19 nt, Homo sapiens
  misc_RNA (1)...(19): siRNA sense strand
ccgaaggcaucgauucuac

SEQ ID NO: 1912185 - RNA, 19 nt, Homo sapiens
  misc_RNA (1)...(19): siRNA sense strand
cacaggauuucucccaaca

SEQ ID NO: 1912186 - RNA, 19 nt, Homo sapiens
  misc_RNA (1)...(19): siRNA sense strand
ccuccgugccuuuccguua

SEQ ID NO: 1912187 - RNA, 19 nt, Homo sapiens
  misc_RNA (1)...(19): siRNA sense strand
gaaggcaucgauucuacag

SEQ ID NO: 1912188 - RNA, 19 nt, Homo sapiens
  misc_RNA (1)...(19): siRNA sense strand
gcaaacauuccacccuaac

SEQ ID NO: 1912189 - RNA, 19 nt, Homo sapiens
  misc_RNA (1)...(19): siRNA sense strand
gaaaacacuugcccuucuc

SEQ ID NO: 1912190 - RNA, 19 nt, Homo sapiens
  misc_RNA (1)...(19): siRNA sense strand
gccaaaaucagccuucaaa

SEQ ID NO: 1912191 - RNA, 19 nt, Homo sapiens
  misc_RNA (1)...(19): siRNA sense strand
aaucagccuucaaauuaac

SEQ ID NO: 1912192 - RNA, 19 nt, Homo sapiens
  misc_RNA (1)...(19): siRNA sense strand
cuacgugggauccgauguu

SEQ ID NO: 1912193 - RNA, 19 nt, Homo sapiens
  misc_RNA (1)...(19): siRNA sense strand
ugaaaacacuugcccuucu

SEQ ID NO: 1912194 - RNA, 19 nt, Homo sapiens
  misc_RNA (1)...(19): siRNA sense strand
gcccaaccuccgugccuuu

SEQ ID NO: 1912195 - RNA, 19 nt, Homo sapiens
  misc_RNA (1)...(19): siRNA sense strand
uacgugggauccgauguug

SEQ ID NO: 1912196 - RNA, 19 nt, Homo sapiens
  misc_RNA (1)...(19): siRNA sense strand
acaggaaacucuucaaaua

SEQ ID NO: 1912197 - RNA, 19 nt, Homo sapiens
  misc_RNA (1)...(19): siRNA sense strand
ucacaggucuauaugagaa

SEQ ID NO: 1912198 - RNA, 19 nt, Homo sapiens
  misc_RNA (1)...(19): siRNA sense strand
gaucacaggucuauaugag

SEQ ID NO: 1912199 - RNA, 19 nt, Homo sapiens
  misc_RNA (1)...(19): siRNA sense strand
ggaggugucauacgcauaa

SEQ ID NO: 1912200 - RNA, 19 nt, Homo sapiens
  misc_RNA (1)...(19): siRNA sense strand
ggagagagcgugaccuugu

SEQ ID NO: 1912201 - RNA, 19 nt, Homo sapiens
  misc_RNA (1)...(19): siRNA sense strand
caugagggauuccgcagaa

SEQ ID NO: 1912202 - RNA, 19 nt, Homo sapiens
  misc_RNA (1)...(19): siRNA sense strand
ggacguuuaaccacacuuu

SEQ ID NO: 1912203 - RNA, 19 nt, Homo sapiens
  misc_RNA (1)...(19): siRNA sense strand
gcagggaccuacagaugcu

SEQ ID NO: 1912204 - RNA, 19 nt, Homo sapiens
  misc_RNA (1)...(19): siRNA sense strand
aggaaacucuucaaauagu

SEQ ID NO: 1912205 - RNA, 19 nt, Homo sapiens
  misc_RNA (1)...(19): siRNA sense strand
ucacaggaaacucuucaaa

SEQ ID NO: 1912206 - RNA, 19 nt, Homo sapiens
  misc_RNA (1)...(19): siRNA sense strand
ggugaaaucagaagagaca

SEQ ID NO: 1912207 - RNA, 19 nt, Homo sapiens
  misc_RNA (1)...(19): siRNA sense strand
uaugacauguaccaucuau

SEQ ID NO: 1912208 - RNA, 19 nt, Homo sapiens
  misc_RNA (1)...(19): siRNA sense strand
gagcuccuaugacauguac

SEQ ID NO: 1912209 - RNA, 19 nt, Homo sapiens
  misc_RNA (1)...(19): siRNA sense strand
gagagagcgugaccuuguc

SEQ ID NO: 1912210 - RNA, 19 nt, Homo sapiens
  misc_RNA (1)...(19): siRNA sense strand
agacagucauccugcaaug

SEQ ID NO: 1912211 - RNA, 19 nt, Homo sapiens
  misc_RNA (1)...(19): siRNA sense strand
ucaaauaguuggccuucac

SEQ ID NO: 1912212 - RNA, 19 nt, Homo sapiens
  misc_RNA (1)...(19): siRNA sense strand
ccuaugacauguaccaucu

SEQ ID NO: 1912213 - RNA, 19 nt, Homo sapiens
  misc_RNA (1)...(19): siRNA sense strand
ucccggagcuccuaugaca

SEQ ID NO: 1912214 - RNA, 19 nt, Homo sapiens
  misc_RNA (1)...(19): siRNA sense strand
caggaaacucuucaaauag

SEQ ID NO: 1912215 - RNA, 19 nt, Homo sapiens
  misc_RNA (1)...(19): siRNA sense strand
cgugaucacaggucuauau

SEQ ID NO: 1912216 - RNA, 19 nt, Homo sapiens
  misc_RNA (1)...(19): siRNA sense strand
acagaugcuucggcucuuu

SEQ ID NO: 1912217 - RNA, 19 nt, Homo sapiens
  misc_RNA (1)...(19): siRNA sense strand
ccauacgaguggucaaagu

SEQ ID NO: 1912218 - RNA, 19 nt, Homo sapiens
  misc_RNA (1)...(19): siRNA sense strand
caaggucaacagaacauuc

SEQ ID NO: 1912219 - RNA, 19 nt, Homo sapiens
  misc_RNA (1)...(19): siRNA sense strand
acagucauccugcaauguu

SEQ ID NO: 1912220 - RNA, 19 nt, Homo sapiens
  misc_RNA (1)...(19): siRNA sense strand
cacaggaaacucuucaaau

SEQ ID NO: 1912221 - RNA, 19 nt, Homo sapiens
  misc_RNA (1)...(19): siRNA sense strand
ggcccaaggucaacagaac

SEQ ID NO: 1912222 - RNA, 19 nt, Homo sapiens
  misc_RNA (1)...(19): siRNA sense strand
gcacagagaggggacguuu

SEQ ID NO: 1912223 - RNA, 19 nt, Homo sapiens
  misc_RNA (1)...(19): siRNA sense strand
ggagcuccuaugacaugua

SEQ ID NO: 1912224 - RNA, 19 nt, Homo sapiens
  misc_RNA (1)...(19): siRNA sense strand
cuacagaugcuacgguucu

SEQ ID NO: 1912225 - RNA, 19 nt, Homo sapiens
  misc_RNA (1)...(19): siRNA sense strand
caggagagagcgugaccuu

SEQ ID NO: 1912226 - RNA, 19 nt, Homo sapiens
  misc_RNA (1)...(19): siRNA sense strand
gagacagucauccugcaau

SEQ ID NO: 1912227 - RNA, 19 nt, Homo sapiens
  misc_RNA (1)...(19): siRNA sense strand
ccggagcuccuaugacaug

SEQ ID NO: 1912228 - RNA, 19 nt, Homo sapiens
  misc_RNA (1)...(19): siRNA sense strand
cagucauccugcaauguug

SEQ ID NO: 1912229 - RNA, 19 nt, Homo sapiens
  misc_RNA (1)...(19): siRNA sense strand
uggcagggaccuacagaug

SEQ ID NO: 1912230 - RNA, 19 nt, Homo sapiens
  misc_RNA (1)...(19): siRNA sense strand
gugacccacugcuuguuuc

SEQ ID NO: 1912231 - RNA, 19 nt, Homo sapiens
  misc_RNA (1)...(19): siRNA sense strand
ugacauguaccaucuaucc

SEQ ID NO: 1912232 - RNA, 19 nt, Homo sapiens
  misc_RNA (1)...(19): siRNA sense strand
cuccaucggucgcaugaca

SEQ ID NO: 1912233 - RNA, 19 nt, Homo sapiens
  misc_RNA (1)...(19): siRNA sense strand
gggaacagaacagugaaca

SEQ ID NO: 1912234 - RNA, 19 nt, Homo sapiens
  misc_RNA (1)...(19): siRNA sense strand
uggcguguguugcguucuu

SEQ ID NO: 1912235 - RNA, 19 nt, Homo sapiens
  misc_RNA (1)...(19): siRNA sense strand
gaacagcacugcagucuca

SEQ ID NO: 1912236 - RNA, 19 nt, Homo sapiens
  misc_RNA (1)...(19): siRNA sense strand
acuagaagcuucagaaaua

SEQ ID NO: 1912237 - RNA, 19 nt, Homo sapiens
  misc_RNA (1)...(19): siRNA sense strand
gggaaauucuaacuucuua

SEQ ID NO: 1912238 - RNA, 19 nt, Homo sapiens
  misc_RNA (1)...(19): siRNA sense strand
ugagaaaucugcaccaauu

SEQ ID NO: 1912239 - RNA, 19 nt, Homo sapiens
  misc_RNA (1)...(19): siRNA sense strand
aaauauaccugcucuagaa

SEQ ID NO: 1912240 - RNA, 19 nt, Homo sapiens
  misc_RNA (1)...(19): siRNA sense strand
gcagagacaguaacucaua

SEQ ID NO: 1912241 - RNA, 19 nt, Homo sapiens
  misc_RNA (1)...(19): siRNA sense strand
gaaaucugcaccaauuaua

SEQ ID NO: 1912242 - RNA, 19 nt, Homo sapiens
  misc_RNA (1)...(19): siRNA sense strand
agaaugagccuaagacuuu

SEQ ID NO: 1912243 - RNA, 19 nt, Homo sapiens
  misc_RNA (1)...(19): siRNA sense strand
ucacagaacaugacagaua

SEQ ID NO: 1912244 - RNA, 19 nt, Homo sapiens
  misc_RNA (1)...(19): siRNA sense strand
gaaugagccuaagacuuua

SEQ ID NO: 1912245 - RNA, 19 nt, Homo sapiens
  misc_RNA (1)...(19): siRNA sense strand
ggacccaccuaguaagaaa

SEQ ID NO: 1912246 - RNA, 19 nt, Homo sapiens
  misc_RNA (1)...(19): siRNA sense strand
cgagauauccucagaaguu

SEQ ID NO: 1912247 - RNA, 19 nt, Homo sapiens
  misc_RNA (1)...(19): siRNA sense strand
gagaagaagcacaaaugua

SEQ ID NO: 1912248 - RNA, 19 nt, Homo sapiens
  misc_RNA (1)...(19): siRNA sense strand
ggaacacgauggagucuca

SEQ ID NO: 1912249 - RNA, 19 nt, Homo sapiens
  misc_RNA (1)...(19): siRNA sense strand
gaccaugaguucuggguuu

SEQ ID NO: 1912250 - RNA, 19 nt, Homo sapiens
  misc_RNA (1)...(19): siRNA sense strand
cacagaacaugacagauaa

SEQ ID NO: 1912251 - RNA, 19 nt, Homo sapiens
  misc_RNA (1)...(19): siRNA sense strand
caacaagaccauugaauca

SEQ ID NO: 1912252 - RNA, 19 nt, Homo sapiens
  misc_RNA (1)...(19): siRNA sense strand
ucaaauauccagacucaaa

SEQ ID NO: 1912253 - RNA, 19 nt, Homo sapiens
  misc_RNA (1)...(19): siRNA sense strand
ggacaccuguuuccaguca

SEQ ID NO: 1912254 - RNA, 19 nt, Homo sapiens
  misc_RNA (1)...(19): siRNA sense strand
gaacuagaagcuucagaaa

SEQ ID NO: 1912255 - RNA, 19 nt, Homo sapiens
  misc_RNA (1)...(19): siRNA sense strand
gcagaggacuguggcaaga

SEQ ID NO: 1912256 - RNA, 19 nt, Homo sapiens
  misc_RNA (1)...(19): siRNA sense strand
ucaagugucucuucccauu

SEQ ID NO: 1912257 - RNA, 19 nt, Homo sapiens
  misc_RNA (1)...(19): siRNA sense strand
gaauagcauuucuucaauc

SEQ ID NO: 1912258 - RNA, 19 nt, Homo sapiens
  misc_RNA (1)...(19): siRNA sense strand
gacccaaaccauagauuua

SEQ ID NO: 1912259 - RNA, 19 nt, Homo sapiens
  misc_RNA (1)...(19): siRNA sense strand
acacagagacccaaacuga

SEQ ID NO: 1912260 - RNA, 19 nt, Homo sapiens
  misc_RNA (1)...(19): siRNA sense strand
gaaagcaaaguucaguuga

SEQ ID NO: 1912261 - RNA, 19 nt, Homo sapiens
  misc_RNA (1)...(19): siRNA sense strand
acaagaccauugaaucauu

SEQ ID NO: 1912262 - RNA, 19 nt, Homo sapiens
  misc_RNA (1)...(19): siRNA sense strand
ccucaaauauccagacuca

SEQ ID NO: 1912263 - RNA, 19 nt, Homo sapiens
  misc_RNA (1)...(19): siRNA sense strand
gcucuaagguaacuucauc

SEQ ID NO: 1912264 - RNA, 19 nt, Homo sapiens
  misc_RNA (1)...(19): siRNA sense strand
caucuaauccuuuacaaga

SEQ ID NO: 1912265 - RNA, 19 nt, Homo sapiens
  misc_RNA (1)...(19): siRNA sense strand
caagaccauugaaucauug

SEQ ID NO: 1912266 - RNA, 19 nt, Homo sapiens
  misc_RNA (1)...(19): siRNA sense strand
gaacacagggacccaccua

SEQ ID NO: 1912267 - RNA, 19 nt, Homo sapiens
  misc_RNA (1)...(19): siRNA sense strand
gagaaaucugcaccaauua

SEQ ID NO: 1912268 - RNA, 19 nt, Homo sapiens
  misc_RNA (1)...(19): siRNA sense strand
gcacugcagucucacaucu

SEQ ID NO: 1912269 - RNA, 19 nt, Homo sapiens
  misc_RNA (1)...(19): siRNA sense strand
gagauauccucagaaguug

SEQ ID NO: 1912270 - RNA, 19 nt, Homo sapiens
  misc_RNA (1)...(19): siRNA sense strand
acagacagacuuaaacuuu

SEQ ID NO: 1912271 - RNA, 19 nt, Homo sapiens
  misc_RNA (1)...(19): siRNA sense strand
ccaccgagauauccucaga

SEQ ID NO: 1912272 - RNA, 19 nt, Homo sapiens
  misc_RNA (1)...(19): siRNA sense strand
ggaugaccauguacagaug

SEQ ID NO: 1912273 - RNA, 19 nt, Homo sapiens
  misc_RNA (1)...(19): siRNA sense strand
uguaguaagugcagcaauu

SEQ ID NO: 1912274 - RNA, 19 nt, Homo sapiens
  misc_RNA (1)...(19): siRNA sense strand
caagcagacucuuacaaca

SEQ ID NO: 1912275 - RNA, 19 nt, Homo sapiens
  misc_RNA (1)...(19): siRNA sense strand
aaacacagaccaugaguuc

SEQ ID NO: 1912276 - RNA, 19 nt, Homo sapiens
  misc_RNA (1)...(19): siRNA sense strand
gaacaugacagauaaucag

SEQ ID NO: 1912277 - RNA, 19 nt, Homo sapiens
  misc_RNA (1)...(19): siRNA sense strand
gagccuaccucuuuucaaa

SEQ ID NO: 1912278 - RNA, 19 nt, Homo sapiens
  misc_RNA (1)...(19): siRNA sense strand
cuagaagcuucagaaauaa

SEQ ID NO: 1912279 - RNA, 19 nt, Homo sapiens
  misc_RNA (1)...(19): siRNA sense strand
cagguaacauuauaagcaa

SEQ ID NO: 1912280 - RNA, 19 nt, Homo sapiens
  misc_RNA (1)...(19): siRNA sense strand
cgagauaccugcagaacac

SEQ ID NO: 1912281 - RNA, 19 nt, Homo sapiens
  misc_RNA (1)...(19): siRNA sense strand
gaaaaugcaugcugagaag

SEQ ID NO: 1912282 - RNA, 19 nt, Homo sapiens
  misc_RNA (1)...(19): siRNA sense strand
cagaaguuauccaacaaga

SEQ ID NO: 1912283 - RNA, 19 nt, Homo sapiens
  misc_RNA (1)...(19): siRNA sense strand
gaacacgugucaaaagaau

SEQ ID NO: 1912284 - RNA, 19 nt, Homo sapiens
  misc_RNA (1)...(19): siRNA sense strand
uuaaugcccuugucaguag

SEQ ID NO: 1912285 - RNA, 19 nt, Homo sapiens
  misc_RNA (1)...(19): siRNA sense strand
gaaauaaagcuagaaccau

SEQ ID NO: 1912286 - RNA, 19 nt, Homo sapiens
  misc_RNA (1)...(19): siRNA sense strand
agaagaagcacaaauguag

SEQ ID NO: 1912287 - RNA, 19 nt, Homo sapiens
  misc_RNA (1)...(19): siRNA sense strand
uuacaacaccaccgagaua

SEQ ID NO: 1912288 - RNA, 19 nt, Homo sapiens
  misc_RNA (1)...(19): siRNA sense strand
guaagugcagcaauucgua

SEQ ID NO: 1912289 - RNA, 19 nt, Homo sapiens
  misc_RNA (1)...(19): siRNA sense strand
uggcugaucuggccuggaa

SEQ ID NO: 1912290 - RNA, 19 nt, Homo sapiens
  misc_RNA (1)...(19): siRNA sense strand
agacagcaauggaugacuu

SEQ ID NO: 1912291 - RNA, 19 nt, Homo sapiens
  misc_RNA (1)...(19): siRNA sense strand
gaagagagugaacuuagca

SEQ ID NO: 1912292 - RNA, 19 nt, Homo sapiens
  misc_RNA (1)...(19): siRNA sense strand
caaucaacgugcagacaga

SEQ ID NO: 1912293 - RNA, 19 nt, Homo sapiens
  misc_RNA (1)...(19): siRNA sense strand
gccaauaaguacugguguu

SEQ ID NO: 1912294 - RNA, 19 nt, Homo sapiens
  misc_RNA (1)...(19): siRNA sense strand
gccuaagacuuuaaaucaa

SEQ ID NO: 1912295 - RNA, 19 nt, Homo sapiens
  misc_RNA (1)...(19): siRNA sense strand
aagcacaaauguaguaagu

SEQ ID NO: 1912296 - RNA, 19 nt, Homo sapiens
  misc_RNA (1)...(19): siRNA sense strand
gacauuggaucaucguagu

SEQ ID NO: 1912297 - RNA, 19 nt, Homo sapiens
  misc_RNA (1)...(19): siRNA sense strand
ccuaagacuuuaaaucaag

SEQ ID NO: 1912298 - RNA, 19 nt, Homo sapiens
  misc_RNA (1)...(19): siRNA sense strand
gcacuuaaugcccuuguca

SEQ ID NO: 1912299 - RNA, 19 nt, Homo sapiens
  misc_RNA (1)...(19): siRNA sense strand
caguucagcucuguagaaa

SEQ ID NO: 1912300 - RNA, 19 nt, Homo sapiens
  misc_RNA (1)...(19): siRNA sense strand
gaaacacagaccaugaguu

SEQ ID NO: 1912301 - RNA, 19 nt, Homo sapiens
  misc_RNA (1)...(19): siRNA sense strand
gacucaaacggacuucuua

SEQ ID NO: 1912302 - RNA, 19 nt, Homo sapiens
  misc_RNA (1)...(19): siRNA sense strand
gcacaaaaccagaaguuau

SEQ ID NO: 1912303 - RNA, 19 nt, Homo sapiens
  misc_RNA (1)...(19): siRNA sense strand
agacacagacagacuuaaa

SEQ ID NO: 1912304 - RNA, 19 nt, Homo sapiens
  misc_RNA (1)...(19): siRNA sense strand
gaguguucauucaucauau

SEQ ID NO: 1912305 - RNA, 19 nt, Homo sapiens
  misc_RNA (1)...(19): siRNA sense strand
ucaaaccagugggauagaa

SEQ ID NO: 1912306 - RNA, 19 nt, Homo sapiens
  misc_RNA (1)...(19): siRNA sense strand
caagugucucuucccauua

SEQ ID NO: 1912307 - RNA, 19 nt, Homo sapiens
  misc_RNA (1)...(19): siRNA sense strand
gcuggugagccaauaagua

SEQ ID NO: 1912308 - RNA, 19 nt, Homo sapiens
  misc_RNA (1)...(19): siRNA sense strand
ugucaugccugucuuugug

SEQ ID NO: 1912309 - RNA, 19 nt, Homo sapiens
  misc_RNA (1)...(19): siRNA sense strand
ccaacaagaccauugaauc

SEQ ID NO: 1912310 - RNA, 19 nt, Homo sapiens
  misc_RNA (1)...(19): siRNA sense strand
ggacauagagacucaaacg

SEQ ID NO: 1912311 - RNA, 19 nt, Homo sapiens
  misc_RNA (1)...(19): siRNA sense strand
uggagucacuggacauaga

SEQ ID NO: 1912312 - RNA, 19 nt, Homo sapiens
  misc_RNA (1)...(19): siRNA sense strand
ugagaguguucauucauca

SEQ ID NO: 1912313 - RNA, 19 nt, Homo sapiens
  misc_RNA (1)...(19): siRNA sense strand
aauaaguacugguguucaa

SEQ ID NO: 1912314 - RNA, 19 nt, Homo sapiens
  misc_RNA (1)...(19): siRNA sense strand
ggaaaacugugcacaaaac

SEQ ID NO: 1912315 - RNA, 19 nt, Homo sapiens
  misc_RNA (1)...(19): siRNA sense strand
cauaguuuguuaccucaga

SEQ ID NO: 1912316 - RNA, 19 nt, Homo sapiens
  misc_RNA (1)...(19): siRNA sense strand
gguguuagguguugaucag

SEQ ID NO: 1912317 - RNA, 19 nt, Homo sapiens
  misc_RNA (1)...(19): siRNA sense strand
ggaaguauucugaaacacu

SEQ ID NO: 1912318 - RNA, 19 nt, Homo sapiens
  misc_RNA (1)...(19): siRNA sense strand
uauccagacucaaacugaa

SEQ ID NO: 1912319 - RNA, 19 nt, Homo sapiens
  misc_RNA (1)...(19): siRNA sense strand
cccaaaccauagauuuauu

SEQ ID NO: 1912320 - RNA, 19 nt, Homo sapiens
  misc_RNA (1)...(19): siRNA sense strand
uagaaaguccaacggauga

SEQ ID NO: 1912321 - RNA, 19 nt, Homo sapiens
  misc_RNA (1)...(19): siRNA sense strand
aagaagcacaaauguagua

SEQ ID NO: 1912322 - RNA, 19 nt, Homo sapiens
  misc_RNA (1)...(19): siRNA sense strand
aaccagaaguuauccaaca

SEQ ID NO: 1912323 - RNA, 19 nt, Homo sapiens
  misc_RNA (1)...(19): siRNA sense strand
cacagggacccaccuagua

SEQ ID NO: 1912324 - RNA, 19 nt, Homo sapiens
  misc_RNA (1)...(19): siRNA sense strand
gaagaagcacaaauguagu

SEQ ID NO: 1912325 - RNA, 19 nt, Homo sapiens
  misc_RNA (1)...(19): siRNA sense strand
uagcagagacaguaacuca

SEQ ID NO: 1912326 - RNA, 19 nt, Homo sapiens
  misc_RNA (1)...(19): siRNA sense strand
aagcaacaguuuaguagca

SEQ ID NO: 1912327 - RNA, 19 nt, Homo sapiens
  misc_RNA (1)...(19): siRNA sense strand
accagacacucaagaacua

SEQ ID NO: 1912328 - RNA, 19 nt, Homo sapiens
  misc_RNA (1)...(19): siRNA sense strand
uugcccagcucuaagguaa

SEQ ID NO: 1912329 - RNA, 19 nt, Homo sapiens
  misc_RNA (1)...(19): siRNA sense strand
uaaucagacccaaaccaua

SEQ ID NO: 1912330 - RNA, 19 nt, Homo sapiens
  misc_RNA (1)...(19): siRNA sense strand
aaauuucagugcacagaau

SEQ ID NO: 1912331 - RNA, 19 nt, Homo sapiens
  misc_RNA (1)...(19): siRNA sense strand
acagggacccaccuaguaa

SEQ ID NO: 1912332 - RNA, 19 nt, Homo sapiens
  misc_RNA (1)...(19): siRNA sense strand
gagccuaagacuuuaaauc

SEQ ID NO: 1912333 - RNA, 19 nt, Homo sapiens
  misc_RNA (1)...(19): siRNA sense strand
uccaacggaugaccaugua

SEQ ID NO: 1912334 - RNA, 19 nt, Homo sapiens
  misc_RNA (1)...(19): siRNA sense strand
aagguaacuucaucuauag

SEQ ID NO: 1912335 - RNA, 19 nt, Homo sapiens
  misc_RNA (1)...(19): siRNA sense strand
gaaccaagcuccaaaucug

SEQ ID NO: 1912336 - RNA, 19 nt, Homo sapiens
  misc_RNA (1)...(19): siRNA sense strand
caggagagcuucaacauga

SEQ ID NO: 1912337 - RNA, 19 nt, Homo sapiens
  misc_RNA (1)...(19): siRNA sense strand
ggucagauaucauguuuga

SEQ ID NO: 1912338 - RNA, 19 nt, Homo sapiens
  misc_RNA (1)...(19): siRNA sense strand
cgucauagguuuaacaauu

SEQ ID NO: 1912339 - RNA, 19 nt, Homo sapiens
  misc_RNA (1)...(19): siRNA sense strand
gaacauuccaggcagauuu

SEQ ID NO: 1912340 - RNA, 19 nt, Homo sapiens
  misc_RNA (1)...(19): siRNA sense strand
ggaaacccuucaaguaguu

SEQ ID NO: 1912341 - RNA, 19 nt, Homo sapiens
  misc_RNA (1)...(19): siRNA sense strand
gcacuucuuucugcacaaa

SEQ ID NO: 1912342 - RNA, 19 nt, Homo sapiens
  misc_RNA (1)...(19): siRNA sense strand
ggagagagcgugaccuugu

SEQ ID NO: 1912343 - RNA, 19 nt, Homo sapiens
  misc_RNA (1)...(19): siRNA sense strand
gcagggaacuacacauguc

SEQ ID NO: 1912344 - RNA, 19 nt, Homo sapiens
  misc_RNA (1)...(19): siRNA sense strand
acaggaaacccuucaagua

SEQ ID NO: 1912345 - RNA, 19 nt, Homo sapiens
  misc_RNA (1)...(19): siRNA sense strand
caggaaacccuucaaguag

SEQ ID NO: 1912346 - RNA, 19 nt, Homo sapiens
  misc_RNA (1)...(19): siRNA sense strand
cugcaauguuggucagaua

SEQ ID NO: 1912347 - RNA, 19 nt, Homo sapiens
  misc_RNA (1)...(19): siRNA sense strand
gcagggaccuacagaugcu

SEQ ID NO: 1912348 - RNA, 19 nt, Homo sapiens
  misc_RNA (1)...(19): siRNA sense strand
ggagggaccuacagaugcu

SEQ ID NO: 1912349 - RNA, 19 nt, Homo sapiens
  misc_RNA (1)...(19): siRNA sense strand
ggaggacacgugacucuuc

SEQ ID NO: 1912350 - RNA, 19 nt, Homo sapiens
  misc_RNA (1)...(19): siRNA sense strand
uaugacauguaccaucuau

SEQ ID NO: 1912351 - RNA, 19 nt, Homo sapiens
  misc_RNA (1)...(19): siRNA sense strand
gagcuccuaugacauguac

SEQ ID NO: 1912352 - RNA, 19 nt, Homo sapiens
  misc_RNA (1)...(19): siRNA sense strand
gagagagcgugaccuuguc

SEQ ID NO: 1912353 - RNA, 19 nt, Homo sapiens
  misc_RNA (1)...(19): siRNA sense strand
caauguuggucagauauca

SEQ ID NO: 1912354 - RNA, 19 nt, Homo sapiens
  misc_RNA (1)...(19): siRNA sense strand
ucacaggaaaccacagaaa

SEQ ID NO: 1912355 - RNA, 19 nt, Homo sapiens
  misc_RNA (1)...(19): siRNA sense strand
aagcccagauccaaaguug

SEQ ID NO: 1912356 - RNA, 19 nt, Homo sapiens
  misc_RNA (1)...(19): siRNA sense strand
ccuaugacauguaccaucu

SEQ ID NO: 1912357 - RNA, 19 nt, Homo sapiens
  misc_RNA (1)...(19): siRNA sense strand
cggugucacuaucgucaua

SEQ ID NO: 1912358 - RNA, 19 nt, Homo sapiens
  misc_RNA (1)...(19): siRNA sense strand
ucccggagcuccuaugaca

SEQ ID NO: 1912359 - RNA, 19 nt, Homo sapiens
  misc_RNA (1)...(19): siRNA sense strand
gcacaugcagggaacuaca

SEQ ID NO: 1912360 - RNA, 19 nt, Homo sapiens
  misc_RNA (1)...(19): siRNA sense strand
guugucagcucccagugau

SEQ ID NO: 1912361 - RNA, 19 nt, Homo sapiens
  misc_RNA (1)...(19): siRNA sense strand
uuggucagauaucauguuu

SEQ ID NO: 1912362 - RNA, 19 nt, Homo sapiens
  misc_RNA (1)...(19): siRNA sense strand
ccacagaaccaagcuccaa

SEQ ID NO: 1912363 - RNA, 19 nt, Homo sapiens
  misc_RNA (1)...(19): siRNA sense strand
acagaugcuucggcucuuu

SEQ ID NO: 1912364 - RNA, 19 nt, Homo sapiens
  misc_RNA (1)...(19): siRNA sense strand
auacaaagaagacagaauc

SEQ ID NO: 1912365 - RNA, 19 nt, Homo sapiens
  misc_RNA (1)...(19): siRNA sense strand
gcuauacaaagaagacaga

SEQ ID NO: 1912366 - RNA, 19 nt, Homo sapiens
  misc_RNA (1)...(19): siRNA sense strand
gcuaagcccagauccaaag

SEQ ID NO: 1912367 - RNA, 19 nt, Homo sapiens
  misc_RNA (1)...(19): siRNA sense strand
ggucacaggaaaccacaga

SEQ ID NO: 1912368 - RNA, 19 nt, Homo sapiens
  misc_RNA (1)...(19): siRNA sense strand
aggaaacccuucaaguagu

SEQ ID NO: 1912369 - RNA, 19 nt, Homo sapiens
  misc_RNA (1)...(19): siRNA sense strand
ccacggagggaccuacaga

SEQ ID NO: 1912370 - RNA, 19 nt, Homo sapiens
  misc_RNA (1)...(19): siRNA sense strand
caaggucaacagaacauuc

SEQ ID NO: 1912371 - RNA, 19 nt, Homo sapiens
  misc_RNA (1)...(19): siRNA sense strand
uaucauguuugagcacuuc

SEQ ID NO: 1912372 - RNA, 19 nt, Homo sapiens
  misc_RNA (1)...(19): siRNA sense strand
caaaugcuaagcccagauc

SEQ ID NO: 1912373 - RNA, 19 nt, Homo sapiens
  misc_RNA (1)...(19): siRNA sense strand
ucaaguaguuggccuucac

SEQ ID NO: 1912374 - RNA, 19 nt, Homo sapiens
  misc_RNA (1)...(19): siRNA sense strand
gcaauguuggucagauauc

SEQ ID NO: 1912375 - RNA, 19 nt, Homo sapiens
  misc_RNA (1)...(19): siRNA sense strand
cauguuugagcacuucuuu

SEQ ID NO: 1912376 - RNA, 19 nt, Homo sapiens
  misc_RNA (1)...(19): siRNA sense strand
ggagcuccuaugacaugua

SEQ ID NO: 1912377 - RNA, 19 nt, Homo sapiens
  misc_RNA (1)...(19): siRNA sense strand
gcccagauccaaaguuguc

SEQ ID NO: 1912378 - RNA, 19 nt, Homo sapiens
  misc_RNA (1)...(19): siRNA sense strand
ccaggagagcuucaacaug

SEQ ID NO: 1912379 - RNA, 19 nt, Homo sapiens
  misc_RNA (1)...(19): siRNA sense strand
caccugcacauucugauug

SEQ ID NO: 1912380 - RNA, 19 nt, Homo sapiens
  misc_RNA (1)...(19): siRNA sense strand
gaggaggacacgugacucu

SEQ ID NO: 1912381 - RNA, 19 nt, Homo sapiens
  misc_RNA (1)...(19): siRNA sense strand
gcaaggucaacagaacauu

SEQ ID NO: 1912382 - RNA, 19 nt, Homo sapiens
  misc_RNA (1)...(19): siRNA sense strand
cuacagaugcuacgguucu

SEQ ID NO: 1912383 - RNA, 19 nt, Homo sapiens
  misc_RNA (1)...(19): siRNA sense strand
caggagagagcgugaccuu

SEQ ID NO: 1912384 - RNA, 19 nt, Homo sapiens
  misc_RNA (1)...(19): siRNA sense strand
ccggagcuccuaugacaug

SEQ ID NO: 1912385 - RNA, 19 nt, Homo sapiens
  misc_RNA (1)...(19): siRNA sense strand
gaucauggucacaggaaac

SEQ ID NO: 1912386 - RNA, 19 nt, Homo sapiens
  misc_RNA (1)...(19): siRNA sense strand
gugacccacugcuuguuuc

SEQ ID NO: 1912387 - RNA, 19 nt, Homo sapiens
  misc_RNA (1)...(19): siRNA sense strand
ugaucauggucacaggaaa

SEQ ID NO: 1912388 - RNA, 19 nt, Homo sapiens
  misc_RNA (1)...(19): siRNA sense strand
ugacauguaccaucuaucc

SEQ ID NO: 1912389 - RNA, 19 nt, Homo sapiens
  misc_RNA (1)...(19): siRNA sense strand
gcgcaaggucaacagaaca

SEQ ID NO: 1912390 - RNA, 19 nt, Homo sapiens
  misc_RNA (1)...(19): siRNA sense strand
cauccuccuccucuucuuu

SEQ ID NO: 1912391 - RNA, 19 nt, Homo sapiens
  misc_RNA (1)...(19): siRNA sense strand
acucuucggugucacuauc

SEQ ID NO: 1912392 - RNA, 19 nt, Homo sapiens
  misc_RNA (1)...(19): siRNA sense strand
agacaccugcacauucuga

SEQ ID NO: 1912393 - RNA, 19 nt, Homo sapiens
  misc_RNA (1)...(19): siRNA sense strand
cacagaaccaagcuccaaa

SEQ ID NO: 1912394 - RNA, 19 nt, Homo sapiens
  misc_RNA (1)...(19): siRNA sense strand
gaaguaacauggagaguuu

SEQ ID NO: 1912395 - RNA, 19 nt, Homo sapiens
  misc_RNA (1)...(19): siRNA sense strand
gaugaaaucucacauauag

SEQ ID NO: 1912396 - RNA, 19 nt, Homo sapiens
  misc_RNA (1)...(19): siRNA sense strand
gaacagcaauucaacagaa

SEQ ID NO: 1912397 - RNA, 19 nt, Homo sapiens
  misc_RNA (1)...(19): siRNA sense strand
caacaaagccuuaggauug

SEQ ID NO: 1912398 - RNA, 19 nt, Homo sapiens
  misc_RNA (1)...(19): siRNA sense strand
guuagaaccugaaguauuu

SEQ ID NO: 1912399 - RNA, 19 nt, Homo sapiens
  misc_RNA (1)...(19): siRNA sense strand
gaaccuagaagcauaguua

SEQ ID NO: 1912400 - RNA, 19 nt, Homo sapiens
  misc_RNA (1)...(19): siRNA sense strand
gaaaguccacuguaaauuu

SEQ ID NO: 1912401 - RNA, 19 nt, Homo sapiens
  misc_RNA (1)...(19): siRNA sense strand
gaaauacauuggaaacuga

SEQ ID NO: 1912402 - RNA, 19 nt, Homo sapiens
  misc_RNA (1)...(19): siRNA sense strand
ucaagaugcuuuccaguua

SEQ ID NO: 1912403 - RNA, 19 nt, Homo sapiens
  misc_RNA (1)...(19): siRNA sense strand
gagcaugccagauguauua

SEQ ID NO: 1912404 - RNA, 19 nt, Homo sapiens
  misc_RNA (1)...(19): siRNA sense strand
gaacauggauuucguagac

SEQ ID NO: 1912405 - RNA, 19 nt, Homo sapiens
  misc_RNA (1)...(19): siRNA sense strand
gaagaaacaucugguugaa

SEQ ID NO: 1912406 - RNA, 19 nt, Homo sapiens
  misc_RNA (1)...(19): siRNA sense strand
caacagaacaagauucaua

SEQ ID NO: 1912407 - RNA, 19 nt, Homo sapiens
  misc_RNA (1)...(19): siRNA sense strand
agacuuaccuugauucuga

SEQ ID NO: 1912408 - RNA, 19 nt, Homo sapiens
  misc_RNA (1)...(19): siRNA sense strand
ucaagaaccuagaagcaua

SEQ ID NO: 1912409 - RNA, 19 nt, Homo sapiens
  misc_RNA (1)...(19): siRNA sense strand
gaacuaggcagauugaaug

SEQ ID NO: 1912410 - RNA, 19 nt, Homo sapiens
  misc_RNA (1)...(19): siRNA sense strand
gaggauaugucucuggauu

SEQ ID NO: 1912411 - RNA, 19 nt, Homo sapiens
  misc_RNA (1)...(19): siRNA sense strand
gggaugaaaucucacauau

SEQ ID NO: 1912412 - RNA, 19 nt, Homo sapiens
  misc_RNA (1)...(19): siRNA sense strand
gaagaagaaaugaauggua

SEQ ID NO: 1912413 - RNA, 19 nt, Homo sapiens
  misc_RNA (1)...(19): siRNA sense strand
aaccagcucuuucaaauuu

SEQ ID NO: 1912414 - RNA, 19 nt, Homo sapiens
  misc_RNA (1)...(19): siRNA sense strand
gcacugaugaugccuauga

SEQ ID NO: 1912415 - RNA, 19 nt, Homo sapiens
  misc_RNA (1)...(19): siRNA sense strand
agaaacaucugguugaaau

SEQ ID NO: 1912416 - RNA, 19 nt, Homo sapiens
  misc_RNA (1)...(19): siRNA sense strand
acucagagcuuauuacuag

SEQ ID NO: 1912417 - RNA, 19 nt, Homo sapiens
  misc_RNA (1)...(19): siRNA sense strand
uaaaggaacuaggcagauu

SEQ ID NO: 1912418 - RNA, 19 nt, Homo sapiens
  misc_RNA (1)...(19): siRNA sense strand
gaguauugaucaucugaaa

SEQ ID NO: 1912419 - RNA, 19 nt, Homo sapiens
  misc_RNA (1)...(19): siRNA sense strand
caaauuaggcaauacagaa

SEQ ID NO: 1912420 - RNA, 19 nt, Homo sapiens
  misc_RNA (1)...(19): siRNA sense strand
ggaaaggcaugucauacca

SEQ ID NO: 1912421 - RNA, 19 nt, Homo sapiens
  misc_RNA (1)...(19): siRNA sense strand
guagaugguuugcaugaga

SEQ ID NO: 1912422 - RNA, 19 nt, Homo sapiens
  misc_RNA (1)...(19): siRNA sense strand
uuaguccacuuucagauua

SEQ ID NO: 1912423 - RNA, 19 nt, Homo sapiens
  misc_RNA (1)...(19): siRNA sense strand
gaccauaagcuacauuuga

SEQ ID NO: 1912424 - RNA, 19 nt, Homo sapiens
  misc_RNA (1)...(19): siRNA sense strand
gaaagagaccaaaggauca

SEQ ID NO: 1912425 - RNA, 19 nt, Homo sapiens
  misc_RNA (1)...(19): siRNA sense strand
gcagucagcucuuuuagaa

SEQ ID NO: 1912426 - RNA, 19 nt, Homo sapiens
  misc_RNA (1)...(19): siRNA sense strand
gaauuggauugccuuauca

SEQ ID NO: 1912427 - RNA, 19 nt, Homo sapiens
  misc_RNA (1)...(19): siRNA sense strand
ucgaaaugcuccagaauug

SEQ ID NO: 1912428 - RNA, 19 nt, Homo sapiens
  misc_RNA (1)...(19): siRNA sense strand
gaaugucuaucagaagaaa

SEQ ID NO: 1912429 - RNA, 19 nt, Homo sapiens
  misc_RNA (1)...(19): siRNA sense strand
ugaaagauaccaacucuga

SEQ ID NO: 1912430 - RNA, 19 nt, Homo sapiens
  misc_RNA (1)...(19): siRNA sense strand
ucaagucagucucaagaaa

SEQ ID NO: 1912431 - RNA, 19 nt, Homo sapiens
  misc_RNA (1)...(19): siRNA sense strand
gcaaucgucuccugaugug

SEQ ID NO: 1912432 - RNA, 19 nt, Homo sapiens
  misc_RNA (1)...(19): siRNA sense strand
ggauagagucaaagaauug

SEQ ID NO: 1912433 - RNA, 19 nt, Homo sapiens
  misc_RNA (1)...(19): siRNA sense strand
ucaaccagcucuuucaaau

SEQ ID NO: 1912434 - RNA, 19 nt, Homo sapiens
  misc_RNA (1)...(19): siRNA sense strand
agacaagaauuggaaguaa

SEQ ID NO: 1912435 - RNA, 19 nt, Homo sapiens
  misc_RNA (1)...(19): siRNA sense strand
ggaauguauugcagccuuu

SEQ ID NO: 1912436 - RNA, 19 nt, Homo sapiens
  misc_RNA (1)...(19): siRNA sense strand
ggagagaacagcaauucaa

SEQ ID NO: 1912437 - RNA, 19 nt, Homo sapiens
  misc_RNA (1)...(19): siRNA sense strand
ggaugaaaucucacauaua

SEQ ID NO: 1912438 - RNA, 19 nt, Homo sapiens
  misc_RNA (1)...(19): siRNA sense strand
auacuuagguccaaaugaa

SEQ ID NO: 1912439 - RNA, 19 nt, Homo sapiens
  misc_RNA (1)...(19): siRNA sense strand
gaaacugauuccaauuaca

SEQ ID NO: 1912440 - RNA, 19 nt, Homo sapiens
  misc_RNA (1)...(19): siRNA sense strand
uccauaggcuguuuaauug

SEQ ID NO: 1912441 - RNA, 19 nt, Homo sapiens
  misc_RNA (1)...(19): siRNA sense strand
cauuauaucuggaaagcaa

SEQ ID NO: 1912442 - RNA, 19 nt, Homo sapiens
  misc_RNA (1)...(19): siRNA sense strand
guguaucaguuaccuauuu

SEQ ID NO: 1912443 - RNA, 19 nt, Homo sapiens
  misc_RNA (1)...(19): siRNA sense strand
ggcuuuaacugaaguagaa

SEQ ID NO: 1912444 - RNA, 19 nt, Homo sapiens
  misc_RNA (1)...(19): siRNA sense strand
ggauaugucucuggauuca

SEQ ID NO: 1912445 - RNA, 19 nt, Homo sapiens
  misc_RNA (1)...(19): siRNA sense strand
ccaguuagaaccugaagua

SEQ ID NO: 1912446 - RNA, 19 nt, Homo sapiens
  misc_RNA (1)...(19): siRNA sense strand
ugaagagacugaaauacau

SEQ ID NO: 1912447 - RNA, 19 nt, Homo sapiens
  misc_RNA (1)...(19): siRNA sense strand
uaacagagaagaacaucaa

SEQ ID NO: 1912448 - RNA, 19 nt, Homo sapiens
  misc_RNA (1)...(19): siRNA sense strand
gcaacgacacauagucuuu

SEQ ID NO: 1912449 - RNA, 19 nt, Homo sapiens
  misc_RNA (1)...(19): siRNA sense strand
gaaacauggugagaaacaa

SEQ ID NO: 1912450 - RNA, 19 nt, Homo sapiens
  misc_RNA (1)...(19): siRNA sense strand
gaagagacugaaauacauu

SEQ ID NO: 1912451 - RNA, 19 nt, Homo sapiens
  misc_RNA (1)...(19): siRNA sense strand
gaaacaaacaccagacaca

SEQ ID NO: 1912452 - RNA, 19 nt, Homo sapiens
  misc_RNA (1)...(19): siRNA sense strand
gauauaguaugcucugaag

SEQ ID NO: 1912453 - RNA, 19 nt, Homo sapiens
  misc_RNA (1)...(19): siRNA sense strand
caagaugcuuuccaguuau

SEQ ID NO: 1912454 - RNA, 19 nt, Homo sapiens
  misc_RNA (1)...(19): siRNA sense strand
gcauuccacuucggcuuua

SEQ ID NO: 1912455 - RNA, 19 nt, Homo sapiens
  misc_RNA (1)...(19): siRNA sense strand
cuacaugcuuuguuucuau

SEQ ID NO: 1912456 - RNA, 19 nt, Homo sapiens
  misc_RNA (1)...(19): siRNA sense strand
caugaaagacguccagaaa

SEQ ID NO: 1912457 - RNA, 19 nt, Homo sapiens
  misc_RNA (1)...(19): siRNA sense strand
caugagaagcuaaauacua

SEQ ID NO: 1912458 - RNA, 19 nt, Homo sapiens
  misc_RNA (1)...(19): siRNA sense strand
uuaugaaggucaagaagaa

SEQ ID NO: 1912459 - RNA, 19 nt, Homo sapiens
  misc_RNA (1)...(19): siRNA sense strand
aaauaugucccaucaguuu

SEQ ID NO: 1912460 - RNA, 19 nt, Homo sapiens
  misc_RNA (1)...(19): siRNA sense strand
uuaaauaugucccaucagu

SEQ ID NO: 1912461 - RNA, 19 nt, Homo sapiens
  misc_RNA (1)...(19): siRNA sense strand
ugaaauacauuggaaacug

SEQ ID NO: 1912462 - RNA, 19 nt, Homo sapiens
  misc_RNA (1)...(19): siRNA sense strand
gauucacgauuagaugaua

SEQ ID NO: 1912463 - RNA, 19 nt, Homo sapiens
  misc_RNA (1)...(19): siRNA sense strand
ggagaaagagaccaaagga

SEQ ID NO: 1912464 - RNA, 19 nt, Homo sapiens
  misc_RNA (1)...(19): siRNA sense strand
gaaacauacuuagguccaa

SEQ ID NO: 1912465 - RNA, 19 nt, Homo sapiens
  misc_RNA (1)...(19): siRNA sense strand
ggaaaguccacuguaaauu

SEQ ID NO: 1912466 - RNA, 19 nt, Homo sapiens
  misc_RNA (1)...(19): siRNA sense strand
gaacuuaguacuccagaag

SEQ ID NO: 1912467 - RNA, 19 nt, Homo sapiens
  misc_RNA (1)...(19): siRNA sense strand
uaaagaagcuccccugugu

SEQ ID NO: 1912468 - RNA, 19 nt, Homo sapiens
  misc_RNA (1)...(19): siRNA sense strand
gaaaugaaccagccucaac

SEQ ID NO: 1912469 - RNA, 19 nt, Homo sapiens
  misc_RNA (1)...(19): siRNA sense strand
ccacuucggcuuuaacuga

SEQ ID NO: 1912470 - RNA, 19 nt, Homo sapiens
  misc_RNA (1)...(19): siRNA sense strand
ggacaguguuaggagagua

SEQ ID NO: 1912471 - RNA, 19 nt, Homo sapiens
  misc_RNA (1)...(19): siRNA sense strand
ugauaaggauagagucaaa

SEQ ID NO: 1912472 - RNA, 19 nt, Homo sapiens
  misc_RNA (1)...(19): siRNA sense strand
ggaaguaacauggagaguu

SEQ ID NO: 1912473 - RNA, 19 nt, Homo sapiens
  misc_RNA (1)...(19): siRNA sense strand
acaauucaaucacagaaga

SEQ ID NO: 1912474 - RNA, 19 nt, Homo sapiens
  misc_RNA (1)...(19): siRNA sense strand
cuaggcagauugaaugcua

SEQ ID NO: 1912475 - RNA, 19 nt, Homo sapiens
  misc_RNA (1)...(19): siRNA sense strand
ggugacuucugaucauauu

SEQ ID NO: 1912476 - RNA, 19 nt, Homo sapiens
  misc_RNA (1)...(19): siRNA sense strand
ggaaacauggugagaaaca

SEQ ID NO: 1912477 - RNA, 19 nt, Homo sapiens
  misc_RNA (1)...(19): siRNA sense strand
agacugaaauacauuggaa

SEQ ID NO: 1912478 - RNA, 19 nt, Homo sapiens
  misc_RNA (1)...(19): siRNA sense strand
gacaacagucuaagucaaa

SEQ ID NO: 1912479 - RNA, 19 nt, Homo sapiens
  misc_RNA (1)...(19): siRNA sense strand
gagcacugaugaugccuau

SEQ ID NO: 1912480 - RNA, 19 nt, Homo sapiens
  misc_RNA (1)...(19): siRNA sense strand
agaggaagcuugaggaucu

SEQ ID NO: 1912481 - RNA, 19 nt, Homo sapiens
  misc_RNA (1)...(19): siRNA sense strand
gcaguuuaguccacuuuca

SEQ ID NO: 1912482 - RNA, 19 nt, Homo sapiens
  misc_RNA (1)...(19): siRNA sense strand
aaaguccacuguaaauuuc

SEQ ID NO: 1912483 - RNA, 19 nt, Homo sapiens
  misc_RNA (1)...(19): siRNA sense strand
gaucaucucauucuuugga

SEQ ID NO: 1912484 - RNA, 19 nt, Homo sapiens
  misc_RNA (1)...(19): siRNA sense strand
uccauaugauucacgauua

SEQ ID NO: 1912485 - RNA, 19 nt, Homo sapiens
  misc_RNA (1)...(19): siRNA sense strand
caacaugccacagaguuaa

SEQ ID NO: 1912486 - RNA, 19 nt, Homo sapiens
  misc_RNA (1)...(19): siRNA sense strand
gagaagaugaaacggcuuu

SEQ ID NO: 1912487 - RNA, 19 nt, Homo sapiens
  misc_RNA (1)...(19): siRNA sense strand
caucucauucuuuggauua

SEQ ID NO: 1912488 - RNA, 19 nt, Homo sapiens
  misc_RNA (1)...(19): siRNA sense strand
auacucagcucccagaaau

SEQ ID NO: 1912489 - RNA, 19 nt, Homo sapiens
  misc_RNA (1)...(19): siRNA sense strand
caacacaagagaagaugaa

SEQ ID NO: 1912490 - RNA, 19 nt, Homo sapiens
  misc_RNA (1)...(19): siRNA sense strand
cauaugcccuuucaucaag

SEQ ID NO: 1912491 - RNA, 19 nt, Homo sapiens
  misc_RNA (1)...(19): siRNA sense strand
agaauuggauugccuuauc

SEQ ID NO: 1912492 - RNA, 19 nt, Homo sapiens
  misc_RNA (1)...(19): siRNA sense strand
ggaacuaggcagauugaau

SEQ ID NO: 1912493 - RNA, 19 nt, Homo sapiens
  misc_RNA (1)...(19): siRNA sense strand
uagccuggaugauguuaaa

SEQ ID NO: 1912494 - RNA, 19 nt, Homo sapiens
  misc_RNA (1)...(19): siRNA sense strand
gaacaaagcuguaugugau

SEQ ID NO: 1912495 - RNA, 19 nt, Homo sapiens
  misc_RNA (1)...(19): siRNA sense strand
ggaauggacugguuaauag

SEQ ID NO: 1912496 - RNA, 19 nt, Homo sapiens
  misc_RNA (1)...(19): siRNA sense strand
gcaaagaagaugcuuauga

SEQ ID NO: 1912497 - RNA, 19 nt, Homo sapiens
  misc_RNA (1)...(19): siRNA sense strand
caaagaagaugcuuaugau

SEQ ID NO: 1912498 - RNA, 19 nt, Homo sapiens
  misc_RNA (1)...(19): siRNA sense strand
caaagugcauaacauagua

SEQ ID NO: 1912499 - RNA, 19 nt, Homo sapiens
  misc_RNA (1)...(19): siRNA sense strand
aaacaucacugcccaaguu

SEQ ID NO: 1912500 - RNA, 19 nt, Homo sapiens
  misc_RNA (1)...(19): siRNA sense strand
gaagaaacacaacuuauca

SEQ ID NO: 1912501 - RNA, 19 nt, Homo sapiens
  misc_RNA (1)...(19): siRNA sense strand
gaauuuacaggaagagaua

SEQ ID NO: 1912502 - RNA, 19 nt, Homo sapiens
  misc_RNA (1)...(19): siRNA sense strand
ugugauggcuucuguguuu

SEQ ID NO: 1912503 - RNA, 19 nt, Homo sapiens
  misc_RNA (1)...(19): siRNA sense strand
guucagaagcguacaauuu

SEQ ID NO: 1912504 - RNA, 19 nt, Homo sapiens
  misc_RNA (1)...(19): siRNA sense strand
cacaguaccuaccguuaua

SEQ ID NO: 1912505 - RNA, 19 nt, Homo sapiens
  misc_RNA (1)...(19): siRNA sense strand
gaaaggcacgcuuaaacaa

SEQ ID NO: 1912506 - RNA, 19 nt, Homo sapiens
  misc_RNA (1)...(19): siRNA sense strand
gcagaggaaaugaguuaua

SEQ ID NO: 1912507 - RNA, 19 nt, Homo sapiens
  misc_RNA (1)...(19): siRNA sense strand
caucaaagugcauaacaua

SEQ ID NO: 1912508 - RNA, 19 nt, Homo sapiens
  misc_RNA (1)...(19): siRNA sense strand
guacucaugaugcaaguua

SEQ ID NO: 1912509 - RNA, 19 nt, Homo sapiens
  misc_RNA (1)...(19): siRNA sense strand
ggaagaaacacaacuuauc

SEQ ID NO: 1912510 - RNA, 19 nt, Homo sapiens
  misc_RNA (1)...(19): siRNA sense strand
gaagaacaaagcuguaugu

SEQ ID NO: 1912511 - RNA, 19 nt, Homo sapiens
  misc_RNA (1)...(19): siRNA sense strand
cagaggaaaugaguuauau

SEQ ID NO: 1912512 - RNA, 19 nt, Homo sapiens
  misc_RNA (1)...(19): siRNA sense strand
ggaaaggcacgcuuaaaca

SEQ ID NO: 1912513 - RNA, 19 nt, Homo sapiens
  misc_RNA (1)...(19): siRNA sense strand
uagcagaggaaaugaguua

SEQ ID NO: 1912514 - RNA, 19 nt, Homo sapiens
  misc_RNA (1)...(19): siRNA sense strand
auagugaaguccauaauga

SEQ ID NO: 1912515 - RNA, 19 nt, Homo sapiens
  misc_RNA (1)...(19): siRNA sense strand
uaacauaguacucaugaug

SEQ ID NO: 1912516 - RNA, 19 nt, Homo sapiens
  misc_RNA (1)...(19): siRNA sense strand
gaggaaaugaguuauaugu

SEQ ID NO: 1912517 - RNA, 19 nt, Homo sapiens
  misc_RNA (1)...(19): siRNA sense strand
uaugauuucuguacucuga

SEQ ID NO: 1912518 - RNA, 19 nt, Homo sapiens
  misc_RNA (1)...(19): siRNA sense strand
agaagaugcuuaugaugga

SEQ ID NO: 1912519 - RNA, 19 nt, Homo sapiens
  misc_RNA (1)...(19): siRNA sense strand
gcaaguuacugugacaaca

SEQ ID NO: 1912520 - RNA, 19 nt, Homo sapiens
  misc_RNA (1)...(19): siRNA sense strand
ucagaagcguacaauuuau

SEQ ID NO: 1912521 - RNA, 19 nt, Homo sapiens
  misc_RNA (1)...(19): siRNA sense strand
cuauuacucugucgaaguu

SEQ ID NO: 1912522 - RNA, 19 nt, Homo sapiens
  misc_RNA (1)...(19): siRNA sense strand
cagccuaugucaguuauga

SEQ ID NO: 1912523 - RNA, 19 nt, Homo sapiens
  misc_RNA (1)...(19): siRNA sense strand
gagauuaaggccaagaaga

SEQ ID NO: 1912524 - RNA, 19 nt, Homo sapiens
  misc_RNA (1)...(19): siRNA sense strand
caggagagguaucaguaug

SEQ ID NO: 1912525 - RNA, 19 nt, Homo sapiens
  misc_RNA (1)...(19): siRNA sense strand
ugauuucuguacucugaua

SEQ ID NO: 1912526 - RNA, 19 nt, Homo sapiens
  misc_RNA (1)...(19): siRNA sense strand
caugaggaauggacugguu

SEQ ID NO: 1912527 - RNA, 19 nt, Homo sapiens
  misc_RNA (1)...(19): siRNA sense strand
uggcauugauuccauauag

SEQ ID NO: 1912528 - RNA, 19 nt, Homo sapiens
  misc_RNA (1)...(19): siRNA sense strand
uucagaagcguacaauuua

SEQ ID NO: 1912529 - RNA, 19 nt, Homo sapiens
  misc_RNA (1)...(19): siRNA sense strand
caagaagaacaaagcugua

SEQ ID NO: 1912530 - RNA, 19 nt, Homo sapiens
  misc_RNA (1)...(19): siRNA sense strand
ugaaguccauaaugaagau

SEQ ID NO: 1912531 - RNA, 19 nt, Homo sapiens
  misc_RNA (1)...(19): siRNA sense strand
guggaagaaacacaacuua

SEQ ID NO: 1912532 - RNA, 19 nt, Homo sapiens
  misc_RNA (1)...(19): siRNA sense strand
cauaacauaguacucauga

SEQ ID NO: 1912533 - RNA, 19 nt, Homo sapiens
  misc_RNA (1)...(19): siRNA sense strand
caaauugauuacacaguac

SEQ ID NO: 1912534 - RNA, 19 nt, Homo sapiens
  misc_RNA (1)...(19): siRNA sense strand
ucagggaacaggaagaauu

SEQ ID NO: 1912535 - RNA, 19 nt, Homo sapiens
  misc_RNA (1)...(19): siRNA sense strand
ggagagguaucaguauguc

SEQ ID NO: 1912536 - RNA, 19 nt, Homo sapiens
  misc_RNA (1)...(19): siRNA sense strand
ggggcagucugaauauuua

SEQ ID NO: 1912537 - RNA, 19 nt, Homo sapiens
  misc_RNA (1)...(19): siRNA sense strand
uauguggaauuuacaggaa

SEQ ID NO: 1912538 - RNA, 19 nt, Homo sapiens
  misc_RNA (1)...(19): siRNA sense strand
gcauugauuccauauagug

SEQ ID NO: 1912539 - RNA, 19 nt, Homo sapiens
  misc_RNA (1)...(19): siRNA sense strand
ucucucaguuuccauaugu

SEQ ID NO: 1912540 - RNA, 19 nt, Homo sapiens
  misc_RNA (1)...(19): siRNA sense strand
cagaagcguacaauuuauu

SEQ ID NO: 1912541 - RNA, 19 nt, Homo sapiens
  misc_RNA (1)...(19): siRNA sense strand
gcucuaucgacgugaaaua

SEQ ID NO: 1912542 - RNA, 19 nt, Homo sapiens
  misc_RNA (1)...(19): siRNA sense strand
uggaagaaauggagauguc

SEQ ID NO: 1912543 - RNA, 19 nt, Homo sapiens
  misc_RNA (1)...(19): siRNA sense strand
gaugcaaguuacugugaca

SEQ ID NO: 1912544 - RNA, 19 nt, Homo sapiens
  misc_RNA (1)...(19): siRNA sense strand
aggaauggacugguuaaua

SEQ ID NO: 1912545 - RNA, 19 nt, Homo sapiens
  misc_RNA (1)...(19): siRNA sense strand
agaacaaagcuguauguga

SEQ ID NO: 1912546 - RNA, 19 nt, Homo sapiens
  misc_RNA (1)...(19): siRNA sense strand
agauuaaggccaagaagaa

SEQ ID NO: 1912547 - RNA, 19 nt, Homo sapiens
  misc_RNA (1)...(19): siRNA sense strand
ggaauuuacaggaagagau

SEQ ID NO: 1912548 - RNA, 19 nt, Homo sapiens
  misc_RNA (1)...(19): siRNA sense strand
caacugguggcauugauuc

SEQ ID NO: 1912549 - RNA, 19 nt, Homo sapiens
  misc_RNA (1)...(19): siRNA sense strand
uaacuauuacucugucgaa

SEQ ID NO: 1912550 - RNA, 19 nt, Homo sapiens
  misc_RNA (1)...(19): siRNA sense strand
caaguuacugugacaacaa

SEQ ID NO: 1912551 - RNA, 19 nt, Homo sapiens
  misc_RNA (1)...(19): siRNA sense strand
cuaugucaguuaugauguu

SEQ ID NO: 1912552 - RNA, 19 nt, Homo sapiens
  misc_RNA (1)...(19): siRNA sense strand
ucaaagugcauaacauagu

SEQ ID NO: 1912553 - RNA, 19 nt, Homo sapiens
  misc_RNA (1)...(19): siRNA sense strand
ccacuugauaugaaacaaa

SEQ ID NO: 1912554 - RNA, 19 nt, Homo sapiens
  misc_RNA (1)...(19): siRNA sense strand
aaucagccuaugucaguua

SEQ ID NO: 1912555 - RNA, 19 nt, Homo sapiens
  misc_RNA (1)...(19): siRNA sense strand
gugcauaacauaguacuca

SEQ ID NO: 1912556 - RNA, 19 nt, Homo sapiens
  misc_RNA (1)...(19): siRNA sense strand
cauauagugaucagagauu

SEQ ID NO: 1912557 - RNA, 19 nt, Homo sapiens
  misc_RNA (1)...(19): siRNA sense strand
guaugucgacuguggaaga

SEQ ID NO: 1912558 - RNA, 19 nt, Homo sapiens
  misc_RNA (1)...(19): siRNA sense strand
ccaucaaagugcauaacau

SEQ ID NO: 1912559 - RNA, 19 nt, Homo sapiens
  misc_RNA (1)...(19): siRNA sense strand
ucaguuaugauguucagaa

SEQ ID NO: 1912560 - RNA, 19 nt, Homo sapiens
  misc_RNA (1)...(19): siRNA sense strand
ucauuugccuuugcauuca

SEQ ID NO: 1912561 - RNA, 19 nt, Homo sapiens
  misc_RNA (1)...(19): siRNA sense strand
uuacugugacaacaacaua

SEQ ID NO: 1912562 - RNA, 19 nt, Homo sapiens
  misc_RNA (1)...(19): siRNA sense strand
ucacugcccaaguucaauu

SEQ ID NO: 1912563 - RNA, 19 nt, Homo sapiens
  misc_RNA (1)...(19): siRNA sense strand
guacuucagccacaacagu

SEQ ID NO: 1912564 - RNA, 19 nt, Homo sapiens
  misc_RNA (1)...(19): siRNA sense strand
gcacgcuuaaacaacauaa

SEQ ID NO: 1912565 - RNA, 19 nt, Homo sapiens
  misc_RNA (1)...(19): siRNA sense strand
aaggcacgcuuaaacaaca

SEQ ID NO: 1912566 - RNA, 19 nt, Homo sapiens
  misc_RNA (1)...(19): siRNA sense strand
gaauggacugguuaauagu

SEQ ID NO: 1912567 - RNA, 19 nt, Homo sapiens
  misc_RNA (1)...(19): siRNA sense strand
gcauaacauaguacucaug

SEQ ID NO: 1912568 - RNA, 19 nt, Homo sapiens
  misc_RNA (1)...(19): siRNA sense strand
acacaguaccuaccguuau

SEQ ID NO: 1912569 - RNA, 19 nt, Homo sapiens
  misc_RNA (1)...(19): siRNA sense strand
ggcauugauuccauauagu

SEQ ID NO: 1912570 - RNA, 19 nt, Homo sapiens
  misc_RNA (1)...(19): siRNA sense strand
guuaauagugaaguccaua

SEQ ID NO: 1912571 - RNA, 19 nt, Homo sapiens
  misc_RNA (1)...(19): siRNA sense strand
uguaugugauggcuucugu

SEQ ID NO: 1912572 - RNA, 19 nt, Homo sapiens
  misc_RNA (1)...(19): siRNA sense strand
uaugucgacuguggaagaa

SEQ ID NO: 1912573 - RNA, 19 nt, Homo sapiens
  misc_RNA (1)...(19): siRNA sense strand
cccaggagagguaucagua

SEQ ID NO: 1912574 - RNA, 19 nt, Homo sapiens
  misc_RNA (1)...(19): siRNA sense strand
gugaaguccauaaugaaga

SEQ ID NO: 1912575 - RNA, 19 nt, Homo sapiens
  misc_RNA (1)...(19): siRNA sense strand
cauuauugguccacuugau

SEQ ID NO: 1912576 - RNA, 19 nt, Homo sapiens
  misc_RNA (1)...(19): siRNA sense strand
ucaccugcccuacuuguca

SEQ ID NO: 1912577 - RNA, 19 nt, Homo sapiens
  misc_RNA (1)...(19): siRNA sense strand
agauaucccaggagaggua

SEQ ID NO: 1912578 - RNA, 19 nt, Homo sapiens
  misc_RNA (1)...(19): siRNA sense strand
cagggaacaggaagaauuc

SEQ ID NO: 1912579 - RNA, 19 nt, Homo sapiens
  misc_RNA (1)...(19): siRNA sense strand
caucacugcccaaguucaa

SEQ ID NO: 1912580 - RNA, 19 nt, Homo sapiens
  misc_RNA (1)...(19): siRNA sense strand
ugugacaacaacauacuuu

SEQ ID NO: 1912581 - RNA, 19 nt, Homo sapiens
  misc_RNA (1)...(19): siRNA sense strand
gcauucaagcaaagaagau

SEQ ID NO: 1912582 - RNA, 19 nt, Homo sapiens
  misc_RNA (1)...(19): siRNA sense strand
ccaacugguggcauugauu

SEQ ID NO: 1912583 - RNA, 19 nt, Homo sapiens
  misc_RNA (1)...(19): siRNA sense strand
uggaagaaacacaacuuau

SEQ ID NO: 1912584 - RNA, 19 nt, Homo sapiens
  misc_RNA (1)...(19): siRNA sense strand
cguuauagcagaggaaaug

SEQ ID NO: 1912585 - RNA, 19 nt, Homo sapiens
  misc_RNA (1)...(19): siRNA sense strand
uauuggaaaggcacgcuua

SEQ ID NO: 1912586 - RNA, 19 nt, Homo sapiens
  misc_RNA (1)...(19): siRNA sense strand
aaagaagaugcuuaugaug

SEQ ID NO: 1912587 - RNA, 19 nt, Homo sapiens
  misc_RNA (1)...(19): siRNA sense strand
ugaggaauggacugguuaa

SEQ ID NO: 1912588 - RNA, 19 nt, Homo sapiens
  misc_RNA (1)...(19): siRNA sense strand
ccaggagagguaucaguau

SEQ ID NO: 1912589 - RNA, 19 nt, Homo sapiens
  misc_RNA (1)...(19): siRNA sense strand
ugacaacaacauacuuugg

SEQ ID NO: 1912590 - RNA, 19 nt, Homo sapiens
  misc_RNA (1)...(19): siRNA sense strand
agugucaccugcccuacuu

SEQ ID NO: 1912591 - RNA, 19 nt, Homo sapiens
  misc_RNA (1)...(19): siRNA sense strand
gauggaagaaauggagaug

SEQ ID NO: 1912592 - RNA, 19 nt, Homo sapiens
  misc_RNA (1)...(19): siRNA sense strand
acauaguacucaugaugca

SEQ ID NO: 1912593 - RNA, 19 nt, Homo sapiens
  misc_RNA (1)...(19): siRNA sense strand
ucuguacucugauauccau

SEQ ID NO: 1912594 - RNA, 19 nt, Homo sapiens
  misc_RNA (1)...(19): siRNA sense strand
gaaccaagcuccaaaucug

SEQ ID NO: 1912595 - RNA, 19 nt, Homo sapiens
  misc_RNA (1)...(19): siRNA sense strand
ggucagauaucauguuuga

SEQ ID NO: 1912596 - RNA, 19 nt, Homo sapiens
  misc_RNA (1)...(19): siRNA sense strand
cgucauagguuuaacaauu

SEQ ID NO: 1912597 - RNA, 19 nt, Homo sapiens
  misc_RNA (1)...(19): siRNA sense strand
gaacauuccaggcagauuu

SEQ ID NO: 1912598 - RNA, 19 nt, Homo sapiens
  misc_RNA (1)...(19): siRNA sense strand
ggaaacccuucaaguaguu

SEQ ID NO: 1912599 - RNA, 19 nt, Homo sapiens
  misc_RNA (1)...(19): siRNA sense strand
gcacuucuuucugcacaaa

SEQ ID NO: 1912600 - RNA, 19 nt, Homo sapiens
  misc_RNA (1)...(19): siRNA sense strand
ggagagagcgugaccuugu

SEQ ID NO: 1912601 - RNA, 19 nt, Homo sapiens
  misc_RNA (1)...(19): siRNA sense strand
gcagggaacuacacauguc

SEQ ID NO: 1912602 - RNA, 19 nt, Homo sapiens
  misc_RNA (1)...(19): siRNA sense strand
acaggaaacccuucaagua

SEQ ID NO: 1912603 - RNA, 19 nt, Homo sapiens
  misc_RNA (1)...(19): siRNA sense strand
caggaaacccuucaaguag

SEQ ID NO: 1912604 - RNA, 19 nt, Homo sapiens
  misc_RNA (1)...(19): siRNA sense strand
gaauccacguucccaucuu

SEQ ID NO: 1912605 - RNA, 19 nt, Homo sapiens
  misc_RNA (1)...(19): siRNA sense strand
cugcaauguuggucagaua

SEQ ID NO: 1912606 - RNA, 19 nt, Homo sapiens
  misc_RNA (1)...(19): siRNA sense strand
gcagggaccuacagaugcu

SEQ ID NO: 1912607 - RNA, 19 nt, Homo sapiens
  misc_RNA (1)...(19): siRNA sense strand
ggagggaccuacagaugcu

SEQ ID NO: 1912608 - RNA, 19 nt, Homo sapiens
  misc_RNA (1)...(19): siRNA sense strand
gagagagcgugaccuuguc

SEQ ID NO: 1912609 - RNA, 19 nt, Homo sapiens
  misc_RNA (1)...(19): siRNA sense strand
ggaggacacgugacucuuc

SEQ ID NO: 1912610 - RNA, 19 nt, Homo sapiens
  misc_RNA (1)...(19): siRNA sense strand
uaugacauguaccaucuau

SEQ ID NO: 1912611 - RNA, 19 nt, Homo sapiens
  misc_RNA (1)...(19): siRNA sense strand
gagcuccuaugacauguac

SEQ ID NO: 1912612 - RNA, 19 nt, Homo sapiens
  misc_RNA (1)...(19): siRNA sense strand
caauguuggucagauauca

SEQ ID NO: 1912613 - RNA, 19 nt, Homo sapiens
  misc_RNA (1)...(19): siRNA sense strand
ucacaggaaaccacagaaa

SEQ ID NO: 1912614 - RNA, 19 nt, Homo sapiens
  misc_RNA (1)...(19): siRNA sense strand
ccuaugacauguaccaucu

SEQ ID NO: 1912615 - RNA, 19 nt, Homo sapiens
  misc_RNA (1)...(19): siRNA sense strand
cggugucacuaucgucaua

SEQ ID NO: 1912616 - RNA, 19 nt, Homo sapiens
  misc_RNA (1)...(19): siRNA sense strand
ucccggagcuccuaugaca

SEQ ID NO: 1912617 - RNA, 19 nt, Homo sapiens
  misc_RNA (1)...(19): siRNA sense strand
gcagggaacagaagugaac

SEQ ID NO: 1912618 - RNA, 19 nt, Homo sapiens
  misc_RNA (1)...(19): siRNA sense strand
gcacaugcagggaacuaca

SEQ ID NO: 1912619 - RNA, 19 nt, Homo sapiens
  misc_RNA (1)...(19): siRNA sense strand
guugucagcucccagugau

SEQ ID NO: 1912620 - RNA, 19 nt, Homo sapiens
  misc_RNA (1)...(19): siRNA sense strand
auacaaagaagacagaauc

SEQ ID NO: 1912621 - RNA, 19 nt, Homo sapiens
  misc_RNA (1)...(19): siRNA sense strand
ccacagaaccaagcuccaa

SEQ ID NO: 1912622 - RNA, 19 nt, Homo sapiens
  misc_RNA (1)...(19): siRNA sense strand
acagaugcuucggcucuuu

SEQ ID NO: 1912623 - RNA, 19 nt, Homo sapiens
  misc_RNA (1)...(19): siRNA sense strand
uuggucagauaucauguuu

SEQ ID NO: 1912624 - RNA, 19 nt, Homo sapiens
  misc_RNA (1)...(19): siRNA sense strand
gcuauacaaagaagacaga

SEQ ID NO: 1912625 - RNA, 19 nt, Homo sapiens
  misc_RNA (1)...(19): siRNA sense strand
ggucacaggaaaccacaga

SEQ ID NO: 1912626 - RNA, 19 nt, Homo sapiens
  misc_RNA (1)...(19): siRNA sense strand
aggaaacccuucaaguagu

SEQ ID NO: 1912627 - RNA, 19 nt, Homo sapiens
  misc_RNA (1)...(19): siRNA sense strand
ccacggagggaccuacaga

SEQ ID NO: 1912628 - RNA, 19 nt, Homo sapiens
  misc_RNA (1)...(19): siRNA sense strand
caaggucaacagaacauuc

SEQ ID NO: 1912629 - RNA, 19 nt, Homo sapiens
  misc_RNA (1)...(19): siRNA sense strand
uaucauguuugagcacuuc

SEQ ID NO: 1912630 - RNA, 19 nt, Homo sapiens
  misc_RNA (1)...(19): siRNA sense strand
ucaaguaguuggccuucac

SEQ ID NO: 1912631 - RNA, 19 nt, Homo sapiens
  misc_RNA (1)...(19): siRNA sense strand
gcaauguuggucagauauc

SEQ ID NO: 1912632 - RNA, 19 nt, Homo sapiens
  misc_RNA (1)...(19): siRNA sense strand
cauguuugagcacuucuuu

SEQ ID NO: 1912633 - RNA, 19 nt, Homo sapiens
  misc_RNA (1)...(19): siRNA sense strand
ggagcuccuaugacaugua

SEQ ID NO: 1912634 - RNA, 19 nt, Homo sapiens
  misc_RNA (1)...(19): siRNA sense strand
gcaaggucaacagaacauu

SEQ ID NO: 1912635 - RNA, 19 nt, Homo sapiens
  misc_RNA (1)...(19): siRNA sense strand
caugaugcgugcccuugca

SEQ ID NO: 1912636 - RNA, 19 nt, Homo sapiens
  misc_RNA (1)...(19): siRNA sense strand
caggagagagcgugaccuu

SEQ ID NO: 1912637 - RNA, 19 nt, Homo sapiens
  misc_RNA (1)...(19): siRNA sense strand
cuacagaugcuacgguucu

SEQ ID NO: 1912638 - RNA, 19 nt, Homo sapiens
  misc_RNA (1)...(19): siRNA sense strand
ccggagcuccuaugacaug

SEQ ID NO: 1912639 - RNA, 19 nt, Homo sapiens
  misc_RNA (1)...(19): siRNA sense strand
gaucauggucacaggaaac

SEQ ID NO: 1912640 - RNA, 19 nt, Homo sapiens
  misc_RNA (1)...(19): siRNA sense strand
aauccacguucccaucuuc

SEQ ID NO: 1912641 - RNA, 19 nt, Homo sapiens
  misc_RNA (1)...(19): siRNA sense strand
gugacccacugcuuguuuc

SEQ ID NO: 1912642 - RNA, 19 nt, Homo sapiens
  misc_RNA (1)...(19): siRNA sense strand
ugaucauggucacaggaaa

SEQ ID NO: 1912643 - RNA, 19 nt, Homo sapiens
  misc_RNA (1)...(19): siRNA sense strand
ugacauguaccaucuaucc

SEQ ID NO: 1912644 - RNA, 19 nt, Homo sapiens
  misc_RNA (1)...(19): siRNA sense strand
gcgcaaggucaacagaaca

SEQ ID NO: 1912645 - RNA, 19 nt, Homo sapiens
  misc_RNA (1)...(19): siRNA sense strand
acucuucggugucacuauc

SEQ ID NO: 1912646 - RNA, 19 nt, Homo sapiens
  misc_RNA (1)...(19): siRNA sense strand
cacagaaccaagcuccaaa

SEQ ID NO: 1912647 - RNA, 19 nt, Homo sapiens
  misc_RNA (1)...(19): siRNA sense strand
gaacggaucuccuuauuua

SEQ ID NO: 1912648 - RNA, 19 nt, Homo sapiens
  misc_RNA (1)...(19): siRNA sense strand
gaaguaagauacccuguua

SEQ ID NO: 1912649 - RNA, 19 nt, Homo sapiens
  misc_RNA (1)...(19): siRNA sense strand
gaagaacgcuuucauguug

SEQ ID NO: 1912650 - RNA, 19 nt, Homo sapiens
  misc_RNA (1)...(19): siRNA sense strand
guacugauguuaagguuua

SEQ ID NO: 1912651 - RNA, 19 nt, Homo sapiens
  misc_RNA (1)...(19): siRNA sense strand
caucagauauucagcuuua

SEQ ID NO: 1912652 - RNA, 19 nt, Homo sapiens
  misc_RNA (1)...(19): siRNA sense strand
gaacuuagaugugucauag

SEQ ID NO: 1912653 - RNA, 19 nt, Homo sapiens
  misc_RNA (1)...(19): siRNA sense strand
gauccuaaaucaucagaua

SEQ ID NO: 1912654 - RNA, 19 nt, Homo sapiens
  misc_RNA (1)...(19): siRNA sense strand
ggagagaaguauauaguau

SEQ ID NO: 1912655 - RNA, 19 nt, Homo sapiens
  misc_RNA (1)...(19): siRNA sense strand
gaaacgagcuauggauuau

SEQ ID NO: 1912656 - RNA, 19 nt, Homo sapiens
  misc_RNA (1)...(19): siRNA sense strand
ggaagaucauguagaagua

SEQ ID NO: 1912657 - RNA, 19 nt, Homo sapiens
  misc_RNA (1)...(19): siRNA sense strand
gaagaccugugauaaaguu

SEQ ID NO: 1912658 - RNA, 19 nt, Homo sapiens
  misc_RNA (1)...(19): siRNA sense strand
gcaaguggaugaauuucuu

SEQ ID NO: 1912659 - RNA, 19 nt, Homo sapiens
  misc_RNA (1)...(19): siRNA sense strand
gaagauaucccaauuguac

SEQ ID NO: 1912660 - RNA, 19 nt, Homo sapiens
  misc_RNA (1)...(19): siRNA sense strand
gaaauuuccucuacagcuu

SEQ ID NO: 1912661 - RNA, 19 nt, Homo sapiens
  misc_RNA (1)...(19): siRNA sense strand
ggaaacgagcuauggauua

SEQ ID NO: 1912662 - RNA, 19 nt, Homo sapiens
  misc_RNA (1)...(19): siRNA sense strand
ggacaaagcgguugccuau

SEQ ID NO: 1912663 - RNA, 19 nt, Homo sapiens
  misc_RNA (1)...(19): siRNA sense strand
caaauaaucccaaagaaug

SEQ ID NO: 1912664 - RNA, 19 nt, Homo sapiens
  misc_RNA (1)...(19): siRNA sense strand
gaacagaagcagaauccua

SEQ ID NO: 1912665 - RNA, 19 nt, Homo sapiens
  misc_RNA (1)...(19): siRNA sense strand
ggaagacggcuacaaauga

SEQ ID NO: 1912666 - RNA, 19 nt, Homo sapiens
  misc_RNA (1)...(19): siRNA sense strand
ucaaugagcucaacuacau

SEQ ID NO: 1912667 - RNA, 19 nt, Homo sapiens
  misc_RNA (1)...(19): siRNA sense strand
caccuaaccuacaggauua

SEQ ID NO: 1912668 - RNA, 19 nt, Homo sapiens
  misc_RNA (1)...(19): siRNA sense strand
gcaaagaaauccaaaucca

SEQ ID NO: 1912669 - RNA, 19 nt, Homo sapiens
  misc_RNA (1)...(19): siRNA sense strand
ggaagcauuucucuuauca

SEQ ID NO: 1912670 - RNA, 19 nt, Homo sapiens
  misc_RNA (1)...(19): siRNA sense strand
cuacagacaugaccucaaa

SEQ ID NO: 1912671 - RNA, 19 nt, Homo sapiens
  misc_RNA (1)...(19): siRNA sense strand
cagaagaucacaauguuua

SEQ ID NO: 1912672 - RNA, 19 nt, Homo sapiens
  misc_RNA (1)...(19): siRNA sense strand
gaacuaugauggaacuuag

SEQ ID NO: 1912673 - RNA, 19 nt, Homo sapiens
  misc_RNA (1)...(19): siRNA sense strand
uaaagcaaguggaugaauu

SEQ ID NO: 1912674 - RNA, 19 nt, Homo sapiens
  misc_RNA (1)...(19): siRNA sense strand
gcauaaugguuccuugaaa

SEQ ID NO: 1912675 - RNA, 19 nt, Homo sapiens
  misc_RNA (1)...(19): siRNA sense strand
gaagacggcuacaaaugau

SEQ ID NO: 1912676 - RNA, 19 nt, Homo sapiens
  misc_RNA (1)...(19): siRNA sense strand
guacuccucugguuagaaa

SEQ ID NO: 1912677 - RNA, 19 nt, Homo sapiens
  misc_RNA (1)...(19): siRNA sense strand
gagcugugauauuguuuaa

SEQ ID NO: 1912678 - RNA, 19 nt, Homo sapiens
  misc_RNA (1)...(19): siRNA sense strand
cgagagaaauuaauugcuu

SEQ ID NO: 1912679 - RNA, 19 nt, Homo sapiens
  misc_RNA (1)...(19): siRNA sense strand
cauaaugcccuaucuuuaa

SEQ ID NO: 1912680 - RNA, 19 nt, Homo sapiens
  misc_RNA (1)...(19): siRNA sense strand
gaagcagaauccuacugua

SEQ ID NO: 1912681 - RNA, 19 nt, Homo sapiens
  misc_RNA (1)...(19): siRNA sense strand
ggcaaggcuucaugaaaua

SEQ ID NO: 1912682 - RNA, 19 nt, Homo sapiens
  misc_RNA (1)...(19): siRNA sense strand
gacaugaccucaaaauaua

SEQ ID NO: 1912683 - RNA, 19 nt, Homo sapiens
  misc_RNA (1)...(19): siRNA sense strand
agaacuugcuccacaauuu

SEQ ID NO: 1912684 - RNA, 19 nt, Homo sapiens
  misc_RNA (1)...(19): siRNA sense strand
guaccuggcugcauuauac

SEQ ID NO: 1912685 - RNA, 19 nt, Homo sapiens
  misc_RNA (1)...(19): siRNA sense strand
gaaguauuaugaugacugu

SEQ ID NO: 1912686 - RNA, 19 nt, Homo sapiens
  misc_RNA (1)...(19): siRNA sense strand
ggaagauccuaaaucauca

SEQ ID NO: 1912687 - RNA, 19 nt, Homo sapiens
  misc_RNA (1)...(19): siRNA sense strand
gaauaaaucguaagguuca

SEQ ID NO: 1912688 - RNA, 19 nt, Homo sapiens
  misc_RNA (1)...(19): siRNA sense strand
gggaacaaaucacuucuuc

SEQ ID NO: 1912689 - RNA, 19 nt, Homo sapiens
  misc_RNA (1)...(19): siRNA sense strand
gaagugagacaucagaaau

SEQ ID NO: 1912690 - RNA, 19 nt, Homo sapiens
  misc_RNA (1)...(19): siRNA sense strand
gaagaccgcugaaauuucc

SEQ ID NO: 1912691 - RNA, 19 nt, Homo sapiens
  misc_RNA (1)...(19): siRNA sense strand
gcaccuaaccuacaggauu

SEQ ID NO: 1912692 - RNA, 19 nt, Homo sapiens
  misc_RNA (1)...(19): siRNA sense strand
ggauauaaaucagggaaau

SEQ ID NO: 1912693 - RNA, 19 nt, Homo sapiens
  misc_RNA (1)...(19): siRNA sense strand
gaugaugacacuguaaaua

SEQ ID NO: 1912694 - RNA, 19 nt, Homo sapiens
  misc_RNA (1)...(19): siRNA sense strand
gauauucagcuuuaccaua

SEQ ID NO: 1912695 - RNA, 19 nt, Homo sapiens
  misc_RNA (1)...(19): siRNA sense strand
gaacucuuguggaacagaa

SEQ ID NO: 1912696 - RNA, 19 nt, Homo sapiens
  misc_RNA (1)...(19): siRNA sense strand
uaucagagccaauucauau

SEQ ID NO: 1912697 - RNA, 19 nt, Homo sapiens
  misc_RNA (1)...(19): siRNA sense strand
gcuuucacauccaguauuu

SEQ ID NO: 1912698 - RNA, 19 nt, Homo sapiens
  misc_RNA (1)...(19): siRNA sense strand
ggaacuaugauggaacuua

SEQ ID NO: 1912699 - RNA, 19 nt, Homo sapiens
  misc_RNA (1)...(19): siRNA sense strand
cauaaugguuccuugaaau

SEQ ID NO: 1912700 - RNA, 19 nt, Homo sapiens
  misc_RNA (1)...(19): siRNA sense strand
gagcuuacacccauucuug

SEQ ID NO: 1912701 - RNA, 19 nt, Homo sapiens
  misc_RNA (1)...(19): siRNA sense strand
gguccaggcugaagaacuu

SEQ ID NO: 1912702 - RNA, 19 nt, Homo sapiens
  misc_RNA (1)...(19): siRNA sense strand
ugucauagcuguuauacgu

SEQ ID NO: 1912703 - RNA, 19 nt, Homo sapiens
  misc_RNA (1)...(19): siRNA sense strand
caggagaccuuuuaaaauu

SEQ ID NO: 1912704 - RNA, 19 nt, Homo sapiens
  misc_RNA (1)...(19): siRNA sense strand
aauggaagauccuaaauca

SEQ ID NO: 1912705 - RNA, 19 nt, Homo sapiens
  misc_RNA (1)...(19): siRNA sense strand
aaucagacaucgaauggaa

SEQ ID NO: 1912706 - RNA, 19 nt, Homo sapiens
  misc_RNA (1)...(19): siRNA sense strand
uggaauaaaucguaagguu

SEQ ID NO: 1912707 - RNA, 19 nt, Homo sapiens
  misc_RNA (1)...(19): siRNA sense strand
gcaaugaaucaaaggauga

SEQ ID NO: 1912708 - RNA, 19 nt, Homo sapiens
  misc_RNA (1)...(19): siRNA sense strand
guauacaccugcaaagauc

SEQ ID NO: 1912709 - RNA, 19 nt, Homo sapiens
  misc_RNA (1)...(19): siRNA sense strand
uagaaacucuucauaaugc

SEQ ID NO: 1912710 - RNA, 19 nt, Homo sapiens
  misc_RNA (1)...(19): siRNA sense strand
ccaaaccaaugaaggaaau

SEQ ID NO: 1912711 - RNA, 19 nt, Homo sapiens
  misc_RNA (1)...(19): siRNA sense strand
gugaagaccugugauaaag

SEQ ID NO: 1912712 - RNA, 19 nt, Homo sapiens
  misc_RNA (1)...(19): siRNA sense strand
gcaaauaugaacggucuuu

SEQ ID NO: 1912713 - RNA, 19 nt, Homo sapiens
  misc_RNA (1)...(19): siRNA sense strand
accagaagauacagaaaua

SEQ ID NO: 1912714 - RNA, 19 nt, Homo sapiens
  misc_RNA (1)...(19): siRNA sense strand
uaagauacccuguuauucu

SEQ ID NO: 1912715 - RNA, 19 nt, Homo sapiens
  misc_RNA (1)...(19): siRNA sense strand
cuacaugacucagauuguu

SEQ ID NO: 1912716 - RNA, 19 nt, Homo sapiens
  misc_RNA (1)...(19): siRNA sense strand
ucuggaagcauuucucuua

SEQ ID NO: 1912717 - RNA, 19 nt, Homo sapiens
  misc_RNA (1)...(19): siRNA sense strand
ccaacuacaucuggaacua

SEQ ID NO: 1912718 - RNA, 19 nt, Homo sapiens
  misc_RNA (1)...(19): siRNA sense strand
cuuagaagcugaagauauc

SEQ ID NO: 1912719 - RNA, 19 nt, Homo sapiens
  misc_RNA (1)...(19): siRNA sense strand
gcuccacaauuucauauuc

SEQ ID NO: 1912720 - RNA, 19 nt, Homo sapiens
  misc_RNA (1)...(19): siRNA sense strand
ggaauccauuuguaaucaa

SEQ ID NO: 1912721 - RNA, 19 nt, Homo sapiens
  misc_RNA (1)...(19): siRNA sense strand
agaaacgcaugaacacaaa

SEQ ID NO: 1912722 - RNA, 19 nt, Homo sapiens
  misc_RNA (1)...(19): siRNA sense strand
gcaagcagcaaaccagcua

SEQ ID NO: 1912723 - RNA, 19 nt, Homo sapiens
  misc_RNA (1)...(19): siRNA sense strand
gcaaagauccucccaacac

SEQ ID NO: 1912724 - RNA, 19 nt, Homo sapiens
  misc_RNA (1)...(19): siRNA sense strand
ucauaaugcccuaucuuua

SEQ ID NO: 1912725 - RNA, 19 nt, Homo sapiens
  misc_RNA (1)...(19): siRNA sense strand
cuacguagaugguccaagu

SEQ ID NO: 1912726 - RNA, 19 nt, Homo sapiens
  misc_RNA (1)...(19): siRNA sense strand
gauaggagagaaguauaua

SEQ ID NO: 1912727 - RNA, 19 nt, Homo sapiens
  misc_RNA (1)...(19): siRNA sense strand
gaacuugcuccacaauuuc

SEQ ID NO: 1912728 - RNA, 19 nt, Homo sapiens
  misc_RNA (1)...(19): siRNA sense strand
gcugugauauuguuuaaac

SEQ ID NO: 1912729 - RNA, 19 nt, Homo sapiens
  misc_RNA (1)...(19): siRNA sense strand
ugaucgagcugugauauug

SEQ ID NO: 1912730 - RNA, 19 nt, Homo sapiens
  misc_RNA (1)...(19): siRNA sense strand
gguccaaguuagagaaaga

SEQ ID NO: 1912731 - RNA, 19 nt, Homo sapiens
  misc_RNA (1)...(19): siRNA sense strand
ggaagugagacaucagaaa

SEQ ID NO: 1912732 - RNA, 19 nt, Homo sapiens
  misc_RNA (1)...(19): siRNA sense strand
gaagaucauguagaaguaa

SEQ ID NO: 1912733 - RNA, 19 nt, Homo sapiens
  misc_RNA (1)...(19): siRNA sense strand
gcagauugugguuggaaua

SEQ ID NO: 1912734 - RNA, 19 nt, Homo sapiens
  misc_RNA (1)...(19): siRNA sense strand
agccaaagguugugaagaa

SEQ ID NO: 1912735 - RNA, 19 nt, Homo sapiens
  misc_RNA (1)...(19): siRNA sense strand
aggcaaggcuucaugaaau

SEQ ID NO: 1912736 - RNA, 19 nt, Homo sapiens
  misc_RNA (1)...(19): siRNA sense strand
gauugugguuggaauaugu

SEQ ID NO: 1912737 - RNA, 19 nt, Homo sapiens
  misc_RNA (1)...(19): siRNA sense strand
gaacaacuuaagacuguau

SEQ ID NO: 1912738 - RNA, 19 nt, Homo sapiens
  misc_RNA (1)...(19): siRNA sense strand
gcacgagagaaauuaauug

SEQ ID NO: 1912739 - RNA, 19 nt, Homo sapiens
  misc_RNA (1)...(19): siRNA sense strand
gcagaagaucacaauguuu

SEQ ID NO: 1912740 - RNA, 19 nt, Homo sapiens
  misc_RNA (1)...(19): siRNA sense strand
ucacaguaguaguauuuga

SEQ ID NO: 1912741 - RNA, 19 nt, Homo sapiens
  misc_RNA (1)...(19): siRNA sense strand
uuaaagagcacuaaagcaa

SEQ ID NO: 1912742 - RNA, 19 nt, Homo sapiens
  misc_RNA (1)...(19): siRNA sense strand
ggaagaccgcugaaauuuc

SEQ ID NO: 1912743 - RNA, 19 nt, Homo sapiens
  misc_RNA (1)...(19): siRNA sense strand
aacgagcuauggauuauuu

SEQ ID NO: 1912744 - RNA, 19 nt, Homo sapiens
  misc_RNA (1)...(19): siRNA sense strand
gagcuuaugcuacguagau

SEQ ID NO: 1912745 - RNA, 19 nt, Homo sapiens
  misc_RNA (1)...(19): siRNA sense strand
ccaaauaaucccaaagaau

SEQ ID NO: 1912746 - RNA, 19 nt, Homo sapiens
  misc_RNA (1)...(19): siRNA sense strand
aaacuggccuuuaugugau

SEQ ID NO: 1912747 - RNA, 19 nt, Homo sapiens
  misc_RNA (1)...(19): siRNA sense strand
gcaagcagcugcccagaca

SEQ ID NO: 1912748 - RNA, 19 nt, Homo sapiens
  misc_RNA (1)...(19): siRNA sense strand
gguccaggcuauaauaauc

SEQ ID NO: 1912749 - RNA, 19 nt, Homo sapiens
  misc_RNA (1)...(19): siRNA sense strand
ugaaggccauugacucaga

SEQ ID NO: 1912750 - RNA, 19 nt, Homo sapiens
  misc_RNA (1)...(19): siRNA sense strand
ggaagauucugaguuaggu

SEQ ID NO: 1912751 - RNA, 19 nt, Homo sapiens
  misc_RNA (1)...(19): siRNA sense strand
ccagggagcaugcgcauug

SEQ ID NO: 1912752 - RNA, 19 nt, Homo sapiens
  misc_RNA (1)...(19): siRNA sense strand
ccaaaggcagagaaacuaa

SEQ ID NO: 1912753 - RNA, 19 nt, Homo sapiens
  misc_RNA (1)...(19): siRNA sense strand
caaaggcagagaaacuaaa

SEQ ID NO: 1912754 - RNA, 19 nt, Homo sapiens
  misc_RNA (1)...(19): siRNA sense strand
ggauuuaagaucucaggaa

SEQ ID NO: 1912755 - RNA, 19 nt, Homo sapiens
  misc_RNA (1)...(19): siRNA sense strand
ggugaaggccauugacuca

SEQ ID NO: 1912756 - RNA, 19 nt, Homo sapiens
  misc_RNA (1)...(19): siRNA sense strand
gcaagccaggguuggaaga

SEQ ID NO: 1912757 - RNA, 19 nt, Homo sapiens
  misc_RNA (1)...(19): siRNA sense strand
gaagaaccaaaggcagaga

SEQ ID NO: 1912758 - RNA, 19 nt, Homo sapiens
  misc_RNA (1)...(19): siRNA sense strand
gggcaagccaggguuggaa

SEQ ID NO: 1912759 - RNA, 19 nt, Homo sapiens
  misc_RNA (1)...(19): siRNA sense strand
gaaccaaaggcagagaaac

SEQ ID NO: 1912760 - RNA, 19 nt, Homo sapiens
  misc_RNA (1)...(19): siRNA sense strand
acaggaaacucuucaagua

SEQ ID NO: 1912761 - RNA, 19 nt, Homo sapiens
  misc_RNA (1)...(19): siRNA sense strand
caacagauaccaccaugua

SEQ ID NO: 1912762 - RNA, 19 nt, Homo sapiens
  misc_RNA (1)...(19): siRNA sense strand
aaagaaugcugcuguaaug

SEQ ID NO: 1912763 - RNA, 19 nt, Homo sapiens
  misc_RNA (1)...(19): siRNA sense strand
caagacaccuccaacagau

SEQ ID NO: 1912764 - RNA, 19 nt, Homo sapiens
  misc_RNA (1)...(19): siRNA sense strand
gaaccaagcuccaaaacug

SEQ ID NO: 1912765 - RNA, 19 nt, Homo sapiens
  misc_RNA (1)...(19): siRNA sense strand
ggugacauaugcacaguug

SEQ ID NO: 1912766 - RNA, 19 nt, Homo sapiens
  misc_RNA (1)...(19): siRNA sense strand
ggagcucauuugacaugua

SEQ ID NO: 1912767 - RNA, 19 nt, Homo sapiens
  misc_RNA (1)...(19): siRNA sense strand
gcagggaccuacagauguc

SEQ ID NO: 1912768 - RNA, 19 nt, Homo sapiens
  misc_RNA (1)...(19): siRNA sense strand
gagagaacgugaccuuguc

SEQ ID NO: 1912769 - RNA, 19 nt, Homo sapiens
  misc_RNA (1)...(19): siRNA sense strand
ggagagaacgugaccuugu

SEQ ID NO: 1912770 - RNA, 19 nt, Homo sapiens
  misc_RNA (1)...(19): siRNA sense strand
ucccugagcucuacaacaa

SEQ ID NO: 1912771 - RNA, 19 nt, Homo sapiens
  misc_RNA (1)...(19): siRNA sense strand
gaacauuccaggcugacuu

SEQ ID NO: 1912772 - RNA, 19 nt, Homo sapiens
  misc_RNA (1)...(19): siRNA sense strand
ugggaaaccuucacucuca

SEQ ID NO: 1912773 - RNA, 19 nt, Homo sapiens
  misc_RNA (1)...(19): siRNA sense strand
gaacagggaggacucugau

SEQ ID NO: 1912774 - RNA, 19 nt, Homo sapiens
  misc_RNA (1)...(19): siRNA sense strand
ggacaugugacucuucugu

SEQ ID NO: 1912775 - RNA, 19 nt, Homo sapiens
  misc_RNA (1)...(19): siRNA sense strand
gcuaucauccucuucauca

SEQ ID NO: 1912776 - RNA, 19 nt, Homo sapiens
  misc_RNA (1)...(19): siRNA sense strand
ccaagacaccuccaacaga

SEQ ID NO: 1912777 - RNA, 19 nt, Homo sapiens
  misc_RNA (1)...(19): siRNA sense strand
caucuucagucuguacaaa

SEQ ID NO: 1912778 - RNA, 19 nt, Homo sapiens
  misc_RNA (1)...(19): siRNA sense strand
caucauccucuucuucuuu

SEQ ID NO: 1912779 - RNA, 19 nt, Homo sapiens
  misc_RNA (1)...(19): siRNA sense strand
gagcucauuugacauguac

SEQ ID NO: 1912780 - RNA, 19 nt, Homo sapiens
  misc_RNA (1)...(19): siRNA sense strand
uccaggagcucauuugaca

SEQ ID NO: 1912781 - RNA, 19 nt, Homo sapiens
  misc_RNA (1)...(19): siRNA sense strand
ggagggaccuacacaugcu

SEQ ID NO: 1912782 - RNA, 19 nt, Homo sapiens
  misc_RNA (1)...(19): siRNA sense strand
gaggacaugugacucuucu

SEQ ID NO: 1912783 - RNA, 19 nt, Homo sapiens
  misc_RNA (1)...(19): siRNA sense strand
guugcuagcucccauguac

SEQ ID NO: 1912784 - RNA, 19 nt, Homo sapiens
  misc_RNA (1)...(19): siRNA sense strand
ggaccucaguggcuaucau

SEQ ID NO: 1912785 - RNA, 19 nt, Homo sapiens
  misc_RNA (1)...(19): siRNA sense strand
acaugugacucuucugugu

SEQ ID NO: 1912786 - RNA, 19 nt, Homo sapiens
  misc_RNA (1)...(19): siRNA sense strand
ugacauaugcacaguugga

SEQ ID NO: 1912787 - RNA, 19 nt, Homo sapiens
  misc_RNA (1)...(19): siRNA sense strand
cgucuuggguuuaccaucu

SEQ ID NO: 1912788 - RNA, 19 nt, Homo sapiens
  misc_RNA (1)...(19): siRNA sense strand
ucaaguaguucaucuucac

SEQ ID NO: 1912789 - RNA, 19 nt, Homo sapiens
  misc_RNA (1)...(19): siRNA sense strand
cauugucuccugcccauaa

SEQ ID NO: 1912790 - RNA, 19 nt, Homo sapiens
  misc_RNA (1)...(19): siRNA sense strand
aggaaacucuucaaguagu

SEQ ID NO: 1912791 - RNA, 19 nt, Homo sapiens
  misc_RNA (1)...(19): siRNA sense strand
cguggucacaggucuauuu

SEQ ID NO: 1912792 - RNA, 19 nt, Homo sapiens
  misc_RNA (1)...(19): siRNA sense strand
gcuaagccaagaucauugu

SEQ ID NO: 1912793 - RNA, 19 nt, Homo sapiens
  misc_RNA (1)...(19): siRNA sense strand
caaaugcuaagccaagauc

SEQ ID NO: 1912794 - RNA, 19 nt, Homo sapiens
  misc_RNA (1)...(19): siRNA sense strand
cauuugacauguaccaucu

SEQ ID NO: 1912795 - RNA, 19 nt, Homo sapiens
  misc_RNA (1)...(19): siRNA sense strand
acagggaggacucugauga

SEQ ID NO: 1912796 - RNA, 19 nt, Homo sapiens
  misc_RNA (1)...(19): siRNA sense strand
cauaugcacaguuggauca

SEQ ID NO: 1912797 - RNA, 19 nt, Homo sapiens
  misc_RNA (1)...(19): siRNA sense strand
cugugucgcucucgucuug

SEQ ID NO: 1912798 - RNA, 19 nt, Homo sapiens
  misc_RNA (1)...(19): siRNA sense strand
caggagcucauuugacaug

SEQ ID NO: 1912799 - RNA, 19 nt, Homo sapiens
  misc_RNA (1)...(19): siRNA sense strand
gaggugacauaugcacagu

SEQ ID NO: 1912800 - RNA, 19 nt, Homo sapiens
  misc_RNA (1)...(19): siRNA sense strand
aaacugguauccgcagaca

SEQ ID NO: 1912801 - RNA, 19 nt, Homo sapiens
  misc_RNA (1)...(19): siRNA sense strand
gaggaggacaugugacucu

SEQ ID NO: 1912802 - RNA, 19 nt, Homo sapiens
  misc_RNA (1)...(19): siRNA sense strand
caggaaacucuucaaguag

SEQ ID NO: 1912803 - RNA, 19 nt, Homo sapiens
  misc_RNA (1)...(19): siRNA sense strand
caggagagaacgugaccuu

SEQ ID NO: 1912804 - RNA, 19 nt, Homo sapiens
  misc_RNA (1)...(19): siRNA sense strand
gaucguggucacaggucua

SEQ ID NO: 1912805 - RNA, 19 nt, Homo sapiens
  misc_RNA (1)...(19): siRNA sense strand
cccauaagcaccacaguca

SEQ ID NO: 1912806 - RNA, 19 nt, Homo sapiens
  misc_RNA (1)...(19): siRNA sense strand
gguuuaccaucuucagucu

SEQ ID NO: 1912807 - RNA, 19 nt, Homo sapiens
  misc_RNA (1)...(19): siRNA sense strand
gcucucgucuuggguuuac

SEQ ID NO: 1912808 - RNA, 19 nt, Homo sapiens
  misc_RNA (1)...(19): siRNA sense strand
caccugcacauucugauug

SEQ ID NO: 1912809 - RNA, 19 nt, Homo sapiens
  misc_RNA (1)...(19): siRNA sense strand
cuccaugacucacccuaug

SEQ ID NO: 1912810 - RNA, 19 nt, Homo sapiens
  misc_RNA (1)...(19): siRNA sense strand
ccacugaaccaagcuccaa

SEQ ID NO: 1912811 - RNA, 19 nt, Homo sapiens
  misc_RNA (1)...(19): siRNA sense strand
ugaacagggaggacucuga

SEQ ID NO: 1912812 - RNA, 19 nt, Homo sapiens
  misc_RNA (1)...(19): siRNA sense strand
ggaggacaugugacucuuc

SEQ ID NO: 1912813 - RNA, 19 nt, Homo sapiens
  misc_RNA (1)...(19): siRNA sense strand
uuuaccaucuucagucugu

SEQ ID NO: 1912814 - RNA, 19 nt, Homo sapiens
  misc_RNA (1)...(19): siRNA sense strand
acagauaccaccauguaca

SEQ ID NO: 1912815 - RNA, 19 nt, Homo sapiens
  misc_RNA (1)...(19): siRNA sense strand
gcagugcccagcgucaaug

SEQ ID NO: 1912816 - RNA, 19 nt, Homo sapiens
  misc_RNA (1)...(19): siRNA sense strand
cucaggaggugacauaugc

SEQ ID NO: 1912817 - RNA, 19 nt, Homo sapiens
  misc_RNA (1)...(19): siRNA sense strand
gugacccacugcuuguuuc

SEQ ID NO: 1912818 - RNA, 19 nt, Homo sapiens
  misc_RNA (1)...(19): siRNA sense strand
uuugacauguaccaucuau

SEQ ID NO: 1912819 - RNA, 19 nt, Homo sapiens
  misc_RNA (1)...(19): siRNA sense strand
ucacaggaaacucuucaag

SEQ ID NO: 1912820 - RNA, 19 nt, Homo sapiens
  misc_RNA (1)...(19): siRNA sense strand
ugacauguaccaucuaucc

SEQ ID NO: 1912821 - RNA, 19 nt, Homo sapiens
  misc_RNA (1)...(19): siRNA sense strand
ccacggagggaccuacaca

SEQ ID NO: 1912822 - RNA, 19 nt, Homo sapiens
  misc_RNA (1)...(19): siRNA sense strand
agaaugcugcuguaaugga

SEQ ID NO: 1912823 - RNA, 19 nt, Homo sapiens
  misc_RNA (1)...(19): siRNA sense strand
gugcccagcgucaauggaa

SEQ ID NO: 1912824 - RNA, 19 nt, Homo sapiens
  misc_RNA (1)...(19): siRNA sense strand
gcccaagacaccuccaaca

SEQ ID NO: 1912825 - RNA, 19 nt, Homo sapiens
  misc_RNA (1)...(19): siRNA sense strand
agacaccugcacauucuga

SEQ ID NO: 1912826 - RNA, 19 nt, Homo sapiens
  misc_RNA (1)...(19): siRNA sense strand
guucaucuucacccacuga

SEQ ID NO: 1912827 - RNA, 19 nt, Homo sapiens
  misc_RNA (1)...(19): siRNA sense strand
cacaggaaacucuucaagu

SEQ ID NO: 1912828 - RNA, 19 nt, Homo sapiens
  misc_RNA (1)...(19): siRNA sense strand
caagagagauaucaacaga

SEQ ID NO: 1912829 - RNA, 19 nt, Homo sapiens
  misc_RNA (1)...(19): siRNA sense strand
gaacaagcgucgcaaugag

SEQ ID NO: 1912830 - RNA, 19 nt, Homo sapiens
  misc_RNA (1)...(19): siRNA sense strand
ggagagccaugcguacuuu

SEQ ID NO: 1912831 - RNA, 19 nt, Homo sapiens
  misc_RNA (1)...(19): siRNA sense strand
cagcugauaugaaugaaug

SEQ ID NO: 1912832 - RNA, 19 nt, Homo sapiens
  misc_RNA (1)...(19): siRNA sense strand
ggaacaagcgucgcaauga

SEQ ID NO: 1912833 - RNA, 19 nt, Homo sapiens
  misc_RNA (1)...(19): siRNA sense strand
gaaugaaugcugucugugu

SEQ ID NO: 1912834 - RNA, 19 nt, Homo sapiens
  misc_RNA (1)...(19): siRNA sense strand
agagagauaucaacagaag

SEQ ID NO: 1912835 - RNA, 19 nt, Homo sapiens
  misc_RNA (1)...(19): siRNA sense strand
gcaaugaggacucucuaca

SEQ ID NO: 1912836 - RNA, 19 nt, Homo sapiens
  misc_RNA (1)...(19): siRNA sense strand
gacuauauggcaacucuuu

SEQ ID NO: 1912837 - RNA, 19 nt, Homo sapiens
  misc_RNA (1)...(19): siRNA sense strand
acucuuugcuguccucauu

SEQ ID NO: 1912838 - RNA, 19 nt, Homo sapiens
  misc_RNA (1)...(19): siRNA sense strand
caaaucaagagagauauca

SEQ ID NO: 1912839 - RNA, 19 nt, Homo sapiens
  misc_RNA (1)...(19): siRNA sense strand
ugccaaaucaagagagaua

SEQ ID NO: 1912840 - RNA, 19 nt, Homo sapiens
  misc_RNA (1)...(19): siRNA sense strand
gagccaugcguacuuucua

SEQ ID NO: 1912841 - RNA, 19 nt, Homo sapiens
  misc_RNA (1)...(19): siRNA sense strand
agagauaucaacagaagga

SEQ ID NO: 1912842 - RNA, 19 nt, Homo sapiens
  misc_RNA (1)...(19): siRNA sense strand
caaguugcagcugauauga

SEQ ID NO: 1912843 - RNA, 19 nt, Homo sapiens
  misc_RNA (1)...(19): siRNA sense strand
ucaaguugcagcugauaug

SEQ ID NO: 1912844 - RNA, 19 nt, Homo sapiens
  misc_RNA (1)...(19): siRNA sense strand
uguccucauuguacucuuu

SEQ ID NO: 1912845 - RNA, 19 nt, Homo sapiens
  misc_RNA (1)...(19): siRNA sense strand
agccaugcguacuuucuaa

SEQ ID NO: 1912846 - RNA, 19 nt, Homo sapiens
  misc_RNA (1)...(19): siRNA sense strand
aguugcagcugauaugaau

SEQ ID NO: 1912847 - RNA, 19 nt, Homo sapiens
  misc_RNA (1)...(19): siRNA sense strand
cuggaucuauuugugauga

SEQ ID NO: 1912848 - RNA, 19 nt, Homo sapiens
  misc_RNA (1)...(19): siRNA sense strand
aggcaugugugacuguuuc

SEQ ID NO: 1912849 - RNA, 19 nt, Homo sapiens
  misc_RNA (1)...(19): siRNA sense strand
gaucuauuugugaugacua

SEQ ID NO: 1912850 - RNA, 19 nt, Homo sapiens
  misc_RNA (1)...(19): siRNA sense strand
augaaugaaugcugucugu

SEQ ID NO: 1912851 - RNA, 19 nt, Homo sapiens
  misc_RNA (1)...(19): siRNA sense strand
gaacuccaacuggcagaca

SEQ ID NO: 1912852 - RNA, 19 nt, Homo sapiens
  misc_RNA (1)...(19): siRNA sense strand
ccaaaucaagagagauauc

SEQ ID NO: 1912853 - RNA, 19 nt, Homo sapiens
  misc_RNA (1)...(19): siRNA sense strand
gaaugcugucuguguggaa

SEQ ID NO: 1912854 - RNA, 19 nt, Homo sapiens
  misc_RNA (1)...(19): siRNA sense strand
uugcagcugauaugaauga

SEQ ID NO: 1912855 - RNA, 19 nt, Homo sapiens
  misc_RNA (1)...(19): siRNA sense strand
gauguugugcugacuauua

SEQ ID NO: 1912856 - RNA, 19 nt, Homo sapiens
  misc_RNA (1)...(19): siRNA sense strand
gcagagcugugccgagauc

SEQ ID NO: 1912857 - RNA, 19 nt, Homo sapiens
  misc_RNA (1)...(19): siRNA sense strand
caacgucacgggcaucgua

SEQ ID NO: 1912858 - RNA, 19 nt, Homo sapiens
  misc_RNA (1)...(19): siRNA sense strand
gaacagcacggccgacaag

SEQ ID NO: 1912859 - RNA, 19 nt, Homo sapiens
  misc_RNA (1)...(19): siRNA sense strand
agaaggcccugcacugcua

SEQ ID NO: 1912860 - RNA, 19 nt, Homo sapiens
  misc_RNA (1)...(19): siRNA sense strand
guggagaccugccucaaca

SEQ ID NO: 1912861 - RNA, 19 nt, Homo sapiens
  misc_RNA (1)...(19): siRNA sense strand
uggccgugcuggacaauuu

SEQ ID NO: 1912862 - RNA, 19 nt, Homo sapiens
  misc_RNA (1)...(19): siRNA sense strand
ggaaagccgcauccaguuc

SEQ ID NO: 1912863 - RNA, 19 nt, Homo sapiens
  misc_RNA (1)...(19): siRNA sense strand
caacuggcgucucaacaac

SEQ ID NO: 1912864 - RNA, 19 nt, Homo sapiens
  misc_RNA (1)...(19): siRNA sense strand
gugccgagaucgaccuguu

SEQ ID NO: 1912865 - RNA, 19 nt, Homo sapiens
  misc_RNA (1)...(19): siRNA sense strand
ggcuacaacuggcgucuca

SEQ ID NO: 1912866 - RNA, 19 nt, Homo sapiens
  misc_RNA (1)...(19): siRNA sense strand
gcauccaguuccagcugaa

SEQ ID NO: 1912867 - RNA, 19 nt, Homo sapiens
  misc_RNA (1)...(19): siRNA sense strand
ggaucucaguggaggacaa

SEQ ID NO: 1912868 - RNA, 19 nt, Homo sapiens
  misc_RNA (1)...(19): siRNA sense strand
cacgugcucugccacauuc

SEQ ID NO: 1912869 - RNA, 19 nt, Homo sapiens
  misc_RNA (1)...(19): siRNA sense strand
agaggaagaucuacaucgu

SEQ ID NO: 1912870 - RNA, 19 nt, Homo sapiens
  misc_RNA (1)...(19): siRNA sense strand
gcuggaggccuucaacuac

SEQ ID NO: 1912871 - RNA, 19 nt, Homo sapiens
  misc_RNA (1)...(19): siRNA sense strand
ggaguccuucgcaggcaua

SEQ ID NO: 1912872 - RNA, 19 nt, Homo sapiens
  misc_RNA (1)...(19): siRNA sense strand
ggagaccugccucaacauc

SEQ ID NO: 1912873 - RNA, 19 nt, Homo sapiens
  misc_RNA (1)...(19): siRNA sense strand
ccacgugcucugccacauu

SEQ ID NO: 1912874 - RNA, 19 nt, Homo sapiens
  misc_RNA (1)...(19): siRNA sense strand
ggccagcuccucgauguug

SEQ ID NO: 1912875 - RNA, 19 nt, Homo sapiens
  misc_RNA (1)...(19): siRNA sense strand
ggagaggaagaucuacauc

SEQ ID NO: 1912876 - RNA, 19 nt, Homo sapiens
  misc_RNA (1)...(19): siRNA sense strand
ggccuuuccugcacacaag

SEQ ID NO: 1912877 - RNA, 19 nt, Homo sapiens
  misc_RNA (1)...(19): siRNA sense strand
acaacuggcgucucaacaa

SEQ ID NO: 1912878 - RNA, 19 nt, Homo sapiens
  misc_RNA (1)...(19): siRNA sense strand
auguugugcugacuauuaa

SEQ ID NO: 1912879 - RNA, 19 nt, Homo sapiens
  misc_RNA (1)...(19): siRNA sense strand
ucgauguugugcugacuau

SEQ ID NO: 1912880 - RNA, 19 nt, Homo sapiens
  misc_RNA (1)...(19): siRNA sense strand
gcugccugcuggagaggaa

SEQ ID NO: 1912881 - RNA, 19 nt, Homo sapiens
  misc_RNA (1)...(19): siRNA sense strand
uaacagagaggccuuuccu

SEQ ID NO: 1912882 - RNA, 19 nt, Homo sapiens
  misc_RNA (1)...(19): siRNA sense strand
cuacagcgccgaggugaca

SEQ ID NO: 1912883 - RNA, 19 nt, Homo sapiens
  misc_RNA (1)...(19): siRNA sense strand
ugugcugacuauuaacaga

SEQ ID NO: 1912884 - RNA, 19 nt, Homo sapiens
  misc_RNA (1)...(19): siRNA sense strand
gugcagacgcuggacauca

SEQ ID NO: 1912885 - RNA, 19 nt, Homo sapiens
  misc_RNA (1)...(19): siRNA sense strand
ugcagacgcuggacaucau

SEQ ID NO: 1912886 - RNA, 19 nt, Homo sapiens
  misc_RNA (1)...(19): siRNA sense strand
ggacauacauuaucugaga

SEQ ID NO: 1912887 - RNA, 19 nt, Homo sapiens
  misc_RNA (1)...(19): siRNA sense strand
gaagaacgaguauggauua

SEQ ID NO: 1912888 - RNA, 19 nt, Homo sapiens
  misc_RNA (1)...(19): siRNA sense strand
uaacccaacuccauuaaua

SEQ ID NO: 1912889 - RNA, 19 nt, Homo sapiens
  misc_RNA (1)...(19): siRNA sense strand
gaacaggaaucaggcauuu

SEQ ID NO: 1912890 - RNA, 19 nt, Homo sapiens
  misc_RNA (1)...(19): siRNA sense strand
gaaaguagcuaaggaguuc

SEQ ID NO: 1912891 - RNA, 19 nt, Homo sapiens
  misc_RNA (1)...(19): siRNA sense strand
caaauucccuggagauaaa

SEQ ID NO: 1912892 - RNA, 19 nt, Homo sapiens
  misc_RNA (1)...(19): siRNA sense strand
gcacuaggccuuccaauga

SEQ ID NO: 1912893 - RNA, 19 nt, Homo sapiens
  misc_RNA (1)...(19): siRNA sense strand
gggaacauauuacuucuuu

SEQ ID NO: 1912894 - RNA, 19 nt, Homo sapiens
  misc_RNA (1)...(19): siRNA sense strand
gauuggaccuuucagauuu

SEQ ID NO: 1912895 - RNA, 19 nt, Homo sapiens
  misc_RNA (1)...(19): siRNA sense strand
ucaguuaaaucgcagcuua

SEQ ID NO: 1912896 - RNA, 19 nt, Homo sapiens
  misc_RNA (1)...(19): siRNA sense strand
gaauacaucuggcaagaca

SEQ ID NO: 1912897 - RNA, 19 nt, Homo sapiens
  misc_RNA (1)...(19): siRNA sense strand
gauccaacaucaaguaaug

SEQ ID NO: 1912898 - RNA, 19 nt, Homo sapiens
  misc_RNA (1)...(19): siRNA sense strand
gaaacuaccaggugacaaa

SEQ ID NO: 1912899 - RNA, 19 nt, Homo sapiens
  misc_RNA (1)...(19): siRNA sense strand
uaacgaacauucacauuag

SEQ ID NO: 1912900 - RNA, 19 nt, Homo sapiens
  misc_RNA (1)...(19): siRNA sense strand
uggaagagcuccuuauguu

SEQ ID NO: 1912901 - RNA, 19 nt, Homo sapiens
  misc_RNA (1)...(19): siRNA sense strand
gggauaagcuggcugcaau

SEQ ID NO: 1912902 - RNA, 19 nt, Homo sapiens
  misc_RNA (1)...(19): siRNA sense strand
ccacaaagaagaacgagua

SEQ ID NO: 1912903 - RNA, 19 nt, Homo sapiens
  misc_RNA (1)...(19): siRNA sense strand
ggagauaccacaaagaaga

SEQ ID NO: 1912904 - RNA, 19 nt, Homo sapiens
  misc_RNA (1)...(19): siRNA sense strand
aaucugaacucuccugaaa

SEQ ID NO: 1912905 - RNA, 19 nt, Homo sapiens
  misc_RNA (1)...(19): siRNA sense strand
gaacgaguauggauuacca

SEQ ID NO: 1912906 - RNA, 19 nt, Homo sapiens
  misc_RNA (1)...(19): siRNA sense strand
caugagcaguucaggguua

SEQ ID NO: 1912907 - RNA, 19 nt, Homo sapiens
  misc_RNA (1)...(19): siRNA sense strand
ggaggaaaguagcuaagga

SEQ ID NO: 1912908 - RNA, 19 nt, Homo sapiens
  misc_RNA (1)...(19): siRNA sense strand
cagccagucuucuauguuu

SEQ ID NO: 1912909 - RNA, 19 nt, Homo sapiens
  misc_RNA (1)...(19): siRNA sense strand
cuauaaagauccaacauca

SEQ ID NO: 1912910 - RNA, 19 nt, Homo sapiens
  misc_RNA (1)...(19): siRNA sense strand
caaguaaugaugacaguaa

SEQ ID NO: 1912911 - RNA, 19 nt, Homo sapiens
  misc_RNA (1)...(19): siRNA sense strand
gaaaaucucuaccccaaau

SEQ ID NO: 1912912 - RNA, 19 nt, Homo sapiens
  misc_RNA (1)...(19): siRNA sense strand
acaaauagcaugagcaguu

SEQ ID NO: 1912913 - RNA, 19 nt, Homo sapiens
  misc_RNA (1)...(19): siRNA sense strand
caagaaagaaguuuguaga

SEQ ID NO: 1912914 - RNA, 19 nt, Homo sapiens
  misc_RNA (1)...(19): siRNA sense strand
uuaccaggcuccagcuaua

SEQ ID NO: 1912915 - RNA, 19 nt, Homo sapiens
  misc_RNA (1)...(19): siRNA sense strand
gaacaguaugucuggauuu

SEQ ID NO: 1912916 - RNA, 19 nt, Homo sapiens
  misc_RNA (1)...(19): siRNA sense strand
ggucagcugucucaguuug

SEQ ID NO: 1912917 - RNA, 19 nt, Homo sapiens
  misc_RNA (1)...(19): siRNA sense strand
uggaaugauuggccuguua

SEQ ID NO: 1912918 - RNA, 19 nt, Homo sapiens
  misc_RNA (1)...(19): siRNA sense strand
uggaaugaauaacuccuua

SEQ ID NO: 1912919 - RNA, 19 nt, Homo sapiens
  misc_RNA (1)...(19): siRNA sense strand
guacagauggacccaaauu

SEQ ID NO: 1912920 - RNA, 19 nt, Homo sapiens
  misc_RNA (1)...(19): siRNA sense strand
caggucagcugucucaguu

SEQ ID NO: 1912921 - RNA, 19 nt, Homo sapiens
  misc_RNA (1)...(19): siRNA sense strand
caaagaagaacgaguaugg

SEQ ID NO: 1912922 - RNA, 19 nt, Homo sapiens
  misc_RNA (1)...(19): siRNA sense strand
ggaaugauuggccuguuaa

SEQ ID NO: 1912923 - RNA, 19 nt, Homo sapiens
  misc_RNA (1)...(19): siRNA sense strand
ggauuggaccuuucagauu

SEQ ID NO: 1912924 - RNA, 19 nt, Homo sapiens
  misc_RNA (1)...(19): siRNA sense strand
gcauggagccaacaaugaa

SEQ ID NO: 1912925 - RNA, 19 nt, Homo sapiens
  misc_RNA (1)...(19): siRNA sense strand
ugauuggccuguuaacauu

SEQ ID NO: 1912926 - RNA, 19 nt, Homo sapiens
  misc_RNA (1)...(19): siRNA sense strand
caaauagcaugagcaguuc

SEQ ID NO: 1912927 - RNA, 19 nt, Homo sapiens
  misc_RNA (1)...(19): siRNA sense strand
gaccuucucuucuaucucu

SEQ ID NO: 1912928 - RNA, 19 nt, Homo sapiens
  misc_RNA (1)...(19): siRNA sense strand
ggacugauggacauacauu

SEQ ID NO: 1912929 - RNA, 19 nt, Homo sapiens
  misc_RNA (1)...(19): siRNA sense strand
ggaacagacggaagugaaa

SEQ ID NO: 1912930 - RNA, 19 nt, Homo sapiens
  misc_RNA (1)...(19): siRNA sense strand
ccaacaaugucacuucaca

SEQ ID NO: 1912931 - RNA, 19 nt, Homo sapiens
  misc_RNA (1)...(19): siRNA sense strand
ggaaaguagcuaaggaguu

SEQ ID NO: 1912932 - RNA, 19 nt, Homo sapiens
  misc_RNA (1)...(19): siRNA sense strand
gauaagcuggcugcaauaa

SEQ ID NO: 1912933 - RNA, 19 nt, Homo sapiens
  misc_RNA (1)...(19): siRNA sense strand
gauuuggaaugaacaggaa

SEQ ID NO: 1912934 - RNA, 19 nt, Homo sapiens
  misc_RNA (1)...(19): siRNA sense strand
uaacaaaaccagcaaauga

SEQ ID NO: 1912935 - RNA, 19 nt, Homo sapiens
  misc_RNA (1)...(19): siRNA sense strand
ggaagagcuccuuauguug

SEQ ID NO: 1912936 - RNA, 19 nt, Homo sapiens
  misc_RNA (1)...(19): siRNA sense strand
caacaauaccccucaguua

SEQ ID NO: 1912937 - RNA, 19 nt, Homo sapiens
  misc_RNA (1)...(19): siRNA sense strand
aaagauccaacaucaagua

SEQ ID NO: 1912938 - RNA, 19 nt, Homo sapiens
  misc_RNA (1)...(19): siRNA sense strand
uaauauguaugccaaagca

SEQ ID NO: 1912939 - RNA, 19 nt, Homo sapiens
  misc_RNA (1)...(19): siRNA sense strand
caauaaaacuuggccgaua

SEQ ID NO: 1912940 - RNA, 19 nt, Homo sapiens
  misc_RNA (1)...(19): siRNA sense strand
uaagcuggcugcaauaaaa

SEQ ID NO: 1912941 - RNA, 19 nt, Homo sapiens
  misc_RNA (1)...(19): siRNA sense strand
ccaaauucccuggagauaa

SEQ ID NO: 1912942 - RNA, 19 nt, Homo sapiens
  misc_RNA (1)...(19): siRNA sense strand
aaucgcagcuuaucacaag

SEQ ID NO: 1912943 - RNA, 19 nt, Homo sapiens
  misc_RNA (1)...(19): siRNA sense strand
ggacuucucaauacacaau

SEQ ID NO: 1912944 - RNA, 19 nt, Homo sapiens
  misc_RNA (1)...(19): siRNA sense strand
cagaagcucgccaagcaua

SEQ ID NO: 1912945 - RNA, 19 nt, Homo sapiens
  misc_RNA (1)...(19): siRNA sense strand
ugaacaguaugucuggauu

SEQ ID NO: 1912946 - RNA, 19 nt, Homo sapiens
  misc_RNA (1)...(19): siRNA sense strand
ugucuuaacuggaggaaag

SEQ ID NO: 1912947 - RNA, 19 nt, Homo sapiens
  misc_RNA (1)...(19): siRNA sense strand
gagauaccacaaagaagaa

SEQ ID NO: 1912948 - RNA, 19 nt, Homo sapiens
  misc_RNA (1)...(19): siRNA sense strand
gauuggagauaccacaaag

SEQ ID NO: 1912949 - RNA, 19 nt, Homo sapiens
  misc_RNA (1)...(19): siRNA sense strand
caguaugucuggauuugga

SEQ ID NO: 1912950 - RNA, 19 nt, Homo sapiens
  misc_RNA (1)...(19): siRNA sense strand
ggugaggacugauggacau

SEQ ID NO: 1912951 - RNA, 19 nt, Homo sapiens
  misc_RNA (1)...(19): siRNA sense strand
cauuaggccucaaucugaa

SEQ ID NO: 1912952 - RNA, 19 nt, Homo sapiens
  misc_RNA (1)...(19): siRNA sense strand
ggaaucaggcauuuggaau

SEQ ID NO: 1912953 - RNA, 19 nt, Homo sapiens
  misc_RNA (1)...(19): siRNA sense strand
ggucagggcauuggaauuc

SEQ ID NO: 1912954 - RNA, 19 nt, Homo sapiens
  misc_RNA (1)...(19): siRNA sense strand
gacauacauuaucugagaa

SEQ ID NO: 1912955 - RNA, 19 nt, Homo sapiens
  misc_RNA (1)...(19): siRNA sense strand
ggauaagcuggcugcaaua

SEQ ID NO: 1912956 - RNA, 19 nt, Homo sapiens
  misc_RNA (1)...(19): siRNA sense strand
gacagacccaggaauggua

SEQ ID NO: 1912957 - RNA, 19 nt, Homo sapiens
  misc_RNA (1)...(19): siRNA sense strand
aacagaagcucgccaagca

SEQ ID NO: 1912958 - RNA, 19 nt, Homo sapiens
  misc_RNA (1)...(19): siRNA sense strand
ugacaggauuggaccuuuc

SEQ ID NO: 1912959 - RNA, 19 nt, Homo sapiens
  misc_RNA (1)...(19): siRNA sense strand
gaggacugauggacauaca

SEQ ID NO: 1912960 - RNA, 19 nt, Homo sapiens
  misc_RNA (1)...(19): siRNA sense strand
ggaacauauuacuucuuug

SEQ ID NO: 1912961 - RNA, 19 nt, Homo sapiens
  misc_RNA (1)...(19): siRNA sense strand
cauguuuggugcuucaaga

SEQ ID NO: 1912962 - RNA, 19 nt, Homo sapiens
  misc_RNA (1)...(19): siRNA sense strand
guacaucuugcauuaggaa

SEQ ID NO: 1912963 - RNA, 19 nt, Homo sapiens
  misc_RNA (1)...(19): siRNA sense strand
gcagagacagacccaggaa

SEQ ID NO: 1912964 - RNA, 19 nt, Homo sapiens
  misc_RNA (1)...(19): siRNA sense strand
gguaacccaacuccauuaa

SEQ ID NO: 1912965 - RNA, 19 nt, Homo sapiens
  misc_RNA (1)...(19): siRNA sense strand
cuaggaauaugaugaacca

SEQ ID NO: 1912966 - RNA, 19 nt, Homo sapiens
  misc_RNA (1)...(19): siRNA sense strand
ccaggaaugguacaucuug

SEQ ID NO: 1912967 - RNA, 19 nt, Homo sapiens
  misc_RNA (1)...(19): siRNA sense strand
caacagggguaccaacaau

SEQ ID NO: 1912968 - RNA, 19 nt, Homo sapiens
  misc_RNA (1)...(19): siRNA sense strand
acauuaggccucaaucuga

SEQ ID NO: 1912969 - RNA, 19 nt, Homo sapiens
  misc_RNA (1)...(19): siRNA sense strand
gugaaaaugugacaggauu

SEQ ID NO: 1912970 - RNA, 19 nt, Homo sapiens
  misc_RNA (1)...(19): siRNA sense strand
aaguacagauggacccaaa

SEQ ID NO: 1912971 - RNA, 19 nt, Homo sapiens
  misc_RNA (1)...(19): siRNA sense strand
guaaugaugacaguaaauc

SEQ ID NO: 1912972 - RNA, 19 nt, Homo sapiens
  misc_RNA (1)...(19): siRNA sense strand
ucccaggacuucucaauac

SEQ ID NO: 1912973 - RNA, 19 nt, Homo sapiens
  misc_RNA (1)...(19): siRNA sense strand
guaccaacaaugucacuuc

SEQ ID NO: 1912974 - RNA, 19 nt, Homo sapiens
  misc_RNA (1)...(19): siRNA sense strand
ggcauggagccaacaauga

SEQ ID NO: 1912975 - RNA, 19 nt, Homo sapiens
  misc_RNA (1)...(19): siRNA sense strand
caucugaguacuuaacgaa

SEQ ID NO: 1912976 - RNA, 19 nt, Homo sapiens
  misc_RNA (1)...(19): siRNA sense strand
caucuugcauuaggaagug

SEQ ID NO: 1912977 - RNA, 19 nt, Homo sapiens
  misc_RNA (1)...(19): siRNA sense strand
uuucagauuucccagcauu

SEQ ID NO: 1912978 - RNA, 19 nt, Homo sapiens
  misc_RNA (1)...(19): siRNA sense strand
uaccaacaaugucacuuca

SEQ ID NO: 1912979 - RNA, 19 nt, Homo sapiens
  misc_RNA (1)...(19): siRNA sense strand
gugacaggauuggaccuuu

SEQ ID NO: 1912980 - RNA, 19 nt, Homo sapiens
  misc_RNA (1)...(19): siRNA sense strand
acauucacauuagggauaa

SEQ ID NO: 1912981 - RNA, 19 nt, Homo sapiens
  misc_RNA (1)...(19): siRNA sense strand
agacuuccauguuccaucu

SEQ ID NO: 1912982 - RNA, 19 nt, Homo sapiens
  misc_RNA (1)...(19): siRNA sense strand
gauaaaaguucaacaacac

SEQ ID NO: 1912983 - RNA, 19 nt, Homo sapiens
  misc_RNA (1)...(19): siRNA sense strand
ugauggacauacauuaucu

SEQ ID NO: 1912984 - RNA, 19 nt, Homo sapiens
  misc_RNA (1)...(19): siRNA sense strand
gcuauaaagauccaacauc

SEQ ID NO: 1912985 - RNA, 19 nt, Homo sapiens
  misc_RNA (1)...(19): siRNA sense strand
ggucgacagugacuaccau

SEQ ID NO: 1912986 - RNA, 19 nt, Homo sapiens
  misc_RNA (1)...(19): siRNA sense strand
gcauugacauggauaaaua

SEQ ID NO: 1912987 - RNA, 19 nt, Homo sapiens
  misc_RNA (1)...(19): siRNA sense strand
ggagagacauccuguacua

SEQ ID NO: 1912988 - RNA, 19 nt, Homo sapiens
  misc_RNA (1)...(19): siRNA sense strand
gaagggacauguucaguga

SEQ ID NO: 1912989 - RNA, 19 nt, Homo sapiens
  misc_RNA (1)...(19): siRNA sense strand
caagauggauucuggauau

SEQ ID NO: 1912990 - RNA, 19 nt, Homo sapiens
  misc_RNA (1)...(19): siRNA sense strand
gcucagggcuuucagagaa

SEQ ID NO: 1912991 - RNA, 19 nt, Homo sapiens
  misc_RNA (1)...(19): siRNA sense strand
uggcugagcuccuaaagua

SEQ ID NO: 1912992 - RNA, 19 nt, Homo sapiens
  misc_RNA (1)...(19): siRNA sense strand
gcaaguaucccuuacaguu

SEQ ID NO: 1912993 - RNA, 19 nt, Homo sapiens
  misc_RNA (1)...(19): siRNA sense strand
ggauaaauaugagguaguu

SEQ ID NO: 1912994 - RNA, 19 nt, Homo sapiens
  misc_RNA (1)...(19): siRNA sense strand
caaggagacugaggagaua

SEQ ID NO: 1912995 - RNA, 19 nt, Homo sapiens
  misc_RNA (1)...(19): siRNA sense strand
ugagagaccuggagaaaca

SEQ ID NO: 1912996 - RNA, 19 nt, Homo sapiens
  misc_RNA (1)...(19): siRNA sense strand
gagaaacaguauaacaaug

SEQ ID NO: 1912997 - RNA, 19 nt, Homo sapiens
  misc_RNA (1)...(19): siRNA sense strand
gaagaaugccuuuaagcuu

SEQ ID NO: 1912998 - RNA, 19 nt, Homo sapiens
  misc_RNA (1)...(19): siRNA sense strand
ucaagcaccucaaggauau

SEQ ID NO: 1912999 - RNA, 19 nt, Homo sapiens
  misc_RNA (1)...(19): siRNA sense strand
ccaagaagcuggaggaaaa

SEQ ID NO: 1913000 - RNA, 19 nt, Homo sapiens
  misc_RNA (1)...(19): siRNA sense strand
gaagagaagggacauguuc

SEQ ID NO: 1913001 - RNA, 19 nt, Homo sapiens
  misc_RNA (1)...(19): siRNA sense strand
gcacugagcgucacuacau

SEQ ID NO: 1913002 - RNA, 19 nt, Homo sapiens
  misc_RNA (1)...(19): siRNA sense strand
ggagaaacaguauaacaau

SEQ ID NO: 1913003 - RNA, 19 nt, Homo sapiens
  misc_RNA (1)...(19): siRNA sense strand
gcugagcuccuaaaguaua

SEQ ID NO: 1913004 - RNA, 19 nt, Homo sapiens
  misc_RNA (1)...(19): siRNA sense strand
uggcagagaugaugacuuc

SEQ ID NO: 1913005 - RNA, 19 nt, Homo sapiens
  misc_RNA (1)...(19): siRNA sense strand
ccuuuaagcuucacaacaa

SEQ ID NO: 1913006 - RNA, 19 nt, Homo sapiens
  misc_RNA (1)...(19): siRNA sense strand
gaacauugaagauaucuac

SEQ ID NO: 1913007 - RNA, 19 nt, Homo sapiens
  misc_RNA (1)...(19): siRNA sense strand
caagcgacguuuagagaau

SEQ ID NO: 1913008 - RNA, 19 nt, Homo sapiens
  misc_RNA (1)...(19): siRNA sense strand
uaaaguauacugcccaaga

SEQ ID NO: 1913009 - RNA, 19 nt, Homo sapiens
  misc_RNA (1)...(19): siRNA sense strand
gaucugcaaguaucccuua

SEQ ID NO: 1913010 - RNA, 19 nt, Homo sapiens
  misc_RNA (1)...(19): siRNA sense strand
gcaacugaagguaaucuuu

SEQ ID NO: 1913011 - RNA, 19 nt, Homo sapiens
  misc_RNA (1)...(19): siRNA sense strand
caacugaagguaaucuuug

SEQ ID NO: 1913012 - RNA, 19 nt, Homo sapiens
  misc_RNA (1)...(19): siRNA sense strand
gagaugaugacuucaaugu

SEQ ID NO: 1913013 - RNA, 19 nt, Homo sapiens
  misc_RNA (1)...(19): siRNA sense strand
gguaaucuuugggaacauu

SEQ ID NO: 1913014 - RNA, 19 nt, Homo sapiens
  misc_RNA (1)...(19): siRNA sense strand
gaaaagucccuaagcaaaa

SEQ ID NO: 1913015 - RNA, 19 nt, Homo sapiens
  misc_RNA (1)...(19): siRNA sense strand
gaaaugugacucagcagau

SEQ ID NO: 1913016 - RNA, 19 nt, Homo sapiens
  misc_RNA (1)...(19): siRNA sense strand
gagaauauugacaagauug

SEQ ID NO: 1913017 - RNA, 19 nt, Homo sapiens
  misc_RNA (1)...(19): siRNA sense strand
gcagagaugaugacuucaa

SEQ ID NO: 1913018 - RNA, 19 nt, Homo sapiens
  misc_RNA (1)...(19): siRNA sense strand
ugacauggauaaauaugag

SEQ ID NO: 1913019 - RNA, 19 nt, Homo sapiens
  misc_RNA (1)...(19): siRNA sense strand
cauugaagauaucuacaga

SEQ ID NO: 1913020 - RNA, 19 nt, Homo sapiens
  misc_RNA (1)...(19): siRNA sense strand
gauucuggauauacucuga

SEQ ID NO: 1913021 - RNA, 19 nt, Homo sapiens
  misc_RNA (1)...(19): siRNA sense strand
gcaagcgacguuuagagaa

SEQ ID NO: 1913022 - RNA, 19 nt, Homo sapiens
  misc_RNA (1)...(19): siRNA sense strand
caaguaucccuuacaguug

SEQ ID NO: 1913023 - RNA, 19 nt, Homo sapiens
  misc_RNA (1)...(19): siRNA sense strand
ucuccaaacugaugaagga

SEQ ID NO: 1913024 - RNA, 19 nt, Homo sapiens
  misc_RNA (1)...(19): siRNA sense strand
cagagaugaugacuucaau

SEQ ID NO: 1913025 - RNA, 19 nt, Homo sapiens
  misc_RNA (1)...(19): siRNA sense strand
ggaagagaagggacauguu

SEQ ID NO: 1913026 - RNA, 19 nt, Homo sapiens
  misc_RNA (1)...(19): siRNA sense strand
gcuaccagcacuucuuuga

SEQ ID NO: 1913027 - RNA, 19 nt, Homo sapiens
  misc_RNA (1)...(19): siRNA sense strand
gcucaguuccuccuuccua

SEQ ID NO: 1913028 - RNA, 19 nt, Homo sapiens
  misc_RNA (1)...(19): siRNA sense strand
gaccuaauccggagagaca

SEQ ID NO: 1913029 - RNA, 19 nt, Homo sapiens
  misc_RNA (1)...(19): siRNA sense strand
guggcaggcuucuguccua

SEQ ID NO: 1913030 - RNA, 19 nt, Homo sapiens
  misc_RNA (1)...(19): siRNA sense strand
aagcgacguuuagagaaua

SEQ ID NO: 1913031 - RNA, 19 nt, Homo sapiens
  misc_RNA (1)...(19): siRNA sense strand
acaguuggcugagcuccua

SEQ ID NO: 1913032 - RNA, 19 nt, Homo sapiens
  misc_RNA (1)...(19): siRNA sense strand
ugacauugcuaucgauggu

SEQ ID NO: 1913033 - RNA, 19 nt, Homo sapiens
  misc_RNA (1)...(19): siRNA sense strand
caugaagaaugccuuuaag

SEQ ID NO: 1913034 - RNA, 19 nt, Homo sapiens
  misc_RNA (1)...(19): siRNA sense strand
gacgagcaacugaagguaa

SEQ ID NO: 1913035 - RNA, 19 nt, Homo sapiens
  misc_RNA (1)...(19): siRNA sense strand
ggaaaaugguacaggaaga

SEQ ID NO: 1913036 - RNA, 19 nt, Homo sapiens
  misc_RNA (1)...(19): siRNA sense strand
ucagaugggcuuugugaga

SEQ ID NO: 1913037 - RNA, 19 nt, Homo sapiens
  misc_RNA (1)...(19): siRNA sense strand
ccaagauggauucuggaua

SEQ ID NO: 1913038 - RNA, 19 nt, Homo sapiens
  misc_RNA (1)...(19): siRNA sense strand
ggaguuggcauuuaaagcu

SEQ ID NO: 1913039 - RNA, 19 nt, Homo sapiens
  misc_RNA (1)...(19): siRNA sense strand
ccacagugacuacagguau

SEQ ID NO: 1913040 - RNA, 19 nt, Homo sapiens
  misc_RNA (1)...(19): siRNA sense strand
gcagaugauugacauugcu

SEQ ID NO: 1913041 - RNA, 19 nt, Homo sapiens
  misc_RNA (1)...(19): siRNA sense strand
gauggauucuggauauacu

SEQ ID NO: 1913042 - RNA, 19 nt, Homo sapiens
  misc_RNA (1)...(19): siRNA sense strand
acauugcuaucgaugguuu

SEQ ID NO: 1913043 - RNA, 19 nt, Homo sapiens
  misc_RNA (1)...(19): siRNA sense strand
gauuucagaugggcuuugu

SEQ ID NO: 1913044 - RNA, 19 nt, Homo sapiens
  misc_RNA (1)...(19): siRNA sense strand
ugagguaguugacauugag

SEQ ID NO: 1913045 - RNA, 19 nt, Homo sapiens
  misc_RNA (1)...(19): siRNA sense strand
gaggauggcagagaugaug

SEQ ID NO: 1913046 - RNA, 19 nt, Homo sapiens
  misc_RNA (1)...(19): siRNA sense strand
ggauauuugugagggcuau

SEQ ID NO: 1913047 - RNA, 19 nt, Homo sapiens
  misc_RNA (1)...(19): siRNA sense strand
ugacucagcagaucaacga

SEQ ID NO: 1913048 - RNA, 19 nt, Homo sapiens
  misc_RNA (1)...(19): siRNA sense strand
ugacuccagugcagaagau

SEQ ID NO: 1913049 - RNA, 19 nt, Homo sapiens
  misc_RNA (1)...(19): siRNA sense strand
aagauggauucuggauaua

SEQ ID NO: 1913050 - RNA, 19 nt, Homo sapiens
  misc_RNA (1)...(19): siRNA sense strand
gcugaucacuggagauucc

SEQ ID NO: 1913051 - RNA, 19 nt, Homo sapiens
  misc_RNA (1)...(19): siRNA sense strand
uugggaacauugaagauau

SEQ ID NO: 1913052 - RNA, 19 nt, Homo sapiens
  misc_RNA (1)...(19): siRNA sense strand
agucgcaggucuuugaguu

SEQ ID NO: 1913053 - RNA, 19 nt, Homo sapiens
  misc_RNA (1)...(19): siRNA sense strand
aauaugagguaguugacau

SEQ ID NO: 1913054 - RNA, 19 nt, Homo sapiens
  misc_RNA (1)...(19): siRNA sense strand
ugauugacauugcuaucga

SEQ ID NO: 1913055 - RNA, 19 nt, Homo sapiens
  misc_RNA (1)...(19): siRNA sense strand
gcaccucaaggauauuugu

SEQ ID NO: 1913056 - RNA, 19 nt, Homo sapiens
  misc_RNA (1)...(19): siRNA sense strand
acaaggagacugaggagau

SEQ ID NO: 1913057 - RNA, 19 nt, Homo sapiens
  misc_RNA (1)...(19): siRNA sense strand
uggagaaacaguauaacaa

SEQ ID NO: 1913058 - RNA, 19 nt, Homo sapiens
  misc_RNA (1)...(19): siRNA sense strand
aaccgggaguuggcauuua

SEQ ID NO: 1913059 - RNA, 19 nt, Homo sapiens
  misc_RNA (1)...(19): siRNA sense strand
gcaaaacuucagcagguua

SEQ ID NO: 1913060 - RNA, 19 nt, Homo sapiens
  misc_RNA (1)...(19): siRNA sense strand
agaaugccuuuaagcuuca

SEQ ID NO: 1913061 - RNA, 19 nt, Homo sapiens
  misc_RNA (1)...(19): siRNA sense strand
caaaggccgcauugacaug

SEQ ID NO: 1913062 - RNA, 19 nt, Homo sapiens
  misc_RNA (1)...(19): siRNA sense strand
guacuacaaaggccgcauu

SEQ ID NO: 1913063 - RNA, 19 nt, Homo sapiens
  misc_RNA (1)...(19): siRNA sense strand
cagcagaugauugacauug

SEQ ID NO: 1913064 - RNA, 19 nt, Homo sapiens
  misc_RNA (1)...(19): siRNA sense strand
cauguucagugacgagcaa

SEQ ID NO: 1913065 - RNA, 19 nt, Homo sapiens
  misc_RNA (1)...(19): siRNA sense strand
guauguggcagcugcuuug

SEQ ID NO: 1913066 - RNA, 19 nt, Homo sapiens
  misc_RNA (1)...(19): siRNA sense strand
cugaagcagugccggaaga

SEQ ID NO: 1913067 - RNA, 19 nt, Homo sapiens
  misc_RNA (1)...(19): siRNA sense strand
accgggaguuggcauuuaa

SEQ ID NO: 1913068 - RNA, 19 nt, Homo sapiens
  misc_RNA (1)...(19): siRNA sense strand
gggugaaccaggaggauga

SEQ ID NO: 1913069 - RNA, 19 nt, Homo sapiens
  misc_RNA (1)...(19): siRNA sense strand
uacaaaggccgcauugaca

SEQ ID NO: 1913070 - RNA, 19 nt, Homo sapiens
  misc_RNA (1)...(19): siRNA sense strand
cacagugacuacagguaug

SEQ ID NO: 1913071 - RNA, 19 nt, Homo sapiens
  misc_RNA (1)...(19): siRNA sense strand
cguuagugcugaggcagua

SEQ ID NO: 1913072 - RNA, 19 nt, Homo sapiens
  misc_RNA (1)...(19): siRNA sense strand
gauugacauugcuaucgau

SEQ ID NO: 1913073 - RNA, 19 nt, Homo sapiens
  misc_RNA (1)...(19): siRNA sense strand
aagguaaucuuugggaaca

SEQ ID NO: 1913074 - RNA, 19 nt, Homo sapiens
  misc_RNA (1)...(19): siRNA sense strand
gcaggcuucuguccuagac

SEQ ID NO: 1913075 - RNA, 19 nt, Homo sapiens
  misc_RNA (1)...(19): siRNA sense strand
aagcagugccggaagagaa

SEQ ID NO: 1913076 - RNA, 19 nt, Homo sapiens
  misc_RNA (1)...(19): siRNA sense strand
ucgcaggucuuugaguuca

SEQ ID NO: 1913077 - RNA, 19 nt, Homo sapiens
  misc_RNA (1)...(19): siRNA sense strand
ggagauuccaucguuagug

SEQ ID NO: 1913078 - RNA, 19 nt, Homo sapiens
  misc_RNA (1)...(19): siRNA sense strand
gcugucaugagaaauguga

SEQ ID NO: 1913079 - RNA, 19 nt, Homo sapiens
  misc_RNA (1)...(19): siRNA sense strand
aaaguauacugcccaagac

SEQ ID NO: 1913080 - RNA, 19 nt, Homo sapiens
  misc_RNA (1)...(19): siRNA sense strand
acgagcaacugaagguaau

SEQ ID NO: 1913081 - RNA, 19 nt, Homo sapiens
  misc_RNA (1)...(19): siRNA sense strand
gcgggucuucuuccuguuu

SEQ ID NO: 1913082 - RNA, 19 nt, Homo sapiens
  misc_RNA (1)...(19): siRNA sense strand
gagaaaagucccuaagcaa

SEQ ID NO: 1913083 - RNA, 19 nt, Homo sapiens
  misc_RNA (1)...(19): siRNA sense strand
ugaagaaugccuuuaagcu

SEQ ID NO: 1913084 - RNA, 19 nt, Homo sapiens
  misc_RNA (1)...(19): siRNA sense strand
cauugaggauggcagagau

SEQ ID NO: 1913085 - RNA, 19 nt, Homo sapiens
  misc_RNA (1)...(19): siRNA sense strand
gccaagaagcuggaggaaa

SEQ ID NO: 1913086 - RNA, 19 nt, Homo sapiens
  misc_RNA (1)...(19): siRNA sense strand
gagaaugcuuugaagauau

SEQ ID NO: 1913087 - RNA, 19 nt, Homo sapiens
  misc_RNA (1)...(19): siRNA sense strand
ggguaaaucuucagcgaaa

SEQ ID NO: 1913088 - RNA, 19 nt, Homo sapiens
  misc_RNA (1)...(19): siRNA sense strand
ggacagagucuugaggaua

SEQ ID NO: 1913089 - RNA, 19 nt, Homo sapiens
  misc_RNA (1)...(19): siRNA sense strand
ggaggcaacucagugauug

SEQ ID NO: 1913090 - RNA, 19 nt, Homo sapiens
  misc_RNA (1)...(19): siRNA sense strand
agagaaugcuuugaagaua

SEQ ID NO: 1913091 - RNA, 19 nt, Homo sapiens
  misc_RNA (1)...(19): siRNA sense strand
ccaagaacgugcggaauga

SEQ ID NO: 1913092 - RNA, 19 nt, Homo sapiens
  misc_RNA (1)...(19): siRNA sense strand
caaacgagacggagaaaga

SEQ ID NO: 1913093 - RNA, 19 nt, Homo sapiens
  misc_RNA (1)...(19): siRNA sense strand
ggaccaggacauacaguuu

SEQ ID NO: 1913094 - RNA, 19 nt, Homo sapiens
  misc_RNA (1)...(19): siRNA sense strand
ggagaguacucacuaacag

SEQ ID NO: 1913095 - RNA, 19 nt, Homo sapiens
  misc_RNA (1)...(19): siRNA sense strand
gacagagucuugaggauac

SEQ ID NO: 1913096 - RNA, 19 nt, Homo sapiens
  misc_RNA (1)...(19): siRNA sense strand
gcagugagcgcccuguguu

SEQ ID NO: 1913097 - RNA, 19 nt, Homo sapiens
  misc_RNA (1)...(19): siRNA sense strand
caccgaggauggcauauuc

SEQ ID NO: 1913098 - RNA, 19 nt, Homo sapiens
  misc_RNA (1)...(19): siRNA sense strand
gaacugccuccucuuguca

SEQ ID NO: 1913099 - RNA, 19 nt, Homo sapiens
  misc_RNA (1)...(19): siRNA sense strand
agagacagaugaacuuugg

SEQ ID NO: 1913100 - RNA, 19 nt, Homo sapiens
  misc_RNA (1)...(19): siRNA sense strand
agaaugcuuugaagauaug

SEQ ID NO: 1913101 - RNA, 19 nt, Homo sapiens
  misc_RNA (1)...(19): siRNA sense strand
agacugggaucuugaaagg

SEQ ID NO: 1913102 - RNA, 19 nt, Homo sapiens
  misc_RNA (1)...(19): siRNA sense strand
gaagacacagagacagaug

SEQ ID NO: 1913103 - RNA, 19 nt, Homo sapiens
  misc_RNA (1)...(19): siRNA sense strand
uauggagaguacucacuaa

SEQ ID NO: 1913104 - RNA, 19 nt, Homo sapiens
  misc_RNA (1)...(19): siRNA sense strand
gcaccgaggauggcauauu

SEQ ID NO: 1913105 - RNA, 19 nt, Homo sapiens
  misc_RNA (1)...(19): siRNA sense strand
gccaagaacgugcggaaug

SEQ ID NO: 1913106 - RNA, 19 nt, Homo sapiens
  misc_RNA (1)...(19): siRNA sense strand
agcggaagcucucggguuu

SEQ ID NO: 1913107 - RNA, 19 nt, Homo sapiens
  misc_RNA (1)...(19): siRNA sense strand
ccagguccguguuuaugau

SEQ ID NO: 1913108 - RNA, 19 nt, Homo sapiens
  misc_RNA (1)...(19): siRNA sense strand
gggaggcaacucagugauu

SEQ ID NO: 1913109 - RNA, 19 nt, Homo sapiens
  misc_RNA (1)...(19): siRNA sense strand
gaccaccuauggagaguac

SEQ ID NO: 1913110 - RNA, 19 nt, Homo sapiens
  misc_RNA (1)...(19): siRNA sense strand
gucuggagcauaagguuua

SEQ ID NO: 1913111 - RNA, 19 nt, Homo sapiens
  misc_RNA (1)...(19): siRNA sense strand
ggaaugacuggcuggacuu

SEQ ID NO: 1913112 - RNA, 19 nt, Homo sapiens
  misc_RNA (1)...(19): siRNA sense strand
gaccaggacauacaguuuc

SEQ ID NO: 1913113 - RNA, 19 nt, Homo sapiens
  misc_RNA (1)...(19): siRNA sense strand
acaggacggugaagcacuu

SEQ ID NO: 1913114 - RNA, 19 nt, Homo sapiens
  misc_RNA (1)...(19): siRNA sense strand
uaagguuuaucucaagucu

SEQ ID NO: 1913115 - RNA, 19 nt, Homo sapiens
  misc_RNA (1)...(19): siRNA sense strand
acucagugauugugggaaa

SEQ ID NO: 1913116 - RNA, 19 nt, Homo sapiens
  misc_RNA (1)...(19): siRNA sense strand
caccgagacugggaucuug

SEQ ID NO: 1913117 - RNA, 19 nt, Homo sapiens
  misc_RNA (1)...(19): siRNA sense strand
gcacccucaucacaugugu

SEQ ID NO: 1913118 - RNA, 19 nt, Homo sapiens
  misc_RNA (1)...(19): siRNA sense strand
ugaacugccuccucuuguc

SEQ ID NO: 1913119 - RNA, 19 nt, Homo sapiens
  misc_RNA (1)...(19): siRNA sense strand
agguuuaucucaagucuca

SEQ ID NO: 1913120 - RNA, 19 nt, Homo sapiens
  misc_RNA (1)...(19): siRNA sense strand
gcaccgagacugggaucuu

SEQ ID NO: 1913121 - RNA, 19 nt, Homo sapiens
  misc_RNA (1)...(19): siRNA sense strand
uagaagacacagagacaga

SEQ ID NO: 1913122 - RNA, 19 nt, Homo sapiens
  misc_RNA (1)...(19): siRNA sense strand
cgacggcacccucaucaca

SEQ ID NO: 1913123 - RNA, 19 nt, Homo sapiens
  misc_RNA (1)...(19): siRNA sense strand
aaacgagacggagaaagaa

SEQ ID NO: 1913124 - RNA, 19 nt, Homo sapiens
  misc_RNA (1)...(19): siRNA sense strand
cagcaccgaggauggcaua

SEQ ID NO: 1913125 - RNA, 19 nt, Homo sapiens
  misc_RNA (1)...(19): siRNA sense strand
ggucuggagcauaagguuu

SEQ ID NO: 1913126 - RNA, 19 nt, Homo sapiens
  misc_RNA (1)...(19): siRNA sense strand
aagagaaugcuuugaagau

SEQ ID NO: 1913127 - RNA, 19 nt, Homo sapiens
  misc_RNA (1)...(19): siRNA sense strand
ggauacacgggacccagaa

SEQ ID NO: 1913128 - RNA, 19 nt, Homo sapiens
  misc_RNA (1)...(19): siRNA sense strand
gcagugccacccuucaaag

SEQ ID NO: 1913129 - RNA, 19 nt, Homo sapiens
  misc_RNA (1)...(19): siRNA sense strand
gggcagcuggcagaaauug

SEQ ID NO: 1913130 - RNA, 19 nt, Homo sapiens
  misc_RNA (1)...(19): siRNA sense strand
ccaccagguccguguuuau

SEQ ID NO: 1913131 - RNA, 19 nt, Homo sapiens
  misc_RNA (1)...(19): siRNA sense strand
agacacagagacagaugaa

SEQ ID NO: 1913132 - RNA, 19 nt, Homo sapiens
  misc_RNA (1)...(19): siRNA sense strand
gcacuucagcaccgaggau

SEQ ID NO: 1913133 - RNA, 19 nt, Homo sapiens
  misc_RNA (1)...(19): siRNA sense strand
cuauggagaguacucacua

SEQ ID NO: 1913134 - RNA, 19 nt, Homo sapiens
  misc_RNA (1)...(19): siRNA sense strand
gcagggcucugaggaaccu

SEQ ID NO: 1913135 - RNA, 19 nt, Homo sapiens
  misc_RNA (1)...(19): siRNA sense strand
cgagacggagaaagaagaa

SEQ ID NO: 1913136 - RNA, 19 nt, Homo sapiens
  misc_RNA (1)...(19): siRNA sense strand
acacagagacagaugaacu

SEQ ID NO: 1913137 - RNA, 19 nt, Homo sapiens
  misc_RNA (1)...(19): siRNA sense strand
gagaccaccuauggagagu

SEQ ID NO: 1913138 - RNA, 19 nt, Homo sapiens
  misc_RNA (1)...(19): siRNA sense strand
gcucugaggaaccuguguu

SEQ ID NO: 1913139 - RNA, 19 nt, Homo sapiens
  misc_RNA (1)...(19): siRNA sense strand
cggaagcucucggguuugg

SEQ ID NO: 1913140 - RNA, 19 nt, Homo sapiens
  misc_RNA (1)...(19): siRNA sense strand
gaaugacuggcuggacuug

SEQ ID NO: 1913141 - RNA, 19 nt, Homo sapiens
  misc_RNA (1)...(19): siRNA sense strand
ggcaugacaaggacaagga

SEQ ID NO: 1913142 - RNA, 19 nt, Homo sapiens
  misc_RNA (1)...(19): siRNA sense strand
ccaacaaggugccccuaga

SEQ ID NO: 1913143 - RNA, 19 nt, Homo sapiens
  misc_RNA (1)...(19): siRNA sense strand
gagucuggcaugacaagga

SEQ ID NO: 1913144 - RNA, 19 nt, Homo sapiens
  misc_RNA (1)...(19): siRNA sense strand
gagacugggaucuugaaag

SEQ ID NO: 1913145 - RNA, 19 nt, Homo sapiens
  misc_RNA (1)...(19): siRNA sense strand
gacccacuccuggaacuga

SEQ ID NO: 1913146 - RNA, 19 nt, Homo sapiens
  misc_RNA (1)...(19): siRNA sense strand
cagagacagaugaacuuug

SEQ ID NO: 1913147 - RNA, 19 nt, Homo sapiens
  misc_RNA (1)...(19): siRNA sense strand
acagagacagaugaacuuu

SEQ ID NO: 1913148 - RNA, 19 nt, Homo sapiens
  misc_RNA (1)...(19): siRNA sense strand
cacagagacagaugaacuu

SEQ ID NO: 1913149 - RNA, 19 nt, Homo sapiens
  misc_RNA (1)...(19): siRNA sense strand
gggaccaggacauacaguu

SEQ ID NO: 1913150 - RNA, 19 nt, Homo sapiens
  misc_RNA (1)...(19): siRNA sense strand
cauauuccagggucagaga

SEQ ID NO: 1913151 - RNA, 19 nt, Homo sapiens
  misc_RNA (1)...(19): siRNA sense strand
ccuagaagacacagagaca

SEQ ID NO: 1913152 - RNA, 19 nt, Homo sapiens
  misc_RNA (1)...(19): siRNA sense strand
gaaagaagaggaagaagaa

SEQ ID NO: 1913153 - RNA, 19 nt, Homo sapiens
  misc_RNA (1)...(19): siRNA sense strand
ggaagaagaagaagaagaa

SEQ ID NO: 1913154 - RNA, 19 nt, Homo sapiens
  misc_RNA (1)...(19): siRNA sense strand
gaugaagggucuaaucuca

SEQ ID NO: 1913155 - RNA, 19 nt, Homo sapiens
  misc_RNA (1)...(19): siRNA sense strand
gaccagauccuguaucaaa

SEQ ID NO: 1913156 - RNA, 19 nt, Homo sapiens
  misc_RNA (1)...(19): siRNA sense strand
aaacugagcgguacaauga

SEQ ID NO: 1913157 - RNA, 19 nt, Homo sapiens
  misc_RNA (1)...(19): siRNA sense strand
cagggaaacucuacauuga

SEQ ID NO: 1913158 - RNA, 19 nt, Homo sapiens
  misc_RNA (1)...(19): siRNA sense strand
gaagaaagaagaggaagaa

SEQ ID NO: 1913159 - RNA, 19 nt, Homo sapiens
  misc_RNA (1)...(19): siRNA sense strand
uagcacagcucacgaugaa

SEQ ID NO: 1913160 - RNA, 19 nt, Homo sapiens
  misc_RNA (1)...(19): siRNA sense strand
ggacuuggauaucuuugau

SEQ ID NO: 1913161 - RNA, 19 nt, Homo sapiens
  misc_RNA (1)...(19): siRNA sense strand
gguauuugauguacgauug

SEQ ID NO: 1913162 - RNA, 19 nt, Homo sapiens
  misc_RNA (1)...(19): siRNA sense strand
ugaagggucuaaucucaaa

SEQ ID NO: 1913163 - RNA, 19 nt, Homo sapiens
  misc_RNA (1)...(19): siRNA sense strand
gugcuggucuugaaauuug

SEQ ID NO: 1913164 - RNA, 19 nt, Homo sapiens
  misc_RNA (1)...(19): siRNA sense strand
gcacagcucacgaugaaau

SEQ ID NO: 1913165 - RNA, 19 nt, Homo sapiens
  misc_RNA (1)...(19): siRNA sense strand
gaaggacuuggauaucuuu

SEQ ID NO: 1913166 - RNA, 19 nt, Homo sapiens
  misc_RNA (1)...(19): siRNA sense strand
gaagaagaauaugaugaag

SEQ ID NO: 1913167 - RNA, 19 nt, Homo sapiens
  misc_RNA (1)...(19): siRNA sense strand
ggauaucuuugaucguguu

SEQ ID NO: 1913168 - RNA, 19 nt, Homo sapiens
  misc_RNA (1)...(19): siRNA sense strand
gaagaagaagaauaugaug

SEQ ID NO: 1913169 - RNA, 19 nt, Homo sapiens
  misc_RNA (1)...(19): siRNA sense strand
ggagaccuuuggcuacgaa

SEQ ID NO: 1913170 - RNA, 19 nt, Homo sapiens
  misc_RNA (1)...(19): siRNA sense strand
gggccgagccucagacuau

SEQ ID NO: 1913171 - RNA, 19 nt, Homo sapiens
  misc_RNA (1)...(19): siRNA sense strand
ugaaggacuuggauaucuu

SEQ ID NO: 1913172 - RNA, 19 nt, Homo sapiens
  misc_RNA (1)...(19): siRNA sense strand
aaagguauuugauguacga

SEQ ID NO: 1913173 - RNA, 19 nt, Homo sapiens
  misc_RNA (1)...(19): siRNA sense strand
ggagaagaaagaagaggaa

SEQ ID NO: 1913174 - RNA, 19 nt, Homo sapiens
  misc_RNA (1)...(19): siRNA sense strand
gacaguggaugauguacca

SEQ ID NO: 1913175 - RNA, 19 nt, Homo sapiens
  misc_RNA (1)...(19): siRNA sense strand
gacaacagcagccucaugu

SEQ ID NO: 1913176 - RNA, 19 nt, Homo sapiens
  misc_RNA (1)...(19): siRNA sense strand
gugaaggacuuggauaucu

SEQ ID NO: 1913177 - RNA, 19 nt, Homo sapiens
  misc_RNA (1)...(19): siRNA sense strand
ggacaacagcagccucaug

SEQ ID NO: 1913178 - RNA, 19 nt, Homo sapiens
  misc_RNA (1)...(19): siRNA sense strand
gcuacgaagugcccaucaa

SEQ ID NO: 1913179 - RNA, 19 nt, Homo sapiens
  misc_RNA (1)...(19): siRNA sense strand
caaggucugugcacucuac

SEQ ID NO: 1913180 - RNA, 19 nt, Homo sapiens
  misc_RNA (1)...(19): siRNA sense strand
gcaugaaacugccaauccu

SEQ ID NO: 1913181 - RNA, 19 nt, Homo sapiens
  misc_RNA (1)...(19): siRNA sense strand
gauuggagaagaaagaaga

SEQ ID NO: 1913182 - RNA, 19 nt, Homo sapiens
  misc_RNA (1)...(19): siRNA sense strand
agaaagaagaggaagaaga

SEQ ID NO: 1913183 - RNA, 19 nt, Homo sapiens
  misc_RNA (1)...(19): siRNA sense strand
agaggaagaagaagaagaa

SEQ ID NO: 1913184 - RNA, 19 nt, Homo sapiens
  misc_RNA (1)...(19): siRNA sense strand
gaaauuugcagaggucuac

SEQ ID NO: 1913185 - RNA, 19 nt, Homo sapiens
  misc_RNA (1)...(19): siRNA sense strand
agaagaggaagaagaagaa

SEQ ID NO: 1913186 - RNA, 19 nt, Homo sapiens
  misc_RNA (1)...(19): siRNA sense strand
acagggaaacucuacauug

SEQ ID NO: 1913187 - RNA, 19 nt, Homo sapiens
  misc_RNA (1)...(19): siRNA sense strand
gaagaagaagaagaauaug

SEQ ID NO: 1913188 - RNA, 19 nt, Homo sapiens
  misc_RNA (1)...(19): siRNA sense strand
cuacgaagugcccaucaaa

SEQ ID NO: 1913189 - RNA, 19 nt, Homo sapiens
  misc_RNA (1)...(19): siRNA sense strand
caaacugagcgguacaaug

SEQ ID NO: 1913190 - RNA, 19 nt, Homo sapiens
  misc_RNA (1)...(19): siRNA sense strand
guacaaugaggagaccuuu

SEQ ID NO: 1913191 - RNA, 19 nt, Homo sapiens
  misc_RNA (1)...(19): siRNA sense strand
gggacuacgugcuggucuu

SEQ ID NO: 1913192 - RNA, 19 nt, Homo sapiens
  misc_RNA (1)...(19): siRNA sense strand
gaagaagaagaagaagaau

SEQ ID NO: 1913193 - RNA, 19 nt, Homo sapiens
  misc_RNA (1)...(19): siRNA sense strand
ggacuacgugcuggucuug

SEQ ID NO: 1913194 - RNA, 19 nt, Homo sapiens
  misc_RNA (1)...(19): siRNA sense strand
cgaugaaauuauaccuaug

SEQ ID NO: 1913195 - RNA, 19 nt, Homo sapiens
  misc_RNA (1)...(19): siRNA sense strand
gcauagcacagcucacgau

SEQ ID NO: 1913196 - RNA, 19 nt, Homo sapiens
  misc_RNA (1)...(19): siRNA sense strand
uugcagaggucuacuuugc

SEQ ID NO: 1913197 - RNA, 19 nt, Homo sapiens
  misc_RNA (1)...(19): siRNA sense strand
ccuaugagcaucagaaagg

SEQ ID NO: 1913198 - RNA, 19 nt, Homo sapiens
  misc_RNA (1)...(19): siRNA sense strand
acgaagugcccaucaaaga

SEQ ID NO: 1913199 - RNA, 19 nt, Homo sapiens
  misc_RNA (1)...(19): siRNA sense strand
aagaagaggaagaagaaga

SEQ ID NO: 1913200 - RNA, 19 nt, Homo sapiens
  misc_RNA (1)...(19): siRNA sense strand
cucagacuauggcaugaaa

SEQ ID NO: 1913201 - RNA, 19 nt, Homo sapiens
  misc_RNA (1)...(19): siRNA sense strand
ggccuucggagucuucauu

SEQ ID NO: 1913202 - RNA, 19 nt, Homo sapiens
  misc_RNA (1)...(19): siRNA sense strand
gaccuuuggcuacgaagug

SEQ ID NO: 1913203 - RNA, 19 nt, Homo sapiens
  misc_RNA (1)...(19): siRNA sense strand
cagcucacgaugaaauuau

SEQ ID NO: 1913204 - RNA, 19 nt, Homo sapiens
  misc_RNA (1)...(19): siRNA sense strand
cgaagugcccaucaaagag

SEQ ID NO: 1913205 - RNA, 19 nt, Homo sapiens
  misc_RNA (1)...(19): siRNA sense strand
ggccgagccucagacuaug

SEQ ID NO: 1913206 - RNA, 19 nt, Homo sapiens
  misc_RNA (1)...(19): siRNA sense strand
acaaugaggagaccuuugg

SEQ ID NO: 1913207 - RNA, 19 nt, Homo sapiens
  misc_RNA (1)...(19): siRNA sense strand
gaaaggggaagcugagugu

SEQ ID NO: 1913208 - RNA, 19 nt, Homo sapiens
  misc_RNA (1)...(19): siRNA sense strand
ggucugugcacucuacauc

SEQ ID NO: 1913209 - RNA, 19 nt, Homo sapiens
  misc_RNA (1)...(19): siRNA sense strand
acuacgugcuggucuugaa

SEQ ID NO: 1913210 - RNA, 19 nt, Homo sapiens
  misc_RNA (1)...(19): siRNA sense strand
guauuugauguacgauuga

SEQ ID NO: 1913211 - RNA, 19 nt, Homo sapiens
  misc_RNA (1)...(19): siRNA sense strand
agaagaaagaagaggaaga

SEQ ID NO: 1913212 - RNA, 19 nt, Homo sapiens
  misc_RNA (1)...(19): siRNA sense strand
cagauccuguaucaaacug

SEQ ID NO: 1913213 - RNA, 19 nt, Homo sapiens
  misc_RNA (1)...(19): siRNA sense strand
ggugaaggacuuggauauc

SEQ ID NO: 1913214 - RNA, 19 nt, Homo sapiens
  misc_RNA (1)...(19): siRNA sense strand
gaagaggaagaagaagaag

SEQ ID NO: 1913215 - RNA, 19 nt, Homo sapiens
  misc_RNA (1)...(19): siRNA sense strand
gggauuggagaagaaagaa

SEQ ID NO: 1913216 - RNA, 19 nt, Homo sapiens
  misc_RNA (1)...(19): siRNA sense strand
cacgaugaaauuauaccua

SEQ ID NO: 1913217 - RNA, 19 nt, Homo sapiens
  misc_RNA (1)...(19): siRNA sense strand
agcucacgaugaaauuaua

SEQ ID NO: 1913218 - RNA, 19 nt, Homo sapiens
  misc_RNA (1)...(19): siRNA sense strand
acagcucacgaugaaauua

SEQ ID NO: 1913219 - RNA, 19 nt, Homo sapiens
  misc_RNA (1)...(19): siRNA sense strand
ucacagggaaacucuacau

SEQ ID NO: 1913220 - RNA, 19 nt, Homo sapiens
  misc_RNA (1)...(19): siRNA sense strand
gaacucaucuccacucguu

SEQ ID NO: 1913221 - RNA, 19 nt, Homo sapiens
  misc_RNA (1)...(19): siRNA sense strand
gaagacagccagcgauaua

SEQ ID NO: 1913222 - RNA, 19 nt, Homo sapiens
  misc_RNA (1)...(19): siRNA sense strand
gagcauguaccaucugaua

SEQ ID NO: 1913223 - RNA, 19 nt, Homo sapiens
  misc_RNA (1)...(19): siRNA sense strand
aaacugggauggaucuaug

SEQ ID NO: 1913224 - RNA, 19 nt, Homo sapiens
  misc_RNA (1)...(19): siRNA sense strand
ggauggaucuaugaguuug

SEQ ID NO: 1913225 - RNA, 19 nt, Homo sapiens
  misc_RNA (1)...(19): siRNA sense strand
ucuaugaguuugccacuga

SEQ ID NO: 1913226 - RNA, 19 nt, Homo sapiens
  misc_RNA (1)...(19): siRNA sense strand
gugauacgauccugaccaa

SEQ ID NO: 1913227 - RNA, 19 nt, Homo sapiens
  misc_RNA (1)...(19): siRNA sense strand
ugggauggaucuaugaguu

SEQ ID NO: 1913228 - RNA, 19 nt, Homo sapiens
  misc_RNA (1)...(19): siRNA sense strand
ccuggaacgugcucuaguu

SEQ ID NO: 1913229 - RNA, 19 nt, Homo sapiens
  misc_RNA (1)...(19): siRNA sense strand
guaguuaaccugcaguaca

SEQ ID NO: 1913230 - RNA, 19 nt, Homo sapiens
  misc_RNA (1)...(19): siRNA sense strand
gggauggaucuaugaguuu

SEQ ID NO: 1913231 - RNA, 19 nt, Homo sapiens
  misc_RNA (1)...(19): siRNA sense strand
aaacugcaauagcaaacug

SEQ ID NO: 1913232 - RNA, 19 nt, Homo sapiens
  misc_RNA (1)...(19): siRNA sense strand
caucuccacucguuucaca

SEQ ID NO: 1913233 - RNA, 19 nt, Homo sapiens
  misc_RNA (1)...(19): siRNA sense strand
gcauguaccaucugauaac

SEQ ID NO: 1913234 - RNA, 19 nt, Homo sapiens
  misc_RNA (1)...(19): siRNA sense strand
ugaggagcauguaccaucu

SEQ ID NO: 1913235 - RNA, 19 nt, Homo sapiens
  misc_RNA (1)...(19): siRNA sense strand
uaguuaaccugcaguacag

SEQ ID NO: 1913236 - RNA, 19 nt, Homo sapiens
  misc_RNA (1)...(19): siRNA sense strand
guacccgucuguuuucuug

SEQ ID NO: 1913237 - RNA, 19 nt, Homo sapiens
  misc_RNA (1)...(19): siRNA sense strand
caaccgcucagaacucauc

SEQ ID NO: 1913238 - RNA, 19 nt, Homo sapiens
  misc_RNA (1)...(19): siRNA sense strand
caaacugggauggaucuau

SEQ ID NO: 1913239 - RNA, 19 nt, Homo sapiens
  misc_RNA (1)...(19): siRNA sense strand
cugaagacagccagcgaua

SEQ ID NO: 1913240 - RNA, 19 nt, Homo sapiens
  misc_RNA (1)...(19): siRNA sense strand
uguaccaucugauaacucu

SEQ ID NO: 1913241 - RNA, 19 nt, Homo sapiens
  misc_RNA (1)...(19): siRNA sense strand
gauccuggaacgugcucua

SEQ ID NO: 1913242 - RNA, 19 nt, Homo sapiens
  misc_RNA (1)...(19): siRNA sense strand
gcagaauuuuccuugauca

SEQ ID NO: 1913243 - RNA, 19 nt, Homo sapiens
  misc_RNA (1)...(19): siRNA sense strand
gggcagaauuuuccuugau

SEQ ID NO: 1913244 - RNA, 19 nt, Homo sapiens
  misc_RNA (1)...(19): siRNA sense strand
gagagagugagggcuuuga

SEQ ID NO: 1913245 - RNA, 19 nt, Homo sapiens
  misc_RNA (1)...(19): siRNA sense strand
aggagcauguaccaucuga

SEQ ID NO: 1913246 - RNA, 19 nt, Homo sapiens
  misc_RNA (1)...(19): siRNA sense strand
uaccaucugauaacucuug

SEQ ID NO: 1913247 - RNA, 19 nt, Homo sapiens
  misc_RNA (1)...(19): siRNA sense strand
ucgagagagugagggcuuu

SEQ ID NO: 1913248 - RNA, 19 nt, Homo sapiens
  misc_RNA (1)...(19): siRNA sense strand
gaccaaccgcucagaacuc

SEQ ID NO: 1913249 - RNA, 19 nt, Homo sapiens
  misc_RNA (1)...(19): siRNA sense strand
ggugguacccgucuguuuu

SEQ ID NO: 1913250 - RNA, 19 nt, Homo sapiens
  misc_RNA (1)...(19): siRNA sense strand
gagaacagcaagaaacuaa

SEQ ID NO: 1913251 - RNA, 19 nt, Homo sapiens
  misc_RNA (1)...(19): siRNA sense strand
gugaugagguggagaagaa

SEQ ID NO: 1913252 - RNA, 19 nt, Homo sapiens
  misc_RNA (1)...(19): siRNA sense strand
ccugaguucucgaccauua

SEQ ID NO: 1913253 - RNA, 19 nt, Homo sapiens
  misc_RNA (1)...(19): siRNA sense strand
gagcugaucuacgugagaa

SEQ ID NO: 1913254 - RNA, 19 nt, Homo sapiens
  misc_RNA (1)...(19): siRNA sense strand
aagggaagcuggacgugua

SEQ ID NO: 1913255 - RNA, 19 nt, Homo sapiens
  misc_RNA (1)...(19): siRNA sense strand
ggacaaagccaaggucauc

SEQ ID NO: 1913256 - RNA, 19 nt, Homo sapiens
  misc_RNA (1)...(19): siRNA sense strand
ccugaaagcuggccacaca

SEQ ID NO: 1913257 - RNA, 19 nt, Homo sapiens
  misc_RNA (1)...(19): siRNA sense strand
ccaccgagcugaucuacgu

SEQ ID NO: 1913258 - RNA, 19 nt, Homo sapiens
  misc_RNA (1)...(19): siRNA sense strand
gcugagacccuguuuggaa

SEQ ID NO: 1913259 - RNA, 19 nt, Homo sapiens
  misc_RNA (1)...(19): siRNA sense strand
ugacagaagacacagauga

SEQ ID NO: 1913260 - RNA, 19 nt, Homo sapiens
  misc_RNA (1)...(19): siRNA sense strand
ggaauguggugguggaaac

SEQ ID NO: 1913261 - RNA, 19 nt, Homo sapiens
  misc_RNA (1)...(19): siRNA sense strand
agaagaaccugcgcccauu

SEQ ID NO: 1913262 - RNA, 19 nt, Homo sapiens
  misc_RNA (1)...(19): siRNA sense strand
gacagaagacacagaugaa

SEQ ID NO: 1913263 - RNA, 19 nt, Homo sapiens
  misc_RNA (1)...(19): siRNA sense strand
gcgaagagcaagagagcuu

SEQ ID NO: 1913264 - RNA, 19 nt, Homo sapiens
  misc_RNA (1)...(19): siRNA sense strand
gagugggacugcugaugga

SEQ ID NO: 1913265 - RNA, 19 nt, Homo sapiens
  misc_RNA (1)...(19): siRNA sense strand
ugauccaccucacugaauu

SEQ ID NO: 1913266 - RNA, 19 nt, Homo sapiens
  misc_RNA (1)...(19): siRNA sense strand
gaggugaggcugcacacuu

SEQ ID NO: 1913267 - RNA, 19 nt, Homo sapiens
  misc_RNA (1)...(19): siRNA sense strand
gaggacaugcucagagaga

SEQ ID NO: 1913268 - RNA, 19 nt, Homo sapiens
  misc_RNA (1)...(19): siRNA sense strand
cugagacccuguuuggaaa

SEQ ID NO: 1913269 - RNA, 19 nt, Homo sapiens
  misc_RNA (1)...(19): siRNA sense strand
cagaagacacagaugaaga

SEQ ID NO: 1913270 - RNA, 19 nt, Homo sapiens
  misc_RNA (1)...(19): siRNA sense strand
ccucccgcauugagacuua

SEQ ID NO: 1913271 - RNA, 19 nt, Homo sapiens
  misc_RNA (1)...(19): siRNA sense strand
agaaagcucaagaucauga

SEQ ID NO: 1913272 - RNA, 19 nt, Homo sapiens
  misc_RNA (1)...(19): siRNA sense strand
gaaggcagaggaguauguu

SEQ ID NO: 1913273 - RNA, 19 nt, Homo sapiens
  misc_RNA (1)...(19): siRNA sense strand
cgaggccugucacccauga

SEQ ID NO: 1913274 - RNA, 19 nt, Homo sapiens
  misc_RNA (1)...(19): siRNA sense strand
agacacagaugaagaugcu

SEQ ID NO: 1913275 - RNA, 19 nt, Homo sapiens
  misc_RNA (1)...(19): siRNA sense strand
gaagaaccugcgcccauuc

SEQ ID NO: 1913276 - RNA, 19 nt, Homo sapiens
  misc_RNA (1)...(19): siRNA sense strand
aggugaggcugcacacuuu

SEQ ID NO: 1913277 - RNA, 19 nt, Homo sapiens
  misc_RNA (1)...(19): siRNA sense strand
gaugcucugugacuugcuu

SEQ ID NO: 1913278 - RNA, 19 nt, Homo sapiens
  misc_RNA (1)...(19): siRNA sense strand
gauugaagccguggaguca

SEQ ID NO: 1913279 - RNA, 19 nt, Homo sapiens
  misc_RNA (1)...(19): siRNA sense strand
ggcccugaaugccaugauu

SEQ ID NO: 1913280 - RNA, 19 nt, Homo sapiens
  misc_RNA (1)...(19): siRNA sense strand
gcacacuuucagcauguuu

SEQ ID NO: 1913281 - RNA, 19 nt, Homo sapiens
  misc_RNA (1)...(19): siRNA sense strand
aaaguggcuuccugacguu

SEQ ID NO: 1913282 - RNA, 19 nt, Homo sapiens
  misc_RNA (1)...(19): siRNA sense strand
uugaagccguggagucauu

SEQ ID NO: 1913283 - RNA, 19 nt, Homo sapiens
  misc_RNA (1)...(19): siRNA sense strand
aaacuaacccucucuucca

SEQ ID NO: 1913284 - RNA, 19 nt, Homo sapiens
  misc_RNA (1)...(19): siRNA sense strand
gagacccuguuuggaaaug

SEQ ID NO: 1913285 - RNA, 19 nt, Homo sapiens
  misc_RNA (1)...(19): siRNA sense strand
caaccuggucugaggaaga

SEQ ID NO: 1913286 - RNA, 19 nt, Homo sapiens
  misc_RNA (1)...(19): siRNA sense strand
acacaucccugcgcccaau

SEQ ID NO: 1913287 - RNA, 19 nt, Homo sapiens
  misc_RNA (1)...(19): siRNA sense strand
ucucugaugugcuccuugu

SEQ ID NO: 1913288 - RNA, 19 nt, Homo sapiens
  misc_RNA (1)...(19): siRNA sense strand
ggacaugcucagagagauc

SEQ ID NO: 1913289 - RNA, 19 nt, Homo sapiens
  misc_RNA (1)...(19): siRNA sense strand
gaagacacagaugaagaug

SEQ ID NO: 1913290 - RNA, 19 nt, Homo sapiens
  misc_RNA (1)...(19): siRNA sense strand
gcugaaggcagaggaguau

SEQ ID NO: 1913291 - RNA, 19 nt, Homo sapiens
  misc_RNA (1)...(19): siRNA sense strand
cagcugagacccuguuugg

SEQ ID NO: 1913292 - RNA, 19 nt, Homo sapiens
  misc_RNA (1)...(19): siRNA sense strand
gggagcuccugacccucua

SEQ ID NO: 1913293 - RNA, 19 nt, Homo sapiens
  misc_RNA (1)...(19): siRNA sense strand
gcagaggaguauguucaac

SEQ ID NO: 1913294 - RNA, 19 nt, Homo sapiens
  misc_RNA (1)...(19): siRNA sense strand
gagucauuccugcgacaua

SEQ ID NO: 1913295 - RNA, 19 nt, Homo sapiens
  misc_RNA (1)...(19): siRNA sense strand
ccagugaugagguggagaa

SEQ ID NO: 1913296 - RNA, 19 nt, Homo sapiens
  misc_RNA (1)...(19): siRNA sense strand
agaagacacagaugaagau

SEQ ID NO: 1913297 - RNA, 19 nt, Homo sapiens
  misc_RNA (1)...(19): siRNA sense strand
acaguggccugaccaucga

SEQ ID NO: 1913298 - RNA, 19 nt, Homo sapiens
  misc_RNA (1)...(19): siRNA sense strand
gggccucuguuccugaaag

SEQ ID NO: 1913299 - RNA, 19 nt, Homo sapiens
  misc_RNA (1)...(19): siRNA sense strand
aaccuggucugaggaagaa

SEQ ID NO: 1913300 - RNA, 19 nt, Homo sapiens
  misc_RNA (1)...(19): siRNA sense strand
gaacagcaagaaacuaacc

SEQ ID NO: 1913301 - RNA, 19 nt, Homo sapiens
  misc_RNA (1)...(19): siRNA sense strand
cgagaacagcaagaaacua

SEQ ID NO: 1913302 - RNA, 19 nt, Homo sapiens
  misc_RNA (1)...(19): siRNA sense strand
gcugauccaccucacugaa

SEQ ID NO: 1913303 - RNA, 19 nt, Homo sapiens
  misc_RNA (1)...(19): siRNA sense strand
agucauuccugcgacauau

SEQ ID NO: 1913304 - RNA, 19 nt, Homo sapiens
  misc_RNA (1)...(19): siRNA sense strand
ggugacagaagacacagau

SEQ ID NO: 1913305 - RNA, 19 nt, Homo sapiens
  misc_RNA (1)...(19): siRNA sense strand
ugaaggcagaggaguaugu

SEQ ID NO: 1913306 - RNA, 19 nt, Homo sapiens
  misc_RNA (1)...(19): siRNA sense strand
gcacuacuggcagacucua

SEQ ID NO: 1913307 - RNA, 19 nt, Homo sapiens
  misc_RNA (1)...(19): siRNA sense strand
ggacugcugauggaagugu

SEQ ID NO: 1913308 - RNA, 19 nt, Homo sapiens
  misc_RNA (1)...(19): siRNA sense strand
cugcacacuuucagcaugu

SEQ ID NO: 1913309 - RNA, 19 nt, Homo sapiens
  misc_RNA (1)...(19): siRNA sense strand
ucugugacuugcuuaucaa

SEQ ID NO: 1913310 - RNA, 19 nt, Homo sapiens
  misc_RNA (1)...(19): siRNA sense strand
gcuccaugcugugcucaag

SEQ ID NO: 1913311 - RNA, 19 nt, Homo sapiens
  misc_RNA (1)...(19): siRNA sense strand
gcccugaaugccaugauug

SEQ ID NO: 1913312 - RNA, 19 nt, Homo sapiens
  misc_RNA (1)...(19): siRNA sense strand
gagaaagcucaagaucaug

SEQ ID NO: 1913313 - RNA, 19 nt, Homo sapiens
  misc_RNA (1)...(19): siRNA sense strand
ugaaagcuggccacacauc

SEQ ID NO: 1913314 - RNA, 19 nt, Homo sapiens
  misc_RNA (1)...(19): siRNA sense strand
ucugaugugcuccuuguga

SEQ ID NO: 1913315 - RNA, 19 nt, Homo sapiens
  misc_RNA (1)...(19): siRNA sense strand
caccagcgcaucaccaagu

SEQ ID NO: 1913316 - RNA, 19 nt, Homo sapiens
  misc_RNA (1)...(19): siRNA sense strand
gaccaucacugacgaguuu

SEQ ID NO: 1913317 - RNA, 19 nt, Homo sapiens
  misc_RNA (1)...(19): siRNA sense strand
gcaccuacaucuacuuuga

SEQ ID NO: 1913318 - RNA, 19 nt, Homo sapiens
  misc_RNA (1)...(19): siRNA sense strand
aaccaaagcuuacagcaaa

SEQ ID NO: 1913319 - RNA, 19 nt, Homo sapiens
  misc_RNA (1)...(19): siRNA sense strand
ggagggagcagcagcagua

SEQ ID NO: 1913320 - RNA, 19 nt, Homo sapiens
  misc_RNA (1)...(19): siRNA sense strand
gaacgaguuucucuacgau

SEQ ID NO: 1913321 - RNA, 19 nt, Homo sapiens
  misc_RNA (1)...(19): siRNA sense strand
ggacgacguugaguacuau

SEQ ID NO: 1913322 - RNA, 19 nt, Homo sapiens
  misc_RNA (1)...(19): siRNA sense strand
ccaacgagaucaaggacaa

SEQ ID NO: 1913323 - RNA, 19 nt, Homo sapiens
  misc_RNA (1)...(19): siRNA sense strand
guaugaggcugaccuaaag

SEQ ID NO: 1913324 - RNA, 19 nt, Homo sapiens
  misc_RNA (1)...(19): siRNA sense strand
ggcagaagcuccacaaugc

SEQ ID NO: 1913325 - RNA, 19 nt, Homo sapiens
  misc_RNA (1)...(19): siRNA sense strand
gaagaagggcgacaaggau

SEQ ID NO: 1913326 - RNA, 19 nt, Homo sapiens
  misc_RNA (1)...(19): siRNA sense strand
gggagcagcagcaguagua

SEQ ID NO: 1913327 - RNA, 19 nt, Homo sapiens
  misc_RNA (1)...(19): siRNA sense strand
ggagcaguuugaagauauu

SEQ ID NO: 1913328 - RNA, 19 nt, Homo sapiens
  misc_RNA (1)...(19): siRNA sense strand
gcacuaaggcacaguaucu

SEQ ID NO: 1913329 - RNA, 19 nt, Homo sapiens
  misc_RNA (1)...(19): siRNA sense strand
ccucugagcuccuugaagu

SEQ ID NO: 1913330 - RNA, 19 nt, Homo sapiens
  misc_RNA (1)...(19): siRNA sense strand
ggaaaacucugaagaugau

SEQ ID NO: 1913331 - RNA, 19 nt, Homo sapiens
  misc_RNA (1)...(19): siRNA sense strand
ggacaagaggcagcuuaua

SEQ ID NO: 1913332 - RNA, 19 nt, Homo sapiens
  misc_RNA (1)...(19): siRNA sense strand
gacaucauccugagcagua

SEQ ID NO: 1913333 - RNA, 19 nt, Homo sapiens
  misc_RNA (1)...(19): siRNA sense strand
gagacacucuucuucaucu

SEQ ID NO: 1913334 - RNA, 19 nt, Homo sapiens
  misc_RNA (1)...(19): siRNA sense strand
gacaagaggcagcuuauag

SEQ ID NO: 1913335 - RNA, 19 nt, Homo sapiens
  misc_RNA (1)...(19): siRNA sense strand
agaggcagcuuauagacaa

SEQ ID NO: 1913336 - RNA, 19 nt, Homo sapiens
  misc_RNA (1)...(19): siRNA sense strand
caaugggccuccacaguuc

SEQ ID NO: 1913337 - RNA, 19 nt, Homo sapiens
  misc_RNA (1)...(19): siRNA sense strand
agaaggagauuaagaagcu

SEQ ID NO: 1913338 - RNA, 19 nt, Homo sapiens
  misc_RNA (1)...(19): siRNA sense strand
gaaggagauuaagaagcua

SEQ ID NO: 1913339 - RNA, 19 nt, Homo sapiens
  misc_RNA (1)...(19): siRNA sense strand
guggagcaguuugaagaua

SEQ ID NO: 1913340 - RNA, 19 nt, Homo sapiens
  misc_RNA (1)...(19): siRNA sense strand
ucaaugggccuccacaguu

SEQ ID NO: 1913341 - RNA, 19 nt, Homo sapiens
  misc_RNA (1)...(19): siRNA sense strand
ccaaggcccuaaagaagca

SEQ ID NO: 1913342 - RNA, 19 nt, Homo sapiens
  misc_RNA (1)...(19): siRNA sense strand
agaauggcgccaccaguua

SEQ ID NO: 1913343 - RNA, 19 nt, Homo sapiens
  misc_RNA (1)...(19): siRNA sense strand
caucagcucuggcauugag

SEQ ID NO: 1913344 - RNA, 19 nt, Homo sapiens
  misc_RNA (1)...(19): siRNA sense strand
gaaggagaaggaagagguu

SEQ ID NO: 1913345 - RNA, 19 nt, Homo sapiens
  misc_RNA (1)...(19): siRNA sense strand
gggaccaaaucaagacaug

SEQ ID NO: 1913346 - RNA, 19 nt, Homo sapiens
  misc_RNA (1)...(19): siRNA sense strand
gagcagggcaccuacaucu

SEQ ID NO: 1913347 - RNA, 19 nt, Homo sapiens
  misc_RNA (1)...(19): siRNA sense strand
gacguugaguacuauguug

SEQ ID NO: 1913348 - RNA, 19 nt, Homo sapiens
  misc_RNA (1)...(19): siRNA sense strand
cuaaagaaggagauuaaga

SEQ ID NO: 1913349 - RNA, 19 nt, Homo sapiens
  misc_RNA (1)...(19): siRNA sense strand
cagccagucuccagccaaa

SEQ ID NO: 1913350 - RNA, 19 nt, Homo sapiens
  misc_RNA (1)...(19): siRNA sense strand
agacauggguagcguccaa

SEQ ID NO: 1913351 - RNA, 19 nt, Homo sapiens
  misc_RNA (1)...(19): siRNA sense strand
ggacaagcgcaaacuccaa

SEQ ID NO: 1913352 - RNA, 19 nt, Homo sapiens
  misc_RNA (1)...(19): siRNA sense strand
cagaauggcgccaccaguu

SEQ ID NO: 1913353 - RNA, 19 nt, Homo sapiens
  misc_RNA (1)...(19): siRNA sense strand
uggagcaguuugaagauau

SEQ ID NO: 1913354 - RNA, 19 nt, Homo sapiens
  misc_RNA (1)...(19): siRNA sense strand
cagccaaggcccuaaagaa

SEQ ID NO: 1913355 - RNA, 19 nt, Homo sapiens
  misc_RNA (1)...(19): siRNA sense strand
gaccuaaagaaggagauua

SEQ ID NO: 1913356 - RNA, 19 nt, Homo sapiens
  misc_RNA (1)...(19): siRNA sense strand
gcagggcaccuacaucuac

SEQ ID NO: 1913357 - RNA, 19 nt, Homo sapiens
  misc_RNA (1)...(19): siRNA sense strand
cggcagagguggcuuugag

SEQ ID NO: 1913358 - RNA, 19 nt, Homo sapiens
  misc_RNA (1)...(19): siRNA sense strand
gcaagaagaagggcgacaa

SEQ ID NO: 1913359 - RNA, 19 nt, Homo sapiens
  misc_RNA (1)...(19): siRNA sense strand
gugcagacacgcaagaaga

SEQ ID NO: 1913360 - RNA, 19 nt, Homo sapiens
  misc_RNA (1)...(19): siRNA sense strand
acaagaggcagcuuauaga

SEQ ID NO: 1913361 - RNA, 19 nt, Homo sapiens
  misc_RNA (1)...(19): siRNA sense strand
aggcugaccuaaagaagga

SEQ ID NO: 1913362 - RNA, 19 nt, Homo sapiens
  misc_RNA (1)...(19): siRNA sense strand
caagaucaaggacgacguu

SEQ ID NO: 1913363 - RNA, 19 nt, Homo sapiens
  misc_RNA (1)...(19): siRNA sense strand
gguagauccugcccagaag

SEQ ID NO: 1913364 - RNA, 19 nt, Homo sapiens
  misc_RNA (1)...(19): siRNA sense strand
ccacauggaggaugagauc

SEQ ID NO: 1913365 - RNA, 19 nt, Homo sapiens
  misc_RNA (1)...(19): siRNA sense strand
gauaagcaggaccggauug

SEQ ID NO: 1913366 - RNA, 19 nt, Homo sapiens
  misc_RNA (1)...(19): siRNA sense strand
gacaaccgcaagcucauug

SEQ ID NO: 1913367 - RNA, 19 nt, Homo sapiens
  misc_RNA (1)...(19): siRNA sense strand
gggcaccuacaucuacuuu

SEQ ID NO: 1913368 - RNA, 19 nt, Homo sapiens
  misc_RNA (1)...(19): siRNA sense strand
gcguggagcaguuugaaga

SEQ ID NO: 1913369 - RNA, 19 nt, Homo sapiens
  misc_RNA (1)...(19): siRNA sense strand
acgaguuucucuacgauga

SEQ ID NO: 1913370 - RNA, 19 nt, Homo sapiens
  misc_RNA (1)...(19): siRNA sense strand
caaacuccaaggugagauu

SEQ ID NO: 1913371 - RNA, 19 nt, Homo sapiens
  misc_RNA (1)...(19): siRNA sense strand
aggacgacguugaguacua

SEQ ID NO: 1913372 - RNA, 19 nt, Homo sapiens
  misc_RNA (1)...(19): siRNA sense strand
aagaagggcgacaaggaua

SEQ ID NO: 1913373 - RNA, 19 nt, Homo sapiens
  misc_RNA (1)...(19): siRNA sense strand
uugaagauauuuggcagaa

SEQ ID NO: 1913374 - RNA, 19 nt, Homo sapiens
  misc_RNA (1)...(19): siRNA sense strand
agaagaagggcgacaagga

SEQ ID NO: 1913375 - RNA, 19 nt, Homo sapiens
  misc_RNA (1)...(19): siRNA sense strand
gcaccacuccuggcaacaa

SEQ ID NO: 1913376 - RNA, 19 nt, Homo sapiens
  misc_RNA (1)...(19): siRNA sense strand
cauggaggaugagaucuuc

SEQ ID NO: 1913377 - RNA, 19 nt, Homo sapiens
  misc_RNA (1)...(19): siRNA sense strand
caaggacgacguugaguac

SEQ ID NO: 1913378 - RNA, 19 nt, Homo sapiens
  misc_RNA (1)...(19): siRNA sense strand
aaaccaaagcuuacagcaa

SEQ ID NO: 1913379 - RNA, 19 nt, Homo sapiens
  misc_RNA (1)...(19): siRNA sense strand
aggaugagaucuucaacca

SEQ ID NO: 1913380 - RNA, 19 nt, Homo sapiens
  misc_RNA (1)...(19): siRNA sense strand
ggaccaguuugagagugaa

SEQ ID NO: 1913381 - RNA, 19 nt, Homo sapiens
  misc_RNA (1)...(19): siRNA sense strand
acaugcagguggaccaguu

SEQ ID NO: 1913382 - RNA, 19 nt, Homo sapiens
  misc_RNA (1)...(19): siRNA sense strand
ccaacgcgaaccagaaaga

SEQ ID NO: 1913383 - RNA, 19 nt, Homo sapiens
  misc_RNA (1)...(19): siRNA sense strand
ccgagacacucuucuucau

SEQ ID NO: 1913384 - RNA, 19 nt, Homo sapiens
  misc_RNA (1)...(19): siRNA sense strand
gaccgagacacucuucuuc

SEQ ID NO: 1913385 - RNA, 19 nt, Homo sapiens
  misc_RNA (1)...(19): siRNA sense strand
cggacacuguggaauucua

SEQ ID NO: 1913386 - RNA, 19 nt, Homo sapiens
  misc_RNA (1)...(19): siRNA sense strand
ggauaagcaggaccggauu

SEQ ID NO: 1913387 - RNA, 19 nt, Homo sapiens
  misc_RNA (1)...(19): siRNA sense strand
gcugagggaccaaaucaag

SEQ ID NO: 1913388 - RNA, 19 nt, Homo sapiens
  misc_RNA (1)...(19): siRNA sense strand
cuacaucuacuuugacuac

SEQ ID NO: 1913389 - RNA, 19 nt, Homo sapiens
  misc_RNA (1)...(19): siRNA sense strand
gcugucagaggugaacaua

SEQ ID NO: 1913390 - RNA, 19 nt, Homo sapiens
  misc_RNA (1)...(19): siRNA sense strand
acagccacauggaggauga

SEQ ID NO: 1913391 - RNA, 19 nt, Homo sapiens
  misc_RNA (1)...(19): siRNA sense strand
uggaccaguuugagaguga

SEQ ID NO: 1913392 - RNA, 19 nt, Homo sapiens
  misc_RNA (1)...(19): siRNA sense strand
acgcccagcuucagugaug

SEQ ID NO: 1913393 - RNA, 19 nt, Homo sapiens
  misc_RNA (1)...(19): siRNA sense strand
caacgcccagcuucaguga

SEQ ID NO: 1913394 - RNA, 19 nt, Homo sapiens
  misc_RNA (1)...(19): siRNA sense strand
gaauggcgccaccaguuac

SEQ ID NO: 1913395 - RNA, 19 nt, Homo sapiens
  misc_RNA (1)...(19): siRNA sense strand
ugaagcggcacaucgagaa

SEQ ID NO: 1913396 - RNA, 19 nt, Homo sapiens
  misc_RNA (1)...(19): siRNA sense strand
agaagggcgacaaggauaa

SEQ ID NO: 1913397 - RNA, 19 nt, Homo sapiens
  misc_RNA (1)...(19): siRNA sense strand
caaugacuccauccucguu

SEQ ID NO: 1913398 - RNA, 19 nt, Homo sapiens
  misc_RNA (1)...(19): siRNA sense strand
aguaugaggcugaccuaaa

SEQ ID NO: 1913399 - RNA, 19 nt, Homo sapiens
  misc_RNA (1)...(19): siRNA sense strand
ggcgauuccacaccaagua

SEQ ID NO: 1913400 - RNA, 19 nt, Homo sapiens
  misc_RNA (1)...(19): siRNA sense strand
caacgcgaaccagaaagaa

SEQ ID NO: 1913401 - RNA, 19 nt, Homo sapiens
  misc_RNA (1)...(19): siRNA sense strand
gcaguuugaagauauuugg

SEQ ID NO: 1913402 - RNA, 19 nt, Homo sapiens
  misc_RNA (1)...(19): siRNA sense strand
cgacguugaguacuauguu

SEQ ID NO: 1913403 - RNA, 19 nt, Homo sapiens
  misc_RNA (1)...(19): siRNA sense strand
caucgacacgcucaacaug

SEQ ID NO: 1913404 - RNA, 19 nt, Homo sapiens
  misc_RNA (1)...(19): siRNA sense strand
gaggagcccaagaccauca

SEQ ID NO: 1913405 - RNA, 19 nt, Homo sapiens
  misc_RNA (1)...(19): siRNA sense strand
ccacaccaaguacaugaug

SEQ ID NO: 1913406 - RNA, 19 nt, Homo sapiens
  misc_RNA (1)...(19): siRNA sense strand
gaagcagucauggcgauuc

SEQ ID NO: 1913407 - RNA, 19 nt, Homo sapiens
  misc_RNA (1)...(19): siRNA sense strand
gcagccaaggcccuaaaga

SEQ ID NO: 1913408 - RNA, 19 nt, Homo sapiens
  misc_RNA (1)...(19): siRNA sense strand
uggcagaagcuccacaaug

SEQ ID NO: 1913409 - RNA, 19 nt, Homo sapiens
  misc_RNA (1)...(19): siRNA sense strand
caccacuccuggcaacaau

SEQ ID NO: 1913410 - RNA, 19 nt, Homo sapiens
  misc_RNA (1)...(19): siRNA sense strand
gagcaguuugaagauauuu

SEQ ID NO: 1913411 - RNA, 19 nt, Homo sapiens
  misc_RNA (1)...(19): siRNA sense strand
cgaccgagacacucuucuu

SEQ ID NO: 1913412 - RNA, 19 nt, Homo sapiens
  misc_RNA (1)...(19): siRNA sense strand
ugucagaggugaacauacc

SEQ ID NO: 1913413 - RNA, 19 nt, Homo sapiens
  misc_RNA (1)...(19): siRNA sense strand
gcagaagcuccacaaugca

SEQ ID NO: 1913414 - RNA, 19 nt, Homo sapiens
  misc_RNA (1)...(19): siRNA sense strand
caagaagaagggcgacaag

SEQ ID NO: 1913415 - RNA, 19 nt, Homo sapiens
  misc_RNA (1)...(19): siRNA sense strand
aguacuauguugacucauc

SEQ ID NO: 1913416 - RNA, 19 nt, Homo sapiens
  misc_RNA (1)...(19): siRNA sense strand
uaacagggauuaaagaaga

SEQ ID NO: 1913417 - RNA, 19 nt, Homo sapiens
  misc_RNA (1)...(19): siRNA sense strand
caaaugcacugaaguuuua

SEQ ID NO: 1913418 - RNA, 19 nt, Homo sapiens
  misc_RNA (1)...(19): siRNA sense strand
gaaaguggaagcugaguuu

SEQ ID NO: 1913419 - RNA, 19 nt, Homo sapiens
  misc_RNA (1)...(19): siRNA sense strand
cuccagaaauuguuaguua

SEQ ID NO: 1913420 - RNA, 19 nt, Homo sapiens
  misc_RNA (1)...(19): siRNA sense strand
ccaagcagcaguaguuaua

SEQ ID NO: 1913421 - RNA, 19 nt, Homo sapiens
  misc_RNA (1)...(19): siRNA sense strand
gaaaugguaacagggauua

SEQ ID NO: 1913422 - RNA, 19 nt, Homo sapiens
  misc_RNA (1)...(19): siRNA sense strand
ggguagaauuuccugauuu

SEQ ID NO: 1913423 - RNA, 19 nt, Homo sapiens
  misc_RNA (1)...(19): siRNA sense strand
gaugaaagcaauuaugaug

SEQ ID NO: 1913424 - RNA, 19 nt, Homo sapiens
  misc_RNA (1)...(19): siRNA sense strand
uguaauaucugugcaaaga

SEQ ID NO: 1913425 - RNA, 19 nt, Homo sapiens
  misc_RNA (1)...(19): siRNA sense strand
gaacugagagauggugaaa

SEQ ID NO: 1913426 - RNA, 19 nt, Homo sapiens
  misc_RNA (1)...(19): siRNA sense strand
caugugacuucuuguacua

SEQ ID NO: 1913427 - RNA, 19 nt, Homo sapiens
  misc_RNA (1)...(19): siRNA sense strand
guagacaaaugcacugaag

SEQ ID NO: 1913428 - RNA, 19 nt, Homo sapiens
  misc_RNA (1)...(19): siRNA sense strand
gggaaacccuacaguccuu

SEQ ID NO: 1913429 - RNA, 19 nt, Homo sapiens
  misc_RNA (1)...(19): siRNA sense strand
ucagagagaucggcacaug

SEQ ID NO: 1913430 - RNA, 19 nt, Homo sapiens
  misc_RNA (1)...(19): siRNA sense strand
gaugaacccaagaguguuu

SEQ ID NO: 1913431 - RNA, 19 nt, Homo sapiens
  misc_RNA (1)...(19): siRNA sense strand
gcaaaggcugagcagaaua

SEQ ID NO: 1913432 - RNA, 19 nt, Homo sapiens
  misc_RNA (1)...(19): siRNA sense strand
ugaaagcaauuaugaugag

SEQ ID NO: 1913433 - RNA, 19 nt, Homo sapiens
  misc_RNA (1)...(19): siRNA sense strand
uacaggacgucuaguaaug

SEQ ID NO: 1913434 - RNA, 19 nt, Homo sapiens
  misc_RNA (1)...(19): siRNA sense strand
guaaugcccgcuccagaaa

SEQ ID NO: 1913435 - RNA, 19 nt, Homo sapiens
  misc_RNA (1)...(19): siRNA sense strand
ucaccaagcagcaguaguu

SEQ ID NO: 1913436 - RNA, 19 nt, Homo sapiens
  misc_RNA (1)...(19): siRNA sense strand
gguaacagggauuaaagaa

SEQ ID NO: 1913437 - RNA, 19 nt, Homo sapiens
  misc_RNA (1)...(19): siRNA sense strand
gguagaauuuccugauuuu

SEQ ID NO: 1913438 - RNA, 19 nt, Homo sapiens
  misc_RNA (1)...(19): siRNA sense strand
gaauacaacugaggcuaac

SEQ ID NO: 1913439 - RNA, 19 nt, Homo sapiens
  misc_RNA (1)...(19): siRNA sense strand
acgaauaccugcccagcaa

SEQ ID NO: 1913440 - RNA, 19 nt, Homo sapiens
  misc_RNA (1)...(19): siRNA sense strand
agacaaaugcacugaaguu

SEQ ID NO: 1913441 - RNA, 19 nt, Homo sapiens
  misc_RNA (1)...(19): siRNA sense strand
ggucugcgguaagaaauuc

SEQ ID NO: 1913442 - RNA, 19 nt, Homo sapiens
  misc_RNA (1)...(19): siRNA sense strand
gugagaauauugaaauggu

SEQ ID NO: 1913443 - RNA, 19 nt, Homo sapiens
  misc_RNA (1)...(19): siRNA sense strand
gacaaaugcacugaaguuu

SEQ ID NO: 1913444 - RNA, 19 nt, Homo sapiens
  misc_RNA (1)...(19): siRNA sense strand
gcacacaaagccguucuug

SEQ ID NO: 1913445 - RNA, 19 nt, Homo sapiens
  misc_RNA (1)...(19): siRNA sense strand
gaaucuaauugggcacaga

SEQ ID NO: 1913446 - RNA, 19 nt, Homo sapiens
  misc_RNA (1)...(19): siRNA sense strand
ugaacaggcugaugaaagc

SEQ ID NO: 1913447 - RNA, 19 nt, Homo sapiens
  misc_RNA (1)...(19): siRNA sense strand
cuacaguccuuugucagaa

SEQ ID NO: 1913448 - RNA, 19 nt, Homo sapiens
  misc_RNA (1)...(19): siRNA sense strand
gcgccagcaaggacaauua

SEQ ID NO: 1913449 - RNA, 19 nt, Homo sapiens
  misc_RNA (1)...(19): siRNA sense strand
gugaugaacccaagagugu

SEQ ID NO: 1913450 - RNA, 19 nt, Homo sapiens
  misc_RNA (1)...(19): siRNA sense strand
gcaugugacuucuuguacu

SEQ ID NO: 1913451 - RNA, 19 nt, Homo sapiens
  misc_RNA (1)...(19): siRNA sense strand
gcuguauccuugucagugu

SEQ ID NO: 1913452 - RNA, 19 nt, Homo sapiens
  misc_RNA (1)...(19): siRNA sense strand
gcagcagguuacagugaga

SEQ ID NO: 1913453 - RNA, 19 nt, Homo sapiens
  misc_RNA (1)...(19): siRNA sense strand
aagcugaguuugaugaaca

SEQ ID NO: 1913454 - RNA, 19 nt, Homo sapiens
  misc_RNA (1)...(19): siRNA sense strand
ggaggaggacuuccacauc

SEQ ID NO: 1913455 - RNA, 19 nt, Homo sapiens
  misc_RNA (1)...(19): siRNA sense strand
gcagguuacagugagaaua

SEQ ID NO: 1913456 - RNA, 19 nt, Homo sapiens
  misc_RNA (1)...(19): siRNA sense strand
uaugugacgucuccauugu

SEQ ID NO: 1913457 - RNA, 19 nt, Homo sapiens
  misc_RNA (1)...(19): siRNA sense strand
ugugacgucuccauuguug

SEQ ID NO: 1913458 - RNA, 19 nt, Homo sapiens
  misc_RNA (1)...(19): siRNA sense strand
uaaagccguaugaguguaa

SEQ ID NO: 1913459 - RNA, 19 nt, Homo sapiens
  misc_RNA (1)...(19): siRNA sense strand
uauacaggacgucuaguaa

SEQ ID NO: 1913460 - RNA, 19 nt, Homo sapiens
  misc_RNA (1)...(19): siRNA sense strand
cggguagaauuuccugauu

SEQ ID NO: 1913461 - RNA, 19 nt, Homo sapiens
  misc_RNA (1)...(19): siRNA sense strand
uauaauggccugguagaga

SEQ ID NO: 1913462 - RNA, 19 nt, Homo sapiens
  misc_RNA (1)...(19): siRNA sense strand
agaauacaacugaggcuaa

SEQ ID NO: 1913463 - RNA, 19 nt, Homo sapiens
  misc_RNA (1)...(19): siRNA sense strand
gugcaaagagguuuaugug

SEQ ID NO: 1913464 - RNA, 19 nt, Homo sapiens
  misc_RNA (1)...(19): siRNA sense strand
guaugaguguaauaucugu

SEQ ID NO: 1913465 - RNA, 19 nt, Homo sapiens
  misc_RNA (1)...(19): siRNA sense strand
gaagaggagagcaccaaag

SEQ ID NO: 1913466 - RNA, 19 nt, Homo sapiens
  misc_RNA (1)...(19): siRNA sense strand
acauucuccuaucuaguua

SEQ ID NO: 1913467 - RNA, 19 nt, Homo sapiens
  misc_RNA (1)...(19): siRNA sense strand
ucaacaccgugcagacaga

SEQ ID NO: 1913468 - RNA, 19 nt, Homo sapiens
  misc_RNA (1)...(19): siRNA sense strand
ccagauguggcauguggua

SEQ ID NO: 1913469 - RNA, 19 nt, Homo sapiens
  misc_RNA (1)...(19): siRNA sense strand
aaugcccgcuccagaaauu

SEQ ID NO: 1913470 - RNA, 19 nt, Homo sapiens
  misc_RNA (1)...(19): siRNA sense strand
gaacauucuccuaucuagu

SEQ ID NO: 1913471 - RNA, 19 nt, Homo sapiens
  misc_RNA (1)...(19): siRNA sense strand
ucacaagagucagagagau

SEQ ID NO: 1913472 - RNA, 19 nt, Homo sapiens
  misc_RNA (1)...(19): siRNA sense strand
cagguuacagugagaauau

SEQ ID NO: 1913473 - RNA, 19 nt, Homo sapiens
  misc_RNA (1)...(19): siRNA sense strand
acacaaagccguucuugcu

SEQ ID NO: 1913474 - RNA, 19 nt, Homo sapiens
  misc_RNA (1)...(19): siRNA sense strand
ccaaagacgagcugucauc

SEQ ID NO: 1913475 - RNA, 19 nt, Homo sapiens
  misc_RNA (1)...(19): siRNA sense strand
ugucagaagcuaaaucaug

SEQ ID NO: 1913476 - RNA, 19 nt, Homo sapiens
  misc_RNA (1)...(19): siRNA sense strand
ggcaugugguagacaaaug

SEQ ID NO: 1913477 - RNA, 19 nt, Homo sapiens
  misc_RNA (1)...(19): siRNA sense strand
gcaagcuuccuccagaugu

SEQ ID NO: 1913478 - RNA, 19 nt, Homo sapiens
  misc_RNA (1)...(19): siRNA sense strand
ccagcaaggacaauuaugu

SEQ ID NO: 1913479 - RNA, 19 nt, Homo sapiens
  misc_RNA (1)...(19): siRNA sense strand
aagcagcaguaguuauaau

SEQ ID NO: 1913480 - RNA, 19 nt, Homo sapiens
  misc_RNA (1)...(19): siRNA sense strand
gaccaccagucaccaagca

SEQ ID NO: 1913481 - RNA, 19 nt, Homo sapiens
  misc_RNA (1)...(19): siRNA sense strand
caagcuuccuccagaugug

SEQ ID NO: 1913482 - RNA, 19 nt, Homo sapiens
  misc_RNA (1)...(19): siRNA sense strand
gagagauggugaaaaugaa

SEQ ID NO: 1913483 - RNA, 19 nt, Homo sapiens
  misc_RNA (1)...(19): siRNA sense strand
ggaagcugaguuugaugaa

SEQ ID NO: 1913484 - RNA, 19 nt, Homo sapiens
  misc_RNA (1)...(19): siRNA sense strand
gaagcugaguuugaugaac

SEQ ID NO: 1913485 - RNA, 19 nt, Homo sapiens
  misc_RNA (1)...(19): siRNA sense strand
gaaaauucacacaggcaua

SEQ ID NO: 1913486 - RNA, 19 nt, Homo sapiens
  misc_RNA (1)...(19): siRNA sense strand
cagugagaauauugaaaug

SEQ ID NO: 1913487 - RNA, 19 nt, Homo sapiens
  misc_RNA (1)...(19): siRNA sense strand
cugaugaaagcaauuauga

SEQ ID NO: 1913488 - RNA, 19 nt, Homo sapiens
  misc_RNA (1)...(19): siRNA sense strand
ucuccuaucuaguuauaca

SEQ ID NO: 1913489 - RNA, 19 nt, Homo sapiens
  misc_RNA (1)...(19): siRNA sense strand
caaaggcugagcagaauac

SEQ ID NO: 1913490 - RNA, 19 nt, Homo sapiens
  misc_RNA (1)...(19): siRNA sense strand
augaugagcagguggauuu

SEQ ID NO: 1913491 - RNA, 19 nt, Homo sapiens
  misc_RNA (1)...(19): siRNA sense strand
aagaggagagcaccaaaga

SEQ ID NO: 1913492 - RNA, 19 nt, Homo sapiens
  misc_RNA (1)...(19): siRNA sense strand
uuauacaggacgucuagua

SEQ ID NO: 1913493 - RNA, 19 nt, Homo sapiens
  misc_RNA (1)...(19): siRNA sense strand
caagcagcaguaguuauaa

SEQ ID NO: 1913494 - RNA, 19 nt, Homo sapiens
  misc_RNA (1)...(19): siRNA sense strand
ugcaaaggcugagcagaau

SEQ ID NO: 1913495 - RNA, 19 nt, Homo sapiens
  misc_RNA (1)...(19): siRNA sense strand
aacauucuccuaucuaguu

SEQ ID NO: 1913496 - RNA, 19 nt, Homo sapiens
  misc_RNA (1)...(19): siRNA sense strand
gagcaugcaccucggucuu

SEQ ID NO: 1913497 - RNA, 19 nt, Homo sapiens
  misc_RNA (1)...(19): siRNA sense strand
gcugaugaaagcaauuaug

SEQ ID NO: 1913498 - RNA, 19 nt, Homo sapiens
  misc_RNA (1)...(19): siRNA sense strand
gaugaacaggcugaugaaa

SEQ ID NO: 1913499 - RNA, 19 nt, Homo sapiens
  misc_RNA (1)...(19): siRNA sense strand
cagcaagcccagcaucaug

SEQ ID NO: 1913500 - RNA, 19 nt, Homo sapiens
  misc_RNA (1)...(19): siRNA sense strand
ucccaaagcccaagaacug

SEQ ID NO: 1913501 - RNA, 19 nt, Homo sapiens
  misc_RNA (1)...(19): siRNA sense strand
cagcaaggacaauuaugug

SEQ ID NO: 1913502 - RNA, 19 nt, Homo sapiens
  misc_RNA (1)...(19): siRNA sense strand
gaaacccuacaguccuuug

SEQ ID NO: 1913503 - RNA, 19 nt, Homo sapiens
  misc_RNA (1)...(19): siRNA sense strand
gcccaagaacugagagaug

SEQ ID NO: 1913504 - RNA, 19 nt, Homo sapiens
  misc_RNA (1)...(19): siRNA sense strand
augagcagguggauuucua

SEQ ID NO: 1913505 - RNA, 19 nt, Homo sapiens
  misc_RNA (1)...(19): siRNA sense strand
ccguaugaguguaauaucu

SEQ ID NO: 1913506 - RNA, 19 nt, Homo sapiens
  misc_RNA (1)...(19): siRNA sense strand
auacaacugaggcuaacua

SEQ ID NO: 1913507 - RNA, 19 nt, Homo sapiens
  misc_RNA (1)...(19): siRNA sense strand
cggcaugugacuucuugua

SEQ ID NO: 1913508 - RNA, 19 nt, Homo sapiens
  misc_RNA (1)...(19): siRNA sense strand
caccaagcagcaguaguua

SEQ ID NO: 1913509 - RNA, 19 nt, Homo sapiens
  misc_RNA (1)...(19): siRNA sense strand
guaacagggauuaaagaag

SEQ ID NO: 1913510 - RNA, 19 nt, Homo sapiens
  misc_RNA (1)...(19): siRNA sense strand
gaaccagcagcgccagcaa

SEQ ID NO: 1913511 - RNA, 19 nt, Homo sapiens
  misc_RNA (1)...(19): siRNA sense strand
caaagcccaagaacugaga

SEQ ID NO: 1913512 - RNA, 19 nt, Homo sapiens
  misc_RNA (1)...(19): siRNA sense strand
acccaagaguguuugagaa

SEQ ID NO: 1913513 - RNA, 19 nt, Homo sapiens
  misc_RNA (1)...(19): siRNA sense strand
uaguuauaauggccuggua

SEQ ID NO: 1913514 - RNA, 19 nt, Homo sapiens
  misc_RNA (1)...(19): siRNA sense strand
auaaagccguaugagugua

SEQ ID NO: 1913515 - RNA, 19 nt, Homo sapiens
  misc_RNA (1)...(19): siRNA sense strand
caccaaagacgagcuguca

SEQ ID NO: 1913516 - RNA, 19 nt, Homo sapiens
  misc_RNA (1)...(19): siRNA sense strand
gcaagaagcuauuguacuu

SEQ ID NO: 1913517 - RNA, 19 nt, Homo sapiens
  misc_RNA (1)...(19): siRNA sense strand
ggaagaaaguuaacgauau

SEQ ID NO: 1913518 - RNA, 19 nt, Homo sapiens
  misc_RNA (1)...(19): siRNA sense strand
ugauaaagcugagacguua

SEQ ID NO: 1913519 - RNA, 19 nt, Homo sapiens
  misc_RNA (1)...(19): siRNA sense strand
gcugagacguuacaacaaa

SEQ ID NO: 1913520 - RNA, 19 nt, Homo sapiens
  misc_RNA (1)...(19): siRNA sense strand
uagaagaccuggaacaaga

SEQ ID NO: 1913521 - RNA, 19 nt, Homo sapiens
  misc_RNA (1)...(19): siRNA sense strand
gcagauggaugacuuagag

SEQ ID NO: 1913522 - RNA, 19 nt, Homo sapiens
  misc_RNA (1)...(19): siRNA sense strand
gagguaauauccuuaagau

SEQ ID NO: 1913523 - RNA, 19 nt, Homo sapiens
  misc_RNA (1)...(19): siRNA sense strand
gccuuuaccucaagcuuua

SEQ ID NO: 1913524 - RNA, 19 nt, Homo sapiens
  misc_RNA (1)...(19): siRNA sense strand
gcugggaaguguuaaagaa

SEQ ID NO: 1913525 - RNA, 19 nt, Homo sapiens
  misc_RNA (1)...(19): siRNA sense strand
caacuugucacuuaaagaa

SEQ ID NO: 1913526 - RNA, 19 nt, Homo sapiens
  misc_RNA (1)...(19): siRNA sense strand
gugggaagcugacuuggaa

SEQ ID NO: 1913527 - RNA, 19 nt, Homo sapiens
  misc_RNA (1)...(19): siRNA sense strand
ucccucaacuugucacuua

SEQ ID NO: 1913528 - RNA, 19 nt, Homo sapiens
  misc_RNA (1)...(19): siRNA sense strand
gaaacaagugugaaggaaa

SEQ ID NO: 1913529 - RNA, 19 nt, Homo sapiens
  misc_RNA (1)...(19): siRNA sense strand
cgaggagauuagaucauua

SEQ ID NO: 1913530 - RNA, 19 nt, Homo sapiens
  misc_RNA (1)...(19): siRNA sense strand
ggaggcagauggagguaau

SEQ ID NO: 1913531 - RNA, 19 nt, Homo sapiens
  misc_RNA (1)...(19): siRNA sense strand
gacguuacaacaaagauua

SEQ ID NO: 1913532 - RNA, 19 nt, Homo sapiens
  misc_RNA (1)...(19): siRNA sense strand
gaggagauuagaucauuaa

SEQ ID NO: 1913533 - RNA, 19 nt, Homo sapiens
  misc_RNA (1)...(19): siRNA sense strand
cuuggaagcuugucgauug

SEQ ID NO: 1913534 - RNA, 19 nt, Homo sapiens
  misc_RNA (1)...(19): siRNA sense strand
ccaggagacugccuaugaa

SEQ ID NO: 1913535 - RNA, 19 nt, Homo sapiens
  misc_RNA (1)...(19): siRNA sense strand
gggacugccugcugagaaa

SEQ ID NO: 1913536 - RNA, 19 nt, Homo sapiens
  misc_RNA (1)...(19): siRNA sense strand
aaucgaagcucuccaagca

SEQ ID NO: 1913537 - RNA, 19 nt, Homo sapiens
  misc_RNA (1)...(19): siRNA sense strand
gaagauuacaacagacuga

SEQ ID NO: 1913538 - RNA, 19 nt, Homo sapiens
  misc_RNA (1)...(19): siRNA sense strand
aagaugcaguugagaauga

SEQ ID NO: 1913539 - RNA, 19 nt, Homo sapiens
  misc_RNA (1)...(19): siRNA sense strand
caaaaugcaugccauauca

SEQ ID NO: 1913540 - RNA, 19 nt, Homo sapiens
  misc_RNA (1)...(19): siRNA sense strand
caguugagaaugaugauua

SEQ ID NO: 1913541 - RNA, 19 nt, Homo sapiens
  misc_RNA (1)...(19): siRNA sense strand
ccgaggagauuagaucauu

SEQ ID NO: 1913542 - RNA, 19 nt, Homo sapiens
  misc_RNA (1)...(19): siRNA sense strand
agacgagacuggcuucuuc

SEQ ID NO: 1913543 - RNA, 19 nt, Homo sapiens
  misc_RNA (1)...(19): siRNA sense strand
gcagcacccugaggaagaa

SEQ ID NO: 1913544 - RNA, 19 nt, Homo sapiens
  misc_RNA (1)...(19): siRNA sense strand
ggaagaugcaguugagaau

SEQ ID NO: 1913545 - RNA, 19 nt, Homo sapiens
  misc_RNA (1)...(19): siRNA sense strand
acacagcaauccacaguca

SEQ ID NO: 1913546 - RNA, 19 nt, Homo sapiens
  misc_RNA (1)...(19): siRNA sense strand
ugaaacaagugugaaggaa

SEQ ID NO: 1913547 - RNA, 19 nt, Homo sapiens
  misc_RNA (1)...(19): siRNA sense strand
ggagguaauauccuuaaga

SEQ ID NO: 1913548 - RNA, 19 nt, Homo sapiens
  misc_RNA (1)...(19): siRNA sense strand
ugacaugcauucuuuacca

SEQ ID NO: 1913549 - RNA, 19 nt, Homo sapiens
  misc_RNA (1)...(19): siRNA sense strand
ggagacugccuaugaaaca

SEQ ID NO: 1913550 - RNA, 19 nt, Homo sapiens
  misc_RNA (1)...(19): siRNA sense strand
ggaaauagaggagcaagag

SEQ ID NO: 1913551 - RNA, 19 nt, Homo sapiens
  misc_RNA (1)...(19): siRNA sense strand
agaaaagugugaagacaua

SEQ ID NO: 1913552 - RNA, 19 nt, Homo sapiens
  misc_RNA (1)...(19): siRNA sense strand
ugaaguacauggaaacacu

SEQ ID NO: 1913553 - RNA, 19 nt, Homo sapiens
  misc_RNA (1)...(19): siRNA sense strand
guacuuggaagaucaacuu

SEQ ID NO: 1913554 - RNA, 19 nt, Homo sapiens
  misc_RNA (1)...(19): siRNA sense strand
gugaagacauaggcaagaa

SEQ ID NO: 1913555 - RNA, 19 nt, Homo sapiens
  misc_RNA (1)...(19): siRNA sense strand
caacagcugagaagggaaa

SEQ ID NO: 1913556 - RNA, 19 nt, Homo sapiens
  misc_RNA (1)...(19): siRNA sense strand
gaagguauuggaagaaugg

SEQ ID NO: 1913557 - RNA, 19 nt, Homo sapiens
  misc_RNA (1)...(19): siRNA sense strand
aaacaagugugaaggaaaa

SEQ ID NO: 1913558 - RNA, 19 nt, Homo sapiens
  misc_RNA (1)...(19): siRNA sense strand
cagcagaguugaguagcaa

SEQ ID NO: 1913559 - RNA, 19 nt, Homo sapiens
  misc_RNA (1)...(19): siRNA sense strand
gcaauccacagucaugaug

SEQ ID NO: 1913560 - RNA, 19 nt, Homo sapiens
  misc_RNA (1)...(19): siRNA sense strand
ucaggaagaugcaguugag

SEQ ID NO: 1913561 - RNA, 19 nt, Homo sapiens
  misc_RNA (1)...(19): siRNA sense strand
aaagaaaucacuacuaagg

SEQ ID NO: 1913562 - RNA, 19 nt, Homo sapiens
  misc_RNA (1)...(19): siRNA sense strand
gaagcuauuguacuuggaa

SEQ ID NO: 1913563 - RNA, 19 nt, Homo sapiens
  misc_RNA (1)...(19): siRNA sense strand
gaagaugcaguugagaaug

SEQ ID NO: 1913564 - RNA, 19 nt, Homo sapiens
  misc_RNA (1)...(19): siRNA sense strand
gagacugccuaugaaacaa

SEQ ID NO: 1913565 - RNA, 19 nt, Homo sapiens
  misc_RNA (1)...(19): siRNA sense strand
gauuacaacagacugagaa

SEQ ID NO: 1913566 - RNA, 19 nt, Homo sapiens
  misc_RNA (1)...(19): siRNA sense strand
gggaaguguuaaagaagau

SEQ ID NO: 1913567 - RNA, 19 nt, Homo sapiens
  misc_RNA (1)...(19): siRNA sense strand
gagccuccaggaaagaaua

SEQ ID NO: 1913568 - RNA, 19 nt, Homo sapiens
  misc_RNA (1)...(19): siRNA sense strand
ggccucagccggucagauu

SEQ ID NO: 1913569 - RNA, 19 nt, Homo sapiens
  misc_RNA (1)...(19): siRNA sense strand
gaaaaucagccugcacuuu

SEQ ID NO: 1913570 - RNA, 19 nt, Homo sapiens
  misc_RNA (1)...(19): siRNA sense strand
aaaggaggcgggagaaaga

SEQ ID NO: 1913571 - RNA, 19 nt, Homo sapiens
  misc_RNA (1)...(19): siRNA sense strand
gaaccucggcgcacuuugg

SEQ ID NO: 1913572 - RNA, 19 nt, Homo sapiens
  misc_RNA (1)...(19): siRNA sense strand
gaaggaaaauacuaugaag

SEQ ID NO: 1913573 - RNA, 19 nt, Homo sapiens
  misc_RNA (1)...(19): siRNA sense strand
caacagacugagaagagaa

SEQ ID NO: 1913574 - RNA, 19 nt, Homo sapiens
  misc_RNA (1)...(19): siRNA sense strand
gauggagguaauauccuua

SEQ ID NO: 1913575 - RNA, 19 nt, Homo sapiens
  misc_RNA (1)...(19): siRNA sense strand
gcaaaggaggcgggagaaa

SEQ ID NO: 1913576 - RNA, 19 nt, Homo sapiens
  misc_RNA (1)...(19): siRNA sense strand
gcuggaagccaaagaucaa

SEQ ID NO: 1913577 - RNA, 19 nt, Homo sapiens
  misc_RNA (1)...(19): siRNA sense strand
uaaaaucccucaacuuguc

SEQ ID NO: 1913578 - RNA, 19 nt, Homo sapiens
  misc_RNA (1)...(19): siRNA sense strand
ugggaaguguuaaagaaga

SEQ ID NO: 1913579 - RNA, 19 nt, Homo sapiens
  misc_RNA (1)...(19): siRNA sense strand
ggagauuagaucauuaaca

SEQ ID NO: 1913580 - RNA, 19 nt, Homo sapiens
  misc_RNA (1)...(19): siRNA sense strand
ucaaggcagccagcucuua

SEQ ID NO: 1913581 - RNA, 19 nt, Homo sapiens
  misc_RNA (1)...(19): siRNA sense strand
agaggcagauggaugacuu

SEQ ID NO: 1913582 - RNA, 19 nt, Homo sapiens
  misc_RNA (1)...(19): siRNA sense strand
gagcgugacaugcauucuu

SEQ ID NO: 1913583 - RNA, 19 nt, Homo sapiens
  misc_RNA (1)...(19): siRNA sense strand
cauggaaacacuuaagaau

SEQ ID NO: 1913584 - RNA, 19 nt, Homo sapiens
  misc_RNA (1)...(19): siRNA sense strand
aggaagaaaguuaacgaua

SEQ ID NO: 1913585 - RNA, 19 nt, Homo sapiens
  misc_RNA (1)...(19): siRNA sense strand
cuacuaagguguguaugag

SEQ ID NO: 1913586 - RNA, 19 nt, Homo sapiens
  misc_RNA (1)...(19): siRNA sense strand
aaaucagccugcacuuuca

SEQ ID NO: 1913587 - RNA, 19 nt, Homo sapiens
  misc_RNA (1)...(19): siRNA sense strand
acuaugaaguacauggaaa

SEQ ID NO: 1913588 - RNA, 19 nt, Homo sapiens
  misc_RNA (1)...(19): siRNA sense strand
cagcagcuacagaaagaaa

SEQ ID NO: 1913589 - RNA, 19 nt, Homo sapiens
  misc_RNA (1)...(19): siRNA sense strand
agacuggcuucuucaggaa

SEQ ID NO: 1913590 - RNA, 19 nt, Homo sapiens
  misc_RNA (1)...(19): siRNA sense strand
gagaggcugagucccauug

SEQ ID NO: 1913591 - RNA, 19 nt, Homo sapiens
  misc_RNA (1)...(19): siRNA sense strand
caaaggaggcgggagaaag

SEQ ID NO: 1913592 - RNA, 19 nt, Homo sapiens
  misc_RNA (1)...(19): siRNA sense strand
agacauaggcaagaagcua

SEQ ID NO: 1913593 - RNA, 19 nt, Homo sapiens
  misc_RNA (1)...(19): siRNA sense strand
ugaagguauuggaagaaug

SEQ ID NO: 1913594 - RNA, 19 nt, Homo sapiens
  misc_RNA (1)...(19): siRNA sense strand
ggaagccugucuguagaag

SEQ ID NO: 1913595 - RNA, 19 nt, Homo sapiens
  misc_RNA (1)...(19): siRNA sense strand
guacauggaaacacuuaag

SEQ ID NO: 1913596 - RNA, 19 nt, Homo sapiens
  misc_RNA (1)...(19): siRNA sense strand
acaacagacugagaagaga

SEQ ID NO: 1913597 - RNA, 19 nt, Homo sapiens
  misc_RNA (1)...(19): siRNA sense strand
cacagugccuuuaccucaa

SEQ ID NO: 1913598 - RNA, 19 nt, Homo sapiens
  misc_RNA (1)...(19): siRNA sense strand
gcagauggagguaauaucc

SEQ ID NO: 1913599 - RNA, 19 nt, Homo sapiens
  misc_RNA (1)...(19): siRNA sense strand
agcgugacaugcauucuuu

SEQ ID NO: 1913600 - RNA, 19 nt, Homo sapiens
  misc_RNA (1)...(19): siRNA sense strand
aagccugucuguagaagau

SEQ ID NO: 1913601 - RNA, 19 nt, Homo sapiens
  misc_RNA (1)...(19): siRNA sense strand
cuaccagccuugcuugaag

SEQ ID NO: 1913602 - RNA, 19 nt, Homo sapiens
  misc_RNA (1)...(19): siRNA sense strand
agccagcucuuagcaguuu

SEQ ID NO: 1913603 - RNA, 19 nt, Homo sapiens
  misc_RNA (1)...(19): siRNA sense strand
gaagaccuggaacaagaga

SEQ ID NO: 1913604 - RNA, 19 nt, Homo sapiens
  misc_RNA (1)...(19): siRNA sense strand
agauggagguaauauccuu

SEQ ID NO: 1913605 - RNA, 19 nt, Homo sapiens
  misc_RNA (1)...(19): siRNA sense strand
agcagcagcuacagaaaga

SEQ ID NO: 1913606 - RNA, 19 nt, Homo sapiens
  misc_RNA (1)...(19): siRNA sense strand
ggagaaaagugugaagaca

SEQ ID NO: 1913607 - RNA, 19 nt, Homo sapiens
  misc_RNA (1)...(19): siRNA sense strand
aagauuagaagaccuggaa

SEQ ID NO: 1913608 - RNA, 19 nt, Homo sapiens
  misc_RNA (1)...(19): siRNA sense strand
gaaacucugcaggccauga

SEQ ID NO: 1913609 - RNA, 19 nt, Homo sapiens
  misc_RNA (1)...(19): siRNA sense strand
gaggcagauggaugacuua

SEQ ID NO: 1913610 - RNA, 19 nt, Homo sapiens
  misc_RNA (1)...(19): siRNA sense strand
caaggcagccagcucuuag

SEQ ID NO: 1913611 - RNA, 19 nt, Homo sapiens
  misc_RNA (1)...(19): siRNA sense strand
ggccagagcgugacaugca

SEQ ID NO: 1913612 - RNA, 19 nt, Homo sapiens
  misc_RNA (1)...(19): siRNA sense strand
uauuguacuuggaagauca

SEQ ID NO: 1913613 - RNA, 19 nt, Homo sapiens
  misc_RNA (1)...(19): siRNA sense strand
guguaugagugagaaauuc

SEQ ID NO: 1913614 - RNA, 19 nt, Homo sapiens
  misc_RNA (1)...(19): siRNA sense strand
ucacuacuaagguguguau

SEQ ID NO: 1913615 - RNA, 19 nt, Homo sapiens
  misc_RNA (1)...(19): siRNA sense strand
ggaggcgggagaaagagaa

SEQ ID NO: 1913616 - RNA, 19 nt, Homo sapiens
  misc_RNA (1)...(19): siRNA sense strand
caacuccacgggaauauaa

SEQ ID NO: 1913617 - RNA, 19 nt, Homo sapiens
  misc_RNA (1)...(19): siRNA sense strand
aaaggaaauuguagccuaa

SEQ ID NO: 1913618 - RNA, 19 nt, Homo sapiens
  misc_RNA (1)...(19): siRNA sense strand
ucacagguguagcuuacua

SEQ ID NO: 1913619 - RNA, 19 nt, Homo sapiens
  misc_RNA (1)...(19): siRNA sense strand
gaagauggaaugaaaccuu

SEQ ID NO: 1913620 - RNA, 19 nt, Homo sapiens
  misc_RNA (1)...(19): siRNA sense strand
ccucaacccucuccgaaga

SEQ ID NO: 1913621 - RNA, 19 nt, Homo sapiens
  misc_RNA (1)...(19): siRNA sense strand
ccacgggaauauaaacaau

SEQ ID NO: 1913622 - RNA, 19 nt, Homo sapiens
  misc_RNA (1)...(19): siRNA sense strand
cuccgaagauggaaugaaa

SEQ ID NO: 1913623 - RNA, 19 nt, Homo sapiens
  misc_RNA (1)...(19): siRNA sense strand
ugacguuggucucccgaaa

SEQ ID NO: 1913624 - RNA, 19 nt, Homo sapiens
  misc_RNA (1)...(19): siRNA sense strand
ccacccaauugcuggcuaa

SEQ ID NO: 1913625 - RNA, 19 nt, Homo sapiens
  misc_RNA (1)...(19): siRNA sense strand
ggucuuagucacaggugua

SEQ ID NO: 1913626 - RNA, 19 nt, Homo sapiens
  misc_RNA (1)...(19): siRNA sense strand
ugacugcggaguaugauga

SEQ ID NO: 1913627 - RNA, 19 nt, Homo sapiens
  misc_RNA (1)...(19): siRNA sense strand
cccaugcccuugaagcaaa

SEQ ID NO: 1913628 - RNA, 19 nt, Homo sapiens
  misc_RNA (1)...(19): siRNA sense strand
gccuagagaccacccaauu

SEQ ID NO: 1913629 - RNA, 19 nt, Homo sapiens
  misc_RNA (1)...(19): siRNA sense strand
ucuccaaccucguaaccaa

SEQ ID NO: 1913630 - RNA, 19 nt, Homo sapiens
  misc_RNA (1)...(19): siRNA sense strand
ggaggggacuuugacuuuu

SEQ ID NO: 1913631 - RNA, 19 nt, Homo sapiens
  misc_RNA (1)...(19): siRNA sense strand
cuaaagccaucaccaaagc

SEQ ID NO: 1913632 - RNA, 19 nt, Homo sapiens
  misc_RNA (1)...(19): siRNA sense strand
gcuaaagccaucaccaaag

SEQ ID NO: 1913633 - RNA, 19 nt, Homo sapiens
  misc_RNA (1)...(19): siRNA sense strand
gcgacagcgugccaucaug

SEQ ID NO: 1913634 - RNA, 19 nt, Homo sapiens
  misc_RNA (1)...(19): siRNA sense strand
gcucaggccaccaauucuu

SEQ ID NO: 1913635 - RNA, 19 nt, Homo sapiens
  misc_RNA (1)...(19): siRNA sense strand
gcuaggggcugccuuaaag

SEQ ID NO: 1913636 - RNA, 19 nt, Homo sapiens
  misc_RNA (1)...(19): siRNA sense strand
ccuagagaccacccaauug

SEQ ID NO: 1913637 - RNA, 19 nt, Homo sapiens
  misc_RNA (1)...(19): siRNA sense strand
ccacuaaugcugaguuugc

SEQ ID NO: 1913638 - RNA, 19 nt, Homo sapiens
  misc_RNA (1)...(19): siRNA sense strand
caaccuggccggagagaac

SEQ ID NO: 1913639 - RNA, 19 nt, Homo sapiens
  misc_RNA (1)...(19): siRNA sense strand
ccaacuccacgggaauaua

SEQ ID NO: 1913640 - RNA, 19 nt, Homo sapiens
  misc_RNA (1)...(19): siRNA sense strand
cgccacuaaugcugaguuu

SEQ ID NO: 1913641 - RNA, 19 nt, Homo sapiens
  misc_RNA (1)...(19): siRNA sense strand
agucacagguguagcuuac

SEQ ID NO: 1913642 - RNA, 19 nt, Homo sapiens
  misc_RNA (1)...(19): siRNA sense strand
cggcucaggccaccaauuc

SEQ ID NO: 1913643 - RNA, 19 nt, Homo sapiens
  misc_RNA (1)...(19): siRNA sense strand
cccaauugcuggcuaaagc

SEQ ID NO: 1913644 - RNA, 19 nt, Homo sapiens
  misc_RNA (1)...(19): siRNA sense strand
ucaacccucuccgaagaug

SEQ ID NO: 1913645 - RNA, 19 nt, Homo sapiens
  misc_RNA (1)...(19): siRNA sense strand
gcuccauccuccgccacua

SEQ ID NO: 1913646 - RNA, 19 nt, Homo sapiens
  misc_RNA (1)...(19): siRNA sense strand
ccugacccaugcccuugaa

SEQ ID NO: 1913647 - RNA, 19 nt, Homo sapiens
  misc_RNA (1)...(19): siRNA sense strand
ggcacgaagugacguuggu

SEQ ID NO: 1913648 - RNA, 19 nt, Homo sapiens
  misc_RNA (1)...(19): siRNA sense strand
ccaaccucguaaccaaaug

SEQ ID NO: 1913649 - RNA, 19 nt, Homo sapiens
  misc_RNA (1)...(19): siRNA sense strand
caagugggcuuccuccuuu

SEQ ID NO: 1913650 - RNA, 19 nt, Homo sapiens
  misc_RNA (1)...(19): siRNA sense strand
guagauggcagaacacuua

SEQ ID NO: 1913651 - RNA, 19 nt, Homo sapiens
  misc_RNA (1)...(19): siRNA sense strand
uagcagaccugauugagaa

SEQ ID NO: 1913652 - RNA, 19 nt, Homo sapiens
  misc_RNA (1)...(19): siRNA sense strand
ugacaaaccuucagauucu

SEQ ID NO: 1913653 - RNA, 19 nt, Homo sapiens
  misc_RNA (1)...(19): siRNA sense strand
gcagauaucuaacagugau

SEQ ID NO: 1913654 - RNA, 19 nt, Homo sapiens
  misc_RNA (1)...(19): siRNA sense strand
gaagagcugcaaaggauaa

SEQ ID NO: 1913655 - RNA, 19 nt, Homo sapiens
  misc_RNA (1)...(19): siRNA sense strand
gcacagagccaguuggaau

SEQ ID NO: 1913656 - RNA, 19 nt, Homo sapiens
  misc_RNA (1)...(19): siRNA sense strand
ugacaccacugcagaggua

SEQ ID NO: 1913657 - RNA, 19 nt, Homo sapiens
  misc_RNA (1)...(19): siRNA sense strand
auacugcaguuacuucuua

SEQ ID NO: 1913658 - RNA, 19 nt, Homo sapiens
  misc_RNA (1)...(19): siRNA sense strand
gguaguagauggcagaaca

SEQ ID NO: 1913659 - RNA, 19 nt, Homo sapiens
  misc_RNA (1)...(19): siRNA sense strand
guaaacaccaagaauauga

SEQ ID NO: 1913660 - RNA, 19 nt, Homo sapiens
  misc_RNA (1)...(19): siRNA sense strand
cagaagacccagcaguuua

SEQ ID NO: 1913661 - RNA, 19 nt, Homo sapiens
  misc_RNA (1)...(19): siRNA sense strand
ccaauucucucaauaguac

SEQ ID NO: 1913662 - RNA, 19 nt, Homo sapiens
  misc_RNA (1)...(19): siRNA sense strand
ccaagaauaugaacagaag

SEQ ID NO: 1913663 - RNA, 19 nt, Homo sapiens
  misc_RNA (1)...(19): siRNA sense strand
ccacaucucuucagaacuc

SEQ ID NO: 1913664 - RNA, 19 nt, Homo sapiens
  misc_RNA (1)...(19): siRNA sense strand
gaacuccucuucacacacu

SEQ ID NO: 1913665 - RNA, 19 nt, Homo sapiens
  misc_RNA (1)...(19): siRNA sense strand
gugcuuauguaaccuauau

SEQ ID NO: 1913666 - RNA, 19 nt, Homo sapiens
  misc_RNA (1)...(19): siRNA sense strand
aggaagagcugcaaaggau

SEQ ID NO: 1913667 - RNA, 19 nt, Homo sapiens
  misc_RNA (1)...(19): siRNA sense strand
ccacagacauccagugacu

SEQ ID NO: 1913668 - RNA, 19 nt, Homo sapiens
  misc_RNA (1)...(19): siRNA sense strand
ugcaaaggauaaagaauga

SEQ ID NO: 1913669 - RNA, 19 nt, Homo sapiens
  misc_RNA (1)...(19): siRNA sense strand
cgucuuuguuguagguuua

SEQ ID NO: 1913670 - RNA, 19 nt, Homo sapiens
  misc_RNA (1)...(19): siRNA sense strand
uaacagagucacagucguu

SEQ ID NO: 1913671 - RNA, 19 nt, Homo sapiens
  misc_RNA (1)...(19): siRNA sense strand
ggguaaacaccaagaauau

SEQ ID NO: 1913672 - RNA, 19 nt, Homo sapiens
  misc_RNA (1)...(19): siRNA sense strand
cuuaaggcaucucuaggua

SEQ ID NO: 1913673 - RNA, 19 nt, Homo sapiens
  misc_RNA (1)...(19): siRNA sense strand
ucaacaaugugguaguaga

SEQ ID NO: 1913674 - RNA, 19 nt, Homo sapiens
  misc_RNA (1)...(19): siRNA sense strand
ugucaacaaugugguagua

SEQ ID NO: 1913675 - RNA, 19 nt, Homo sapiens
  misc_RNA (1)...(19): siRNA sense strand
guaauuucuuggacuugaa

SEQ ID NO: 1913676 - RNA, 19 nt, Homo sapiens
  misc_RNA (1)...(19): siRNA sense strand
gauaauucccagcagauau

SEQ ID NO: 1913677 - RNA, 19 nt, Homo sapiens
  misc_RNA (1)...(19): siRNA sense strand
gcauggagcccuuggagau

SEQ ID NO: 1913678 - RNA, 19 nt, Homo sapiens
  misc_RNA (1)...(19): siRNA sense strand
uaaggcaucucuagguaca

SEQ ID NO: 1913679 - RNA, 19 nt, Homo sapiens
  misc_RNA (1)...(19): siRNA sense strand
gaagacccagcaguuuaua

SEQ ID NO: 1913680 - RNA, 19 nt, Homo sapiens
  misc_RNA (1)...(19): siRNA sense strand
uaaccuauauccggucaga

SEQ ID NO: 1913681 - RNA, 19 nt, Homo sapiens
  misc_RNA (1)...(19): siRNA sense strand
ggaagagcugcaaaggaua

SEQ ID NO: 1913682 - RNA, 19 nt, Homo sapiens
  misc_RNA (1)...(19): siRNA sense strand
caaaggauaaagaaugaga

SEQ ID NO: 1913683 - RNA, 19 nt, Homo sapiens
  misc_RNA (1)...(19): siRNA sense strand
gaaacaaucccaguaucau

SEQ ID NO: 1913684 - RNA, 19 nt, Homo sapiens
  misc_RNA (1)...(19): siRNA sense strand
gcaaaccccaccucaaaua

SEQ ID NO: 1913685 - RNA, 19 nt, Homo sapiens
  misc_RNA (1)...(19): siRNA sense strand
cgaauucgcacugaugaaa

SEQ ID NO: 1913686 - RNA, 19 nt, Homo sapiens
  misc_RNA (1)...(19): siRNA sense strand
ccagaagacccagcaguuu

SEQ ID NO: 1913687 - RNA, 19 nt, Homo sapiens
  misc_RNA (1)...(19): siRNA sense strand
gagcugcaaaggauaaaga

SEQ ID NO: 1913688 - RNA, 19 nt, Homo sapiens
  misc_RNA (1)...(19): siRNA sense strand
cagaaacaaucccaguauc

SEQ ID NO: 1913689 - RNA, 19 nt, Homo sapiens
  misc_RNA (1)...(19): siRNA sense strand
cggguaaacaccaagaaua

SEQ ID NO: 1913690 - RNA, 19 nt, Homo sapiens
  misc_RNA (1)...(19): siRNA sense strand
caagaccaaccuucccuuu

SEQ ID NO: 1913691 - RNA, 19 nt, Homo sapiens
  misc_RNA (1)...(19): siRNA sense strand
cuaccagauuugccgauuu

SEQ ID NO: 1913692 - RNA, 19 nt, Homo sapiens
  misc_RNA (1)...(19): siRNA sense strand
gcccacaucucuucagaac

SEQ ID NO: 1913693 - RNA, 19 nt, Homo sapiens
  misc_RNA (1)...(19): siRNA sense strand
aaaccugacugcauguauc

SEQ ID NO: 1913694 - RNA, 19 nt, Homo sapiens
  misc_RNA (1)...(19): siRNA sense strand
cagauuuacuacagaguuc

SEQ ID NO: 1913695 - RNA, 19 nt, Homo sapiens
  misc_RNA (1)...(19): siRNA sense strand
caucaauaauagcacauca

SEQ ID NO: 1913696 - RNA, 19 nt, Homo sapiens
  misc_RNA (1)...(19): siRNA sense strand
ucagaaacaaucccaguau

SEQ ID NO: 1913697 - RNA, 19 nt, Homo sapiens
  misc_RNA (1)...(19): siRNA sense strand
gcaggcggguaaacaccaa

SEQ ID NO: 1913698 - RNA, 19 nt, Homo sapiens
  misc_RNA (1)...(19): siRNA sense strand
ccuuggagauagaugauau

SEQ ID NO: 1913699 - RNA, 19 nt, Homo sapiens
  misc_RNA (1)...(19): siRNA sense strand
caacacuggaccgccauua

SEQ ID NO: 1913700 - RNA, 19 nt, Homo sapiens
  misc_RNA (1)...(19): siRNA sense strand
gcagcccgcuauccuugga

SEQ ID NO: 1913701 - RNA, 19 nt, Homo sapiens
  misc_RNA (1)...(19): siRNA sense strand
cuacaaaugccaauucucu

SEQ ID NO: 1913702 - RNA, 19 nt, Homo sapiens
  misc_RNA (1)...(19): siRNA sense strand
uacagugugucaacaaugu

SEQ ID NO: 1913703 - RNA, 19 nt, Homo sapiens
  misc_RNA (1)...(19): siRNA sense strand
cauacagugugucaacaau

SEQ ID NO: 1913704 - RNA, 19 nt, Homo sapiens
  misc_RNA (1)...(19): siRNA sense strand
gcuaccagauuugccgauu

SEQ ID NO: 1913705 - RNA, 19 nt, Homo sapiens
  misc_RNA (1)...(19): siRNA sense strand
aaaccucgucuuuguugua

SEQ ID NO: 1913706 - RNA, 19 nt, Homo sapiens
  misc_RNA (1)...(19): siRNA sense strand
uagaaagccauauccagaa

SEQ ID NO: 1913707 - RNA, 19 nt, Homo sapiens
  misc_RNA (1)...(19): siRNA sense strand
uaaacaaccagagggauga

SEQ ID NO: 1913708 - RNA, 19 nt, Homo sapiens
  misc_RNA (1)...(19): siRNA sense strand
cagagucacagucguuauu

SEQ ID NO: 1913709 - RNA, 19 nt, Homo sapiens
  misc_RNA (1)...(19): siRNA sense strand
ccuguggagugcccucuuu

SEQ ID NO: 1913710 - RNA, 19 nt, Homo sapiens
  misc_RNA (1)...(19): siRNA sense strand
ucucagagccauacagugu

SEQ ID NO: 1913711 - RNA, 19 nt, Homo sapiens
  misc_RNA (1)...(19): siRNA sense strand
agacccagcaguuuauaaa

SEQ ID NO: 1913712 - RNA, 19 nt, Homo sapiens
  misc_RNA (1)...(19): siRNA sense strand
gaaagccauauccagaaga

SEQ ID NO: 1913713 - RNA, 19 nt, Homo sapiens
  misc_RNA (1)...(19): siRNA sense strand
ccacugcagagguacgaua

SEQ ID NO: 1913714 - RNA, 19 nt, Homo sapiens
  misc_RNA (1)...(19): siRNA sense strand
ucagagccauacagugugu

SEQ ID NO: 1913715 - RNA, 19 nt, Homo sapiens
  misc_RNA (1)...(19): siRNA sense strand
caacaaugugguaguagau

SEQ ID NO: 1913716 - RNA, 19 nt, Homo sapiens
  misc_RNA (1)...(19): siRNA sense strand
cagaacuccucuucacaca

SEQ ID NO: 1913717 - RNA, 19 nt, Homo sapiens
  misc_RNA (1)...(19): siRNA sense strand
ggaaaugcaggcggguaaa

SEQ ID NO: 1913718 - RNA, 19 nt, Homo sapiens
  misc_RNA (1)...(19): siRNA sense strand
caacaaaauacugcaguua

SEQ ID NO: 1913719 - RNA, 19 nt, Homo sapiens
  misc_RNA (1)...(19): siRNA sense strand
gccaauucucucaauagua

SEQ ID NO: 1913720 - RNA, 19 nt, Homo sapiens
  misc_RNA (1)...(19): siRNA sense strand
uggcuuugguucuucuaaa

SEQ ID NO: 1913721 - RNA, 19 nt, Homo sapiens
  misc_RNA (1)...(19): siRNA sense strand
agaaacaaucccaguauca

SEQ ID NO: 1913722 - RNA, 19 nt, Homo sapiens
  misc_RNA (1)...(19): siRNA sense strand
guauagggaacggugauaa

SEQ ID NO: 1913723 - RNA, 19 nt, Homo sapiens
  misc_RNA (1)...(19): siRNA sense strand
agaaagccauauccagaag

SEQ ID NO: 1913724 - RNA, 19 nt, Homo sapiens
  misc_RNA (1)...(19): siRNA sense strand
gguaaacaccaagaauaug

SEQ ID NO: 1913725 - RNA, 19 nt, Homo sapiens
  misc_RNA (1)...(19): siRNA sense strand
uaacagugauacgccuuca

SEQ ID NO: 1913726 - RNA, 19 nt, Homo sapiens
  misc_RNA (1)...(19): siRNA sense strand
ccaagugggcuuccuccuu

SEQ ID NO: 1913727 - RNA, 19 nt, Homo sapiens
  misc_RNA (1)...(19): siRNA sense strand
cugcaaaggauaaagaaug

SEQ ID NO: 1913728 - RNA, 19 nt, Homo sapiens
  misc_RNA (1)...(19): siRNA sense strand
aaugccaauucucucaaua

SEQ ID NO: 1913729 - RNA, 19 nt, Homo sapiens
  misc_RNA (1)...(19): siRNA sense strand
agaccaaccuucccuuucg

SEQ ID NO: 1913730 - RNA, 19 nt, Homo sapiens
  misc_RNA (1)...(19): siRNA sense strand
caagugccagugcuuaugu

SEQ ID NO: 1913731 - RNA, 19 nt, Homo sapiens
  misc_RNA (1)...(19): siRNA sense strand
caaccagagggaugacuug

SEQ ID NO: 1913732 - RNA, 19 nt, Homo sapiens
  misc_RNA (1)...(19): siRNA sense strand
agaagacccagcaguuuau

SEQ ID NO: 1913733 - RNA, 19 nt, Homo sapiens
  misc_RNA (1)...(19): siRNA sense strand
gucagaagacgcucucaga

SEQ ID NO: 1913734 - RNA, 19 nt, Homo sapiens
  misc_RNA (1)...(19): siRNA sense strand
cuucaaacccuuccagcuu

SEQ ID NO: 1913735 - RNA, 19 nt, Homo sapiens
  misc_RNA (1)...(19): siRNA sense strand
cagcaaaccccaccucaaa

SEQ ID NO: 1913736 - RNA, 19 nt, Homo sapiens
  misc_RNA (1)...(19): siRNA sense strand
cacagucguuauucucaga

SEQ ID NO: 1913737 - RNA, 19 nt, Homo sapiens
  misc_RNA (1)...(19): siRNA sense strand
cauggagcccuuggagaua

SEQ ID NO: 1913738 - RNA, 19 nt, Homo sapiens
  misc_RNA (1)...(19): siRNA sense strand
gcauguagaaagccauauc

SEQ ID NO: 1913739 - RNA, 19 nt, Homo sapiens
  misc_RNA (1)...(19): siRNA sense strand
ccgagcgguuuauaauuca

SEQ ID NO: 1913740 - RNA, 19 nt, Homo sapiens
  misc_RNA (1)...(19): siRNA sense strand
caaaugccaauucucucaa

SEQ ID NO: 1913741 - RNA, 19 nt, Homo sapiens
  misc_RNA (1)...(19): siRNA sense strand
acaaaugccaauucucuca

SEQ ID NO: 1913742 - RNA, 19 nt, Homo sapiens
  misc_RNA (1)...(19): siRNA sense strand
cagauucucucaguauagg

SEQ ID NO: 1913743 - RNA, 19 nt, Homo sapiens
  misc_RNA (1)...(19): siRNA sense strand
gaacacuuaaggcaucucu

SEQ ID NO: 1913744 - RNA, 19 nt, Homo sapiens
  misc_RNA (1)...(19): siRNA sense strand
aguaauuucuuggacuuga

SEQ ID NO: 1913745 - RNA, 19 nt, Homo sapiens
  misc_RNA (1)...(19): siRNA sense strand
aaaugccaauucucucaau

SEQ ID NO: 1913746 - RNA, 19 nt, Homo sapiens
  misc_RNA (1)...(19): siRNA sense strand
aaacaaucccaguaucauc

SEQ ID NO: 1913747 - RNA, 19 nt, Homo sapiens
  misc_RNA (1)...(19): siRNA sense strand
ugauaauucccagcagaua

SEQ ID NO: 1913748 - RNA, 19 nt, Homo sapiens
  misc_RNA (1)...(19): siRNA sense strand
uucagauucucucaguaua

SEQ ID NO: 1913749 - RNA, 19 nt, Homo sapiens
  misc_RNA (1)...(19): siRNA sense strand
cgagaaaggucuagaauua

SEQ ID NO: 1913750 - RNA, 19 nt, Homo sapiens
  misc_RNA (1)...(19): siRNA sense strand
ccacgaagcucaagcagaa

SEQ ID NO: 1913751 - RNA, 19 nt, Homo sapiens
  misc_RNA (1)...(19): siRNA sense strand
gcuauggagugaaauauuu

SEQ ID NO: 1913752 - RNA, 19 nt, Homo sapiens
  misc_RNA (1)...(19): siRNA sense strand
gaagaggauugcagaaaug

SEQ ID NO: 1913753 - RNA, 19 nt, Homo sapiens
  misc_RNA (1)...(19): siRNA sense strand
ccaauggcaugguguauuu

SEQ ID NO: 1913754 - RNA, 19 nt, Homo sapiens
  misc_RNA (1)...(19): siRNA sense strand
ggaaaucaguuagcuaaau

SEQ ID NO: 1913755 - RNA, 19 nt, Homo sapiens
  misc_RNA (1)...(19): siRNA sense strand
gaaguugggaaaucaguua

SEQ ID NO: 1913756 - RNA, 19 nt, Homo sapiens
  misc_RNA (1)...(19): siRNA sense strand
ucaguuagcuaaauucaga

SEQ ID NO: 1913757 - RNA, 19 nt, Homo sapiens
  misc_RNA (1)...(19): siRNA sense strand
gaauggaccacuucuugua

SEQ ID NO: 1913758 - RNA, 19 nt, Homo sapiens
  misc_RNA (1)...(19): siRNA sense strand
aauaugagguguucaguga

SEQ ID NO: 1913759 - RNA, 19 nt, Homo sapiens
  misc_RNA (1)...(19): siRNA sense strand
gcagaugccucagacagaa

SEQ ID NO: 1913760 - RNA, 19 nt, Homo sapiens
  misc_RNA (1)...(19): siRNA sense strand
ugaagaggauugcagaaau

SEQ ID NO: 1913761 - RNA, 19 nt, Homo sapiens
  misc_RNA (1)...(19): siRNA sense strand
gaauugaggcuuuacuuca

SEQ ID NO: 1913762 - RNA, 19 nt, Homo sapiens
  misc_RNA (1)...(19): siRNA sense strand
cagaacgauugaugaagua

SEQ ID NO: 1913763 - RNA, 19 nt, Homo sapiens
  misc_RNA (1)...(19): siRNA sense strand
caaacuuucugucuucuca

SEQ ID NO: 1913764 - RNA, 19 nt, Homo sapiens
  misc_RNA (1)...(19): siRNA sense strand
caacaaagcaaaccucaag

SEQ ID NO: 1913765 - RNA, 19 nt, Homo sapiens
  misc_RNA (1)...(19): siRNA sense strand
gaggccagaugacaaguau

SEQ ID NO: 1913766 - RNA, 19 nt, Homo sapiens
  misc_RNA (1)...(19): siRNA sense strand
gagauaucccuguucagua

SEQ ID NO: 1913767 - RNA, 19 nt, Homo sapiens
  misc_RNA (1)...(19): siRNA sense strand
gaauuacggagucaacaaa

SEQ ID NO: 1913768 - RNA, 19 nt, Homo sapiens
  misc_RNA (1)...(19): siRNA sense strand
uuaggaagcuggucaugga

SEQ ID NO: 1913769 - RNA, 19 nt, Homo sapiens
  misc_RNA (1)...(19): siRNA sense strand
ucaaggugcuggugaagau

SEQ ID NO: 1913770 - RNA, 19 nt, Homo sapiens
  misc_RNA (1)...(19): siRNA sense strand
gaucgaaaccugccagaca

SEQ ID NO: 1913771 - RNA, 19 nt, Homo sapiens
  misc_RNA (1)...(19): siRNA sense strand
uaacaacccgugcuuugaa

SEQ ID NO: 1913772 - RNA, 19 nt, Homo sapiens
  misc_RNA (1)...(19): siRNA sense strand
gcagcuauggagugaaaua

SEQ ID NO: 1913773 - RNA, 19 nt, Homo sapiens
  misc_RNA (1)...(19): siRNA sense strand
ugacaaguaucacgagaag

SEQ ID NO: 1913774 - RNA, 19 nt, Homo sapiens
  misc_RNA (1)...(19): siRNA sense strand
ccaaauucuugcauacaga

SEQ ID NO: 1913775 - RNA, 19 nt, Homo sapiens
  misc_RNA (1)...(19): siRNA sense strand
gcucccaggucauuaggaa

SEQ ID NO: 1913776 - RNA, 19 nt, Homo sapiens
  misc_RNA (1)...(19): siRNA sense strand
gcagaaaugacagauauca

SEQ ID NO: 1913777 - RNA, 19 nt, Homo sapiens
  misc_RNA (1)...(19): siRNA sense strand
uugcagaaaugacagauau

SEQ ID NO: 1913778 - RNA, 19 nt, Homo sapiens
  misc_RNA (1)...(19): siRNA sense strand
ggcagcagaucuacgagaa

SEQ ID NO: 1913779 - RNA, 19 nt, Homo sapiens
  misc_RNA (1)...(19): siRNA sense strand
ggagauaucccuguucagu

SEQ ID NO: 1913780 - RNA, 19 nt, Homo sapiens
  misc_RNA (1)...(19): siRNA sense strand
cagcagcucugguggagau

SEQ ID NO: 1913781 - RNA, 19 nt, Homo sapiens
  misc_RNA (1)...(19): siRNA sense strand
aagcugacuuuaucgauga

SEQ ID NO: 1913782 - RNA, 19 nt, Homo sapiens
  misc_RNA (1)...(19): siRNA sense strand
ugaauuacgugggugaaug

SEQ ID NO: 1913783 - RNA, 19 nt, Homo sapiens
  misc_RNA (1)...(19): siRNA sense strand
acagaacgauugaugaagu

SEQ ID NO: 1913784 - RNA, 19 nt, Homo sapiens
  misc_RNA (1)...(19): siRNA sense strand
gaacccaccauaccuguca

SEQ ID NO: 1913785 - RNA, 19 nt, Homo sapiens
  misc_RNA (1)...(19): siRNA sense strand
caaagcaaaccucaagaug

SEQ ID NO: 1913786 - RNA, 19 nt, Homo sapiens
  misc_RNA (1)...(19): siRNA sense strand
ccugacagcuggagauauc

SEQ ID NO: 1913787 - RNA, 19 nt, Homo sapiens
  misc_RNA (1)...(19): siRNA sense strand
acaaaggaauggaccacuu

SEQ ID NO: 1913788 - RNA, 19 nt, Homo sapiens
  misc_RNA (1)...(19): siRNA sense strand
ggagcucgccaauggaauu

SEQ ID NO: 1913789 - RNA, 19 nt, Homo sapiens
  misc_RNA (1)...(19): siRNA sense strand
cuguggagcucuugaaguu

SEQ ID NO: 1913790 - RNA, 19 nt, Homo sapiens
  misc_RNA (1)...(19): siRNA sense strand
gcugcggccuucuugacua

SEQ ID NO: 1913791 - RNA, 19 nt, Homo sapiens
  misc_RNA (1)...(19): siRNA sense strand
cgacgaagccaaacuuucu

SEQ ID NO: 1913792 - RNA, 19 nt, Homo sapiens
  misc_RNA (1)...(19): siRNA sense strand
ggacccaaauacaauagag

SEQ ID NO: 1913793 - RNA, 19 nt, Homo sapiens
  misc_RNA (1)...(19): siRNA sense strand
ccagaucaugccagucuua

SEQ ID NO: 1913794 - RNA, 19 nt, Homo sapiens
  misc_RNA (1)...(19): siRNA sense strand
gugauaauaugagguguuc

SEQ ID NO: 1913795 - RNA, 19 nt, Homo sapiens
  misc_RNA (1)...(19): siRNA sense strand
gaaaugacagauaucaaac

SEQ ID NO: 1913796 - RNA, 19 nt, Homo sapiens
  misc_RNA (1)...(19): siRNA sense strand
gagacaggcagcagaucua

SEQ ID NO: 1913797 - RNA, 19 nt, Homo sapiens
  misc_RNA (1)...(19): siRNA sense strand
ggaauggaccacuucuugu

SEQ ID NO: 1913798 - RNA, 19 nt, Homo sapiens
  misc_RNA (1)...(19): siRNA sense strand
agacaucgacgaagccaaa

SEQ ID NO: 1913799 - RNA, 19 nt, Homo sapiens
  misc_RNA (1)...(19): siRNA sense strand
cagcagaucuacgagaaag

SEQ ID NO: 1913800 - RNA, 19 nt, Homo sapiens
  misc_RNA (1)...(19): siRNA sense strand
gaucaugccagucuuaaaa

SEQ ID NO: 1913801 - RNA, 19 nt, Homo sapiens
  misc_RNA (1)...(19): siRNA sense strand
agacagaacgauugaugaa

SEQ ID NO: 1913802 - RNA, 19 nt, Homo sapiens
  misc_RNA (1)...(19): siRNA sense strand
gaugacugccaaauucuug

SEQ ID NO: 1913803 - RNA, 19 nt, Homo sapiens
  misc_RNA (1)...(19): siRNA sense strand
ccucauagacagaacgauu

SEQ ID NO: 1913804 - RNA, 19 nt, Homo sapiens
  misc_RNA (1)...(19): siRNA sense strand
gcauacagaaauucgagaa

SEQ ID NO: 1913805 - RNA, 19 nt, Homo sapiens
  misc_RNA (1)...(19): siRNA sense strand
ugggaaaucaguuagcuaa

SEQ ID NO: 1913806 - RNA, 19 nt, Homo sapiens
  misc_RNA (1)...(19): siRNA sense strand
caaaggaauggaccacuuc

SEQ ID NO: 1913807 - RNA, 19 nt, Homo sapiens
  misc_RNA (1)...(19): siRNA sense strand
caauggaauuccugacucu

SEQ ID NO: 1913808 - RNA, 19 nt, Homo sapiens
  misc_RNA (1)...(19): siRNA sense strand
ggccagaugacaaguauca

SEQ ID NO: 1913809 - RNA, 19 nt, Homo sapiens
  misc_RNA (1)...(19): siRNA sense strand
agacagugccugcaggaaa

SEQ ID NO: 1913810 - RNA, 19 nt, Homo sapiens
  misc_RNA (1)...(19): siRNA sense strand
agauaucccuguucaguac

SEQ ID NO: 1913811 - RNA, 19 nt, Homo sapiens
  misc_RNA (1)...(19): siRNA sense strand
acucacacauggacaccua

SEQ ID NO: 1913812 - RNA, 19 nt, Homo sapiens
  misc_RNA (1)...(19): siRNA sense strand
gacagugccugcaggaaaa

SEQ ID NO: 1913813 - RNA, 19 nt, Homo sapiens
  misc_RNA (1)...(19): siRNA sense strand
aagccaaacuuucugucuu

SEQ ID NO: 1913814 - RNA, 19 nt, Homo sapiens
  misc_RNA (1)...(19): siRNA sense strand
gccaaauucuugcauacag

SEQ ID NO: 1913815 - RNA, 19 nt, Homo sapiens
  misc_RNA (1)...(19): siRNA sense strand
aagcaucggucggaguaaa

SEQ ID NO: 1913816 - RNA, 19 nt, Homo sapiens
  misc_RNA (1)...(19): siRNA sense strand
gaggauugcagaaaugaca

SEQ ID NO: 1913817 - RNA, 19 nt, Homo sapiens
  misc_RNA (1)...(19): siRNA sense strand
gucagaagccucauagaca

SEQ ID NO: 1913818 - RNA, 19 nt, Homo sapiens
  misc_RNA (1)...(19): siRNA sense strand
ccuggcagaugaagacuca

SEQ ID NO: 1913819 - RNA, 19 nt, Homo sapiens
  misc_RNA (1)...(19): siRNA sense strand
agaagcaucggucggagua

SEQ ID NO: 1913820 - RNA, 19 nt, Homo sapiens
  misc_RNA (1)...(19): siRNA sense strand
ugaugcagcuauggaguga

SEQ ID NO: 1913821 - RNA, 19 nt, Homo sapiens
  misc_RNA (1)...(19): siRNA sense strand
aacgauugaugaaguaguu

SEQ ID NO: 1913822 - RNA, 19 nt, Homo sapiens
  misc_RNA (1)...(19): siRNA sense strand
gauauugaacccaccauac

SEQ ID NO: 1913823 - RNA, 19 nt, Homo sapiens
  misc_RNA (1)...(19): siRNA sense strand
ugaagaugaucgaauugag

SEQ ID NO: 1913824 - RNA, 19 nt, Homo sapiens
  misc_RNA (1)...(19): siRNA sense strand
gaagcaggcacagguggaa

SEQ ID NO: 1913825 - RNA, 19 nt, Homo sapiens
  misc_RNA (1)...(19): siRNA sense strand
uguacggccucucggauga

SEQ ID NO: 1913826 - RNA, 19 nt, Homo sapiens
  misc_RNA (1)...(19): siRNA sense strand
uucaagcccuggcagauga

SEQ ID NO: 1913827 - RNA, 19 nt, Homo sapiens
  misc_RNA (1)...(19): siRNA sense strand
cagcagauagaauugaaga

SEQ ID NO: 1913828 - RNA, 19 nt, Homo sapiens
  misc_RNA (1)...(19): siRNA sense strand
ggagacaggcagcagaucu

SEQ ID NO: 1913829 - RNA, 19 nt, Homo sapiens
  misc_RNA (1)...(19): siRNA sense strand
gaagccaaacuuucugucu

SEQ ID NO: 1913830 - RNA, 19 nt, Homo sapiens
  misc_RNA (1)...(19): siRNA sense strand
gugaaugcauccgaacugu

SEQ ID NO: 1913831 - RNA, 19 nt, Homo sapiens
  misc_RNA (1)...(19): siRNA sense strand
gauaauaugagguguucag

SEQ ID NO: 1913832 - RNA, 19 nt, Homo sapiens
  misc_RNA (1)...(19): siRNA sense strand
gaucuacgagaaaggucua

SEQ ID NO: 1913833 - RNA, 19 nt, Homo sapiens
  misc_RNA (1)...(19): siRNA sense strand
gcagcagaucuacgagaaa

SEQ ID NO: 1913834 - RNA, 19 nt, Homo sapiens
  misc_RNA (1)...(19): siRNA sense strand
gcaaaacucagccacaaug

SEQ ID NO: 1913835 - RNA, 19 nt, Homo sapiens
  misc_RNA (1)...(19): siRNA sense strand
uaaaauccuugcacguuug

SEQ ID NO: 1913836 - RNA, 19 nt, Homo sapiens
  misc_RNA (1)...(19): siRNA sense strand
caacccgugcuuugaagaa

SEQ ID NO: 1913837 - RNA, 19 nt, Homo sapiens
  misc_RNA (1)...(19): siRNA sense strand
augcagcuauggagugaaa

SEQ ID NO: 1913838 - RNA, 19 nt, Homo sapiens
  misc_RNA (1)...(19): siRNA sense strand
cgaauugaggcuuuacuuc

SEQ ID NO: 1913839 - RNA, 19 nt, Homo sapiens
  misc_RNA (1)...(19): siRNA sense strand
agaaaggucuagaauuacg

SEQ ID NO: 1913840 - RNA, 19 nt, Homo sapiens
  misc_RNA (1)...(19): siRNA sense strand
gaugaggccagaugacaag

SEQ ID NO: 1913841 - RNA, 19 nt, Homo sapiens
  misc_RNA (1)...(19): siRNA sense strand
cagggacccaaauacaaua

SEQ ID NO: 1913842 - RNA, 19 nt, Homo sapiens
  misc_RNA (1)...(19): siRNA sense strand
uuaaaauccuugcacguuu

SEQ ID NO: 1913843 - RNA, 19 nt, Homo sapiens
  misc_RNA (1)...(19): siRNA sense strand
auugaggcuuuacuucaua

SEQ ID NO: 1913844 - RNA, 19 nt, Homo sapiens
  misc_RNA (1)...(19): siRNA sense strand
ugaucgaauugaggcuuua

SEQ ID NO: 1913845 - RNA, 19 nt, Homo sapiens
  misc_RNA (1)...(19): siRNA sense strand
gagaaaggucuagaauuac

SEQ ID NO: 1913846 - RNA, 19 nt, Homo sapiens
  misc_RNA (1)...(19): siRNA sense strand
acaaguaucacgagaagca

SEQ ID NO: 1913847 - RNA, 19 nt, Homo sapiens
  misc_RNA (1)...(19): siRNA sense strand
uuacagggacccaaauaca

SEQ ID NO: 1913848 - RNA, 19 nt, Homo sapiens
  misc_RNA (1)...(19): siRNA sense strand
aggaauggaccacuucuug

SEQ ID NO: 1913849 - RNA, 19 nt, Homo sapiens
  misc_RNA (1)...(19): siRNA sense strand
cgagaaaggucuagaauua

SEQ ID NO: 1913850 - RNA, 19 nt, Homo sapiens
  misc_RNA (1)...(19): siRNA sense strand
ccacgaagcucaagcagaa

SEQ ID NO: 1913851 - RNA, 19 nt, Homo sapiens
  misc_RNA (1)...(19): siRNA sense strand
gcuauggagugaaauauuu

SEQ ID NO: 1913852 - RNA, 19 nt, Homo sapiens
  misc_RNA (1)...(19): siRNA sense strand
gaagaggauugcagaaaug

SEQ ID NO: 1913853 - RNA, 19 nt, Homo sapiens
  misc_RNA (1)...(19): siRNA sense strand
ccaauggcaugguguauuu

SEQ ID NO: 1913854 - RNA, 19 nt, Homo sapiens
  misc_RNA (1)...(19): siRNA sense strand
ggaaaucaguuagcuaaau

SEQ ID NO: 1913855 - RNA, 19 nt, Homo sapiens
  misc_RNA (1)...(19): siRNA sense strand
gaaguugggaaaucaguua

SEQ ID NO: 1913856 - RNA, 19 nt, Homo sapiens
  misc_RNA (1)...(19): siRNA sense strand
ucaguuagcuaaauucaga

SEQ ID NO: 1913857 - RNA, 19 nt, Homo sapiens
  misc_RNA (1)...(19): siRNA sense strand
gaauggaccacuucuugua

SEQ ID NO: 1913858 - RNA, 19 nt, Homo sapiens
  misc_RNA (1)...(19): siRNA sense strand
aauaugagguguucaguga

SEQ ID NO: 1913859 - RNA, 19 nt, Homo sapiens
  misc_RNA (1)...(19): siRNA sense strand
gcagaugccucagacagaa

SEQ ID NO: 1913860 - RNA, 19 nt, Homo sapiens
  misc_RNA (1)...(19): siRNA sense strand
ugaagaggauugcagaaau

SEQ ID NO: 1913861 - RNA, 19 nt, Homo sapiens
  misc_RNA (1)...(19): siRNA sense strand
caaacuuucugucuucuca

SEQ ID NO: 1913862 - RNA, 19 nt, Homo sapiens
  misc_RNA (1)...(19): siRNA sense strand
caacaaagcaaaccucaag

SEQ ID NO: 1913863 - RNA, 19 nt, Homo sapiens
  misc_RNA (1)...(19): siRNA sense strand
gaggccagaugacaaguau

SEQ ID NO: 1913864 - RNA, 19 nt, Homo sapiens
  misc_RNA (1)...(19): siRNA sense strand
gagauaucccuguucagua

SEQ ID NO: 1913865 - RNA, 19 nt, Homo sapiens
  misc_RNA (1)...(19): siRNA sense strand
gaauuacggagucaacaaa

SEQ ID NO: 1913866 - RNA, 19 nt, Homo sapiens
  misc_RNA (1)...(19): siRNA sense strand
uuaggaagcuggucaugga

SEQ ID NO: 1913867 - RNA, 19 nt, Homo sapiens
  misc_RNA (1)...(19): siRNA sense strand
ucaaggugcuggugaagau

SEQ ID NO: 1913868 - RNA, 19 nt, Homo sapiens
  misc_RNA (1)...(19): siRNA sense strand
gaucgaaaccugccagaca

SEQ ID NO: 1913869 - RNA, 19 nt, Homo sapiens
  misc_RNA (1)...(19): siRNA sense strand
uaacaacccgugcuuugaa

SEQ ID NO: 1913870 - RNA, 19 nt, Homo sapiens
  misc_RNA (1)...(19): siRNA sense strand
gcagcuauggagugaaaua

SEQ ID NO: 1913871 - RNA, 19 nt, Homo sapiens
  misc_RNA (1)...(19): siRNA sense strand
ugacaaguaucacgagaag

SEQ ID NO: 1913872 - RNA, 19 nt, Homo sapiens
  misc_RNA (1)...(19): siRNA sense strand
ccaaauucuugcauacaga

SEQ ID NO: 1913873 - RNA, 19 nt, Homo sapiens
  misc_RNA (1)...(19): siRNA sense strand
gcucccaggucauuaggaa

SEQ ID NO: 1913874 - RNA, 19 nt, Homo sapiens
  misc_RNA (1)...(19): siRNA sense strand
gcagaaaugacagauauca

SEQ ID NO: 1913875 - RNA, 19 nt, Homo sapiens
  misc_RNA (1)...(19): siRNA sense strand
uugcagaaaugacagauau

SEQ ID NO: 1913876 - RNA, 19 nt, Homo sapiens
  misc_RNA (1)...(19): siRNA sense strand
ggcagcagaucuacgagaa

SEQ ID NO: 1913877 - RNA, 19 nt, Homo sapiens
  misc_RNA (1)...(19): siRNA sense strand
ggagauaucccuguucagu

SEQ ID NO: 1913878 - RNA, 19 nt, Homo sapiens
  misc_RNA (1)...(19): siRNA sense strand
cagcagcucugguggagau

SEQ ID NO: 1913879 - RNA, 19 nt, Homo sapiens
  misc_RNA (1)...(19): siRNA sense strand
aagcugacuuuaucgauga

SEQ ID NO: 1913880 - RNA, 19 nt, Homo sapiens
  misc_RNA (1)...(19): siRNA sense strand
ugaauuacgugggugaaug

SEQ ID NO: 1913881 - RNA, 19 nt, Homo sapiens
  misc_RNA (1)...(19): siRNA sense strand
gaacccaccauaccuguca

SEQ ID NO: 1913882 - RNA, 19 nt, Homo sapiens
  misc_RNA (1)...(19): siRNA sense strand
caaagcaaaccucaagaug

SEQ ID NO: 1913883 - RNA, 19 nt, Homo sapiens
  misc_RNA (1)...(19): siRNA sense strand
ccugacagcuggagauauc

SEQ ID NO: 1913884 - RNA, 19 nt, Homo sapiens
  misc_RNA (1)...(19): siRNA sense strand
acaaaggaauggaccacuu

SEQ ID NO: 1913885 - RNA, 19 nt, Homo sapiens
  misc_RNA (1)...(19): siRNA sense strand
ggagcucgccaauggaauu

SEQ ID NO: 1913886 - RNA, 19 nt, Homo sapiens
  misc_RNA (1)...(19): siRNA sense strand
cuguggagcucuugaaguu

SEQ ID NO: 1913887 - RNA, 19 nt, Homo sapiens
  misc_RNA (1)...(19): siRNA sense strand
gcugcggccuucuugacua

SEQ ID NO: 1913888 - RNA, 19 nt, Homo sapiens
  misc_RNA (1)...(19): siRNA sense strand
cgacgaagccaaacuuucu

SEQ ID NO: 1913889 - RNA, 19 nt, Homo sapiens
  misc_RNA (1)...(19): siRNA sense strand
ggacccaaauacaauagag

SEQ ID NO: 1913890 - RNA, 19 nt, Homo sapiens
  misc_RNA (1)...(19): siRNA sense strand
ccagaucaugccagucuua

SEQ ID NO: 1913891 - RNA, 19 nt, Homo sapiens
  misc_RNA (1)...(19): siRNA sense strand
gugauaauaugagguguuc

SEQ ID NO: 1913892 - RNA, 19 nt, Homo sapiens
  misc_RNA (1)...(19): siRNA sense strand
gaaaugacagauaucaaac

SEQ ID NO: 1913893 - RNA, 19 nt, Homo sapiens
  misc_RNA (1)...(19): siRNA sense strand
gagacaggcagcagaucua

SEQ ID NO: 1913894 - RNA, 19 nt, Homo sapiens
  misc_RNA (1)...(19): siRNA sense strand
ggaauggaccacuucuugu

SEQ ID NO: 1913895 - RNA, 19 nt, Homo sapiens
  misc_RNA (1)...(19): siRNA sense strand
agacaucgacgaagccaaa

SEQ ID NO: 1913896 - RNA, 19 nt, Homo sapiens
  misc_RNA (1)...(19): siRNA sense strand
cagcagaucuacgagaaag

SEQ ID NO: 1913897 - RNA, 19 nt, Homo sapiens
  misc_RNA (1)...(19): siRNA sense strand
gaucaugccagucuuaaaa

SEQ ID NO: 1913898 - RNA, 19 nt, Homo sapiens
  misc_RNA (1)...(19): siRNA sense strand
gaugacugccaaauucuug

SEQ ID NO: 1913899 - RNA, 19 nt, Homo sapiens
  misc_RNA (1)...(19): siRNA sense strand
gcauacagaaauucgagaa

SEQ ID NO: 1913900 - RNA, 19 nt, Homo sapiens
  misc_RNA (1)...(19): siRNA sense strand
ggccagaugacaaguauca

SEQ ID NO: 1913901 - RNA, 19 nt, Homo sapiens
  misc_RNA (1)...(19): siRNA sense strand
caaaggaauggaccacuuc

SEQ ID NO: 1913902 - RNA, 19 nt, Homo sapiens
  misc_RNA (1)...(19): siRNA sense strand
agacagugccugcaggaaa

SEQ ID NO: 1913903 - RNA, 19 nt, Homo sapiens
  misc_RNA (1)...(19): siRNA sense strand
caauggaauuccugacucu

SEQ ID NO: 1913904 - RNA, 19 nt, Homo sapiens
  misc_RNA (1)...(19): siRNA sense strand
ugggaaaucaguuagcuaa

SEQ ID NO: 1913905 - RNA, 19 nt, Homo sapiens
  misc_RNA (1)...(19): siRNA sense strand
agauaucccuguucaguac

SEQ ID NO: 1913906 - RNA, 19 nt, Homo sapiens
  misc_RNA (1)...(19): siRNA sense strand
acucacacauggacaccua

SEQ ID NO: 1913907 - RNA, 19 nt, Homo sapiens
  misc_RNA (1)...(19): siRNA sense strand
gacagugccugcaggaaaa

SEQ ID NO: 1913908 - RNA, 19 nt, Homo sapiens
  misc_RNA (1)...(19): siRNA sense strand
aagccaaacuuucugucuu

SEQ ID NO: 1913909 - RNA, 19 nt, Homo sapiens
  misc_RNA (1)...(19): siRNA sense strand
gccaaauucuugcauacag

SEQ ID NO: 1913910 - RNA, 19 nt, Homo sapiens
  misc_RNA (1)...(19): siRNA sense strand
aagcaucggucggaguaaa

SEQ ID NO: 1913911 - RNA, 19 nt, Homo sapiens
  misc_RNA (1)...(19): siRNA sense strand
gaggauugcagaaaugaca

SEQ ID NO: 1913912 - RNA, 19 nt, Homo sapiens
  misc_RNA (1)...(19): siRNA sense strand
gauauugaacccaccauac

SEQ ID NO: 1913913 - RNA, 19 nt, Homo sapiens
  misc_RNA (1)...(19): siRNA sense strand
ccuggcagaugaagacuca

SEQ ID NO: 1913914 - RNA, 19 nt, Homo sapiens
  misc_RNA (1)...(19): siRNA sense strand
agaagcaucggucggagua

SEQ ID NO: 1913915 - RNA, 19 nt, Homo sapiens
  misc_RNA (1)...(19): siRNA sense strand
ugaugcagcuauggaguga

SEQ ID NO: 1913916 - RNA, 19 nt, Homo sapiens
  misc_RNA (1)...(19): siRNA sense strand
gaagcaggcacagguggaa

SEQ ID NO: 1913917 - RNA, 19 nt, Homo sapiens
  misc_RNA (1)...(19): siRNA sense strand
uguacggccucucggauga

SEQ ID NO: 1913918 - RNA, 19 nt, Homo sapiens
  misc_RNA (1)...(19): siRNA sense strand
uucaagcccuggcagauga

SEQ ID NO: 1913919 - RNA, 19 nt, Homo sapiens
  misc_RNA (1)...(19): siRNA sense strand
cagcagauagaauugaaga

SEQ ID NO: 1913920 - RNA, 19 nt, Homo sapiens
  misc_RNA (1)...(19): siRNA sense strand
ggagacaggcagcagaucu

SEQ ID NO: 1913921 - RNA, 19 nt, Homo sapiens
  misc_RNA (1)...(19): siRNA sense strand
gaagccaaacuuucugucu

SEQ ID NO: 1913922 - RNA, 19 nt, Homo sapiens
  misc_RNA (1)...(19): siRNA sense strand
gugaaugcauccgaacugu

SEQ ID NO: 1913923 - RNA, 19 nt, Homo sapiens
  misc_RNA (1)...(19): siRNA sense strand
gauaauaugagguguucag

SEQ ID NO: 1913924 - RNA, 19 nt, Homo sapiens
  misc_RNA (1)...(19): siRNA sense strand
gaucuacgagaaaggucua

SEQ ID NO: 1913925 - RNA, 19 nt, Homo sapiens
  misc_RNA (1)...(19): siRNA sense strand
gcagcagaucuacgagaaa

SEQ ID NO: 1913926 - RNA, 19 nt, Homo sapiens
  misc_RNA (1)...(19): siRNA sense strand
gcaaaacucagccacaaug

SEQ ID NO: 1913927 - RNA, 19 nt, Homo sapiens
  misc_RNA (1)...(19): siRNA sense strand
uaaaauccuugcacguuug

SEQ ID NO: 1913928 - RNA, 19 nt, Homo sapiens
  misc_RNA (1)...(19): siRNA sense strand
caacccgugcuuugaagaa

SEQ ID NO: 1913929 - RNA, 19 nt, Homo sapiens
  misc_RNA (1)...(19): siRNA sense strand
augcagcuauggagugaaa

SEQ ID NO: 1913930 - RNA, 19 nt, Homo sapiens
  misc_RNA (1)...(19): siRNA sense strand
agaaaggucuagaauuacg

SEQ ID NO: 1913931 - RNA, 19 nt, Homo sapiens
  misc_RNA (1)...(19): siRNA sense strand
gagaaaggucuagaauuac

SEQ ID NO: 1913932 - RNA, 19 nt, Homo sapiens
  misc_RNA (1)...(19): siRNA sense strand
cagggacccaaauacaaua

SEQ ID NO: 1913933 - RNA, 19 nt, Homo sapiens
  misc_RNA (1)...(19): siRNA sense strand
uuaaaauccuugcacguuu

SEQ ID NO: 1913934 - RNA, 19 nt, Homo sapiens
  misc_RNA (1)...(19): siRNA sense strand
acaaguaucacgagaagca

SEQ ID NO: 1913935 - RNA, 19 nt, Homo sapiens
  misc_RNA (1)...(19): siRNA sense strand
gaugaggccagaugacaag

SEQ ID NO: 1913936 - RNA, 19 nt, Homo sapiens
  misc_RNA (1)...(19): siRNA sense strand
cugccagcguugaaaguuu

SEQ ID NO: 1913937 - RNA, 19 nt, Homo sapiens
  misc_RNA (1)...(19): siRNA sense strand
aggaauggaccacuucuug

SEQ ID NO: 1913938 - RNA, 19 nt, Homo sapiens
  misc_RNA (1)...(19): siRNA sense strand
uuacagggacccaaauaca

SEQ ID NO: 1913939 - RNA, 19 nt, Homo sapiens
  misc_RNA (1)...(19): siRNA sense strand
uuagcuaaauucagacagu

SEQ ID NO: 1913940 - RNA, 19 nt, Homo sapiens
  misc_RNA (1)...(19): siRNA sense strand
gcgcaaaacucagccacaa

SEQ ID NO: 1913941 - RNA, 19 nt, Homo sapiens
  misc_RNA (1)...(19): siRNA sense strand
gcucagcagauagaauuga

SEQ ID NO: 1913942 - RNA, 19 nt, Homo sapiens
  misc_RNA (1)...(19): siRNA sense strand
cuggagauaucccuguuca

SEQ ID NO: 1913943 - RNA, 19 nt, Homo sapiens
  misc_RNA (1)...(19): siRNA sense strand
cgauauugaacccaccaua

SEQ ID NO: 1913944 - RNA, 19 nt, Homo sapiens
  misc_RNA (1)...(19): siRNA sense strand
gaugaagaggauugcagaa

SEQ ID NO: 1913945 - RNA, 19 nt, Homo sapiens
  misc_RNA (1)...(19): siRNA sense strand
gcagaucuacgagaaaggu

SEQ ID NO: 1913946 - RNA, 19 nt, Homo sapiens
  misc_RNA (1)...(19): siRNA sense strand
gggaaaucaguuagcuaaa

SEQ ID NO: 1913947 - RNA, 19 nt, Homo sapiens
  misc_RNA (1)...(19): siRNA sense strand
cuacgagaaaggucuagaa

SEQ ID NO: 1913948 - RNA, 19 nt, Homo sapiens
  misc_RNA (1)...(19): siRNA sense strand
agccaaacuuucugucuuc

SEQ ID NO: 1913949 - RNA, 19 nt, Homo sapiens
  misc_RNA (1)...(19): siRNA sense strand
gggcagcacucccuuauuu

SEQ ID NO: 1913950 - RNA, 19 nt, Homo sapiens
  misc_RNA (1)...(19): siRNA sense strand
gaagaaggaaugagaagua

SEQ ID NO: 1913951 - RNA, 19 nt, Homo sapiens
  misc_RNA (1)...(19): siRNA sense strand
caagugagaucaaugaaga

SEQ ID NO: 1913952 - RNA, 19 nt, Homo sapiens
  misc_RNA (1)...(19): siRNA sense strand
gaugauggcuaccagauug

SEQ ID NO: 1913953 - RNA, 19 nt, Homo sapiens
  misc_RNA (1)...(19): siRNA sense strand
gcuaccagauugucuauaa

SEQ ID NO: 1913954 - RNA, 19 nt, Homo sapiens
  misc_RNA (1)...(19): siRNA sense strand
gcacagggcagcugguaua

SEQ ID NO: 1913955 - RNA, 19 nt, Homo sapiens
  misc_RNA (1)...(19): siRNA sense strand
ggagaacacuuugcagcua

SEQ ID NO: 1913956 - RNA, 19 nt, Homo sapiens
  misc_RNA (1)...(19): siRNA sense strand
ggaaugagaaguacgauau

SEQ ID NO: 1913957 - RNA, 19 nt, Homo sapiens
  misc_RNA (1)...(19): siRNA sense strand
gagaacacuuugcagcuaa

SEQ ID NO: 1913958 - RNA, 19 nt, Homo sapiens
  misc_RNA (1)...(19): siRNA sense strand
caaguuagauccacagaca

SEQ ID NO: 1913959 - RNA, 19 nt, Homo sapiens
  misc_RNA (1)...(19): siRNA sense strand
uaugguggcuuucuuuauu

SEQ ID NO: 1913960 - RNA, 19 nt, Homo sapiens
  misc_RNA (1)...(19): siRNA sense strand
gcugguauaugguggcuuu

SEQ ID NO: 1913961 - RNA, 19 nt, Homo sapiens
  misc_RNA (1)...(19): siRNA sense strand
cagagaagaucuacguguu

SEQ ID NO: 1913962 - RNA, 19 nt, Homo sapiens
  misc_RNA (1)...(19): siRNA sense strand
gagaagaucuacguguuag

SEQ ID NO: 1913963 - RNA, 19 nt, Homo sapiens
  misc_RNA (1)...(19): siRNA sense strand
gaagaaagaggaggagguu

SEQ ID NO: 1913964 - RNA, 19 nt, Homo sapiens
  misc_RNA (1)...(19): siRNA sense strand
gaacugaggccgacaccau

SEQ ID NO: 1913965 - RNA, 19 nt, Homo sapiens
  misc_RNA (1)...(19): siRNA sense strand
uacacaaucucucaaguga

SEQ ID NO: 1913966 - RNA, 19 nt, Homo sapiens
  misc_RNA (1)...(19): siRNA sense strand
gaaagaggaggagguuuga

SEQ ID NO: 1913967 - RNA, 19 nt, Homo sapiens
  misc_RNA (1)...(19): siRNA sense strand
ugaagauucugaagcgauu

SEQ ID NO: 1913968 - RNA, 19 nt, Homo sapiens
  misc_RNA (1)...(19): siRNA sense strand
gaaguacgauauggugaca

SEQ ID NO: 1913969 - RNA, 19 nt, Homo sapiens
  misc_RNA (1)...(19): siRNA sense strand
guacauggaacgccgacua

SEQ ID NO: 1913970 - RNA, 19 nt, Homo sapiens
  misc_RNA (1)...(19): siRNA sense strand
gaaggaaugagaaguacga

SEQ ID NO: 1913971 - RNA, 19 nt, Homo sapiens
  misc_RNA (1)...(19): siRNA sense strand
guguagaguuugaugagaa

SEQ ID NO: 1913972 - RNA, 19 nt, Homo sapiens
  misc_RNA (1)...(19): siRNA sense strand
cagggcagcugguauaugg

SEQ ID NO: 1913973 - RNA, 19 nt, Homo sapiens
  misc_RNA (1)...(19): siRNA sense strand
ucuauaagcuggagaugag

SEQ ID NO: 1913974 - RNA, 19 nt, Homo sapiens
  misc_RNA (1)...(19): siRNA sense strand
ccgacuagcugcuuuagag

SEQ ID NO: 1913975 - RNA, 19 nt, Homo sapiens
  misc_RNA (1)...(19): siRNA sense strand
cacagacacuggacacaga

SEQ ID NO: 1913976 - RNA, 19 nt, Homo sapiens
  misc_RNA (1)...(19): siRNA sense strand
ccuggcagcugaugaggaa

SEQ ID NO: 1913977 - RNA, 19 nt, Homo sapiens
  misc_RNA (1)...(19): siRNA sense strand
gguauaugguggcuuucuu

SEQ ID NO: 1913978 - RNA, 19 nt, Homo sapiens
  misc_RNA (1)...(19): siRNA sense strand
agagaagaucuacguguua

SEQ ID NO: 1913979 - RNA, 19 nt, Homo sapiens
  misc_RNA (1)...(19): siRNA sense strand
ugagaucaaugaagauucu

SEQ ID NO: 1913980 - RNA, 19 nt, Homo sapiens
  misc_RNA (1)...(19): siRNA sense strand
gacccucuaugucgucuau

SEQ ID NO: 1913981 - RNA, 19 nt, Homo sapiens
  misc_RNA (1)...(19): siRNA sense strand
guauaugguggcuuucuuu

SEQ ID NO: 1913982 - RNA, 19 nt, Homo sapiens
  misc_RNA (1)...(19): siRNA sense strand
agaaagaggaggagguuug

SEQ ID NO: 1913983 - RNA, 19 nt, Homo sapiens
  misc_RNA (1)...(19): siRNA sense strand
gaucaaugaagauucugaa

SEQ ID NO: 1913984 - RNA, 19 nt, Homo sapiens
  misc_RNA (1)...(19): siRNA sense strand
ugccauggcugcccggaaa

SEQ ID NO: 1913985 - RNA, 19 nt, Homo sapiens
  misc_RNA (1)...(19): siRNA sense strand
gaaugagaaguacgauaug

SEQ ID NO: 1913986 - RNA, 19 nt, Homo sapiens
  misc_RNA (1)...(19): siRNA sense strand
aaacagagaagaucuacgu

SEQ ID NO: 1913987 - RNA, 19 nt, Homo sapiens
  misc_RNA (1)...(19): siRNA sense strand
uauaugguggcuuucuuua

SEQ ID NO: 1913988 - RNA, 19 nt, Homo sapiens
  misc_RNA (1)...(19): siRNA sense strand
cuccucaucuuguuccuuu

SEQ ID NO: 1913989 - RNA, 19 nt, Homo sapiens
  misc_RNA (1)...(19): siRNA sense strand
ggacuucaagaacaagaug

SEQ ID NO: 1913990 - RNA, 19 nt, Homo sapiens
  misc_RNA (1)...(19): siRNA sense strand
ggaugauggcuaccagauu

SEQ ID NO: 1913991 - RNA, 19 nt, Homo sapiens
  misc_RNA (1)...(19): siRNA sense strand
gcuacacaaucucucaagu

SEQ ID NO: 1913992 - RNA, 19 nt, Homo sapiens
  misc_RNA (1)...(19): siRNA sense strand
uagaugggacacagaauga

SEQ ID NO: 1913993 - RNA, 19 nt, Homo sapiens
  misc_RNA (1)...(19): siRNA sense strand
gcaagggaagaaggaauga

SEQ ID NO: 1913994 - RNA, 19 nt, Homo sapiens
  misc_RNA (1)...(19): siRNA sense strand
cgagaacgccagcucuaug

SEQ ID NO: 1913995 - RNA, 19 nt, Homo sapiens
  misc_RNA (1)...(19): siRNA sense strand
gcagugggacacaccaugu

SEQ ID NO: 1913996 - RNA, 19 nt, Homo sapiens
  misc_RNA (1)...(19): siRNA sense strand
gaccaaaggcaagggaaga

SEQ ID NO: 1913997 - RNA, 19 nt, Homo sapiens
  misc_RNA (1)...(19): siRNA sense strand
caugccagccuccgcuaua

SEQ ID NO: 1913998 - RNA, 19 nt, Homo sapiens
  misc_RNA (1)...(19): siRNA sense strand
cccucuaugucgucuauaa

SEQ ID NO: 1913999 - RNA, 19 nt, Homo sapiens
  misc_RNA (1)...(19): siRNA sense strand
gaaggucuuugggcugucu

SEQ ID NO: 1914000 - RNA, 19 nt, Homo sapiens
  misc_RNA (1)...(19): siRNA sense strand
ggagcgggagguagacuau

SEQ ID NO: 1914001 - RNA, 19 nt, Homo sapiens
  misc_RNA (1)...(19): siRNA sense strand
ucaaauuccaccuggcaaa

SEQ ID NO: 1914002 - RNA, 19 nt, Homo sapiens
  misc_RNA (1)...(19): siRNA sense strand
gaacgccgacuagcugcuu

SEQ ID NO: 1914003 - RNA, 19 nt, Homo sapiens
  misc_RNA (1)...(19): siRNA sense strand
ggaagaaggaaugagaagu

SEQ ID NO: 1914004 - RNA, 19 nt, Homo sapiens
  misc_RNA (1)...(19): siRNA sense strand
gaggaugacaggcacuugu

SEQ ID NO: 1914005 - RNA, 19 nt, Homo sapiens
  misc_RNA (1)...(19): siRNA sense strand
gcaaacagagaagaucuac

SEQ ID NO: 1914006 - RNA, 19 nt, Homo sapiens
  misc_RNA (1)...(19): siRNA sense strand
ggcaagggaagaaggaaug

SEQ ID NO: 1914007 - RNA, 19 nt, Homo sapiens
  misc_RNA (1)...(19): siRNA sense strand
cagcagacaccuacaucga

SEQ ID NO: 1914008 - RNA, 19 nt, Homo sapiens
  misc_RNA (1)...(19): siRNA sense strand
gguggacagcucaguauuc

SEQ ID NO: 1914009 - RNA, 19 nt, Homo sapiens
  misc_RNA (1)...(19): siRNA sense strand
ggcaaacagagaagaucua

SEQ ID NO: 1914010 - RNA, 19 nt, Homo sapiens
  misc_RNA (1)...(19): siRNA sense strand
uggcccagcuggucuaugg

SEQ ID NO: 1914011 - RNA, 19 nt, Homo sapiens
  misc_RNA (1)...(19): siRNA sense strand
aguacgauauggugacaga

SEQ ID NO: 1914012 - RNA, 19 nt, Homo sapiens
  misc_RNA (1)...(19): siRNA sense strand
cuacacaaucucucaagug

SEQ ID NO: 1914013 - RNA, 19 nt, Homo sapiens
  misc_RNA (1)...(19): siRNA sense strand
gagcugcgggacuucaaga

SEQ ID NO: 1914014 - RNA, 19 nt, Homo sapiens
  misc_RNA (1)...(19): siRNA sense strand
gacagcagcaccaccuugu

SEQ ID NO: 1914015 - RNA, 19 nt, Homo sapiens
  misc_RNA (1)...(19): siRNA sense strand
cugcugagcugcgggacuu

SEQ ID NO: 1914016 - RNA, 19 nt, Homo sapiens
  misc_RNA (1)...(19): siRNA sense strand
cugcgggacuucaagaaca

SEQ ID NO: 1914017 - RNA, 19 nt, Homo sapiens
  misc_RNA (1)...(19): siRNA sense strand
gugagauggagaacacuuu

SEQ ID NO: 1914018 - RNA, 19 nt, Homo sapiens
  misc_RNA (1)...(19): siRNA sense strand
acuagcugcuuuagaggaa

SEQ ID NO: 1914019 - RNA, 19 nt, Homo sapiens
  misc_RNA (1)...(19): siRNA sense strand
gaagauucugaagcgauuu

SEQ ID NO: 1914020 - RNA, 19 nt, Homo sapiens
  misc_RNA (1)...(19): siRNA sense strand
gagaacgccagcucuaugc

SEQ ID NO: 1914021 - RNA, 19 nt, Homo sapiens
  misc_RNA (1)...(19): siRNA sense strand
guggugagauggagaacac

SEQ ID NO: 1914022 - RNA, 19 nt, Homo sapiens
  misc_RNA (1)...(19): siRNA sense strand
ugguggagguggugagaug

SEQ ID NO: 1914023 - RNA, 19 nt, Homo sapiens
  misc_RNA (1)...(19): siRNA sense strand
gaugggacacagaaugaca

SEQ ID NO: 1914024 - RNA, 19 nt, Homo sapiens
  misc_RNA (1)...(19): siRNA sense strand
gagcgggaggcacucagaa

SEQ ID NO: 1914025 - RNA, 19 nt, Homo sapiens
  misc_RNA (1)...(19): siRNA sense strand
augguggcuuucuuuauuu

SEQ ID NO: 1914026 - RNA, 19 nt, Homo sapiens
  misc_RNA (1)...(19): siRNA sense strand
gggaagaaggaaugagaag

SEQ ID NO: 1914027 - RNA, 19 nt, Homo sapiens
  misc_RNA (1)...(19): siRNA sense strand
ugagauggagaacacuuug

SEQ ID NO: 1914028 - RNA, 19 nt, Homo sapiens
  misc_RNA (1)...(19): siRNA sense strand
aagaaggaaugagaaguac

SEQ ID NO: 1914029 - RNA, 19 nt, Homo sapiens
  misc_RNA (1)...(19): siRNA sense strand
gggaugauggcuaccagau

SEQ ID NO: 1914030 - RNA, 19 nt, Homo sapiens
  misc_RNA (1)...(19): siRNA sense strand
gagguggugagauggagaa

SEQ ID NO: 1914031 - RNA, 19 nt, Homo sapiens
  misc_RNA (1)...(19): siRNA sense strand
agaaugacacagccuuugu

SEQ ID NO: 1914032 - RNA, 19 nt, Homo sapiens
  misc_RNA (1)...(19): siRNA sense strand
cagaaugacacagccuuug

SEQ ID NO: 1914033 - RNA, 19 nt, Homo sapiens
  misc_RNA (1)...(19): siRNA sense strand
aaugagaaguacgauaugg

SEQ ID NO: 1914034 - RNA, 19 nt, Homo sapiens
  misc_RNA (1)...(19): siRNA sense strand
acacuuugcagcuaaucaa

SEQ ID NO: 1914035 - RNA, 19 nt, Homo sapiens
  misc_RNA (1)...(19): siRNA sense strand
ucccaaggcugcgugacuu

SEQ ID NO: 1914036 - RNA, 19 nt, Homo sapiens
  misc_RNA (1)...(19): siRNA sense strand
uuagaugggacacagaaug

SEQ ID NO: 1914037 - RNA, 19 nt, Homo sapiens
  misc_RNA (1)...(19): siRNA sense strand
gggcaaacagagaagaucu

SEQ ID NO: 1914038 - RNA, 19 nt, Homo sapiens
  misc_RNA (1)...(19): siRNA sense strand
acccagcucugcccugugu

SEQ ID NO: 1914039 - RNA, 19 nt, Homo sapiens
  misc_RNA (1)...(19): siRNA sense strand
acagaaugacacagccuuu

SEQ ID NO: 1914040 - RNA, 19 nt, Homo sapiens
  misc_RNA (1)...(19): siRNA sense strand
cuaccagauugucuauaag

SEQ ID NO: 1914041 - RNA, 19 nt, Homo sapiens
  misc_RNA (1)...(19): siRNA sense strand
gacagcagacaccuacauc

SEQ ID NO: 1914042 - RNA, 19 nt, Homo sapiens
  misc_RNA (1)...(19): siRNA sense strand
aagggaagaaggaaugaga

SEQ ID NO: 1914043 - RNA, 19 nt, Homo sapiens
  misc_RNA (1)...(19): siRNA sense strand
auccagugcuccuuugaug

SEQ ID NO: 1914044 - RNA, 19 nt, Homo sapiens
  misc_RNA (1)...(19): siRNA sense strand
gcauccagugcuccuuuga

SEQ ID NO: 1914045 - RNA, 19 nt, Homo sapiens
  misc_RNA (1)...(19): siRNA sense strand
ccgcauccagugcuccuuu

SEQ ID NO: 1914046 - RNA, 19 nt, Homo sapiens
  misc_RNA (1)...(19): siRNA sense strand
caccaugucccagagagaa

SEQ ID NO: 1914047 - RNA, 19 nt, Homo sapiens
  misc_RNA (1)...(19): siRNA sense strand
ggaugacaggcacuugugu

SEQ ID NO: 1914048 - RNA, 19 nt, Homo sapiens
  misc_RNA (1)...(19): siRNA sense strand
uggaggcccugggaccaaa

SEQ ID NO: 1914049 - RNA, 19 nt, Homo sapiens
  misc_RNA (1)...(19): siRNA sense strand
ggagaaaggcgaacagaua

SEQ ID NO: 1914050 - RNA, 19 nt, Homo sapiens
  misc_RNA (1)...(19): siRNA sense strand
ccuaagcacuuccauaaua

SEQ ID NO: 1914051 - RNA, 19 nt, Homo sapiens
  misc_RNA (1)...(19): siRNA sense strand
ggaaggcagucuuucuaua

SEQ ID NO: 1914052 - RNA, 19 nt, Homo sapiens
  misc_RNA (1)...(19): siRNA sense strand
caaaggaaagccuguauua

SEQ ID NO: 1914053 - RNA, 19 nt, Homo sapiens
  misc_RNA (1)...(19): siRNA sense strand
cgacuucuacgacuuauua

SEQ ID NO: 1914054 - RNA, 19 nt, Homo sapiens
  misc_RNA (1)...(19): siRNA sense strand
aggaaagccuguauuauuu

SEQ ID NO: 1914055 - RNA, 19 nt, Homo sapiens
  misc_RNA (1)...(19): siRNA sense strand
gaaaggagacagcaguauu

SEQ ID NO: 1914056 - RNA, 19 nt, Homo sapiens
  misc_RNA (1)...(19): siRNA sense strand
gaacaggaacuaugguuug

SEQ ID NO: 1914057 - RNA, 19 nt, Homo sapiens
  misc_RNA (1)...(19): siRNA sense strand
gaaauauguucaacugcaa

SEQ ID NO: 1914058 - RNA, 19 nt, Homo sapiens
  misc_RNA (1)...(19): siRNA sense strand
gagaaaggcgaacagauaa

SEQ ID NO: 1914059 - RNA, 19 nt, Homo sapiens
  misc_RNA (1)...(19): siRNA sense strand
gcacacaucuuuuauugaa

SEQ ID NO: 1914060 - RNA, 19 nt, Homo sapiens
  misc_RNA (1)...(19): siRNA sense strand
ugaaacaucucuacaacug

SEQ ID NO: 1914061 - RNA, 19 nt, Homo sapiens
  misc_RNA (1)...(19): siRNA sense strand
gaaauccaaucaaggaagu

SEQ ID NO: 1914062 - RNA, 19 nt, Homo sapiens
  misc_RNA (1)...(19): siRNA sense strand
guugugcgguuucuagaua

SEQ ID NO: 1914063 - RNA, 19 nt, Homo sapiens
  misc_RNA (1)...(19): siRNA sense strand
agacggauacucuuuauaa

SEQ ID NO: 1914064 - RNA, 19 nt, Homo sapiens
  misc_RNA (1)...(19): siRNA sense strand
gaaagaaagcccacacaca

SEQ ID NO: 1914065 - RNA, 19 nt, Homo sapiens
  misc_RNA (1)...(19): siRNA sense strand
ccacagacaagugaauuua

SEQ ID NO: 1914066 - RNA, 19 nt, Homo sapiens
  misc_RNA (1)...(19): siRNA sense strand
auucgaaucuuccuacaua

SEQ ID NO: 1914067 - RNA, 19 nt, Homo sapiens
  misc_RNA (1)...(19): siRNA sense strand
ggaggcaccugcgaaagaa

SEQ ID NO: 1914068 - RNA, 19 nt, Homo sapiens
  misc_RNA (1)...(19): siRNA sense strand
aaagaaagcccacacacaa

SEQ ID NO: 1914069 - RNA, 19 nt, Homo sapiens
  misc_RNA (1)...(19): siRNA sense strand
caaggaaguugugcgguuu

SEQ ID NO: 1914070 - RNA, 19 nt, Homo sapiens
  misc_RNA (1)...(19): siRNA sense strand
ucaauuguaucauccuuug

SEQ ID NO: 1914071 - RNA, 19 nt, Homo sapiens
  misc_RNA (1)...(19): siRNA sense strand
aaggaaagccuguauuauu

SEQ ID NO: 1914072 - RNA, 19 nt, Homo sapiens
  misc_RNA (1)...(19): siRNA sense strand
gaaggcagucuuucuauag

SEQ ID NO: 1914073 - RNA, 19 nt, Homo sapiens
  misc_RNA (1)...(19): siRNA sense strand
ugaaagagcuuacgauccu

SEQ ID NO: 1914074 - RNA, 19 nt, Homo sapiens
  misc_RNA (1)...(19): siRNA sense strand
gaaaaugacuuccagugau

SEQ ID NO: 1914075 - RNA, 19 nt, Homo sapiens
  misc_RNA (1)...(19): siRNA sense strand
gacggauacucuuuauaaa

SEQ ID NO: 1914076 - RNA, 19 nt, Homo sapiens
  misc_RNA (1)...(19): siRNA sense strand
uuuauucgauuccucguua

SEQ ID NO: 1914077 - RNA, 19 nt, Homo sapiens
  misc_RNA (1)...(19): siRNA sense strand
gagaauuuauccaucagau

SEQ ID NO: 1914078 - RNA, 19 nt, Homo sapiens
  misc_RNA (1)...(19): siRNA sense strand
ucauaugacagcaagauua

SEQ ID NO: 1914079 - RNA, 19 nt, Homo sapiens
  misc_RNA (1)...(19): siRNA sense strand
ucacugacagcaaacuuua

SEQ ID NO: 1914080 - RNA, 19 nt, Homo sapiens
  misc_RNA (1)...(19): siRNA sense strand
guggauggcucaagaucuu

SEQ ID NO: 1914081 - RNA, 19 nt, Homo sapiens
  misc_RNA (1)...(19): siRNA sense strand
uacaaucuaugcagugaaa

SEQ ID NO: 1914082 - RNA, 19 nt, Homo sapiens
  misc_RNA (1)...(19): siRNA sense strand
gcaaaggaaagccuguauu

SEQ ID NO: 1914083 - RNA, 19 nt, Homo sapiens
  misc_RNA (1)...(19): siRNA sense strand
gaaagagcuuacgauccua

SEQ ID NO: 1914084 - RNA, 19 nt, Homo sapiens
  misc_RNA (1)...(19): siRNA sense strand
uaucgagucuacaaucuau

SEQ ID NO: 1914085 - RNA, 19 nt, Homo sapiens
  misc_RNA (1)...(19): siRNA sense strand
gaaucuuccuacauacuau

SEQ ID NO: 1914086 - RNA, 19 nt, Homo sapiens
  misc_RNA (1)...(19): siRNA sense strand
ccacacacaagugaauuua

SEQ ID NO: 1914087 - RNA, 19 nt, Homo sapiens
  misc_RNA (1)...(19): siRNA sense strand
guuugugccuuccuuauug

SEQ ID NO: 1914088 - RNA, 19 nt, Homo sapiens
  misc_RNA (1)...(19): siRNA sense strand
uaagaaggcggguuucaga

SEQ ID NO: 1914089 - RNA, 19 nt, Homo sapiens
  misc_RNA (1)...(19): siRNA sense strand
aaaggagacagcaguauuu

SEQ ID NO: 1914090 - RNA, 19 nt, Homo sapiens
  misc_RNA (1)...(19): siRNA sense strand
cauaugacagcaagauuaa

SEQ ID NO: 1914091 - RNA, 19 nt, Homo sapiens
  misc_RNA (1)...(19): siRNA sense strand
cagaacguauuauugcuau

SEQ ID NO: 1914092 - RNA, 19 nt, Homo sapiens
  misc_RNA (1)...(19): siRNA sense strand
uaaaggaggcacagauaga

SEQ ID NO: 1914093 - RNA, 19 nt, Homo sapiens
  misc_RNA (1)...(19): siRNA sense strand
gaacguauuauugcuaugu

SEQ ID NO: 1914094 - RNA, 19 nt, Homo sapiens
  misc_RNA (1)...(19): siRNA sense strand
gaaguugugcgguuucuag

SEQ ID NO: 1914095 - RNA, 19 nt, Homo sapiens
  misc_RNA (1)...(19): siRNA sense strand
gauacugccauuauuguga

SEQ ID NO: 1914096 - RNA, 19 nt, Homo sapiens
  misc_RNA (1)...(19): siRNA sense strand
gcacggagaauuuauccau

SEQ ID NO: 1914097 - RNA, 19 nt, Homo sapiens
  misc_RNA (1)...(19): siRNA sense strand
gacagcaaacuuuauauuc

SEQ ID NO: 1914098 - RNA, 19 nt, Homo sapiens
  misc_RNA (1)...(19): siRNA sense strand
uaacaggcuuuaucuacca

SEQ ID NO: 1914099 - RNA, 19 nt, Homo sapiens
  misc_RNA (1)...(19): siRNA sense strand
aauguucgguacuugauaa

SEQ ID NO: 1914100 - RNA, 19 nt, Homo sapiens
  misc_RNA (1)...(19): siRNA sense strand
ccaaauagaaauggagaaa

SEQ ID NO: 1914101 - RNA, 19 nt, Homo sapiens
  misc_RNA (1)...(19): siRNA sense strand
ucguagcgauucacuguaa

SEQ ID NO: 1914102 - RNA, 19 nt, Homo sapiens
  misc_RNA (1)...(19): siRNA sense strand
ucucauggauguucuucuu

SEQ ID NO: 1914103 - RNA, 19 nt, Homo sapiens
  misc_RNA (1)...(19): siRNA sense strand
auaauagggucguuagaau

SEQ ID NO: 1914104 - RNA, 19 nt, Homo sapiens
  misc_RNA (1)...(19): siRNA sense strand
gauccuaagcacuuccaua

SEQ ID NO: 1914105 - RNA, 19 nt, Homo sapiens
  misc_RNA (1)...(19): siRNA sense strand
ggauguucuucuucgagua

SEQ ID NO: 1914106 - RNA, 19 nt, Homo sapiens
  misc_RNA (1)...(19): siRNA sense strand
uguaucauccuuugcauuu

SEQ ID NO: 1914107 - RNA, 19 nt, Homo sapiens
  misc_RNA (1)...(19): siRNA sense strand
cauaauagggucguuagaa

SEQ ID NO: 1914108 - RNA, 19 nt, Homo sapiens
  misc_RNA (1)...(19): siRNA sense strand
cuaagcacuuccauaauag

SEQ ID NO: 1914109 - RNA, 19 nt, Homo sapiens
  misc_RNA (1)...(19): siRNA sense strand
ggaguaucguucuauuucu

SEQ ID NO: 1914110 - RNA, 19 nt, Homo sapiens
  misc_RNA (1)...(19): siRNA sense strand
gaaagccuguauuauuuug

SEQ ID NO: 1914111 - RNA, 19 nt, Homo sapiens
  misc_RNA (1)...(19): siRNA sense strand
cuauagaaauccaaucaag

SEQ ID NO: 1914112 - RNA, 19 nt, Homo sapiens
  misc_RNA (1)...(19): siRNA sense strand
cgaaaccacuaucgagucu

SEQ ID NO: 1914113 - RNA, 19 nt, Homo sapiens
  misc_RNA (1)...(19): siRNA sense strand
cgaaucuuccuacauacua

SEQ ID NO: 1914114 - RNA, 19 nt, Homo sapiens
  misc_RNA (1)...(19): siRNA sense strand
uguaaaggaggcacagaua

SEQ ID NO: 1914115 - RNA, 19 nt, Homo sapiens
  misc_RNA (1)...(19): siRNA sense strand
ucaccaaggaaguaaauga

SEQ ID NO: 1914116 - RNA, 19 nt, Homo sapiens
  misc_RNA (1)...(19): siRNA sense strand
cuagaccucacuuacguua

SEQ ID NO: 1914117 - RNA, 19 nt, Homo sapiens
  misc_RNA (1)...(19): siRNA sense strand
uaucagugaaaguguguua

SEQ ID NO: 1914118 - RNA, 19 nt, Homo sapiens
  misc_RNA (1)...(19): siRNA sense strand
gcuaugucauuuccaucuu

SEQ ID NO: 1914119 - RNA, 19 nt, Homo sapiens
  misc_RNA (1)...(19): siRNA sense strand
caaugacaguccacagaca

SEQ ID NO: 1914120 - RNA, 19 nt, Homo sapiens
  misc_RNA (1)...(19): siRNA sense strand
cagaagagauauguugcau

SEQ ID NO: 1914121 - RNA, 19 nt, Homo sapiens
  misc_RNA (1)...(19): siRNA sense strand
gacaagugaauuuaaagga

SEQ ID NO: 1914122 - RNA, 19 nt, Homo sapiens
  misc_RNA (1)...(19): siRNA sense strand
guaaaggaggcacagauag

SEQ ID NO: 1914123 - RNA, 19 nt, Homo sapiens
  misc_RNA (1)...(19): siRNA sense strand
agaccucacuuacguuaca

SEQ ID NO: 1914124 - RNA, 19 nt, Homo sapiens
  misc_RNA (1)...(19): siRNA sense strand
gggauggauuugaccuaga

SEQ ID NO: 1914125 - RNA, 19 nt, Homo sapiens
  misc_RNA (1)...(19): siRNA sense strand
acauuuacuucgacuucua

SEQ ID NO: 1914126 - RNA, 19 nt, Homo sapiens
  misc_RNA (1)...(19): siRNA sense strand
uaugacagcaagauuaaga

SEQ ID NO: 1914127 - RNA, 19 nt, Homo sapiens
  misc_RNA (1)...(19): siRNA sense strand
gaaagcccacacacaagug

SEQ ID NO: 1914128 - RNA, 19 nt, Homo sapiens
  misc_RNA (1)...(19): siRNA sense strand
gaaacaccgaaaccacuau

SEQ ID NO: 1914129 - RNA, 19 nt, Homo sapiens
  misc_RNA (1)...(19): siRNA sense strand
ggauggauuugaccuagac

SEQ ID NO: 1914130 - RNA, 19 nt, Homo sapiens
  misc_RNA (1)...(19): siRNA sense strand
cauccuugccgaccuaauu

SEQ ID NO: 1914131 - RNA, 19 nt, Homo sapiens
  misc_RNA (1)...(19): siRNA sense strand
gaguaucguucuauuucuc

SEQ ID NO: 1914132 - RNA, 19 nt, Homo sapiens
  misc_RNA (1)...(19): siRNA sense strand
gacuuccagugauguugua

SEQ ID NO: 1914133 - RNA, 19 nt, Homo sapiens
  misc_RNA (1)...(19): siRNA sense strand
ucuguaugaugaugugaaa

SEQ ID NO: 1914134 - RNA, 19 nt, Homo sapiens
  misc_RNA (1)...(19): siRNA sense strand
guucgguacuugauaacau

SEQ ID NO: 1914135 - RNA, 19 nt, Homo sapiens
  misc_RNA (1)...(19): siRNA sense strand
gaaaauguucgguacuuga

SEQ ID NO: 1914136 - RNA, 19 nt, Homo sapiens
  misc_RNA (1)...(19): siRNA sense strand
acagauagaacaggaacua

SEQ ID NO: 1914137 - RNA, 19 nt, Homo sapiens
  misc_RNA (1)...(19): siRNA sense strand
gauaagaaggcggguuuca

SEQ ID NO: 1914138 - RNA, 19 nt, Homo sapiens
  misc_RNA (1)...(19): siRNA sense strand
ugacagcaagauuaagaaa

SEQ ID NO: 1914139 - RNA, 19 nt, Homo sapiens
  misc_RNA (1)...(19): siRNA sense strand
uggcgggagucaucauuga

SEQ ID NO: 1914140 - RNA, 19 nt, Homo sapiens
  misc_RNA (1)...(19): siRNA sense strand
gauaaaacccacagcgaaa

SEQ ID NO: 1914141 - RNA, 19 nt, Homo sapiens
  misc_RNA (1)...(19): siRNA sense strand
gaaaggcgaacagauaaaa

SEQ ID NO: 1914142 - RNA, 19 nt, Homo sapiens
  misc_RNA (1)...(19): siRNA sense strand
ugaagaugcugaaaauguu

SEQ ID NO: 1914143 - RNA, 19 nt, Homo sapiens
  misc_RNA (1)...(19): siRNA sense strand
guuacagaacguauuauug

SEQ ID NO: 1914144 - RNA, 19 nt, Homo sapiens
  misc_RNA (1)...(19): siRNA sense strand
cagauggacacauuuacuu

SEQ ID NO: 1914145 - RNA, 19 nt, Homo sapiens
  misc_RNA (1)...(19): siRNA sense strand
gucuaccucuguaugauga

SEQ ID NO: 1914146 - RNA, 19 nt, Homo sapiens
  misc_RNA (1)...(19): siRNA sense strand
ggaaagccuguauuauuuu

SEQ ID NO: 1914147 - RNA, 19 nt, Homo sapiens
  misc_RNA (1)...(19): siRNA sense strand
aaaccacuaucgagucuac

SEQ ID NO: 1914148 - RNA, 19 nt, Homo sapiens
  misc_RNA (1)...(19): siRNA sense strand
auagaaauccaaucaagga

SEQ ID NO: 1914149 - RNA, 19 nt, Homo sapiens
  misc_RNA (1)...(19): siRNA sense strand
ucagagaacucaugaaaua

SEQ ID NO: 1914150 - RNA, 19 nt, Homo sapiens
  misc_RNA (1)...(19): siRNA sense strand
ggagagaaauccuauauau

SEQ ID NO: 1914151 - RNA, 19 nt, Homo sapiens
  misc_RNA (1)...(19): siRNA sense strand
gguaaaggcuucacuauga

SEQ ID NO: 1914152 - RNA, 19 nt, Homo sapiens
  misc_RNA (1)...(19): siRNA sense strand
gggaagagcaugcuuauua

SEQ ID NO: 1914153 - RNA, 19 nt, Homo sapiens
  misc_RNA (1)...(19): siRNA sense strand
gaacaucaacgaacucaua

SEQ ID NO: 1914154 - RNA, 19 nt, Homo sapiens
  misc_RNA (1)...(19): siRNA sense strand
ggaaagcguuugucaagaa

SEQ ID NO: 1914155 - RNA, 19 nt, Homo sapiens
  misc_RNA (1)...(19): siRNA sense strand
gaacaucagcgaacucaua

SEQ ID NO: 1914156 - RNA, 19 nt, Homo sapiens
  misc_RNA (1)...(19): siRNA sense strand
gggaaaggcuucaccauga

SEQ ID NO: 1914157 - RNA, 19 nt, Homo sapiens
  misc_RNA (1)...(19): siRNA sense strand
aaacagagcuugcuuuaca

SEQ ID NO: 1914158 - RNA, 19 nt, Homo sapiens
  misc_RNA (1)...(19): siRNA sense strand
gaaacgcuaucucauugua

SEQ ID NO: 1914159 - RNA, 19 nt, Homo sapiens
  misc_RNA (1)...(19): siRNA sense strand
gcagcuaaauucucuguaa

SEQ ID NO: 1914160 - RNA, 19 nt, Homo sapiens
  misc_RNA (1)...(19): siRNA sense strand
ggaaacagagcuugcuuua

SEQ ID NO: 1914161 - RNA, 19 nt, Homo sapiens
  misc_RNA (1)...(19): siRNA sense strand
gaagagccgucuaauuguu

SEQ ID NO: 1914162 - RNA, 19 nt, Homo sapiens
  misc_RNA (1)...(19): siRNA sense strand
ggaaaagucuucacuauga

SEQ ID NO: 1914163 - RNA, 19 nt, Homo sapiens
  misc_RNA (1)...(19): siRNA sense strand
ggagagaaaccauauauau

SEQ ID NO: 1914164 - RNA, 19 nt, Homo sapiens
  misc_RNA (1)...(19): siRNA sense strand
ggaagagcaugcuuauuau

SEQ ID NO: 1914165 - RNA, 19 nt, Homo sapiens
  misc_RNA (1)...(19): siRNA sense strand
ucagagaaaucauacagua

SEQ ID NO: 1914166 - RNA, 19 nt, Homo sapiens
  misc_RNA (1)...(19): siRNA sense strand
ggaaaggcuucaccacaaa

SEQ ID NO: 1914167 - RNA, 19 nt, Homo sapiens
  misc_RNA (1)...(19): siRNA sense strand
ggaaaaggcuucaccauga

SEQ ID NO: 1914168 - RNA, 19 nt, Homo sapiens
  misc_RNA (1)...(19): siRNA sense strand
ugaagaguguggaacaaua

SEQ ID NO: 1914169 - RNA, 19 nt, Homo sapiens
  misc_RNA (1)...(19): siRNA sense strand
gggaaaggcuucaccacaa

SEQ ID NO: 1914170 - RNA, 19 nt, Homo sapiens
  misc_RNA (1)...(19): siRNA sense strand
guacaucagcgaaaucaua

SEQ ID NO: 1914171 - RNA, 19 nt, Homo sapiens
  misc_RNA (1)...(19): siRNA sense strand
gcuaaauucucuguaagua

SEQ ID NO: 1914172 - RNA, 19 nt, Homo sapiens
  misc_RNA (1)...(19): siRNA sense strand
gaacauaaugcauuuggaa

SEQ ID NO: 1914173 - RNA, 19 nt, Homo sapiens
  misc_RNA (1)...(19): siRNA sense strand
gaacaauaccaugaacaua

SEQ ID NO: 1914174 - RNA, 19 nt, Homo sapiens
  misc_RNA (1)...(19): siRNA sense strand
guacaucagcgaacucaua

SEQ ID NO: 1914175 - RNA, 19 nt, Homo sapiens
  misc_RNA (1)...(19): siRNA sense strand
guacaucagcgaacucaua

SEQ ID NO: 1914176 - RNA, 19 nt, Homo sapiens
  misc_RNA (1)...(19): siRNA sense strand
gagagaagcccuacacaug

SEQ ID NO: 1914177 - RNA, 19 nt, Homo sapiens
  misc_RNA (1)...(19): siRNA sense strand
caucauacaucaacgaaau

SEQ ID NO: 1914178 - RNA, 19 nt, Homo sapiens
  misc_RNA (1)...(19): siRNA sense strand
gaaaguccaggcuaaauga

SEQ ID NO: 1914179 - RNA, 19 nt, Homo sapiens
  misc_RNA (1)...(19): siRNA sense strand
gaacaaaagcugugaaauu

SEQ ID NO: 1914180 - RNA, 19 nt, Homo sapiens
  misc_RNA (1)...(19): siRNA sense strand
ggagagaaacccuacauau

SEQ ID NO: 1914181 - RNA, 19 nt, Homo sapiens
  misc_RNA (1)...(19): siRNA sense strand
ggagagaaacccuuuguau

SEQ ID NO: 1914182 - RNA, 19 nt, Homo sapiens
  misc_RNA (1)...(19): siRNA sense strand
gaagaggcuuugccaagga

SEQ ID NO: 1914183 - RNA, 19 nt, Homo sapiens
  misc_RNA (1)...(19): siRNA sense strand
ggagagaaacccuuuaugu

SEQ ID NO: 1914184 - RNA, 19 nt, Homo sapiens
  misc_RNA (1)...(19): siRNA sense strand
ggagagaaaccguacauau

SEQ ID NO: 1914185 - RNA, 19 nt, Homo sapiens
  misc_RNA (1)...(19): siRNA sense strand
ggagagaaacccuacauau

SEQ ID NO: 1914186 - RNA, 19 nt, Homo sapiens
  misc_RNA (1)...(19): siRNA sense strand
gaagagcaugcuuauuaua

SEQ ID NO: 1914187 - RNA, 19 nt, Homo sapiens
  misc_RNA (1)...(19): siRNA sense strand
guacaucagagaaaucaua

SEQ ID NO: 1914188 - RNA, 19 nt, Homo sapiens
  misc_RNA (1)...(19): siRNA sense strand
gaagagccgucugauugaa

SEQ ID NO: 1914189 - RNA, 19 nt, Homo sapiens
  misc_RNA (1)...(19): siRNA sense strand
gaaaucucauuguacauca

SEQ ID NO: 1914190 - RNA, 19 nt, Homo sapiens
  misc_RNA (1)...(19): siRNA sense strand
guacaucagcaaauucaua

SEQ ID NO: 1914191 - RNA, 19 nt, Homo sapiens
  misc_RNA (1)...(19): siRNA sense strand
gagagaaaccguacauaug

SEQ ID NO: 1914192 - RNA, 19 nt, Homo sapiens
  misc_RNA (1)...(19): siRNA sense strand
gagagaaacccuacauaug

SEQ ID NO: 1914193 - RNA, 19 nt, Homo sapiens
  misc_RNA (1)...(19): siRNA sense strand
gagagaaacccuacauaug

SEQ ID NO: 1914194 - RNA, 19 nt, Homo sapiens
  misc_RNA (1)...(19): siRNA sense strand
cagaugcacucuccaaguu

SEQ ID NO: 1914195 - RNA, 19 nt, Homo sapiens
  misc_RNA (1)...(19): siRNA sense strand
gaauagcggacugauguua

SEQ ID NO: 1914196 - RNA, 19 nt, Homo sapiens
  misc_RNA (1)...(19): siRNA sense strand
gagaacucaugaaauagaa

SEQ ID NO: 1914197 - RNA, 19 nt, Homo sapiens
  misc_RNA (1)...(19): siRNA sense strand
ggaaauacugccucucaaa

SEQ ID NO: 1914198 - RNA, 19 nt, Homo sapiens
  misc_RNA (1)...(19): siRNA sense strand
ccaugaacauaaugcauuu

SEQ ID NO: 1914199 - RNA, 19 nt, Homo sapiens
  misc_RNA (1)...(19): siRNA sense strand
gaaaucauacaguagagaa

SEQ ID NO: 1914200 - RNA, 19 nt, Homo sapiens
  misc_RNA (1)...(19): siRNA sense strand
gagagaaacccuuuaugug

SEQ ID NO: 1914201 - RNA, 19 nt, Homo sapiens
  misc_RNA (1)...(19): siRNA sense strand
gagagaaacccuuuguaug

SEQ ID NO: 1914202 - RNA, 19 nt, Homo sapiens
  misc_RNA (1)...(19): siRNA sense strand
caucagagaacucaugaaa

SEQ ID NO: 1914203 - RNA, 19 nt, Homo sapiens
  misc_RNA (1)...(19): siRNA sense strand
gaaaagccuucuccucaaa

SEQ ID NO: 1914204 - RNA, 19 nt, Homo sapiens
  misc_RNA (1)...(19): siRNA sense strand
gagaaacccuacauaugca

SEQ ID NO: 1914205 - RNA, 19 nt, Homo sapiens
  misc_RNA (1)...(19): siRNA sense strand
gagaaacccuacauaugca

SEQ ID NO: 1914206 - RNA, 19 nt, Homo sapiens
  misc_RNA (1)...(19): siRNA sense strand
gaaaggcacagucgaaucu

SEQ ID NO: 1914207 - RNA, 19 nt, Homo sapiens
  misc_RNA (1)...(19): siRNA sense strand
guacaccagcgaacucaua

SEQ ID NO: 1914208 - RNA, 19 nt, Homo sapiens
  misc_RNA (1)...(19): siRNA sense strand
gaagagccguaugaucgaa

SEQ ID NO: 1914209 - RNA, 19 nt, Homo sapiens
  misc_RNA (1)...(19): siRNA sense strand
gagagaagcccuacaucug

SEQ ID NO: 1914210 - RNA, 19 nt, Homo sapiens
  misc_RNA (1)...(19): siRNA sense strand
gaucgaacaucaacgaacu

SEQ ID NO: 1914211 - RNA, 19 nt, Homo sapiens
  misc_RNA (1)...(19): siRNA sense strand
gaacuuuauucugcagcua

SEQ ID NO: 1914212 - RNA, 19 nt, Homo sapiens
  misc_RNA (1)...(19): siRNA sense strand
gagaaacccuuuguaugca

SEQ ID NO: 1914213 - RNA, 19 nt, Homo sapiens
  misc_RNA (1)...(19): siRNA sense strand
gaaagcguuugucaagaag

SEQ ID NO: 1914214 - RNA, 19 nt, Homo sapiens
  misc_RNA (1)...(19): siRNA sense strand
gcaaguucauacuggagaa

SEQ ID NO: 1914215 - RNA, 19 nt, Homo sapiens
  misc_RNA (1)...(19): siRNA sense strand
gcaaauucauacagaagag

SEQ ID NO: 1914216 - RNA, 19 nt, Homo sapiens
  misc_RNA (1)...(19): siRNA sense strand
gaaaucauacuggagagaa

SEQ ID NO: 1914217 - RNA, 19 nt, Homo sapiens
  misc_RNA (1)...(19): siRNA sense strand
gaugaaaggcacagucgaa

SEQ ID NO: 1914218 - RNA, 19 nt, Homo sapiens
  misc_RNA (1)...(19): siRNA sense strand
gagaagcccuacacaugca

SEQ ID NO: 1914219 - RNA, 19 nt, Homo sapiens
  misc_RNA (1)...(19): siRNA sense strand
aaaggaugcugaagagugu

SEQ ID NO: 1914220 - RNA, 19 nt, Homo sapiens
  misc_RNA (1)...(19): siRNA sense strand
gagagaaauccuauauaug

SEQ ID NO: 1914221 - RNA, 19 nt, Homo sapiens
  misc_RNA (1)...(19): siRNA sense strand
ggauguacuuugugugcaa

SEQ ID NO: 1914222 - RNA, 19 nt, Homo sapiens
  misc_RNA (1)...(19): siRNA sense strand
gaacucauacuggagagaa

SEQ ID NO: 1914223 - RNA, 19 nt, Homo sapiens
  misc_RNA (1)...(19): siRNA sense strand
gaacucauacuggagagaa

SEQ ID NO: 1914224 - RNA, 19 nt, Homo sapiens
  misc_RNA (1)...(19): siRNA sense strand
gaacucauacuggagagaa

SEQ ID NO: 1914225 - RNA, 19 nt, Homo sapiens
  misc_RNA (1)...(19): siRNA sense strand
uuacaucagcgaacucaua

SEQ ID NO: 1914226 - RNA, 19 nt, Homo sapiens
  misc_RNA (1)...(19): siRNA sense strand
gugaauagcggacugaugu

SEQ ID NO: 1914227 - RNA, 19 nt, Homo sapiens
  misc_RNA (1)...(19): siRNA sense strand
gaacucauacuggagagaa

SEQ ID NO: 1914228 - RNA, 19 nt, Homo sapiens
  misc_RNA (1)...(19): siRNA sense strand
caagcguaaucucauugua

SEQ ID NO: 1914229 - RNA, 19 nt, Homo sapiens
  misc_RNA (1)...(19): siRNA sense strand
guaccgggaugugauguug

SEQ ID NO: 1914230 - RNA, 19 nt, Homo sapiens
  misc_RNA (1)...(19): siRNA sense strand
ucagcgaacucauaaugga

SEQ ID NO: 1914231 - RNA, 19 nt, Homo sapiens
  misc_RNA (1)...(19): siRNA sense strand
augaagagccgucuaauug

SEQ ID NO: 1914232 - RNA, 19 nt, Homo sapiens
  misc_RNA (1)...(19): siRNA sense strand
cauggacaauggaagauga

SEQ ID NO: 1914233 - RNA, 19 nt, Homo sapiens
  misc_RNA (1)...(19): siRNA sense strand
gggaaagcguuugucaaga

SEQ ID NO: 1914234 - RNA, 19 nt, Homo sapiens
  misc_RNA (1)...(19): siRNA sense strand
gagcaugcuuauuauacau

SEQ ID NO: 1914235 - RNA, 19 nt, Homo sapiens
  misc_RNA (1)...(19): siRNA sense strand
ggaacaauaccaugaacau

SEQ ID NO: 1914236 - RNA, 19 nt, Homo sapiens
  misc_RNA (1)...(19): siRNA sense strand
gagaaaccguacauaugca

SEQ ID NO: 1914237 - RNA, 19 nt, Homo sapiens
  misc_RNA (1)...(19): siRNA sense strand
ggagagaagcccuacaucu

SEQ ID NO: 1914238 - RNA, 19 nt, Homo sapiens
  misc_RNA (1)...(19): siRNA sense strand
gcugugaaauuaacaacuc

SEQ ID NO: 1914239 - RNA, 19 nt, Homo sapiens
  misc_RNA (1)...(19): siRNA sense strand
uaaguuuagucaaccagaa

SEQ ID NO: 1914240 - RNA, 19 nt, Homo sapiens
  misc_RNA (1)...(19): siRNA sense strand
gagaagaaccauggacaau

SEQ ID NO: 1914241 - RNA, 19 nt, Homo sapiens
  misc_RNA (1)...(19): siRNA sense strand
gaacucauaauggaaacaa

SEQ ID NO: 1914242 - RNA, 19 nt, Homo sapiens
  misc_RNA (1)...(19): siRNA sense strand
guaaucucauuguacauca

SEQ ID NO: 1914243 - RNA, 19 nt, Homo sapiens
  misc_RNA (1)...(19): siRNA sense strand
gcuaaaugaacaucaaaga

SEQ ID NO: 1914244 - RNA, 19 nt, Homo sapiens
  misc_RNA (1)...(19): siRNA sense strand
ggagaagaaccauggacaa

SEQ ID NO: 1914245 - RNA, 19 nt, Homo sapiens
  misc_RNA (1)...(19): siRNA sense strand
cuaaaucccaagucaguaa

SEQ ID NO: 1914246 - RNA, 19 nt, Homo sapiens
  misc_RNA (1)...(19): siRNA sense strand
gaaauacugccucucaaac

SEQ ID NO: 1914247 - RNA, 19 nt, Homo sapiens
  misc_RNA (1)...(19): siRNA sense strand
cauuguacaucagcaaauu

SEQ ID NO: 1914248 - RNA, 19 nt, Homo sapiens
  misc_RNA (1)...(19): siRNA sense strand
caucagcgaacucauaaug

SEQ ID NO: 1914249 - RNA, 19 nt, Homo sapiens
  misc_RNA (1)...(19): siRNA sense strand
ggaaugcgcuggcuacaga

SEQ ID NO: 1914250 - RNA, 19 nt, Homo sapiens
  misc_RNA (1)...(19): siRNA sense strand
ggaagaggauggcuacaga

SEQ ID NO: 1914251 - RNA, 19 nt, Homo sapiens
  misc_RNA (1)...(19): siRNA sense strand
gcaagcagaagaucuauuu

SEQ ID NO: 1914252 - RNA, 19 nt, Homo sapiens
  misc_RNA (1)...(19): siRNA sense strand
gaaagaaauccaggaguua

SEQ ID NO: 1914253 - RNA, 19 nt, Homo sapiens
  misc_RNA (1)...(19): siRNA sense strand
agaaagaaauccaggaguu

SEQ ID NO: 1914254 - RNA, 19 nt, Homo sapiens
  misc_RNA (1)...(19): siRNA sense strand
gcaaggcggugguggugaa

SEQ ID NO: 1914255 - RNA, 19 nt, Homo sapiens
  misc_RNA (1)...(19): siRNA sense strand
ggauagagacggaugaaga

SEQ ID NO: 1914256 - RNA, 19 nt, Homo sapiens
  misc_RNA (1)...(19): siRNA sense strand
agagagagauugaagaaca

SEQ ID NO: 1914257 - RNA, 19 nt, Homo sapiens
  misc_RNA (1)...(19): siRNA sense strand
gagcagguguacagagaga

SEQ ID NO: 1914258 - RNA, 19 nt, Homo sapiens
  misc_RNA (1)...(19): siRNA sense strand
agagcugucugaugcaaua

SEQ ID NO: 1914259 - RNA, 19 nt, Homo sapiens
  misc_RNA (1)...(19): siRNA sense strand
uaaagcagcuaccaaucau

SEQ ID NO: 1914260 - RNA, 19 nt, Homo sapiens
  misc_RNA (1)...(19): siRNA sense strand
acagagagaggcagaagua

SEQ ID NO: 1914261 - RNA, 19 nt, Homo sapiens
  misc_RNA (1)...(19): siRNA sense strand
uagagacggaugaagauua

SEQ ID NO: 1914262 - RNA, 19 nt, Homo sapiens
  misc_RNA (1)...(19): siRNA sense strand
gcaguucuuugaggaaguu

SEQ ID NO: 1914263 - RNA, 19 nt, Homo sapiens
  misc_RNA (1)...(19): siRNA sense strand
gcaacaaggcaagaucaaa

SEQ ID NO: 1914264 - RNA, 19 nt, Homo sapiens
  misc_RNA (1)...(19): siRNA sense strand
gagagagauugaagaacau

SEQ ID NO: 1914265 - RNA, 19 nt, Homo sapiens
  misc_RNA (1)...(19): siRNA sense strand
caacaaggcaagaucaaag

SEQ ID NO: 1914266 - RNA, 19 nt, Homo sapiens
  misc_RNA (1)...(19): siRNA sense strand
aaagaaauccaggaguuaa

SEQ ID NO: 1914267 - RNA, 19 nt, Homo sapiens
  misc_RNA (1)...(19): siRNA sense strand
gaaauccaggaguuaaaga

SEQ ID NO: 1914268 - RNA, 19 nt, Homo sapiens
  misc_RNA (1)...(19): siRNA sense strand
gagugaugcugaccuucaa

SEQ ID NO: 1914269 - RNA, 19 nt, Homo sapiens
  misc_RNA (1)...(19): siRNA sense strand
gauagagacggaugaagau

SEQ ID NO: 1914270 - RNA, 19 nt, Homo sapiens
  misc_RNA (1)...(19): siRNA sense strand
gcagcuaccaaucauguga

SEQ ID NO: 1914271 - RNA, 19 nt, Homo sapiens
  misc_RNA (1)...(19): siRNA sense strand
gagagauugaagaacauua

SEQ ID NO: 1914272 - RNA, 19 nt, Homo sapiens
  misc_RNA (1)...(19): siRNA sense strand
gaucaggaccaguuugaca

SEQ ID NO: 1914273 - RNA, 19 nt, Homo sapiens
  misc_RNA (1)...(19): siRNA sense strand
gagagaggcagaaguacug

SEQ ID NO: 1914274 - RNA, 19 nt, Homo sapiens
  misc_RNA (1)...(19): siRNA sense strand
aagagcagguguacagaga

SEQ ID NO: 1914275 - RNA, 19 nt, Homo sapiens
  misc_RNA (1)...(19): siRNA sense strand
ggaggaagaggaagaggau

SEQ ID NO: 1914276 - RNA, 19 nt, Homo sapiens
  misc_RNA (1)...(19): siRNA sense strand
aaggcaagaucaaagagaa

SEQ ID NO: 1914277 - RNA, 19 nt, Homo sapiens
  misc_RNA (1)...(19): siRNA sense strand
augcaauacuugaaggaua

SEQ ID NO: 1914278 - RNA, 19 nt, Homo sapiens
  misc_RNA (1)...(19): siRNA sense strand
ggugagugaugcugaccuu

SEQ ID NO: 1914279 - RNA, 19 nt, Homo sapiens
  misc_RNA (1)...(19): siRNA sense strand
uguaaggaguggaggaaga

SEQ ID NO: 1914280 - RNA, 19 nt, Homo sapiens
  misc_RNA (1)...(19): siRNA sense strand
gaaagagcagguguacaga

SEQ ID NO: 1914281 - RNA, 19 nt, Homo sapiens
  misc_RNA (1)...(19): siRNA sense strand
acagagagagauugaagaa

SEQ ID NO: 1914282 - RNA, 19 nt, Homo sapiens
  misc_RNA (1)...(19): siRNA sense strand
uuaaagcagcuaccaauca

SEQ ID NO: 1914283 - RNA, 19 nt, Homo sapiens
  misc_RNA (1)...(19): siRNA sense strand
gaagcaguucuuugaggaa

SEQ ID NO: 1914284 - RNA, 19 nt, Homo sapiens
  misc_RNA (1)...(19): siRNA sense strand
agaaagagcagguguacag

SEQ ID NO: 1914285 - RNA, 19 nt, Homo sapiens
  misc_RNA (1)...(19): siRNA sense strand
cauuaaagcagcuaccaau

SEQ ID NO: 1914286 - RNA, 19 nt, Homo sapiens
  misc_RNA (1)...(19): siRNA sense strand
agagacggaugaagauuac

SEQ ID NO: 1914287 - RNA, 19 nt, Homo sapiens
  misc_RNA (1)...(19): siRNA sense strand
uggagcagcuggcgcaaca

SEQ ID NO: 1914288 - RNA, 19 nt, Homo sapiens
  misc_RNA (1)...(19): siRNA sense strand
gcugucugaugcaauacuu

SEQ ID NO: 1914289 - RNA, 19 nt, Homo sapiens
  misc_RNA (1)...(19): siRNA sense strand
gaucaaagagaagauguac

SEQ ID NO: 1914290 - RNA, 19 nt, Homo sapiens
  misc_RNA (1)...(19): siRNA sense strand
agaggcagaaguacuguaa

SEQ ID NO: 1914291 - RNA, 19 nt, Homo sapiens
  misc_RNA (1)...(19): siRNA sense strand
ucaugugacuccagaagag

SEQ ID NO: 1914292 - RNA, 19 nt, Homo sapiens
  misc_RNA (1)...(19): siRNA sense strand
caaggcaagaucaaagaga

SEQ ID NO: 1914293 - RNA, 19 nt, Homo sapiens
  misc_RNA (1)...(19): siRNA sense strand
gcgcaacaaggcaagauca

SEQ ID NO: 1914294 - RNA, 19 nt, Homo sapiens
  misc_RNA (1)...(19): siRNA sense strand
aguuugacauggugaguga

SEQ ID NO: 1914295 - RNA, 19 nt, Homo sapiens
  misc_RNA (1)...(19): siRNA sense strand
ccaagagcaagaagcaguu

SEQ ID NO: 1914296 - RNA, 19 nt, Homo sapiens
  misc_RNA (1)...(19): siRNA sense strand
caagaucaaagagaagaug

SEQ ID NO: 1914297 - RNA, 19 nt, Homo sapiens
  misc_RNA (1)...(19): siRNA sense strand
cuacagagagagauugaag

SEQ ID NO: 1914298 - RNA, 19 nt, Homo sapiens
  misc_RNA (1)...(19): siRNA sense strand
aagaaauccaggaguuaaa

SEQ ID NO: 1914299 - RNA, 19 nt, Homo sapiens
  misc_RNA (1)...(19): siRNA sense strand
ugaggaaguugggauagag

SEQ ID NO: 1914300 - RNA, 19 nt, Homo sapiens
  misc_RNA (1)...(19): siRNA sense strand
gagaggcagaaguacugua

SEQ ID NO: 1914301 - RNA, 19 nt, Homo sapiens
  misc_RNA (1)...(19): siRNA sense strand
ucguggcccucacugcuaa

SEQ ID NO: 1914302 - RNA, 19 nt, Homo sapiens
  misc_RNA (1)...(19): siRNA sense strand
gaggaaguugggauagaga

SEQ ID NO: 1914303 - RNA, 19 nt, Homo sapiens
  misc_RNA (1)...(19): siRNA sense strand
ugcaauacuugaaggauac

SEQ ID NO: 1914304 - RNA, 19 nt, Homo sapiens
  misc_RNA (1)...(19): siRNA sense strand
gauugaagaacauuaaagc

SEQ ID NO: 1914305 - RNA, 19 nt, Homo sapiens
  misc_RNA (1)...(19): siRNA sense strand
uccaggaguuaaagaagga

SEQ ID NO: 1914306 - RNA, 19 nt, Homo sapiens
  misc_RNA (1)...(19): siRNA sense strand
ugagugaugcugaccuuca

SEQ ID NO: 1914307 - RNA, 19 nt, Homo sapiens
  misc_RNA (1)...(19): siRNA sense strand
ggcaagaucaaagagaaga

SEQ ID NO: 1914308 - RNA, 19 nt, Homo sapiens
  misc_RNA (1)...(19): siRNA sense strand
gaccuucaaguccuagaug

SEQ ID NO: 1914309 - RNA, 19 nt, Homo sapiens
  misc_RNA (1)...(19): siRNA sense strand
gagcagcuggcgcaacaag

SEQ ID NO: 1914310 - RNA, 19 nt, Homo sapiens
  misc_RNA (1)...(19): siRNA sense strand
gcaagaucaaagagaagau

SEQ ID NO: 1914311 - RNA, 19 nt, Homo sapiens
  misc_RNA (1)...(19): siRNA sense strand
aggcagaaguacuguaagg

SEQ ID NO: 1914312 - RNA, 19 nt, Homo sapiens
  misc_RNA (1)...(19): siRNA sense strand
cggaucaggaccaguuuga

SEQ ID NO: 1914313 - RNA, 19 nt, Homo sapiens
  misc_RNA (1)...(19): siRNA sense strand
guacagagagaggcagaag

SEQ ID NO: 1914314 - RNA, 19 nt, Homo sapiens
  misc_RNA (1)...(19): siRNA sense strand
aagcagcuaccaaucaugu

SEQ ID NO: 1914315 - RNA, 19 nt, Homo sapiens
  misc_RNA (1)...(19): siRNA sense strand
gaguggaggaagaggaaga

SEQ ID NO: 1914316 - RNA, 19 nt, Homo sapiens
  misc_RNA (1)...(19): siRNA sense strand
aagagaaagagcaggugua

SEQ ID NO: 1914317 - RNA, 19 nt, Homo sapiens
  misc_RNA (1)...(19): siRNA sense strand
agacggaugaagauuacaa

SEQ ID NO: 1914318 - RNA, 19 nt, Homo sapiens
  misc_RNA (1)...(19): siRNA sense strand
aaauccaggaguuaaagaa

SEQ ID NO: 1914319 - RNA, 19 nt, Homo sapiens
  misc_RNA (1)...(19): siRNA sense strand
ggaaugcgcuggcuacaga

SEQ ID NO: 1914320 - RNA, 19 nt, Homo sapiens
  misc_RNA (1)...(19): siRNA sense strand
ggaagaggauggcuacaga

SEQ ID NO: 1914321 - RNA, 19 nt, Homo sapiens
  misc_RNA (1)...(19): siRNA sense strand
gcaagcagaagaucuauuu

SEQ ID NO: 1914322 - RNA, 19 nt, Homo sapiens
  misc_RNA (1)...(19): siRNA sense strand
gaaagaaauccaggaguua

SEQ ID NO: 1914323 - RNA, 19 nt, Homo sapiens
  misc_RNA (1)...(19): siRNA sense strand
agaaagaaauccaggaguu

SEQ ID NO: 1914324 - RNA, 19 nt, Homo sapiens
  misc_RNA (1)...(19): siRNA sense strand
gcaaggcggugguggugaa

SEQ ID NO: 1914325 - RNA, 19 nt, Homo sapiens
  misc_RNA (1)...(19): siRNA sense strand
ggauagagacggaugaaga

SEQ ID NO: 1914326 - RNA, 19 nt, Homo sapiens
  misc_RNA (1)...(19): siRNA sense strand
agagagagauugaagaaca

SEQ ID NO: 1914327 - RNA, 19 nt, Homo sapiens
  misc_RNA (1)...(19): siRNA sense strand
gagcagguguacagagaga

SEQ ID NO: 1914328 - RNA, 19 nt, Homo sapiens
  misc_RNA (1)...(19): siRNA sense strand
agagcugucugaugcaaua

SEQ ID NO: 1914329 - RNA, 19 nt, Homo sapiens
  misc_RNA (1)...(19): siRNA sense strand
uaaagcagcuaccaaucau

SEQ ID NO: 1914330 - RNA, 19 nt, Homo sapiens
  misc_RNA (1)...(19): siRNA sense strand
acagagagaggcagaagua

SEQ ID NO: 1914331 - RNA, 19 nt, Homo sapiens
  misc_RNA (1)...(19): siRNA sense strand
uagagacggaugaagauua

SEQ ID NO: 1914332 - RNA, 19 nt, Homo sapiens
  misc_RNA (1)...(19): siRNA sense strand
gcaguucuuugaggaaguu

SEQ ID NO: 1914333 - RNA, 19 nt, Homo sapiens
  misc_RNA (1)...(19): siRNA sense strand
gcaacaaggcaagaucaaa

SEQ ID NO: 1914334 - RNA, 19 nt, Homo sapiens
  misc_RNA (1)...(19): siRNA sense strand
gagagagauugaagaacau

SEQ ID NO: 1914335 - RNA, 19 nt, Homo sapiens
  misc_RNA (1)...(19): siRNA sense strand
caacaaggcaagaucaaag

SEQ ID NO: 1914336 - RNA, 19 nt, Homo sapiens
  misc_RNA (1)...(19): siRNA sense strand
aaagaaauccaggaguuaa

SEQ ID NO: 1914337 - RNA, 19 nt, Homo sapiens
  misc_RNA (1)...(19): siRNA sense strand
gaaauccaggaguuaaaga

SEQ ID NO: 1914338 - RNA, 19 nt, Homo sapiens
  misc_RNA (1)...(19): siRNA sense strand
gagugaugcugaccuucaa

SEQ ID NO: 1914339 - RNA, 19 nt, Homo sapiens
  misc_RNA (1)...(19): siRNA sense strand
gauagagacggaugaagau

SEQ ID NO: 1914340 - RNA, 19 nt, Homo sapiens
  misc_RNA (1)...(19): siRNA sense strand
gcagcuaccaaucauguga

SEQ ID NO: 1914341 - RNA, 19 nt, Homo sapiens
  misc_RNA (1)...(19): siRNA sense strand
gagagauugaagaacauua

SEQ ID NO: 1914342 - RNA, 19 nt, Homo sapiens
  misc_RNA (1)...(19): siRNA sense strand
gaucaggaccaguuugaca

SEQ ID NO: 1914343 - RNA, 19 nt, Homo sapiens
  misc_RNA (1)...(19): siRNA sense strand
gagagaggcagaaguacug

SEQ ID NO: 1914344 - RNA, 19 nt, Homo sapiens
  misc_RNA (1)...(19): siRNA sense strand
aagagcagguguacagaga

SEQ ID NO: 1914345 - RNA, 19 nt, Homo sapiens
  misc_RNA (1)...(19): siRNA sense strand
ggaggaagaggaagaggau

SEQ ID NO: 1914346 - RNA, 19 nt, Homo sapiens
  misc_RNA (1)...(19): siRNA sense strand
aaggcaagaucaaagagaa

SEQ ID NO: 1914347 - RNA, 19 nt, Homo sapiens
  misc_RNA (1)...(19): siRNA sense strand
augcaauacuugaaggaua

SEQ ID NO: 1914348 - RNA, 19 nt, Homo sapiens
  misc_RNA (1)...(19): siRNA sense strand
ggugagugaugcugaccuu

SEQ ID NO: 1914349 - RNA, 19 nt, Homo sapiens
  misc_RNA (1)...(19): siRNA sense strand
uguaaggaguggaggaaga

SEQ ID NO: 1914350 - RNA, 19 nt, Homo sapiens
  misc_RNA (1)...(19): siRNA sense strand
gaaagagcagguguacaga

SEQ ID NO: 1914351 - RNA, 19 nt, Homo sapiens
  misc_RNA (1)...(19): siRNA sense strand
acagagagagauugaagaa

SEQ ID NO: 1914352 - RNA, 19 nt, Homo sapiens
  misc_RNA (1)...(19): siRNA sense strand
uuaaagcagcuaccaauca

SEQ ID NO: 1914353 - RNA, 19 nt, Homo sapiens
  misc_RNA (1)...(19): siRNA sense strand
gaagcaguucuuugaggaa

SEQ ID NO: 1914354 - RNA, 19 nt, Homo sapiens
  misc_RNA (1)...(19): siRNA sense strand
agaaagagcagguguacag

SEQ ID NO: 1914355 - RNA, 19 nt, Homo sapiens
  misc_RNA (1)...(19): siRNA sense strand
cauuaaagcagcuaccaau

SEQ ID NO: 1914356 - RNA, 19 nt, Homo sapiens
  misc_RNA (1)...(19): siRNA sense strand
agagacggaugaagauuac

SEQ ID NO: 1914357 - RNA, 19 nt, Homo sapiens
  misc_RNA (1)...(19): siRNA sense strand
uggagcagcuggcgcaaca

SEQ ID NO: 1914358 - RNA, 19 nt, Homo sapiens
  misc_RNA (1)...(19): siRNA sense strand
gcugucugaugcaauacuu

SEQ ID NO: 1914359 - RNA, 19 nt, Homo sapiens
  misc_RNA (1)...(19): siRNA sense strand
gaucaaagagaagauguac

SEQ ID NO: 1914360 - RNA, 19 nt, Homo sapiens
  misc_RNA (1)...(19): siRNA sense strand
agaggcagaaguacuguaa

SEQ ID NO: 1914361 - RNA, 19 nt, Homo sapiens
  misc_RNA (1)...(19): siRNA sense strand
ucaugugacuccagaagag

SEQ ID NO: 1914362 - RNA, 19 nt, Homo sapiens
  misc_RNA (1)...(19): siRNA sense strand
caaggcaagaucaaagaga

SEQ ID NO: 1914363 - RNA, 19 nt, Homo sapiens
  misc_RNA (1)...(19): siRNA sense strand
gcgcaacaaggcaagauca

SEQ ID NO: 1914364 - RNA, 19 nt, Homo sapiens
  misc_RNA (1)...(19): siRNA sense strand
aguuugacauggugaguga

SEQ ID NO: 1914365 - RNA, 19 nt, Homo sapiens
  misc_RNA (1)...(19): siRNA sense strand
ccaagagcaagaagcaguu

SEQ ID NO: 1914366 - RNA, 19 nt, Homo sapiens
  misc_RNA (1)...(19): siRNA sense strand
caagaucaaagagaagaug

SEQ ID NO: 1914367 - RNA, 19 nt, Homo sapiens
  misc_RNA (1)...(19): siRNA sense strand
cuacagagagagauugaag

SEQ ID NO: 1914368 - RNA, 19 nt, Homo sapiens
  misc_RNA (1)...(19): siRNA sense strand
aagaaauccaggaguuaaa

SEQ ID NO: 1914369 - RNA, 19 nt, Homo sapiens
  misc_RNA (1)...(19): siRNA sense strand
ugaggaaguugggauagag

SEQ ID NO: 1914370 - RNA, 19 nt, Homo sapiens
  misc_RNA (1)...(19): siRNA sense strand
gagaggcagaaguacugua

SEQ ID NO: 1914371 - RNA, 19 nt, Homo sapiens
  misc_RNA (1)...(19): siRNA sense strand
ucguggcccucacugcuaa

SEQ ID NO: 1914372 - RNA, 19 nt, Homo sapiens
  misc_RNA (1)...(19): siRNA sense strand
gaggaaguugggauagaga

SEQ ID NO: 1914373 - RNA, 19 nt, Homo sapiens
  misc_RNA (1)...(19): siRNA sense strand
ugcaauacuugaaggauac

SEQ ID NO: 1914374 - RNA, 19 nt, Homo sapiens
  misc_RNA (1)...(19): siRNA sense strand
gauugaagaacauuaaagc

SEQ ID NO: 1914375 - RNA, 19 nt, Homo sapiens
  misc_RNA (1)...(19): siRNA sense strand
uccaggaguuaaagaagga

SEQ ID NO: 1914376 - RNA, 19 nt, Homo sapiens
  misc_RNA (1)...(19): siRNA sense strand
ugagugaugcugaccuuca

SEQ ID NO: 1914377 - RNA, 19 nt, Homo sapiens
  misc_RNA (1)...(19): siRNA sense strand
ggcaagaucaaagagaaga

SEQ ID NO: 1914378 - RNA, 19 nt, Homo sapiens
  misc_RNA (1)...(19): siRNA sense strand
gaccuucaaguccuagaug

SEQ ID NO: 1914379 - RNA, 19 nt, Homo sapiens
  misc_RNA (1)...(19): siRNA sense strand
gagcagcuggcgcaacaag

SEQ ID NO: 1914380 - RNA, 19 nt, Homo sapiens
  misc_RNA (1)...(19): siRNA sense strand
gcaagaucaaagagaagau

SEQ ID NO: 1914381 - RNA, 19 nt, Homo sapiens
  misc_RNA (1)...(19): siRNA sense strand
aggcagaaguacuguaagg

SEQ ID NO: 1914382 - RNA, 19 nt, Homo sapiens
  misc_RNA (1)...(19): siRNA sense strand
cggaucaggaccaguuuga

SEQ ID NO: 1914383 - RNA, 19 nt, Homo sapiens
  misc_RNA (1)...(19): siRNA sense strand
guacagagagaggcagaag

SEQ ID NO: 1914384 - RNA, 19 nt, Homo sapiens
  misc_RNA (1)...(19): siRNA sense strand
aagcagcuaccaaucaugu

SEQ ID NO: 1914385 - RNA, 19 nt, Homo sapiens
  misc_RNA (1)...(19): siRNA sense strand
gaguggaggaagaggaaga

SEQ ID NO: 1914386 - RNA, 19 nt, Homo sapiens
  misc_RNA (1)...(19): siRNA sense strand
aagagaaagagcaggugua

SEQ ID NO: 1914387 - RNA, 19 nt, Homo sapiens
  misc_RNA (1)...(19): siRNA sense strand
agacggaugaagauuacaa

SEQ ID NO: 1914388 - RNA, 19 nt, Homo sapiens
  misc_RNA (1)...(19): siRNA sense strand
aaauccaggaguuaaagaa

SEQ ID NO: 1914389 - RNA, 19 nt, Homo sapiens
  misc_RNA (1)...(19): siRNA sense strand
gguaagagcuuccguguua

SEQ ID NO: 1914390 - RNA, 19 nt, Homo sapiens
  misc_RNA (1)...(19): siRNA sense strand
ggaaagagauuuacucaga

SEQ ID NO: 1914391 - RNA, 19 nt, Homo sapiens
  misc_RNA (1)...(19): siRNA sense strand
gaagagaucuacucagaau

SEQ ID NO: 1914392 - RNA, 19 nt, Homo sapiens
  misc_RNA (1)...(19): siRNA sense strand
caaauucccugaaguagaa

SEQ ID NO: 1914393 - RNA, 19 nt, Homo sapiens
  misc_RNA (1)...(19): siRNA sense strand
gagagaaaccuuauaauug

SEQ ID NO: 1914394 - RNA, 19 nt, Homo sapiens
  misc_RNA (1)...(19): siRNA sense strand
ggaaaaggcuucauuugua

SEQ ID NO: 1914395 - RNA, 19 nt, Homo sapiens
  misc_RNA (1)...(19): siRNA sense strand
gaucagcacuuaauaguca

SEQ ID NO: 1914396 - RNA, 19 nt, Homo sapiens
  misc_RNA (1)...(19): siRNA sense strand
gcaaauaugggaacaaauu

SEQ ID NO: 1914397 - RNA, 19 nt, Homo sapiens
  misc_RNA (1)...(19): siRNA sense strand
ggagagaaaccauauaauu

SEQ ID NO: 1914398 - RNA, 19 nt, Homo sapiens
  misc_RNA (1)...(19): siRNA sense strand
ggagagaaaccuuauaauu

SEQ ID NO: 1914399 - RNA, 19 nt, Homo sapiens
  misc_RNA (1)...(19): siRNA sense strand
cauaguagaucagcacuua

SEQ ID NO: 1914400 - RNA, 19 nt, Homo sapiens
  misc_RNA (1)...(19): siRNA sense strand
gggaagagaucuacucaga

SEQ ID NO: 1914401 - RNA, 19 nt, Homo sapiens
  misc_RNA (1)...(19): siRNA sense strand
cguguuagaucaagacuua

SEQ ID NO: 1914402 - RNA, 19 nt, Homo sapiens
  misc_RNA (1)...(19): siRNA sense strand
gaucagcacuuaauguuca

SEQ ID NO: 1914403 - RNA, 19 nt, Homo sapiens
  misc_RNA (1)...(19): siRNA sense strand
gagagacccuauaauugua

SEQ ID NO: 1914404 - RNA, 19 nt, Homo sapiens
  misc_RNA (1)...(19): siRNA sense strand
gagguuggaucuugaguuu

SEQ ID NO: 1914405 - RNA, 19 nt, Homo sapiens
  misc_RNA (1)...(19): siRNA sense strand
gaacaucagagaauccaua

SEQ ID NO: 1914406 - RNA, 19 nt, Homo sapiens
  misc_RNA (1)...(19): siRNA sense strand
cgucagagaucagcacuua

SEQ ID NO: 1914407 - RNA, 19 nt, Homo sapiens
  misc_RNA (1)...(19): siRNA sense strand
gagcgacccuauaauugua

SEQ ID NO: 1914408 - RNA, 19 nt, Homo sapiens
  misc_RNA (1)...(19): siRNA sense strand
gagagaaaccauauaauug

SEQ ID NO: 1914409 - RNA, 19 nt, Homo sapiens
  misc_RNA (1)...(19): siRNA sense strand
gagaaaagcuauacaaaug

SEQ ID NO: 1914410 - RNA, 19 nt, Homo sapiens
  misc_RNA (1)...(19): siRNA sense strand
ggcaagaacuuucgucaga

SEQ ID NO: 1914411 - RNA, 19 nt, Homo sapiens
  misc_RNA (1)...(19): siRNA sense strand
ggagagcgacccuauaauu

SEQ ID NO: 1914412 - RNA, 19 nt, Homo sapiens
  misc_RNA (1)...(19): siRNA sense strand
caucagagaucccacaaug

SEQ ID NO: 1914413 - RNA, 19 nt, Homo sapiens
  misc_RNA (1)...(19): siRNA sense strand
gaggcaagauccaaauuga

SEQ ID NO: 1914414 - RNA, 19 nt, Homo sapiens
  misc_RNA (1)...(19): siRNA sense strand
gaagagaagccauacaaau

SEQ ID NO: 1914415 - RNA, 19 nt, Homo sapiens
  misc_RNA (1)...(19): siRNA sense strand
gggaaagccuucauucaug

SEQ ID NO: 1914416 - RNA, 19 nt, Homo sapiens
  misc_RNA (1)...(19): siRNA sense strand
gggaacaaauugcaaguga

SEQ ID NO: 1914417 - RNA, 19 nt, Homo sapiens
  misc_RNA (1)...(19): siRNA sense strand
gguaaggaauuuaaucaga

SEQ ID NO: 1914418 - RNA, 19 nt, Homo sapiens
  misc_RNA (1)...(19): siRNA sense strand
gcucacaucugcaaacuca

SEQ ID NO: 1914419 - RNA, 19 nt, Homo sapiens
  misc_RNA (1)...(19): siRNA sense strand
gaggcaagacuaucuauaa

SEQ ID NO: 1914420 - RNA, 19 nt, Homo sapiens
  misc_RNA (1)...(19): siRNA sense strand
ggugagagacccuauaauu

SEQ ID NO: 1914421 - RNA, 19 nt, Homo sapiens
  misc_RNA (1)...(19): siRNA sense strand
gaauucacagcuucauuua

SEQ ID NO: 1914422 - RNA, 19 nt, Homo sapiens
  misc_RNA (1)...(19): siRNA sense strand
cagcaaauaugggaacaaa

SEQ ID NO: 1914423 - RNA, 19 nt, Homo sapiens
  misc_RNA (1)...(19): siRNA sense strand
gaagacaacaagccaaaga

SEQ ID NO: 1914424 - RNA, 19 nt, Homo sapiens
  misc_RNA (1)...(19): siRNA sense strand
guaaacaguccaucaguga

SEQ ID NO: 1914425 - RNA, 19 nt, Homo sapiens
  misc_RNA (1)...(19): siRNA sense strand
gagcuuccguguuagauca

SEQ ID NO: 1914426 - RNA, 19 nt, Homo sapiens
  misc_RNA (1)...(19): siRNA sense strand
caagaacuuucgucagaga

SEQ ID NO: 1914427 - RNA, 19 nt, Homo sapiens
  misc_RNA (1)...(19): siRNA sense strand
caacuucauucccaucaga

SEQ ID NO: 1914428 - RNA, 19 nt, Homo sapiens
  misc_RNA (1)...(19): siRNA sense strand
ccaagauacuuuccacuuc

SEQ ID NO: 1914429 - RNA, 19 nt, Homo sapiens
  misc_RNA (1)...(19): siRNA sense strand
ggguacaacaguaaauuua

SEQ ID NO: 1914430 - RNA, 19 nt, Homo sapiens
  misc_RNA (1)...(19): siRNA sense strand
cuacaaauucccugaagua

SEQ ID NO: 1914431 - RNA, 19 nt, Homo sapiens
  misc_RNA (1)...(19): siRNA sense strand
acagaaaccuuaccguugu

SEQ ID NO: 1914432 - RNA, 19 nt, Homo sapiens
  misc_RNA (1)...(19): siRNA sense strand
caucagacaugccauacug

SEQ ID NO: 1914433 - RNA, 19 nt, Homo sapiens
  misc_RNA (1)...(19): siRNA sense strand
gguuggaucuugaguuuca

SEQ ID NO: 1914434 - RNA, 19 nt, Homo sapiens
  misc_RNA (1)...(19): siRNA sense strand
gcccagcccuucauauuca

SEQ ID NO: 1914435 - RNA, 19 nt, Homo sapiens
  misc_RNA (1)...(19): siRNA sense strand
ucaaagaggcagugacauu

SEQ ID NO: 1914436 - RNA, 19 nt, Homo sapiens
  misc_RNA (1)...(19): siRNA sense strand
gagagcgacccuauaauug

SEQ ID NO: 1914437 - RNA, 19 nt, Homo sapiens
  misc_RNA (1)...(19): siRNA sense strand
aaauugagauggagacugu

SEQ ID NO: 1914438 - RNA, 19 nt, Homo sapiens
  misc_RNA (1)...(19): siRNA sense strand
gagaagccauacaaaugug

SEQ ID NO: 1914439 - RNA, 19 nt, Homo sapiens
  misc_RNA (1)...(19): siRNA sense strand
gaacuuucgucagagauca

SEQ ID NO: 1914440 - RNA, 19 nt, Homo sapiens
  misc_RNA (1)...(19): siRNA sense strand
auucaggacucuacaaauu

SEQ ID NO: 1914441 - RNA, 19 nt, Homo sapiens
  misc_RNA (1)...(19): siRNA sense strand
uaagucacgugcaacagaa

SEQ ID NO: 1914442 - RNA, 19 nt, Homo sapiens
  misc_RNA (1)...(19): siRNA sense strand
ugaagaguguggaaagaga

SEQ ID NO: 1914443 - RNA, 19 nt, Homo sapiens
  misc_RNA (1)...(19): siRNA sense strand
ugagagacccuauaauugu

SEQ ID NO: 1914444 - RNA, 19 nt, Homo sapiens
  misc_RNA (1)...(19): siRNA sense strand
caggagagaaaccauauaa

SEQ ID NO: 1914445 - RNA, 19 nt, Homo sapiens
  misc_RNA (1)...(19): siRNA sense strand
uaauaggcauuccaugguu

SEQ ID NO: 1914446 - RNA, 19 nt, Homo sapiens
  misc_RNA (1)...(19): siRNA sense strand
caggagagaaaccuuauaa

SEQ ID NO: 1914447 - RNA, 19 nt, Homo sapiens
  misc_RNA (1)...(19): siRNA sense strand
caagauacuuuccacuucu

SEQ ID NO: 1914448 - RNA, 19 nt, Homo sapiens
  misc_RNA (1)...(19): siRNA sense strand
gagaaaccuuauaauugug

SEQ ID NO: 1914449 - RNA, 19 nt, Homo sapiens
  misc_RNA (1)...(19): siRNA sense strand
gaaaaggcuucauuuguag

SEQ ID NO: 1914450 - RNA, 19 nt, Homo sapiens
  misc_RNA (1)...(19): siRNA sense strand
gugagagacccuauaauug

SEQ ID NO: 1914451 - RNA, 19 nt, Homo sapiens
  misc_RNA (1)...(19): siRNA sense strand
guaagucuaugugggagaa

SEQ ID NO: 1914452 - RNA, 19 nt, Homo sapiens
  misc_RNA (1)...(19): siRNA sense strand
gaaaagcuauacaaaugug

SEQ ID NO: 1914453 - RNA, 19 nt, Homo sapiens
  misc_RNA (1)...(19): siRNA sense strand
gaaaagccauugaaaucug

SEQ ID NO: 1914454 - RNA, 19 nt, Homo sapiens
  misc_RNA (1)...(19): siRNA sense strand
gagaagggguacaacagua

SEQ ID NO: 1914455 - RNA, 19 nt, Homo sapiens
  misc_RNA (1)...(19): siRNA sense strand
ggaggcaagauccaaauug

SEQ ID NO: 1914456 - RNA, 19 nt, Homo sapiens
  misc_RNA (1)...(19): siRNA sense strand
agaauucacagcuucauuu

SEQ ID NO: 1914457 - RNA, 19 nt, Homo sapiens
  misc_RNA (1)...(19): siRNA sense strand
ggaagggauuuuauacaaa

SEQ ID NO: 1914458 - RNA, 19 nt, Homo sapiens
  misc_RNA (1)...(19): siRNA sense strand
auacaaaugugagcaaugu

SEQ ID NO: 1914459 - RNA, 19 nt, Homo sapiens
  misc_RNA (1)...(19): siRNA sense strand
gagaucagcacuuaauagu

SEQ ID NO: 1914460 - RNA, 19 nt, Homo sapiens
  misc_RNA (1)...(19): siRNA sense strand
gaaaggcuuccauaguaga

SEQ ID NO: 1914461 - RNA, 19 nt, Homo sapiens
  misc_RNA (1)...(19): siRNA sense strand
cagaaaccuuaccguugua

SEQ ID NO: 1914462 - RNA, 19 nt, Homo sapiens
  misc_RNA (1)...(19): siRNA sense strand
ggcaagauccaaauugaga

SEQ ID NO: 1914463 - RNA, 19 nt, Homo sapiens
  misc_RNA (1)...(19): siRNA sense strand
ggaagagaucuacucagaa

SEQ ID NO: 1914464 - RNA, 19 nt, Homo sapiens
  misc_RNA (1)...(19): siRNA sense strand
aaaggagguuggaucuuga

SEQ ID NO: 1914465 - RNA, 19 nt, Homo sapiens
  misc_RNA (1)...(19): siRNA sense strand
gaauguaaacaguccauca

SEQ ID NO: 1914466 - RNA, 19 nt, Homo sapiens
  misc_RNA (1)...(19): siRNA sense strand
caaauaugggaacaaauug

SEQ ID NO: 1914467 - RNA, 19 nt, Homo sapiens
  misc_RNA (1)...(19): siRNA sense strand
gggaagggauuuuauacaa

SEQ ID NO: 1914468 - RNA, 19 nt, Homo sapiens
  misc_RNA (1)...(19): siRNA sense strand
aagagaagccauacaaaug

SEQ ID NO: 1914469 - RNA, 19 nt, Homo sapiens
  misc_RNA (1)...(19): siRNA sense strand
ucagagaucccacaaugga

SEQ ID NO: 1914470 - RNA, 19 nt, Homo sapiens
  misc_RNA (1)...(19): siRNA sense strand
gagaaaagccauugaaauc

SEQ ID NO: 1914471 - RNA, 19 nt, Homo sapiens
  misc_RNA (1)...(19): siRNA sense strand
gacaacaagccaaagagaa

SEQ ID NO: 1914472 - RNA, 19 nt, Homo sapiens
  misc_RNA (1)...(19): siRNA sense strand
caaccauuccaccaagaua

SEQ ID NO: 1914473 - RNA, 19 nt, Homo sapiens
  misc_RNA (1)...(19): siRNA sense strand
uagaagagaagccauacaa

SEQ ID NO: 1914474 - RNA, 19 nt, Homo sapiens
  misc_RNA (1)...(19): siRNA sense strand
acacaggagagaaaccuua

SEQ ID NO: 1914475 - RNA, 19 nt, Homo sapiens
  misc_RNA (1)...(19): siRNA sense strand
ucagugauguuucugucuu

SEQ ID NO: 1914476 - RNA, 19 nt, Homo sapiens
  misc_RNA (1)...(19): siRNA sense strand
gaguguggaaagagauuua

SEQ ID NO: 1914477 - RNA, 19 nt, Homo sapiens
  misc_RNA (1)...(19): siRNA sense strand
gaauguggcaagagcuuug

SEQ ID NO: 1914478 - RNA, 19 nt, Homo sapiens
  misc_RNA (1)...(19): siRNA sense strand
ucagagaucagcacuuaau

SEQ ID NO: 1914479 - RNA, 19 nt, Homo sapiens
  misc_RNA (1)...(19): siRNA sense strand
ugugauauaugugguaaga

SEQ ID NO: 1914480 - RNA, 19 nt, Homo sapiens
  misc_RNA (1)...(19): siRNA sense strand
caucagagaguccauaugg

SEQ ID NO: 1914481 - RNA, 19 nt, Homo sapiens
  misc_RNA (1)...(19): siRNA sense strand
ccaaagagaagggaauuca

SEQ ID NO: 1914482 - RNA, 19 nt, Homo sapiens
  misc_RNA (1)...(19): siRNA sense strand
auucacagcuucauuuaca

SEQ ID NO: 1914483 - RNA, 19 nt, Homo sapiens
  misc_RNA (1)...(19): siRNA sense strand
gaucuacucagaauucaca

SEQ ID NO: 1914484 - RNA, 19 nt, Homo sapiens
  misc_RNA (1)...(19): siRNA sense strand
gacaugccauacuggagaa

SEQ ID NO: 1914485 - RNA, 19 nt, Homo sapiens
  misc_RNA (1)...(19): siRNA sense strand
caaagaggcagugacauuc

SEQ ID NO: 1914486 - RNA, 19 nt, Homo sapiens
  misc_RNA (1)...(19): siRNA sense strand
caucagagaauccauacug

SEQ ID NO: 1914487 - RNA, 19 nt, Homo sapiens
  misc_RNA (1)...(19): siRNA sense strand
ggcugggccuccugucuuu

SEQ ID NO: 1914488 - RNA, 19 nt, Homo sapiens
  misc_RNA (1)...(19): siRNA sense strand
gagaucuacucagaauuca

SEQ ID NO: 1914489 - RNA, 19 nt, Homo sapiens
  misc_RNA (1)...(19): siRNA sense strand
gaauggaguuuccuaguua

SEQ ID NO: 1914490 - RNA, 19 nt, Homo sapiens
  misc_RNA (1)...(19): siRNA sense strand
gaaugaagaugauauguug

SEQ ID NO: 1914491 - RNA, 19 nt, Homo sapiens
  misc_RNA (1)...(19): siRNA sense strand
gaagaucagucccuacuuu

SEQ ID NO: 1914492 - RNA, 19 nt, Homo sapiens
  misc_RNA (1)...(19): siRNA sense strand
ggucagaaguuauauguaa

SEQ ID NO: 1914493 - RNA, 19 nt, Homo sapiens
  misc_RNA (1)...(19): siRNA sense strand
ggauuaagaugaccaaauu

SEQ ID NO: 1914494 - RNA, 19 nt, Homo sapiens
  misc_RNA (1)...(19): siRNA sense strand
gcaccuggcugcugacuuu

SEQ ID NO: 1914495 - RNA, 19 nt, Homo sapiens
  misc_RNA (1)...(19): siRNA sense strand
guaaggcucuuucaacgua

SEQ ID NO: 1914496 - RNA, 19 nt, Homo sapiens
  misc_RNA (1)...(19): siRNA sense strand
guuaagagccugauugaua

SEQ ID NO: 1914497 - RNA, 19 nt, Homo sapiens
  misc_RNA (1)...(19): siRNA sense strand
gaagggaauuguaacuaaa

SEQ ID NO: 1914498 - RNA, 19 nt, Homo sapiens
  misc_RNA (1)...(19): siRNA sense strand
cguagaagcuuaucaauca

SEQ ID NO: 1914499 - RNA, 19 nt, Homo sapiens
  misc_RNA (1)...(19): siRNA sense strand
cagguuggcuuaauaaauu

SEQ ID NO: 1914500 - RNA, 19 nt, Homo sapiens
  misc_RNA (1)...(19): siRNA sense strand
gcagagacuucacauguau

SEQ ID NO: 1914501 - RNA, 19 nt, Homo sapiens
  misc_RNA (1)...(19): siRNA sense strand
gaugauauguugcucuuug

SEQ ID NO: 1914502 - RNA, 19 nt, Homo sapiens
  misc_RNA (1)...(19): siRNA sense strand
gaaaauacguaaaggcuaa

SEQ ID NO: 1914503 - RNA, 19 nt, Homo sapiens
  misc_RNA (1)...(19): siRNA sense strand
gcaagaguguaucaaagaa

SEQ ID NO: 1914504 - RNA, 19 nt, Homo sapiens
  misc_RNA (1)...(19): siRNA sense strand
uuaagagccugauugauaa

SEQ ID NO: 1914505 - RNA, 19 nt, Homo sapiens
  misc_RNA (1)...(19): siRNA sense strand
gagauugccuuagacuuaa

SEQ ID NO: 1914506 - RNA, 19 nt, Homo sapiens
  misc_RNA (1)...(19): siRNA sense strand
gagaugccacgaagauuua

SEQ ID NO: 1914507 - RNA, 19 nt, Homo sapiens
  misc_RNA (1)...(19): siRNA sense strand
guaaugauguggugugcaa

SEQ ID NO: 1914508 - RNA, 19 nt, Homo sapiens
  misc_RNA (1)...(19): siRNA sense strand
aaauacagcugucagauuc

SEQ ID NO: 1914509 - RNA, 19 nt, Homo sapiens
  misc_RNA (1)...(19): siRNA sense strand
agaagggaauuguaacuaa

SEQ ID NO: 1914510 - RNA, 19 nt, Homo sapiens
  misc_RNA (1)...(19): siRNA sense strand
gaauaagccuggaauuggu

SEQ ID NO: 1914511 - RNA, 19 nt, Homo sapiens
  misc_RNA (1)...(19): siRNA sense strand
gaugacaguugcuuaaaca

SEQ ID NO: 1914512 - RNA, 19 nt, Homo sapiens
  misc_RNA (1)...(19): siRNA sense strand
cgaauggaguuuccuaguu

SEQ ID NO: 1914513 - RNA, 19 nt, Homo sapiens
  misc_RNA (1)...(19): siRNA sense strand
ggacgccuuucucaaauug

SEQ ID NO: 1914514 - RNA, 19 nt, Homo sapiens
  misc_RNA (1)...(19): siRNA sense strand
gacaguugcuuaaacaaug

SEQ ID NO: 1914515 - RNA, 19 nt, Homo sapiens
  misc_RNA (1)...(19): siRNA sense strand
uagaagauguaacaccuaa

SEQ ID NO: 1914516 - RNA, 19 nt, Homo sapiens
  misc_RNA (1)...(19): siRNA sense strand
gaagauguaacaccuaaga

SEQ ID NO: 1914517 - RNA, 19 nt, Homo sapiens
  misc_RNA (1)...(19): siRNA sense strand
caucuaaauuguccagaaa

SEQ ID NO: 1914518 - RNA, 19 nt, Homo sapiens
  misc_RNA (1)...(19): siRNA sense strand
ugaaaugugugcuaacaau

SEQ ID NO: 1914519 - RNA, 19 nt, Homo sapiens
  misc_RNA (1)...(19): siRNA sense strand
uaacaccugugauugaaga

SEQ ID NO: 1914520 - RNA, 19 nt, Homo sapiens
  misc_RNA (1)...(19): siRNA sense strand
agagauugccuuagacuua

SEQ ID NO: 1914521 - RNA, 19 nt, Homo sapiens
  misc_RNA (1)...(19): siRNA sense strand
gaugaaaugugugcuaaca

SEQ ID NO: 1914522 - RNA, 19 nt, Homo sapiens
  misc_RNA (1)...(19): siRNA sense strand
ggacaccgccuuucacugu

SEQ ID NO: 1914523 - RNA, 19 nt, Homo sapiens
  misc_RNA (1)...(19): siRNA sense strand
gaucagucccuacuuuaaa

SEQ ID NO: 1914524 - RNA, 19 nt, Homo sapiens
  misc_RNA (1)...(19): siRNA sense strand
gagaaaucguagugugaaa

SEQ ID NO: 1914525 - RNA, 19 nt, Homo sapiens
  misc_RNA (1)...(19): siRNA sense strand
acagacagcuucuucacaa

SEQ ID NO: 1914526 - RNA, 19 nt, Homo sapiens
  misc_RNA (1)...(19): siRNA sense strand
aaaccguacuugagaauga

SEQ ID NO: 1914527 - RNA, 19 nt, Homo sapiens
  misc_RNA (1)...(19): siRNA sense strand
ucaccagauuucacucuua

SEQ ID NO: 1914528 - RNA, 19 nt, Homo sapiens
  misc_RNA (1)...(19): siRNA sense strand
gcaucuaaauuguccagaa

SEQ ID NO: 1914529 - RNA, 19 nt, Homo sapiens
  misc_RNA (1)...(19): siRNA sense strand
gcaccuugaugaaaugugu

SEQ ID NO: 1914530 - RNA, 19 nt, Homo sapiens
  misc_RNA (1)...(19): siRNA sense strand
ccacgcacaugcugaguga

SEQ ID NO: 1914531 - RNA, 19 nt, Homo sapiens
  misc_RNA (1)...(19): siRNA sense strand
guaaaauggugccuagaua

SEQ ID NO: 1914532 - RNA, 19 nt, Homo sapiens
  misc_RNA (1)...(19): siRNA sense strand
gaaguaaagcagaagauca

SEQ ID NO: 1914533 - RNA, 19 nt, Homo sapiens
  misc_RNA (1)...(19): siRNA sense strand
gcaagucuguguuugugau

SEQ ID NO: 1914534 - RNA, 19 nt, Homo sapiens
  misc_RNA (1)...(19): siRNA sense strand
gugugaaagucauuuguuu

SEQ ID NO: 1914535 - RNA, 19 nt, Homo sapiens
  misc_RNA (1)...(19): siRNA sense strand
agaaauggcugugcaagau

SEQ ID NO: 1914536 - RNA, 19 nt, Homo sapiens
  misc_RNA (1)...(19): siRNA sense strand
caaauuagaguaugaagag

SEQ ID NO: 1914537 - RNA, 19 nt, Homo sapiens
  misc_RNA (1)...(19): siRNA sense strand
gggaucgacuggcccuuaa

SEQ ID NO: 1914538 - RNA, 19 nt, Homo sapiens
  misc_RNA (1)...(19): siRNA sense strand
ucccagagccgucacuuua

SEQ ID NO: 1914539 - RNA, 19 nt, Homo sapiens
  misc_RNA (1)...(19): siRNA sense strand
ugauaucccucacagcauu

SEQ ID NO: 1914540 - RNA, 19 nt, Homo sapiens
  misc_RNA (1)...(19): siRNA sense strand
gaaauacugcagagacuuc

SEQ ID NO: 1914541 - RNA, 19 nt, Homo sapiens
  misc_RNA (1)...(19): siRNA sense strand
gcaagaacucucugaagug

SEQ ID NO: 1914542 - RNA, 19 nt, Homo sapiens
  misc_RNA (1)...(19): siRNA sense strand
ugaccaaauuagaguauga

SEQ ID NO: 1914543 - RNA, 19 nt, Homo sapiens
  misc_RNA (1)...(19): siRNA sense strand
agggaaaccuccugacaaa

SEQ ID NO: 1914544 - RNA, 19 nt, Homo sapiens
  misc_RNA (1)...(19): siRNA sense strand
aaacaaccggucauccuua

SEQ ID NO: 1914545 - RNA, 19 nt, Homo sapiens
  misc_RNA (1)...(19): siRNA sense strand
ccacagaguuccaaaucca

SEQ ID NO: 1914546 - RNA, 19 nt, Homo sapiens
  misc_RNA (1)...(19): siRNA sense strand
gcucuuucaacguaaauua

SEQ ID NO: 1914547 - RNA, 19 nt, Homo sapiens
  misc_RNA (1)...(19): siRNA sense strand
gagaagggaauuguaacua

SEQ ID NO: 1914548 - RNA, 19 nt, Homo sapiens
  misc_RNA (1)...(19): siRNA sense strand
gugcauuccugaacauaug

SEQ ID NO: 1914549 - RNA, 19 nt, Homo sapiens
  misc_RNA (1)...(19): siRNA sense strand
gaaucccaauggacagaaa

SEQ ID NO: 1914550 - RNA, 19 nt, Homo sapiens
  misc_RNA (1)...(19): siRNA sense strand
gaagggaaaccuccugaca

SEQ ID NO: 1914551 - RNA, 19 nt, Homo sapiens
  misc_RNA (1)...(19): siRNA sense strand
ggaauacauuaaagucuac

SEQ ID NO: 1914552 - RNA, 19 nt, Homo sapiens
  misc_RNA (1)...(19): siRNA sense strand
ccaccaaagacaaauuuaa

SEQ ID NO: 1914553 - RNA, 19 nt, Homo sapiens
  misc_RNA (1)...(19): siRNA sense strand
gagccaaagccuuagcuaa

SEQ ID NO: 1914554 - RNA, 19 nt, Homo sapiens
  misc_RNA (1)...(19): siRNA sense strand
ggcugcagcugauucauga

SEQ ID NO: 1914555 - RNA, 19 nt, Homo sapiens
  misc_RNA (1)...(19): siRNA sense strand
ugaggaagccgucagagaa

SEQ ID NO: 1914556 - RNA, 19 nt, Homo sapiens
  misc_RNA (1)...(19): siRNA sense strand
gguggacgccuuucucaaa

SEQ ID NO: 1914557 - RNA, 19 nt, Homo sapiens
  misc_RNA (1)...(19): siRNA sense strand
cuacuggucagaaguuaua

SEQ ID NO: 1914558 - RNA, 19 nt, Homo sapiens
  misc_RNA (1)...(19): siRNA sense strand
gugauucucuaaaggaaga

SEQ ID NO: 1914559 - RNA, 19 nt, Homo sapiens
  misc_RNA (1)...(19): siRNA sense strand
aaagggaaguaaagcagaa

SEQ ID NO: 1914560 - RNA, 19 nt, Homo sapiens
  misc_RNA (1)...(19): siRNA sense strand
gcagguuggcuuaauaaau

SEQ ID NO: 1914561 - RNA, 19 nt, Homo sapiens
  misc_RNA (1)...(19): siRNA sense strand
gcaggaugacaguugcuua

SEQ ID NO: 1914562 - RNA, 19 nt, Homo sapiens
  misc_RNA (1)...(19): siRNA sense strand
ccaaauccacaguuguuaa

SEQ ID NO: 1914563 - RNA, 19 nt, Homo sapiens
  misc_RNA (1)...(19): siRNA sense strand
ucgacuggcccuuaauuua

SEQ ID NO: 1914564 - RNA, 19 nt, Homo sapiens
  misc_RNA (1)...(19): siRNA sense strand
acuguuggguggauuuaua

SEQ ID NO: 1914565 - RNA, 19 nt, Homo sapiens
  misc_RNA (1)...(19): siRNA sense strand
ugagaugccacgaagauuu

SEQ ID NO: 1914566 - RNA, 19 nt, Homo sapiens
  misc_RNA (1)...(19): siRNA sense strand
agacuuaacaccugugauu

SEQ ID NO: 1914567 - RNA, 19 nt, Homo sapiens
  misc_RNA (1)...(19): siRNA sense strand
guaugaagagauugccuua

SEQ ID NO: 1914568 - RNA, 19 nt, Homo sapiens
  misc_RNA (1)...(19): siRNA sense strand
caagaugagcugagaaauc

SEQ ID NO: 1914569 - RNA, 19 nt, Homo sapiens
  misc_RNA (1)...(19): siRNA sense strand
augaagagauugccuuaga

SEQ ID NO: 1914570 - RNA, 19 nt, Homo sapiens
  misc_RNA (1)...(19): siRNA sense strand
ucaaucagcaagaauaaga

SEQ ID NO: 1914571 - RNA, 19 nt, Homo sapiens
  misc_RNA (1)...(19): siRNA sense strand
caaccggucauccuuacua

SEQ ID NO: 1914572 - RNA, 19 nt, Homo sapiens
  misc_RNA (1)...(19): siRNA sense strand
gaugagcugagaaaucgua

SEQ ID NO: 1914573 - RNA, 19 nt, Homo sapiens
  misc_RNA (1)...(19): siRNA sense strand
gaaaugugugcuaacaaug

SEQ ID NO: 1914574 - RNA, 19 nt, Homo sapiens
  misc_RNA (1)...(19): siRNA sense strand
cagaguggcuucccuuguc

SEQ ID NO: 1914575 - RNA, 19 nt, Homo sapiens
  misc_RNA (1)...(19): siRNA sense strand
gaucgacuggcccuuaauu

SEQ ID NO: 1914576 - RNA, 19 nt, Homo sapiens
  misc_RNA (1)...(19): siRNA sense strand
ggaauuggugcagugauuu

SEQ ID NO: 1914577 - RNA, 19 nt, Homo sapiens
  misc_RNA (1)...(19): siRNA sense strand
gcaagaauaagccuggaau

SEQ ID NO: 1914578 - RNA, 19 nt, Homo sapiens
  misc_RNA (1)...(19): siRNA sense strand
caggagaagggaauuguaa

SEQ ID NO: 1914579 - RNA, 19 nt, Homo sapiens
  misc_RNA (1)...(19): siRNA sense strand
gcaggagaagggaauugua

SEQ ID NO: 1914580 - RNA, 19 nt, Homo sapiens
  misc_RNA (1)...(19): siRNA sense strand
gauaacucuucagaaauug

SEQ ID NO: 1914581 - RNA, 19 nt, Homo sapiens
  misc_RNA (1)...(19): siRNA sense strand
caauagauaaggaugaaga

SEQ ID NO: 1914582 - RNA, 19 nt, Homo sapiens
  misc_RNA (1)...(19): siRNA sense strand
ugggaagccuagcaucuaa

SEQ ID NO: 1914583 - RNA, 19 nt, Homo sapiens
  misc_RNA (1)...(19): siRNA sense strand
uaacaaugacuucguucaa

SEQ ID NO: 1914584 - RNA, 19 nt, Homo sapiens
  misc_RNA (1)...(19): siRNA sense strand
ccaaugaucgucuuucaca

SEQ ID NO: 1914585 - RNA, 19 nt, Homo sapiens
  misc_RNA (1)...(19): siRNA sense strand
ugcagagacuucacaugua

SEQ ID NO: 1914586 - RNA, 19 nt, Homo sapiens
  misc_RNA (1)...(19): siRNA sense strand
uggaauuggugcagugauu

SEQ ID NO: 1914587 - RNA, 19 nt, Homo sapiens
  misc_RNA (1)...(19): siRNA sense strand
gggcagguuggcuuaauaa

SEQ ID NO: 1914588 - RNA, 19 nt, Homo sapiens
  misc_RNA (1)...(19): siRNA sense strand
caccugugauugaagaauu

SEQ ID NO: 1914589 - RNA, 19 nt, Homo sapiens
  misc_RNA (1)...(19): siRNA sense strand
ggaagagguuucauugaua

SEQ ID NO: 1914590 - RNA, 19 nt, Homo sapiens
  misc_RNA (1)...(19): siRNA sense strand
gggaaaggcuucagaugua

SEQ ID NO: 1914591 - RNA, 19 nt, Homo sapiens
  misc_RNA (1)...(19): siRNA sense strand
gggaagagcuuuagacaug

SEQ ID NO: 1914592 - RNA, 19 nt, Homo sapiens
  misc_RNA (1)...(19): siRNA sense strand
ggacagaaaccauauaauu

SEQ ID NO: 1914593 - RNA, 19 nt, Homo sapiens
  misc_RNA (1)...(19): siRNA sense strand
aaacugagauggagacuuu

SEQ ID NO: 1914594 - RNA, 19 nt, Homo sapiens
  misc_RNA (1)...(19): siRNA sense strand
gggaagggcuacauuagua

SEQ ID NO: 1914595 - RNA, 19 nt, Homo sapiens
  misc_RNA (1)...(19): siRNA sense strand
gagagaaaccuuauaauug

SEQ ID NO: 1914596 - RNA, 19 nt, Homo sapiens
  misc_RNA (1)...(19): siRNA sense strand
ggagagagaucuuauaacu

SEQ ID NO: 1914597 - RNA, 19 nt, Homo sapiens
  misc_RNA (1)...(19): siRNA sense strand
guaaacaguucuucaguga

SEQ ID NO: 1914598 - RNA, 19 nt, Homo sapiens
  misc_RNA (1)...(19): siRNA sense strand
caagauaccaccauaagua

SEQ ID NO: 1914599 - RNA, 19 nt, Homo sapiens
  misc_RNA (1)...(19): siRNA sense strand
ugucuuaggucaagucuua

SEQ ID NO: 1914600 - RNA, 19 nt, Homo sapiens
  misc_RNA (1)...(19): siRNA sense strand
ggagugaaaugcuauaagu

SEQ ID NO: 1914601 - RNA, 19 nt, Homo sapiens
  misc_RNA (1)...(19): siRNA sense strand
ggucuugacuuccaccaua

SEQ ID NO: 1914602 - RNA, 19 nt, Homo sapiens
  misc_RNA (1)...(19): siRNA sense strand
gcaagacuaucuacaguuc

SEQ ID NO: 1914603 - RNA, 19 nt, Homo sapiens
  misc_RNA (1)...(19): siRNA sense strand
ucagaaacaucacagaauu

SEQ ID NO: 1914604 - RNA, 19 nt, Homo sapiens
  misc_RNA (1)...(19): siRNA sense strand
gaagagguuucauugauag

SEQ ID NO: 1914605 - RNA, 19 nt, Homo sapiens
  misc_RNA (1)...(19): siRNA sense strand
gggaacaaauugcaaguga

SEQ ID NO: 1914606 - RNA, 19 nt, Homo sapiens
  misc_RNA (1)...(19): siRNA sense strand
cagagaaacuguacaaauc

SEQ ID NO: 1914607 - RNA, 19 nt, Homo sapiens
  misc_RNA (1)...(19): siRNA sense strand
gaggcaagauccaaacuga

SEQ ID NO: 1914608 - RNA, 19 nt, Homo sapiens
  misc_RNA (1)...(19): siRNA sense strand
agacaugcuucuaguauuu

SEQ ID NO: 1914609 - RNA, 19 nt, Homo sapiens
  misc_RNA (1)...(19): siRNA sense strand
agagagaucuuauaacugu

SEQ ID NO: 1914610 - RNA, 19 nt, Homo sapiens
  misc_RNA (1)...(19): siRNA sense strand
gguaaggaauuuagucaga

SEQ ID NO: 1914611 - RNA, 19 nt, Homo sapiens
  misc_RNA (1)...(19): siRNA sense strand
gacagaaaccauauaauug

SEQ ID NO: 1914612 - RNA, 19 nt, Homo sapiens
  misc_RNA (1)...(19): siRNA sense strand
aaacaguucuucagugaug

SEQ ID NO: 1914613 - RNA, 19 nt, Homo sapiens
  misc_RNA (1)...(19): siRNA sense strand
gcagagaaacuguacaaau

SEQ ID NO: 1914614 - RNA, 19 nt, Homo sapiens
  misc_RNA (1)...(19): siRNA sense strand
ggagagaaaccauucaaau

SEQ ID NO: 1914615 - RNA, 19 nt, Homo sapiens
  misc_RNA (1)...(19): siRNA sense strand
aaacuccacugccaaagaa

SEQ ID NO: 1914616 - RNA, 19 nt, Homo sapiens
  misc_RNA (1)...(19): siRNA sense strand
aggaacacaugaagaauuu

SEQ ID NO: 1914617 - RNA, 19 nt, Homo sapiens
  misc_RNA (1)...(19): siRNA sense strand
uuaaccaggucucaagaua

SEQ ID NO: 1914618 - RNA, 19 nt, Homo sapiens
  misc_RNA (1)...(19): siRNA sense strand
gcuugaaucuggauauaau

SEQ ID NO: 1914619 - RNA, 19 nt, Homo sapiens
  misc_RNA (1)...(19): siRNA sense strand
caaagaaagccauugaaau

SEQ ID NO: 1914620 - RNA, 19 nt, Homo sapiens
  misc_RNA (1)...(19): siRNA sense strand
ccaaagaaagccauugaaa

SEQ ID NO: 1914621 - RNA, 19 nt, Homo sapiens
  misc_RNA (1)...(19): siRNA sense strand
agauguagaucagcacuua

SEQ ID NO: 1914622 - RNA, 19 nt, Homo sapiens
  misc_RNA (1)...(19): siRNA sense strand
ugagagagaaaccuuauaa

SEQ ID NO: 1914623 - RNA, 19 nt, Homo sapiens
  misc_RNA (1)...(19): siRNA sense strand
gcucacgucugcaaacuca

SEQ ID NO: 1914624 - RNA, 19 nt, Homo sapiens
  misc_RNA (1)...(19): siRNA sense strand
gcgcuugaaucuggauaua

SEQ ID NO: 1914625 - RNA, 19 nt, Homo sapiens
  misc_RNA (1)...(19): siRNA sense strand
guaaagaccaacaaagaga

SEQ ID NO: 1914626 - RNA, 19 nt, Homo sapiens
  misc_RNA (1)...(19): siRNA sense strand
gcaaauuacacaugagaga

SEQ ID NO: 1914627 - RNA, 19 nt, Homo sapiens
  misc_RNA (1)...(19): siRNA sense strand
gaaacuccacugccaaaga

SEQ ID NO: 1914628 - RNA, 19 nt, Homo sapiens
  misc_RNA (1)...(19): siRNA sense strand
ggaaggcuuucaugcacaa

SEQ ID NO: 1914629 - RNA, 19 nt, Homo sapiens
  misc_RNA (1)...(19): siRNA sense strand
caucucagcccuucauauu

SEQ ID NO: 1914630 - RNA, 19 nt, Homo sapiens
  misc_RNA (1)...(19): siRNA sense strand
caaaugguccucauaucuu

SEQ ID NO: 1914631 - RNA, 19 nt, Homo sapiens
  misc_RNA (1)...(19): siRNA sense strand
aaaugguccucauaucuuu

SEQ ID NO: 1914632 - RNA, 19 nt, Homo sapiens
  misc_RNA (1)...(19): siRNA sense strand
ggaaaggcuucagauguag

SEQ ID NO: 1914633 - RNA, 19 nt, Homo sapiens
  misc_RNA (1)...(19): siRNA sense strand
uggaagagguuucauugau

SEQ ID NO: 1914634 - RNA, 19 nt, Homo sapiens
  misc_RNA (1)...(19): siRNA sense strand
gcaagcaaauuugggaaca

SEQ ID NO: 1914635 - RNA, 19 nt, Homo sapiens
  misc_RNA (1)...(19): siRNA sense strand
gagaaaagccauacaaaug

SEQ ID NO: 1914636 - RNA, 19 nt, Homo sapiens
  misc_RNA (1)...(19): siRNA sense strand
gagaaaccuuauaauugug

SEQ ID NO: 1914637 - RNA, 19 nt, Homo sapiens
  misc_RNA (1)...(19): siRNA sense strand
gacaaccccucccagauua

SEQ ID NO: 1914638 - RNA, 19 nt, Homo sapiens
  misc_RNA (1)...(19): siRNA sense strand
ggaagggcuacauuaguaa

SEQ ID NO: 1914639 - RNA, 19 nt, Homo sapiens
  misc_RNA (1)...(19): siRNA sense strand
gagaaacuguacaaaucug

SEQ ID NO: 1914640 - RNA, 19 nt, Homo sapiens
  misc_RNA (1)...(19): siRNA sense strand
ucucagcccuucauauuca

SEQ ID NO: 1914641 - RNA, 19 nt, Homo sapiens
  misc_RNA (1)...(19): siRNA sense strand
gauguuuccuucuuugauc

SEQ ID NO: 1914642 - RNA, 19 nt, Homo sapiens
  misc_RNA (1)...(19): siRNA sense strand
ucagugauguuuccuucuu

SEQ ID NO: 1914643 - RNA, 19 nt, Homo sapiens
  misc_RNA (1)...(19): siRNA sense strand
gaacaaauugcaagugacu

SEQ ID NO: 1914644 - RNA, 19 nt, Homo sapiens
  misc_RNA (1)...(19): siRNA sense strand
gaaaugcuauaagugugau

SEQ ID NO: 1914645 - RNA, 19 nt, Homo sapiens
  misc_RNA (1)...(19): siRNA sense strand
ucugcaaacucaucaaaga

SEQ ID NO: 1914646 - RNA, 19 nt, Homo sapiens
  misc_RNA (1)...(19): siRNA sense strand
gauuaaagcaagacuaucu

SEQ ID NO: 1914647 - RNA, 19 nt, Homo sapiens
  misc_RNA (1)...(19): siRNA sense strand
gaaaagccauacaaaugug

SEQ ID NO: 1914648 - RNA, 19 nt, Homo sapiens
  misc_RNA (1)...(19): siRNA sense strand
cauugcaaauuacacauga

SEQ ID NO: 1914649 - RNA, 19 nt, Homo sapiens
  misc_RNA (1)...(19): siRNA sense strand
ggcaagauccaaacugaga

SEQ ID NO: 1914650 - RNA, 19 nt, Homo sapiens
  misc_RNA (1)...(19): siRNA sense strand
gaaacuguacaaaucugaa

SEQ ID NO: 1914651 - RNA, 19 nt, Homo sapiens
  misc_RNA (1)...(19): siRNA sense strand
gaaaacccauccaaaugug

SEQ ID NO: 1914652 - RNA, 19 nt, Homo sapiens
  misc_RNA (1)...(19): siRNA sense strand
cgggagagagaucuuauaa

SEQ ID NO: 1914653 - RNA, 19 nt, Homo sapiens
  misc_RNA (1)...(19): siRNA sense strand
ggagaaaacccauccaaau

SEQ ID NO: 1914654 - RNA, 19 nt, Homo sapiens
  misc_RNA (1)...(19): siRNA sense strand
cagauuaaagcaagacuau

SEQ ID NO: 1914655 - RNA, 19 nt, Homo sapiens
  misc_RNA (1)...(19): siRNA sense strand
caggaacacaugaagaauu

SEQ ID NO: 1914656 - RNA, 19 nt, Homo sapiens
  misc_RNA (1)...(19): siRNA sense strand
gauaggcuagauuugcaua

SEQ ID NO: 1914657 - RNA, 19 nt, Homo sapiens
  misc_RNA (1)...(19): siRNA sense strand
gagaaaacccauccaaaug

SEQ ID NO: 1914658 - RNA, 19 nt, Homo sapiens
  misc_RNA (1)...(19): siRNA sense strand
caagcaaauuugggaacaa

SEQ ID NO: 1914659 - RNA, 19 nt, Homo sapiens
  misc_RNA (1)...(19): siRNA sense strand
ugugauaacugcgggaaga

SEQ ID NO: 1914660 - RNA, 19 nt, Homo sapiens
  misc_RNA (1)...(19): siRNA sense strand
auacaaaugugaggagugu

SEQ ID NO: 1914661 - RNA, 19 nt, Homo sapiens
  misc_RNA (1)...(19): siRNA sense strand
aagcaagacuaucuacagu

SEQ ID NO: 1914662 - RNA, 19 nt, Homo sapiens
  misc_RNA (1)...(19): siRNA sense strand
ugugaagacuguggaaaga

SEQ ID NO: 1914663 - RNA, 19 nt, Homo sapiens
  misc_RNA (1)...(19): siRNA sense strand
ucaaaugguccucauaucu

SEQ ID NO: 1914664 - RNA, 19 nt, Homo sapiens
  misc_RNA (1)...(19): siRNA sense strand
cagcagagaaacuguacaa

SEQ ID NO: 1914665 - RNA, 19 nt, Homo sapiens
  misc_RNA (1)...(19): siRNA sense strand
aggcuuucaugcacaauuu

SEQ ID NO: 1914666 - RNA, 19 nt, Homo sapiens
  misc_RNA (1)...(19): siRNA sense strand
gaaaggcuucagauguaga

SEQ ID NO: 1914667 - RNA, 19 nt, Homo sapiens
  misc_RNA (1)...(19): siRNA sense strand
cuauaagugugaugugugu

SEQ ID NO: 1914668 - RNA, 19 nt, Homo sapiens
  misc_RNA (1)...(19): siRNA sense strand
aagcuucuguuacaucuca

SEQ ID NO: 1914669 - RNA, 19 nt, Homo sapiens
  misc_RNA (1)...(19): siRNA sense strand
aagauaccaccauaaguaa

SEQ ID NO: 1914670 - RNA, 19 nt, Homo sapiens
  misc_RNA (1)...(19): siRNA sense strand
gaagagcuuuagacaugcu

SEQ ID NO: 1914671 - RNA, 19 nt, Homo sapiens
  misc_RNA (1)...(19): siRNA sense strand
gaauuuuccugcaagcaaa

SEQ ID NO: 1914672 - RNA, 19 nt, Homo sapiens
  misc_RNA (1)...(19): siRNA sense strand
gagagagaaaccuuauaau

SEQ ID NO: 1914673 - RNA, 19 nt, Homo sapiens
  misc_RNA (1)...(19): siRNA sense strand
ugaaaugcuauaaguguga

SEQ ID NO: 1914674 - RNA, 19 nt, Homo sapiens
  misc_RNA (1)...(19): siRNA sense strand
agaagucucauaccuguga

SEQ ID NO: 1914675 - RNA, 19 nt, Homo sapiens
  misc_RNA (1)...(19): siRNA sense strand
guauggaagagguuucauu

SEQ ID NO: 1914676 - RNA, 19 nt, Homo sapiens
  misc_RNA (1)...(19): siRNA sense strand
gggcuacauuaguaaguca

SEQ ID NO: 1914677 - RNA, 19 nt, Homo sapiens
  misc_RNA (1)...(19): siRNA sense strand
ucauugauaggcuagauuu

SEQ ID NO: 1914678 - RNA, 19 nt, Homo sapiens
  misc_RNA (1)...(19): siRNA sense strand
uauggaagagguuucauug

SEQ ID NO: 1914679 - RNA, 19 nt, Homo sapiens
  misc_RNA (1)...(19): siRNA sense strand
uaucuacaguucacacaag

SEQ ID NO: 1914680 - RNA, 19 nt, Homo sapiens
  misc_RNA (1)...(19): siRNA sense strand
ugaugugugugguaaggaa

SEQ ID NO: 1914681 - RNA, 19 nt, Homo sapiens
  misc_RNA (1)...(19): siRNA sense strand
cagugauguuuccuucuuu

SEQ ID NO: 1914682 - RNA, 19 nt, Homo sapiens
  misc_RNA (1)...(19): siRNA sense strand
agaaaugugggaaggcuuu

SEQ ID NO: 1914683 - RNA, 19 nt, Homo sapiens
  misc_RNA (1)...(19): siRNA sense strand
ggagaaaagccauacaaau

SEQ ID NO: 1914684 - RNA, 19 nt, Homo sapiens
  misc_RNA (1)...(19): siRNA sense strand
caucacagaauucauacug

SEQ ID NO: 1914685 - RNA, 19 nt, Homo sapiens
  misc_RNA (1)...(19): siRNA sense strand
ugaucuuccucagcaguua

SEQ ID NO: 1914686 - RNA, 19 nt, Homo sapiens
  misc_RNA (1)...(19): siRNA sense strand
uguaaagaaugugggaaga

SEQ ID NO: 1914687 - RNA, 19 nt, Homo sapiens
  misc_RNA (1)...(19): siRNA sense strand
gagagagaucuuauaacug

SEQ ID NO: 1914688 - RNA, 19 nt, Homo sapiens
  misc_RNA (1)...(19): siRNA sense strand
gaagcaggaacacaugaag

SEQ ID NO: 1914689 - RNA, 19 nt, Homo sapiens
  misc_RNA (1)...(19): siRNA sense strand
gaaguggaaugaugagaua

SEQ ID NO: 1914690 - RNA, 19 nt, Homo sapiens
  misc_RNA (1)...(19): siRNA sense strand
gaccaaaccucaaguacaa

SEQ ID NO: 1914691 - RNA, 19 nt, Homo sapiens
  misc_RNA (1)...(19): siRNA sense strand
ggaacucaaugauacgaua

SEQ ID NO: 1914692 - RNA, 19 nt, Homo sapiens
  misc_RNA (1)...(19): siRNA sense strand
gaaaugagucucuuggaaa

SEQ ID NO: 1914693 - RNA, 19 nt, Homo sapiens
  misc_RNA (1)...(19): siRNA sense strand
gagcuggugugcgcuauua

SEQ ID NO: 1914694 - RNA, 19 nt, Homo sapiens
  misc_RNA (1)...(19): siRNA sense strand
caaaucacauggacgguuu

SEQ ID NO: 1914695 - RNA, 19 nt, Homo sapiens
  misc_RNA (1)...(19): siRNA sense strand
gcagcuaacuuuguagaaa

SEQ ID NO: 1914696 - RNA, 19 nt, Homo sapiens
  misc_RNA (1)...(19): siRNA sense strand
ggugugcgcuauuauguaa

SEQ ID NO: 1914697 - RNA, 19 nt, Homo sapiens
  misc_RNA (1)...(19): siRNA sense strand
ugagauacauugccuuuga

SEQ ID NO: 1914698 - RNA, 19 nt, Homo sapiens
  misc_RNA (1)...(19): siRNA sense strand
uagcagaaaugcaagauga

SEQ ID NO: 1914699 - RNA, 19 nt, Homo sapiens
  misc_RNA (1)...(19): siRNA sense strand
ccaaugugauccagaguuu

SEQ ID NO: 1914700 - RNA, 19 nt, Homo sapiens
  misc_RNA (1)...(19): siRNA sense strand
ugcauuaucuguuugcuua

SEQ ID NO: 1914701 - RNA, 19 nt, Homo sapiens
  misc_RNA (1)...(19): siRNA sense strand
gagcagacauuugcaacaa

SEQ ID NO: 1914702 - RNA, 19 nt, Homo sapiens
  misc_RNA (1)...(19): siRNA sense strand
cagaaacacuggccuaugu

SEQ ID NO: 1914703 - RNA, 19 nt, Homo sapiens
  misc_RNA (1)...(19): siRNA sense strand
gcagguaauuaucuuauag

SEQ ID NO: 1914704 - RNA, 19 nt, Homo sapiens
  misc_RNA (1)...(19): siRNA sense strand
gagaugggaucgacuaagu

SEQ ID NO: 1914705 - RNA, 19 nt, Homo sapiens
  misc_RNA (1)...(19): siRNA sense strand
caacaauggugucuuccuu

SEQ ID NO: 1914706 - RNA, 19 nt, Homo sapiens
  misc_RNA (1)...(19): siRNA sense strand
gcuaaaccaugucuugaau

SEQ ID NO: 1914707 - RNA, 19 nt, Homo sapiens
  misc_RNA (1)...(19): siRNA sense strand
gaauuagaaucucauaguc

SEQ ID NO: 1914708 - RNA, 19 nt, Homo sapiens
  misc_RNA (1)...(19): siRNA sense strand
ggaaagagaacucauuugg

SEQ ID NO: 1914709 - RNA, 19 nt, Homo sapiens
  misc_RNA (1)...(19): siRNA sense strand
gaaagauguuccuccuuca

SEQ ID NO: 1914710 - RNA, 19 nt, Homo sapiens
  misc_RNA (1)...(19): siRNA sense strand
caaaguagcaaaucacaug

SEQ ID NO: 1914711 - RNA, 19 nt, Homo sapiens
  misc_RNA (1)...(19): siRNA sense strand
ccaugcagcuaacuuugua

SEQ ID NO: 1914712 - RNA, 19 nt, Homo sapiens
  misc_RNA (1)...(19): siRNA sense strand
uuacauggcuuuauuacca

SEQ ID NO: 1914713 - RNA, 19 nt, Homo sapiens
  misc_RNA (1)...(19): siRNA sense strand
uaucaugguuguugccuuu

SEQ ID NO: 1914714 - RNA, 19 nt, Homo sapiens
  misc_RNA (1)...(19): siRNA sense strand
caagaugaauuugagaaga

SEQ ID NO: 1914715 - RNA, 19 nt, Homo sapiens
  misc_RNA (1)...(19): siRNA sense strand
gaagacaauguugcacuua

SEQ ID NO: 1914716 - RNA, 19 nt, Homo sapiens
  misc_RNA (1)...(19): siRNA sense strand
caacacuaguccugaauuc

SEQ ID NO: 1914717 - RNA, 19 nt, Homo sapiens
  misc_RNA (1)...(19): siRNA sense strand
uaaaccaugucuugaaugu

SEQ ID NO: 1914718 - RNA, 19 nt, Homo sapiens
  misc_RNA (1)...(19): siRNA sense strand
agaaaugagucucuuggaa

SEQ ID NO: 1914719 - RNA, 19 nt, Homo sapiens
  misc_RNA (1)...(19): siRNA sense strand
gaacucauuugggacuuau

SEQ ID NO: 1914720 - RNA, 19 nt, Homo sapiens
  misc_RNA (1)...(19): siRNA sense strand
gcacuacaaugggagcaaa

SEQ ID NO: 1914721 - RNA, 19 nt, Homo sapiens
  misc_RNA (1)...(19): siRNA sense strand
gaucagcgguuuguaugga

SEQ ID NO: 1914722 - RNA, 19 nt, Homo sapiens
  misc_RNA (1)...(19): siRNA sense strand
gacaaaagcuugaagaaca

SEQ ID NO: 1914723 - RNA, 19 nt, Homo sapiens
  misc_RNA (1)...(19): siRNA sense strand
ggcagguaauuaucuuaua

SEQ ID NO: 1914724 - RNA, 19 nt, Homo sapiens
  misc_RNA (1)...(19): siRNA sense strand
gcagaucagcgguuuguau

SEQ ID NO: 1914725 - RNA, 19 nt, Homo sapiens
  misc_RNA (1)...(19): siRNA sense strand
gaaacuauucaguggauga

SEQ ID NO: 1914726 - RNA, 19 nt, Homo sapiens
  misc_RNA (1)...(19): siRNA sense strand
gaugagauacauugccuuu

SEQ ID NO: 1914727 - RNA, 19 nt, Homo sapiens
  misc_RNA (1)...(19): siRNA sense strand
guagaaacagaacaaauug

SEQ ID NO: 1914728 - RNA, 19 nt, Homo sapiens
  misc_RNA (1)...(19): siRNA sense strand
ccacagaucagcaaaguag

SEQ ID NO: 1914729 - RNA, 19 nt, Homo sapiens
  misc_RNA (1)...(19): siRNA sense strand
gaacaagaugaauuugaga

SEQ ID NO: 1914730 - RNA, 19 nt, Homo sapiens
  misc_RNA (1)...(19): siRNA sense strand
ggugacacuuggacagaaa

SEQ ID NO: 1914731 - RNA, 19 nt, Homo sapiens
  misc_RNA (1)...(19): siRNA sense strand
cgaagcaauugcauggauu

SEQ ID NO: 1914732 - RNA, 19 nt, Homo sapiens
  misc_RNA (1)...(19): siRNA sense strand
cuagauagaaccaauguga

SEQ ID NO: 1914733 - RNA, 19 nt, Homo sapiens
  misc_RNA (1)...(19): siRNA sense strand
aagacaauguugcacuuaa

SEQ ID NO: 1914734 - RNA, 19 nt, Homo sapiens
  misc_RNA (1)...(19): siRNA sense strand
uccauagacuuauuucuug

SEQ ID NO: 1914735 - RNA, 19 nt, Homo sapiens
  misc_RNA (1)...(19): siRNA sense strand
cagcggcuauccaacacua

SEQ ID NO: 1914736 - RNA, 19 nt, Homo sapiens
  misc_RNA (1)...(19): siRNA sense strand
gaaggcguguuccgaagca

SEQ ID NO: 1914737 - RNA, 19 nt, Homo sapiens
  misc_RNA (1)...(19): siRNA sense strand
gccagagguucaucgguuu

SEQ ID NO: 1914738 - RNA, 19 nt, Homo sapiens
  misc_RNA (1)...(19): siRNA sense strand
cauguagucuggaaagcaa

SEQ ID NO: 1914739 - RNA, 19 nt, Homo sapiens
  misc_RNA (1)...(19): siRNA sense strand
acaagauuccauagacuua

SEQ ID NO: 1914740 - RNA, 19 nt, Homo sapiens
  misc_RNA (1)...(19): siRNA sense strand
ugggaucgacuaaguauuu

SEQ ID NO: 1914741 - RNA, 19 nt, Homo sapiens
  misc_RNA (1)...(19): siRNA sense strand
ggaaguggaaugaugagau

SEQ ID NO: 1914742 - RNA, 19 nt, Homo sapiens
  misc_RNA (1)...(19): siRNA sense strand
uguggaagcuugugaugau

SEQ ID NO: 1914743 - RNA, 19 nt, Homo sapiens
  misc_RNA (1)...(19): siRNA sense strand
gaacaacuuuuccgaugga

SEQ ID NO: 1914744 - RNA, 19 nt, Homo sapiens
  misc_RNA (1)...(19): siRNA sense strand
gaacucaaugauacgauau

SEQ ID NO: 1914745 - RNA, 19 nt, Homo sapiens
  misc_RNA (1)...(19): siRNA sense strand
gaugcuaaaccaugucuug

SEQ ID NO: 1914746 - RNA, 19 nt, Homo sapiens
  misc_RNA (1)...(19): siRNA sense strand
agaacaagaugaauuugag

SEQ ID NO: 1914747 - RNA, 19 nt, Homo sapiens
  misc_RNA (1)...(19): siRNA sense strand
ugauggagcagaugacgua

SEQ ID NO: 1914748 - RNA, 19 nt, Homo sapiens
  misc_RNA (1)...(19): siRNA sense strand
gaucagcaaaguagcaaau

SEQ ID NO: 1914749 - RNA, 19 nt, Homo sapiens
  misc_RNA (1)...(19): siRNA sense strand
cauaguccuuuaaguguuc

SEQ ID NO: 1914750 - RNA, 19 nt, Homo sapiens
  misc_RNA (1)...(19): siRNA sense strand
gaagaacaagaugaauuug

SEQ ID NO: 1914751 - RNA, 19 nt, Homo sapiens
  misc_RNA (1)...(19): siRNA sense strand
gaugggaucgacuaaguau

SEQ ID NO: 1914752 - RNA, 19 nt, Homo sapiens
  misc_RNA (1)...(19): siRNA sense strand
ggaagcuugugaugaugga

SEQ ID NO: 1914753 - RNA, 19 nt, Homo sapiens
  misc_RNA (1)...(19): siRNA sense strand
gcauuuugauucccaagua

SEQ ID NO: 1914754 - RNA, 19 nt, Homo sapiens
  misc_RNA (1)...(19): siRNA sense strand
agaagacaauguugcacuu

SEQ ID NO: 1914755 - RNA, 19 nt, Homo sapiens
  misc_RNA (1)...(19): siRNA sense strand
ucagcaaaguagcaaauca

SEQ ID NO: 1914756 - RNA, 19 nt, Homo sapiens
  misc_RNA (1)...(19): siRNA sense strand
acaaaccacugccacagau

SEQ ID NO: 1914757 - RNA, 19 nt, Homo sapiens
  misc_RNA (1)...(19): siRNA sense strand
gaugacguacuuaccauug

SEQ ID NO: 1914758 - RNA, 19 nt, Homo sapiens
  misc_RNA (1)...(19): siRNA sense strand
aguguuacauggcuuuauu

SEQ ID NO: 1914759 - RNA, 19 nt, Homo sapiens
  misc_RNA (1)...(19): siRNA sense strand
gcuuauggcuggugacacu

SEQ ID NO: 1914760 - RNA, 19 nt, Homo sapiens
  misc_RNA (1)...(19): siRNA sense strand
aagacugacuuuaccagaa

SEQ ID NO: 1914761 - RNA, 19 nt, Homo sapiens
  misc_RNA (1)...(19): siRNA sense strand
ggaaggccaugcagcuaac

SEQ ID NO: 1914762 - RNA, 19 nt, Homo sapiens
  misc_RNA (1)...(19): siRNA sense strand
caauguugcacuuaacuga

SEQ ID NO: 1914763 - RNA, 19 nt, Homo sapiens
  misc_RNA (1)...(19): siRNA sense strand
ucauaguccuuuaaguguu

SEQ ID NO: 1914764 - RNA, 19 nt, Homo sapiens
  misc_RNA (1)...(19): siRNA sense strand
gacaagauuccauagacuu

SEQ ID NO: 1914765 - RNA, 19 nt, Homo sapiens
  misc_RNA (1)...(19): siRNA sense strand
agaacucauuugggacuua

SEQ ID NO: 1914766 - RNA, 19 nt, Homo sapiens
  misc_RNA (1)...(19): siRNA sense strand
gaacuggugccuugaagac

SEQ ID NO: 1914767 - RNA, 19 nt, Homo sapiens
  misc_RNA (1)...(19): siRNA sense strand
gcagaaaugcaagaugaau

SEQ ID NO: 1914768 - RNA, 19 nt, Homo sapiens
  misc_RNA (1)...(19): siRNA sense strand
ucagguagcagaaaugcaa

SEQ ID NO: 1914769 - RNA, 19 nt, Homo sapiens
  misc_RNA (1)...(19): siRNA sense strand
gaggaggagcuguuucaga

SEQ ID NO: 1914770 - RNA, 19 nt, Homo sapiens
  misc_RNA (1)...(19): siRNA sense strand
gcagaugacguacuuacca

SEQ ID NO: 1914771 - RNA, 19 nt, Homo sapiens
  misc_RNA (1)...(19): siRNA sense strand
ggaauggucaucuucuaag

SEQ ID NO: 1914772 - RNA, 19 nt, Homo sapiens
  misc_RNA (1)...(19): siRNA sense strand
aaaugagucucuuggaaag

SEQ ID NO: 1914773 - RNA, 19 nt, Homo sapiens
  misc_RNA (1)...(19): siRNA sense strand
gguggcagguaauuaucuu

SEQ ID NO: 1914774 - RNA, 19 nt, Homo sapiens
  misc_RNA (1)...(19): siRNA sense strand
gaaagaaaagauagacuga

SEQ ID NO: 1914775 - RNA, 19 nt, Homo sapiens
  misc_RNA (1)...(19): siRNA sense strand
ugcaagcauuggaacauuu

SEQ ID NO: 1914776 - RNA, 19 nt, Homo sapiens
  misc_RNA (1)...(19): siRNA sense strand
uggagcagaugacguacuu

SEQ ID NO: 1914777 - RNA, 19 nt, Homo sapiens
  misc_RNA (1)...(19): siRNA sense strand
ugucacaagaccaauauuu

SEQ ID NO: 1914778 - RNA, 19 nt, Homo sapiens
  misc_RNA (1)...(19): siRNA sense strand
gaacuggaaagagaacuca

SEQ ID NO: 1914779 - RNA, 19 nt, Homo sapiens
  misc_RNA (1)...(19): siRNA sense strand
uugcauggauugucuagau

SEQ ID NO: 1914780 - RNA, 19 nt, Homo sapiens
  misc_RNA (1)...(19): siRNA sense strand
cagaaaugcaagaugaauu

SEQ ID NO: 1914781 - RNA, 19 nt, Homo sapiens
  misc_RNA (1)...(19): siRNA sense strand
gcucggagaagccacuuga

SEQ ID NO: 1914782 - RNA, 19 nt, Homo sapiens
  misc_RNA (1)...(19): siRNA sense strand
gcuauuauguaagaggaau

SEQ ID NO: 1914783 - RNA, 19 nt, Homo sapiens
  misc_RNA (1)...(19): siRNA sense strand
cugcauaucacaccugaaa

SEQ ID NO: 1914784 - RNA, 19 nt, Homo sapiens
  misc_RNA (1)...(19): siRNA sense strand
uuuguuagcucgucguuca

SEQ ID NO: 1914785 - RNA, 19 nt, Homo sapiens
  misc_RNA (1)...(19): siRNA sense strand
agaaucucauaguccuuua

SEQ ID NO: 1914786 - RNA, 19 nt, Homo sapiens
  misc_RNA (1)...(19): siRNA sense strand
uagacaagauuccauagac

SEQ ID NO: 1914787 - RNA, 19 nt, Homo sapiens
  misc_RNA (1)...(19): siRNA sense strand
gagguuacccuugcaguca

SEQ ID NO: 1914788 - RNA, 19 nt, Homo sapiens
  misc_RNA (1)...(19): siRNA sense strand
cuucagagacuaggaguuu

SEQ ID NO: 1914789 - RNA, 19 nt, Homo sapiens
  misc_RNA (1)...(19): siRNA sense strand
guguggcucuguugcugua

SEQ ID NO: 1914790 - RNA, 19 nt, Homo sapiens
  misc_RNA (1)...(19): siRNA sense strand
gaaaaugccugaagaauga

SEQ ID NO: 1914791 - RNA, 19 nt, Homo sapiens
  misc_RNA (1)...(19): siRNA sense strand
ugacuuaucuccacacuug

SEQ ID NO: 1914792 - RNA, 19 nt, Homo sapiens
  misc_RNA (1)...(19): siRNA sense strand
gaaugcaacgucuugauua

SEQ ID NO: 1914793 - RNA, 19 nt, Homo sapiens
  misc_RNA (1)...(19): siRNA sense strand
gaagaaugaguacguagaa

SEQ ID NO: 1914794 - RNA, 19 nt, Homo sapiens
  misc_RNA (1)...(19): siRNA sense strand
aaugcaacgucuugauuaa

SEQ ID NO: 1914795 - RNA, 19 nt, Homo sapiens
  misc_RNA (1)...(19): siRNA sense strand
gcaacgucuugauuaacuu

SEQ ID NO: 1914796 - RNA, 19 nt, Homo sapiens
  misc_RNA (1)...(19): siRNA sense strand
gagcagggagcauggcauu

SEQ ID NO: 1914797 - RNA, 19 nt, Homo sapiens
  misc_RNA (1)...(19): siRNA sense strand
ccugaagaaugaguacgua

SEQ ID NO: 1914798 - RNA, 19 nt, Homo sapiens
  misc_RNA (1)...(19): siRNA sense strand
gcuuaaggaaugucacaaa

SEQ ID NO: 1914799 - RNA, 19 nt, Homo sapiens
  misc_RNA (1)...(19): siRNA sense strand
agaaugcaacgucuugauu

SEQ ID NO: 1914800 - RNA, 19 nt, Homo sapiens
  misc_RNA (1)...(19): siRNA sense strand
gaucgggaguugagaaaau

SEQ ID NO: 1914801 - RNA, 19 nt, Homo sapiens
  misc_RNA (1)...(19): siRNA sense strand
uaacuugcuuaaggaaugu

SEQ ID NO: 1914802 - RNA, 19 nt, Homo sapiens
  misc_RNA (1)...(19): siRNA sense strand
aagaaugaguacguagaaa

SEQ ID NO: 1914803 - RNA, 19 nt, Homo sapiens
  misc_RNA (1)...(19): siRNA sense strand
caacgucuugauuaacuug

SEQ ID NO: 1914804 - RNA, 19 nt, Homo sapiens
  misc_RNA (1)...(19): siRNA sense strand
ugaagaaugaguacguaga

SEQ ID NO: 1914805 - RNA, 19 nt, Homo sapiens
  misc_RNA (1)...(19): siRNA sense strand
guagaaaacaggaccaaga

SEQ ID NO: 1914806 - RNA, 19 nt, Homo sapiens
  misc_RNA (1)...(19): siRNA sense strand
gcagggagcauggcauugc

SEQ ID NO: 1914807 - RNA, 19 nt, Homo sapiens
  misc_RNA (1)...(19): siRNA sense strand
acacuugcacacugaagaa

SEQ ID NO: 1914808 - RNA, 19 nt, Homo sapiens
  misc_RNA (1)...(19): siRNA sense strand
ugcaacgucuugauuaacu

SEQ ID NO: 1914809 - RNA, 19 nt, Homo sapiens
  misc_RNA (1)...(19): siRNA sense strand
cuuaaggaaugucacaaaa

SEQ ID NO: 1914810 - RNA, 19 nt, Homo sapiens
  misc_RNA (1)...(19): siRNA sense strand
cuccacacuugcacacuga

SEQ ID NO: 1914811 - RNA, 19 nt, Homo sapiens
  misc_RNA (1)...(19): siRNA sense strand
ugauguugaucgggaguug

SEQ ID NO: 1914812 - RNA, 19 nt, Homo sapiens
  misc_RNA (1)...(19): siRNA sense strand
ggaaagggcuacaauagua

SEQ ID NO: 1914813 - RNA, 19 nt, Homo sapiens
  misc_RNA (1)...(19): siRNA sense strand
gagagaaacuguauaauug

SEQ ID NO: 1914814 - RNA, 19 nt, Homo sapiens
  misc_RNA (1)...(19): siRNA sense strand
gauaagagcuuucgucaga

SEQ ID NO: 1914815 - RNA, 19 nt, Homo sapiens
  misc_RNA (1)...(19): siRNA sense strand
gguaagagcuucuguggua

SEQ ID NO: 1914816 - RNA, 19 nt, Homo sapiens
  misc_RNA (1)...(19): siRNA sense strand
gggaagagauuuacucaaa

SEQ ID NO: 1914817 - RNA, 19 nt, Homo sapiens
  misc_RNA (1)...(19): siRNA sense strand
gggaaaggcuucagucgua

SEQ ID NO: 1914818 - RNA, 19 nt, Homo sapiens
  misc_RNA (1)...(19): siRNA sense strand
ggaagaacauuguacagaa

SEQ ID NO: 1914819 - RNA, 19 nt, Homo sapiens
  misc_RNA (1)...(19): siRNA sense strand
gagagaaaccuuauaauug

SEQ ID NO: 1914820 - RNA, 19 nt, Homo sapiens
  misc_RNA (1)...(19): siRNA sense strand
gaucagcacuuaauaguca

SEQ ID NO: 1914821 - RNA, 19 nt, Homo sapiens
  misc_RNA (1)...(19): siRNA sense strand
ggagagaaaugcuauaagu

SEQ ID NO: 1914822 - RNA, 19 nt, Homo sapiens
  misc_RNA (1)...(19): siRNA sense strand
ggagagaaacuguauaauu

SEQ ID NO: 1914823 - RNA, 19 nt, Homo sapiens
  misc_RNA (1)...(19): siRNA sense strand
ggagagaaaccuuauaauu

SEQ ID NO: 1914824 - RNA, 19 nt, Homo sapiens
  misc_RNA (1)...(19): siRNA sense strand
gagacaagauccaaacuga

SEQ ID NO: 1914825 - RNA, 19 nt, Homo sapiens
  misc_RNA (1)...(19): siRNA sense strand
ggagagagaccauacaauu

SEQ ID NO: 1914826 - RNA, 19 nt, Homo sapiens
  misc_RNA (1)...(19): siRNA sense strand
gaucagcacuuaauguuca

SEQ ID NO: 1914827 - RNA, 19 nt, Homo sapiens
  misc_RNA (1)...(19): siRNA sense strand
gagguuggaucuugacuuu

SEQ ID NO: 1914828 - RNA, 19 nt, Homo sapiens
  misc_RNA (1)...(19): siRNA sense strand
gaacaucagagaauccaua

SEQ ID NO: 1914829 - RNA, 19 nt, Homo sapiens
  misc_RNA (1)...(19): siRNA sense strand
gaaaagauuuggaugauga

SEQ ID NO: 1914830 - RNA, 19 nt, Homo sapiens
  misc_RNA (1)...(19): siRNA sense strand
gaagaacauuguacagaau

SEQ ID NO: 1914831 - RNA, 19 nt, Homo sapiens
  misc_RNA (1)...(19): siRNA sense strand
cgucagagaucagcacuua

SEQ ID NO: 1914832 - RNA, 19 nt, Homo sapiens
  misc_RNA (1)...(19): siRNA sense strand
aaacaccucucaaauguga

SEQ ID NO: 1914833 - RNA, 19 nt, Homo sapiens
  misc_RNA (1)...(19): siRNA sense strand
gagagaaaccguucaaaug

SEQ ID NO: 1914834 - RNA, 19 nt, Homo sapiens
  misc_RNA (1)...(19): siRNA sense strand
ugugguagaucaagacuua

SEQ ID NO: 1914835 - RNA, 19 nt, Homo sapiens
  misc_RNA (1)...(19): siRNA sense strand
agaaacaccucucaaaugu

SEQ ID NO: 1914836 - RNA, 19 nt, Homo sapiens
  misc_RNA (1)...(19): siRNA sense strand
aaacugagauggagacugu

SEQ ID NO: 1914837 - RNA, 19 nt, Homo sapiens
  misc_RNA (1)...(19): siRNA sense strand
gauggagacuguuucagaa

SEQ ID NO: 1914838 - RNA, 19 nt, Homo sapiens
  misc_RNA (1)...(19): siRNA sense strand
ggacguggcuguggucuuc

SEQ ID NO: 1914839 - RNA, 19 nt, Homo sapiens
  misc_RNA (1)...(19): siRNA sense strand
gguaaggaauucagucaga

SEQ ID NO: 1914840 - RNA, 19 nt, Homo sapiens
  misc_RNA (1)...(19): siRNA sense strand
gagagaaaccauacaaaug

SEQ ID NO: 1914841 - RNA, 19 nt, Homo sapiens
  misc_RNA (1)...(19): siRNA sense strand
gagaaaccguucaaaugug

SEQ ID NO: 1914842 - RNA, 19 nt, Homo sapiens
  misc_RNA (1)...(19): siRNA sense strand
ggagagaaaccauacaaau

SEQ ID NO: 1914843 - RNA, 19 nt, Homo sapiens
  misc_RNA (1)...(19): siRNA sense strand
guucacaucugcaaacuca

SEQ ID NO: 1914844 - RNA, 19 nt, Homo sapiens
  misc_RNA (1)...(19): siRNA sense strand
gagaaaccauuccgaugug

SEQ ID NO: 1914845 - RNA, 19 nt, Homo sapiens
  misc_RNA (1)...(19): siRNA sense strand
gggcuacaauaguaaguuu

SEQ ID NO: 1914846 - RNA, 19 nt, Homo sapiens
  misc_RNA (1)...(19): siRNA sense strand
gaaagggcuacaauaguaa

SEQ ID NO: 1914847 - RNA, 19 nt, Homo sapiens
  misc_RNA (1)...(19): siRNA sense strand
ggagagaaaccguucaaau

SEQ ID NO: 1914848 - RNA, 19 nt, Homo sapiens
  misc_RNA (1)...(19): siRNA sense strand
caacucgucugacccauca

SEQ ID NO: 1914849 - RNA, 19 nt, Homo sapiens
  misc_RNA (1)...(19): siRNA sense strand
auaaauagcucucaguucu

SEQ ID NO: 1914850 - RNA, 19 nt, Homo sapiens
  misc_RNA (1)...(19): siRNA sense strand
caccagagaucccauagug

SEQ ID NO: 1914851 - RNA, 19 nt, Homo sapiens
  misc_RNA (1)...(19): siRNA sense strand
gagcuucugugguagauca

SEQ ID NO: 1914852 - RNA, 19 nt, Homo sapiens
  misc_RNA (1)...(19): siRNA sense strand
gcucucaguucuccaaaga

SEQ ID NO: 1914853 - RNA, 19 nt, Homo sapiens
  misc_RNA (1)...(19): siRNA sense strand
gagaugugaugcuggagaa

SEQ ID NO: 1914854 - RNA, 19 nt, Homo sapiens
  misc_RNA (1)...(19): siRNA sense strand
gagaaaacauggaagugua

SEQ ID NO: 1914855 - RNA, 19 nt, Homo sapiens
  misc_RNA (1)...(19): siRNA sense strand
gagagagaccauacaauug

SEQ ID NO: 1914856 - RNA, 19 nt, Homo sapiens
  misc_RNA (1)...(19): siRNA sense strand
gcaggacuaucuguaauuc

SEQ ID NO: 1914857 - RNA, 19 nt, Homo sapiens
  misc_RNA (1)...(19): siRNA sense strand
gagaaaccauacaaaugug

SEQ ID NO: 1914858 - RNA, 19 nt, Homo sapiens
  misc_RNA (1)...(19): siRNA sense strand
ccagggcaauggauauaaa

SEQ ID NO: 1914859 - RNA, 19 nt, Homo sapiens
  misc_RNA (1)...(19): siRNA sense strand
gggaaaagauuuacucaga

SEQ ID NO: 1914860 - RNA, 19 nt, Homo sapiens
  misc_RNA (1)...(19): siRNA sense strand
gguuggaucuugacuuuca

SEQ ID NO: 1914861 - RNA, 19 nt, Homo sapiens
  misc_RNA (1)...(19): siRNA sense strand
agucguagaucagcacuua

SEQ ID NO: 1914862 - RNA, 19 nt, Homo sapiens
  misc_RNA (1)...(19): siRNA sense strand
ggaaaggauuuuacacaaa

SEQ ID NO: 1914863 - RNA, 19 nt, Homo sapiens
  misc_RNA (1)...(19): siRNA sense strand
gaauguucauguuggagaa

SEQ ID NO: 1914864 - RNA, 19 nt, Homo sapiens
  misc_RNA (1)...(19): siRNA sense strand
auacaaaugugaugagugu

SEQ ID NO: 1914865 - RNA, 19 nt, Homo sapiens
  misc_RNA (1)...(19): siRNA sense strand
gacaagauccaaacugaga

SEQ ID NO: 1914866 - RNA, 19 nt, Homo sapiens
  misc_RNA (1)...(19): siRNA sense strand
gcgcuugaaucuugauaug

SEQ ID NO: 1914867 - RNA, 19 nt, Homo sapiens
  misc_RNA (1)...(19): siRNA sense strand
guucaaauguguggaaugu

SEQ ID NO: 1914868 - RNA, 19 nt, Homo sapiens
  misc_RNA (1)...(19): siRNA sense strand
gaagcuguaucgagaugug

SEQ ID NO: 1914869 - RNA, 19 nt, Homo sapiens
  misc_RNA (1)...(19): siRNA sense strand
caggagagaaaccuuauaa

SEQ ID NO: 1914870 - RNA, 19 nt, Homo sapiens
  misc_RNA (1)...(19): siRNA sense strand
caggagagaaacuguauaa

SEQ ID NO: 1914871 - RNA, 19 nt, Homo sapiens
  misc_RNA (1)...(19): siRNA sense strand
uaauaggcauuccaugguu

SEQ ID NO: 1914872 - RNA, 19 nt, Homo sapiens
  misc_RNA (1)...(19): siRNA sense strand
ggaauucagucagaguuca

SEQ ID NO: 1914873 - RNA, 19 nt, Homo sapiens
  misc_RNA (1)...(19): siRNA sense strand
gagaaaagccauacaaaug

SEQ ID NO: 1914874 - RNA, 19 nt, Homo sapiens
  misc_RNA (1)...(19): siRNA sense strand
gagaaaagccauacaaaug

SEQ ID NO: 1914875 - RNA, 19 nt, Homo sapiens
  misc_RNA (1)...(19): siRNA sense strand
gaaugugggaagagcuuua

SEQ ID NO: 1914876 - RNA, 19 nt, Homo sapiens
  misc_RNA (1)...(19): siRNA sense strand
uaagagcuuucgucagaga

SEQ ID NO: 1914877 - RNA, 19 nt, Homo sapiens
  misc_RNA (1)...(19): siRNA sense strand
gagaaaccuuauaauugug

SEQ ID NO: 1914878 - RNA, 19 nt, Homo sapiens
  misc_RNA (1)...(19): siRNA sense strand
gaagacagcaauccaaagg

SEQ ID NO: 1914879 - RNA, 19 nt, Homo sapiens
  misc_RNA (1)...(19): siRNA sense strand
gaagggaauucaggagaca

SEQ ID NO: 1914880 - RNA, 19 nt, Homo sapiens
  misc_RNA (1)...(19): siRNA sense strand
aacaggcgcuugaaucuug

SEQ ID NO: 1914881 - RNA, 19 nt, Homo sapiens
  misc_RNA (1)...(19): siRNA sense strand
cagcuucauucucaucaaa

SEQ ID NO: 1914882 - RNA, 19 nt, Homo sapiens
  misc_RNA (1)...(19): siRNA sense strand
ggaaaagauuuacucagaa

SEQ ID NO: 1914883 - RNA, 19 nt, Homo sapiens
  misc_RNA (1)...(19): siRNA sense strand
gaugugauacgugugauaa

SEQ ID NO: 1914884 - RNA, 19 nt, Homo sapiens
  misc_RNA (1)...(19): siRNA sense strand
ugacgugugugguaaggaa

SEQ ID NO: 1914885 - RNA, 19 nt, Homo sapiens
  misc_RNA (1)...(19): siRNA sense strand
guaauucacacaagacaga

SEQ ID NO: 1914886 - RNA, 19 nt, Homo sapiens
  misc_RNA (1)...(19): siRNA sense strand
ugaagaaugugggaaagga

SEQ ID NO: 1914887 - RNA, 19 nt, Homo sapiens
  misc_RNA (1)...(19): siRNA sense strand
ggaaguguagggaguguga

SEQ ID NO: 1914888 - RNA, 19 nt, Homo sapiens
  misc_RNA (1)...(19): siRNA sense strand
agaaaucucauacguguga

SEQ ID NO: 1914889 - RNA, 19 nt, Homo sapiens
  misc_RNA (1)...(19): siRNA sense strand
ggaagagauuuacucaaaa

SEQ ID NO: 1914890 - RNA, 19 nt, Homo sapiens
  misc_RNA (1)...(19): siRNA sense strand
agagaaaccauacaaaugu

SEQ ID NO: 1914891 - RNA, 19 nt, Homo sapiens
  misc_RNA (1)...(19): siRNA sense strand
gagaucagcacuuaauagu

SEQ ID NO: 1914892 - RNA, 19 nt, Homo sapiens
  misc_RNA (1)...(19): siRNA sense strand
gaagaaaagauuuggauga

SEQ ID NO: 1914893 - RNA, 19 nt, Homo sapiens
  misc_RNA (1)...(19): siRNA sense strand
gaggcaggacuaucuguaa

SEQ ID NO: 1914894 - RNA, 19 nt, Homo sapiens
  misc_RNA (1)...(19): siRNA sense strand
gcuugaaucuugauaugca

SEQ ID NO: 1914895 - RNA, 19 nt, Homo sapiens
  misc_RNA (1)...(19): siRNA sense strand
auucacagcuucauucuca

SEQ ID NO: 1914896 - RNA, 19 nt, Homo sapiens
  misc_RNA (1)...(19): siRNA sense strand
aaaggagguuggaucuuga

SEQ ID NO: 1914897 - RNA, 19 nt, Homo sapiens
  misc_RNA (1)...(19): siRNA sense strand
caauuacacucaggagaga

SEQ ID NO: 1914898 - RNA, 19 nt, Homo sapiens
  misc_RNA (1)...(19): siRNA sense strand
caucucagcccuucguauu

SEQ ID NO: 1914899 - RNA, 19 nt, Homo sapiens
  misc_RNA (1)...(19): siRNA sense strand
ggagugugauaugugcuuu

SEQ ID NO: 1914900 - RNA, 19 nt, Homo sapiens
  misc_RNA (1)...(19): siRNA sense strand
gaaaagccauacaaaugug

SEQ ID NO: 1914901 - RNA, 19 nt, Homo sapiens
  misc_RNA (1)...(19): siRNA sense strand
gaaaagccauacaaaugug

SEQ ID NO: 1914902 - RNA, 19 nt, Homo sapiens
  misc_RNA (1)...(19): siRNA sense strand
gaaaagccauacaaaugug

SEQ ID NO: 1914903 - RNA, 19 nt, Homo sapiens
  misc_RNA (1)...(19): siRNA sense strand
agaugggccucgugucuuu

SEQ ID NO: 1914904 - RNA, 19 nt, Homo sapiens
  misc_RNA (1)...(19): siRNA sense strand
agagaaaccguucaaaugu

SEQ ID NO: 1914905 - RNA, 19 nt, Homo sapiens
  misc_RNA (1)...(19): siRNA sense strand
gaacuuuuguuacaucuca

SEQ ID NO: 1914906 - RNA, 19 nt, Homo sapiens
  misc_RNA (1)...(19): siRNA sense strand
uuacacaaauucacaaugc

SEQ ID NO: 1914907 - RNA, 19 nt, Homo sapiens
  misc_RNA (1)...(19): siRNA sense strand
gguagaucaagacuuaaua

SEQ ID NO: 1914908 - RNA, 19 nt, Homo sapiens
  misc_RNA (1)...(19): siRNA sense strand
acacaggagagaaaccuua

SEQ ID NO: 1914909 - RNA, 19 nt, Homo sapiens
  misc_RNA (1)...(19): siRNA sense strand
gggaagaacauuguacaga

SEQ ID NO: 1914910 - RNA, 19 nt, Homo sapiens
  misc_RNA (1)...(19): siRNA sense strand
aaaccauuccgaugugaua

SEQ ID NO: 1914911 - RNA, 19 nt, Homo sapiens
  misc_RNA (1)...(19): siRNA sense strand
ucaagaacaucagagaauc

SEQ ID NO: 1914912 - RNA, 19 nt, Homo sapiens
  misc_RNA (1)...(19): siRNA sense strand
gcaaggagcugcaguugga

SEQ ID NO: 1914913 - RNA, 19 nt, Homo sapiens
  misc_RNA (1)...(19): siRNA sense strand
gcuaagcucuccaaacaaa

SEQ ID NO: 1914914 - RNA, 19 nt, Homo sapiens
  misc_RNA (1)...(19): siRNA sense strand
ggagaaagagcgggauuua

SEQ ID NO: 1914915 - RNA, 19 nt, Homo sapiens
  misc_RNA (1)...(19): siRNA sense strand
gaugaaagcuccugugacu

SEQ ID NO: 1914916 - RNA, 19 nt, Homo sapiens
  misc_RNA (1)...(19): siRNA sense strand
ugacacaggugaccacauu

SEQ ID NO: 1914917 - RNA, 19 nt, Homo sapiens
  misc_RNA (1)...(19): siRNA sense strand
cagaggaacuggccaagaa

SEQ ID NO: 1914918 - RNA, 19 nt, Homo sapiens
  misc_RNA (1)...(19): siRNA sense strand
gugcuaagcucuccaaaca

SEQ ID NO: 1914919 - RNA, 19 nt, Homo sapiens
  misc_RNA (1)...(19): siRNA sense strand
ugaaagaguuggccagaug

SEQ ID NO: 1914920 - RNA, 19 nt, Homo sapiens
  misc_RNA (1)...(19): siRNA sense strand
gaaagagcgggauuuagaa

SEQ ID NO: 1914921 - RNA, 19 nt, Homo sapiens
  misc_RNA (1)...(19): siRNA sense strand
cagagaccaucaccuauga

SEQ ID NO: 1914922 - RNA, 19 nt, Homo sapiens
  misc_RNA (1)...(19): siRNA sense strand
ggaagguucugccacacuu

SEQ ID NO: 1914923 - RNA, 19 nt, Homo sapiens
  misc_RNA (1)...(19): siRNA sense strand
gcuccuaccugccugagaa

SEQ ID NO: 1914924 - RNA, 19 nt, Homo sapiens
  misc_RNA (1)...(19): siRNA sense strand
gacgaaguguacugccuua

SEQ ID NO: 1914925 - RNA, 19 nt, Homo sapiens
  misc_RNA (1)...(19): siRNA sense strand
gcaaauugaagagacguua

SEQ ID NO: 1914926 - RNA, 19 nt, Homo sapiens
  misc_RNA (1)...(19): siRNA sense strand
ccuccucaguccagaauua

SEQ ID NO: 1914927 - RNA, 19 nt, Homo sapiens
  misc_RNA (1)...(19): siRNA sense strand
agaaagagcgggauuuaga

SEQ ID NO: 1914928 - RNA, 19 nt, Homo sapiens
  misc_RNA (1)...(19): siRNA sense strand
guacugccuuaacgacuuu

SEQ ID NO: 1914929 - RNA, 19 nt, Homo sapiens
  misc_RNA (1)...(19): siRNA sense strand
ugaagaaccuccggaacaa

SEQ ID NO: 1914930 - RNA, 19 nt, Homo sapiens
  misc_RNA (1)...(19): siRNA sense strand
aggaugagcugcuucaguu

SEQ ID NO: 1914931 - RNA, 19 nt, Homo sapiens
  misc_RNA (1)...(19): siRNA sense strand
ggagaucacacaccugcua

SEQ ID NO: 1914932 - RNA, 19 nt, Homo sapiens
  misc_RNA (1)...(19): siRNA sense strand
agacagagaccaucaccua

SEQ ID NO: 1914933 - RNA, 19 nt, Homo sapiens
  misc_RNA (1)...(19): siRNA sense strand
uaacgacuuugaagaagau

SEQ ID NO: 1914934 - RNA, 19 nt, Homo sapiens
  misc_RNA (1)...(19): siRNA sense strand
ggacaaagucaggagguuu

SEQ ID NO: 1914935 - RNA, 19 nt, Homo sapiens
  misc_RNA (1)...(19): siRNA sense strand
ccagaugacuaagacauau

SEQ ID NO: 1914936 - RNA, 19 nt, Homo sapiens
  misc_RNA (1)...(19): siRNA sense strand
agacaucacucaccagaag

SEQ ID NO: 1914937 - RNA, 19 nt, Homo sapiens
  misc_RNA (1)...(19): siRNA sense strand
cagaauuacuuucauuugg

SEQ ID NO: 1914938 - RNA, 19 nt, Homo sapiens
  misc_RNA (1)...(19): siRNA sense strand
gaaagaguuggccagauga

SEQ ID NO: 1914939 - RNA, 19 nt, Homo sapiens
  misc_RNA (1)...(19): siRNA sense strand
gaaguguacugccuuaacg

SEQ ID NO: 1914940 - RNA, 19 nt, Homo sapiens
  misc_RNA (1)...(19): siRNA sense strand
gaaacgaugagcggaguaa

SEQ ID NO: 1914941 - RNA, 19 nt, Homo sapiens
  misc_RNA (1)...(19): siRNA sense strand
caaccgagcaaauugaaga

SEQ ID NO: 1914942 - RNA, 19 nt, Homo sapiens
  misc_RNA (1)...(19): siRNA sense strand
gcugaguccuucacuaaca

SEQ ID NO: 1914943 - RNA, 19 nt, Homo sapiens
  misc_RNA (1)...(19): siRNA sense strand
ggacaaacgccugugaugu

SEQ ID NO: 1914944 - RNA, 19 nt, Homo sapiens
  misc_RNA (1)...(19): siRNA sense strand
gacaaacgccugugaugug

SEQ ID NO: 1914945 - RNA, 19 nt, Homo sapiens
  misc_RNA (1)...(19): siRNA sense strand
gccagucguuguugaagaa

SEQ ID NO: 1914946 - RNA, 19 nt, Homo sapiens
  misc_RNA (1)...(19): siRNA sense strand
agagcgggauuuagaauug

SEQ ID NO: 1914947 - RNA, 19 nt, Homo sapiens
  misc_RNA (1)...(19): siRNA sense strand
ggagaauguuguacuucga

SEQ ID NO: 1914948 - RNA, 19 nt, Homo sapiens
  misc_RNA (1)...(19): siRNA sense strand
ggaugccaauguccagauu

SEQ ID NO: 1914949 - RNA, 19 nt, Homo sapiens
  misc_RNA (1)...(19): siRNA sense strand
gaagagacguuaaaauacu

SEQ ID NO: 1914950 - RNA, 19 nt, Homo sapiens
  misc_RNA (1)...(19): siRNA sense strand
ccauacaccucucauuucu

SEQ ID NO: 1914951 - RNA, 19 nt, Homo sapiens
  misc_RNA (1)...(19): siRNA sense strand
guccagaauuacuuucauu

SEQ ID NO: 1914952 - RNA, 19 nt, Homo sapiens
  misc_RNA (1)...(19): siRNA sense strand
gaacucgccuaugcagaca

SEQ ID NO: 1914953 - RNA, 19 nt, Homo sapiens
  misc_RNA (1)...(19): siRNA sense strand
gaagaaccuccggaacaaa

SEQ ID NO: 1914954 - RNA, 19 nt, Homo sapiens
  misc_RNA (1)...(19): siRNA sense strand
caaauugaagagacguuaa

SEQ ID NO: 1914955 - RNA, 19 nt, Homo sapiens
  misc_RNA (1)...(19): siRNA sense strand
gcugaaagaccuugaagag

SEQ ID NO: 1914956 - RNA, 19 nt, Homo sapiens
  misc_RNA (1)...(19): siRNA sense strand
ccgacaccaucuacgguua

SEQ ID NO: 1914957 - RNA, 19 nt, Homo sapiens
  misc_RNA (1)...(19): siRNA sense strand
cacgacgacuggcuccaua

SEQ ID NO: 1914958 - RNA, 19 nt, Homo sapiens
  misc_RNA (1)...(19): siRNA sense strand
gcaagcucauucggacaaa

SEQ ID NO: 1914959 - RNA, 19 nt, Homo sapiens
  misc_RNA (1)...(19): siRNA sense strand
gcugagggaugccaauguc

SEQ ID NO: 1914960 - RNA, 19 nt, Homo sapiens
  misc_RNA (1)...(19): siRNA sense strand
ucauuuggauucucuucaa

SEQ ID NO: 1914961 - RNA, 19 nt, Homo sapiens
  misc_RNA (1)...(19): siRNA sense strand
gccagaugacuaagacaua

SEQ ID NO: 1914962 - RNA, 19 nt, Homo sapiens
  misc_RNA (1)...(19): siRNA sense strand
gaguuggccagaugacuaa

SEQ ID NO: 1914963 - RNA, 19 nt, Homo sapiens
  misc_RNA (1)...(19): siRNA sense strand
gcaccagccacuugaaauc

SEQ ID NO: 1914964 - RNA, 19 nt, Homo sapiens
  misc_RNA (1)...(19): siRNA sense strand
agaggagaauguuguacuu

SEQ ID NO: 1914965 - RNA, 19 nt, Homo sapiens
  misc_RNA (1)...(19): siRNA sense strand
ccagaauuacuuucauuug

SEQ ID NO: 1914966 - RNA, 19 nt, Homo sapiens
  misc_RNA (1)...(19): siRNA sense strand
ucacaaccgagcaaauuga

SEQ ID NO: 1914967 - RNA, 19 nt, Homo sapiens
  misc_RNA (1)...(19): siRNA sense strand
acaauuuccuggcuuccaa

SEQ ID NO: 1914968 - RNA, 19 nt, Homo sapiens
  misc_RNA (1)...(19): siRNA sense strand
gggaagugcaugucucaga

SEQ ID NO: 1914969 - RNA, 19 nt, Homo sapiens
  misc_RNA (1)...(19): siRNA sense strand
uuaacgacuuugaagaaga

SEQ ID NO: 1914970 - RNA, 19 nt, Homo sapiens
  misc_RNA (1)...(19): siRNA sense strand
ugucucagcuccggcauga

SEQ ID NO: 1914971 - RNA, 19 nt, Homo sapiens
  misc_RNA (1)...(19): siRNA sense strand
aagaagaacaagacccuaa

SEQ ID NO: 1914972 - RNA, 19 nt, Homo sapiens
  misc_RNA (1)...(19): siRNA sense strand
caacagcaucauucuggaa

SEQ ID NO: 1914973 - RNA, 19 nt, Homo sapiens
  misc_RNA (1)...(19): siRNA sense strand
uuuaugugcugaaagaguu

SEQ ID NO: 1914974 - RNA, 19 nt, Homo sapiens
  misc_RNA (1)...(19): siRNA sense strand
ugaaagcuccugugacucu

SEQ ID NO: 1914975 - RNA, 19 nt, Homo sapiens
  misc_RNA (1)...(19): siRNA sense strand
cagaugaaagcuccuguga

SEQ ID NO: 1914976 - RNA, 19 nt, Homo sapiens
  misc_RNA (1)...(19): siRNA sense strand
ugaagaggagaauguugua

SEQ ID NO: 1914977 - RNA, 19 nt, Homo sapiens
  misc_RNA (1)...(19): siRNA sense strand
ggccagucguuguugaaga

SEQ ID NO: 1914978 - RNA, 19 nt, Homo sapiens
  misc_RNA (1)...(19): siRNA sense strand
gaagcugaaagaccuugaa

SEQ ID NO: 1914979 - RNA, 19 nt, Homo sapiens
  misc_RNA (1)...(19): siRNA sense strand
uggcugaguccuucacuaa

SEQ ID NO: 1914980 - RNA, 19 nt, Homo sapiens
  misc_RNA (1)...(19): siRNA sense strand
cagaccaacuccaccuuca

SEQ ID NO: 1914981 - RNA, 19 nt, Homo sapiens
  misc_RNA (1)...(19): siRNA sense strand
ccagaagcgugucuuugag

SEQ ID NO: 1914982 - RNA, 19 nt, Homo sapiens
  misc_RNA (1)...(19): siRNA sense strand
ccucacaaccgagcaaauu

SEQ ID NO: 1914983 - RNA, 19 nt, Homo sapiens
  misc_RNA (1)...(19): siRNA sense strand
ccggaagucgagaucauua

SEQ ID NO: 1914984 - RNA, 19 nt, Homo sapiens
  misc_RNA (1)...(19): siRNA sense strand
ugaagaacuuguccagcau

SEQ ID NO: 1914985 - RNA, 19 nt, Homo sapiens
  misc_RNA (1)...(19): siRNA sense strand
acaaacgccugugaugugu

SEQ ID NO: 1914986 - RNA, 19 nt, Homo sapiens
  misc_RNA (1)...(19): siRNA sense strand
gcauuucugcugccgugua

SEQ ID NO: 1914987 - RNA, 19 nt, Homo sapiens
  misc_RNA (1)...(19): siRNA sense strand
gggcucguguggcuguuga

SEQ ID NO: 1914988 - RNA, 19 nt, Homo sapiens
  misc_RNA (1)...(19): siRNA sense strand
cagaugacuaagacauaua

SEQ ID NO: 1914989 - RNA, 19 nt, Homo sapiens
  misc_RNA (1)...(19): siRNA sense strand
caagaccaacagcaucauu

SEQ ID NO: 1914990 - RNA, 19 nt, Homo sapiens
  misc_RNA (1)...(19): siRNA sense strand
caugaaggaugagcugcuu

SEQ ID NO: 1914991 - RNA, 19 nt, Homo sapiens
  misc_RNA (1)...(19): siRNA sense strand
gagcagcugccccauuaua

SEQ ID NO: 1914992 - RNA, 19 nt, Homo sapiens
  misc_RNA (1)...(19): siRNA sense strand
aggagcagcugccccauua

SEQ ID NO: 1914993 - RNA, 19 nt, Homo sapiens
  misc_RNA (1)...(19): siRNA sense strand
gagaaagagcgggauuuag

SEQ ID NO: 1914994 - RNA, 19 nt, Homo sapiens
  misc_RNA (1)...(19): siRNA sense strand
cuccauacaccucucauuu

SEQ ID NO: 1914995 - RNA, 19 nt, Homo sapiens
  misc_RNA (1)...(19): siRNA sense strand
cagcaucauucuggaaaca

SEQ ID NO: 1914996 - RNA, 19 nt, Homo sapiens
  misc_RNA (1)...(19): siRNA sense strand
gaggaacuggccaagaaga

SEQ ID NO: 1914997 - RNA, 19 nt, Homo sapiens
  misc_RNA (1)...(19): siRNA sense strand
uaagagccgacaccaucua

SEQ ID NO: 1914998 - RNA, 19 nt, Homo sapiens
  misc_RNA (1)...(19): siRNA sense strand
gaggagaaagagcgggauu

SEQ ID NO: 1914999 - RNA, 19 nt, Homo sapiens
  misc_RNA (1)...(19): siRNA sense strand
ucguguggcuguugaagga

SEQ ID NO: 1915000 - RNA, 19 nt, Homo sapiens
  misc_RNA (1)...(19): siRNA sense strand
ccuuaacgacuuugaagaa

SEQ ID NO: 1915001 - RNA, 19 nt, Homo sapiens
  misc_RNA (1)...(19): siRNA sense strand
ccacugagagcaucauguc

SEQ ID NO: 1915002 - RNA, 19 nt, Homo sapiens
  misc_RNA (1)...(19): siRNA sense strand
ggaaacgaugagcggagua

SEQ ID NO: 1915003 - RNA, 19 nt, Homo sapiens
  misc_RNA (1)...(19): siRNA sense strand
ugcgugagcuggaggacaa

SEQ ID NO: 1915004 - RNA, 19 nt, Homo sapiens
  misc_RNA (1)...(19): siRNA sense strand
agaguuggccagaugacua

SEQ ID NO: 1915005 - RNA, 19 nt, Homo sapiens
  misc_RNA (1)...(19): siRNA sense strand
cugagaagcuccagaucgu

SEQ ID NO: 1915006 - RNA, 19 nt, Homo sapiens
  misc_RNA (1)...(19): siRNA sense strand
gacagagaccaucaccuau

SEQ ID NO: 1915007 - RNA, 19 nt, Homo sapiens
  misc_RNA (1)...(19): siRNA sense strand
gagaauguuguacuucgau

SEQ ID NO: 1915008 - RNA, 19 nt, Homo sapiens
  misc_RNA (1)...(19): siRNA sense strand
cagcaccagccacuugaaa

SEQ ID NO: 1915009 - RNA, 19 nt, Homo sapiens
  misc_RNA (1)...(19): siRNA sense strand
ccucucauuucuccagaug

SEQ ID NO: 1915010 - RNA, 19 nt, Homo sapiens
  misc_RNA (1)...(19): siRNA sense strand
gagaucacacaccugcuau

SEQ ID NO: 1915011 - RNA, 19 nt, Homo sapiens
  misc_RNA (1)...(19): siRNA sense strand
acagagaccaucaccuaug

SEQ ID NO: 1915012 - RNA, 19 nt, Homo sapiens
  misc_RNA (1)...(19): siRNA sense strand
gaaagaggcugaagagcaa

SEQ ID NO: 1915013 - RNA, 19 nt, Homo sapiens
  misc_RNA (1)...(19): siRNA sense strand
gagaaugccugaagacuug

SEQ ID NO: 1915014 - RNA, 19 nt, Homo sapiens
  misc_RNA (1)...(19): siRNA sense strand
gagcaaggaugcccugaaa

SEQ ID NO: 1915015 - RNA, 19 nt, Homo sapiens
  misc_RNA (1)...(19): siRNA sense strand
gaacauagaaagauucaug

SEQ ID NO: 1915016 - RNA, 19 nt, Homo sapiens
  misc_RNA (1)...(19): siRNA sense strand
ggugugagcuauguaauaa

SEQ ID NO: 1915017 - RNA, 19 nt, Homo sapiens
  misc_RNA (1)...(19): siRNA sense strand
gagaaaaucuguccauauu

SEQ ID NO: 1915018 - RNA, 19 nt, Homo sapiens
  misc_RNA (1)...(19): siRNA sense strand
cauaagaaguuuacaagga

SEQ ID NO: 1915019 - RNA, 19 nt, Homo sapiens
  misc_RNA (1)...(19): siRNA sense strand
gaagaacagcaaauuauga

SEQ ID NO: 1915020 - RNA, 19 nt, Homo sapiens
  misc_RNA (1)...(19): siRNA sense strand
gaggaaggauacauuaaau

SEQ ID NO: 1915021 - RNA, 19 nt, Homo sapiens
  misc_RNA (1)...(19): siRNA sense strand
gaaagacacaagaaguaua

SEQ ID NO: 1915022 - RNA, 19 nt, Homo sapiens
  misc_RNA (1)...(19): siRNA sense strand
ccacagaaauguuuacaag

SEQ ID NO: 1915023 - RNA, 19 nt, Homo sapiens
  misc_RNA (1)...(19): siRNA sense strand
gaggaagaacagcaaauua

SEQ ID NO: 1915024 - RNA, 19 nt, Homo sapiens
  misc_RNA (1)...(19): siRNA sense strand
agacaaaccuuacaaaugc

SEQ ID NO: 1915025 - RNA, 19 nt, Homo sapiens
  misc_RNA (1)...(19): siRNA sense strand
ucaagugggugcucacaaa

SEQ ID NO: 1915026 - RNA, 19 nt, Homo sapiens
  misc_RNA (1)...(19): siRNA sense strand
ucacugcgaugcuaccuuu

SEQ ID NO: 1915027 - RNA, 19 nt, Homo sapiens
  misc_RNA (1)...(19): siRNA sense strand
ggagagaccguuccaaugu

SEQ ID NO: 1915028 - RNA, 19 nt, Homo sapiens
  misc_RNA (1)...(19): siRNA sense strand
gaagacaaaccuuacaaau

SEQ ID NO: 1915029 - RNA, 19 nt, Homo sapiens
  misc_RNA (1)...(19): siRNA sense strand
ccacagaggagaaagaauu

SEQ ID NO: 1915030 - RNA, 19 nt, Homo sapiens
  misc_RNA (1)...(19): siRNA sense strand
uaagaggaaggauacauua

SEQ ID NO: 1915031 - RNA, 19 nt, Homo sapiens
  misc_RNA (1)...(19): siRNA sense strand
gaaaaucuguccauauugu

SEQ ID NO: 1915032 - RNA, 19 nt, Homo sapiens
  misc_RNA (1)...(19): siRNA sense strand
gaauuuaagugcaagaacu

SEQ ID NO: 1915033 - RNA, 19 nt, Homo sapiens
  misc_RNA (1)...(19): siRNA sense strand
acacggagcuucugauugg

SEQ ID NO: 1915034 - RNA, 19 nt, Homo sapiens
  misc_RNA (1)...(19): siRNA sense strand
caagaacugugggaagaaa

SEQ ID NO: 1915035 - RNA, 19 nt, Homo sapiens
  misc_RNA (1)...(19): siRNA sense strand
ggaagaacagcaaauuaug

SEQ ID NO: 1915036 - RNA, 19 nt, Homo sapiens
  misc_RNA (1)...(19): siRNA sense strand
ugaagaauguaaagcuuug

SEQ ID NO: 1915037 - RNA, 19 nt, Homo sapiens
  misc_RNA (1)...(19): siRNA sense strand
gggagaagccguacaagug

SEQ ID NO: 1915038 - RNA, 19 nt, Homo sapiens
  misc_RNA (1)...(19): siRNA sense strand
gaagaaauucccaguuaag

SEQ ID NO: 1915039 - RNA, 19 nt, Homo sapiens
  misc_RNA (1)...(19): siRNA sense strand
ggaggaagaacagcaaauu

SEQ ID NO: 1915040 - RNA, 19 nt, Homo sapiens
  misc_RNA (1)...(19): siRNA sense strand
uguaauaaggccuuuguua

SEQ ID NO: 1915041 - RNA, 19 nt, Homo sapiens
  misc_RNA (1)...(19): siRNA sense strand
ccaggugguucaugaaaga

SEQ ID NO: 1915042 - RNA, 19 nt, Homo sapiens
  misc_RNA (1)...(19): siRNA sense strand
ggagaaguuuuguacauuu

SEQ ID NO: 1915043 - RNA, 19 nt, Homo sapiens
  misc_RNA (1)...(19): siRNA sense strand
gaaaacacauacaggagaa

SEQ ID NO: 1915044 - RNA, 19 nt, Homo sapiens
  misc_RNA (1)...(19): siRNA sense strand
gaagauauagaaacagaca

SEQ ID NO: 1915045 - RNA, 19 nt, Homo sapiens
  misc_RNA (1)...(19): siRNA sense strand
ggacugaagaugcacauuc

SEQ ID NO: 1915046 - RNA, 19 nt, Homo sapiens
  misc_RNA (1)...(19): siRNA sense strand
caacuggcuucgcuucguu

SEQ ID NO: 1915047 - RNA, 19 nt, Homo sapiens
  misc_RNA (1)...(19): siRNA sense strand
gagagaccguuccaaugug

SEQ ID NO: 1915048 - RNA, 19 nt, Homo sapiens
  misc_RNA (1)...(19): siRNA sense strand
guuccaaugugaagaaugu

SEQ ID NO: 1915049 - RNA, 19 nt, Homo sapiens
  misc_RNA (1)...(19): siRNA sense strand
acaggaacauagaaagauu

SEQ ID NO: 1915050 - RNA, 19 nt, Homo sapiens
  misc_RNA (1)...(19): siRNA sense strand
gagaagagaaugccugaag

SEQ ID NO: 1915051 - RNA, 19 nt, Homo sapiens
  misc_RNA (1)...(19): siRNA sense strand
ccuuacaaaugcaaacuuu

SEQ ID NO: 1915052 - RNA, 19 nt, Homo sapiens
  misc_RNA (1)...(19): siRNA sense strand
cagaggagaaagaauuuaa

SEQ ID NO: 1915053 - RNA, 19 nt, Homo sapiens
  misc_RNA (1)...(19): siRNA sense strand
gacaccugcuaauacauaa

SEQ ID NO: 1915054 - RNA, 19 nt, Homo sapiens
  misc_RNA (1)...(19): siRNA sense strand
ugucaagaauguaugaaga

SEQ ID NO: 1915055 - RNA, 19 nt, Homo sapiens
  misc_RNA (1)...(19): siRNA sense strand
aagcuuauauguucagugu

SEQ ID NO: 1915056 - RNA, 19 nt, Homo sapiens
  misc_RNA (1)...(19): siRNA sense strand
cugauuggcuaccuggaua

SEQ ID NO: 1915057 - RNA, 19 nt, Homo sapiens
  misc_RNA (1)...(19): siRNA sense strand
ucaauguccuuacugugaa

SEQ ID NO: 1915058 - RNA, 19 nt, Homo sapiens
  misc_RNA (1)...(19): siRNA sense strand
uaauaaggccuuuguuaca

SEQ ID NO: 1915059 - RNA, 19 nt, Homo sapiens
  misc_RNA (1)...(19): siRNA sense strand
agagacaccugcuaauaca

SEQ ID NO: 1915060 - RNA, 19 nt, Homo sapiens
  misc_RNA (1)...(19): siRNA sense strand
gaggagagaccguuccaau

SEQ ID NO: 1915061 - RNA, 19 nt, Homo sapiens
  misc_RNA (1)...(19): siRNA sense strand
caaugugaaucgaguuuua

SEQ ID NO: 1915062 - RNA, 19 nt, Homo sapiens
  misc_RNA (1)...(19): siRNA sense strand
agaagagaaugccugaaga

SEQ ID NO: 1915063 - RNA, 19 nt, Homo sapiens
  misc_RNA (1)...(19): siRNA sense strand
uuacagagacaccugcuaa

SEQ ID NO: 1915064 - RNA, 19 nt, Homo sapiens
  misc_RNA (1)...(19): siRNA sense strand
caucaagccuacaggaaca

SEQ ID NO: 1915065 - RNA, 19 nt, Homo sapiens
  misc_RNA (1)...(19): siRNA sense strand
aaaguguucuucagcauca

SEQ ID NO: 1915066 - RNA, 19 nt, Homo sapiens
  misc_RNA (1)...(19): siRNA sense strand
cacuggagauccuaagaaa

SEQ ID NO: 1915067 - RNA, 19 nt, Homo sapiens
  misc_RNA (1)...(19): siRNA sense strand
gcaauucuuccuucaguuc

SEQ ID NO: 1915068 - RNA, 19 nt, Homo sapiens
  misc_RNA (1)...(19): siRNA sense strand
ggacaauauccauggugua

SEQ ID NO: 1915069 - RNA, 19 nt, Homo sapiens
  misc_RNA (1)...(19): siRNA sense strand
acagagacaccugcuaaua

SEQ ID NO: 1915070 - RNA, 19 nt, Homo sapiens
  misc_RNA (1)...(19): siRNA sense strand
uauguucagugugcaauaa

SEQ ID NO: 1915071 - RNA, 19 nt, Homo sapiens
  misc_RNA (1)...(19): siRNA sense strand
ucagugcucuguuugcaau

SEQ ID NO: 1915072 - RNA, 19 nt, Homo sapiens
  misc_RNA (1)...(19): siRNA sense strand
gaaugacuaccucaaagug

SEQ ID NO: 1915073 - RNA, 19 nt, Homo sapiens
  misc_RNA (1)...(19): siRNA sense strand
gagcgucccuaucaauguc

SEQ ID NO: 1915074 - RNA, 19 nt, Homo sapiens
  misc_RNA (1)...(19): siRNA sense strand
agacaccugcuaauacaua

SEQ ID NO: 1915075 - RNA, 19 nt, Homo sapiens
  misc_RNA (1)...(19): siRNA sense strand
ccugaagacuuggaugaaa

SEQ ID NO: 1915076 - RNA, 19 nt, Homo sapiens
  misc_RNA (1)...(19): siRNA sense strand
aaagggauuugcccacaga

SEQ ID NO: 1915077 - RNA, 19 nt, Homo sapiens
  misc_RNA (1)...(19): siRNA sense strand
cugagcaucuccagacauu

SEQ ID NO: 1915078 - RNA, 19 nt, Homo sapiens
  misc_RNA (1)...(19): siRNA sense strand
uaaagaggacuaugcuugu

SEQ ID NO: 1915079 - RNA, 19 nt, Homo sapiens
  misc_RNA (1)...(19): siRNA sense strand
ggaaugacuaccucaaagu

SEQ ID NO: 1915080 - RNA, 19 nt, Homo sapiens
  misc_RNA (1)...(19): siRNA sense strand
gcaaggccuucagccagaa

SEQ ID NO: 1915081 - RNA, 19 nt, Homo sapiens
  misc_RNA (1)...(19): siRNA sense strand
auaagaagacccacucuga

SEQ ID NO: 1915082 - RNA, 19 nt, Homo sapiens
  misc_RNA (1)...(19): siRNA sense strand
gcaguugaagauauagaaa

SEQ ID NO: 1915083 - RNA, 19 nt, Homo sapiens
  misc_RNA (1)...(19): siRNA sense strand
agugggugcucacaaagua

SEQ ID NO: 1915084 - RNA, 19 nt, Homo sapiens
  misc_RNA (1)...(19): siRNA sense strand
gaaaagacaccaggaaaau

SEQ ID NO: 1915085 - RNA, 19 nt, Homo sapiens
  misc_RNA (1)...(19): siRNA sense strand
aaagaucgccuuggcugua

SEQ ID NO: 1915086 - RNA, 19 nt, Homo sapiens
  misc_RNA (1)...(19): siRNA sense strand
cgaagacaaaccuuacaaa

SEQ ID NO: 1915087 - RNA, 19 nt, Homo sapiens
  misc_RNA (1)...(19): siRNA sense strand
agaggaaggauacauuaaa

SEQ ID NO: 1915088 - RNA, 19 nt, Homo sapiens
  misc_RNA (1)...(19): siRNA sense strand
agagaccguuccaauguga

SEQ ID NO: 1915089 - RNA, 19 nt, Homo sapiens
  misc_RNA (1)...(19): siRNA sense strand
gcuaaaacgucauaugauc

SEQ ID NO: 1915090 - RNA, 19 nt, Homo sapiens
  misc_RNA (1)...(19): siRNA sense strand
caauguccuuacugugaaa

SEQ ID NO: 1915091 - RNA, 19 nt, Homo sapiens
  misc_RNA (1)...(19): siRNA sense strand
caggugagcgucccuauca

SEQ ID NO: 1915092 - RNA, 19 nt, Homo sapiens
  misc_RNA (1)...(19): siRNA sense strand
gcgaaagggugaaaaguuc

SEQ ID NO: 1915093 - RNA, 19 nt, Homo sapiens
  misc_RNA (1)...(19): siRNA sense strand
gugaagaauguaaagcuuu

SEQ ID NO: 1915094 - RNA, 19 nt, Homo sapiens
  misc_RNA (1)...(19): siRNA sense strand
aagacaaaccuuacaaaug

SEQ ID NO: 1915095 - RNA, 19 nt, Homo sapiens
  misc_RNA (1)...(19): siRNA sense strand
cauggaggcugaggaggaa

SEQ ID NO: 1915096 - RNA, 19 nt, Homo sapiens
  misc_RNA (1)...(19): siRNA sense strand
gaaguauaggugugagcua

SEQ ID NO: 1915097 - RNA, 19 nt, Homo sapiens
  misc_RNA (1)...(19): siRNA sense strand
gaggagaaagaauuuaagu

SEQ ID NO: 1915098 - RNA, 19 nt, Homo sapiens
  misc_RNA (1)...(19): siRNA sense strand
gcaagaacugugggaagaa

SEQ ID NO: 1915099 - RNA, 19 nt, Homo sapiens
  misc_RNA (1)...(19): siRNA sense strand
caauauccaugguguagcu

SEQ ID NO: 1915100 - RNA, 19 nt, Homo sapiens
  misc_RNA (1)...(19): siRNA sense strand
cauagaaagauucaugaga

SEQ ID NO: 1915101 - RNA, 19 nt, Homo sapiens
  misc_RNA (1)...(19): siRNA sense strand
uuuggcaguugaagauaua

SEQ ID NO: 1915102 - RNA, 19 nt, Homo sapiens
  misc_RNA (1)...(19): siRNA sense strand
gacaauauccaugguguag

SEQ ID NO: 1915103 - RNA, 19 nt, Homo sapiens
  misc_RNA (1)...(19): siRNA sense strand
cauauuguggccagaaauu

SEQ ID NO: 1915104 - RNA, 19 nt, Homo sapiens
  misc_RNA (1)...(19): siRNA sense strand
caugagauauuugauuguc

SEQ ID NO: 1915105 - RNA, 19 nt, Homo sapiens
  misc_RNA (1)...(19): siRNA sense strand
cuacaggaacauagaaaga

SEQ ID NO: 1915106 - RNA, 19 nt, Homo sapiens
  misc_RNA (1)...(19): siRNA sense strand
ugcaagaacugugggaaga

SEQ ID NO: 1915107 - RNA, 19 nt, Homo sapiens
  misc_RNA (1)...(19): siRNA sense strand
aggaagaacagcaaauuau

SEQ ID NO: 1915108 - RNA, 19 nt, Homo sapiens
  misc_RNA (1)...(19): siRNA sense strand
gcgaagacaaaccuuacaa

SEQ ID NO: 1915109 - RNA, 19 nt, Homo sapiens
  misc_RNA (1)...(19): siRNA sense strand
gaagagaaugccugaagac

SEQ ID NO: 1915110 - RNA, 19 nt, Homo sapiens
  misc_RNA (1)...(19): siRNA sense strand
ugaaagacacaagaaguau

SEQ ID NO: 1915111 - RNA, 19 nt, Homo sapiens
  misc_RNA (1)...(19): siRNA sense strand
aaagugcacauggacaaua

SEQ ID NO: 1915112 - RNA, 19 nt, Homo sapiens
  misc_RNA (1)...(19): siRNA sense strand
ggaagacgcugugucguuu

SEQ ID NO: 1915113 - RNA, 19 nt, Homo sapiens
  misc_RNA (1)...(19): siRNA sense strand
gcgaacauccugucacuua

SEQ ID NO: 1915114 - RNA, 19 nt, Homo sapiens
  misc_RNA (1)...(19): siRNA sense strand
gcagauggauucuaugagu

SEQ ID NO: 1915115 - RNA, 19 nt, Homo sapiens
  misc_RNA (1)...(19): siRNA sense strand
gagaaacggucauuuaagg

SEQ ID NO: 1915116 - RNA, 19 nt, Homo sapiens
  misc_RNA (1)...(19): siRNA sense strand
gagauguccuguauuccua

SEQ ID NO: 1915117 - RNA, 19 nt, Homo sapiens
  misc_RNA (1)...(19): siRNA sense strand
cuaaauggcuugacuuugg

SEQ ID NO: 1915118 - RNA, 19 nt, Homo sapiens
  misc_RNA (1)...(19): siRNA sense strand
ucacuuaccuagagauguu

SEQ ID NO: 1915119 - RNA, 19 nt, Homo sapiens
  misc_RNA (1)...(19): siRNA sense strand
gagaggaggcaguuucuaa

SEQ ID NO: 1915120 - RNA, 19 nt, Homo sapiens
  misc_RNA (1)...(19): siRNA sense strand
gaacaucaccuuccaugca

SEQ ID NO: 1915121 - RNA, 19 nt, Homo sapiens
  misc_RNA (1)...(19): siRNA sense strand
ggaggcaguuucuaaaugg

SEQ ID NO: 1915122 - RNA, 19 nt, Homo sapiens
  misc_RNA (1)...(19): siRNA sense strand
gaaauuaauccacccaaca

SEQ ID NO: 1915123 - RNA, 19 nt, Homo sapiens
  misc_RNA (1)...(19): siRNA sense strand
gugaacaacucgcgaaaca

SEQ ID NO: 1915124 - RNA, 19 nt, Homo sapiens
  misc_RNA (1)...(19): siRNA sense strand
caacagagaacaucaccuu

SEQ ID NO: 1915125 - RNA, 19 nt, Homo sapiens
  misc_RNA (1)...(19): siRNA sense strand
gaacaacucgcgaaacaac

SEQ ID NO: 1915126 - RNA, 19 nt, Homo sapiens
  misc_RNA (1)...(19): siRNA sense strand
caacaagaguccucaaucc

SEQ ID NO: 1915127 - RNA, 19 nt, Homo sapiens
  misc_RNA (1)...(19): siRNA sense strand
gaagucagguagcauuggu

SEQ ID NO: 1915128 - RNA, 19 nt, Homo sapiens
  misc_RNA (1)...(19): siRNA sense strand
agccauacuucaucuauuu

SEQ ID NO: 1915129 - RNA, 19 nt, Homo sapiens
  misc_RNA (1)...(19): siRNA sense strand
aagcugcaguucaauacua

SEQ ID NO: 1915130 - RNA, 19 nt, Homo sapiens
  misc_RNA (1)...(19): siRNA sense strand
gauguccuguauuccuaua

SEQ ID NO: 1915131 - RNA, 19 nt, Homo sapiens
  misc_RNA (1)...(19): siRNA sense strand
aggaagcucugaaauuaau

SEQ ID NO: 1915132 - RNA, 19 nt, Homo sapiens
  misc_RNA (1)...(19): siRNA sense strand
gagaaagucugggacaacu

SEQ ID NO: 1915133 - RNA, 19 nt, Homo sapiens
  misc_RNA (1)...(19): siRNA sense strand
ggagaaacggucauuuaag

SEQ ID NO: 1915134 - RNA, 19 nt, Homo sapiens
  misc_RNA (1)...(19): siRNA sense strand
ccagucaguuccugcagaa

SEQ ID NO: 1915135 - RNA, 19 nt, Homo sapiens
  misc_RNA (1)...(19): siRNA sense strand
cacaguggauuccugcaaa

SEQ ID NO: 1915136 - RNA, 19 nt, Homo sapiens
  misc_RNA (1)...(19): siRNA sense strand
gggaagacgcugugucguu

SEQ ID NO: 1915137 - RNA, 19 nt, Homo sapiens
  misc_RNA (1)...(19): siRNA sense strand
uggagaaacggucauuuaa

SEQ ID NO: 1915138 - RNA, 19 nt, Homo sapiens
  misc_RNA (1)...(19): siRNA sense strand
caaaccagaggcagccaua

SEQ ID NO: 1915139 - RNA, 19 nt, Homo sapiens
  misc_RNA (1)...(19): siRNA sense strand
guucaauacuaccaacugu

SEQ ID NO: 1915140 - RNA, 19 nt, Homo sapiens
  misc_RNA (1)...(19): siRNA sense strand
uuuagcagauggauucuau

SEQ ID NO: 1915141 - RNA, 19 nt, Homo sapiens
  misc_RNA (1)...(19): siRNA sense strand
ugcaaaggcuugagugaca

SEQ ID NO: 1915142 - RNA, 19 nt, Homo sapiens
  misc_RNA (1)...(19): siRNA sense strand
cuuccaagcugcaguucaa

SEQ ID NO: 1915143 - RNA, 19 nt, Homo sapiens
  misc_RNA (1)...(19): siRNA sense strand
aaaggaagagucagauguu

SEQ ID NO: 1915144 - RNA, 19 nt, Homo sapiens
  misc_RNA (1)...(19): siRNA sense strand
gggagaaagucugggacaa

SEQ ID NO: 1915145 - RNA, 19 nt, Homo sapiens
  misc_RNA (1)...(19): siRNA sense strand
cagccauacuucaucuauu

SEQ ID NO: 1915146 - RNA, 19 nt, Homo sapiens
  misc_RNA (1)...(19): siRNA sense strand
gcagccauacuucaucuau

SEQ ID NO: 1915147 - RNA, 19 nt, Homo sapiens
  misc_RNA (1)...(19): siRNA sense strand
uagcagauggauucuauga

SEQ ID NO: 1915148 - RNA, 19 nt, Homo sapiens
  misc_RNA (1)...(19): siRNA sense strand
guagugauaccguaaugga

SEQ ID NO: 1915149 - RNA, 19 nt, Homo sapiens
  misc_RNA (1)...(19): siRNA sense strand
ugucucgacugcacuuuga

SEQ ID NO: 1915150 - RNA, 19 nt, Homo sapiens
  misc_RNA (1)...(19): siRNA sense strand
gaggaggcaguuucuaaau

SEQ ID NO: 1915151 - RNA, 19 nt, Homo sapiens
  misc_RNA (1)...(19): siRNA sense strand
gcaaaggcuugagugacau

SEQ ID NO: 1915152 - RNA, 19 nt, Homo sapiens
  misc_RNA (1)...(19): siRNA sense strand
gggcgaacauccugucacu

SEQ ID NO: 1915153 - RNA, 19 nt, Homo sapiens
  misc_RNA (1)...(19): siRNA sense strand
gagaagucagguagcauug

SEQ ID NO: 1915154 - RNA, 19 nt, Homo sapiens
  misc_RNA (1)...(19): siRNA sense strand
caggaagcucugaaauuaa

SEQ ID NO: 1915155 - RNA, 19 nt, Homo sapiens
  misc_RNA (1)...(19): siRNA sense strand
uaaauggcuugacuuuggu

SEQ ID NO: 1915156 - RNA, 19 nt, Homo sapiens
  misc_RNA (1)...(19): siRNA sense strand
gugauaccguaauggagaa

SEQ ID NO: 1915157 - RNA, 19 nt, Homo sapiens
  misc_RNA (1)...(19): siRNA sense strand
gcagcgaugucagggaaca

SEQ ID NO: 1915158 - RNA, 19 nt, Homo sapiens
  misc_RNA (1)...(19): siRNA sense strand
auggagaaacggucauuua

SEQ ID NO: 1915159 - RNA, 19 nt, Homo sapiens
  misc_RNA (1)...(19): siRNA sense strand
ucucuucuguggugaacaa

SEQ ID NO: 1915160 - RNA, 19 nt, Homo sapiens
  misc_RNA (1)...(19): siRNA sense strand
cagagaacaucaccuucca

SEQ ID NO: 1915161 - RNA, 19 nt, Homo sapiens
  misc_RNA (1)...(19): siRNA sense strand
aggaggcaguuucuaaaug

SEQ ID NO: 1915162 - RNA, 19 nt, Homo sapiens
  misc_RNA (1)...(19): siRNA sense strand
uaaggugccucugggaaag

SEQ ID NO: 1915163 - RNA, 19 nt, Homo sapiens
  misc_RNA (1)...(19): siRNA sense strand
ccucaaaucaagacagaga

SEQ ID NO: 1915164 - RNA, 19 nt, Homo sapiens
  misc_RNA (1)...(19): siRNA sense strand
acaagaguccucaauccaa

SEQ ID NO: 1915165 - RNA, 19 nt, Homo sapiens
  misc_RNA (1)...(19): siRNA sense strand
gacacaggacuuucagaga

SEQ ID NO: 1915166 - RNA, 19 nt, Homo sapiens
  misc_RNA (1)...(19): siRNA sense strand
caucugagcguaucauugc

SEQ ID NO: 1915167 - RNA, 19 nt, Homo sapiens
  misc_RNA (1)...(19): siRNA sense strand
ccugagaacugggagaaag

SEQ ID NO: 1915168 - RNA, 19 nt, Homo sapiens
  misc_RNA (1)...(19): siRNA sense strand
acagagaagucagguagca

SEQ ID NO: 1915169 - RNA, 19 nt, Homo sapiens
  misc_RNA (1)...(19): siRNA sense strand
ccuauaccaucaucacagu

SEQ ID NO: 1915170 - RNA, 19 nt, Homo sapiens
  misc_RNA (1)...(19): siRNA sense strand
cagauaguccugagaacug

SEQ ID NO: 1915171 - RNA, 19 nt, Homo sapiens
  misc_RNA (1)...(19): siRNA sense strand
acuggaggcugcugacaau

SEQ ID NO: 1915172 - RNA, 19 nt, Homo sapiens
  misc_RNA (1)...(19): siRNA sense strand
ggccacaacgucacccaaa

SEQ ID NO: 1915173 - RNA, 19 nt, Homo sapiens
  misc_RNA (1)...(19): siRNA sense strand
agaggaggcaguuucuaaa

SEQ ID NO: 1915174 - RNA, 19 nt, Homo sapiens
  misc_RNA (1)...(19): siRNA sense strand
ggagaggaggcaguuucua

SEQ ID NO: 1915175 - RNA, 19 nt, Homo sapiens
  misc_RNA (1)...(19): siRNA sense strand
ggagauguccuguauuccu

SEQ ID NO: 1915176 - RNA, 19 nt, Homo sapiens
  misc_RNA (1)...(19): siRNA sense strand
aaagugauccuuccaagcu

SEQ ID NO: 1915177 - RNA, 19 nt, Homo sapiens
  misc_RNA (1)...(19): siRNA sense strand
gcagauaguccugagaacu

SEQ ID NO: 1915178 - RNA, 19 nt, Homo sapiens
  misc_RNA (1)...(19): siRNA sense strand
agagaagucagguagcauu

SEQ ID NO: 1915179 - RNA, 19 nt, Homo sapiens
  misc_RNA (1)...(19): siRNA sense strand
uuaaggugccucugggaaa

SEQ ID NO: 1915180 - RNA, 19 nt, Homo sapiens
  misc_RNA (1)...(19): siRNA sense strand
cgaacauccugucacuuac

SEQ ID NO: 1915181 - RNA, 19 nt, Homo sapiens
  misc_RNA (1)...(19): siRNA sense strand
ggagaaagucugggacaac

SEQ ID NO: 1915182 - RNA, 19 nt, Homo sapiens
  misc_RNA (1)...(19): siRNA sense strand
gcauuggugcugcagauag

SEQ ID NO: 1915183 - RNA, 19 nt, Homo sapiens
  misc_RNA (1)...(19): siRNA sense strand
ggcaguagcagaggauguu

SEQ ID NO: 1915184 - RNA, 19 nt, Homo sapiens
  misc_RNA (1)...(19): siRNA sense strand
ugaagucucaacucaggaa

SEQ ID NO: 1915185 - RNA, 19 nt, Homo sapiens
  misc_RNA (1)...(19): siRNA sense strand
cauuggugcugcagauagu

SEQ ID NO: 1915186 - RNA, 19 nt, Homo sapiens
  misc_RNA (1)...(19): siRNA sense strand
gacugcacuuugagaagga

SEQ ID NO: 1915187 - RNA, 19 nt, Homo sapiens
  misc_RNA (1)...(19): siRNA sense strand
ggucccuucuugguucaaa

SEQ ID NO: 1915188 - RNA, 19 nt, Homo sapiens
  misc_RNA (1)...(19): siRNA sense strand
gauaaguacugccccucuu

SEQ ID NO: 1915189 - RNA, 19 nt, Homo sapiens
  misc_RNA (1)...(19): siRNA sense strand
ccagugguccagucaguuc

SEQ ID NO: 1915190 - RNA, 19 nt, Homo sapiens
  misc_RNA (1)...(19): siRNA sense strand
uuaauccacccaacagaga

SEQ ID NO: 1915191 - RNA, 19 nt, Homo sapiens
  misc_RNA (1)...(19): siRNA sense strand
uuggugaagucucaacuca

SEQ ID NO: 1915192 - RNA, 19 nt, Homo sapiens
  misc_RNA (1)...(19): siRNA sense strand
ggaugccugccauauuaga

SEQ ID NO: 1915193 - RNA, 19 nt, Homo sapiens
  misc_RNA (1)...(19): siRNA sense strand
aauacuaccaacugucgua

SEQ ID NO: 1915194 - RNA, 19 nt, Homo sapiens
  misc_RNA (1)...(19): siRNA sense strand
agaggauguugcagugguu

SEQ ID NO: 1915195 - RNA, 19 nt, Homo sapiens
  misc_RNA (1)...(19): siRNA sense strand
ccagaggcagccauacuuc

SEQ ID NO: 1915196 - RNA, 19 nt, Homo sapiens
  misc_RNA (1)...(19): siRNA sense strand
uaccaacugucguagugau

SEQ ID NO: 1915197 - RNA, 19 nt, Homo sapiens
  misc_RNA (1)...(19): siRNA sense strand
gaaagggaagacgcugugu

SEQ ID NO: 1915198 - RNA, 19 nt, Homo sapiens
  misc_RNA (1)...(19): siRNA sense strand
gccagugacacaggacuuu

SEQ ID NO: 1915199 - RNA, 19 nt, Homo sapiens
  misc_RNA (1)...(19): siRNA sense strand
aaggaagagucagauguuc

SEQ ID NO: 1915200 - RNA, 19 nt, Homo sapiens
  misc_RNA (1)...(19): siRNA sense strand
ccaagcugcaguucaauac

SEQ ID NO: 1915201 - RNA, 19 nt, Homo sapiens
  misc_RNA (1)...(19): siRNA sense strand
acaacaagaguccucaauc

SEQ ID NO: 1915202 - RNA, 19 nt, Homo sapiens
  misc_RNA (1)...(19): siRNA sense strand
caccuuccaugcagucucu

SEQ ID NO: 1915203 - RNA, 19 nt, Homo sapiens
  misc_RNA (1)...(19): siRNA sense strand
caacagcccagugcuucug

SEQ ID NO: 1915204 - RNA, 19 nt, Homo sapiens
  misc_RNA (1)...(19): siRNA sense strand
ucacaguggauuccugcaa

SEQ ID NO: 1915205 - RNA, 19 nt, Homo sapiens
  misc_RNA (1)...(19): siRNA sense strand
ggcugaagcgggagaagga

SEQ ID NO: 1915206 - RNA, 19 nt, Homo sapiens
  misc_RNA (1)...(19): siRNA sense strand
uccaagcugcaguucaaua

SEQ ID NO: 1915207 - RNA, 19 nt, Homo sapiens
  misc_RNA (1)...(19): siRNA sense strand
ggaaaacgcuucauuuaua

SEQ ID NO: 1915208 - RNA, 19 nt, Homo sapiens
  misc_RNA (1)...(19): siRNA sense strand
gggagaaacucuauaauug

SEQ ID NO: 1915209 - RNA, 19 nt, Homo sapiens
  misc_RNA (1)...(19): siRNA sense strand
uguaagagcuuccguagua

SEQ ID NO: 1915210 - RNA, 19 nt, Homo sapiens
  misc_RNA (1)...(19): siRNA sense strand
ggagagagaccuuauaauu

SEQ ID NO: 1915211 - RNA, 19 nt, Homo sapiens
  misc_RNA (1)...(19): siRNA sense strand
gagaaacccuauaauugua

SEQ ID NO: 1915212 - RNA, 19 nt, Homo sapiens
  misc_RNA (1)...(19): siRNA sense strand
gguaagagcuuuggucuga

SEQ ID NO: 1915213 - RNA, 19 nt, Homo sapiens
  misc_RNA (1)...(19): siRNA sense strand
gggaagagauuuacugaga

SEQ ID NO: 1915214 - RNA, 19 nt, Homo sapiens
  misc_RNA (1)...(19): siRNA sense strand
gagagaaacccuauaauug

SEQ ID NO: 1915215 - RNA, 19 nt, Homo sapiens
  misc_RNA (1)...(19): siRNA sense strand
ggagagaaacccuauaauu

SEQ ID NO: 1915216 - RNA, 19 nt, Homo sapiens
  misc_RNA (1)...(19): siRNA sense strand
ggagugaaaccucauauuu

SEQ ID NO: 1915217 - RNA, 19 nt, Homo sapiens
  misc_RNA (1)...(19): siRNA sense strand
gaacaucaaagaauccaua

SEQ ID NO: 1915218 - RNA, 19 nt, Homo sapiens
  misc_RNA (1)...(19): siRNA sense strand
gaacaaauuucaagugacu

SEQ ID NO: 1915219 - RNA, 19 nt, Homo sapiens
  misc_RNA (1)...(19): siRNA sense strand
gagaagccauauaauugua

SEQ ID NO: 1915220 - RNA, 19 nt, Homo sapiens
  misc_RNA (1)...(19): siRNA sense strand
gaucaggacuuuauguuca

SEQ ID NO: 1915221 - RNA, 19 nt, Homo sapiens
  misc_RNA (1)...(19): siRNA sense strand
gggaacaaauuucaaguga

SEQ ID NO: 1915222 - RNA, 19 nt, Homo sapiens
  misc_RNA (1)...(19): siRNA sense strand
gaagagauuuacugagaau

SEQ ID NO: 1915223 - RNA, 19 nt, Homo sapiens
  misc_RNA (1)...(19): siRNA sense strand
gcaggacuaucuauaauuc

SEQ ID NO: 1915224 - RNA, 19 nt, Homo sapiens
  misc_RNA (1)...(19): siRNA sense strand
guaaacagcuuucaguucu

SEQ ID NO: 1915225 - RNA, 19 nt, Homo sapiens
  misc_RNA (1)...(19): siRNA sense strand
guacaaaugugaggaaugu

SEQ ID NO: 1915226 - RNA, 19 nt, Homo sapiens
  misc_RNA (1)...(19): siRNA sense strand
gagaaacucuauaauugug

SEQ ID NO: 1915227 - RNA, 19 nt, Homo sapiens
  misc_RNA (1)...(19): siRNA sense strand
gagagagaccuuauaauug

SEQ ID NO: 1915228 - RNA, 19 nt, Homo sapiens
  misc_RNA (1)...(19): siRNA sense strand
caucaaaccugggaacaaa

SEQ ID NO: 1915229 - RNA, 19 nt, Homo sapiens
  misc_RNA (1)...(19): siRNA sense strand
ccaaagagaagggaauuua

SEQ ID NO: 1915230 - RNA, 19 nt, Homo sapiens
  misc_RNA (1)...(19): siRNA sense strand
gggagaagccauauaauug

SEQ ID NO: 1915231 - RNA, 19 nt, Homo sapiens
  misc_RNA (1)...(19): siRNA sense strand
ggcaagaucuuuauaagca

SEQ ID NO: 1915232 - RNA, 19 nt, Homo sapiens
  misc_RNA (1)...(19): siRNA sense strand
gaaaucagcacuuaauagu

SEQ ID NO: 1915233 - RNA, 19 nt, Homo sapiens
  misc_RNA (1)...(19): siRNA sense strand
ggaagagauuuacugagaa

SEQ ID NO: 1915234 - RNA, 19 nt, Homo sapiens
  misc_RNA (1)...(19): siRNA sense strand
agagagaccuuauaauugu

SEQ ID NO: 1915235 - RNA, 19 nt, Homo sapiens
  misc_RNA (1)...(19): siRNA sense strand
gauggagacuguuucagaa

SEQ ID NO: 1915236 - RNA, 19 nt, Homo sapiens
  misc_RNA (1)...(19): siRNA sense strand
gugcacaguucaugccuua

SEQ ID NO: 1915237 - RNA, 19 nt, Homo sapiens
  misc_RNA (1)...(19): siRNA sense strand
ggacguggcuguggucuuc

SEQ ID NO: 1915238 - RNA, 19 nt, Homo sapiens
  misc_RNA (1)...(19): siRNA sense strand
gguaaggaauucaaucaga

SEQ ID NO: 1915239 - RNA, 19 nt, Homo sapiens
  misc_RNA (1)...(19): siRNA sense strand
caacuacagucaagagaga

SEQ ID NO: 1915240 - RNA, 19 nt, Homo sapiens
  misc_RNA (1)...(19): siRNA sense strand
gagaagugaugcuggagaa

SEQ ID NO: 1915241 - RNA, 19 nt, Homo sapiens
  misc_RNA (1)...(19): siRNA sense strand
caacucaucuaacccauca

SEQ ID NO: 1915242 - RNA, 19 nt, Homo sapiens
  misc_RNA (1)...(19): siRNA sense strand
gaccuugacuuucaucaga

SEQ ID NO: 1915243 - RNA, 19 nt, Homo sapiens
  misc_RNA (1)...(19): siRNA sense strand
gagaaaccauucagaugug

SEQ ID NO: 1915244 - RNA, 19 nt, Homo sapiens
  misc_RNA (1)...(19): siRNA sense strand
caucagagacuccacagua

SEQ ID NO: 1915245 - RNA, 19 nt, Homo sapiens
  misc_RNA (1)...(19): siRNA sense strand
gaggagagaaacccuauaa

SEQ ID NO: 1915246 - RNA, 19 nt, Homo sapiens
  misc_RNA (1)...(19): siRNA sense strand
ggagagaaaccauucaaau

SEQ ID NO: 1915247 - RNA, 19 nt, Homo sapiens
  misc_RNA (1)...(19): siRNA sense strand
gaguaaagccauacaaaug

SEQ ID NO: 1915248 - RNA, 19 nt, Homo sapiens
  misc_RNA (1)...(19): siRNA sense strand
gagaaacgguacaaaugug

SEQ ID NO: 1915249 - RNA, 19 nt, Homo sapiens
  misc_RNA (1)...(19): siRNA sense strand
gagagaaacgguacaaaug

SEQ ID NO: 1915250 - RNA, 19 nt, Homo sapiens
  misc_RNA (1)...(19): siRNA sense strand
gagcucacaucagcaaauu

SEQ ID NO: 1915251 - RNA, 19 nt, Homo sapiens
  misc_RNA (1)...(19): siRNA sense strand
uaagagcuuuggucugaaa

SEQ ID NO: 1915252 - RNA, 19 nt, Homo sapiens
  misc_RNA (1)...(19): siRNA sense strand
gagagaccuuauaauugua

SEQ ID NO: 1915253 - RNA, 19 nt, Homo sapiens
  misc_RNA (1)...(19): siRNA sense strand
ggagagaaacgguacaaau

SEQ ID NO: 1915254 - RNA, 19 nt, Homo sapiens
  misc_RNA (1)...(19): siRNA sense strand
gacuuuauguucaucguaa

SEQ ID NO: 1915255 - RNA, 19 nt, Homo sapiens
  misc_RNA (1)...(19): siRNA sense strand
aaucagcacuuaauaguca

SEQ ID NO: 1915256 - RNA, 19 nt, Homo sapiens
  misc_RNA (1)...(19): siRNA sense strand
cguaguagagcaaaucuua

SEQ ID NO: 1915257 - RNA, 19 nt, Homo sapiens
  misc_RNA (1)...(19): siRNA sense strand
gaugcaggacuaucuauaa

SEQ ID NO: 1915258 - RNA, 19 nt, Homo sapiens
  misc_RNA (1)...(19): siRNA sense strand
gcacaguucaugccuuaaa

SEQ ID NO: 1915259 - RNA, 19 nt, Homo sapiens
  misc_RNA (1)...(19): siRNA sense strand
ggagaaacucuauaauugu

SEQ ID NO: 1915260 - RNA, 19 nt, Homo sapiens
  misc_RNA (1)...(19): siRNA sense strand
ggagacagcaacccaaaga

SEQ ID NO: 1915261 - RNA, 19 nt, Homo sapiens
  misc_RNA (1)...(19): siRNA sense strand
caacaaagagaccaaagug

SEQ ID NO: 1915262 - RNA, 19 nt, Homo sapiens
  misc_RNA (1)...(19): siRNA sense strand
guaaagccauacaaaugug

SEQ ID NO: 1915263 - RNA, 19 nt, Homo sapiens
  misc_RNA (1)...(19): siRNA sense strand
gggaaaagauuuacucaga

SEQ ID NO: 1915264 - RNA, 19 nt, Homo sapiens
  misc_RNA (1)...(19): siRNA sense strand
gggaaaagauuuacucaga

SEQ ID NO: 1915265 - RNA, 19 nt, Homo sapiens
  misc_RNA (1)...(19): siRNA sense strand
gagugaaaccucauauuug

SEQ ID NO: 1915266 - RNA, 19 nt, Homo sapiens
  misc_RNA (1)...(19): siRNA sense strand
ggagacuguuucagaauca

SEQ ID NO: 1915267 - RNA, 19 nt, Homo sapiens
  misc_RNA (1)...(19): siRNA sense strand
gcucagcucuucguauuca

SEQ ID NO: 1915268 - RNA, 19 nt, Homo sapiens
  misc_RNA (1)...(19): siRNA sense strand
auacaaaugugaagagugu

SEQ ID NO: 1915269 - RNA, 19 nt, Homo sapiens
  misc_RNA (1)...(19): siRNA sense strand
ggaguaaagccauacaaau

SEQ ID NO: 1915270 - RNA, 19 nt, Homo sapiens
  misc_RNA (1)...(19): siRNA sense strand
acucagaauucacaacuuu

SEQ ID NO: 1915271 - RNA, 19 nt, Homo sapiens
  misc_RNA (1)...(19): siRNA sense strand
acucagaauucacaacuuu

SEQ ID NO: 1915272 - RNA, 19 nt, Homo sapiens
  misc_RNA (1)...(19): siRNA sense strand
ggagaagccauauaauugu

SEQ ID NO: 1915273 - RNA, 19 nt, Homo sapiens
  misc_RNA (1)...(19): siRNA sense strand
gagagaaaccauucagaug

SEQ ID NO: 1915274 - RNA, 19 nt, Homo sapiens
  misc_RNA (1)...(19): siRNA sense strand
ggagagacaacauucaaau

SEQ ID NO: 1915275 - RNA, 19 nt, Homo sapiens
  misc_RNA (1)...(19): siRNA sense strand
gguuggaccuugacuuuca

SEQ ID NO: 1915276 - RNA, 19 nt, Homo sapiens
  misc_RNA (1)...(19): siRNA sense strand
uuucaagacuccaugguaa

SEQ ID NO: 1915277 - RNA, 19 nt, Homo sapiens
  misc_RNA (1)...(19): siRNA sense strand
agaccaaaguggagagaaa

SEQ ID NO: 1915278 - RNA, 19 nt, Homo sapiens
  misc_RNA (1)...(19): siRNA sense strand
gagauuuacugagaauuca

SEQ ID NO: 1915279 - RNA, 19 nt, Homo sapiens
  misc_RNA (1)...(19): siRNA sense strand
uaauaggcauuccaugguu

SEQ ID NO: 1915280 - RNA, 19 nt, Homo sapiens
  misc_RNA (1)...(19): siRNA sense strand
aaauggagauggagacugu

SEQ ID NO: 1915281 - RNA, 19 nt, Homo sapiens
  misc_RNA (1)...(19): siRNA sense strand
gaaugugggaagagcuuua

SEQ ID NO: 1915282 - RNA, 19 nt, Homo sapiens
  misc_RNA (1)...(19): siRNA sense strand
gagcuuuggucugaaauca

SEQ ID NO: 1915283 - RNA, 19 nt, Homo sapiens
  misc_RNA (1)...(19): siRNA sense strand
agugaaaccucauauuugu

SEQ ID NO: 1915284 - RNA, 19 nt, Homo sapiens
  misc_RNA (1)...(19): siRNA sense strand
gagacuccauggugaugaa

SEQ ID NO: 1915285 - RNA, 19 nt, Homo sapiens
  misc_RNA (1)...(19): siRNA sense strand
ucaggaacaucaaagaauc

SEQ ID NO: 1915286 - RNA, 19 nt, Homo sapiens
  misc_RNA (1)...(19): siRNA sense strand
ggaaaagauuuacucagaa

SEQ ID NO: 1915287 - RNA, 19 nt, Homo sapiens
  misc_RNA (1)...(19): siRNA sense strand
ggaaaagauuuacucagaa

SEQ ID NO: 1915288 - RNA, 19 nt, Homo sapiens
  misc_RNA (1)...(19): siRNA sense strand
agagaaacccuauaauugu

SEQ ID NO: 1915289 - RNA, 19 nt, Homo sapiens
  misc_RNA (1)...(19): siRNA sense strand
gaaacuguaccgagaagug

SEQ ID NO: 1915290 - RNA, 19 nt, Homo sapiens
  misc_RNA (1)...(19): siRNA sense strand
gaaaacgcuucauuuauag

SEQ ID NO: 1915291 - RNA, 19 nt, Homo sapiens
  misc_RNA (1)...(19): siRNA sense strand
uaauucacguuaagacaga

SEQ ID NO: 1915292 - RNA, 19 nt, Homo sapiens
  misc_RNA (1)...(19): siRNA sense strand
gaauuuaggaggcaagauc

SEQ ID NO: 1915293 - RNA, 19 nt, Homo sapiens
  misc_RNA (1)...(19): siRNA sense strand
cagagauacuuuccacuuc

SEQ ID NO: 1915294 - RNA, 19 nt, Homo sapiens
  misc_RNA (1)...(19): siRNA sense strand
ggaagggauuuuauacaaa

SEQ ID NO: 1915295 - RNA, 19 nt, Homo sapiens
  misc_RNA (1)...(19): siRNA sense strand
ugaaaccucauauuuguga

SEQ ID NO: 1915296 - RNA, 19 nt, Homo sapiens
  misc_RNA (1)...(19): siRNA sense strand
acacuggaguaaagccaua

SEQ ID NO: 1915297 - RNA, 19 nt, Homo sapiens
  misc_RNA (1)...(19): siRNA sense strand
ccagguugaugcaggacua

SEQ ID NO: 1915298 - RNA, 19 nt, Homo sapiens
  misc_RNA (1)...(19): siRNA sense strand
gaagagcauugugcacagu

SEQ ID NO: 1915299 - RNA, 19 nt, Homo sapiens
  misc_RNA (1)...(19): siRNA sense strand
gaaaagccauacaaaugug

SEQ ID NO: 1915300 - RNA, 19 nt, Homo sapiens
  misc_RNA (1)...(19): siRNA sense strand
gaaaagccauauagaugug

SEQ ID NO: 1915301 - RNA, 19 nt, Homo sapiens
  misc_RNA (1)...(19): siRNA sense strand
gagaaaagccauauagaug

SEQ ID NO: 1915302 - RNA, 19 nt, Homo sapiens
  misc_RNA (1)...(19): siRNA sense strand
gggaagggauuuuauacaa

SEQ ID NO: 1915303 - RNA, 19 nt, Homo sapiens
  misc_RNA (1)...(19): siRNA sense strand
gguaaacagcuuucaguuc

SEQ ID NO: 1915304 - RNA, 19 nt, Homo sapiens
  misc_RNA (1)...(19): siRNA sense strand
gcucacaucagcaaauuca

SEQ ID NO: 1915305 - RNA, 19 nt, Homo sapiens
  misc_RNA (1)...(19): siRNA sense strand
caucaaagaauccauacug

SEQ ID NO: 1915306 - RNA, 19 nt, Homo sapiens
  misc_RNA (1)...(19): siRNA sense strand
guagagcaaaucuuaauag

SEQ ID NO: 1915307 - RNA, 19 nt, Homo sapiens
  misc_RNA (1)...(19): siRNA sense strand
gagaaggacuguuccauca

SEQ ID NO: 1915308 - RNA, 19 nt, Homo sapiens
  misc_RNA (1)...(19): siRNA sense strand
agaaugcccuguuccagua

SEQ ID NO: 1915309 - RNA, 19 nt, Homo sapiens
  misc_RNA (1)...(19): siRNA sense strand
ccaacgaccucaaguacga

SEQ ID NO: 1915310 - RNA, 19 nt, Homo sapiens
  misc_RNA (1)...(19): siRNA sense strand
ggagaugaccggcaggaaa

SEQ ID NO: 1915311 - RNA, 19 nt, Homo sapiens
  misc_RNA (1)...(19): siRNA sense strand
gggauuacccgcagcauga

SEQ ID NO: 1915312 - RNA, 19 nt, Homo sapiens
  misc_RNA (1)...(19): siRNA sense strand
ggaagaaagcauugugguu

SEQ ID NO: 1915313 - RNA, 19 nt, Homo sapiens
  misc_RNA (1)...(19): siRNA sense strand
gagccagacugagaacaaa

SEQ ID NO: 1915314 - RNA, 19 nt, Homo sapiens
  misc_RNA (1)...(19): siRNA sense strand
gaagugggaggacgccuuu

SEQ ID NO: 1915315 - RNA, 19 nt, Homo sapiens
  misc_RNA (1)...(19): siRNA sense strand
gaguaugucuuccucaucu

SEQ ID NO: 1915316 - RNA, 19 nt, Homo sapiens
  misc_RNA (1)...(19): siRNA sense strand
caccagcgcuucuucaagu

SEQ ID NO: 1915317 - RNA, 19 nt, Homo sapiens
  misc_RNA (1)...(19): siRNA sense strand
gagaguggcuacgcuuugu

SEQ ID NO: 1915318 - RNA, 19 nt, Homo sapiens
  misc_RNA (1)...(19): siRNA sense strand
ccgagucccugguggauga

SEQ ID NO: 1915319 - RNA, 19 nt, Homo sapiens
  misc_RNA (1)...(19): siRNA sense strand
ggaccuugcucccgguauc

SEQ ID NO: 1915320 - RNA, 19 nt, Homo sapiens
  misc_RNA (1)...(19): siRNA sense strand
gcuucuaccucuccuacaa

SEQ ID NO: 1915321 - RNA, 19 nt, Homo sapiens
  misc_RNA (1)...(19): siRNA sense strand
caagcagaaugcccuguuc

SEQ ID NO: 1915322 - RNA, 19 nt, Homo sapiens
  misc_RNA (1)...(19): siRNA sense strand
ggagaguggcuacgcuuug

SEQ ID NO: 1915323 - RNA, 19 nt, Homo sapiens
  misc_RNA (1)...(19): siRNA sense strand
guacaacuuugagaacaag

SEQ ID NO: 1915324 - RNA, 19 nt, Homo sapiens
  misc_RNA (1)...(19): siRNA sense strand
gcaagugggcaucaagauc

SEQ ID NO: 1915325 - RNA, 19 nt, Homo sapiens
  misc_RNA (1)...(19): siRNA sense strand
caccagggcugcgacauca

SEQ ID NO: 1915326 - RNA, 19 nt, Homo sapiens
  misc_RNA (1)...(19): siRNA sense strand
aagaaagcauugugguuca

SEQ ID NO: 1915327 - RNA, 19 nt, Homo sapiens
  misc_RNA (1)...(19): siRNA sense strand
gagaugaccggcaggaaag

SEQ ID NO: 1915328 - RNA, 19 nt, Homo sapiens
  misc_RNA (1)...(19): siRNA sense strand
gcacacccuuccggaacuu

SEQ ID NO: 1915329 - RNA, 19 nt, Homo sapiens
  misc_RNA (1)...(19): siRNA sense strand
gaggacuucuccaacaucu

SEQ ID NO: 1915330 - RNA, 19 nt, Homo sapiens
  misc_RNA (1)...(19): siRNA sense strand
gcugcgacaucaacuucaa

SEQ ID NO: 1915331 - RNA, 19 nt, Homo sapiens
  misc_RNA (1)...(19): siRNA sense strand
cccgugaccucagcaagua

SEQ ID NO: 1915332 - RNA, 19 nt, Homo sapiens
  misc_RNA (1)...(19): siRNA sense strand
ggcagguggucuucuacaa

SEQ ID NO: 1915333 - RNA, 19 nt, Homo sapiens
  misc_RNA (1)...(19): siRNA sense strand
ggcagagcgugauccaguu

SEQ ID NO: 1915334 - RNA, 19 nt, Homo sapiens
  misc_RNA (1)...(19): siRNA sense strand
gaaggucagcggcauguac

SEQ ID NO: 1915335 - RNA, 19 nt, Homo sapiens
  misc_RNA (1)...(19): siRNA sense strand
ccaagcgccuggagagucu

SEQ ID NO: 1915336 - RNA, 19 nt, Homo sapiens
  misc_RNA (1)...(19): siRNA sense strand
gcacaccagcgcuucuuca

SEQ ID NO: 1915337 - RNA, 19 nt, Homo sapiens
  misc_RNA (1)...(19): siRNA sense strand
cagaguaugucuuccucau

SEQ ID NO: 1915338 - RNA, 19 nt, Homo sapiens
  misc_RNA (1)...(19): siRNA sense strand
ccuacaagguccgcgguaa

SEQ ID NO: 1915339 - RNA, 19 nt, Homo sapiens
  misc_RNA (1)...(19): siRNA sense strand
ccgaggcccugaacguguu

SEQ ID NO: 1915340 - RNA, 19 nt, Homo sapiens
  misc_RNA (1)...(19): siRNA sense strand
ccugguggaugacgacguu

SEQ ID NO: 1915341 - RNA, 19 nt, Homo sapiens
  misc_RNA (1)...(19): siRNA sense strand
ugcuagaccugcagaacaa

SEQ ID NO: 1915342 - RNA, 19 nt, Homo sapiens
  misc_RNA (1)...(19): siRNA sense strand
ccuucucgcugccgccaua

SEQ ID NO: 1915343 - RNA, 19 nt, Homo sapiens
  misc_RNA (1)...(19): siRNA sense strand
gaggacgccuuugccaagu

SEQ ID NO: 1915344 - RNA, 19 nt, Homo sapiens
  misc_RNA (1)...(19): siRNA sense strand
ggagggcaaauacgacaug

SEQ ID NO: 1915345 - RNA, 19 nt, Homo sapiens
  misc_RNA (1)...(19): siRNA sense strand
gagaagcucguggccauca

SEQ ID NO: 1915346 - RNA, 19 nt, Homo sapiens
  misc_RNA (1)...(19): siRNA sense strand
guucgacgagugucacaaa

SEQ ID NO: 1915347 - RNA, 19 nt, Homo sapiens
  misc_RNA (1)...(19): siRNA sense strand
gaagcaagugggcaucaag

SEQ ID NO: 1915348 - RNA, 19 nt, Homo sapiens
  misc_RNA (1)...(19): siRNA sense strand
gcagguggucuucuacaag

SEQ ID NO: 1915349 - RNA, 19 nt, Homo sapiens
  misc_RNA (1)...(19): siRNA sense strand
caagagaaagcgggacaga

SEQ ID NO: 1915350 - RNA, 19 nt, Homo sapiens
  misc_RNA (1)...(19): siRNA sense strand
ggacaagcgggagggcaaa

SEQ ID NO: 1915351 - RNA, 19 nt, Homo sapiens
  misc_RNA (1)...(19): siRNA sense strand
cagcucagcaggccguuug

SEQ ID NO: 1915352 - RNA, 19 nt, Homo sapiens
  misc_RNA (1)...(19): siRNA sense strand
caccuacuccgcccugauu

SEQ ID NO: 1915353 - RNA, 19 nt, Homo sapiens
  misc_RNA (1)...(19): siRNA sense strand
gcagagcgugauccaguuc

SEQ ID NO: 1915354 - RNA, 19 nt, Homo sapiens
  misc_RNA (1)...(19): siRNA sense strand
ccaaggacaggaagaagca

SEQ ID NO: 1915355 - RNA, 19 nt, Homo sapiens
  misc_RNA (1)...(19): siRNA sense strand
gccuggacguggagaagga

SEQ ID NO: 1915356 - RNA, 19 nt, Homo sapiens
  misc_RNA (1)...(19): siRNA sense strand
gggcugcgacaucaacuuc

SEQ ID NO: 1915357 - RNA, 19 nt, Homo sapiens
  misc_RNA (1)...(19): siRNA sense strand
gggagaguggcuacgcuuu

SEQ ID NO: 1915358 - RNA, 19 nt, Homo sapiens
  misc_RNA (1)...(19): siRNA sense strand
ggcuggaggugcacaagca

SEQ ID NO: 1915359 - RNA, 19 nt, Homo sapiens
  misc_RNA (1)...(19): siRNA sense strand
guggagaccagcacacugu

SEQ ID NO: 1915360 - RNA, 19 nt, Homo sapiens
  misc_RNA (1)...(19): siRNA sense strand
uuugaggacuucuccaaca

SEQ ID NO: 1915361 - RNA, 19 nt, Homo sapiens
  misc_RNA (1)...(19): siRNA sense strand
ucuccaacaucuccaucuu

SEQ ID NO: 1915362 - RNA, 19 nt, Homo sapiens
  misc_RNA (1)...(19): siRNA sense strand
acuguuccaucaccaaguu

SEQ ID NO: 1915363 - RNA, 19 nt, Homo sapiens
  misc_RNA (1)...(19): siRNA sense strand
gaacgaugggcaccucaac

SEQ ID NO: 1915364 - RNA, 19 nt, Homo sapiens
  misc_RNA (1)...(19): siRNA sense strand
aguacaacuuugagaacaa

SEQ ID NO: 1915365 - RNA, 19 nt, Homo sapiens
  misc_RNA (1)...(19): siRNA sense strand
ggacaggaagaagcaagug

SEQ ID NO: 1915366 - RNA, 19 nt, Homo sapiens
  misc_RNA (1)...(19): siRNA sense strand
uccaacaucuccaucuucu

SEQ ID NO: 1915367 - RNA, 19 nt, Homo sapiens
  misc_RNA (1)...(19): siRNA sense strand
ccgacuacgugccguccaa

SEQ ID NO: 1915368 - RNA, 19 nt, Homo sapiens
  misc_RNA (1)...(19): siRNA sense strand
gccaguucuucacggugua

SEQ ID NO: 1915369 - RNA, 19 nt, Homo sapiens
  misc_RNA (1)...(19): siRNA sense strand
acgggcagguggucuucua

SEQ ID NO: 1915370 - RNA, 19 nt, Homo sapiens
  misc_RNA (1)...(19): siRNA sense strand
gaggugcacaagcagaaug

SEQ ID NO: 1915371 - RNA, 19 nt, Homo sapiens
  misc_RNA (1)...(19): siRNA sense strand
gcgugcacaugaccuugga

SEQ ID NO: 1915372 - RNA, 19 nt, Homo sapiens
  misc_RNA (1)...(19): siRNA sense strand
gugcuagaccugcagaaca

SEQ ID NO: 1915373 - RNA, 19 nt, Homo sapiens
  misc_RNA (1)...(19): siRNA sense strand
caccuacgccugccagcaa

SEQ ID NO: 1915374 - RNA, 19 nt, Homo sapiens
  misc_RNA (1)...(19): siRNA sense strand
agaagcaagugggcaucaa

SEQ ID NO: 1915375 - RNA, 19 nt, Homo sapiens
  misc_RNA (1)...(19): siRNA sense strand
ugaagaccaaggacaggaa

SEQ ID NO: 1915376 - RNA, 19 nt, Homo sapiens
  misc_RNA (1)...(19): siRNA sense strand
gcgcucagcaagaucaagu

SEQ ID NO: 1915377 - RNA, 19 nt, Homo sapiens
  misc_RNA (1)...(19): siRNA sense strand
ccggagucauccuggagaa

SEQ ID NO: 1915378 - RNA, 19 nt, Homo sapiens
  misc_RNA (1)...(19): siRNA sense strand
caagguccgcgguaacaag

SEQ ID NO: 1915379 - RNA, 19 nt, Homo sapiens
  misc_RNA (1)...(19): siRNA sense strand
ggagagccagcagguguuc

SEQ ID NO: 1915380 - RNA, 19 nt, Homo sapiens
  misc_RNA (1)...(19): siRNA sense strand
ugagccagacugagaacaa

SEQ ID NO: 1915381 - RNA, 19 nt, Homo sapiens
  misc_RNA (1)...(19): siRNA sense strand
gaagcucguggccaucauc

SEQ ID NO: 1915382 - RNA, 19 nt, Homo sapiens
  misc_RNA (1)...(19): siRNA sense strand
cagcgcuucuucaaguauc

SEQ ID NO: 1915383 - RNA, 19 nt, Homo sapiens
  misc_RNA (1)...(19): siRNA sense strand
gaugggcaaggccgugcua

SEQ ID NO: 1915384 - RNA, 19 nt, Homo sapiens
  misc_RNA (1)...(19): siRNA sense strand
ggauuacccgcagcaugaa

SEQ ID NO: 1915385 - RNA, 19 nt, Homo sapiens
  misc_RNA (1)...(19): siRNA sense strand
acaagcgggagggcaaaua

SEQ ID NO: 1915386 - RNA, 19 nt, Homo sapiens
  misc_RNA (1)...(19): siRNA sense strand
ggacguggagaaggacugu

SEQ ID NO: 1915387 - RNA, 19 nt, Homo sapiens
  misc_RNA (1)...(19): siRNA sense strand
gccuccagcuugccaccaa

SEQ ID NO: 1915388 - RNA, 19 nt, Homo sapiens
  misc_RNA (1)...(19): siRNA sense strand
caccaaagaccugcgacuu

SEQ ID NO: 1915389 - RNA, 19 nt, Homo sapiens
  misc_RNA (1)...(19): siRNA sense strand
guguuccugucgcuaauuc

SEQ ID NO: 1915390 - RNA, 19 nt, Homo sapiens
  misc_RNA (1)...(19): siRNA sense strand
gcguguuccugucgcuaau

SEQ ID NO: 1915391 - RNA, 19 nt, Homo sapiens
  misc_RNA (1)...(19): siRNA sense strand
aaugccggcuccaccaaga

SEQ ID NO: 1915392 - RNA, 19 nt, Homo sapiens
  misc_RNA (1)...(19): siRNA sense strand
ucuccaacgaccucaagua

SEQ ID NO: 1915393 - RNA, 19 nt, Homo sapiens
  misc_RNA (1)...(19): siRNA sense strand
caaaggaugugaauugaua

SEQ ID NO: 1915394 - RNA, 19 nt, Homo sapiens
  misc_RNA (1)...(19): siRNA sense strand
acacagcaaucacagauaa

SEQ ID NO: 1915395 - RNA, 19 nt, Homo sapiens
  misc_RNA (1)...(19): siRNA sense strand
gaaauacacagcaaucaca

SEQ ID NO: 1915396 - RNA, 19 nt, Homo sapiens
  misc_RNA (1)...(19): siRNA sense strand
acauaucucugugguuuaa

SEQ ID NO: 1915397 - RNA, 19 nt, Homo sapiens
  misc_RNA (1)...(19): siRNA sense strand
ggaugugaauugauaucau

SEQ ID NO: 1915398 - RNA, 19 nt, Homo sapiens
  misc_RNA (1)...(19): siRNA sense strand
cugcaaaggaugugaauug

SEQ ID NO: 1915399 - RNA, 19 nt, Homo sapiens
  misc_RNA (1)...(19): siRNA sense strand
gcaaaggaugugaauugau

SEQ ID NO: 1915400 - RNA, 19 nt, Homo sapiens
  misc_RNA (1)...(19): siRNA sense strand
ugcaaaggaugugaauuga

SEQ ID NO: 1915401 - RNA, 19 nt, Homo sapiens
  misc_RNA (1)...(19): siRNA sense strand
ugucugaaauacacagcaa

SEQ ID NO: 1915402 - RNA, 19 nt, Homo sapiens
  misc_RNA (1)...(19): siRNA sense strand
uccuguaucugucugaaau

SEQ ID NO: 1915403 - RNA, 19 nt, Homo sapiens
  misc_RNA (1)...(19): siRNA sense strand
cucauugacugauaagagu

SEQ ID NO: 1915404 - RNA, 19 nt, Homo sapiens
  misc_RNA (1)...(19): siRNA sense strand
agcaaucacagauaacaaa

SEQ ID NO: 1915405 - RNA, 19 nt, Homo sapiens
  misc_RNA (1)...(19): siRNA sense strand
gcaaucacagauaacaaaa

SEQ ID NO: 1915406 - RNA, 19 nt, Homo sapiens
  misc_RNA (1)...(19): siRNA sense strand
ucaaggagcugcaggagau

SEQ ID NO: 1915407 - RNA, 19 nt, Homo sapiens
  misc_RNA (1)...(19): siRNA sense strand
gcgacgggcugaagaagga

SEQ ID NO: 1915408 - RNA, 19 nt, Homo sapiens
  misc_RNA (1)...(19): siRNA sense strand
gcugaugucaacagaguua

SEQ ID NO: 1915409 - RNA, 19 nt, Homo sapiens
  misc_RNA (1)...(19): siRNA sense strand
aggacgagcugcccuauga

SEQ ID NO: 1915410 - RNA, 19 nt, Homo sapiens
  misc_RNA (1)...(19): siRNA sense strand
gggcugaugucaacagagu

SEQ ID NO: 1915411 - RNA, 19 nt, Homo sapiens
  misc_RNA (1)...(19): siRNA sense strand
ccacuccacuuggcuguga

SEQ ID NO: 1915412 - RNA, 19 nt, Homo sapiens
  misc_RNA (1)...(19): siRNA sense strand
agucagaguucacggaguu

SEQ ID NO: 1915413 - RNA, 19 nt, Homo sapiens
  misc_RNA (1)...(19): siRNA sense strand
gcacuuggccaucauccau

SEQ ID NO: 1915414 - RNA, 19 nt, Homo sapiens
  misc_RNA (1)...(19): siRNA sense strand
agaaauugcugaggcacuu

SEQ ID NO: 1915415 - RNA, 19 nt, Homo sapiens
  misc_RNA (1)...(19): siRNA sense strand
acacuuagccucuauccau

SEQ ID NO: 1915416 - RNA, 19 nt, Homo sapiens
  misc_RNA (1)...(19): siRNA sense strand
ccugaaggcuaccaacuac

SEQ ID NO: 1915417 - RNA, 19 nt, Homo sapiens
  misc_RNA (1)...(19): siRNA sense strand
gcagacuccacuccacuug

SEQ ID NO: 1915418 - RNA, 19 nt, Homo sapiens
  misc_RNA (1)...(19): siRNA sense strand
ugaaagacgaggaguacga

SEQ ID NO: 1915419 - RNA, 19 nt, Homo sapiens
  misc_RNA (1)...(19): siRNA sense strand
ugaaggcuaccaacuacaa

SEQ ID NO: 1915420 - RNA, 19 nt, Homo sapiens
  misc_RNA (1)...(19): siRNA sense strand
acgagcagauggucaagga

SEQ ID NO: 1915421 - RNA, 19 nt, Homo sapiens
  misc_RNA (1)...(19): siRNA sense strand
cccuacaccuugccuguga

SEQ ID NO: 1915422 - RNA, 19 nt, Homo sapiens
  misc_RNA (1)...(19): siRNA sense strand
ccaugaaagacgaggagua

SEQ ID NO: 1915423 - RNA, 19 nt, Homo sapiens
  misc_RNA (1)...(19): siRNA sense strand
gggacucguuccugcacuu

SEQ ID NO: 1915424 - RNA, 19 nt, Homo sapiens
  misc_RNA (1)...(19): siRNA sense strand
gaaggcuaccaacuacaau

SEQ ID NO: 1915425 - RNA, 19 nt, Homo sapiens
  misc_RNA (1)...(19): siRNA sense strand
ucugggagcuggcugugau

SEQ ID NO: 1915426 - RNA, 19 nt, Homo sapiens
  misc_RNA (1)...(19): siRNA sense strand
caccaaccagccagaaauu

SEQ ID NO: 1915427 - RNA, 19 nt, Homo sapiens
  misc_RNA (1)...(19): siRNA sense strand
ucaccaaccagccagaaau

SEQ ID NO: 1915428 - RNA, 19 nt, Homo sapiens
  misc_RNA (1)...(19): siRNA sense strand
ugucuacacuuagccucua

SEQ ID NO: 1915429 - RNA, 19 nt, Homo sapiens
  misc_RNA (1)...(19): siRNA sense strand
ucaacagaguuaccuacca

SEQ ID NO: 1915430 - RNA, 19 nt, Homo sapiens
  misc_RNA (1)...(19): siRNA sense strand
ggccagcugacacuagaaa

SEQ ID NO: 1915431 - RNA, 19 nt, Homo sapiens
  misc_RNA (1)...(19): siRNA sense strand
aaaaggcacugaccaugga

SEQ ID NO: 1915432 - RNA, 19 nt, Homo sapiens
  misc_RNA (1)...(19): siRNA sense strand
gagcugcccuaugaugacu

SEQ ID NO: 1915433 - RNA, 19 nt, Homo sapiens
  misc_RNA (1)...(19): siRNA sense strand
gacgagcugcccuaugaug

SEQ ID NO: 1915434 - RNA, 19 nt, Homo sapiens
  misc_RNA (1)...(19): siRNA sense strand
ugccagagagugaggauga

SEQ ID NO: 1915435 - RNA, 19 nt, Homo sapiens
  misc_RNA (1)...(19): siRNA sense strand
cuccgagacuuucgaggaa

SEQ ID NO: 1915436 - RNA, 19 nt, Homo sapiens
  misc_RNA (1)...(19): siRNA sense strand
gugaggaugaggagagcua

SEQ ID NO: 1915437 - RNA, 19 nt, Homo sapiens
  misc_RNA (1)...(19): siRNA sense strand
gaugaggagagcuaugaca

SEQ ID NO: 1915438 - RNA, 19 nt, Homo sapiens
  misc_RNA (1)...(19): siRNA sense strand
gaucaccaaccagccagaa

SEQ ID NO: 1915439 - RNA, 19 nt, Homo sapiens
  misc_RNA (1)...(19): siRNA sense strand
cuucagaugcugccagaga

SEQ ID NO: 1915440 - RNA, 19 nt, Homo sapiens
  misc_RNA (1)...(19): siRNA sense strand
uggugucacuccuguugaa

SEQ ID NO: 1915441 - RNA, 19 nt, Homo sapiens
  misc_RNA (1)...(19): siRNA sense strand
cuugggugcugaugucaau

SEQ ID NO: 1915442 - RNA, 19 nt, Homo sapiens
  misc_RNA (1)...(19): siRNA sense strand
caugaaagacgaggaguac

SEQ ID NO: 1915443 - RNA, 19 nt, Homo sapiens
  misc_RNA (1)...(19): siRNA sense strand
guccuugggugcugauguc

SEQ ID NO: 1915444 - RNA, 19 nt, Homo sapiens
  misc_RNA (1)...(19): siRNA sense strand
ugggccagcugacacuaga

SEQ ID NO: 1915445 - RNA, 19 nt, Homo sapiens
  misc_RNA (1)...(19): siRNA sense strand
ggacucguuccugcacuug

SEQ ID NO: 1915446 - RNA, 19 nt, Homo sapiens
  misc_RNA (1)...(19): siRNA sense strand
gcaaagaccuuaaauagug

SEQ ID NO: 1915447 - RNA, 19 nt, Homo sapiens
  misc_RNA (1)...(19): siRNA sense strand
gaagaacuauguagaagaa

SEQ ID NO: 1915448 - RNA, 19 nt, Homo sapiens
  misc_RNA (1)...(19): siRNA sense strand
caaauaaacugaucccaaa

SEQ ID NO: 1915449 - RNA, 19 nt, Homo sapiens
  misc_RNA (1)...(19): siRNA sense strand
gcaaacaacaggaucauua

SEQ ID NO: 1915450 - RNA, 19 nt, Homo sapiens
  misc_RNA (1)...(19): siRNA sense strand
gaacugaacagacauuuga

SEQ ID NO: 1915451 - RNA, 19 nt, Homo sapiens
  misc_RNA (1)...(19): siRNA sense strand
cuaauuaucucauggcuaa

SEQ ID NO: 1915452 - RNA, 19 nt, Homo sapiens
  misc_RNA (1)...(19): siRNA sense strand
gaagaaauggaacgaguua

SEQ ID NO: 1915453 - RNA, 19 nt, Homo sapiens
  misc_RNA (1)...(19): siRNA sense strand
ggaggacucuugacucuga

SEQ ID NO: 1915454 - RNA, 19 nt, Homo sapiens
  misc_RNA (1)...(19): siRNA sense strand
gaaggagacggucagauua

SEQ ID NO: 1915455 - RNA, 19 nt, Homo sapiens
  misc_RNA (1)...(19): siRNA sense strand
gaagaaggagccauaauug

SEQ ID NO: 1915456 - RNA, 19 nt, Homo sapiens
  misc_RNA (1)...(19): siRNA sense strand
uaaacaaccuucaggcaaa

SEQ ID NO: 1915457 - RNA, 19 nt, Homo sapiens
  misc_RNA (1)...(19): siRNA sense strand
ggaagaagaaggagccaua

SEQ ID NO: 1915458 - RNA, 19 nt, Homo sapiens
  misc_RNA (1)...(19): siRNA sense strand
cauaauugcuggucuguug

SEQ ID NO: 1915459 - RNA, 19 nt, Homo sapiens
  misc_RNA (1)...(19): siRNA sense strand
ggaauuggcuaugaagaug

SEQ ID NO: 1915460 - RNA, 19 nt, Homo sapiens
  misc_RNA (1)...(19): siRNA sense strand
ccaugaagauccuaauuau

SEQ ID NO: 1915461 - RNA, 19 nt, Homo sapiens
  misc_RNA (1)...(19): siRNA sense strand
gaagagaagacuaaucaga

SEQ ID NO: 1915462 - RNA, 19 nt, Homo sapiens
  misc_RNA (1)...(19): siRNA sense strand
ucagagcucucaagcauga

SEQ ID NO: 1915463 - RNA, 19 nt, Homo sapiens
  misc_RNA (1)...(19): siRNA sense strand
uagaagaacugaacagaca

SEQ ID NO: 1915464 - RNA, 19 nt, Homo sapiens
  misc_RNA (1)...(19): siRNA sense strand
gauuggauguugagaaaga

SEQ ID NO: 1915465 - RNA, 19 nt, Homo sapiens
  misc_RNA (1)...(19): siRNA sense strand
gaucauuaccuuacaagaa

SEQ ID NO: 1915466 - RNA, 19 nt, Homo sapiens
  misc_RNA (1)...(19): siRNA sense strand
ggaacgaguuaaagaggaa

SEQ ID NO: 1915467 - RNA, 19 nt, Homo sapiens
  misc_RNA (1)...(19): siRNA sense strand
gggaacagcaguaaaggua

SEQ ID NO: 1915468 - RNA, 19 nt, Homo sapiens
  misc_RNA (1)...(19): siRNA sense strand
gagauggaauuggcuauga

SEQ ID NO: 1915469 - RNA, 19 nt, Homo sapiens
  misc_RNA (1)...(19): siRNA sense strand
gaagcaagaaagcauuuaa

SEQ ID NO: 1915470 - RNA, 19 nt, Homo sapiens
  misc_RNA (1)...(19): siRNA sense strand
agaaagaacuggagaugca

SEQ ID NO: 1915471 - RNA, 19 nt, Homo sapiens
  misc_RNA (1)...(19): siRNA sense strand
gcugcagaguucagacuua

SEQ ID NO: 1915472 - RNA, 19 nt, Homo sapiens
  misc_RNA (1)...(19): siRNA sense strand
ccaaugcccucaugaugga

SEQ ID NO: 1915473 - RNA, 19 nt, Homo sapiens
  misc_RNA (1)...(19): siRNA sense strand
gaaacaggcaaagaccuua

SEQ ID NO: 1915474 - RNA, 19 nt, Homo sapiens
  misc_RNA (1)...(19): siRNA sense strand
ugaagaugcuggagaagga

SEQ ID NO: 1915475 - RNA, 19 nt, Homo sapiens
  misc_RNA (1)...(19): siRNA sense strand
ggaagggucccaagcaaga

SEQ ID NO: 1915476 - RNA, 19 nt, Homo sapiens
  misc_RNA (1)...(19): siRNA sense strand
caacaggaucauuaccuua

SEQ ID NO: 1915477 - RNA, 19 nt, Homo sapiens
  misc_RNA (1)...(19): siRNA sense strand
gcagcuggaugaccucaga

SEQ ID NO: 1915478 - RNA, 19 nt, Homo sapiens
  misc_RNA (1)...(19): siRNA sense strand
gaagagacacaauuacgau

SEQ ID NO: 1915479 - RNA, 19 nt, Homo sapiens
  misc_RNA (1)...(19): siRNA sense strand
ccucagagcucucaagcau

SEQ ID NO: 1915480 - RNA, 19 nt, Homo sapiens
  misc_RNA (1)...(19): siRNA sense strand
gaagaagaaggagccauaa

SEQ ID NO: 1915481 - RNA, 19 nt, Homo sapiens
  misc_RNA (1)...(19): siRNA sense strand
agcaugaacuugccuuuaa

SEQ ID NO: 1915482 - RNA, 19 nt, Homo sapiens
  misc_RNA (1)...(19): siRNA sense strand
ugaaggagacggucagauu

SEQ ID NO: 1915483 - RNA, 19 nt, Homo sapiens
  misc_RNA (1)...(19): siRNA sense strand
ucugaaacauggcuugaaa

SEQ ID NO: 1915484 - RNA, 19 nt, Homo sapiens
  misc_RNA (1)...(19): siRNA sense strand
gaugccaauuucuguauga

SEQ ID NO: 1915485 - RNA, 19 nt, Homo sapiens
  misc_RNA (1)...(19): siRNA sense strand
ccaucuaccuuugcaaauu

SEQ ID NO: 1915486 - RNA, 19 nt, Homo sapiens
  misc_RNA (1)...(19): siRNA sense strand
gaagaacugaacagacauu

SEQ ID NO: 1915487 - RNA, 19 nt, Homo sapiens
  misc_RNA (1)...(19): siRNA sense strand
agaagaaggagccauaauu

SEQ ID NO: 1915488 - RNA, 19 nt, Homo sapiens
  misc_RNA (1)...(19): siRNA sense strand
gaacauggccaagcugagu

SEQ ID NO: 1915489 - RNA, 19 nt, Homo sapiens
  misc_RNA (1)...(19): siRNA sense strand
gcaauucuuuguggugaug

SEQ ID NO: 1915490 - RNA, 19 nt, Homo sapiens
  misc_RNA (1)...(19): siRNA sense strand
ggacuuaagacaccaguag

SEQ ID NO: 1915491 - RNA, 19 nt, Homo sapiens
  misc_RNA (1)...(19): siRNA sense strand
agagaagacuaaucagaug

SEQ ID NO: 1915492 - RNA, 19 nt, Homo sapiens
  misc_RNA (1)...(19): siRNA sense strand
ccuuuaagcugcagaguuc

SEQ ID NO: 1915493 - RNA, 19 nt, Homo sapiens
  misc_RNA (1)...(19): siRNA sense strand
cuaugaagaugcuggagaa

SEQ ID NO: 1915494 - RNA, 19 nt, Homo sapiens
  misc_RNA (1)...(19): siRNA sense strand
gaacuggagaugcagauca

SEQ ID NO: 1915495 - RNA, 19 nt, Homo sapiens
  misc_RNA (1)...(19): siRNA sense strand
ccagaagaacuauguagaa

SEQ ID NO: 1915496 - RNA, 19 nt, Homo sapiens
  misc_RNA (1)...(19): siRNA sense strand
caucuaccuuugcaaauuc

SEQ ID NO: 1915497 - RNA, 19 nt, Homo sapiens
  misc_RNA (1)...(19): siRNA sense strand
cagcaaguguuaaagaucu

SEQ ID NO: 1915498 - RNA, 19 nt, Homo sapiens
  misc_RNA (1)...(19): siRNA sense strand
gcagaagggcaagcacuaa

SEQ ID NO: 1915499 - RNA, 19 nt, Homo sapiens
  misc_RNA (1)...(19): siRNA sense strand
gaaauggaacgaguuaaag

SEQ ID NO: 1915500 - RNA, 19 nt, Homo sapiens
  misc_RNA (1)...(19): siRNA sense strand
cagaagaacuauguagaag

SEQ ID NO: 1915501 - RNA, 19 nt, Homo sapiens
  misc_RNA (1)...(19): siRNA sense strand
gaguucagacuuaggagua

SEQ ID NO: 1915502 - RNA, 19 nt, Homo sapiens
  misc_RNA (1)...(19): siRNA sense strand
acgauuggauguugagaaa

SEQ ID NO: 1915503 - RNA, 19 nt, Homo sapiens
  misc_RNA (1)...(19): siRNA sense strand
agaaauggaacgaguuaaa

SEQ ID NO: 1915504 - RNA, 19 nt, Homo sapiens
  misc_RNA (1)...(19): siRNA sense strand
uccagaagccgcagagaua

SEQ ID NO: 1915505 - RNA, 19 nt, Homo sapiens
  misc_RNA (1)...(19): siRNA sense strand
gcaugaacuugccuuuaag

SEQ ID NO: 1915506 - RNA, 19 nt, Homo sapiens
  misc_RNA (1)...(19): siRNA sense strand
cccaugaagauccuaauua

SEQ ID NO: 1915507 - RNA, 19 nt, Homo sapiens
  misc_RNA (1)...(19): siRNA sense strand
gaccaucuaccuuugcaaa

SEQ ID NO: 1915508 - RNA, 19 nt, Homo sapiens
  misc_RNA (1)...(19): siRNA sense strand
uaugaaaggagaagacuug

SEQ ID NO: 1915509 - RNA, 19 nt, Homo sapiens
  misc_RNA (1)...(19): siRNA sense strand
gcagaguucagacuuagga

SEQ ID NO: 1915510 - RNA, 19 nt, Homo sapiens
  misc_RNA (1)...(19): siRNA sense strand
agaaggaugucugugagaa

SEQ ID NO: 1915511 - RNA, 19 nt, Homo sapiens
  misc_RNA (1)...(19): siRNA sense strand
aggcaaagaccuuaaauag

SEQ ID NO: 1915512 - RNA, 19 nt, Homo sapiens
  misc_RNA (1)...(19): siRNA sense strand
gauggagcacugucugaaa

SEQ ID NO: 1915513 - RNA, 19 nt, Homo sapiens
  misc_RNA (1)...(19): siRNA sense strand
uggaagagaagacuaauca

SEQ ID NO: 1915514 - RNA, 19 nt, Homo sapiens
  misc_RNA (1)...(19): siRNA sense strand
acaacaggaucauuaccuu

SEQ ID NO: 1915515 - RNA, 19 nt, Homo sapiens
  misc_RNA (1)...(19): siRNA sense strand
gaacuucucagugaauucu

SEQ ID NO: 1915516 - RNA, 19 nt, Homo sapiens
  misc_RNA (1)...(19): siRNA sense strand
gcagagauaacagcaagug

SEQ ID NO: 1915517 - RNA, 19 nt, Homo sapiens
  misc_RNA (1)...(19): siRNA sense strand
caggcaaagaccuuaaaua

SEQ ID NO: 1915518 - RNA, 19 nt, Homo sapiens
  misc_RNA (1)...(19): siRNA sense strand
gaacaaagugaaaaggauu

SEQ ID NO: 1915519 - RNA, 19 nt, Homo sapiens
  misc_RNA (1)...(19): siRNA sense strand
gaaugcuacuguaaacaac

SEQ ID NO: 1915520 - RNA, 19 nt, Homo sapiens
  misc_RNA (1)...(19): siRNA sense strand
ugaaugcuacuguaaacaa

SEQ ID NO: 1915521 - RNA, 19 nt, Homo sapiens
  misc_RNA (1)...(19): siRNA sense strand
ggacgggaacagcaguaaa

SEQ ID NO: 1915522 - RNA, 19 nt, Homo sapiens
  misc_RNA (1)...(19): siRNA sense strand
aaagaucuuccaggacuua

SEQ ID NO: 1915523 - RNA, 19 nt, Homo sapiens
  misc_RNA (1)...(19): siRNA sense strand
gaacccaaugcccucauga

SEQ ID NO: 1915524 - RNA, 19 nt, Homo sapiens
  misc_RNA (1)...(19): siRNA sense strand
ggcaaagaccuuaaauagu

SEQ ID NO: 1915525 - RNA, 19 nt, Homo sapiens
  misc_RNA (1)...(19): siRNA sense strand
ugaaaaggauuuggugaaa

SEQ ID NO: 1915526 - RNA, 19 nt, Homo sapiens
  misc_RNA (1)...(19): siRNA sense strand
gaacuauguagaagaacug

SEQ ID NO: 1915527 - RNA, 19 nt, Homo sapiens
  misc_RNA (1)...(19): siRNA sense strand
ccagaagccgcagagauaa

SEQ ID NO: 1915528 - RNA, 19 nt, Homo sapiens
  misc_RNA (1)...(19): siRNA sense strand
acuaaacagucgcuuggaa

SEQ ID NO: 1915529 - RNA, 19 nt, Homo sapiens
  misc_RNA (1)...(19): siRNA sense strand
ggaccagaagaacuaugua

SEQ ID NO: 1915530 - RNA, 19 nt, Homo sapiens
  misc_RNA (1)...(19): siRNA sense strand
gagaccaucuaccuuugca

SEQ ID NO: 1915531 - RNA, 19 nt, Homo sapiens
  misc_RNA (1)...(19): siRNA sense strand
uaagacaccaguagguaga

SEQ ID NO: 1915532 - RNA, 19 nt, Homo sapiens
  misc_RNA (1)...(19): siRNA sense strand
acccagagccuacccauga

SEQ ID NO: 1915533 - RNA, 19 nt, Homo sapiens
  misc_RNA (1)...(19): siRNA sense strand
uaaagaucuuccaggacuu

SEQ ID NO: 1915534 - RNA, 19 nt, Homo sapiens
  misc_RNA (1)...(19): siRNA sense strand
uaaacagucgcuuggaaga

SEQ ID NO: 1915535 - RNA, 19 nt, Homo sapiens
  misc_RNA (1)...(19): siRNA sense strand
ucacacaggcugccaugga

SEQ ID NO: 1915536 - RNA, 19 nt, Homo sapiens
  misc_RNA (1)...(19): siRNA sense strand
gcaagacagaacugcagaa

SEQ ID NO: 1915537 - RNA, 19 nt, Homo sapiens
  misc_RNA (1)...(19): siRNA sense strand
aaacaggcaaagaccuuaa

SEQ ID NO: 1915538 - RNA, 19 nt, Homo sapiens
  misc_RNA (1)...(19): siRNA sense strand
gcuuggaagagaagacuaa

SEQ ID NO: 1915539 - RNA, 19 nt, Homo sapiens
  misc_RNA (1)...(19): siRNA sense strand
gagaaggaugucugugaga

SEQ ID NO: 1915540 - RNA, 19 nt, Homo sapiens
  misc_RNA (1)...(19): siRNA sense strand
ggcaaaaguagaugcauua

SEQ ID NO: 1915541 - RNA, 19 nt, Homo sapiens
  misc_RNA (1)...(19): siRNA sense strand
ugaaacaggcaaagaccuu

SEQ ID NO: 1915542 - RNA, 19 nt, Homo sapiens
  misc_RNA (1)...(19): siRNA sense strand
guucagacuuaggaguaaa

SEQ ID NO: 1915543 - RNA, 19 nt, Homo sapiens
  misc_RNA (1)...(19): siRNA sense strand
gcaugaggcaggagaugga

SEQ ID NO: 1915544 - RNA, 19 nt, Homo sapiens
  misc_RNA (1)...(19): siRNA sense strand
aaauggaacgaguuaaaga

SEQ ID NO: 1915545 - RNA, 19 nt, Homo sapiens
  misc_RNA (1)...(19): siRNA sense strand
caggaucauuaccuuacaa

SEQ ID NO: 1915546 - RNA, 19 nt, Homo sapiens
  misc_RNA (1)...(19): siRNA sense strand
caaacacaguggcggagaa

SEQ ID NO: 1915547 - RNA, 19 nt, Homo sapiens
  misc_RNA (1)...(19): siRNA sense strand
gggcaacgccaucgccuuu

SEQ ID NO: 1915548 - RNA, 19 nt, Homo sapiens
  misc_RNA (1)...(19): siRNA sense strand
gcgaugcgaucuccuaugc

SEQ ID NO: 1915549 - RNA, 19 nt, Homo sapiens
  misc_RNA (1)...(19): siRNA sense strand
gcguguggaugaucaugaa

SEQ ID NO: 1915550 - RNA, 19 nt, Homo sapiens
  misc_RNA (1)...(19): siRNA sense strand
ucucuggccucuucaacug

SEQ ID NO: 1915551 - RNA, 19 nt, Homo sapiens
  misc_RNA (1)...(19): siRNA sense strand
gcugccaguucaucgaguu

SEQ ID NO: 1915552 - RNA, 19 nt, Homo sapiens
  misc_RNA (1)...(19): siRNA sense strand
cgcgaucucuggccucuuc

SEQ ID NO: 1915553 - RNA, 19 nt, Homo sapiens
  misc_RNA (1)...(19): siRNA sense strand
gcaggcggaugaggagaag

SEQ ID NO: 1915554 - RNA, 19 nt, Homo sapiens
  misc_RNA (1)...(19): siRNA sense strand
agaggcagcaggcggauga

SEQ ID NO: 1915555 - RNA, 19 nt, Homo sapiens
  misc_RNA (1)...(19): siRNA sense strand
cauccacccucugaacauc

SEQ ID NO: 1915556 - RNA, 19 nt, Homo sapiens
  misc_RNA (1)...(19): siRNA sense strand
gaaugccuucaucuuguug

SEQ ID NO: 1915557 - RNA, 19 nt, Homo sapiens
  misc_RNA (1)...(19): siRNA sense strand
ucaucuuguugcuguguga

SEQ ID NO: 1915558 - RNA, 19 nt, Homo sapiens
  misc_RNA (1)...(19): siRNA sense strand
gaacaagcgugacuucucu

SEQ ID NO: 1915559 - RNA, 19 nt, Homo sapiens
  misc_RNA (1)...(19): siRNA sense strand
ugacggagcccuauaauga

SEQ ID NO: 1915560 - RNA, 19 nt, Homo sapiens
  misc_RNA (1)...(19): siRNA sense strand
acaaugagcucaaagugaa

SEQ ID NO: 1915561 - RNA, 19 nt, Homo sapiens
  misc_RNA (1)...(19): siRNA sense strand
ggaaggagaacaugaaguu

SEQ ID NO: 1915562 - RNA, 19 nt, Homo sapiens
  misc_RNA (1)...(19): siRNA sense strand
gggagaagcugauggagau

SEQ ID NO: 1915563 - RNA, 19 nt, Homo sapiens
  misc_RNA (1)...(19): siRNA sense strand
ccacaacucuucucaacga

SEQ ID NO: 1915564 - RNA, 19 nt, Homo sapiens
  misc_RNA (1)...(19): siRNA sense strand
auaaugaccucgugaaaga

SEQ ID NO: 1915565 - RNA, 19 nt, Homo sapiens
  misc_RNA (1)...(19): siRNA sense strand
ggaagcgggugucugagaa

SEQ ID NO: 1915566 - RNA, 19 nt, Homo sapiens
  misc_RNA (1)...(19): siRNA sense strand
gacgagcaguccaauauug

SEQ ID NO: 1915567 - RNA, 19 nt, Homo sapiens
  misc_RNA (1)...(19): siRNA sense strand
ugaaagaggagcucaauau

SEQ ID NO: 1915568 - RNA, 19 nt, Homo sapiens
  misc_RNA (1)...(19): siRNA sense strand
gaaagaggagcucaauaug

SEQ ID NO: 1915569 - RNA, 19 nt, Homo sapiens
  misc_RNA (1)...(19): siRNA sense strand
ggagaacagcccucaguuu

SEQ ID NO: 1915570 - RNA, 19 nt, Homo sapiens
  misc_RNA (1)...(19): siRNA sense strand
ccacgagaaugccaucuga

SEQ ID NO: 1915571 - RNA, 19 nt, Homo sapiens
  misc_RNA (1)...(19): siRNA sense strand
gagaacagcccucaguuuc

SEQ ID NO: 1915572 - RNA, 19 nt, Homo sapiens
  misc_RNA (1)...(19): siRNA sense strand
aagaggagcucaauaugau

SEQ ID NO: 1915573 - RNA, 19 nt, Homo sapiens
  misc_RNA (1)...(19): siRNA sense strand
gacuaucacucgcuucuau

SEQ ID NO: 1915574 - RNA, 19 nt, Homo sapiens
  misc_RNA (1)...(19): siRNA sense strand
gaagacgagcaguccaaua

SEQ ID NO: 1915575 - RNA, 19 nt, Homo sapiens
  misc_RNA (1)...(19): siRNA sense strand
ucacaauccuucuagacaa

SEQ ID NO: 1915576 - RNA, 19 nt, Homo sapiens
  misc_RNA (1)...(19): siRNA sense strand
ucaaggaugcggacaauga

SEQ ID NO: 1915577 - RNA, 19 nt, Homo sapiens
  misc_RNA (1)...(19): siRNA sense strand
gaccacaacucuucucaac

SEQ ID NO: 1915578 - RNA, 19 nt, Homo sapiens
  misc_RNA (1)...(19): siRNA sense strand
aaagaggagcucaauauga

SEQ ID NO: 1915579 - RNA, 19 nt, Homo sapiens
  misc_RNA (1)...(19): siRNA sense strand
gacaaugagcucaaaguga

SEQ ID NO: 1915580 - RNA, 19 nt, Homo sapiens
  misc_RNA (1)...(19): siRNA sense strand
gcucagccucccucaguua

SEQ ID NO: 1915581 - RNA, 19 nt, Homo sapiens
  misc_RNA (1)...(19): siRNA sense strand
ugacuucucugccuucaag

SEQ ID NO: 1915582 - RNA, 19 nt, Homo sapiens
  misc_RNA (1)...(19): siRNA sense strand
caucauccuucucaccaaa

SEQ ID NO: 1915583 - RNA, 19 nt, Homo sapiens
  misc_RNA (1)...(19): siRNA sense strand
ggacaaugagcucaaagug

SEQ ID NO: 1915584 - RNA, 19 nt, Homo sapiens
  misc_RNA (1)...(19): siRNA sense strand
caaguacccagaugucauu

SEQ ID NO: 1915585 - RNA, 19 nt, Homo sapiens
  misc_RNA (1)...(19): siRNA sense strand
aggagaacaugaaguuuga

SEQ ID NO: 1915586 - RNA, 19 nt, Homo sapiens
  misc_RNA (1)...(19): siRNA sense strand
gaaggagaacaugaaguuu

SEQ ID NO: 1915587 - RNA, 19 nt, Homo sapiens
  misc_RNA (1)...(19): siRNA sense strand
gccaguacaucucugacuu

SEQ ID NO: 1915588 - RNA, 19 nt, Homo sapiens
  misc_RNA (1)...(19): siRNA sense strand
gcaguccaauauuguagau

SEQ ID NO: 1915589 - RNA, 19 nt, Homo sapiens
  misc_RNA (1)...(19): siRNA sense strand
caacaccucccucacaauc

SEQ ID NO: 1915590 - RNA, 19 nt, Homo sapiens
  misc_RNA (1)...(19): siRNA sense strand
gauauucucuacgucaaag

SEQ ID NO: 1915591 - RNA, 19 nt, Homo sapiens
  misc_RNA (1)...(19): siRNA sense strand
uuagcaagcuccuggacuu

SEQ ID NO: 1915592 - RNA, 19 nt, Homo sapiens
  misc_RNA (1)...(19): siRNA sense strand
cugcacauucuccuaauua

SEQ ID NO: 1915593 - RNA, 19 nt, Homo sapiens
  misc_RNA (1)...(19): siRNA sense strand
ucgaggagaucaucaaguc

SEQ ID NO: 1915594 - RNA, 19 nt, Homo sapiens
  misc_RNA (1)...(19): siRNA sense strand
gaccaaaacuguagaggau

SEQ ID NO: 1915595 - RNA, 19 nt, Homo sapiens
  misc_RNA (1)...(19): siRNA sense strand
ugauggagauguugaaggu

SEQ ID NO: 1915596 - RNA, 19 nt, Homo sapiens
  misc_RNA (1)...(19): siRNA sense strand
gcgcuaugcccgcaagauu

SEQ ID NO: 1915597 - RNA, 19 nt, Homo sapiens
  misc_RNA (1)...(19): siRNA sense strand
ccacccacauggagaacuu

SEQ ID NO: 1915598 - RNA, 19 nt, Homo sapiens
  misc_RNA (1)...(19): siRNA sense strand
gucaacaccucccucacaa

SEQ ID NO: 1915599 - RNA, 19 nt, Homo sapiens
  misc_RNA (1)...(19): siRNA sense strand
gcuaugcccgcaagauuga

SEQ ID NO: 1915600 - RNA, 19 nt, Homo sapiens
  misc_RNA (1)...(19): siRNA sense strand
gacgagaccacaacucuuc

SEQ ID NO: 1915601 - RNA, 19 nt, Homo sapiens
  misc_RNA (1)...(19): siRNA sense strand
gcagggaaggagaacauga

SEQ ID NO: 1915602 - RNA, 19 nt, Homo sapiens
  misc_RNA (1)...(19): siRNA sense strand
cuccaggacugcuucauga

SEQ ID NO: 1915603 - RNA, 19 nt, Homo sapiens
  misc_RNA (1)...(19): siRNA sense strand
gcugcacauucuccuaauu

SEQ ID NO: 1915604 - RNA, 19 nt, Homo sapiens
  misc_RNA (1)...(19): siRNA sense strand
caggagauucgcacuguuu

SEQ ID NO: 1915605 - RNA, 19 nt, Homo sapiens
  misc_RNA (1)...(19): siRNA sense strand
gauaauggaaagcggcuau

SEQ ID NO: 1915606 - RNA, 19 nt, Homo sapiens
  misc_RNA (1)...(19): siRNA sense strand
gcccucaguuucccauaga

SEQ ID NO: 1915607 - RNA, 19 nt, Homo sapiens
  misc_RNA (1)...(19): siRNA sense strand
ggucaacaccucccucaca

SEQ ID NO: 1915608 - RNA, 19 nt, Homo sapiens
  misc_RNA (1)...(19): siRNA sense strand
caaagccucccacgagaau

SEQ ID NO: 1915609 - RNA, 19 nt, Homo sapiens
  misc_RNA (1)...(19): siRNA sense strand
gcaccacccacauggagaa

SEQ ID NO: 1915610 - RNA, 19 nt, Homo sapiens
  misc_RNA (1)...(19): siRNA sense strand
gccaggagauucgcacugu

SEQ ID NO: 1915611 - RNA, 19 nt, Homo sapiens
  misc_RNA (1)...(19): siRNA sense strand
caccaaauucuuuaugcua

SEQ ID NO: 1915612 - RNA, 19 nt, Homo sapiens
  misc_RNA (1)...(19): siRNA sense strand
cauuggcauugucaucuuu

SEQ ID NO: 1915613 - RNA, 19 nt, Homo sapiens
  misc_RNA (1)...(19): siRNA sense strand
gagaacaugaaguuugaga

SEQ ID NO: 1915614 - RNA, 19 nt, Homo sapiens
  misc_RNA (1)...(19): siRNA sense strand
gcaucccgguguucgaaga

SEQ ID NO: 1915615 - RNA, 19 nt, Homo sapiens
  misc_RNA (1)...(19): siRNA sense strand
ugaaguggacggacaagga

SEQ ID NO: 1915616 - RNA, 19 nt, Homo sapiens
  misc_RNA (1)...(19): siRNA sense strand
aagacgagcaguccaauau

SEQ ID NO: 1915617 - RNA, 19 nt, Homo sapiens
  misc_RNA (1)...(19): siRNA sense strand
ggacgagaccacaacucuu

SEQ ID NO: 1915618 - RNA, 19 nt, Homo sapiens
  misc_RNA (1)...(19): siRNA sense strand
ggugcugucgggcauauuu

SEQ ID NO: 1915619 - RNA, 19 nt, Homo sapiens
  misc_RNA (1)...(19): siRNA sense strand
guaacuccuugcugcacaa

SEQ ID NO: 1915620 - RNA, 19 nt, Homo sapiens
  misc_RNA (1)...(19): siRNA sense strand
ucaacgagcguaacuccuu

SEQ ID NO: 1915621 - RNA, 19 nt, Homo sapiens
  misc_RNA (1)...(19): siRNA sense strand
uugacgagcacaauaagua

SEQ ID NO: 1915622 - RNA, 19 nt, Homo sapiens
  misc_RNA (1)...(19): siRNA sense strand
guacccagaugucauucag

SEQ ID NO: 1915623 - RNA, 19 nt, Homo sapiens
  misc_RNA (1)...(19): siRNA sense strand
ccauuggcauugucaucuu

SEQ ID NO: 1915624 - RNA, 19 nt, Homo sapiens
  misc_RNA (1)...(19): siRNA sense strand
gagaagaacaagcgugacu

SEQ ID NO: 1915625 - RNA, 19 nt, Homo sapiens
  misc_RNA (1)...(19): siRNA sense strand
aguccgacauguacacuga

SEQ ID NO: 1915626 - RNA, 19 nt, Homo sapiens
  misc_RNA (1)...(19): siRNA sense strand
cgagcaguccaauauugua

SEQ ID NO: 1915627 - RNA, 19 nt, Homo sapiens
  misc_RNA (1)...(19): siRNA sense strand
ugucggagauaauggaaag

SEQ ID NO: 1915628 - RNA, 19 nt, Homo sapiens
  misc_RNA (1)...(19): siRNA sense strand
ccaaaacuguagaggauau

SEQ ID NO: 1915629 - RNA, 19 nt, Homo sapiens
  misc_RNA (1)...(19): siRNA sense strand
gugaaagaggagcucaaua

SEQ ID NO: 1915630 - RNA, 19 nt, Homo sapiens
  misc_RNA (1)...(19): siRNA sense strand
gagauucgcacuguuuaca

SEQ ID NO: 1915631 - RNA, 19 nt, Homo sapiens
  misc_RNA (1)...(19): siRNA sense strand
gccaacaucauccuucuca

SEQ ID NO: 1915632 - RNA, 19 nt, Homo sapiens
  misc_RNA (1)...(19): siRNA sense strand
agaagcugauggagauguu

SEQ ID NO: 1915633 - RNA, 19 nt, Homo sapiens
  misc_RNA (1)...(19): siRNA sense strand
aaggagaacaugaaguuug

SEQ ID NO: 1915634 - RNA, 19 nt, Homo sapiens
  misc_RNA (1)...(19): siRNA sense strand
ggacucacugcucuucaug

SEQ ID NO: 1915635 - RNA, 19 nt, Homo sapiens
  misc_RNA (1)...(19): siRNA sense strand
gaaggugacggagcccuau

SEQ ID NO: 1915636 - RNA, 19 nt, Homo sapiens
  misc_RNA (1)...(19): siRNA sense strand
gaacuguggcaccgagaag

SEQ ID NO: 1915637 - RNA, 19 nt, Homo sapiens
  misc_RNA (1)...(19): siRNA sense strand
gauucgcacuguuuacaac

SEQ ID NO: 1915638 - RNA, 19 nt, Homo sapiens
  misc_RNA (1)...(19): siRNA sense strand
uggagaacuuggccgagaa

SEQ ID NO: 1915639 - RNA, 19 nt, Homo sapiens
  misc_RNA (1)...(19): siRNA sense strand
gagcaguccaauauuguag

SEQ ID NO: 1915640 - RNA, 19 nt, Homo sapiens
  misc_RNA (1)...(19): siRNA sense strand
ggccucaaccucgggcuua

SEQ ID NO: 1915641 - RNA, 19 nt, Homo sapiens
  misc_RNA (1)...(19): siRNA sense strand
ccaggagauucgcacuguu

SEQ ID NO: 1915642 - RNA, 19 nt, Homo sapiens
  misc_RNA (1)...(19): siRNA sense strand
cagggaaggagaacaugaa

SEQ ID NO: 1915643 - RNA, 19 nt, Homo sapiens
  misc_RNA (1)...(19): siRNA sense strand
caacaccaugucggagaua

SEQ ID NO: 1915644 - RNA, 19 nt, Homo sapiens
  misc_RNA (1)...(19): siRNA sense strand
ucaacaccaugucggagau

SEQ ID NO: 1915645 - RNA, 19 nt, Homo sapiens
  misc_RNA (1)...(19): siRNA sense strand
ucauccuucucaccaaauu

SEQ ID NO: 1915646 - RNA, 19 nt, Homo sapiens
  misc_RNA (1)...(19): siRNA sense strand
caguacaucucugacuuca

SEQ ID NO: 1915647 - RNA, 19 nt, Homo sapiens
  misc_RNA (1)...(19): siRNA sense strand
ggacggacaaggacucacu

SEQ ID NO: 1915648 - RNA, 19 nt, Homo sapiens
  misc_RNA (1)...(19): siRNA sense strand
gagaaggagaggcgcuaug

SEQ ID NO: 1915649 - RNA, 19 nt, Homo sapiens
  misc_RNA (1)...(19): siRNA sense strand
gcuccaggacugcuucaug

SEQ ID NO: 1915650 - RNA, 19 nt, Homo sapiens
  misc_RNA (1)...(19): siRNA sense strand
ugcagaagguaaacaacga

SEQ ID NO: 1915651 - RNA, 19 nt, Homo sapiens
  misc_RNA (1)...(19): siRNA sense strand
cuaucacucgcuucuauaa

SEQ ID NO: 1915652 - RNA, 19 nt, Homo sapiens
  misc_RNA (1)...(19): siRNA sense strand
cuucucaccaaauucuuua

SEQ ID NO: 1915653 - RNA, 19 nt, Homo sapiens
  misc_RNA (1)...(19): siRNA sense strand
uaccuguacacccgaaaua

SEQ ID NO: 1915654 - RNA, 19 nt, Homo sapiens
  misc_RNA (1)...(19): siRNA sense strand
cuucaaggaugcggacaau

SEQ ID NO: 1915655 - RNA, 19 nt, Homo sapiens
  misc_RNA (1)...(19): siRNA sense strand
cuauaaugaccucgugaaa

SEQ ID NO: 1915656 - RNA, 19 nt, Homo sapiens
  misc_RNA (1)...(19): siRNA sense strand
caaauucuuuaugcuacuc

SEQ ID NO: 1915657 - RNA, 19 nt, Homo sapiens
  misc_RNA (1)...(19): siRNA sense strand
ccaaauucuuuaugcuacu

SEQ ID NO: 1915658 - RNA, 19 nt, Homo sapiens
  misc_RNA (1)...(19): siRNA sense strand
gaacacugcuuucuaauuc

SEQ ID NO: 1915659 - RNA, 19 nt, Homo sapiens
  misc_RNA (1)...(19): siRNA sense strand
gaaaucacagucuccaaua

SEQ ID NO: 1915660 - RNA, 19 nt, Homo sapiens
  misc_RNA (1)...(19): siRNA sense strand
gaagaaggaucccaaugag

SEQ ID NO: 1915661 - RNA, 19 nt, Homo sapiens
  misc_RNA (1)...(19): siRNA sense strand
ugaagcaacucgcagcaua

SEQ ID NO: 1915662 - RNA, 19 nt, Homo sapiens
  misc_RNA (1)...(19): siRNA sense strand
caacuugguuugaauaugg

SEQ ID NO: 1915663 - RNA, 19 nt, Homo sapiens
  misc_RNA (1)...(19): siRNA sense strand
ggugagaacauguauauga

SEQ ID NO: 1915664 - RNA, 19 nt, Homo sapiens
  misc_RNA (1)...(19): siRNA sense strand
cagcaaggauuuacucuuc

SEQ ID NO: 1915665 - RNA, 19 nt, Homo sapiens
  misc_RNA (1)...(19): siRNA sense strand
guaccuaaguucccacuau

SEQ ID NO: 1915666 - RNA, 19 nt, Homo sapiens
  misc_RNA (1)...(19): siRNA sense strand
gggaaugaauccucaccua

SEQ ID NO: 1915667 - RNA, 19 nt, Homo sapiens
  misc_RNA (1)...(19): siRNA sense strand
ggaaugaauccucaccuaa

SEQ ID NO: 1915668 - RNA, 19 nt, Homo sapiens
  misc_RNA (1)...(19): siRNA sense strand
ggaccucccugaaaucaca

SEQ ID NO: 1915669 - RNA, 19 nt, Homo sapiens
  misc_RNA (1)...(19): siRNA sense strand
gacaaagcacuguaccuua

SEQ ID NO: 1915670 - RNA, 19 nt, Homo sapiens
  misc_RNA (1)...(19): siRNA sense strand
gcaaggauuuacucuucaa

SEQ ID NO: 1915671 - RNA, 19 nt, Homo sapiens
  misc_RNA (1)...(19): siRNA sense strand
ggaacacugcuuucuaauu

SEQ ID NO: 1915672 - RNA, 19 nt, Homo sapiens
  misc_RNA (1)...(19): siRNA sense strand
ggacaaagcacuguaccuu

SEQ ID NO: 1915673 - RNA, 19 nt, Homo sapiens
  misc_RNA (1)...(19): siRNA sense strand
gaagaugaaggcgaugaua

SEQ ID NO: 1915674 - RNA, 19 nt, Homo sapiens
  misc_RNA (1)...(19): siRNA sense strand
gcguuauucuuucgugaua

SEQ ID NO: 1915675 - RNA, 19 nt, Homo sapiens
  misc_RNA (1)...(19): siRNA sense strand
gaucaaugguggagagaag

SEQ ID NO: 1915676 - RNA, 19 nt, Homo sapiens
  misc_RNA (1)...(19): siRNA sense strand
ccacauggccagcugacua

SEQ ID NO: 1915677 - RNA, 19 nt, Homo sapiens
  misc_RNA (1)...(19): siRNA sense strand
gagccagccuuguauccaa

SEQ ID NO: 1915678 - RNA, 19 nt, Homo sapiens
  misc_RNA (1)...(19): siRNA sense strand
agaagaaggaucccaauga

SEQ ID NO: 1915679 - RNA, 19 nt, Homo sapiens
  misc_RNA (1)...(19): siRNA sense strand
ggacuggaauaacgacuac

SEQ ID NO: 1915680 - RNA, 19 nt, Homo sapiens
  misc_RNA (1)...(19): siRNA sense strand
gcaacucgcagcauacaga

SEQ ID NO: 1915681 - RNA, 19 nt, Homo sapiens
  misc_RNA (1)...(19): siRNA sense strand
gaagaaggaguaccugaag

SEQ ID NO: 1915682 - RNA, 19 nt, Homo sapiens
  misc_RNA (1)...(19): siRNA sense strand
gauggaacacugcuuucua

SEQ ID NO: 1915683 - RNA, 19 nt, Homo sapiens
  misc_RNA (1)...(19): siRNA sense strand
caacccgacuaucagacua

SEQ ID NO: 1915684 - RNA, 19 nt, Homo sapiens
  misc_RNA (1)...(19): siRNA sense strand
acaaagcacuguaccuuac

SEQ ID NO: 1915685 - RNA, 19 nt, Homo sapiens
  misc_RNA (1)...(19): siRNA sense strand
gaagcggccugccucugau

SEQ ID NO: 1915686 - RNA, 19 nt, Homo sapiens
  misc_RNA (1)...(19): siRNA sense strand
auggaacacugcuuucuaa

SEQ ID NO: 1915687 - RNA, 19 nt, Homo sapiens
  misc_RNA (1)...(19): siRNA sense strand
aaaccgaggcugcgaagaa

SEQ ID NO: 1915688 - RNA, 19 nt, Homo sapiens
  misc_RNA (1)...(19): siRNA sense strand
gaagaagaaggaucccaau

SEQ ID NO: 1915689 - RNA, 19 nt, Homo sapiens
  misc_RNA (1)...(19): siRNA sense strand
gcaccugaaugaaguugag

SEQ ID NO: 1915690 - RNA, 19 nt, Homo sapiens
  misc_RNA (1)...(19): siRNA sense strand
ggccagcugacuaccauua

SEQ ID NO: 1915691 - RNA, 19 nt, Homo sapiens
  misc_RNA (1)...(19): siRNA sense strand
aaacauggaccucccugaa

SEQ ID NO: 1915692 - RNA, 19 nt, Homo sapiens
  misc_RNA (1)...(19): siRNA sense strand
ucaccuaacugccaugcau

SEQ ID NO: 1915693 - RNA, 19 nt, Homo sapiens
  misc_RNA (1)...(19): siRNA sense strand
cuccucagcugaucaauuc

SEQ ID NO: 1915694 - RNA, 19 nt, Homo sapiens
  misc_RNA (1)...(19): siRNA sense strand
gcgaugauaccucuaagau

SEQ ID NO: 1915695 - RNA, 19 nt, Homo sapiens
  misc_RNA (1)...(19): siRNA sense strand
gaauaugggaggaagcaau

SEQ ID NO: 1915696 - RNA, 19 nt, Homo sapiens
  misc_RNA (1)...(19): siRNA sense strand
agaaggaacucaguacagu

SEQ ID NO: 1915697 - RNA, 19 nt, Homo sapiens
  misc_RNA (1)...(19): siRNA sense strand
acauggaccucccugaaau

SEQ ID NO: 1915698 - RNA, 19 nt, Homo sapiens
  misc_RNA (1)...(19): siRNA sense strand
gaaugaauccucaccuaac

SEQ ID NO: 1915699 - RNA, 19 nt, Homo sapiens
  misc_RNA (1)...(19): siRNA sense strand
aaaucacagucuccaauau

SEQ ID NO: 1915700 - RNA, 19 nt, Homo sapiens
  misc_RNA (1)...(19): siRNA sense strand
cgaagaaggaguaccugaa

SEQ ID NO: 1915701 - RNA, 19 nt, Homo sapiens
  misc_RNA (1)...(19): siRNA sense strand
gugggacgguuuaggagaa

SEQ ID NO: 1915702 - RNA, 19 nt, Homo sapiens
  misc_RNA (1)...(19): siRNA sense strand
gugagaacauguauaugag

SEQ ID NO: 1915703 - RNA, 19 nt, Homo sapiens
  misc_RNA (1)...(19): siRNA sense strand
ggaagcaagucugcaacuc

SEQ ID NO: 1915704 - RNA, 19 nt, Homo sapiens
  misc_RNA (1)...(19): siRNA sense strand
gugacugucucuauagcaa

SEQ ID NO: 1915705 - RNA, 19 nt, Homo sapiens
  misc_RNA (1)...(19): siRNA sense strand
ggcgaagucucuaaaauug

SEQ ID NO: 1915706 - RNA, 19 nt, Homo sapiens
  misc_RNA (1)...(19): siRNA sense strand
ucaccagcaucucaacaug

SEQ ID NO: 1915707 - RNA, 19 nt, Homo sapiens
  misc_RNA (1)...(19): siRNA sense strand
cuucaacauuccaccaauu

SEQ ID NO: 1915708 - RNA, 19 nt, Homo sapiens
  misc_RNA (1)...(19): siRNA sense strand
cacaaccgguggacuggaa

SEQ ID NO: 1915709 - RNA, 19 nt, Homo sapiens
  misc_RNA (1)...(19): siRNA sense strand
caacaaccgggaaugaauc

SEQ ID NO: 1915710 - RNA, 19 nt, Homo sapiens
  misc_RNA (1)...(19): siRNA sense strand
cuaauuccauuucugugau

SEQ ID NO: 1915711 - RNA, 19 nt, Homo sapiens
  misc_RNA (1)...(19): siRNA sense strand
ugaaaucacagucuccaau

SEQ ID NO: 1915712 - RNA, 19 nt, Homo sapiens
  misc_RNA (1)...(19): siRNA sense strand
ccaacaaccgggaaugaau

SEQ ID NO: 1915713 - RNA, 19 nt, Homo sapiens
  misc_RNA (1)...(19): siRNA sense strand
gaagcaauguuccccacaa

SEQ ID NO: 1915714 - RNA, 19 nt, Homo sapiens
  misc_RNA (1)...(19): siRNA sense strand
caagccgaauaaccaaaug

SEQ ID NO: 1915715 - RNA, 19 nt, Homo sapiens
  misc_RNA (1)...(19): siRNA sense strand
caggauggaacacugcuuu

SEQ ID NO: 1915716 - RNA, 19 nt, Homo sapiens
  misc_RNA (1)...(19): siRNA sense strand
gugaaccuguugacgugaa

SEQ ID NO: 1915717 - RNA, 19 nt, Homo sapiens
  misc_RNA (1)...(19): siRNA sense strand
agaagcggccugccucuga

SEQ ID NO: 1915718 - RNA, 19 nt, Homo sapiens
  misc_RNA (1)...(19): siRNA sense strand
gcagcaaggauuuacucuu

SEQ ID NO: 1915719 - RNA, 19 nt, Homo sapiens
  misc_RNA (1)...(19): siRNA sense strand
gaaggaguaccugaagcaa

SEQ ID NO: 1915720 - RNA, 19 nt, Homo sapiens
  misc_RNA (1)...(19): siRNA sense strand
uccaagagcuacagugaac

SEQ ID NO: 1915721 - RNA, 19 nt, Homo sapiens
  misc_RNA (1)...(19): siRNA sense strand
uauccaagagcuacaguga

SEQ ID NO: 1915722 - RNA, 19 nt, Homo sapiens
  misc_RNA (1)...(19): siRNA sense strand
gcuaccauuucauccacaa

SEQ ID NO: 1915723 - RNA, 19 nt, Homo sapiens
  misc_RNA (1)...(19): siRNA sense strand
caaccgguggacuggaaua

SEQ ID NO: 1915724 - RNA, 19 nt, Homo sapiens
  misc_RNA (1)...(19): siRNA sense strand
gcagcagccaggaaugaug

SEQ ID NO: 1915725 - RNA, 19 nt, Homo sapiens
  misc_RNA (1)...(19): siRNA sense strand
uaucaauccuacaucuaca

SEQ ID NO: 1915726 - RNA, 19 nt, Homo sapiens
  misc_RNA (1)...(19): siRNA sense strand
caccaugcagcaaggauuu

SEQ ID NO: 1915727 - RNA, 19 nt, Homo sapiens
  misc_RNA (1)...(19): siRNA sense strand
gaagcaacucgcagcauac

SEQ ID NO: 1915728 - RNA, 19 nt, Homo sapiens
  misc_RNA (1)...(19): siRNA sense strand
uaauuccauuucugugaug

SEQ ID NO: 1915729 - RNA, 19 nt, Homo sapiens
  misc_RNA (1)...(19): siRNA sense strand
ccgacuaucagacuauuau

SEQ ID NO: 1915730 - RNA, 19 nt, Homo sapiens
  misc_RNA (1)...(19): siRNA sense strand
uucaacauuccaccaauua

SEQ ID NO: 1915731 - RNA, 19 nt, Homo sapiens
  misc_RNA (1)...(19): siRNA sense strand
caacauuccaccaauuacu

SEQ ID NO: 1915732 - RNA, 19 nt, Homo sapiens
  misc_RNA (1)...(19): siRNA sense strand
gccuaugcguuauucuuuc

SEQ ID NO: 1915733 - RNA, 19 nt, Homo sapiens
  misc_RNA (1)...(19): siRNA sense strand
gaugccagauauacgaaac

SEQ ID NO: 1915734 - RNA, 19 nt, Homo sapiens
  misc_RNA (1)...(19): siRNA sense strand
aaagcacuguaccuuacuu

SEQ ID NO: 1915735 - RNA, 19 nt, Homo sapiens
  misc_RNA (1)...(19): siRNA sense strand
cccaggcaauggaguaugu

SEQ ID NO: 1915736 - RNA, 19 nt, Homo sapiens
  misc_RNA (1)...(19): siRNA sense strand
uaccuaaguucccacuauc

SEQ ID NO: 1915737 - RNA, 19 nt, Homo sapiens
  misc_RNA (1)...(19): siRNA sense strand
ccacucggcccuguaccua

SEQ ID NO: 1915738 - RNA, 19 nt, Homo sapiens
  misc_RNA (1)...(19): siRNA sense strand
aaucacagucuccaauaug

SEQ ID NO: 1915739 - RNA, 19 nt, Homo sapiens
  misc_RNA (1)...(19): siRNA sense strand
ucacccaggcaauggagua

SEQ ID NO: 1915740 - RNA, 19 nt, Homo sapiens
  misc_RNA (1)...(19): siRNA sense strand
gacuaucagacuauuauca

SEQ ID NO: 1915741 - RNA, 19 nt, Homo sapiens
  misc_RNA (1)...(19): siRNA sense strand
ggaaccagcuccccaugca

SEQ ID NO: 1915742 - RNA, 19 nt, Homo sapiens
  misc_RNA (1)...(19): siRNA sense strand
aggaguaccugaagcaacu

SEQ ID NO: 1915743 - RNA, 19 nt, Homo sapiens
  misc_RNA (1)...(19): siRNA sense strand
gcaacuccuucaccaucca

SEQ ID NO: 1915744 - RNA, 19 nt, Homo sapiens
  misc_RNA (1)...(19): siRNA sense strand
ccaggaaugaugccacaug

SEQ ID NO: 1915745 - RNA, 19 nt, Homo sapiens
  misc_RNA (1)...(19): siRNA sense strand
ucuaauuccauuucuguga

SEQ ID NO: 1915746 - RNA, 19 nt, Homo sapiens
  misc_RNA (1)...(19): siRNA sense strand
cuacuauugcaacaaguuu

SEQ ID NO: 1915747 - RNA, 19 nt, Homo sapiens
  misc_RNA (1)...(19): siRNA sense strand
ccaagccgaauaaccaaau

SEQ ID NO: 1915748 - RNA, 19 nt, Homo sapiens
  misc_RNA (1)...(19): siRNA sense strand
cgaagucucuaaaauugug

SEQ ID NO: 1915749 - RNA, 19 nt, Homo sapiens
  misc_RNA (1)...(19): siRNA sense strand
auuaaccagucacagcuaa

SEQ ID NO: 1915750 - RNA, 19 nt, Homo sapiens
  misc_RNA (1)...(19): siRNA sense strand
gauauacgaaacccagaag

SEQ ID NO: 1915751 - RNA, 19 nt, Homo sapiens
  misc_RNA (1)...(19): siRNA sense strand
aaugaauccucaccuaacu

SEQ ID NO: 1915752 - RNA, 19 nt, Homo sapiens
  misc_RNA (1)...(19): siRNA sense strand
uauacgaaacccagaagga

SEQ ID NO: 1915753 - RNA, 19 nt, Homo sapiens
  misc_RNA (1)...(19): siRNA sense strand
gguccagucugccuuacac

SEQ ID NO: 1915754 - RNA, 19 nt, Homo sapiens
  misc_RNA (1)...(19): siRNA sense strand
gccagcugacuaccauuaa

SEQ ID NO: 1915755 - RNA, 19 nt, Homo sapiens
  misc_RNA (1)...(19): siRNA sense strand
gaaguugagucugguuacc

SEQ ID NO: 1915756 - RNA, 19 nt, Homo sapiens
  misc_RNA (1)...(19): siRNA sense strand
auacgaaacccagaaggaa

SEQ ID NO: 1915757 - RNA, 19 nt, Homo sapiens
  misc_RNA (1)...(19): siRNA sense strand
aucuacagcugcacaaguu

SEQ ID NO: 1915758 - RNA, 19 nt, Homo sapiens
  misc_RNA (1)...(19): siRNA sense strand
ggagaacacccaccucuug

SEQ ID NO: 1915759 - RNA, 19 nt, Homo sapiens
  misc_RNA (1)...(19): siRNA sense strand
cagcauggccacccuuauu

SEQ ID NO: 1915760 - RNA, 19 nt, Homo sapiens
  misc_RNA (1)...(19): siRNA sense strand
caagauggacgugcacauu

SEQ ID NO: 1915761 - RNA, 19 nt, Homo sapiens
  misc_RNA (1)...(19): siRNA sense strand
aagauggacgugcacauua

SEQ ID NO: 1915762 - RNA, 19 nt, Homo sapiens
  misc_RNA (1)...(19): siRNA sense strand
ucuuggagguugugaauca

SEQ ID NO: 1915763 - RNA, 19 nt, Homo sapiens
  misc_RNA (1)...(19): siRNA sense strand
ccucagagcaugcagugaa

SEQ ID NO: 1915764 - RNA, 19 nt, Homo sapiens
  misc_RNA (1)...(19): siRNA sense strand
uagaggaguugaacguagu

SEQ ID NO: 1915765 - RNA, 19 nt, Homo sapiens
  misc_RNA (1)...(19): siRNA sense strand
ggaguugaacguaguagag

SEQ ID NO: 1915766 - RNA, 19 nt, Homo sapiens
  misc_RNA (1)...(19): siRNA sense strand
gcuagaggaguugaacgua

SEQ ID NO: 1915767 - RNA, 19 nt, Homo sapiens
  misc_RNA (1)...(19): siRNA sense strand
caggugcggguucagguua

SEQ ID NO: 1915768 - RNA, 19 nt, Homo sapiens
  misc_RNA (1)...(19): siRNA sense strand
uuauuggucuguccaucaa

SEQ ID NO: 1915769 - RNA, 19 nt, Homo sapiens
  misc_RNA (1)...(19): siRNA sense strand
ccaucaaggucaagcuucu

SEQ ID NO: 1915770 - RNA, 19 nt, Homo sapiens
  misc_RNA (1)...(19): siRNA sense strand
gcaggugcggguucagguu

SEQ ID NO: 1915771 - RNA, 19 nt, Homo sapiens
  misc_RNA (1)...(19): siRNA sense strand
cacugacgcuagaggaguu

SEQ ID NO: 1915772 - RNA, 19 nt, Homo sapiens
  misc_RNA (1)...(19): siRNA sense strand
agauggacgugcacauuac

SEQ ID NO: 1915773 - RNA, 19 nt, Homo sapiens
  misc_RNA (1)...(19): siRNA sense strand
cagcugcccuggagaacac

SEQ ID NO: 1915774 - RNA, 19 nt, Homo sapiens
  misc_RNA (1)...(19): siRNA sense strand
caucgacgcacgcgagauc

SEQ ID NO: 1915775 - RNA, 19 nt, Homo sapiens
  misc_RNA (1)...(19): siRNA sense strand
gcagcauggccacccuuau

SEQ ID NO: 1915776 - RNA, 19 nt, Homo sapiens
  misc_RNA (1)...(19): siRNA sense strand
uagagcaggugcggguuca

SEQ ID NO: 1915777 - RNA, 19 nt, Homo sapiens
  misc_RNA (1)...(19): siRNA sense strand
gcucacagcugccucaauc

SEQ ID NO: 1915778 - RNA, 19 nt, Homo sapiens
  misc_RNA (1)...(19): siRNA sense strand
ggaacgauucugucagcua

SEQ ID NO: 1915779 - RNA, 19 nt, Homo sapiens
  misc_RNA (1)...(19): siRNA sense strand
cggauuugcugugcuguuu

SEQ ID NO: 1915780 - RNA, 19 nt, Homo sapiens
  misc_RNA (1)...(19): siRNA sense strand
gaaaguguggacagcaaga

SEQ ID NO: 1915781 - RNA, 19 nt, Homo sapiens
  misc_RNA (1)...(19): siRNA sense strand
gauuugcugugcuguuugu

SEQ ID NO: 1915782 - RNA, 19 nt, Homo sapiens
  misc_RNA (1)...(19): siRNA sense strand
cccaugcucuuccuguauu

SEQ ID NO: 1915783 - RNA, 19 nt, Homo sapiens
  misc_RNA (1)...(19): siRNA sense strand
ucauccugcugaccaugua

SEQ ID NO: 1915784 - RNA, 19 nt, Homo sapiens
  misc_RNA (1)...(19): siRNA sense strand
ccaugcucuuccuguauuu

SEQ ID NO: 1915785 - RNA, 19 nt, Homo sapiens
  misc_RNA (1)...(19): siRNA sense strand
acgaaaguguggacagcaa

SEQ ID NO: 1915786 - RNA, 19 nt, Homo sapiens
  misc_RNA (1)...(19): siRNA sense strand
agaaauccaccagccauga

SEQ ID NO: 1915787 - RNA, 19 nt, Homo sapiens
  misc_RNA (1)...(19): siRNA sense strand
gaaauccaccagccaugac

SEQ ID NO: 1915788 - RNA, 19 nt, Homo sapiens
  misc_RNA (1)...(19): siRNA sense strand
ggugacugccauccgguuu

SEQ ID NO: 1915789 - RNA, 19 nt, Homo sapiens
  misc_RNA (1)...(19): siRNA sense strand
ugcagugugugguggacua

SEQ ID NO: 1915790 - RNA, 19 nt, Homo sapiens
  misc_RNA (1)...(19): siRNA sense strand
ggaaggaggugguggaaca

SEQ ID NO: 1915791 - RNA, 19 nt, Homo sapiens
  misc_RNA (1)...(19): siRNA sense strand
gaacaagggcugcugaaga

SEQ ID NO: 1915792 - RNA, 19 nt, Homo sapiens
  misc_RNA (1)...(19): siRNA sense strand
gaagaaagcccaggauuca

SEQ ID NO: 1915793 - RNA, 19 nt, Homo sapiens
  misc_RNA (1)...(19): siRNA sense strand
cggagaagcugcuggagua

SEQ ID NO: 1915794 - RNA, 19 nt, Homo sapiens
  misc_RNA (1)...(19): siRNA sense strand
uagcaaaggucaccgagaa

SEQ ID NO: 1915795 - RNA, 19 nt, Homo sapiens
  misc_RNA (1)...(19): siRNA sense strand
gaggugaggucgugcuuug

SEQ ID NO: 1915796 - RNA, 19 nt, Homo sapiens
  misc_RNA (1)...(19): siRNA sense strand
gcaagaaacgcaagucaga

SEQ ID NO: 1915797 - RNA, 19 nt, Homo sapiens
  misc_RNA (1)...(19): siRNA sense strand
gaugaaauaugcccugaag

SEQ ID NO: 1915798 - RNA, 19 nt, Homo sapiens
  misc_RNA (1)...(19): siRNA sense strand
agaacaagcugcagaagga

SEQ ID NO: 1915799 - RNA, 19 nt, Homo sapiens
  misc_RNA (1)...(19): siRNA sense strand
gaccugcucucuuugcaaa

SEQ ID NO: 1915800 - RNA, 19 nt, Homo sapiens
  misc_RNA (1)...(19): siRNA sense strand
aaagccgacuugaauauaa

SEQ ID NO: 1915801 - RNA, 19 nt, Homo sapiens
  misc_RNA (1)...(19): siRNA sense strand
ucgcagaccuccuguugaa

SEQ ID NO: 1915802 - RNA, 19 nt, Homo sapiens
  misc_RNA (1)...(19): siRNA sense strand
ggaaggcccugguggacau

SEQ ID NO: 1915803 - RNA, 19 nt, Homo sapiens
  misc_RNA (1)...(19): siRNA sense strand
gaagcacagucgcgaguuc

SEQ ID NO: 1915804 - RNA, 19 nt, Homo sapiens
  misc_RNA (1)...(19): siRNA sense strand
gagacgugauccgccauua

SEQ ID NO: 1915805 - RNA, 19 nt, Homo sapiens
  misc_RNA (1)...(19): siRNA sense strand
gaggaaauggaucaucuuu

SEQ ID NO: 1915806 - RNA, 19 nt, Homo sapiens
  misc_RNA (1)...(19): siRNA sense strand
cgaccgcuauggccuauug

SEQ ID NO: 1915807 - RNA, 19 nt, Homo sapiens
  misc_RNA (1)...(19): siRNA sense strand
caacagaagcucagagagu

SEQ ID NO: 1915808 - RNA, 19 nt, Homo sapiens
  misc_RNA (1)...(19): siRNA sense strand
ccagugaggaugagaauga

SEQ ID NO: 1915809 - RNA, 19 nt, Homo sapiens
  misc_RNA (1)...(19): siRNA sense strand
gguccgagaugaaauaugc

SEQ ID NO: 1915810 - RNA, 19 nt, Homo sapiens
  misc_RNA (1)...(19): siRNA sense strand
caaagccgacuugaauaua

SEQ ID NO: 1915811 - RNA, 19 nt, Homo sapiens
  misc_RNA (1)...(19): siRNA sense strand
gcaccaacaaccagaagaa

SEQ ID NO: 1915812 - RNA, 19 nt, Homo sapiens
  misc_RNA (1)...(19): siRNA sense strand
ggaacaggacaaaggcuaa

SEQ ID NO: 1915813 - RNA, 19 nt, Homo sapiens
  misc_RNA (1)...(19): siRNA sense strand
gaagaaggcaaugcugaga

SEQ ID NO: 1915814 - RNA, 19 nt, Homo sapiens
  misc_RNA (1)...(19): siRNA sense strand
cgacagcacugagcuccuu

SEQ ID NO: 1915815 - RNA, 19 nt, Homo sapiens
  misc_RNA (1)...(19): siRNA sense strand
aacaagggcugcugaagau

SEQ ID NO: 1915816 - RNA, 19 nt, Homo sapiens
  misc_RNA (1)...(19): siRNA sense strand
ggaaaagucugggagagaa

SEQ ID NO: 1915817 - RNA, 19 nt, Homo sapiens
  misc_RNA (1)...(19): siRNA sense strand
gcuauggccuauugaagca

SEQ ID NO: 1915818 - RNA, 19 nt, Homo sapiens
  misc_RNA (1)...(19): siRNA sense strand
gagccucgccagccucuuu

SEQ ID NO: 1915819 - RNA, 19 nt, Homo sapiens
  misc_RNA (1)...(19): siRNA sense strand
caaagcacccguucuccuu

SEQ ID NO: 1915820 - RNA, 19 nt, Homo sapiens
  misc_RNA (1)...(19): siRNA sense strand
ccccagagauggacgauua

SEQ ID NO: 1915821 - RNA, 19 nt, Homo sapiens
  misc_RNA (1)...(19): siRNA sense strand
gugaaccuauucucagaug

SEQ ID NO: 1915822 - RNA, 19 nt, Homo sapiens
  misc_RNA (1)...(19): siRNA sense strand
ccucacaguucccauguuc

SEQ ID NO: 1915823 - RNA, 19 nt, Homo sapiens
  misc_RNA (1)...(19): siRNA sense strand
gcagaccuccuguugaauc

SEQ ID NO: 1915824 - RNA, 19 nt, Homo sapiens
  misc_RNA (1)...(19): siRNA sense strand
gcucaaggaagacaaguuc

SEQ ID NO: 1915825 - RNA, 19 nt, Homo sapiens
  misc_RNA (1)...(19): siRNA sense strand
cgacuugaauauaauacuc

SEQ ID NO: 1915826 - RNA, 19 nt, Homo sapiens
  misc_RNA (1)...(19): siRNA sense strand
ccaccgcccucuaccacuu

SEQ ID NO: 1915827 - RNA, 19 nt, Homo sapiens
  misc_RNA (1)...(19): siRNA sense strand
gacaacagaagcucagaga

SEQ ID NO: 1915828 - RNA, 19 nt, Homo sapiens
  misc_RNA (1)...(19): siRNA sense strand
gcauccaccuccucaaguc

SEQ ID NO: 1915829 - RNA, 19 nt, Homo sapiens
  misc_RNA (1)...(19): siRNA sense strand
ucacaaagaagcccacauc

SEQ ID NO: 1915830 - RNA, 19 nt, Homo sapiens
  misc_RNA (1)...(19): siRNA sense strand
gcacugcuaagcucccaaa

SEQ ID NO: 1915831 - RNA, 19 nt, Homo sapiens
  misc_RNA (1)...(19): siRNA sense strand
caggucggcuggugaagga

SEQ ID NO: 1915832 - RNA, 19 nt, Homo sapiens
  misc_RNA (1)...(19): siRNA sense strand
ccagaucccugagacaaag

SEQ ID NO: 1915833 - RNA, 19 nt, Homo sapiens
  misc_RNA (1)...(19): siRNA sense strand
ucccaaagcaguucaaguu

SEQ ID NO: 1915834 - RNA, 19 nt, Homo sapiens
  misc_RNA (1)...(19): siRNA sense strand
gagcaggagacgcgacuug

SEQ ID NO: 1915835 - RNA, 19 nt, Homo sapiens
  misc_RNA (1)...(19): siRNA sense strand
ggaaggugaggacaacaga

SEQ ID NO: 1915836 - RNA, 19 nt, Homo sapiens
  misc_RNA (1)...(19): siRNA sense strand
ugacggacgauucugauga

SEQ ID NO: 1915837 - RNA, 19 nt, Homo sapiens
  misc_RNA (1)...(19): siRNA sense strand
gagcguguuuggccacauc

SEQ ID NO: 1915838 - RNA, 19 nt, Homo sapiens
  misc_RNA (1)...(19): siRNA sense strand
gcagugccuucuucagucu

SEQ ID NO: 1915839 - RNA, 19 nt, Homo sapiens
  misc_RNA (1)...(19): siRNA sense strand
gcuaguggccuucucaucu

SEQ ID NO: 1915840 - RNA, 19 nt, Homo sapiens
  misc_RNA (1)...(19): siRNA sense strand
ccaagcagcccgagaaugc

SEQ ID NO: 1915841 - RNA, 19 nt, Homo sapiens
  misc_RNA (1)...(19): siRNA sense strand
augagaagcugaccuugga

SEQ ID NO: 1915842 - RNA, 19 nt, Homo sapiens
  misc_RNA (1)...(19): siRNA sense strand
gccuggcgcucaaggaaga

SEQ ID NO: 1915843 - RNA, 19 nt, Homo sapiens
  misc_RNA (1)...(19): siRNA sense strand
cgaagaagcgcaagaaacg

SEQ ID NO: 1915844 - RNA, 19 nt, Homo sapiens
  misc_RNA (1)...(19): siRNA sense strand
cagaagaaagcccaggauu

SEQ ID NO: 1915845 - RNA, 19 nt, Homo sapiens
  misc_RNA (1)...(19): siRNA sense strand
ugucagcagugccuucuuc

SEQ ID NO: 1915846 - RNA, 19 nt, Homo sapiens
  misc_RNA (1)...(19): siRNA sense strand
gcccugaagcgucuaauca

SEQ ID NO: 1915847 - RNA, 19 nt, Homo sapiens
  misc_RNA (1)...(19): siRNA sense strand
ugaccaagcagcccgagaa

SEQ ID NO: 1915848 - RNA, 19 nt, Homo sapiens
  misc_RNA (1)...(19): siRNA sense strand
ccagccagcuaccuguguu

SEQ ID NO: 1915849 - RNA, 19 nt, Homo sapiens
  misc_RNA (1)...(19): siRNA sense strand
agaaagcacaggugaggaa

SEQ ID NO: 1915850 - RNA, 19 nt, Homo sapiens
  misc_RNA (1)...(19): siRNA sense strand
gcacagucgcgaguucuug

SEQ ID NO: 1915851 - RNA, 19 nt, Homo sapiens
  misc_RNA (1)...(19): siRNA sense strand
agaagaaggaugccaagga

SEQ ID NO: 1915852 - RNA, 19 nt, Homo sapiens
  misc_RNA (1)...(19): siRNA sense strand
gagaggacagugagaacga

SEQ ID NO: 1915853 - RNA, 19 nt, Homo sapiens
  misc_RNA (1)...(19): siRNA sense strand
agaagcugcuggaguaucu

SEQ ID NO: 1915854 - RNA, 19 nt, Homo sapiens
  misc_RNA (1)...(19): siRNA sense strand
gaaggugaggacaacagaa

SEQ ID NO: 1915855 - RNA, 19 nt, Homo sapiens
  misc_RNA (1)...(19): siRNA sense strand
ggacuucuucugggacauu

SEQ ID NO: 1915856 - RNA, 19 nt, Homo sapiens
  misc_RNA (1)...(19): siRNA sense strand
uggaucaucuuucgauugg

SEQ ID NO: 1915857 - RNA, 19 nt, Homo sapiens
  misc_RNA (1)...(19): siRNA sense strand
ggaccaggaggcacugaug

SEQ ID NO: 1915858 - RNA, 19 nt, Homo sapiens
  misc_RNA (1)...(19): siRNA sense strand
ccccaaaacugcagaagaa

SEQ ID NO: 1915859 - RNA, 19 nt, Homo sapiens
  misc_RNA (1)...(19): siRNA sense strand
uagaggugcugguggagau

SEQ ID NO: 1915860 - RNA, 19 nt, Homo sapiens
  misc_RNA (1)...(19): siRNA sense strand
ggauucaucgcuccacaug

SEQ ID NO: 1915861 - RNA, 19 nt, Homo sapiens
  misc_RNA (1)...(19): siRNA sense strand
agaagaaagcccaggauuc

SEQ ID NO: 1915862 - RNA, 19 nt, Homo sapiens
  misc_RNA (1)...(19): siRNA sense strand
gaccaggaggcacugauga

SEQ ID NO: 1915863 - RNA, 19 nt, Homo sapiens
  misc_RNA (1)...(19): siRNA sense strand
uggaggaggccuugacuga

SEQ ID NO: 1915864 - RNA, 19 nt, Homo sapiens
  misc_RNA (1)...(19): siRNA sense strand
aggcaaggcugucuuuggu

SEQ ID NO: 1915865 - RNA, 19 nt, Homo sapiens
  misc_RNA (1)...(19): siRNA sense strand
agacacaggagaagcagaa

SEQ ID NO: 1915866 - RNA, 19 nt, Homo sapiens
  misc_RNA (1)...(19): siRNA sense strand
gcagcuaauucuggaugug

SEQ ID NO: 1915867 - RNA, 19 nt, Homo sapiens
  misc_RNA (1)...(19): siRNA sense strand
gaccuccuguugaaucaca

SEQ ID NO: 1915868 - RNA, 19 nt, Homo sapiens
  misc_RNA (1)...(19): siRNA sense strand
ccgugaaccuauucucaga

SEQ ID NO: 1915869 - RNA, 19 nt, Homo sapiens
  misc_RNA (1)...(19): siRNA sense strand
gaaacgcaagucagaggau

SEQ ID NO: 1915870 - RNA, 19 nt, Homo sapiens
  misc_RNA (1)...(19): siRNA sense strand
caaaggucaccgagaacuu

SEQ ID NO: 1915871 - RNA, 19 nt, Homo sapiens
  misc_RNA (1)...(19): siRNA sense strand
gcgcuacugccacgacuug

SEQ ID NO: 1915872 - RNA, 19 nt, Homo sapiens
  misc_RNA (1)...(19): siRNA sense strand
gacggacgauucugaugag

SEQ ID NO: 1915873 - RNA, 19 nt, Homo sapiens
  misc_RNA (1)...(19): siRNA sense strand
caacgugaccaccgugaca

SEQ ID NO: 1915874 - RNA, 19 nt, Homo sapiens
  misc_RNA (1)...(19): siRNA sense strand
ggugggauccgugaaccua

SEQ ID NO: 1915875 - RNA, 19 nt, Homo sapiens
  misc_RNA (1)...(19): siRNA sense strand
ggagugcucgcccucuuuc

SEQ ID NO: 1915876 - RNA, 19 nt, Homo sapiens
  misc_RNA (1)...(19): siRNA sense strand
gacgaagaagcgcaagaaa

SEQ ID NO: 1915877 - RNA, 19 nt, Homo sapiens
  misc_RNA (1)...(19): siRNA sense strand
cuaguggccuucucaucug

SEQ ID NO: 1915878 - RNA, 19 nt, Homo sapiens
  misc_RNA (1)...(19): siRNA sense strand
ugggauccgugaaccuauu

SEQ ID NO: 1915879 - RNA, 19 nt, Homo sapiens
  misc_RNA (1)...(19): siRNA sense strand
cgaggaaggugaggacaac

SEQ ID NO: 1915880 - RNA, 19 nt, Homo sapiens
  misc_RNA (1)...(19): siRNA sense strand
ggacaagagcgaggaaggu

SEQ ID NO: 1915881 - RNA, 19 nt, Homo sapiens
  misc_RNA (1)...(19): siRNA sense strand
cagaccuccuguugaauca

SEQ ID NO: 1915882 - RNA, 19 nt, Homo sapiens
  misc_RNA (1)...(19): siRNA sense strand
cagcagugccuucuucagu

SEQ ID NO: 1915883 - RNA, 19 nt, Homo sapiens
  misc_RNA (1)...(19): siRNA sense strand
agacaaagcacccguucuc

SEQ ID NO: 1915884 - RNA, 19 nt, Homo sapiens
  misc_RNA (1)...(19): siRNA sense strand
gaacaggacaaaggcuaag

SEQ ID NO: 1915885 - RNA, 19 nt, Homo sapiens
  misc_RNA (1)...(19): siRNA sense strand
gcgcaagaaacgcaaguca

SEQ ID NO: 1915886 - RNA, 19 nt, Homo sapiens
  misc_RNA (1)...(19): siRNA sense strand
agaagaacaagcugcagaa

SEQ ID NO: 1915887 - RNA, 19 nt, Homo sapiens
  misc_RNA (1)...(19): siRNA sense strand
gaagaacaagcugcagaag

SEQ ID NO: 1915888 - RNA, 19 nt, Homo sapiens
  misc_RNA (1)...(19): siRNA sense strand
ucaguaagaagcggaagaa

SEQ ID NO: 1915889 - RNA, 19 nt, Homo sapiens
  misc_RNA (1)...(19): siRNA sense strand
aaaggucaccgagaacuug

SEQ ID NO: 1915890 - RNA, 19 nt, Homo sapiens
  misc_RNA (1)...(19): siRNA sense strand
gauaugggcuguacugaua

SEQ ID NO: 1915891 - RNA, 19 nt, Homo sapiens
  misc_RNA (1)...(19): siRNA sense strand
ggacaaaguugaccacaca

SEQ ID NO: 1915892 - RNA, 19 nt, Homo sapiens
  misc_RNA (1)...(19): siRNA sense strand
ggccugagcugcagcauaa

SEQ ID NO: 1915893 - RNA, 19 nt, Homo sapiens
  misc_RNA (1)...(19): siRNA sense strand
gaaugagguuuguggauuu

SEQ ID NO: 1915894 - RNA, 19 nt, Homo sapiens
  misc_RNA (1)...(19): siRNA sense strand
ggaaugagguuuguggauu

SEQ ID NO: 1915895 - RNA, 19 nt, Homo sapiens
  misc_RNA (1)...(19): siRNA sense strand
uacaaggccuucuacauua

SEQ ID NO: 1915896 - RNA, 19 nt, Homo sapiens
  misc_RNA (1)...(19): siRNA sense strand
caccagcacugccuuguua

SEQ ID NO: 1915897 - RNA, 19 nt, Homo sapiens
  misc_RNA (1)...(19): siRNA sense strand
cagcauaaguuuccucuga

SEQ ID NO: 1915898 - RNA, 19 nt, Homo sapiens
  misc_RNA (1)...(19): siRNA sense strand
ggaagacgauaccgcagaa

SEQ ID NO: 1915899 - RNA, 19 nt, Homo sapiens
  misc_RNA (1)...(19): siRNA sense strand
ccagaaguaugcugagaaa

SEQ ID NO: 1915900 - RNA, 19 nt, Homo sapiens
  misc_RNA (1)...(19): siRNA sense strand
ggagcaaacugggcagaaa

SEQ ID NO: 1915901 - RNA, 19 nt, Homo sapiens
  misc_RNA (1)...(19): siRNA sense strand
gcauaaguuuccucugauu

SEQ ID NO: 1915902 - RNA, 19 nt, Homo sapiens
  misc_RNA (1)...(19): siRNA sense strand
uuacgucacugggauaaua

SEQ ID NO: 1915903 - RNA, 19 nt, Homo sapiens
  misc_RNA (1)...(19): siRNA sense strand
guaacucccugcuguaauc

SEQ ID NO: 1915904 - RNA, 19 nt, Homo sapiens
  misc_RNA (1)...(19): siRNA sense strand
uuacaaggccuucuacauu

SEQ ID NO: 1915905 - RNA, 19 nt, Homo sapiens
  misc_RNA (1)...(19): siRNA sense strand
uguaaucccuaccaaauug

SEQ ID NO: 1915906 - RNA, 19 nt, Homo sapiens
  misc_RNA (1)...(19): siRNA sense strand
gaaagcaacccaguucauc

SEQ ID NO: 1915907 - RNA, 19 nt, Homo sapiens
  misc_RNA (1)...(19): siRNA sense strand
caagaggacagaagccaaa

SEQ ID NO: 1915908 - RNA, 19 nt, Homo sapiens
  misc_RNA (1)...(19): siRNA sense strand
uggcagaguuccaguuaau

SEQ ID NO: 1915909 - RNA, 19 nt, Homo sapiens
  misc_RNA (1)...(19): siRNA sense strand
gcagaguuccaguuaaugu

SEQ ID NO: 1915910 - RNA, 19 nt, Homo sapiens
  misc_RNA (1)...(19): siRNA sense strand
uuacuggccuggcagaguu

SEQ ID NO: 1915911 - RNA, 19 nt, Homo sapiens
  misc_RNA (1)...(19): siRNA sense strand
gcuguaaucccuaccaaau

SEQ ID NO: 1915912 - RNA, 19 nt, Homo sapiens
  misc_RNA (1)...(19): siRNA sense strand
caaacugggcagaaacaaa

SEQ ID NO: 1915913 - RNA, 19 nt, Homo sapiens
  misc_RNA (1)...(19): siRNA sense strand
ucaaagagacuguuacacu

SEQ ID NO: 1915914 - RNA, 19 nt, Homo sapiens
  misc_RNA (1)...(19): siRNA sense strand
ccacaugcacgugcccuua

SEQ ID NO: 1915915 - RNA, 19 nt, Homo sapiens
  misc_RNA (1)...(19): siRNA sense strand
ggagucacacgcaacuuug

SEQ ID NO: 1915916 - RNA, 19 nt, Homo sapiens
  misc_RNA (1)...(19): siRNA sense strand
gaggacagaagccaaacuu

SEQ ID NO: 1915917 - RNA, 19 nt, Homo sapiens
  misc_RNA (1)...(19): siRNA sense strand
cacgugcccuuaccuguga

SEQ ID NO: 1915918 - RNA, 19 nt, Homo sapiens
  misc_RNA (1)...(19): siRNA sense strand
ugagaaagcaacccaguuc

SEQ ID NO: 1915919 - RNA, 19 nt, Homo sapiens
  misc_RNA (1)...(19): siRNA sense strand
gagcagccuugcccagaag

SEQ ID NO: 1915920 - RNA, 19 nt, Homo sapiens
  misc_RNA (1)...(19): siRNA sense strand
ggcccucccucuuuaugaa

SEQ ID NO: 1915921 - RNA, 19 nt, Homo sapiens
  misc_RNA (1)...(19): siRNA sense strand
caaggacggcgcuuugaug

SEQ ID NO: 1915922 - RNA, 19 nt, Homo sapiens
  misc_RNA (1)...(19): siRNA sense strand
ggacaccacggcucuuauc

SEQ ID NO: 1915923 - RNA, 19 nt, Homo sapiens
  misc_RNA (1)...(19): siRNA sense strand
ucaggacccuucaguaacu

SEQ ID NO: 1915924 - RNA, 19 nt, Homo sapiens
  misc_RNA (1)...(19): siRNA sense strand
acucaggacccuucaguaa

SEQ ID NO: 1915925 - RNA, 19 nt, Homo sapiens
  misc_RNA (1)...(19): siRNA sense strand
gcagacguccuccaagaca

SEQ ID NO: 1915926 - RNA, 19 nt, Homo sapiens
  misc_RNA (1)...(19): siRNA sense strand
gacguggcccucccucuuu

SEQ ID NO: 1915927 - RNA, 19 nt, Homo sapiens
  misc_RNA (1)...(19): siRNA sense strand
aaagagacuguuacacuga

SEQ ID NO: 1915928 - RNA, 19 nt, Homo sapiens
  misc_RNA (1)...(19): siRNA sense strand
ccagaucaaggacaaaguu

SEQ ID NO: 1915929 - RNA, 19 nt, Homo sapiens
  misc_RNA (1)...(19): siRNA sense strand
cugccaaccuugauaagau

SEQ ID NO: 1915930 - RNA, 19 nt, Homo sapiens
  misc_RNA (1)...(19): siRNA sense strand
gugcagggcucugggagau

SEQ ID NO: 1915931 - RNA, 19 nt, Homo sapiens
  misc_RNA (1)...(19): siRNA sense strand
ugagcagccuugcccagaa

SEQ ID NO: 1915932 - RNA, 19 nt, Homo sapiens
  misc_RNA (1)...(19): siRNA sense strand
gagcagccggugaacuuga

SEQ ID NO: 1915933 - RNA, 19 nt, Homo sapiens
  misc_RNA (1)...(19): siRNA sense strand
aaacugggcagaaacaaag

SEQ ID NO: 1915934 - RNA, 19 nt, Homo sapiens
  misc_RNA (1)...(19): siRNA sense strand
uugcagacguccuccaaga

SEQ ID NO: 1915935 - RNA, 19 nt, Homo sapiens
  misc_RNA (1)...(19): siRNA sense strand
cauaaguuuccucugauuu

SEQ ID NO: 1915936 - RNA, 19 nt, Homo sapiens
  misc_RNA (1)...(19): siRNA sense strand
aaaguugaccacacaguga

SEQ ID NO: 1915937 - RNA, 19 nt, Homo sapiens
  misc_RNA (1)...(19): siRNA sense strand
gcccagaaguaugcugaga

SEQ ID NO: 1915938 - RNA, 19 nt, Homo sapiens
  misc_RNA (1)...(19): siRNA sense strand
gcaggcggguuacgucacu

SEQ ID NO: 1915939 - RNA, 19 nt, Homo sapiens
  misc_RNA (1)...(19): siRNA sense strand
gcccuuaccugugacucaa

SEQ ID NO: 1915940 - RNA, 19 nt, Homo sapiens
  misc_RNA (1)...(19): siRNA sense strand
ggacacugccaaccuugau

SEQ ID NO: 1915941 - RNA, 19 nt, Homo sapiens
  misc_RNA (1)...(19): siRNA sense strand
auaggcaaauggcaucuug

SEQ ID NO: 1915942 - RNA, 19 nt, Homo sapiens
  misc_RNA (1)...(19): siRNA sense strand
gagaaagcaacccaguuca

SEQ ID NO: 1915943 - RNA, 19 nt, Homo sapiens
  misc_RNA (1)...(19): siRNA sense strand
uccaagacauugccaacga

SEQ ID NO: 1915944 - RNA, 19 nt, Homo sapiens
  misc_RNA (1)...(19): siRNA sense strand
gaccacacagugaaggaaa

SEQ ID NO: 1915945 - RNA, 19 nt, Homo sapiens
  misc_RNA (1)...(19): siRNA sense strand
ggaggcccuuccugcucua

SEQ ID NO: 1915946 - RNA, 19 nt, Homo sapiens
  misc_RNA (1)...(19): siRNA sense strand
aaagagguggugcggagua

SEQ ID NO: 1915947 - RNA, 19 nt, Homo sapiens
  misc_RNA (1)...(19): siRNA sense strand
acacugccaaccuugauaa

SEQ ID NO: 1915948 - RNA, 19 nt, Homo sapiens
  misc_RNA (1)...(19): siRNA sense strand
caggccagcuuaccucaag

SEQ ID NO: 1915949 - RNA, 19 nt, Homo sapiens
  misc_RNA (1)...(19): siRNA sense strand
uaagcgugcuggacauuuu

SEQ ID NO: 1915950 - RNA, 19 nt, Homo sapiens
  misc_RNA (1)...(19): siRNA sense strand
gcagacgaccugggaagga

SEQ ID NO: 1915951 - RNA, 19 nt, Homo sapiens
  misc_RNA (1)...(19): siRNA sense strand
gacacugccaaccuugaua

SEQ ID NO: 1915952 - RNA, 19 nt, Homo sapiens
  misc_RNA (1)...(19): siRNA sense strand
cggcuuggccuucgcaaug

SEQ ID NO: 1915953 - RNA, 19 nt, Homo sapiens
  misc_RNA (1)...(19): siRNA sense strand
acguggcccucccucuuua

SEQ ID NO: 1915954 - RNA, 19 nt, Homo sapiens
  misc_RNA (1)...(19): siRNA sense strand
gugggucccuucacuggau

SEQ ID NO: 1915955 - RNA, 19 nt, Homo sapiens
  misc_RNA (1)...(19): siRNA sense strand
ggcccuuccugcucuaugu

SEQ ID NO: 1915956 - RNA, 19 nt, Homo sapiens
  misc_RNA (1)...(19): siRNA sense strand
caacuuugcagucacuucu

SEQ ID NO: 1915957 - RNA, 19 nt, Homo sapiens
  misc_RNA (1)...(19): siRNA sense strand
caguaacucccugcuguaa

SEQ ID NO: 1915958 - RNA, 19 nt, Homo sapiens
  misc_RNA (1)...(19): siRNA sense strand
acacauuccucugguuuac

SEQ ID NO: 1915959 - RNA, 19 nt, Homo sapiens
  misc_RNA (1)...(19): siRNA sense strand
ugacguggcccucccucuu

SEQ ID NO: 1915960 - RNA, 19 nt, Homo sapiens
  misc_RNA (1)...(19): siRNA sense strand
ucaguaacucccugcugua

SEQ ID NO: 1915961 - RNA, 19 nt, Homo sapiens
  misc_RNA (1)...(19): siRNA sense strand
ccucaaggacggcgcuuug

SEQ ID NO: 1915962 - RNA, 19 nt, Homo sapiens
  misc_RNA (1)...(19): siRNA sense strand
ucugggagauggacagucu

SEQ ID NO: 1915963 - RNA, 19 nt, Homo sapiens
  misc_RNA (1)...(19): siRNA sense strand
uggagucacacgcaacuuu

SEQ ID NO: 1915964 - RNA, 19 nt, Homo sapiens
  misc_RNA (1)...(19): siRNA sense strand
uaugaaaaccucaacauug

SEQ ID NO: 1915965 - RNA, 19 nt, Homo sapiens
  misc_RNA (1)...(19): siRNA sense strand
caacuuccgugguuuugau

SEQ ID NO: 1915966 - RNA, 19 nt, Homo sapiens
  misc_RNA (1)...(19): siRNA sense strand
gggccugagcugcagcaua

SEQ ID NO: 1915967 - RNA, 19 nt, Homo sapiens
  misc_RNA (1)...(19): siRNA sense strand
acaaggccuucuacauuac

SEQ ID NO: 1915968 - RNA, 19 nt, Homo sapiens
  misc_RNA (1)...(19): siRNA sense strand
caaaggacacugccaaccu

SEQ ID NO: 1915969 - RNA, 19 nt, Homo sapiens
  misc_RNA (1)...(19): siRNA sense strand
uggagcagccggugaacuu

SEQ ID NO: 1915970 - RNA, 19 nt, Homo sapiens
  misc_RNA (1)...(19): siRNA sense strand
gcaaacugggcagaaacaa

SEQ ID NO: 1915971 - RNA, 19 nt, Homo sapiens
  misc_RNA (1)...(19): siRNA sense strand
gagcugcagcauaaguuuc

SEQ ID NO: 1915972 - RNA, 19 nt, Homo sapiens
  misc_RNA (1)...(19): siRNA sense strand
gaguuucucaggauuucuu

SEQ ID NO: 1915973 - RNA, 19 nt, Homo sapiens
  misc_RNA (1)...(19): siRNA sense strand
guuacaaggccuucuacau

SEQ ID NO: 1915974 - RNA, 19 nt, Homo sapiens
  misc_RNA (1)...(19): siRNA sense strand
cggggcagcuggagaguuu

SEQ ID NO: 1915975 - RNA, 19 nt, Homo sapiens
  misc_RNA (1)...(19): siRNA sense strand
ucuccgaggugcucuuugg

SEQ ID NO: 1915976 - RNA, 19 nt, Homo sapiens
  misc_RNA (1)...(19): siRNA sense strand
gggaaugagguuuguggau

SEQ ID NO: 1915977 - RNA, 19 nt, Homo sapiens
  misc_RNA (1)...(19): siRNA sense strand
gcagccuugcccagaagua

SEQ ID NO: 1915978 - RNA, 19 nt, Homo sapiens
  misc_RNA (1)...(19): siRNA sense strand
gagcaaacugggcagaaac

SEQ ID NO: 1915979 - RNA, 19 nt, Homo sapiens
  misc_RNA (1)...(19): siRNA sense strand
ugccaaccuugauaagaug

SEQ ID NO: 1915980 - RNA, 19 nt, Homo sapiens
  misc_RNA (1)...(19): siRNA sense strand
caugauaugggcuguacug

SEQ ID NO: 1915981 - RNA, 19 nt, Homo sapiens
  misc_RNA (1)...(19): siRNA sense strand
gaaaacaagaggacagaag

SEQ ID NO: 1915982 - RNA, 19 nt, Homo sapiens
  misc_RNA (1)...(19): siRNA sense strand
uuggagcccugcagacugu

SEQ ID NO: 1915983 - RNA, 19 nt, Homo sapiens
  misc_RNA (1)...(19): siRNA sense strand
ggagcagccggugaacuug

SEQ ID NO: 1915984 - RNA, 19 nt, Homo sapiens
  misc_RNA (1)...(19): siRNA sense strand
agacguccuccaagacauu

SEQ ID NO: 1915985 - RNA, 19 nt, Homo sapiens
  misc_RNA (1)...(19): siRNA sense strand
agaaguaugcugagaaagc

SEQ ID NO: 1915986 - RNA, 19 nt, Homo sapiens
  misc_RNA (1)...(19): siRNA sense strand
ugagcugcagcauaaguuu

SEQ ID NO: 1915987 - RNA, 19 nt, Homo sapiens
  misc_RNA (1)...(19): siRNA sense strand
ugggaggccuuccgcucaa

SEQ ID NO: 1915988 - RNA, 19 nt, Homo sapiens
  misc_RNA (1)...(19): siRNA sense strand
gauaaagccuacuugauca

SEQ ID NO: 1915989 - RNA, 19 nt, Homo sapiens
  misc_RNA (1)...(19): siRNA sense strand
ggauaaagccuacuugauc

SEQ ID NO: 1915990 - RNA, 19 nt, Homo sapiens
  misc_RNA (1)...(19): siRNA sense strand
gggauaaagccuacuugau

SEQ ID NO: 1915991 - RNA, 19 nt, Homo sapiens
  misc_RNA (1)...(19): siRNA sense strand
aaagccuacuugaucauga

SEQ ID NO: 1915992 - RNA, 19 nt, Homo sapiens
  misc_RNA (1)...(19): siRNA sense strand
ucugccagguuucgguaua

SEQ ID NO: 1915993 - RNA, 19 nt, Homo sapiens
  misc_RNA (1)...(19): siRNA sense strand
gaucaugauggguaagcuu

SEQ ID NO: 1915994 - RNA, 19 nt, Homo sapiens
  misc_RNA (1)...(19): siRNA sense strand
uugaugugcuaguggguuu

SEQ ID NO: 1915995 - RNA, 19 nt, Homo sapiens
  misc_RNA (1)...(19): siRNA sense strand
gucuuuaguuguuuaugug

SEQ ID NO: 1915996 - RNA, 19 nt, Homo sapiens
  misc_RNA (1)...(19): siRNA sense strand
cugccagguuucgguauaa

SEQ ID NO: 1915997 - RNA, 19 nt, Homo sapiens
  misc_RNA (1)...(19): siRNA sense strand
ccagguuucgguauaagga

SEQ ID NO: 1915998 - RNA, 19 nt, Homo sapiens
  misc_RNA (1)...(19): siRNA sense strand
uaaagccuacuugaucaug

SEQ ID NO: 1915999 - RNA, 19 nt, Homo sapiens
  misc_RNA (1)...(19): siRNA sense strand
uugugucucugccagguuu

SEQ ID NO: 1916000 - RNA, 19 nt, Homo sapiens
  misc_RNA (1)...(19): siRNA sense strand
caacagauaucaucgugua

SEQ ID NO: 1916001 - RNA, 19 nt, Homo sapiens
  misc_RNA (1)...(19): siRNA sense strand
ggaggacucugaugaacaa

SEQ ID NO: 1916002 - RNA, 19 nt, Homo sapiens
  misc_RNA (1)...(19): siRNA sense strand
ggaaacccuucaaauaguu

SEQ ID NO: 1916003 - RNA, 19 nt, Homo sapiens
  misc_RNA (1)...(19): siRNA sense strand
gcacagagaagggaaguuu

SEQ ID NO: 1916004 - RNA, 19 nt, Homo sapiens
  misc_RNA (1)...(19): siRNA sense strand
acaggaaacccuucaaaua

SEQ ID NO: 1916005 - RNA, 19 nt, Homo sapiens
  misc_RNA (1)...(19): siRNA sense strand
gcagggaacagaacaguga

SEQ ID NO: 1916006 - RNA, 19 nt, Homo sapiens
  misc_RNA (1)...(19): siRNA sense strand
ggugacauaugcacaguug

SEQ ID NO: 1916007 - RNA, 19 nt, Homo sapiens
  misc_RNA (1)...(19): siRNA sense strand
gagaagggaaguuuaagga

SEQ ID NO: 1916008 - RNA, 19 nt, Homo sapiens
  misc_RNA (1)...(19): siRNA sense strand
caggaaacccuucaaauag

SEQ ID NO: 1916009 - RNA, 19 nt, Homo sapiens
  misc_RNA (1)...(19): siRNA sense strand
gaacagggaggacucugau

SEQ ID NO: 1916010 - RNA, 19 nt, Homo sapiens
  misc_RNA (1)...(19): siRNA sense strand
acagagaagggaaguuuaa

SEQ ID NO: 1916011 - RNA, 19 nt, Homo sapiens
  misc_RNA (1)...(19): siRNA sense strand
ugacauaugcacaguugaa

SEQ ID NO: 1916012 - RNA, 19 nt, Homo sapiens
  misc_RNA (1)...(19): siRNA sense strand
gcagggaccuacagaugcu

SEQ ID NO: 1916013 - RNA, 19 nt, Homo sapiens
  misc_RNA (1)...(19): siRNA sense strand
acaccugcauguucugauu

SEQ ID NO: 1916014 - RNA, 19 nt, Homo sapiens
  misc_RNA (1)...(19): siRNA sense strand
ggugaaaucagaagagaca

SEQ ID NO: 1916015 - RNA, 19 nt, Homo sapiens
  misc_RNA (1)...(19): siRNA sense strand
ggacucugaugaacaagac

SEQ ID NO: 1916016 - RNA, 19 nt, Homo sapiens
  misc_RNA (1)...(19): siRNA sense strand
agacagucauccugcaaug

SEQ ID NO: 1916017 - RNA, 19 nt, Homo sapiens
  misc_RNA (1)...(19): siRNA sense strand
aggaaacccuucaaauagu

SEQ ID NO: 1916018 - RNA, 19 nt, Homo sapiens
  misc_RNA (1)...(19): siRNA sense strand
ucacaggaaacccuucaaa

SEQ ID NO: 1916019 - RNA, 19 nt, Homo sapiens
  misc_RNA (1)...(19): siRNA sense strand
gaaacccuucaaauaguug

SEQ ID NO: 1916020 - RNA, 19 nt, Homo sapiens
  misc_RNA (1)...(19): siRNA sense strand
caauguuggucagauguca

SEQ ID NO: 1916021 - RNA, 19 nt, Homo sapiens
  misc_RNA (1)...(19): siRNA sense strand
acagggaggacucugauga

SEQ ID NO: 1916022 - RNA, 19 nt, Homo sapiens
  misc_RNA (1)...(19): siRNA sense strand
uuggucagaugucagguuu

SEQ ID NO: 1916023 - RNA, 19 nt, Homo sapiens
  misc_RNA (1)...(19): siRNA sense strand
cacagagaagggaaguuua

SEQ ID NO: 1916024 - RNA, 19 nt, Homo sapiens
  misc_RNA (1)...(19): siRNA sense strand
gaggugacauaugcacagu

SEQ ID NO: 1916025 - RNA, 19 nt, Homo sapiens
  misc_RNA (1)...(19): siRNA sense strand
acagucauccugcaauguu

SEQ ID NO: 1916026 - RNA, 19 nt, Homo sapiens
  misc_RNA (1)...(19): siRNA sense strand
cacaggaaacccuucaaau

SEQ ID NO: 1916027 - RNA, 19 nt, Homo sapiens
  misc_RNA (1)...(19): siRNA sense strand
ggucaucauccucuucauc

SEQ ID NO: 1916028 - RNA, 19 nt, Homo sapiens
  misc_RNA (1)...(19): siRNA sense strand
caugagggaguccacagaa

SEQ ID NO: 1916029 - RNA, 19 nt, Homo sapiens
  misc_RNA (1)...(19): siRNA sense strand
cuacagaugcuacgguucu

SEQ ID NO: 1916030 - RNA, 19 nt, Homo sapiens
  misc_RNA (1)...(19): siRNA sense strand
cagggaggacucugaugaa

SEQ ID NO: 1916031 - RNA, 19 nt, Homo sapiens
  misc_RNA (1)...(19): siRNA sense strand
ugaacagggaggacucuga

SEQ ID NO: 1916032 - RNA, 19 nt, Homo sapiens
  misc_RNA (1)...(19): siRNA sense strand
aaaaugcuguuguaaugga

SEQ ID NO: 1916033 - RNA, 19 nt, Homo sapiens
  misc_RNA (1)...(19): siRNA sense strand
cagucauccugcaauguug

SEQ ID NO: 1916034 - RNA, 19 nt, Homo sapiens
  misc_RNA (1)...(19): siRNA sense strand
gggaggacucugaugaaca

SEQ ID NO: 1916035 - RNA, 19 nt, Homo sapiens
  misc_RNA (1)...(19): siRNA sense strand
gagacagucauccugcaau

SEQ ID NO: 1916036 - RNA, 19 nt, Homo sapiens
  misc_RNA (1)...(19): siRNA sense strand
gugacccacugcuuguuuc

SEQ ID NO: 1916037 - RNA, 19 nt, Homo sapiens
  misc_RNA (1)...(19): siRNA sense strand
cucaggaggugacauaugc

SEQ ID NO: 1916038 - RNA, 19 nt, Homo sapiens
  misc_RNA (1)...(19): siRNA sense strand
cugcaauguuggucagaug

SEQ ID NO: 1916039 - RNA, 19 nt, Homo sapiens
  misc_RNA (1)...(19): siRNA sense strand
cauccuccuccucuucuuu

SEQ ID NO: 1916040 - RNA, 19 nt, Homo sapiens
  misc_RNA (1)...(19): siRNA sense strand
augagggaguccacagaaa

SEQ ID NO: 1916041 - RNA, 19 nt, Homo sapiens
  misc_RNA (1)...(19): siRNA sense strand
gggaacagaacagugaaca

SEQ ID NO: 1916042 - RNA, 19 nt, Homo sapiens
  misc_RNA (1)...(19): siRNA sense strand
caacagauaucaucgugua

SEQ ID NO: 1916043 - RNA, 19 nt, Homo sapiens
  misc_RNA (1)...(19): siRNA sense strand
ggaggacucugaugaacaa

SEQ ID NO: 1916044 - RNA, 19 nt, Homo sapiens
  misc_RNA (1)...(19): siRNA sense strand
ggaaacccuucaaauaguu

SEQ ID NO: 1916045 - RNA, 19 nt, Homo sapiens
  misc_RNA (1)...(19): siRNA sense strand
gcacagagaagggaaguuu

SEQ ID NO: 1916046 - RNA, 19 nt, Homo sapiens
  misc_RNA (1)...(19): siRNA sense strand
acaggaaacccuucaaaua

SEQ ID NO: 1916047 - RNA, 19 nt, Homo sapiens
  misc_RNA (1)...(19): siRNA sense strand
gcagggaacagaacaguga

SEQ ID NO: 1916048 - RNA, 19 nt, Homo sapiens
  misc_RNA (1)...(19): siRNA sense strand
ggugacauaugcacaguug

SEQ ID NO: 1916049 - RNA, 19 nt, Homo sapiens
  misc_RNA (1)...(19): siRNA sense strand
gagaagggaaguuuaagga

SEQ ID NO: 1916050 - RNA, 19 nt, Homo sapiens
  misc_RNA (1)...(19): siRNA sense strand
caggaaacccuucaaauag

SEQ ID NO: 1916051 - RNA, 19 nt, Homo sapiens
  misc_RNA (1)...(19): siRNA sense strand
gaacagggaggacucugau

SEQ ID NO: 1916052 - RNA, 19 nt, Homo sapiens
  misc_RNA (1)...(19): siRNA sense strand
acagagaagggaaguuuaa

SEQ ID NO: 1916053 - RNA, 19 nt, Homo sapiens
  misc_RNA (1)...(19): siRNA sense strand
ugacauaugcacaguugaa

SEQ ID NO: 1916054 - RNA, 19 nt, Homo sapiens
  misc_RNA (1)...(19): siRNA sense strand
gcagggaccuacagaugcu

SEQ ID NO: 1916055 - RNA, 19 nt, Homo sapiens
  misc_RNA (1)...(19): siRNA sense strand
acaccugcauguucugauu

SEQ ID NO: 1916056 - RNA, 19 nt, Homo sapiens
  misc_RNA (1)...(19): siRNA sense strand
ggugaaaucagaagagaca

SEQ ID NO: 1916057 - RNA, 19 nt, Homo sapiens
  misc_RNA (1)...(19): siRNA sense strand
ggacucugaugaacaagac

SEQ ID NO: 1916058 - RNA, 19 nt, Homo sapiens
  misc_RNA (1)...(19): siRNA sense strand
agacagucauccugcaaug

SEQ ID NO: 1916059 - RNA, 19 nt, Homo sapiens
  misc_RNA (1)...(19): siRNA sense strand
aggaaacccuucaaauagu

SEQ ID NO: 1916060 - RNA, 19 nt, Homo sapiens
  misc_RNA (1)...(19): siRNA sense strand
ucacaggaaacccuucaaa

SEQ ID NO: 1916061 - RNA, 19 nt, Homo sapiens
  misc_RNA (1)...(19): siRNA sense strand
gaaacccuucaaauaguug

SEQ ID NO: 1916062 - RNA, 19 nt, Homo sapiens
  misc_RNA (1)...(19): siRNA sense strand
caauguuggucagauguca

SEQ ID NO: 1916063 - RNA, 19 nt, Homo sapiens
  misc_RNA (1)...(19): siRNA sense strand
acagggaggacucugauga

SEQ ID NO: 1916064 - RNA, 19 nt, Homo sapiens
  misc_RNA (1)...(19): siRNA sense strand
uuggucagaugucagguuu

SEQ ID NO: 1916065 - RNA, 19 nt, Homo sapiens
  misc_RNA (1)...(19): siRNA sense strand
acagucauccugcaauguu

SEQ ID NO: 1916066 - RNA, 19 nt, Homo sapiens
  misc_RNA (1)...(19): siRNA sense strand
gaggugacauaugcacagu

SEQ ID NO: 1916067 - RNA, 19 nt, Homo sapiens
  misc_RNA (1)...(19): siRNA sense strand
cacagagaagggaaguuua

SEQ ID NO: 1916068 - RNA, 19 nt, Homo sapiens
  misc_RNA (1)...(19): siRNA sense strand
cacaggaaacccuucaaau

SEQ ID NO: 1916069 - RNA, 19 nt, Homo sapiens
  misc_RNA (1)...(19): siRNA sense strand
ggucaucauccucuucauc

SEQ ID NO: 1916070 - RNA, 19 nt, Homo sapiens
  misc_RNA (1)...(19): siRNA sense strand
caugagggaguccacagaa

SEQ ID NO: 1916071 - RNA, 19 nt, Homo sapiens
  misc_RNA (1)...(19): siRNA sense strand
cuacagaugcuacgguucu

SEQ ID NO: 1916072 - RNA, 19 nt, Homo sapiens
  misc_RNA (1)...(19): siRNA sense strand
cagggaggacucugaugaa

SEQ ID NO: 1916073 - RNA, 19 nt, Homo sapiens
  misc_RNA (1)...(19): siRNA sense strand
ugaacagggaggacucuga

SEQ ID NO: 1916074 - RNA, 19 nt, Homo sapiens
  misc_RNA (1)...(19): siRNA sense strand
gagacagucauccugcaau

SEQ ID NO: 1916075 - RNA, 19 nt, Homo sapiens
  misc_RNA (1)...(19): siRNA sense strand
gggaggacucugaugaaca

SEQ ID NO: 1916076 - RNA, 19 nt, Homo sapiens
  misc_RNA (1)...(19): siRNA sense strand
cagucauccugcaauguug

SEQ ID NO: 1916077 - RNA, 19 nt, Homo sapiens
  misc_RNA (1)...(19): siRNA sense strand
aaaaugcuguuguaaugga

SEQ ID NO: 1916078 - RNA, 19 nt, Homo sapiens
  misc_RNA (1)...(19): siRNA sense strand
gugacccacugcuuguuuc

SEQ ID NO: 1916079 - RNA, 19 nt, Homo sapiens
  misc_RNA (1)...(19): siRNA sense strand
cucaggaggugacauaugc

SEQ ID NO: 1916080 - RNA, 19 nt, Homo sapiens
  misc_RNA (1)...(19): siRNA sense strand
cugcaauguuggucagaug

SEQ ID NO: 1916081 - RNA, 19 nt, Homo sapiens
  misc_RNA (1)...(19): siRNA sense strand
cauccuccuccucuucuuu

SEQ ID NO: 1916082 - RNA, 19 nt, Homo sapiens
  misc_RNA (1)...(19): siRNA sense strand
augagggaguccacagaaa

SEQ ID NO: 1916083 - RNA, 19 nt, Homo sapiens
  misc_RNA (1)...(19): siRNA sense strand
gggaacagaacagugaaca

SEQ ID NO: 1916084 - RNA, 19 nt, Homo sapiens
  misc_RNA (1)...(19): siRNA sense strand
ggagagagaucgauugaaa

SEQ ID NO: 1916085 - RNA, 19 nt, Homo sapiens
  misc_RNA (1)...(19): siRNA sense strand
caacauggauuacgacauc

SEQ ID NO: 1916086 - RNA, 19 nt, Homo sapiens
  misc_RNA (1)...(19): siRNA sense strand
gaaauacgaaucccagaaa

SEQ ID NO: 1916087 - RNA, 19 nt, Homo sapiens
  misc_RNA (1)...(19): siRNA sense strand
agagagaucgauugaaaua

SEQ ID NO: 1916088 - RNA, 19 nt, Homo sapiens
  misc_RNA (1)...(19): siRNA sense strand
cagccaaccuccuggauga

SEQ ID NO: 1916089 - RNA, 19 nt, Homo sapiens
  misc_RNA (1)...(19): siRNA sense strand
gggacaagcugaaacacau

SEQ ID NO: 1916090 - RNA, 19 nt, Homo sapiens
  misc_RNA (1)...(19): siRNA sense strand
ggaaacgacuuuggcuuuu

SEQ ID NO: 1916091 - RNA, 19 nt, Homo sapiens
  misc_RNA (1)...(19): siRNA sense strand
ccggagaucuuggaaagga

SEQ ID NO: 1916092 - RNA, 19 nt, Homo sapiens
  misc_RNA (1)...(19): siRNA sense strand
gaggaaggccugcgagaag

SEQ ID NO: 1916093 - RNA, 19 nt, Homo sapiens
  misc_RNA (1)...(19): siRNA sense strand
cggaaacgacuuuggcuuu

SEQ ID NO: 1916094 - RNA, 19 nt, Homo sapiens
  misc_RNA (1)...(19): siRNA sense strand
gagaucgauugaaauacga

SEQ ID NO: 1916095 - RNA, 19 nt, Homo sapiens
  misc_RNA (1)...(19): siRNA sense strand
gucugaagaugccuuauuc

SEQ ID NO: 1916096 - RNA, 19 nt, Homo sapiens
  misc_RNA (1)...(19): siRNA sense strand
ccugauagcucggaugaag

SEQ ID NO: 1916097 - RNA, 19 nt, Homo sapiens
  misc_RNA (1)...(19): siRNA sense strand
ggaggaaggccugcgagaa

SEQ ID NO: 1916098 - RNA, 19 nt, Homo sapiens
  misc_RNA (1)...(19): siRNA sense strand
gaaaguccacccggaggaa

SEQ ID NO: 1916099 - RNA, 19 nt, Homo sapiens
  misc_RNA (1)...(19): siRNA sense strand
caaccuuccggaugacuuu

SEQ ID NO: 1916100 - RNA, 19 nt, Homo sapiens
  misc_RNA (1)...(19): siRNA sense strand
ugaaacacaugggaaaguc

SEQ ID NO: 1916101 - RNA, 19 nt, Homo sapiens
  misc_RNA (1)...(19): siRNA sense strand
ggauuacgacaucaucgaa

SEQ ID NO: 1916102 - RNA, 19 nt, Homo sapiens
  misc_RNA (1)...(19): siRNA sense strand
ugggcaaccuuccggauga

SEQ ID NO: 1916103 - RNA, 19 nt, Homo sapiens
  misc_RNA (1)...(19): siRNA sense strand
acgaaucccagaaaucuaa

SEQ ID NO: 1916104 - RNA, 19 nt, Homo sapiens
  misc_RNA (1)...(19): siRNA sense strand
aaauacgaaucccagaaau

SEQ ID NO: 1916105 - RNA, 19 nt, Homo sapiens
  misc_RNA (1)...(19): siRNA sense strand
ugaaauacgaaucccagaa

SEQ ID NO: 1916106 - RNA, 19 nt, Homo sapiens
  misc_RNA (1)...(19): siRNA sense strand
acgaggaguucaugaagga

SEQ ID NO: 1916107 - RNA, 19 nt, Homo sapiens
  misc_RNA (1)...(19): siRNA sense strand
gagagagaucgauugaaau

SEQ ID NO: 1916108 - RNA, 19 nt, Homo sapiens
  misc_RNA (1)...(19): siRNA sense strand
cccaggagcucaacaacag

SEQ ID NO: 1916109 - RNA, 19 nt, Homo sapiens
  misc_RNA (1)...(19): siRNA sense strand
cagagacgcuaucggaacu

SEQ ID NO: 1916110 - RNA, 19 nt, Homo sapiens
  misc_RNA (1)...(19): siRNA sense strand
ucaaagaggaaacacuugu

SEQ ID NO: 1916111 - RNA, 19 nt, Homo sapiens
  misc_RNA (1)...(19): siRNA sense strand
gcaacggaaccgcgacuuc

SEQ ID NO: 1916112 - RNA, 19 nt, Homo sapiens
  misc_RNA (1)...(19): siRNA sense strand
ggacaagcugaaacacaug

SEQ ID NO: 1916113 - RNA, 19 nt, Homo sapiens
  misc_RNA (1)...(19): siRNA sense strand
agagaucgauugaaauacg

SEQ ID NO: 1916114 - RNA, 19 nt, Homo sapiens
  misc_RNA (1)...(19): siRNA sense strand
gaacuugcccgagccuucu

SEQ ID NO: 1916115 - RNA, 19 nt, Homo sapiens
  misc_RNA (1)...(19): siRNA sense strand
ggaagucaaagaggaaaca

SEQ ID NO: 1916116 - RNA, 19 nt, Homo sapiens
  misc_RNA (1)...(19): siRNA sense strand
gacgagaggaucgcgcuuu

SEQ ID NO: 1916117 - RNA, 19 nt, Homo sapiens
  misc_RNA (1)...(19): siRNA sense strand
ccaaccuccuggaugaugu

SEQ ID NO: 1916118 - RNA, 19 nt, Homo sapiens
  misc_RNA (1)...(19): siRNA sense strand
gggccacgcgugugaugaa

SEQ ID NO: 1916119 - RNA, 19 nt, Homo sapiens
  misc_RNA (1)...(19): siRNA sense strand
ggaaggccugcgagaagga

SEQ ID NO: 1916120 - RNA, 19 nt, Homo sapiens
  misc_RNA (1)...(19): siRNA sense strand
ggacuuuggaaccugauag

SEQ ID NO: 1916121 - RNA, 19 nt, Homo sapiens
  misc_RNA (1)...(19): siRNA sense strand
ugaggaagucaaagaggaa

SEQ ID NO: 1916122 - RNA, 19 nt, Homo sapiens
  misc_RNA (1)...(19): siRNA sense strand
gacgcuaucggaacuggaa

SEQ ID NO: 1916123 - RNA, 19 nt, Homo sapiens
  misc_RNA (1)...(19): siRNA sense strand
ggccauggacgacuucaag

SEQ ID NO: 1916124 - RNA, 19 nt, Homo sapiens
  misc_RNA (1)...(19): siRNA sense strand
ugucugaagaugccuuauu

SEQ ID NO: 1916125 - RNA, 19 nt, Homo sapiens
  misc_RNA (1)...(19): siRNA sense strand
agucaaagaggaaacacuu

SEQ ID NO: 1916126 - RNA, 19 nt, Homo sapiens
  misc_RNA (1)...(19): siRNA sense strand
gaggaagucaaagaggaaa

SEQ ID NO: 1916127 - RNA, 19 nt, Homo sapiens
  misc_RNA (1)...(19): siRNA sense strand
ucccagaaaucuaaaucca

SEQ ID NO: 1916128 - RNA, 19 nt, Homo sapiens
  misc_RNA (1)...(19): siRNA sense strand
ccacgcgugugaugaagac

SEQ ID NO: 1916129 - RNA, 19 nt, Homo sapiens
  misc_RNA (1)...(19): siRNA sense strand
ccugcgagaaggacaguaa

SEQ ID NO: 1916130 - RNA, 19 nt, Homo sapiens
  misc_RNA (1)...(19): siRNA sense strand
gcaaccuuccggaugacuu

SEQ ID NO: 1916131 - RNA, 19 nt, Homo sapiens
  misc_RNA (1)...(19): siRNA sense strand
ucagagaagaccaaaauga

SEQ ID NO: 1916132 - RNA, 19 nt, Homo sapiens
  misc_RNA (1)...(19): siRNA sense strand
auuacgacaucaucgaaug

SEQ ID NO: 1916133 - RNA, 19 nt, Homo sapiens
  misc_RNA (1)...(19): siRNA sense strand
gauuacgacaucaucgaau

SEQ ID NO: 1916134 - RNA, 19 nt, Homo sapiens
  misc_RNA (1)...(19): siRNA sense strand
auacgaaucccagaaaucu

SEQ ID NO: 1916135 - RNA, 19 nt, Homo sapiens
  misc_RNA (1)...(19): siRNA sense strand
ggaagguacuuuagauuga

SEQ ID NO: 1916136 - RNA, 19 nt, Homo sapiens
  misc_RNA (1)...(19): siRNA sense strand
agacuuggauaaugcaaua

SEQ ID NO: 1916137 - RNA, 19 nt, Homo sapiens
  misc_RNA (1)...(19): siRNA sense strand
ggagagacuuggauaaugc

SEQ ID NO: 1916138 - RNA, 19 nt, Homo sapiens
  misc_RNA (1)...(19): siRNA sense strand
uagaagcuguggaugaauu

SEQ ID NO: 1916139 - RNA, 19 nt, Homo sapiens
  misc_RNA (1)...(19): siRNA sense strand
caauagaagcuguggauga

SEQ ID NO: 1916140 - RNA, 19 nt, Homo sapiens
  misc_RNA (1)...(19): siRNA sense strand
aauagaagcuguggaugaa

SEQ ID NO: 1916141 - RNA, 19 nt, Homo sapiens
  misc_RNA (1)...(19): siRNA sense strand
gaggagagacuuggauaau

SEQ ID NO: 1916142 - RNA, 19 nt, Homo sapiens
  misc_RNA (1)...(19): siRNA sense strand
caaaagaugccuacuguug

SEQ ID NO: 1916143 - RNA, 19 nt, Homo sapiens
  misc_RNA (1)...(19): siRNA sense strand
cagaggagagacuuggaua

SEQ ID NO: 1916144 - RNA, 19 nt, Homo sapiens
  misc_RNA (1)...(19): siRNA sense strand
ugaauuugcuuuucuggaa

SEQ ID NO: 1916145 - RNA, 19 nt, Homo sapiens
  misc_RNA (1)...(19): siRNA sense strand
gagugaaggccuuggugaa

SEQ ID NO: 1916146 - RNA, 19 nt, Homo sapiens
  misc_RNA (1)...(19): siRNA sense strand
ucuggaagguacuuuagau

SEQ ID NO: 1916147 - RNA, 19 nt, Homo sapiens
  misc_RNA (1)...(19): siRNA sense strand
uggaagguacuuuagauug

SEQ ID NO: 1916148 - RNA, 19 nt, Homo sapiens
  misc_RNA (1)...(19): siRNA sense strand
aggagagacuuggauaaug

SEQ ID NO: 1916149 - RNA, 19 nt, Homo sapiens
  misc_RNA (1)...(19): siRNA sense strand
gacgcuagcgggacaggaa

SEQ ID NO: 1916150 - RNA, 19 nt, Homo sapiens
  misc_RNA (1)...(19): siRNA sense strand
agaggagagacuuggauaa

SEQ ID NO: 1916151 - RNA, 19 nt, Homo sapiens
  misc_RNA (1)...(19): siRNA sense strand
cuuggauaaugcaauagaa

SEQ ID NO: 1916152 - RNA, 19 nt, Homo sapiens
  misc_RNA (1)...(19): siRNA sense strand
ggagaccauugcaaaagau

SEQ ID NO: 1916153 - RNA, 19 nt, Homo sapiens
  misc_RNA (1)...(19): siRNA sense strand
gaaccaagauccugaacaa

SEQ ID NO: 1916154 - RNA, 19 nt, Homo sapiens
  misc_RNA (1)...(19): siRNA sense strand
gggaagaugugguacagaa

SEQ ID NO: 1916155 - RNA, 19 nt, Homo sapiens
  misc_RNA (1)...(19): siRNA sense strand
gaacaaccacagcucuauu

SEQ ID NO: 1916156 - RNA, 19 nt, Homo sapiens
  misc_RNA (1)...(19): siRNA sense strand
gacaauggcuggaguaagc

SEQ ID NO: 1916157 - RNA, 19 nt, Homo sapiens
  misc_RNA (1)...(19): siRNA sense strand
gugaggagccugaggaaga

SEQ ID NO: 1916158 - RNA, 19 nt, Homo sapiens
  misc_RNA (1)...(19): siRNA sense strand
gagugaagaugaagaugag

SEQ ID NO: 1916159 - RNA, 19 nt, Homo sapiens
  misc_RNA (1)...(19): siRNA sense strand
ggauggagauguaguugcu

SEQ ID NO: 1916160 - RNA, 19 nt, Homo sapiens
  misc_RNA (1)...(19): siRNA sense strand
ccaagauccugaacaagag

SEQ ID NO: 1916161 - RNA, 19 nt, Homo sapiens
  misc_RNA (1)...(19): siRNA sense strand
gaagaugugguacagaaag

SEQ ID NO: 1916162 - RNA, 19 nt, Homo sapiens
  misc_RNA (1)...(19): siRNA sense strand
gagcguaucuuccccaauc

SEQ ID NO: 1916163 - RNA, 19 nt, Homo sapiens
  misc_RNA (1)...(19): siRNA sense strand
ggaagaugugguacagaaa

SEQ ID NO: 1916164 - RNA, 19 nt, Homo sapiens
  misc_RNA (1)...(19): siRNA sense strand
gagcuacagcguugaacaa

SEQ ID NO: 1916165 - RNA, 19 nt, Homo sapiens
  misc_RNA (1)...(19): siRNA sense strand
cauuagagagugaagauga

SEQ ID NO: 1916166 - RNA, 19 nt, Homo sapiens
  misc_RNA (1)...(19): siRNA sense strand
gauggcaacaguaguucua

SEQ ID NO: 1916167 - RNA, 19 nt, Homo sapiens
  misc_RNA (1)...(19): siRNA sense strand
ccagugggaagauguggua

SEQ ID NO: 1916168 - RNA, 19 nt, Homo sapiens
  misc_RNA (1)...(19): siRNA sense strand
ugccugggcucgggagaua

SEQ ID NO: 1916169 - RNA, 19 nt, Homo sapiens
  misc_RNA (1)...(19): siRNA sense strand
agagugaagaugaagauga

SEQ ID NO: 1916170 - RNA, 19 nt, Homo sapiens
  misc_RNA (1)...(19): siRNA sense strand
cugaggaacugggacauca

SEQ ID NO: 1916171 - RNA, 19 nt, Homo sapiens
  misc_RNA (1)...(19): siRNA sense strand
accaagauccugaacaaga

SEQ ID NO: 1916172 - RNA, 19 nt, Homo sapiens
  misc_RNA (1)...(19): siRNA sense strand
ggacccagaacauguagag

SEQ ID NO: 1916173 - RNA, 19 nt, Homo sapiens
  misc_RNA (1)...(19): siRNA sense strand
gaagaugaggagggagcua

SEQ ID NO: 1916174 - RNA, 19 nt, Homo sapiens
  misc_RNA (1)...(19): siRNA sense strand
gacaucagggcccuucaga

SEQ ID NO: 1916175 - RNA, 19 nt, Homo sapiens
  misc_RNA (1)...(19): siRNA sense strand
gggcucgggagauaucuga

SEQ ID NO: 1916176 - RNA, 19 nt, Homo sapiens
  misc_RNA (1)...(19): siRNA sense strand
ccagacccaccauuagaga

SEQ ID NO: 1916177 - RNA, 19 nt, Homo sapiens
  misc_RNA (1)...(19): siRNA sense strand
ggagcuacagcguugaaca

SEQ ID NO: 1916178 - RNA, 19 nt, Homo sapiens
  misc_RNA (1)...(19): siRNA sense strand
ugaacaaccacagcucuau

SEQ ID NO: 1916179 - RNA, 19 nt, Homo sapiens
  misc_RNA (1)...(19): siRNA sense strand
ggcaacaguaguucuagga

SEQ ID NO: 1916180 - RNA, 19 nt, Homo sapiens
  misc_RNA (1)...(19): siRNA sense strand
auuagagagugaagaugaa

SEQ ID NO: 1916181 - RNA, 19 nt, Homo sapiens
  misc_RNA (1)...(19): siRNA sense strand
ggacaauggcuggaguaag

SEQ ID NO: 1916182 - RNA, 19 nt, Homo sapiens
  misc_RNA (1)...(19): siRNA sense strand
ccggauggcaacaguaguu

SEQ ID NO: 1916183 - RNA, 19 nt, Homo sapiens
  misc_RNA (1)...(19): siRNA sense strand
ugaggagccugaggaagag

SEQ ID NO: 1916184 - RNA, 19 nt, Homo sapiens
  misc_RNA (1)...(19): siRNA sense strand
gcucgggagauaucugaug

SEQ ID NO: 1916185 - RNA, 19 nt, Homo sapiens
  misc_RNA (1)...(19): siRNA sense strand
ggagauguaguugcugaca

SEQ ID NO: 1916186 - RNA, 19 nt, Homo sapiens
  misc_RNA (1)...(19): siRNA sense strand
aaacagagguggaaauaga

SEQ ID NO: 1916187 - RNA, 19 nt, Homo sapiens
  misc_RNA (1)...(19): siRNA sense strand
gaggagcggucuaagcaua

SEQ ID NO: 1916188 - RNA, 19 nt, Homo sapiens
  misc_RNA (1)...(19): siRNA sense strand
ggaaauugacuuagacaaa

SEQ ID NO: 1916189 - RNA, 19 nt, Homo sapiens
  misc_RNA (1)...(19): siRNA sense strand
ccaaagacuuguuucagaa

SEQ ID NO: 1916190 - RNA, 19 nt, Homo sapiens
  misc_RNA (1)...(19): siRNA sense strand
ggucuaagcauaagagaaa

SEQ ID NO: 1916191 - RNA, 19 nt, Homo sapiens
  misc_RNA (1)...(19): siRNA sense strand
gaaauugacuuagacaaac

SEQ ID NO: 1916192 - RNA, 19 nt, Homo sapiens
  misc_RNA (1)...(19): siRNA sense strand
gccaaagacuuguuucaga

SEQ ID NO: 1916193 - RNA, 19 nt, Homo sapiens
  misc_RNA (1)...(19): siRNA sense strand
gcgaggaaauugacuuaga

SEQ ID NO: 1916194 - RNA, 19 nt, Homo sapiens
  misc_RNA (1)...(19): siRNA sense strand
gaacaaggccaagaaagga

SEQ ID NO: 1916195 - RNA, 19 nt, Homo sapiens
  misc_RNA (1)...(19): siRNA sense strand
ggaaaccuguggguacaaa

SEQ ID NO: 1916196 - RNA, 19 nt, Homo sapiens
  misc_RNA (1)...(19): siRNA sense strand
uacccaagaucaugcaaua

SEQ ID NO: 1916197 - RNA, 19 nt, Homo sapiens
  misc_RNA (1)...(19): siRNA sense strand
acaaacagauacaucagaa

SEQ ID NO: 1916198 - RNA, 19 nt, Homo sapiens
  misc_RNA (1)...(19): siRNA sense strand
gauguagucucuaagaaag

SEQ ID NO: 1916199 - RNA, 19 nt, Homo sapiens
  misc_RNA (1)...(19): siRNA sense strand
ucagauaacaguaccagua

SEQ ID NO: 1916200 - RNA, 19 nt, Homo sapiens
  misc_RNA (1)...(19): siRNA sense strand
gacagcagauugagacuag

SEQ ID NO: 1916201 - RNA, 19 nt, Homo sapiens
  misc_RNA (1)...(19): siRNA sense strand
ccaagaucaugcaauauuc

SEQ ID NO: 1916202 - RNA, 19 nt, Homo sapiens
  misc_RNA (1)...(19): siRNA sense strand
ggaccagucuauucuugga

SEQ ID NO: 1916203 - RNA, 19 nt, Homo sapiens
  misc_RNA (1)...(19): siRNA sense strand
acaagagcauccaaagaaa

SEQ ID NO: 1916204 - RNA, 19 nt, Homo sapiens
  misc_RNA (1)...(19): siRNA sense strand
cacaagagcauccaaagaa

SEQ ID NO: 1916205 - RNA, 19 nt, Homo sapiens
  misc_RNA (1)...(19): siRNA sense strand
gaaaaucgguugccucagu

SEQ ID NO: 1916206 - RNA, 19 nt, Homo sapiens
  misc_RNA (1)...(19): siRNA sense strand
ggaaauagaaaccguacau

SEQ ID NO: 1916207 - RNA, 19 nt, Homo sapiens
  misc_RNA (1)...(19): siRNA sense strand
gaaaacagagguggaaaua

SEQ ID NO: 1916208 - RNA, 19 nt, Homo sapiens
  misc_RNA (1)...(19): siRNA sense strand
gcuuagagccaaagacuug

SEQ ID NO: 1916209 - RNA, 19 nt, Homo sapiens
  misc_RNA (1)...(19): siRNA sense strand
aagcacuucuccucagaua

SEQ ID NO: 1916210 - RNA, 19 nt, Homo sapiens
  misc_RNA (1)...(19): siRNA sense strand
aaacagauacaucagaaga

SEQ ID NO: 1916211 - RNA, 19 nt, Homo sapiens
  misc_RNA (1)...(19): siRNA sense strand
cagaaaagcuuaagaaucg

SEQ ID NO: 1916212 - RNA, 19 nt, Homo sapiens
  misc_RNA (1)...(19): siRNA sense strand
ggaacaaggccaagaaagg

SEQ ID NO: 1916213 - RNA, 19 nt, Homo sapiens
  misc_RNA (1)...(19): siRNA sense strand
guacaaaggagagguuaau

SEQ ID NO: 1916214 - RNA, 19 nt, Homo sapiens
  misc_RNA (1)...(19): siRNA sense strand
uagaauguuugaccagaga

SEQ ID NO: 1916215 - RNA, 19 nt, Homo sapiens
  misc_RNA (1)...(19): siRNA sense strand
gcacuucuccucagauaac

SEQ ID NO: 1916216 - RNA, 19 nt, Homo sapiens
  misc_RNA (1)...(19): siRNA sense strand
gagcauccaaagaaagaaa

SEQ ID NO: 1916217 - RNA, 19 nt, Homo sapiens
  misc_RNA (1)...(19): siRNA sense strand
gaaaggggacuauuuggaa

SEQ ID NO: 1916218 - RNA, 19 nt, Homo sapiens
  misc_RNA (1)...(19): siRNA sense strand
gaaauagaaaccguacaug

SEQ ID NO: 1916219 - RNA, 19 nt, Homo sapiens
  misc_RNA (1)...(19): siRNA sense strand
ccacguauagaauguuuga

SEQ ID NO: 1916220 - RNA, 19 nt, Homo sapiens
  misc_RNA (1)...(19): siRNA sense strand
cuaagaaagaggaacguaa

SEQ ID NO: 1916221 - RNA, 19 nt, Homo sapiens
  misc_RNA (1)...(19): siRNA sense strand
ggacagaggaggaaaugcu

SEQ ID NO: 1916222 - RNA, 19 nt, Homo sapiens
  misc_RNA (1)...(19): siRNA sense strand
cccaagaucaugcaauauu

SEQ ID NO: 1916223 - RNA, 19 nt, Homo sapiens
  misc_RNA (1)...(19): siRNA sense strand
cugaaaccauccagaccua

SEQ ID NO: 1916224 - RNA, 19 nt, Homo sapiens
  misc_RNA (1)...(19): siRNA sense strand
gaaaggacagaggaggaaa

SEQ ID NO: 1916225 - RNA, 19 nt, Homo sapiens
  misc_RNA (1)...(19): siRNA sense strand
ucacaugguguagaacaua

SEQ ID NO: 1916226 - RNA, 19 nt, Homo sapiens
  misc_RNA (1)...(19): siRNA sense strand
gcccaugacagcagauuga

SEQ ID NO: 1916227 - RNA, 19 nt, Homo sapiens
  misc_RNA (1)...(19): siRNA sense strand
uaagaaagaggaacguaag

SEQ ID NO: 1916228 - RNA, 19 nt, Homo sapiens
  misc_RNA (1)...(19): siRNA sense strand
aaauagaaaccguacaugu

SEQ ID NO: 1916229 - RNA, 19 nt, Homo sapiens
  misc_RNA (1)...(19): siRNA sense strand
aaacacaagagcauccaaa

SEQ ID NO: 1916230 - RNA, 19 nt, Homo sapiens
  misc_RNA (1)...(19): siRNA sense strand
uggcucacaugguguagaa

SEQ ID NO: 1916231 - RNA, 19 nt, Homo sapiens
  misc_RNA (1)...(19): siRNA sense strand
gcaauauuccacaaacagu

SEQ ID NO: 1916232 - RNA, 19 nt, Homo sapiens
  misc_RNA (1)...(19): siRNA sense strand
guguagaacauagaguuua

SEQ ID NO: 1916233 - RNA, 19 nt, Homo sapiens
  misc_RNA (1)...(19): siRNA sense strand
gaaaaggcacccagaggaa

SEQ ID NO: 1916234 - RNA, 19 nt, Homo sapiens
  misc_RNA (1)...(19): siRNA sense strand
ccagucuauucuuggauuu

SEQ ID NO: 1916235 - RNA, 19 nt, Homo sapiens
  misc_RNA (1)...(19): siRNA sense strand
guacagaaaagcuuaagaa

SEQ ID NO: 1916236 - RNA, 19 nt, Homo sapiens
  misc_RNA (1)...(19): siRNA sense strand
ucgguugccucagugguua

SEQ ID NO: 1916237 - RNA, 19 nt, Homo sapiens
  misc_RNA (1)...(19): siRNA sense strand
aaaggaacaaggccaagaa

SEQ ID NO: 1916238 - RNA, 19 nt, Homo sapiens
  misc_RNA (1)...(19): siRNA sense strand
ugacuuagacaaacacaag

SEQ ID NO: 1916239 - RNA, 19 nt, Homo sapiens
  misc_RNA (1)...(19): siRNA sense strand
cgaggaaauugacuuagac

SEQ ID NO: 1916240 - RNA, 19 nt, Homo sapiens
  misc_RNA (1)...(19): siRNA sense strand
acaagcacuucuccucaga

SEQ ID NO: 1916241 - RNA, 19 nt, Homo sapiens
  misc_RNA (1)...(19): siRNA sense strand
gguguagaacauagaguuu

SEQ ID NO: 1916242 - RNA, 19 nt, Homo sapiens
  misc_RNA (1)...(19): siRNA sense strand
acaaaggagagguuaauuc

SEQ ID NO: 1916243 - RNA, 19 nt, Homo sapiens
  misc_RNA (1)...(19): siRNA sense strand
gagccaaagacuuguuuca

SEQ ID NO: 1916244 - RNA, 19 nt, Homo sapiens
  misc_RNA (1)...(19): siRNA sense strand
caaaggagagguuaauucc

SEQ ID NO: 1916245 - RNA, 19 nt, Homo sapiens
  misc_RNA (1)...(19): siRNA sense strand
ccagaggaaggcagagaaa

SEQ ID NO: 1916246 - RNA, 19 nt, Homo sapiens
  misc_RNA (1)...(19): siRNA sense strand
gaugaaaggggacuauuug

SEQ ID NO: 1916247 - RNA, 19 nt, Homo sapiens
  misc_RNA (1)...(19): siRNA sense strand
agauguagucucuaagaaa

SEQ ID NO: 1916248 - RNA, 19 nt, Homo sapiens
  misc_RNA (1)...(19): siRNA sense strand
uuaagaaucgaaaggagaa

SEQ ID NO: 1916249 - RNA, 19 nt, Homo sapiens
  misc_RNA (1)...(19): siRNA sense strand
acacaagagcauccaaaga

SEQ ID NO: 1916250 - RNA, 19 nt, Homo sapiens
  misc_RNA (1)...(19): siRNA sense strand
ucaucaagccagucacaaa

SEQ ID NO: 1916251 - RNA, 19 nt, Homo sapiens
  misc_RNA (1)...(19): siRNA sense strand
guacucaucaagccaguca

SEQ ID NO: 1916252 - RNA, 19 nt, Homo sapiens
  misc_RNA (1)...(19): siRNA sense strand
aaagaagacauaugacucu

SEQ ID NO: 1916253 - RNA, 19 nt, Homo sapiens
  misc_RNA (1)...(19): siRNA sense strand
auagaaaccguacauguca

SEQ ID NO: 1916254 - RNA, 19 nt, Homo sapiens
  misc_RNA (1)...(19): siRNA sense strand
cagaggaggagcggucuaa

SEQ ID NO: 1916255 - RNA, 19 nt, Homo sapiens
  misc_RNA (1)...(19): siRNA sense strand
gaaaccguacaugucagua

SEQ ID NO: 1916256 - RNA, 19 nt, Homo sapiens
  misc_RNA (1)...(19): siRNA sense strand
agacccacguauagaaugu

SEQ ID NO: 1916257 - RNA, 19 nt, Homo sapiens
  misc_RNA (1)...(19): siRNA sense strand
caagagcauccaaagaaag

SEQ ID NO: 1916258 - RNA, 19 nt, Homo sapiens
  misc_RNA (1)...(19): siRNA sense strand
ucaaagaagacauaugacu

SEQ ID NO: 1916259 - RNA, 19 nt, Homo sapiens
  misc_RNA (1)...(19): siRNA sense strand
uguagaacauagaguuuac

SEQ ID NO: 1916260 - RNA, 19 nt, Homo sapiens
  misc_RNA (1)...(19): siRNA sense strand
ccugaacuuuaaucaacaa

SEQ ID NO: 1916261 - RNA, 19 nt, Homo sapiens
  misc_RNA (1)...(19): siRNA sense strand
ugggaccagucuauucuug

SEQ ID NO: 1916262 - RNA, 19 nt, Homo sapiens
  misc_RNA (1)...(19): siRNA sense strand
aagagcauccaaagaaaga

SEQ ID NO: 1916263 - RNA, 19 nt, Homo sapiens
  misc_RNA (1)...(19): siRNA sense strand
caugcaauauuccacaaac

SEQ ID NO: 1916264 - RNA, 19 nt, Homo sapiens
  misc_RNA (1)...(19): siRNA sense strand
cagaggaggaaaugcuuug

SEQ ID NO: 1916265 - RNA, 19 nt, Homo sapiens
  misc_RNA (1)...(19): siRNA sense strand
aauagaaaccguacauguc

SEQ ID NO: 1916266 - RNA, 19 nt, Homo sapiens
  misc_RNA (1)...(19): siRNA sense strand
ccaguaccccugaacuuua

SEQ ID NO: 1916267 - RNA, 19 nt, Homo sapiens
  misc_RNA (1)...(19): siRNA sense strand
gacuagacucucugagcua

SEQ ID NO: 1916268 - RNA, 19 nt, Homo sapiens
  misc_RNA (1)...(19): siRNA sense strand
gcucacaugguguagaaca

SEQ ID NO: 1916269 - RNA, 19 nt, Homo sapiens
  misc_RNA (1)...(19): siRNA sense strand
gacagaggaggaaaugcuu

SEQ ID NO: 1916270 - RNA, 19 nt, Homo sapiens
  misc_RNA (1)...(19): siRNA sense strand
gguacaaaggagagguuaa

SEQ ID NO: 1916271 - RNA, 19 nt, Homo sapiens
  misc_RNA (1)...(19): siRNA sense strand
cauccagaccuacccaaga

SEQ ID NO: 1916272 - RNA, 19 nt, Homo sapiens
  misc_RNA (1)...(19): siRNA sense strand
ggagcggucuaagcauaag

SEQ ID NO: 1916273 - RNA, 19 nt, Homo sapiens
  misc_RNA (1)...(19): siRNA sense strand
cacaugguguagaacauag

SEQ ID NO: 1916274 - RNA, 19 nt, Homo sapiens
  misc_RNA (1)...(19): siRNA sense strand
cugcgaggaaauugacuua

SEQ ID NO: 1916275 - RNA, 19 nt, Homo sapiens
  misc_RNA (1)...(19): siRNA sense strand
aacauagaguuuacaagca

SEQ ID NO: 1916276 - RNA, 19 nt, Homo sapiens
  misc_RNA (1)...(19): siRNA sense strand
caguaccccugaacuuuaa

SEQ ID NO: 1916277 - RNA, 19 nt, Homo sapiens
  misc_RNA (1)...(19): siRNA sense strand
gaggaacguaagcguacaa

SEQ ID NO: 1916278 - RNA, 19 nt, Homo sapiens
  misc_RNA (1)...(19): siRNA sense strand
gaggaaauugacuuagaca

SEQ ID NO: 1916279 - RNA, 19 nt, Homo sapiens
  misc_RNA (1)...(19): siRNA sense strand
ccagacccacguauagaau

SEQ ID NO: 1916280 - RNA, 19 nt, Homo sapiens
  misc_RNA (1)...(19): siRNA sense strand
agauacaucagaagaggaa

SEQ ID NO: 1916281 - RNA, 19 nt, Homo sapiens
  misc_RNA (1)...(19): siRNA sense strand
cacaaacagauacaucaga

SEQ ID NO: 1916282 - RNA, 19 nt, Homo sapiens
  misc_RNA (1)...(19): siRNA sense strand
ccagaccuacccaagauca

SEQ ID NO: 1916283 - RNA, 19 nt, Homo sapiens
  misc_RNA (1)...(19): siRNA sense strand
cacgagggacuguuucuca

SEQ ID NO: 1916284 - RNA, 19 nt, Homo sapiens
  misc_RNA (1)...(19): siRNA sense strand
acccacguauagaauguuu

SEQ ID NO: 1916285 - RNA, 19 nt, Homo sapiens
  misc_RNA (1)...(19): siRNA sense strand
ucaagccagucacaaacag

SEQ ID NO: 1916286 - RNA, 19 nt, Homo sapiens
  misc_RNA (1)...(19): siRNA sense strand
ugaggaaucuuuguacuua

SEQ ID NO: 1916287 - RNA, 19 nt, Homo sapiens
  misc_RNA (1)...(19): siRNA sense strand
ccaaagugcugggauuaua

SEQ ID NO: 1916288 - RNA, 19 nt, Homo sapiens
  misc_RNA (1)...(19): siRNA sense strand
gagggcagcuuuagaccuu

SEQ ID NO: 1916289 - RNA, 19 nt, Homo sapiens
  misc_RNA (1)...(19): siRNA sense strand
gucaagaggucaaggugua

SEQ ID NO: 1916290 - RNA, 19 nt, Homo sapiens
  misc_RNA (1)...(19): siRNA sense strand
ucaaguagcugggauuaca

SEQ ID NO: 1916291 - RNA, 19 nt, Homo sapiens
  misc_RNA (1)...(19): siRNA sense strand
gcagugaggaaucuuugua

SEQ ID NO: 1916292 - RNA, 19 nt, Homo sapiens
  misc_RNA (1)...(19): siRNA sense strand
gaggaaucuuuguacuuaa

SEQ ID NO: 1916293 - RNA, 19 nt, Homo sapiens
  misc_RNA (1)...(19): siRNA sense strand
gccuggaucuguuuucuua

SEQ ID NO: 1916294 - RNA, 19 nt, Homo sapiens
  misc_RNA (1)...(19): siRNA sense strand
caaagugcugggauuauag

SEQ ID NO: 1916295 - RNA, 19 nt, Homo sapiens
  misc_RNA (1)...(19): siRNA sense strand
gggcugacuuugcugacau

SEQ ID NO: 1916296 - RNA, 19 nt, Homo sapiens
  misc_RNA (1)...(19): siRNA sense strand
ccagaacuguggcagaaaa

SEQ ID NO: 1916297 - RNA, 19 nt, Homo sapiens
  misc_RNA (1)...(19): siRNA sense strand
ucagcauccucagcgauuu

SEQ ID NO: 1916298 - RNA, 19 nt, Homo sapiens
  misc_RNA (1)...(19): siRNA sense strand
gugaggaaucuuuguacuu

SEQ ID NO: 1916299 - RNA, 19 nt, Homo sapiens
  misc_RNA (1)...(19): siRNA sense strand
cuuccaaagugcugggauu

SEQ ID NO: 1916300 - RNA, 19 nt, Homo sapiens
  misc_RNA (1)...(19): siRNA sense strand
ggccagggcaacaaaguca

SEQ ID NO: 1916301 - RNA, 19 nt, Homo sapiens
  misc_RNA (1)...(19): siRNA sense strand
ccagagggcagcuuuagac

SEQ ID NO: 1916302 - RNA, 19 nt, Homo sapiens
  misc_RNA (1)...(19): siRNA sense strand
ucucaaguagcugggauua

SEQ ID NO: 1916303 - RNA, 19 nt, Homo sapiens
  misc_RNA (1)...(19): siRNA sense strand
ccucccagguucaagcaau

SEQ ID NO: 1916304 - RNA, 19 nt, Homo sapiens
  misc_RNA (1)...(19): siRNA sense strand
gaaaccugagugugguaga

SEQ ID NO: 1916305 - RNA, 19 nt, Homo sapiens
  misc_RNA (1)...(19): siRNA sense strand
cuaccgggcugacuuugcu

SEQ ID NO: 1916306 - RNA, 19 nt, Homo sapiens
  misc_RNA (1)...(19): siRNA sense strand
cuuuagaccuuuucaaaug

SEQ ID NO: 1916307 - RNA, 19 nt, Homo sapiens
  misc_RNA (1)...(19): siRNA sense strand
aggaaucuuuguacuuaag

SEQ ID NO: 1916308 - RNA, 19 nt, Homo sapiens
  misc_RNA (1)...(19): siRNA sense strand
gugcaguagugcgaucuca

SEQ ID NO: 1916309 - RNA, 19 nt, Homo sapiens
  misc_RNA (1)...(19): siRNA sense strand
gccucagccuuccaaagug

SEQ ID NO: 1916310 - RNA, 19 nt, Homo sapiens
  misc_RNA (1)...(19): siRNA sense strand
ccacagaaccagaaauaga

SEQ ID NO: 1916311 - RNA, 19 nt, Homo sapiens
  misc_RNA (1)...(19): siRNA sense strand
gcccacagaaccagaaaua

SEQ ID NO: 1916312 - RNA, 19 nt, Homo sapiens
  misc_RNA (1)...(19): siRNA sense strand
gcacgucccguaucuguuc

SEQ ID NO: 1916313 - RNA, 19 nt, Homo sapiens
  misc_RNA (1)...(19): siRNA sense strand
uggaugcguugaagaacua

SEQ ID NO: 1916314 - RNA, 19 nt, Homo sapiens
  misc_RNA (1)...(19): siRNA sense strand
gcaugauccuagcuuccuu

SEQ ID NO: 1916315 - RNA, 19 nt, Homo sapiens
  misc_RNA (1)...(19): siRNA sense strand
ugaggacgcugaggcugaa

SEQ ID NO: 1916316 - RNA, 19 nt, Homo sapiens
  misc_RNA (1)...(19): siRNA sense strand
ccauccugcuggugaacua

SEQ ID NO: 1916317 - RNA, 19 nt, Homo sapiens
  misc_RNA (1)...(19): siRNA sense strand
uugaagaacuaugagauca

SEQ ID NO: 1916318 - RNA, 19 nt, Homo sapiens
  misc_RNA (1)...(19): siRNA sense strand
ccaaagccgugagcgucuu

SEQ ID NO: 1916319 - RNA, 19 nt, Homo sapiens
  misc_RNA (1)...(19): siRNA sense strand
gcaguucgaggugcucaug

SEQ ID NO: 1916320 - RNA, 19 nt, Homo sapiens
  misc_RNA (1)...(19): siRNA sense strand
uguacgccgucaccaaguu

SEQ ID NO: 1916321 - RNA, 19 nt, Homo sapiens
  misc_RNA (1)...(19): siRNA sense strand
guggaugcguugaagaacu

SEQ ID NO: 1916322 - RNA, 19 nt, Homo sapiens
  misc_RNA (1)...(19): siRNA sense strand
guugaagaacuaugagauc

SEQ ID NO: 1916323 - RNA, 19 nt, Homo sapiens
  misc_RNA (1)...(19): siRNA sense strand
cacagaaccagaaauagag

SEQ ID NO: 1916324 - RNA, 19 nt, Homo sapiens
  misc_RNA (1)...(19): siRNA sense strand
ggagauaucugcugcauac

SEQ ID NO: 1916325 - RNA, 19 nt, Homo sapiens
  misc_RNA (1)...(19): siRNA sense strand
ggaauaagccacaguaaca

SEQ ID NO: 1916326 - RNA, 19 nt, Homo sapiens
  misc_RNA (1)...(19): siRNA sense strand
cgaguucgguuuaaugaaa

SEQ ID NO: 1916327 - RNA, 19 nt, Homo sapiens
  misc_RNA (1)...(19): siRNA sense strand
aaacagggagguccacuua

SEQ ID NO: 1916328 - RNA, 19 nt, Homo sapiens
  misc_RNA (1)...(19): siRNA sense strand
gcuauuguccugacuguga

SEQ ID NO: 1916329 - RNA, 19 nt, Homo sapiens
  misc_RNA (1)...(19): siRNA sense strand
ucuacgaaauggaggcuua

SEQ ID NO: 1916330 - RNA, 19 nt, Homo sapiens
  misc_RNA (1)...(19): siRNA sense strand
aaacggacacgcugaauag

SEQ ID NO: 1916331 - RNA, 19 nt, Homo sapiens
  misc_RNA (1)...(19): siRNA sense strand
cggacacgcugaauaguag

SEQ ID NO: 1916332 - RNA, 19 nt, Homo sapiens
  misc_RNA (1)...(19): siRNA sense strand
acagggagguccacuuaca

SEQ ID NO: 1916333 - RNA, 19 nt, Homo sapiens
  misc_RNA (1)...(19): siRNA sense strand
caacugccaauccuguaaa

SEQ ID NO: 1916334 - RNA, 19 nt, Homo sapiens
  misc_RNA (1)...(19): siRNA sense strand
agaucaaagugcaggcuaa

SEQ ID NO: 1916335 - RNA, 19 nt, Homo sapiens
  misc_RNA (1)...(19): siRNA sense strand
ggaagucaaccacuacaac

SEQ ID NO: 1916336 - RNA, 19 nt, Homo sapiens
  misc_RNA (1)...(19): siRNA sense strand
acaguaccauggcuauugu

SEQ ID NO: 1916337 - RNA, 19 nt, Homo sapiens
  misc_RNA (1)...(19): siRNA sense strand
ccaacugccaauccuguaa

SEQ ID NO: 1916338 - RNA, 19 nt, Homo sapiens
  misc_RNA (1)...(19): siRNA sense strand
ccucccagguucaagcuau

SEQ ID NO: 1916339 - RNA, 19 nt, Homo sapiens
  misc_RNA (1)...(19): siRNA sense strand
ggagguccacuuacacagu

SEQ ID NO: 1916340 - RNA, 19 nt, Homo sapiens
  misc_RNA (1)...(19): siRNA sense strand
uagcucaaguggcacaaca

SEQ ID NO: 1916341 - RNA, 19 nt, Homo sapiens
  misc_RNA (1)...(19): siRNA sense strand
accuacagcuggaggauga

SEQ ID NO: 1916342 - RNA, 19 nt, Homo sapiens
  misc_RNA (1)...(19): siRNA sense strand
ccacccaccgggaaagauu

SEQ ID NO: 1916343 - RNA, 19 nt, Homo sapiens
  misc_RNA (1)...(19): siRNA sense strand
gaucaaagugcaggcuaau

SEQ ID NO: 1916344 - RNA, 19 nt, Homo sapiens
  misc_RNA (1)...(19): siRNA sense strand
caauggcacccuucuacga

SEQ ID NO: 1916345 - RNA, 19 nt, Homo sapiens
  misc_RNA (1)...(19): siRNA sense strand
gcugcauacccaacaguaa

SEQ ID NO: 1916346 - RNA, 19 nt, Homo sapiens
  misc_RNA (1)...(19): siRNA sense strand
gggaauaagccacaguaac

SEQ ID NO: 1916347 - RNA, 19 nt, Homo sapiens
  misc_RNA (1)...(19): siRNA sense strand
ucaaagugcaggcuaaugc

SEQ ID NO: 1916348 - RNA, 19 nt, Homo sapiens
  misc_RNA (1)...(19): siRNA sense strand
gcuccaguccagcuucuga

SEQ ID NO: 1916349 - RNA, 19 nt, Homo sapiens
  misc_RNA (1)...(19): siRNA sense strand
uugacacccugaccucuga

SEQ ID NO: 1916350 - RNA, 19 nt, Homo sapiens
  misc_RNA (1)...(19): siRNA sense strand
gaggaugagaugacugaca

SEQ ID NO: 1916351 - RNA, 19 nt, Homo sapiens
  misc_RNA (1)...(19): siRNA sense strand
gcugaauaguagcucaagu

SEQ ID NO: 1916352 - RNA, 19 nt, Homo sapiens
  misc_RNA (1)...(19): siRNA sense strand
gaauaagccacaguaacag

SEQ ID NO: 1916353 - RNA, 19 nt, Homo sapiens
  misc_RNA (1)...(19): siRNA sense strand
uacaguaccauggcuauug

SEQ ID NO: 1916354 - RNA, 19 nt, Homo sapiens
  misc_RNA (1)...(19): siRNA sense strand
gguugacaccugugaagug

SEQ ID NO: 1916355 - RNA, 19 nt, Homo sapiens
  misc_RNA (1)...(19): siRNA sense strand
acggacacgcugaauagua

SEQ ID NO: 1916356 - RNA, 19 nt, Homo sapiens
  misc_RNA (1)...(19): siRNA sense strand
gcaccaaaaccacagaaga

SEQ ID NO: 1916357 - RNA, 19 nt, Homo sapiens
  misc_RNA (1)...(19): siRNA sense strand
guccagcuucugaugcaua

SEQ ID NO: 1916358 - RNA, 19 nt, Homo sapiens
  misc_RNA (1)...(19): siRNA sense strand
gccuagagaagaucaaagu

SEQ ID NO: 1916359 - RNA, 19 nt, Homo sapiens
  misc_RNA (1)...(19): siRNA sense strand
ccuccagccuagagaagau

SEQ ID NO: 1916360 - RNA, 19 nt, Homo sapiens
  misc_RNA (1)...(19): siRNA sense strand
uggaggaugagaugacuga

SEQ ID NO: 1916361 - RNA, 19 nt, Homo sapiens
  misc_RNA (1)...(19): siRNA sense strand
cuaacaaaauuccaaaugg

SEQ ID NO: 1916362 - RNA, 19 nt, Homo sapiens
  misc_RNA (1)...(19): siRNA sense strand
cugaauaguagcucaagug

SEQ ID NO: 1916363 - RNA, 19 nt, Homo sapiens
  misc_RNA (1)...(19): siRNA sense strand
gaugacugacagcuccaaa

SEQ ID NO: 1916364 - RNA, 19 nt, Homo sapiens
  misc_RNA (1)...(19): siRNA sense strand
caguccagcuucugaugca

SEQ ID NO: 1916365 - RNA, 19 nt, Homo sapiens
  misc_RNA (1)...(19): siRNA sense strand
gcacccuucuacgaaaugg

SEQ ID NO: 1916366 - RNA, 19 nt, Homo sapiens
  misc_RNA (1)...(19): siRNA sense strand
gaugggaacuggcacuuua

SEQ ID NO: 1916367 - RNA, 19 nt, Homo sapiens
  misc_RNA (1)...(19): siRNA sense strand
ggaauaggaucuucauaca

SEQ ID NO: 1916368 - RNA, 19 nt, Homo sapiens
  misc_RNA (1)...(19): siRNA sense strand
gcuggagacugacacuuua

SEQ ID NO: 1916369 - RNA, 19 nt, Homo sapiens
  misc_RNA (1)...(19): siRNA sense strand
gcugauggcucaccugaug

SEQ ID NO: 1916370 - RNA, 19 nt, Homo sapiens
  misc_RNA (1)...(19): siRNA sense strand
ccacacugcuggcaagaaa

SEQ ID NO: 1916371 - RNA, 19 nt, Homo sapiens
  misc_RNA (1)...(19): siRNA sense strand
ccacuucuauuccuucuau

SEQ ID NO: 1916372 - RNA, 19 nt, Homo sapiens
  misc_RNA (1)...(19): siRNA sense strand
gggaaaaccuacuggaaua

SEQ ID NO: 1916373 - RNA, 19 nt, Homo sapiens
  misc_RNA (1)...(19): siRNA sense strand
gauguuggacugcauaauu

SEQ ID NO: 1916374 - RNA, 19 nt, Homo sapiens
  misc_RNA (1)...(19): siRNA sense strand
guacaugcaugccaucuac

SEQ ID NO: 1916375 - RNA, 19 nt, Homo sapiens
  misc_RNA (1)...(19): siRNA sense strand
gcgaugacauuugcauuug

SEQ ID NO: 1916376 - RNA, 19 nt, Homo sapiens
  misc_RNA (1)...(19): siRNA sense strand
gaugcuggccuaugucuuu

SEQ ID NO: 1916377 - RNA, 19 nt, Homo sapiens
  misc_RNA (1)...(19): siRNA sense strand
ggaacuggcacuuuaccua

SEQ ID NO: 1916378 - RNA, 19 nt, Homo sapiens
  misc_RNA (1)...(19): siRNA sense strand
aauuugagcuggagacuga

SEQ ID NO: 1916379 - RNA, 19 nt, Homo sapiens
  misc_RNA (1)...(19): siRNA sense strand
aagagaaggugguacaaga

SEQ ID NO: 1916380 - RNA, 19 nt, Homo sapiens
  misc_RNA (1)...(19): siRNA sense strand
ggagacugacacuuuauuu

SEQ ID NO: 1916381 - RNA, 19 nt, Homo sapiens
  misc_RNA (1)...(19): siRNA sense strand
aauaggaucuucauacaag

SEQ ID NO: 1916382 - RNA, 19 nt, Homo sapiens
  misc_RNA (1)...(19): siRNA sense strand
cacuuuauuuggaggauua

SEQ ID NO: 1916383 - RNA, 19 nt, Homo sapiens
  misc_RNA (1)...(19): siRNA sense strand
gaaggaugcgaccgacuuu

SEQ ID NO: 1916384 - RNA, 19 nt, Homo sapiens
  misc_RNA (1)...(19): siRNA sense strand
gaugacauuugcauuugug

SEQ ID NO: 1916385 - RNA, 19 nt, Homo sapiens
  misc_RNA (1)...(19): siRNA sense strand
gaauaggaucuucauacaa

SEQ ID NO: 1916386 - RNA, 19 nt, Homo sapiens
  misc_RNA (1)...(19): siRNA sense strand
ucacuaggcuuccacuucu

SEQ ID NO: 1916387 - RNA, 19 nt, Homo sapiens
  misc_RNA (1)...(19): siRNA sense strand
ugagcaccauguucaguuu

SEQ ID NO: 1916388 - RNA, 19 nt, Homo sapiens
  misc_RNA (1)...(19): siRNA sense strand
gagacugacacuuuauuug

SEQ ID NO: 1916389 - RNA, 19 nt, Homo sapiens
  misc_RNA (1)...(19): siRNA sense strand
uauccagucuuacacaaug

SEQ ID NO: 1916390 - RNA, 19 nt, Homo sapiens
  misc_RNA (1)...(19): siRNA sense strand
uggaagaaguuaagagaag

SEQ ID NO: 1916391 - RNA, 19 nt, Homo sapiens
  misc_RNA (1)...(19): siRNA sense strand
gacugacacuuuauuugga

SEQ ID NO: 1916392 - RNA, 19 nt, Homo sapiens
  misc_RNA (1)...(19): siRNA sense strand
uggacugcauaauuucuua

SEQ ID NO: 1916393 - RNA, 19 nt, Homo sapiens
  misc_RNA (1)...(19): siRNA sense strand
gaaggugguacaagacaga

SEQ ID NO: 1916394 - RNA, 19 nt, Homo sapiens
  misc_RNA (1)...(19): siRNA sense strand
cacagacccuggauucuca

SEQ ID NO: 1916395 - RNA, 19 nt, Homo sapiens
  misc_RNA (1)...(19): siRNA sense strand
gggagucacuguggagaau

SEQ ID NO: 1916396 - RNA, 19 nt, Homo sapiens
  misc_RNA (1)...(19): siRNA sense strand
ucucggaguucaucaaaca

SEQ ID NO: 1916397 - RNA, 19 nt, Homo sapiens
  misc_RNA (1)...(19): siRNA sense strand
ggcgaugacauuugcauuu

SEQ ID NO: 1916398 - RNA, 19 nt, Homo sapiens
  misc_RNA (1)...(19): siRNA sense strand
ccacggcgaugacauuugc

SEQ ID NO: 1916399 - RNA, 19 nt, Homo sapiens
  misc_RNA (1)...(19): siRNA sense strand
gauccuguccaaccuggua

SEQ ID NO: 1916400 - RNA, 19 nt, Homo sapiens
  misc_RNA (1)...(19): siRNA sense strand
gcacagacccuggauucuc

SEQ ID NO: 1916401 - RNA, 19 nt, Homo sapiens
  misc_RNA (1)...(19): siRNA sense strand
ggacugcauaauuucuuaa

SEQ ID NO: 1916402 - RNA, 19 nt, Homo sapiens
  misc_RNA (1)...(19): siRNA sense strand
uggccuaugucuuuuauua

SEQ ID NO: 1916403 - RNA, 19 nt, Homo sapiens
  misc_RNA (1)...(19): siRNA sense strand
ugacguggcucuguucucu

SEQ ID NO: 1916404 - RNA, 19 nt, Homo sapiens
  misc_RNA (1)...(19): siRNA sense strand
cuaugaaguuuacaaaguc

SEQ ID NO: 1916405 - RNA, 19 nt, Homo sapiens
  misc_RNA (1)...(19): siRNA sense strand
ucaccgggauguggaggua

SEQ ID NO: 1916406 - RNA, 19 nt, Homo sapiens
  misc_RNA (1)...(19): siRNA sense strand
ugaaguacuuggugcucuu

SEQ ID NO: 1916407 - RNA, 19 nt, Homo sapiens
  misc_RNA (1)...(19): siRNA sense strand
gaaguacuuggugcucuuu

SEQ ID NO: 1916408 - RNA, 19 nt, Homo sapiens
  misc_RNA (1)...(19): siRNA sense strand
acgcugcccuugcuucuug

SEQ ID NO: 1916409 - RNA, 19 nt, Homo sapiens
  misc_RNA (1)...(19): siRNA sense strand
uuaccuacuugccucacua

SEQ ID NO: 1916410 - RNA, 19 nt, Homo sapiens
  misc_RNA (1)...(19): siRNA sense strand
gaccuacgccacggacuaa

SEQ ID NO: 1916411 - RNA, 19 nt, Homo sapiens
  misc_RNA (1)...(19): siRNA sense strand
ccuggaugcuggccuaugu

SEQ ID NO: 1916412 - RNA, 19 nt, Homo sapiens
  misc_RNA (1)...(19): siRNA sense strand
auguuggacugcauaauuu

SEQ ID NO: 1916413 - RNA, 19 nt, Homo sapiens
  misc_RNA (1)...(19): siRNA sense strand
gagaaggugguacaagaca

SEQ ID NO: 1916414 - RNA, 19 nt, Homo sapiens
  misc_RNA (1)...(19): siRNA sense strand
ugggauuccuguacugcua

SEQ ID NO: 1916415 - RNA, 19 nt, Homo sapiens
  misc_RNA (1)...(19): siRNA sense strand
uguccaaccugguauuucu

SEQ ID NO: 1916416 - RNA, 19 nt, Homo sapiens
  misc_RNA (1)...(19): siRNA sense strand
gcugcaggguguggaagaa

SEQ ID NO: 1916417 - RNA, 19 nt, Homo sapiens
  misc_RNA (1)...(19): siRNA sense strand
aggacagucuggcccgaua

SEQ ID NO: 1916418 - RNA, 19 nt, Homo sapiens
  misc_RNA (1)...(19): siRNA sense strand
cgaugacauuugcauuugu

SEQ ID NO: 1916419 - RNA, 19 nt, Homo sapiens
  misc_RNA (1)...(19): siRNA sense strand
uggcucaccugauguacau

SEQ ID NO: 1916420 - RNA, 19 nt, Homo sapiens
  misc_RNA (1)...(19): siRNA sense strand
caugguagugucucaaaug

SEQ ID NO: 1916421 - RNA, 19 nt, Homo sapiens
  misc_RNA (1)...(19): siRNA sense strand
agacugacacuuuauuugg

SEQ ID NO: 1916422 - RNA, 19 nt, Homo sapiens
  misc_RNA (1)...(19): siRNA sense strand
gaaagcacagacccuggau

SEQ ID NO: 1916423 - RNA, 19 nt, Homo sapiens
  misc_RNA (1)...(19): siRNA sense strand
cauuugcauuugugagcua

SEQ ID NO: 1916424 - RNA, 19 nt, Homo sapiens
  misc_RNA (1)...(19): siRNA sense strand
guuaagagaaggugguaca

SEQ ID NO: 1916425 - RNA, 19 nt, Homo sapiens
  misc_RNA (1)...(19): siRNA sense strand
aagcacagacccuggauuc

SEQ ID NO: 1916426 - RNA, 19 nt, Homo sapiens
  misc_RNA (1)...(19): siRNA sense strand
gaagaaguuaagagaaggu

SEQ ID NO: 1916427 - RNA, 19 nt, Homo sapiens
  misc_RNA (1)...(19): siRNA sense strand
ggauucucaugcucuaugg

SEQ ID NO: 1916428 - RNA, 19 nt, Homo sapiens
  misc_RNA (1)...(19): siRNA sense strand
gcaggguguggaagaaguu

SEQ ID NO: 1916429 - RNA, 19 nt, Homo sapiens
  misc_RNA (1)...(19): siRNA sense strand
gagucacuguggagaaugg

SEQ ID NO: 1916430 - RNA, 19 nt, Homo sapiens
  misc_RNA (1)...(19): siRNA sense strand
ccuggauucucaugcucua

SEQ ID NO: 1916431 - RNA, 19 nt, Homo sapiens
  misc_RNA (1)...(19): siRNA sense strand
uggaauaggaucuucauac

SEQ ID NO: 1916432 - RNA, 19 nt, Homo sapiens
  misc_RNA (1)...(19): siRNA sense strand
gugagcaccauguucaguu

SEQ ID NO: 1916433 - RNA, 19 nt, Homo sapiens
  misc_RNA (1)...(19): siRNA sense strand
ugauggcucaccugaugua

SEQ ID NO: 1916434 - RNA, 19 nt, Homo sapiens
  misc_RNA (1)...(19): siRNA sense strand
cuacuggaauaggaucuuc

SEQ ID NO: 1916435 - RNA, 19 nt, Homo sapiens
  misc_RNA (1)...(19): siRNA sense strand
agaaggaugcgaccgacuu

SEQ ID NO: 1916436 - RNA, 19 nt, Homo sapiens
  misc_RNA (1)...(19): siRNA sense strand
gcauggcggcuacgacuac

SEQ ID NO: 1916437 - RNA, 19 nt, Homo sapiens
  misc_RNA (1)...(19): siRNA sense strand
gcgccuggauggacucacu

SEQ ID NO: 1916438 - RNA, 19 nt, Homo sapiens
  misc_RNA (1)...(19): siRNA sense strand
guggaagaaguuaagagaa

SEQ ID NO: 1916439 - RNA, 19 nt, Homo sapiens
  misc_RNA (1)...(19): siRNA sense strand
agaccuacgccacggacua

SEQ ID NO: 1916440 - RNA, 19 nt, Homo sapiens
  misc_RNA (1)...(19): siRNA sense strand
gacccuggauucucaugcu

SEQ ID NO: 1916441 - RNA, 19 nt, Homo sapiens
  misc_RNA (1)...(19): siRNA sense strand
uguggaagaaguuaagaga

SEQ ID NO: 1916442 - RNA, 19 nt, Homo sapiens
  misc_RNA (1)...(19): siRNA sense strand
cuccuccucuccacacuga

SEQ ID NO: 1916443 - RNA, 19 nt, Homo sapiens
  misc_RNA (1)...(19): siRNA sense strand
cacuaggcuuccacuucua

SEQ ID NO: 1916444 - RNA, 19 nt, Homo sapiens
  misc_RNA (1)...(19): siRNA sense strand
uaggaggacuggcguuagc

SEQ ID NO: 1916445 - RNA, 19 nt, Homo sapiens
  misc_RNA (1)...(19): siRNA sense strand
acaaauggcuugcuaauaa

SEQ ID NO: 1916446 - RNA, 19 nt, Homo sapiens
  misc_RNA (1)...(19): siRNA sense strand
gcaauuggcuuccucauga

SEQ ID NO: 1916447 - RNA, 19 nt, Homo sapiens
  misc_RNA (1)...(19): siRNA sense strand
aaagauggauccagaaaua

SEQ ID NO: 1916448 - RNA, 19 nt, Homo sapiens
  misc_RNA (1)...(19): siRNA sense strand
gcacaugggugagaucaua

SEQ ID NO: 1916449 - RNA, 19 nt, Homo sapiens
  misc_RNA (1)...(19): siRNA sense strand
ccagaagccucgaacauua

SEQ ID NO: 1916450 - RNA, 19 nt, Homo sapiens
  misc_RNA (1)...(19): siRNA sense strand
ggacaauagugcaagauuu

SEQ ID NO: 1916451 - RNA, 19 nt, Homo sapiens
  misc_RNA (1)...(19): siRNA sense strand
gaaaguaugccaacauuug

SEQ ID NO: 1916452 - RNA, 19 nt, Homo sapiens
  misc_RNA (1)...(19): siRNA sense strand
caaaccagcucaucuuuau

SEQ ID NO: 1916453 - RNA, 19 nt, Homo sapiens
  misc_RNA (1)...(19): siRNA sense strand
gagauaaaguguuuggaaa

SEQ ID NO: 1916454 - RNA, 19 nt, Homo sapiens
  misc_RNA (1)...(19): siRNA sense strand
caaagggaguaccauauuu

SEQ ID NO: 1916455 - RNA, 19 nt, Homo sapiens
  misc_RNA (1)...(19): siRNA sense strand
caacaagaaugacuggauu

SEQ ID NO: 1916456 - RNA, 19 nt, Homo sapiens
  misc_RNA (1)...(19): siRNA sense strand
gaaagugagagauuugaua

SEQ ID NO: 1916457 - RNA, 19 nt, Homo sapiens
  misc_RNA (1)...(19): siRNA sense strand
gagcaggaauuacggcuuu

SEQ ID NO: 1916458 - RNA, 19 nt, Homo sapiens
  misc_RNA (1)...(19): siRNA sense strand
ccacaugucucucugaaug

SEQ ID NO: 1916459 - RNA, 19 nt, Homo sapiens
  misc_RNA (1)...(19): siRNA sense strand
uggaagaacugcaaagaaa

SEQ ID NO: 1916460 - RNA, 19 nt, Homo sapiens
  misc_RNA (1)...(19): siRNA sense strand
auacagacaugcaacauuu

SEQ ID NO: 1916461 - RNA, 19 nt, Homo sapiens
  misc_RNA (1)...(19): siRNA sense strand
caaauggcuugcuaauaaa

SEQ ID NO: 1916462 - RNA, 19 nt, Homo sapiens
  misc_RNA (1)...(19): siRNA sense strand
gauaagaacuccauauucc

SEQ ID NO: 1916463 - RNA, 19 nt, Homo sapiens
  misc_RNA (1)...(19): siRNA sense strand
gaacagaggaauacuuugu

SEQ ID NO: 1916464 - RNA, 19 nt, Homo sapiens
  misc_RNA (1)...(19): siRNA sense strand
gggauucaguggaaacuuu

SEQ ID NO: 1916465 - RNA, 19 nt, Homo sapiens
  misc_RNA (1)...(19): siRNA sense strand
caaguuaccuuuggcuauu

SEQ ID NO: 1916466 - RNA, 19 nt, Homo sapiens
  misc_RNA (1)...(19): siRNA sense strand
guggugacguggauuauaa

SEQ ID NO: 1916467 - RNA, 19 nt, Homo sapiens
  misc_RNA (1)...(19): siRNA sense strand
gaggagaaauaaagcaguu

SEQ ID NO: 1916468 - RNA, 19 nt, Homo sapiens
  misc_RNA (1)...(19): siRNA sense strand
gagcacaagaggagaaaua

SEQ ID NO: 1916469 - RNA, 19 nt, Homo sapiens
  misc_RNA (1)...(19): siRNA sense strand
gcacaggucuauguacaga

SEQ ID NO: 1916470 - RNA, 19 nt, Homo sapiens
  misc_RNA (1)...(19): siRNA sense strand
caaagcaaguuguuaucaa

SEQ ID NO: 1916471 - RNA, 19 nt, Homo sapiens
  misc_RNA (1)...(19): siRNA sense strand
aacaggacguucccaauua

SEQ ID NO: 1916472 - RNA, 19 nt, Homo sapiens
  misc_RNA (1)...(19): siRNA sense strand
ggaaggcucuugcccaaag

SEQ ID NO: 1916473 - RNA, 19 nt, Homo sapiens
  misc_RNA (1)...(19): siRNA sense strand
gcacagacuauuccaugua

SEQ ID NO: 1916474 - RNA, 19 nt, Homo sapiens
  misc_RNA (1)...(19): siRNA sense strand
gaagaauuccuggcagaua

SEQ ID NO: 1916475 - RNA, 19 nt, Homo sapiens
  misc_RNA (1)...(19): siRNA sense strand
ugacguggauuauaaagga

SEQ ID NO: 1916476 - RNA, 19 nt, Homo sapiens
  misc_RNA (1)...(19): siRNA sense strand
gaauugggauccaggacaa

SEQ ID NO: 1916477 - RNA, 19 nt, Homo sapiens
  misc_RNA (1)...(19): siRNA sense strand
caucacagcuucucaaggu

SEQ ID NO: 1916478 - RNA, 19 nt, Homo sapiens
  misc_RNA (1)...(19): siRNA sense strand
gcaggcggcuucaggaguu

SEQ ID NO: 1916479 - RNA, 19 nt, Homo sapiens
  misc_RNA (1)...(19): siRNA sense strand
gagucaagcuucagccaaa

SEQ ID NO: 1916480 - RNA, 19 nt, Homo sapiens
  misc_RNA (1)...(19): siRNA sense strand
gauggauccagaaauauua

SEQ ID NO: 1916481 - RNA, 19 nt, Homo sapiens
  misc_RNA (1)...(19): siRNA sense strand
gaauaggacugaccuuugc

SEQ ID NO: 1916482 - RNA, 19 nt, Homo sapiens
  misc_RNA (1)...(19): siRNA sense strand
gcaaugaauccgugagaaa

SEQ ID NO: 1916483 - RNA, 19 nt, Homo sapiens
  misc_RNA (1)...(19): siRNA sense strand
caagucagaugaaggugaa

SEQ ID NO: 1916484 - RNA, 19 nt, Homo sapiens
  misc_RNA (1)...(19): siRNA sense strand
gggaauaccucuguuugga

SEQ ID NO: 1916485 - RNA, 19 nt, Homo sapiens
  misc_RNA (1)...(19): siRNA sense strand
gaagcuaaauuugcuagau

SEQ ID NO: 1916486 - RNA, 19 nt, Homo sapiens
  misc_RNA (1)...(19): siRNA sense strand
gugaaaguaugccaacauu

SEQ ID NO: 1916487 - RNA, 19 nt, Homo sapiens
  misc_RNA (1)...(19): siRNA sense strand
ggaauaggacugaccuuug

SEQ ID NO: 1916488 - RNA, 19 nt, Homo sapiens
  misc_RNA (1)...(19): siRNA sense strand
cauccaagcuguguaaaug

SEQ ID NO: 1916489 - RNA, 19 nt, Homo sapiens
  misc_RNA (1)...(19): siRNA sense strand
uuagaggcuuucagauuua

SEQ ID NO: 1916490 - RNA, 19 nt, Homo sapiens
  misc_RNA (1)...(19): siRNA sense strand
gauuugauacccaugaaua

SEQ ID NO: 1916491 - RNA, 19 nt, Homo sapiens
  misc_RNA (1)...(19): siRNA sense strand
aagaauuccuggcagauaa

SEQ ID NO: 1916492 - RNA, 19 nt, Homo sapiens
  misc_RNA (1)...(19): siRNA sense strand
uguaggcacuggaggaaua

SEQ ID NO: 1916493 - RNA, 19 nt, Homo sapiens
  misc_RNA (1)...(19): siRNA sense strand
acuaguaccucugggauua

SEQ ID NO: 1916494 - RNA, 19 nt, Homo sapiens
  misc_RNA (1)...(19): siRNA sense strand
ggagaaauaaagcaguuaa

SEQ ID NO: 1916495 - RNA, 19 nt, Homo sapiens
  misc_RNA (1)...(19): siRNA sense strand
ccagaaauauuacuuugag

SEQ ID NO: 1916496 - RNA, 19 nt, Homo sapiens
  misc_RNA (1)...(19): siRNA sense strand
ggcgauacccuguucauuu

SEQ ID NO: 1916497 - RNA, 19 nt, Homo sapiens
  misc_RNA (1)...(19): siRNA sense strand
ggucagaggaggagauauu

SEQ ID NO: 1916498 - RNA, 19 nt, Homo sapiens
  misc_RNA (1)...(19): siRNA sense strand
caugcgagauaaaguguuu

SEQ ID NO: 1916499 - RNA, 19 nt, Homo sapiens
  misc_RNA (1)...(19): siRNA sense strand
caauuccagucaccugaua

SEQ ID NO: 1916500 - RNA, 19 nt, Homo sapiens
  misc_RNA (1)...(19): siRNA sense strand
auuagaggcuuucagauuu

SEQ ID NO: 1916501 - RNA, 19 nt, Homo sapiens
  misc_RNA (1)...(19): siRNA sense strand
uaauggagcuugggucaga

SEQ ID NO: 1916502 - RNA, 19 nt, Homo sapiens
  misc_RNA (1)...(19): siRNA sense strand
cauagacgguguagacaug

SEQ ID NO: 1916503 - RNA, 19 nt, Homo sapiens
  misc_RNA (1)...(19): siRNA sense strand
ccaaaccagcucaucuuua

SEQ ID NO: 1916504 - RNA, 19 nt, Homo sapiens
  misc_RNA (1)...(19): siRNA sense strand
guaccagccugucgucaug

SEQ ID NO: 1916505 - RNA, 19 nt, Homo sapiens
  misc_RNA (1)...(19): siRNA sense strand
aaccagaacucacuccauu

SEQ ID NO: 1916506 - RNA, 19 nt, Homo sapiens
  misc_RNA (1)...(19): siRNA sense strand
gagauuugauacccaugaa

SEQ ID NO: 1916507 - RNA, 19 nt, Homo sapiens
  misc_RNA (1)...(19): siRNA sense strand
gcacaagaggagaaauaaa

SEQ ID NO: 1916508 - RNA, 19 nt, Homo sapiens
  misc_RNA (1)...(19): siRNA sense strand
gaaguuugguccacauguc

SEQ ID NO: 1916509 - RNA, 19 nt, Homo sapiens
  misc_RNA (1)...(19): siRNA sense strand
aaggcuggcuuauuuauug

SEQ ID NO: 1916510 - RNA, 19 nt, Homo sapiens
  misc_RNA (1)...(19): siRNA sense strand
ggacaaauggcuugcuaau

SEQ ID NO: 1916511 - RNA, 19 nt, Homo sapiens
  misc_RNA (1)...(19): siRNA sense strand
guagauggagugaagcuaa

SEQ ID NO: 1916512 - RNA, 19 nt, Homo sapiens
  misc_RNA (1)...(19): siRNA sense strand
ugacaaagggaguaccaua

SEQ ID NO: 1916513 - RNA, 19 nt, Homo sapiens
  misc_RNA (1)...(19): siRNA sense strand
gccaagagguaucugaauc

SEQ ID NO: 1916514 - RNA, 19 nt, Homo sapiens
  misc_RNA (1)...(19): siRNA sense strand
gagcugagguuggaauucu

SEQ ID NO: 1916515 - RNA, 19 nt, Homo sapiens
  misc_RNA (1)...(19): siRNA sense strand
caugagagcugagguugga

SEQ ID NO: 1916516 - RNA, 19 nt, Homo sapiens
  misc_RNA (1)...(19): siRNA sense strand
gaucauagacgguguagac

SEQ ID NO: 1916517 - RNA, 19 nt, Homo sapiens
  misc_RNA (1)...(19): siRNA sense strand
caagguccauuguucuguu

SEQ ID NO: 1916518 - RNA, 19 nt, Homo sapiens
  misc_RNA (1)...(19): siRNA sense strand
gaaagcaauccgagaggaa

SEQ ID NO: 1916519 - RNA, 19 nt, Homo sapiens
  misc_RNA (1)...(19): siRNA sense strand
ccaauuagaggcuuucaga

SEQ ID NO: 1916520 - RNA, 19 nt, Homo sapiens
  misc_RNA (1)...(19): siRNA sense strand
caacaggguccauucaaau

SEQ ID NO: 1916521 - RNA, 19 nt, Homo sapiens
  misc_RNA (1)...(19): siRNA sense strand
acaacaggguccauucaaa

SEQ ID NO: 1916522 - RNA, 19 nt, Homo sapiens
  misc_RNA (1)...(19): siRNA sense strand
gacaaauggcuugcuaaua

SEQ ID NO: 1916523 - RNA, 19 nt, Homo sapiens
  misc_RNA (1)...(19): siRNA sense strand
ugugacagcuuauagugaa

SEQ ID NO: 1916524 - RNA, 19 nt, Homo sapiens
  misc_RNA (1)...(19): siRNA sense strand
ccagucaccugauaaagca

SEQ ID NO: 1916525 - RNA, 19 nt, Homo sapiens
  misc_RNA (1)...(19): siRNA sense strand
gauacaaggaugcuuaugu

SEQ ID NO: 1916526 - RNA, 19 nt, Homo sapiens
  misc_RNA (1)...(19): siRNA sense strand
caaauuuaccuccaucaga

SEQ ID NO: 1916527 - RNA, 19 nt, Homo sapiens
  misc_RNA (1)...(19): siRNA sense strand
aggaacaacuccaugugua

SEQ ID NO: 1916528 - RNA, 19 nt, Homo sapiens
  misc_RNA (1)...(19): siRNA sense strand
ggacucaugcuacgcagaa

SEQ ID NO: 1916529 - RNA, 19 nt, Homo sapiens
  misc_RNA (1)...(19): siRNA sense strand
ugagauggauggugauaag

SEQ ID NO: 1916530 - RNA, 19 nt, Homo sapiens
  misc_RNA (1)...(19): siRNA sense strand
gagaagaccgggcaaccuu

SEQ ID NO: 1916531 - RNA, 19 nt, Homo sapiens
  misc_RNA (1)...(19): siRNA sense strand
gauaauggaauaggacuga

SEQ ID NO: 1916532 - RNA, 19 nt, Homo sapiens
  misc_RNA (1)...(19): siRNA sense strand
guaccaccaugcgagauaa

SEQ ID NO: 1916533 - RNA, 19 nt, Homo sapiens
  misc_RNA (1)...(19): siRNA sense strand
gcaaagcaaguuguuauca

SEQ ID NO: 1916534 - RNA, 19 nt, Homo sapiens
  misc_RNA (1)...(19): siRNA sense strand
caucauggacuaagcuauu

SEQ ID NO: 1916535 - RNA, 19 nt, Homo sapiens
  misc_RNA (1)...(19): siRNA sense strand
ggauucaguggaaacuuua

SEQ ID NO: 1916536 - RNA, 19 nt, Homo sapiens
  misc_RNA (1)...(19): siRNA sense strand
ucacccaucuggcuauguu

SEQ ID NO: 1916537 - RNA, 19 nt, Homo sapiens
  misc_RNA (1)...(19): siRNA sense strand
caggauacaaggaugcuua

SEQ ID NO: 1916538 - RNA, 19 nt, Homo sapiens
  misc_RNA (1)...(19): siRNA sense strand
guuugaagauugugagaug

SEQ ID NO: 1916539 - RNA, 19 nt, Homo sapiens
  misc_RNA (1)...(19): siRNA sense strand
gcgauacccuguucauuuu

SEQ ID NO: 1916540 - RNA, 19 nt, Homo sapiens
  misc_RNA (1)...(19): siRNA sense strand
gcguuucucuuucaggauu

SEQ ID NO: 1916541 - RNA, 19 nt, Homo sapiens
  misc_RNA (1)...(19): siRNA sense strand
gaggacugcuuguauuugg

SEQ ID NO: 1916542 - RNA, 19 nt, Homo sapiens
  misc_RNA (1)...(19): siRNA sense strand
auacaaggaugcuuaugug

SEQ ID NO: 1916543 - RNA, 19 nt, Homo sapiens
  misc_RNA (1)...(19): siRNA sense strand
guguaaaugugucuaagug

SEQ ID NO: 1916544 - RNA, 19 nt, Homo sapiens
  misc_RNA (1)...(19): siRNA sense strand
gaacaauucauaccuuugc

SEQ ID NO: 1916545 - RNA, 19 nt, Homo sapiens
  misc_RNA (1)...(19): siRNA sense strand
gcaauagccucccugauau

SEQ ID NO: 1916546 - RNA, 19 nt, Homo sapiens
  misc_RNA (1)...(19): siRNA sense strand
ccacugaguucaaccguua

SEQ ID NO: 1916547 - RNA, 19 nt, Homo sapiens
  misc_RNA (1)...(19): siRNA sense strand
gaagagacguugaagaaac

SEQ ID NO: 1916548 - RNA, 19 nt, Homo sapiens
  misc_RNA (1)...(19): siRNA sense strand
ggucaaacaucgagacaug

SEQ ID NO: 1916549 - RNA, 19 nt, Homo sapiens
  misc_RNA (1)...(19): siRNA sense strand
cagaugauguguaugacua

SEQ ID NO: 1916550 - RNA, 19 nt, Homo sapiens
  misc_RNA (1)...(19): siRNA sense strand
cagaguacaucuccacuga

SEQ ID NO: 1916551 - RNA, 19 nt, Homo sapiens
  misc_RNA (1)...(19): siRNA sense strand
ggaguggucugccgaguca

SEQ ID NO: 1916552 - RNA, 19 nt, Homo sapiens
  misc_RNA (1)...(19): siRNA sense strand
gaaaccaggguccgccuua

SEQ ID NO: 1916553 - RNA, 19 nt, Homo sapiens
  misc_RNA (1)...(19): siRNA sense strand
gcagugaugcugauucuga

SEQ ID NO: 1916554 - RNA, 19 nt, Homo sapiens
  misc_RNA (1)...(19): siRNA sense strand
uagaagagacguugaagaa

SEQ ID NO: 1916555 - RNA, 19 nt, Homo sapiens
  misc_RNA (1)...(19): siRNA sense strand
guuauggcaucuccaauga

SEQ ID NO: 1916556 - RNA, 19 nt, Homo sapiens
  misc_RNA (1)...(19): siRNA sense strand
cgagucaaguacugcaaua

SEQ ID NO: 1916557 - RNA, 19 nt, Homo sapiens
  misc_RNA (1)...(19): siRNA sense strand
gugcucaggugaucuuuga

SEQ ID NO: 1916558 - RNA, 19 nt, Homo sapiens
  misc_RNA (1)...(19): siRNA sense strand
ugcaauagccucccugaua

SEQ ID NO: 1916559 - RNA, 19 nt, Homo sapiens
  misc_RNA (1)...(19): siRNA sense strand
agaaacagcacaaacauga

SEQ ID NO: 1916560 - RNA, 19 nt, Homo sapiens
  misc_RNA (1)...(19): siRNA sense strand
agaacaggaucguccagua

SEQ ID NO: 1916561 - RNA, 19 nt, Homo sapiens
  misc_RNA (1)...(19): siRNA sense strand
aagaggagauggagacaga

SEQ ID NO: 1916562 - RNA, 19 nt, Homo sapiens
  misc_RNA (1)...(19): siRNA sense strand
aaaucaaucucacagcauu

SEQ ID NO: 1916563 - RNA, 19 nt, Homo sapiens
  misc_RNA (1)...(19): siRNA sense strand
aacaugaccuccugacuga

SEQ ID NO: 1916564 - RNA, 19 nt, Homo sapiens
  misc_RNA (1)...(19): siRNA sense strand
gaguacaucuccacugagu

SEQ ID NO: 1916565 - RNA, 19 nt, Homo sapiens
  misc_RNA (1)...(19): siRNA sense strand
caccaucgaucucaucaau

SEQ ID NO: 1916566 - RNA, 19 nt, Homo sapiens
  misc_RNA (1)...(19): siRNA sense strand
guacaucuccacugaguuc

SEQ ID NO: 1916567 - RNA, 19 nt, Homo sapiens
  misc_RNA (1)...(19): siRNA sense strand
gaucacagccauugagaag

SEQ ID NO: 1916568 - RNA, 19 nt, Homo sapiens
  misc_RNA (1)...(19): siRNA sense strand
gcagugacaaugauucaga

SEQ ID NO: 1916569 - RNA, 19 nt, Homo sapiens
  misc_RNA (1)...(19): siRNA sense strand
ggagacagaagagaaagaa

SEQ ID NO: 1916570 - RNA, 19 nt, Homo sapiens
  misc_RNA (1)...(19): siRNA sense strand
ccagugaagcugauaguga

SEQ ID NO: 1916571 - RNA, 19 nt, Homo sapiens
  misc_RNA (1)...(19): siRNA sense strand
gaacaggaucguccaguac

SEQ ID NO: 1916572 - RNA, 19 nt, Homo sapiens
  misc_RNA (1)...(19): siRNA sense strand
gauggagacagaagagaaa

SEQ ID NO: 1916573 - RNA, 19 nt, Homo sapiens
  misc_RNA (1)...(19): siRNA sense strand
ggagaaacagcacaaacau

SEQ ID NO: 1916574 - RNA, 19 nt, Homo sapiens
  misc_RNA (1)...(19): siRNA sense strand
ccacuuccuuggagaaaca

SEQ ID NO: 1916575 - RNA, 19 nt, Homo sapiens
  misc_RNA (1)...(19): siRNA sense strand
ccaggaggauggcagugaa

SEQ ID NO: 1916576 - RNA, 19 nt, Homo sapiens
  misc_RNA (1)...(19): siRNA sense strand
ggagaucuuuggcagugau

SEQ ID NO: 1916577 - RNA, 19 nt, Homo sapiens
  misc_RNA (1)...(19): siRNA sense strand
cgaggaagaaauauacaaa

SEQ ID NO: 1916578 - RNA, 19 nt, Homo sapiens
  misc_RNA (1)...(19): siRNA sense strand
agauccagcugaugagaaa

SEQ ID NO: 1916579 - RNA, 19 nt, Homo sapiens
  misc_RNA (1)...(19): siRNA sense strand
agacaugaaugagaaggaa

SEQ ID NO: 1916580 - RNA, 19 nt, Homo sapiens
  misc_RNA (1)...(19): siRNA sense strand
gaaggagggcagugaagau

SEQ ID NO: 1916581 - RNA, 19 nt, Homo sapiens
  misc_RNA (1)...(19): siRNA sense strand
gagaaacagcacaaacaug

SEQ ID NO: 1916582 - RNA, 19 nt, Homo sapiens
  misc_RNA (1)...(19): siRNA sense strand
ggacgaggccagugacaag

SEQ ID NO: 1916583 - RNA, 19 nt, Homo sapiens
  misc_RNA (1)...(19): siRNA sense strand
gaaaacuacuucuucaucu

SEQ ID NO: 1916584 - RNA, 19 nt, Homo sapiens
  misc_RNA (1)...(19): siRNA sense strand
caccagaugauguguauga

SEQ ID NO: 1916585 - RNA, 19 nt, Homo sapiens
  misc_RNA (1)...(19): siRNA sense strand
gauggacuaugcaccagau

SEQ ID NO: 1916586 - RNA, 19 nt, Homo sapiens
  misc_RNA (1)...(19): siRNA sense strand
gaaccaguuuguggccuau

SEQ ID NO: 1916587 - RNA, 19 nt, Homo sapiens
  misc_RNA (1)...(19): siRNA sense strand
gcagcugcguuggagauga

SEQ ID NO: 1916588 - RNA, 19 nt, Homo sapiens
  misc_RNA (1)...(19): siRNA sense strand
agacagggauagccagauc

SEQ ID NO: 1916589 - RNA, 19 nt, Homo sapiens
  misc_RNA (1)...(19): siRNA sense strand
ggagggcagugaagaugag

SEQ ID NO: 1916590 - RNA, 19 nt, Homo sapiens
  misc_RNA (1)...(19): siRNA sense strand
gaggaaaacuacuucuuca

SEQ ID NO: 1916591 - RNA, 19 nt, Homo sapiens
  misc_RNA (1)...(19): siRNA sense strand
ggacuaugcaccagaugau

SEQ ID NO: 1916592 - RNA, 19 nt, Homo sapiens
  misc_RNA (1)...(19): siRNA sense strand
uuuaagauguggaucaauc

SEQ ID NO: 1916593 - RNA, 19 nt, Homo sapiens
  misc_RNA (1)...(19): siRNA sense strand
gaaaucaaucucacagcau

SEQ ID NO: 1916594 - RNA, 19 nt, Homo sapiens
  misc_RNA (1)...(19): siRNA sense strand
ucacagccauugagaagac

SEQ ID NO: 1916595 - RNA, 19 nt, Homo sapiens
  misc_RNA (1)...(19): siRNA sense strand
gaaugagaaggaacuggaa

SEQ ID NO: 1916596 - RNA, 19 nt, Homo sapiens
  misc_RNA (1)...(19): siRNA sense strand
cgaagguggugccauggau

SEQ ID NO: 1916597 - RNA, 19 nt, Homo sapiens
  misc_RNA (1)...(19): siRNA sense strand
ggacgaugccgacucugau

SEQ ID NO: 1916598 - RNA, 19 nt, Homo sapiens
  misc_RNA (1)...(19): siRNA sense strand
aaacaucgagacaugaaug

SEQ ID NO: 1916599 - RNA, 19 nt, Homo sapiens
  misc_RNA (1)...(19): siRNA sense strand
ucaaacaucgagacaugaa

SEQ ID NO: 1916600 - RNA, 19 nt, Homo sapiens
  misc_RNA (1)...(19): siRNA sense strand
gcaguuuaccgaggaagaa

SEQ ID NO: 1916601 - RNA, 19 nt, Homo sapiens
  misc_RNA (1)...(19): siRNA sense strand
ucagacagcggcagcaaug

SEQ ID NO: 1916602 - RNA, 19 nt, Homo sapiens
  misc_RNA (1)...(19): siRNA sense strand
guagaagagacguugaaga

SEQ ID NO: 1916603 - RNA, 19 nt, Homo sapiens
  misc_RNA (1)...(19): siRNA sense strand
ugaggaagggaaccaguuu

SEQ ID NO: 1916604 - RNA, 19 nt, Homo sapiens
  misc_RNA (1)...(19): siRNA sense strand
gaggaugcccagaaaucaa

SEQ ID NO: 1916605 - RNA, 19 nt, Homo sapiens
  misc_RNA (1)...(19): siRNA sense strand
ggaagaaauauacaaagac

SEQ ID NO: 1916606 - RNA, 19 nt, Homo sapiens
  misc_RNA (1)...(19): siRNA sense strand
ggaagaggaagaggagaug

SEQ ID NO: 1916607 - RNA, 19 nt, Homo sapiens
  misc_RNA (1)...(19): siRNA sense strand
cagaugaggagcaggagaa

SEQ ID NO: 1916608 - RNA, 19 nt, Homo sapiens
  misc_RNA (1)...(19): siRNA sense strand
uuaccgaggaagaaauaua

SEQ ID NO: 1916609 - RNA, 19 nt, Homo sapiens
  misc_RNA (1)...(19): siRNA sense strand
uuacuacaaugaguuggaa

SEQ ID NO: 1916610 - RNA, 19 nt, Homo sapiens
  misc_RNA (1)...(19): siRNA sense strand
gaaagacagaguacaucuc

SEQ ID NO: 1916611 - RNA, 19 nt, Homo sapiens
  misc_RNA (1)...(19): siRNA sense strand
caucgagacaugaaugaga

SEQ ID NO: 1916612 - RNA, 19 nt, Homo sapiens
  misc_RNA (1)...(19): siRNA sense strand
gcaccaacgcccugcuugu

SEQ ID NO: 1916613 - RNA, 19 nt, Homo sapiens
  misc_RNA (1)...(19): siRNA sense strand
guuuaccgaggaagaaaua

SEQ ID NO: 1916614 - RNA, 19 nt, Homo sapiens
  misc_RNA (1)...(19): siRNA sense strand
gcagcaguuuaccgaggaa

SEQ ID NO: 1916615 - RNA, 19 nt, Homo sapiens
  misc_RNA (1)...(19): siRNA sense strand
ugaggacgaugccgacucu

SEQ ID NO: 1916616 - RNA, 19 nt, Homo sapiens
  misc_RNA (1)...(19): siRNA sense strand
aaacuacuucuucaucuuc

SEQ ID NO: 1916617 - RNA, 19 nt, Homo sapiens
  misc_RNA (1)...(19): siRNA sense strand
cagcugcguuggagaugau

SEQ ID NO: 1916618 - RNA, 19 nt, Homo sapiens
  misc_RNA (1)...(19): siRNA sense strand
gaggaagaaauauacaaag

SEQ ID NO: 1916619 - RNA, 19 nt, Homo sapiens
  misc_RNA (1)...(19): siRNA sense strand
ccuauuuccugccuguaga

SEQ ID NO: 1916620 - RNA, 19 nt, Homo sapiens
  misc_RNA (1)...(19): siRNA sense strand
caagguggcagugacaaug

SEQ ID NO: 1916621 - RNA, 19 nt, Homo sapiens
  misc_RNA (1)...(19): siRNA sense strand
aggaggagauggacuaugc

SEQ ID NO: 1916622 - RNA, 19 nt, Homo sapiens
  misc_RNA (1)...(19): siRNA sense strand
ccaucgaucucaucaaucc

SEQ ID NO: 1916623 - RNA, 19 nt, Homo sapiens
  misc_RNA (1)...(19): siRNA sense strand
ucaucaauccugacaccua

SEQ ID NO: 1916624 - RNA, 19 nt, Homo sapiens
  misc_RNA (1)...(19): siRNA sense strand
ggagauggagacagaagag

SEQ ID NO: 1916625 - RNA, 19 nt, Homo sapiens
  misc_RNA (1)...(19): siRNA sense strand
acuggaacgugaagaacaa

SEQ ID NO: 1916626 - RNA, 19 nt, Homo sapiens
  misc_RNA (1)...(19): siRNA sense strand
gaucucaucaauccugaca

SEQ ID NO: 1916627 - RNA, 19 nt, Homo sapiens
  misc_RNA (1)...(19): siRNA sense strand
gggaagaggaagaggagau

SEQ ID NO: 1916628 - RNA, 19 nt, Homo sapiens
  misc_RNA (1)...(19): siRNA sense strand
cggaaggcccagcuagaaa

SEQ ID NO: 1916629 - RNA, 19 nt, Homo sapiens
  misc_RNA (1)...(19): siRNA sense strand
ggaaaacuacuucuucauc

SEQ ID NO: 1916630 - RNA, 19 nt, Homo sapiens
  misc_RNA (1)...(19): siRNA sense strand
gaggaagggaaccaguuug

SEQ ID NO: 1916631 - RNA, 19 nt, Homo sapiens
  misc_RNA (1)...(19): siRNA sense strand
cgaaagacagaguacaucu

SEQ ID NO: 1916632 - RNA, 19 nt, Homo sapiens
  misc_RNA (1)...(19): siRNA sense strand
ggaaggcccagcuagaaaa

SEQ ID NO: 1916633 - RNA, 19 nt, Homo sapiens
  misc_RNA (1)...(19): siRNA sense strand
ccaggguccgccuuaguaa

SEQ ID NO: 1916634 - RNA, 19 nt, Homo sapiens
  misc_RNA (1)...(19): siRNA sense strand
ggaagggaaccaguuugug

SEQ ID NO: 1916635 - RNA, 19 nt, Homo sapiens
  misc_RNA (1)...(19): siRNA sense strand
ucucacagcauuacagcaa

SEQ ID NO: 1916636 - RNA, 19 nt, Homo sapiens
  misc_RNA (1)...(19): siRNA sense strand
gaugccgacucugaugaug

SEQ ID NO: 1916637 - RNA, 19 nt, Homo sapiens
  misc_RNA (1)...(19): siRNA sense strand
aagcugauagugacaguga

SEQ ID NO: 1916638 - RNA, 19 nt, Homo sapiens
  misc_RNA (1)...(19): siRNA sense strand
ucccagacuuuaagaugug

SEQ ID NO: 1916639 - RNA, 19 nt, Homo sapiens
  misc_RNA (1)...(19): siRNA sense strand
cagcuucugauuccaguga

SEQ ID NO: 1916640 - RNA, 19 nt, Homo sapiens
  misc_RNA (1)...(19): siRNA sense strand
gagaaggagggcagugaag

SEQ ID NO: 1916641 - RNA, 19 nt, Homo sapiens
  misc_RNA (1)...(19): siRNA sense strand
gaacgugaagaacaaagcu

SEQ ID NO: 1916642 - RNA, 19 nt, Homo sapiens
  misc_RNA (1)...(19): siRNA sense strand
caaaauugcucgggaguac

SEQ ID NO: 1916643 - RNA, 19 nt, Homo sapiens
  misc_RNA (1)...(19): siRNA sense strand
ugcaccagaugauguguau

SEQ ID NO: 1916644 - RNA, 19 nt, Homo sapiens
  misc_RNA (1)...(19): siRNA sense strand
agaagagacguugaagaaa

SEQ ID NO: 1916645 - RNA, 19 nt, Homo sapiens
  misc_RNA (1)...(19): siRNA sense strand
gggcagagcuggauaguga

SEQ ID NO: 1916646 - RNA, 19 nt, Homo sapiens
  misc_RNA (1)...(19): siRNA sense strand
caaaggagguuucucaaga

SEQ ID NO: 1916647 - RNA, 19 nt, Homo sapiens
  misc_RNA (1)...(19): siRNA sense strand
gaaagugucagccgagaua

SEQ ID NO: 1916648 - RNA, 19 nt, Homo sapiens
  misc_RNA (1)...(19): siRNA sense strand
uaacaacacugagaacaaa

SEQ ID NO: 1916649 - RNA, 19 nt, Homo sapiens
  misc_RNA (1)...(19): siRNA sense strand
gagacgagcuuuaaugaca

SEQ ID NO: 1916650 - RNA, 19 nt, Homo sapiens
  misc_RNA (1)...(19): siRNA sense strand
gaauagcacuggcaacauc

SEQ ID NO: 1916651 - RNA, 19 nt, Homo sapiens
  misc_RNA (1)...(19): siRNA sense strand
gcaaauuccucacguacau

SEQ ID NO: 1916652 - RNA, 19 nt, Homo sapiens
  misc_RNA (1)...(19): siRNA sense strand
guaauaacccuuucuggaa

SEQ ID NO: 1916653 - RNA, 19 nt, Homo sapiens
  misc_RNA (1)...(19): siRNA sense strand
guaaguugcucaagacugu

SEQ ID NO: 1916654 - RNA, 19 nt, Homo sapiens
  misc_RNA (1)...(19): siRNA sense strand
ccaacgagcucucugacuu

SEQ ID NO: 1916655 - RNA, 19 nt, Homo sapiens
  misc_RNA (1)...(19): siRNA sense strand
gagcuuuaaugacaucaaa

SEQ ID NO: 1916656 - RNA, 19 nt, Homo sapiens
  misc_RNA (1)...(19): siRNA sense strand
cagcagaucuccaugaaag

SEQ ID NO: 1916657 - RNA, 19 nt, Homo sapiens
  misc_RNA (1)...(19): siRNA sense strand
gaaaaccucuaucaucuug

SEQ ID NO: 1916658 - RNA, 19 nt, Homo sapiens
  misc_RNA (1)...(19): siRNA sense strand
gaagaacgaagucgggaaa

SEQ ID NO: 1916659 - RNA, 19 nt, Homo sapiens
  misc_RNA (1)...(19): siRNA sense strand
gcacacaacaccaccgaaa

SEQ ID NO: 1916660 - RNA, 19 nt, Homo sapiens
  misc_RNA (1)...(19): siRNA sense strand
uaccggaacucaacacuga

SEQ ID NO: 1916661 - RNA, 19 nt, Homo sapiens
  misc_RNA (1)...(19): siRNA sense strand
agacaaacaucgugugcaa

SEQ ID NO: 1916662 - RNA, 19 nt, Homo sapiens
  misc_RNA (1)...(19): siRNA sense strand
uaauaacccuuucuggaau

SEQ ID NO: 1916663 - RNA, 19 nt, Homo sapiens
  misc_RNA (1)...(19): siRNA sense strand
gcguaugacuucuuacuca

SEQ ID NO: 1916664 - RNA, 19 nt, Homo sapiens
  misc_RNA (1)...(19): siRNA sense strand
gugugggacuucaucaaua

SEQ ID NO: 1916665 - RNA, 19 nt, Homo sapiens
  misc_RNA (1)...(19): siRNA sense strand
ggacccugcucauggagaa

SEQ ID NO: 1916666 - RNA, 19 nt, Homo sapiens
  misc_RNA (1)...(19): siRNA sense strand
gaaccugccgcucaccuuu

SEQ ID NO: 1916667 - RNA, 19 nt, Homo sapiens
  misc_RNA (1)...(19): siRNA sense strand
ggacucugaucuuggugaa

SEQ ID NO: 1916668 - RNA, 19 nt, Homo sapiens
  misc_RNA (1)...(19): siRNA sense strand
ugugggacuucaucaauaa

SEQ ID NO: 1916669 - RNA, 19 nt, Homo sapiens
  misc_RNA (1)...(19): siRNA sense strand
gggcaaaggagguuucuca

SEQ ID NO: 1916670 - RNA, 19 nt, Homo sapiens
  misc_RNA (1)...(19): siRNA sense strand
gggaagcaccaguucguuu

SEQ ID NO: 1916671 - RNA, 19 nt, Homo sapiens
  misc_RNA (1)...(19): siRNA sense strand
guaacaacacugagaacaa

SEQ ID NO: 1916672 - RNA, 19 nt, Homo sapiens
  misc_RNA (1)...(19): siRNA sense strand
ccucaaguuugguaaguug

SEQ ID NO: 1916673 - RNA, 19 nt, Homo sapiens
  misc_RNA (1)...(19): siRNA sense strand
gaaggaagggccauauguc

SEQ ID NO: 1916674 - RNA, 19 nt, Homo sapiens
  misc_RNA (1)...(19): siRNA sense strand
acagcgguaugauugauaa

SEQ ID NO: 1916675 - RNA, 19 nt, Homo sapiens
  misc_RNA (1)...(19): siRNA sense strand
uguggaagccugcguauga

SEQ ID NO: 1916676 - RNA, 19 nt, Homo sapiens
  misc_RNA (1)...(19): siRNA sense strand
cagagacgagcuuuaauga

SEQ ID NO: 1916677 - RNA, 19 nt, Homo sapiens
  misc_RNA (1)...(19): siRNA sense strand
guacaguaauaacccuuuc

SEQ ID NO: 1916678 - RNA, 19 nt, Homo sapiens
  misc_RNA (1)...(19): siRNA sense strand
ccaaaguggugcgaggauu

SEQ ID NO: 1916679 - RNA, 19 nt, Homo sapiens
  misc_RNA (1)...(19): siRNA sense strand
gaaggaggacuguaacaac

SEQ ID NO: 1916680 - RNA, 19 nt, Homo sapiens
  misc_RNA (1)...(19): siRNA sense strand
gggauggacagaugacaaa

SEQ ID NO: 1916681 - RNA, 19 nt, Homo sapiens
  misc_RNA (1)...(19): siRNA sense strand
cgcuggagcucaacaguga

SEQ ID NO: 1916682 - RNA, 19 nt, Homo sapiens
  misc_RNA (1)...(19): siRNA sense strand
gcaaaggagguuucucaag

SEQ ID NO: 1916683 - RNA, 19 nt, Homo sapiens
  misc_RNA (1)...(19): siRNA sense strand
gaagcaagcgcuccuacag

SEQ ID NO: 1916684 - RNA, 19 nt, Homo sapiens
  misc_RNA (1)...(19): siRNA sense strand
cugagaagcuggccaaggu

SEQ ID NO: 1916685 - RNA, 19 nt, Homo sapiens
  misc_RNA (1)...(19): siRNA sense strand
acaaagaacggaaguccuu

SEQ ID NO: 1916686 - RNA, 19 nt, Homo sapiens
  misc_RNA (1)...(19): siRNA sense strand
aaaccucuaucaucuugga

SEQ ID NO: 1916687 - RNA, 19 nt, Homo sapiens
  misc_RNA (1)...(19): siRNA sense strand
ggaacucuccguccuccaa

SEQ ID NO: 1916688 - RNA, 19 nt, Homo sapiens
  misc_RNA (1)...(19): siRNA sense strand
cagacgagguagccaagga

SEQ ID NO: 1916689 - RNA, 19 nt, Homo sapiens
  misc_RNA (1)...(19): siRNA sense strand
ucagagacgagcuuuaaug

SEQ ID NO: 1916690 - RNA, 19 nt, Homo sapiens
  misc_RNA (1)...(19): siRNA sense strand
gaaaugcaaaggaagugau

SEQ ID NO: 1916691 - RNA, 19 nt, Homo sapiens
  misc_RNA (1)...(19): siRNA sense strand
gaucucaaggucuguaugu

SEQ ID NO: 1916692 - RNA, 19 nt, Homo sapiens
  misc_RNA (1)...(19): siRNA sense strand
acacaacaccaccgaaaug

SEQ ID NO: 1916693 - RNA, 19 nt, Homo sapiens
  misc_RNA (1)...(19): siRNA sense strand
gccugcguaugacuucuua

SEQ ID NO: 1916694 - RNA, 19 nt, Homo sapiens
  misc_RNA (1)...(19): siRNA sense strand
aaggaggacuguaacaaca

SEQ ID NO: 1916695 - RNA, 19 nt, Homo sapiens
  misc_RNA (1)...(19): siRNA sense strand
ucucaaggucuguauguuu

SEQ ID NO: 1916696 - RNA, 19 nt, Homo sapiens
  misc_RNA (1)...(19): siRNA sense strand
cgaaggaagggccauaugu

SEQ ID NO: 1916697 - RNA, 19 nt, Homo sapiens
  misc_RNA (1)...(19): siRNA sense strand
ggacaaccccuucuucaga

SEQ ID NO: 1916698 - RNA, 19 nt, Homo sapiens
  misc_RNA (1)...(19): siRNA sense strand
gcucagccaccacgaauag

SEQ ID NO: 1916699 - RNA, 19 nt, Homo sapiens
  misc_RNA (1)...(19): siRNA sense strand
agacagcccagacgaggua

SEQ ID NO: 1916700 - RNA, 19 nt, Homo sapiens
  misc_RNA (1)...(19): siRNA sense strand
ggaaaugcaaaggaaguga

SEQ ID NO: 1916701 - RNA, 19 nt, Homo sapiens
  misc_RNA (1)...(19): siRNA sense strand
gcgaccaucucuacgucuu

SEQ ID NO: 1916702 - RNA, 19 nt, Homo sapiens
  misc_RNA (1)...(19): siRNA sense strand
cccaagccguggagacaaa

SEQ ID NO: 1916703 - RNA, 19 nt, Homo sapiens
  misc_RNA (1)...(19): siRNA sense strand
gcucccacaucgucgaguu

SEQ ID NO: 1916704 - RNA, 19 nt, Homo sapiens
  misc_RNA (1)...(19): siRNA sense strand
cuacggcccuaaacacauc

SEQ ID NO: 1916705 - RNA, 19 nt, Homo sapiens
  misc_RNA (1)...(19): siRNA sense strand
gauggacgccuacgagucu

SEQ ID NO: 1916706 - RNA, 19 nt, Homo sapiens
  misc_RNA (1)...(19): siRNA sense strand
gugaaaaccucuaucaucu

SEQ ID NO: 1916707 - RNA, 19 nt, Homo sapiens
  misc_RNA (1)...(19): siRNA sense strand
ccagaaggagcuugugaug

SEQ ID NO: 1916708 - RNA, 19 nt, Homo sapiens
  misc_RNA (1)...(19): siRNA sense strand
caacacugagaacaaagaa

SEQ ID NO: 1916709 - RNA, 19 nt, Homo sapiens
  misc_RNA (1)...(19): siRNA sense strand
gaacuaccggaacucaaca

SEQ ID NO: 1916710 - RNA, 19 nt, Homo sapiens
  misc_RNA (1)...(19): siRNA sense strand
ggaggacuguaacaacacu

SEQ ID NO: 1916711 - RNA, 19 nt, Homo sapiens
  misc_RNA (1)...(19): siRNA sense strand
accacuaccugcuggagua

SEQ ID NO: 1916712 - RNA, 19 nt, Homo sapiens
  misc_RNA (1)...(19): siRNA sense strand
caaaguggugcgaggauuc

SEQ ID NO: 1916713 - RNA, 19 nt, Homo sapiens
  misc_RNA (1)...(19): siRNA sense strand
ccaauaugacgaauuacga

SEQ ID NO: 1916714 - RNA, 19 nt, Homo sapiens
  misc_RNA (1)...(19): siRNA sense strand
cccagcagaucuccaugaa

SEQ ID NO: 1916715 - RNA, 19 nt, Homo sapiens
  misc_RNA (1)...(19): siRNA sense strand
ccaaaaguacuguggauuu

SEQ ID NO: 1916716 - RNA, 19 nt, Homo sapiens
  misc_RNA (1)...(19): siRNA sense strand
ugacagcgguaugauugau

SEQ ID NO: 1916717 - RNA, 19 nt, Homo sapiens
  misc_RNA (1)...(19): siRNA sense strand
uuucagagacgagcuuuaa

SEQ ID NO: 1916718 - RNA, 19 nt, Homo sapiens
  misc_RNA (1)...(19): siRNA sense strand
caacgagcucucugacuuc

SEQ ID NO: 1916719 - RNA, 19 nt, Homo sapiens
  misc_RNA (1)...(19): siRNA sense strand
gagcugaaucccaaaagua

SEQ ID NO: 1916720 - RNA, 19 nt, Homo sapiens
  misc_RNA (1)...(19): siRNA sense strand
gacagcgguaugauugaua

SEQ ID NO: 1916721 - RNA, 19 nt, Homo sapiens
  misc_RNA (1)...(19): siRNA sense strand
gaggagcgacucgaaggaa

SEQ ID NO: 1916722 - RNA, 19 nt, Homo sapiens
  misc_RNA (1)...(19): siRNA sense strand
ggaagccugcguaugacuu

SEQ ID NO: 1916723 - RNA, 19 nt, Homo sapiens
  misc_RNA (1)...(19): siRNA sense strand
gugauggcccuacugaaga

SEQ ID NO: 1916724 - RNA, 19 nt, Homo sapiens
  misc_RNA (1)...(19): siRNA sense strand
ccugcaaauuccucacgua

SEQ ID NO: 1916725 - RNA, 19 nt, Homo sapiens
  misc_RNA (1)...(19): siRNA sense strand
ucaagacgguagugaccau

SEQ ID NO: 1916726 - RNA, 19 nt, Homo sapiens
  misc_RNA (1)...(19): siRNA sense strand
ucacugggacucugaucuu

SEQ ID NO: 1916727 - RNA, 19 nt, Homo sapiens
  misc_RNA (1)...(19): siRNA sense strand
gugccuugcucguagacaa

SEQ ID NO: 1916728 - RNA, 19 nt, Homo sapiens
  misc_RNA (1)...(19): siRNA sense strand
gagugacagcgguaugauu

SEQ ID NO: 1916729 - RNA, 19 nt, Homo sapiens
  misc_RNA (1)...(19): siRNA sense strand
caagggcgaccaucucuac

SEQ ID NO: 1916730 - RNA, 19 nt, Homo sapiens
  misc_RNA (1)...(19): siRNA sense strand
ggaagcaccaguucguuuu

SEQ ID NO: 1916731 - RNA, 19 nt, Homo sapiens
  misc_RNA (1)...(19): siRNA sense strand
gcccugugcuggaggucaa

SEQ ID NO: 1916732 - RNA, 19 nt, Homo sapiens
  misc_RNA (1)...(19): siRNA sense strand
ugaaggaggacuguaacaa

SEQ ID NO: 1916733 - RNA, 19 nt, Homo sapiens
  misc_RNA (1)...(19): siRNA sense strand
ggcagaacaagaaccacua

SEQ ID NO: 1916734 - RNA, 19 nt, Homo sapiens
  misc_RNA (1)...(19): siRNA sense strand
uuugguaaguugcucaaga

SEQ ID NO: 1916735 - RNA, 19 nt, Homo sapiens
  misc_RNA (1)...(19): siRNA sense strand
ucaccacacugaaguucuc

SEQ ID NO: 1916736 - RNA, 19 nt, Homo sapiens
  misc_RNA (1)...(19): siRNA sense strand
aauaacccuuucuggaaug

SEQ ID NO: 1916737 - RNA, 19 nt, Homo sapiens
  misc_RNA (1)...(19): siRNA sense strand
ugauggcccuacugaagau

SEQ ID NO: 1916738 - RNA, 19 nt, Homo sapiens
  misc_RNA (1)...(19): siRNA sense strand
ccaccgaaaugggcuacau

SEQ ID NO: 1916739 - RNA, 19 nt, Homo sapiens
  misc_RNA (1)...(19): siRNA sense strand
gacgagcuuuaaugacauc

SEQ ID NO: 1916740 - RNA, 19 nt, Homo sapiens
  misc_RNA (1)...(19): siRNA sense strand
ccagugccuugcucguaga

SEQ ID NO: 1916741 - RNA, 19 nt, Homo sapiens
  misc_RNA (1)...(19): siRNA sense strand
ccagcgagcaggccaaagu

SEQ ID NO: 1916742 - RNA, 19 nt, Homo sapiens
  misc_RNA (1)...(19): siRNA sense strand
gcacuggcaacaucuucga

SEQ ID NO: 1916743 - RNA, 19 nt, Homo sapiens
  misc_RNA (1)...(19): siRNA sense strand
gguguccagccucaaguuu

SEQ ID NO: 1916744 - RNA, 19 nt, Homo sapiens
  misc_RNA (1)...(19): siRNA sense strand
uggccaaggucuccaagca

SEQ ID NO: 1916745 - RNA, 19 nt, Homo sapiens
  misc_RNA (1)...(19): siRNA sense strand
gaacaaaccagaccaaaga

SEQ ID NO: 1916746 - RNA, 19 nt, Homo sapiens
  misc_RNA (1)...(19): siRNA sense strand
gcaagaaccuggagaagga

SEQ ID NO: 1916747 - RNA, 19 nt, Homo sapiens
  misc_RNA (1)...(19): siRNA sense strand
aaaggaagcuccaggauuu

SEQ ID NO: 1916748 - RNA, 19 nt, Homo sapiens
  misc_RNA (1)...(19): siRNA sense strand
gggcaaagcugucaacuuc

SEQ ID NO: 1916749 - RNA, 19 nt, Homo sapiens
  misc_RNA (1)...(19): siRNA sense strand
ggaaaucccuuggaacaaa

SEQ ID NO: 1916750 - RNA, 19 nt, Homo sapiens
  misc_RNA (1)...(19): siRNA sense strand
ggaagaagauuaugaugag

SEQ ID NO: 1916751 - RNA, 19 nt, Homo sapiens
  misc_RNA (1)...(19): siRNA sense strand
gaugagaccuacauuccua

SEQ ID NO: 1916752 - RNA, 19 nt, Homo sapiens
  misc_RNA (1)...(19): siRNA sense strand
caggugacauuuacuauuu

SEQ ID NO: 1916753 - RNA, 19 nt, Homo sapiens
  misc_RNA (1)...(19): siRNA sense strand
gcacagaguucaccagaag

SEQ ID NO: 1916754 - RNA, 19 nt, Homo sapiens
  misc_RNA (1)...(19): siRNA sense strand
acaggaagcucaacagaaa

SEQ ID NO: 1916755 - RNA, 19 nt, Homo sapiens
  misc_RNA (1)...(19): siRNA sense strand
ggccuuggguuccucauua

SEQ ID NO: 1916756 - RNA, 19 nt, Homo sapiens
  misc_RNA (1)...(19): siRNA sense strand
ggaaauuagugaacacaug

SEQ ID NO: 1916757 - RNA, 19 nt, Homo sapiens
  misc_RNA (1)...(19): siRNA sense strand
gccaagaacuggaaauuag

SEQ ID NO: 1916758 - RNA, 19 nt, Homo sapiens
  misc_RNA (1)...(19): siRNA sense strand
ggagagguaccauagguua

SEQ ID NO: 1916759 - RNA, 19 nt, Homo sapiens
  misc_RNA (1)...(19): siRNA sense strand
gaaaggaagcuccaggauu

SEQ ID NO: 1916760 - RNA, 19 nt, Homo sapiens
  misc_RNA (1)...(19): siRNA sense strand
gaaauuagugaacacauga

SEQ ID NO: 1916761 - RNA, 19 nt, Homo sapiens
  misc_RNA (1)...(19): siRNA sense strand
caagugagccucuuaggaa

SEQ ID NO: 1916762 - RNA, 19 nt, Homo sapiens
  misc_RNA (1)...(19): siRNA sense strand
gcaaagcugucaacuucug

SEQ ID NO: 1916763 - RNA, 19 nt, Homo sapiens
  misc_RNA (1)...(19): siRNA sense strand
gaauagaagacaaggauga

SEQ ID NO: 1916764 - RNA, 19 nt, Homo sapiens
  misc_RNA (1)...(19): siRNA sense strand
ccaaggagccaaagaagaa

SEQ ID NO: 1916765 - RNA, 19 nt, Homo sapiens
  misc_RNA (1)...(19): siRNA sense strand
gcaaggaggacuuauacuu

SEQ ID NO: 1916766 - RNA, 19 nt, Homo sapiens
  misc_RNA (1)...(19): siRNA sense strand
gagaggagguuggacaaga

SEQ ID NO: 1916767 - RNA, 19 nt, Homo sapiens
  misc_RNA (1)...(19): siRNA sense strand
gggagaagcugugccaaga

SEQ ID NO: 1916768 - RNA, 19 nt, Homo sapiens
  misc_RNA (1)...(19): siRNA sense strand
ugagagaagugacaguuga

SEQ ID NO: 1916769 - RNA, 19 nt, Homo sapiens
  misc_RNA (1)...(19): siRNA sense strand
gggaagaggccucagauga

SEQ ID NO: 1916770 - RNA, 19 nt, Homo sapiens
  misc_RNA (1)...(19): siRNA sense strand
ucaaggcccuggaagauau

SEQ ID NO: 1916771 - RNA, 19 nt, Homo sapiens
  misc_RNA (1)...(19): siRNA sense strand
gaagagugaaccuaagauu

SEQ ID NO: 1916772 - RNA, 19 nt, Homo sapiens
  misc_RNA (1)...(19): siRNA sense strand
caagaccucugcuuauaca

SEQ ID NO: 1916773 - RNA, 19 nt, Homo sapiens
  misc_RNA (1)...(19): siRNA sense strand
gcuccaggauuuagaguug

SEQ ID NO: 1916774 - RNA, 19 nt, Homo sapiens
  misc_RNA (1)...(19): siRNA sense strand
gccacaaccugcugaagaa

SEQ ID NO: 1916775 - RNA, 19 nt, Homo sapiens
  misc_RNA (1)...(19): siRNA sense strand
agaaguggcgcaaguauuu

SEQ ID NO: 1916776 - RNA, 19 nt, Homo sapiens
  misc_RNA (1)...(19): siRNA sense strand
aagaugagcugcagagcaa

SEQ ID NO: 1916777 - RNA, 19 nt, Homo sapiens
  misc_RNA (1)...(19): siRNA sense strand
gcagagggcccaugaacga

SEQ ID NO: 1916778 - RNA, 19 nt, Homo sapiens
  misc_RNA (1)...(19): siRNA sense strand
gaggagagguaccauaggu

SEQ ID NO: 1916779 - RNA, 19 nt, Homo sapiens
  misc_RNA (1)...(19): siRNA sense strand
gaagaagauuaugaugaga

SEQ ID NO: 1916780 - RNA, 19 nt, Homo sapiens
  misc_RNA (1)...(19): siRNA sense strand
gaggaaaucccuuggaaca

SEQ ID NO: 1916781 - RNA, 19 nt, Homo sapiens
  misc_RNA (1)...(19): siRNA sense strand
agaccuacauuccuaguga

SEQ ID NO: 1916782 - RNA, 19 nt, Homo sapiens
  misc_RNA (1)...(19): siRNA sense strand
agccagaucuccauauuga

SEQ ID NO: 1916783 - RNA, 19 nt, Homo sapiens
  misc_RNA (1)...(19): siRNA sense strand
gaaaccagagcuaaagaug

SEQ ID NO: 1916784 - RNA, 19 nt, Homo sapiens
  misc_RNA (1)...(19): siRNA sense strand
uggcaacgcuggagaagga

SEQ ID NO: 1916785 - RNA, 19 nt, Homo sapiens
  misc_RNA (1)...(19): siRNA sense strand
gaguucaccagaagucuua

SEQ ID NO: 1916786 - RNA, 19 nt, Homo sapiens
  misc_RNA (1)...(19): siRNA sense strand
gaaccuacaccuggacauu

SEQ ID NO: 1916787 - RNA, 19 nt, Homo sapiens
  misc_RNA (1)...(19): siRNA sense strand
gaagauacaggaagcucaa

SEQ ID NO: 1916788 - RNA, 19 nt, Homo sapiens
  misc_RNA (1)...(19): siRNA sense strand
gagaagagugaaccuaaga

SEQ ID NO: 1916789 - RNA, 19 nt, Homo sapiens
  misc_RNA (1)...(19): siRNA sense strand
gaaggauguuucucuggau

SEQ ID NO: 1916790 - RNA, 19 nt, Homo sapiens
  misc_RNA (1)...(19): siRNA sense strand
cucaagaccucugcuuaua

SEQ ID NO: 1916791 - RNA, 19 nt, Homo sapiens
  misc_RNA (1)...(19): siRNA sense strand
gcuggaacgugucaagaau

SEQ ID NO: 1916792 - RNA, 19 nt, Homo sapiens
  misc_RNA (1)...(19): siRNA sense strand
cauaggagaucagcugguu

SEQ ID NO: 1916793 - RNA, 19 nt, Homo sapiens
  misc_RNA (1)...(19): siRNA sense strand
gcaaguggagcacagaguu

SEQ ID NO: 1916794 - RNA, 19 nt, Homo sapiens
  misc_RNA (1)...(19): siRNA sense strand
agagugaaccuaagauuug

SEQ ID NO: 1916795 - RNA, 19 nt, Homo sapiens
  misc_RNA (1)...(19): siRNA sense strand
gccagcaacugcagaaaca

SEQ ID NO: 1916796 - RNA, 19 nt, Homo sapiens
  misc_RNA (1)...(19): siRNA sense strand
caaggaaccagaacugaug

SEQ ID NO: 1916797 - RNA, 19 nt, Homo sapiens
  misc_RNA (1)...(19): siRNA sense strand
gggccuggcuccuuuacga

SEQ ID NO: 1916798 - RNA, 19 nt, Homo sapiens
  misc_RNA (1)...(19): siRNA sense strand
ugagccagaucuccauauu

SEQ ID NO: 1916799 - RNA, 19 nt, Homo sapiens
  misc_RNA (1)...(19): siRNA sense strand
gagagaagcgccaggaagu

SEQ ID NO: 1916800 - RNA, 19 nt, Homo sapiens
  misc_RNA (1)...(19): siRNA sense strand
uagguuaucuccuccacuu

SEQ ID NO: 1916801 - RNA, 19 nt, Homo sapiens
  misc_RNA (1)...(19): siRNA sense strand
ccucuuggguuuaggagaa

SEQ ID NO: 1916802 - RNA, 19 nt, Homo sapiens
  misc_RNA (1)...(19): siRNA sense strand
gagcaaggaggacuuauac

SEQ ID NO: 1916803 - RNA, 19 nt, Homo sapiens
  misc_RNA (1)...(19): siRNA sense strand
gaaggaaccacagcucuca

SEQ ID NO: 1916804 - RNA, 19 nt, Homo sapiens
  misc_RNA (1)...(19): siRNA sense strand
uggaacgugucaagaauga

SEQ ID NO: 1916805 - RNA, 19 nt, Homo sapiens
  misc_RNA (1)...(19): siRNA sense strand
gagaaguggcgcaaguauu

SEQ ID NO: 1916806 - RNA, 19 nt, Homo sapiens
  misc_RNA (1)...(19): siRNA sense strand
gaaaucccuuggaacaaac

SEQ ID NO: 1916807 - RNA, 19 nt, Homo sapiens
  misc_RNA (1)...(19): siRNA sense strand
gggaauagaagacaaggau

SEQ ID NO: 1916808 - RNA, 19 nt, Homo sapiens
  misc_RNA (1)...(19): siRNA sense strand
uggaagauaugcgcaagaa

SEQ ID NO: 1916809 - RNA, 19 nt, Homo sapiens
  misc_RNA (1)...(19): siRNA sense strand
cgcaggagguggccaaaga

SEQ ID NO: 1916810 - RNA, 19 nt, Homo sapiens
  misc_RNA (1)...(19): siRNA sense strand
gaggagcaccagcaaguga

SEQ ID NO: 1916811 - RNA, 19 nt, Homo sapiens
  misc_RNA (1)...(19): siRNA sense strand
gaagugacaguugaggaaa

SEQ ID NO: 1916812 - RNA, 19 nt, Homo sapiens
  misc_RNA (1)...(19): siRNA sense strand
gguuaccucucuucucuuc

SEQ ID NO: 1916813 - RNA, 19 nt, Homo sapiens
  misc_RNA (1)...(19): siRNA sense strand
ggagaaguggcgcaaguau

SEQ ID NO: 1916814 - RNA, 19 nt, Homo sapiens
  misc_RNA (1)...(19): siRNA sense strand
acagggaaguggagcaaga

SEQ ID NO: 1916815 - RNA, 19 nt, Homo sapiens
  misc_RNA (1)...(19): siRNA sense strand
gcaccuggaugagaugaag

SEQ ID NO: 1916816 - RNA, 19 nt, Homo sapiens
  misc_RNA (1)...(19): siRNA sense strand
ggaacaaaccagaccaaag

SEQ ID NO: 1916817 - RNA, 19 nt, Homo sapiens
  misc_RNA (1)...(19): siRNA sense strand
gcagcucaaggaagagaua

SEQ ID NO: 1916818 - RNA, 19 nt, Homo sapiens
  misc_RNA (1)...(19): siRNA sense strand
gggaagaggcagccaagga

SEQ ID NO: 1916819 - RNA, 19 nt, Homo sapiens
  misc_RNA (1)...(19): siRNA sense strand
gaccucugcuuauacaaag

SEQ ID NO: 1916820 - RNA, 19 nt, Homo sapiens
  misc_RNA (1)...(19): siRNA sense strand
gaugagcacaacagaguga

SEQ ID NO: 1916821 - RNA, 19 nt, Homo sapiens
  misc_RNA (1)...(19): siRNA sense strand
gcagugaaaguucugaauc

SEQ ID NO: 1916822 - RNA, 19 nt, Homo sapiens
  misc_RNA (1)...(19): siRNA sense strand
ggugacauuuacuauuuca

SEQ ID NO: 1916823 - RNA, 19 nt, Homo sapiens
  misc_RNA (1)...(19): siRNA sense strand
caguuggaguccucucuuu

SEQ ID NO: 1916824 - RNA, 19 nt, Homo sapiens
  misc_RNA (1)...(19): siRNA sense strand
acaaccugcugaagaagaa

SEQ ID NO: 1916825 - RNA, 19 nt, Homo sapiens
  misc_RNA (1)...(19): siRNA sense strand
aacgagaacuggagacugu

SEQ ID NO: 1916826 - RNA, 19 nt, Homo sapiens
  misc_RNA (1)...(19): siRNA sense strand
gaaggaggagcaccagcaa

SEQ ID NO: 1916827 - RNA, 19 nt, Homo sapiens
  misc_RNA (1)...(19): siRNA sense strand
gaacuggaaauuagugaac

SEQ ID NO: 1916828 - RNA, 19 nt, Homo sapiens
  misc_RNA (1)...(19): siRNA sense strand
acaacagagugaaggugua

SEQ ID NO: 1916829 - RNA, 19 nt, Homo sapiens
  misc_RNA (1)...(19): siRNA sense strand
aaccagagcuaaagauguc

SEQ ID NO: 1916830 - RNA, 19 nt, Homo sapiens
  misc_RNA (1)...(19): siRNA sense strand
ggauguuucucuggauuca

SEQ ID NO: 1916831 - RNA, 19 nt, Homo sapiens
  misc_RNA (1)...(19): siRNA sense strand
cuacauuccuagugagcaa

SEQ ID NO: 1916832 - RNA, 19 nt, Homo sapiens
  misc_RNA (1)...(19): siRNA sense strand
agaaagaggagaagcugaa

SEQ ID NO: 1916833 - RNA, 19 nt, Homo sapiens
  misc_RNA (1)...(19): siRNA sense strand
ggaaaggaagcuccaggau

SEQ ID NO: 1916834 - RNA, 19 nt, Homo sapiens
  misc_RNA (1)...(19): siRNA sense strand
gcagaugaggaccaaauca

SEQ ID NO: 1916835 - RNA, 19 nt, Homo sapiens
  misc_RNA (1)...(19): siRNA sense strand
ucucagaggcugcacuaaa

SEQ ID NO: 1916836 - RNA, 19 nt, Homo sapiens
  misc_RNA (1)...(19): siRNA sense strand
gcaggaagaggcagaggau

SEQ ID NO: 1916837 - RNA, 19 nt, Homo sapiens
  misc_RNA (1)...(19): siRNA sense strand
caaagccucugaaaaggaa

SEQ ID NO: 1916838 - RNA, 19 nt, Homo sapiens
  misc_RNA (1)...(19): siRNA sense strand
uggaagaagauuaugauga

SEQ ID NO: 1916839 - RNA, 19 nt, Homo sapiens
  misc_RNA (1)...(19): siRNA sense strand
uuaccucucuucucuucaa

SEQ ID NO: 1916840 - RNA, 19 nt, Homo sapiens
  misc_RNA (1)...(19): siRNA sense strand
cagugaaaguucugaaucu

SEQ ID NO: 1916841 - RNA, 19 nt, Homo sapiens
  misc_RNA (1)...(19): siRNA sense strand
ggccacaaccugcugaaga

SEQ ID NO: 1916842 - RNA, 19 nt, Homo sapiens
  misc_RNA (1)...(19): siRNA sense strand
gcaucaaggcccuggaaga

SEQ ID NO: 1916843 - RNA, 19 nt, Homo sapiens
  misc_RNA (1)...(19): siRNA sense strand
cugaggaaaucccuuggaa

SEQ ID NO: 1916844 - RNA, 19 nt, Homo sapiens
  misc_RNA (1)...(19): siRNA sense strand
gagggcccaugaacgagaa

SEQ ID NO: 1916845 - RNA, 19 nt, Homo sapiens
  misc_RNA (1)...(19): siRNA sense strand
gaaccaaagcacagacgaa

SEQ ID NO: 1916846 - RNA, 19 nt, Homo sapiens
  misc_RNA (1)...(19): siRNA sense strand
ccaaagcacagacgaaugu

SEQ ID NO: 1916847 - RNA, 19 nt, Homo sapiens
  misc_RNA (1)...(19): siRNA sense strand
ccgagaacauaaugaaaug

SEQ ID NO: 1916848 - RNA, 19 nt, Homo sapiens
  misc_RNA (1)...(19): siRNA sense strand
ccaggcaggugaugugaca

SEQ ID NO: 1916849 - RNA, 19 nt, Homo sapiens
  misc_RNA (1)...(19): siRNA sense strand
acacacacguuagggucua

SEQ ID NO: 1916850 - RNA, 19 nt, Homo sapiens
  misc_RNA (1)...(19): siRNA sense strand
ccagaggagcgcacaguca

SEQ ID NO: 1916851 - RNA, 19 nt, Homo sapiens
  misc_RNA (1)...(19): siRNA sense strand
gacgauuccuccgagaaca

SEQ ID NO: 1916852 - RNA, 19 nt, Homo sapiens
  misc_RNA (1)...(19): siRNA sense strand
cgauuccuccgagaacaua

SEQ ID NO: 1916853 - RNA, 19 nt, Homo sapiens
  misc_RNA (1)...(19): siRNA sense strand
ccuccgagaacauaaugaa

SEQ ID NO: 1916854 - RNA, 19 nt, Homo sapiens
  misc_RNA (1)...(19): siRNA sense strand
gcaagacacuucccaguaa

SEQ ID NO: 1916855 - RNA, 19 nt, Homo sapiens
  misc_RNA (1)...(19): siRNA sense strand
aaacaaggauggaucauuu

SEQ ID NO: 1916856 - RNA, 19 nt, Homo sapiens
  misc_RNA (1)...(19): siRNA sense strand
gaagguggaauaaugaaua

SEQ ID NO: 1916857 - RNA, 19 nt, Homo sapiens
  misc_RNA (1)...(19): siRNA sense strand
caaugaagguggaauaaug

SEQ ID NO: 1916858 - RNA, 19 nt, Homo sapiens
  misc_RNA (1)...(19): siRNA sense strand
aaggauggaucauuucuua

SEQ ID NO: 1916859 - RNA, 19 nt, Homo sapiens
  misc_RNA (1)...(19): siRNA sense strand
gaagaggcauugcacagau

SEQ ID NO: 1916860 - RNA, 19 nt, Homo sapiens
  misc_RNA (1)...(19): siRNA sense strand
caaagcaccuccaaguguu

SEQ ID NO: 1916861 - RNA, 19 nt, Homo sapiens
  misc_RNA (1)...(19): siRNA sense strand
ggaugaggcugauuaugug

SEQ ID NO: 1916862 - RNA, 19 nt, Homo sapiens
  misc_RNA (1)...(19): siRNA sense strand
gaaguaugcaguuaaaguu

SEQ ID NO: 1916863 - RNA, 19 nt, Homo sapiens
  misc_RNA (1)...(19): siRNA sense strand
gcagugguccgaugacuuu

SEQ ID NO: 1916864 - RNA, 19 nt, Homo sapiens
  misc_RNA (1)...(19): siRNA sense strand
cagaaugcuucaaguguuu

SEQ ID NO: 1916865 - RNA, 19 nt, Homo sapiens
  misc_RNA (1)...(19): siRNA sense strand
cagcuggccuucagagaaa

SEQ ID NO: 1916866 - RNA, 19 nt, Homo sapiens
  misc_RNA (1)...(19): siRNA sense strand
gaaaucaucaggaaucauc

SEQ ID NO: 1916867 - RNA, 19 nt, Homo sapiens
  misc_RNA (1)...(19): siRNA sense strand
ggauggaucauuucuuauu

SEQ ID NO: 1916868 - RNA, 19 nt, Homo sapiens
  misc_RNA (1)...(19): siRNA sense strand
caaacaaccauauacacua

SEQ ID NO: 1916869 - RNA, 19 nt, Homo sapiens
  misc_RNA (1)...(19): siRNA sense strand
acaagaagcugugcaguca

SEQ ID NO: 1916870 - RNA, 19 nt, Homo sapiens
  misc_RNA (1)...(19): siRNA sense strand
gaaaagcucuggccaugau

SEQ ID NO: 1916871 - RNA, 19 nt, Homo sapiens
  misc_RNA (1)...(19): siRNA sense strand
gauggaucauuucuuauuc

SEQ ID NO: 1916872 - RNA, 19 nt, Homo sapiens
  misc_RNA (1)...(19): siRNA sense strand
gcacagaucaaacaaggau

SEQ ID NO: 1916873 - RNA, 19 nt, Homo sapiens
  misc_RNA (1)...(19): siRNA sense strand
aaacaaccauauacacuag

SEQ ID NO: 1916874 - RNA, 19 nt, Homo sapiens
  misc_RNA (1)...(19): siRNA sense strand
uaauauuccugugcgauuu

SEQ ID NO: 1916875 - RNA, 19 nt, Homo sapiens
  misc_RNA (1)...(19): siRNA sense strand
aaacaaugaagguggaaua

SEQ ID NO: 1916876 - RNA, 19 nt, Homo sapiens
  misc_RNA (1)...(19): siRNA sense strand
ccauaccucugccaagauu

SEQ ID NO: 1916877 - RNA, 19 nt, Homo sapiens
  misc_RNA (1)...(19): siRNA sense strand
cauaguccuuugguucuua

SEQ ID NO: 1916878 - RNA, 19 nt, Homo sapiens
  misc_RNA (1)...(19): siRNA sense strand
gaucaaccaagccaaauuc

SEQ ID NO: 1916879 - RNA, 19 nt, Homo sapiens
  misc_RNA (1)...(19): siRNA sense strand
acagaaugcuucaaguguu

SEQ ID NO: 1916880 - RNA, 19 nt, Homo sapiens
  misc_RNA (1)...(19): siRNA sense strand
agagagcccugcugacgaa

SEQ ID NO: 1916881 - RNA, 19 nt, Homo sapiens
  misc_RNA (1)...(19): siRNA sense strand
caucaggaaucaucaacau

SEQ ID NO: 1916882 - RNA, 19 nt, Homo sapiens
  misc_RNA (1)...(19): siRNA sense strand
caacagaaugcuucaagug

SEQ ID NO: 1916883 - RNA, 19 nt, Homo sapiens
  misc_RNA (1)...(19): siRNA sense strand
guauauagacaaucgauca

SEQ ID NO: 1916884 - RNA, 19 nt, Homo sapiens
  misc_RNA (1)...(19): siRNA sense strand
gaucgaaagucugcugaag

SEQ ID NO: 1916885 - RNA, 19 nt, Homo sapiens
  misc_RNA (1)...(19): siRNA sense strand
ggugaagaguacuuuggaa

SEQ ID NO: 1916886 - RNA, 19 nt, Homo sapiens
  misc_RNA (1)...(19): siRNA sense strand
ucaaagcaccuccaagugu

SEQ ID NO: 1916887 - RNA, 19 nt, Homo sapiens
  misc_RNA (1)...(19): siRNA sense strand
gcacucggacucagagaug

SEQ ID NO: 1916888 - RNA, 19 nt, Homo sapiens
  misc_RNA (1)...(19): siRNA sense strand
cgacaccacugaagacaac

SEQ ID NO: 1916889 - RNA, 19 nt, Homo sapiens
  misc_RNA (1)...(19): siRNA sense strand
cguggaagauaaugaugaa

SEQ ID NO: 1916890 - RNA, 19 nt, Homo sapiens
  misc_RNA (1)...(19): siRNA sense strand
gcgaguauauagacaaucg

SEQ ID NO: 1916891 - RNA, 19 nt, Homo sapiens
  misc_RNA (1)...(19): siRNA sense strand
ccaccagacugaaguaugc

SEQ ID NO: 1916892 - RNA, 19 nt, Homo sapiens
  misc_RNA (1)...(19): siRNA sense strand
caaacaaggauggaucauu

SEQ ID NO: 1916893 - RNA, 19 nt, Homo sapiens
  misc_RNA (1)...(19): siRNA sense strand
ucaaguguuugugaagaaa

SEQ ID NO: 1916894 - RNA, 19 nt, Homo sapiens
  misc_RNA (1)...(19): siRNA sense strand
guccuuugguucuuauuga

SEQ ID NO: 1916895 - RNA, 19 nt, Homo sapiens
  misc_RNA (1)...(19): siRNA sense strand
ucgaaagucugcugaagag

SEQ ID NO: 1916896 - RNA, 19 nt, Homo sapiens
  misc_RNA (1)...(19): siRNA sense strand
guaugcaguuaaaguuuca

SEQ ID NO: 1916897 - RNA, 19 nt, Homo sapiens
  misc_RNA (1)...(19): siRNA sense strand
acucagagauguacgugau

SEQ ID NO: 1916898 - RNA, 19 nt, Homo sapiens
  misc_RNA (1)...(19): siRNA sense strand
acaaccauauacacuaguu

SEQ ID NO: 1916899 - RNA, 19 nt, Homo sapiens
  misc_RNA (1)...(19): siRNA sense strand
acaggaagcuggcguucuc

SEQ ID NO: 1916900 - RNA, 19 nt, Homo sapiens
  misc_RNA (1)...(19): siRNA sense strand
caagacacuucccaguaag

SEQ ID NO: 1916901 - RNA, 19 nt, Homo sapiens
  misc_RNA (1)...(19): siRNA sense strand
agaaacaaauccaccaaaa

SEQ ID NO: 1916902 - RNA, 19 nt, Homo sapiens
  misc_RNA (1)...(19): siRNA sense strand
ucaggaaucaucaacauag

SEQ ID NO: 1916903 - RNA, 19 nt, Homo sapiens
  misc_RNA (1)...(19): siRNA sense strand
gcauugcacagaucaaaca

SEQ ID NO: 1916904 - RNA, 19 nt, Homo sapiens
  misc_RNA (1)...(19): siRNA sense strand
gcuggagccugugaucgaa

SEQ ID NO: 1916905 - RNA, 19 nt, Homo sapiens
  misc_RNA (1)...(19): siRNA sense strand
ggaacagcuucaggucgaa

SEQ ID NO: 1916906 - RNA, 19 nt, Homo sapiens
  misc_RNA (1)...(19): siRNA sense strand
cuaauuccacuauuucaga

SEQ ID NO: 1916907 - RNA, 19 nt, Homo sapiens
  misc_RNA (1)...(19): siRNA sense strand
caucuaauuccacuauuuc

SEQ ID NO: 1916908 - RNA, 19 nt, Homo sapiens
  misc_RNA (1)...(19): siRNA sense strand
gcugugcagucaccagugu

SEQ ID NO: 1916909 - RNA, 19 nt, Homo sapiens
  misc_RNA (1)...(19): siRNA sense strand
gaacagcuucaggucgaaa

SEQ ID NO: 1916910 - RNA, 19 nt, Homo sapiens
  misc_RNA (1)...(19): siRNA sense strand
gaucaagccagaggcauuc

SEQ ID NO: 1916911 - RNA, 19 nt, Homo sapiens
  misc_RNA (1)...(19): siRNA sense strand
ugaaguaugcaguuaaagu

SEQ ID NO: 1916912 - RNA, 19 nt, Homo sapiens
  misc_RNA (1)...(19): siRNA sense strand
ucaacagaaugcuucaagu

SEQ ID NO: 1916913 - RNA, 19 nt, Homo sapiens
  misc_RNA (1)...(19): siRNA sense strand
ccaacgacaccacugaaga

SEQ ID NO: 1916914 - RNA, 19 nt, Homo sapiens
  misc_RNA (1)...(19): siRNA sense strand
ccagcuggccuucagagaa

SEQ ID NO: 1916915 - RNA, 19 nt, Homo sapiens
  misc_RNA (1)...(19): siRNA sense strand
cagaaacaaauccaccaaa

SEQ ID NO: 1916916 - RNA, 19 nt, Homo sapiens
  misc_RNA (1)...(19): siRNA sense strand
aaagauuccaccagacuga

SEQ ID NO: 1916917 - RNA, 19 nt, Homo sapiens
  misc_RNA (1)...(19): siRNA sense strand
ucaacauaguccuuugguu

SEQ ID NO: 1916918 - RNA, 19 nt, Homo sapiens
  misc_RNA (1)...(19): siRNA sense strand
ccaaacaaccauauacacu

SEQ ID NO: 1916919 - RNA, 19 nt, Homo sapiens
  misc_RNA (1)...(19): siRNA sense strand
auaccucugccaagauuua

SEQ ID NO: 1916920 - RNA, 19 nt, Homo sapiens
  misc_RNA (1)...(19): siRNA sense strand
acagucagaauaacacaaa

SEQ ID NO: 1916921 - RNA, 19 nt, Homo sapiens
  misc_RNA (1)...(19): siRNA sense strand
ccugugcgauuuauugaag

SEQ ID NO: 1916922 - RNA, 19 nt, Homo sapiens
  misc_RNA (1)...(19): siRNA sense strand
aggaugaggcugauuaugu

SEQ ID NO: 1916923 - RNA, 19 nt, Homo sapiens
  misc_RNA (1)...(19): siRNA sense strand
ccgaggagaacgcugauga

SEQ ID NO: 1916924 - RNA, 19 nt, Homo sapiens
  misc_RNA (1)...(19): siRNA sense strand
cuacccagcuuuucaucua

SEQ ID NO: 1916925 - RNA, 19 nt, Homo sapiens
  misc_RNA (1)...(19): siRNA sense strand
cuacgagccgccuccagua

SEQ ID NO: 1916926 - RNA, 19 nt, Homo sapiens
  misc_RNA (1)...(19): siRNA sense strand
ggucaagucacagacaaga

SEQ ID NO: 1916927 - RNA, 19 nt, Homo sapiens
  misc_RNA (1)...(19): siRNA sense strand
caccgagggucaagucaca

SEQ ID NO: 1916928 - RNA, 19 nt, Homo sapiens
  misc_RNA (1)...(19): siRNA sense strand
aaaccaacgacaccacuga

SEQ ID NO: 1916929 - RNA, 19 nt, Homo sapiens
  misc_RNA (1)...(19): siRNA sense strand
cuauauucaucccacagaa

SEQ ID NO: 1916930 - RNA, 19 nt, Homo sapiens
  misc_RNA (1)...(19): siRNA sense strand
gagcccugcugacgaagag

SEQ ID NO: 1916931 - RNA, 19 nt, Homo sapiens
  misc_RNA (1)...(19): siRNA sense strand
gcgauuuauugaagcaaca

SEQ ID NO: 1916932 - RNA, 19 nt, Homo sapiens
  misc_RNA (1)...(19): siRNA sense strand
gaggagaacgcugaugaca

SEQ ID NO: 1916933 - RNA, 19 nt, Homo sapiens
  misc_RNA (1)...(19): siRNA sense strand
ugaggcagcuucaaaagau

SEQ ID NO: 1916934 - RNA, 19 nt, Homo sapiens
  misc_RNA (1)...(19): siRNA sense strand
uugaggaugaggcugauua

SEQ ID NO: 1916935 - RNA, 19 nt, Homo sapiens
  misc_RNA (1)...(19): siRNA sense strand
caggaaucaucaacauagu

SEQ ID NO: 1916936 - RNA, 19 nt, Homo sapiens
  misc_RNA (1)...(19): siRNA sense strand
aaugaagguggaauaauga

SEQ ID NO: 1916937 - RNA, 19 nt, Homo sapiens
  misc_RNA (1)...(19): siRNA sense strand
ggaaguguugcugaaauca

SEQ ID NO: 1916938 - RNA, 19 nt, Homo sapiens
  misc_RNA (1)...(19): siRNA sense strand
uggaaguguugcugaaauc

SEQ ID NO: 1916939 - RNA, 19 nt, Homo sapiens
  misc_RNA (1)...(19): siRNA sense strand
aauauuccugugcgauuua

SEQ ID NO: 1916940 - RNA, 19 nt, Homo sapiens
  misc_RNA (1)...(19): siRNA sense strand
gauuccaaacaaccauaua

SEQ ID NO: 1916941 - RNA, 19 nt, Homo sapiens
  misc_RNA (1)...(19): siRNA sense strand
cugccaagauuuacagaag

SEQ ID NO: 1916942 - RNA, 19 nt, Homo sapiens
  misc_RNA (1)...(19): siRNA sense strand
ccagaggcgaguauauaga

SEQ ID NO: 1916943 - RNA, 19 nt, Homo sapiens
  misc_RNA (1)...(19): siRNA sense strand
gaaguguugcugaaaucau

SEQ ID NO: 1916944 - RNA, 19 nt, Homo sapiens
  misc_RNA (1)...(19): siRNA sense strand
ugaagaggcauugcacaga

SEQ ID NO: 1916945 - RNA, 19 nt, Homo sapiens
  misc_RNA (1)...(19): siRNA sense strand
acccauaccucugccaaga

SEQ ID NO: 1916946 - RNA, 19 nt, Homo sapiens
  misc_RNA (1)...(19): siRNA sense strand
ggaagauaaugaugaaaac

SEQ ID NO: 1916947 - RNA, 19 nt, Homo sapiens
  misc_RNA (1)...(19): siRNA sense strand
aguaugcaguuaaaguuuc

SEQ ID NO: 1916948 - RNA, 19 nt, Homo sapiens
  misc_RNA (1)...(19): siRNA sense strand
ucaucaacauaguccuuug

SEQ ID NO: 1916949 - RNA, 19 nt, Homo sapiens
  misc_RNA (1)...(19): siRNA sense strand
gcucuggccaugauuccaa

SEQ ID NO: 1916950 - RNA, 19 nt, Homo sapiens
  misc_RNA (1)...(19): siRNA sense strand
gagcagugguccgaugacu

SEQ ID NO: 1916951 - RNA, 19 nt, Homo sapiens
  misc_RNA (1)...(19): siRNA sense strand
uauauucaucccacagaaa

SEQ ID NO: 1916952 - RNA, 19 nt, Homo sapiens
  misc_RNA (1)...(19): siRNA sense strand
cgaucaagccagaggcauu

SEQ ID NO: 1916953 - RNA, 19 nt, Homo sapiens
  misc_RNA (1)...(19): siRNA sense strand
gccagaggcgaguauauag

SEQ ID NO: 1916954 - RNA, 19 nt, Homo sapiens
  misc_RNA (1)...(19): siRNA sense strand
ggacaaauuuggccacaau

SEQ ID NO: 1916955 - RNA, 19 nt, Homo sapiens
  misc_RNA (1)...(19): siRNA sense strand
gaaagaaggccaaacacaa

SEQ ID NO: 1916956 - RNA, 19 nt, Homo sapiens
  misc_RNA (1)...(19): siRNA sense strand
ccaacaagcuucguacaaa

SEQ ID NO: 1916957 - RNA, 19 nt, Homo sapiens
  misc_RNA (1)...(19): siRNA sense strand
ggaaugagacccucgugua

SEQ ID NO: 1916958 - RNA, 19 nt, Homo sapiens
  misc_RNA (1)...(19): siRNA sense strand
aggaagagcugacugauga

SEQ ID NO: 1916959 - RNA, 19 nt, Homo sapiens
  misc_RNA (1)...(19): siRNA sense strand
gcaggacgcuuuccagauc

SEQ ID NO: 1916960 - RNA, 19 nt, Homo sapiens
  misc_RNA (1)...(19): siRNA sense strand
ggaagaauuucaacaucug

SEQ ID NO: 1916961 - RNA, 19 nt, Homo sapiens
  misc_RNA (1)...(19): siRNA sense strand
acagugaccuggcaaagaa

SEQ ID NO: 1916962 - RNA, 19 nt, Homo sapiens
  misc_RNA (1)...(19): siRNA sense strand
cgaauucaaugaggaguuu

SEQ ID NO: 1916963 - RNA, 19 nt, Homo sapiens
  misc_RNA (1)...(19): siRNA sense strand
gaggaagaauuucaacauc

SEQ ID NO: 1916964 - RNA, 19 nt, Homo sapiens
  misc_RNA (1)...(19): siRNA sense strand
gaaugagacccucguguau

SEQ ID NO: 1916965 - RNA, 19 nt, Homo sapiens
  misc_RNA (1)...(19): siRNA sense strand
agaagucacuggacauuuc

SEQ ID NO: 1916966 - RNA, 19 nt, Homo sapiens
  misc_RNA (1)...(19): siRNA sense strand
gugaaccgcugcauacugu

SEQ ID NO: 1916967 - RNA, 19 nt, Homo sapiens
  misc_RNA (1)...(19): siRNA sense strand
ggcaccagcuacagaauga

SEQ ID NO: 1916968 - RNA, 19 nt, Homo sapiens
  misc_RNA (1)...(19): siRNA sense strand
ggaaagaaggccaaacaca

SEQ ID NO: 1916969 - RNA, 19 nt, Homo sapiens
  misc_RNA (1)...(19): siRNA sense strand
gcgagugauuccuaugaaa

SEQ ID NO: 1916970 - RNA, 19 nt, Homo sapiens
  misc_RNA (1)...(19): siRNA sense strand
agaaagaaaucaucaacag

SEQ ID NO: 1916971 - RNA, 19 nt, Homo sapiens
  misc_RNA (1)...(19): siRNA sense strand
gcugggcucugccugugua

SEQ ID NO: 1916972 - RNA, 19 nt, Homo sapiens
  misc_RNA (1)...(19): siRNA sense strand
ccaaccagaggaagaauuu

SEQ ID NO: 1916973 - RNA, 19 nt, Homo sapiens
  misc_RNA (1)...(19): siRNA sense strand
gagcgugguucuucaaagg

SEQ ID NO: 1916974 - RNA, 19 nt, Homo sapiens
  misc_RNA (1)...(19): siRNA sense strand
caaauuuggccacaaugaa

SEQ ID NO: 1916975 - RNA, 19 nt, Homo sapiens
  misc_RNA (1)...(19): siRNA sense strand
ccacagccuaugccuauaa

SEQ ID NO: 1916976 - RNA, 19 nt, Homo sapiens
  misc_RNA (1)...(19): siRNA sense strand
gcagggaggccucauugug

SEQ ID NO: 1916977 - RNA, 19 nt, Homo sapiens
  misc_RNA (1)...(19): siRNA sense strand
gagcgagugauuccuauga

SEQ ID NO: 1916978 - RNA, 19 nt, Homo sapiens
  misc_RNA (1)...(19): siRNA sense strand
ugugaggacuguaagaaga

SEQ ID NO: 1916979 - RNA, 19 nt, Homo sapiens
  misc_RNA (1)...(19): siRNA sense strand
caacaagcuucguacaaaa

SEQ ID NO: 1916980 - RNA, 19 nt, Homo sapiens
  misc_RNA (1)...(19): siRNA sense strand
gaugaggacaugcaaagga

SEQ ID NO: 1916981 - RNA, 19 nt, Homo sapiens
  misc_RNA (1)...(19): siRNA sense strand
caaguccaaugauuacauc

SEQ ID NO: 1916982 - RNA, 19 nt, Homo sapiens
  misc_RNA (1)...(19): siRNA sense strand
ggacgcuaauggcuacuca

SEQ ID NO: 1916983 - RNA, 19 nt, Homo sapiens
  misc_RNA (1)...(19): siRNA sense strand
gaagccaacagcuacgauu

SEQ ID NO: 1916984 - RNA, 19 nt, Homo sapiens
  misc_RNA (1)...(19): siRNA sense strand
gggcucugccuguguagua

SEQ ID NO: 1916985 - RNA, 19 nt, Homo sapiens
  misc_RNA (1)...(19): siRNA sense strand
ucaaacggcuuggcugauc

SEQ ID NO: 1916986 - RNA, 19 nt, Homo sapiens
  misc_RNA (1)...(19): siRNA sense strand
ggaauucagccuucucuac

SEQ ID NO: 1916987 - RNA, 19 nt, Homo sapiens
  misc_RNA (1)...(19): siRNA sense strand
ggagagcgcuuaaaacacu

SEQ ID NO: 1916988 - RNA, 19 nt, Homo sapiens
  misc_RNA (1)...(19): siRNA sense strand
gagaaagaaaucaucaaca

SEQ ID NO: 1916989 - RNA, 19 nt, Homo sapiens
  misc_RNA (1)...(19): siRNA sense strand
ggagaaagaaaucaucaac

SEQ ID NO: 1916990 - RNA, 19 nt, Homo sapiens
  misc_RNA (1)...(19): siRNA sense strand
agaaccacgugucaaguga

SEQ ID NO: 1916991 - RNA, 19 nt, Homo sapiens
  misc_RNA (1)...(19): siRNA sense strand
gaaugagaaccacguguca

SEQ ID NO: 1916992 - RNA, 19 nt, Homo sapiens
  misc_RNA (1)...(19): siRNA sense strand
ugacugaugaggagaaaga

SEQ ID NO: 1916993 - RNA, 19 nt, Homo sapiens
  misc_RNA (1)...(19): siRNA sense strand
ggaagacccucaggaucuc

SEQ ID NO: 1916994 - RNA, 19 nt, Homo sapiens
  misc_RNA (1)...(19): siRNA sense strand
cagcuacgauucggaugaa

SEQ ID NO: 1916995 - RNA, 19 nt, Homo sapiens
  misc_RNA (1)...(19): siRNA sense strand
uggcugaucccuacguuaa

SEQ ID NO: 1916996 - RNA, 19 nt, Homo sapiens
  misc_RNA (1)...(19): siRNA sense strand
gagaaccacgugucaagug

SEQ ID NO: 1916997 - RNA, 19 nt, Homo sapiens
  misc_RNA (1)...(19): siRNA sense strand
gaagaacguggcuggagau

SEQ ID NO: 1916998 - RNA, 19 nt, Homo sapiens
  misc_RNA (1)...(19): siRNA sense strand
gaggagaaagaaaucauca

SEQ ID NO: 1916999 - RNA, 19 nt, Homo sapiens
  misc_RNA (1)...(19): siRNA sense strand
gagcccagcagguuugaga

SEQ ID NO: 1917000 - RNA, 19 nt, Homo sapiens
  misc_RNA (1)...(19): siRNA sense strand
gcaaguccaaugauuacau

SEQ ID NO: 1917001 - RNA, 19 nt, Homo sapiens
  misc_RNA (1)...(19): siRNA sense strand
caaacacaagacucaaauu

SEQ ID NO: 1917002 - RNA, 19 nt, Homo sapiens
  misc_RNA (1)...(19): siRNA sense strand
ccaaacacaagacucaaau

SEQ ID NO: 1917003 - RNA, 19 nt, Homo sapiens
  misc_RNA (1)...(19): siRNA sense strand
ggagcgugguucuucaaag

SEQ ID NO: 1917004 - RNA, 19 nt, Homo sapiens
  misc_RNA (1)...(19): siRNA sense strand
cagccuaugccuauaaaga

SEQ ID NO: 1917005 - RNA, 19 nt, Homo sapiens
  misc_RNA (1)...(19): siRNA sense strand
cccgaggcauggcccuuua

SEQ ID NO: 1917006 - RNA, 19 nt, Homo sapiens
  misc_RNA (1)...(19): siRNA sense strand
gaagucacuggacauuuca

SEQ ID NO: 1917007 - RNA, 19 nt, Homo sapiens
  misc_RNA (1)...(19): siRNA sense strand
cacagccuaugccuauaaa

SEQ ID NO: 1917008 - RNA, 19 nt, Homo sapiens
  misc_RNA (1)...(19): siRNA sense strand
aaagaaggccaaacacaag

SEQ ID NO: 1917009 - RNA, 19 nt, Homo sapiens
  misc_RNA (1)...(19): siRNA sense strand
uggccacaaugaauuuauu

SEQ ID NO: 1917010 - RNA, 19 nt, Homo sapiens
  misc_RNA (1)...(19): siRNA sense strand
guucuaaccguuggaugua

SEQ ID NO: 1917011 - RNA, 19 nt, Homo sapiens
  misc_RNA (1)...(19): siRNA sense strand
gaaccgcugcauacugugu

SEQ ID NO: 1917012 - RNA, 19 nt, Homo sapiens
  misc_RNA (1)...(19): siRNA sense strand
gccaaacacaagacucaaa

SEQ ID NO: 1917013 - RNA, 19 nt, Homo sapiens
  misc_RNA (1)...(19): siRNA sense strand
cagcagggaggccucauug

SEQ ID NO: 1917014 - RNA, 19 nt, Homo sapiens
  misc_RNA (1)...(19): siRNA sense strand
ggaucuccgucugugauga

SEQ ID NO: 1917015 - RNA, 19 nt, Homo sapiens
  misc_RNA (1)...(19): siRNA sense strand
gcagugcaccaucauuaag

SEQ ID NO: 1917016 - RNA, 19 nt, Homo sapiens
  misc_RNA (1)...(19): siRNA sense strand
cgaggugacagugaagaua

SEQ ID NO: 1917017 - RNA, 19 nt, Homo sapiens
  misc_RNA (1)...(19): siRNA sense strand
ccaacaaccgccugcauuc

SEQ ID NO: 1917018 - RNA, 19 nt, Homo sapiens
  misc_RNA (1)...(19): siRNA sense strand
agaagaacgucugcaccaa

SEQ ID NO: 1917019 - RNA, 19 nt, Homo sapiens
  misc_RNA (1)...(19): siRNA sense strand
aaaggaagacccucaggau

SEQ ID NO: 1917020 - RNA, 19 nt, Homo sapiens
  misc_RNA (1)...(19): siRNA sense strand
gaggacaugcaaaggaaga

SEQ ID NO: 1917021 - RNA, 19 nt, Homo sapiens
  misc_RNA (1)...(19): siRNA sense strand
gaggugacagugaagauag

SEQ ID NO: 1917022 - RNA, 19 nt, Homo sapiens
  misc_RNA (1)...(19): siRNA sense strand
gcugacugaugaggagaaa

SEQ ID NO: 1917023 - RNA, 19 nt, Homo sapiens
  misc_RNA (1)...(19): siRNA sense strand
aagaacgucugcaccaagu

SEQ ID NO: 1917024 - RNA, 19 nt, Homo sapiens
  misc_RNA (1)...(19): siRNA sense strand
aaagaagucacuggacauu

SEQ ID NO: 1917025 - RNA, 19 nt, Homo sapiens
  misc_RNA (1)...(19): siRNA sense strand
cgaggagcguggcaagauc

SEQ ID NO: 1917026 - RNA, 19 nt, Homo sapiens
  misc_RNA (1)...(19): siRNA sense strand
gaggcauggcccuuuauga

SEQ ID NO: 1917027 - RNA, 19 nt, Homo sapiens
  misc_RNA (1)...(19): siRNA sense strand
acaaauuuggccacaauga

SEQ ID NO: 1917028 - RNA, 19 nt, Homo sapiens
  misc_RNA (1)...(19): siRNA sense strand
aggaagaauuucaacaucu

SEQ ID NO: 1917029 - RNA, 19 nt, Homo sapiens
  misc_RNA (1)...(19): siRNA sense strand
caagggagagcgcuuaaaa

SEQ ID NO: 1917030 - RNA, 19 nt, Homo sapiens
  misc_RNA (1)...(19): siRNA sense strand
ucggcaaguccaaugauua

SEQ ID NO: 1917031 - RNA, 19 nt, Homo sapiens
  misc_RNA (1)...(19): siRNA sense strand
caaagaagucacuggacau

SEQ ID NO: 1917032 - RNA, 19 nt, Homo sapiens
  misc_RNA (1)...(19): siRNA sense strand
gucaagcucuggcugaaac

SEQ ID NO: 1917033 - RNA, 19 nt, Homo sapiens
  misc_RNA (1)...(19): siRNA sense strand
gccugaagcccauggauuc

SEQ ID NO: 1917034 - RNA, 19 nt, Homo sapiens
  misc_RNA (1)...(19): siRNA sense strand
aaccacgugucaagugauu

SEQ ID NO: 1917035 - RNA, 19 nt, Homo sapiens
  misc_RNA (1)...(19): siRNA sense strand
gagcagguggagcguguug

SEQ ID NO: 1917036 - RNA, 19 nt, Homo sapiens
  misc_RNA (1)...(19): siRNA sense strand
augagacccucguguauca

SEQ ID NO: 1917037 - RNA, 19 nt, Homo sapiens
  misc_RNA (1)...(19): siRNA sense strand
cagcaaguccaacaagcuu

SEQ ID NO: 1917038 - RNA, 19 nt, Homo sapiens
  misc_RNA (1)...(19): siRNA sense strand
uagaaaacaugaggaagaa

SEQ ID NO: 1917039 - RNA, 19 nt, Homo sapiens
  misc_RNA (1)...(19): siRNA sense strand
ugaaaccggacaugggaaa

SEQ ID NO: 1917040 - RNA, 19 nt, Homo sapiens
  misc_RNA (1)...(19): siRNA sense strand
aaauuuggccacaaugaau

SEQ ID NO: 1917041 - RNA, 19 nt, Homo sapiens
  misc_RNA (1)...(19): siRNA sense strand
acaaccgccugcauucugu

SEQ ID NO: 1917042 - RNA, 19 nt, Homo sapiens
  misc_RNA (1)...(19): siRNA sense strand
ggagcguguuggugacauc

SEQ ID NO: 1917043 - RNA, 19 nt, Homo sapiens
  misc_RNA (1)...(19): siRNA sense strand
gaccagauucucccucaag

SEQ ID NO: 1917044 - RNA, 19 nt, Homo sapiens
  misc_RNA (1)...(19): siRNA sense strand
cgucugugaugaggacaaa

SEQ ID NO: 1917045 - RNA, 19 nt, Homo sapiens
  misc_RNA (1)...(19): siRNA sense strand
augaggacaugcaaaggaa

SEQ ID NO: 1917046 - RNA, 19 nt, Homo sapiens
  misc_RNA (1)...(19): siRNA sense strand
ggccugaagcccauggauu

SEQ ID NO: 1917047 - RNA, 19 nt, Homo sapiens
  misc_RNA (1)...(19): siRNA sense strand
aagaggaagccaacagcua

SEQ ID NO: 1917048 - RNA, 19 nt, Homo sapiens
  misc_RNA (1)...(19): siRNA sense strand
cccagcagccugucaguga

SEQ ID NO: 1917049 - RNA, 19 nt, Homo sapiens
  misc_RNA (1)...(19): siRNA sense strand
gccuaugccuauaaagaag

SEQ ID NO: 1917050 - RNA, 19 nt, Homo sapiens
  misc_RNA (1)...(19): siRNA sense strand
uguaguaugugaggacugu

SEQ ID NO: 1917051 - RNA, 19 nt, Homo sapiens
  misc_RNA (1)...(19): siRNA sense strand
gugaugaggacaaauuugg

SEQ ID NO: 1917052 - RNA, 19 nt, Homo sapiens
  misc_RNA (1)...(19): siRNA sense strand
aaccggacaugggaaagaa

SEQ ID NO: 1917053 - RNA, 19 nt, Homo sapiens
  misc_RNA (1)...(19): siRNA sense strand
gauccuggucucccucaug

SEQ ID NO: 1917054 - RNA, 19 nt, Homo sapiens
  misc_RNA (1)...(19): siRNA sense strand
guacauggauuaucugugu

SEQ ID NO: 1917055 - RNA, 19 nt, Homo sapiens
  misc_RNA (1)...(19): siRNA sense strand
ucucucagcugauuaauuu

SEQ ID NO: 1917056 - RNA, 19 nt, Homo sapiens
  misc_RNA (1)...(19): siRNA sense strand
ugacauggaugcacugaaa

SEQ ID NO: 1917057 - RNA, 19 nt, Homo sapiens
  misc_RNA (1)...(19): siRNA sense strand
gcacucagcucuucagcau

SEQ ID NO: 1917058 - RNA, 19 nt, Homo sapiens
  misc_RNA (1)...(19): siRNA sense strand
ccaugaagcuguaagaaug

SEQ ID NO: 1917059 - RNA, 19 nt, Homo sapiens
  misc_RNA (1)...(19): siRNA sense strand
guuaugcacuuuacccuuu

SEQ ID NO: 1917060 - RNA, 19 nt, Homo sapiens
  misc_RNA (1)...(19): siRNA sense strand
gccagcagcucgcucagua

SEQ ID NO: 1917061 - RNA, 19 nt, Homo sapiens
  misc_RNA (1)...(19): siRNA sense strand
uaacugaggcguuucugua

SEQ ID NO: 1917062 - RNA, 19 nt, Homo sapiens
  misc_RNA (1)...(19): siRNA sense strand
ccgaauaacugaggcguuu

SEQ ID NO: 1917063 - RNA, 19 nt, Homo sapiens
  misc_RNA (1)...(19): siRNA sense strand
ggaaaacgcuggauucuac

SEQ ID NO: 1917064 - RNA, 19 nt, Homo sapiens
  misc_RNA (1)...(19): siRNA sense strand
uuuagaagcugcuagaaau

SEQ ID NO: 1917065 - RNA, 19 nt, Homo sapiens
  misc_RNA (1)...(19): siRNA sense strand
ccucacagguucuggcaaa

SEQ ID NO: 1917066 - RNA, 19 nt, Homo sapiens
  misc_RNA (1)...(19): siRNA sense strand
agaaugccaucuugaaugu

SEQ ID NO: 1917067 - RNA, 19 nt, Homo sapiens
  misc_RNA (1)...(19): siRNA sense strand
cugauaacauccggaaaua

SEQ ID NO: 1917068 - RNA, 19 nt, Homo sapiens
  misc_RNA (1)...(19): siRNA sense strand
uccaaacucugcagugaaa

SEQ ID NO: 1917069 - RNA, 19 nt, Homo sapiens
  misc_RNA (1)...(19): siRNA sense strand
aaaccagucuguuguccaa

SEQ ID NO: 1917070 - RNA, 19 nt, Homo sapiens
  misc_RNA (1)...(19): siRNA sense strand
aaugccaucuugaauguaa

SEQ ID NO: 1917071 - RNA, 19 nt, Homo sapiens
  misc_RNA (1)...(19): siRNA sense strand
gauaacauccggaaauacu

SEQ ID NO: 1917072 - RNA, 19 nt, Homo sapiens
  misc_RNA (1)...(19): siRNA sense strand
gcugauaacauccggaaau

SEQ ID NO: 1917073 - RNA, 19 nt, Homo sapiens
  misc_RNA (1)...(19): siRNA sense strand
ccacaguuaugcacuuuac

SEQ ID NO: 1917074 - RNA, 19 nt, Homo sapiens
  misc_RNA (1)...(19): siRNA sense strand
aauaugaccugguuugcau

SEQ ID NO: 1917075 - RNA, 19 nt, Homo sapiens
  misc_RNA (1)...(19): siRNA sense strand
gcagcucgcucaguacaag

SEQ ID NO: 1917076 - RNA, 19 nt, Homo sapiens
  misc_RNA (1)...(19): siRNA sense strand
gaccacagguuuuaguauu

SEQ ID NO: 1917077 - RNA, 19 nt, Homo sapiens
  misc_RNA (1)...(19): siRNA sense strand
ugaaagacagcuucucuca

SEQ ID NO: 1917078 - RNA, 19 nt, Homo sapiens
  misc_RNA (1)...(19): siRNA sense strand
cagaaugccaucuugaaug

SEQ ID NO: 1917079 - RNA, 19 nt, Homo sapiens
  misc_RNA (1)...(19): siRNA sense strand
cagaauaugaccugguuug

SEQ ID NO: 1917080 - RNA, 19 nt, Homo sapiens
  misc_RNA (1)...(19): siRNA sense strand
uguccaaacucugcaguga

SEQ ID NO: 1917081 - RNA, 19 nt, Homo sapiens
  misc_RNA (1)...(19): siRNA sense strand
gaauaugaccugguuugca

SEQ ID NO: 1917082 - RNA, 19 nt, Homo sapiens
  misc_RNA (1)...(19): siRNA sense strand
uucagaggaugauuuagaa

SEQ ID NO: 1917083 - RNA, 19 nt, Homo sapiens
  misc_RNA (1)...(19): siRNA sense strand
ccagaaugccaucuugaau

SEQ ID NO: 1917084 - RNA, 19 nt, Homo sapiens
  misc_RNA (1)...(19): siRNA sense strand
uagaagcugcuagaaauga

SEQ ID NO: 1917085 - RNA, 19 nt, Homo sapiens
  misc_RNA (1)...(19): siRNA sense strand
ccacagguuuuaguauuaa

SEQ ID NO: 1917086 - RNA, 19 nt, Homo sapiens
  misc_RNA (1)...(19): siRNA sense strand
cuucagaggaugauuuaga

SEQ ID NO: 1917087 - RNA, 19 nt, Homo sapiens
  misc_RNA (1)...(19): siRNA sense strand
cauccacaguuaugcacuu

SEQ ID NO: 1917088 - RNA, 19 nt, Homo sapiens
  misc_RNA (1)...(19): siRNA sense strand
gaacuuggaggggcugaua

SEQ ID NO: 1917089 - RNA, 19 nt, Homo sapiens
  misc_RNA (1)...(19): siRNA sense strand
aaaagaccaugaagcugua

SEQ ID NO: 1917090 - RNA, 19 nt, Homo sapiens
  misc_RNA (1)...(19): siRNA sense strand
gaauaacugaggcguuucu

SEQ ID NO: 1917091 - RNA, 19 nt, Homo sapiens
  misc_RNA (1)...(19): siRNA sense strand
ucuucagcauccacaguua

SEQ ID NO: 1917092 - RNA, 19 nt, Homo sapiens
  misc_RNA (1)...(19): siRNA sense strand
guauuaaagcagugccauu

SEQ ID NO: 1917093 - RNA, 19 nt, Homo sapiens
  misc_RNA (1)...(19): siRNA sense strand
ggccaaucaucaagacaag

SEQ ID NO: 1917094 - RNA, 19 nt, Homo sapiens
  misc_RNA (1)...(19): siRNA sense strand
gcguuucuguacauggauu

SEQ ID NO: 1917095 - RNA, 19 nt, Homo sapiens
  misc_RNA (1)...(19): siRNA sense strand
gaccaugaagcuguaagaa

SEQ ID NO: 1917096 - RNA, 19 nt, Homo sapiens
  misc_RNA (1)...(19): siRNA sense strand
gcagugaaagccccgauaa

SEQ ID NO: 1917097 - RNA, 19 nt, Homo sapiens
  misc_RNA (1)...(19): siRNA sense strand
gagccgcuacuaccaagga

SEQ ID NO: 1917098 - RNA, 19 nt, Homo sapiens
  misc_RNA (1)...(19): siRNA sense strand
uuaaagcagugccauucca

SEQ ID NO: 1917099 - RNA, 19 nt, Homo sapiens
  misc_RNA (1)...(19): siRNA sense strand
gaaugccaucuugaaugua

SEQ ID NO: 1917100 - RNA, 19 nt, Homo sapiens
  misc_RNA (1)...(19): siRNA sense strand
gcacugaaagacagcuucu

SEQ ID NO: 1917101 - RNA, 19 nt, Homo sapiens
  misc_RNA (1)...(19): siRNA sense strand
caccugcacgaccagaaua

SEQ ID NO: 1917102 - RNA, 19 nt, Homo sapiens
  misc_RNA (1)...(19): siRNA sense strand
gcuucucucagcugauuaa

SEQ ID NO: 1917103 - RNA, 19 nt, Homo sapiens
  misc_RNA (1)...(19): siRNA sense strand
uauuaaagcagugccauuc

SEQ ID NO: 1917104 - RNA, 19 nt, Homo sapiens
  misc_RNA (1)...(19): siRNA sense strand
ugauuuagaagcugcuaga

SEQ ID NO: 1917105 - RNA, 19 nt, Homo sapiens
  misc_RNA (1)...(19): siRNA sense strand
aagcagugccauuccagaa

SEQ ID NO: 1917106 - RNA, 19 nt, Homo sapiens
  misc_RNA (1)...(19): siRNA sense strand
cugcacgaccagaauauga

SEQ ID NO: 1917107 - RNA, 19 nt, Homo sapiens
  misc_RNA (1)...(19): siRNA sense strand
acauggauuaucuguguuu

SEQ ID NO: 1917108 - RNA, 19 nt, Homo sapiens
  misc_RNA (1)...(19): siRNA sense strand
gauuaucuguguuuuagag

SEQ ID NO: 1917109 - RNA, 19 nt, Homo sapiens
  misc_RNA (1)...(19): siRNA sense strand
gaggugaacuugaauaaua

SEQ ID NO: 1917110 - RNA, 19 nt, Homo sapiens
  misc_RNA (1)...(19): siRNA sense strand
agaaggaacuggagaaaua

SEQ ID NO: 1917111 - RNA, 19 nt, Homo sapiens
  misc_RNA (1)...(19): siRNA sense strand
ggagaaauacagagacaua

SEQ ID NO: 1917112 - RNA, 19 nt, Homo sapiens
  misc_RNA (1)...(19): siRNA sense strand
caaagagcgugaugacuug

SEQ ID NO: 1917113 - RNA, 19 nt, Homo sapiens
  misc_RNA (1)...(19): siRNA sense strand
ccacaaacauugaggagau

SEQ ID NO: 1917114 - RNA, 19 nt, Homo sapiens
  misc_RNA (1)...(19): siRNA sense strand
cagcaauucuggacaugua

SEQ ID NO: 1917115 - RNA, 19 nt, Homo sapiens
  misc_RNA (1)...(19): siRNA sense strand
guaacaagcaauacuauga

SEQ ID NO: 1917116 - RNA, 19 nt, Homo sapiens
  misc_RNA (1)...(19): siRNA sense strand
ggagauggauccugagaac

SEQ ID NO: 1917117 - RNA, 19 nt, Homo sapiens
  misc_RNA (1)...(19): siRNA sense strand
gaauccaacuucauuagca

SEQ ID NO: 1917118 - RNA, 19 nt, Homo sapiens
  misc_RNA (1)...(19): siRNA sense strand
agacauagaugaagaugag

SEQ ID NO: 1917119 - RNA, 19 nt, Homo sapiens
  misc_RNA (1)...(19): siRNA sense strand
gaacuacgucgccagcaaa

SEQ ID NO: 1917120 - RNA, 19 nt, Homo sapiens
  misc_RNA (1)...(19): siRNA sense strand
gguacagccugacaaguau

SEQ ID NO: 1917121 - RNA, 19 nt, Homo sapiens
  misc_RNA (1)...(19): siRNA sense strand
ggagauggccaccgugcua

SEQ ID NO: 1917122 - RNA, 19 nt, Homo sapiens
  misc_RNA (1)...(19): siRNA sense strand
gaaggcaaauaccuaugug

SEQ ID NO: 1917123 - RNA, 19 nt, Homo sapiens
  misc_RNA (1)...(19): siRNA sense strand
ccaaaucccacaaacauug

SEQ ID NO: 1917124 - RNA, 19 nt, Homo sapiens
  misc_RNA (1)...(19): siRNA sense strand
gaaauacagagacauagau

SEQ ID NO: 1917125 - RNA, 19 nt, Homo sapiens
  misc_RNA (1)...(19): siRNA sense strand
ucaaagagcgugaugacuu

SEQ ID NO: 1917126 - RNA, 19 nt, Homo sapiens
  misc_RNA (1)...(19): siRNA sense strand
caauacccaugcuaaguga

SEQ ID NO: 1917127 - RNA, 19 nt, Homo sapiens
  misc_RNA (1)...(19): siRNA sense strand
caacgugaccagacaaaga

SEQ ID NO: 1917128 - RNA, 19 nt, Homo sapiens
  misc_RNA (1)...(19): siRNA sense strand
uguacacacugaugaguaa

SEQ ID NO: 1917129 - RNA, 19 nt, Homo sapiens
  misc_RNA (1)...(19): siRNA sense strand
gcugacauguugcgugaga

SEQ ID NO: 1917130 - RNA, 19 nt, Homo sapiens
  misc_RNA (1)...(19): siRNA sense strand
gagaggcccuuuugcagua

SEQ ID NO: 1917131 - RNA, 19 nt, Homo sapiens
  misc_RNA (1)...(19): siRNA sense strand
caucgaauccaacuucauu

SEQ ID NO: 1917132 - RNA, 19 nt, Homo sapiens
  misc_RNA (1)...(19): siRNA sense strand
uggaggaggugaacuugaa

SEQ ID NO: 1917133 - RNA, 19 nt, Homo sapiens
  misc_RNA (1)...(19): siRNA sense strand
acagagacauagaugaaga

SEQ ID NO: 1917134 - RNA, 19 nt, Homo sapiens
  misc_RNA (1)...(19): siRNA sense strand
ggacauguacacacugaug

SEQ ID NO: 1917135 - RNA, 19 nt, Homo sapiens
  misc_RNA (1)...(19): siRNA sense strand
gagcagugucccucuauug

SEQ ID NO: 1917136 - RNA, 19 nt, Homo sapiens
  misc_RNA (1)...(19): siRNA sense strand
cugcaacacugaaggcauu

SEQ ID NO: 1917137 - RNA, 19 nt, Homo sapiens
  misc_RNA (1)...(19): siRNA sense strand
aaacaucgaauccaacuuc

SEQ ID NO: 1917138 - RNA, 19 nt, Homo sapiens
  misc_RNA (1)...(19): siRNA sense strand
caaugaaggcaaauaccua

SEQ ID NO: 1917139 - RNA, 19 nt, Homo sapiens
  misc_RNA (1)...(19): siRNA sense strand
uaaagaggguccgaagcaa

SEQ ID NO: 1917140 - RNA, 19 nt, Homo sapiens
  misc_RNA (1)...(19): siRNA sense strand
ugcaguggcugacauguug

SEQ ID NO: 1917141 - RNA, 19 nt, Homo sapiens
  misc_RNA (1)...(19): siRNA sense strand
ugccacagaugcugaaaug

SEQ ID NO: 1917142 - RNA, 19 nt, Homo sapiens
  misc_RNA (1)...(19): siRNA sense strand
cacaaacauugaggagaua

SEQ ID NO: 1917143 - RNA, 19 nt, Homo sapiens
  misc_RNA (1)...(19): siRNA sense strand
gcaacaggcacuagaaguc

SEQ ID NO: 1917144 - RNA, 19 nt, Homo sapiens
  misc_RNA (1)...(19): siRNA sense strand
gugaggcaaugaaggcaaa

SEQ ID NO: 1917145 - RNA, 19 nt, Homo sapiens
  misc_RNA (1)...(19): siRNA sense strand
gaggaggugaacuugaaua

SEQ ID NO: 1917146 - RNA, 19 nt, Homo sapiens
  misc_RNA (1)...(19): siRNA sense strand
gccaugacccgaaacaaug

SEQ ID NO: 1917147 - RNA, 19 nt, Homo sapiens
  misc_RNA (1)...(19): siRNA sense strand
ccugccagcuggacuaaga

SEQ ID NO: 1917148 - RNA, 19 nt, Homo sapiens
  misc_RNA (1)...(19): siRNA sense strand
ucauugagcuccguguaga

SEQ ID NO: 1917149 - RNA, 19 nt, Homo sapiens
  misc_RNA (1)...(19): siRNA sense strand
ggagcaacaggcacuagaa

SEQ ID NO: 1917150 - RNA, 19 nt, Homo sapiens
  misc_RNA (1)...(19): siRNA sense strand
ugaacuacgucgccagcaa

SEQ ID NO: 1917151 - RNA, 19 nt, Homo sapiens
  misc_RNA (1)...(19): siRNA sense strand
gccuaaacaucgaauccaa

SEQ ID NO: 1917152 - RNA, 19 nt, Homo sapiens
  misc_RNA (1)...(19): siRNA sense strand
agaugaagaugagauccua

SEQ ID NO: 1917153 - RNA, 19 nt, Homo sapiens
  misc_RNA (1)...(19): siRNA sense strand
ugguacagccugacaagua

SEQ ID NO: 1917154 - RNA, 19 nt, Homo sapiens
  misc_RNA (1)...(19): siRNA sense strand
auacagagacauagaugaa

SEQ ID NO: 1917155 - RNA, 19 nt, Homo sapiens
  misc_RNA (1)...(19): siRNA sense strand
ccaauacccaugcuaagug

SEQ ID NO: 1917156 - RNA, 19 nt, Homo sapiens
  misc_RNA (1)...(19): siRNA sense strand
caacaggcacuagaaguca

SEQ ID NO: 1917157 - RNA, 19 nt, Homo sapiens
  misc_RNA (1)...(19): siRNA sense strand
caaaucccacaaacauuga

SEQ ID NO: 1917158 - RNA, 19 nt, Homo sapiens
  misc_RNA (1)...(19): siRNA sense strand
gauggauccugagaacaug

SEQ ID NO: 1917159 - RNA, 19 nt, Homo sapiens
  misc_RNA (1)...(19): siRNA sense strand
cgcuuuggcuaccacuuua

SEQ ID NO: 1917160 - RNA, 19 nt, Homo sapiens
  misc_RNA (1)...(19): siRNA sense strand
ggaacuggagaaauacaga

SEQ ID NO: 1917161 - RNA, 19 nt, Homo sapiens
  misc_RNA (1)...(19): siRNA sense strand
ccaaugcaguggcugacau

SEQ ID NO: 1917162 - RNA, 19 nt, Homo sapiens
  misc_RNA (1)...(19): siRNA sense strand
ggccaugacccgaaacaau

SEQ ID NO: 1917163 - RNA, 19 nt, Homo sapiens
  misc_RNA (1)...(19): siRNA sense strand
guacagccugacaaguaua

SEQ ID NO: 1917164 - RNA, 19 nt, Homo sapiens
  misc_RNA (1)...(19): siRNA sense strand
gacccgaaacaaugaacua

SEQ ID NO: 1917165 - RNA, 19 nt, Homo sapiens
  misc_RNA (1)...(19): siRNA sense strand
gaagucaaagagcgugaug

SEQ ID NO: 1917166 - RNA, 19 nt, Homo sapiens
  misc_RNA (1)...(19): siRNA sense strand
cuaaagaggguccgaagca

SEQ ID NO: 1917167 - RNA, 19 nt, Homo sapiens
  misc_RNA (1)...(19): siRNA sense strand
aaacauugaggagauacua

SEQ ID NO: 1917168 - RNA, 19 nt, Homo sapiens
  misc_RNA (1)...(19): siRNA sense strand
ccucugcaguggagaaauc

SEQ ID NO: 1917169 - RNA, 19 nt, Homo sapiens
  misc_RNA (1)...(19): siRNA sense strand
caucauaucagaaggaacu

SEQ ID NO: 1917170 - RNA, 19 nt, Homo sapiens
  misc_RNA (1)...(19): siRNA sense strand
gacauguacacacugauga

SEQ ID NO: 1917171 - RNA, 19 nt, Homo sapiens
  misc_RNA (1)...(19): siRNA sense strand
gugaugcaguggagaugga

SEQ ID NO: 1917172 - RNA, 19 nt, Homo sapiens
  misc_RNA (1)...(19): siRNA sense strand
agaaauacagagacauaga

SEQ ID NO: 1917173 - RNA, 19 nt, Homo sapiens
  misc_RNA (1)...(19): siRNA sense strand
gagaaaucugcaacacuga

SEQ ID NO: 1917174 - RNA, 19 nt, Homo sapiens
  misc_RNA (1)...(19): siRNA sense strand
ccgaaacaaugaacuacgu

SEQ ID NO: 1917175 - RNA, 19 nt, Homo sapiens
  misc_RNA (1)...(19): siRNA sense strand
uauacaggacaucccaaua

SEQ ID NO: 1917176 - RNA, 19 nt, Homo sapiens
  misc_RNA (1)...(19): siRNA sense strand
gaaaucugcaacacugaag

SEQ ID NO: 1917177 - RNA, 19 nt, Homo sapiens
  misc_RNA (1)...(19): siRNA sense strand
ggaggugaacuugaauaau

SEQ ID NO: 1917178 - RNA, 19 nt, Homo sapiens
  misc_RNA (1)...(19): siRNA sense strand
gcaaugaaggcaaauaccu

SEQ ID NO: 1917179 - RNA, 19 nt, Homo sapiens
  misc_RNA (1)...(19): siRNA sense strand
acacacugaugaguaacaa

SEQ ID NO: 1917180 - RNA, 19 nt, Homo sapiens
  misc_RNA (1)...(19): siRNA sense strand
gaaggaacuggagaaauac

SEQ ID NO: 1917181 - RNA, 19 nt, Homo sapiens
  misc_RNA (1)...(19): siRNA sense strand
ugaaggcaaauaccuaugu

SEQ ID NO: 1917182 - RNA, 19 nt, Homo sapiens
  misc_RNA (1)...(19): siRNA sense strand
aacaagcaauacuaugaug

SEQ ID NO: 1917183 - RNA, 19 nt, Homo sapiens
  misc_RNA (1)...(19): siRNA sense strand
gagcaacaggcacuagaag

SEQ ID NO: 1917184 - RNA, 19 nt, Homo sapiens
  misc_RNA (1)...(19): siRNA sense strand
gaaggcaguucgggaaaau

SEQ ID NO: 1917185 - RNA, 19 nt, Homo sapiens
  misc_RNA (1)...(19): siRNA sense strand
gaugaagaugagauccuaa

SEQ ID NO: 1917186 - RNA, 19 nt, Homo sapiens
  misc_RNA (1)...(19): siRNA sense strand
ugaugaguaacaagcaaua

SEQ ID NO: 1917187 - RNA, 19 nt, Homo sapiens
  misc_RNA (1)...(19): siRNA sense strand
gagaaauacagagacauag

SEQ ID NO: 1917188 - RNA, 19 nt, Homo sapiens
  misc_RNA (1)...(19): siRNA sense strand
gacaacgugaccagacaaa

SEQ ID NO: 1917189 - RNA, 19 nt, Homo sapiens
  misc_RNA (1)...(19): siRNA sense strand
auaagccagugccggauga

SEQ ID NO: 1917190 - RNA, 19 nt, Homo sapiens
  misc_RNA (1)...(19): siRNA sense strand
cagcuggacugcgaacuac

SEQ ID NO: 1917191 - RNA, 19 nt, Homo sapiens
  misc_RNA (1)...(19): siRNA sense strand
ugagcuccguguagacaau

SEQ ID NO: 1917192 - RNA, 19 nt, Homo sapiens
  misc_RNA (1)...(19): siRNA sense strand
uagcagcacaggacucaug

SEQ ID NO: 1917193 - RNA, 19 nt, Homo sapiens
  misc_RNA (1)...(19): siRNA sense strand
gaggcaaugaaggcaaaua

SEQ ID NO: 1917194 - RNA, 19 nt, Homo sapiens
  misc_RNA (1)...(19): siRNA sense strand
ucagaaggaacuggagaaa

SEQ ID NO: 1917195 - RNA, 19 nt, Homo sapiens
  misc_RNA (1)...(19): siRNA sense strand
ccaugacccgaaacaauga

SEQ ID NO: 1917196 - RNA, 19 nt, Homo sapiens
  misc_RNA (1)...(19): siRNA sense strand
ccgcuuuggcuaccacuuu

SEQ ID NO: 1917197 - RNA, 19 nt, Homo sapiens
  misc_RNA (1)...(19): siRNA sense strand
gcagugucccucuauuguc

SEQ ID NO: 1917198 - RNA, 19 nt, Homo sapiens
  misc_RNA (1)...(19): siRNA sense strand
acucauggcugugcugaag

SEQ ID NO: 1917199 - RNA, 19 nt, Homo sapiens
  misc_RNA (1)...(19): siRNA sense strand
cuggacauguacacacuga

SEQ ID NO: 1917200 - RNA, 19 nt, Homo sapiens
  misc_RNA (1)...(19): siRNA sense strand
gucaucauaucagaaggaa

SEQ ID NO: 1917201 - RNA, 19 nt, Homo sapiens
  misc_RNA (1)...(19): siRNA sense strand
uugaggagauacuaaagag

SEQ ID NO: 1917202 - RNA, 19 nt, Homo sapiens
  misc_RNA (1)...(19): siRNA sense strand
acauugaggagauacuaaa

SEQ ID NO: 1917203 - RNA, 19 nt, Homo sapiens
  misc_RNA (1)...(19): siRNA sense strand
aagacaacgugaccagaca

SEQ ID NO: 1917204 - RNA, 19 nt, Homo sapiens
  misc_RNA (1)...(19): siRNA sense strand
gagacauagaugaagauga

SEQ ID NO: 1917205 - RNA, 19 nt, Homo sapiens
  misc_RNA (1)...(19): siRNA sense strand
auacaggacaucccaauac

SEQ ID NO: 1917206 - RNA, 19 nt, Homo sapiens
  misc_RNA (1)...(19): siRNA sense strand
gaggaguggugaccccauu

SEQ ID NO: 1917207 - RNA, 19 nt, Homo sapiens
  misc_RNA (1)...(19): siRNA sense strand
cuggagaaauacagagaca

SEQ ID NO: 1917208 - RNA, 19 nt, Homo sapiens
  misc_RNA (1)...(19): siRNA sense strand
aaauacagagacauagaug

SEQ ID NO: 1917209 - RNA, 19 nt, Homo sapiens
  misc_RNA (1)...(19): siRNA sense strand
gaacgcagcugcuuuccua

SEQ ID NO: 1917210 - RNA, 19 nt, Homo sapiens
  misc_RNA (1)...(19): siRNA sense strand
uuacagaccugagcacuua

SEQ ID NO: 1917211 - RNA, 19 nt, Homo sapiens
  misc_RNA (1)...(19): siRNA sense strand
cgaaagaccuccacaccuu

SEQ ID NO: 1917212 - RNA, 19 nt, Homo sapiens
  misc_RNA (1)...(19): siRNA sense strand
gaaagaccuccacaccuua

SEQ ID NO: 1917213 - RNA, 19 nt, Homo sapiens
  misc_RNA (1)...(19): siRNA sense strand
gaaagucccuucccaugcu

SEQ ID NO: 1917214 - RNA, 19 nt, Homo sapiens
  misc_RNA (1)...(19): siRNA sense strand
caggagagcugaugaugag

SEQ ID NO: 1917215 - RNA, 19 nt, Homo sapiens
  misc_RNA (1)...(19): siRNA sense strand
ugacucgccuggagaaugu

SEQ ID NO: 1917216 - RNA, 19 nt, Homo sapiens
  misc_RNA (1)...(19): siRNA sense strand
ugaugagccuccuguggua

SEQ ID NO: 1917217 - RNA, 19 nt, Homo sapiens
  misc_RNA (1)...(19): siRNA sense strand
cgacuacaauggccugugu

SEQ ID NO: 1917218 - RNA, 19 nt, Homo sapiens
  misc_RNA (1)...(19): siRNA sense strand
agaugaggcugaugagcua

SEQ ID NO: 1917219 - RNA, 19 nt, Homo sapiens
  misc_RNA (1)...(19): siRNA sense strand
caaaguggcccaaggucaa

SEQ ID NO: 1917220 - RNA, 19 nt, Homo sapiens
  misc_RNA (1)...(19): siRNA sense strand
agacccagcucccaagaga

SEQ ID NO: 1917221 - RNA, 19 nt, Homo sapiens
  misc_RNA (1)...(19): siRNA sense strand
gcauugaggagaagugcua

SEQ ID NO: 1917222 - RNA, 19 nt, Homo sapiens
  misc_RNA (1)...(19): siRNA sense strand
gcccauugguuccugagaa

SEQ ID NO: 1917223 - RNA, 19 nt, Homo sapiens
  misc_RNA (1)...(19): siRNA sense strand
gcaaggcugcccugaugaa

SEQ ID NO: 1917224 - RNA, 19 nt, Homo sapiens
  misc_RNA (1)...(19): siRNA sense strand
uacaauggccuguguguug

SEQ ID NO: 1917225 - RNA, 19 nt, Homo sapiens
  misc_RNA (1)...(19): siRNA sense strand
gaacaguguggccugcauu

SEQ ID NO: 1917226 - RNA, 19 nt, Homo sapiens
  misc_RNA (1)...(19): siRNA sense strand
gugagaaggcuguguaugu

SEQ ID NO: 1917227 - RNA, 19 nt, Homo sapiens
  misc_RNA (1)...(19): siRNA sense strand
gcccaaggccugcaaagug

SEQ ID NO: 1917228 - RNA, 19 nt, Homo sapiens
  misc_RNA (1)...(19): siRNA sense strand
caccuuauguggccaagau

SEQ ID NO: 1917229 - RNA, 19 nt, Homo sapiens
  misc_RNA (1)...(19): siRNA sense strand
ugagaaggcuguguauguc

SEQ ID NO: 1917230 - RNA, 19 nt, Homo sapiens
  misc_RNA (1)...(19): siRNA sense strand
cacgagcccuugcagaaug

SEQ ID NO: 1917231 - RNA, 19 nt, Homo sapiens
  misc_RNA (1)...(19): siRNA sense strand
caaaucaggcccacgaaag

SEQ ID NO: 1917232 - RNA, 19 nt, Homo sapiens
  misc_RNA (1)...(19): siRNA sense strand
caaggucaauggcaagaac

SEQ ID NO: 1917233 - RNA, 19 nt, Homo sapiens
  misc_RNA (1)...(19): siRNA sense strand
gcacgagcccuugcagaau

SEQ ID NO: 1917234 - RNA, 19 nt, Homo sapiens
  misc_RNA (1)...(19): siRNA sense strand
ccgcaagaauuacccacuu

SEQ ID NO: 1917235 - RNA, 19 nt, Homo sapiens
  misc_RNA (1)...(19): siRNA sense strand
aagaauuacccacuucgua

SEQ ID NO: 1917236 - RNA, 19 nt, Homo sapiens
  misc_RNA (1)...(19): siRNA sense strand
gaagugcuaugugcugacu

SEQ ID NO: 1917237 - RNA, 19 nt, Homo sapiens
  misc_RNA (1)...(19): siRNA sense strand
gaaccauggccaucugcaa

SEQ ID NO: 1917238 - RNA, 19 nt, Homo sapiens
  misc_RNA (1)...(19): siRNA sense strand
gagacuggcuagccugaac

SEQ ID NO: 1917239 - RNA, 19 nt, Homo sapiens
  misc_RNA (1)...(19): siRNA sense strand
gugcagaugaggcugauga

SEQ ID NO: 1917240 - RNA, 19 nt, Homo sapiens
  misc_RNA (1)...(19): siRNA sense strand
cagcaucugcggaguguug

SEQ ID NO: 1917241 - RNA, 19 nt, Homo sapiens
  misc_RNA (1)...(19): siRNA sense strand
ugagccuccugugguauua

SEQ ID NO: 1917242 - RNA, 19 nt, Homo sapiens
  misc_RNA (1)...(19): siRNA sense strand
gagccagccauccgaaaga

SEQ ID NO: 1917243 - RNA, 19 nt, Homo sapiens
  misc_RNA (1)...(19): siRNA sense strand
uagaugggcgcuccacuga

SEQ ID NO: 1917244 - RNA, 19 nt, Homo sapiens
  misc_RNA (1)...(19): siRNA sense strand
ucccagcgguucuaaguca

SEQ ID NO: 1917245 - RNA, 19 nt, Homo sapiens
  misc_RNA (1)...(19): siRNA sense strand
agugcuaugugcugacuuu

SEQ ID NO: 1917246 - RNA, 19 nt, Homo sapiens
  misc_RNA (1)...(19): siRNA sense strand
agaaggcuguguaugucuu

SEQ ID NO: 1917247 - RNA, 19 nt, Homo sapiens
  misc_RNA (1)...(19): siRNA sense strand
caccguccuucucaaauca

SEQ ID NO: 1917248 - RNA, 19 nt, Homo sapiens
  misc_RNA (1)...(19): siRNA sense strand
augcugaagcucucaauaa

SEQ ID NO: 1917249 - RNA, 19 nt, Homo sapiens
  misc_RNA (1)...(19): siRNA sense strand
aaaucaggcccacgaaaga

SEQ ID NO: 1917250 - RNA, 19 nt, Homo sapiens
  misc_RNA (1)...(19): siRNA sense strand
ucaaaucaggcccacgaaa

SEQ ID NO: 1917251 - RNA, 19 nt, Homo sapiens
  misc_RNA (1)...(19): siRNA sense strand
acaccguccuucucaaauc

SEQ ID NO: 1917252 - RNA, 19 nt, Homo sapiens
  misc_RNA (1)...(19): siRNA sense strand
cuguguaugucuuggauga

SEQ ID NO: 1917253 - RNA, 19 nt, Homo sapiens
  misc_RNA (1)...(19): siRNA sense strand
gaaggcuguguaugucuug

SEQ ID NO: 1917254 - RNA, 19 nt, Homo sapiens
  misc_RNA (1)...(19): siRNA sense strand
cuugcagaaugaaguguuu

SEQ ID NO: 1917255 - RNA, 19 nt, Homo sapiens
  misc_RNA (1)...(19): siRNA sense strand
cgcaagaauuacccacuuc

SEQ ID NO: 1917256 - RNA, 19 nt, Homo sapiens
  misc_RNA (1)...(19): siRNA sense strand
ccgaaagacagcacugguu

SEQ ID NO: 1917257 - RNA, 19 nt, Homo sapiens
  misc_RNA (1)...(19): siRNA sense strand
gacacacacucggagaaag

SEQ ID NO: 1917258 - RNA, 19 nt, Homo sapiens
  misc_RNA (1)...(19): siRNA sense strand
ggagccagccauccgaaag

SEQ ID NO: 1917259 - RNA, 19 nt, Homo sapiens
  misc_RNA (1)...(19): siRNA sense strand
gaacugcaucagcccucuu

SEQ ID NO: 1917260 - RNA, 19 nt, Homo sapiens
  misc_RNA (1)...(19): siRNA sense strand
cugaagcucucaauaaccu

SEQ ID NO: 1917261 - RNA, 19 nt, Homo sapiens
  misc_RNA (1)...(19): siRNA sense strand
cgugugagaaggcugugua

SEQ ID NO: 1917262 - RNA, 19 nt, Homo sapiens
  misc_RNA (1)...(19): siRNA sense strand
aaagaccuccacaccuuau

SEQ ID NO: 1917263 - RNA, 19 nt, Homo sapiens
  misc_RNA (1)...(19): siRNA sense strand
ggucaauggcaagaacuau

SEQ ID NO: 1917264 - RNA, 19 nt, Homo sapiens
  misc_RNA (1)...(19): siRNA sense strand
gagaaggcuguguaugucu

SEQ ID NO: 1917265 - RNA, 19 nt, Homo sapiens
  misc_RNA (1)...(19): siRNA sense strand
guccagccaucucauaagc

SEQ ID NO: 1917266 - RNA, 19 nt, Homo sapiens
  misc_RNA (1)...(19): siRNA sense strand
uacagcaucugcggagugu

SEQ ID NO: 1917267 - RNA, 19 nt, Homo sapiens
  misc_RNA (1)...(19): siRNA sense strand
ucaagcacaucagaaguuu

SEQ ID NO: 1917268 - RNA, 19 nt, Homo sapiens
  misc_RNA (1)...(19): siRNA sense strand
cccaguggcucccaaauau

SEQ ID NO: 1917269 - RNA, 19 nt, Homo sapiens
  misc_RNA (1)...(19): siRNA sense strand
caauuuaccucugcaacau

SEQ ID NO: 1917270 - RNA, 19 nt, Homo sapiens
  misc_RNA (1)...(19): siRNA sense strand
gcccaguggcucccaaaua

SEQ ID NO: 1917271 - RNA, 19 nt, Homo sapiens
  misc_RNA (1)...(19): siRNA sense strand
caguggcucccaaauauaa

SEQ ID NO: 1917272 - RNA, 19 nt, Homo sapiens
  misc_RNA (1)...(19): siRNA sense strand
cucccuaacuuaauuaugu

SEQ ID NO: 1917273 - RNA, 19 nt, Homo sapiens
  misc_RNA (1)...(19): siRNA sense strand
cacaaucccucagccaguu

SEQ ID NO: 1917274 - RNA, 19 nt, Homo sapiens
  misc_RNA (1)...(19): siRNA sense strand
guuucucccuaacuuaauu

SEQ ID NO: 1917275 - RNA, 19 nt, Homo sapiens
  misc_RNA (1)...(19): siRNA sense strand
ccaguggcucccaaauaua

SEQ ID NO: 1917276 - RNA, 19 nt, Homo sapiens
  misc_RNA (1)...(19): siRNA sense strand
uuaguucgcccauauggaa

SEQ ID NO: 1917277 - RNA, 19 nt, Homo sapiens
  misc_RNA (1)...(19): siRNA sense strand
gcuccaggcauauagguau

SEQ ID NO: 1917278 - RNA, 19 nt, Homo sapiens
  misc_RNA (1)...(19): siRNA sense strand
ccaauuuaccucugcaaca

SEQ ID NO: 1917279 - RNA, 19 nt, Homo sapiens
  misc_RNA (1)...(19): siRNA sense strand
uauaaccagagcaggauaa

SEQ ID NO: 1917280 - RNA, 19 nt, Homo sapiens
  misc_RNA (1)...(19): siRNA sense strand
cauccucuggcuccaauuu

SEQ ID NO: 1917281 - RNA, 19 nt, Homo sapiens
  misc_RNA (1)...(19): siRNA sense strand
auuuaccucugcaacauaa

SEQ ID NO: 1917282 - RNA, 19 nt, Homo sapiens
  misc_RNA (1)...(19): siRNA sense strand
caaaucuucaagcacauca

SEQ ID NO: 1917283 - RNA, 19 nt, Homo sapiens
  misc_RNA (1)...(19): siRNA sense strand
gaagaacgccaacaacauu

SEQ ID NO: 1917284 - RNA, 19 nt, Homo sapiens
  misc_RNA (1)...(19): siRNA sense strand
gaagaagcccauuccauuu

SEQ ID NO: 1917285 - RNA, 19 nt, Homo sapiens
  misc_RNA (1)...(19): siRNA sense strand
cacagcaggugcaauauuu

SEQ ID NO: 1917286 - RNA, 19 nt, Homo sapiens
  misc_RNA (1)...(19): siRNA sense strand
cagcgcaguuucugugaua

SEQ ID NO: 1917287 - RNA, 19 nt, Homo sapiens
  misc_RNA (1)...(19): siRNA sense strand
guacgacuccucuuugauu

SEQ ID NO: 1917288 - RNA, 19 nt, Homo sapiens
  misc_RNA (1)...(19): siRNA sense strand
gauagcuagugccaucaua

SEQ ID NO: 1917289 - RNA, 19 nt, Homo sapiens
  misc_RNA (1)...(19): siRNA sense strand
uaucacagcaggugcaaua

SEQ ID NO: 1917290 - RNA, 19 nt, Homo sapiens
  misc_RNA (1)...(19): siRNA sense strand
gaagaugacaggcgagaau

SEQ ID NO: 1917291 - RNA, 19 nt, Homo sapiens
  misc_RNA (1)...(19): siRNA sense strand
gagaagaacgccaacaaca

SEQ ID NO: 1917292 - RNA, 19 nt, Homo sapiens
  misc_RNA (1)...(19): siRNA sense strand
caacauuucugagaucuac

SEQ ID NO: 1917293 - RNA, 19 nt, Homo sapiens
  misc_RNA (1)...(19): siRNA sense strand
ugacaacauuucugagauc

SEQ ID NO: 1917294 - RNA, 19 nt, Homo sapiens
  misc_RNA (1)...(19): siRNA sense strand
gagcuggccuuuccuuuug

SEQ ID NO: 1917295 - RNA, 19 nt, Homo sapiens
  misc_RNA (1)...(19): siRNA sense strand
gcagcugccucccacaagu

SEQ ID NO: 1917296 - RNA, 19 nt, Homo sapiens
  misc_RNA (1)...(19): siRNA sense strand
aagggaaccugcagcuuga

SEQ ID NO: 1917297 - RNA, 19 nt, Homo sapiens
  misc_RNA (1)...(19): siRNA sense strand
gcagaacaugcacgauaaa

SEQ ID NO: 1917298 - RNA, 19 nt, Homo sapiens
  misc_RNA (1)...(19): siRNA sense strand
cauuugagcccuauauuuc

SEQ ID NO: 1917299 - RNA, 19 nt, Homo sapiens
  misc_RNA (1)...(19): siRNA sense strand
ccauuugagcccuauauuu

SEQ ID NO: 1917300 - RNA, 19 nt, Homo sapiens
  misc_RNA (1)...(19): siRNA sense strand
gauguacgacuccucuuug

SEQ ID NO: 1917301 - RNA, 19 nt, Homo sapiens
  misc_RNA (1)...(19): siRNA sense strand
agaagcccauuccauuuga

SEQ ID NO: 1917302 - RNA, 19 nt, Homo sapiens
  misc_RNA (1)...(19): siRNA sense strand
gagucaagccucacagaug

SEQ ID NO: 1917303 - RNA, 19 nt, Homo sapiens
  misc_RNA (1)...(19): siRNA sense strand
uguccagccugaacuuaaa

SEQ ID NO: 1917304 - RNA, 19 nt, Homo sapiens
  misc_RNA (1)...(19): siRNA sense strand
agucaagccucacagaugu

SEQ ID NO: 1917305 - RNA, 19 nt, Homo sapiens
  misc_RNA (1)...(19): siRNA sense strand
gggccuauuucaagaccaa

SEQ ID NO: 1917306 - RNA, 19 nt, Homo sapiens
  misc_RNA (1)...(19): siRNA sense strand
ucacagcaggugcaauauu

SEQ ID NO: 1917307 - RNA, 19 nt, Homo sapiens
  misc_RNA (1)...(19): siRNA sense strand
gcuagugccaucauaggaa

SEQ ID NO: 1917308 - RNA, 19 nt, Homo sapiens
  misc_RNA (1)...(19): siRNA sense strand
guggucagcauugcacuua

SEQ ID NO: 1917309 - RNA, 19 nt, Homo sapiens
  misc_RNA (1)...(19): siRNA sense strand
gcuugcugcucuacuucua

SEQ ID NO: 1917310 - RNA, 19 nt, Homo sapiens
  misc_RNA (1)...(19): siRNA sense strand
ggucagcauugcacuuaac

SEQ ID NO: 1917311 - RNA, 19 nt, Homo sapiens
  misc_RNA (1)...(19): siRNA sense strand
ccacaaccauugcuaucac

SEQ ID NO: 1917312 - RNA, 19 nt, Homo sapiens
  misc_RNA (1)...(19): siRNA sense strand
aagaagcccauuccauuug

SEQ ID NO: 1917313 - RNA, 19 nt, Homo sapiens
  misc_RNA (1)...(19): siRNA sense strand
ggagaagaacgccaacaac

SEQ ID NO: 1917314 - RNA, 19 nt, Homo sapiens
  misc_RNA (1)...(19): siRNA sense strand
gcacaccaagaaggaauga

SEQ ID NO: 1917315 - RNA, 19 nt, Homo sapiens
  misc_RNA (1)...(19): siRNA sense strand
gagcacaccaagaaggaau

SEQ ID NO: 1917316 - RNA, 19 nt, Homo sapiens
  misc_RNA (1)...(19): siRNA sense strand
ccucuuugauugccagugu

SEQ ID NO: 1917317 - RNA, 19 nt, Homo sapiens
  misc_RNA (1)...(19): siRNA sense strand
ggaaccugcagcuugacua

SEQ ID NO: 1917318 - RNA, 19 nt, Homo sapiens
  misc_RNA (1)...(19): siRNA sense strand
ugucgugauucuucucuug

SEQ ID NO: 1917319 - RNA, 19 nt, Homo sapiens
  misc_RNA (1)...(19): siRNA sense strand
gguggcaaccgccgucuau

SEQ ID NO: 1917320 - RNA, 19 nt, Homo sapiens
  misc_RNA (1)...(19): siRNA sense strand
auucuugggcgucuucuua

SEQ ID NO: 1917321 - RNA, 19 nt, Homo sapiens
  misc_RNA (1)...(19): siRNA sense strand
cuagugccaucauaggaau

SEQ ID NO: 1917322 - RNA, 19 nt, Homo sapiens
  misc_RNA (1)...(19): siRNA sense strand
gacaacauuucugagaucu

SEQ ID NO: 1917323 - RNA, 19 nt, Homo sapiens
  misc_RNA (1)...(19): siRNA sense strand
gugccucauugcauucuug

SEQ ID NO: 1917324 - RNA, 19 nt, Homo sapiens
  misc_RNA (1)...(19): siRNA sense strand
gacauucgcacccaacagu

SEQ ID NO: 1917325 - RNA, 19 nt, Homo sapiens
  misc_RNA (1)...(19): siRNA sense strand
cagcugccucccacaagua

SEQ ID NO: 1917326 - RNA, 19 nt, Homo sapiens
  misc_RNA (1)...(19): siRNA sense strand
gaaccugcagcuugacuac

SEQ ID NO: 1917327 - RNA, 19 nt, Homo sapiens
  misc_RNA (1)...(19): siRNA sense strand
ccuaccugcuggugacauu

SEQ ID NO: 1917328 - RNA, 19 nt, Homo sapiens
  misc_RNA (1)...(19): siRNA sense strand
caugguggcugggccuguu

SEQ ID NO: 1917329 - RNA, 19 nt, Homo sapiens
  misc_RNA (1)...(19): siRNA sense strand
uacgacuccucuuugauug

SEQ ID NO: 1917330 - RNA, 19 nt, Homo sapiens
  misc_RNA (1)...(19): siRNA sense strand
gcaccucguggucagcauu

SEQ ID NO: 1917331 - RNA, 19 nt, Homo sapiens
  misc_RNA (1)...(19): siRNA sense strand
augcuugucuuguccauuc

SEQ ID NO: 1917332 - RNA, 19 nt, Homo sapiens
  misc_RNA (1)...(19): siRNA sense strand
ugguggagaucauucuguu

SEQ ID NO: 1917333 - RNA, 19 nt, Homo sapiens
  misc_RNA (1)...(19): siRNA sense strand
caacagucacgagaagaug

SEQ ID NO: 1917334 - RNA, 19 nt, Homo sapiens
  misc_RNA (1)...(19): siRNA sense strand
ccagaaguacugccacauc

SEQ ID NO: 1917335 - RNA, 19 nt, Homo sapiens
  misc_RNA (1)...(19): siRNA sense strand
agaagaacgccaacaacau

SEQ ID NO: 1917336 - RNA, 19 nt, Homo sapiens
  misc_RNA (1)...(19): siRNA sense strand
uaaucacgcguaacaggaa

SEQ ID NO: 1917337 - RNA, 19 nt, Homo sapiens
  misc_RNA (1)...(19): siRNA sense strand
gccaucauaggaaucauau

SEQ ID NO: 1917338 - RNA, 19 nt, Homo sapiens
  misc_RNA (1)...(19): siRNA sense strand
uggaugccaugccagguau

SEQ ID NO: 1917339 - RNA, 19 nt, Homo sapiens
  misc_RNA (1)...(19): siRNA sense strand
gaagcccauuccauuugag

SEQ ID NO: 1917340 - RNA, 19 nt, Homo sapiens
  misc_RNA (1)...(19): siRNA sense strand
gcuacauucuguccacaac

SEQ ID NO: 1917341 - RNA, 19 nt, Homo sapiens
  misc_RNA (1)...(19): siRNA sense strand
ccaugacaguggugacagu

SEQ ID NO: 1917342 - RNA, 19 nt, Homo sapiens
  misc_RNA (1)...(19): siRNA sense strand
caacauugucgugauucuu

SEQ ID NO: 1917343 - RNA, 19 nt, Homo sapiens
  misc_RNA (1)...(19): siRNA sense strand
ccaacagucacgagaagau

SEQ ID NO: 1917344 - RNA, 19 nt, Homo sapiens
  misc_RNA (1)...(19): siRNA sense strand
gcgcuacgucuuguccuuu

SEQ ID NO: 1917345 - RNA, 19 nt, Homo sapiens
  misc_RNA (1)...(19): siRNA sense strand
cagcaggugcaauauuuua

SEQ ID NO: 1917346 - RNA, 19 nt, Homo sapiens
  misc_RNA (1)...(19): siRNA sense strand
agugugggcuacauucugu

SEQ ID NO: 1917347 - RNA, 19 nt, Homo sapiens
  misc_RNA (1)...(19): siRNA sense strand
uggcugggaugcuugucuu

SEQ ID NO: 1917348 - RNA, 19 nt, Homo sapiens
  misc_RNA (1)...(19): siRNA sense strand
agauguacgacuccucuuu

SEQ ID NO: 1917349 - RNA, 19 nt, Homo sapiens
  misc_RNA (1)...(19): siRNA sense strand
ggcgcuacgucuuguccuu

SEQ ID NO: 1917350 - RNA, 19 nt, Homo sapiens
  misc_RNA (1)...(19): siRNA sense strand
gcaguuucugugauagcua

SEQ ID NO: 1917351 - RNA, 19 nt, Homo sapiens
  misc_RNA (1)...(19): siRNA sense strand
uugggcgucuucuuaauca

SEQ ID NO: 1917352 - RNA, 19 nt, Homo sapiens
  misc_RNA (1)...(19): siRNA sense strand
uagagcacaccaagaagga

SEQ ID NO: 1917353 - RNA, 19 nt, Homo sapiens
  misc_RNA (1)...(19): siRNA sense strand
gcgaggccuccuucuccua

SEQ ID NO: 1917354 - RNA, 19 nt, Homo sapiens
  misc_RNA (1)...(19): siRNA sense strand
uccuagagcacaccaagaa

SEQ ID NO: 1917355 - RNA, 19 nt, Homo sapiens
  misc_RNA (1)...(19): siRNA sense strand
cacaaccauugcuaucaca

SEQ ID NO: 1917356 - RNA, 19 nt, Homo sapiens
  misc_RNA (1)...(19): siRNA sense strand
ucugcuugcugcucuacuu

SEQ ID NO: 1917357 - RNA, 19 nt, Homo sapiens
  misc_RNA (1)...(19): siRNA sense strand
gaagaaacagccaacaaua

SEQ ID NO: 1917358 - RNA, 19 nt, Homo sapiens
  misc_RNA (1)...(19): siRNA sense strand
caaaggaccugucagaaau

SEQ ID NO: 1917359 - RNA, 19 nt, Homo sapiens
  misc_RNA (1)...(19): siRNA sense strand
gcaaaggaccugucagaaa

SEQ ID NO: 1917360 - RNA, 19 nt, Homo sapiens
  misc_RNA (1)...(19): siRNA sense strand
gggaacagcuguagagaug

SEQ ID NO: 1917361 - RNA, 19 nt, Homo sapiens
  misc_RNA (1)...(19): siRNA sense strand
caauaaagguggcaaagga

SEQ ID NO: 1917362 - RNA, 19 nt, Homo sapiens
  misc_RNA (1)...(19): siRNA sense strand
gaacauugaugaagaugag

SEQ ID NO: 1917363 - RNA, 19 nt, Homo sapiens
  misc_RNA (1)...(19): siRNA sense strand
gauccuagcuugcaagaag

SEQ ID NO: 1917364 - RNA, 19 nt, Homo sapiens
  misc_RNA (1)...(19): siRNA sense strand
gaacagcuguagagaugga

SEQ ID NO: 1917365 - RNA, 19 nt, Homo sapiens
  misc_RNA (1)...(19): siRNA sense strand
gcagacaugcugaaaguaa

SEQ ID NO: 1917366 - RNA, 19 nt, Homo sapiens
  misc_RNA (1)...(19): siRNA sense strand
gcgagcaccuccucaugua

SEQ ID NO: 1917367 - RNA, 19 nt, Homo sapiens
  misc_RNA (1)...(19): siRNA sense strand
auaaugaccugguucguaa

SEQ ID NO: 1917368 - RNA, 19 nt, Homo sapiens
  misc_RNA (1)...(19): siRNA sense strand
caaaggcucuggagaccaa

SEQ ID NO: 1917369 - RNA, 19 nt, Homo sapiens
  misc_RNA (1)...(19): siRNA sense strand
ugucagaaauguugucaaa

SEQ ID NO: 1917370 - RNA, 19 nt, Homo sapiens
  misc_RNA (1)...(19): siRNA sense strand
gcucaacaauccaaaguuc

SEQ ID NO: 1917371 - RNA, 19 nt, Homo sapiens
  misc_RNA (1)...(19): siRNA sense strand
acaagaacauugaugaaga

SEQ ID NO: 1917372 - RNA, 19 nt, Homo sapiens
  misc_RNA (1)...(19): siRNA sense strand
ggagagucuuuaucccuaa

SEQ ID NO: 1917373 - RNA, 19 nt, Homo sapiens
  misc_RNA (1)...(19): siRNA sense strand
caagaacauugaugaagau

SEQ ID NO: 1917374 - RNA, 19 nt, Homo sapiens
  misc_RNA (1)...(19): siRNA sense strand
aaaguucgaugaagaaaca

SEQ ID NO: 1917375 - RNA, 19 nt, Homo sapiens
  misc_RNA (1)...(19): siRNA sense strand
gaagucaaccucaacaaca

SEQ ID NO: 1917376 - RNA, 19 nt, Homo sapiens
  misc_RNA (1)...(19): siRNA sense strand
gaaggaggcuuuggaacag

SEQ ID NO: 1917377 - RNA, 19 nt, Homo sapiens
  misc_RNA (1)...(19): siRNA sense strand
aaugacaccuugacagaaa

SEQ ID NO: 1917378 - RNA, 19 nt, Homo sapiens
  misc_RNA (1)...(19): siRNA sense strand
gaccaacacucacgugaag

SEQ ID NO: 1917379 - RNA, 19 nt, Homo sapiens
  misc_RNA (1)...(19): siRNA sense strand
agaaacagccaacaauaaa

SEQ ID NO: 1917380 - RNA, 19 nt, Homo sapiens
  misc_RNA (1)...(19): siRNA sense strand
guacacaauuugcucaaca

SEQ ID NO: 1917381 - RNA, 19 nt, Homo sapiens
  misc_RNA (1)...(19): siRNA sense strand
ucagaaauguugucaaagg

SEQ ID NO: 1917382 - RNA, 19 nt, Homo sapiens
  misc_RNA (1)...(19): siRNA sense strand
gauggaaauugcccagaug

SEQ ID NO: 1917383 - RNA, 19 nt, Homo sapiens
  misc_RNA (1)...(19): siRNA sense strand
ucaaggauccucaaguuug

SEQ ID NO: 1917384 - RNA, 19 nt, Homo sapiens
  misc_RNA (1)...(19): siRNA sense strand
ggagaaauacaagaacauu

SEQ ID NO: 1917385 - RNA, 19 nt, Homo sapiens
  misc_RNA (1)...(19): siRNA sense strand
cagcugccaucacaaagaa

SEQ ID NO: 1917386 - RNA, 19 nt, Homo sapiens
  misc_RNA (1)...(19): siRNA sense strand
ucauguaccuggagaagga

SEQ ID NO: 1917387 - RNA, 19 nt, Homo sapiens
  misc_RNA (1)...(19): siRNA sense strand
caccaaaucccacaaaugu

SEQ ID NO: 1917388 - RNA, 19 nt, Homo sapiens
  misc_RNA (1)...(19): siRNA sense strand
acacucacgugaagaaguu

SEQ ID NO: 1917389 - RNA, 19 nt, Homo sapiens
  misc_RNA (1)...(19): siRNA sense strand
ggagaaggaggcuuuggaa

SEQ ID NO: 1917390 - RNA, 19 nt, Homo sapiens
  misc_RNA (1)...(19): siRNA sense strand
guagaggcacugaaagaaa

SEQ ID NO: 1917391 - RNA, 19 nt, Homo sapiens
  misc_RNA (1)...(19): siRNA sense strand
ggaccugucagaaauguug

SEQ ID NO: 1917392 - RNA, 19 nt, Homo sapiens
  misc_RNA (1)...(19): siRNA sense strand
aagaaacagccaacaauaa

SEQ ID NO: 1917393 - RNA, 19 nt, Homo sapiens
  misc_RNA (1)...(19): siRNA sense strand
cagacaugcugaaaguaaa

SEQ ID NO: 1917394 - RNA, 19 nt, Homo sapiens
  misc_RNA (1)...(19): siRNA sense strand
ugaccuagauccugagagu

SEQ ID NO: 1917395 - RNA, 19 nt, Homo sapiens
  misc_RNA (1)...(19): siRNA sense strand
aaagaauaaugaccugguu

SEQ ID NO: 1917396 - RNA, 19 nt, Homo sapiens
  misc_RNA (1)...(19): siRNA sense strand
agaaagaccagacacagaa

SEQ ID NO: 1917397 - RNA, 19 nt, Homo sapiens
  misc_RNA (1)...(19): siRNA sense strand
ugaagcagaccgaagguaa

SEQ ID NO: 1917398 - RNA, 19 nt, Homo sapiens
  misc_RNA (1)...(19): siRNA sense strand
gauaccaguuuaccaagca

SEQ ID NO: 1917399 - RNA, 19 nt, Homo sapiens
  misc_RNA (1)...(19): siRNA sense strand
gagaaauacaagaacauug

SEQ ID NO: 1917400 - RNA, 19 nt, Homo sapiens
  misc_RNA (1)...(19): siRNA sense strand
acaccgaacucuaugaucu

SEQ ID NO: 1917401 - RNA, 19 nt, Homo sapiens
  misc_RNA (1)...(19): siRNA sense strand
caaggauccucaaguuugg

SEQ ID NO: 1917402 - RNA, 19 nt, Homo sapiens
  misc_RNA (1)...(19): siRNA sense strand
ccagcuggauuucgacaga

SEQ ID NO: 1917403 - RNA, 19 nt, Homo sapiens
  misc_RNA (1)...(19): siRNA sense strand
ugaagaaacagccaacaau

SEQ ID NO: 1917404 - RNA, 19 nt, Homo sapiens
  misc_RNA (1)...(19): siRNA sense strand
caaguuuggauaccaguuu

SEQ ID NO: 1917405 - RNA, 19 nt, Homo sapiens
  misc_RNA (1)...(19): siRNA sense strand
gaaacagccaacaauaaag

SEQ ID NO: 1917406 - RNA, 19 nt, Homo sapiens
  misc_RNA (1)...(19): siRNA sense strand
auucaaggauccucaaguu

SEQ ID NO: 1917407 - RNA, 19 nt, Homo sapiens
  misc_RNA (1)...(19): siRNA sense strand
uagaaacucguaaagaaga

SEQ ID NO: 1917408 - RNA, 19 nt, Homo sapiens
  misc_RNA (1)...(19): siRNA sense strand
aaguaaagccaguauuuga

SEQ ID NO: 1917409 - RNA, 19 nt, Homo sapiens
  misc_RNA (1)...(19): siRNA sense strand
gcagcugccaucacaaaga

SEQ ID NO: 1917410 - RNA, 19 nt, Homo sapiens
  misc_RNA (1)...(19): siRNA sense strand
aaguuuggauaccaguuua

SEQ ID NO: 1917411 - RNA, 19 nt, Homo sapiens
  misc_RNA (1)...(19): siRNA sense strand
caacaauaaagguggcaaa

SEQ ID NO: 1917412 - RNA, 19 nt, Homo sapiens
  misc_RNA (1)...(19): siRNA sense strand
ugaaacaguuggaaaaugu

SEQ ID NO: 1917413 - RNA, 19 nt, Homo sapiens
  misc_RNA (1)...(19): siRNA sense strand
acaauuugcucaacaaucc

SEQ ID NO: 1917414 - RNA, 19 nt, Homo sapiens
  misc_RNA (1)...(19): siRNA sense strand
gcugccaucacaaagaaua

SEQ ID NO: 1917415 - RNA, 19 nt, Homo sapiens
  misc_RNA (1)...(19): siRNA sense strand
gguagaggcacugaaagaa

SEQ ID NO: 1917416 - RNA, 19 nt, Homo sapiens
  misc_RNA (1)...(19): siRNA sense strand
cagaaauguugucaaaggu

SEQ ID NO: 1917417 - RNA, 19 nt, Homo sapiens
  misc_RNA (1)...(19): siRNA sense strand
cagaaagaccagacacaga

SEQ ID NO: 1917418 - RNA, 19 nt, Homo sapiens
  misc_RNA (1)...(19): siRNA sense strand
uugcagacaugcugaaagu

SEQ ID NO: 1917419 - RNA, 19 nt, Homo sapiens
  misc_RNA (1)...(19): siRNA sense strand
agacagagaggacuuugug

SEQ ID NO: 1917420 - RNA, 19 nt, Homo sapiens
  misc_RNA (1)...(19): siRNA sense strand
aauaaugaccugguucgua

SEQ ID NO: 1917421 - RNA, 19 nt, Homo sapiens
  misc_RNA (1)...(19): siRNA sense strand
uggaaaauguucuagauga

SEQ ID NO: 1917422 - RNA, 19 nt, Homo sapiens
  misc_RNA (1)...(19): siRNA sense strand
cagaagaggaacugaaaca

SEQ ID NO: 1917423 - RNA, 19 nt, Homo sapiens
  misc_RNA (1)...(19): siRNA sense strand
ccaacacucacgugaagaa

SEQ ID NO: 1917424 - RNA, 19 nt, Homo sapiens
  misc_RNA (1)...(19): siRNA sense strand
agaaacucguaaagaagaa

SEQ ID NO: 1917425 - RNA, 19 nt, Homo sapiens
  misc_RNA (1)...(19): siRNA sense strand
agaaggaggcuuuggaaca

SEQ ID NO: 1917426 - RNA, 19 nt, Homo sapiens
  misc_RNA (1)...(19): siRNA sense strand
gcaguugggaacagcugua

SEQ ID NO: 1917427 - RNA, 19 nt, Homo sapiens
  misc_RNA (1)...(19): siRNA sense strand
ggccgcaacucgcagcaau

SEQ ID NO: 1917428 - RNA, 19 nt, Homo sapiens
  misc_RNA (1)...(19): siRNA sense strand
uaagaacauuccaauucca

SEQ ID NO: 1917429 - RNA, 19 nt, Homo sapiens
  misc_RNA (1)...(19): siRNA sense strand
gcaagaagucaaccucaac

SEQ ID NO: 1917430 - RNA, 19 nt, Homo sapiens
  misc_RNA (1)...(19): siRNA sense strand
gcagaugaaagccaaugau

SEQ ID NO: 1917431 - RNA, 19 nt, Homo sapiens
  misc_RNA (1)...(19): siRNA sense strand
aaaguaaagccaguauuug

SEQ ID NO: 1917432 - RNA, 19 nt, Homo sapiens
  misc_RNA (1)...(19): siRNA sense strand
cgaacucuaugaucuugca

SEQ ID NO: 1917433 - RNA, 19 nt, Homo sapiens
  misc_RNA (1)...(19): siRNA sense strand
ccaccaaaucccacaaaug

SEQ ID NO: 1917434 - RNA, 19 nt, Homo sapiens
  misc_RNA (1)...(19): siRNA sense strand
gaaacucguaaagaagaaa

SEQ ID NO: 1917435 - RNA, 19 nt, Homo sapiens
  misc_RNA (1)...(19): siRNA sense strand
uagaggcacugaaagaaaa

SEQ ID NO: 1917436 - RNA, 19 nt, Homo sapiens
  misc_RNA (1)...(19): siRNA sense strand
gucaaccucaacaacauua

SEQ ID NO: 1917437 - RNA, 19 nt, Homo sapiens
  misc_RNA (1)...(19): siRNA sense strand
gaugaaagccaaugauccu

SEQ ID NO: 1917438 - RNA, 19 nt, Homo sapiens
  misc_RNA (1)...(19): siRNA sense strand
gaaagaccagacacagaag

SEQ ID NO: 1917439 - RNA, 19 nt, Homo sapiens
  misc_RNA (1)...(19): siRNA sense strand
caagaagucaaccucaaca

SEQ ID NO: 1917440 - RNA, 19 nt, Homo sapiens
  misc_RNA (1)...(19): siRNA sense strand
caaugauccuagcuugcaa

SEQ ID NO: 1917441 - RNA, 19 nt, Homo sapiens
  misc_RNA (1)...(19): siRNA sense strand
gaaaagaaagggagagucu

SEQ ID NO: 1917442 - RNA, 19 nt, Homo sapiens
  misc_RNA (1)...(19): siRNA sense strand
uuaagaacauuccaauucc

SEQ ID NO: 1917443 - RNA, 19 nt, Homo sapiens
  misc_RNA (1)...(19): siRNA sense strand
uacacaauuugcucaacaa

SEQ ID NO: 1917444 - RNA, 19 nt, Homo sapiens
  misc_RNA (1)...(19): siRNA sense strand
ugaccugguucguaagaag

SEQ ID NO: 1917445 - RNA, 19 nt, Homo sapiens
  misc_RNA (1)...(19): siRNA sense strand
ugcaagaagucaaccucaa

SEQ ID NO: 1917446 - RNA, 19 nt, Homo sapiens
  misc_RNA (1)...(19): siRNA sense strand
ccaaugauccuagcuugca

SEQ ID NO: 1917447 - RNA, 19 nt, Homo sapiens
  misc_RNA (1)...(19): siRNA sense strand
auccaaaguucgaugaaga

SEQ ID NO: 1917448 - RNA, 19 nt, Homo sapiens
  misc_RNA (1)...(19): siRNA sense strand
cuauagaaacucguaaaga

SEQ ID NO: 1917449 - RNA, 19 nt, Homo sapiens
  misc_RNA (1)...(19): siRNA sense strand
aagcaagggccacgaacaa

SEQ ID NO: 1917450 - RNA, 19 nt, Homo sapiens
  misc_RNA (1)...(19): siRNA sense strand
agauggaaauugcccagau

SEQ ID NO: 1917451 - RNA, 19 nt, Homo sapiens
  misc_RNA (1)...(19): siRNA sense strand
uggcaaaggaccugucaga

SEQ ID NO: 1917452 - RNA, 19 nt, Homo sapiens
  misc_RNA (1)...(19): siRNA sense strand
aaacagccaacaauaaagg

SEQ ID NO: 1917453 - RNA, 19 nt, Homo sapiens
  misc_RNA (1)...(19): siRNA sense strand
uaagaagagaguugaagca

SEQ ID NO: 1917454 - RNA, 19 nt, Homo sapiens
  misc_RNA (1)...(19): siRNA sense strand
uuggcaaacucucagaaga

SEQ ID NO: 1917455 - RNA, 19 nt, Homo sapiens
  misc_RNA (1)...(19): siRNA sense strand
gagcuggagaaauacaaga

SEQ ID NO: 1917456 - RNA, 19 nt, Homo sapiens
  misc_RNA (1)...(19): siRNA sense strand
ccugguagaggcacugaaa

SEQ ID NO: 1917457 - RNA, 19 nt, Homo sapiens
  misc_RNA (1)...(19): siRNA sense strand
gaauauaacugcugaagaa

SEQ ID NO: 1917458 - RNA, 19 nt, Homo sapiens
  misc_RNA (1)...(19): siRNA sense strand
gaagaaaccuagagaaaga

SEQ ID NO: 1917459 - RNA, 19 nt, Homo sapiens
  misc_RNA (1)...(19): siRNA sense strand
ggaaagagacagacaguua

SEQ ID NO: 1917460 - RNA, 19 nt, Homo sapiens
  misc_RNA (1)...(19): siRNA sense strand
gaaaagagcgugaauauaa

SEQ ID NO: 1917461 - RNA, 19 nt, Homo sapiens
  misc_RNA (1)...(19): siRNA sense strand
gaacuaagcagagagagua

SEQ ID NO: 1917462 - RNA, 19 nt, Homo sapiens
  misc_RNA (1)...(19): siRNA sense strand
cagaguaucucauaucuug

SEQ ID NO: 1917463 - RNA, 19 nt, Homo sapiens
  misc_RNA (1)...(19): siRNA sense strand
ugauaccacuucacuauua

SEQ ID NO: 1917464 - RNA, 19 nt, Homo sapiens
  misc_RNA (1)...(19): siRNA sense strand
gaaaauagcuauggacauu

SEQ ID NO: 1917465 - RNA, 19 nt, Homo sapiens
  misc_RNA (1)...(19): siRNA sense strand
gcacagaagauaauauuga

SEQ ID NO: 1917466 - RNA, 19 nt, Homo sapiens
  misc_RNA (1)...(19): siRNA sense strand
gaaaggcauuugaagaaga

SEQ ID NO: 1917467 - RNA, 19 nt, Homo sapiens
  misc_RNA (1)...(19): siRNA sense strand
uaaccaaguuucaaaggua

SEQ ID NO: 1917468 - RNA, 19 nt, Homo sapiens
  misc_RNA (1)...(19): siRNA sense strand
gaaggaacgucuacaucaa

SEQ ID NO: 1917469 - RNA, 19 nt, Homo sapiens
  misc_RNA (1)...(19): siRNA sense strand
gcaaaacuaucucucaaua

SEQ ID NO: 1917470 - RNA, 19 nt, Homo sapiens
  misc_RNA (1)...(19): siRNA sense strand
gaucaggaauugacuacuu

SEQ ID NO: 1917471 - RNA, 19 nt, Homo sapiens
  misc_RNA (1)...(19): siRNA sense strand
gagaaaggcauuugaagaa

SEQ ID NO: 1917472 - RNA, 19 nt, Homo sapiens
  misc_RNA (1)...(19): siRNA sense strand
agaaagagccaguugguua

SEQ ID NO: 1917473 - RNA, 19 nt, Homo sapiens
  misc_RNA (1)...(19): siRNA sense strand
aagcagcaguuucuaaaua

SEQ ID NO: 1917474 - RNA, 19 nt, Homo sapiens
  misc_RNA (1)...(19): siRNA sense strand
ggaaugaagaugaaaugua

SEQ ID NO: 1917475 - RNA, 19 nt, Homo sapiens
  misc_RNA (1)...(19): siRNA sense strand
gaaagagccaguugguuaa

SEQ ID NO: 1917476 - RNA, 19 nt, Homo sapiens
  misc_RNA (1)...(19): siRNA sense strand
caauauaccucagaaacaa

SEQ ID NO: 1917477 - RNA, 19 nt, Homo sapiens
  misc_RNA (1)...(19): siRNA sense strand
gaacuguuauuuccgaugu

SEQ ID NO: 1917478 - RNA, 19 nt, Homo sapiens
  misc_RNA (1)...(19): siRNA sense strand
cuacagagcugcuacucaa

SEQ ID NO: 1917479 - RNA, 19 nt, Homo sapiens
  misc_RNA (1)...(19): siRNA sense strand
gaacagaguaucucauauc

SEQ ID NO: 1917480 - RNA, 19 nt, Homo sapiens
  misc_RNA (1)...(19): siRNA sense strand
gauguaaucucacgacaag

SEQ ID NO: 1917481 - RNA, 19 nt, Homo sapiens
  misc_RNA (1)...(19): siRNA sense strand
ggagauuggaugacuguua

SEQ ID NO: 1917482 - RNA, 19 nt, Homo sapiens
  misc_RNA (1)...(19): siRNA sense strand
aaaggaacgucucaaagaa

SEQ ID NO: 1917483 - RNA, 19 nt, Homo sapiens
  misc_RNA (1)...(19): siRNA sense strand
agacgaagcuuuacagaag

SEQ ID NO: 1917484 - RNA, 19 nt, Homo sapiens
  misc_RNA (1)...(19): siRNA sense strand
guaaagagacaaagagaga

SEQ ID NO: 1917485 - RNA, 19 nt, Homo sapiens
  misc_RNA (1)...(19): siRNA sense strand
gagaguaugugggaccuuu

SEQ ID NO: 1917486 - RNA, 19 nt, Homo sapiens
  misc_RNA (1)...(19): siRNA sense strand
ccagacacguuccugcaua

SEQ ID NO: 1917487 - RNA, 19 nt, Homo sapiens
  misc_RNA (1)...(19): siRNA sense strand
ucuaaugggucuccaguuu

SEQ ID NO: 1917488 - RNA, 19 nt, Homo sapiens
  misc_RNA (1)...(19): siRNA sense strand
gagagcagcuuacaaacag

SEQ ID NO: 1917489 - RNA, 19 nt, Homo sapiens
  misc_RNA (1)...(19): siRNA sense strand
gaauuugcaucagcuacua

SEQ ID NO: 1917490 - RNA, 19 nt, Homo sapiens
  misc_RNA (1)...(19): siRNA sense strand
gaugauaccacuucacuau

SEQ ID NO: 1917491 - RNA, 19 nt, Homo sapiens
  misc_RNA (1)...(19): siRNA sense strand
gagaaagaguagaugauag

SEQ ID NO: 1917492 - RNA, 19 nt, Homo sapiens
  misc_RNA (1)...(19): siRNA sense strand
gaagguugcuauaguggau

SEQ ID NO: 1917493 - RNA, 19 nt, Homo sapiens
  misc_RNA (1)...(19): siRNA sense strand
gaaacaaauccuaauggaa

SEQ ID NO: 1917494 - RNA, 19 nt, Homo sapiens
  misc_RNA (1)...(19): siRNA sense strand
ugagagagcagcuuacaaa

SEQ ID NO: 1917495 - RNA, 19 nt, Homo sapiens
  misc_RNA (1)...(19): siRNA sense strand
gaacgucuacaucaacuug

SEQ ID NO: 1917496 - RNA, 19 nt, Homo sapiens
  misc_RNA (1)...(19): siRNA sense strand
uaugaagaauccaaaggua

SEQ ID NO: 1917497 - RNA, 19 nt, Homo sapiens
  misc_RNA (1)...(19): siRNA sense strand
uaaagcagcaguuucuaaa

SEQ ID NO: 1917498 - RNA, 19 nt, Homo sapiens
  misc_RNA (1)...(19): siRNA sense strand
ggagagaaaggcauuugaa

SEQ ID NO: 1917499 - RNA, 19 nt, Homo sapiens
  misc_RNA (1)...(19): siRNA sense strand
gagauuggaugacuguuac

SEQ ID NO: 1917500 - RNA, 19 nt, Homo sapiens
  misc_RNA (1)...(19): siRNA sense strand
acaagaccaugaacaagaa

SEQ ID NO: 1917501 - RNA, 19 nt, Homo sapiens
  misc_RNA (1)...(19): siRNA sense strand
gacaagaccaugaacaaga

SEQ ID NO: 1917502 - RNA, 19 nt, Homo sapiens
  misc_RNA (1)...(19): siRNA sense strand
gaauaucgucagaaacaaa

SEQ ID NO: 1917503 - RNA, 19 nt, Homo sapiens
  misc_RNA (1)...(19): siRNA sense strand
caagugcuauguucuucaa

SEQ ID NO: 1917504 - RNA, 19 nt, Homo sapiens
  misc_RNA (1)...(19): siRNA sense strand
agaaacaaauccuaaugga

SEQ ID NO: 1917505 - RNA, 19 nt, Homo sapiens
  misc_RNA (1)...(19): siRNA sense strand
gaagaaagagccaguuggu

SEQ ID NO: 1917506 - RNA, 19 nt, Homo sapiens
  misc_RNA (1)...(19): siRNA sense strand
uuacgagacuguuauuugu

SEQ ID NO: 1917507 - RNA, 19 nt, Homo sapiens
  misc_RNA (1)...(19): siRNA sense strand
gaaagaguagaugauagua

SEQ ID NO: 1917508 - RNA, 19 nt, Homo sapiens
  misc_RNA (1)...(19): siRNA sense strand
gaacaggaauuugcaucag

SEQ ID NO: 1917509 - RNA, 19 nt, Homo sapiens
  misc_RNA (1)...(19): siRNA sense strand
uauaguggaugcuccuuga

SEQ ID NO: 1917510 - RNA, 19 nt, Homo sapiens
  misc_RNA (1)...(19): siRNA sense strand
gaaauucagcaguguaaag

SEQ ID NO: 1917511 - RNA, 19 nt, Homo sapiens
  misc_RNA (1)...(19): siRNA sense strand
ugagaaagaugaggugcaa

SEQ ID NO: 1917512 - RNA, 19 nt, Homo sapiens
  misc_RNA (1)...(19): siRNA sense strand
cugcauaucugaacauagu

SEQ ID NO: 1917513 - RNA, 19 nt, Homo sapiens
  misc_RNA (1)...(19): siRNA sense strand
gauuaugaauaucgucaga

SEQ ID NO: 1917514 - RNA, 19 nt, Homo sapiens
  misc_RNA (1)...(19): siRNA sense strand
ugaagaauccaaagguaaa

SEQ ID NO: 1917515 - RNA, 19 nt, Homo sapiens
  misc_RNA (1)...(19): siRNA sense strand
aaaggcauuugaagaagaa

SEQ ID NO: 1917516 - RNA, 19 nt, Homo sapiens
  misc_RNA (1)...(19): siRNA sense strand
gaaaagucauguagaaaag

SEQ ID NO: 1917517 - RNA, 19 nt, Homo sapiens
  misc_RNA (1)...(19): siRNA sense strand
gagcgugaauauaauaaac

SEQ ID NO: 1917518 - RNA, 19 nt, Homo sapiens
  misc_RNA (1)...(19): siRNA sense strand
gcagcaguuucuaaauaug

SEQ ID NO: 1917519 - RNA, 19 nt, Homo sapiens
  misc_RNA (1)...(19): siRNA sense strand
agaaaacaguggagaauuu

SEQ ID NO: 1917520 - RNA, 19 nt, Homo sapiens
  misc_RNA (1)...(19): siRNA sense strand
ugugggaccuuuccuguga

SEQ ID NO: 1917521 - RNA, 19 nt, Homo sapiens
  misc_RNA (1)...(19): siRNA sense strand
agacaaagagagaguuaaa

SEQ ID NO: 1917522 - RNA, 19 nt, Homo sapiens
  misc_RNA (1)...(19): siRNA sense strand
aagaagaaaccuagagaaa

SEQ ID NO: 1917523 - RNA, 19 nt, Homo sapiens
  misc_RNA (1)...(19): siRNA sense strand
gaaagagacagacaguuac

SEQ ID NO: 1917524 - RNA, 19 nt, Homo sapiens
  misc_RNA (1)...(19): siRNA sense strand
agagaaagaguagaugaua

SEQ ID NO: 1917525 - RNA, 19 nt, Homo sapiens
  misc_RNA (1)...(19): siRNA sense strand
gagaaaagagcgugaauau

SEQ ID NO: 1917526 - RNA, 19 nt, Homo sapiens
  misc_RNA (1)...(19): siRNA sense strand
caggaagguugcuauagug

SEQ ID NO: 1917527 - RNA, 19 nt, Homo sapiens
  misc_RNA (1)...(19): siRNA sense strand
acaggaagguugcuauagu

SEQ ID NO: 1917528 - RNA, 19 nt, Homo sapiens
  misc_RNA (1)...(19): siRNA sense strand
gagacgaagcuuuacagaa

SEQ ID NO: 1917529 - RNA, 19 nt, Homo sapiens
  misc_RNA (1)...(19): siRNA sense strand
aagaguagaugauaguaca

SEQ ID NO: 1917530 - RNA, 19 nt, Homo sapiens
  misc_RNA (1)...(19): siRNA sense strand
ugaaggaacgucuacauca

SEQ ID NO: 1917531 - RNA, 19 nt, Homo sapiens
  misc_RNA (1)...(19): siRNA sense strand
uuacaaacagcaucagaaa

SEQ ID NO: 1917532 - RNA, 19 nt, Homo sapiens
  misc_RNA (1)...(19): siRNA sense strand
aaacugaagccaggaauga

SEQ ID NO: 1917533 - RNA, 19 nt, Homo sapiens
  misc_RNA (1)...(19): siRNA sense strand
ugcaucagcuacuaaagaa

SEQ ID NO: 1917534 - RNA, 19 nt, Homo sapiens
  misc_RNA (1)...(19): siRNA sense strand
cuaaauaugacuaccuuug

SEQ ID NO: 1917535 - RNA, 19 nt, Homo sapiens
  misc_RNA (1)...(19): siRNA sense strand
agacagacaguuacaaugu

SEQ ID NO: 1917536 - RNA, 19 nt, Homo sapiens
  misc_RNA (1)...(19): siRNA sense strand
ucacaggaagguugcuaua

SEQ ID NO: 1917537 - RNA, 19 nt, Homo sapiens
  misc_RNA (1)...(19): siRNA sense strand
agugcuauguucuucaaua

SEQ ID NO: 1917538 - RNA, 19 nt, Homo sapiens
  misc_RNA (1)...(19): siRNA sense strand
cuacaucaacuuguuauga

SEQ ID NO: 1917539 - RNA, 19 nt, Homo sapiens
  misc_RNA (1)...(19): siRNA sense strand
guagcuguacuaaauugua

SEQ ID NO: 1917540 - RNA, 19 nt, Homo sapiens
  misc_RNA (1)...(19): siRNA sense strand
agggagagacgaagcuuua

SEQ ID NO: 1917541 - RNA, 19 nt, Homo sapiens
  misc_RNA (1)...(19): siRNA sense strand
cgggagagcugauggaaaa

SEQ ID NO: 1917542 - RNA, 19 nt, Homo sapiens
  misc_RNA (1)...(19): siRNA sense strand
ugauugggcuucaggaaag

SEQ ID NO: 1917543 - RNA, 19 nt, Homo sapiens
  misc_RNA (1)...(19): siRNA sense strand
uccuugagcuacacaaauu

SEQ ID NO: 1917544 - RNA, 19 nt, Homo sapiens
  misc_RNA (1)...(19): siRNA sense strand
uagaaauucagcaguguaa

SEQ ID NO: 1917545 - RNA, 19 nt, Homo sapiens
  misc_RNA (1)...(19): siRNA sense strand
uagaaaagcuugauaacca

SEQ ID NO: 1917546 - RNA, 19 nt, Homo sapiens
  misc_RNA (1)...(19): siRNA sense strand
ugaacagaguaucucauau

SEQ ID NO: 1917547 - RNA, 19 nt, Homo sapiens
  misc_RNA (1)...(19): siRNA sense strand
cgucagaaacaaauccuaa

SEQ ID NO: 1917548 - RNA, 19 nt, Homo sapiens
  misc_RNA (1)...(19): siRNA sense strand
caucagcuacuaaagaaug

SEQ ID NO: 1917549 - RNA, 19 nt, Homo sapiens
  misc_RNA (1)...(19): siRNA sense strand
gcaagucgagcuacucagu

SEQ ID NO: 1917550 - RNA, 19 nt, Homo sapiens
  misc_RNA (1)...(19): siRNA sense strand
gaaacaaagaugucuccau

SEQ ID NO: 1917551 - RNA, 19 nt, Homo sapiens
  misc_RNA (1)...(19): siRNA sense strand
uuaaagcagcaguuucuaa

SEQ ID NO: 1917552 - RNA, 19 nt, Homo sapiens
  misc_RNA (1)...(19): siRNA sense strand
gaagaagaaagagccaguu

SEQ ID NO: 1917553 - RNA, 19 nt, Homo sapiens
  misc_RNA (1)...(19): siRNA sense strand
agagaaaggcauuugaaga

SEQ ID NO: 1917554 - RNA, 19 nt, Homo sapiens
  misc_RNA (1)...(19): siRNA sense strand
gaacgucucaaagaagaau

SEQ ID NO: 1917555 - RNA, 19 nt, Homo sapiens
  misc_RNA (1)...(19): siRNA sense strand
augcagaacuuaagaaggu

SEQ ID NO: 1917556 - RNA, 19 nt, Homo sapiens
  misc_RNA (1)...(19): siRNA sense strand
cagacacguuccugcauau

SEQ ID NO: 1917557 - RNA, 19 nt, Homo sapiens
  misc_RNA (1)...(19): siRNA sense strand
ggaggaagaugcugcagua

SEQ ID NO: 1917558 - RNA, 19 nt, Homo sapiens
  misc_RNA (1)...(19): siRNA sense strand
gcaagaaguucaagugugu

SEQ ID NO: 1917559 - RNA, 19 nt, Homo sapiens
  misc_RNA (1)...(19): siRNA sense strand
gggcuucuguugcauuaua

SEQ ID NO: 1917560 - RNA, 19 nt, Homo sapiens
  misc_RNA (1)...(19): siRNA sense strand
ggagcaaagugacauuguu

SEQ ID NO: 1917561 - RNA, 19 nt, Homo sapiens
  misc_RNA (1)...(19): siRNA sense strand
ccaccgagcuccuggucua

SEQ ID NO: 1917562 - RNA, 19 nt, Homo sapiens
  misc_RNA (1)...(19): siRNA sense strand
gaacagaugggaaauggau

SEQ ID NO: 1917563 - RNA, 19 nt, Homo sapiens
  misc_RNA (1)...(19): siRNA sense strand
aaagugacauuguucaaga

SEQ ID NO: 1917564 - RNA, 19 nt, Homo sapiens
  misc_RNA (1)...(19): siRNA sense strand
gagccucgcuucucucuag

SEQ ID NO: 1917565 - RNA, 19 nt, Homo sapiens
  misc_RNA (1)...(19): siRNA sense strand
ugacauuguucaagaagaa

SEQ ID NO: 1917566 - RNA, 19 nt, Homo sapiens
  misc_RNA (1)...(19): siRNA sense strand
caagggaacuacaccuguu

SEQ ID NO: 1917567 - RNA, 19 nt, Homo sapiens
  misc_RNA (1)...(19): siRNA sense strand
gcagugaggagcaaaguga

SEQ ID NO: 1917568 - RNA, 19 nt, Homo sapiens
  misc_RNA (1)...(19): siRNA sense strand
gaaguucaugagaauguua

SEQ ID NO: 1917569 - RNA, 19 nt, Homo sapiens
  misc_RNA (1)...(19): siRNA sense strand
ccaccucccugcacauuga

SEQ ID NO: 1917570 - RNA, 19 nt, Homo sapiens
  misc_RNA (1)...(19): siRNA sense strand
ggagggagcacgugagaga

SEQ ID NO: 1917571 - RNA, 19 nt, Homo sapiens
  misc_RNA (1)...(19): siRNA sense strand
gaaaucuggcugaguguga

SEQ ID NO: 1917572 - RNA, 19 nt, Homo sapiens
  misc_RNA (1)...(19): siRNA sense strand
cagggcuucuguugcauua

SEQ ID NO: 1917573 - RNA, 19 nt, Homo sapiens
  misc_RNA (1)...(19): siRNA sense strand
ggcaacaucucgggacuga

SEQ ID NO: 1917574 - RNA, 19 nt, Homo sapiens
  misc_RNA (1)...(19): siRNA sense strand
gagaaguucaugagaaugu

SEQ ID NO: 1917575 - RNA, 19 nt, Homo sapiens
  misc_RNA (1)...(19): siRNA sense strand
gaagagccaggagguguaa

SEQ ID NO: 1917576 - RNA, 19 nt, Homo sapiens
  misc_RNA (1)...(19): siRNA sense strand
gcaucaggaucguucaugu

SEQ ID NO: 1917577 - RNA, 19 nt, Homo sapiens
  misc_RNA (1)...(19): siRNA sense strand
gagaggaguugccaaaaga

SEQ ID NO: 1917578 - RNA, 19 nt, Homo sapiens
  misc_RNA (1)...(19): siRNA sense strand
gagccugucuuccuucucu

SEQ ID NO: 1917579 - RNA, 19 nt, Homo sapiens
  misc_RNA (1)...(19): siRNA sense strand
gaauguuacucugcacugu

SEQ ID NO: 1917580 - RNA, 19 nt, Homo sapiens
  misc_RNA (1)...(19): siRNA sense strand
gcaaagugacauuguucaa

SEQ ID NO: 1917581 - RNA, 19 nt, Homo sapiens
  misc_RNA (1)...(19): siRNA sense strand
ugaaucagcucagcaagag

SEQ ID NO: 1917582 - RNA, 19 nt, Homo sapiens
  misc_RNA (1)...(19): siRNA sense strand
gagcaaagugacauuguuc

SEQ ID NO: 1917583 - RNA, 19 nt, Homo sapiens
  misc_RNA (1)...(19): siRNA sense strand
gaacuccacccucacuauc

SEQ ID NO: 1917584 - RNA, 19 nt, Homo sapiens
  misc_RNA (1)...(19): siRNA sense strand
uggagaaguucaugagaau

SEQ ID NO: 1917585 - RNA, 19 nt, Homo sapiens
  misc_RNA (1)...(19): siRNA sense strand
caaaagaaauaccuaagca

SEQ ID NO: 1917586 - RNA, 19 nt, Homo sapiens
  misc_RNA (1)...(19): siRNA sense strand
guuacaagccacauaguug

SEQ ID NO: 1917587 - RNA, 19 nt, Homo sapiens
  misc_RNA (1)...(19): siRNA sense strand
uagaacagaugggaaaugg

SEQ ID NO: 1917588 - RNA, 19 nt, Homo sapiens
  misc_RNA (1)...(19): siRNA sense strand
gaaguucaaguguguuaca

SEQ ID NO: 1917589 - RNA, 19 nt, Homo sapiens
  misc_RNA (1)...(19): siRNA sense strand
ucucagggcuucuguugca

SEQ ID NO: 1917590 - RNA, 19 nt, Homo sapiens
  misc_RNA (1)...(19): siRNA sense strand
uuggagaaguucaugagaa

SEQ ID NO: 1917591 - RNA, 19 nt, Homo sapiens
  misc_RNA (1)...(19): siRNA sense strand
caacggcacccucuaugca

SEQ ID NO: 1917592 - RNA, 19 nt, Homo sapiens
  misc_RNA (1)...(19): siRNA sense strand
auuggaggcuguugucauu

SEQ ID NO: 1917593 - RNA, 19 nt, Homo sapiens
  misc_RNA (1)...(19): siRNA sense strand
ggaguugccaaaagaaaua

SEQ ID NO: 1917594 - RNA, 19 nt, Homo sapiens
  misc_RNA (1)...(19): siRNA sense strand
agagagaggaguugccaaa

SEQ ID NO: 1917595 - RNA, 19 nt, Homo sapiens
  misc_RNA (1)...(19): siRNA sense strand
gucccucccuucucucuga

SEQ ID NO: 1917596 - RNA, 19 nt, Homo sapiens
  misc_RNA (1)...(19): siRNA sense strand
aagaaguucaaguguguua

SEQ ID NO: 1917597 - RNA, 19 nt, Homo sapiens
  misc_RNA (1)...(19): siRNA sense strand
ucguucauguugcagcuua

SEQ ID NO: 1917598 - RNA, 19 nt, Homo sapiens
  misc_RNA (1)...(19): siRNA sense strand
ugacagcagugaggagcaa

SEQ ID NO: 1917599 - RNA, 19 nt, Homo sapiens
  misc_RNA (1)...(19): siRNA sense strand
acauagaacagaugggaaa

SEQ ID NO: 1917600 - RNA, 19 nt, Homo sapiens
  misc_RNA (1)...(19): siRNA sense strand
ucgcuucucucuaguggau

SEQ ID NO: 1917601 - RNA, 19 nt, Homo sapiens
  misc_RNA (1)...(19): siRNA sense strand
gcaggaccacauucacaga

SEQ ID NO: 1917602 - RNA, 19 nt, Homo sapiens
  misc_RNA (1)...(19): siRNA sense strand
ggaggcuguugucauugga

SEQ ID NO: 1917603 - RNA, 19 nt, Homo sapiens
  misc_RNA (1)...(19): siRNA sense strand
ccgagcuccuggucuacua

SEQ ID NO: 1917604 - RNA, 19 nt, Homo sapiens
  misc_RNA (1)...(19): siRNA sense strand
ggacaaaacauggaugaug

SEQ ID NO: 1917605 - RNA, 19 nt, Homo sapiens
  misc_RNA (1)...(19): siRNA sense strand
uagcagccgccaucucauu

SEQ ID NO: 1917606 - RNA, 19 nt, Homo sapiens
  misc_RNA (1)...(19): siRNA sense strand
caggaucguucauguugca

SEQ ID NO: 1917607 - RNA, 19 nt, Homo sapiens
  misc_RNA (1)...(19): siRNA sense strand
ugaaugugacucagugguu

SEQ ID NO: 1917608 - RNA, 19 nt, Homo sapiens
  misc_RNA (1)...(19): siRNA sense strand
gggacuggccauuaucuca

SEQ ID NO: 1917609 - RNA, 19 nt, Homo sapiens
  misc_RNA (1)...(19): siRNA sense strand
gggauugugggaaccauug

SEQ ID NO: 1917610 - RNA, 19 nt, Homo sapiens
  misc_RNA (1)...(19): siRNA sense strand
caacucggagccugucuuc

SEQ ID NO: 1917611 - RNA, 19 nt, Homo sapiens
  misc_RNA (1)...(19): siRNA sense strand
gcaagagacaucgaaaggu

SEQ ID NO: 1917612 - RNA, 19 nt, Homo sapiens
  misc_RNA (1)...(19): siRNA sense strand
ccuagcagccgccaucuca

SEQ ID NO: 1917613 - RNA, 19 nt, Homo sapiens
  misc_RNA (1)...(19): siRNA sense strand
caaagugacauuguucaag

SEQ ID NO: 1917614 - RNA, 19 nt, Homo sapiens
  misc_RNA (1)...(19): siRNA sense strand
caucaggaucguucauguu

SEQ ID NO: 1917615 - RNA, 19 nt, Homo sapiens
  misc_RNA (1)...(19): siRNA sense strand
ugaaugggaacauagaaca

SEQ ID NO: 1917616 - RNA, 19 nt, Homo sapiens
  misc_RNA (1)...(19): siRNA sense strand
uaucucagggcuucuguug

SEQ ID NO: 1917617 - RNA, 19 nt, Homo sapiens
  misc_RNA (1)...(19): siRNA sense strand
gcugucggauggcaagaag

SEQ ID NO: 1917618 - RNA, 19 nt, Homo sapiens
  misc_RNA (1)...(19): siRNA sense strand
acucagugguuccaagugu

SEQ ID NO: 1917619 - RNA, 19 nt, Homo sapiens
  misc_RNA (1)...(19): siRNA sense strand
gugacauuguucaagaaga

SEQ ID NO: 1917620 - RNA, 19 nt, Homo sapiens
  misc_RNA (1)...(19): siRNA sense strand
agaagagccaggaggugua

SEQ ID NO: 1917621 - RNA, 19 nt, Homo sapiens
  misc_RNA (1)...(19): siRNA sense strand
aaaucuggcugagugugaa

SEQ ID NO: 1917622 - RNA, 19 nt, Homo sapiens
  misc_RNA (1)...(19): siRNA sense strand
gaggagcaaagugacauug

SEQ ID NO: 1917623 - RNA, 19 nt, Homo sapiens
  misc_RNA (1)...(19): siRNA sense strand
uuacugauaucgccaaacc

SEQ ID NO: 1917624 - RNA, 19 nt, Homo sapiens
  misc_RNA (1)...(19): siRNA sense strand
cuuggugaaugggaacaua

SEQ ID NO: 1917625 - RNA, 19 nt, Homo sapiens
  misc_RNA (1)...(19): siRNA sense strand
agaaguucaugagaauguu

SEQ ID NO: 1917626 - RNA, 19 nt, Homo sapiens
  misc_RNA (1)...(19): siRNA sense strand
cuaagcaggaccacauuca

SEQ ID NO: 1917627 - RNA, 19 nt, Homo sapiens
  misc_RNA (1)...(19): siRNA sense strand
ggaggaggaggaggaggaa

SEQ ID NO: 1917628 - RNA, 19 nt, Homo sapiens
  misc_RNA (1)...(19): siRNA sense strand
ggugaaugggaacauagaa

SEQ ID NO: 1917629 - RNA, 19 nt, Homo sapiens
  misc_RNA (1)...(19): siRNA sense strand
ccugggagaugagggaauc

SEQ ID NO: 1917630 - RNA, 19 nt, Homo sapiens
  misc_RNA (1)...(19): siRNA sense strand
aagugacauuguucaagaa

SEQ ID NO: 1917631 - RNA, 19 nt, Homo sapiens
  misc_RNA (1)...(19): siRNA sense strand
gcauuauagcccuguguuc

SEQ ID NO: 1917632 - RNA, 19 nt, Homo sapiens
  misc_RNA (1)...(19): siRNA sense strand
ggagaaguucaugagaaug

SEQ ID NO: 1917633 - RNA, 19 nt, Homo sapiens
  misc_RNA (1)...(19): siRNA sense strand
ucucugagcccaugaagac

SEQ ID NO: 1917634 - RNA, 19 nt, Homo sapiens
  misc_RNA (1)...(19): siRNA sense strand
cugagcccaugaagacuug

SEQ ID NO: 1917635 - RNA, 19 nt, Homo sapiens
  misc_RNA (1)...(19): siRNA sense strand
ugaccgccuuggugaaugg

SEQ ID NO: 1917636 - RNA, 19 nt, Homo sapiens
  misc_RNA (1)...(19): siRNA sense strand
ggaggaggaggaggaagau

SEQ ID NO: 1917637 - RNA, 19 nt, Homo sapiens
  misc_RNA (1)...(19): siRNA sense strand
cugcugggacuggccauua

SEQ ID NO: 1917638 - RNA, 19 nt, Homo sapiens
  misc_RNA (1)...(19): siRNA sense strand
agauugagguccacaucgu

SEQ ID NO: 1917639 - RNA, 19 nt, Homo sapiens
  misc_RNA (1)...(19): siRNA sense strand
caggagggagcacgugaga

SEQ ID NO: 1917640 - RNA, 19 nt, Homo sapiens
  misc_RNA (1)...(19): siRNA sense strand
ugucggauggcaagaaguu

SEQ ID NO: 1917641 - RNA, 19 nt, Homo sapiens
  misc_RNA (1)...(19): siRNA sense strand
gcccagaggucagaaauca

SEQ ID NO: 1917642 - RNA, 19 nt, Homo sapiens
  misc_RNA (1)...(19): siRNA sense strand
ggaaugacuccuccacauc

SEQ ID NO: 1917643 - RNA, 19 nt, Homo sapiens
  misc_RNA (1)...(19): siRNA sense strand
ccagaggucagaaaucaga

SEQ ID NO: 1917644 - RNA, 19 nt, Homo sapiens
  misc_RNA (1)...(19): siRNA sense strand
gaugcugccaccucccuua

SEQ ID NO: 1917645 - RNA, 19 nt, Homo sapiens
  misc_RNA (1)...(19): siRNA sense strand
gguaccgggucacuguuga

SEQ ID NO: 1917646 - RNA, 19 nt, Homo sapiens
  misc_RNA (1)...(19): siRNA sense strand
gcccaguacacacaaguuu

SEQ ID NO: 1917647 - RNA, 19 nt, Homo sapiens
  misc_RNA (1)...(19): siRNA sense strand
gaggucagaaaucagauau

SEQ ID NO: 1917648 - RNA, 19 nt, Homo sapiens
  misc_RNA (1)...(19): siRNA sense strand
uaaagcacccaguauggau

SEQ ID NO: 1917649 - RNA, 19 nt, Homo sapiens
  misc_RNA (1)...(19): siRNA sense strand
gacccuagaguccaagaga

SEQ ID NO: 1917650 - RNA, 19 nt, Homo sapiens
  misc_RNA (1)...(19): siRNA sense strand
cagggaagauaguguugag

SEQ ID NO: 1917651 - RNA, 19 nt, Homo sapiens
  misc_RNA (1)...(19): siRNA sense strand
gcacagcaggagacacaca

SEQ ID NO: 1917652 - RNA, 19 nt, Homo sapiens
  misc_RNA (1)...(19): siRNA sense strand
gcugccaccucccuuagag

SEQ ID NO: 1917653 - RNA, 19 nt, Homo sapiens
  misc_RNA (1)...(19): siRNA sense strand
ucacggccuucccacacuu

SEQ ID NO: 1917654 - RNA, 19 nt, Homo sapiens
  misc_RNA (1)...(19): siRNA sense strand
cuaaagcacccaguaugga

SEQ ID NO: 1917655 - RNA, 19 nt, Homo sapiens
  misc_RNA (1)...(19): siRNA sense strand
gcaggacaaggacccuaga

SEQ ID NO: 1917656 - RNA, 19 nt, Homo sapiens
  misc_RNA (1)...(19): siRNA sense strand
agacacacaagucccaaga

SEQ ID NO: 1917657 - RNA, 19 nt, Homo sapiens
  misc_RNA (1)...(19): siRNA sense strand
ccacauccgaggccucuag

SEQ ID NO: 1917658 - RNA, 19 nt, Homo sapiens
  misc_RNA (1)...(19): siRNA sense strand
cacacuuuguccucacuug

SEQ ID NO: 1917659 - RNA, 19 nt, Homo sapiens
  misc_RNA (1)...(19): siRNA sense strand
agaggucagaaaucagaua

SEQ ID NO: 1917660 - RNA, 19 nt, Homo sapiens
  misc_RNA (1)...(19): siRNA sense strand
gcccagaggucagaaauca

SEQ ID NO: 1917661 - RNA, 19 nt, Homo sapiens
  misc_RNA (1)...(19): siRNA sense strand
ggaaugacuccuccacauc

SEQ ID NO: 1917662 - RNA, 19 nt, Homo sapiens
  misc_RNA (1)...(19): siRNA sense strand
ccagaggucagaaaucaga

SEQ ID NO: 1917663 - RNA, 19 nt, Homo sapiens
  misc_RNA (1)...(19): siRNA sense strand
gaugcugccaccucccuua

SEQ ID NO: 1917664 - RNA, 19 nt, Homo sapiens
  misc_RNA (1)...(19): siRNA sense strand
gaugcugccaccucccuua

SEQ ID NO: 1917665 - RNA, 19 nt, Homo sapiens
  misc_RNA (1)...(19): siRNA sense strand
gguaccgggucacuguuga

SEQ ID NO: 1917666 - RNA, 19 nt, Homo sapiens
  misc_RNA (1)...(19): siRNA sense strand
gcccaguacacacaaguuu

SEQ ID NO: 1917667 - RNA, 19 nt, Homo sapiens
  misc_RNA (1)...(19): siRNA sense strand
gaggucagaaaucagauau

SEQ ID NO: 1917668 - RNA, 19 nt, Homo sapiens
  misc_RNA (1)...(19): siRNA sense strand
uaaagcacccaguauggau

SEQ ID NO: 1917669 - RNA, 19 nt, Homo sapiens
  misc_RNA (1)...(19): siRNA sense strand
gacccuagaguccaagaga

SEQ ID NO: 1917670 - RNA, 19 nt, Homo sapiens
  misc_RNA (1)...(19): siRNA sense strand
cagggaagauaguguugag

SEQ ID NO: 1917671 - RNA, 19 nt, Homo sapiens
  misc_RNA (1)...(19): siRNA sense strand
ggacaauggaggccucucu

SEQ ID NO: 1917672 - RNA, 19 nt, Homo sapiens
  misc_RNA (1)...(19): siRNA sense strand
gcacagcaggagacacaca

SEQ ID NO: 1917673 - RNA, 19 nt, Homo sapiens
  misc_RNA (1)...(19): siRNA sense strand
gcugccaccucccuuagag

SEQ ID NO: 1917674 - RNA, 19 nt, Homo sapiens
  misc_RNA (1)...(19): siRNA sense strand
ucacggccuucccacacuu

SEQ ID NO: 1917675 - RNA, 19 nt, Homo sapiens
  misc_RNA (1)...(19): siRNA sense strand
gcugccaccucccuuagag

SEQ ID NO: 1917676 - RNA, 19 nt, Homo sapiens
  misc_RNA (1)...(19): siRNA sense strand
cuaaagcacccaguaugga

SEQ ID NO: 1917677 - RNA, 19 nt, Homo sapiens
  misc_RNA (1)...(19): siRNA sense strand
ccacauccgaggccucuag

SEQ ID NO: 1917678 - RNA, 19 nt, Homo sapiens
  misc_RNA (1)...(19): siRNA sense strand
agacacacaagucccaaga

SEQ ID NO: 1917679 - RNA, 19 nt, Homo sapiens
  misc_RNA (1)...(19): siRNA sense strand
gcaggacaaggacccuaga

SEQ ID NO: 1917680 - RNA, 19 nt, Homo sapiens
  misc_RNA (1)...(19): siRNA sense strand
cacacuuuguccucacuug

SEQ ID NO: 1917681 - RNA, 19 nt, Homo sapiens
  misc_RNA (1)...(19): siRNA sense strand
cacacuuuguccucacuug

SEQ ID NO: 1917682 - RNA, 19 nt, Homo sapiens
  misc_RNA (1)...(19): siRNA sense strand
agaggucagaaaucagaua

SEQ ID NO: 1917683 - RNA, 19 nt, Homo sapiens
  misc_RNA (1)...(19): siRNA sense strand
acagacaucuccucaaaua

SEQ ID NO: 1917684 - RNA, 19 nt, Homo sapiens
  misc_RNA (1)...(19): siRNA sense strand
gaagagaauugauaaacuc

SEQ ID NO: 1917685 - RNA, 19 nt, Homo sapiens
  misc_RNA (1)...(19): siRNA sense strand
gaaggagguucaagggaaa

SEQ ID NO: 1917686 - RNA, 19 nt, Homo sapiens
  misc_RNA (1)...(19): siRNA sense strand
uuacagacaucuccucaaa

SEQ ID NO: 1917687 - RNA, 19 nt, Homo sapiens
  misc_RNA (1)...(19): siRNA sense strand
aagaagaaguugucacauu

SEQ ID NO: 1917688 - RNA, 19 nt, Homo sapiens
  misc_RNA (1)...(19): siRNA sense strand
gaccauaccagauuuagaa

SEQ ID NO: 1917689 - RNA, 19 nt, Homo sapiens
  misc_RNA (1)...(19): siRNA sense strand
cgagcuauguuaacuugua

SEQ ID NO: 1917690 - RNA, 19 nt, Homo sapiens
  misc_RNA (1)...(19): siRNA sense strand
caacagccauugugaacau

SEQ ID NO: 1917691 - RNA, 19 nt, Homo sapiens
  misc_RNA (1)...(19): siRNA sense strand
cugcagaccuccaaagaaa

SEQ ID NO: 1917692 - RNA, 19 nt, Homo sapiens
  misc_RNA (1)...(19): siRNA sense strand
acacagaccuagucacuuc

SEQ ID NO: 1917693 - RNA, 19 nt, Homo sapiens
  misc_RNA (1)...(19): siRNA sense strand
gaaagaagaagaaguuguc

SEQ ID NO: 1917694 - RNA, 19 nt, Homo sapiens
  misc_RNA (1)...(19): siRNA sense strand
gaaaugauagcuguacuga

SEQ ID NO: 1917695 - RNA, 19 nt, Homo sapiens
  misc_RNA (1)...(19): siRNA sense strand
agaagaaguugucacauuc

SEQ ID NO: 1917696 - RNA, 19 nt, Homo sapiens
  misc_RNA (1)...(19): siRNA sense strand
ggguagaacuggcggagaa

SEQ ID NO: 1917697 - RNA, 19 nt, Homo sapiens
  misc_RNA (1)...(19): siRNA sense strand
uugauaaacucaccaaaga

SEQ ID NO: 1917698 - RNA, 19 nt, Homo sapiens
  misc_RNA (1)...(19): siRNA sense strand
aggaggagcuucuuaggaa

SEQ ID NO: 1917699 - RNA, 19 nt, Homo sapiens
  misc_RNA (1)...(19): siRNA sense strand
ggacguggccguggaaaug

SEQ ID NO: 1917700 - RNA, 19 nt, Homo sapiens
  misc_RNA (1)...(19): siRNA sense strand
ggaggagcuucuuaggaaa

SEQ ID NO: 1917701 - RNA, 19 nt, Homo sapiens
  misc_RNA (1)...(19): siRNA sense strand
gcagaaaccgagcuauguu

SEQ ID NO: 1917702 - RNA, 19 nt, Homo sapiens
  misc_RNA (1)...(19): siRNA sense strand
caaauaggaagcccaaaug

SEQ ID NO: 1917703 - RNA, 19 nt, Homo sapiens
  misc_RNA (1)...(19): siRNA sense strand
cagaaaccgagcuauguua

SEQ ID NO: 1917704 - RNA, 19 nt, Homo sapiens
  misc_RNA (1)...(19): siRNA sense strand
ggagaccauaccagauuua

SEQ ID NO: 1917705 - RNA, 19 nt, Homo sapiens
  misc_RNA (1)...(19): siRNA sense strand
ccuagucacuuccucagaa

SEQ ID NO: 1917706 - RNA, 19 nt, Homo sapiens
  misc_RNA (1)...(19): siRNA sense strand
gcaacgugguaaagcagaa

SEQ ID NO: 1917707 - RNA, 19 nt, Homo sapiens
  misc_RNA (1)...(19): siRNA sense strand
ucacagcuacgaagaaaga

SEQ ID NO: 1917708 - RNA, 19 nt, Homo sapiens
  misc_RNA (1)...(19): siRNA sense strand
uaaccacccugaucucaag

SEQ ID NO: 1917709 - RNA, 19 nt, Homo sapiens
  misc_RNA (1)...(19): siRNA sense strand
ggaaagaagaagaaguugu

SEQ ID NO: 1917710 - RNA, 19 nt, Homo sapiens
  misc_RNA (1)...(19): siRNA sense strand
gaagaaguugucacauuca

SEQ ID NO: 1917711 - RNA, 19 nt, Homo sapiens
  misc_RNA (1)...(19): siRNA sense strand
cgaggcacaugucagagaa

SEQ ID NO: 1917712 - RNA, 19 nt, Homo sapiens
  misc_RNA (1)...(19): siRNA sense strand
gggaaggaaccaccugaaa

SEQ ID NO: 1917713 - RNA, 19 nt, Homo sapiens
  misc_RNA (1)...(19): siRNA sense strand
cagagaggccuguguccua

SEQ ID NO: 1917714 - RNA, 19 nt, Homo sapiens
  misc_RNA (1)...(19): siRNA sense strand
ccaaggccauucacgaaca

SEQ ID NO: 1917715 - RNA, 19 nt, Homo sapiens
  misc_RNA (1)...(19): siRNA sense strand
uaggaaagaagaagaaguu

SEQ ID NO: 1917716 - RNA, 19 nt, Homo sapiens
  misc_RNA (1)...(19): siRNA sense strand
gauaggaccauugagaaga

SEQ ID NO: 1917717 - RNA, 19 nt, Homo sapiens
  misc_RNA (1)...(19): siRNA sense strand
gagaagagaauugauaaac

SEQ ID NO: 1917718 - RNA, 19 nt, Homo sapiens
  misc_RNA (1)...(19): siRNA sense strand
gagcaguggcaacguggua

SEQ ID NO: 1917719 - RNA, 19 nt, Homo sapiens
  misc_RNA (1)...(19): siRNA sense strand
gcacgugcuuacagacauc

SEQ ID NO: 1917720 - RNA, 19 nt, Homo sapiens
  misc_RNA (1)...(19): siRNA sense strand
cagcaggccucuggcuuug

SEQ ID NO: 1917721 - RNA, 19 nt, Homo sapiens
  misc_RNA (1)...(19): siRNA sense strand
guggagaccauaccagauu

SEQ ID NO: 1917722 - RNA, 19 nt, Homo sapiens
  misc_RNA (1)...(19): siRNA sense strand
gcaggccucuggcuuuguc

SEQ ID NO: 1917723 - RNA, 19 nt, Homo sapiens
  misc_RNA (1)...(19): siRNA sense strand
ccucaaagacacagaccua

SEQ ID NO: 1917724 - RNA, 19 nt, Homo sapiens
  misc_RNA (1)...(19): siRNA sense strand
ggaaggaaccaccugaaaa

SEQ ID NO: 1917725 - RNA, 19 nt, Homo sapiens
  misc_RNA (1)...(19): siRNA sense strand
ucaaauaggaagcccaaau

SEQ ID NO: 1917726 - RNA, 19 nt, Homo sapiens
  misc_RNA (1)...(19): siRNA sense strand
cagcuugaguacuaucaga

SEQ ID NO: 1917727 - RNA, 19 nt, Homo sapiens
  misc_RNA (1)...(19): siRNA sense strand
cuccaggacuuuauugaga

SEQ ID NO: 1917728 - RNA, 19 nt, Homo sapiens
  misc_RNA (1)...(19): siRNA sense strand
gaggaggagcuucuuagga

SEQ ID NO: 1917729 - RNA, 19 nt, Homo sapiens
  misc_RNA (1)...(19): siRNA sense strand
guuaacuuguacagcauuu

SEQ ID NO: 1917730 - RNA, 19 nt, Homo sapiens
  misc_RNA (1)...(19): siRNA sense strand
aaaccgagcuauguuaacu

SEQ ID NO: 1917731 - RNA, 19 nt, Homo sapiens
  misc_RNA (1)...(19): siRNA sense strand
caaagacacagaccuaguc

SEQ ID NO: 1917732 - RNA, 19 nt, Homo sapiens
  misc_RNA (1)...(19): siRNA sense strand
agucacagcuacgaagaaa

SEQ ID NO: 1917733 - RNA, 19 nt, Homo sapiens
  misc_RNA (1)...(19): siRNA sense strand
caucuggaguucagucaca

SEQ ID NO: 1917734 - RNA, 19 nt, Homo sapiens
  misc_RNA (1)...(19): siRNA sense strand
ggaaaugauagcuguacug

SEQ ID NO: 1917735 - RNA, 19 nt, Homo sapiens
  misc_RNA (1)...(19): siRNA sense strand
uggagaccauaccagauuu

SEQ ID NO: 1917736 - RNA, 19 nt, Homo sapiens
  misc_RNA (1)...(19): siRNA sense strand
gcgggcacgugcuuacaga

SEQ ID NO: 1917737 - RNA, 19 nt, Homo sapiens
  misc_RNA (1)...(19): siRNA sense strand
acagaaggcuuuugaggaa

SEQ ID NO: 1917738 - RNA, 19 nt, Homo sapiens
  misc_RNA (1)...(19): siRNA sense strand
ggacugcccaccucagaca

SEQ ID NO: 1917739 - RNA, 19 nt, Homo sapiens
  misc_RNA (1)...(19): siRNA sense strand
agaaaccgagcuauguuaa

SEQ ID NO: 1917740 - RNA, 19 nt, Homo sapiens
  misc_RNA (1)...(19): siRNA sense strand
ggcaacgccugacggaauc

SEQ ID NO: 1917741 - RNA, 19 nt, Homo sapiens
  misc_RNA (1)...(19): siRNA sense strand
gaauugauaaacucaccaa

SEQ ID NO: 1917742 - RNA, 19 nt, Homo sapiens
  misc_RNA (1)...(19): siRNA sense strand
ccaaggacaggaagccauu

SEQ ID NO: 1917743 - RNA, 19 nt, Homo sapiens
  misc_RNA (1)...(19): siRNA sense strand
uaaagcagaaaccgagcua

SEQ ID NO: 1917744 - RNA, 19 nt, Homo sapiens
  misc_RNA (1)...(19): siRNA sense strand
gaucucaagucccauuucc

SEQ ID NO: 1917745 - RNA, 19 nt, Homo sapiens
  misc_RNA (1)...(19): siRNA sense strand
cugcggaacuguuggaagu

SEQ ID NO: 1917746 - RNA, 19 nt, Homo sapiens
  misc_RNA (1)...(19): siRNA sense strand
gaaaacugcggaacuguug

SEQ ID NO: 1917747 - RNA, 19 nt, Homo sapiens
  misc_RNA (1)...(19): siRNA sense strand
caaagaguuggcccagaaa

SEQ ID NO: 1917748 - RNA, 19 nt, Homo sapiens
  misc_RNA (1)...(19): siRNA sense strand
uguccuaugugcagaccua

SEQ ID NO: 1917749 - RNA, 19 nt, Homo sapiens
  misc_RNA (1)...(19): siRNA sense strand
uguacagcauuucacauga

SEQ ID NO: 1917750 - RNA, 19 nt, Homo sapiens
  misc_RNA (1)...(19): siRNA sense strand
uaacuuguacagcauuuca

SEQ ID NO: 1917751 - RNA, 19 nt, Homo sapiens
  misc_RNA (1)...(19): siRNA sense strand
gagcuauguuaacuuguac

SEQ ID NO: 1917752 - RNA, 19 nt, Homo sapiens
  misc_RNA (1)...(19): siRNA sense strand
agagaggccuguguccuau

SEQ ID NO: 1917753 - RNA, 19 nt, Homo sapiens
  misc_RNA (1)...(19): siRNA sense strand
gcacccgcauucgguaugu

SEQ ID NO: 1917754 - RNA, 19 nt, Homo sapiens
  misc_RNA (1)...(19): siRNA sense strand
ggaagcggcagcugagaag

SEQ ID NO: 1917755 - RNA, 19 nt, Homo sapiens
  misc_RNA (1)...(19): siRNA sense strand
guggauaggaccauugaga

SEQ ID NO: 1917756 - RNA, 19 nt, Homo sapiens
  misc_RNA (1)...(19): siRNA sense strand
cacaugaacauuccaagga

SEQ ID NO: 1917757 - RNA, 19 nt, Homo sapiens
  misc_RNA (1)...(19): siRNA sense strand
ggauaggaccauugagaag

SEQ ID NO: 1917758 - RNA, 19 nt, Homo sapiens
  misc_RNA (1)...(19): siRNA sense strand
gcaguggcaacgugguaaa

SEQ ID NO: 1917759 - RNA, 19 nt, Homo sapiens
  misc_RNA (1)...(19): siRNA sense strand
ggaguccuuugagaauguu

SEQ ID NO: 1917760 - RNA, 19 nt, Homo sapiens
  misc_RNA (1)...(19): siRNA sense strand
agaagaagaaguugucaca

SEQ ID NO: 1917761 - RNA, 19 nt, Homo sapiens
  misc_RNA (1)...(19): siRNA sense strand
cauaccagauuuagaagcu

SEQ ID NO: 1917762 - RNA, 19 nt, Homo sapiens
  misc_RNA (1)...(19): siRNA sense strand
ggacaggaagccauuugag

SEQ ID NO: 1917763 - RNA, 19 nt, Homo sapiens
  misc_RNA (1)...(19): siRNA sense strand
aagaaguugucacauucaa

SEQ ID NO: 1917764 - RNA, 19 nt, Homo sapiens
  misc_RNA (1)...(19): siRNA sense strand
ccaggacuuuauugagaau

SEQ ID NO: 1917765 - RNA, 19 nt, Homo sapiens
  misc_RNA (1)...(19): siRNA sense strand
gcagaccuccaaagaaagg

SEQ ID NO: 1917766 - RNA, 19 nt, Homo sapiens
  misc_RNA (1)...(19): siRNA sense strand
gacaaaaugcagucucuuu

SEQ ID NO: 1917767 - RNA, 19 nt, Homo sapiens
  misc_RNA (1)...(19): siRNA sense strand
guaaccacccugaucucaa

SEQ ID NO: 1917768 - RNA, 19 nt, Homo sapiens
  misc_RNA (1)...(19): siRNA sense strand
agacaucuccucaaauagg

SEQ ID NO: 1917769 - RNA, 19 nt, Homo sapiens
  misc_RNA (1)...(19): siRNA sense strand
uccaggacuuuauugagaa

SEQ ID NO: 1917770 - RNA, 19 nt, Homo sapiens
  misc_RNA (1)...(19): siRNA sense strand
ccauugagaagagaauuga

SEQ ID NO: 1917771 - RNA, 19 nt, Homo sapiens
  misc_RNA (1)...(19): siRNA sense strand
uuagaagcuugucauccuu

SEQ ID NO: 1917772 - RNA, 19 nt, Homo sapiens
  misc_RNA (1)...(19): siRNA sense strand
ggacuuuauugagaaucug

SEQ ID NO: 1917773 - RNA, 19 nt, Homo sapiens
  misc_RNA (1)...(19): siRNA sense strand
gaagaagaaguugucacau

SEQ ID NO: 1917774 - RNA, 19 nt, Homo sapiens
  misc_RNA (1)...(19): siRNA sense strand
guauguaaccacccugauc

SEQ ID NO: 1917775 - RNA, 19 nt, Homo sapiens
  misc_RNA (1)...(19): siRNA sense strand
cagcugagaaggagguuca

SEQ ID NO: 1917776 - RNA, 19 nt, Homo sapiens
  misc_RNA (1)...(19): siRNA sense strand
aagcagaaaccgagcuaug

SEQ ID NO: 1917777 - RNA, 19 nt, Homo sapiens
  misc_RNA (1)...(19): siRNA sense strand
agaagcuugucauccuuga

SEQ ID NO: 1917778 - RNA, 19 nt, Homo sapiens
  misc_RNA (1)...(19): siRNA sense strand
uggauaggaccauugagaa

SEQ ID NO: 1917779 - RNA, 19 nt, Homo sapiens
  misc_RNA (1)...(19): siRNA sense strand
agaggccuguguccuaugu

SEQ ID NO: 1917780 - RNA, 19 nt, Homo sapiens
  misc_RNA (1)...(19): siRNA sense strand
accgagcuauguuaacuug

SEQ ID NO: 1917781 - RNA, 19 nt, Homo sapiens
  misc_RNA (1)...(19): siRNA sense strand
gaaaccgagcuauguuaac

SEQ ID NO: 1917782 - RNA, 19 nt, Homo sapiens
  misc_RNA (1)...(19): siRNA sense strand
ucaaagacacagaccuagu

SEQ ID NO: 1917783 - RNA, 19 nt, Homo sapiens
  misc_RNA (1)...(19): siRNA sense strand
gggaugcgaugcuggagaa

SEQ ID NO: 1917784 - RNA, 19 nt, Homo sapiens
  misc_RNA (1)...(19): siRNA sense strand
ucgaaggacugcagcauga

SEQ ID NO: 1917785 - RNA, 19 nt, Homo sapiens
  misc_RNA (1)...(19): siRNA sense strand
gaagacagaggaaccacuu

SEQ ID NO: 1917786 - RNA, 19 nt, Homo sapiens
  misc_RNA (1)...(19): siRNA sense strand
ggaagucaguguucgucau

SEQ ID NO: 1917787 - RNA, 19 nt, Homo sapiens
  misc_RNA (1)...(19): siRNA sense strand
ggacaggcgucugcagaag

SEQ ID NO: 1917788 - RNA, 19 nt, Homo sapiens
  misc_RNA (1)...(19): siRNA sense strand
gaaccauggacaccaagaa

SEQ ID NO: 1917789 - RNA, 19 nt, Homo sapiens
  misc_RNA (1)...(19): siRNA sense strand
gaaccagccuccacauccu

SEQ ID NO: 1917790 - RNA, 19 nt, Homo sapiens
  misc_RNA (1)...(19): siRNA sense strand
ugaaggaggagcccaaugu

SEQ ID NO: 1917791 - RNA, 19 nt, Homo sapiens
  misc_RNA (1)...(19): siRNA sense strand
gcacacugccucccgagau

SEQ ID NO: 1917792 - RNA, 19 nt, Homo sapiens
  misc_RNA (1)...(19): siRNA sense strand
augcgaugcuggagaagua

SEQ ID NO: 1917793 - RNA, 19 nt, Homo sapiens
  misc_RNA (1)...(19): siRNA sense strand
gaagucaguguucgucauc

SEQ ID NO: 1917794 - RNA, 19 nt, Homo sapiens
  misc_RNA (1)...(19): siRNA sense strand
gcaugacccugggcaacug

SEQ ID NO: 1917795 - RNA, 19 nt, Homo sapiens
  misc_RNA (1)...(19): siRNA sense strand
gaaggaggagcccaauguc

SEQ ID NO: 1917796 - RNA, 19 nt, Homo sapiens
  misc_RNA (1)...(19): siRNA sense strand
ggaagucgcagcuggucau

SEQ ID NO: 1917797 - RNA, 19 nt, Homo sapiens
  misc_RNA (1)...(19): siRNA sense strand
ggaagucgcagcuggucau

SEQ ID NO: 1917798 - RNA, 19 nt, Homo sapiens
  misc_RNA (1)...(19): siRNA sense strand
ucacagcccauguccugaa

SEQ ID NO: 1917799 - RNA, 19 nt, Homo sapiens
  misc_RNA (1)...(19): siRNA sense strand
ggagcccaaugucgaugga

SEQ ID NO: 1917800 - RNA, 19 nt, Homo sapiens
  misc_RNA (1)...(19): siRNA sense strand
gcucgggaaaugagaguga

SEQ ID NO: 1917801 - RNA, 19 nt, Homo sapiens
  misc_RNA (1)...(19): siRNA sense strand
ggaggagcccaaugucgau

SEQ ID NO: 1917802 - RNA, 19 nt, Homo sapiens
  misc_RNA (1)...(19): siRNA sense strand
gggacaggcgucugcagaa

SEQ ID NO: 1917803 - RNA, 19 nt, Homo sapiens
  misc_RNA (1)...(19): siRNA sense strand
ggaccggucacagaaggaa

SEQ ID NO: 1917804 - RNA, 19 nt, Homo sapiens
  misc_RNA (1)...(19): siRNA sense strand
gagugcgggugcagcuuca

SEQ ID NO: 1917805 - RNA, 19 nt, Homo sapiens
  misc_RNA (1)...(19): siRNA sense strand
gaagccugcgcucgggaaa

SEQ ID NO: 1917806 - RNA, 19 nt, Homo sapiens
  misc_RNA (1)...(19): siRNA sense strand
cagcccauguccugaagca

SEQ ID NO: 1917807 - RNA, 19 nt, Homo sapiens
  misc_RNA (1)...(19): siRNA sense strand
ggaaccauggacaccaaga

SEQ ID NO: 1917808 - RNA, 19 nt, Homo sapiens
  misc_RNA (1)...(19): siRNA sense strand
acagagaagccaccacaag

SEQ ID NO: 1917809 - RNA, 19 nt, Homo sapiens
  misc_RNA (1)...(19): siRNA sense strand
cacacugccucccgagauc

SEQ ID NO: 1917810 - RNA, 19 nt, Homo sapiens
  misc_RNA (1)...(19): siRNA sense strand
ggacagcgcuggagcuaga

SEQ ID NO: 1917811 - RNA, 19 nt, Homo sapiens
  misc_RNA (1)...(19): siRNA sense strand
gugcagaaauacagcgauu

SEQ ID NO: 1917812 - RNA, 19 nt, Homo sapiens
  misc_RNA (1)...(19): siRNA sense strand
gaccaggguuugcaaucug

SEQ ID NO: 1917813 - RNA, 19 nt, Homo sapiens
  misc_RNA (1)...(19): siRNA sense strand
gaaaguguggcuggagcua

SEQ ID NO: 1917814 - RNA, 19 nt, Homo sapiens
  misc_RNA (1)...(19): siRNA sense strand
ugcuucaggugcagaaaua

SEQ ID NO: 1917815 - RNA, 19 nt, Homo sapiens
  misc_RNA (1)...(19): siRNA sense strand
cauggcaccuccuguagag

SEQ ID NO: 1917816 - RNA, 19 nt, Homo sapiens
  misc_RNA (1)...(19): siRNA sense strand
gcacaguggaagcuaugga

SEQ ID NO: 1917817 - RNA, 19 nt, Homo sapiens
  misc_RNA (1)...(19): siRNA sense strand
gcagagaccaggguuugca

SEQ ID NO: 1917818 - RNA, 19 nt, Homo sapiens
  misc_RNA (1)...(19): siRNA sense strand
aaguguggcuggagcuaga

SEQ ID NO: 1917819 - RNA, 19 nt, Homo sapiens
  misc_RNA (1)...(19): siRNA sense strand
gagaccaggguuugcaauc

SEQ ID NO: 1917820 - RNA, 19 nt, Homo sapiens
  misc_RNA (1)...(19): siRNA sense strand
cugggcaucugggccauuu

SEQ ID NO: 1917821 - RNA, 19 nt, Homo sapiens
  misc_RNA (1)...(19): siRNA sense strand
gagggacuucucucauuca

SEQ ID NO: 1917822 - RNA, 19 nt, Homo sapiens
  misc_RNA (1)...(19): siRNA sense strand
agaccaggguuugcaaucu

SEQ ID NO: 1917823 - RNA, 19 nt, Homo sapiens
  misc_RNA (1)...(19): siRNA sense strand
acagucaaguggaaacaac

SEQ ID NO: 1917824 - RNA, 19 nt, Homo sapiens
  misc_RNA (1)...(19): siRNA sense strand
gggcacaguggaagcuaug

SEQ ID NO: 1917825 - RNA, 19 nt, Homo sapiens
  misc_RNA (1)...(19): siRNA sense strand
ggacaaucauuaccagaua

SEQ ID NO: 1917826 - RNA, 19 nt, Homo sapiens
  misc_RNA (1)...(19): siRNA sense strand
ugaagaagaugucagcaua

SEQ ID NO: 1917827 - RNA, 19 nt, Homo sapiens
  misc_RNA (1)...(19): siRNA sense strand
caacagcaguccaguacaa

SEQ ID NO: 1917828 - RNA, 19 nt, Homo sapiens
  misc_RNA (1)...(19): siRNA sense strand
cacaagaucuuaccauaga

SEQ ID NO: 1917829 - RNA, 19 nt, Homo sapiens
  misc_RNA (1)...(19): siRNA sense strand
ccugucaucucauuacuua

SEQ ID NO: 1917830 - RNA, 19 nt, Homo sapiens
  misc_RNA (1)...(19): siRNA sense strand
gauacuauguugaagaaga

SEQ ID NO: 1917831 - RNA, 19 nt, Homo sapiens
  misc_RNA (1)...(19): siRNA sense strand
cagaagauauuccuacaga

SEQ ID NO: 1917832 - RNA, 19 nt, Homo sapiens
  misc_RNA (1)...(19): siRNA sense strand
gaugagcaguccgaaauaa

SEQ ID NO: 1917833 - RNA, 19 nt, Homo sapiens
  misc_RNA (1)...(19): siRNA sense strand
gagccaaguucaacgguaa

SEQ ID NO: 1917834 - RNA, 19 nt, Homo sapiens
  misc_RNA (1)...(19): siRNA sense strand
ugaaagaggugguuuagag

SEQ ID NO: 1917835 - RNA, 19 nt, Homo sapiens
  misc_RNA (1)...(19): siRNA sense strand
caauguuccugacuguuua

SEQ ID NO: 1917836 - RNA, 19 nt, Homo sapiens
  misc_RNA (1)...(19): siRNA sense strand
gaagauauuccuacagaug

SEQ ID NO: 1917837 - RNA, 19 nt, Homo sapiens
  misc_RNA (1)...(19): siRNA sense strand
ugaacuaccuacagcuaua

SEQ ID NO: 1917838 - RNA, 19 nt, Homo sapiens
  misc_RNA (1)...(19): siRNA sense strand
uaucagcggugucacuuaa

SEQ ID NO: 1917839 - RNA, 19 nt, Homo sapiens
  misc_RNA (1)...(19): siRNA sense strand
cagaugaacugaaagacuu

SEQ ID NO: 1917840 - RNA, 19 nt, Homo sapiens
  misc_RNA (1)...(19): siRNA sense strand
gcacaaugauaugcacaaa

SEQ ID NO: 1917841 - RNA, 19 nt, Homo sapiens
  misc_RNA (1)...(19): siRNA sense strand
gugcuaaccuguacuaaca

SEQ ID NO: 1917842 - RNA, 19 nt, Homo sapiens
  misc_RNA (1)...(19): siRNA sense strand
gaagaagaugucagcauaa

SEQ ID NO: 1917843 - RNA, 19 nt, Homo sapiens
  misc_RNA (1)...(19): siRNA sense strand
gacaaucauuaccagauaa

SEQ ID NO: 1917844 - RNA, 19 nt, Homo sapiens
  misc_RNA (1)...(19): siRNA sense strand
ugguaaauguggacaaaua

SEQ ID NO: 1917845 - RNA, 19 nt, Homo sapiens
  misc_RNA (1)...(19): siRNA sense strand
gaaaauaucugugcaugug

SEQ ID NO: 1917846 - RNA, 19 nt, Homo sapiens
  misc_RNA (1)...(19): siRNA sense strand
gaucacagacgaaagcauu

SEQ ID NO: 1917847 - RNA, 19 nt, Homo sapiens
  misc_RNA (1)...(19): siRNA sense strand
aaaguuccguguccaaauu

SEQ ID NO: 1917848 - RNA, 19 nt, Homo sapiens
  misc_RNA (1)...(19): siRNA sense strand
gaaauagggccuucuaaac

SEQ ID NO: 1917849 - RNA, 19 nt, Homo sapiens
  misc_RNA (1)...(19): siRNA sense strand
guaggcagcuucaggaaca

SEQ ID NO: 1917850 - RNA, 19 nt, Homo sapiens
  misc_RNA (1)...(19): siRNA sense strand
ugacagcucccuccaguuu

SEQ ID NO: 1917851 - RNA, 19 nt, Homo sapiens
  misc_RNA (1)...(19): siRNA sense strand
gcagauuguucuaguucaa

SEQ ID NO: 1917852 - RNA, 19 nt, Homo sapiens
  misc_RNA (1)...(19): siRNA sense strand
acauaugucuagcugcuua

SEQ ID NO: 1917853 - RNA, 19 nt, Homo sapiens
  misc_RNA (1)...(19): siRNA sense strand
gaaaauuagugcagaaugu

SEQ ID NO: 1917854 - RNA, 19 nt, Homo sapiens
  misc_RNA (1)...(19): siRNA sense strand
cccaagaucugaccaugaa

SEQ ID NO: 1917855 - RNA, 19 nt, Homo sapiens
  misc_RNA (1)...(19): siRNA sense strand
gaggaccugucaucucauu

SEQ ID NO: 1917856 - RNA, 19 nt, Homo sapiens
  misc_RNA (1)...(19): siRNA sense strand
cacugacaaugaugaauua

SEQ ID NO: 1917857 - RNA, 19 nt, Homo sapiens
  misc_RNA (1)...(19): siRNA sense strand
ugugauagcuguggauuug

SEQ ID NO: 1917858 - RNA, 19 nt, Homo sapiens
  misc_RNA (1)...(19): siRNA sense strand
uaagagaacacuauacugu

SEQ ID NO: 1917859 - RNA, 19 nt, Homo sapiens
  misc_RNA (1)...(19): siRNA sense strand
gaaagaggugguuuagaga

SEQ ID NO: 1917860 - RNA, 19 nt, Homo sapiens
  misc_RNA (1)...(19): siRNA sense strand
ugaaauagggccuucuaaa

SEQ ID NO: 1917861 - RNA, 19 nt, Homo sapiens
  misc_RNA (1)...(19): siRNA sense strand
gaagagccauuuuauagau

SEQ ID NO: 1917862 - RNA, 19 nt, Homo sapiens
  misc_RNA (1)...(19): siRNA sense strand
ggaagagaauccugaugag

SEQ ID NO: 1917863 - RNA, 19 nt, Homo sapiens
  misc_RNA (1)...(19): siRNA sense strand
uuacuuagccaaacacauu

SEQ ID NO: 1917864 - RNA, 19 nt, Homo sapiens
  misc_RNA (1)...(19): siRNA sense strand
aguaagugcugaugaaaga

SEQ ID NO: 1917865 - RNA, 19 nt, Homo sapiens
  misc_RNA (1)...(19): siRNA sense strand
gcauaguacugcacaacug

SEQ ID NO: 1917866 - RNA, 19 nt, Homo sapiens
  misc_RNA (1)...(19): siRNA sense strand
aacacaagaucuuaccaua

SEQ ID NO: 1917867 - RNA, 19 nt, Homo sapiens
  misc_RNA (1)...(19): siRNA sense strand
aagaagaugucagcauaaa

SEQ ID NO: 1917868 - RNA, 19 nt, Homo sapiens
  misc_RNA (1)...(19): siRNA sense strand
gagaggaaaaggauuauua

SEQ ID NO: 1917869 - RNA, 19 nt, Homo sapiens
  misc_RNA (1)...(19): siRNA sense strand
gccuguagcuccuauuuua

SEQ ID NO: 1917870 - RNA, 19 nt, Homo sapiens
  misc_RNA (1)...(19): siRNA sense strand
cauggccaguggugaaaua

SEQ ID NO: 1917871 - RNA, 19 nt, Homo sapiens
  misc_RNA (1)...(19): siRNA sense strand
cugcuuagaucaagauaug

SEQ ID NO: 1917872 - RNA, 19 nt, Homo sapiens
  misc_RNA (1)...(19): siRNA sense strand
ugacugcuguauugcaauu

SEQ ID NO: 1917873 - RNA, 19 nt, Homo sapiens
  misc_RNA (1)...(19): siRNA sense strand
ggguaagaauguaugaaga

SEQ ID NO: 1917874 - RNA, 19 nt, Homo sapiens
  misc_RNA (1)...(19): siRNA sense strand
ggaagaaaaugaaagagau

SEQ ID NO: 1917875 - RNA, 19 nt, Homo sapiens
  misc_RNA (1)...(19): siRNA sense strand
uaacaacagcaguccagua

SEQ ID NO: 1917876 - RNA, 19 nt, Homo sapiens
  misc_RNA (1)...(19): siRNA sense strand
ccacugacaaugaugaauu

SEQ ID NO: 1917877 - RNA, 19 nt, Homo sapiens
  misc_RNA (1)...(19): siRNA sense strand
cuacagcuauacaauguuc

SEQ ID NO: 1917878 - RNA, 19 nt, Homo sapiens
  misc_RNA (1)...(19): siRNA sense strand
gcuaaacaaccaaagagaa

SEQ ID NO: 1917879 - RNA, 19 nt, Homo sapiens
  misc_RNA (1)...(19): siRNA sense strand
acaaugauaugcacaaagg

SEQ ID NO: 1917880 - RNA, 19 nt, Homo sapiens
  misc_RNA (1)...(19): siRNA sense strand
augaauggguuaggaaaua

SEQ ID NO: 1917881 - RNA, 19 nt, Homo sapiens
  misc_RNA (1)...(19): siRNA sense strand
gaggugguuuagagaauau

SEQ ID NO: 1917882 - RNA, 19 nt, Homo sapiens
  misc_RNA (1)...(19): siRNA sense strand
uagagaggcugaugaagag

SEQ ID NO: 1917883 - RNA, 19 nt, Homo sapiens
  misc_RNA (1)...(19): siRNA sense strand
gaucucauuuugcaguuua

SEQ ID NO: 1917884 - RNA, 19 nt, Homo sapiens
  misc_RNA (1)...(19): siRNA sense strand
cugcacagacggacaaaua

SEQ ID NO: 1917885 - RNA, 19 nt, Homo sapiens
  misc_RNA (1)...(19): siRNA sense strand
ggaugcagauuguucuagu

SEQ ID NO: 1917886 - RNA, 19 nt, Homo sapiens
  misc_RNA (1)...(19): siRNA sense strand
guagcacaguggagucuga

SEQ ID NO: 1917887 - RNA, 19 nt, Homo sapiens
  misc_RNA (1)...(19): siRNA sense strand
gaugcagauuguucuaguu

SEQ ID NO: 1917888 - RNA, 19 nt, Homo sapiens
  misc_RNA (1)...(19): siRNA sense strand
gagccacuauuugauguau

SEQ ID NO: 1917889 - RNA, 19 nt, Homo sapiens
  misc_RNA (1)...(19): siRNA sense strand
aaacagaacagcaaaauga

SEQ ID NO: 1917890 - RNA, 19 nt, Homo sapiens
  misc_RNA (1)...(19): siRNA sense strand
gaaagagaucacagacgaa

SEQ ID NO: 1917891 - RNA, 19 nt, Homo sapiens
  misc_RNA (1)...(19): siRNA sense strand
ucaggaacaugcucaacga

SEQ ID NO: 1917892 - RNA, 19 nt, Homo sapiens
  misc_RNA (1)...(19): siRNA sense strand
ugaauccacugacaaugau

SEQ ID NO: 1917893 - RNA, 19 nt, Homo sapiens
  misc_RNA (1)...(19): siRNA sense strand
uaauagagaggcugaugaa

SEQ ID NO: 1917894 - RNA, 19 nt, Homo sapiens
  misc_RNA (1)...(19): siRNA sense strand
gcacaguggagucugaaau

SEQ ID NO: 1917895 - RNA, 19 nt, Homo sapiens
  misc_RNA (1)...(19): siRNA sense strand
gcagcuaaacaaccaaaga

SEQ ID NO: 1917896 - RNA, 19 nt, Homo sapiens
  misc_RNA (1)...(19): siRNA sense strand
agaggugguuuagagaaua

SEQ ID NO: 1917897 - RNA, 19 nt, Homo sapiens
  misc_RNA (1)...(19): siRNA sense strand
gauggagccagaagauauu

SEQ ID NO: 1917898 - RNA, 19 nt, Homo sapiens
  misc_RNA (1)...(19): siRNA sense strand
cacaguggagucugaaaua

SEQ ID NO: 1917899 - RNA, 19 nt, Homo sapiens
  misc_RNA (1)...(19): siRNA sense strand
gccacuauuugauguaugu

SEQ ID NO: 1917900 - RNA, 19 nt, Homo sapiens
  misc_RNA (1)...(19): siRNA sense strand
cuaaaccuguggagaagug

SEQ ID NO: 1917901 - RNA, 19 nt, Homo sapiens
  misc_RNA (1)...(19): siRNA sense strand
ucacuuaagagaacacuau

SEQ ID NO: 1917902 - RNA, 19 nt, Homo sapiens
  misc_RNA (1)...(19): siRNA sense strand
gcacagacggacaaauaca

SEQ ID NO: 1917903 - RNA, 19 nt, Homo sapiens
  misc_RNA (1)...(19): siRNA sense strand
acaauguuccugacuguuu

SEQ ID NO: 1917904 - RNA, 19 nt, Homo sapiens
  misc_RNA (1)...(19): siRNA sense strand
aggaggaccugucaucuca

SEQ ID NO: 1917905 - RNA, 19 nt, Homo sapiens
  misc_RNA (1)...(19): siRNA sense strand
aaaccucgaaugucaguaa

SEQ ID NO: 1917906 - RNA, 19 nt, Homo sapiens
  misc_RNA (1)...(19): siRNA sense strand
guaaugaauccacugacaa

SEQ ID NO: 1917907 - RNA, 19 nt, Homo sapiens
  misc_RNA (1)...(19): siRNA sense strand
ugaaauagcaagcgaagag

SEQ ID NO: 1917908 - RNA, 19 nt, Homo sapiens
  misc_RNA (1)...(19): siRNA sense strand
gaaaagacaguaacaucaa

SEQ ID NO: 1917909 - RNA, 19 nt, Homo sapiens
  misc_RNA (1)...(19): siRNA sense strand
ccaggcugcugaugauuca

SEQ ID NO: 1917910 - RNA, 19 nt, Homo sapiens
  misc_RNA (1)...(19): siRNA sense strand
uggaagagaauccugauga

SEQ ID NO: 1917911 - RNA, 19 nt, Homo sapiens
  misc_RNA (1)...(19): siRNA sense strand
aaauggacuuggaagagaa

SEQ ID NO: 1917912 - RNA, 19 nt, Homo sapiens
  misc_RNA (1)...(19): siRNA sense strand
ugugagcuguguggacuua

SEQ ID NO: 1917913 - RNA, 19 nt, Homo sapiens
  misc_RNA (1)...(19): siRNA sense strand
gaugacauuuacuuucaag

SEQ ID NO: 1917914 - RNA, 19 nt, Homo sapiens
  misc_RNA (1)...(19): siRNA sense strand
gaaauagcaagcgaagaga

SEQ ID NO: 1917915 - RNA, 19 nt, Homo sapiens
  misc_RNA (1)...(19): siRNA sense strand
gguaagaauguaugaagau

SEQ ID NO: 1917916 - RNA, 19 nt, Homo sapiens
  misc_RNA (1)...(19): siRNA sense strand
cuaaacaaccaaagagaau

SEQ ID NO: 1917917 - RNA, 19 nt, Homo sapiens
  misc_RNA (1)...(19): siRNA sense strand
gccagaagauauuccuaca

SEQ ID NO: 1917918 - RNA, 19 nt, Homo sapiens
  misc_RNA (1)...(19): siRNA sense strand
gaagauacuguggcucgaa

SEQ ID NO: 1917919 - RNA, 19 nt, Homo sapiens
  misc_RNA (1)...(19): siRNA sense strand
caaguucaacgguaaauac

SEQ ID NO: 1917920 - RNA, 19 nt, Homo sapiens
  misc_RNA (1)...(19): siRNA sense strand
ggugaaauagggccuucua

SEQ ID NO: 1917921 - RNA, 19 nt, Homo sapiens
  misc_RNA (1)...(19): siRNA sense strand
caagaucugaccaugaaug

SEQ ID NO: 1917922 - RNA, 19 nt, Homo sapiens
  misc_RNA (1)...(19): siRNA sense strand
cuacagaugaacugaaaga

SEQ ID NO: 1917923 - RNA, 19 nt, Homo sapiens
  misc_RNA (1)...(19): siRNA sense strand
ucagcggugucacuuaaga

SEQ ID NO: 1917924 - RNA, 19 nt, Homo sapiens
  misc_RNA (1)...(19): siRNA sense strand
gaugaaagaggugguuuag

SEQ ID NO: 1917925 - RNA, 19 nt, Homo sapiens
  misc_RNA (1)...(19): siRNA sense strand
gcaaagaacauggacauua

SEQ ID NO: 1917926 - RNA, 19 nt, Homo sapiens
  misc_RNA (1)...(19): siRNA sense strand
caaagaacauggacauuau

SEQ ID NO: 1917927 - RNA, 19 nt, Homo sapiens
  misc_RNA (1)...(19): siRNA sense strand
caacacaguuccugcagua

SEQ ID NO: 1917928 - RNA, 19 nt, Homo sapiens
  misc_RNA (1)...(19): siRNA sense strand
ggaaugggcugaacguguu

SEQ ID NO: 1917929 - RNA, 19 nt, Homo sapiens
  misc_RNA (1)...(19): siRNA sense strand
gaaaggacccaaaguguga

SEQ ID NO: 1917930 - RNA, 19 nt, Homo sapiens
  misc_RNA (1)...(19): siRNA sense strand
gcacgucacugugguugua

SEQ ID NO: 1917931 - RNA, 19 nt, Homo sapiens
  misc_RNA (1)...(19): siRNA sense strand
gaacauggacauuaucguu

SEQ ID NO: 1917932 - RNA, 19 nt, Homo sapiens
  misc_RNA (1)...(19): siRNA sense strand
gaacguacauguguuugga

SEQ ID NO: 1917933 - RNA, 19 nt, Homo sapiens
  misc_RNA (1)...(19): siRNA sense strand
guacauugcucaaaagaua

SEQ ID NO: 1917934 - RNA, 19 nt, Homo sapiens
  misc_RNA (1)...(19): siRNA sense strand
ccaaggaacugcacagcaa

SEQ ID NO: 1917935 - RNA, 19 nt, Homo sapiens
  misc_RNA (1)...(19): siRNA sense strand
aaaggucacugcacaaaga

SEQ ID NO: 1917936 - RNA, 19 nt, Homo sapiens
  misc_RNA (1)...(19): siRNA sense strand
cugaagagcucccacaguu

SEQ ID NO: 1917937 - RNA, 19 nt, Homo sapiens
  misc_RNA (1)...(19): siRNA sense strand
gcagaacguacauguguuu

SEQ ID NO: 1917938 - RNA, 19 nt, Homo sapiens
  misc_RNA (1)...(19): siRNA sense strand
gaagagggagcgugacaga

SEQ ID NO: 1917939 - RNA, 19 nt, Homo sapiens
  misc_RNA (1)...(19): siRNA sense strand
gcccaucacuucuuugcuu

SEQ ID NO: 1917940 - RNA, 19 nt, Homo sapiens
  misc_RNA (1)...(19): siRNA sense strand
caucagcuauggacauuca

SEQ ID NO: 1917941 - RNA, 19 nt, Homo sapiens
  misc_RNA (1)...(19): siRNA sense strand
gcagugaaccgcaaugaca

SEQ ID NO: 1917942 - RNA, 19 nt, Homo sapiens
  misc_RNA (1)...(19): siRNA sense strand
gagggagcgugacagauau

SEQ ID NO: 1917943 - RNA, 19 nt, Homo sapiens
  misc_RNA (1)...(19): siRNA sense strand
ggagagacaggacuacgaa

SEQ ID NO: 1917944 - RNA, 19 nt, Homo sapiens
  misc_RNA (1)...(19): siRNA sense strand
agagggagcgugacagaua

SEQ ID NO: 1917945 - RNA, 19 nt, Homo sapiens
  misc_RNA (1)...(19): siRNA sense strand
ucacauaugcauuuaagga

SEQ ID NO: 1917946 - RNA, 19 nt, Homo sapiens
  misc_RNA (1)...(19): siRNA sense strand
cagauuccgucacagagaa

SEQ ID NO: 1917947 - RNA, 19 nt, Homo sapiens
  misc_RNA (1)...(19): siRNA sense strand
gaccgagccuucagcagau

SEQ ID NO: 1917948 - RNA, 19 nt, Homo sapiens
  misc_RNA (1)...(19): siRNA sense strand
ucacuucuuugcuuacuuc

SEQ ID NO: 1917949 - RNA, 19 nt, Homo sapiens
  misc_RNA (1)...(19): siRNA sense strand
gggagaagcacgucacugu

SEQ ID NO: 1917950 - RNA, 19 nt, Homo sapiens
  misc_RNA (1)...(19): siRNA sense strand
ggcaucagcuauggacauu

SEQ ID NO: 1917951 - RNA, 19 nt, Homo sapiens
  misc_RNA (1)...(19): siRNA sense strand
aaacagcgaugagcucgau

SEQ ID NO: 1917952 - RNA, 19 nt, Homo sapiens
  misc_RNA (1)...(19): siRNA sense strand
ggagcugugugcccucuuc

SEQ ID NO: 1917953 - RNA, 19 nt, Homo sapiens
  misc_RNA (1)...(19): siRNA sense strand
cacaggaagugcugccauu

SEQ ID NO: 1917954 - RNA, 19 nt, Homo sapiens
  misc_RNA (1)...(19): siRNA sense strand
gugugaaucugcccaagga

SEQ ID NO: 1917955 - RNA, 19 nt, Homo sapiens
  misc_RNA (1)...(19): siRNA sense strand
gcagauuccgucacagaga

SEQ ID NO: 1917956 - RNA, 19 nt, Homo sapiens
  misc_RNA (1)...(19): siRNA sense strand
gaacugugccuuggaaacu

SEQ ID NO: 1917957 - RNA, 19 nt, Homo sapiens
  misc_RNA (1)...(19): siRNA sense strand
cgucacauaugcauuuaag

SEQ ID NO: 1917958 - RNA, 19 nt, Homo sapiens
  misc_RNA (1)...(19): siRNA sense strand
acagagaagugguccaucu

SEQ ID NO: 1917959 - RNA, 19 nt, Homo sapiens
  misc_RNA (1)...(19): siRNA sense strand
ccaaaggucacugcacaaa

SEQ ID NO: 1917960 - RNA, 19 nt, Homo sapiens
  misc_RNA (1)...(19): siRNA sense strand
guggaacugugccuuggaa

SEQ ID NO: 1917961 - RNA, 19 nt, Homo sapiens
  misc_RNA (1)...(19): siRNA sense strand
uaaaucaaccuuggcauca

SEQ ID NO: 1917962 - RNA, 19 nt, Homo sapiens
  misc_RNA (1)...(19): siRNA sense strand
cccaucacuucuuugcuua

SEQ ID NO: 1917963 - RNA, 19 nt, Homo sapiens
  misc_RNA (1)...(19): siRNA sense strand
ucaagaagcacaaucugau

SEQ ID NO: 1917964 - RNA, 19 nt, Homo sapiens
  misc_RNA (1)...(19): siRNA sense strand
guccaucuguccagguuga

SEQ ID NO: 1917965 - RNA, 19 nt, Homo sapiens
  misc_RNA (1)...(19): siRNA sense strand
caagaagcacaaucugaug

SEQ ID NO: 1917966 - RNA, 19 nt, Homo sapiens
  misc_RNA (1)...(19): siRNA sense strand
ggcgucacauaugcauuua

SEQ ID NO: 1917967 - RNA, 19 nt, Homo sapiens
  misc_RNA (1)...(19): siRNA sense strand
gcugugugcccucuucauu

SEQ ID NO: 1917968 - RNA, 19 nt, Homo sapiens
  misc_RNA (1)...(19): siRNA sense strand
gugcugccauugagagugu

SEQ ID NO: 1917969 - RNA, 19 nt, Homo sapiens
  misc_RNA (1)...(19): siRNA sense strand
gggcaaagaacauggacau

SEQ ID NO: 1917970 - RNA, 19 nt, Homo sapiens
  misc_RNA (1)...(19): siRNA sense strand
ugaugagccugaauucgau

SEQ ID NO: 1917971 - RNA, 19 nt, Homo sapiens
  misc_RNA (1)...(19): siRNA sense strand
aagcagaacguacaugugu

SEQ ID NO: 1917972 - RNA, 19 nt, Homo sapiens
  misc_RNA (1)...(19): siRNA sense strand
gaagcagaacguacaugug

SEQ ID NO: 1917973 - RNA, 19 nt, Homo sapiens
  misc_RNA (1)...(19): siRNA sense strand
cacaguuccugcaguacuu

SEQ ID NO: 1917974 - RNA, 19 nt, Homo sapiens
  misc_RNA (1)...(19): siRNA sense strand
acauucaggugcccuacaa

SEQ ID NO: 1917975 - RNA, 19 nt, Homo sapiens
  misc_RNA (1)...(19): siRNA sense strand
cagcagauuccgucacaga

SEQ ID NO: 1917976 - RNA, 19 nt, Homo sapiens
  misc_RNA (1)...(19): siRNA sense strand
ggaagugcugccauugaga

SEQ ID NO: 1917977 - RNA, 19 nt, Homo sapiens
  misc_RNA (1)...(19): siRNA sense strand
gcacagcaagugggagaga

SEQ ID NO: 1917978 - RNA, 19 nt, Homo sapiens
  misc_RNA (1)...(19): siRNA sense strand
ucucugaggcuguuaaauc

SEQ ID NO: 1917979 - RNA, 19 nt, Homo sapiens
  misc_RNA (1)...(19): siRNA sense strand
gucaagaagcacaaucuga

SEQ ID NO: 1917980 - RNA, 19 nt, Homo sapiens
  misc_RNA (1)...(19): siRNA sense strand
caggaagugcugccauuga

SEQ ID NO: 1917981 - RNA, 19 nt, Homo sapiens
  misc_RNA (1)...(19): siRNA sense strand
ccucuucucuggcuaugca

SEQ ID NO: 1917982 - RNA, 19 nt, Homo sapiens
  misc_RNA (1)...(19): siRNA sense strand
caacaggggcugccgguaa

SEQ ID NO: 1917983 - RNA, 19 nt, Homo sapiens
  misc_RNA (1)...(19): siRNA sense strand
ggucacugcacaaagauuc

SEQ ID NO: 1917984 - RNA, 19 nt, Homo sapiens
  misc_RNA (1)...(19): siRNA sense strand
uggcgucacauaugcauuu

SEQ ID NO: 1917985 - RNA, 19 nt, Homo sapiens
  misc_RNA (1)...(19): siRNA sense strand
ucaggugcccuacaacaug

SEQ ID NO: 1917986 - RNA, 19 nt, Homo sapiens
  misc_RNA (1)...(19): siRNA sense strand
ugaagcagaacguacaugu

SEQ ID NO: 1917987 - RNA, 19 nt, Homo sapiens
  misc_RNA (1)...(19): siRNA sense strand
gaagcacgucacugugguu

SEQ ID NO: 1917988 - RNA, 19 nt, Homo sapiens
  misc_RNA (1)...(19): siRNA sense strand
ugacaagagcccucaugga

SEQ ID NO: 1917989 - RNA, 19 nt, Homo sapiens
  misc_RNA (1)...(19): siRNA sense strand
ccuugcagcuggguacauu

SEQ ID NO: 1917990 - RNA, 19 nt, Homo sapiens
  misc_RNA (1)...(19): siRNA sense strand
uggcauggcgucacauaug

SEQ ID NO: 1917991 - RNA, 19 nt, Homo sapiens
  misc_RNA (1)...(19): siRNA sense strand
ggacccaaagugugaaucu

SEQ ID NO: 1917992 - RNA, 19 nt, Homo sapiens
  misc_RNA (1)...(19): siRNA sense strand
aagaagcacaaucugauga

SEQ ID NO: 1917993 - RNA, 19 nt, Homo sapiens
  misc_RNA (1)...(19): siRNA sense strand
agacuguguuugccgaugu

SEQ ID NO: 1917994 - RNA, 19 nt, Homo sapiens
  misc_RNA (1)...(19): siRNA sense strand
gagccgaucaagacugugu

SEQ ID NO: 1917995 - RNA, 19 nt, Homo sapiens
  misc_RNA (1)...(19): siRNA sense strand
aaucugaugagccugaauu

SEQ ID NO: 1917996 - RNA, 19 nt, Homo sapiens
  misc_RNA (1)...(19): siRNA sense strand
uggcuguaauggaguguga

SEQ ID NO: 1917997 - RNA, 19 nt, Homo sapiens
  misc_RNA (1)...(19): siRNA sense strand
cucugaggcuguuaaauca

SEQ ID NO: 1917998 - RNA, 19 nt, Homo sapiens
  misc_RNA (1)...(19): siRNA sense strand
ucccacaguuggacagaga

SEQ ID NO: 1917999 - RNA, 19 nt, Homo sapiens
  misc_RNA (1)...(19): siRNA sense strand
ucauggagcaguuugaaag

SEQ ID NO: 1918000 - RNA, 19 nt, Homo sapiens
  misc_RNA (1)...(19): siRNA sense strand
gaaacugugggcccagaag

SEQ ID NO: 1918001 - RNA, 19 nt, Homo sapiens
  misc_RNA (1)...(19): siRNA sense strand
ugaagagcucccacaguug

SEQ ID NO: 1918002 - RNA, 19 nt, Homo sapiens
  misc_RNA (1)...(19): siRNA sense strand
ggaaacugugggcccagaa

SEQ ID NO: 1918003 - RNA, 19 nt, Homo sapiens
  misc_RNA (1)...(19): siRNA sense strand
gagagacaggacuacgaaa

SEQ ID NO: 1918004 - RNA, 19 nt, Homo sapiens
  misc_RNA (1)...(19): siRNA sense strand
cugaugagccugaauucga

SEQ ID NO: 1918005 - RNA, 19 nt, Homo sapiens
  misc_RNA (1)...(19): siRNA sense strand
gggagagacaggacuacga

SEQ ID NO: 1918006 - RNA, 19 nt, Homo sapiens
  misc_RNA (1)...(19): siRNA sense strand
ugcaguacuuccuggagaa

SEQ ID NO: 1918007 - RNA, 19 nt, Homo sapiens
  misc_RNA (1)...(19): siRNA sense strand
gacccaaagugugaaucug

SEQ ID NO: 1918008 - RNA, 19 nt, Homo sapiens
  misc_RNA (1)...(19): siRNA sense strand
gagcccucauggagcaguu

SEQ ID NO: 1918009 - RNA, 19 nt, Homo sapiens
  misc_RNA (1)...(19): siRNA sense strand
caaaggucacugcacaaag

SEQ ID NO: 1918010 - RNA, 19 nt, Homo sapiens
  misc_RNA (1)...(19): siRNA sense strand
acauggacauuaucguucu

SEQ ID NO: 1918011 - RNA, 19 nt, Homo sapiens
  misc_RNA (1)...(19): siRNA sense strand
cagaagagggagcgugaca

SEQ ID NO: 1918012 - RNA, 19 nt, Homo sapiens
  misc_RNA (1)...(19): siRNA sense strand
ggaacugugccuuggaaac

SEQ ID NO: 1918013 - RNA, 19 nt, Homo sapiens
  misc_RNA (1)...(19): siRNA sense strand
ucgaugagccgaucaagac

SEQ ID NO: 1918014 - RNA, 19 nt, Homo sapiens
  misc_RNA (1)...(19): siRNA sense strand
aggaagugcugccauugag

SEQ ID NO: 1918015 - RNA, 19 nt, Homo sapiens
  misc_RNA (1)...(19): siRNA sense strand
ugugugcccucuucauugg

SEQ ID NO: 1918016 - RNA, 19 nt, Homo sapiens
  misc_RNA (1)...(19): siRNA sense strand
ggagggaaacagcgaugag

SEQ ID NO: 1918017 - RNA, 19 nt, Homo sapiens
  misc_RNA (1)...(19): siRNA sense strand
gagccugaauucgaucaac

SEQ ID NO: 1918018 - RNA, 19 nt, Homo sapiens
  misc_RNA (1)...(19): siRNA sense strand
gagcacaccuggccaauca

SEQ ID NO: 1918019 - RNA, 19 nt, Homo sapiens
  misc_RNA (1)...(19): siRNA sense strand
gaaauacgagcaugccuuu

SEQ ID NO: 1918020 - RNA, 19 nt, Homo sapiens
  misc_RNA (1)...(19): siRNA sense strand
gcgccuaccucuucaauuc

SEQ ID NO: 1918021 - RNA, 19 nt, Homo sapiens
  misc_RNA (1)...(19): siRNA sense strand
gaaggaaaauucaucauug

SEQ ID NO: 1918022 - RNA, 19 nt, Homo sapiens
  misc_RNA (1)...(19): siRNA sense strand
gagagcagucagaaauaua

SEQ ID NO: 1918023 - RNA, 19 nt, Homo sapiens
  misc_RNA (1)...(19): siRNA sense strand
ugagagcagucagaaauau

SEQ ID NO: 1918024 - RNA, 19 nt, Homo sapiens
  misc_RNA (1)...(19): siRNA sense strand
ggacgcgccuaccucuuca

SEQ ID NO: 1918025 - RNA, 19 nt, Homo sapiens
  misc_RNA (1)...(19): siRNA sense strand
ucagaaauauaaggaagga

SEQ ID NO: 1918026 - RNA, 19 nt, Homo sapiens
  misc_RNA (1)...(19): siRNA sense strand
aagcguaucugccgaacug

SEQ ID NO: 1918027 - RNA, 19 nt, Homo sapiens
  misc_RNA (1)...(19): siRNA sense strand
gcagucagaaauauaagga

SEQ ID NO: 1918028 - RNA, 19 nt, Homo sapiens
  misc_RNA (1)...(19): siRNA sense strand
gcucauaugaucaaagaca

SEQ ID NO: 1918029 - RNA, 19 nt, Homo sapiens
  misc_RNA (1)...(19): siRNA sense strand
ggaaggaaaauucaucauu

SEQ ID NO: 1918030 - RNA, 19 nt, Homo sapiens
  misc_RNA (1)...(19): siRNA sense strand
agagcagucagaaauauaa

SEQ ID NO: 1918031 - RNA, 19 nt, Homo sapiens
  misc_RNA (1)...(19): siRNA sense strand
gcacaccuggccaaucaug

SEQ ID NO: 1918032 - RNA, 19 nt, Homo sapiens
  misc_RNA (1)...(19): siRNA sense strand
uugcucauaugaucaaaga

SEQ ID NO: 1918033 - RNA, 19 nt, Homo sapiens
  misc_RNA (1)...(19): siRNA sense strand
gcucaucuccaaguccuuu

SEQ ID NO: 1918034 - RNA, 19 nt, Homo sapiens
  misc_RNA (1)...(19): siRNA sense strand
aauacgagcaugccuuuga

SEQ ID NO: 1918035 - RNA, 19 nt, Homo sapiens
  misc_RNA (1)...(19): siRNA sense strand
ucaauuccguggugaacgu

SEQ ID NO: 1918036 - RNA, 19 nt, Homo sapiens
  misc_RNA (1)...(19): siRNA sense strand
agacaauggcugggaguaa

SEQ ID NO: 1918037 - RNA, 19 nt, Homo sapiens
  misc_RNA (1)...(19): siRNA sense strand
gcaugcgguugccgacauc

SEQ ID NO: 1918038 - RNA, 19 nt, Homo sapiens
  misc_RNA (1)...(19): siRNA sense strand
gaaaaugacaaaguccaaa

SEQ ID NO: 1918039 - RNA, 19 nt, Homo sapiens
  misc_RNA (1)...(19): siRNA sense strand
cgacaucuacugcgagaac

SEQ ID NO: 1918040 - RNA, 19 nt, Homo sapiens
  misc_RNA (1)...(19): siRNA sense strand
uuugagagcagucagaaau

SEQ ID NO: 1918041 - RNA, 19 nt, Homo sapiens
  misc_RNA (1)...(19): siRNA sense strand
cauaugaucaaagacaaug

SEQ ID NO: 1918042 - RNA, 19 nt, Homo sapiens
  misc_RNA (1)...(19): siRNA sense strand
cgaacugucaccgaacgua

SEQ ID NO: 1918043 - RNA, 19 nt, Homo sapiens
  misc_RNA (1)...(19): siRNA sense strand
uugagagcagucagaaaua

SEQ ID NO: 1918044 - RNA, 19 nt, Homo sapiens
  misc_RNA (1)...(19): siRNA sense strand
gacgagcucaucuccaagu

SEQ ID NO: 1918045 - RNA, 19 nt, Homo sapiens
  misc_RNA (1)...(19): siRNA sense strand
ggugguagcugaaguagaa

SEQ ID NO: 1918046 - RNA, 19 nt, Homo sapiens
  misc_RNA (1)...(19): siRNA sense strand
gccaccagcuguuucauua

SEQ ID NO: 1918047 - RNA, 19 nt, Homo sapiens
  misc_RNA (1)...(19): siRNA sense strand
ccaagaagcuuugugagaa

SEQ ID NO: 1918048 - RNA, 19 nt, Homo sapiens
  misc_RNA (1)...(19): siRNA sense strand
gcaaaggccuaacuagcaa

SEQ ID NO: 1918049 - RNA, 19 nt, Homo sapiens
  misc_RNA (1)...(19): siRNA sense strand
uaauacugcuguaccuuua

SEQ ID NO: 1918050 - RNA, 19 nt, Homo sapiens
  misc_RNA (1)...(19): siRNA sense strand
cagaggagcuaccagauga

SEQ ID NO: 1918051 - RNA, 19 nt, Homo sapiens
  misc_RNA (1)...(19): siRNA sense strand
acacaacccucugcuauaa

SEQ ID NO: 1918052 - RNA, 19 nt, Homo sapiens
  misc_RNA (1)...(19): siRNA sense strand
gaucguccauuauaucuuc

SEQ ID NO: 1918053 - RNA, 19 nt, Homo sapiens
  misc_RNA (1)...(19): siRNA sense strand
gacgagaucagccgacuua

SEQ ID NO: 1918054 - RNA, 19 nt, Homo sapiens
  misc_RNA (1)...(19): siRNA sense strand
gcugaauacucuagauuug

SEQ ID NO: 1918055 - RNA, 19 nt, Homo sapiens
  misc_RNA (1)...(19): siRNA sense strand
gagaucagccgacuuagug

SEQ ID NO: 1918056 - RNA, 19 nt, Homo sapiens
  misc_RNA (1)...(19): siRNA sense strand
ccaccagccuuuccaguga

SEQ ID NO: 1918057 - RNA, 19 nt, Homo sapiens
  misc_RNA (1)...(19): siRNA sense strand
gaucgaagccagcaaguuc

SEQ ID NO: 1918058 - RNA, 19 nt, Homo sapiens
  misc_RNA (1)...(19): siRNA sense strand
gcacagaagagacgauuca

SEQ ID NO: 1918059 - RNA, 19 nt, Homo sapiens
  misc_RNA (1)...(19): siRNA sense strand
ugaaacaggugccaaaguc

SEQ ID NO: 1918060 - RNA, 19 nt, Homo sapiens
  misc_RNA (1)...(19): siRNA sense strand
ggagguucaugacaacuga

SEQ ID NO: 1918061 - RNA, 19 nt, Homo sapiens
  misc_RNA (1)...(19): siRNA sense strand
cgagggagguucaugacaa

SEQ ID NO: 1918062 - RNA, 19 nt, Homo sapiens
  misc_RNA (1)...(19): siRNA sense strand
aaucuggacugcuuggaua

SEQ ID NO: 1918063 - RNA, 19 nt, Homo sapiens
  misc_RNA (1)...(19): siRNA sense strand
caagaagcuuugugagaau

SEQ ID NO: 1918064 - RNA, 19 nt, Homo sapiens
  misc_RNA (1)...(19): siRNA sense strand
gguccaggcugcuccuauu

SEQ ID NO: 1918065 - RNA, 19 nt, Homo sapiens
  misc_RNA (1)...(19): siRNA sense strand
guacaggcuucuccaguca

SEQ ID NO: 1918066 - RNA, 19 nt, Homo sapiens
  misc_RNA (1)...(19): siRNA sense strand
ccaacacaauacccgauaa

SEQ ID NO: 1918067 - RNA, 19 nt, Homo sapiens
  misc_RNA (1)...(19): siRNA sense strand
guaaaccggaucaaagaaa

SEQ ID NO: 1918068 - RNA, 19 nt, Homo sapiens
  misc_RNA (1)...(19): siRNA sense strand
ugaauacucuagauuugug

SEQ ID NO: 1918069 - RNA, 19 nt, Homo sapiens
  misc_RNA (1)...(19): siRNA sense strand
uaaaccggaucaaagaaau

SEQ ID NO: 1918070 - RNA, 19 nt, Homo sapiens
  misc_RNA (1)...(19): siRNA sense strand
caccacagcugcuccuuca

SEQ ID NO: 1918071 - RNA, 19 nt, Homo sapiens
  misc_RNA (1)...(19): siRNA sense strand
agucagggaugcauuaugu

SEQ ID NO: 1918072 - RNA, 19 nt, Homo sapiens
  misc_RNA (1)...(19): siRNA sense strand
ucaguugucuccagcuguu

SEQ ID NO: 1918073 - RNA, 19 nt, Homo sapiens
  misc_RNA (1)...(19): siRNA sense strand
gaacaugcuguacccacuu

SEQ ID NO: 1918074 - RNA, 19 nt, Homo sapiens
  misc_RNA (1)...(19): siRNA sense strand
gaaaccaacucagaaugcu

SEQ ID NO: 1918075 - RNA, 19 nt, Homo sapiens
  misc_RNA (1)...(19): siRNA sense strand
aaacagaguccgaugaaag

SEQ ID NO: 1918076 - RNA, 19 nt, Homo sapiens
  misc_RNA (1)...(19): siRNA sense strand
gcaaguuccucaggcaaag

SEQ ID NO: 1918077 - RNA, 19 nt, Homo sapiens
  misc_RNA (1)...(19): siRNA sense strand
gccaagaagcuuugugaga

SEQ ID NO: 1918078 - RNA, 19 nt, Homo sapiens
  misc_RNA (1)...(19): siRNA sense strand
ggcaaaggccuaacuagca

SEQ ID NO: 1918079 - RNA, 19 nt, Homo sapiens
  misc_RNA (1)...(19): siRNA sense strand
cacaauacccgauaacaca

SEQ ID NO: 1918080 - RNA, 19 nt, Homo sapiens
  misc_RNA (1)...(19): siRNA sense strand
guagcugaaguagaaauua

SEQ ID NO: 1918081 - RNA, 19 nt, Homo sapiens
  misc_RNA (1)...(19): siRNA sense strand
ucagauuaauacugcugua

SEQ ID NO: 1918082 - RNA, 19 nt, Homo sapiens
  misc_RNA (1)...(19): siRNA sense strand
gauugaaacaggugccaaa

SEQ ID NO: 1918083 - RNA, 19 nt, Homo sapiens
  misc_RNA (1)...(19): siRNA sense strand
ccagucagaaugagauuga

SEQ ID NO: 1918084 - RNA, 19 nt, Homo sapiens
  misc_RNA (1)...(19): siRNA sense strand
gagagggacaggcaguuga

SEQ ID NO: 1918085 - RNA, 19 nt, Homo sapiens
  misc_RNA (1)...(19): siRNA sense strand
gcaauaaaagcaaggauga

SEQ ID NO: 1918086 - RNA, 19 nt, Homo sapiens
  misc_RNA (1)...(19): siRNA sense strand
aggccuaacuagcaauaaa

SEQ ID NO: 1918087 - RNA, 19 nt, Homo sapiens
  misc_RNA (1)...(19): siRNA sense strand
cuacggaguaccaagcaua

SEQ ID NO: 1918088 - RNA, 19 nt, Homo sapiens
  misc_RNA (1)...(19): siRNA sense strand
cagcacccaucgcucaguu

SEQ ID NO: 1918089 - RNA, 19 nt, Homo sapiens
  misc_RNA (1)...(19): siRNA sense strand
gcuguaaaccggaucaaag

SEQ ID NO: 1918090 - RNA, 19 nt, Homo sapiens
  misc_RNA (1)...(19): siRNA sense strand
gggccagacacgggaauua

SEQ ID NO: 1918091 - RNA, 19 nt, Homo sapiens
  misc_RNA (1)...(19): siRNA sense strand
gaugcauuauguucaagau

SEQ ID NO: 1918092 - RNA, 19 nt, Homo sapiens
  misc_RNA (1)...(19): siRNA sense strand
aagaaauuaucaccaaugg

SEQ ID NO: 1918093 - RNA, 19 nt, Homo sapiens
  misc_RNA (1)...(19): siRNA sense strand
caagugcagccuccagcua

SEQ ID NO: 1918094 - RNA, 19 nt, Homo sapiens
  misc_RNA (1)...(19): siRNA sense strand
uuaauacugcuguaccuuu

SEQ ID NO: 1918095 - RNA, 19 nt, Homo sapiens
  misc_RNA (1)...(19): siRNA sense strand
caaagguucaggcugcauu

SEQ ID NO: 1918096 - RNA, 19 nt, Homo sapiens
  misc_RNA (1)...(19): siRNA sense strand
uacacaacccucugcuaua

SEQ ID NO: 1918097 - RNA, 19 nt, Homo sapiens
  misc_RNA (1)...(19): siRNA sense strand
gccaacacaauacccgaua

SEQ ID NO: 1918098 - RNA, 19 nt, Homo sapiens
  misc_RNA (1)...(19): siRNA sense strand
gagggagguucaugacaac

SEQ ID NO: 1918099 - RNA, 19 nt, Homo sapiens
  misc_RNA (1)...(19): siRNA sense strand
caaccaccauauuauccau

SEQ ID NO: 1918100 - RNA, 19 nt, Homo sapiens
  misc_RNA (1)...(19): siRNA sense strand
acaacccucugcuauaagu

SEQ ID NO: 1918101 - RNA, 19 nt, Homo sapiens
  misc_RNA (1)...(19): siRNA sense strand
gaagcuuugugagaaucuu

SEQ ID NO: 1918102 - RNA, 19 nt, Homo sapiens
  misc_RNA (1)...(19): siRNA sense strand
gagaagcuuuugaaccuau

SEQ ID NO: 1918103 - RNA, 19 nt, Homo sapiens
  misc_RNA (1)...(19): siRNA sense strand
auacacaacccucugcuau

SEQ ID NO: 1918104 - RNA, 19 nt, Homo sapiens
  misc_RNA (1)...(19): siRNA sense strand
gacccauucauaugacuaa

SEQ ID NO: 1918105 - RNA, 19 nt, Homo sapiens
  misc_RNA (1)...(19): siRNA sense strand
auuagcaccuggagucuug

SEQ ID NO: 1918106 - RNA, 19 nt, Homo sapiens
  misc_RNA (1)...(19): siRNA sense strand
cuccucaaccaccauauua

SEQ ID NO: 1918107 - RNA, 19 nt, Homo sapiens
  misc_RNA (1)...(19): siRNA sense strand
aaccggaucaaagaaauua

SEQ ID NO: 1918108 - RNA, 19 nt, Homo sapiens
  misc_RNA (1)...(19): siRNA sense strand
gaaucuggacugcuuggau

SEQ ID NO: 1918109 - RNA, 19 nt, Homo sapiens
  misc_RNA (1)...(19): siRNA sense strand
aaagggaagcugaaaccaa

SEQ ID NO: 1918110 - RNA, 19 nt, Homo sapiens
  misc_RNA (1)...(19): siRNA sense strand
gcugaaguagaaauuaaug

SEQ ID NO: 1918111 - RNA, 19 nt, Homo sapiens
  misc_RNA (1)...(19): siRNA sense strand
ugcagcacauucagauuga

SEQ ID NO: 1918112 - RNA, 19 nt, Homo sapiens
  misc_RNA (1)...(19): siRNA sense strand
gaaacaggugccaaagucu

SEQ ID NO: 1918113 - RNA, 19 nt, Homo sapiens
  misc_RNA (1)...(19): siRNA sense strand
cauggugagugugauauag

SEQ ID NO: 1918114 - RNA, 19 nt, Homo sapiens
  misc_RNA (1)...(19): siRNA sense strand
gguagcugaaguagaaauu

SEQ ID NO: 1918115 - RNA, 19 nt, Homo sapiens
  misc_RNA (1)...(19): siRNA sense strand
ggacccauucauaugacua

SEQ ID NO: 1918116 - RNA, 19 nt, Homo sapiens
  misc_RNA (1)...(19): siRNA sense strand
gauuaauacugcuguaccu

SEQ ID NO: 1918117 - RNA, 19 nt, Homo sapiens
  misc_RNA (1)...(19): siRNA sense strand
gcacccaucgcucaguugu

SEQ ID NO: 1918118 - RNA, 19 nt, Homo sapiens
  misc_RNA (1)...(19): siRNA sense strand
aaacaggugccaaagucuu

SEQ ID NO: 1918119 - RNA, 19 nt, Homo sapiens
  misc_RNA (1)...(19): siRNA sense strand
aacaugcuguacccacuuu

SEQ ID NO: 1918120 - RNA, 19 nt, Homo sapiens
  misc_RNA (1)...(19): siRNA sense strand
aaaggccuaacuagcaaua

SEQ ID NO: 1918121 - RNA, 19 nt, Homo sapiens
  misc_RNA (1)...(19): siRNA sense strand
ggagccauggugaguguga

SEQ ID NO: 1918122 - RNA, 19 nt, Homo sapiens
  misc_RNA (1)...(19): siRNA sense strand
acgggaaucuggacugcuu

SEQ ID NO: 1918123 - RNA, 19 nt, Homo sapiens
  misc_RNA (1)...(19): siRNA sense strand
gaugggugguccuuuuauu

SEQ ID NO: 1918124 - RNA, 19 nt, Homo sapiens
  misc_RNA (1)...(19): siRNA sense strand
caaggaugaccugguggua

SEQ ID NO: 1918125 - RNA, 19 nt, Homo sapiens
  misc_RNA (1)...(19): siRNA sense strand
guucaugacaacugaggaa

SEQ ID NO: 1918126 - RNA, 19 nt, Homo sapiens
  misc_RNA (1)...(19): siRNA sense strand
ccauggugagugugauaua

SEQ ID NO: 1918127 - RNA, 19 nt, Homo sapiens
  misc_RNA (1)...(19): siRNA sense strand
agaguccgaugaaaggaau

SEQ ID NO: 1918128 - RNA, 19 nt, Homo sapiens
  misc_RNA (1)...(19): siRNA sense strand
gaauacucuagauuuguga

SEQ ID NO: 1918129 - RNA, 19 nt, Homo sapiens
  misc_RNA (1)...(19): siRNA sense strand
gcuccuauuugcagcacau

SEQ ID NO: 1918130 - RNA, 19 nt, Homo sapiens
  misc_RNA (1)...(19): siRNA sense strand
ccagacacgggaauuagug

SEQ ID NO: 1918131 - RNA, 19 nt, Homo sapiens
  misc_RNA (1)...(19): siRNA sense strand
ucucacauguaggaacuug

SEQ ID NO: 1918132 - RNA, 19 nt, Homo sapiens
  misc_RNA (1)...(19): siRNA sense strand
ucagggaugcauuauguuc

SEQ ID NO: 1918133 - RNA, 19 nt, Homo sapiens
  misc_RNA (1)...(19): siRNA sense strand
aaaccggaucaaagaaauu

SEQ ID NO: 1918134 - RNA, 19 nt, Homo sapiens
  misc_RNA (1)...(19): siRNA sense strand
uuaccaggcuauacacaac

SEQ ID NO: 1918135 - RNA, 19 nt, Homo sapiens
  misc_RNA (1)...(19): siRNA sense strand
caucuggccgagaagcuuu

SEQ ID NO: 1918136 - RNA, 19 nt, Homo sapiens
  misc_RNA (1)...(19): siRNA sense strand
agggaugcauuauguucaa

SEQ ID NO: 1918137 - RNA, 19 nt, Homo sapiens
  misc_RNA (1)...(19): siRNA sense strand
uuuaauggugcaacaguaa

SEQ ID NO: 1918138 - RNA, 19 nt, Homo sapiens
  misc_RNA (1)...(19): siRNA sense strand
ggaugcauuauguucaaga

SEQ ID NO: 1918139 - RNA, 19 nt, Homo sapiens
  misc_RNA (1)...(19): siRNA sense strand
ggaucgaagccagcaaguu

SEQ ID NO: 1918140 - RNA, 19 nt, Homo sapiens
  misc_RNA (1)...(19): siRNA sense strand
cgagaucagccgacuuagu

SEQ ID NO: 1918141 - RNA, 19 nt, Homo sapiens
  misc_RNA (1)...(19): siRNA sense strand
ccaggcugcuccuauuugc

SEQ ID NO: 1918142 - RNA, 19 nt, Homo sapiens
  misc_RNA (1)...(19): siRNA sense strand
ccucaaccaccauauuauc

SEQ ID NO: 1918143 - RNA, 19 nt, Homo sapiens
  misc_RNA (1)...(19): siRNA sense strand
gagagagggacaggcaguu

SEQ ID NO: 1918144 - RNA, 19 nt, Homo sapiens
  misc_RNA (1)...(19): siRNA sense strand
acaggcuucuccagucaga

SEQ ID NO: 1918145 - RNA, 19 nt, Homo sapiens
  misc_RNA (1)...(19): siRNA sense strand
gagagaaacugccauauaa

SEQ ID NO: 1918146 - RNA, 19 nt, Homo sapiens
  misc_RNA (1)...(19): siRNA sense strand
gcaaaucgcucucagauga

SEQ ID NO: 1918147 - RNA, 19 nt, Homo sapiens
  misc_RNA (1)...(19): siRNA sense strand
gaacauagauugugcagau

SEQ ID NO: 1918148 - RNA, 19 nt, Homo sapiens
  misc_RNA (1)...(19): siRNA sense strand
gaauauaccugugaagaua

SEQ ID NO: 1918149 - RNA, 19 nt, Homo sapiens
  misc_RNA (1)...(19): siRNA sense strand
agacaacucugaugaauua

SEQ ID NO: 1918150 - RNA, 19 nt, Homo sapiens
  misc_RNA (1)...(19): siRNA sense strand
gaaagagacuguccugaaa

SEQ ID NO: 1918151 - RNA, 19 nt, Homo sapiens
  misc_RNA (1)...(19): siRNA sense strand
caagauagcugaugaauac

SEQ ID NO: 1918152 - RNA, 19 nt, Homo sapiens
  misc_RNA (1)...(19): siRNA sense strand
gaacaaggauaauugauuc

SEQ ID NO: 1918153 - RNA, 19 nt, Homo sapiens
  misc_RNA (1)...(19): siRNA sense strand
gaagaugaauccaaucaaa

SEQ ID NO: 1918154 - RNA, 19 nt, Homo sapiens
  misc_RNA (1)...(19): siRNA sense strand
ggacugauauucacucauu

SEQ ID NO: 1918155 - RNA, 19 nt, Homo sapiens
  misc_RNA (1)...(19): siRNA sense strand
aaacaucucugcaugauaa

SEQ ID NO: 1918156 - RNA, 19 nt, Homo sapiens
  misc_RNA (1)...(19): siRNA sense strand
ggacagauguuguagaaga

SEQ ID NO: 1918157 - RNA, 19 nt, Homo sapiens
  misc_RNA (1)...(19): siRNA sense strand
guaaacugcuucaaucaua

SEQ ID NO: 1918158 - RNA, 19 nt, Homo sapiens
  misc_RNA (1)...(19): siRNA sense strand
gagaagaauucaucuauug

SEQ ID NO: 1918159 - RNA, 19 nt, Homo sapiens
  misc_RNA (1)...(19): siRNA sense strand
gugguaagcugacauauaa

SEQ ID NO: 1918160 - RNA, 19 nt, Homo sapiens
  misc_RNA (1)...(19): siRNA sense strand
uaacagggauggauguaua

SEQ ID NO: 1918161 - RNA, 19 nt, Homo sapiens
  misc_RNA (1)...(19): siRNA sense strand
ccuaagaacuacacuaaua

SEQ ID NO: 1918162 - RNA, 19 nt, Homo sapiens
  misc_RNA (1)...(19): siRNA sense strand
ggaggaaccugcauuguga

SEQ ID NO: 1918163 - RNA, 19 nt, Homo sapiens
  misc_RNA (1)...(19): siRNA sense strand
ccaguaaacuuaagaugua

SEQ ID NO: 1918164 - RNA, 19 nt, Homo sapiens
  misc_RNA (1)...(19): siRNA sense strand
gaagaucacugugguggua

SEQ ID NO: 1918165 - RNA, 19 nt, Homo sapiens
  misc_RNA (1)...(19): siRNA sense strand
gacaauaugugccgaguaa

SEQ ID NO: 1918166 - RNA, 19 nt, Homo sapiens
  misc_RNA (1)...(19): siRNA sense strand
caagagauauucagaguau

SEQ ID NO: 1918167 - RNA, 19 nt, Homo sapiens
  misc_RNA (1)...(19): siRNA sense strand
gaucaugguuucaacuuaa

SEQ ID NO: 1918168 - RNA, 19 nt, Homo sapiens
  misc_RNA (1)...(19): siRNA sense strand
gaaaagaacugcaauaaca

SEQ ID NO: 1918169 - RNA, 19 nt, Homo sapiens
  misc_RNA (1)...(19): siRNA sense strand
ggaggaagaugaaauagau

SEQ ID NO: 1918170 - RNA, 19 nt, Homo sapiens
  misc_RNA (1)...(19): siRNA sense strand
gaauagcuccuacugaaua

SEQ ID NO: 1918171 - RNA, 19 nt, Homo sapiens
  misc_RNA (1)...(19): siRNA sense strand
ccacagacauguacauuga

SEQ ID NO: 1918172 - RNA, 19 nt, Homo sapiens
  misc_RNA (1)...(19): siRNA sense strand
ggacaaaugcccuguauug

SEQ ID NO: 1918173 - RNA, 19 nt, Homo sapiens
  misc_RNA (1)...(19): siRNA sense strand
gaggauggauucgaaauaa

SEQ ID NO: 1918174 - RNA, 19 nt, Homo sapiens
  misc_RNA (1)...(19): siRNA sense strand
gcaccagacucuuaacaaa

SEQ ID NO: 1918175 - RNA, 19 nt, Homo sapiens
  misc_RNA (1)...(19): siRNA sense strand
gaagaggaauugucuguuc

SEQ ID NO: 1918176 - RNA, 19 nt, Homo sapiens
  misc_RNA (1)...(19): siRNA sense strand
gcaacaaggugacaauaug

SEQ ID NO: 1918177 - RNA, 19 nt, Homo sapiens
  misc_RNA (1)...(19): siRNA sense strand
gaaauggcaucuugugaau

SEQ ID NO: 1918178 - RNA, 19 nt, Homo sapiens
  misc_RNA (1)...(19): siRNA sense strand
cagaauagcuccuacugaa

SEQ ID NO: 1918179 - RNA, 19 nt, Homo sapiens
  misc_RNA (1)...(19): siRNA sense strand
gagcaaggaugcagaauag

SEQ ID NO: 1918180 - RNA, 19 nt, Homo sapiens
  misc_RNA (1)...(19): siRNA sense strand
ccucacagaugcagaaaua

SEQ ID NO: 1918181 - RNA, 19 nt, Homo sapiens
  misc_RNA (1)...(19): siRNA sense strand
guacaaguguugauccuuu

SEQ ID NO: 1918182 - RNA, 19 nt, Homo sapiens
  misc_RNA (1)...(19): siRNA sense strand
caugugaaauuguggauua

SEQ ID NO: 1918183 - RNA, 19 nt, Homo sapiens
  misc_RNA (1)...(19): siRNA sense strand
guaagcaacucugucuuua

SEQ ID NO: 1918184 - RNA, 19 nt, Homo sapiens
  misc_RNA (1)...(19): siRNA sense strand
ggauuuagcaugcgaauuu

SEQ ID NO: 1918185 - RNA, 19 nt, Homo sapiens
  misc_RNA (1)...(19): siRNA sense strand
gauaugcgauggucagaaa

SEQ ID NO: 1918186 - RNA, 19 nt, Homo sapiens
  misc_RNA (1)...(19): siRNA sense strand
gagaaaccauccugaaaga

SEQ ID NO: 1918187 - RNA, 19 nt, Homo sapiens
  misc_RNA (1)...(19): siRNA sense strand
gaaagaggaggaaauauau

SEQ ID NO: 1918188 - RNA, 19 nt, Homo sapiens
  misc_RNA (1)...(19): siRNA sense strand
gaagagaacugugaaagag

SEQ ID NO: 1918189 - RNA, 19 nt, Homo sapiens
  misc_RNA (1)...(19): siRNA sense strand
gaaaugugauggccaugaa

SEQ ID NO: 1918190 - RNA, 19 nt, Homo sapiens
  misc_RNA (1)...(19): siRNA sense strand
caaaugcccuguauuggaa

SEQ ID NO: 1918191 - RNA, 19 nt, Homo sapiens
  misc_RNA (1)...(19): siRNA sense strand
guaauugcguuccugauuu

SEQ ID NO: 1918192 - RNA, 19 nt, Homo sapiens
  misc_RNA (1)...(19): siRNA sense strand
gauaugauuuguuggauug

SEQ ID NO: 1918193 - RNA, 19 nt, Homo sapiens
  misc_RNA (1)...(19): siRNA sense strand
ggagaaagaugugaaguca

SEQ ID NO: 1918194 - RNA, 19 nt, Homo sapiens
  misc_RNA (1)...(19): siRNA sense strand
gacagacucucacugauuu

SEQ ID NO: 1918195 - RNA, 19 nt, Homo sapiens
  misc_RNA (1)...(19): siRNA sense strand
gaacagucaugcaacaguu

SEQ ID NO: 1918196 - RNA, 19 nt, Homo sapiens
  misc_RNA (1)...(19): siRNA sense strand
gauaaucaguucagauguu

SEQ ID NO: 1918197 - RNA, 19 nt, Homo sapiens
  misc_RNA (1)...(19): siRNA sense strand
gugaagaccuuaaugaaug

SEQ ID NO: 1918198 - RNA, 19 nt, Homo sapiens
  misc_RNA (1)...(19): siRNA sense strand
aaacagggauuaaacaaug

SEQ ID NO: 1918199 - RNA, 19 nt, Homo sapiens
  misc_RNA (1)...(19): siRNA sense strand
gggagaagcuguaaagauc

SEQ ID NO: 1918200 - RNA, 19 nt, Homo sapiens
  misc_RNA (1)...(19): siRNA sense strand
ggaaggaucauauaaaugu

SEQ ID NO: 1918201 - RNA, 19 nt, Homo sapiens
  misc_RNA (1)...(19): siRNA sense strand
caaaaugacugcagugaua

SEQ ID NO: 1918202 - RNA, 19 nt, Homo sapiens
  misc_RNA (1)...(19): siRNA sense strand
gaagcaauguggauauguu

SEQ ID NO: 1918203 - RNA, 19 nt, Homo sapiens
  misc_RNA (1)...(19): siRNA sense strand
aagaagaccugcuaugaaa

SEQ ID NO: 1918204 - RNA, 19 nt, Homo sapiens
  misc_RNA (1)...(19): siRNA sense strand
gaucauaucagcacaagaa

SEQ ID NO: 1918205 - RNA, 19 nt, Homo sapiens
  misc_RNA (1)...(19): siRNA sense strand
gaaacugccauauaaauga

SEQ ID NO: 1918206 - RNA, 19 nt, Homo sapiens
  misc_RNA (1)...(19): siRNA sense strand
gaaguaaucgagucaauga

SEQ ID NO: 1918207 - RNA, 19 nt, Homo sapiens
  misc_RNA (1)...(19): siRNA sense strand
cauuugaccuucagauaua

SEQ ID NO: 1918208 - RNA, 19 nt, Homo sapiens
  misc_RNA (1)...(19): siRNA sense strand
ucacagauauccaggugua

SEQ ID NO: 1918209 - RNA, 19 nt, Homo sapiens
  misc_RNA (1)...(19): siRNA sense strand
gaauuaaagugcccaguuc

SEQ ID NO: 1918210 - RNA, 19 nt, Homo sapiens
  misc_RNA (1)...(19): siRNA sense strand
caacagaugugugacuaaa

SEQ ID NO: 1918211 - RNA, 19 nt, Homo sapiens
  misc_RNA (1)...(19): siRNA sense strand
gaaaggacgcccaggaauu

SEQ ID NO: 1918212 - RNA, 19 nt, Homo sapiens
  misc_RNA (1)...(19): siRNA sense strand
ccuaaacucugauuugaaa

SEQ ID NO: 1918213 - RNA, 19 nt, Homo sapiens
  misc_RNA (1)...(19): siRNA sense strand
gaagacaaccuauuaucaa

SEQ ID NO: 1918214 - RNA, 19 nt, Homo sapiens
  misc_RNA (1)...(19): siRNA sense strand
ugaaagaggaggaaauaua

SEQ ID NO: 1918215 - RNA, 19 nt, Homo sapiens
  misc_RNA (1)...(19): siRNA sense strand
gcagugugauggagacuuu

SEQ ID NO: 1918216 - RNA, 19 nt, Homo sapiens
  misc_RNA (1)...(19): siRNA sense strand
gaugggcggugucuucuaa

SEQ ID NO: 1918217 - RNA, 19 nt, Homo sapiens
  misc_RNA (1)...(19): siRNA sense strand
caaguuaugugauggagaa

SEQ ID NO: 1918218 - RNA, 19 nt, Homo sapiens
  misc_RNA (1)...(19): siRNA sense strand
uauuugggcuucagauuua

SEQ ID NO: 1918219 - RNA, 19 nt, Homo sapiens
  misc_RNA (1)...(19): siRNA sense strand
gcaggaggauuaacagaug

SEQ ID NO: 1918220 - RNA, 19 nt, Homo sapiens
  misc_RNA (1)...(19): siRNA sense strand
gauaaccaccuuaguaauu

SEQ ID NO: 1918221 - RNA, 19 nt, Homo sapiens
  misc_RNA (1)...(19): siRNA sense strand
cuagauggcucccuaagaa

SEQ ID NO: 1918222 - RNA, 19 nt, Homo sapiens
  misc_RNA (1)...(19): siRNA sense strand
ggaaacauauacuggauag

SEQ ID NO: 1918223 - RNA, 19 nt, Homo sapiens
  misc_RNA (1)...(19): siRNA sense strand
ucacaauccuaaagcaaua

SEQ ID NO: 1918224 - RNA, 19 nt, Homo sapiens
  misc_RNA (1)...(19): siRNA sense strand
gaccggaucuuuguuugua

SEQ ID NO: 1918225 - RNA, 19 nt, Homo sapiens
  misc_RNA (1)...(19): siRNA sense strand
gauccuggcuuuaugauag

SEQ ID NO: 1918226 - RNA, 19 nt, Homo sapiens
  misc_RNA (1)...(19): siRNA sense strand
ggaggaagaugcauuuuaa

SEQ ID NO: 1918227 - RNA, 19 nt, Homo sapiens
  misc_RNA (1)...(19): siRNA sense strand
ggagaacccuaugcuauug

SEQ ID NO: 1918228 - RNA, 19 nt, Homo sapiens
  misc_RNA (1)...(19): siRNA sense strand
gccaacagcugaauuguca

SEQ ID NO: 1918229 - RNA, 19 nt, Homo sapiens
  misc_RNA (1)...(19): siRNA sense strand
caacugcaccagacucuua

SEQ ID NO: 1918230 - RNA, 19 nt, Homo sapiens
  misc_RNA (1)...(19): siRNA sense strand
ccagaaauguaucccagua

SEQ ID NO: 1918231 - RNA, 19 nt, Homo sapiens
  misc_RNA (1)...(19): siRNA sense strand
gaagugacauuaagguagu

SEQ ID NO: 1918232 - RNA, 19 nt, Homo sapiens
  misc_RNA (1)...(19): siRNA sense strand
gaacaacauccaaguauca

SEQ ID NO: 1918233 - RNA, 19 nt, Homo sapiens
  misc_RNA (1)...(19): siRNA sense strand
ggaacaaacaugauagaaa

SEQ ID NO: 1918234 - RNA, 19 nt, Homo sapiens
  misc_RNA (1)...(19): siRNA sense strand
gggacaacuugcacauuua

SEQ ID NO: 1918235 - RNA, 19 nt, Homo sapiens
  misc_RNA (1)...(19): siRNA sense strand
ggaauggacuugaauacca

SEQ ID NO: 1918236 - RNA, 19 nt, Homo sapiens
  misc_RNA (1)...(19): siRNA sense strand
ucacacaucugucuacuca

SEQ ID NO: 1918237 - RNA, 19 nt, Homo sapiens
  misc_RNA (1)...(19): siRNA sense strand
caagaugaaugugcuguuu

SEQ ID NO: 1918238 - RNA, 19 nt, Homo sapiens
  misc_RNA (1)...(19): siRNA sense strand
gaauuucuuugcuugcuaa

SEQ ID NO: 1918239 - RNA, 19 nt, Homo sapiens
  misc_RNA (1)...(19): siRNA sense strand
ggauggacgugaugaauuc

SEQ ID NO: 1918240 - RNA, 19 nt, Homo sapiens
  misc_RNA (1)...(19): siRNA sense strand
gaugcacacuuuggaaaua

SEQ ID NO: 1918241 - RNA, 19 nt, Homo sapiens
  misc_RNA (1)...(19): siRNA sense strand
gaacuggguuagaaacugu

SEQ ID NO: 1918242 - RNA, 19 nt, Homo sapiens
  misc_RNA (1)...(19): siRNA sense strand
uagaccaccuauacuauua

SEQ ID NO: 1918243 - RNA, 19 nt, Homo sapiens
  misc_RNA (1)...(19): siRNA sense strand
gcaaacaguggcuugauuu

SEQ ID NO: 1918244 - RNA, 19 nt, Homo sapiens
  misc_RNA (1)...(19): siRNA sense strand
gagguacucuaucaacgua

SEQ ID NO: 1918245 - RNA, 19 nt, Homo sapiens
  misc_RNA (1)...(19): siRNA sense strand
ggaaguggaucaaacagua

SEQ ID NO: 1918246 - RNA, 19 nt, Homo sapiens
  misc_RNA (1)...(19): siRNA sense strand
gagaguaucuugcagaaau

SEQ ID NO: 1918247 - RNA, 19 nt, Homo sapiens
  misc_RNA (1)...(19): siRNA sense strand
ggcagaagguuauguaauu

SEQ ID NO: 1918248 - RNA, 19 nt, Homo sapiens
  misc_RNA (1)...(19): siRNA sense strand
ggagaaauacuguuacauu

SEQ ID NO: 1918249 - RNA, 19 nt, Homo sapiens
  misc_RNA (1)...(19): siRNA sense strand
gauacgacauggaaucauu

SEQ ID NO: 1918250 - RNA, 19 nt, Homo sapiens
  misc_RNA (1)...(19): siRNA sense strand
ucaaggaauuugccaagua

SEQ ID NO: 1918251 - RNA, 19 nt, Homo sapiens
  misc_RNA (1)...(19): siRNA sense strand
gacagaaccuccacucaau

SEQ ID NO: 1918252 - RNA, 19 nt, Homo sapiens
  misc_RNA (1)...(19): siRNA sense strand
gcagagggauuugaagaga

SEQ ID NO: 1918253 - RNA, 19 nt, Homo sapiens
  misc_RNA (1)...(19): siRNA sense strand
gcagaagguuauguaauug

SEQ ID NO: 1918254 - RNA, 19 nt, Homo sapiens
  misc_RNA (1)...(19): siRNA sense strand
caaggaauuugccaaguau

SEQ ID NO: 1918255 - RNA, 19 nt, Homo sapiens
  misc_RNA (1)...(19): siRNA sense strand
gaaggacuaugaagaguac

SEQ ID NO: 1918256 - RNA, 19 nt, Homo sapiens
  misc_RNA (1)...(19): siRNA sense strand
ucucagauguuguugauga

SEQ ID NO: 1918257 - RNA, 19 nt, Homo sapiens
  misc_RNA (1)...(19): siRNA sense strand
ucaaugcgaucaaccagaa

SEQ ID NO: 1918258 - RNA, 19 nt, Homo sapiens
  misc_RNA (1)...(19): siRNA sense strand
gaagaaguuuguuauagac

SEQ ID NO: 1918259 - RNA, 19 nt, Homo sapiens
  misc_RNA (1)...(19): siRNA sense strand
cagaagaaguuuguuauag

SEQ ID NO: 1918260 - RNA, 19 nt, Homo sapiens
  misc_RNA (1)...(19): siRNA sense strand
gacauggaaucauugaaga

SEQ ID NO: 1918261 - RNA, 19 nt, Homo sapiens
  misc_RNA (1)...(19): siRNA sense strand
gaaguuuguuauagacguu

SEQ ID NO: 1918262 - RNA, 19 nt, Homo sapiens
  misc_RNA (1)...(19): siRNA sense strand
ccugggaccugaaauauuc

SEQ ID NO: 1918263 - RNA, 19 nt, Homo sapiens
  misc_RNA (1)...(19): siRNA sense strand
agacugggaucuuauggaa

SEQ ID NO: 1918264 - RNA, 19 nt, Homo sapiens
  misc_RNA (1)...(19): siRNA sense strand
ccagaagaaguuuguuaua

SEQ ID NO: 1918265 - RNA, 19 nt, Homo sapiens
  misc_RNA (1)...(19): siRNA sense strand
gauugcagguagagauauu

SEQ ID NO: 1918266 - RNA, 19 nt, Homo sapiens
  misc_RNA (1)...(19): siRNA sense strand
ccaagaaggacuaugaaga

SEQ ID NO: 1918267 - RNA, 19 nt, Homo sapiens
  misc_RNA (1)...(19): siRNA sense strand
cuacauaugcuacaaagug

SEQ ID NO: 1918268 - RNA, 19 nt, Homo sapiens
  misc_RNA (1)...(19): siRNA sense strand
agacguugguuacgaaaga

SEQ ID NO: 1918269 - RNA, 19 nt, Homo sapiens
  misc_RNA (1)...(19): siRNA sense strand
cagagaguaucuugcagaa

SEQ ID NO: 1918270 - RNA, 19 nt, Homo sapiens
  misc_RNA (1)...(19): siRNA sense strand
caaaagccauuaaggagaa

SEQ ID NO: 1918271 - RNA, 19 nt, Homo sapiens
  misc_RNA (1)...(19): siRNA sense strand
guaccaggacucuacauug

SEQ ID NO: 1918272 - RNA, 19 nt, Homo sapiens
  misc_RNA (1)...(19): siRNA sense strand
caagaaggacuaugaagag

SEQ ID NO: 1918273 - RNA, 19 nt, Homo sapiens
  misc_RNA (1)...(19): siRNA sense strand
gaagcugcaucaaacacau

SEQ ID NO: 1918274 - RNA, 19 nt, Homo sapiens
  misc_RNA (1)...(19): siRNA sense strand
ugacagaaccuccacucaa

SEQ ID NO: 1918275 - RNA, 19 nt, Homo sapiens
  misc_RNA (1)...(19): siRNA sense strand
uauagacguugguuacgaa

SEQ ID NO: 1918276 - RNA, 19 nt, Homo sapiens
  misc_RNA (1)...(19): siRNA sense strand
gauaaaccuacauaugcua

SEQ ID NO: 1918277 - RNA, 19 nt, Homo sapiens
  misc_RNA (1)...(19): siRNA sense strand
guaauuggaagcugcauca

SEQ ID NO: 1918278 - RNA, 19 nt, Homo sapiens
  misc_RNA (1)...(19): siRNA sense strand
gaagccaucgauaaaccua

SEQ ID NO: 1918279 - RNA, 19 nt, Homo sapiens
  misc_RNA (1)...(19): siRNA sense strand
guauaagaaugucguacuc

SEQ ID NO: 1918280 - RNA, 19 nt, Homo sapiens
  misc_RNA (1)...(19): siRNA sense strand
aaacagagaguaucuugca

SEQ ID NO: 1918281 - RNA, 19 nt, Homo sapiens
  misc_RNA (1)...(19): siRNA sense strand
gaaaacagagaguaucuug

SEQ ID NO: 1918282 - RNA, 19 nt, Homo sapiens
  misc_RNA (1)...(19): siRNA sense strand
cgauauagucaaggaauuu

SEQ ID NO: 1918283 - RNA, 19 nt, Homo sapiens
  misc_RNA (1)...(19): siRNA sense strand
acaccaagaaggacuauga

SEQ ID NO: 1918284 - RNA, 19 nt, Homo sapiens
  misc_RNA (1)...(19): siRNA sense strand
gcuacaaaguggccgauac

SEQ ID NO: 1918285 - RNA, 19 nt, Homo sapiens
  misc_RNA (1)...(19): siRNA sense strand
gaauuugccaaguaugaug

SEQ ID NO: 1918286 - RNA, 19 nt, Homo sapiens
  misc_RNA (1)...(19): siRNA sense strand
ucaaacacaucccgauugc

SEQ ID NO: 1918287 - RNA, 19 nt, Homo sapiens
  misc_RNA (1)...(19): siRNA sense strand
uaacguaccaggacucuac

SEQ ID NO: 1918288 - RNA, 19 nt, Homo sapiens
  misc_RNA (1)...(19): siRNA sense strand
gaguaucuugcagaaauua

SEQ ID NO: 1918289 - RNA, 19 nt, Homo sapiens
  misc_RNA (1)...(19): siRNA sense strand
cagagagucagcaaaggua

SEQ ID NO: 1918290 - RNA, 19 nt, Homo sapiens
  misc_RNA (1)...(19): siRNA sense strand
gaaccugaggaccauuauu

SEQ ID NO: 1918291 - RNA, 19 nt, Homo sapiens
  misc_RNA (1)...(19): siRNA sense strand
uaaauaucuucgagcugaa

SEQ ID NO: 1918292 - RNA, 19 nt, Homo sapiens
  misc_RNA (1)...(19): siRNA sense strand
agauguuguugaugaagua

SEQ ID NO: 1918293 - RNA, 19 nt, Homo sapiens
  misc_RNA (1)...(19): siRNA sense strand
aaccugaggaccauuauuu

SEQ ID NO: 1918294 - RNA, 19 nt, Homo sapiens
  misc_RNA (1)...(19): siRNA sense strand
cgacauggaaucauugaag

SEQ ID NO: 1918295 - RNA, 19 nt, Homo sapiens
  misc_RNA (1)...(19): siRNA sense strand
ccgauauagucaaggaauu

SEQ ID NO: 1918296 - RNA, 19 nt, Homo sapiens
  misc_RNA (1)...(19): siRNA sense strand
caucaaacacaucccgauu

SEQ ID NO: 1918297 - RNA, 19 nt, Homo sapiens
  misc_RNA (1)...(19): siRNA sense strand
cgauaaaccuacauaugcu

SEQ ID NO: 1918298 - RNA, 19 nt, Homo sapiens
  misc_RNA (1)...(19): siRNA sense strand
gaucaaccagaagaaguuu

SEQ ID NO: 1918299 - RNA, 19 nt, Homo sapiens
  misc_RNA (1)...(19): siRNA sense strand
aaagguaguugaccaagcu

SEQ ID NO: 1918300 - RNA, 19 nt, Homo sapiens
  misc_RNA (1)...(19): siRNA sense strand
aaaccuacauaugcuacaa

SEQ ID NO: 1918301 - RNA, 19 nt, Homo sapiens
  misc_RNA (1)...(19): siRNA sense strand
aaccagaagaaguuuguua

SEQ ID NO: 1918302 - RNA, 19 nt, Homo sapiens
  misc_RNA (1)...(19): siRNA sense strand
caucagagagucagcaaag

SEQ ID NO: 1918303 - RNA, 19 nt, Homo sapiens
  misc_RNA (1)...(19): siRNA sense strand
uaacggggauagucauuga

SEQ ID NO: 1918304 - RNA, 19 nt, Homo sapiens
  misc_RNA (1)...(19): siRNA sense strand
acagaaccuccacucaaua

SEQ ID NO: 1918305 - RNA, 19 nt, Homo sapiens
  misc_RNA (1)...(19): siRNA sense strand
guucauuauuccuucaugu

SEQ ID NO: 1918306 - RNA, 19 nt, Homo sapiens
  misc_RNA (1)...(19): siRNA sense strand
gauauagucaaggaauuug

SEQ ID NO: 1918307 - RNA, 19 nt, Homo sapiens
  misc_RNA (1)...(19): siRNA sense strand
agaguaucuugcagaaauu

SEQ ID NO: 1918308 - RNA, 19 nt, Homo sapiens
  misc_RNA (1)...(19): siRNA sense strand
gggaucuuauggaaagguu

SEQ ID NO: 1918309 - RNA, 19 nt, Homo sapiens
  misc_RNA (1)...(19): siRNA sense strand
agaagguuauguaauugga

SEQ ID NO: 1918310 - RNA, 19 nt, Homo sapiens
  misc_RNA (1)...(19): siRNA sense strand
gaagguuauguaauuggaa

SEQ ID NO: 1918311 - RNA, 19 nt, Homo sapiens
  misc_RNA (1)...(19): siRNA sense strand
agaaggacuaugaagagua

SEQ ID NO: 1918312 - RNA, 19 nt, Homo sapiens
  misc_RNA (1)...(19): siRNA sense strand
ccaccauguucagggauuu

SEQ ID NO: 1918313 - RNA, 19 nt, Homo sapiens
  misc_RNA (1)...(19): siRNA sense strand
aaggagaaauacuguuaca

SEQ ID NO: 1918314 - RNA, 19 nt, Homo sapiens
  misc_RNA (1)...(19): siRNA sense strand
ggaagcugcaucaaacaca

SEQ ID NO: 1918315 - RNA, 19 nt, Homo sapiens
  misc_RNA (1)...(19): siRNA sense strand
gaucuuauggaaagguuca

SEQ ID NO: 1918316 - RNA, 19 nt, Homo sapiens
  misc_RNA (1)...(19): siRNA sense strand
guucauggagcaagugguu

SEQ ID NO: 1918317 - RNA, 19 nt, Homo sapiens
  misc_RNA (1)...(19): siRNA sense strand
acugggaucuuauggaaag

SEQ ID NO: 1918318 - RNA, 19 nt, Homo sapiens
  misc_RNA (1)...(19): siRNA sense strand
uaagaaugucguacucuca

SEQ ID NO: 1918319 - RNA, 19 nt, Homo sapiens
  misc_RNA (1)...(19): siRNA sense strand
ggaauuugccaaguaugau

SEQ ID NO: 1918320 - RNA, 19 nt, Homo sapiens
  misc_RNA (1)...(19): siRNA sense strand
gcagguagagauauuacgu

SEQ ID NO: 1918321 - RNA, 19 nt, Homo sapiens
  misc_RNA (1)...(19): siRNA sense strand
cgacaagugggugaacgua

SEQ ID NO: 1918322 - RNA, 19 nt, Homo sapiens
  misc_RNA (1)...(19): siRNA sense strand
uuggacaucucgacaagug

SEQ ID NO: 1918323 - RNA, 19 nt, Homo sapiens
  misc_RNA (1)...(19): siRNA sense strand
uaccaggacucuacauugc

SEQ ID NO: 1918324 - RNA, 19 nt, Homo sapiens
  misc_RNA (1)...(19): siRNA sense strand
agguagagauauuacguau

SEQ ID NO: 1918325 - RNA, 19 nt, Homo sapiens
  misc_RNA (1)...(19): siRNA sense strand
cagauguuguugaugaagu

SEQ ID NO: 1918326 - RNA, 19 nt, Homo sapiens
  misc_RNA (1)...(19): siRNA sense strand
cgaucaaccagaagaaguu

SEQ ID NO: 1918327 - RNA, 19 nt, Homo sapiens
  misc_RNA (1)...(19): siRNA sense strand
ccacucaauacaccagaaa

SEQ ID NO: 1918328 - RNA, 19 nt, Homo sapiens
  misc_RNA (1)...(19): siRNA sense strand
agagggauuugaagagagu

SEQ ID NO: 1918329 - RNA, 19 nt, Homo sapiens
  misc_RNA (1)...(19): siRNA sense strand
ucaaacaguacacggguau

SEQ ID NO: 1918330 - RNA, 19 nt, Homo sapiens
  misc_RNA (1)...(19): siRNA sense strand
ucgauaaaccuacauaugc

SEQ ID NO: 1918331 - RNA, 19 nt, Homo sapiens
  misc_RNA (1)...(19): siRNA sense strand
gacucuacauugcaguuca

SEQ ID NO: 1918332 - RNA, 19 nt, Homo sapiens
  misc_RNA (1)...(19): siRNA sense strand
ccauuaaggagaaauacug

SEQ ID NO: 1918333 - RNA, 19 nt, Homo sapiens
  misc_RNA (1)...(19): siRNA sense strand
ccgauugcagguagagaua

SEQ ID NO: 1918334 - RNA, 19 nt, Homo sapiens
  misc_RNA (1)...(19): siRNA sense strand
ggacuguggcaccggguau

SEQ ID NO: 1918335 - RNA, 19 nt, Homo sapiens
  misc_RNA (1)...(19): siRNA sense strand
ccaguucauuauuccuuca

SEQ ID NO: 1918336 - RNA, 19 nt, Homo sapiens
  misc_RNA (1)...(19): siRNA sense strand
cagguagagauauuacgua

SEQ ID NO: 1918337 - RNA, 19 nt, Homo sapiens
  misc_RNA (1)...(19): siRNA sense strand
gaaccuccacucaauacac

SEQ ID NO: 1918338 - RNA, 19 nt, Homo sapiens
  misc_RNA (1)...(19): siRNA sense strand
gaaguggaucaaacaguac

SEQ ID NO: 1918339 - RNA, 19 nt, Homo sapiens
  misc_RNA (1)...(19): siRNA sense strand
gcgaucaaccagaagaagu

SEQ ID NO: 1918340 - RNA, 19 nt, Homo sapiens
  misc_RNA (1)...(19): siRNA sense strand
guugaugaaguaauacaga

SEQ ID NO: 1918341 - RNA, 19 nt, Homo sapiens
  misc_RNA (1)...(19): siRNA sense strand
gguagagauauuacguauu

SEQ ID NO: 1918342 - RNA, 19 nt, Homo sapiens
  misc_RNA (1)...(19): siRNA sense strand
aagaaggacuaugaagagu

SEQ ID NO: 1918343 - RNA, 19 nt, Homo sapiens
  misc_RNA (1)...(19): siRNA sense strand
uuauagacguugguuacga

SEQ ID NO: 1918344 - RNA, 19 nt, Homo sapiens
  misc_RNA (1)...(19): siRNA sense strand
aaacaguacacggguauca

SEQ ID NO: 1918345 - RNA, 19 nt, Homo sapiens
  misc_RNA (1)...(19): siRNA sense strand
gggaagcgcuuuaccaaua

SEQ ID NO: 1918346 - RNA, 19 nt, Homo sapiens
  misc_RNA (1)...(19): siRNA sense strand
ggaagcgcuuuaccaauaa

SEQ ID NO: 1918347 - RNA, 19 nt, Homo sapiens
  misc_RNA (1)...(19): siRNA sense strand
gaagaagcacgaugucuga

SEQ ID NO: 1918348 - RNA, 19 nt, Homo sapiens
  misc_RNA (1)...(19): siRNA sense strand
aauaagcccuaucugacuu

SEQ ID NO: 1918349 - RNA, 19 nt, Homo sapiens
  misc_RNA (1)...(19): siRNA sense strand
gcgggaagcgcuuuaccaa

SEQ ID NO: 1918350 - RNA, 19 nt, Homo sapiens
  misc_RNA (1)...(19): siRNA sense strand
gaagcgcuuuaccaauaag

SEQ ID NO: 1918351 - RNA, 19 nt, Homo sapiens
  misc_RNA (1)...(19): siRNA sense strand
gcaaggccuuccgccacaa

SEQ ID NO: 1918352 - RNA, 19 nt, Homo sapiens
  misc_RNA (1)...(19): siRNA sense strand
ccagcuaguugcccacaag

SEQ ID NO: 1918353 - RNA, 19 nt, Homo sapiens
  misc_RNA (1)...(19): siRNA sense strand
caauaagcccuaucugacu

SEQ ID NO: 1918354 - RNA, 19 nt, Homo sapiens
  misc_RNA (1)...(19): siRNA sense strand
aacccaaccugcugucuca

SEQ ID NO: 1918355 - RNA, 19 nt, Homo sapiens
  misc_RNA (1)...(19): siRNA sense strand
gaguguggccgucgcuuuc

SEQ ID NO: 1918356 - RNA, 19 nt, Homo sapiens
  misc_RNA (1)...(19): siRNA sense strand
ccagaaguccaaccucauc

SEQ ID NO: 1918357 - RNA, 19 nt, Homo sapiens
  misc_RNA (1)...(19): siRNA sense strand
agacgcuucuggcgacgaa

SEQ ID NO: 1918358 - RNA, 19 nt, Homo sapiens
  misc_RNA (1)...(19): siRNA sense strand
ccacaagcgggugcacgua

SEQ ID NO: 1918359 - RNA, 19 nt, Homo sapiens
  misc_RNA (1)...(19): siRNA sense strand
accaauaagcccuaucuga

SEQ ID NO: 1918360 - RNA, 19 nt, Homo sapiens
  misc_RNA (1)...(19): siRNA sense strand
ccagugggaccagcuaguu

SEQ ID NO: 1918361 - RNA, 19 nt, Homo sapiens
  misc_RNA (1)...(19): siRNA sense strand
gcaagcgcuuccggcacaa

SEQ ID NO: 1918362 - RNA, 19 nt, Homo sapiens
  misc_RNA (1)...(19): siRNA sense strand
cuucugcugugccaucugu

SEQ ID NO: 1918363 - RNA, 19 nt, Homo sapiens
  misc_RNA (1)...(19): siRNA sense strand
ugaguguggccgucgcuuu

SEQ ID NO: 1918364 - RNA, 19 nt, Homo sapiens
  misc_RNA (1)...(19): siRNA sense strand
gggaagcgcuuuaccaaua

SEQ ID NO: 1918365 - RNA, 19 nt, Homo sapiens
  misc_RNA (1)...(19): siRNA sense strand
ggaagcgcuuuaccaauaa

SEQ ID NO: 1918366 - RNA, 19 nt, Homo sapiens
  misc_RNA (1)...(19): siRNA sense strand
gaagaagcacgaugucuga

SEQ ID NO: 1918367 - RNA, 19 nt, Homo sapiens
  misc_RNA (1)...(19): siRNA sense strand
aauaagcccuaucugacuu

SEQ ID NO: 1918368 - RNA, 19 nt, Homo sapiens
  misc_RNA (1)...(19): siRNA sense strand
gcgggaagcgcuuuaccaa

SEQ ID NO: 1918369 - RNA, 19 nt, Homo sapiens
  misc_RNA (1)...(19): siRNA sense strand
gaagcgcuuuaccaauaag

SEQ ID NO: 1918370 - RNA, 19 nt, Homo sapiens
  misc_RNA (1)...(19): siRNA sense strand
gcaaggccuuccgccacaa

SEQ ID NO: 1918371 - RNA, 19 nt, Homo sapiens
  misc_RNA (1)...(19): siRNA sense strand
ccagcuaguugcccacaag

SEQ ID NO: 1918372 - RNA, 19 nt, Homo sapiens
  misc_RNA (1)...(19): siRNA sense strand
caauaagcccuaucugacu

SEQ ID NO: 1918373 - RNA, 19 nt, Homo sapiens
  misc_RNA (1)...(19): siRNA sense strand
aacccaaccugcugucuca

SEQ ID NO: 1918374 - RNA, 19 nt, Homo sapiens
  misc_RNA (1)...(19): siRNA sense strand
gaguguggccgucgcuuuc

SEQ ID NO: 1918375 - RNA, 19 nt, Homo sapiens
  misc_RNA (1)...(19): siRNA sense strand
ccagaaguccaaccucauc

SEQ ID NO: 1918376 - RNA, 19 nt, Homo sapiens
  misc_RNA (1)...(19): siRNA sense strand
agacgcuucuggcgacgaa

SEQ ID NO: 1918377 - RNA, 19 nt, Homo sapiens
  misc_RNA (1)...(19): siRNA sense strand
ccacaagcgggugcacgua

SEQ ID NO: 1918378 - RNA, 19 nt, Homo sapiens
  misc_RNA (1)...(19): siRNA sense strand
accaauaagcccuaucuga

SEQ ID NO: 1918379 - RNA, 19 nt, Homo sapiens
  misc_RNA (1)...(19): siRNA sense strand
ccagugggaccagcuaguu

SEQ ID NO: 1918380 - RNA, 19 nt, Homo sapiens
  misc_RNA (1)...(19): siRNA sense strand
gcaagcgcuuccggcacaa

SEQ ID NO: 1918381 - RNA, 19 nt, Homo sapiens
  misc_RNA (1)...(19): siRNA sense strand
cuucugcugugccaucugu

SEQ ID NO: 1918382 - RNA, 19 nt, Homo sapiens
  misc_RNA (1)...(19): siRNA sense strand
ugaguguggccgucgcuuu

SEQ ID NO: 1918383 - RNA, 19 nt, Homo sapiens
  misc_RNA (1)...(19): siRNA sense strand
gcaagauccugaugaaauu

SEQ ID NO: 1918384 - RNA, 19 nt, Homo sapiens
  misc_RNA (1)...(19): siRNA sense strand
caagagauguguuaaagga

SEQ ID NO: 1918385 - RNA, 19 nt, Homo sapiens
  misc_RNA (1)...(19): siRNA sense strand
caaaguaacuccggacauu

SEQ ID NO: 1918386 - RNA, 19 nt, Homo sapiens
  misc_RNA (1)...(19): siRNA sense strand
ggaagagggugauuuagau

SEQ ID NO: 1918387 - RNA, 19 nt, Homo sapiens
  misc_RNA (1)...(19): siRNA sense strand
ggaggaagaggaccuauuu

SEQ ID NO: 1918388 - RNA, 19 nt, Homo sapiens
  misc_RNA (1)...(19): siRNA sense strand
gaaaggagagcccgucauu

SEQ ID NO: 1918389 - RNA, 19 nt, Homo sapiens
  misc_RNA (1)...(19): siRNA sense strand
ggacggucgugauggauaa

SEQ ID NO: 1918390 - RNA, 19 nt, Homo sapiens
  misc_RNA (1)...(19): siRNA sense strand
aagagaagauugagaagaa

SEQ ID NO: 1918391 - RNA, 19 nt, Homo sapiens
  misc_RNA (1)...(19): siRNA sense strand
caagaaggcgguuaaagaa

SEQ ID NO: 1918392 - RNA, 19 nt, Homo sapiens
  misc_RNA (1)...(19): siRNA sense strand
aaacugaaguggcgaauag

SEQ ID NO: 1918393 - RNA, 19 nt, Homo sapiens
  misc_RNA (1)...(19): siRNA sense strand
gaagaggaccuauuugaca

SEQ ID NO: 1918394 - RNA, 19 nt, Homo sapiens
  misc_RNA (1)...(19): siRNA sense strand
ugagggcgcugaucagaaa

SEQ ID NO: 1918395 - RNA, 19 nt, Homo sapiens
  misc_RNA (1)...(19): siRNA sense strand
uggagaaccugcagaauau

SEQ ID NO: 1918396 - RNA, 19 nt, Homo sapiens
  misc_RNA (1)...(19): siRNA sense strand
acaaaucggucuagaguca

SEQ ID NO: 1918397 - RNA, 19 nt, Homo sapiens
  misc_RNA (1)...(19): siRNA sense strand
gaaagcguguggcaaugga

SEQ ID NO: 1918398 - RNA, 19 nt, Homo sapiens
  misc_RNA (1)...(19): siRNA sense strand
ucaagaaggcgguuaaaga

SEQ ID NO: 1918399 - RNA, 19 nt, Homo sapiens
  misc_RNA (1)...(19): siRNA sense strand
uuaaaggacugaagaugga

SEQ ID NO: 1918400 - RNA, 19 nt, Homo sapiens
  misc_RNA (1)...(19): siRNA sense strand
gaggaaggcacagaagaua

SEQ ID NO: 1918401 - RNA, 19 nt, Homo sapiens
  misc_RNA (1)...(19): siRNA sense strand
agaaggcgguuaaagaaga

SEQ ID NO: 1918402 - RNA, 19 nt, Homo sapiens
  misc_RNA (1)...(19): siRNA sense strand
ggaggaaguuugauuuuga

SEQ ID NO: 1918403 - RNA, 19 nt, Homo sapiens
  misc_RNA (1)...(19): siRNA sense strand
ugaaauuggcaucgaguua

SEQ ID NO: 1918404 - RNA, 19 nt, Homo sapiens
  misc_RNA (1)...(19): siRNA sense strand
gccaagagauguguuaaag

SEQ ID NO: 1918405 - RNA, 19 nt, Homo sapiens
  misc_RNA (1)...(19): siRNA sense strand
gaagagggugauuuagauu

SEQ ID NO: 1918406 - RNA, 19 nt, Homo sapiens
  misc_RNA (1)...(19): siRNA sense strand
gaagagaagauugagaaga

SEQ ID NO: 1918407 - RNA, 19 nt, Homo sapiens
  misc_RNA (1)...(19): siRNA sense strand
acaagcagguccaaagaga

SEQ ID NO: 1918408 - RNA, 19 nt, Homo sapiens
  misc_RNA (1)...(19): siRNA sense strand
ggaaggcacagaagauaau

SEQ ID NO: 1918409 - RNA, 19 nt, Homo sapiens
  misc_RNA (1)...(19): siRNA sense strand
ggucuagagucaccaaauc

SEQ ID NO: 1918410 - RNA, 19 nt, Homo sapiens
  misc_RNA (1)...(19): siRNA sense strand
ggcaagauccugaugaaau

SEQ ID NO: 1918411 - RNA, 19 nt, Homo sapiens
  misc_RNA (1)...(19): siRNA sense strand
cugaagacauuaagaagga

SEQ ID NO: 1918412 - RNA, 19 nt, Homo sapiens
  misc_RNA (1)...(19): siRNA sense strand
caucagccaucuccacaga

SEQ ID NO: 1918413 - RNA, 19 nt, Homo sapiens
  misc_RNA (1)...(19): siRNA sense strand
gggccaaagugguaacgaa

SEQ ID NO: 1918414 - RNA, 19 nt, Homo sapiens
  misc_RNA (1)...(19): siRNA sense strand
ccacagaacugagcugcau

SEQ ID NO: 1918415 - RNA, 19 nt, Homo sapiens
  misc_RNA (1)...(19): siRNA sense strand
uaagaacacuuuggaaacu

SEQ ID NO: 1918416 - RNA, 19 nt, Homo sapiens
  misc_RNA (1)...(19): siRNA sense strand
gaaauuggcaucgaguuag

SEQ ID NO: 1918417 - RNA, 19 nt, Homo sapiens
  misc_RNA (1)...(19): siRNA sense strand
caacaagagcguccugaug

SEQ ID NO: 1918418 - RNA, 19 nt, Homo sapiens
  misc_RNA (1)...(19): siRNA sense strand
caagaagucagccaagaga

SEQ ID NO: 1918419 - RNA, 19 nt, Homo sapiens
  misc_RNA (1)...(19): siRNA sense strand
gaaacugaaguggcgaaua

SEQ ID NO: 1918420 - RNA, 19 nt, Homo sapiens
  misc_RNA (1)...(19): siRNA sense strand
gaagacgggaggaaguuug

SEQ ID NO: 1918421 - RNA, 19 nt, Homo sapiens
  misc_RNA (1)...(19): siRNA sense strand
ggaggaaggcacagaagau

SEQ ID NO: 1918422 - RNA, 19 nt, Homo sapiens
  misc_RNA (1)...(19): siRNA sense strand
gacaagaggcugagugaag

SEQ ID NO: 1918423 - RNA, 19 nt, Homo sapiens
  misc_RNA (1)...(19): siRNA sense strand
gacgagaugaugccuauug

SEQ ID NO: 1918424 - RNA, 19 nt, Homo sapiens
  misc_RNA (1)...(19): siRNA sense strand
gaacgggagauccgcgaaa

SEQ ID NO: 1918425 - RNA, 19 nt, Homo sapiens
  misc_RNA (1)...(19): siRNA sense strand
aaagagagaagcuccaaga

SEQ ID NO: 1918426 - RNA, 19 nt, Homo sapiens
  misc_RNA (1)...(19): siRNA sense strand
guaaaucugagccaguaaa

SEQ ID NO: 1918427 - RNA, 19 nt, Homo sapiens
  misc_RNA (1)...(19): siRNA sense strand
cuggagaaccugcagaaua

SEQ ID NO: 1918428 - RNA, 19 nt, Homo sapiens
  misc_RNA (1)...(19): siRNA sense strand
ggacaugagugugcuagac

SEQ ID NO: 1918429 - RNA, 19 nt, Homo sapiens
  misc_RNA (1)...(19): siRNA sense strand
caucuugucguuugauaaa

SEQ ID NO: 1918430 - RNA, 19 nt, Homo sapiens
  misc_RNA (1)...(19): siRNA sense strand
aaaugagccugcugggaaa

SEQ ID NO: 1918431 - RNA, 19 nt, Homo sapiens
  misc_RNA (1)...(19): siRNA sense strand
gcaaagaagacgggaggaa

SEQ ID NO: 1918432 - RNA, 19 nt, Homo sapiens
  misc_RNA (1)...(19): siRNA sense strand
gaagucagccaagagaugu

SEQ ID NO: 1918433 - RNA, 19 nt, Homo sapiens
  misc_RNA (1)...(19): siRNA sense strand
agagggugauuuagauuug

SEQ ID NO: 1918434 - RNA, 19 nt, Homo sapiens
  misc_RNA (1)...(19): siRNA sense strand
cgugauggauaaaucgaaa

SEQ ID NO: 1918435 - RNA, 19 nt, Homo sapiens
  misc_RNA (1)...(19): siRNA sense strand
gcaaguaugggaagguugu

SEQ ID NO: 1918436 - RNA, 19 nt, Homo sapiens
  misc_RNA (1)...(19): siRNA sense strand
ccagagauagcaaagaaga

SEQ ID NO: 1918437 - RNA, 19 nt, Homo sapiens
  misc_RNA (1)...(19): siRNA sense strand
gcgagaggacggacuguga

SEQ ID NO: 1918438 - RNA, 19 nt, Homo sapiens
  misc_RNA (1)...(19): siRNA sense strand
gggcagcacuauggagaug

SEQ ID NO: 1918439 - RNA, 19 nt, Homo sapiens
  misc_RNA (1)...(19): siRNA sense strand
gacgaaugaucuccguaga

SEQ ID NO: 1918440 - RNA, 19 nt, Homo sapiens
  misc_RNA (1)...(19): siRNA sense strand
agccagagauagcaaagaa

SEQ ID NO: 1918441 - RNA, 19 nt, Homo sapiens
  misc_RNA (1)...(19): siRNA sense strand
gccagaaaaugagaaaaua

SEQ ID NO: 1918442 - RNA, 19 nt, Homo sapiens
  misc_RNA (1)...(19): siRNA sense strand
ccgacgagaugaugccuau

SEQ ID NO: 1918443 - RNA, 19 nt, Homo sapiens
  misc_RNA (1)...(19): siRNA sense strand
ccacaagcagguccaaaga

SEQ ID NO: 1918444 - RNA, 19 nt, Homo sapiens
  misc_RNA (1)...(19): siRNA sense strand
gaaggcgguuaaagaagag

SEQ ID NO: 1918445 - RNA, 19 nt, Homo sapiens
  misc_RNA (1)...(19): siRNA sense strand
ccuguuagcgguagugaaa

SEQ ID NO: 1918446 - RNA, 19 nt, Homo sapiens
  misc_RNA (1)...(19): siRNA sense strand
caagucagaaagcaaagaa

SEQ ID NO: 1918447 - RNA, 19 nt, Homo sapiens
  misc_RNA (1)...(19): siRNA sense strand
cuacaaaucggucuagagu

SEQ ID NO: 1918448 - RNA, 19 nt, Homo sapiens
  misc_RNA (1)...(19): siRNA sense strand
cagcaaguaugggaagguu

SEQ ID NO: 1918449 - RNA, 19 nt, Homo sapiens
  misc_RNA (1)...(19): siRNA sense strand
ucaagaaccuuuucagcaa

SEQ ID NO: 1918450 - RNA, 19 nt, Homo sapiens
  misc_RNA (1)...(19): siRNA sense strand
cuacggaucucaagaaccu

SEQ ID NO: 1918451 - RNA, 19 nt, Homo sapiens
  misc_RNA (1)...(19): siRNA sense strand
gcaagaagucagccaagag

SEQ ID NO: 1918452 - RNA, 19 nt, Homo sapiens
  misc_RNA (1)...(19): siRNA sense strand
ccgauaucgugcagacuuu

SEQ ID NO: 1918453 - RNA, 19 nt, Homo sapiens
  misc_RNA (1)...(19): siRNA sense strand
gaucgcaagucagaaagca

SEQ ID NO: 1918454 - RNA, 19 nt, Homo sapiens
  misc_RNA (1)...(19): siRNA sense strand
uaagaaggaagagaagauu

SEQ ID NO: 1918455 - RNA, 19 nt, Homo sapiens
  misc_RNA (1)...(19): siRNA sense strand
aaauuggcaucgaguuaga

SEQ ID NO: 1918456 - RNA, 19 nt, Homo sapiens
  misc_RNA (1)...(19): siRNA sense strand
ggaggaggaaggcacagaa

SEQ ID NO: 1918457 - RNA, 19 nt, Homo sapiens
  misc_RNA (1)...(19): siRNA sense strand
gggaaacuuguaaaucuga

SEQ ID NO: 1918458 - RNA, 19 nt, Homo sapiens
  misc_RNA (1)...(19): siRNA sense strand
cggaagagggugauuuaga

SEQ ID NO: 1918459 - RNA, 19 nt, Homo sapiens
  misc_RNA (1)...(19): siRNA sense strand
gagucaggaucgcaaguca

SEQ ID NO: 1918460 - RNA, 19 nt, Homo sapiens
  misc_RNA (1)...(19): siRNA sense strand
agaaggaagagaagauuga

SEQ ID NO: 1918461 - RNA, 19 nt, Homo sapiens
  misc_RNA (1)...(19): siRNA sense strand
gcgcuacggaucucaagaa

SEQ ID NO: 1918462 - RNA, 19 nt, Homo sapiens
  misc_RNA (1)...(19): siRNA sense strand
ggaagcaagucuggagaac

SEQ ID NO: 1918463 - RNA, 19 nt, Homo sapiens
  misc_RNA (1)...(19): siRNA sense strand
aaggagagcccgucauuag

SEQ ID NO: 1918464 - RNA, 19 nt, Homo sapiens
  misc_RNA (1)...(19): siRNA sense strand
gaaaagagugcgaagugaa

SEQ ID NO: 1918465 - RNA, 19 nt, Homo sapiens
  misc_RNA (1)...(19): siRNA sense strand
ggaagaggaccuauuugac

SEQ ID NO: 1918466 - RNA, 19 nt, Homo sapiens
  misc_RNA (1)...(19): siRNA sense strand
gauuuaagaacacuuugga

SEQ ID NO: 1918467 - RNA, 19 nt, Homo sapiens
  misc_RNA (1)...(19): siRNA sense strand
gaaagcuugcggaggaaga

SEQ ID NO: 1918468 - RNA, 19 nt, Homo sapiens
  misc_RNA (1)...(19): siRNA sense strand
gaaacccggaccuacaaau

SEQ ID NO: 1918469 - RNA, 19 nt, Homo sapiens
  misc_RNA (1)...(19): siRNA sense strand
gagcugaaacccggaccua

SEQ ID NO: 1918470 - RNA, 19 nt, Homo sapiens
  misc_RNA (1)...(19): siRNA sense strand
gagcugcauggacgaauga

SEQ ID NO: 1918471 - RNA, 19 nt, Homo sapiens
  misc_RNA (1)...(19): siRNA sense strand
ggaaggauuuaagaacacu

SEQ ID NO: 1918472 - RNA, 19 nt, Homo sapiens
  misc_RNA (1)...(19): siRNA sense strand
caggaucgcaagucagaaa

SEQ ID NO: 1918473 - RNA, 19 nt, Homo sapiens
  misc_RNA (1)...(19): siRNA sense strand
agaagauaauggccuggaa

SEQ ID NO: 1918474 - RNA, 19 nt, Homo sapiens
  misc_RNA (1)...(19): siRNA sense strand
agaccaggaugagcugaaa

SEQ ID NO: 1918475 - RNA, 19 nt, Homo sapiens
  misc_RNA (1)...(19): siRNA sense strand
uuguaaaucugagccagua

SEQ ID NO: 1918476 - RNA, 19 nt, Homo sapiens
  misc_RNA (1)...(19): siRNA sense strand
gaccuggaccgacgagaug

SEQ ID NO: 1918477 - RNA, 19 nt, Homo sapiens
  misc_RNA (1)...(19): siRNA sense strand
aaaggagagcccgucauua

SEQ ID NO: 1918478 - RNA, 19 nt, Homo sapiens
  misc_RNA (1)...(19): siRNA sense strand
acaagagcguccugaugga

SEQ ID NO: 1918479 - RNA, 19 nt, Homo sapiens
  misc_RNA (1)...(19): siRNA sense strand
gcugaaacccggaccuaca

SEQ ID NO: 1918480 - RNA, 19 nt, Homo sapiens
  misc_RNA (1)...(19): siRNA sense strand
aggaagaggaccuauuuga

SEQ ID NO: 1918481 - RNA, 19 nt, Homo sapiens
  misc_RNA (1)...(19): siRNA sense strand
ggcaauggaggaccgauau

SEQ ID NO: 1918482 - RNA, 19 nt, Homo sapiens
  misc_RNA (1)...(19): siRNA sense strand
gggaugggcagcacuaugg

SEQ ID NO: 1918483 - RNA, 19 nt, Homo sapiens
  misc_RNA (1)...(19): siRNA sense strand
gaaaggaggucaacaagaa

SEQ ID NO: 1918484 - RNA, 19 nt, Homo sapiens
  misc_RNA (1)...(19): siRNA sense strand
ugacugaccuuguugauua

SEQ ID NO: 1918485 - RNA, 19 nt, Homo sapiens
  misc_RNA (1)...(19): siRNA sense strand
ggaaagacaucucuacuau

SEQ ID NO: 1918486 - RNA, 19 nt, Homo sapiens
  misc_RNA (1)...(19): siRNA sense strand
ggaaacagcugguaaaugg

SEQ ID NO: 1918487 - RNA, 19 nt, Homo sapiens
  misc_RNA (1)...(19): siRNA sense strand
gcacaaagauugaguccaa

SEQ ID NO: 1918488 - RNA, 19 nt, Homo sapiens
  misc_RNA (1)...(19): siRNA sense strand
gaaagagggcaucaaauua

SEQ ID NO: 1918489 - RNA, 19 nt, Homo sapiens
  misc_RNA (1)...(19): siRNA sense strand
ggaaaugcauugucagaaa

SEQ ID NO: 1918490 - RNA, 19 nt, Homo sapiens
  misc_RNA (1)...(19): siRNA sense strand
uaaaugaucuggacaguga

SEQ ID NO: 1918491 - RNA, 19 nt, Homo sapiens
  misc_RNA (1)...(19): siRNA sense strand
gaacagaguccuuaaauuc

SEQ ID NO: 1918492 - RNA, 19 nt, Homo sapiens
  misc_RNA (1)...(19): siRNA sense strand
aagaagaucuccaagaaua

SEQ ID NO: 1918493 - RNA, 19 nt, Homo sapiens
  misc_RNA (1)...(19): siRNA sense strand
ggacuuaccuucaaccaau

SEQ ID NO: 1918494 - RNA, 19 nt, Homo sapiens
  misc_RNA (1)...(19): siRNA sense strand
ggauuuggauguugccuua

SEQ ID NO: 1918495 - RNA, 19 nt, Homo sapiens
  misc_RNA (1)...(19): siRNA sense strand
gcaaagccauugagaacuu

SEQ ID NO: 1918496 - RNA, 19 nt, Homo sapiens
  misc_RNA (1)...(19): siRNA sense strand
gaagggcuaucuugaaaug

SEQ ID NO: 1918497 - RNA, 19 nt, Homo sapiens
  misc_RNA (1)...(19): siRNA sense strand
gaaauuaaacugagugaug

SEQ ID NO: 1918498 - RNA, 19 nt, Homo sapiens
  misc_RNA (1)...(19): siRNA sense strand
ggaacagaguccuuaaauu

SEQ ID NO: 1918499 - RNA, 19 nt, Homo sapiens
  misc_RNA (1)...(19): siRNA sense strand
gauagaaagugaugaggaa

SEQ ID NO: 1918500 - RNA, 19 nt, Homo sapiens
  misc_RNA (1)...(19): siRNA sense strand
aaagauaucuccaccauca

SEQ ID NO: 1918501 - RNA, 19 nt, Homo sapiens
  misc_RNA (1)...(19): siRNA sense strand
gaacagaaagaaagugaaa

SEQ ID NO: 1918502 - RNA, 19 nt, Homo sapiens
  misc_RNA (1)...(19): siRNA sense strand
cuacagauuugaugaguuu

SEQ ID NO: 1918503 - RNA, 19 nt, Homo sapiens
  misc_RNA (1)...(19): siRNA sense strand
gaagaaacugagaaacuua

SEQ ID NO: 1918504 - RNA, 19 nt, Homo sapiens
  misc_RNA (1)...(19): siRNA sense strand
ugagaaaucuacugaagaa

SEQ ID NO: 1918505 - RNA, 19 nt, Homo sapiens
  misc_RNA (1)...(19): siRNA sense strand
gaaaugcauugucagaaau

SEQ ID NO: 1918506 - RNA, 19 nt, Homo sapiens
  misc_RNA (1)...(19): siRNA sense strand
gaagaagagucaacagcuu

SEQ ID NO: 1918507 - RNA, 19 nt, Homo sapiens
  misc_RNA (1)...(19): siRNA sense strand
caggugagcuugagaaaga

SEQ ID NO: 1918508 - RNA, 19 nt, Homo sapiens
  misc_RNA (1)...(19): siRNA sense strand
caagauaugccaagaguuu

SEQ ID NO: 1918509 - RNA, 19 nt, Homo sapiens
  misc_RNA (1)...(19): siRNA sense strand
gaauuugguggcaauauua

SEQ ID NO: 1918510 - RNA, 19 nt, Homo sapiens
  misc_RNA (1)...(19): siRNA sense strand
uuaagaagaucuccaagaa

SEQ ID NO: 1918511 - RNA, 19 nt, Homo sapiens
  misc_RNA (1)...(19): siRNA sense strand
gaggaaagaugcagauagu

SEQ ID NO: 1918512 - RNA, 19 nt, Homo sapiens
  misc_RNA (1)...(19): siRNA sense strand
aaacuucucuugauucuuc

SEQ ID NO: 1918513 - RNA, 19 nt, Homo sapiens
  misc_RNA (1)...(19): siRNA sense strand
gagagugacugaccuuguu

SEQ ID NO: 1918514 - RNA, 19 nt, Homo sapiens
  misc_RNA (1)...(19): siRNA sense strand
gauguugccuuaaagaaga

SEQ ID NO: 1918515 - RNA, 19 nt, Homo sapiens
  misc_RNA (1)...(19): siRNA sense strand
agacaaagauggccucaug

SEQ ID NO: 1918516 - RNA, 19 nt, Homo sapiens
  misc_RNA (1)...(19): siRNA sense strand
caagaacucugaagaugau

SEQ ID NO: 1918517 - RNA, 19 nt, Homo sapiens
  misc_RNA (1)...(19): siRNA sense strand
gcagaaagagggcaucaaa

SEQ ID NO: 1918518 - RNA, 19 nt, Homo sapiens
  misc_RNA (1)...(19): siRNA sense strand
ggaagaaacaccuaaacaa

SEQ ID NO: 1918519 - RNA, 19 nt, Homo sapiens
  misc_RNA (1)...(19): siRNA sense strand
gaaagaaagugaaaagaug

SEQ ID NO: 1918520 - RNA, 19 nt, Homo sapiens
  misc_RNA (1)...(19): siRNA sense strand
gaagaaguuccaaagagua

SEQ ID NO: 1918521 - RNA, 19 nt, Homo sapiens
  misc_RNA (1)...(19): siRNA sense strand
guccuuaaauucugucaua

SEQ ID NO: 1918522 - RNA, 19 nt, Homo sapiens
  misc_RNA (1)...(19): siRNA sense strand
acaaauugauccuguacua

SEQ ID NO: 1918523 - RNA, 19 nt, Homo sapiens
  misc_RNA (1)...(19): siRNA sense strand
gaaagagcgugccgaacga

SEQ ID NO: 1918524 - RNA, 19 nt, Homo sapiens
  misc_RNA (1)...(19): siRNA sense strand
gaaaggguagcuccaaauu

SEQ ID NO: 1918525 - RNA, 19 nt, Homo sapiens
  misc_RNA (1)...(19): siRNA sense strand
gaagaaacaccuaaacaag

SEQ ID NO: 1918526 - RNA, 19 nt, Homo sapiens
  misc_RNA (1)...(19): siRNA sense strand
caaagaagacucagaaagu

SEQ ID NO: 1918527 - RNA, 19 nt, Homo sapiens
  misc_RNA (1)...(19): siRNA sense strand
ggaggaaucugaggagaau

SEQ ID NO: 1918528 - RNA, 19 nt, Homo sapiens
  misc_RNA (1)...(19): siRNA sense strand
gaggaugaauucaagauca

SEQ ID NO: 1918529 - RNA, 19 nt, Homo sapiens
  misc_RNA (1)...(19): siRNA sense strand
ucacaaagguagaaaugga

SEQ ID NO: 1918530 - RNA, 19 nt, Homo sapiens
  misc_RNA (1)...(19): siRNA sense strand
gacaaaggguucuaugcaa

SEQ ID NO: 1918531 - RNA, 19 nt, Homo sapiens
  misc_RNA (1)...(19): siRNA sense strand
guacacaagcgaagacuuu

SEQ ID NO: 1918532 - RNA, 19 nt, Homo sapiens
  misc_RNA (1)...(19): siRNA sense strand
aaaugugggucguacuuua

SEQ ID NO: 1918533 - RNA, 19 nt, Homo sapiens
  misc_RNA (1)...(19): siRNA sense strand
aaagagggcaucaaauuaa

SEQ ID NO: 1918534 - RNA, 19 nt, Homo sapiens
  misc_RNA (1)...(19): siRNA sense strand
caugggagauggagaagaa

SEQ ID NO: 1918535 - RNA, 19 nt, Homo sapiens
  misc_RNA (1)...(19): siRNA sense strand
caagaagcccuaccggaua

SEQ ID NO: 1918536 - RNA, 19 nt, Homo sapiens
  misc_RNA (1)...(19): siRNA sense strand
gaaauggaaacuucucuug

SEQ ID NO: 1918537 - RNA, 19 nt, Homo sapiens
  misc_RNA (1)...(19): siRNA sense strand
gcugguaaauggagaaguu

SEQ ID NO: 1918538 - RNA, 19 nt, Homo sapiens
  misc_RNA (1)...(19): siRNA sense strand
ugaagaaacugagaaacuu

SEQ ID NO: 1918539 - RNA, 19 nt, Homo sapiens
  misc_RNA (1)...(19): siRNA sense strand
gaaaucuacugaagaaacu

SEQ ID NO: 1918540 - RNA, 19 nt, Homo sapiens
  misc_RNA (1)...(19): siRNA sense strand
cgaauuugguggcaauauu

SEQ ID NO: 1918541 - RNA, 19 nt, Homo sapiens
  misc_RNA (1)...(19): siRNA sense strand
gagcagauccuaaagauac

SEQ ID NO: 1918542 - RNA, 19 nt, Homo sapiens
  misc_RNA (1)...(19): siRNA sense strand
gaaggaauguagagcagau

SEQ ID NO: 1918543 - RNA, 19 nt, Homo sapiens
  misc_RNA (1)...(19): siRNA sense strand
guacauagaagaacaagau

SEQ ID NO: 1918544 - RNA, 19 nt, Homo sapiens
  misc_RNA (1)...(19): siRNA sense strand
ggagcagccuauggauuua

SEQ ID NO: 1918545 - RNA, 19 nt, Homo sapiens
  misc_RNA (1)...(19): siRNA sense strand
ggaaagaugcagauaguuc

SEQ ID NO: 1918546 - RNA, 19 nt, Homo sapiens
  misc_RNA (1)...(19): siRNA sense strand
gaauguacauagaagaaca

SEQ ID NO: 1918547 - RNA, 19 nt, Homo sapiens
  misc_RNA (1)...(19): siRNA sense strand
gcacagacgaguauucaga

SEQ ID NO: 1918548 - RNA, 19 nt, Homo sapiens
  misc_RNA (1)...(19): siRNA sense strand
ugagcuagcuaaagaauca

SEQ ID NO: 1918549 - RNA, 19 nt, Homo sapiens
  misc_RNA (1)...(19): siRNA sense strand
uaaguugguuccugaagaa

SEQ ID NO: 1918550 - RNA, 19 nt, Homo sapiens
  misc_RNA (1)...(19): siRNA sense strand
ggaaacuucucuugauucu

SEQ ID NO: 1918551 - RNA, 19 nt, Homo sapiens
  misc_RNA (1)...(19): siRNA sense strand
gaggaacaguugcaggauu

SEQ ID NO: 1918552 - RNA, 19 nt, Homo sapiens
  misc_RNA (1)...(19): siRNA sense strand
agaaagagggcaucaaauu

SEQ ID NO: 1918553 - RNA, 19 nt, Homo sapiens
  misc_RNA (1)...(19): siRNA sense strand
gaagggaaacagcugguaa

SEQ ID NO: 1918554 - RNA, 19 nt, Homo sapiens
  misc_RNA (1)...(19): siRNA sense strand
gaacaagagagcaccaaga

SEQ ID NO: 1918555 - RNA, 19 nt, Homo sapiens
  misc_RNA (1)...(19): siRNA sense strand
gaaauaaggcgaguacaca

SEQ ID NO: 1918556 - RNA, 19 nt, Homo sapiens
  misc_RNA (1)...(19): siRNA sense strand
cgaaggcggucaaggagaa

SEQ ID NO: 1918557 - RNA, 19 nt, Homo sapiens
  misc_RNA (1)...(19): siRNA sense strand
gagcgaggaugaauucaag

SEQ ID NO: 1918558 - RNA, 19 nt, Homo sapiens
  misc_RNA (1)...(19): siRNA sense strand
gaaagacaucucuacuauu

SEQ ID NO: 1918559 - RNA, 19 nt, Homo sapiens
  misc_RNA (1)...(19): siRNA sense strand
gaagaaagaccccaaagaa

SEQ ID NO: 1918560 - RNA, 19 nt, Homo sapiens
  misc_RNA (1)...(19): siRNA sense strand
caaacuagcacucuuaaag

SEQ ID NO: 1918561 - RNA, 19 nt, Homo sapiens
  misc_RNA (1)...(19): siRNA sense strand
gaagaggacuuugaaaaug

SEQ ID NO: 1918562 - RNA, 19 nt, Homo sapiens
  misc_RNA (1)...(19): siRNA sense strand
ugacaaugcucauggagau

SEQ ID NO: 1918563 - RNA, 19 nt, Homo sapiens
  misc_RNA (1)...(19): siRNA sense strand
gaaaagaacgcuuggugua

SEQ ID NO: 1918564 - RNA, 19 nt, Homo sapiens
  misc_RNA (1)...(19): siRNA sense strand
aacauaaacugcucuguga

SEQ ID NO: 1918565 - RNA, 19 nt, Homo sapiens
  misc_RNA (1)...(19): siRNA sense strand
acaaaggguucuaugcaaa

SEQ ID NO: 1918566 - RNA, 19 nt, Homo sapiens
  misc_RNA (1)...(19): siRNA sense strand
caugaaaggugaagagaag

SEQ ID NO: 1918567 - RNA, 19 nt, Homo sapiens
  misc_RNA (1)...(19): siRNA sense strand
agaacaagaugaucaagau

SEQ ID NO: 1918568 - RNA, 19 nt, Homo sapiens
  misc_RNA (1)...(19): siRNA sense strand
ggacagagcccuggcaaag

SEQ ID NO: 1918569 - RNA, 19 nt, Homo sapiens
  misc_RNA (1)...(19): siRNA sense strand
gggaaagacaucucuacua

SEQ ID NO: 1918570 - RNA, 19 nt, Homo sapiens
  misc_RNA (1)...(19): siRNA sense strand
ggcaucaaauuaacaauca

SEQ ID NO: 1918571 - RNA, 19 nt, Homo sapiens
  misc_RNA (1)...(19): siRNA sense strand
gcauagaggagccuucuga

SEQ ID NO: 1918572 - RNA, 19 nt, Homo sapiens
  misc_RNA (1)...(19): siRNA sense strand
cagaagaaguuccaaagag

SEQ ID NO: 1918573 - RNA, 19 nt, Homo sapiens
  misc_RNA (1)...(19): siRNA sense strand
gaaagaugcagauaguuca

SEQ ID NO: 1918574 - RNA, 19 nt, Homo sapiens
  misc_RNA (1)...(19): siRNA sense strand
gaagagacuuguaaaagga

SEQ ID NO: 1918575 - RNA, 19 nt, Homo sapiens
  misc_RNA (1)...(19): siRNA sense strand
agaagagacuacugugaaa

SEQ ID NO: 1918576 - RNA, 19 nt, Homo sapiens
  misc_RNA (1)...(19): siRNA sense strand
aaaaggaucucuacaauca

SEQ ID NO: 1918577 - RNA, 19 nt, Homo sapiens
  misc_RNA (1)...(19): siRNA sense strand
gcgacgugguaaagaaaua

SEQ ID NO: 1918578 - RNA, 19 nt, Homo sapiens
  misc_RNA (1)...(19): siRNA sense strand
gaaaagauaucuccaccau

SEQ ID NO: 1918579 - RNA, 19 nt, Homo sapiens
  misc_RNA (1)...(19): siRNA sense strand
ugaugaagcuauugaagau

SEQ ID NO: 1918580 - RNA, 19 nt, Homo sapiens
  misc_RNA (1)...(19): siRNA sense strand
gauaguggauaccauacug

SEQ ID NO: 1918581 - RNA, 19 nt, Homo sapiens
  misc_RNA (1)...(19): siRNA sense strand
aagaugagguggaagaaga

SEQ ID NO: 1918582 - RNA, 19 nt, Homo sapiens
  misc_RNA (1)...(19): siRNA sense strand
ggucguacuuuaagaagau

SEQ ID NO: 1918583 - RNA, 19 nt, Homo sapiens
  misc_RNA (1)...(19): siRNA sense strand
aaagaaagcuucaacacua

SEQ ID NO: 1918584 - RNA, 19 nt, Homo sapiens
  misc_RNA (1)...(19): siRNA sense strand
gcacaccgcuaaacaaaga

SEQ ID NO: 1918585 - RNA, 19 nt, Homo sapiens
  misc_RNA (1)...(19): siRNA sense strand
gaacauggacgacaacauu

SEQ ID NO: 1918586 - RNA, 19 nt, Homo sapiens
  misc_RNA (1)...(19): siRNA sense strand
gaagaucaguuaaggcauu

SEQ ID NO: 1918587 - RNA, 19 nt, Homo sapiens
  misc_RNA (1)...(19): siRNA sense strand
aaacaaagaugcauugaca

SEQ ID NO: 1918588 - RNA, 19 nt, Homo sapiens
  misc_RNA (1)...(19): siRNA sense strand
ucgaggagauugcguauaa

SEQ ID NO: 1918589 - RNA, 19 nt, Homo sapiens
  misc_RNA (1)...(19): siRNA sense strand
ugaaggcucugucuugaaa

SEQ ID NO: 1918590 - RNA, 19 nt, Homo sapiens
  misc_RNA (1)...(19): siRNA sense strand
gaagcuaucucagacaaau

SEQ ID NO: 1918591 - RNA, 19 nt, Homo sapiens
  misc_RNA (1)...(19): siRNA sense strand
ggaacaacuuugaauauac

SEQ ID NO: 1918592 - RNA, 19 nt, Homo sapiens
  misc_RNA (1)...(19): siRNA sense strand
caagggagcugagcggaaa

SEQ ID NO: 1918593 - RNA, 19 nt, Homo sapiens
  misc_RNA (1)...(19): siRNA sense strand
gcgaauggauaucacaguu

SEQ ID NO: 1918594 - RNA, 19 nt, Homo sapiens
  misc_RNA (1)...(19): siRNA sense strand
aagcagagaagaucaguua

SEQ ID NO: 1918595 - RNA, 19 nt, Homo sapiens
  misc_RNA (1)...(19): siRNA sense strand
ugacguaccugaacaaagg

SEQ ID NO: 1918596 - RNA, 19 nt, Homo sapiens
  misc_RNA (1)...(19): siRNA sense strand
gcauugacauagcugacua

SEQ ID NO: 1918597 - RNA, 19 nt, Homo sapiens
  misc_RNA (1)...(19): siRNA sense strand
gagcagcagugaaggaauc

SEQ ID NO: 1918598 - RNA, 19 nt, Homo sapiens
  misc_RNA (1)...(19): siRNA sense strand
gauagaagaaccaaagaga

SEQ ID NO: 1918599 - RNA, 19 nt, Homo sapiens
  misc_RNA (1)...(19): siRNA sense strand
acaaagaugcauugacaua

SEQ ID NO: 1918600 - RNA, 19 nt, Homo sapiens
  misc_RNA (1)...(19): siRNA sense strand
ucauugaucucgauacuca

SEQ ID NO: 1918601 - RNA, 19 nt, Homo sapiens
  misc_RNA (1)...(19): siRNA sense strand
ggugaaggcucugucuuga

SEQ ID NO: 1918602 - RNA, 19 nt, Homo sapiens
  misc_RNA (1)...(19): siRNA sense strand
gaauauacccuagaagcuu

SEQ ID NO: 1918603 - RNA, 19 nt, Homo sapiens
  misc_RNA (1)...(19): siRNA sense strand
gaauggauaucacaguuuu

SEQ ID NO: 1918604 - RNA, 19 nt, Homo sapiens
  misc_RNA (1)...(19): siRNA sense strand
gaacaacuuugaauauacc

SEQ ID NO: 1918605 - RNA, 19 nt, Homo sapiens
  misc_RNA (1)...(19): siRNA sense strand
guugauaccuauaguuaca

SEQ ID NO: 1918606 - RNA, 19 nt, Homo sapiens
  misc_RNA (1)...(19): siRNA sense strand
gaaaggagucagaagaagu

SEQ ID NO: 1918607 - RNA, 19 nt, Homo sapiens
  misc_RNA (1)...(19): siRNA sense strand
gugaagggguugccucuua

SEQ ID NO: 1918608 - RNA, 19 nt, Homo sapiens
  misc_RNA (1)...(19): siRNA sense strand
ccuagaagcuucaaaauca

SEQ ID NO: 1918609 - RNA, 19 nt, Homo sapiens
  misc_RNA (1)...(19): siRNA sense strand
gaugaagaacgaaagcaaa

SEQ ID NO: 1918610 - RNA, 19 nt, Homo sapiens
  misc_RNA (1)...(19): siRNA sense strand
uaagagaggccaucugaca

SEQ ID NO: 1918611 - RNA, 19 nt, Homo sapiens
  misc_RNA (1)...(19): siRNA sense strand
aaucagggaugaagaacga

SEQ ID NO: 1918612 - RNA, 19 nt, Homo sapiens
  misc_RNA (1)...(19): siRNA sense strand
caaaaucacuucgacagaa

SEQ ID NO: 1918613 - RNA, 19 nt, Homo sapiens
  misc_RNA (1)...(19): siRNA sense strand
gcuaaacaaagaugcauug

SEQ ID NO: 1918614 - RNA, 19 nt, Homo sapiens
  misc_RNA (1)...(19): siRNA sense strand
guucagcucuggugcucaa

SEQ ID NO: 1918615 - RNA, 19 nt, Homo sapiens
  misc_RNA (1)...(19): siRNA sense strand
cauugccucugaagaauug

SEQ ID NO: 1918616 - RNA, 19 nt, Homo sapiens
  misc_RNA (1)...(19): siRNA sense strand
gaagaacgaaagcaaagca

SEQ ID NO: 1918617 - RNA, 19 nt, Homo sapiens
  misc_RNA (1)...(19): siRNA sense strand
agaucaaggucuucuguga

SEQ ID NO: 1918618 - RNA, 19 nt, Homo sapiens
  misc_RNA (1)...(19): siRNA sense strand
cagcacaccgcuaaacaaa

SEQ ID NO: 1918619 - RNA, 19 nt, Homo sapiens
  misc_RNA (1)...(19): siRNA sense strand
gcagagaagaucaguuaag

SEQ ID NO: 1918620 - RNA, 19 nt, Homo sapiens
  misc_RNA (1)...(19): siRNA sense strand
cagagaagaucaguuaagg

SEQ ID NO: 1918621 - RNA, 19 nt, Homo sapiens
  misc_RNA (1)...(19): siRNA sense strand
gcacagaagaugacuuugc

SEQ ID NO: 1918622 - RNA, 19 nt, Homo sapiens
  misc_RNA (1)...(19): siRNA sense strand
ccucuuaacauucaaguug

SEQ ID NO: 1918623 - RNA, 19 nt, Homo sapiens
  misc_RNA (1)...(19): siRNA sense strand
ucaguaacaucgaggagau

SEQ ID NO: 1918624 - RNA, 19 nt, Homo sapiens
  misc_RNA (1)...(19): siRNA sense strand
aagaaagcuucaacacuau

SEQ ID NO: 1918625 - RNA, 19 nt, Homo sapiens
  misc_RNA (1)...(19): siRNA sense strand
gagacaguaccaugacgua

SEQ ID NO: 1918626 - RNA, 19 nt, Homo sapiens
  misc_RNA (1)...(19): siRNA sense strand
gaacgaaagcaaagcaaaa

SEQ ID NO: 1918627 - RNA, 19 nt, Homo sapiens
  misc_RNA (1)...(19): siRNA sense strand
gaaaaucagggaugaagaa

SEQ ID NO: 1918628 - RNA, 19 nt, Homo sapiens
  misc_RNA (1)...(19): siRNA sense strand
gcagcacaccgcuaaacaa

SEQ ID NO: 1918629 - RNA, 19 nt, Homo sapiens
  misc_RNA (1)...(19): siRNA sense strand
gaaagcuucaacacuauca

SEQ ID NO: 1918630 - RNA, 19 nt, Homo sapiens
  misc_RNA (1)...(19): siRNA sense strand
ggaugaagaacgaaagcaa

SEQ ID NO: 1918631 - RNA, 19 nt, Homo sapiens
  misc_RNA (1)...(19): siRNA sense strand
cggcacagaagaugacuuu

SEQ ID NO: 1918632 - RNA, 19 nt, Homo sapiens
  misc_RNA (1)...(19): siRNA sense strand
gggaaaauauucaagaagu

SEQ ID NO: 1918633 - RNA, 19 nt, Homo sapiens
  misc_RNA (1)...(19): siRNA sense strand
cgaaaggagucagaagaag

SEQ ID NO: 1918634 - RNA, 19 nt, Homo sapiens
  misc_RNA (1)...(19): siRNA sense strand
gaggugagcagcagugaag

SEQ ID NO: 1918635 - RNA, 19 nt, Homo sapiens
  misc_RNA (1)...(19): siRNA sense strand
gaucggaaucucaauacug

SEQ ID NO: 1918636 - RNA, 19 nt, Homo sapiens
  misc_RNA (1)...(19): siRNA sense strand
uaaagaaagcuucaacacu

SEQ ID NO: 1918637 - RNA, 19 nt, Homo sapiens
  misc_RNA (1)...(19): siRNA sense strand
cgaauggauaucacaguuu

SEQ ID NO: 1918638 - RNA, 19 nt, Homo sapiens
  misc_RNA (1)...(19): siRNA sense strand
gaaagcaaagcaaaagaaa

SEQ ID NO: 1918639 - RNA, 19 nt, Homo sapiens
  misc_RNA (1)...(19): siRNA sense strand
gguugccucuuaacauuca

SEQ ID NO: 1918640 - RNA, 19 nt, Homo sapiens
  misc_RNA (1)...(19): siRNA sense strand
ggaaaauauucaagaagug

SEQ ID NO: 1918641 - RNA, 19 nt, Homo sapiens
  misc_RNA (1)...(19): siRNA sense strand
ccaggagacaguaccauga

SEQ ID NO: 1918642 - RNA, 19 nt, Homo sapiens
  misc_RNA (1)...(19): siRNA sense strand
ugacaagauugggaaaaua

SEQ ID NO: 1918643 - RNA, 19 nt, Homo sapiens
  misc_RNA (1)...(19): siRNA sense strand
uggaagcuaucucagacaa

SEQ ID NO: 1918644 - RNA, 19 nt, Homo sapiens
  misc_RNA (1)...(19): siRNA sense strand
gggugaaggcucugucuug

SEQ ID NO: 1918645 - RNA, 19 nt, Homo sapiens
  misc_RNA (1)...(19): siRNA sense strand
caacgaugaagcaaagguu

SEQ ID NO: 1918646 - RNA, 19 nt, Homo sapiens
  misc_RNA (1)...(19): siRNA sense strand
gcuucaacacuaucaguaa

SEQ ID NO: 1918647 - RNA, 19 nt, Homo sapiens
  misc_RNA (1)...(19): siRNA sense strand
ggccaguucuaucccauca

SEQ ID NO: 1918648 - RNA, 19 nt, Homo sapiens
  misc_RNA (1)...(19): siRNA sense strand
gcagugaaggaauccauca

SEQ ID NO: 1918649 - RNA, 19 nt, Homo sapiens
  misc_RNA (1)...(19): siRNA sense strand
uagaagaaccaaagagagu

SEQ ID NO: 1918650 - RNA, 19 nt, Homo sapiens
  misc_RNA (1)...(19): siRNA sense strand
caaguugauaccuauaguu

SEQ ID NO: 1918651 - RNA, 19 nt, Homo sapiens
  misc_RNA (1)...(19): siRNA sense strand
ccuuccagcugcagauuga

SEQ ID NO: 1918652 - RNA, 19 nt, Homo sapiens
  misc_RNA (1)...(19): siRNA sense strand
ucucacaagcgaauggaua

SEQ ID NO: 1918653 - RNA, 19 nt, Homo sapiens
  misc_RNA (1)...(19): siRNA sense strand
caaagaugcauugacauag

SEQ ID NO: 1918654 - RNA, 19 nt, Homo sapiens
  misc_RNA (1)...(19): siRNA sense strand
uaacgccauuuccuucaca

SEQ ID NO: 1918655 - RNA, 19 nt, Homo sapiens
  misc_RNA (1)...(19): siRNA sense strand
aaagaugcauugacauagc

SEQ ID NO: 1918656 - RNA, 19 nt, Homo sapiens
  misc_RNA (1)...(19): siRNA sense strand
ucacaugggacaucaacga

SEQ ID NO: 1918657 - RNA, 19 nt, Homo sapiens
  misc_RNA (1)...(19): siRNA sense strand
acagaaacccagccacaug

SEQ ID NO: 1918658 - RNA, 19 nt, Homo sapiens
  misc_RNA (1)...(19): siRNA sense strand
cacagaagaugacuuugcu

SEQ ID NO: 1918659 - RNA, 19 nt, Homo sapiens
  misc_RNA (1)...(19): siRNA sense strand
acucauguccuucccauug

SEQ ID NO: 1918660 - RNA, 19 nt, Homo sapiens
  misc_RNA (1)...(19): siRNA sense strand
gggguugccucuuaacauu

SEQ ID NO: 1918661 - RNA, 19 nt, Homo sapiens
  misc_RNA (1)...(19): siRNA sense strand
gaacuccagacucgaccuu

SEQ ID NO: 1918662 - RNA, 19 nt, Homo sapiens
  misc_RNA (1)...(19): siRNA sense strand
ucagacaaauacgauguuc

SEQ ID NO: 1918663 - RNA, 19 nt, Homo sapiens
  misc_RNA (1)...(19): siRNA sense strand
ggaagcuaucucagacaaa

SEQ ID NO: 1918664 - RNA, 19 nt, Homo sapiens
  misc_RNA (1)...(19): siRNA sense strand
ucgaaaggagucagaagaa

SEQ ID NO: 1918665 - RNA, 19 nt, Homo sapiens
  misc_RNA (1)...(19): siRNA sense strand
aucggaaucucaauacuga

SEQ ID NO: 1918666 - RNA, 19 nt, Homo sapiens
  misc_RNA (1)...(19): siRNA sense strand
caacaaccgcagcaacaag

SEQ ID NO: 1918667 - RNA, 19 nt, Homo sapiens
  misc_RNA (1)...(19): siRNA sense strand
ggauaucacaguuuucaaa

SEQ ID NO: 1918668 - RNA, 19 nt, Homo sapiens
  misc_RNA (1)...(19): siRNA sense strand
guuaaggcauuggaaguac

SEQ ID NO: 1918669 - RNA, 19 nt, Homo sapiens
  misc_RNA (1)...(19): siRNA sense strand
ccuacccacuccaucaaga

SEQ ID NO: 1918670 - RNA, 19 nt, Homo sapiens
  misc_RNA (1)...(19): siRNA sense strand
ugugaagcauuacuccaau

SEQ ID NO: 1918671 - RNA, 19 nt, Homo sapiens
  misc_RNA (1)...(19): siRNA sense strand
cgacagaagccaggagaca

SEQ ID NO: 1918672 - RNA, 19 nt, Homo sapiens
  misc_RNA (1)...(19): siRNA sense strand
gucacugucuccauagcaa

SEQ ID NO: 1918673 - RNA, 19 nt, Homo sapiens
  misc_RNA (1)...(19): siRNA sense strand
gugcugcucuacguucgaa

SEQ ID NO: 1918674 - RNA, 19 nt, Homo sapiens
  misc_RNA (1)...(19): siRNA sense strand
ucagcaaaguucgaagugu

SEQ ID NO: 1918675 - RNA, 19 nt, Homo sapiens
  misc_RNA (1)...(19): siRNA sense strand
caucaucccaucagcaaag

SEQ ID NO: 1918676 - RNA, 19 nt, Homo sapiens
  misc_RNA (1)...(19): siRNA sense strand
gaucaguuaaggcauugga

SEQ ID NO: 1918677 - RNA, 19 nt, Homo sapiens
  misc_RNA (1)...(19): siRNA sense strand
ugauggaagcuaucucaga

SEQ ID NO: 1918678 - RNA, 19 nt, Homo sapiens
  misc_RNA (1)...(19): siRNA sense strand
ggauagaagaaccaaagag

SEQ ID NO: 1918679 - RNA, 19 nt, Homo sapiens
  misc_RNA (1)...(19): siRNA sense strand
gcaaagcaaaagaaaaguu

SEQ ID NO: 1918680 - RNA, 19 nt, Homo sapiens
  misc_RNA (1)...(19): siRNA sense strand
ugaagggguugccucuuaa

SEQ ID NO: 1918681 - RNA, 19 nt, Homo sapiens
  misc_RNA (1)...(19): siRNA sense strand
cagccuguccucuucauuc

SEQ ID NO: 1918682 - RNA, 19 nt, Homo sapiens
  misc_RNA (1)...(19): siRNA sense strand
ucccauugccucugaagaa

SEQ ID NO: 1918683 - RNA, 19 nt, Homo sapiens
  misc_RNA (1)...(19): siRNA sense strand
aaagaaagcuucaacacua

SEQ ID NO: 1918684 - RNA, 19 nt, Homo sapiens
  misc_RNA (1)...(19): siRNA sense strand
gcacaccgcuaaacaaaga

SEQ ID NO: 1918685 - RNA, 19 nt, Homo sapiens
  misc_RNA (1)...(19): siRNA sense strand
gaacauggacgacaacauu

SEQ ID NO: 1918686 - RNA, 19 nt, Homo sapiens
  misc_RNA (1)...(19): siRNA sense strand
gaagaucaguuaaggcauu

SEQ ID NO: 1918687 - RNA, 19 nt, Homo sapiens
  misc_RNA (1)...(19): siRNA sense strand
aaacaaagaugcauugaca

SEQ ID NO: 1918688 - RNA, 19 nt, Homo sapiens
  misc_RNA (1)...(19): siRNA sense strand
ucgaggagauugcguauaa

SEQ ID NO: 1918689 - RNA, 19 nt, Homo sapiens
  misc_RNA (1)...(19): siRNA sense strand
ugaaggcucugucuugaaa

SEQ ID NO: 1918690 - RNA, 19 nt, Homo sapiens
  misc_RNA (1)...(19): siRNA sense strand
gaagcuaucucagacaaau

SEQ ID NO: 1918691 - RNA, 19 nt, Homo sapiens
  misc_RNA (1)...(19): siRNA sense strand
ggaacaacuuugaauauac

SEQ ID NO: 1918692 - RNA, 19 nt, Homo sapiens
  misc_RNA (1)...(19): siRNA sense strand
caagggagcugagcggaaa

SEQ ID NO: 1918693 - RNA, 19 nt, Homo sapiens
  misc_RNA (1)...(19): siRNA sense strand
gcgaauggauaucacaguu

SEQ ID NO: 1918694 - RNA, 19 nt, Homo sapiens
  misc_RNA (1)...(19): siRNA sense strand
aagcagagaagaucaguua

SEQ ID NO: 1918695 - RNA, 19 nt, Homo sapiens
  misc_RNA (1)...(19): siRNA sense strand
ugacguaccugaacaaagg

SEQ ID NO: 1918696 - RNA, 19 nt, Homo sapiens
  misc_RNA (1)...(19): siRNA sense strand
gcauugacauagcugacua

SEQ ID NO: 1918697 - RNA, 19 nt, Homo sapiens
  misc_RNA (1)...(19): siRNA sense strand
gagcagcagugaaggaauc

SEQ ID NO: 1918698 - RNA, 19 nt, Homo sapiens
  misc_RNA (1)...(19): siRNA sense strand
gauagaagaaccaaagaga

SEQ ID NO: 1918699 - RNA, 19 nt, Homo sapiens
  misc_RNA (1)...(19): siRNA sense strand
acaaagaugcauugacaua

SEQ ID NO: 1918700 - RNA, 19 nt, Homo sapiens
  misc_RNA (1)...(19): siRNA sense strand
ucauugaucucgauacuca

SEQ ID NO: 1918701 - RNA, 19 nt, Homo sapiens
  misc_RNA (1)...(19): siRNA sense strand
ggugaaggcucugucuuga

SEQ ID NO: 1918702 - RNA, 19 nt, Homo sapiens
  misc_RNA (1)...(19): siRNA sense strand
gaauauacccuagaagcuu

SEQ ID NO: 1918703 - RNA, 19 nt, Homo sapiens
  misc_RNA (1)...(19): siRNA sense strand
gaauggauaucacaguuuu

SEQ ID NO: 1918704 - RNA, 19 nt, Homo sapiens
  misc_RNA (1)...(19): siRNA sense strand
gaacaacuuugaauauacc

SEQ ID NO: 1918705 - RNA, 19 nt, Homo sapiens
  misc_RNA (1)...(19): siRNA sense strand
guugauaccuauaguuaca

SEQ ID NO: 1918706 - RNA, 19 nt, Homo sapiens
  misc_RNA (1)...(19): siRNA sense strand
gaaaggagucagaagaagu

SEQ ID NO: 1918707 - RNA, 19 nt, Homo sapiens
  misc_RNA (1)...(19): siRNA sense strand
gugaagggguugccucuua

SEQ ID NO: 1918708 - RNA, 19 nt, Homo sapiens
  misc_RNA (1)...(19): siRNA sense strand
ccuagaagcuucaaaauca

SEQ ID NO: 1918709 - RNA, 19 nt, Homo sapiens
  misc_RNA (1)...(19): siRNA sense strand
gaugaagaacgaaagcaaa

SEQ ID NO: 1918710 - RNA, 19 nt, Homo sapiens
  misc_RNA (1)...(19): siRNA sense strand
aaucagggaugaagaacga

SEQ ID NO: 1918711 - RNA, 19 nt, Homo sapiens
  misc_RNA (1)...(19): siRNA sense strand
caaaaucacuucgacagaa

SEQ ID NO: 1918712 - RNA, 19 nt, Homo sapiens
  misc_RNA (1)...(19): siRNA sense strand
gcuaaacaaagaugcauug

SEQ ID NO: 1918713 - RNA, 19 nt, Homo sapiens
  misc_RNA (1)...(19): siRNA sense strand
gcagagaagaucaguuaag

SEQ ID NO: 1918714 - RNA, 19 nt, Homo sapiens
  misc_RNA (1)...(19): siRNA sense strand
guucagcucuggugcucaa

SEQ ID NO: 1918715 - RNA, 19 nt, Homo sapiens
  misc_RNA (1)...(19): siRNA sense strand
cauugccucugaagaauug

SEQ ID NO: 1918716 - RNA, 19 nt, Homo sapiens
  misc_RNA (1)...(19): siRNA sense strand
gaagaacgaaagcaaagca

SEQ ID NO: 1918717 - RNA, 19 nt, Homo sapiens
  misc_RNA (1)...(19): siRNA sense strand
agaucaaggucuucuguga

SEQ ID NO: 1918718 - RNA, 19 nt, Homo sapiens
  misc_RNA (1)...(19): siRNA sense strand
cagcacaccgcuaaacaaa

SEQ ID NO: 1918719 - RNA, 19 nt, Homo sapiens
  misc_RNA (1)...(19): siRNA sense strand
cagagaagaucaguuaagg

SEQ ID NO: 1918720 - RNA, 19 nt, Homo sapiens
  misc_RNA (1)...(19): siRNA sense strand
gcacagaagaugacuuugc

SEQ ID NO: 1918721 - RNA, 19 nt, Homo sapiens
  misc_RNA (1)...(19): siRNA sense strand
ccucuuaacauucaaguug

SEQ ID NO: 1918722 - RNA, 19 nt, Homo sapiens
  misc_RNA (1)...(19): siRNA sense strand
ucaguaacaucgaggagau

SEQ ID NO: 1918723 - RNA, 19 nt, Homo sapiens
  misc_RNA (1)...(19): siRNA sense strand
aagaaagcuucaacacuau

SEQ ID NO: 1918724 - RNA, 19 nt, Homo sapiens
  misc_RNA (1)...(19): siRNA sense strand
gagacaguaccaugacgua

SEQ ID NO: 1918725 - RNA, 19 nt, Homo sapiens
  misc_RNA (1)...(19): siRNA sense strand
gaacgaaagcaaagcaaaa

SEQ ID NO: 1918726 - RNA, 19 nt, Homo sapiens
  misc_RNA (1)...(19): siRNA sense strand
gaaaaucagggaugaagaa

SEQ ID NO: 1918727 - RNA, 19 nt, Homo sapiens
  misc_RNA (1)...(19): siRNA sense strand
gcagcacaccgcuaaacaa

SEQ ID NO: 1918728 - RNA, 19 nt, Homo sapiens
  misc_RNA (1)...(19): siRNA sense strand
gaaagcuucaacacuauca

SEQ ID NO: 1918729 - RNA, 19 nt, Homo sapiens
  misc_RNA (1)...(19): siRNA sense strand
ggaugaagaacgaaagcaa

SEQ ID NO: 1918730 - RNA, 19 nt, Homo sapiens
  misc_RNA (1)...(19): siRNA sense strand
cggcacagaagaugacuuu

SEQ ID NO: 1918731 - RNA, 19 nt, Homo sapiens
  misc_RNA (1)...(19): siRNA sense strand
gggaaaauauucaagaagu

SEQ ID NO: 1918732 - RNA, 19 nt, Homo sapiens
  misc_RNA (1)...(19): siRNA sense strand
cgaaaggagucagaagaag

SEQ ID NO: 1918733 - RNA, 19 nt, Homo sapiens
  misc_RNA (1)...(19): siRNA sense strand
gaggugagcagcagugaag

SEQ ID NO: 1918734 - RNA, 19 nt, Homo sapiens
  misc_RNA (1)...(19): siRNA sense strand
gaucggaaucucaauacug

SEQ ID NO: 1918735 - RNA, 19 nt, Homo sapiens
  misc_RNA (1)...(19): siRNA sense strand
uaaagaaagcuucaacacu

SEQ ID NO: 1918736 - RNA, 19 nt, Homo sapiens
  misc_RNA (1)...(19): siRNA sense strand
cgaauggauaucacaguuu

SEQ ID NO: 1918737 - RNA, 19 nt, Homo sapiens
  misc_RNA (1)...(19): siRNA sense strand
gaaagcaaagcaaaagaaa

SEQ ID NO: 1918738 - RNA, 19 nt, Homo sapiens
  misc_RNA (1)...(19): siRNA sense strand
gguugccucuuaacauuca

SEQ ID NO: 1918739 - RNA, 19 nt, Homo sapiens
  misc_RNA (1)...(19): siRNA sense strand
ggaaaauauucaagaagug

SEQ ID NO: 1918740 - RNA, 19 nt, Homo sapiens
  misc_RNA (1)...(19): siRNA sense strand
ccaggagacaguaccauga

SEQ ID NO: 1918741 - RNA, 19 nt, Homo sapiens
  misc_RNA (1)...(19): siRNA sense strand
ugacaagauugggaaaaua

SEQ ID NO: 1918742 - RNA, 19 nt, Homo sapiens
  misc_RNA (1)...(19): siRNA sense strand
uggaagcuaucucagacaa

SEQ ID NO: 1918743 - RNA, 19 nt, Homo sapiens
  misc_RNA (1)...(19): siRNA sense strand
gggugaaggcucugucuug

SEQ ID NO: 1918744 - RNA, 19 nt, Homo sapiens
  misc_RNA (1)...(19): siRNA sense strand
caacgaugaagcaaagguu

SEQ ID NO: 1918745 - RNA, 19 nt, Homo sapiens
  misc_RNA (1)...(19): siRNA sense strand
gcuucaacacuaucaguaa

SEQ ID NO: 1918746 - RNA, 19 nt, Homo sapiens
  misc_RNA (1)...(19): siRNA sense strand
ggccaguucuaucccauca

SEQ ID NO: 1918747 - RNA, 19 nt, Homo sapiens
  misc_RNA (1)...(19): siRNA sense strand
gcagugaaggaauccauca

SEQ ID NO: 1918748 - RNA, 19 nt, Homo sapiens
  misc_RNA (1)...(19): siRNA sense strand
uagaagaaccaaagagagu

SEQ ID NO: 1918749 - RNA, 19 nt, Homo sapiens
  misc_RNA (1)...(19): siRNA sense strand
caaguugauaccuauaguu

SEQ ID NO: 1918750 - RNA, 19 nt, Homo sapiens
  misc_RNA (1)...(19): siRNA sense strand
ccuuccagcugcagauuga

SEQ ID NO: 1918751 - RNA, 19 nt, Homo sapiens
  misc_RNA (1)...(19): siRNA sense strand
ucucacaagcgaauggaua

SEQ ID NO: 1918752 - RNA, 19 nt, Homo sapiens
  misc_RNA (1)...(19): siRNA sense strand
caaagaugcauugacauag

SEQ ID NO: 1918753 - RNA, 19 nt, Homo sapiens
  misc_RNA (1)...(19): siRNA sense strand
uaacgccauuuccuucaca

SEQ ID NO: 1918754 - RNA, 19 nt, Homo sapiens
  misc_RNA (1)...(19): siRNA sense strand
aaagaugcauugacauagc

SEQ ID NO: 1918755 - RNA, 19 nt, Homo sapiens
  misc_RNA (1)...(19): siRNA sense strand
ucacaugggacaucaacga

SEQ ID NO: 1918756 - RNA, 19 nt, Homo sapiens
  misc_RNA (1)...(19): siRNA sense strand
cacagaagaugacuuugcu

SEQ ID NO: 1918757 - RNA, 19 nt, Homo sapiens
  misc_RNA (1)...(19): siRNA sense strand
acucauguccuucccauug

SEQ ID NO: 1918758 - RNA, 19 nt, Homo sapiens
  misc_RNA (1)...(19): siRNA sense strand
gggguugccucuuaacauu

SEQ ID NO: 1918759 - RNA, 19 nt, Homo sapiens
  misc_RNA (1)...(19): siRNA sense strand
aucggaaucucaauacuga

SEQ ID NO: 1918760 - RNA, 19 nt, Homo sapiens
  misc_RNA (1)...(19): siRNA sense strand
ucagacaaauacgauguuc

SEQ ID NO: 1918761 - RNA, 19 nt, Homo sapiens
  misc_RNA (1)...(19): siRNA sense strand
ggaagcuaucucagacaaa

SEQ ID NO: 1918762 - RNA, 19 nt, Homo sapiens
  misc_RNA (1)...(19): siRNA sense strand
ucgaaaggagucagaagaa

SEQ ID NO: 1918763 - RNA, 19 nt, Homo sapiens
  misc_RNA (1)...(19): siRNA sense strand
gaacuccagacucgaccuu

SEQ ID NO: 1918764 - RNA, 19 nt, Homo sapiens
  misc_RNA (1)...(19): siRNA sense strand
caacaaccgcagcaacaag

SEQ ID NO: 1918765 - RNA, 19 nt, Homo sapiens
  misc_RNA (1)...(19): siRNA sense strand
ggauaucacaguuuucaaa

SEQ ID NO: 1918766 - RNA, 19 nt, Homo sapiens
  misc_RNA (1)...(19): siRNA sense strand
guuaaggcauuggaaguac

SEQ ID NO: 1918767 - RNA, 19 nt, Homo sapiens
  misc_RNA (1)...(19): siRNA sense strand
caucaucccaucagcaaag

SEQ ID NO: 1918768 - RNA, 19 nt, Homo sapiens
  misc_RNA (1)...(19): siRNA sense strand
ugugaagcauuacuccaau

SEQ ID NO: 1918769 - RNA, 19 nt, Homo sapiens
  misc_RNA (1)...(19): siRNA sense strand
gugcugcucuacguucgaa

SEQ ID NO: 1918770 - RNA, 19 nt, Homo sapiens
  misc_RNA (1)...(19): siRNA sense strand
cgacagaagccaggagaca

SEQ ID NO: 1918771 - RNA, 19 nt, Homo sapiens
  misc_RNA (1)...(19): siRNA sense strand
ucagcaaaguucgaagugu

SEQ ID NO: 1918772 - RNA, 19 nt, Homo sapiens
  misc_RNA (1)...(19): siRNA sense strand
gaucaguuaaggcauugga

SEQ ID NO: 1918773 - RNA, 19 nt, Homo sapiens
  misc_RNA (1)...(19): siRNA sense strand
ugauggaagcuaucucaga

SEQ ID NO: 1918774 - RNA, 19 nt, Homo sapiens
  misc_RNA (1)...(19): siRNA sense strand
ggauagaagaaccaaagag

SEQ ID NO: 1918775 - RNA, 19 nt, Homo sapiens
  misc_RNA (1)...(19): siRNA sense strand
gcaaagcaaaagaaaaguu

SEQ ID NO: 1918776 - RNA, 19 nt, Homo sapiens
  misc_RNA (1)...(19): siRNA sense strand
ugaagggguugccucuuaa

SEQ ID NO: 1918777 - RNA, 19 nt, Homo sapiens
  misc_RNA (1)...(19): siRNA sense strand
cuuugaauauacccuagaa

SEQ ID NO: 1918778 - RNA, 19 nt, Homo sapiens
  misc_RNA (1)...(19): siRNA sense strand
ucccauugccucugaagaa

SEQ ID NO: 1918779 - RNA, 19 nt, Homo sapiens
  misc_RNA (1)...(19): siRNA sense strand
cagccuguccucuucauuc

SEQ ID NO: 1918780 - RNA, 19 nt, Homo sapiens
  misc_RNA (1)...(19): siRNA sense strand
cguauaacgccauuuccuu

SEQ ID NO: 1918781 - RNA, 19 nt, Homo sapiens
  misc_RNA (1)...(19): siRNA sense strand
ucuaucccaucaccuugaa

SEQ ID NO: 1918782 - RNA, 19 nt, Homo sapiens
  misc_RNA (1)...(19): siRNA sense strand
aaaaggggauccuggugaa

SEQ ID NO: 1918783 - RNA, 19 nt, Homo sapiens
  misc_RNA (1)...(19): siRNA sense strand
ucacaaagcuuggaaauug

SEQ ID NO: 1918784 - RNA, 19 nt, Homo sapiens
  misc_RNA (1)...(19): siRNA sense strand
gaacgucacuggccuggaa

SEQ ID NO: 1918785 - RNA, 19 nt, Homo sapiens
  misc_RNA (1)...(19): siRNA sense strand
ggacagaguauuucauuaa

SEQ ID NO: 1918786 - RNA, 19 nt, Homo sapiens
  misc_RNA (1)...(19): siRNA sense strand
gacaguaacuuugguguaa

SEQ ID NO: 1918787 - RNA, 19 nt, Homo sapiens
  misc_RNA (1)...(19): siRNA sense strand
ucacuggccuggaaaugua

SEQ ID NO: 1918788 - RNA, 19 nt, Homo sapiens
  misc_RNA (1)...(19): siRNA sense strand
guacacaucugccucaucu

SEQ ID NO: 1918789 - RNA, 19 nt, Homo sapiens
  misc_RNA (1)...(19): siRNA sense strand
gagcagaagcugucacaaa

SEQ ID NO: 1918790 - RNA, 19 nt, Homo sapiens
  misc_RNA (1)...(19): siRNA sense strand
guggaaaucuguaggauca

SEQ ID NO: 1918791 - RNA, 19 nt, Homo sapiens
  misc_RNA (1)...(19): siRNA sense strand
cacaagcccuuuggucuua

SEQ ID NO: 1918792 - RNA, 19 nt, Homo sapiens
  misc_RNA (1)...(19): siRNA sense strand
gagcccagccugacacaua

SEQ ID NO: 1918793 - RNA, 19 nt, Homo sapiens
  misc_RNA (1)...(19): siRNA sense strand
agaauucacugcaacaaga

SEQ ID NO: 1918794 - RNA, 19 nt, Homo sapiens
  misc_RNA (1)...(19): siRNA sense strand
aaagagaagucaugguuuc

SEQ ID NO: 1918795 - RNA, 19 nt, Homo sapiens
  misc_RNA (1)...(19): siRNA sense strand
gaccaagaauucacugcaa

SEQ ID NO: 1918796 - RNA, 19 nt, Homo sapiens
  misc_RNA (1)...(19): siRNA sense strand
uagaaaaucucaucucuga

SEQ ID NO: 1918797 - RNA, 19 nt, Homo sapiens
  misc_RNA (1)...(19): siRNA sense strand
caggagcucuggaauaaag

SEQ ID NO: 1918798 - RNA, 19 nt, Homo sapiens
  misc_RNA (1)...(19): siRNA sense strand
gaagcuggccgagaucauu

SEQ ID NO: 1918799 - RNA, 19 nt, Homo sapiens
  misc_RNA (1)...(19): siRNA sense strand
gaagauagagcaggcugaa

SEQ ID NO: 1918800 - RNA, 19 nt, Homo sapiens
  misc_RNA (1)...(19): siRNA sense strand
caaagagaagucaugguuu

SEQ ID NO: 1918801 - RNA, 19 nt, Homo sapiens
  misc_RNA (1)...(19): siRNA sense strand
cugaagaucucacaaagag

SEQ ID NO: 1918802 - RNA, 19 nt, Homo sapiens
  misc_RNA (1)...(19): siRNA sense strand
gaaugugccuccugcaaaa

SEQ ID NO: 1918803 - RNA, 19 nt, Homo sapiens
  misc_RNA (1)...(19): siRNA sense strand
acaguuucauuucccuuua

SEQ ID NO: 1918804 - RNA, 19 nt, Homo sapiens
  misc_RNA (1)...(19): siRNA sense strand
gacagaguauuucauuaag

SEQ ID NO: 1918805 - RNA, 19 nt, Homo sapiens
  misc_RNA (1)...(19): siRNA sense strand
acaaagagaagucaugguu

SEQ ID NO: 1918806 - RNA, 19 nt, Homo sapiens
  misc_RNA (1)...(19): siRNA sense strand
ggagagcacagacggcauu

SEQ ID NO: 1918807 - RNA, 19 nt, Homo sapiens
  misc_RNA (1)...(19): siRNA sense strand
ggcaaagucuuacugaaaa

SEQ ID NO: 1918808 - RNA, 19 nt, Homo sapiens
  misc_RNA (1)...(19): siRNA sense strand
ggaugugccugaggaguuc

SEQ ID NO: 1918809 - RNA, 19 nt, Homo sapiens
  misc_RNA (1)...(19): siRNA sense strand
aaaugaaagccaccaauga

SEQ ID NO: 1918810 - RNA, 19 nt, Homo sapiens
  misc_RNA (1)...(19): siRNA sense strand
caagagggagcaacacuuc

SEQ ID NO: 1918811 - RNA, 19 nt, Homo sapiens
  misc_RNA (1)...(19): siRNA sense strand
cgaaugugccuccugcaaa

SEQ ID NO: 1918812 - RNA, 19 nt, Homo sapiens
  misc_RNA (1)...(19): siRNA sense strand
ccacaguucagaccaagaa

SEQ ID NO: 1918813 - RNA, 19 nt, Homo sapiens
  misc_RNA (1)...(19): siRNA sense strand
guguaaaugcuuccuguuu

SEQ ID NO: 1918814 - RNA, 19 nt, Homo sapiens
  misc_RNA (1)...(19): siRNA sense strand
gaucccuucuuccauuguu

SEQ ID NO: 1918815 - RNA, 19 nt, Homo sapiens
  misc_RNA (1)...(19): siRNA sense strand
caguuucauuucccuuuaa

SEQ ID NO: 1918816 - RNA, 19 nt, Homo sapiens
  misc_RNA (1)...(19): siRNA sense strand
ggaaaucuguaggaucaac

SEQ ID NO: 1918817 - RNA, 19 nt, Homo sapiens
  misc_RNA (1)...(19): siRNA sense strand
caggacagaguauuucauu

SEQ ID NO: 1918818 - RNA, 19 nt, Homo sapiens
  misc_RNA (1)...(19): siRNA sense strand
gcagugaucccuucuucca

SEQ ID NO: 1918819 - RNA, 19 nt, Homo sapiens
  misc_RNA (1)...(19): siRNA sense strand
ggaucuguaucacccaugu

SEQ ID NO: 1918820 - RNA, 19 nt, Homo sapiens
  misc_RNA (1)...(19): siRNA sense strand
ggcgguaucccuuguauca

SEQ ID NO: 1918821 - RNA, 19 nt, Homo sapiens
  misc_RNA (1)...(19): siRNA sense strand
ccacaagcccuuuggucuu

SEQ ID NO: 1918822 - RNA, 19 nt, Homo sapiens
  misc_RNA (1)...(19): siRNA sense strand
agugaucccuucuuccauu

SEQ ID NO: 1918823 - RNA, 19 nt, Homo sapiens
  misc_RNA (1)...(19): siRNA sense strand
aggacagaguauuucauua

SEQ ID NO: 1918824 - RNA, 19 nt, Homo sapiens
  misc_RNA (1)...(19): siRNA sense strand
caguaacuuugguguaaau

SEQ ID NO: 1918825 - RNA, 19 nt, Homo sapiens
  misc_RNA (1)...(19): siRNA sense strand
ucuguaggaucaacauaga

SEQ ID NO: 1918826 - RNA, 19 nt, Homo sapiens
  misc_RNA (1)...(19): siRNA sense strand
aggcaaagucuuacugaaa

SEQ ID NO: 1918827 - RNA, 19 nt, Homo sapiens
  misc_RNA (1)...(19): siRNA sense strand
uaacuuugguguaaaugcu

SEQ ID NO: 1918828 - RNA, 19 nt, Homo sapiens
  misc_RNA (1)...(19): siRNA sense strand
cuugguaggcaaagucuua

SEQ ID NO: 1918829 - RNA, 19 nt, Homo sapiens
  misc_RNA (1)...(19): siRNA sense strand
guaggcaaagucuuacuga

SEQ ID NO: 1918830 - RNA, 19 nt, Homo sapiens
  misc_RNA (1)...(19): siRNA sense strand
gaaaaucucaucucugaag

SEQ ID NO: 1918831 - RNA, 19 nt, Homo sapiens
  misc_RNA (1)...(19): siRNA sense strand
gacaguuucauuucccuuu

SEQ ID NO: 1918832 - RNA, 19 nt, Homo sapiens
  misc_RNA (1)...(19): siRNA sense strand
agcagaagcugucacaaag

SEQ ID NO: 1918833 - RNA, 19 nt, Homo sapiens
  misc_RNA (1)...(19): siRNA sense strand
ccuuuggucuuacccacua

SEQ ID NO: 1918834 - RNA, 19 nt, Homo sapiens
  misc_RNA (1)...(19): siRNA sense strand
ugcagaagcuggccgagau

SEQ ID NO: 1918835 - RNA, 19 nt, Homo sapiens
  misc_RNA (1)...(19): siRNA sense strand
agcagagugucuuggaaua

SEQ ID NO: 1918836 - RNA, 19 nt, Homo sapiens
  misc_RNA (1)...(19): siRNA sense strand
gaaguguaaccgcagugaa

SEQ ID NO: 1918837 - RNA, 19 nt, Homo sapiens
  misc_RNA (1)...(19): siRNA sense strand
uggcagugaucccuucuuc

SEQ ID NO: 1918838 - RNA, 19 nt, Homo sapiens
  misc_RNA (1)...(19): siRNA sense strand
caacgcucccugcccauga

SEQ ID NO: 1918839 - RNA, 19 nt, Homo sapiens
  misc_RNA (1)...(19): siRNA sense strand
cauccacccuuggcucuau

SEQ ID NO: 1918840 - RNA, 19 nt, Homo sapiens
  misc_RNA (1)...(19): siRNA sense strand
ccauuguucugcccucuca

SEQ ID NO: 1918841 - RNA, 19 nt, Homo sapiens
  misc_RNA (1)...(19): siRNA sense strand
ucauuaagccaccagucua

SEQ ID NO: 1918842 - RNA, 19 nt, Homo sapiens
  misc_RNA (1)...(19): siRNA sense strand
gcacacugcuaagaaaaug

SEQ ID NO: 1918843 - RNA, 19 nt, Homo sapiens
  misc_RNA (1)...(19): siRNA sense strand
uguaaaugcuuccuguuuu

SEQ ID NO: 1918844 - RNA, 19 nt, Homo sapiens
  misc_RNA (1)...(19): siRNA sense strand
cuaugugacaguuucauuu

SEQ ID NO: 1918845 - RNA, 19 nt, Homo sapiens
  misc_RNA (1)...(19): siRNA sense strand
uaggcaaagucuuacugaa

SEQ ID NO: 1918846 - RNA, 19 nt, Homo sapiens
  misc_RNA (1)...(19): siRNA sense strand
acaguaacuuugguguaaa

SEQ ID NO: 1918847 - RNA, 19 nt, Homo sapiens
  misc_RNA (1)...(19): siRNA sense strand
gugaucccuucuuccauug

SEQ ID NO: 1918848 - RNA, 19 nt, Homo sapiens
  misc_RNA (1)...(19): siRNA sense strand
agacaguaacuuuggugua

SEQ ID NO: 1918849 - RNA, 19 nt, Homo sapiens
  misc_RNA (1)...(19): siRNA sense strand
acacaucugccucaucuag

SEQ ID NO: 1918850 - RNA, 19 nt, Homo sapiens
  misc_RNA (1)...(19): siRNA sense strand
ccauggaaagugacuguga

SEQ ID NO: 1918851 - RNA, 19 nt, Homo sapiens
  misc_RNA (1)...(19): siRNA sense strand
cuagcagagugucuuggaa

SEQ ID NO: 1918852 - RNA, 19 nt, Homo sapiens
  misc_RNA (1)...(19): siRNA sense strand
agagcaggcugaacauguc

SEQ ID NO: 1918853 - RNA, 19 nt, Homo sapiens
  misc_RNA (1)...(19): siRNA sense strand
gaaaucuguaggaucaaca

SEQ ID NO: 1918854 - RNA, 19 nt, Homo sapiens
  misc_RNA (1)...(19): siRNA sense strand
caagaauucacugcaacaa

SEQ ID NO: 1918855 - RNA, 19 nt, Homo sapiens
  misc_RNA (1)...(19): siRNA sense strand
gaauucacugcaacaagau

SEQ ID NO: 1918856 - RNA, 19 nt, Homo sapiens
  misc_RNA (1)...(19): siRNA sense strand
caguucagaccaagaauuc

SEQ ID NO: 1918857 - RNA, 19 nt, Homo sapiens
  misc_RNA (1)...(19): siRNA sense strand
agauagagcaggcugaaca

SEQ ID NO: 1918858 - RNA, 19 nt, Homo sapiens
  misc_RNA (1)...(19): siRNA sense strand
gaucaacauagaccucaca

SEQ ID NO: 1918859 - RNA, 19 nt, Homo sapiens
  misc_RNA (1)...(19): siRNA sense strand
ucucugaagaucucacaaa

SEQ ID NO: 1918860 - RNA, 19 nt, Homo sapiens
  misc_RNA (1)...(19): siRNA sense strand
gcugaugguuacgaaguag

SEQ ID NO: 1918861 - RNA, 19 nt, Homo sapiens
  misc_RNA (1)...(19): siRNA sense strand
uagagcaggcugaacaugu

SEQ ID NO: 1918862 - RNA, 19 nt, Homo sapiens
  misc_RNA (1)...(19): siRNA sense strand
cgagaucauucaggaugug

SEQ ID NO: 1918863 - RNA, 19 nt, Homo sapiens
  misc_RNA (1)...(19): siRNA sense strand
cauuaagccaccagucuau

SEQ ID NO: 1918864 - RNA, 19 nt, Homo sapiens
  misc_RNA (1)...(19): siRNA sense strand
gaaaaugaaagccaccaau

SEQ ID NO: 1918865 - RNA, 19 nt, Homo sapiens
  misc_RNA (1)...(19): siRNA sense strand
guaucaagcgguuggaagu

SEQ ID NO: 1918866 - RNA, 19 nt, Homo sapiens
  misc_RNA (1)...(19): siRNA sense strand
ccagagccaagugguguuu

SEQ ID NO: 1918867 - RNA, 19 nt, Homo sapiens
  misc_RNA (1)...(19): siRNA sense strand
cagacggcauuggcaguga

SEQ ID NO: 1918868 - RNA, 19 nt, Homo sapiens
  misc_RNA (1)...(19): siRNA sense strand
cagucuaugugacaguuuc

SEQ ID NO: 1918869 - RNA, 19 nt, Homo sapiens
  misc_RNA (1)...(19): siRNA sense strand
uagcagagugucuuggaau

SEQ ID NO: 1918870 - RNA, 19 nt, Homo sapiens
  misc_RNA (1)...(19): siRNA sense strand
gauagagcaggcugaacau

SEQ ID NO: 1918871 - RNA, 19 nt, Homo sapiens
  misc_RNA (1)...(19): siRNA sense strand
ccgagaucauucaggaugu

SEQ ID NO: 1918872 - RNA, 19 nt, Homo sapiens
  misc_RNA (1)...(19): siRNA sense strand
ccaagaauucacugcaaca

SEQ ID NO: 1918873 - RNA, 19 nt, Homo sapiens
  misc_RNA (1)...(19): siRNA sense strand
ccuuuaauguggaaaucug

SEQ ID NO: 1918874 - RNA, 19 nt, Homo sapiens
  misc_RNA (1)...(19): siRNA sense strand
uaugugacaguuucauuuc

SEQ ID NO: 1918875 - RNA, 19 nt, Homo sapiens
  misc_RNA (1)...(19): siRNA sense strand
gcagagugucuuggaauac

SEQ ID NO: 1918876 - RNA, 19 nt, Homo sapiens
  misc_RNA (1)...(19): siRNA sense strand
agagccaagugguguuuag

SEQ ID NO: 1918877 - RNA, 19 nt, Homo sapiens
  misc_RNA (1)...(19): siRNA sense strand
cacaaagcuuggaaauugc

SEQ ID NO: 1918878 - RNA, 19 nt, Homo sapiens
  misc_RNA (1)...(19): siRNA sense strand
ggaggcguucaccuuggua

SEQ ID NO: 1918879 - RNA, 19 nt, Homo sapiens
  misc_RNA (1)...(19): siRNA sense strand
aaugaaagccaccaaugag

SEQ ID NO: 1918880 - RNA, 19 nt, Homo sapiens
  misc_RNA (1)...(19): siRNA sense strand
cacuuaaggaucuguauca

SEQ ID NO: 1918881 - RNA, 19 nt, Homo sapiens
  misc_RNA (1)...(19): siRNA sense strand
gagaagaaaucagguaauu

SEQ ID NO: 1918882 - RNA, 19 nt, Homo sapiens
  misc_RNA (1)...(19): siRNA sense strand
gaaaggaauucuuagcaau

SEQ ID NO: 1918883 - RNA, 19 nt, Homo sapiens
  misc_RNA (1)...(19): siRNA sense strand
cagaugaaauggacuauga

SEQ ID NO: 1918884 - RNA, 19 nt, Homo sapiens
  misc_RNA (1)...(19): siRNA sense strand
gaaguggaaucucaguuga

SEQ ID NO: 1918885 - RNA, 19 nt, Homo sapiens
  misc_RNA (1)...(19): siRNA sense strand
aagaagagccgguuagaua

SEQ ID NO: 1918886 - RNA, 19 nt, Homo sapiens
  misc_RNA (1)...(19): siRNA sense strand
caaauuaccaccugagaaa

SEQ ID NO: 1918887 - RNA, 19 nt, Homo sapiens
  misc_RNA (1)...(19): siRNA sense strand
gaaauggacuaugaucuag

SEQ ID NO: 1918888 - RNA, 19 nt, Homo sapiens
  misc_RNA (1)...(19): siRNA sense strand
ggacuaugaucuagaacug

SEQ ID NO: 1918889 - RNA, 19 nt, Homo sapiens
  misc_RNA (1)...(19): siRNA sense strand
ggacauggaugcagaugac

SEQ ID NO: 1918890 - RNA, 19 nt, Homo sapiens
  misc_RNA (1)...(19): siRNA sense strand
ugaaaggaauucuuagcaa

SEQ ID NO: 1918891 - RNA, 19 nt, Homo sapiens
  misc_RNA (1)...(19): siRNA sense strand
ugaaauggacuaugaucua

SEQ ID NO: 1918892 - RNA, 19 nt, Homo sapiens
  misc_RNA (1)...(19): siRNA sense strand
aaaccgaauugguaacaaa

SEQ ID NO: 1918893 - RNA, 19 nt, Homo sapiens
  misc_RNA (1)...(19): siRNA sense strand
gaaagcagcucugguucag

SEQ ID NO: 1918894 - RNA, 19 nt, Homo sapiens
  misc_RNA (1)...(19): siRNA sense strand
ggcaugaaaggaauucuua

SEQ ID NO: 1918895 - RNA, 19 nt, Homo sapiens
  misc_RNA (1)...(19): siRNA sense strand
guauaaacaucgacauucu

SEQ ID NO: 1918896 - RNA, 19 nt, Homo sapiens
  misc_RNA (1)...(19): siRNA sense strand
ggaggaagaggaagaggaa

SEQ ID NO: 1918897 - RNA, 19 nt, Homo sapiens
  misc_RNA (1)...(19): siRNA sense strand
gcaugaaaaugacuaugua

SEQ ID NO: 1918898 - RNA, 19 nt, Homo sapiens
  misc_RNA (1)...(19): siRNA sense strand
aaagagcagucucgccaaa

SEQ ID NO: 1918899 - RNA, 19 nt, Homo sapiens
  misc_RNA (1)...(19): siRNA sense strand
acagaguggugguagagua

SEQ ID NO: 1918900 - RNA, 19 nt, Homo sapiens
  misc_RNA (1)...(19): siRNA sense strand
ggaaagcagcucugguuca

SEQ ID NO: 1918901 - RNA, 19 nt, Homo sapiens
  misc_RNA (1)...(19): siRNA sense strand
ggaagaggaagaggaagaa

SEQ ID NO: 1918902 - RNA, 19 nt, Homo sapiens
  misc_RNA (1)...(19): siRNA sense strand
gggagaagaaaucagguaa

SEQ ID NO: 1918903 - RNA, 19 nt, Homo sapiens
  misc_RNA (1)...(19): siRNA sense strand
ccagucagcaguacuaaau

SEQ ID NO: 1918904 - RNA, 19 nt, Homo sapiens
  misc_RNA (1)...(19): siRNA sense strand
gacuauguaugcugacgaa

SEQ ID NO: 1918905 - RNA, 19 nt, Homo sapiens
  misc_RNA (1)...(19): siRNA sense strand
cgaaguggaaucucaguug

SEQ ID NO: 1918906 - RNA, 19 nt, Homo sapiens
  misc_RNA (1)...(19): siRNA sense strand
agaagagccgguuagauaa

SEQ ID NO: 1918907 - RNA, 19 nt, Homo sapiens
  misc_RNA (1)...(19): siRNA sense strand
gaucugcacccaagaccaa

SEQ ID NO: 1918908 - RNA, 19 nt, Homo sapiens
  misc_RNA (1)...(19): siRNA sense strand
gaaauaugggaauccaaau

SEQ ID NO: 1918909 - RNA, 19 nt, Homo sapiens
  misc_RNA (1)...(19): siRNA sense strand
caagaagagagcccugauu

SEQ ID NO: 1918910 - RNA, 19 nt, Homo sapiens
  misc_RNA (1)...(19): siRNA sense strand
ugagaaauuugcagauguc

SEQ ID NO: 1918911 - RNA, 19 nt, Homo sapiens
  misc_RNA (1)...(19): siRNA sense strand
caugagggcagauagugua

SEQ ID NO: 1918912 - RNA, 19 nt, Homo sapiens
  misc_RNA (1)...(19): siRNA sense strand
uauguaugcugacgaagug

SEQ ID NO: 1918913 - RNA, 19 nt, Homo sapiens
  misc_RNA (1)...(19): siRNA sense strand
aauggacuaugaucuagaa

SEQ ID NO: 1918914 - RNA, 19 nt, Homo sapiens
  misc_RNA (1)...(19): siRNA sense strand
gggcucugauuaaggagaa

SEQ ID NO: 1918915 - RNA, 19 nt, Homo sapiens
  misc_RNA (1)...(19): siRNA sense strand
uaguguaucuucaagcaau

SEQ ID NO: 1918916 - RNA, 19 nt, Homo sapiens
  misc_RNA (1)...(19): siRNA sense strand
aagaagagagcccugauug

SEQ ID NO: 1918917 - RNA, 19 nt, Homo sapiens
  misc_RNA (1)...(19): siRNA sense strand
gaaguuagucgggaaagca

SEQ ID NO: 1918918 - RNA, 19 nt, Homo sapiens
  misc_RNA (1)...(19): siRNA sense strand
gcacccaagaccaaagaaa

SEQ ID NO: 1918919 - RNA, 19 nt, Homo sapiens
  misc_RNA (1)...(19): siRNA sense strand
ggaggaggaggaagaggaa

SEQ ID NO: 1918920 - RNA, 19 nt, Homo sapiens
  misc_RNA (1)...(19): siRNA sense strand
acuaugaucuagaacugaa

SEQ ID NO: 1918921 - RNA, 19 nt, Homo sapiens
  misc_RNA (1)...(19): siRNA sense strand
gauauacgccagcgguuag

SEQ ID NO: 1918922 - RNA, 19 nt, Homo sapiens
  misc_RNA (1)...(19): siRNA sense strand
cagcaguacuaaaucagau

SEQ ID NO: 1918923 - RNA, 19 nt, Homo sapiens
  misc_RNA (1)...(19): siRNA sense strand
ccgaggaacccauugaaga

SEQ ID NO: 1918924 - RNA, 19 nt, Homo sapiens
  misc_RNA (1)...(19): siRNA sense strand
ggagaagaaaucagguaau

SEQ ID NO: 1918925 - RNA, 19 nt, Homo sapiens
  misc_RNA (1)...(19): siRNA sense strand
agauaucauucccgucgua

SEQ ID NO: 1918926 - RNA, 19 nt, Homo sapiens
  misc_RNA (1)...(19): siRNA sense strand
agaggaagaggaagaagaa

SEQ ID NO: 1918927 - RNA, 19 nt, Homo sapiens
  misc_RNA (1)...(19): siRNA sense strand
cuucugaugugcauaguag

SEQ ID NO: 1918928 - RNA, 19 nt, Homo sapiens
  misc_RNA (1)...(19): siRNA sense strand
gcaguacuaaaucagauau

SEQ ID NO: 1918929 - RNA, 19 nt, Homo sapiens
  misc_RNA (1)...(19): siRNA sense strand
ccugagaaauuugcagaug

SEQ ID NO: 1918930 - RNA, 19 nt, Homo sapiens
  misc_RNA (1)...(19): siRNA sense strand
aguggaaucucaguugaaa

SEQ ID NO: 1918931 - RNA, 19 nt, Homo sapiens
  misc_RNA (1)...(19): siRNA sense strand
cagcucagacucagaugaa

SEQ ID NO: 1918932 - RNA, 19 nt, Homo sapiens
  misc_RNA (1)...(19): siRNA sense strand
uaucauucccgucguauuc

SEQ ID NO: 1918933 - RNA, 19 nt, Homo sapiens
  misc_RNA (1)...(19): siRNA sense strand
ccaccagucagcaguacua

SEQ ID NO: 1918934 - RNA, 19 nt, Homo sapiens
  misc_RNA (1)...(19): siRNA sense strand
ggaagaggaagaagaagac

SEQ ID NO: 1918935 - RNA, 19 nt, Homo sapiens
  misc_RNA (1)...(19): siRNA sense strand
gaucuagaacugaaaauga

SEQ ID NO: 1918936 - RNA, 19 nt, Homo sapiens
  misc_RNA (1)...(19): siRNA sense strand
agucagcaguacuaaauca

SEQ ID NO: 1918937 - RNA, 19 nt, Homo sapiens
  misc_RNA (1)...(19): siRNA sense strand
cgggaaagcagcucugguu

SEQ ID NO: 1918938 - RNA, 19 nt, Homo sapiens
  misc_RNA (1)...(19): siRNA sense strand
gaugaaauggacuaugauc

SEQ ID NO: 1918939 - RNA, 19 nt, Homo sapiens
  misc_RNA (1)...(19): siRNA sense strand
gguguucccaggcaggaua

SEQ ID NO: 1918940 - RNA, 19 nt, Homo sapiens
  misc_RNA (1)...(19): siRNA sense strand
gcucagacucagaugaaau

SEQ ID NO: 1918941 - RNA, 19 nt, Homo sapiens
  misc_RNA (1)...(19): siRNA sense strand
uuuauggacucgccuagga

SEQ ID NO: 1918942 - RNA, 19 nt, Homo sapiens
  misc_RNA (1)...(19): siRNA sense strand
cauaguaggcuagguguuc

SEQ ID NO: 1918943 - RNA, 19 nt, Homo sapiens
  misc_RNA (1)...(19): siRNA sense strand
uggaagcgaagauaucauu

SEQ ID NO: 1918944 - RNA, 19 nt, Homo sapiens
  misc_RNA (1)...(19): siRNA sense strand
ccaaagaaaagcaugaaaa

SEQ ID NO: 1918945 - RNA, 19 nt, Homo sapiens
  misc_RNA (1)...(19): siRNA sense strand
aauauuaggaacuccauga

SEQ ID NO: 1918946 - RNA, 19 nt, Homo sapiens
  misc_RNA (1)...(19): siRNA sense strand
agacgacucugagcugcaa

SEQ ID NO: 1918947 - RNA, 19 nt, Homo sapiens
  misc_RNA (1)...(19): siRNA sense strand
cugagaaauuugcagaugu

SEQ ID NO: 1918948 - RNA, 19 nt, Homo sapiens
  misc_RNA (1)...(19): siRNA sense strand
gcagcucagacucagauga

SEQ ID NO: 1918949 - RNA, 19 nt, Homo sapiens
  misc_RNA (1)...(19): siRNA sense strand
agaagaagaccaggacaug

SEQ ID NO: 1918950 - RNA, 19 nt, Homo sapiens
  misc_RNA (1)...(19): siRNA sense strand
caaauuauggaggcaugaa

SEQ ID NO: 1918951 - RNA, 19 nt, Homo sapiens
  misc_RNA (1)...(19): siRNA sense strand
gaaaagaauacgaagaaag

SEQ ID NO: 1918952 - RNA, 19 nt, Homo sapiens
  misc_RNA (1)...(19): siRNA sense strand
auuaccaccugagaaauuu

SEQ ID NO: 1918953 - RNA, 19 nt, Homo sapiens
  misc_RNA (1)...(19): siRNA sense strand
aagaagaccaggacaugga

SEQ ID NO: 1918954 - RNA, 19 nt, Homo sapiens
  misc_RNA (1)...(19): siRNA sense strand
aaaggccucuacgccgaua

SEQ ID NO: 1918955 - RNA, 19 nt, Homo sapiens
  misc_RNA (1)...(19): siRNA sense strand
agauauacgccagcgguua

SEQ ID NO: 1918956 - RNA, 19 nt, Homo sapiens
  misc_RNA (1)...(19): siRNA sense strand
acaaauuaccaccugagaa

SEQ ID NO: 1918957 - RNA, 19 nt, Homo sapiens
  misc_RNA (1)...(19): siRNA sense strand
cgaggaacccauugaagag

SEQ ID NO: 1918958 - RNA, 19 nt, Homo sapiens
  misc_RNA (1)...(19): siRNA sense strand
uauggaggcaugaaaggaa

SEQ ID NO: 1918959 - RNA, 19 nt, Homo sapiens
  misc_RNA (1)...(19): siRNA sense strand
ggaagcgaagauaucauuc

SEQ ID NO: 1918960 - RNA, 19 nt, Homo sapiens
  misc_RNA (1)...(19): siRNA sense strand
gggacgugaucaagaagag

SEQ ID NO: 1918961 - RNA, 19 nt, Homo sapiens
  misc_RNA (1)...(19): siRNA sense strand
gaaaaugacuauguaugcu

SEQ ID NO: 1918962 - RNA, 19 nt, Homo sapiens
  misc_RNA (1)...(19): siRNA sense strand
cugacgaaguggaaucuca

SEQ ID NO: 1918963 - RNA, 19 nt, Homo sapiens
  misc_RNA (1)...(19): siRNA sense strand
ccaaagaaaagaauacgaa

SEQ ID NO: 1918964 - RNA, 19 nt, Homo sapiens
  misc_RNA (1)...(19): siRNA sense strand
cauggaagcgaagauauca

SEQ ID NO: 1918965 - RNA, 19 nt, Homo sapiens
  misc_RNA (1)...(19): siRNA sense strand
cagcgggacgugaucaaga

SEQ ID NO: 1918966 - RNA, 19 nt, Homo sapiens
  misc_RNA (1)...(19): siRNA sense strand
agaccacauucuccggaaa

SEQ ID NO: 1918967 - RNA, 19 nt, Homo sapiens
  misc_RNA (1)...(19): siRNA sense strand
cagcagcucagacucagau

SEQ ID NO: 1918968 - RNA, 19 nt, Homo sapiens
  misc_RNA (1)...(19): siRNA sense strand
ggcuugacgucguauaaac

SEQ ID NO: 1918969 - RNA, 19 nt, Homo sapiens
  misc_RNA (1)...(19): siRNA sense strand
cguauaaacaucgacauuc

SEQ ID NO: 1918970 - RNA, 19 nt, Homo sapiens
  misc_RNA (1)...(19): siRNA sense strand
aguguaucuucaagcaaua

SEQ ID NO: 1918971 - RNA, 19 nt, Homo sapiens
  misc_RNA (1)...(19): siRNA sense strand
gcaugaaaggaauucuuag

SEQ ID NO: 1918972 - RNA, 19 nt, Homo sapiens
  misc_RNA (1)...(19): siRNA sense strand
gauacucgggagaagaaau

SEQ ID NO: 1918973 - RNA, 19 nt, Homo sapiens
  misc_RNA (1)...(19): siRNA sense strand
cgacauucugggcuaguga

SEQ ID NO: 1918974 - RNA, 19 nt, Homo sapiens
  misc_RNA (1)...(19): siRNA sense strand
ccauugaagaggaggaaga

SEQ ID NO: 1918975 - RNA, 19 nt, Homo sapiens
  misc_RNA (1)...(19): siRNA sense strand
uaugggaauccaaauuaug

SEQ ID NO: 1918976 - RNA, 19 nt, Homo sapiens
  misc_RNA (1)...(19): siRNA sense strand
cgggagaagaaaucaggua

SEQ ID NO: 1918977 - RNA, 19 nt, Homo sapiens
  misc_RNA (1)...(19): siRNA sense strand
agcgggacgugaucaagaa

SEQ ID NO: 1918978 - RNA, 19 nt, Homo sapiens
  misc_RNA (1)...(19): siRNA sense strand
ggacgugaucaagaagaga

SEQ ID NO: 1918979 - RNA, 19 nt, Homo sapiens
  misc_RNA (1)...(19): siRNA sense strand
gaagcgaagauaucauucc

SEQ ID NO: 1918980 - RNA, 19 nt, Homo sapiens
  misc_RNA (1)...(19): siRNA sense strand
ggccaaagaugaccauuua

SEQ ID NO: 1918981 - RNA, 19 nt, Homo sapiens
  misc_RNA (1)...(19): siRNA sense strand
gcaacgagauggugcagaa

SEQ ID NO: 1918982 - RNA, 19 nt, Homo sapiens
  misc_RNA (1)...(19): siRNA sense strand
gaagggagccgaucggaaa

SEQ ID NO: 1918983 - RNA, 19 nt, Homo sapiens
  misc_RNA (1)...(19): siRNA sense strand
gugcagaacuuccaagaug

SEQ ID NO: 1918984 - RNA, 19 nt, Homo sapiens
  misc_RNA (1)...(19): siRNA sense strand
caaggucagucuuaugaaa

SEQ ID NO: 1918985 - RNA, 19 nt, Homo sapiens
  misc_RNA (1)...(19): siRNA sense strand
gaaaagaacugcccaagag

SEQ ID NO: 1918986 - RNA, 19 nt, Homo sapiens
  misc_RNA (1)...(19): siRNA sense strand
gaagaugucccgagaugau

SEQ ID NO: 1918987 - RNA, 19 nt, Homo sapiens
  misc_RNA (1)...(19): siRNA sense strand
gagagcuucugcauucauu

SEQ ID NO: 1918988 - RNA, 19 nt, Homo sapiens
  misc_RNA (1)...(19): siRNA sense strand
uggaagagcugaccaccuu

SEQ ID NO: 1918989 - RNA, 19 nt, Homo sapiens
  misc_RNA (1)...(19): siRNA sense strand
caaccaaggucagucuuau

SEQ ID NO: 1918990 - RNA, 19 nt, Homo sapiens
  misc_RNA (1)...(19): siRNA sense strand
gcaacagguucucgcaguu

SEQ ID NO: 1918991 - RNA, 19 nt, Homo sapiens
  misc_RNA (1)...(19): siRNA sense strand
gucaggagcuggagcagaa

SEQ ID NO: 1918992 - RNA, 19 nt, Homo sapiens
  misc_RNA (1)...(19): siRNA sense strand
ccugaaauguggacucuga

SEQ ID NO: 1918993 - RNA, 19 nt, Homo sapiens
  misc_RNA (1)...(19): siRNA sense strand
gagaugauuugguccagau

SEQ ID NO: 1918994 - RNA, 19 nt, Homo sapiens
  misc_RNA (1)...(19): siRNA sense strand
caaagaugaccauuuaugu

SEQ ID NO: 1918995 - RNA, 19 nt, Homo sapiens
  misc_RNA (1)...(19): siRNA sense strand
cccaagagaaggagaaaua

SEQ ID NO: 1918996 - RNA, 19 nt, Homo sapiens
  misc_RNA (1)...(19): siRNA sense strand
gauauuccacugucuguug

SEQ ID NO: 1918997 - RNA, 19 nt, Homo sapiens
  misc_RNA (1)...(19): siRNA sense strand
ccaaagaugaccauuuaug

SEQ ID NO: 1918998 - RNA, 19 nt, Homo sapiens
  misc_RNA (1)...(19): siRNA sense strand
ccuuggagcugauugagaa

SEQ ID NO: 1918999 - RNA, 19 nt, Homo sapiens
  misc_RNA (1)...(19): siRNA sense strand
gaacugcccaagagaagga

SEQ ID NO: 1919000 - RNA, 19 nt, Homo sapiens
  misc_RNA (1)...(19): siRNA sense strand
ccgugaagcugcaugaaga

SEQ ID NO: 1919001 - RNA, 19 nt, Homo sapiens
  misc_RNA (1)...(19): siRNA sense strand
agaaauaccagccguccua

SEQ ID NO: 1919002 - RNA, 19 nt, Homo sapiens
  misc_RNA (1)...(19): siRNA sense strand
gcugaaugcagucgaguuu

SEQ ID NO: 1919003 - RNA, 19 nt, Homo sapiens
  misc_RNA (1)...(19): siRNA sense strand
caagaugaauccuguuuug

SEQ ID NO: 1919004 - RNA, 19 nt, Homo sapiens
  misc_RNA (1)...(19): siRNA sense strand
gcagaacuuccaagaugaa

SEQ ID NO: 1919005 - RNA, 19 nt, Homo sapiens
  misc_RNA (1)...(19): siRNA sense strand
gaugaccauuuaugucugu

SEQ ID NO: 1919006 - RNA, 19 nt, Homo sapiens
  misc_RNA (1)...(19): siRNA sense strand
caaaauaugucaagagcau

SEQ ID NO: 1919007 - RNA, 19 nt, Homo sapiens
  misc_RNA (1)...(19): siRNA sense strand
gcacauccaccgagucuac

SEQ ID NO: 1919008 - RNA, 19 nt, Homo sapiens
  misc_RNA (1)...(19): siRNA sense strand
ggugcugacuugcugaaga

SEQ ID NO: 1919009 - RNA, 19 nt, Homo sapiens
  misc_RNA (1)...(19): siRNA sense strand
uaccagccguccuaugaaa

SEQ ID NO: 1919010 - RNA, 19 nt, Homo sapiens
  misc_RNA (1)...(19): siRNA sense strand
gagccgaucggaaacagaa

SEQ ID NO: 1919011 - RNA, 19 nt, Homo sapiens
  misc_RNA (1)...(19): siRNA sense strand
gaguccagauugacacguu

SEQ ID NO: 1919012 - RNA, 19 nt, Homo sapiens
  misc_RNA (1)...(19): siRNA sense strand
cugaagaugucccgagaug

SEQ ID NO: 1919013 - RNA, 19 nt, Homo sapiens
  misc_RNA (1)...(19): siRNA sense strand
aaaccaccauccucacaga

SEQ ID NO: 1919014 - RNA, 19 nt, Homo sapiens
  misc_RNA (1)...(19): siRNA sense strand
gcugggagacuuucaagau

SEQ ID NO: 1919015 - RNA, 19 nt, Homo sapiens
  misc_RNA (1)...(19): siRNA sense strand
gcucuucaacgccaucaaa

SEQ ID NO: 1919016 - RNA, 19 nt, Homo sapiens
  misc_RNA (1)...(19): siRNA sense strand
gaugggauccggcucuuca

SEQ ID NO: 1919017 - RNA, 19 nt, Homo sapiens
  misc_RNA (1)...(19): siRNA sense strand
uacaaugguucuccaaaca

SEQ ID NO: 1919018 - RNA, 19 nt, Homo sapiens
  misc_RNA (1)...(19): siRNA sense strand
ucaaccaaggucagucuua

SEQ ID NO: 1919019 - RNA, 19 nt, Homo sapiens
  misc_RNA (1)...(19): siRNA sense strand
acacgcagcccgagcacua

SEQ ID NO: 1919020 - RNA, 19 nt, Homo sapiens
  misc_RNA (1)...(19): siRNA sense strand
gugcugacuugcugaagau

SEQ ID NO: 1919021 - RNA, 19 nt, Homo sapiens
  misc_RNA (1)...(19): siRNA sense strand
gauccuggacaucgauauu

SEQ ID NO: 1919022 - RNA, 19 nt, Homo sapiens
  misc_RNA (1)...(19): siRNA sense strand
gggagaagauggagaaaag

SEQ ID NO: 1919023 - RNA, 19 nt, Homo sapiens
  misc_RNA (1)...(19): siRNA sense strand
aauuaaagcugagagcaau

SEQ ID NO: 1919024 - RNA, 19 nt, Homo sapiens
  misc_RNA (1)...(19): siRNA sense strand
aauaccagccguccuauga

SEQ ID NO: 1919025 - RNA, 19 nt, Homo sapiens
  misc_RNA (1)...(19): siRNA sense strand
caucauccguguggucuuc

SEQ ID NO: 1919026 - RNA, 19 nt, Homo sapiens
  misc_RNA (1)...(19): siRNA sense strand
gcuaccacaucauccugaa

SEQ ID NO: 1919027 - RNA, 19 nt, Homo sapiens
  misc_RNA (1)...(19): siRNA sense strand
gcaaugauggcuaccacau

SEQ ID NO: 1919028 - RNA, 19 nt, Homo sapiens
  misc_RNA (1)...(19): siRNA sense strand
caauuaaagcugagagcaa

SEQ ID NO: 1919029 - RNA, 19 nt, Homo sapiens
  misc_RNA (1)...(19): siRNA sense strand
ggaaugugaggccaaagau

SEQ ID NO: 1919030 - RNA, 19 nt, Homo sapiens
  misc_RNA (1)...(19): siRNA sense strand
aaagaacugcccaagagaa

SEQ ID NO: 1919031 - RNA, 19 nt, Homo sapiens
  misc_RNA (1)...(19): siRNA sense strand
aaugugaggccaaagauga

SEQ ID NO: 1919032 - RNA, 19 nt, Homo sapiens
  misc_RNA (1)...(19): siRNA sense strand
cuacaaugguucuccaaac

SEQ ID NO: 1919033 - RNA, 19 nt, Homo sapiens
  misc_RNA (1)...(19): siRNA sense strand
gaagcugggagacuuucaa

SEQ ID NO: 1919034 - RNA, 19 nt, Homo sapiens
  misc_RNA (1)...(19): siRNA sense strand
gaacuuccaagaugaaucc

SEQ ID NO: 1919035 - RNA, 19 nt, Homo sapiens
  misc_RNA (1)...(19): siRNA sense strand
gaaauaccagccguccuau

SEQ ID NO: 1919036 - RNA, 19 nt, Homo sapiens
  misc_RNA (1)...(19): siRNA sense strand
gcugccagaucaagguguu

SEQ ID NO: 1919037 - RNA, 19 nt, Homo sapiens
  misc_RNA (1)...(19): siRNA sense strand
gaaugugaggccaaagaug

SEQ ID NO: 1919038 - RNA, 19 nt, Homo sapiens
  misc_RNA (1)...(19): siRNA sense strand
gagcuucugcauucauuca

SEQ ID NO: 1919039 - RNA, 19 nt, Homo sapiens
  misc_RNA (1)...(19): siRNA sense strand
ugcagaacuuccaagauga

SEQ ID NO: 1919040 - RNA, 19 nt, Homo sapiens
  misc_RNA (1)...(19): siRNA sense strand
gaucugaacacaaaauaug

SEQ ID NO: 1919041 - RNA, 19 nt, Homo sapiens
  misc_RNA (1)...(19): siRNA sense strand
gggagacuuucaagaucug

SEQ ID NO: 1919042 - RNA, 19 nt, Homo sapiens
  misc_RNA (1)...(19): siRNA sense strand
caucaaaggccggaaugug

SEQ ID NO: 1919043 - RNA, 19 nt, Homo sapiens
  misc_RNA (1)...(19): siRNA sense strand
gcuacaaugguucuccaaa

SEQ ID NO: 1919044 - RNA, 19 nt, Homo sapiens
  misc_RNA (1)...(19): siRNA sense strand
agacugaccgggagaagau

SEQ ID NO: 1919045 - RNA, 19 nt, Homo sapiens
  misc_RNA (1)...(19): siRNA sense strand
gaacacaaaauaugucaag

SEQ ID NO: 1919046 - RNA, 19 nt, Homo sapiens
  misc_RNA (1)...(19): siRNA sense strand
aaagaugaccauuuauguc

SEQ ID NO: 1919047 - RNA, 19 nt, Homo sapiens
  misc_RNA (1)...(19): siRNA sense strand
gcucuuugccagcuucuca

SEQ ID NO: 1919048 - RNA, 19 nt, Homo sapiens
  misc_RNA (1)...(19): siRNA sense strand
caacagguucucgcaguuc

SEQ ID NO: 1919049 - RNA, 19 nt, Homo sapiens
  misc_RNA (1)...(19): siRNA sense strand
augaagagacgcugaccua

SEQ ID NO: 1919050 - RNA, 19 nt, Homo sapiens
  misc_RNA (1)...(19): siRNA sense strand
gccggaaugugaggccaaa

SEQ ID NO: 1919051 - RNA, 19 nt, Homo sapiens
  misc_RNA (1)...(19): siRNA sense strand
gagaagauggagaaaagaa

SEQ ID NO: 1919052 - RNA, 19 nt, Homo sapiens
  misc_RNA (1)...(19): siRNA sense strand
guccagauugacacguuua

SEQ ID NO: 1919053 - RNA, 19 nt, Homo sapiens
  misc_RNA (1)...(19): siRNA sense strand
uuaaagcugagagcaauga

SEQ ID NO: 1919054 - RNA, 19 nt, Homo sapiens
  misc_RNA (1)...(19): siRNA sense strand
aagagacgcugaccuaccu

SEQ ID NO: 1919055 - RNA, 19 nt, Homo sapiens
  misc_RNA (1)...(19): siRNA sense strand
gugggacccugcgaagaga

SEQ ID NO: 1919056 - RNA, 19 nt, Homo sapiens
  misc_RNA (1)...(19): siRNA sense strand
ugggagacuuucaagaucu

SEQ ID NO: 1919057 - RNA, 19 nt, Homo sapiens
  misc_RNA (1)...(19): siRNA sense strand
accaaggucagucuuauga

SEQ ID NO: 1919058 - RNA, 19 nt, Homo sapiens
  misc_RNA (1)...(19): siRNA sense strand
guccucagcacaauuaaag

SEQ ID NO: 1919059 - RNA, 19 nt, Homo sapiens
  misc_RNA (1)...(19): siRNA sense strand
aagaugaccauuuaugucu

SEQ ID NO: 1919060 - RNA, 19 nt, Homo sapiens
  misc_RNA (1)...(19): siRNA sense strand
cugggagacuuucaagauc

SEQ ID NO: 1919061 - RNA, 19 nt, Homo sapiens
  misc_RNA (1)...(19): siRNA sense strand
aaauaugucaagagcauca

SEQ ID NO: 1919062 - RNA, 19 nt, Homo sapiens
  misc_RNA (1)...(19): siRNA sense strand
uaccacaucauccugaaau

SEQ ID NO: 1919063 - RNA, 19 nt, Homo sapiens
  misc_RNA (1)...(19): siRNA sense strand
cggaaugugaggccaaaga

SEQ ID NO: 1919064 - RNA, 19 nt, Homo sapiens
  misc_RNA (1)...(19): siRNA sense strand
gaacgagaauggggaguac

SEQ ID NO: 1919065 - RNA, 19 nt, Homo sapiens
  misc_RNA (1)...(19): siRNA sense strand
ugaaaccaccauccucaca

SEQ ID NO: 1919066 - RNA, 19 nt, Homo sapiens
  misc_RNA (1)...(19): siRNA sense strand
acgagauggugcagaacuu

SEQ ID NO: 1919067 - RNA, 19 nt, Homo sapiens
  misc_RNA (1)...(19): siRNA sense strand
aucaaaggccggaauguga

SEQ ID NO: 1919068 - RNA, 19 nt, Homo sapiens
  misc_RNA (1)...(19): siRNA sense strand
cagaugggauccggcucuu

SEQ ID NO: 1919069 - RNA, 19 nt, Homo sapiens
  misc_RNA (1)...(19): siRNA sense strand
gaugucccgagaugauuug

SEQ ID NO: 1919070 - RNA, 19 nt, Homo sapiens
  misc_RNA (1)...(19): siRNA sense strand
ccaaggucagucuuaugaa

SEQ ID NO: 1919071 - RNA, 19 nt, Homo sapiens
  misc_RNA (1)...(19): siRNA sense strand
uccaagaugaauccuguuu

SEQ ID NO: 1919072 - RNA, 19 nt, Homo sapiens
  misc_RNA (1)...(19): siRNA sense strand
gaaaggaacuuacagauuu

SEQ ID NO: 1919073 - RNA, 19 nt, Homo sapiens
  misc_RNA (1)...(19): siRNA sense strand
gaaagaggauuauacagaa

SEQ ID NO: 1919074 - RNA, 19 nt, Homo sapiens
  misc_RNA (1)...(19): siRNA sense strand
gaacugacauuugaugaaa

SEQ ID NO: 1919075 - RNA, 19 nt, Homo sapiens
  misc_RNA (1)...(19): siRNA sense strand
caaaguaacuacagacuau

SEQ ID NO: 1919076 - RNA, 19 nt, Homo sapiens
  misc_RNA (1)...(19): siRNA sense strand
gggcucagcuggcaaagua

SEQ ID NO: 1919077 - RNA, 19 nt, Homo sapiens
  misc_RNA (1)...(19): siRNA sense strand
ugacauagauccuacagaa

SEQ ID NO: 1919078 - RNA, 19 nt, Homo sapiens
  misc_RNA (1)...(19): siRNA sense strand
gcaagaggauauugacaaa

SEQ ID NO: 1919079 - RNA, 19 nt, Homo sapiens
  misc_RNA (1)...(19): siRNA sense strand
gaucauggcaucugcuuua

SEQ ID NO: 1919080 - RNA, 19 nt, Homo sapiens
  misc_RNA (1)...(19): siRNA sense strand
gaaaucacacccugagaua

SEQ ID NO: 1919081 - RNA, 19 nt, Homo sapiens
  misc_RNA (1)...(19): siRNA sense strand
gagaaaggaugaauauauc

SEQ ID NO: 1919082 - RNA, 19 nt, Homo sapiens
  misc_RNA (1)...(19): siRNA sense strand
guaguuaccuagauuguga

SEQ ID NO: 1919083 - RNA, 19 nt, Homo sapiens
  misc_RNA (1)...(19): siRNA sense strand
gaaacuagcagagcuuuaa

SEQ ID NO: 1919084 - RNA, 19 nt, Homo sapiens
  misc_RNA (1)...(19): siRNA sense strand
ggaagaaacugagaauaag

SEQ ID NO: 1919085 - RNA, 19 nt, Homo sapiens
  misc_RNA (1)...(19): siRNA sense strand
gaggaaagaaagaggauua

SEQ ID NO: 1919086 - RNA, 19 nt, Homo sapiens
  misc_RNA (1)...(19): siRNA sense strand
ggaaauugaaggaugcuua

SEQ ID NO: 1919087 - RNA, 19 nt, Homo sapiens
  misc_RNA (1)...(19): siRNA sense strand
caagacaacugaaagcaau

SEQ ID NO: 1919088 - RNA, 19 nt, Homo sapiens
  misc_RNA (1)...(19): siRNA sense strand
uagaagaguuacagaauga

SEQ ID NO: 1919089 - RNA, 19 nt, Homo sapiens
  misc_RNA (1)...(19): siRNA sense strand
ccuagaaucacuucaauua

SEQ ID NO: 1919090 - RNA, 19 nt, Homo sapiens
  misc_RNA (1)...(19): siRNA sense strand
gaaaguugauaucucugaa

SEQ ID NO: 1919091 - RNA, 19 nt, Homo sapiens
  misc_RNA (1)...(19): siRNA sense strand
gaaaaucagugucaaaugu

SEQ ID NO: 1919092 - RNA, 19 nt, Homo sapiens
  misc_RNA (1)...(19): siRNA sense strand
gaagagcaguugaggaaag

SEQ ID NO: 1919093 - RNA, 19 nt, Homo sapiens
  misc_RNA (1)...(19): siRNA sense strand
gaacuaaguccaccucuca

SEQ ID NO: 1919094 - RNA, 19 nt, Homo sapiens
  misc_RNA (1)...(19): siRNA sense strand
uaaggaugcugcaauguga

SEQ ID NO: 1919095 - RNA, 19 nt, Homo sapiens
  misc_RNA (1)...(19): siRNA sense strand
gaagaagagccuuguguga

SEQ ID NO: 1919096 - RNA, 19 nt, Homo sapiens
  misc_RNA (1)...(19): siRNA sense strand
gaccgaagaucaguuuaaa

SEQ ID NO: 1919097 - RNA, 19 nt, Homo sapiens
  misc_RNA (1)...(19): siRNA sense strand
ugacuuaugccuccuguua

SEQ ID NO: 1919098 - RNA, 19 nt, Homo sapiens
  misc_RNA (1)...(19): siRNA sense strand
ugacauaccuacugaucuu

SEQ ID NO: 1919099 - RNA, 19 nt, Homo sapiens
  misc_RNA (1)...(19): siRNA sense strand
gauauaagaccgaagauca

SEQ ID NO: 1919100 - RNA, 19 nt, Homo sapiens
  misc_RNA (1)...(19): siRNA sense strand
gaaagaaagaggauuauac

SEQ ID NO: 1919101 - RNA, 19 nt, Homo sapiens
  misc_RNA (1)...(19): siRNA sense strand
gaauaaauuucuggugaug

SEQ ID NO: 1919102 - RNA, 19 nt, Homo sapiens
  misc_RNA (1)...(19): siRNA sense strand
ggaacuuacagauuucuua

SEQ ID NO: 1919103 - RNA, 19 nt, Homo sapiens
  misc_RNA (1)...(19): siRNA sense strand
agagagaaguugcagcuaa

SEQ ID NO: 1919104 - RNA, 19 nt, Homo sapiens
  misc_RNA (1)...(19): siRNA sense strand
ggaaagaaagaggauuaua

SEQ ID NO: 1919105 - RNA, 19 nt, Homo sapiens
  misc_RNA (1)...(19): siRNA sense strand
uuaaagaucuccaggaagu

SEQ ID NO: 1919106 - RNA, 19 nt, Homo sapiens
  misc_RNA (1)...(19): siRNA sense strand
gauacaguuugcagaaauu

SEQ ID NO: 1919107 - RNA, 19 nt, Homo sapiens
  misc_RNA (1)...(19): siRNA sense strand
ggaugaauauaucaccauu

SEQ ID NO: 1919108 - RNA, 19 nt, Homo sapiens
  misc_RNA (1)...(19): siRNA sense strand
gaaggaugcuuauggaaaa

SEQ ID NO: 1919109 - RNA, 19 nt, Homo sapiens
  misc_RNA (1)...(19): siRNA sense strand
ucaaauccaugcuaaagau

SEQ ID NO: 1919110 - RNA, 19 nt, Homo sapiens
  misc_RNA (1)...(19): siRNA sense strand
gaugaagauuuaccuacaa

SEQ ID NO: 1919111 - RNA, 19 nt, Homo sapiens
  misc_RNA (1)...(19): siRNA sense strand
gaaacaagauugcauuccu

SEQ ID NO: 1919112 - RNA, 19 nt, Homo sapiens
  misc_RNA (1)...(19): siRNA sense strand
ucaagaggauucugcaaug

SEQ ID NO: 1919113 - RNA, 19 nt, Homo sapiens
  misc_RNA (1)...(19): siRNA sense strand
gagaaucccauugagaaua

SEQ ID NO: 1919114 - RNA, 19 nt, Homo sapiens
  misc_RNA (1)...(19): siRNA sense strand
gcacaccagauuaauauug

SEQ ID NO: 1919115 - RNA, 19 nt, Homo sapiens
  misc_RNA (1)...(19): siRNA sense strand
gagauacaguuugcagaaa

SEQ ID NO: 1919116 - RNA, 19 nt, Homo sapiens
  misc_RNA (1)...(19): siRNA sense strand
gggauauccuccuuaguga

SEQ ID NO: 1919117 - RNA, 19 nt, Homo sapiens
  misc_RNA (1)...(19): siRNA sense strand
acaagaaauuggagacaaa

SEQ ID NO: 1919118 - RNA, 19 nt, Homo sapiens
  misc_RNA (1)...(19): siRNA sense strand
uacagaagcugagaauaaa

SEQ ID NO: 1919119 - RNA, 19 nt, Homo sapiens
  misc_RNA (1)...(19): siRNA sense strand
auacagaagcugagaauaa

SEQ ID NO: 1919120 - RNA, 19 nt, Homo sapiens
  misc_RNA (1)...(19): siRNA sense strand
ucagcuaucugucuaccua

SEQ ID NO: 1919121 - RNA, 19 nt, Homo sapiens
  misc_RNA (1)...(19): siRNA sense strand
uaacagccgagguguauuu

SEQ ID NO: 1919122 - RNA, 19 nt, Homo sapiens
  misc_RNA (1)...(19): siRNA sense strand
gacuuuacguuucuugauu

SEQ ID NO: 1919123 - RNA, 19 nt, Homo sapiens
  misc_RNA (1)...(19): siRNA sense strand
gcaaaguaacuacagacua

SEQ ID NO: 1919124 - RNA, 19 nt, Homo sapiens
  misc_RNA (1)...(19): siRNA sense strand
gaaugaggaagaagaacua

SEQ ID NO: 1919125 - RNA, 19 nt, Homo sapiens
  misc_RNA (1)...(19): siRNA sense strand
gaaccgccaucuucugaca

SEQ ID NO: 1919126 - RNA, 19 nt, Homo sapiens
  misc_RNA (1)...(19): siRNA sense strand
ggaguuaccgcaauccaaa

SEQ ID NO: 1919127 - RNA, 19 nt, Homo sapiens
  misc_RNA (1)...(19): siRNA sense strand
agaaugugcuggaauccua

SEQ ID NO: 1919128 - RNA, 19 nt, Homo sapiens
  misc_RNA (1)...(19): siRNA sense strand
ggacugcuagaauuucaua

SEQ ID NO: 1919129 - RNA, 19 nt, Homo sapiens
  misc_RNA (1)...(19): siRNA sense strand
gaaauugaaggaugcuuau

SEQ ID NO: 1919130 - RNA, 19 nt, Homo sapiens
  misc_RNA (1)...(19): siRNA sense strand
gaagaccccuugugaaaga

SEQ ID NO: 1919131 - RNA, 19 nt, Homo sapiens
  misc_RNA (1)...(19): siRNA sense strand
gcagacauccugagacugu

SEQ ID NO: 1919132 - RNA, 19 nt, Homo sapiens
  misc_RNA (1)...(19): siRNA sense strand
ugauguaccuggaauuguu

SEQ ID NO: 1919133 - RNA, 19 nt, Homo sapiens
  misc_RNA (1)...(19): siRNA sense strand
cuacagaagaugaagauuu

SEQ ID NO: 1919134 - RNA, 19 nt, Homo sapiens
  misc_RNA (1)...(19): siRNA sense strand
cauucaagcuggcaauuau

SEQ ID NO: 1919135 - RNA, 19 nt, Homo sapiens
  misc_RNA (1)...(19): siRNA sense strand
caaagucaagcaaggauuu

SEQ ID NO: 1919136 - RNA, 19 nt, Homo sapiens
  misc_RNA (1)...(19): siRNA sense strand
gaaaaggaaugucucaauc

SEQ ID NO: 1919137 - RNA, 19 nt, Homo sapiens
  misc_RNA (1)...(19): siRNA sense strand
ggaccucaauacccaguga

SEQ ID NO: 1919138 - RNA, 19 nt, Homo sapiens
  misc_RNA (1)...(19): siRNA sense strand
gaauaucucccuugauuac

SEQ ID NO: 1919139 - RNA, 19 nt, Homo sapiens
  misc_RNA (1)...(19): siRNA sense strand
gaagaacaccaguuauaag

SEQ ID NO: 1919140 - RNA, 19 nt, Homo sapiens
  misc_RNA (1)...(19): siRNA sense strand
gaagauuuaccuacaacuu

SEQ ID NO: 1919141 - RNA, 19 nt, Homo sapiens
  misc_RNA (1)...(19): siRNA sense strand
gaagaugaagauuuaccua

SEQ ID NO: 1919142 - RNA, 19 nt, Homo sapiens
  misc_RNA (1)...(19): siRNA sense strand
ggaguacaauauaaaugug

SEQ ID NO: 1919143 - RNA, 19 nt, Homo sapiens
  misc_RNA (1)...(19): siRNA sense strand
gcagucagcguauugaaau

SEQ ID NO: 1919144 - RNA, 19 nt, Homo sapiens
  misc_RNA (1)...(19): siRNA sense strand
ggagcaaguuauagaaagu

SEQ ID NO: 1919145 - RNA, 19 nt, Homo sapiens
  misc_RNA (1)...(19): siRNA sense strand
ugaagaacaccaguuauaa

SEQ ID NO: 1919146 - RNA, 19 nt, Homo sapiens
  misc_RNA (1)...(19): siRNA sense strand
ccagaauggugaggaaauu

SEQ ID NO: 1919147 - RNA, 19 nt, Homo sapiens
  misc_RNA (1)...(19): siRNA sense strand
caacugaacaaacaggaaa

SEQ ID NO: 1919148 - RNA, 19 nt, Homo sapiens
  misc_RNA (1)...(19): siRNA sense strand
gaaggaagaaacugagaau

SEQ ID NO: 1919149 - RNA, 19 nt, Homo sapiens
  misc_RNA (1)...(19): siRNA sense strand
ggaaaggcuugcucgucaa

SEQ ID NO: 1919150 - RNA, 19 nt, Homo sapiens
  misc_RNA (1)...(19): siRNA sense strand
ucuauagccuggaugaauu

SEQ ID NO: 1919151 - RNA, 19 nt, Homo sapiens
  misc_RNA (1)...(19): siRNA sense strand
gaggaaagaacaagcaaau

SEQ ID NO: 1919152 - RNA, 19 nt, Homo sapiens
  misc_RNA (1)...(19): siRNA sense strand
gauguuauccugcuaucaa

SEQ ID NO: 1919153 - RNA, 19 nt, Homo sapiens
  misc_RNA (1)...(19): siRNA sense strand
gaaggagaaucccauugag

SEQ ID NO: 1919154 - RNA, 19 nt, Homo sapiens
  misc_RNA (1)...(19): siRNA sense strand
ucuaucaucugcuucauau

SEQ ID NO: 1919155 - RNA, 19 nt, Homo sapiens
  misc_RNA (1)...(19): siRNA sense strand
ugaagaugaugauccaaga

SEQ ID NO: 1919156 - RNA, 19 nt, Homo sapiens
  misc_RNA (1)...(19): siRNA sense strand
aggaagaaacugagaauaa

SEQ ID NO: 1919157 - RNA, 19 nt, Homo sapiens
  misc_RNA (1)...(19): siRNA sense strand
ugcaagauuucccaguuua

SEQ ID NO: 1919158 - RNA, 19 nt, Homo sapiens
  misc_RNA (1)...(19): siRNA sense strand
aagagcaacuuucuaugaa

SEQ ID NO: 1919159 - RNA, 19 nt, Homo sapiens
  misc_RNA (1)...(19): siRNA sense strand
gaaaucauacagaggaugu

SEQ ID NO: 1919160 - RNA, 19 nt, Homo sapiens
  misc_RNA (1)...(19): siRNA sense strand
uaaugaagcagacgauuug

SEQ ID NO: 1919161 - RNA, 19 nt, Homo sapiens
  misc_RNA (1)...(19): siRNA sense strand
agaaagaggauuauacaga

SEQ ID NO: 1919162 - RNA, 19 nt, Homo sapiens
  misc_RNA (1)...(19): siRNA sense strand
caaauuacagcgucaaauc

SEQ ID NO: 1919163 - RNA, 19 nt, Homo sapiens
  misc_RNA (1)...(19): siRNA sense strand
uaucgcaucucuuaaucaa

SEQ ID NO: 1919164 - RNA, 19 nt, Homo sapiens
  misc_RNA (1)...(19): siRNA sense strand
gaaaaccaaaugcagauua

SEQ ID NO: 1919165 - RNA, 19 nt, Homo sapiens
  misc_RNA (1)...(19): siRNA sense strand
gaaauagaagaguuacaga

SEQ ID NO: 1919166 - RNA, 19 nt, Homo sapiens
  misc_RNA (1)...(19): siRNA sense strand
ccuguuagcucuuauaaaa

SEQ ID NO: 1919167 - RNA, 19 nt, Homo sapiens
  misc_RNA (1)...(19): siRNA sense strand
agaaucccauugagaauau

SEQ ID NO: 1919168 - RNA, 19 nt, Homo sapiens
  misc_RNA (1)...(19): siRNA sense strand
uccaggaaguuaagaguaa

SEQ ID NO: 1919169 - RNA, 19 nt, Homo sapiens
  misc_RNA (1)...(19): siRNA sense strand
ccaagucccauauguggua

SEQ ID NO: 1919170 - RNA, 19 nt, Homo sapiens
  misc_RNA (1)...(19): siRNA sense strand
ggaggccacucacuucaca

SEQ ID NO: 1919171 - RNA, 19 nt, Homo sapiens
  misc_RNA (1)...(19): siRNA sense strand
gaaaggcuugcucgucaaa

SEQ ID NO: 1919172 - RNA, 19 nt, Homo sapiens
  misc_RNA (1)...(19): siRNA sense strand
gaacaaaucuguauugaga

SEQ ID NO: 1919173 - RNA, 19 nt, Homo sapiens
  misc_RNA (1)...(19): siRNA sense strand
gcacagcucuuuacaauau

SEQ ID NO: 1919174 - RNA, 19 nt, Homo sapiens
  misc_RNA (1)...(19): siRNA sense strand
caacaaaucuucacuuaga

SEQ ID NO: 1919175 - RNA, 19 nt, Homo sapiens
  misc_RNA (1)...(19): siRNA sense strand
gaacacagcccuuucagua

SEQ ID NO: 1919176 - RNA, 19 nt, Homo sapiens
  misc_RNA (1)...(19): siRNA sense strand
gagaaacaguuaaugcuuu

SEQ ID NO: 1919177 - RNA, 19 nt, Homo sapiens
  misc_RNA (1)...(19): siRNA sense strand
ggacacaccugcaucuuuc

SEQ ID NO: 1919178 - RNA, 19 nt, Homo sapiens
  misc_RNA (1)...(19): siRNA sense strand
gcugaaagauguaagcaaa

SEQ ID NO: 1919179 - RNA, 19 nt, Homo sapiens
  misc_RNA (1)...(19): siRNA sense strand
gaagaaggguggcucuaug

SEQ ID NO: 1919180 - RNA, 19 nt, Homo sapiens
  misc_RNA (1)...(19): siRNA sense strand
gcaagaugauucuacugua

SEQ ID NO: 1919181 - RNA, 19 nt, Homo sapiens
  misc_RNA (1)...(19): siRNA sense strand
ggaagggucucuuguaugg

SEQ ID NO: 1919182 - RNA, 19 nt, Homo sapiens
  misc_RNA (1)...(19): siRNA sense strand
ugaagaagcugaagcaauc

SEQ ID NO: 1919183 - RNA, 19 nt, Homo sapiens
  misc_RNA (1)...(19): siRNA sense strand
cuaccuagcuacuuuguaa

SEQ ID NO: 1919184 - RNA, 19 nt, Homo sapiens
  misc_RNA (1)...(19): siRNA sense strand
gaagauagaagaguuggua

SEQ ID NO: 1919185 - RNA, 19 nt, Homo sapiens
  misc_RNA (1)...(19): siRNA sense strand
ucagaaggcuaaagaagaa

SEQ ID NO: 1919186 - RNA, 19 nt, Homo sapiens
  misc_RNA (1)...(19): siRNA sense strand
guucugggcucagcucuua

SEQ ID NO: 1919187 - RNA, 19 nt, Homo sapiens
  misc_RNA (1)...(19): siRNA sense strand
gaacaucauuuaccaugca

SEQ ID NO: 1919188 - RNA, 19 nt, Homo sapiens
  misc_RNA (1)...(19): siRNA sense strand
gaagaagagagaaagcaua

SEQ ID NO: 1919189 - RNA, 19 nt, Homo sapiens
  misc_RNA (1)...(19): siRNA sense strand
ggucggugcucaauaaaga

SEQ ID NO: 1919190 - RNA, 19 nt, Homo sapiens
  misc_RNA (1)...(19): siRNA sense strand
aaacaacucucuucaacau

SEQ ID NO: 1919191 - RNA, 19 nt, Homo sapiens
  misc_RNA (1)...(19): siRNA sense strand
ggagaugugugaugugugu

SEQ ID NO: 1919192 - RNA, 19 nt, Homo sapiens
  misc_RNA (1)...(19): siRNA sense strand
ggaacaugcugcacugaga

SEQ ID NO: 1919193 - RNA, 19 nt, Homo sapiens
  misc_RNA (1)...(19): siRNA sense strand
gauaacagcagaagauaga

SEQ ID NO: 1919194 - RNA, 19 nt, Homo sapiens
  misc_RNA (1)...(19): siRNA sense strand
aaagcaaacugcccuugua

SEQ ID NO: 1919195 - RNA, 19 nt, Homo sapiens
  misc_RNA (1)...(19): siRNA sense strand
cagaagagaugggugauga

SEQ ID NO: 1919196 - RNA, 19 nt, Homo sapiens
  misc_RNA (1)...(19): siRNA sense strand
ggaaggagccaguccaaug

SEQ ID NO: 1919197 - RNA, 19 nt, Homo sapiens
  misc_RNA (1)...(19): siRNA sense strand
gcacaagugucgugaaugc

SEQ ID NO: 1919198 - RNA, 19 nt, Homo sapiens
  misc_RNA (1)...(19): siRNA sense strand
ccacagagaacaaaccuuu

SEQ ID NO: 1919199 - RNA, 19 nt, Homo sapiens
  misc_RNA (1)...(19): siRNA sense strand
ggaaagaagaagagagaaa

SEQ ID NO: 1919200 - RNA, 19 nt, Homo sapiens
  misc_RNA (1)...(19): siRNA sense strand
caggaacugugcuauaauu

SEQ ID NO: 1919201 - RNA, 19 nt, Homo sapiens
  misc_RNA (1)...(19): siRNA sense strand
ggaccuagcgaucuuugua

SEQ ID NO: 1919202 - RNA, 19 nt, Homo sapiens
  misc_RNA (1)...(19): siRNA sense strand
gagcaccucucccuaguuc

SEQ ID NO: 1919203 - RNA, 19 nt, Homo sapiens
  misc_RNA (1)...(19): siRNA sense strand
gcaaacugcccuuguauca

SEQ ID NO: 1919204 - RNA, 19 nt, Homo sapiens
  misc_RNA (1)...(19): siRNA sense strand
gugcaaggcugggcuauug

SEQ ID NO: 1919205 - RNA, 19 nt, Homo sapiens
  misc_RNA (1)...(19): siRNA sense strand
ggacacaggcauacccuuu

SEQ ID NO: 1919206 - RNA, 19 nt, Homo sapiens
  misc_RNA (1)...(19): siRNA sense strand
agagaugggugaugaagaa

SEQ ID NO: 1919207 - RNA, 19 nt, Homo sapiens
  misc_RNA (1)...(19): siRNA sense strand
gcuaguaucugguguucug

SEQ ID NO: 1919208 - RNA, 19 nt, Homo sapiens
  misc_RNA (1)...(19): siRNA sense strand
gaucauaugcaaacgacua

SEQ ID NO: 1919209 - RNA, 19 nt, Homo sapiens
  misc_RNA (1)...(19): siRNA sense strand
aagcaacacuccuggguaa

SEQ ID NO: 1919210 - RNA, 19 nt, Homo sapiens
  misc_RNA (1)...(19): siRNA sense strand
gaugggugaugaagaaguu

SEQ ID NO: 1919211 - RNA, 19 nt, Homo sapiens
  misc_RNA (1)...(19): siRNA sense strand
uggcacagcucuuuacaau

SEQ ID NO: 1919212 - RNA, 19 nt, Homo sapiens
  misc_RNA (1)...(19): siRNA sense strand
gaauauaccaaacgagaug

SEQ ID NO: 1919213 - RNA, 19 nt, Homo sapiens
  misc_RNA (1)...(19): siRNA sense strand
gcacugguuggcagauuua

SEQ ID NO: 1919214 - RNA, 19 nt, Homo sapiens
  misc_RNA (1)...(19): siRNA sense strand
gggucugccuugacuguua

SEQ ID NO: 1919215 - RNA, 19 nt, Homo sapiens
  misc_RNA (1)...(19): siRNA sense strand
gaagagguacucaagacaa

SEQ ID NO: 1919216 - RNA, 19 nt, Homo sapiens
  misc_RNA (1)...(19): siRNA sense strand
gaacugugcuauaauuucc

SEQ ID NO: 1919217 - RNA, 19 nt, Homo sapiens
  misc_RNA (1)...(19): siRNA sense strand
ccagauaaaccgcaacauu

SEQ ID NO: 1919218 - RNA, 19 nt, Homo sapiens
  misc_RNA (1)...(19): siRNA sense strand
gcagaggauucaugaugga

SEQ ID NO: 1919219 - RNA, 19 nt, Homo sapiens
  misc_RNA (1)...(19): siRNA sense strand
gaugguguauguugggauu

SEQ ID NO: 1919220 - RNA, 19 nt, Homo sapiens
  misc_RNA (1)...(19): siRNA sense strand
uugaagaucugauggagaa

SEQ ID NO: 1919221 - RNA, 19 nt, Homo sapiens
  misc_RNA (1)...(19): siRNA sense strand
aaacgaaacuaccuucucu

SEQ ID NO: 1919222 - RNA, 19 nt, Homo sapiens
  misc_RNA (1)...(19): siRNA sense strand
gggagagaauucaagaaau

SEQ ID NO: 1919223 - RNA, 19 nt, Homo sapiens
  misc_RNA (1)...(19): siRNA sense strand
caacucagaaggcuaaaga

SEQ ID NO: 1919224 - RNA, 19 nt, Homo sapiens
  misc_RNA (1)...(19): siRNA sense strand
gagcgguaccggaaguuua

SEQ ID NO: 1919225 - RNA, 19 nt, Homo sapiens
  misc_RNA (1)...(19): siRNA sense strand
gccaauggguugcaucugu

SEQ ID NO: 1919226 - RNA, 19 nt, Homo sapiens
  misc_RNA (1)...(19): siRNA sense strand
gcaaacgacuacggucaga

SEQ ID NO: 1919227 - RNA, 19 nt, Homo sapiens
  misc_RNA (1)...(19): siRNA sense strand
gcuauaauuuccgauguga

SEQ ID NO: 1919228 - RNA, 19 nt, Homo sapiens
  misc_RNA (1)...(19): siRNA sense strand
caucauugccucaguggua

SEQ ID NO: 1919229 - RNA, 19 nt, Homo sapiens
  misc_RNA (1)...(19): siRNA sense strand
caucaaauagcaauaguga

SEQ ID NO: 1919230 - RNA, 19 nt, Homo sapiens
  misc_RNA (1)...(19): siRNA sense strand
ucagguagcuccucuucug

SEQ ID NO: 1919231 - RNA, 19 nt, Homo sapiens
  misc_RNA (1)...(19): siRNA sense strand
guaacuacuucacuacugu

SEQ ID NO: 1919232 - RNA, 19 nt, Homo sapiens
  misc_RNA (1)...(19): siRNA sense strand
caucgcaaccuuugacuuu

SEQ ID NO: 1919233 - RNA, 19 nt, Homo sapiens
  misc_RNA (1)...(19): siRNA sense strand
gaagagagaaagcauagag

SEQ ID NO: 1919234 - RNA, 19 nt, Homo sapiens
  misc_RNA (1)...(19): siRNA sense strand
ugaagaacaucauuuacca

SEQ ID NO: 1919235 - RNA, 19 nt, Homo sapiens
  misc_RNA (1)...(19): siRNA sense strand
gaagaacaaggccaagaga

SEQ ID NO: 1919236 - RNA, 19 nt, Homo sapiens
  misc_RNA (1)...(19): siRNA sense strand
ccgaaagguuggagaagaa

SEQ ID NO: 1919237 - RNA, 19 nt, Homo sapiens
  misc_RNA (1)...(19): siRNA sense strand
gccugcaacuugacugaua

SEQ ID NO: 1919238 - RNA, 19 nt, Homo sapiens
  misc_RNA (1)...(19): siRNA sense strand
caauaaagagucucauuca

SEQ ID NO: 1919239 - RNA, 19 nt, Homo sapiens
  misc_RNA (1)...(19): siRNA sense strand
gaacaggagcaagaugauu

SEQ ID NO: 1919240 - RNA, 19 nt, Homo sapiens
  misc_RNA (1)...(19): siRNA sense strand
gcgcagugcugagcuguug

SEQ ID NO: 1919241 - RNA, 19 nt, Homo sapiens
  misc_RNA (1)...(19): siRNA sense strand
gaguuuggcugaugauucu

SEQ ID NO: 1919242 - RNA, 19 nt, Homo sapiens
  misc_RNA (1)...(19): siRNA sense strand
gaaagaagaagagagaaag

SEQ ID NO: 1919243 - RNA, 19 nt, Homo sapiens
  misc_RNA (1)...(19): siRNA sense strand
ggugugacccugcaucaaa

SEQ ID NO: 1919244 - RNA, 19 nt, Homo sapiens
  misc_RNA (1)...(19): siRNA sense strand
ugcaggaacugugcuauaa

SEQ ID NO: 1919245 - RNA, 19 nt, Homo sapiens
  misc_RNA (1)...(19): siRNA sense strand
uagcaauagugaacugaaa

SEQ ID NO: 1919246 - RNA, 19 nt, Homo sapiens
  misc_RNA (1)...(19): siRNA sense strand
cagauaaaccgcaacauuc

SEQ ID NO: 1919247 - RNA, 19 nt, Homo sapiens
  misc_RNA (1)...(19): siRNA sense strand
agaaacaguuaaugcuuug

SEQ ID NO: 1919248 - RNA, 19 nt, Homo sapiens
  misc_RNA (1)...(19): siRNA sense strand
gcagaagacuuuguaucuc

SEQ ID NO: 1919249 - RNA, 19 nt, Homo sapiens
  misc_RNA (1)...(19): siRNA sense strand
gaagaugggcagccaaugg

SEQ ID NO: 1919250 - RNA, 19 nt, Homo sapiens
  misc_RNA (1)...(19): siRNA sense strand
cagaagggauagaucuaga

SEQ ID NO: 1919251 - RNA, 19 nt, Homo sapiens
  misc_RNA (1)...(19): siRNA sense strand
cuacuucacuacuguuuca

SEQ ID NO: 1919252 - RNA, 19 nt, Homo sapiens
  misc_RNA (1)...(19): siRNA sense strand
ccaauggguugcaucuguu

SEQ ID NO: 1919253 - RNA, 19 nt, Homo sapiens
  misc_RNA (1)...(19): siRNA sense strand
agaccaggauguagacuug

SEQ ID NO: 1919254 - RNA, 19 nt, Homo sapiens
  misc_RNA (1)...(19): siRNA sense strand
gaaacaacucucuucaaca

SEQ ID NO: 1919255 - RNA, 19 nt, Homo sapiens
  misc_RNA (1)...(19): siRNA sense strand
ggagcaagaugauucuacu

SEQ ID NO: 1919256 - RNA, 19 nt, Homo sapiens
  misc_RNA (1)...(19): siRNA sense strand
agacaggccugaagggaau

SEQ ID NO: 1919257 - RNA, 19 nt, Homo sapiens
  misc_RNA (1)...(19): siRNA sense strand
ggaagaaggguggcucuau

SEQ ID NO: 1919258 - RNA, 19 nt, Homo sapiens
  misc_RNA (1)...(19): siRNA sense strand
caaugcaugucccaaacuu

SEQ ID NO: 1919259 - RNA, 19 nt, Homo sapiens
  misc_RNA (1)...(19): siRNA sense strand
cgacuacggucagaagaug

SEQ ID NO: 1919260 - RNA, 19 nt, Homo sapiens
  misc_RNA (1)...(19): siRNA sense strand
gaagggauagaucuagaga

SEQ ID NO: 1919261 - RNA, 19 nt, Homo sapiens
  misc_RNA (1)...(19): siRNA sense strand
ugaaagauguaagcaaagu

SEQ ID NO: 1919262 - RNA, 19 nt, Homo sapiens
  misc_RNA (1)...(19): siRNA sense strand
gcagccaccgucuacauuu

SEQ ID NO: 1919263 - RNA, 19 nt, Homo sapiens
  misc_RNA (1)...(19): siRNA sense strand
uuaaugugaugguguaugu

SEQ ID NO: 1919264 - RNA, 19 nt, Homo sapiens
  misc_RNA (1)...(19): siRNA sense strand
ggaacugugcuauaauuuc

SEQ ID NO: 1919265 - RNA, 19 nt, Homo sapiens
  misc_RNA (1)...(19): siRNA sense strand
ccuagugccucuucuggaa

SEQ ID NO: 1919266 - RNA, 19 nt, Homo sapiens
  misc_RNA (1)...(19): siRNA sense strand
gagaaggaggccaugauga

SEQ ID NO: 1919267 - RNA, 19 nt, Homo sapiens
  misc_RNA (1)...(19): siRNA sense strand
aggagcagcugcaggcuaa

SEQ ID NO: 1919268 - RNA, 19 nt, Homo sapiens
  misc_RNA (1)...(19): siRNA sense strand
caaauugucccgagaagag

SEQ ID NO: 1919269 - RNA, 19 nt, Homo sapiens
  misc_RNA (1)...(19): siRNA sense strand
cgaagcagaggauucauga

SEQ ID NO: 1919270 - RNA, 19 nt, Homo sapiens
  misc_RNA (1)...(19): siRNA sense strand
agaaggaagugaaggagau

SEQ ID NO: 1919271 - RNA, 19 nt, Homo sapiens
  misc_RNA (1)...(19): siRNA sense strand
ucacagcuuccuagcauaa

SEQ ID NO: 1919272 - RNA, 19 nt, Homo sapiens
  misc_RNA (1)...(19): siRNA sense strand
gcagaauacucuugcaaua

SEQ ID NO: 1919273 - RNA, 19 nt, Homo sapiens
  misc_RNA (1)...(19): siRNA sense strand
gcaaagauauucaaacucu

SEQ ID NO: 1919274 - RNA, 19 nt, Homo sapiens
  misc_RNA (1)...(19): siRNA sense strand
ggaaagaguuugacaccaa

SEQ ID NO: 1919275 - RNA, 19 nt, Homo sapiens
  misc_RNA (1)...(19): siRNA sense strand
ggaaauggagaaagaaaua

SEQ ID NO: 1919276 - RNA, 19 nt, Homo sapiens
  misc_RNA (1)...(19): siRNA sense strand
gcaaauaugcugacuguau

SEQ ID NO: 1919277 - RNA, 19 nt, Homo sapiens
  misc_RNA (1)...(19): siRNA sense strand
gcauuucgccugaccauua

SEQ ID NO: 1919278 - RNA, 19 nt, Homo sapiens
  misc_RNA (1)...(19): siRNA sense strand
gaucaucaauuucuacaug

SEQ ID NO: 1919279 - RNA, 19 nt, Homo sapiens
  misc_RNA (1)...(19): siRNA sense strand
caaugaagccugcagaaua

SEQ ID NO: 1919280 - RNA, 19 nt, Homo sapiens
  misc_RNA (1)...(19): siRNA sense strand
cgaaagaccucaaguggau

SEQ ID NO: 1919281 - RNA, 19 nt, Homo sapiens
  misc_RNA (1)...(19): siRNA sense strand
gcaaauggccaauggagaa

SEQ ID NO: 1919282 - RNA, 19 nt, Homo sapiens
  misc_RNA (1)...(19): siRNA sense strand
aaagagagauuuacagaca

SEQ ID NO: 1919283 - RNA, 19 nt, Homo sapiens
  misc_RNA (1)...(19): siRNA sense strand
agaaacagccgaagucuuu

SEQ ID NO: 1919284 - RNA, 19 nt, Homo sapiens
  misc_RNA (1)...(19): siRNA sense strand
gaggauggaugcuggagaa

SEQ ID NO: 1919285 - RNA, 19 nt, Homo sapiens
  misc_RNA (1)...(19): siRNA sense strand
ccacaacuccguauucaaa

SEQ ID NO: 1919286 - RNA, 19 nt, Homo sapiens
  misc_RNA (1)...(19): siRNA sense strand
gaaagaguuugacaccaau

SEQ ID NO: 1919287 - RNA, 19 nt, Homo sapiens
  misc_RNA (1)...(19): siRNA sense strand
cagaggaaauggagaaaga

SEQ ID NO: 1919288 - RNA, 19 nt, Homo sapiens
  misc_RNA (1)...(19): siRNA sense strand
ggagauuccuguuacuguu

SEQ ID NO: 1919289 - RNA, 19 nt, Homo sapiens
  misc_RNA (1)...(19): siRNA sense strand
ucaaguggauuaucaaaca

SEQ ID NO: 1919290 - RNA, 19 nt, Homo sapiens
  misc_RNA (1)...(19): siRNA sense strand
uugaaagacucacuguuua

SEQ ID NO: 1919291 - RNA, 19 nt, Homo sapiens
  misc_RNA (1)...(19): siRNA sense strand
ccauguaucugcauaugaa

SEQ ID NO: 1919292 - RNA, 19 nt, Homo sapiens
  misc_RNA (1)...(19): siRNA sense strand
uaacuuagcagcuucaaau

SEQ ID NO: 1919293 - RNA, 19 nt, Homo sapiens
  misc_RNA (1)...(19): siRNA sense strand
gaaagacucacuguuuaaa

SEQ ID NO: 1919294 - RNA, 19 nt, Homo sapiens
  misc_RNA (1)...(19): siRNA sense strand
ggacaaagaaaguagaugu

SEQ ID NO: 1919295 - RNA, 19 nt, Homo sapiens
  misc_RNA (1)...(19): siRNA sense strand
gaacauucaguacaugauu

SEQ ID NO: 1919296 - RNA, 19 nt, Homo sapiens
  misc_RNA (1)...(19): siRNA sense strand
ggaagugacugugggaugu

SEQ ID NO: 1919297 - RNA, 19 nt, Homo sapiens
  misc_RNA (1)...(19): siRNA sense strand
caagaagugcagcuuauaa

SEQ ID NO: 1919298 - RNA, 19 nt, Homo sapiens
  misc_RNA (1)...(19): siRNA sense strand
gaagaaagagagauuuaca

SEQ ID NO: 1919299 - RNA, 19 nt, Homo sapiens
  misc_RNA (1)...(19): siRNA sense strand
ggaugaaguucucagugaa

SEQ ID NO: 1919300 - RNA, 19 nt, Homo sapiens
  misc_RNA (1)...(19): siRNA sense strand
gugaaacguuggacaaaga

SEQ ID NO: 1919301 - RNA, 19 nt, Homo sapiens
  misc_RNA (1)...(19): siRNA sense strand
gaccucaaguggauuauca

SEQ ID NO: 1919302 - RNA, 19 nt, Homo sapiens
  misc_RNA (1)...(19): siRNA sense strand
caagaaagcauugacaaga

SEQ ID NO: 1919303 - RNA, 19 nt, Homo sapiens
  misc_RNA (1)...(19): siRNA sense strand
ccagauaacuuagcagcuu

SEQ ID NO: 1919304 - RNA, 19 nt, Homo sapiens
  misc_RNA (1)...(19): siRNA sense strand
gaagaagaaagagagauuu

SEQ ID NO: 1919305 - RNA, 19 nt, Homo sapiens
  misc_RNA (1)...(19): siRNA sense strand
gauggaugcuggagaagug

SEQ ID NO: 1919306 - RNA, 19 nt, Homo sapiens
  misc_RNA (1)...(19): siRNA sense strand
agaaagcauugacaagaaa

SEQ ID NO: 1919307 - RNA, 19 nt, Homo sapiens
  misc_RNA (1)...(19): siRNA sense strand
gcagagcuguggaucaaag

SEQ ID NO: 1919308 - RNA, 19 nt, Homo sapiens
  misc_RNA (1)...(19): siRNA sense strand
acucagaggcgacauguua

SEQ ID NO: 1919309 - RNA, 19 nt, Homo sapiens
  misc_RNA (1)...(19): siRNA sense strand
aagaaagcauugacaagaa

SEQ ID NO: 1919310 - RNA, 19 nt, Homo sapiens
  misc_RNA (1)...(19): siRNA sense strand
uaacugauagugaagauga

SEQ ID NO: 1919311 - RNA, 19 nt, Homo sapiens
  misc_RNA (1)...(19): siRNA sense strand
agagacaguucaagaagaa

SEQ ID NO: 1919312 - RNA, 19 nt, Homo sapiens
  misc_RNA (1)...(19): siRNA sense strand
gaaccacaacuccguauuc

SEQ ID NO: 1919313 - RNA, 19 nt, Homo sapiens
  misc_RNA (1)...(19): siRNA sense strand
ccacaagaagugcagcuua

SEQ ID NO: 1919314 - RNA, 19 nt, Homo sapiens
  misc_RNA (1)...(19): siRNA sense strand
caagugugcaugcauuuaa

SEQ ID NO: 1919315 - RNA, 19 nt, Homo sapiens
  misc_RNA (1)...(19): siRNA sense strand
gaaagauugcgccagauug

SEQ ID NO: 1919316 - RNA, 19 nt, Homo sapiens
  misc_RNA (1)...(19): siRNA sense strand
gaagagacaguucaagaag

SEQ ID NO: 1919317 - RNA, 19 nt, Homo sapiens
  misc_RNA (1)...(19): siRNA sense strand
gauaauccuuccucagaca

SEQ ID NO: 1919318 - RNA, 19 nt, Homo sapiens
  misc_RNA (1)...(19): siRNA sense strand
cacaagaagugcagcuuau

SEQ ID NO: 1919319 - RNA, 19 nt, Homo sapiens
  misc_RNA (1)...(19): siRNA sense strand
acagacagcugcuacagau

SEQ ID NO: 1919320 - RNA, 19 nt, Homo sapiens
  misc_RNA (1)...(19): siRNA sense strand
ggaccgaucuuuuacaugu

SEQ ID NO: 1919321 - RNA, 19 nt, Homo sapiens
  misc_RNA (1)...(19): siRNA sense strand
guaaugggaaucaggauga

SEQ ID NO: 1919322 - RNA, 19 nt, Homo sapiens
  misc_RNA (1)...(19): siRNA sense strand
cagauaauccuuccucaga

SEQ ID NO: 1919323 - RNA, 19 nt, Homo sapiens
  misc_RNA (1)...(19): siRNA sense strand
ugaaagacucacuguuuaa

SEQ ID NO: 1919324 - RNA, 19 nt, Homo sapiens
  misc_RNA (1)...(19): siRNA sense strand
gcaugcauuuaauaccuuu

SEQ ID NO: 1919325 - RNA, 19 nt, Homo sapiens
  misc_RNA (1)...(19): siRNA sense strand
gacaaagaaaguagaugua

SEQ ID NO: 1919326 - RNA, 19 nt, Homo sapiens
  misc_RNA (1)...(19): siRNA sense strand
gaaacagccgaagucuuua

SEQ ID NO: 1919327 - RNA, 19 nt, Homo sapiens
  misc_RNA (1)...(19): siRNA sense strand
uauuaaaccuguuccaagu

SEQ ID NO: 1919328 - RNA, 19 nt, Homo sapiens
  misc_RNA (1)...(19): siRNA sense strand
aaccaucacugccauguau

SEQ ID NO: 1919329 - RNA, 19 nt, Homo sapiens
  misc_RNA (1)...(19): siRNA sense strand
gcagugaaacguuggacaa

SEQ ID NO: 1919330 - RNA, 19 nt, Homo sapiens
  misc_RNA (1)...(19): siRNA sense strand
ccaaacccaccacacauuu

SEQ ID NO: 1919331 - RNA, 19 nt, Homo sapiens
  misc_RNA (1)...(19): siRNA sense strand
cagaagagacaguucaaga

SEQ ID NO: 1919332 - RNA, 19 nt, Homo sapiens
  misc_RNA (1)...(19): siRNA sense strand
gaggaaauggagaaagaaa

SEQ ID NO: 1919333 - RNA, 19 nt, Homo sapiens
  misc_RNA (1)...(19): siRNA sense strand
ugcaauaccuaaagcaaga

SEQ ID NO: 1919334 - RNA, 19 nt, Homo sapiens
  misc_RNA (1)...(19): siRNA sense strand
aggaugaaguucucaguga

SEQ ID NO: 1919335 - RNA, 19 nt, Homo sapiens
  misc_RNA (1)...(19): siRNA sense strand
guagauguauuuucuguug

SEQ ID NO: 1919336 - RNA, 19 nt, Homo sapiens
  misc_RNA (1)...(19): siRNA sense strand
uacacaaucugaaggauca

SEQ ID NO: 1919337 - RNA, 19 nt, Homo sapiens
  misc_RNA (1)...(19): siRNA sense strand
cugcaaauaugcugacugu

SEQ ID NO: 1919338 - RNA, 19 nt, Homo sapiens
  misc_RNA (1)...(19): siRNA sense strand
gcaagaaagcauugacaag

SEQ ID NO: 1919339 - RNA, 19 nt, Homo sapiens
  misc_RNA (1)...(19): siRNA sense strand
aaagaccucaaguggauua

SEQ ID NO: 1919340 - RNA, 19 nt, Homo sapiens
  misc_RNA (1)...(19): siRNA sense strand
gcgggaacauucaguacau

SEQ ID NO: 1919341 - RNA, 19 nt, Homo sapiens
  misc_RNA (1)...(19): siRNA sense strand
cuuagcagcuucaaauaca

SEQ ID NO: 1919342 - RNA, 19 nt, Homo sapiens
  misc_RNA (1)...(19): siRNA sense strand
ucaagcucaucuuuacaaa

SEQ ID NO: 1919343 - RNA, 19 nt, Homo sapiens
  misc_RNA (1)...(19): siRNA sense strand
aaugaagccugcagaauac

SEQ ID NO: 1919344 - RNA, 19 nt, Homo sapiens
  misc_RNA (1)...(19): siRNA sense strand
ggagcgaaguaaagagaag

SEQ ID NO: 1919345 - RNA, 19 nt, Homo sapiens
  misc_RNA (1)...(19): siRNA sense strand
gcuguggaucaaagaauua

SEQ ID NO: 1919346 - RNA, 19 nt, Homo sapiens
  misc_RNA (1)...(19): siRNA sense strand
agaaagagagauuuacaga

SEQ ID NO: 1919347 - RNA, 19 nt, Homo sapiens
  misc_RNA (1)...(19): siRNA sense strand
caagcuauuacucagauaa

SEQ ID NO: 1919348 - RNA, 19 nt, Homo sapiens
  misc_RNA (1)...(19): siRNA sense strand
gaaucaggaugaaguucuc

SEQ ID NO: 1919349 - RNA, 19 nt, Homo sapiens
  misc_RNA (1)...(19): siRNA sense strand
ggagcgggaacauucagua

SEQ ID NO: 1919350 - RNA, 19 nt, Homo sapiens
  misc_RNA (1)...(19): siRNA sense strand
aaagauugcgccagauuga

SEQ ID NO: 1919351 - RNA, 19 nt, Homo sapiens
  misc_RNA (1)...(19): siRNA sense strand
uuugaaagacucacuguuu

SEQ ID NO: 1919352 - RNA, 19 nt, Homo sapiens
  misc_RNA (1)...(19): siRNA sense strand
cgaagucuuuaccucgaaa

SEQ ID NO: 1919353 - RNA, 19 nt, Homo sapiens
  misc_RNA (1)...(19): siRNA sense strand
gaaauuacagaggaaaugg

SEQ ID NO: 1919354 - RNA, 19 nt, Homo sapiens
  misc_RNA (1)...(19): siRNA sense strand
uggaaacucuugugcaucu

SEQ ID NO: 1919355 - RNA, 19 nt, Homo sapiens
  misc_RNA (1)...(19): siRNA sense strand
aagagacaguucaagaaga

SEQ ID NO: 1919356 - RNA, 19 nt, Homo sapiens
  misc_RNA (1)...(19): siRNA sense strand
uucaguacaugauucagua

SEQ ID NO: 1919357 - RNA, 19 nt, Homo sapiens
  misc_RNA (1)...(19): siRNA sense strand
agaagagacaguucaagaa

SEQ ID NO: 1919358 - RNA, 19 nt, Homo sapiens
  misc_RNA (1)...(19): siRNA sense strand
ugggugggauaaacaauga

SEQ ID NO: 1919359 - RNA, 19 nt, Homo sapiens
  misc_RNA (1)...(19): siRNA sense strand
ccaagugugcaugcauuua

SEQ ID NO: 1919360 - RNA, 19 nt, Homo sapiens
  misc_RNA (1)...(19): siRNA sense strand
aggcagagcuguggaucaa

SEQ ID NO: 1919361 - RNA, 19 nt, Homo sapiens
  misc_RNA (1)...(19): siRNA sense strand
agaagaagaaagagagauu

SEQ ID NO: 1919362 - RNA, 19 nt, Homo sapiens
  misc_RNA (1)...(19): siRNA sense strand
ccaagcuauuacucagaua

SEQ ID NO: 1919363 - RNA, 19 nt, Homo sapiens
  misc_RNA (1)...(19): siRNA sense strand
ccagauuccucagcagaug

SEQ ID NO: 1919364 - RNA, 19 nt, Homo sapiens
  misc_RNA (1)...(19): siRNA sense strand
acgcaaagauauucaaacu

SEQ ID NO: 1919365 - RNA, 19 nt, Homo sapiens
  misc_RNA (1)...(19): siRNA sense strand
caguguauauucccuaucu

SEQ ID NO: 1919366 - RNA, 19 nt, Homo sapiens
  misc_RNA (1)...(19): siRNA sense strand
gaggcgacauguuaguaca

SEQ ID NO: 1919367 - RNA, 19 nt, Homo sapiens
  misc_RNA (1)...(19): siRNA sense strand
gccaaacccaccacacauu

SEQ ID NO: 1919368 - RNA, 19 nt, Homo sapiens
  misc_RNA (1)...(19): siRNA sense strand
agacagaccaaucaacuuc

SEQ ID NO: 1919369 - RNA, 19 nt, Homo sapiens
  misc_RNA (1)...(19): siRNA sense strand
ugacuuuagugaaccacaa

SEQ ID NO: 1919370 - RNA, 19 nt, Homo sapiens
  misc_RNA (1)...(19): siRNA sense strand
ucaaauacacaaucugaag

SEQ ID NO: 1919371 - RNA, 19 nt, Homo sapiens
  misc_RNA (1)...(19): siRNA sense strand
caccacacauuuuccuuua

SEQ ID NO: 1919372 - RNA, 19 nt, Homo sapiens
  misc_RNA (1)...(19): siRNA sense strand
aaagaaagcugucgaauug

SEQ ID NO: 1919373 - RNA, 19 nt, Homo sapiens
  misc_RNA (1)...(19): siRNA sense strand
ggaauggaguguauuauuu

SEQ ID NO: 1919374 - RNA, 19 nt, Homo sapiens
  misc_RNA (1)...(19): siRNA sense strand
gaacaucccuucugaaucu

SEQ ID NO: 1919375 - RNA, 19 nt, Homo sapiens
  misc_RNA (1)...(19): siRNA sense strand
gugauaacuucccauauua

SEQ ID NO: 1919376 - RNA, 19 nt, Homo sapiens
  misc_RNA (1)...(19): siRNA sense strand
gaucuuuguucuucucuua

SEQ ID NO: 1919377 - RNA, 19 nt, Homo sapiens
  misc_RNA (1)...(19): siRNA sense strand
ggaaaccuccauacaguua

SEQ ID NO: 1919378 - RNA, 19 nt, Homo sapiens
  misc_RNA (1)...(19): siRNA sense strand
gaagagggcacgaucugua

SEQ ID NO: 1919379 - RNA, 19 nt, Homo sapiens
  misc_RNA (1)...(19): siRNA sense strand
caacaagguuugaugaaca

SEQ ID NO: 1919380 - RNA, 19 nt, Homo sapiens
  misc_RNA (1)...(19): siRNA sense strand
guacaaccuuccagaaaga

SEQ ID NO: 1919381 - RNA, 19 nt, Homo sapiens
  misc_RNA (1)...(19): siRNA sense strand
gcacauggaacaggaauuu

SEQ ID NO: 1919382 - RNA, 19 nt, Homo sapiens
  misc_RNA (1)...(19): siRNA sense strand
aaacuggccuuauacauuc

SEQ ID NO: 1919383 - RNA, 19 nt, Homo sapiens
  misc_RNA (1)...(19): siRNA sense strand
gaacgggccucaacuccau

SEQ ID NO: 1919384 - RNA, 19 nt, Homo sapiens
  misc_RNA (1)...(19): siRNA sense strand
caaacuggccuuauacauu

SEQ ID NO: 1919385 - RNA, 19 nt, Homo sapiens
  misc_RNA (1)...(19): siRNA sense strand
ugugauaacuucccauauu

SEQ ID NO: 1919386 - RNA, 19 nt, Homo sapiens
  misc_RNA (1)...(19): siRNA sense strand
ggaagugugcauaguuaua

SEQ ID NO: 1919387 - RNA, 19 nt, Homo sapiens
  misc_RNA (1)...(19): siRNA sense strand
gacaagccauccagaauca

SEQ ID NO: 1919388 - RNA, 19 nt, Homo sapiens
  misc_RNA (1)...(19): siRNA sense strand
cgaauugccagcaguguua

SEQ ID NO: 1919389 - RNA, 19 nt, Homo sapiens
  misc_RNA (1)...(19): siRNA sense strand
uagcauagauucagauucu

SEQ ID NO: 1919390 - RNA, 19 nt, Homo sapiens
  misc_RNA (1)...(19): siRNA sense strand
uacacaaacuggccuuaua

SEQ ID NO: 1919391 - RNA, 19 nt, Homo sapiens
  misc_RNA (1)...(19): siRNA sense strand
guucuucucuuaaucaguu

SEQ ID NO: 1919392 - RNA, 19 nt, Homo sapiens
  misc_RNA (1)...(19): siRNA sense strand
ggaagugccucuccaacuc

SEQ ID NO: 1919393 - RNA, 19 nt, Homo sapiens
  misc_RNA (1)...(19): siRNA sense strand
uaacgucuauggacugguu

SEQ ID NO: 1919394 - RNA, 19 nt, Homo sapiens
  misc_RNA (1)...(19): siRNA sense strand
caucagacguuaacacauc

SEQ ID NO: 1919395 - RNA, 19 nt, Homo sapiens
  misc_RNA (1)...(19): siRNA sense strand
gcacaaagaugggaaaccu

SEQ ID NO: 1919396 - RNA, 19 nt, Homo sapiens
  misc_RNA (1)...(19): siRNA sense strand
gcacucagcacuccaggaa

SEQ ID NO: 1919397 - RNA, 19 nt, Homo sapiens
  misc_RNA (1)...(19): siRNA sense strand
guauaacacugaucaggau

SEQ ID NO: 1919398 - RNA, 19 nt, Homo sapiens
  misc_RNA (1)...(19): siRNA sense strand
gaacaggaaauuuguacau

SEQ ID NO: 1919399 - RNA, 19 nt, Homo sapiens
  misc_RNA (1)...(19): siRNA sense strand
gcaguagccuuaacaacag

SEQ ID NO: 1919400 - RNA, 19 nt, Homo sapiens
  misc_RNA (1)...(19): siRNA sense strand
uaagaagaaugcacuccuu

SEQ ID NO: 1919401 - RNA, 19 nt, Homo sapiens
  misc_RNA (1)...(19): siRNA sense strand
caggaaauuuguacauaga

SEQ ID NO: 1919402 - RNA, 19 nt, Homo sapiens
  misc_RNA (1)...(19): siRNA sense strand
gaacuggagagcagccuaa

SEQ ID NO: 1919403 - RNA, 19 nt, Homo sapiens
  misc_RNA (1)...(19): siRNA sense strand
gagagcagccuaacgucua

SEQ ID NO: 1919404 - RNA, 19 nt, Homo sapiens
  misc_RNA (1)...(19): siRNA sense strand
ggaacaggaauuucuaaga

SEQ ID NO: 1919405 - RNA, 19 nt, Homo sapiens
  misc_RNA (1)...(19): siRNA sense strand
gcauagauucagauucuuu

SEQ ID NO: 1919406 - RNA, 19 nt, Homo sapiens
  misc_RNA (1)...(19): siRNA sense strand
cauaaucugucauugaaca

SEQ ID NO: 1919407 - RNA, 19 nt, Homo sapiens
  misc_RNA (1)...(19): siRNA sense strand
uaaagugccucgaucuaag

SEQ ID NO: 1919408 - RNA, 19 nt, Homo sapiens
  misc_RNA (1)...(19): siRNA sense strand
caaagcagccuguccaaca

SEQ ID NO: 1919409 - RNA, 19 nt, Homo sapiens
  misc_RNA (1)...(19): siRNA sense strand
gggaauggaguguauuauu

SEQ ID NO: 1919410 - RNA, 19 nt, Homo sapiens
  misc_RNA (1)...(19): siRNA sense strand
gaauggaguguauuauuuc

SEQ ID NO: 1919411 - RNA, 19 nt, Homo sapiens
  misc_RNA (1)...(19): siRNA sense strand
cagcaucccucuccacauc

SEQ ID NO: 1919412 - RNA, 19 nt, Homo sapiens
  misc_RNA (1)...(19): siRNA sense strand
uuggaagugugcauaguua

SEQ ID NO: 1919413 - RNA, 19 nt, Homo sapiens
  misc_RNA (1)...(19): siRNA sense strand
gaaucagucucucaaucau

SEQ ID NO: 1919414 - RNA, 19 nt, Homo sapiens
  misc_RNA (1)...(19): siRNA sense strand
cagaaucagucucucaauc

SEQ ID NO: 1919415 - RNA, 19 nt, Homo sapiens
  misc_RNA (1)...(19): siRNA sense strand
ggcagugguuggaagaauu

SEQ ID NO: 1919416 - RNA, 19 nt, Homo sapiens
  misc_RNA (1)...(19): siRNA sense strand
guaauucugguguuucaaa

SEQ ID NO: 1919417 - RNA, 19 nt, Homo sapiens
  misc_RNA (1)...(19): siRNA sense strand
uggcaucuguuaauuugaa

SEQ ID NO: 1919418 - RNA, 19 nt, Homo sapiens
  misc_RNA (1)...(19): siRNA sense strand
aucagucucucaaucauua

SEQ ID NO: 1919419 - RNA, 19 nt, Homo sapiens
  misc_RNA (1)...(19): siRNA sense strand
gcaaucaacacugugacua

SEQ ID NO: 1919420 - RNA, 19 nt, Homo sapiens
  misc_RNA (1)...(19): siRNA sense strand
aggcagaucucaagaacug

SEQ ID NO: 1919421 - RNA, 19 nt, Homo sapiens
  misc_RNA (1)...(19): siRNA sense strand
gcagucacuuagucaacaa

SEQ ID NO: 1919422 - RNA, 19 nt, Homo sapiens
  misc_RNA (1)...(19): siRNA sense strand
caaucaacacugugacuaa

SEQ ID NO: 1919423 - RNA, 19 nt, Homo sapiens
  misc_RNA (1)...(19): siRNA sense strand
cauauagcauagauucaga

SEQ ID NO: 1919424 - RNA, 19 nt, Homo sapiens
  misc_RNA (1)...(19): siRNA sense strand
gaucuuagugccucauuuc

SEQ ID NO: 1919425 - RNA, 19 nt, Homo sapiens
  misc_RNA (1)...(19): siRNA sense strand
ucaacacugugacuaacaa

SEQ ID NO: 1919426 - RNA, 19 nt, Homo sapiens
  misc_RNA (1)...(19): siRNA sense strand
gaaagagacaagcaacuac

SEQ ID NO: 1919427 - RNA, 19 nt, Homo sapiens
  misc_RNA (1)...(19): siRNA sense strand
agugauagcccacgcagua

SEQ ID NO: 1919428 - RNA, 19 nt, Homo sapiens
  misc_RNA (1)...(19): siRNA sense strand
agaaagagacaagcaacua

SEQ ID NO: 1919429 - RNA, 19 nt, Homo sapiens
  misc_RNA (1)...(19): siRNA sense strand
ugggaaaccuccauacagu

SEQ ID NO: 1919430 - RNA, 19 nt, Homo sapiens
  misc_RNA (1)...(19): siRNA sense strand
acaggaaauuuguacauag

SEQ ID NO: 1919431 - RNA, 19 nt, Homo sapiens
  misc_RNA (1)...(19): siRNA sense strand
guccaucuguaacuucauu

SEQ ID NO: 1919432 - RNA, 19 nt, Homo sapiens
  misc_RNA (1)...(19): siRNA sense strand
cacugugacuaacaaagua

SEQ ID NO: 1919433 - RNA, 19 nt, Homo sapiens
  misc_RNA (1)...(19): siRNA sense strand
agaauuccauacgacauaa

SEQ ID NO: 1919434 - RNA, 19 nt, Homo sapiens
  misc_RNA (1)...(19): siRNA sense strand
uuaaagugccucgaucuaa

SEQ ID NO: 1919435 - RNA, 19 nt, Homo sapiens
  misc_RNA (1)...(19): siRNA sense strand
uguagaccuuucacaguuu

SEQ ID NO: 1919436 - RNA, 19 nt, Homo sapiens
  misc_RNA (1)...(19): siRNA sense strand
gcacucacccacacagcaa

SEQ ID NO: 1919437 - RNA, 19 nt, Homo sapiens
  misc_RNA (1)...(19): siRNA sense strand
ggucugauggagaguauga

SEQ ID NO: 1919438 - RNA, 19 nt, Homo sapiens
  misc_RNA (1)...(19): siRNA sense strand
caacacauuggaacaggaa

SEQ ID NO: 1919439 - RNA, 19 nt, Homo sapiens
  misc_RNA (1)...(19): siRNA sense strand
gaagugugcauaguuauac

SEQ ID NO: 1919440 - RNA, 19 nt, Homo sapiens
  misc_RNA (1)...(19): siRNA sense strand
gaaccagcagcacaugaug

SEQ ID NO: 1919441 - RNA, 19 nt, Homo sapiens
  misc_RNA (1)...(19): siRNA sense strand
caugagagcagccauccaa

SEQ ID NO: 1919442 - RNA, 19 nt, Homo sapiens
  misc_RNA (1)...(19): siRNA sense strand
caacaaaaccuucccaaca

SEQ ID NO: 1919443 - RNA, 19 nt, Homo sapiens
  misc_RNA (1)...(19): siRNA sense strand
gguaugcgacacuugauau

SEQ ID NO: 1919444 - RNA, 19 nt, Homo sapiens
  misc_RNA (1)...(19): siRNA sense strand
auuaauagcucacccaaaa

SEQ ID NO: 1919445 - RNA, 19 nt, Homo sapiens
  misc_RNA (1)...(19): siRNA sense strand
cuuauacauucacagagua

SEQ ID NO: 1919446 - RNA, 19 nt, Homo sapiens
  misc_RNA (1)...(19): siRNA sense strand
gcacuccuugacccaaaua

SEQ ID NO: 1919447 - RNA, 19 nt, Homo sapiens
  misc_RNA (1)...(19): siRNA sense strand
gauguagaccuuucacagu

SEQ ID NO: 1919448 - RNA, 19 nt, Homo sapiens
  misc_RNA (1)...(19): siRNA sense strand
caguacaaccuuccagaaa

SEQ ID NO: 1919449 - RNA, 19 nt, Homo sapiens
  misc_RNA (1)...(19): siRNA sense strand
uuuggcaucuguuaauuug

SEQ ID NO: 1919450 - RNA, 19 nt, Homo sapiens
  misc_RNA (1)...(19): siRNA sense strand
aagaauuccauacgacaua

SEQ ID NO: 1919451 - RNA, 19 nt, Homo sapiens
  misc_RNA (1)...(19): siRNA sense strand
gaagaauuccauacgacau

SEQ ID NO: 1919452 - RNA, 19 nt, Homo sapiens
  misc_RNA (1)...(19): siRNA sense strand
auucugguguuucaaauga

SEQ ID NO: 1919453 - RNA, 19 nt, Homo sapiens
  misc_RNA (1)...(19): siRNA sense strand
guagaccuuucacaguuuc

SEQ ID NO: 1919454 - RNA, 19 nt, Homo sapiens
  misc_RNA (1)...(19): siRNA sense strand
guggauuugugauaacuuc

SEQ ID NO: 1919455 - RNA, 19 nt, Homo sapiens
  misc_RNA (1)...(19): siRNA sense strand
ugacuuugauugggauuca

SEQ ID NO: 1919456 - RNA, 19 nt, Homo sapiens
  misc_RNA (1)...(19): siRNA sense strand
guuaauuggucagauguag

SEQ ID NO: 1919457 - RNA, 19 nt, Homo sapiens
  misc_RNA (1)...(19): siRNA sense strand
ucacuuagucaacaagguu

SEQ ID NO: 1919458 - RNA, 19 nt, Homo sapiens
  misc_RNA (1)...(19): siRNA sense strand
gaguuuggcaucuguuaau

SEQ ID NO: 1919459 - RNA, 19 nt, Homo sapiens
  misc_RNA (1)...(19): siRNA sense strand
acaccaauccgaaggaaga

SEQ ID NO: 1919460 - RNA, 19 nt, Homo sapiens
  misc_RNA (1)...(19): siRNA sense strand
gaagaaugcacuccuugac

SEQ ID NO: 1919461 - RNA, 19 nt, Homo sapiens
  misc_RNA (1)...(19): siRNA sense strand
ccacacagcaaccaaagca

SEQ ID NO: 1919462 - RNA, 19 nt, Homo sapiens
  misc_RNA (1)...(19): siRNA sense strand
agaaucagucucucaauca

SEQ ID NO: 1919463 - RNA, 19 nt, Homo sapiens
  misc_RNA (1)...(19): siRNA sense strand
ucuguaacuucauuaagga

SEQ ID NO: 1919464 - RNA, 19 nt, Homo sapiens
  misc_RNA (1)...(19): siRNA sense strand
ccuuauacauucacagagu

SEQ ID NO: 1919465 - RNA, 19 nt, Homo sapiens
  misc_RNA (1)...(19): siRNA sense strand
gcaucccucuccacaucaa

SEQ ID NO: 1919466 - RNA, 19 nt, Homo sapiens
  misc_RNA (1)...(19): siRNA sense strand
caacaccacaggcaguaau

SEQ ID NO: 1919467 - RNA, 19 nt, Homo sapiens
  misc_RNA (1)...(19): siRNA sense strand
ucauuucggagccuuuaua

SEQ ID NO: 1919468 - RNA, 19 nt, Homo sapiens
  misc_RNA (1)...(19): siRNA sense strand
uuucggagccuuuauaagu

SEQ ID NO: 1919469 - RNA, 19 nt, Homo sapiens
  misc_RNA (1)...(19): siRNA sense strand
acucagcacuccaggaaca

SEQ ID NO: 1919470 - RNA, 19 nt, Homo sapiens
  misc_RNA (1)...(19): siRNA sense strand
cauuggaacaggaaauuug

SEQ ID NO: 1919471 - RNA, 19 nt, Homo sapiens
  misc_RNA (1)...(19): siRNA sense strand
gggaaaccuccauacaguu

SEQ ID NO: 1919472 - RNA, 19 nt, Homo sapiens
  misc_RNA (1)...(19): siRNA sense strand
gcaaacagguacuacagaa

SEQ ID NO: 1919473 - RNA, 19 nt, Homo sapiens
  misc_RNA (1)...(19): siRNA sense strand
ugauagagauccuagauau

SEQ ID NO: 1919474 - RNA, 19 nt, Homo sapiens
  misc_RNA (1)...(19): siRNA sense strand
aaacagguacuacagaaua

SEQ ID NO: 1919475 - RNA, 19 nt, Homo sapiens
  misc_RNA (1)...(19): siRNA sense strand
gauccuagauauuugacuu

SEQ ID NO: 1919476 - RNA, 19 nt, Homo sapiens
  misc_RNA (1)...(19): siRNA sense strand
acucugaaaucccuguaua

SEQ ID NO: 1919477 - RNA, 19 nt, Homo sapiens
  misc_RNA (1)...(19): siRNA sense strand
gauagagauccuagauauu

SEQ ID NO: 1919478 - RNA, 19 nt, Homo sapiens
  misc_RNA (1)...(19): siRNA sense strand
uagagauccuagauauuug

SEQ ID NO: 1919479 - RNA, 19 nt, Homo sapiens
  misc_RNA (1)...(19): siRNA sense strand
aacagguacuacagaauaa

SEQ ID NO: 1919480 - RNA, 19 nt, Homo sapiens
  misc_RNA (1)...(19): siRNA sense strand
ucugaaaucccuguauauu

SEQ ID NO: 1919481 - RNA, 19 nt, Homo sapiens
  misc_RNA (1)...(19): siRNA sense strand
gauauuugacuuggagaau

SEQ ID NO: 1919482 - RNA, 19 nt, Homo sapiens
  misc_RNA (1)...(19): siRNA sense strand
caagcaauauguggcaaac

SEQ ID NO: 1919483 - RNA, 19 nt, Homo sapiens
  misc_RNA (1)...(19): siRNA sense strand
caaacagguacuacagaau

SEQ ID NO: 1919484 - RNA, 19 nt, Homo sapiens
  misc_RNA (1)...(19): siRNA sense strand
uaugauagagauccuagau

SEQ ID NO: 1919485 - RNA, 19 nt, Homo sapiens
  misc_RNA (1)...(19): siRNA sense strand
gacuuggagaauacuguua

SEQ ID NO: 1919486 - RNA, 19 nt, Homo sapiens
  misc_RNA (1)...(19): siRNA sense strand
ggcaaacagguacuacaga

SEQ ID NO: 1919487 - RNA, 19 nt, Homo sapiens
  misc_RNA (1)...(19): siRNA sense strand
agagauccuagauauuuga

SEQ ID NO: 1919488 - RNA, 19 nt, Homo sapiens
  misc_RNA (1)...(19): siRNA sense strand
ugacuuggagaauacuguu

SEQ ID NO: 1919489 - RNA, 19 nt, Homo sapiens
  misc_RNA (1)...(19): siRNA sense strand
gcgacaacgucugcuauga

SEQ ID NO: 1919490 - RNA, 19 nt, Homo sapiens
  misc_RNA (1)...(19): siRNA sense strand
gaggaggcgugcacuaagg

SEQ ID NO: 1919491 - RNA, 19 nt, Homo sapiens
  misc_RNA (1)...(19): siRNA sense strand
ucacggugcugguggucuu

SEQ ID NO: 1919492 - RNA, 19 nt, Homo sapiens
  misc_RNA (1)...(19): siRNA sense strand
gcuucugggucuuccauau

SEQ ID NO: 1919493 - RNA, 19 nt, Homo sapiens
  misc_RNA (1)...(19): siRNA sense strand
ggacgagcaggccaaguuc

SEQ ID NO: 1919494 - RNA, 19 nt, Homo sapiens
  misc_RNA (1)...(19): siRNA sense strand
ggaggaggcgugcacuaag

SEQ ID NO: 1919495 - RNA, 19 nt, Homo sapiens
  misc_RNA (1)...(19): siRNA sense strand
cggaggaggcgugcacuaa

SEQ ID NO: 1919496 - RNA, 19 nt, Homo sapiens
  misc_RNA (1)...(19): siRNA sense strand
cggacgagcaggccaaguu

SEQ ID NO: 1919497 - RNA, 19 nt, Homo sapiens
  misc_RNA (1)...(19): siRNA sense strand
ccacucccucggucaugua

SEQ ID NO: 1919498 - RNA, 19 nt, Homo sapiens
  misc_RNA (1)...(19): siRNA sense strand
cgcaagugguggacugcuu

SEQ ID NO: 1919499 - RNA, 19 nt, Homo sapiens
  misc_RNA (1)...(19): siRNA sense strand
gaaugagccuccagagaaa

SEQ ID NO: 1919500 - RNA, 19 nt, Homo sapiens
  misc_RNA (1)...(19): siRNA sense strand
ggaauuaaaucgcagaaag

SEQ ID NO: 1919501 - RNA, 19 nt, Homo sapiens
  misc_RNA (1)...(19): siRNA sense strand
ggagcgagaugaagaggaa

SEQ ID NO: 1919502 - RNA, 19 nt, Homo sapiens
  misc_RNA (1)...(19): siRNA sense strand
ggaagacuuuggcuuugaa

SEQ ID NO: 1919503 - RNA, 19 nt, Homo sapiens
  misc_RNA (1)...(19): siRNA sense strand
gaggaagacuuuggcuuug

SEQ ID NO: 1919504 - RNA, 19 nt, Homo sapiens
  misc_RNA (1)...(19): siRNA sense strand
agaaugagccuccagagaa

SEQ ID NO: 1919505 - RNA, 19 nt, Homo sapiens
  misc_RNA (1)...(19): siRNA sense strand
ggaaguggaguuuguguca

SEQ ID NO: 1919506 - RNA, 19 nt, Homo sapiens
  misc_RNA (1)...(19): siRNA sense strand
ccauugugcuggaggauga

SEQ ID NO: 1919507 - RNA, 19 nt, Homo sapiens
  misc_RNA (1)...(19): siRNA sense strand
ugaggaagacuuuggcuuu

SEQ ID NO: 1919508 - RNA, 19 nt, Homo sapiens
  misc_RNA (1)...(19): siRNA sense strand
agauuaagguugaggaaga

SEQ ID NO: 1919509 - RNA, 19 nt, Homo sapiens
  misc_RNA (1)...(19): siRNA sense strand
agacggaaguggaguuugu

SEQ ID NO: 1919510 - RNA, 19 nt, Homo sapiens
  misc_RNA (1)...(19): siRNA sense strand
gaauuaaaucgcagaaagu

SEQ ID NO: 1919511 - RNA, 19 nt, Homo sapiens
  misc_RNA (1)...(19): siRNA sense strand
gagaaugagccuccagaga

SEQ ID NO: 1919512 - RNA, 19 nt, Homo sapiens
  misc_RNA (1)...(19): siRNA sense strand
ggaauuggagcagagagaa

SEQ ID NO: 1919513 - RNA, 19 nt, Homo sapiens
  misc_RNA (1)...(19): siRNA sense strand
cagaugaggcccuggauuc

SEQ ID NO: 1919514 - RNA, 19 nt, Homo sapiens
  misc_RNA (1)...(19): siRNA sense strand
caucaggugcagaggauaa

SEQ ID NO: 1919515 - RNA, 19 nt, Homo sapiens
  misc_RNA (1)...(19): siRNA sense strand
ggagacggaaguggaguuu

SEQ ID NO: 1919516 - RNA, 19 nt, Homo sapiens
  misc_RNA (1)...(19): siRNA sense strand
gcagaugaggcccuggauu

SEQ ID NO: 1919517 - RNA, 19 nt, Homo sapiens
  misc_RNA (1)...(19): siRNA sense strand
uaagguugaggaagacuuu

SEQ ID NO: 1919518 - RNA, 19 nt, Homo sapiens
  misc_RNA (1)...(19): siRNA sense strand
gcagauuaagguugaggaa

SEQ ID NO: 1919519 - RNA, 19 nt, Homo sapiens
  misc_RNA (1)...(19): siRNA sense strand
cagcccagccucugacuga

SEQ ID NO: 1919520 - RNA, 19 nt, Homo sapiens
  misc_RNA (1)...(19): siRNA sense strand
gccagccaguucaccauug

SEQ ID NO: 1919521 - RNA, 19 nt, Homo sapiens
  misc_RNA (1)...(19): siRNA sense strand
gauggacgccgagcaggaa

SEQ ID NO: 1919522 - RNA, 19 nt, Homo sapiens
  misc_RNA (1)...(19): siRNA sense strand
ccagccaguucaccauugu

SEQ ID NO: 1919523 - RNA, 19 nt, Homo sapiens
  misc_RNA (1)...(19): siRNA sense strand
ugaacgagcggguccugaa

SEQ ID NO: 1919524 - RNA, 19 nt, Homo sapiens
  misc_RNA (1)...(19): siRNA sense strand
aggaagacuuuggcuuuga

SEQ ID NO: 1919525 - RNA, 19 nt, Homo sapiens
  misc_RNA (1)...(19): siRNA sense strand
cggugcagauuaagguuga

SEQ ID NO: 1919526 - RNA, 19 nt, Homo sapiens
  misc_RNA (1)...(19): siRNA sense strand
caggcaaugcggagaauga

SEQ ID NO: 1919527 - RNA, 19 nt, Homo sapiens
  misc_RNA (1)...(19): siRNA sense strand
ggcguugccuccccuauuu

SEQ ID NO: 1919528 - RNA, 19 nt, Homo sapiens
  misc_RNA (1)...(19): siRNA sense strand
gaacgagcggguccugaac

SEQ ID NO: 1919529 - RNA, 19 nt, Homo sapiens
  misc_RNA (1)...(19): siRNA sense strand
ggacgccgagcaggaaaug

SEQ ID NO: 1919530 - RNA, 19 nt, Homo sapiens
  misc_RNA (1)...(19): siRNA sense strand
ccagagaaagagacacugu

SEQ ID NO: 1919531 - RNA, 19 nt, Homo sapiens
  misc_RNA (1)...(19): siRNA sense strand
cagaaaguaccaggcacua

SEQ ID NO: 1919532 - RNA, 19 nt, Homo sapiens
  misc_RNA (1)...(19): siRNA sense strand
ccuauuugguggccacauc

SEQ ID NO: 1919533 - RNA, 19 nt, Homo sapiens
  misc_RNA (1)...(19): siRNA sense strand
gauuaagguugaggaagac

SEQ ID NO: 1919534 - RNA, 19 nt, Homo sapiens
  misc_RNA (1)...(19): siRNA sense strand
gaauuggagcagagagaag

SEQ ID NO: 1919535 - RNA, 19 nt, Homo sapiens
  misc_RNA (1)...(19): siRNA sense strand
gggaauuaaaucgcagaaa

SEQ ID NO: 1919536 - RNA, 19 nt, Homo sapiens
  misc_RNA (1)...(19): siRNA sense strand
gagaagaaguuaaagcaua

SEQ ID NO: 1919537 - RNA, 19 nt, Homo sapiens
  misc_RNA (1)...(19): siRNA sense strand
ggaaugaacugaagaagca

SEQ ID NO: 1919538 - RNA, 19 nt, Homo sapiens
  misc_RNA (1)...(19): siRNA sense strand
gcgcuaaaguggauaauga

SEQ ID NO: 1919539 - RNA, 19 nt, Homo sapiens
  misc_RNA (1)...(19): siRNA sense strand
gcgcagaccucuuccacua

SEQ ID NO: 1919540 - RNA, 19 nt, Homo sapiens
  misc_RNA (1)...(19): siRNA sense strand
gcacacagcuggcuaugag

SEQ ID NO: 1919541 - RNA, 19 nt, Homo sapiens
  misc_RNA (1)...(19): siRNA sense strand
ggagagauguggcuaugga

SEQ ID NO: 1919542 - RNA, 19 nt, Homo sapiens
  misc_RNA (1)...(19): siRNA sense strand
gaagaggaaugaacugaag

SEQ ID NO: 1919543 - RNA, 19 nt, Homo sapiens
  misc_RNA (1)...(19): siRNA sense strand
gcaguaagcccaucaagau

SEQ ID NO: 1919544 - RNA, 19 nt, Homo sapiens
  misc_RNA (1)...(19): siRNA sense strand
gagagucgcugggaacauu

SEQ ID NO: 1919545 - RNA, 19 nt, Homo sapiens
  misc_RNA (1)...(19): siRNA sense strand
gaucuacccuuaugaacug

SEQ ID NO: 1919546 - RNA, 19 nt, Homo sapiens
  misc_RNA (1)...(19): siRNA sense strand
cgacuaccaugcccaguuu

SEQ ID NO: 1919547 - RNA, 19 nt, Homo sapiens
  misc_RNA (1)...(19): siRNA sense strand
gaggagaggaggaugauuu

SEQ ID NO: 1919548 - RNA, 19 nt, Homo sapiens
  misc_RNA (1)...(19): siRNA sense strand
gaaaccgacugcccaagga

SEQ ID NO: 1919549 - RNA, 19 nt, Homo sapiens
  misc_RNA (1)...(19): siRNA sense strand
gggcagagaagaaguuaaa

SEQ ID NO: 1919550 - RNA, 19 nt, Homo sapiens
  misc_RNA (1)...(19): siRNA sense strand
gaagaguucuaccaagucu

SEQ ID NO: 1919551 - RNA, 19 nt, Homo sapiens
  misc_RNA (1)...(19): siRNA sense strand
uaaaguggauaaugagauc

SEQ ID NO: 1919552 - RNA, 19 nt, Homo sapiens
  misc_RNA (1)...(19): siRNA sense strand
aguacaagaucuacccuua

SEQ ID NO: 1919553 - RNA, 19 nt, Homo sapiens
  misc_RNA (1)...(19): siRNA sense strand
acacuagcauuccuuauca

SEQ ID NO: 1919554 - RNA, 19 nt, Homo sapiens
  misc_RNA (1)...(19): siRNA sense strand
uacaagaucuacccuuaug

SEQ ID NO: 1919555 - RNA, 19 nt, Homo sapiens
  misc_RNA (1)...(19): siRNA sense strand
gcaugaccaucucugaguu

SEQ ID NO: 1919556 - RNA, 19 nt, Homo sapiens
  misc_RNA (1)...(19): siRNA sense strand
gcaaggaggagaucaagca

SEQ ID NO: 1919557 - RNA, 19 nt, Homo sapiens
  misc_RNA (1)...(19): siRNA sense strand
caagaucuacccuuaugaa

SEQ ID NO: 1919558 - RNA, 19 nt, Homo sapiens
  misc_RNA (1)...(19): siRNA sense strand
gcagaauccuuacaaucca

SEQ ID NO: 1919559 - RNA, 19 nt, Homo sapiens
  misc_RNA (1)...(19): siRNA sense strand
gggaguauaucagcaagga

SEQ ID NO: 1919560 - RNA, 19 nt, Homo sapiens
  misc_RNA (1)...(19): siRNA sense strand
agaagaaguuaaagcauag

SEQ ID NO: 1919561 - RNA, 19 nt, Homo sapiens
  misc_RNA (1)...(19): siRNA sense strand
ggaagaggaaugaacugaa

SEQ ID NO: 1919562 - RNA, 19 nt, Homo sapiens
  misc_RNA (1)...(19): siRNA sense strand
ccaaugucauccagugcua

SEQ ID NO: 1919563 - RNA, 19 nt, Homo sapiens
  misc_RNA (1)...(19): siRNA sense strand
ggacuaccagcaacucuau

SEQ ID NO: 1919564 - RNA, 19 nt, Homo sapiens
  misc_RNA (1)...(19): siRNA sense strand
gaacugcugcuggugacua

SEQ ID NO: 1919565 - RNA, 19 nt, Homo sapiens
  misc_RNA (1)...(19): siRNA sense strand
ugacagugauccucucauc

SEQ ID NO: 1919566 - RNA, 19 nt, Homo sapiens
  misc_RNA (1)...(19): siRNA sense strand
caacaaccacuuccacauc

SEQ ID NO: 1919567 - RNA, 19 nt, Homo sapiens
  misc_RNA (1)...(19): siRNA sense strand
caaguacagucccaucuac

SEQ ID NO: 1919568 - RNA, 19 nt, Homo sapiens
  misc_RNA (1)...(19): siRNA sense strand
caucugcgcuaaaguggau

SEQ ID NO: 1919569 - RNA, 19 nt, Homo sapiens
  misc_RNA (1)...(19): siRNA sense strand
gaaugugugugccaaacgu

SEQ ID NO: 1919570 - RNA, 19 nt, Homo sapiens
  misc_RNA (1)...(19): siRNA sense strand
cuuaucagcagaauccuua

SEQ ID NO: 1919571 - RNA, 19 nt, Homo sapiens
  misc_RNA (1)...(19): siRNA sense strand
gaucaagcacggccaguca

SEQ ID NO: 1919572 - RNA, 19 nt, Homo sapiens
  misc_RNA (1)...(19): siRNA sense strand
ccaaguacagucccaucua

SEQ ID NO: 1919573 - RNA, 19 nt, Homo sapiens
  misc_RNA (1)...(19): siRNA sense strand
guacaagaucuacccuuau

SEQ ID NO: 1919574 - RNA, 19 nt, Homo sapiens
  misc_RNA (1)...(19): siRNA sense strand
gcucaccucaccacuacua

SEQ ID NO: 1919575 - RNA, 19 nt, Homo sapiens
  misc_RNA (1)...(19): siRNA sense strand
caaaacaagugaagacauc

SEQ ID NO: 1919576 - RNA, 19 nt, Homo sapiens
  misc_RNA (1)...(19): siRNA sense strand
uaccauagccaguuagaug

SEQ ID NO: 1919577 - RNA, 19 nt, Homo sapiens
  misc_RNA (1)...(19): siRNA sense strand
cuucagcgguaaagaaugu

SEQ ID NO: 1919578 - RNA, 19 nt, Homo sapiens
  misc_RNA (1)...(19): siRNA sense strand
caucccagcuggagacagu

SEQ ID NO: 1919579 - RNA, 19 nt, Homo sapiens
  misc_RNA (1)...(19): siRNA sense strand
ucagaugcuucaccuguca

SEQ ID NO: 1919580 - RNA, 19 nt, Homo sapiens
  misc_RNA (1)...(19): siRNA sense strand
gaccuucagcgguaaagaa

SEQ ID NO: 1919581 - RNA, 19 nt, Homo sapiens
  misc_RNA (1)...(19): siRNA sense strand
cagcaaggaugguguucca

SEQ ID NO: 1919582 - RNA, 19 nt, Homo sapiens
  misc_RNA (1)...(19): siRNA sense strand
ggugauuugucuacagcaa

SEQ ID NO: 1919583 - RNA, 19 nt, Homo sapiens
  misc_RNA (1)...(19): siRNA sense strand
uccauaccauagccaguua

SEQ ID NO: 1919584 - RNA, 19 nt, Homo sapiens
  misc_RNA (1)...(19): siRNA sense strand
cgagucaucugcgcuaaag

SEQ ID NO: 1919585 - RNA, 19 nt, Homo sapiens
  misc_RNA (1)...(19): siRNA sense strand
gaacacuagcauuccuuau

SEQ ID NO: 1919586 - RNA, 19 nt, Homo sapiens
  misc_RNA (1)...(19): siRNA sense strand
cgaaggagaggaaauguac

SEQ ID NO: 1919587 - RNA, 19 nt, Homo sapiens
  misc_RNA (1)...(19): siRNA sense strand
cauagacggacaucugaaa

SEQ ID NO: 1919588 - RNA, 19 nt, Homo sapiens
  misc_RNA (1)...(19): siRNA sense strand
gugauccucucaucuccaa

SEQ ID NO: 1919589 - RNA, 19 nt, Homo sapiens
  misc_RNA (1)...(19): siRNA sense strand
gcacgucagcugcuucaag

SEQ ID NO: 1919590 - RNA, 19 nt, Homo sapiens
  misc_RNA (1)...(19): siRNA sense strand
ggaagaguucuaccaaguc

SEQ ID NO: 1919591 - RNA, 19 nt, Homo sapiens
  misc_RNA (1)...(19): siRNA sense strand
aggaagaguucuaccaagu

SEQ ID NO: 1919592 - RNA, 19 nt, Homo sapiens
  misc_RNA (1)...(19): siRNA sense strand
cccaggacaucuacgagaa

SEQ ID NO: 1919593 - RNA, 19 nt, Homo sapiens
  misc_RNA (1)...(19): siRNA sense strand
gaacauuaucucccuacuc

SEQ ID NO: 1919594 - RNA, 19 nt, Homo sapiens
  misc_RNA (1)...(19): siRNA sense strand
cacgucagcugcuucaagu

SEQ ID NO: 1919595 - RNA, 19 nt, Homo sapiens
  misc_RNA (1)...(19): siRNA sense strand
agaguucuaccaagucuuu

SEQ ID NO: 1919596 - RNA, 19 nt, Homo sapiens
  misc_RNA (1)...(19): siRNA sense strand
ccucucaucuccaaaucug

SEQ ID NO: 1919597 - RNA, 19 nt, Homo sapiens
  misc_RNA (1)...(19): siRNA sense strand
cuaccuggcugacagugau

SEQ ID NO: 1919598 - RNA, 19 nt, Homo sapiens
  misc_RNA (1)...(19): siRNA sense strand
ccagucaggcuucuucuuc

SEQ ID NO: 1919599 - RNA, 19 nt, Homo sapiens
  misc_RNA (1)...(19): siRNA sense strand
ucagccagaccuccaagua

SEQ ID NO: 1919600 - RNA, 19 nt, Homo sapiens
  misc_RNA (1)...(19): siRNA sense strand
acaaacggcauggugauuu

SEQ ID NO: 1919601 - RNA, 19 nt, Homo sapiens
  misc_RNA (1)...(19): siRNA sense strand
cagagaagaaguuaaagca

SEQ ID NO: 1919602 - RNA, 19 nt, Homo sapiens
  misc_RNA (1)...(19): siRNA sense strand
uuaaaugugagacuuguga

SEQ ID NO: 1919603 - RNA, 19 nt, Homo sapiens
  misc_RNA (1)...(19): siRNA sense strand
caucacaggcgaagucauc

SEQ ID NO: 1919604 - RNA, 19 nt, Homo sapiens
  misc_RNA (1)...(19): siRNA sense strand
ccaggaagaguucuaccaa

SEQ ID NO: 1919605 - RNA, 19 nt, Homo sapiens
  misc_RNA (1)...(19): siRNA sense strand
guagacaggacccguuuag

SEQ ID NO: 1919606 - RNA, 19 nt, Homo sapiens
  misc_RNA (1)...(19): siRNA sense strand
ucaagaaccaggaguacau

SEQ ID NO: 1919607 - RNA, 19 nt, Homo sapiens
  misc_RNA (1)...(19): siRNA sense strand
aacaaccacuuccacauca

SEQ ID NO: 1919608 - RNA, 19 nt, Homo sapiens
  misc_RNA (1)...(19): siRNA sense strand
gagccucauuccagauaca

SEQ ID NO: 1919609 - RNA, 19 nt, Homo sapiens
  misc_RNA (1)...(19): siRNA sense strand
gauccucucaucuccaaau

SEQ ID NO: 1919610 - RNA, 19 nt, Homo sapiens
  misc_RNA (1)...(19): siRNA sense strand
ucagcagaauccuuacaau

SEQ ID NO: 1919611 - RNA, 19 nt, Homo sapiens
  misc_RNA (1)...(19): siRNA sense strand
cauagccaguuagauguga

SEQ ID NO: 1919612 - RNA, 19 nt, Homo sapiens
  misc_RNA (1)...(19): siRNA sense strand
cagcagaauccuuacaauc

SEQ ID NO: 1919613 - RNA, 19 nt, Homo sapiens
  misc_RNA (1)...(19): siRNA sense strand
gaccaucucugaguuugac

SEQ ID NO: 1919614 - RNA, 19 nt, Homo sapiens
  misc_RNA (1)...(19): siRNA sense strand
gagaggaggaugauuuuga

SEQ ID NO: 1919615 - RNA, 19 nt, Homo sapiens
  misc_RNA (1)...(19): siRNA sense strand
auacauguccgacgagaug

SEQ ID NO: 1919616 - RNA, 19 nt, Homo sapiens
  misc_RNA (1)...(19): siRNA sense strand
guaagcccaucaagauucg

SEQ ID NO: 1919617 - RNA, 19 nt, Homo sapiens
  misc_RNA (1)...(19): siRNA sense strand
cuucaccugucaaguaugu

SEQ ID NO: 1919618 - RNA, 19 nt, Homo sapiens
  misc_RNA (1)...(19): siRNA sense strand
ccuccacuccaaccucuua

SEQ ID NO: 1919619 - RNA, 19 nt, Homo sapiens
  misc_RNA (1)...(19): siRNA sense strand
gauccuuaauuacaaagac

SEQ ID NO: 1919620 - RNA, 19 nt, Homo sapiens
  misc_RNA (1)...(19): siRNA sense strand
gcuaaaguggauaaugaga

SEQ ID NO: 1919621 - RNA, 19 nt, Homo sapiens
  misc_RNA (1)...(19): siRNA sense strand
gggcagcuccaaugucauc

SEQ ID NO: 1919622 - RNA, 19 nt, Homo sapiens
  misc_RNA (1)...(19): siRNA sense strand
agacaggacccguuuagag

SEQ ID NO: 1919623 - RNA, 19 nt, Homo sapiens
  misc_RNA (1)...(19): siRNA sense strand
cagucaggcuucuucuuca

SEQ ID NO: 1919624 - RNA, 19 nt, Homo sapiens
  misc_RNA (1)...(19): siRNA sense strand
ccgcucaccucaccacuac

SEQ ID NO: 1919625 - RNA, 19 nt, Homo sapiens
  misc_RNA (1)...(19): siRNA sense strand
acgagaugcuggagagaug

SEQ ID NO: 1919626 - RNA, 19 nt, Homo sapiens
  misc_RNA (1)...(19): siRNA sense strand
gcagagaagaaguuaaagc

SEQ ID NO: 1919627 - RNA, 19 nt, Homo sapiens
  misc_RNA (1)...(19): siRNA sense strand
ccgaaggagaggaaaugua

SEQ ID NO: 1919628 - RNA, 19 nt, Homo sapiens
  misc_RNA (1)...(19): siRNA sense strand
cuacagcaaccaagagcaa

SEQ ID NO: 1919629 - RNA, 19 nt, Homo sapiens
  misc_RNA (1)...(19): siRNA sense strand
gcauagacggacaucugaa

SEQ ID NO: 1919630 - RNA, 19 nt, Homo sapiens
  misc_RNA (1)...(19): siRNA sense strand
caguaagcccaucaagauu

SEQ ID NO: 1919631 - RNA, 19 nt, Homo sapiens
  misc_RNA (1)...(19): siRNA sense strand
cuacuaugcuucggagucu

SEQ ID NO: 1919632 - RNA, 19 nt, Homo sapiens
  misc_RNA (1)...(19): siRNA sense strand
caaccacuuccacaucaga

SEQ ID NO: 1919633 - RNA, 19 nt, Homo sapiens
  misc_RNA (1)...(19): siRNA sense strand
aagcauagacggacaucug

SEQ ID NO: 1919634 - RNA, 19 nt, Homo sapiens
  misc_RNA (1)...(19): siRNA sense strand
gaagaaguuaaagcauaga

SEQ ID NO: 1919635 - RNA, 19 nt, Homo sapiens
  misc_RNA (1)...(19): siRNA sense strand
augcuucaccugucaagua

SEQ ID NO: 1919636 - RNA, 19 nt, Homo sapiens
  misc_RNA (1)...(19): siRNA sense strand
caaacaggauuagacuuua

SEQ ID NO: 1919637 - RNA, 19 nt, Homo sapiens
  misc_RNA (1)...(19): siRNA sense strand
ggauuagacuuuauuacug

SEQ ID NO: 1919638 - RNA, 19 nt, Homo sapiens
  misc_RNA (1)...(19): siRNA sense strand
gagcagaauugacagaaca

SEQ ID NO: 1919639 - RNA, 19 nt, Homo sapiens
  misc_RNA (1)...(19): siRNA sense strand
ccaaacaggauuagacuuu

SEQ ID NO: 1919640 - RNA, 19 nt, Homo sapiens
  misc_RNA (1)...(19): siRNA sense strand
gcagaugggagcagaauug

SEQ ID NO: 1919641 - RNA, 19 nt, Homo sapiens
  misc_RNA (1)...(19): siRNA sense strand
cuaacagaauggagaguaa

SEQ ID NO: 1919642 - RNA, 19 nt, Homo sapiens
  misc_RNA (1)...(19): siRNA sense strand
caucagaggcuaacagaau

SEQ ID NO: 1919643 - RNA, 19 nt, Homo sapiens
  misc_RNA (1)...(19): siRNA sense strand
ucacagagcaagccaaaca

SEQ ID NO: 1919644 - RNA, 19 nt, Homo sapiens
  misc_RNA (1)...(19): siRNA sense strand
gaugggagcagaauugaca

SEQ ID NO: 1919645 - RNA, 19 nt, Homo sapiens
  misc_RNA (1)...(19): siRNA sense strand
aaaccaacguacucacaga

SEQ ID NO: 1919646 - RNA, 19 nt, Homo sapiens
  misc_RNA (1)...(19): siRNA sense strand
ggauaucccuccccgcuaa

SEQ ID NO: 1919647 - RNA, 19 nt, Homo sapiens
  misc_RNA (1)...(19): siRNA sense strand
gagcaagccaaacaggauu

SEQ ID NO: 1919648 - RNA, 19 nt, Homo sapiens
  misc_RNA (1)...(19): siRNA sense strand
gcuaacagaauggagagua

SEQ ID NO: 1919649 - RNA, 19 nt, Homo sapiens
  misc_RNA (1)...(19): siRNA sense strand
ggagcagaauugacagaac

SEQ ID NO: 1919650 - RNA, 19 nt, Homo sapiens
  misc_RNA (1)...(19): siRNA sense strand
uaacagaauggagaguaaa

SEQ ID NO: 1919651 - RNA, 19 nt, Homo sapiens
  misc_RNA (1)...(19): siRNA sense strand
gcacauggccaggauaucc

SEQ ID NO: 1919652 - RNA, 19 nt, Homo sapiens
  misc_RNA (1)...(19): siRNA sense strand
caacguacucacagagcaa

SEQ ID NO: 1919653 - RNA, 19 nt, Homo sapiens
  misc_RNA (1)...(19): siRNA sense strand
cagcacauggccaggauau

SEQ ID NO: 1919654 - RNA, 19 nt, Homo sapiens
  misc_RNA (1)...(19): siRNA sense strand
ccgcuaaaauacuaggaua

SEQ ID NO: 1919655 - RNA, 19 nt, Homo sapiens
  misc_RNA (1)...(19): siRNA sense strand
ugaaaccaacguacucaca

SEQ ID NO: 1919656 - RNA, 19 nt, Homo sapiens
  misc_RNA (1)...(19): siRNA sense strand
gcugaaaccaacguacuca

SEQ ID NO: 1919657 - RNA, 19 nt, Homo sapiens
  misc_RNA (1)...(19): siRNA sense strand
gggagcagaauugacagaa

SEQ ID NO: 1919658 - RNA, 19 nt, Homo sapiens
  misc_RNA (1)...(19): siRNA sense strand
cagaugggagcagaauuga

SEQ ID NO: 1919659 - RNA, 19 nt, Homo sapiens
  misc_RNA (1)...(19): siRNA sense strand
gaaagcaaguucaacauau

SEQ ID NO: 1919660 - RNA, 19 nt, Homo sapiens
  misc_RNA (1)...(19): siRNA sense strand
caaaggcgcuacucaucua

SEQ ID NO: 1919661 - RNA, 19 nt, Homo sapiens
  misc_RNA (1)...(19): siRNA sense strand
ggaaagcaaguucaacaua

SEQ ID NO: 1919662 - RNA, 19 nt, Homo sapiens
  misc_RNA (1)...(19): siRNA sense strand
gaauggagguugcacuguu

SEQ ID NO: 1919663 - RNA, 19 nt, Homo sapiens
  misc_RNA (1)...(19): siRNA sense strand
gcaacgauuauaagaguua

SEQ ID NO: 1919664 - RNA, 19 nt, Homo sapiens
  misc_RNA (1)...(19): siRNA sense strand
gaacaacuggguagaaugg

SEQ ID NO: 1919665 - RNA, 19 nt, Homo sapiens
  misc_RNA (1)...(19): siRNA sense strand
gugcaacgauuauaagagu

SEQ ID NO: 1919666 - RNA, 19 nt, Homo sapiens
  misc_RNA (1)...(19): siRNA sense strand
gcagcuuucuugcccuaaa

SEQ ID NO: 1919667 - RNA, 19 nt, Homo sapiens
  misc_RNA (1)...(19): siRNA sense strand
ccacguagacugucaagau

SEQ ID NO: 1919668 - RNA, 19 nt, Homo sapiens
  misc_RNA (1)...(19): siRNA sense strand
ggaaaaccuuugccacgua

SEQ ID NO: 1919669 - RNA, 19 nt, Homo sapiens
  misc_RNA (1)...(19): siRNA sense strand
uggauggguuugaggguua

SEQ ID NO: 1919670 - RNA, 19 nt, Homo sapiens
  misc_RNA (1)...(19): siRNA sense strand
gcaaguucaacauaucaaa

SEQ ID NO: 1919671 - RNA, 19 nt, Homo sapiens
  misc_RNA (1)...(19): siRNA sense strand
ggacuuggauggguuugag

SEQ ID NO: 1919672 - RNA, 19 nt, Homo sapiens
  misc_RNA (1)...(19): siRNA sense strand
aaagcaaguucaacauauc

SEQ ID NO: 1919673 - RNA, 19 nt, Homo sapiens
  misc_RNA (1)...(19): siRNA sense strand
gacaaaggcgcuacucauc

SEQ ID NO: 1919674 - RNA, 19 nt, Homo sapiens
  misc_RNA (1)...(19): siRNA sense strand
gucaagaucugcugaaucc

SEQ ID NO: 1919675 - RNA, 19 nt, Homo sapiens
  misc_RNA (1)...(19): siRNA sense strand
gaugaacaacuggguagaa

SEQ ID NO: 1919676 - RNA, 19 nt, Homo sapiens
  misc_RNA (1)...(19): siRNA sense strand
aggcgcuacucaucuauuu

SEQ ID NO: 1919677 - RNA, 19 nt, Homo sapiens
  misc_RNA (1)...(19): siRNA sense strand
cacguagacugucaagauc

SEQ ID NO: 1919678 - RNA, 19 nt, Homo sapiens
  misc_RNA (1)...(19): siRNA sense strand
ggaggacuuggauggguuu

SEQ ID NO: 1919679 - RNA, 19 nt, Homo sapiens
  misc_RNA (1)...(19): siRNA sense strand
uauggccucuuccagauca

SEQ ID NO: 1919680 - RNA, 19 nt, Homo sapiens
  misc_RNA (1)...(19): siRNA sense strand
cagcuuucuugcccuaaau

SEQ ID NO: 1919681 - RNA, 19 nt, Homo sapiens
  misc_RNA (1)...(19): siRNA sense strand
guggaaagcaaguucaaca

SEQ ID NO: 1919682 - RNA, 19 nt, Homo sapiens
  misc_RNA (1)...(19): siRNA sense strand
caaguucaacauaucaaag

SEQ ID NO: 1919683 - RNA, 19 nt, Homo sapiens
  misc_RNA (1)...(19): siRNA sense strand
gcgcuacucaucuauuugg

SEQ ID NO: 1919684 - RNA, 19 nt, Homo sapiens
  misc_RNA (1)...(19): siRNA sense strand
acuauggccucuuccagau

SEQ ID NO: 1919685 - RNA, 19 nt, Homo sapiens
  misc_RNA (1)...(19): siRNA sense strand
aauggagguugcacuguuc

SEQ ID NO: 1919686 - RNA, 19 nt, Homo sapiens
  misc_RNA (1)...(19): siRNA sense strand
cguagacugucaagaucug

SEQ ID NO: 1919687 - RNA, 19 nt, Homo sapiens
  misc_RNA (1)...(19): siRNA sense strand
cuacuggugcaacgauuau

SEQ ID NO: 1919688 - RNA, 19 nt, Homo sapiens
  misc_RNA (1)...(19): siRNA sense strand
augaacaacuggguagaau

SEQ ID NO: 1919689 - RNA, 19 nt, Homo sapiens
  misc_RNA (1)...(19): siRNA sense strand
gugccuggcuuuuguggaa

SEQ ID NO: 1919690 - RNA, 19 nt, Homo sapiens
  misc_RNA (1)...(19): siRNA sense strand
caacgauuauaagaguuac

SEQ ID NO: 1919691 - RNA, 19 nt, Homo sapiens
  misc_RNA (1)...(19): siRNA sense strand
acaaaggcgcuacucaucu

SEQ ID NO: 1919692 - RNA, 19 nt, Homo sapiens
  misc_RNA (1)...(19): siRNA sense strand
gauaacaucuucaucuuug

SEQ ID NO: 1919693 - RNA, 19 nt, Homo sapiens
  misc_RNA (1)...(19): siRNA sense strand
gggcaugucuguggaguuu

SEQ ID NO: 1919694 - RNA, 19 nt, Homo sapiens
  misc_RNA (1)...(19): siRNA sense strand
gcagaggcccugaucauga

SEQ ID NO: 1919695 - RNA, 19 nt, Homo sapiens
  misc_RNA (1)...(19): siRNA sense strand
gaacagacccggcuuuuga

SEQ ID NO: 1919696 - RNA, 19 nt, Homo sapiens
  misc_RNA (1)...(19): siRNA sense strand
ucucugaacugccuaaaga

SEQ ID NO: 1919697 - RNA, 19 nt, Homo sapiens
  misc_RNA (1)...(19): siRNA sense strand
gcaccagccucucugacaa

SEQ ID NO: 1919698 - RNA, 19 nt, Homo sapiens
  misc_RNA (1)...(19): siRNA sense strand
ccagcuacauugucauauu

SEQ ID NO: 1919699 - RNA, 19 nt, Homo sapiens
  misc_RNA (1)...(19): siRNA sense strand
auaaguaucuucccugguu

SEQ ID NO: 1919700 - RNA, 19 nt, Homo sapiens
  misc_RNA (1)...(19): siRNA sense strand
ucaacagccuccugcagua

SEQ ID NO: 1919701 - RNA, 19 nt, Homo sapiens
  misc_RNA (1)...(19): siRNA sense strand
ccaagcagcugguaucacu

SEQ ID NO: 1919702 - RNA, 19 nt, Homo sapiens
  misc_RNA (1)...(19): siRNA sense strand
gcuugacuauuuccucuuu

SEQ ID NO: 1919703 - RNA, 19 nt, Homo sapiens
  misc_RNA (1)...(19): siRNA sense strand
cguucucccucaacaauua

SEQ ID NO: 1919704 - RNA, 19 nt, Homo sapiens
  misc_RNA (1)...(19): siRNA sense strand
ggaguacaguggcacaauc

SEQ ID NO: 1919705 - RNA, 19 nt, Homo sapiens
  misc_RNA (1)...(19): siRNA sense strand
ggaaagugccuggaacaga

SEQ ID NO: 1919706 - RNA, 19 nt, Homo sapiens
  misc_RNA (1)...(19): siRNA sense strand
cagcugugguggccuauga

SEQ ID NO: 1919707 - RNA, 19 nt, Homo sapiens
  misc_RNA (1)...(19): siRNA sense strand
acucguaccugcuugacua

SEQ ID NO: 1919708 - RNA, 19 nt, Homo sapiens
  misc_RNA (1)...(19): siRNA sense strand
cagcuacauugucauauuc

SEQ ID NO: 1919709 - RNA, 19 nt, Homo sapiens
  misc_RNA (1)...(19): siRNA sense strand
gcaugucuguggaguuugu

SEQ ID NO: 1919710 - RNA, 19 nt, Homo sapiens
  misc_RNA (1)...(19): siRNA sense strand
gaagcgagucugucgauca

SEQ ID NO: 1919711 - RNA, 19 nt, Homo sapiens
  misc_RNA (1)...(19): siRNA sense strand
ccacauuacccgcuccuuu

SEQ ID NO: 1919712 - RNA, 19 nt, Homo sapiens
  misc_RNA (1)...(19): siRNA sense strand
cguaccugcuugacuauuu

SEQ ID NO: 1919713 - RNA, 19 nt, Homo sapiens
  misc_RNA (1)...(19): siRNA sense strand
ggaggaggccuucuuagag

SEQ ID NO: 1919714 - RNA, 19 nt, Homo sapiens
  misc_RNA (1)...(19): siRNA sense strand
gggaggaggccuucuuaga

SEQ ID NO: 1919715 - RNA, 19 nt, Homo sapiens
  misc_RNA (1)...(19): siRNA sense strand
ucggauggcuggcauguuc

SEQ ID NO: 1919716 - RNA, 19 nt, Homo sapiens
  misc_RNA (1)...(19): siRNA sense strand
cagcaccucugugaacuug

SEQ ID NO: 1919717 - RNA, 19 nt, Homo sapiens
  misc_RNA (1)...(19): siRNA sense strand
caccauguguggcguguau

SEQ ID NO: 1919718 - RNA, 19 nt, Homo sapiens
  misc_RNA (1)...(19): siRNA sense strand
gcagaugucagccuuugug

SEQ ID NO: 1919719 - RNA, 19 nt, Homo sapiens
  misc_RNA (1)...(19): siRNA sense strand
guacaaaggaaaggacuau

SEQ ID NO: 1919720 - RNA, 19 nt, Homo sapiens
  misc_RNA (1)...(19): siRNA sense strand
guaccugcuugacuauuuc

SEQ ID NO: 1919721 - RNA, 19 nt, Homo sapiens
  misc_RNA (1)...(19): siRNA sense strand
caccugauccuauuacaga

SEQ ID NO: 1919722 - RNA, 19 nt, Homo sapiens
  misc_RNA (1)...(19): siRNA sense strand
ucaccaauguguuuuauga

SEQ ID NO: 1919723 - RNA, 19 nt, Homo sapiens
  misc_RNA (1)...(19): siRNA sense strand
guguauggcucugcccuuu

SEQ ID NO: 1919724 - RNA, 19 nt, Homo sapiens
  misc_RNA (1)...(19): siRNA sense strand
ggaaggaccauuuucugua

SEQ ID NO: 1919725 - RNA, 19 nt, Homo sapiens
  misc_RNA (1)...(19): siRNA sense strand
ucauucagaucuucuucuu

SEQ ID NO: 1919726 - RNA, 19 nt, Homo sapiens
  misc_RNA (1)...(19): siRNA sense strand
guucauggccuaucacaag

SEQ ID NO: 1919727 - RNA, 19 nt, Homo sapiens
  misc_RNA (1)...(19): siRNA sense strand
caaaggaaaggacuauucu

SEQ ID NO: 1919728 - RNA, 19 nt, Homo sapiens
  misc_RNA (1)...(19): siRNA sense strand
uaugggaagugcgguguuu

SEQ ID NO: 1919729 - RNA, 19 nt, Homo sapiens
  misc_RNA (1)...(19): siRNA sense strand
ccuacacgaucaccaaugu

SEQ ID NO: 1919730 - RNA, 19 nt, Homo sapiens
  misc_RNA (1)...(19): siRNA sense strand
gcugauaacaucuucaucu

SEQ ID NO: 1919731 - RNA, 19 nt, Homo sapiens
  misc_RNA (1)...(19): siRNA sense strand
ggacaauaccagucucuac

SEQ ID NO: 1919732 - RNA, 19 nt, Homo sapiens
  misc_RNA (1)...(19): siRNA sense strand
ccacagcugacaacaucua

SEQ ID NO: 1919733 - RNA, 19 nt, Homo sapiens
  misc_RNA (1)...(19): siRNA sense strand
gacuucagauggccagguu

SEQ ID NO: 1919734 - RNA, 19 nt, Homo sapiens
  misc_RNA (1)...(19): siRNA sense strand
cacgagagguccacauugg

SEQ ID NO: 1919735 - RNA, 19 nt, Homo sapiens
  misc_RNA (1)...(19): siRNA sense strand
gccaccagcuacauuguca

SEQ ID NO: 1919736 - RNA, 19 nt, Homo sapiens
  misc_RNA (1)...(19): siRNA sense strand
gcucacagccaaccagaca

SEQ ID NO: 1919737 - RNA, 19 nt, Homo sapiens
  misc_RNA (1)...(19): siRNA sense strand
ccagguucauggccuauca

SEQ ID NO: 1919738 - RNA, 19 nt, Homo sapiens
  misc_RNA (1)...(19): siRNA sense strand
cugauaacaucuucaucuu

SEQ ID NO: 1919739 - RNA, 19 nt, Homo sapiens
  misc_RNA (1)...(19): siRNA sense strand
aaggaaaggacuauucuga

SEQ ID NO: 1919740 - RNA, 19 nt, Homo sapiens
  misc_RNA (1)...(19): siRNA sense strand
gcaguuccauaaguaucuu

SEQ ID NO: 1919741 - RNA, 19 nt, Homo sapiens
  misc_RNA (1)...(19): siRNA sense strand
ccaaagaggccaccaucuc

SEQ ID NO: 1919742 - RNA, 19 nt, Homo sapiens
  misc_RNA (1)...(19): siRNA sense strand
agacacaguugccauucug

SEQ ID NO: 1919743 - RNA, 19 nt, Homo sapiens
  misc_RNA (1)...(19): siRNA sense strand
ccaauaaggacaaguucug

SEQ ID NO: 1919744 - RNA, 19 nt, Homo sapiens
  misc_RNA (1)...(19): siRNA sense strand
ccacagcuuugaagguucu

SEQ ID NO: 1919745 - RNA, 19 nt, Homo sapiens
  misc_RNA (1)...(19): siRNA sense strand
gguggccucuugcccaaau

SEQ ID NO: 1919746 - RNA, 19 nt, Homo sapiens
  misc_RNA (1)...(19): siRNA sense strand
ugaacugccuaaagaacug

SEQ ID NO: 1919747 - RNA, 19 nt, Homo sapiens
  misc_RNA (1)...(19): siRNA sense strand
acaaaggaaaggacuauuc

SEQ ID NO: 1919748 - RNA, 19 nt, Homo sapiens
  misc_RNA (1)...(19): siRNA sense strand
cuccacagcugacaacauc

SEQ ID NO: 1919749 - RNA, 19 nt, Homo sapiens
  misc_RNA (1)...(19): siRNA sense strand
cacauuacccgcuccuuug

SEQ ID NO: 1919750 - RNA, 19 nt, Homo sapiens
  misc_RNA (1)...(19): siRNA sense strand
ugcaacaacuucuccuuca

SEQ ID NO: 1919751 - RNA, 19 nt, Homo sapiens
  misc_RNA (1)...(19): siRNA sense strand
gacuauuuccucuuucuga

SEQ ID NO: 1919752 - RNA, 19 nt, Homo sapiens
  misc_RNA (1)...(19): siRNA sense strand
gcuacugcgccuucuauga

SEQ ID NO: 1919753 - RNA, 19 nt, Homo sapiens
  misc_RNA (1)...(19): siRNA sense strand
caccagcuacauugucaua

SEQ ID NO: 1919754 - RNA, 19 nt, Homo sapiens
  misc_RNA (1)...(19): siRNA sense strand
gcucugcccuuugcaaugc

SEQ ID NO: 1919755 - RNA, 19 nt, Homo sapiens
  misc_RNA (1)...(19): siRNA sense strand
ugaagguucuaucaaaggu

SEQ ID NO: 1919756 - RNA, 19 nt, Homo sapiens
  misc_RNA (1)...(19): siRNA sense strand
cacgaucaccaauguguuu

SEQ ID NO: 1919757 - RNA, 19 nt, Homo sapiens
  misc_RNA (1)...(19): siRNA sense strand
gcaccucugugaacuugac

SEQ ID NO: 1919758 - RNA, 19 nt, Homo sapiens
  misc_RNA (1)...(19): siRNA sense strand
cccagaagauccaguaugc

SEQ ID NO: 1919759 - RNA, 19 nt, Homo sapiens
  misc_RNA (1)...(19): siRNA sense strand
gacgucugcugcuguguca

SEQ ID NO: 1919760 - RNA, 19 nt, Homo sapiens
  misc_RNA (1)...(19): siRNA sense strand
gugggaggaggccuucuua

SEQ ID NO: 1919761 - RNA, 19 nt, Homo sapiens
  misc_RNA (1)...(19): siRNA sense strand
gaaggaccauuuucuguac

SEQ ID NO: 1919762 - RNA, 19 nt, Homo sapiens
  misc_RNA (1)...(19): siRNA sense strand
ggccuggucuuuacagaac

SEQ ID NO: 1919763 - RNA, 19 nt, Homo sapiens
  misc_RNA (1)...(19): siRNA sense strand
ccaagaacuucagcggaau

SEQ ID NO: 1919764 - RNA, 19 nt, Homo sapiens
  misc_RNA (1)...(19): siRNA sense strand
aaccugcucuccauuguca

SEQ ID NO: 1919765 - RNA, 19 nt, Homo sapiens
  misc_RNA (1)...(19): siRNA sense strand
ucaaccugcucuccauugu

SEQ ID NO: 1919766 - RNA, 19 nt, Homo sapiens
  misc_RNA (1)...(19): siRNA sense strand
gauucagccuccagguuca

SEQ ID NO: 1919767 - RNA, 19 nt, Homo sapiens
  misc_RNA (1)...(19): siRNA sense strand
gaagaacccagagcugucu

SEQ ID NO: 1919768 - RNA, 19 nt, Homo sapiens
  misc_RNA (1)...(19): siRNA sense strand
ggccaucugcuucuuccua

SEQ ID NO: 1919769 - RNA, 19 nt, Homo sapiens
  misc_RNA (1)...(19): siRNA sense strand
acagccuccugcaguauuu

SEQ ID NO: 1919770 - RNA, 19 nt, Homo sapiens
  misc_RNA (1)...(19): siRNA sense strand
gaagggcaccagccucucu

SEQ ID NO: 1919771 - RNA, 19 nt, Homo sapiens
  misc_RNA (1)...(19): siRNA sense strand
ugagcugcauggcugacua

SEQ ID NO: 1919772 - RNA, 19 nt, Homo sapiens
  misc_RNA (1)...(19): siRNA sense strand
gacguucucccucaacaau

SEQ ID NO: 1919773 - RNA, 19 nt, Homo sapiens
  misc_RNA (1)...(19): siRNA sense strand
ccaaggcccagcucauuca

SEQ ID NO: 1919774 - RNA, 19 nt, Homo sapiens
  misc_RNA (1)...(19): siRNA sense strand
ucacaggauuacacagaag

SEQ ID NO: 1919775 - RNA, 19 nt, Homo sapiens
  misc_RNA (1)...(19): siRNA sense strand
ggagcaguuccauaaguau

SEQ ID NO: 1919776 - RNA, 19 nt, Homo sapiens
  misc_RNA (1)...(19): siRNA sense strand
ucacccagaagauccagua

SEQ ID NO: 1919777 - RNA, 19 nt, Homo sapiens
  misc_RNA (1)...(19): siRNA sense strand
gcaacaacuucuccuucac

SEQ ID NO: 1919778 - RNA, 19 nt, Homo sapiens
  misc_RNA (1)...(19): siRNA sense strand
cgccuucuaugacgaaugu

SEQ ID NO: 1919779 - RNA, 19 nt, Homo sapiens
  misc_RNA (1)...(19): siRNA sense strand
guauggcucugcccuuugc

SEQ ID NO: 1919780 - RNA, 19 nt, Homo sapiens
  misc_RNA (1)...(19): siRNA sense strand
gaggccuucuaccagcaua

SEQ ID NO: 1919781 - RNA, 19 nt, Homo sapiens
  misc_RNA (1)...(19): siRNA sense strand
caaggacucguaccugcuu

SEQ ID NO: 1919782 - RNA, 19 nt, Homo sapiens
  misc_RNA (1)...(19): siRNA sense strand
ccacgagagguccacauug

SEQ ID NO: 1919783 - RNA, 19 nt, Homo sapiens
  misc_RNA (1)...(19): siRNA sense strand
ccaugggcuucuucuccua

SEQ ID NO: 1919784 - RNA, 19 nt, Homo sapiens
  misc_RNA (1)...(19): siRNA sense strand
caacagccuccugcaguau

SEQ ID NO: 1919785 - RNA, 19 nt, Homo sapiens
  misc_RNA (1)...(19): siRNA sense strand
gcagucugguccucaucau

SEQ ID NO: 1919786 - RNA, 19 nt, Homo sapiens
  misc_RNA (1)...(19): siRNA sense strand
ggaagccucaugacacucu

SEQ ID NO: 1919787 - RNA, 19 nt, Homo sapiens
  misc_RNA (1)...(19): siRNA sense strand
gggcuucuucuccuacuug

SEQ ID NO: 1919788 - RNA, 19 nt, Homo sapiens
  misc_RNA (1)...(19): siRNA sense strand
agagugagccuuacacaac

SEQ ID NO: 1919789 - RNA, 19 nt, Homo sapiens
  misc_RNA (1)...(19): siRNA sense strand
cuggaucacucgagguguu

SEQ ID NO: 1919790 - RNA, 19 nt, Homo sapiens
  misc_RNA (1)...(19): siRNA sense strand
gagcaguuccauaaguauc

SEQ ID NO: 1919791 - RNA, 19 nt, Homo sapiens
  misc_RNA (1)...(19): siRNA sense strand
gcugccgccuuuauauauc

SEQ ID NO: 1919792 - RNA, 19 nt, Homo sapiens
  misc_RNA (1)...(19): siRNA sense strand
gaacuaaaccuuaagauga

SEQ ID NO: 1919793 - RNA, 19 nt, Homo sapiens
  misc_RNA (1)...(19): siRNA sense strand
ggaaagacauaaagaagaa

SEQ ID NO: 1919794 - RNA, 19 nt, Homo sapiens
  misc_RNA (1)...(19): siRNA sense strand
gauauacaguccaauguua

SEQ ID NO: 1919795 - RNA, 19 nt, Homo sapiens
  misc_RNA (1)...(19): siRNA sense strand
aaagaaagcucucugaaau

SEQ ID NO: 1919796 - RNA, 19 nt, Homo sapiens
  misc_RNA (1)...(19): siRNA sense strand
caucugaagucguuaauuu

SEQ ID NO: 1919797 - RNA, 19 nt, Homo sapiens
  misc_RNA (1)...(19): siRNA sense strand
caagaaaucucauuggaau

SEQ ID NO: 1919798 - RNA, 19 nt, Homo sapiens
  misc_RNA (1)...(19): siRNA sense strand
guaggaagaucuagagaaa

SEQ ID NO: 1919799 - RNA, 19 nt, Homo sapiens
  misc_RNA (1)...(19): siRNA sense strand
gagcagaguucauaaauac

SEQ ID NO: 1919800 - RNA, 19 nt, Homo sapiens
  misc_RNA (1)...(19): siRNA sense strand
gaaagcaaauuaacuaguc

SEQ ID NO: 1919801 - RNA, 19 nt, Homo sapiens
  misc_RNA (1)...(19): siRNA sense strand
ugagaaagcaacaguauua

SEQ ID NO: 1919802 - RNA, 19 nt, Homo sapiens
  misc_RNA (1)...(19): siRNA sense strand
agaauuaucugcccuaaga

SEQ ID NO: 1919803 - RNA, 19 nt, Homo sapiens
  misc_RNA (1)...(19): siRNA sense strand
gcagaaagagauaaacuaa

SEQ ID NO: 1919804 - RNA, 19 nt, Homo sapiens
  misc_RNA (1)...(19): siRNA sense strand
gauuucagaugcuucauaa

SEQ ID NO: 1919805 - RNA, 19 nt, Homo sapiens
  misc_RNA (1)...(19): siRNA sense strand
gaacuuugcauuaaacuug

SEQ ID NO: 1919806 - RNA, 19 nt, Homo sapiens
  misc_RNA (1)...(19): siRNA sense strand
gcacauaaaugcccaucau

SEQ ID NO: 1919807 - RNA, 19 nt, Homo sapiens
  misc_RNA (1)...(19): siRNA sense strand
ugacucaucucaucagaaa

SEQ ID NO: 1919808 - RNA, 19 nt, Homo sapiens
  misc_RNA (1)...(19): siRNA sense strand
gaaguuaacccuuucugaa

SEQ ID NO: 1919809 - RNA, 19 nt, Homo sapiens
  misc_RNA (1)...(19): siRNA sense strand
gaggagacaucuucgagaa

SEQ ID NO: 1919810 - RNA, 19 nt, Homo sapiens
  misc_RNA (1)...(19): siRNA sense strand
uaaucgagaucgugagaua

SEQ ID NO: 1919811 - RNA, 19 nt, Homo sapiens
  misc_RNA (1)...(19): siRNA sense strand
gagcuaaaguggcacaguu

SEQ ID NO: 1919812 - RNA, 19 nt, Homo sapiens
  misc_RNA (1)...(19): siRNA sense strand
gagaaagaguggagcuauu

SEQ ID NO: 1919813 - RNA, 19 nt, Homo sapiens
  misc_RNA (1)...(19): siRNA sense strand
gaacuucuuucuauugaca

SEQ ID NO: 1919814 - RNA, 19 nt, Homo sapiens
  misc_RNA (1)...(19): siRNA sense strand
ggagaaagcagcucaguuc

SEQ ID NO: 1919815 - RNA, 19 nt, Homo sapiens
  misc_RNA (1)...(19): siRNA sense strand
gaacuuaugccagaaagaa

SEQ ID NO: 1919816 - RNA, 19 nt, Homo sapiens
  misc_RNA (1)...(19): siRNA sense strand
caaagaacucgaugaagua

SEQ ID NO: 1919817 - RNA, 19 nt, Homo sapiens
  misc_RNA (1)...(19): siRNA sense strand
gagagacuccaacauauaa

SEQ ID NO: 1919818 - RNA, 19 nt, Homo sapiens
  misc_RNA (1)...(19): siRNA sense strand
gugaugaacuccuuguaaa

SEQ ID NO: 1919819 - RNA, 19 nt, Homo sapiens
  misc_RNA (1)...(19): siRNA sense strand
uaaugaagcucaggaagaa

SEQ ID NO: 1919820 - RNA, 19 nt, Homo sapiens
  misc_RNA (1)...(19): siRNA sense strand
acaaagaacucgaugaagu

SEQ ID NO: 1919821 - RNA, 19 nt, Homo sapiens
  misc_RNA (1)...(19): siRNA sense strand
gcgaagaucuugcucuaca

SEQ ID NO: 1919822 - RNA, 19 nt, Homo sapiens
  misc_RNA (1)...(19): siRNA sense strand
caaauuaacuagucaaagc

SEQ ID NO: 1919823 - RNA, 19 nt, Homo sapiens
  misc_RNA (1)...(19): siRNA sense strand
gaagaauuaucugcccuaa

SEQ ID NO: 1919824 - RNA, 19 nt, Homo sapiens
  misc_RNA (1)...(19): siRNA sense strand
gaagauauacaguccaaug

SEQ ID NO: 1919825 - RNA, 19 nt, Homo sapiens
  misc_RNA (1)...(19): siRNA sense strand
gagacuagaacauggaaua

SEQ ID NO: 1919826 - RNA, 19 nt, Homo sapiens
  misc_RNA (1)...(19): siRNA sense strand
acagaaauccagcuacuua

SEQ ID NO: 1919827 - RNA, 19 nt, Homo sapiens
  misc_RNA (1)...(19): siRNA sense strand
gaaauucaagagcacauaa

SEQ ID NO: 1919828 - RNA, 19 nt, Homo sapiens
  misc_RNA (1)...(19): siRNA sense strand
acagaagacugcaagauga

SEQ ID NO: 1919829 - RNA, 19 nt, Homo sapiens
  misc_RNA (1)...(19): siRNA sense strand
ugacauguguuaaucauca

SEQ ID NO: 1919830 - RNA, 19 nt, Homo sapiens
  misc_RNA (1)...(19): siRNA sense strand
cuagagagacuccaacaua

SEQ ID NO: 1919831 - RNA, 19 nt, Homo sapiens
  misc_RNA (1)...(19): siRNA sense strand
uaagaugacuucacaggau

SEQ ID NO: 1919832 - RNA, 19 nt, Homo sapiens
  misc_RNA (1)...(19): siRNA sense strand
aggcagaucucaacugaaa

SEQ ID NO: 1919833 - RNA, 19 nt, Homo sapiens
  misc_RNA (1)...(19): siRNA sense strand
ugagagacauacaguuaaa

SEQ ID NO: 1919834 - RNA, 19 nt, Homo sapiens
  misc_RNA (1)...(19): siRNA sense strand
uaaaugcccaucaugcuua

SEQ ID NO: 1919835 - RNA, 19 nt, Homo sapiens
  misc_RNA (1)...(19): siRNA sense strand
gaaaugaagagcagaguuc

SEQ ID NO: 1919836 - RNA, 19 nt, Homo sapiens
  misc_RNA (1)...(19): siRNA sense strand
ugaaauagaucaguuagca

SEQ ID NO: 1919837 - RNA, 19 nt, Homo sapiens
  misc_RNA (1)...(19): siRNA sense strand
aaaggcagaucucaacuga

SEQ ID NO: 1919838 - RNA, 19 nt, Homo sapiens
  misc_RNA (1)...(19): siRNA sense strand
gacuggaacuucuuucuau

SEQ ID NO: 1919839 - RNA, 19 nt, Homo sapiens
  misc_RNA (1)...(19): siRNA sense strand
gaagagcagaguucauaaa

SEQ ID NO: 1919840 - RNA, 19 nt, Homo sapiens
  misc_RNA (1)...(19): siRNA sense strand
gaacuugcguuaucugacu

SEQ ID NO: 1919841 - RNA, 19 nt, Homo sapiens
  misc_RNA (1)...(19): siRNA sense strand
cagcgaagaucuugcucua

SEQ ID NO: 1919842 - RNA, 19 nt, Homo sapiens
  misc_RNA (1)...(19): siRNA sense strand
gcugagacaucaagaagau

SEQ ID NO: 1919843 - RNA, 19 nt, Homo sapiens
  misc_RNA (1)...(19): siRNA sense strand
ugaugcagcucacaaagaa

SEQ ID NO: 1919844 - RNA, 19 nt, Homo sapiens
  misc_RNA (1)...(19): siRNA sense strand
gaagaagaacgagauuauu

SEQ ID NO: 1919845 - RNA, 19 nt, Homo sapiens
  misc_RNA (1)...(19): siRNA sense strand
ucucagaucucaucaaugg

SEQ ID NO: 1919846 - RNA, 19 nt, Homo sapiens
  misc_RNA (1)...(19): siRNA sense strand
caucagaucacaagagaaa

SEQ ID NO: 1919847 - RNA, 19 nt, Homo sapiens
  misc_RNA (1)...(19): siRNA sense strand
uagagagacuccaacauau

SEQ ID NO: 1919848 - RNA, 19 nt, Homo sapiens
  misc_RNA (1)...(19): siRNA sense strand
aagaagagcugagacauca

SEQ ID NO: 1919849 - RNA, 19 nt, Homo sapiens
  misc_RNA (1)...(19): siRNA sense strand
ggagacaucuucgagaaag

SEQ ID NO: 1919850 - RNA, 19 nt, Homo sapiens
  misc_RNA (1)...(19): siRNA sense strand
ugaaagguauagaagaaga

SEQ ID NO: 1919851 - RNA, 19 nt, Homo sapiens
  misc_RNA (1)...(19): siRNA sense strand
cgagaaggauacagaaauc

SEQ ID NO: 1919852 - RNA, 19 nt, Homo sapiens
  misc_RNA (1)...(19): siRNA sense strand
agagcagaguucauaaaua

SEQ ID NO: 1919853 - RNA, 19 nt, Homo sapiens
  misc_RNA (1)...(19): siRNA sense strand
ucugaaagguauagaagaa

SEQ ID NO: 1919854 - RNA, 19 nt, Homo sapiens
  misc_RNA (1)...(19): siRNA sense strand
aaugagagacauacaguua

SEQ ID NO: 1919855 - RNA, 19 nt, Homo sapiens
  misc_RNA (1)...(19): siRNA sense strand
agaaagaguggagcuauua

SEQ ID NO: 1919856 - RNA, 19 nt, Homo sapiens
  misc_RNA (1)...(19): siRNA sense strand
gcucaaaugaagauaauga

SEQ ID NO: 1919857 - RNA, 19 nt, Homo sapiens
  misc_RNA (1)...(19): siRNA sense strand
uaagaaagagcuagagaga

SEQ ID NO: 1919858 - RNA, 19 nt, Homo sapiens
  misc_RNA (1)...(19): siRNA sense strand
aaucagaccuagaaacugu

SEQ ID NO: 1919859 - RNA, 19 nt, Homo sapiens
  misc_RNA (1)...(19): siRNA sense strand
ugaaagauacgaacgagaa

SEQ ID NO: 1919860 - RNA, 19 nt, Homo sapiens
  misc_RNA (1)...(19): siRNA sense strand
agaaaggaauccacccaaa

SEQ ID NO: 1919861 - RNA, 19 nt, Homo sapiens
  misc_RNA (1)...(19): siRNA sense strand
gagacuccaacauauaaua

SEQ ID NO: 1919862 - RNA, 19 nt, Homo sapiens
  misc_RNA (1)...(19): siRNA sense strand
gcuugagacugcugauaaa

SEQ ID NO: 1919863 - RNA, 19 nt, Homo sapiens
  misc_RNA (1)...(19): siRNA sense strand
agaaagagcuagagagacu

SEQ ID NO: 1919864 - RNA, 19 nt, Homo sapiens
  misc_RNA (1)...(19): siRNA sense strand
uagaaacuguuguucauca

SEQ ID NO: 1919865 - RNA, 19 nt, Homo sapiens
  misc_RNA (1)...(19): siRNA sense strand
gauagugaaugagcagcua

SEQ ID NO: 1919866 - RNA, 19 nt, Homo sapiens
  misc_RNA (1)...(19): siRNA sense strand
gcagaucucaacugaaaga

SEQ ID NO: 1919867 - RNA, 19 nt, Homo sapiens
  misc_RNA (1)...(19): siRNA sense strand
uaaacuugauucaggcaaa

SEQ ID NO: 1919868 - RNA, 19 nt, Homo sapiens
  misc_RNA (1)...(19): siRNA sense strand
ucacaaagaacucgaugaa

SEQ ID NO: 1919869 - RNA, 19 nt, Homo sapiens
  misc_RNA (1)...(19): siRNA sense strand
gagugugaaucaucuguga

SEQ ID NO: 1919870 - RNA, 19 nt, Homo sapiens
  misc_RNA (1)...(19): siRNA sense strand
caagaaaaccuagcuaaua

SEQ ID NO: 1919871 - RNA, 19 nt, Homo sapiens
  misc_RNA (1)...(19): siRNA sense strand
gagauaaacuaagugucuu

SEQ ID NO: 1919872 - RNA, 19 nt, Homo sapiens
  misc_RNA (1)...(19): siRNA sense strand
gaugagaaagcaacaguau

SEQ ID NO: 1919873 - RNA, 19 nt, Homo sapiens
  misc_RNA (1)...(19): siRNA sense strand
gaagaagagcugagacauc

SEQ ID NO: 1919874 - RNA, 19 nt, Homo sapiens
  misc_RNA (1)...(19): siRNA sense strand
ggaagcagcagugcaagaa

SEQ ID NO: 1919875 - RNA, 19 nt, Homo sapiens
  misc_RNA (1)...(19): siRNA sense strand
aagaugaccuggcuacaau

SEQ ID NO: 1919876 - RNA, 19 nt, Homo sapiens
  misc_RNA (1)...(19): siRNA sense strand
gaagaauuauggcagaaaa

SEQ ID NO: 1919877 - RNA, 19 nt, Homo sapiens
  misc_RNA (1)...(19): siRNA sense strand
gaagcaaagaaagagauua

SEQ ID NO: 1919878 - RNA, 19 nt, Homo sapiens
  misc_RNA (1)...(19): siRNA sense strand
caagagaugcgucgacaug

SEQ ID NO: 1919879 - RNA, 19 nt, Homo sapiens
  misc_RNA (1)...(19): siRNA sense strand
gaacgagcaauccaagaga

SEQ ID NO: 1919880 - RNA, 19 nt, Homo sapiens
  misc_RNA (1)...(19): siRNA sense strand
ucaagaagaugagaaagca

SEQ ID NO: 1919881 - RNA, 19 nt, Homo sapiens
  misc_RNA (1)...(19): siRNA sense strand
caauagagucguuagagaa

SEQ ID NO: 1919882 - RNA, 19 nt, Homo sapiens
  misc_RNA (1)...(19): siRNA sense strand
ccauguggcuggugacuca

SEQ ID NO: 1919883 - RNA, 19 nt, Homo sapiens
  misc_RNA (1)...(19): siRNA sense strand
gcaacaguauuaaaugacu

SEQ ID NO: 1919884 - RNA, 19 nt, Homo sapiens
  misc_RNA (1)...(19): siRNA sense strand
agaaaucgcuuuuaaggaa

SEQ ID NO: 1919885 - RNA, 19 nt, Homo sapiens
  misc_RNA (1)...(19): siRNA sense strand
gaucucagagugugaauca

SEQ ID NO: 1919886 - RNA, 19 nt, Homo sapiens
  misc_RNA (1)...(19): siRNA sense strand
acaauagagucguuagaga

SEQ ID NO: 1919887 - RNA, 19 nt, Homo sapiens
  misc_RNA (1)...(19): siRNA sense strand
gcacaguuacaaacagauu

SEQ ID NO: 1919888 - RNA, 19 nt, Homo sapiens
  misc_RNA (1)...(19): siRNA sense strand
ggucaaagcccaucaagcu

SEQ ID NO: 1919889 - RNA, 19 nt, Homo sapiens
  misc_RNA (1)...(19): siRNA sense strand
aggaagaucuagagaaauc

SEQ ID NO: 1919890 - RNA, 19 nt, Homo sapiens
  misc_RNA (1)...(19): siRNA sense strand
gagaaagcaacaguauuaa

SEQ ID NO: 1919891 - RNA, 19 nt, Homo sapiens
  misc_RNA (1)...(19): siRNA sense strand
cagcuggaauugaacuuau

SEQ ID NO: 1919892 - RNA, 19 nt, Homo sapiens
  misc_RNA (1)...(19): siRNA sense strand
ccaaaggaaugcauuauuu

SEQ ID NO: 1919893 - RNA, 19 nt, Homo sapiens
  misc_RNA (1)...(19): siRNA sense strand
gaaagacguuuaaagaugu

SEQ ID NO: 1919894 - RNA, 19 nt, Homo sapiens
  misc_RNA (1)...(19): siRNA sense strand
ggauauggaucacauuaug

SEQ ID NO: 1919895 - RNA, 19 nt, Homo sapiens
  misc_RNA (1)...(19): siRNA sense strand
ggagguggcuguaaagaag

SEQ ID NO: 1919896 - RNA, 19 nt, Homo sapiens
  misc_RNA (1)...(19): siRNA sense strand
agaaagacguuuaaagaug

SEQ ID NO: 1919897 - RNA, 19 nt, Homo sapiens
  misc_RNA (1)...(19): siRNA sense strand
cgagaaagacguuuaaaga

SEQ ID NO: 1919898 - RNA, 19 nt, Homo sapiens
  misc_RNA (1)...(19): siRNA sense strand
uaaagaagcuccucaaaau

SEQ ID NO: 1919899 - RNA, 19 nt, Homo sapiens
  misc_RNA (1)...(19): siRNA sense strand
gaagugaggagauggauau

SEQ ID NO: 1919900 - RNA, 19 nt, Homo sapiens
  misc_RNA (1)...(19): siRNA sense strand
gaagaucugugacuuuggu

SEQ ID NO: 1919901 - RNA, 19 nt, Homo sapiens
  misc_RNA (1)...(19): siRNA sense strand
ggaagcugaugccaagaaa

SEQ ID NO: 1919902 - RNA, 19 nt, Homo sapiens
  misc_RNA (1)...(19): siRNA sense strand
agagaaagaggcagaaaua

SEQ ID NO: 1919903 - RNA, 19 nt, Homo sapiens
  misc_RNA (1)...(19): siRNA sense strand
uaacagaagugaggagaug

SEQ ID NO: 1919904 - RNA, 19 nt, Homo sapiens
  misc_RNA (1)...(19): siRNA sense strand
acaaggagguggcuguaaa

SEQ ID NO: 1919905 - RNA, 19 nt, Homo sapiens
  misc_RNA (1)...(19): siRNA sense strand
gaaauugaggcaacucuug

SEQ ID NO: 1919906 - RNA, 19 nt, Homo sapiens
  misc_RNA (1)...(19): siRNA sense strand
gaaagaggcagaaauacuc

SEQ ID NO: 1919907 - RNA, 19 nt, Homo sapiens
  misc_RNA (1)...(19): siRNA sense strand
acagaaacaucauccaguu

SEQ ID NO: 1919908 - RNA, 19 nt, Homo sapiens
  misc_RNA (1)...(19): siRNA sense strand
gaguggaggugcgaaauug

SEQ ID NO: 1919909 - RNA, 19 nt, Homo sapiens
  misc_RNA (1)...(19): siRNA sense strand
gagaaagacguuuaaagau

SEQ ID NO: 1919910 - RNA, 19 nt, Homo sapiens
  misc_RNA (1)...(19): siRNA sense strand
ucacagagaccucaaguca

SEQ ID NO: 1919911 - RNA, 19 nt, Homo sapiens
  misc_RNA (1)...(19): siRNA sense strand
ccaagaaacggccaucauu

SEQ ID NO: 1919912 - RNA, 19 nt, Homo sapiens
  misc_RNA (1)...(19): siRNA sense strand
caagaaacguuguuauagc

SEQ ID NO: 1919913 - RNA, 19 nt, Homo sapiens
  misc_RNA (1)...(19): siRNA sense strand
gucaagaaacguuguuaua

SEQ ID NO: 1919914 - RNA, 19 nt, Homo sapiens
  misc_RNA (1)...(19): siRNA sense strand
gugaggagauggauaugga

SEQ ID NO: 1919915 - RNA, 19 nt, Homo sapiens
  misc_RNA (1)...(19): siRNA sense strand
caacacacauguccuuggu

SEQ ID NO: 1919916 - RNA, 19 nt, Homo sapiens
  misc_RNA (1)...(19): siRNA sense strand
acagagaccucaagucaag

SEQ ID NO: 1919917 - RNA, 19 nt, Homo sapiens
  misc_RNA (1)...(19): siRNA sense strand
ugacaaguguaacucauuc

SEQ ID NO: 1919918 - RNA, 19 nt, Homo sapiens
  misc_RNA (1)...(19): siRNA sense strand
uauagcugcugauggagua

SEQ ID NO: 1919919 - RNA, 19 nt, Homo sapiens
  misc_RNA (1)...(19): siRNA sense strand
gagcgugaucucagcuuua

SEQ ID NO: 1919920 - RNA, 19 nt, Homo sapiens
  misc_RNA (1)...(19): siRNA sense strand
uuaaagaugugggagcaaa

SEQ ID NO: 1919921 - RNA, 19 nt, Homo sapiens
  misc_RNA (1)...(19): siRNA sense strand
uguuauagcugcugaugga

SEQ ID NO: 1919922 - RNA, 19 nt, Homo sapiens
  misc_RNA (1)...(19): siRNA sense strand
aacgagagauuaaccauuc

SEQ ID NO: 1919923 - RNA, 19 nt, Homo sapiens
  misc_RNA (1)...(19): siRNA sense strand
aaacugcgguggaggaagu

SEQ ID NO: 1919924 - RNA, 19 nt, Homo sapiens
  misc_RNA (1)...(19): siRNA sense strand
gcuuaaagaacgagaaaga

SEQ ID NO: 1919925 - RNA, 19 nt, Homo sapiens
  misc_RNA (1)...(19): siRNA sense strand
gagcuuaaagaacgagaaa

SEQ ID NO: 1919926 - RNA, 19 nt, Homo sapiens
  misc_RNA (1)...(19): siRNA sense strand
caagaaacggccaucauuc

SEQ ID NO: 1919927 - RNA, 19 nt, Homo sapiens
  misc_RNA (1)...(19): siRNA sense strand
gauauggaucacauuauga

SEQ ID NO: 1919928 - RNA, 19 nt, Homo sapiens
  misc_RNA (1)...(19): siRNA sense strand
uugcugaacuguuacauca

SEQ ID NO: 1919929 - RNA, 19 nt, Homo sapiens
  misc_RNA (1)...(19): siRNA sense strand
uuaaagguuuggaaggauu

SEQ ID NO: 1919930 - RNA, 19 nt, Homo sapiens
  misc_RNA (1)...(19): siRNA sense strand
gaccugggccacugaugua

SEQ ID NO: 1919931 - RNA, 19 nt, Homo sapiens
  misc_RNA (1)...(19): siRNA sense strand
ggacaaggagguggcugua

SEQ ID NO: 1919932 - RNA, 19 nt, Homo sapiens
  misc_RNA (1)...(19): siRNA sense strand
ggaguggaggugcgaaauu

SEQ ID NO: 1919933 - RNA, 19 nt, Homo sapiens
  misc_RNA (1)...(19): siRNA sense strand
acacgagccuuccugacaa

SEQ ID NO: 1919934 - RNA, 19 nt, Homo sapiens
  misc_RNA (1)...(19): siRNA sense strand
ggauaucacaggacaagga

SEQ ID NO: 1919935 - RNA, 19 nt, Homo sapiens
  misc_RNA (1)...(19): siRNA sense strand
gagccuuccugacaagugu

SEQ ID NO: 1919936 - RNA, 19 nt, Homo sapiens
  misc_RNA (1)...(19): siRNA sense strand
ccacugauguagccaaagg

SEQ ID NO: 1919937 - RNA, 19 nt, Homo sapiens
  misc_RNA (1)...(19): siRNA sense strand
gccaaaggaaugcauuauu

SEQ ID NO: 1919938 - RNA, 19 nt, Homo sapiens
  misc_RNA (1)...(19): siRNA sense strand
uaaagguuuggaaggauua

SEQ ID NO: 1919939 - RNA, 19 nt, Homo sapiens
  misc_RNA (1)...(19): siRNA sense strand
ggagcaggagcuuaaagaa

SEQ ID NO: 1919940 - RNA, 19 nt, Homo sapiens
  misc_RNA (1)...(19): siRNA sense strand
guaaagaagcuccucaaaa

SEQ ID NO: 1919941 - RNA, 19 nt, Homo sapiens
  misc_RNA (1)...(19): siRNA sense strand
gaaacggccaucauucaag

SEQ ID NO: 1919942 - RNA, 19 nt, Homo sapiens
  misc_RNA (1)...(19): siRNA sense strand
ucaagaaacguuguuauag

SEQ ID NO: 1919943 - RNA, 19 nt, Homo sapiens
  misc_RNA (1)...(19): siRNA sense strand
guaacucauuccuacacaa

SEQ ID NO: 1919944 - RNA, 19 nt, Homo sapiens
  misc_RNA (1)...(19): siRNA sense strand
ggccaucauucaagcaaau

SEQ ID NO: 1919945 - RNA, 19 nt, Homo sapiens
  misc_RNA (1)...(19): siRNA sense strand
ucuugaaccucccaacuau

SEQ ID NO: 1919946 - RNA, 19 nt, Homo sapiens
  misc_RNA (1)...(19): siRNA sense strand
gaaacuagagcgugaucuc

SEQ ID NO: 1919947 - RNA, 19 nt, Homo sapiens
  misc_RNA (1)...(19): siRNA sense strand
gacacgagccuuccugaca

SEQ ID NO: 1919948 - RNA, 19 nt, Homo sapiens
  misc_RNA (1)...(19): siRNA sense strand
gcaggagcuuaaagaacga

SEQ ID NO: 1919949 - RNA, 19 nt, Homo sapiens
  misc_RNA (1)...(19): siRNA sense strand
gggaagcugaugccaagaa

SEQ ID NO: 1919950 - RNA, 19 nt, Homo sapiens
  misc_RNA (1)...(19): siRNA sense strand
ggccacugauguagccaaa

SEQ ID NO: 1919951 - RNA, 19 nt, Homo sapiens
  misc_RNA (1)...(19): siRNA sense strand
gaguguuuaucgagccaaa

SEQ ID NO: 1919952 - RNA, 19 nt, Homo sapiens
  misc_RNA (1)...(19): siRNA sense strand
caaguguaacucauuccua

SEQ ID NO: 1919953 - RNA, 19 nt, Homo sapiens
  misc_RNA (1)...(19): siRNA sense strand
ugauguagccaaaggaaug

SEQ ID NO: 1919954 - RNA, 19 nt, Homo sapiens
  misc_RNA (1)...(19): siRNA sense strand
aggcagaaauacucagugu

SEQ ID NO: 1919955 - RNA, 19 nt, Homo sapiens
  misc_RNA (1)...(19): siRNA sense strand
gagcaggagcuuaaagaac

SEQ ID NO: 1919956 - RNA, 19 nt, Homo sapiens
  misc_RNA (1)...(19): siRNA sense strand
cagaaguuauccagagucu

SEQ ID NO: 1919957 - RNA, 19 nt, Homo sapiens
  misc_RNA (1)...(19): siRNA sense strand
ucucugggaucacucuaug

SEQ ID NO: 1919958 - RNA, 19 nt, Homo sapiens
  misc_RNA (1)...(19): siRNA sense strand
uagccaaaggaaugcauua

SEQ ID NO: 1919959 - RNA, 19 nt, Homo sapiens
  misc_RNA (1)...(19): siRNA sense strand
ugacagagcaguccaacac

SEQ ID NO: 1919960 - RNA, 19 nt, Homo sapiens
  misc_RNA (1)...(19): siRNA sense strand
aagaaacggccaucauuca

SEQ ID NO: 1919961 - RNA, 19 nt, Homo sapiens
  misc_RNA (1)...(19): siRNA sense strand
aaacgagagauuaaccauu

SEQ ID NO: 1919962 - RNA, 19 nt, Homo sapiens
  misc_RNA (1)...(19): siRNA sense strand
uuggaaggauuacaaguag

SEQ ID NO: 1919963 - RNA, 19 nt, Homo sapiens
  misc_RNA (1)...(19): siRNA sense strand
ucugggagaugcuaacaag

SEQ ID NO: 1919964 - RNA, 19 nt, Homo sapiens
  misc_RNA (1)...(19): siRNA sense strand
gaccucaagucaagaaacg

SEQ ID NO: 1919965 - RNA, 19 nt, Homo sapiens
  misc_RNA (1)...(19): siRNA sense strand
aagaaacguuguuauagcu

SEQ ID NO: 1919966 - RNA, 19 nt, Homo sapiens
  misc_RNA (1)...(19): siRNA sense strand
ggauggcuccagaaguuau

SEQ ID NO: 1919967 - RNA, 19 nt, Homo sapiens
  misc_RNA (1)...(19): siRNA sense strand
aaauugaggcaacucuuga

SEQ ID NO: 1919968 - RNA, 19 nt, Homo sapiens
  misc_RNA (1)...(19): siRNA sense strand
agcgugaucucagcuuuaa

SEQ ID NO: 1919969 - RNA, 19 nt, Homo sapiens
  misc_RNA (1)...(19): siRNA sense strand
acuauggcauugucacaga

SEQ ID NO: 1919970 - RNA, 19 nt, Homo sapiens
  misc_RNA (1)...(19): siRNA sense strand
agagcgugaucucagcuuu

SEQ ID NO: 1919971 - RNA, 19 nt, Homo sapiens
  misc_RNA (1)...(19): siRNA sense strand
uuuggaaggauuacaagua

SEQ ID NO: 1919972 - RNA, 19 nt, Homo sapiens
  misc_RNA (1)...(19): siRNA sense strand
cuuuaaagguuuggaagga

SEQ ID NO: 1919973 - RNA, 19 nt, Homo sapiens
  misc_RNA (1)...(19): siRNA sense strand
gacaaggagguggcuguaa

SEQ ID NO: 1919974 - RNA, 19 nt, Homo sapiens
  misc_RNA (1)...(19): siRNA sense strand
gagucucccugugucagaa

SEQ ID NO: 1919975 - RNA, 19 nt, Homo sapiens
  misc_RNA (1)...(19): siRNA sense strand
acucauuccuacacaacaa

SEQ ID NO: 1919976 - RNA, 19 nt, Homo sapiens
  misc_RNA (1)...(19): siRNA sense strand
agaaacggccaucauucaa

SEQ ID NO: 1919977 - RNA, 19 nt, Homo sapiens
  misc_RNA (1)...(19): siRNA sense strand
ggaaggauuacaaguagcu

SEQ ID NO: 1919978 - RNA, 19 nt, Homo sapiens
  misc_RNA (1)...(19): siRNA sense strand
caacuauggcauugucaca

SEQ ID NO: 1919979 - RNA, 19 nt, Homo sapiens
  misc_RNA (1)...(19): siRNA sense strand
gagaaagaggcagaaauac

SEQ ID NO: 1919980 - RNA, 19 nt, Homo sapiens
  misc_RNA (1)...(19): siRNA sense strand
ccaguuuuauggaguaauu

SEQ ID NO: 1919981 - RNA, 19 nt, Homo sapiens
  misc_RNA (1)...(19): siRNA sense strand
agaaagaggcagaaauacu

SEQ ID NO: 1919982 - RNA, 19 nt, Homo sapiens
  misc_RNA (1)...(19): siRNA sense strand
gugccucucgguuccauaa

SEQ ID NO: 1919983 - RNA, 19 nt, Homo sapiens
  misc_RNA (1)...(19): siRNA sense strand
cauuaacaguaacagaagu

SEQ ID NO: 1919984 - RNA, 19 nt, Homo sapiens
  misc_RNA (1)...(19): siRNA sense strand
aaagaagcuccucaaaaua

SEQ ID NO: 1919985 - RNA, 19 nt, Homo sapiens
  misc_RNA (1)...(19): siRNA sense strand
guccuugguuggaacuuuc

SEQ ID NO: 1919986 - RNA, 19 nt, Homo sapiens
  misc_RNA (1)...(19): siRNA sense strand
uguaaagaagcuccucaaa

SEQ ID NO: 1919987 - RNA, 19 nt, Homo sapiens
  misc_RNA (1)...(19): siRNA sense strand
ggagauggauauggaucac

SEQ ID NO: 1919988 - RNA, 19 nt, Homo sapiens
  misc_RNA (1)...(19): siRNA sense strand
agauggauauggaucacau

SEQ ID NO: 1919989 - RNA, 19 nt, Homo sapiens
  misc_RNA (1)...(19): siRNA sense strand
aaagacguuuaaagaugug

SEQ ID NO: 1919990 - RNA, 19 nt, Homo sapiens
  misc_RNA (1)...(19): siRNA sense strand
uugagaggcuaaagaaacu

SEQ ID NO: 1919991 - RNA, 19 nt, Homo sapiens
  misc_RNA (1)...(19): siRNA sense strand
gagaggcuaaagaaacuag

SEQ ID NO: 1919992 - RNA, 19 nt, Homo sapiens
  misc_RNA (1)...(19): siRNA sense strand
ccaaaggaaugcauuauuu

SEQ ID NO: 1919993 - RNA, 19 nt, Homo sapiens
  misc_RNA (1)...(19): siRNA sense strand
gaaagacguuuaaagaugu

SEQ ID NO: 1919994 - RNA, 19 nt, Homo sapiens
  misc_RNA (1)...(19): siRNA sense strand
ggauauggaucacauuaug

SEQ ID NO: 1919995 - RNA, 19 nt, Homo sapiens
  misc_RNA (1)...(19): siRNA sense strand
ggagguggcuguaaagaag

SEQ ID NO: 1919996 - RNA, 19 nt, Homo sapiens
  misc_RNA (1)...(19): siRNA sense strand
agaaagacguuuaaagaug

SEQ ID NO: 1919997 - RNA, 19 nt, Homo sapiens
  misc_RNA (1)...(19): siRNA sense strand
cgagaaagacguuuaaaga

SEQ ID NO: 1919998 - RNA, 19 nt, Homo sapiens
  misc_RNA (1)...(19): siRNA sense strand
uaaagaagcuccucaaaau

SEQ ID NO: 1919999 - RNA, 19 nt, Homo sapiens
  misc_RNA (1)...(19): siRNA sense strand
gaagugaggagauggauau

SEQ ID NO: 1920000 - RNA, 19 nt, Homo sapiens
  misc_RNA (1)...(19): siRNA sense strand
gaagaucugugacuuuggu

SEQ ID NO: 1920001 - RNA, 19 nt, Homo sapiens
  misc_RNA (1)...(19): siRNA sense strand
ggaagcugaugccaagaaa

SEQ ID NO: 1920002 - RNA, 19 nt, Homo sapiens
  misc_RNA (1)...(19): siRNA sense strand
agagaaagaggcagaaaua

SEQ ID NO: 1920003 - RNA, 19 nt, Homo sapiens
  misc_RNA (1)...(19): siRNA sense strand
uaacagaagugaggagaug

SEQ ID NO: 1920004 - RNA, 19 nt, Homo sapiens
  misc_RNA (1)...(19): siRNA sense strand
acaaggagguggcuguaaa

SEQ ID NO: 1920005 - RNA, 19 nt, Homo sapiens
  misc_RNA (1)...(19): siRNA sense strand
gaaauugaggcaacucuug

SEQ ID NO: 1920006 - RNA, 19 nt, Homo sapiens
  misc_RNA (1)...(19): siRNA sense strand
gaaagaggcagaaauacuc

SEQ ID NO: 1920007 - RNA, 19 nt, Homo sapiens
  misc_RNA (1)...(19): siRNA sense strand
acagaaacaucauccaguu

SEQ ID NO: 1920008 - RNA, 19 nt, Homo sapiens
  misc_RNA (1)...(19): siRNA sense strand
gaguggaggugcgaaauug

SEQ ID NO: 1920009 - RNA, 19 nt, Homo sapiens
  misc_RNA (1)...(19): siRNA sense strand
gagaaagacguuuaaagau

SEQ ID NO: 1920010 - RNA, 19 nt, Homo sapiens
  misc_RNA (1)...(19): siRNA sense strand
ucacagagaccucaaguca

SEQ ID NO: 1920011 - RNA, 19 nt, Homo sapiens
  misc_RNA (1)...(19): siRNA sense strand
ccaagaaacggccaucauu

SEQ ID NO: 1920012 - RNA, 19 nt, Homo sapiens
  misc_RNA (1)...(19): siRNA sense strand
caagaaacguuguuauagc

SEQ ID NO: 1920013 - RNA, 19 nt, Homo sapiens
  misc_RNA (1)...(19): siRNA sense strand
gucaagaaacguuguuaua

SEQ ID NO: 1920014 - RNA, 19 nt, Homo sapiens
  misc_RNA (1)...(19): siRNA sense strand
gugaggagauggauaugga

SEQ ID NO: 1920015 - RNA, 19 nt, Homo sapiens
  misc_RNA (1)...(19): siRNA sense strand
caacacacauguccuuggu

SEQ ID NO: 1920016 - RNA, 19 nt, Homo sapiens
  misc_RNA (1)...(19): siRNA sense strand
acagagaccucaagucaag

SEQ ID NO: 1920017 - RNA, 19 nt, Homo sapiens
  misc_RNA (1)...(19): siRNA sense strand
ugacaaguguaacucauuc

SEQ ID NO: 1920018 - RNA, 19 nt, Homo sapiens
  misc_RNA (1)...(19): siRNA sense strand
uauagcugcugauggagua

SEQ ID NO: 1920019 - RNA, 19 nt, Homo sapiens
  misc_RNA (1)...(19): siRNA sense strand
gagcgugaucucagcuuua

SEQ ID NO: 1920020 - RNA, 19 nt, Homo sapiens
  misc_RNA (1)...(19): siRNA sense strand
uuaaagaugugggagcaaa

SEQ ID NO: 1920021 - RNA, 19 nt, Homo sapiens
  misc_RNA (1)...(19): siRNA sense strand
uguuauagcugcugaugga

SEQ ID NO: 1920022 - RNA, 19 nt, Homo sapiens
  misc_RNA (1)...(19): siRNA sense strand
aacgagagauuaaccauuc

SEQ ID NO: 1920023 - RNA, 19 nt, Homo sapiens
  misc_RNA (1)...(19): siRNA sense strand
aaacugcgguggaggaagu

SEQ ID NO: 1920024 - RNA, 19 nt, Homo sapiens
  misc_RNA (1)...(19): siRNA sense strand
gcuuaaagaacgagaaaga

SEQ ID NO: 1920025 - RNA, 19 nt, Homo sapiens
  misc_RNA (1)...(19): siRNA sense strand
gagcuuaaagaacgagaaa

SEQ ID NO: 1920026 - RNA, 19 nt, Homo sapiens
  misc_RNA (1)...(19): siRNA sense strand
caagaaacggccaucauuc

SEQ ID NO: 1920027 - RNA, 19 nt, Homo sapiens
  misc_RNA (1)...(19): siRNA sense strand
gauauggaucacauuauga

SEQ ID NO: 1920028 - RNA, 19 nt, Homo sapiens
  misc_RNA (1)...(19): siRNA sense strand
uugcugaacuguuacauca

SEQ ID NO: 1920029 - RNA, 19 nt, Homo sapiens
  misc_RNA (1)...(19): siRNA sense strand
uuaaagguuuggaaggauu

SEQ ID NO: 1920030 - RNA, 19 nt, Homo sapiens
  misc_RNA (1)...(19): siRNA sense strand
gaccugggccacugaugua

SEQ ID NO: 1920031 - RNA, 19 nt, Homo sapiens
  misc_RNA (1)...(19): siRNA sense strand
ggacaaggagguggcugua

SEQ ID NO: 1920032 - RNA, 19 nt, Homo sapiens
  misc_RNA (1)...(19): siRNA sense strand
ggaguggaggugcgaaauu

SEQ ID NO: 1920033 - RNA, 19 nt, Homo sapiens
  misc_RNA (1)...(19): siRNA sense strand
acacgagccuuccugacaa

SEQ ID NO: 1920034 - RNA, 19 nt, Homo sapiens
  misc_RNA (1)...(19): siRNA sense strand
ggauaucacaggacaagga

SEQ ID NO: 1920035 - RNA, 19 nt, Homo sapiens
  misc_RNA (1)...(19): siRNA sense strand
gagccuuccugacaagugu

SEQ ID NO: 1920036 - RNA, 19 nt, Homo sapiens
  misc_RNA (1)...(19): siRNA sense strand
ccacugauguagccaaagg

SEQ ID NO: 1920037 - RNA, 19 nt, Homo sapiens
  misc_RNA (1)...(19): siRNA sense strand
gccaaaggaaugcauuauu

SEQ ID NO: 1920038 - RNA, 19 nt, Homo sapiens
  misc_RNA (1)...(19): siRNA sense strand
uaaagguuuggaaggauua

SEQ ID NO: 1920039 - RNA, 19 nt, Homo sapiens
  misc_RNA (1)...(19): siRNA sense strand
ggagcaggagcuuaaagaa

SEQ ID NO: 1920040 - RNA, 19 nt, Homo sapiens
  misc_RNA (1)...(19): siRNA sense strand
guaaagaagcuccucaaaa

SEQ ID NO: 1920041 - RNA, 19 nt, Homo sapiens
  misc_RNA (1)...(19): siRNA sense strand
gaaacggccaucauucaag

SEQ ID NO: 1920042 - RNA, 19 nt, Homo sapiens
  misc_RNA (1)...(19): siRNA sense strand
ucaagaaacguuguuauag

SEQ ID NO: 1920043 - RNA, 19 nt, Homo sapiens
  misc_RNA (1)...(19): siRNA sense strand
guaacucauuccuacacaa

SEQ ID NO: 1920044 - RNA, 19 nt, Homo sapiens
  misc_RNA (1)...(19): siRNA sense strand
ggccaucauucaagcaaau

SEQ ID NO: 1920045 - RNA, 19 nt, Homo sapiens
  misc_RNA (1)...(19): siRNA sense strand
ucuugaaccucccaacuau

SEQ ID NO: 1920046 - RNA, 19 nt, Homo sapiens
  misc_RNA (1)...(19): siRNA sense strand
gaaacuagagcgugaucuc

SEQ ID NO: 1920047 - RNA, 19 nt, Homo sapiens
  misc_RNA (1)...(19): siRNA sense strand
gacacgagccuuccugaca

SEQ ID NO: 1920048 - RNA, 19 nt, Homo sapiens
  misc_RNA (1)...(19): siRNA sense strand
gcaggagcuuaaagaacga

SEQ ID NO: 1920049 - RNA, 19 nt, Homo sapiens
  misc_RNA (1)...(19): siRNA sense strand
gggaagcugaugccaagaa

SEQ ID NO: 1920050 - RNA, 19 nt, Homo sapiens
  misc_RNA (1)...(19): siRNA sense strand
ggccacugauguagccaaa

SEQ ID NO: 1920051 - RNA, 19 nt, Homo sapiens
  misc_RNA (1)...(19): siRNA sense strand
gaguguuuaucgagccaaa

SEQ ID NO: 1920052 - RNA, 19 nt, Homo sapiens
  misc_RNA (1)...(19): siRNA sense strand
caaguguaacucauuccua

SEQ ID NO: 1920053 - RNA, 19 nt, Homo sapiens
  misc_RNA (1)...(19): siRNA sense strand
ugauguagccaaaggaaug

SEQ ID NO: 1920054 - RNA, 19 nt, Homo sapiens
  misc_RNA (1)...(19): siRNA sense strand
aggcagaaauacucagugu

SEQ ID NO: 1920055 - RNA, 19 nt, Homo sapiens
  misc_RNA (1)...(19): siRNA sense strand
gagcaggagcuuaaagaac

SEQ ID NO: 1920056 - RNA, 19 nt, Homo sapiens
  misc_RNA (1)...(19): siRNA sense strand
cagaaguuauccagagucu

SEQ ID NO: 1920057 - RNA, 19 nt, Homo sapiens
  misc_RNA (1)...(19): siRNA sense strand
ucucugggaucacucuaug

SEQ ID NO: 1920058 - RNA, 19 nt, Homo sapiens
  misc_RNA (1)...(19): siRNA sense strand
uagccaaaggaaugcauua

SEQ ID NO: 1920059 - RNA, 19 nt, Homo sapiens
  misc_RNA (1)...(19): siRNA sense strand
ugacagagcaguccaacac

SEQ ID NO: 1920060 - RNA, 19 nt, Homo sapiens
  misc_RNA (1)...(19): siRNA sense strand
aagaaacggccaucauuca

SEQ ID NO: 1920061 - RNA, 19 nt, Homo sapiens
  misc_RNA (1)...(19): siRNA sense strand
aaacgagagauuaaccauu

SEQ ID NO: 1920062 - RNA, 19 nt, Homo sapiens
  misc_RNA (1)...(19): siRNA sense strand
uuggaaggauuacaaguag

SEQ ID NO: 1920063 - RNA, 19 nt, Homo sapiens
  misc_RNA (1)...(19): siRNA sense strand
ucugggagaugcuaacaag

SEQ ID NO: 1920064 - RNA, 19 nt, Homo sapiens
  misc_RNA (1)...(19): siRNA sense strand
gaccucaagucaagaaacg

SEQ ID NO: 1920065 - RNA, 19 nt, Homo sapiens
  misc_RNA (1)...(19): siRNA sense strand
aagaaacguuguuauagcu

SEQ ID NO: 1920066 - RNA, 19 nt, Homo sapiens
  misc_RNA (1)...(19): siRNA sense strand
ggauggcuccagaaguuau

SEQ ID NO: 1920067 - RNA, 19 nt, Homo sapiens
  misc_RNA (1)...(19): siRNA sense strand
aaauugaggcaacucuuga

SEQ ID NO: 1920068 - RNA, 19 nt, Homo sapiens
  misc_RNA (1)...(19): siRNA sense strand
agcgugaucucagcuuuaa

SEQ ID NO: 1920069 - RNA, 19 nt, Homo sapiens
  misc_RNA (1)...(19): siRNA sense strand
acuauggcauugucacaga

SEQ ID NO: 1920070 - RNA, 19 nt, Homo sapiens
  misc_RNA (1)...(19): siRNA sense strand
agagcgugaucucagcuuu

SEQ ID NO: 1920071 - RNA, 19 nt, Homo sapiens
  misc_RNA (1)...(19): siRNA sense strand
uuuggaaggauuacaagua

SEQ ID NO: 1920072 - RNA, 19 nt, Homo sapiens
  misc_RNA (1)...(19): siRNA sense strand
cuuuaaagguuuggaagga

SEQ ID NO: 1920073 - RNA, 19 nt, Homo sapiens
  misc_RNA (1)...(19): siRNA sense strand
gacaaggagguggcuguaa

SEQ ID NO: 1920074 - RNA, 19 nt, Homo sapiens
  misc_RNA (1)...(19): siRNA sense strand
gagucucccugugucagaa

SEQ ID NO: 1920075 - RNA, 19 nt, Homo sapiens
  misc_RNA (1)...(19): siRNA sense strand
acucauuccuacacaacaa

SEQ ID NO: 1920076 - RNA, 19 nt, Homo sapiens
  misc_RNA (1)...(19): siRNA sense strand
agaaacggccaucauucaa

SEQ ID NO: 1920077 - RNA, 19 nt, Homo sapiens
  misc_RNA (1)...(19): siRNA sense strand
ggaaggauuacaaguagcu

SEQ ID NO: 1920078 - RNA, 19 nt, Homo sapiens
  misc_RNA (1)...(19): siRNA sense strand
caacuauggcauugucaca

SEQ ID NO: 1920079 - RNA, 19 nt, Homo sapiens
  misc_RNA (1)...(19): siRNA sense strand
gagaaagaggcagaaauac

SEQ ID NO: 1920080 - RNA, 19 nt, Homo sapiens
  misc_RNA (1)...(19): siRNA sense strand
ccaguuuuauggaguaauu

SEQ ID NO: 1920081 - RNA, 19 nt, Homo sapiens
  misc_RNA (1)...(19): siRNA sense strand
agaaagaggcagaaauacu

SEQ ID NO: 1920082 - RNA, 19 nt, Homo sapiens
  misc_RNA (1)...(19): siRNA sense strand
gugccucucgguuccauaa

SEQ ID NO: 1920083 - RNA, 19 nt, Homo sapiens
  misc_RNA (1)...(19): siRNA sense strand
cauuaacaguaacagaagu

SEQ ID NO: 1920084 - RNA, 19 nt, Homo sapiens
  misc_RNA (1)...(19): siRNA sense strand
aaagaagcuccucaaaaua

SEQ ID NO: 1920085 - RNA, 19 nt, Homo sapiens
  misc_RNA (1)...(19): siRNA sense strand
guccuugguuggaacuuuc

SEQ ID NO: 1920086 - RNA, 19 nt, Homo sapiens
  misc_RNA (1)...(19): siRNA sense strand
uguaaagaagcuccucaaa

SEQ ID NO: 1920087 - RNA, 19 nt, Homo sapiens
  misc_RNA (1)...(19): siRNA sense strand
ggagauggauauggaucac

SEQ ID NO: 1920088 - RNA, 19 nt, Homo sapiens
  misc_RNA (1)...(19): siRNA sense strand
agauggauauggaucacau

SEQ ID NO: 1920089 - RNA, 19 nt, Homo sapiens
  misc_RNA (1)...(19): siRNA sense strand
aaagacguuuaaagaugug

SEQ ID NO: 1920090 - RNA, 19 nt, Homo sapiens
  misc_RNA (1)...(19): siRNA sense strand
uugagaggcuaaagaaacu

SEQ ID NO: 1920091 - RNA, 19 nt, Homo sapiens
  misc_RNA (1)...(19): siRNA sense strand
gagaggcuaaagaaacuag

SEQ ID NO: 1920092 - RNA, 19 nt, Homo sapiens
  misc_RNA (1)...(19): siRNA sense strand
guaaauuccuauccaguua

SEQ ID NO: 1920093 - RNA, 19 nt, Homo sapiens
  misc_RNA (1)...(19): siRNA sense strand
gaaguuugcuccaaccuuu

SEQ ID NO: 1920094 - RNA, 19 nt, Homo sapiens
  misc_RNA (1)...(19): siRNA sense strand
gaggcugcaucaaagauua

SEQ ID NO: 1920095 - RNA, 19 nt, Homo sapiens
  misc_RNA (1)...(19): siRNA sense strand
gcaaggggcucaaauaguu

SEQ ID NO: 1920096 - RNA, 19 nt, Homo sapiens
  misc_RNA (1)...(19): siRNA sense strand
gaacugaggauuguuguug

SEQ ID NO: 1920097 - RNA, 19 nt, Homo sapiens
  misc_RNA (1)...(19): siRNA sense strand
ccagagcauugccuuuaua

SEQ ID NO: 1920098 - RNA, 19 nt, Homo sapiens
  misc_RNA (1)...(19): siRNA sense strand
uuacugcucugcucuguuu

SEQ ID NO: 1920099 - RNA, 19 nt, Homo sapiens
  misc_RNA (1)...(19): siRNA sense strand
ugucggaccuuauuuaaug

SEQ ID NO: 1920100 - RNA, 19 nt, Homo sapiens
  misc_RNA (1)...(19): siRNA sense strand
gcaaugaaauauuccugau

SEQ ID NO: 1920101 - RNA, 19 nt, Homo sapiens
  misc_RNA (1)...(19): siRNA sense strand
caucaaagauuaccacacu

SEQ ID NO: 1920102 - RNA, 19 nt, Homo sapiens
  misc_RNA (1)...(19): siRNA sense strand
gccacuaccuguuguauuc

SEQ ID NO: 1920103 - RNA, 19 nt, Homo sapiens
  misc_RNA (1)...(19): siRNA sense strand
gcucugaggcugcaucaaa

SEQ ID NO: 1920104 - RNA, 19 nt, Homo sapiens
  misc_RNA (1)...(19): siRNA sense strand
uuaccacacuuccaguuaa

SEQ ID NO: 1920105 - RNA, 19 nt, Homo sapiens
  misc_RNA (1)...(19): siRNA sense strand
uaucuucccagucuuguua

SEQ ID NO: 1920106 - RNA, 19 nt, Homo sapiens
  misc_RNA (1)...(19): siRNA sense strand
uuaaugaacugaggauugu

SEQ ID NO: 1920107 - RNA, 19 nt, Homo sapiens
  misc_RNA (1)...(19): siRNA sense strand
uguauucacucaucuuugu

SEQ ID NO: 1920108 - RNA, 19 nt, Homo sapiens
  misc_RNA (1)...(19): siRNA sense strand
cgaagaaacccauauuguc

SEQ ID NO: 1920109 - RNA, 19 nt, Homo sapiens
  misc_RNA (1)...(19): siRNA sense strand
gcucugcucuguuuguucu

SEQ ID NO: 1920110 - RNA, 19 nt, Homo sapiens
  misc_RNA (1)...(19): siRNA sense strand
gaccuuauuuaaugaacug

SEQ ID NO: 1920111 - RNA, 19 nt, Homo sapiens
  misc_RNA (1)...(19): siRNA sense strand
gagcauugccuuuauaagc

SEQ ID NO: 1920112 - RNA, 19 nt, Homo sapiens
  misc_RNA (1)...(19): siRNA sense strand
ucaaggaaguuugcuccaa

SEQ ID NO: 1920113 - RNA, 19 nt, Homo sapiens
  misc_RNA (1)...(19): siRNA sense strand
cauauugucggaccuuauu

SEQ ID NO: 1920114 - RNA, 19 nt, Homo sapiens
  misc_RNA (1)...(19): siRNA sense strand
gcucuuaccagugcucuga

SEQ ID NO: 1920115 - RNA, 19 nt, Homo sapiens
  misc_RNA (1)...(19): siRNA sense strand
ucaaagauuaccacacuuc

SEQ ID NO: 1920116 - RNA, 19 nt, Homo sapiens
  misc_RNA (1)...(19): siRNA sense strand
cagagcauugccuuuauaa

SEQ ID NO: 1920117 - RNA, 19 nt, Homo sapiens
  misc_RNA (1)...(19): siRNA sense strand
uuucuuacccuucgauauu

SEQ ID NO: 1920118 - RNA, 19 nt, Homo sapiens
  misc_RNA (1)...(19): siRNA sense strand
gcuccaaccuuuuauauac

SEQ ID NO: 1920119 - RNA, 19 nt, Homo sapiens
  misc_RNA (1)...(19): siRNA sense strand
gcuucaugcugccacauau

SEQ ID NO: 1920120 - RNA, 19 nt, Homo sapiens
  misc_RNA (1)...(19): siRNA sense strand
uauugucggaccuuauuua

SEQ ID NO: 1920121 - RNA, 19 nt, Homo sapiens
  misc_RNA (1)...(19): siRNA sense strand
uuggacaaauuaagugcua

SEQ ID NO: 1920122 - RNA, 19 nt, Homo sapiens
  misc_RNA (1)...(19): siRNA sense strand
ggaaguuugcuccaaccuu

SEQ ID NO: 1920123 - RNA, 19 nt, Homo sapiens
  misc_RNA (1)...(19): siRNA sense strand
uaguuuaccucugcugaga

SEQ ID NO: 1920124 - RNA, 19 nt, Homo sapiens
  misc_RNA (1)...(19): siRNA sense strand
ucgaagaaacccauauugu

SEQ ID NO: 1920125 - RNA, 19 nt, Homo sapiens
  misc_RNA (1)...(19): siRNA sense strand
ccaguuacaaugaguaucu

SEQ ID NO: 1920126 - RNA, 19 nt, Homo sapiens
  misc_RNA (1)...(19): siRNA sense strand
cuccagagcauugccuuua

SEQ ID NO: 1920127 - RNA, 19 nt, Homo sapiens
  misc_RNA (1)...(19): siRNA sense strand
ggaccuuauuuaaugaacu

SEQ ID NO: 1920128 - RNA, 19 nt, Homo sapiens
  misc_RNA (1)...(19): siRNA sense strand
guuauucucuuugcuucau

SEQ ID NO: 1920129 - RNA, 19 nt, Homo sapiens
  misc_RNA (1)...(19): siRNA sense strand
gaguaucuucccagucuug

SEQ ID NO: 1920130 - RNA, 19 nt, Homo sapiens
  misc_RNA (1)...(19): siRNA sense strand
ccaguuaagcagagcauuc

SEQ ID NO: 1920131 - RNA, 19 nt, Homo sapiens
  misc_RNA (1)...(19): siRNA sense strand
ccugaugccugcgacaguu

SEQ ID NO: 1920132 - RNA, 19 nt, Homo sapiens
  misc_RNA (1)...(19): siRNA sense strand
cagcugccacuaccuguug

SEQ ID NO: 1920133 - RNA, 19 nt, Homo sapiens
  misc_RNA (1)...(19): siRNA sense strand
caaugaaauauuccugaug

SEQ ID NO: 1920134 - RNA, 19 nt, Homo sapiens
  misc_RNA (1)...(19): siRNA sense strand
uguaaauuccuauccaguu

SEQ ID NO: 1920135 - RNA, 19 nt, Homo sapiens
  misc_RNA (1)...(19): siRNA sense strand
gauuaccacacuuccaguu

SEQ ID NO: 1920136 - RNA, 19 nt, Homo sapiens
  misc_RNA (1)...(19): siRNA sense strand
caugaugaccaauaaacug

SEQ ID NO: 1920137 - RNA, 19 nt, Homo sapiens
  misc_RNA (1)...(19): siRNA sense strand
gacuuugucuccagagcau

SEQ ID NO: 1920138 - RNA, 19 nt, Homo sapiens
  misc_RNA (1)...(19): siRNA sense strand
guuguauucacucaucuuu

SEQ ID NO: 1920139 - RNA, 19 nt, Homo sapiens
  misc_RNA (1)...(19): siRNA sense strand
ccuguuguauucacucauc

SEQ ID NO: 1920140 - RNA, 19 nt, Homo sapiens
  misc_RNA (1)...(19): siRNA sense strand
uccagagcauugccuuuau

SEQ ID NO: 1920141 - RNA, 19 nt, Homo sapiens
  misc_RNA (1)...(19): siRNA sense strand
aaaccugcuugcccacugu

SEQ ID NO: 1920142 - RNA, 19 nt, Homo sapiens
  misc_RNA (1)...(19): siRNA sense strand
guuuaccucugcugagauc

SEQ ID NO: 1920143 - RNA, 19 nt, Homo sapiens
  misc_RNA (1)...(19): siRNA sense strand
augaguaucuucccagucu

SEQ ID NO: 1920144 - RNA, 19 nt, Homo sapiens
  misc_RNA (1)...(19): siRNA sense strand
ucucgcuuguucacaguuu

SEQ ID NO: 1920145 - RNA, 19 nt, Homo sapiens
  misc_RNA (1)...(19): siRNA sense strand
uuuaaugaacugaggauug

SEQ ID NO: 1920146 - RNA, 19 nt, Homo sapiens
  misc_RNA (1)...(19): siRNA sense strand
gucggaccuuauuuaauga

SEQ ID NO: 1920147 - RNA, 19 nt, Homo sapiens
  misc_RNA (1)...(19): siRNA sense strand
agcauugccuuuauaagca

SEQ ID NO: 1920148 - RNA, 19 nt, Homo sapiens
  misc_RNA (1)...(19): siRNA sense strand
ggcccaggcuuuguuagag

SEQ ID NO: 1920149 - RNA, 19 nt, Homo sapiens
  misc_RNA (1)...(19): siRNA sense strand
aaacuggacacggcaaugu

SEQ ID NO: 1920150 - RNA, 19 nt, Homo sapiens
  misc_RNA (1)...(19): siRNA sense strand
ucucgaagaaacccauauu

SEQ ID NO: 1920151 - RNA, 19 nt, Homo sapiens
  misc_RNA (1)...(19): siRNA sense strand
aaauuccuauccaguuaca

SEQ ID NO: 1920152 - RNA, 19 nt, Homo sapiens
  misc_RNA (1)...(19): siRNA sense strand
guauucacucaucuuugua

SEQ ID NO: 1920153 - RNA, 19 nt, Homo sapiens
  misc_RNA (1)...(19): siRNA sense strand
acugaggauuguuguugaa

SEQ ID NO: 1920154 - RNA, 19 nt, Homo sapiens
  misc_RNA (1)...(19): siRNA sense strand
aacugaggauuguuguuga

SEQ ID NO: 1920155 - RNA, 19 nt, Homo sapiens
  misc_RNA (1)...(19): siRNA sense strand
uaccacacuuccaguuaag

SEQ ID NO: 1920156 - RNA, 19 nt, Homo sapiens
  misc_RNA (1)...(19): siRNA sense strand
ugaggcugcaucaaagauu

SEQ ID NO: 1920157 - RNA, 19 nt, Homo sapiens
  misc_RNA (1)...(19): siRNA sense strand
cccauauugucggaccuua

SEQ ID NO: 1920158 - RNA, 19 nt, Homo sapiens
  misc_RNA (1)...(19): siRNA sense strand
guggcuuucucgcuuguuc

SEQ ID NO: 1920159 - RNA, 19 nt, Homo sapiens
  misc_RNA (1)...(19): siRNA sense strand
gggcucaaauaguuuaccu

SEQ ID NO: 1920160 - RNA, 19 nt, Homo sapiens
  misc_RNA (1)...(19): siRNA sense strand
ggaaauggaugagaugaug

SEQ ID NO: 1920161 - RNA, 19 nt, Homo sapiens
  misc_RNA (1)...(19): siRNA sense strand
ggaggaggauuucuacuac

SEQ ID NO: 1920162 - RNA, 19 nt, Homo sapiens
  misc_RNA (1)...(19): siRNA sense strand
gaaggagaguggugacauc

SEQ ID NO: 1920163 - RNA, 19 nt, Homo sapiens
  misc_RNA (1)...(19): siRNA sense strand
acacagaggugcagcugaa

SEQ ID NO: 1920164 - RNA, 19 nt, Homo sapiens
  misc_RNA (1)...(19): siRNA sense strand
ccaaacugaucauggcuuu

SEQ ID NO: 1920165 - RNA, 19 nt, Homo sapiens
  misc_RNA (1)...(19): siRNA sense strand
gaaagaacucugugaaggu

SEQ ID NO: 1920166 - RNA, 19 nt, Homo sapiens
  misc_RNA (1)...(19): siRNA sense strand
gggaggaggauuucuacua

SEQ ID NO: 1920167 - RNA, 19 nt, Homo sapiens
  misc_RNA (1)...(19): siRNA sense strand
ugaaggugauguacaagug

SEQ ID NO: 1920168 - RNA, 19 nt, Homo sapiens
  misc_RNA (1)...(19): siRNA sense strand
ccagaguggugccaggaaa

SEQ ID NO: 1920169 - RNA, 19 nt, Homo sapiens
  misc_RNA (1)...(19): siRNA sense strand
gaagucggacgcaguggaa

SEQ ID NO: 1920170 - RNA, 19 nt, Homo sapiens
  misc_RNA (1)...(19): siRNA sense strand
caucaaacgacacgucaaa

SEQ ID NO: 1920171 - RNA, 19 nt, Homo sapiens
  misc_RNA (1)...(19): siRNA sense strand
aaagaaagaacucugugaa

SEQ ID NO: 1920172 - RNA, 19 nt, Homo sapiens
  misc_RNA (1)...(19): siRNA sense strand
gggacacaguggacucuga

SEQ ID NO: 1920173 - RNA, 19 nt, Homo sapiens
  misc_RNA (1)...(19): siRNA sense strand
gaggccaacuucucugcuu

SEQ ID NO: 1920174 - RNA, 19 nt, Homo sapiens
  misc_RNA (1)...(19): siRNA sense strand
caccugcgaugaaaucuca

SEQ ID NO: 1920175 - RNA, 19 nt, Homo sapiens
  misc_RNA (1)...(19): siRNA sense strand
gcaaaguucugcgcuccau

SEQ ID NO: 1920176 - RNA, 19 nt, Homo sapiens
  misc_RNA (1)...(19): siRNA sense strand
aaacugaucauggcuuuga

SEQ ID NO: 1920177 - RNA, 19 nt, Homo sapiens
  misc_RNA (1)...(19): siRNA sense strand
gggcagaagguuuaugugu

SEQ ID NO: 1920178 - RNA, 19 nt, Homo sapiens
  misc_RNA (1)...(19): siRNA sense strand
gccagcaccugcgaugaaa

SEQ ID NO: 1920179 - RNA, 19 nt, Homo sapiens
  misc_RNA (1)...(19): siRNA sense strand
cgaaccagcuccacgaaaa

SEQ ID NO: 1920180 - RNA, 19 nt, Homo sapiens
  misc_RNA (1)...(19): siRNA sense strand
ucaggcagaucaugcauac

SEQ ID NO: 1920181 - RNA, 19 nt, Homo sapiens
  misc_RNA (1)...(19): siRNA sense strand
gaggaggauuucuacuaca

SEQ ID NO: 1920182 - RNA, 19 nt, Homo sapiens
  misc_RNA (1)...(19): siRNA sense strand
agaccgauccugacccuuu

SEQ ID NO: 1920183 - RNA, 19 nt, Homo sapiens
  misc_RNA (1)...(19): siRNA sense strand
acaagugccuguggccaaa

SEQ ID NO: 1920184 - RNA, 19 nt, Homo sapiens
  misc_RNA (1)...(19): siRNA sense strand
gaccgauccugacccuuuc

SEQ ID NO: 1920185 - RNA, 19 nt, Homo sapiens
  misc_RNA (1)...(19): siRNA sense strand
cgucaaagcccuccaucug

SEQ ID NO: 1920186 - RNA, 19 nt, Homo sapiens
  misc_RNA (1)...(19): siRNA sense strand
ggacucugaucaguucaag

SEQ ID NO: 1920187 - RNA, 19 nt, Homo sapiens
  misc_RNA (1)...(19): siRNA sense strand
ggacacaguggacucugau

SEQ ID NO: 1920188 - RNA, 19 nt, Homo sapiens
  misc_RNA (1)...(19): siRNA sense strand
ggacgcaguggaaauggau

SEQ ID NO: 1920189 - RNA, 19 nt, Homo sapiens
  misc_RNA (1)...(19): siRNA sense strand
aaaguucugcgcuccauug

SEQ ID NO: 1920190 - RNA, 19 nt, Homo sapiens
  misc_RNA (1)...(19): siRNA sense strand
cugugaaggugauguacaa

SEQ ID NO: 1920191 - RNA, 19 nt, Homo sapiens
  misc_RNA (1)...(19): siRNA sense strand
ggaccgaggccaacuucuc

SEQ ID NO: 1920192 - RNA, 19 nt, Homo sapiens
  misc_RNA (1)...(19): siRNA sense strand
caguggaaauggaugagau

SEQ ID NO: 1920193 - RNA, 19 nt, Homo sapiens
  misc_RNA (1)...(19): siRNA sense strand
ucaagcgggaggaggauuu

SEQ ID NO: 1920194 - RNA, 19 nt, Homo sapiens
  misc_RNA (1)...(19): siRNA sense strand
ggaaggagaguggugacau

SEQ ID NO: 1920195 - RNA, 19 nt, Homo sapiens
  misc_RNA (1)...(19): siRNA sense strand
gacagcggcagcagcacua

SEQ ID NO: 1920196 - RNA, 19 nt, Homo sapiens
  misc_RNA (1)...(19): siRNA sense strand
gaagugccgcaagguguau

SEQ ID NO: 1920197 - RNA, 19 nt, Homo sapiens
  misc_RNA (1)...(19): siRNA sense strand
agaagugccgcaaggugua

SEQ ID NO: 1920198 - RNA, 19 nt, Homo sapiens
  misc_RNA (1)...(19): siRNA sense strand
aguggacucugaucaguuc

SEQ ID NO: 1920199 - RNA, 19 nt, Homo sapiens
  misc_RNA (1)...(19): siRNA sense strand
gaaggccugccagcgcuuu

SEQ ID NO: 1920200 - RNA, 19 nt, Homo sapiens
  misc_RNA (1)...(19): siRNA sense strand
gaccgaggccaacuucucu

SEQ ID NO: 1920201 - RNA, 19 nt, Homo sapiens
  misc_RNA (1)...(19): siRNA sense strand
ccucggagccacugcuaga

SEQ ID NO: 1920202 - RNA, 19 nt, Homo sapiens
  misc_RNA (1)...(19): siRNA sense strand
gcaguggaaauggaugaga

SEQ ID NO: 1920203 - RNA, 19 nt, Homo sapiens
  misc_RNA (1)...(19): siRNA sense strand
ugaaaucucaucugaucgu

SEQ ID NO: 1920204 - RNA, 19 nt, Homo sapiens
  misc_RNA (1)...(19): siRNA sense strand
gcacauucaggcagaucau

SEQ ID NO: 1920205 - RNA, 19 nt, Homo sapiens
  misc_RNA (1)...(19): siRNA sense strand
caccaccucugcacaaagc

SEQ ID NO: 1920206 - RNA, 19 nt, Homo sapiens
  misc_RNA (1)...(19): siRNA sense strand
acaguggacucugaucagu

SEQ ID NO: 1920207 - RNA, 19 nt, Homo sapiens
  misc_RNA (1)...(19): siRNA sense strand
agccugggcagaagguuua

SEQ ID NO: 1920208 - RNA, 19 nt, Homo sapiens
  misc_RNA (1)...(19): siRNA sense strand
cagcaccugcgaugaaauc

SEQ ID NO: 1920209 - RNA, 19 nt, Homo sapiens
  misc_RNA (1)...(19): siRNA sense strand
cagaggugcagcugaagga

SEQ ID NO: 1920210 - RNA, 19 nt, Homo sapiens
  misc_RNA (1)...(19): siRNA sense strand
ggaagaagcugccaagauc

SEQ ID NO: 1920211 - RNA, 19 nt, Homo sapiens
  misc_RNA (1)...(19): siRNA sense strand
ccaaauugcuuaugaaguu

SEQ ID NO: 1920212 - RNA, 19 nt, Homo sapiens
  misc_RNA (1)...(19): siRNA sense strand
gaacacguguacaggguuu

SEQ ID NO: 1920213 - RNA, 19 nt, Homo sapiens
  misc_RNA (1)...(19): siRNA sense strand
caaccacuaucucuucuuu

SEQ ID NO: 1920214 - RNA, 19 nt, Homo sapiens
  misc_RNA (1)...(19): siRNA sense strand
gaggaacagccaagucuua

SEQ ID NO: 1920215 - RNA, 19 nt, Homo sapiens
  misc_RNA (1)...(19): siRNA sense strand
gaggauguguugcgcauug

SEQ ID NO: 1920216 - RNA, 19 nt, Homo sapiens
  misc_RNA (1)...(19): siRNA sense strand
ggguuuaugucacaacuuu

SEQ ID NO: 1920217 - RNA, 19 nt, Homo sapiens
  misc_RNA (1)...(19): siRNA sense strand
ggaagcaguuggcuaucuu

SEQ ID NO: 1920218 - RNA, 19 nt, Homo sapiens
  misc_RNA (1)...(19): siRNA sense strand
guacaggguuuaugucaca

SEQ ID NO: 1920219 - RNA, 19 nt, Homo sapiens
  misc_RNA (1)...(19): siRNA sense strand
gagaaggacaguagggaua

SEQ ID NO: 1920220 - RNA, 19 nt, Homo sapiens
  misc_RNA (1)...(19): siRNA sense strand
uaucuuggcugaccuagug

SEQ ID NO: 1920221 - RNA, 19 nt, Homo sapiens
  misc_RNA (1)...(19): siRNA sense strand
ccaaggcugcucaggauua

SEQ ID NO: 1920222 - RNA, 19 nt, Homo sapiens
  misc_RNA (1)...(19): siRNA sense strand
ggaguuugacuuccucuuu

SEQ ID NO: 1920223 - RNA, 19 nt, Homo sapiens
  misc_RNA (1)...(19): siRNA sense strand
ugggagccauucuauauaa

SEQ ID NO: 1920224 - RNA, 19 nt, Homo sapiens
  misc_RNA (1)...(19): siRNA sense strand
acauuggagugcuucauua

SEQ ID NO: 1920225 - RNA, 19 nt, Homo sapiens
  misc_RNA (1)...(19): siRNA sense strand
gcugggagccauucuauau

SEQ ID NO: 1920226 - RNA, 19 nt, Homo sapiens
  misc_RNA (1)...(19): siRNA sense strand
ccacgaggaugaaucagau

SEQ ID NO: 1920227 - RNA, 19 nt, Homo sapiens
  misc_RNA (1)...(19): siRNA sense strand
gagcaucgacucaaauauc

SEQ ID NO: 1920228 - RNA, 19 nt, Homo sapiens
  misc_RNA (1)...(19): siRNA sense strand
gaagagguggugcccauga

SEQ ID NO: 1920229 - RNA, 19 nt, Homo sapiens
  misc_RNA (1)...(19): siRNA sense strand
ggacggagaaggacaguag

SEQ ID NO: 1920230 - RNA, 19 nt, Homo sapiens
  misc_RNA (1)...(19): siRNA sense strand
gguacuaacucagagauuc

SEQ ID NO: 1920231 - RNA, 19 nt, Homo sapiens
  misc_RNA (1)...(19): siRNA sense strand
acgaagaccuuguucugaa

SEQ ID NO: 1920232 - RNA, 19 nt, Homo sapiens
  misc_RNA (1)...(19): siRNA sense strand
caugaaggauuccacuuuc

SEQ ID NO: 1920233 - RNA, 19 nt, Homo sapiens
  misc_RNA (1)...(19): siRNA sense strand
gaacagccaagucuuacau

SEQ ID NO: 1920234 - RNA, 19 nt, Homo sapiens
  misc_RNA (1)...(19): siRNA sense strand
cgagauaggcaauacgaaa

SEQ ID NO: 1920235 - RNA, 19 nt, Homo sapiens
  misc_RNA (1)...(19): siRNA sense strand
ccaggaaucucugcaaugg

SEQ ID NO: 1920236 - RNA, 19 nt, Homo sapiens
  misc_RNA (1)...(19): siRNA sense strand
uggcugaccuagugaaaga

SEQ ID NO: 1920237 - RNA, 19 nt, Homo sapiens
  misc_RNA (1)...(19): siRNA sense strand
cagaacaugccagugauua

SEQ ID NO: 1920238 - RNA, 19 nt, Homo sapiens
  misc_RNA (1)...(19): siRNA sense strand
acccaaaucugaauuaugg

SEQ ID NO: 1920239 - RNA, 19 nt, Homo sapiens
  misc_RNA (1)...(19): siRNA sense strand
ggauuccacuuucccuaug

SEQ ID NO: 1920240 - RNA, 19 nt, Homo sapiens
  misc_RNA (1)...(19): siRNA sense strand
guaccaagucuuacaugaa

SEQ ID NO: 1920241 - RNA, 19 nt, Homo sapiens
  misc_RNA (1)...(19): siRNA sense strand
gcauauaucaaucgccuau

SEQ ID NO: 1920242 - RNA, 19 nt, Homo sapiens
  misc_RNA (1)...(19): siRNA sense strand
cgaagaccuuguucugaau

SEQ ID NO: 1920243 - RNA, 19 nt, Homo sapiens
  misc_RNA (1)...(19): siRNA sense strand
gggagccauucuauauaaa

SEQ ID NO: 1920244 - RNA, 19 nt, Homo sapiens
  misc_RNA (1)...(19): siRNA sense strand
uaaaucggcuuggauguac

SEQ ID NO: 1920245 - RNA, 19 nt, Homo sapiens
  misc_RNA (1)...(19): siRNA sense strand
cagcagugguucccggauu

SEQ ID NO: 1920246 - RNA, 19 nt, Homo sapiens
  misc_RNA (1)...(19): siRNA sense strand
cgaauucaccaccgacaaa

SEQ ID NO: 1920247 - RNA, 19 nt, Homo sapiens
  misc_RNA (1)...(19): siRNA sense strand
cgacucaaauaucaguguu

SEQ ID NO: 1920248 - RNA, 19 nt, Homo sapiens
  misc_RNA (1)...(19): siRNA sense strand
uaacucagagauucaagaa

SEQ ID NO: 1920249 - RNA, 19 nt, Homo sapiens
  misc_RNA (1)...(19): siRNA sense strand
ugaccuagugaaagauuua

SEQ ID NO: 1920250 - RNA, 19 nt, Homo sapiens
  misc_RNA (1)...(19): siRNA sense strand
acacgauucuuaccacuca

SEQ ID NO: 1920251 - RNA, 19 nt, Homo sapiens
  misc_RNA (1)...(19): siRNA sense strand
uaccaagucuuacaugaag

SEQ ID NO: 1920252 - RNA, 19 nt, Homo sapiens
  misc_RNA (1)...(19): siRNA sense strand
gaagacccaaaucugaauu

SEQ ID NO: 1920253 - RNA, 19 nt, Homo sapiens
  misc_RNA (1)...(19): siRNA sense strand
gacauuggagugcuucauu

SEQ ID NO: 1920254 - RNA, 19 nt, Homo sapiens
  misc_RNA (1)...(19): siRNA sense strand
gagccucucuccaaauugc

SEQ ID NO: 1920255 - RNA, 19 nt, Homo sapiens
  misc_RNA (1)...(19): siRNA sense strand
acagauugcuuggucagaa

SEQ ID NO: 1920256 - RNA, 19 nt, Homo sapiens
  misc_RNA (1)...(19): siRNA sense strand
gauuccacuuucccuauga

SEQ ID NO: 1920257 - RNA, 19 nt, Homo sapiens
  misc_RNA (1)...(19): siRNA sense strand
agucuuacaugaaggauuc

SEQ ID NO: 1920258 - RNA, 19 nt, Homo sapiens
  misc_RNA (1)...(19): siRNA sense strand
ucaauggcauauaucaauc

SEQ ID NO: 1920259 - RNA, 19 nt, Homo sapiens
  misc_RNA (1)...(19): siRNA sense strand
cagaugugguggagaggaa

SEQ ID NO: 1920260 - RNA, 19 nt, Homo sapiens
  misc_RNA (1)...(19): siRNA sense strand
ggcagacacuccagaacau

SEQ ID NO: 1920261 - RNA, 19 nt, Homo sapiens
  misc_RNA (1)...(19): siRNA sense strand
caaauugcuuaugaaguuc

SEQ ID NO: 1920262 - RNA, 19 nt, Homo sapiens
  misc_RNA (1)...(19): siRNA sense strand
ucauagacuuucgacauug

SEQ ID NO: 1920263 - RNA, 19 nt, Homo sapiens
  misc_RNA (1)...(19): siRNA sense strand
gagaggaacagccaagucu

SEQ ID NO: 1920264 - RNA, 19 nt, Homo sapiens
  misc_RNA (1)...(19): siRNA sense strand
guucugaaugaaacucuua

SEQ ID NO: 1920265 - RNA, 19 nt, Homo sapiens
  misc_RNA (1)...(19): siRNA sense strand
guuuaugcauggauuggaa

SEQ ID NO: 1920266 - RNA, 19 nt, Homo sapiens
  misc_RNA (1)...(19): siRNA sense strand
gaauuauggacuuguuguu

SEQ ID NO: 1920267 - RNA, 19 nt, Homo sapiens
  misc_RNA (1)...(19): siRNA sense strand
uuaaaucggcuuggaugua

SEQ ID NO: 1920268 - RNA, 19 nt, Homo sapiens
  misc_RNA (1)...(19): siRNA sense strand
gagauaggcaauacgaaag

SEQ ID NO: 1920269 - RNA, 19 nt, Homo sapiens
  misc_RNA (1)...(19): siRNA sense strand
guacuaacucagagauuca

SEQ ID NO: 1920270 - RNA, 19 nt, Homo sapiens
  misc_RNA (1)...(19): siRNA sense strand
gaccuuguucugaaugaaa

SEQ ID NO: 1920271 - RNA, 19 nt, Homo sapiens
  misc_RNA (1)...(19): siRNA sense strand
gaagaccuuguucugaaug

SEQ ID NO: 1920272 - RNA, 19 nt, Homo sapiens
  misc_RNA (1)...(19): siRNA sense strand
cugggacucuucuucauau

SEQ ID NO: 1920273 - RNA, 19 nt, Homo sapiens
  misc_RNA (1)...(19): siRNA sense strand
gaguuugacuuccucuuuu

SEQ ID NO: 1920274 - RNA, 19 nt, Homo sapiens
  misc_RNA (1)...(19): siRNA sense strand
ugaagcuacugacacugaa

SEQ ID NO: 1920275 - RNA, 19 nt, Homo sapiens
  misc_RNA (1)...(19): siRNA sense strand
gcuacuggccaucuuccua

SEQ ID NO: 1920276 - RNA, 19 nt, Homo sapiens
  misc_RNA (1)...(19): siRNA sense strand
cauauccugucuccuuuua

SEQ ID NO: 1920277 - RNA, 19 nt, Homo sapiens
  misc_RNA (1)...(19): siRNA sense strand
acaugaaggauuccacuuu

SEQ ID NO: 1920278 - RNA, 19 nt, Homo sapiens
  misc_RNA (1)...(19): siRNA sense strand
ccucuguccuuccugcaaa

SEQ ID NO: 1920279 - RNA, 19 nt, Homo sapiens
  misc_RNA (1)...(19): siRNA sense strand
gcagcaggacggagaagga

SEQ ID NO: 1920280 - RNA, 19 nt, Homo sapiens
  misc_RNA (1)...(19): siRNA sense strand
auuauggacuuguuguuga

SEQ ID NO: 1920281 - RNA, 19 nt, Homo sapiens
  misc_RNA (1)...(19): siRNA sense strand
agaggaagcaguuggcuau

SEQ ID NO: 1920282 - RNA, 19 nt, Homo sapiens
  misc_RNA (1)...(19): siRNA sense strand
ggaaucaacuuuguuuugg

SEQ ID NO: 1920283 - RNA, 19 nt, Homo sapiens
  misc_RNA (1)...(19): siRNA sense strand
cuucauauccugucuccuu

SEQ ID NO: 1920284 - RNA, 19 nt, Homo sapiens
  misc_RNA (1)...(19): siRNA sense strand
aaucauagacuuucgacau

SEQ ID NO: 1920285 - RNA, 19 nt, Homo sapiens
  misc_RNA (1)...(19): siRNA sense strand
ugccaaggcugcucaggau

SEQ ID NO: 1920286 - RNA, 19 nt, Homo sapiens
  misc_RNA (1)...(19): siRNA sense strand
uaccaugggccaacauuug

SEQ ID NO: 1920287 - RNA, 19 nt, Homo sapiens
  misc_RNA (1)...(19): siRNA sense strand
cagugggacucacagaugu

SEQ ID NO: 1920288 - RNA, 19 nt, Homo sapiens
  misc_RNA (1)...(19): siRNA sense strand
ggagaccccucuuuacauc

SEQ ID NO: 1920289 - RNA, 19 nt, Homo sapiens
  misc_RNA (1)...(19): siRNA sense strand
ccagugggacucacagaug

SEQ ID NO: 1920290 - RNA, 19 nt, Homo sapiens
  misc_RNA (1)...(19): siRNA sense strand
gaagcaguuggcuaucuug

SEQ ID NO: 1920291 - RNA, 19 nt, Homo sapiens
  misc_RNA (1)...(19): siRNA sense strand
gauucgaccacgaggauga

SEQ ID NO: 1920292 - RNA, 19 nt, Homo sapiens
  misc_RNA (1)...(19): siRNA sense strand
cuacgaagaccuuguucug

SEQ ID NO: 1920293 - RNA, 19 nt, Homo sapiens
  misc_RNA (1)...(19): siRNA sense strand
ucacaacuuuucuggguuu

SEQ ID NO: 1920294 - RNA, 19 nt, Homo sapiens
  misc_RNA (1)...(19): siRNA sense strand
caaccugggcugugaugug

SEQ ID NO: 1920295 - RNA, 19 nt, Homo sapiens
  misc_RNA (1)...(19): siRNA sense strand
ucuccaaauugcuuaugaa

SEQ ID NO: 1920296 - RNA, 19 nt, Homo sapiens
  misc_RNA (1)...(19): siRNA sense strand
acaaggagaccccucuuua

SEQ ID NO: 1920297 - RNA, 19 nt, Homo sapiens
  misc_RNA (1)...(19): siRNA sense strand
gauaggcaauacgaaaggu

SEQ ID NO: 1920298 - RNA, 19 nt, Homo sapiens
  misc_RNA (1)...(19): siRNA sense strand
aucauagacuuucgacauu

SEQ ID NO: 1920299 - RNA, 19 nt, Homo sapiens
  misc_RNA (1)...(19): siRNA sense strand
agacccaaaucugaauuau

SEQ ID NO: 1920300 - RNA, 19 nt, Homo sapiens
  misc_RNA (1)...(19): siRNA sense strand
cuacggcuucucugaguuu

SEQ ID NO: 1920301 - RNA, 19 nt, Homo sapiens
  misc_RNA (1)...(19): siRNA sense strand
ggacucuucuucauauccu

SEQ ID NO: 1920302 - RNA, 19 nt, Homo sapiens
  misc_RNA (1)...(19): siRNA sense strand
gcgcuacgaagaccuuguu

SEQ ID NO: 1920303 - RNA, 19 nt, Homo sapiens
  misc_RNA (1)...(19): siRNA sense strand
cgaccacgaggaugaauca

SEQ ID NO: 1920304 - RNA, 19 nt, Homo sapiens
  misc_RNA (1)...(19): siRNA sense strand
cauagacuuucgacauugg

SEQ ID NO: 1920305 - RNA, 19 nt, Homo sapiens
  misc_RNA (1)...(19): siRNA sense strand
ggagaggaacagccaaguc

SEQ ID NO: 1920306 - RNA, 19 nt, Homo sapiens
  misc_RNA (1)...(19): siRNA sense strand
ccugggacucuucuucaua

SEQ ID NO: 1920307 - RNA, 19 nt, Homo sapiens
  misc_RNA (1)...(19): siRNA sense strand
caacaacagcgaguucuac

SEQ ID NO: 1920308 - RNA, 19 nt, Homo sapiens
  misc_RNA (1)...(19): siRNA sense strand
ucaacaacagcgaguucua

SEQ ID NO: 1920309 - RNA, 19 nt, Homo sapiens
  misc_RNA (1)...(19): siRNA sense strand
gacccaaaucugaauuaug

SEQ ID NO: 1920310 - RNA, 19 nt, Homo sapiens
  misc_RNA (1)...(19): siRNA sense strand
gaagaaagcagauguguca

SEQ ID NO: 1920311 - RNA, 19 nt, Homo sapiens
  misc_RNA (1)...(19): siRNA sense strand
gaaagcagaugugucagaa

SEQ ID NO: 1920312 - RNA, 19 nt, Homo sapiens
  misc_RNA (1)...(19): siRNA sense strand
ggaucaagaugcuagagua

SEQ ID NO: 1920313 - RNA, 19 nt, Homo sapiens
  misc_RNA (1)...(19): siRNA sense strand
gaaagggccaaauaucaua

SEQ ID NO: 1920314 - RNA, 19 nt, Homo sapiens
  misc_RNA (1)...(19): siRNA sense strand
ggaaagccgucgggucaaa

SEQ ID NO: 1920315 - RNA, 19 nt, Homo sapiens
  misc_RNA (1)...(19): siRNA sense strand
ggaaagggcaggagaaucu

SEQ ID NO: 1920316 - RNA, 19 nt, Homo sapiens
  misc_RNA (1)...(19): siRNA sense strand
ggccaaauaucauaaacug

SEQ ID NO: 1920317 - RNA, 19 nt, Homo sapiens
  misc_RNA (1)...(19): siRNA sense strand
gggagucgcugcuggugaa

SEQ ID NO: 1920318 - RNA, 19 nt, Homo sapiens
  misc_RNA (1)...(19): siRNA sense strand
gcaggaaagggccaaauau

SEQ ID NO: 1920319 - RNA, 19 nt, Homo sapiens
  misc_RNA (1)...(19): siRNA sense strand
ggaaagggccaaauaucau

SEQ ID NO: 1920320 - RNA, 19 nt, Homo sapiens
  misc_RNA (1)...(19): siRNA sense strand
gcgacaccgucuuguauga

SEQ ID NO: 1920321 - RNA, 19 nt, Homo sapiens
  misc_RNA (1)...(19): siRNA sense strand
caacccagaucaaccaagu

SEQ ID NO: 1920322 - RNA, 19 nt, Homo sapiens
  misc_RNA (1)...(19): siRNA sense strand
cagcauggaucccuaugau

SEQ ID NO: 1920323 - RNA, 19 nt, Homo sapiens
  misc_RNA (1)...(19): siRNA sense strand
cagaacaagucuccaaugg

SEQ ID NO: 1920324 - RNA, 19 nt, Homo sapiens
  misc_RNA (1)...(19): siRNA sense strand
ggaagacgaggaugaggaa

SEQ ID NO: 1920325 - RNA, 19 nt, Homo sapiens
  misc_RNA (1)...(19): siRNA sense strand
gaacgcggcaggcaaagau

SEQ ID NO: 1920326 - RNA, 19 nt, Homo sapiens
  misc_RNA (1)...(19): siRNA sense strand
caacggcgcauuccugaug

SEQ ID NO: 1920327 - RNA, 19 nt, Homo sapiens
  misc_RNA (1)...(19): siRNA sense strand
gaggugggcuacacagaca

SEQ ID NO: 1920328 - RNA, 19 nt, Homo sapiens
  misc_RNA (1)...(19): siRNA sense strand
ggaagacgacucugaggau

SEQ ID NO: 1920329 - RNA, 19 nt, Homo sapiens
  misc_RNA (1)...(19): siRNA sense strand
gaccucagcugcgaucugu

SEQ ID NO: 1920330 - RNA, 19 nt, Homo sapiens
  misc_RNA (1)...(19): siRNA sense strand
gcagaugugucagaacaag

SEQ ID NO: 1920331 - RNA, 19 nt, Homo sapiens
  misc_RNA (1)...(19): siRNA sense strand
aagcagaugugucagaaca

SEQ ID NO: 1920332 - RNA, 19 nt, Homo sapiens
  misc_RNA (1)...(19): siRNA sense strand
gaggaacgcggcaggcaaa

SEQ ID NO: 1920333 - RNA, 19 nt, Homo sapiens
  misc_RNA (1)...(19): siRNA sense strand
gugugaagcucccauccaa

SEQ ID NO: 1920334 - RNA, 19 nt, Homo sapiens
  misc_RNA (1)...(19): siRNA sense strand
ggccaaggucuucguauga

SEQ ID NO: 1920335 - RNA, 19 nt, Homo sapiens
  misc_RNA (1)...(19): siRNA sense strand
aggcaaagauggcaaagag

SEQ ID NO: 1920336 - RNA, 19 nt, Homo sapiens
  misc_RNA (1)...(19): siRNA sense strand
gaucaagaugcuagaguau

SEQ ID NO: 1920337 - RNA, 19 nt, Homo sapiens
  misc_RNA (1)...(19): siRNA sense strand
gaaagggcaggagaaucua

SEQ ID NO: 1920338 - RNA, 19 nt, Homo sapiens
  misc_RNA (1)...(19): siRNA sense strand
ucaagaugcuagaguaugc

SEQ ID NO: 1920339 - RNA, 19 nt, Homo sapiens
  misc_RNA (1)...(19): siRNA sense strand
gagaagaaagcagaugugu

SEQ ID NO: 1920340 - RNA, 19 nt, Homo sapiens
  misc_RNA (1)...(19): siRNA sense strand
aaacgugcgugcaggagau

SEQ ID NO: 1920341 - RNA, 19 nt, Homo sapiens
  misc_RNA (1)...(19): siRNA sense strand
gaacugcgaggacgaagac

SEQ ID NO: 1920342 - RNA, 19 nt, Homo sapiens
  misc_RNA (1)...(19): siRNA sense strand
ggagaagaaagcagaugug

SEQ ID NO: 1920343 - RNA, 19 nt, Homo sapiens
  misc_RNA (1)...(19): siRNA sense strand
guaagccggugcacuccau

SEQ ID NO: 1920344 - RNA, 19 nt, Homo sapiens
  misc_RNA (1)...(19): siRNA sense strand
cgaaauggaagacgaggau

SEQ ID NO: 1920345 - RNA, 19 nt, Homo sapiens
  misc_RNA (1)...(19): siRNA sense strand
caaaccagccucucaccau

SEQ ID NO: 1920346 - RNA, 19 nt, Homo sapiens
  misc_RNA (1)...(19): siRNA sense strand
cugaggaugcuaucaauga

SEQ ID NO: 1920347 - RNA, 19 nt, Homo sapiens
  misc_RNA (1)...(19): siRNA sense strand
gacaccgucuuguaugaca

SEQ ID NO: 1920348 - RNA, 19 nt, Homo sapiens
  misc_RNA (1)...(19): siRNA sense strand
uggaaccuauacaugcuuu

SEQ ID NO: 1920349 - RNA, 19 nt, Homo sapiens
  misc_RNA (1)...(19): siRNA sense strand
gaggaaagggcaggagaau

SEQ ID NO: 1920350 - RNA, 19 nt, Homo sapiens
  misc_RNA (1)...(19): siRNA sense strand
gggagaagaaagcagaugu

SEQ ID NO: 1920351 - RNA, 19 nt, Homo sapiens
  misc_RNA (1)...(19): siRNA sense strand
ucuggagccuggacaacaa

SEQ ID NO: 1920352 - RNA, 19 nt, Homo sapiens
  misc_RNA (1)...(19): siRNA sense strand
aggaaagggccaaauauca

SEQ ID NO: 1920353 - RNA, 19 nt, Homo sapiens
  misc_RNA (1)...(19): siRNA sense strand
aggaugcuaucaaugaguu

SEQ ID NO: 1920354 - RNA, 19 nt, Homo sapiens
  misc_RNA (1)...(19): siRNA sense strand
ggaagaggugggcuacaca

SEQ ID NO: 1920355 - RNA, 19 nt, Homo sapiens
  misc_RNA (1)...(19): siRNA sense strand
uggccaaggucuucguaug

SEQ ID NO: 1920356 - RNA, 19 nt, Homo sapiens
  misc_RNA (1)...(19): siRNA sense strand
caggaaagggccaaauauc

SEQ ID NO: 1920357 - RNA, 19 nt, Homo sapiens
  misc_RNA (1)...(19): siRNA sense strand
gggcaggagaaucuaaaga

SEQ ID NO: 1920358 - RNA, 19 nt, Homo sapiens
  misc_RNA (1)...(19): siRNA sense strand
acagaucgaggagcagaua

SEQ ID NO: 1920359 - RNA, 19 nt, Homo sapiens
  misc_RNA (1)...(19): siRNA sense strand
aaagggccaaauaucauaa

SEQ ID NO: 1920360 - RNA, 19 nt, Homo sapiens
  misc_RNA (1)...(19): siRNA sense strand
aggagcagauaaagaggaa

SEQ ID NO: 1920361 - RNA, 19 nt, Homo sapiens
  misc_RNA (1)...(19): siRNA sense strand
agaaagcagaugugucaga

SEQ ID NO: 1920362 - RNA, 19 nt, Homo sapiens
  misc_RNA (1)...(19): siRNA sense strand
gcuagauguggaaccuaua

SEQ ID NO: 1920363 - RNA, 19 nt, Homo sapiens
  misc_RNA (1)...(19): siRNA sense strand
gcuagaguaugcgcugaag

SEQ ID NO: 1920364 - RNA, 19 nt, Homo sapiens
  misc_RNA (1)...(19): siRNA sense strand
uggcugaccugcgggaugu

SEQ ID NO: 1920365 - RNA, 19 nt, Homo sapiens
  misc_RNA (1)...(19): siRNA sense strand
aaauggaagacgaggauga

SEQ ID NO: 1920366 - RNA, 19 nt, Homo sapiens
  misc_RNA (1)...(19): siRNA sense strand
ucagaacaagucuccaaug

SEQ ID NO: 1920367 - RNA, 19 nt, Homo sapiens
  misc_RNA (1)...(19): siRNA sense strand
gggcagcaacagugaauac

SEQ ID NO: 1920368 - RNA, 19 nt, Homo sapiens
  misc_RNA (1)...(19): siRNA sense strand
cgcuagauguggaaccuau

SEQ ID NO: 1920369 - RNA, 19 nt, Homo sapiens
  misc_RNA (1)...(19): siRNA sense strand
ugaggaugcuaucaaugag

SEQ ID NO: 1920370 - RNA, 19 nt, Homo sapiens
  misc_RNA (1)...(19): siRNA sense strand
acaagaagcagcgugugaa

SEQ ID NO: 1920371 - RNA, 19 nt, Homo sapiens
  misc_RNA (1)...(19): siRNA sense strand
ggaacgcggcaggcaaaga

SEQ ID NO: 1920372 - RNA, 19 nt, Homo sapiens
  misc_RNA (1)...(19): siRNA sense strand
gaucgaggagcagauaaag

SEQ ID NO: 1920373 - RNA, 19 nt, Homo sapiens
  misc_RNA (1)...(19): siRNA sense strand
gcaguggagccgagugaag

SEQ ID NO: 1920374 - RNA, 19 nt, Homo sapiens
  misc_RNA (1)...(19): siRNA sense strand
caagaagcagcgugugaag

SEQ ID NO: 1920375 - RNA, 19 nt, Homo sapiens
  misc_RNA (1)...(19): siRNA sense strand
cauccaaaccagccucuca

SEQ ID NO: 1920376 - RNA, 19 nt, Homo sapiens
  misc_RNA (1)...(19): siRNA sense strand
ggcagcuucuccgacagua

SEQ ID NO: 1920377 - RNA, 19 nt, Homo sapiens
  misc_RNA (1)...(19): siRNA sense strand
uggacaaucggacagguaa

SEQ ID NO: 1920378 - RNA, 19 nt, Homo sapiens
  misc_RNA (1)...(19): siRNA sense strand
uggcgacaccgucuuguau

SEQ ID NO: 1920379 - RNA, 19 nt, Homo sapiens
  misc_RNA (1)...(19): siRNA sense strand
ucgaggagcagauaaagag

SEQ ID NO: 1920380 - RNA, 19 nt, Homo sapiens
  misc_RNA (1)...(19): siRNA sense strand
aaagggcaggagaaucuaa

SEQ ID NO: 1920381 - RNA, 19 nt, Homo sapiens
  misc_RNA (1)...(19): siRNA sense strand
caaguggugagucauccaa

SEQ ID NO: 1920382 - RNA, 19 nt, Homo sapiens
  misc_RNA (1)...(19): siRNA sense strand
uagaguaugcgcugaagca

SEQ ID NO: 1920383 - RNA, 19 nt, Homo sapiens
  misc_RNA (1)...(19): siRNA sense strand
agcaggaaagggccaaaua

SEQ ID NO: 1920384 - RNA, 19 nt, Homo sapiens
  misc_RNA (1)...(19): siRNA sense strand
ggucacggccaagaagaau

SEQ ID NO: 1920385 - RNA, 19 nt, Homo sapiens
  misc_RNA (1)...(19): siRNA sense strand
ggaagugccuagucaagua

SEQ ID NO: 1920386 - RNA, 19 nt, Homo sapiens
  misc_RNA (1)...(19): siRNA sense strand
caacaucccugcauugcua

SEQ ID NO: 1920387 - RNA, 19 nt, Homo sapiens
  misc_RNA (1)...(19): siRNA sense strand
caagugagacuguuugaua

SEQ ID NO: 1920388 - RNA, 19 nt, Homo sapiens
  misc_RNA (1)...(19): siRNA sense strand
ggacgggacugccaagaga

SEQ ID NO: 1920389 - RNA, 19 nt, Homo sapiens
  misc_RNA (1)...(19): siRNA sense strand
aagauugucuccagcuuua

SEQ ID NO: 1920390 - RNA, 19 nt, Homo sapiens
  misc_RNA (1)...(19): siRNA sense strand
gaaaucgacacucuuaaug

SEQ ID NO: 1920391 - RNA, 19 nt, Homo sapiens
  misc_RNA (1)...(19): siRNA sense strand
ccacugacaucccucaaga

SEQ ID NO: 1920392 - RNA, 19 nt, Homo sapiens
  misc_RNA (1)...(19): siRNA sense strand
gcacggacucugccauuaa

SEQ ID NO: 1920393 - RNA, 19 nt, Homo sapiens
  misc_RNA (1)...(19): siRNA sense strand
gagaucagacugcucauau

SEQ ID NO: 1920394 - RNA, 19 nt, Homo sapiens
  misc_RNA (1)...(19): siRNA sense strand
gcaguacacuucuggaacu

SEQ ID NO: 1920395 - RNA, 19 nt, Homo sapiens
  misc_RNA (1)...(19): siRNA sense strand
guacacuucuggaacuguu

SEQ ID NO: 1920396 - RNA, 19 nt, Homo sapiens
  misc_RNA (1)...(19): siRNA sense strand
aaucgacacucuuaaugaa

SEQ ID NO: 1920397 - RNA, 19 nt, Homo sapiens
  misc_RNA (1)...(19): siRNA sense strand
gcaagauugucuccagcuu

SEQ ID NO: 1920398 - RNA, 19 nt, Homo sapiens
  misc_RNA (1)...(19): siRNA sense strand
agaauuacguagagaaauc

SEQ ID NO: 1920399 - RNA, 19 nt, Homo sapiens
  misc_RNA (1)...(19): siRNA sense strand
ccacagaaagcgcaaguug

SEQ ID NO: 1920400 - RNA, 19 nt, Homo sapiens
  misc_RNA (1)...(19): siRNA sense strand
ccagccagcucucccagaa

SEQ ID NO: 1920401 - RNA, 19 nt, Homo sapiens
  misc_RNA (1)...(19): siRNA sense strand
acagaaagcgcaaguuguu

SEQ ID NO: 1920402 - RNA, 19 nt, Homo sapiens
  misc_RNA (1)...(19): siRNA sense strand
cagaagcgcaaaucccaua

SEQ ID NO: 1920403 - RNA, 19 nt, Homo sapiens
  misc_RNA (1)...(19): siRNA sense strand
cgacagggccacaggagaa

SEQ ID NO: 1920404 - RNA, 19 nt, Homo sapiens
  misc_RNA (1)...(19): siRNA sense strand
gagacuguuugauauguca

SEQ ID NO: 1920405 - RNA, 19 nt, Homo sapiens
  misc_RNA (1)...(19): siRNA sense strand
cacgugggcucaguaaauu

SEQ ID NO: 1920406 - RNA, 19 nt, Homo sapiens
  misc_RNA (1)...(19): siRNA sense strand
caugacaaccgacaaguga

SEQ ID NO: 1920407 - RNA, 19 nt, Homo sapiens
  misc_RNA (1)...(19): siRNA sense strand
ggagaucagacugcucaua

SEQ ID NO: 1920408 - RNA, 19 nt, Homo sapiens
  misc_RNA (1)...(19): siRNA sense strand
ccacgugggcucaguaaau

SEQ ID NO: 1920409 - RNA, 19 nt, Homo sapiens
  misc_RNA (1)...(19): siRNA sense strand
cgacugcucgccaaacaaa

SEQ ID NO: 1920410 - RNA, 19 nt, Homo sapiens
  misc_RNA (1)...(19): siRNA sense strand
gaaggacaagcgauugaug

SEQ ID NO: 1920411 - RNA, 19 nt, Homo sapiens
  misc_RNA (1)...(19): siRNA sense strand
caagauugucuccagcuuu

SEQ ID NO: 1920412 - RNA, 19 nt, Homo sapiens
  misc_RNA (1)...(19): siRNA sense strand
gagaaaucgacacucuuaa

SEQ ID NO: 1920413 - RNA, 19 nt, Homo sapiens
  misc_RNA (1)...(19): siRNA sense strand
gccauugguuggaacauca

SEQ ID NO: 1920414 - RNA, 19 nt, Homo sapiens
  misc_RNA (1)...(19): siRNA sense strand
acagggaagugccuaguca

SEQ ID NO: 1920415 - RNA, 19 nt, Homo sapiens
  misc_RNA (1)...(19): siRNA sense strand
gcaaaucccauagccuuuc

SEQ ID NO: 1920416 - RNA, 19 nt, Homo sapiens
  misc_RNA (1)...(19): siRNA sense strand
agaaacugaagaccacuua

SEQ ID NO: 1920417 - RNA, 19 nt, Homo sapiens
  misc_RNA (1)...(19): siRNA sense strand
gaucagacugcucauaucu

SEQ ID NO: 1920418 - RNA, 19 nt, Homo sapiens
  misc_RNA (1)...(19): siRNA sense strand
ggucaaauagaaagagaau

SEQ ID NO: 1920419 - RNA, 19 nt, Homo sapiens
  misc_RNA (1)...(19): siRNA sense strand
uaacaggaucaauguaugu

SEQ ID NO: 1920420 - RNA, 19 nt, Homo sapiens
  misc_RNA (1)...(19): siRNA sense strand
uuaacaggaucaauguaug

SEQ ID NO: 1920421 - RNA, 19 nt, Homo sapiens
  misc_RNA (1)...(19): siRNA sense strand
acguuuagcugcugaagga

SEQ ID NO: 1920422 - RNA, 19 nt, Homo sapiens
  misc_RNA (1)...(19): siRNA sense strand
aagugagacuguuugauau

SEQ ID NO: 1920423 - RNA, 19 nt, Homo sapiens
  misc_RNA (1)...(19): siRNA sense strand
gccaagagacauguuagaa

SEQ ID NO: 1920424 - RNA, 19 nt, Homo sapiens
  misc_RNA (1)...(19): siRNA sense strand
gugagacuguuugauaugu

SEQ ID NO: 1920425 - RNA, 19 nt, Homo sapiens
  misc_RNA (1)...(19): siRNA sense strand
aaaucgacacucuuaauga

SEQ ID NO: 1920426 - RNA, 19 nt, Homo sapiens
  misc_RNA (1)...(19): siRNA sense strand
cgacaagugagacuguuug

SEQ ID NO: 1920427 - RNA, 19 nt, Homo sapiens
  misc_RNA (1)...(19): siRNA sense strand
agaaaucgacacucuuaau

SEQ ID NO: 1920428 - RNA, 19 nt, Homo sapiens
  misc_RNA (1)...(19): siRNA sense strand
ggcaagccauugguuggaa

SEQ ID NO: 1920429 - RNA, 19 nt, Homo sapiens
  misc_RNA (1)...(19): siRNA sense strand
ucaaauuucaucccucaga

SEQ ID NO: 1920430 - RNA, 19 nt, Homo sapiens
  misc_RNA (1)...(19): siRNA sense strand
caaaucccauagccuuucu

SEQ ID NO: 1920431 - RNA, 19 nt, Homo sapiens
  misc_RNA (1)...(19): siRNA sense strand
gcauagagacagggaagug

SEQ ID NO: 1920432 - RNA, 19 nt, Homo sapiens
  misc_RNA (1)...(19): siRNA sense strand
aggacaagauucuaaacug

SEQ ID NO: 1920433 - RNA, 19 nt, Homo sapiens
  misc_RNA (1)...(19): siRNA sense strand
caucaacaucccugcauug

SEQ ID NO: 1920434 - RNA, 19 nt, Homo sapiens
  misc_RNA (1)...(19): siRNA sense strand
cgcacggacucugccauua

SEQ ID NO: 1920435 - RNA, 19 nt, Homo sapiens
  misc_RNA (1)...(19): siRNA sense strand
ccugccagcucgugaagga

SEQ ID NO: 1920436 - RNA, 19 nt, Homo sapiens
  misc_RNA (1)...(19): siRNA sense strand
ccaagagacauguuagaag

SEQ ID NO: 1920437 - RNA, 19 nt, Homo sapiens
  misc_RNA (1)...(19): siRNA sense strand
cauguuagaaggacaagau

SEQ ID NO: 1920438 - RNA, 19 nt, Homo sapiens
  misc_RNA (1)...(19): siRNA sense strand
acacggacacugugacuuc

SEQ ID NO: 1920439 - RNA, 19 nt, Homo sapiens
  misc_RNA (1)...(19): siRNA sense strand
ggacggcaaaccuguacga

SEQ ID NO: 1920440 - RNA, 19 nt, Homo sapiens
  misc_RNA (1)...(19): siRNA sense strand
aaacugaagaccacuuaca

SEQ ID NO: 1920441 - RNA, 19 nt, Homo sapiens
  misc_RNA (1)...(19): siRNA sense strand
ugacaaccgacaagugaga

SEQ ID NO: 1920442 - RNA, 19 nt, Homo sapiens
  misc_RNA (1)...(19): siRNA sense strand
ggagacguccgagcucguu

SEQ ID NO: 1920443 - RNA, 19 nt, Homo sapiens
  misc_RNA (1)...(19): siRNA sense strand
gaaggacaagauucuaaac

SEQ ID NO: 1920444 - RNA, 19 nt, Homo sapiens
  misc_RNA (1)...(19): siRNA sense strand
gacaagugagacuguuuga

SEQ ID NO: 1920445 - RNA, 19 nt, Homo sapiens
  misc_RNA (1)...(19): siRNA sense strand
gaaagcgcaaguuguucga

SEQ ID NO: 1920446 - RNA, 19 nt, Homo sapiens
  misc_RNA (1)...(19): siRNA sense strand
acaucaacaucccugcauu

SEQ ID NO: 1920447 - RNA, 19 nt, Homo sapiens
  misc_RNA (1)...(19): siRNA sense strand
gcuuuaagaccacgacauc

SEQ ID NO: 1920448 - RNA, 19 nt, Homo sapiens
  misc_RNA (1)...(19): siRNA sense strand
gaugucagcguggccaaga

SEQ ID NO: 1920449 - RNA, 19 nt, Homo sapiens
  misc_RNA (1)...(19): siRNA sense strand
gccagcucgugaaggagua

SEQ ID NO: 1920450 - RNA, 19 nt, Homo sapiens
  misc_RNA (1)...(19): siRNA sense strand
ggccacaggagaaugguau

SEQ ID NO: 1920451 - RNA, 19 nt, Homo sapiens
  misc_RNA (1)...(19): siRNA sense strand
ggacugcaucagccgauca

SEQ ID NO: 1920452 - RNA, 19 nt, Homo sapiens
  misc_RNA (1)...(19): siRNA sense strand
uagccuuucuauacgaaga

SEQ ID NO: 1920453 - RNA, 19 nt, Homo sapiens
  misc_RNA (1)...(19): siRNA sense strand
gauggagcagagcugagua

SEQ ID NO: 1920454 - RNA, 19 nt, Homo sapiens
  misc_RNA (1)...(19): siRNA sense strand
gaagugccuagucaaguac

SEQ ID NO: 1920455 - RNA, 19 nt, Homo sapiens
  misc_RNA (1)...(19): siRNA sense strand
ggacugccaagagacaugu

SEQ ID NO: 1920456 - RNA, 19 nt, Homo sapiens
  misc_RNA (1)...(19): siRNA sense strand
gcucaguaaauucuaucaa

SEQ ID NO: 1920457 - RNA, 19 nt, Homo sapiens
  misc_RNA (1)...(19): siRNA sense strand
gggaagugccuagucaagu

SEQ ID NO: 1920458 - RNA, 19 nt, Homo sapiens
  misc_RNA (1)...(19): siRNA sense strand
gcugaaggacaagcgauug

SEQ ID NO: 1920459 - RNA, 19 nt, Homo sapiens
  misc_RNA (1)...(19): siRNA sense strand
cacucuuaaugaacguuua

SEQ ID NO: 1920460 - RNA, 19 nt, Homo sapiens
  misc_RNA (1)...(19): siRNA sense strand
ucuguucaccuguggguuu

SEQ ID NO: 1920461 - RNA, 19 nt, Homo sapiens
  misc_RNA (1)...(19): siRNA sense strand
guugcugacacuaguauau

SEQ ID NO: 1920462 - RNA, 19 nt, Homo sapiens
  misc_RNA (1)...(19): siRNA sense strand
agaucagacugcucauauc

SEQ ID NO: 1920463 - RNA, 19 nt, Homo sapiens
  misc_RNA (1)...(19): siRNA sense strand
gaaggaaacaccaagaaga

SEQ ID NO: 1920464 - RNA, 19 nt, Homo sapiens
  misc_RNA (1)...(19): siRNA sense strand
gcaagaggcagaagacaga

SEQ ID NO: 1920465 - RNA, 19 nt, Homo sapiens
  misc_RNA (1)...(19): siRNA sense strand
gcacaggacaggagcauca

SEQ ID NO: 1920466 - RNA, 19 nt, Homo sapiens
  misc_RNA (1)...(19): siRNA sense strand
gagcaucaggagccuauuu

SEQ ID NO: 1920467 - RNA, 19 nt, Homo sapiens
  misc_RNA (1)...(19): siRNA sense strand
uauacagccugcagcauug

SEQ ID NO: 1920468 - RNA, 19 nt, Homo sapiens
  misc_RNA (1)...(19): siRNA sense strand
gcccugcgagugagauaua

SEQ ID NO: 1920469 - RNA, 19 nt, Homo sapiens
  misc_RNA (1)...(19): siRNA sense strand
gcagaagacagaaggaaac

SEQ ID NO: 1920470 - RNA, 19 nt, Homo sapiens
  misc_RNA (1)...(19): siRNA sense strand
cagaaggaaacaccaagaa

SEQ ID NO: 1920471 - RNA, 19 nt, Homo sapiens
  misc_RNA (1)...(19): siRNA sense strand
ggcagaagacagaaggaaa

SEQ ID NO: 1920472 - RNA, 19 nt, Homo sapiens
  misc_RNA (1)...(19): siRNA sense strand
gcaggcaagaggcagaaga

SEQ ID NO: 1920473 - RNA, 19 nt, Homo sapiens
  misc_RNA (1)...(19): siRNA sense strand
ggagggugcaagcucagaa

SEQ ID NO: 1920474 - RNA, 19 nt, Homo sapiens
  misc_RNA (1)...(19): siRNA sense strand
cugcagcauugucuggauu

SEQ ID NO: 1920475 - RNA, 19 nt, Homo sapiens
  misc_RNA (1)...(19): siRNA sense strand
auauacagccugcagcauu

SEQ ID NO: 1920476 - RNA, 19 nt, Homo sapiens
  misc_RNA (1)...(19): siRNA sense strand
gcagcauugucuggauuca

SEQ ID NO: 1920477 - RNA, 19 nt, Homo sapiens
  misc_RNA (1)...(19): siRNA sense strand
agcauugucuggauucauc

SEQ ID NO: 1920478 - RNA, 19 nt, Homo sapiens
  misc_RNA (1)...(19): siRNA sense strand
agacagaaggaaacaccaa

SEQ ID NO: 1920479 - RNA, 19 nt, Homo sapiens
  misc_RNA (1)...(19): siRNA sense strand
gcaaggagauccaugauuu

SEQ ID NO: 1920480 - RNA, 19 nt, Homo sapiens
  misc_RNA (1)...(19): siRNA sense strand
cgacggcugucaucaguua

SEQ ID NO: 1920481 - RNA, 19 nt, Homo sapiens
  misc_RNA (1)...(19): siRNA sense strand
gagaagaucugggcaagga

SEQ ID NO: 1920482 - RNA, 19 nt, Homo sapiens
  misc_RNA (1)...(19): siRNA sense strand
ggagauccaugauuuguuc

SEQ ID NO: 1920483 - RNA, 19 nt, Homo sapiens
  misc_RNA (1)...(19): siRNA sense strand
ggacugacaugaagagagu

SEQ ID NO: 1920484 - RNA, 19 nt, Homo sapiens
  misc_RNA (1)...(19): siRNA sense strand
cagcgaggccuucaacuua

SEQ ID NO: 1920485 - RNA, 19 nt, Homo sapiens
  misc_RNA (1)...(19): siRNA sense strand
cagaaaggcucucaagcuu

SEQ ID NO: 1920486 - RNA, 19 nt, Homo sapiens
  misc_RNA (1)...(19): siRNA sense strand
gaaggacccagaucucuuu

SEQ ID NO: 1920487 - RNA, 19 nt, Homo sapiens
  misc_RNA (1)...(19): siRNA sense strand
gaagaagaauaccuguuca

SEQ ID NO: 1920488 - RNA, 19 nt, Homo sapiens
  misc_RNA (1)...(19): siRNA sense strand
ggaacaagaucgacgucaa

SEQ ID NO: 1920489 - RNA, 19 nt, Homo sapiens
  misc_RNA (1)...(19): siRNA sense strand
ugaagagagugaaggagua

SEQ ID NO: 1920490 - RNA, 19 nt, Homo sapiens
  misc_RNA (1)...(19): siRNA sense strand
gagacuacauggagaggaa

SEQ ID NO: 1920491 - RNA, 19 nt, Homo sapiens
  misc_RNA (1)...(19): siRNA sense strand
gaucuggacugacaugaag

SEQ ID NO: 1920492 - RNA, 19 nt, Homo sapiens
  misc_RNA (1)...(19): siRNA sense strand
caagauguauagugagaug

SEQ ID NO: 1920493 - RNA, 19 nt, Homo sapiens
  misc_RNA (1)...(19): siRNA sense strand
agaagaaccugccuuugga

SEQ ID NO: 1920494 - RNA, 19 nt, Homo sapiens
  misc_RNA (1)...(19): siRNA sense strand
gaacaagaucgacgucaau

SEQ ID NO: 1920495 - RNA, 19 nt, Homo sapiens
  misc_RNA (1)...(19): siRNA sense strand
ggagcuggauuuccucaau

SEQ ID NO: 1920496 - RNA, 19 nt, Homo sapiens
  misc_RNA (1)...(19): siRNA sense strand
ggcaagauguauagugaga

SEQ ID NO: 1920497 - RNA, 19 nt, Homo sapiens
  misc_RNA (1)...(19): siRNA sense strand
gagcucauccugcguguga

SEQ ID NO: 1920498 - RNA, 19 nt, Homo sapiens
  misc_RNA (1)...(19): siRNA sense strand
ccaagaagaaccugccuuu

SEQ ID NO: 1920499 - RNA, 19 nt, Homo sapiens
  misc_RNA (1)...(19): siRNA sense strand
gagcacaagaagaagaaua

SEQ ID NO: 1920500 - RNA, 19 nt, Homo sapiens
  misc_RNA (1)...(19): siRNA sense strand
gagcuggauuuccucaaug

SEQ ID NO: 1920501 - RNA, 19 nt, Homo sapiens
  misc_RNA (1)...(19): siRNA sense strand
uuauguggcuuguggauga

SEQ ID NO: 1920502 - RNA, 19 nt, Homo sapiens
  misc_RNA (1)...(19): siRNA sense strand
uagcugagcacaagaagaa

SEQ ID NO: 1920503 - RNA, 19 nt, Homo sapiens
  misc_RNA (1)...(19): siRNA sense strand
gaucagccaucuccucaac

SEQ ID NO: 1920504 - RNA, 19 nt, Homo sapiens
  misc_RNA (1)...(19): siRNA sense strand
ucccagaguuugaguuuau

SEQ ID NO: 1920505 - RNA, 19 nt, Homo sapiens
  misc_RNA (1)...(19): siRNA sense strand
ugaagagugucccuuaugg

SEQ ID NO: 1920506 - RNA, 19 nt, Homo sapiens
  misc_RNA (1)...(19): siRNA sense strand
ucucugaucuggacugaca

SEQ ID NO: 1920507 - RNA, 19 nt, Homo sapiens
  misc_RNA (1)...(19): siRNA sense strand
ugggcaagauguauaguga

SEQ ID NO: 1920508 - RNA, 19 nt, Homo sapiens
  misc_RNA (1)...(19): siRNA sense strand
ggacccagaucucuuucag

SEQ ID NO: 1920509 - RNA, 19 nt, Homo sapiens
  misc_RNA (1)...(19): siRNA sense strand
ggaggaaugcugagaaggu

SEQ ID NO: 1920510 - RNA, 19 nt, Homo sapiens
  misc_RNA (1)...(19): siRNA sense strand
ggucuuggcccuaauaugc

SEQ ID NO: 1920511 - RNA, 19 nt, Homo sapiens
  misc_RNA (1)...(19): siRNA sense strand
ccucuggcaucuacuucua

SEQ ID NO: 1920512 - RNA, 19 nt, Homo sapiens
  misc_RNA (1)...(19): siRNA sense strand
agaagaagaauaccuguuc

SEQ ID NO: 1920513 - RNA, 19 nt, Homo sapiens
  misc_RNA (1)...(19): siRNA sense strand
gcgaggccuucaacuuaug

SEQ ID NO: 1920514 - RNA, 19 nt, Homo sapiens
  misc_RNA (1)...(19): siRNA sense strand
cagccaagcucccgucacu

SEQ ID NO: 1920515 - RNA, 19 nt, Homo sapiens
  misc_RNA (1)...(19): siRNA sense strand
caaggagauccaugauuug

SEQ ID NO: 1920516 - RNA, 19 nt, Homo sapiens
  misc_RNA (1)...(19): siRNA sense strand
ccacugaggacuuagagau

SEQ ID NO: 1920517 - RNA, 19 nt, Homo sapiens
  misc_RNA (1)...(19): siRNA sense strand
caagaucgacgucaaugag

SEQ ID NO: 1920518 - RNA, 19 nt, Homo sapiens
  misc_RNA (1)...(19): siRNA sense strand
cagagcagcaugcaagaga

SEQ ID NO: 1920519 - RNA, 19 nt, Homo sapiens
  misc_RNA (1)...(19): siRNA sense strand
cuuggacccuaaugacuuu

SEQ ID NO: 1920520 - RNA, 19 nt, Homo sapiens
  misc_RNA (1)...(19): siRNA sense strand
gaagggaggaaugcugaga

SEQ ID NO: 1920521 - RNA, 19 nt, Homo sapiens
  misc_RNA (1)...(19): siRNA sense strand
gcagcuguucccagaguuu

SEQ ID NO: 1920522 - RNA, 19 nt, Homo sapiens
  misc_RNA (1)...(19): siRNA sense strand
agaagaauaccuguucauu

SEQ ID NO: 1920523 - RNA, 19 nt, Homo sapiens
  misc_RNA (1)...(19): siRNA sense strand
gcucagaggaguacuugca

SEQ ID NO: 1920524 - RNA, 19 nt, Homo sapiens
  misc_RNA (1)...(19): siRNA sense strand
ccagaaaggcucucaagcu

SEQ ID NO: 1920525 - RNA, 19 nt, Homo sapiens
  misc_RNA (1)...(19): siRNA sense strand
ccugaagagugucccuuau

SEQ ID NO: 1920526 - RNA, 19 nt, Homo sapiens
  misc_RNA (1)...(19): siRNA sense strand
aggcggagauuguccuguu

SEQ ID NO: 1920527 - RNA, 19 nt, Homo sapiens
  misc_RNA (1)...(19): siRNA sense strand
aagaagaaccugccuuugg

SEQ ID NO: 1920528 - RNA, 19 nt, Homo sapiens
  misc_RNA (1)...(19): siRNA sense strand
gaugcucacggaagaauuc

SEQ ID NO: 1920529 - RNA, 19 nt, Homo sapiens
  misc_RNA (1)...(19): siRNA sense strand
cugagaaggugucccagau

SEQ ID NO: 1920530 - RNA, 19 nt, Homo sapiens
  misc_RNA (1)...(19): siRNA sense strand
uggaugaagccaagaagaa

SEQ ID NO: 1920531 - RNA, 19 nt, Homo sapiens
  misc_RNA (1)...(19): siRNA sense strand
guucccugcuccacucuga

SEQ ID NO: 1920532 - RNA, 19 nt, Homo sapiens
  misc_RNA (1)...(19): siRNA sense strand
gcagaucaaccuccaugag

SEQ ID NO: 1920533 - RNA, 19 nt, Homo sapiens
  misc_RNA (1)...(19): siRNA sense strand
ugucaucaguuacgacuac

SEQ ID NO: 1920534 - RNA, 19 nt, Homo sapiens
  misc_RNA (1)...(19): siRNA sense strand
caagaagaaccugccuuug

SEQ ID NO: 1920535 - RNA, 19 nt, Homo sapiens
  misc_RNA (1)...(19): siRNA sense strand
gcucaggcauuuugacuuc

SEQ ID NO: 1920536 - RNA, 19 nt, Homo sapiens
  misc_RNA (1)...(19): siRNA sense strand
acuugcagcugagaucuaa

SEQ ID NO: 1920537 - RNA, 19 nt, Homo sapiens
  misc_RNA (1)...(19): siRNA sense strand
guucccagaguuugaguuu

SEQ ID NO: 1920538 - RNA, 19 nt, Homo sapiens
  misc_RNA (1)...(19): siRNA sense strand
ggcaaggagauccaugauu

SEQ ID NO: 1920539 - RNA, 19 nt, Homo sapiens
  misc_RNA (1)...(19): siRNA sense strand
gaagguccagcacccaaag

SEQ ID NO: 1920540 - RNA, 19 nt, Homo sapiens
  misc_RNA (1)...(19): siRNA sense strand
gcuccuuucucaacauguc

SEQ ID NO: 1920541 - RNA, 19 nt, Homo sapiens
  misc_RNA (1)...(19): siRNA sense strand
gaagagagugaaggaguac

SEQ ID NO: 1920542 - RNA, 19 nt, Homo sapiens
  misc_RNA (1)...(19): siRNA sense strand
cgggaaaggcggagauugu

SEQ ID NO: 1920543 - RNA, 19 nt, Homo sapiens
  misc_RNA (1)...(19): siRNA sense strand
caccugggcaagauguaua

SEQ ID NO: 1920544 - RNA, 19 nt, Homo sapiens
  misc_RNA (1)...(19): siRNA sense strand
aagcagcuguucccagagu

SEQ ID NO: 1920545 - RNA, 19 nt, Homo sapiens
  misc_RNA (1)...(19): siRNA sense strand
ugauggaggugcucguucu

SEQ ID NO: 1920546 - RNA, 19 nt, Homo sapiens
  misc_RNA (1)...(19): siRNA sense strand
ggcggagauuguccuguug

SEQ ID NO: 1920547 - RNA, 19 nt, Homo sapiens
  misc_RNA (1)...(19): siRNA sense strand
ucagcgaggccuucaacuu

SEQ ID NO: 1920548 - RNA, 19 nt, Homo sapiens
  misc_RNA (1)...(19): siRNA sense strand
gcugagcacaagaagaaga

SEQ ID NO: 1920549 - RNA, 19 nt, Homo sapiens
  misc_RNA (1)...(19): siRNA sense strand
cagcuccuuucucaacaug

SEQ ID NO: 1920550 - RNA, 19 nt, Homo sapiens
  misc_RNA (1)...(19): siRNA sense strand
uuccagagcuucgaugaca

SEQ ID NO: 1920551 - RNA, 19 nt, Homo sapiens
  misc_RNA (1)...(19): siRNA sense strand
uacgacggcugucaucagu

SEQ ID NO: 1920552 - RNA, 19 nt, Homo sapiens
  misc_RNA (1)...(19): siRNA sense strand
acuuagagauucgcaacaa

SEQ ID NO: 1920553 - RNA, 19 nt, Homo sapiens
  misc_RNA (1)...(19): siRNA sense strand
cacugccacugaggacuua

SEQ ID NO: 1920554 - RNA, 19 nt, Homo sapiens
  misc_RNA (1)...(19): siRNA sense strand
ccaugggcuuuaccagaug

SEQ ID NO: 1920555 - RNA, 19 nt, Homo sapiens
  misc_RNA (1)...(19): siRNA sense strand
gauguauagugagaugauc

SEQ ID NO: 1920556 - RNA, 19 nt, Homo sapiens
  misc_RNA (1)...(19): siRNA sense strand
guacuuggacccuaaugac

SEQ ID NO: 1920557 - RNA, 19 nt, Homo sapiens
  misc_RNA (1)...(19): siRNA sense strand
accaugggcuuuaccagau

SEQ ID NO: 1920558 - RNA, 19 nt, Homo sapiens
  misc_RNA (1)...(19): siRNA sense strand
acugaggacuuagagauuc

SEQ ID NO: 1920559 - RNA, 19 nt, Homo sapiens
  misc_RNA (1)...(19): siRNA sense strand
gcacgggaaaggcggagau

SEQ ID NO: 1920560 - RNA, 19 nt, Homo sapiens
  misc_RNA (1)...(19): siRNA sense strand
ucagccaucuccucaacca

SEQ ID NO: 1920561 - RNA, 19 nt, Homo sapiens
  misc_RNA (1)...(19): siRNA sense strand
ccaaaggugcgggcucaga

SEQ ID NO: 1920562 - RNA, 19 nt, Homo sapiens
  misc_RNA (1)...(19): siRNA sense strand
ccuaauaugcuggcuguuc

SEQ ID NO: 1920563 - RNA, 19 nt, Homo sapiens
  misc_RNA (1)...(19): siRNA sense strand
gaucgugggacucggucaa

SEQ ID NO: 1920564 - RNA, 19 nt, Homo sapiens
  misc_RNA (1)...(19): siRNA sense strand
gagcagcaugcaagagauc

SEQ ID NO: 1920565 - RNA, 19 nt, Homo sapiens
  misc_RNA (1)...(19): siRNA sense strand
ggaugaagccaagaagaac

SEQ ID NO: 1920566 - RNA, 19 nt, Homo sapiens
  misc_RNA (1)...(19): siRNA sense strand
agcgaggccuucaacuuau

SEQ ID NO: 1920567 - RNA, 19 nt, Homo sapiens
  misc_RNA (1)...(19): siRNA sense strand
caaugacagagacuacaug

SEQ ID NO: 1920568 - RNA, 19 nt, Homo sapiens
  misc_RNA (1)...(19): siRNA sense strand
agaaggacccagaucucuu

SEQ ID NO: 1920569 - RNA, 19 nt, Homo sapiens
  misc_RNA (1)...(19): siRNA sense strand
gccagcuccuuucucaaca

SEQ ID NO: 1920570 - RNA, 19 nt, Homo sapiens
  misc_RNA (1)...(19): siRNA sense strand
accagaugcucacggaaga

SEQ ID NO: 1920571 - RNA, 19 nt, Homo sapiens
  misc_RNA (1)...(19): siRNA sense strand
acaagaucgacgucaauga

SEQ ID NO: 1920572 - RNA, 19 nt, Homo sapiens
  misc_RNA (1)...(19): siRNA sense strand
ucacugccacugaggacuu

SEQ ID NO: 1920573 - RNA, 19 nt, Homo sapiens
  misc_RNA (1)...(19): siRNA sense strand
gggaaaggcggagauuguc

SEQ ID NO: 1920574 - RNA, 19 nt, Homo sapiens
  misc_RNA (1)...(19): siRNA sense strand
gaacaggaacauucaaaua

SEQ ID NO: 1920575 - RNA, 19 nt, Homo sapiens
  misc_RNA (1)...(19): siRNA sense strand
gagcaaagccagaauauau

SEQ ID NO: 1920576 - RNA, 19 nt, Homo sapiens
  misc_RNA (1)...(19): siRNA sense strand
ggaaauggauacaguuaug

SEQ ID NO: 1920577 - RNA, 19 nt, Homo sapiens
  misc_RNA (1)...(19): siRNA sense strand
ggcaagagcucugugauaa

SEQ ID NO: 1920578 - RNA, 19 nt, Homo sapiens
  misc_RNA (1)...(19): siRNA sense strand
gaaacgaccaaacuuauuu

SEQ ID NO: 1920579 - RNA, 19 nt, Homo sapiens
  misc_RNA (1)...(19): siRNA sense strand
aaacuuaccugaagaagga

SEQ ID NO: 1920580 - RNA, 19 nt, Homo sapiens
  misc_RNA (1)...(19): siRNA sense strand
aaacaaaggucuggcagua

SEQ ID NO: 1920581 - RNA, 19 nt, Homo sapiens
  misc_RNA (1)...(19): siRNA sense strand
ggagaaugcugaggacuuu

SEQ ID NO: 1920582 - RNA, 19 nt, Homo sapiens
  misc_RNA (1)...(19): siRNA sense strand
gaucgaauccggccucaua

SEQ ID NO: 1920583 - RNA, 19 nt, Homo sapiens
  misc_RNA (1)...(19): siRNA sense strand
gaaaugaagcucaagaaga

SEQ ID NO: 1920584 - RNA, 19 nt, Homo sapiens
  misc_RNA (1)...(19): siRNA sense strand
acaaaggucuggcaguaua

SEQ ID NO: 1920585 - RNA, 19 nt, Homo sapiens
  misc_RNA (1)...(19): siRNA sense strand
gaacagucgugguaaaaua

SEQ ID NO: 1920586 - RNA, 19 nt, Homo sapiens
  misc_RNA (1)...(19): siRNA sense strand
guaagaugguccucaauga

SEQ ID NO: 1920587 - RNA, 19 nt, Homo sapiens
  misc_RNA (1)...(19): siRNA sense strand
gaguagagccaaauauuaa

SEQ ID NO: 1920588 - RNA, 19 nt, Homo sapiens
  misc_RNA (1)...(19): siRNA sense strand
caaagcaaguuaccaaugu

SEQ ID NO: 1920589 - RNA, 19 nt, Homo sapiens
  misc_RNA (1)...(19): siRNA sense strand
gggcaaggaucgugauuug

SEQ ID NO: 1920590 - RNA, 19 nt, Homo sapiens
  misc_RNA (1)...(19): siRNA sense strand
ccagggcgcuuacaucaaa

SEQ ID NO: 1920591 - RNA, 19 nt, Homo sapiens
  misc_RNA (1)...(19): siRNA sense strand
gaggaaacgaccaaacuua

SEQ ID NO: 1920592 - RNA, 19 nt, Homo sapiens
  misc_RNA (1)...(19): siRNA sense strand
caagagcucugugauaaau

SEQ ID NO: 1920593 - RNA, 19 nt, Homo sapiens
  misc_RNA (1)...(19): siRNA sense strand
ggaagaagauguagaugac

SEQ ID NO: 1920594 - RNA, 19 nt, Homo sapiens
  misc_RNA (1)...(19): siRNA sense strand
caaugucucuucuccauga

SEQ ID NO: 1920595 - RNA, 19 nt, Homo sapiens
  misc_RNA (1)...(19): siRNA sense strand
agacagacauugugcuaaa

SEQ ID NO: 1920596 - RNA, 19 nt, Homo sapiens
  misc_RNA (1)...(19): siRNA sense strand
caccaaagccguuauuaaa

SEQ ID NO: 1920597 - RNA, 19 nt, Homo sapiens
  misc_RNA (1)...(19): siRNA sense strand
gcugaggacuuucuugaga

SEQ ID NO: 1920598 - RNA, 19 nt, Homo sapiens
  misc_RNA (1)...(19): siRNA sense strand
augagaagauugccaaaua

SEQ ID NO: 1920599 - RNA, 19 nt, Homo sapiens
  misc_RNA (1)...(19): siRNA sense strand
gaggaaauggauacaguua

SEQ ID NO: 1920600 - RNA, 19 nt, Homo sapiens
  misc_RNA (1)...(19): siRNA sense strand
uuaaagcacuggaugagaa

SEQ ID NO: 1920601 - RNA, 19 nt, Homo sapiens
  misc_RNA (1)...(19): siRNA sense strand
gcugaaauguccacugaga

SEQ ID NO: 1920602 - RNA, 19 nt, Homo sapiens
  misc_RNA (1)...(19): siRNA sense strand
caacguggcucccauugca

SEQ ID NO: 1920603 - RNA, 19 nt, Homo sapiens
  misc_RNA (1)...(19): siRNA sense strand
ggaaacgaccaaacuuauu

SEQ ID NO: 1920604 - RNA, 19 nt, Homo sapiens
  misc_RNA (1)...(19): siRNA sense strand
ggugugcgcuacuaugaaa

SEQ ID NO: 1920605 - RNA, 19 nt, Homo sapiens
  misc_RNA (1)...(19): siRNA sense strand
ggucagaauccaucauuaa

SEQ ID NO: 1920606 - RNA, 19 nt, Homo sapiens
  misc_RNA (1)...(19): siRNA sense strand
cagaauccaucauuaagga

SEQ ID NO: 1920607 - RNA, 19 nt, Homo sapiens
  misc_RNA (1)...(19): siRNA sense strand
gcaagaguagagccaaaua

SEQ ID NO: 1920608 - RNA, 19 nt, Homo sapiens
  misc_RNA (1)...(19): siRNA sense strand
ugacagagcaccuuccaaa

SEQ ID NO: 1920609 - RNA, 19 nt, Homo sapiens
  misc_RNA (1)...(19): siRNA sense strand
acacagagaugcagcagau

SEQ ID NO: 1920610 - RNA, 19 nt, Homo sapiens
  misc_RNA (1)...(19): siRNA sense strand
ccacauuggugcuguacuu

SEQ ID NO: 1920611 - RNA, 19 nt, Homo sapiens
  misc_RNA (1)...(19): siRNA sense strand
aaaugaagcucaagaagag

SEQ ID NO: 1920612 - RNA, 19 nt, Homo sapiens
  misc_RNA (1)...(19): siRNA sense strand
gcacauucuugauacugaa

SEQ ID NO: 1920613 - RNA, 19 nt, Homo sapiens
  misc_RNA (1)...(19): siRNA sense strand
ugagaagauugccaaauau

SEQ ID NO: 1920614 - RNA, 19 nt, Homo sapiens
  misc_RNA (1)...(19): siRNA sense strand
caaggaucgugauuuggua

SEQ ID NO: 1920615 - RNA, 19 nt, Homo sapiens
  misc_RNA (1)...(19): siRNA sense strand
gauuaagcagucaucauua

SEQ ID NO: 1920616 - RNA, 19 nt, Homo sapiens
  misc_RNA (1)...(19): siRNA sense strand
aaaaggaguuguucaagua

SEQ ID NO: 1920617 - RNA, 19 nt, Homo sapiens
  misc_RNA (1)...(19): siRNA sense strand
caagugauaugcagucucu

SEQ ID NO: 1920618 - RNA, 19 nt, Homo sapiens
  misc_RNA (1)...(19): siRNA sense strand
gaaaguugcacacugacaa

SEQ ID NO: 1920619 - RNA, 19 nt, Homo sapiens
  misc_RNA (1)...(19): siRNA sense strand
agacaaagccaaagccaaa

SEQ ID NO: 1920620 - RNA, 19 nt, Homo sapiens
  misc_RNA (1)...(19): siRNA sense strand
agaguagagccaaauauua

SEQ ID NO: 1920621 - RNA, 19 nt, Homo sapiens
  misc_RNA (1)...(19): siRNA sense strand
ggugucagaucuugaggaa

SEQ ID NO: 1920622 - RNA, 19 nt, Homo sapiens
  misc_RNA (1)...(19): siRNA sense strand
ggacugggaaguuacuaaa

SEQ ID NO: 1920623 - RNA, 19 nt, Homo sapiens
  misc_RNA (1)...(19): siRNA sense strand
cgucggauauuccugauug

SEQ ID NO: 1920624 - RNA, 19 nt, Homo sapiens
  misc_RNA (1)...(19): siRNA sense strand
gcucugugauaaauacauu

SEQ ID NO: 1920625 - RNA, 19 nt, Homo sapiens
  misc_RNA (1)...(19): siRNA sense strand
gcaaagcaaguuaccaaug

SEQ ID NO: 1920626 - RNA, 19 nt, Homo sapiens
  misc_RNA (1)...(19): siRNA sense strand
gaaggauccauacaaaguu

SEQ ID NO: 1920627 - RNA, 19 nt, Homo sapiens
  misc_RNA (1)...(19): siRNA sense strand
gcaaagccagaauauauca

SEQ ID NO: 1920628 - RNA, 19 nt, Homo sapiens
  misc_RNA (1)...(19): siRNA sense strand
gaucaguguuggguucauu

SEQ ID NO: 1920629 - RNA, 19 nt, Homo sapiens
  misc_RNA (1)...(19): siRNA sense strand
gggucagaauccaucauua

SEQ ID NO: 1920630 - RNA, 19 nt, Homo sapiens
  misc_RNA (1)...(19): siRNA sense strand
gcaagagcucugugauaaa

SEQ ID NO: 1920631 - RNA, 19 nt, Homo sapiens
  misc_RNA (1)...(19): siRNA sense strand
gaaauggauacaguuauga

SEQ ID NO: 1920632 - RNA, 19 nt, Homo sapiens
  misc_RNA (1)...(19): siRNA sense strand
cacagaaacugcaggugaa

SEQ ID NO: 1920633 - RNA, 19 nt, Homo sapiens
  misc_RNA (1)...(19): siRNA sense strand
gagaaaugaagcucaagaa

SEQ ID NO: 1920634 - RNA, 19 nt, Homo sapiens
  misc_RNA (1)...(19): siRNA sense strand
gccagaauauaucagcaaa

SEQ ID NO: 1920635 - RNA, 19 nt, Homo sapiens
  misc_RNA (1)...(19): siRNA sense strand
ccaaagccguuauuaaagc

SEQ ID NO: 1920636 - RNA, 19 nt, Homo sapiens
  misc_RNA (1)...(19): siRNA sense strand
ggaacaggagcaacaaaga

SEQ ID NO: 1920637 - RNA, 19 nt, Homo sapiens
  misc_RNA (1)...(19): siRNA sense strand
ggaagaaacagaagagaac

SEQ ID NO: 1920638 - RNA, 19 nt, Homo sapiens
  misc_RNA (1)...(19): siRNA sense strand
gcaaggaucgugauuuggu

SEQ ID NO: 1920639 - RNA, 19 nt, Homo sapiens
  misc_RNA (1)...(19): siRNA sense strand
gaacaggagcaacaaagag

SEQ ID NO: 1920640 - RNA, 19 nt, Homo sapiens
  misc_RNA (1)...(19): siRNA sense strand
caacguggugccucaguuu

SEQ ID NO: 1920641 - RNA, 19 nt, Homo sapiens
  misc_RNA (1)...(19): siRNA sense strand
ugccaaauaucagaaguuu

SEQ ID NO: 1920642 - RNA, 19 nt, Homo sapiens
  misc_RNA (1)...(19): siRNA sense strand
aaacagaagagaacaguca

SEQ ID NO: 1920643 - RNA, 19 nt, Homo sapiens
  misc_RNA (1)...(19): siRNA sense strand
gaacggaggcgagcaguac

SEQ ID NO: 1920644 - RNA, 19 nt, Homo sapiens
  misc_RNA (1)...(19): siRNA sense strand
caggaacagucgugguaaa

SEQ ID NO: 1920645 - RNA, 19 nt, Homo sapiens
  misc_RNA (1)...(19): siRNA sense strand
aagcagucaucauuacaaa

SEQ ID NO: 1920646 - RNA, 19 nt, Homo sapiens
  misc_RNA (1)...(19): siRNA sense strand
gaagaggaacaggaacauu

SEQ ID NO: 1920647 - RNA, 19 nt, Homo sapiens
  misc_RNA (1)...(19): siRNA sense strand
guugcacacugacaagaaa

SEQ ID NO: 1920648 - RNA, 19 nt, Homo sapiens
  misc_RNA (1)...(19): siRNA sense strand
cauugaaacuuaccugaag

SEQ ID NO: 1920649 - RNA, 19 nt, Homo sapiens
  misc_RNA (1)...(19): siRNA sense strand
cugaauauguauaggcaaa

SEQ ID NO: 1920650 - RNA, 19 nt, Homo sapiens
  misc_RNA (1)...(19): siRNA sense strand
gguaagaugguccucaaug

SEQ ID NO: 1920651 - RNA, 19 nt, Homo sapiens
  misc_RNA (1)...(19): siRNA sense strand
ggaacaggaacauucaaau

SEQ ID NO: 1920652 - RNA, 19 nt, Homo sapiens
  misc_RNA (1)...(19): siRNA sense strand
ugaaggauccauacaaagu

SEQ ID NO: 1920653 - RNA, 19 nt, Homo sapiens
  misc_RNA (1)...(19): siRNA sense strand
acaccaaagccguuauuaa

SEQ ID NO: 1920654 - RNA, 19 nt, Homo sapiens
  misc_RNA (1)...(19): siRNA sense strand
gggaggaagucacagaaac

SEQ ID NO: 1920655 - RNA, 19 nt, Homo sapiens
  misc_RNA (1)...(19): siRNA sense strand
aaacuacauuuggcccuaa

SEQ ID NO: 1920656 - RNA, 19 nt, Homo sapiens
  misc_RNA (1)...(19): siRNA sense strand
caggaacauucaaauaaag

SEQ ID NO: 1920657 - RNA, 19 nt, Homo sapiens
  misc_RNA (1)...(19): siRNA sense strand
caaagccguuauuaaagca

SEQ ID NO: 1920658 - RNA, 19 nt, Homo sapiens
  misc_RNA (1)...(19): siRNA sense strand
gaauccggccucauaacuu

SEQ ID NO: 1920659 - RNA, 19 nt, Homo sapiens
  misc_RNA (1)...(19): siRNA sense strand
ugaaacacacaacgugaaa

SEQ ID NO: 1920660 - RNA, 19 nt, Homo sapiens
  misc_RNA (1)...(19): siRNA sense strand
gagaagauugccaaauauc

SEQ ID NO: 1920661 - RNA, 19 nt, Homo sapiens
  misc_RNA (1)...(19): siRNA sense strand
uuggaaaguugcacacuga

SEQ ID NO: 1920662 - RNA, 19 nt, Homo sapiens
  misc_RNA (1)...(19): siRNA sense strand
gagcauucauucagcuucu

SEQ ID NO: 1920663 - RNA, 19 nt, Homo sapiens
  misc_RNA (1)...(19): siRNA sense strand
aauccggccucauaacuug

SEQ ID NO: 1920664 - RNA, 19 nt, Homo sapiens
  misc_RNA (1)...(19): siRNA sense strand
gcucaagaagagaucuaua

SEQ ID NO: 1920665 - RNA, 19 nt, Homo sapiens
  misc_RNA (1)...(19): siRNA sense strand
gaagauugccaaauaucag

SEQ ID NO: 1920666 - RNA, 19 nt, Homo sapiens
  misc_RNA (1)...(19): siRNA sense strand
cgagacagacauugugcua

SEQ ID NO: 1920667 - RNA, 19 nt, Homo sapiens
  misc_RNA (1)...(19): siRNA sense strand
gcaagggagcauucauuca

SEQ ID NO: 1920668 - RNA, 19 nt, Homo sapiens
  misc_RNA (1)...(19): siRNA sense strand
acaagaaacagaucagugu

SEQ ID NO: 1920669 - RNA, 19 nt, Homo sapiens
  misc_RNA (1)...(19): siRNA sense strand
aagaguagagccaaauauu

SEQ ID NO: 1920670 - RNA, 19 nt, Homo sapiens
  misc_RNA (1)...(19): siRNA sense strand
aagaggaaauggauacagu

SEQ ID NO: 1920671 - RNA, 19 nt, Homo sapiens
  misc_RNA (1)...(19): siRNA sense strand
caagaguagagccaaauau

SEQ ID NO: 1920672 - RNA, 19 nt, Homo sapiens
  misc_RNA (1)...(19): siRNA sense strand
cggcagaacuuugguaaaa

SEQ ID NO: 1920673 - RNA, 19 nt, Homo sapiens
  misc_RNA (1)...(19): siRNA sense strand
cauuggugcuguacuugaa

SEQ ID NO: 1920674 - RNA, 19 nt, Homo sapiens
  misc_RNA (1)...(19): siRNA sense strand
gaaauuaaacuacgggaaa

SEQ ID NO: 1920675 - RNA, 19 nt, Homo sapiens
  misc_RNA (1)...(19): siRNA sense strand
gcagaaagacuauucauuc

SEQ ID NO: 1920676 - RNA, 19 nt, Homo sapiens
  misc_RNA (1)...(19): siRNA sense strand
ccgagcagcuucugaauuu

SEQ ID NO: 1920677 - RNA, 19 nt, Homo sapiens
  misc_RNA (1)...(19): siRNA sense strand
ggugagauuuguggauuua

SEQ ID NO: 1920678 - RNA, 19 nt, Homo sapiens
  misc_RNA (1)...(19): siRNA sense strand
aagagaaacuggacuguga

SEQ ID NO: 1920679 - RNA, 19 nt, Homo sapiens
  misc_RNA (1)...(19): siRNA sense strand
ugaacgacgugaaugagua

SEQ ID NO: 1920680 - RNA, 19 nt, Homo sapiens
  misc_RNA (1)...(19): siRNA sense strand
cagaaagacuauucauuca

SEQ ID NO: 1920681 - RNA, 19 nt, Homo sapiens
  misc_RNA (1)...(19): siRNA sense strand
gcuagaaaccagccacaua

SEQ ID NO: 1920682 - RNA, 19 nt, Homo sapiens
  misc_RNA (1)...(19): siRNA sense strand
acaacaggauugaguauga

SEQ ID NO: 1920683 - RNA, 19 nt, Homo sapiens
  misc_RNA (1)...(19): siRNA sense strand
auacagaccugcagaguuc

SEQ ID NO: 1920684 - RNA, 19 nt, Homo sapiens
  misc_RNA (1)...(19): siRNA sense strand
gaacugggcaugaccuuca

SEQ ID NO: 1920685 - RNA, 19 nt, Homo sapiens
  misc_RNA (1)...(19): siRNA sense strand
gaacaacaggauugaguau

SEQ ID NO: 1920686 - RNA, 19 nt, Homo sapiens
  misc_RNA (1)...(19): siRNA sense strand
ccgggaaacucgcggauaa

SEQ ID NO: 1920687 - RNA, 19 nt, Homo sapiens
  misc_RNA (1)...(19): siRNA sense strand
aaacugagccugugacugu

SEQ ID NO: 1920688 - RNA, 19 nt, Homo sapiens
  misc_RNA (1)...(19): siRNA sense strand
gacgugcccuuuacuguug

SEQ ID NO: 1920689 - RNA, 19 nt, Homo sapiens
  misc_RNA (1)...(19): siRNA sense strand
ggaacaacaggauugagua

SEQ ID NO: 1920690 - RNA, 19 nt, Homo sapiens
  misc_RNA (1)...(19): siRNA sense strand
gggaaagaacaucaauaua

SEQ ID NO: 1920691 - RNA, 19 nt, Homo sapiens
  misc_RNA (1)...(19): siRNA sense strand
gaaguugaaucaggucugu

SEQ ID NO: 1920692 - RNA, 19 nt, Homo sapiens
  misc_RNA (1)...(19): siRNA sense strand
gaaaagagccacagaagau

SEQ ID NO: 1920693 - RNA, 19 nt, Homo sapiens
  misc_RNA (1)...(19): siRNA sense strand
gugaucgacugucuguaua

SEQ ID NO: 1920694 - RNA, 19 nt, Homo sapiens
  misc_RNA (1)...(19): siRNA sense strand
ccacugaucgcgcuggaua

SEQ ID NO: 1920695 - RNA, 19 nt, Homo sapiens
  misc_RNA (1)...(19): siRNA sense strand
ccaaagagccguucaccau

SEQ ID NO: 1920696 - RNA, 19 nt, Homo sapiens
  misc_RNA (1)...(19): siRNA sense strand
cgagacaccuacucagaga

SEQ ID NO: 1920697 - RNA, 19 nt, Homo sapiens
  misc_RNA (1)...(19): siRNA sense strand
acugugagcugcagaaaga

SEQ ID NO: 1920698 - RNA, 19 nt, Homo sapiens
  misc_RNA (1)...(19): siRNA sense strand
ccagcacaaucaaguguuu

SEQ ID NO: 1920699 - RNA, 19 nt, Homo sapiens
  misc_RNA (1)...(19): siRNA sense strand
gucauucgcuccaaagaga

SEQ ID NO: 1920700 - RNA, 19 nt, Homo sapiens
  misc_RNA (1)...(19): siRNA sense strand
ggaggaagaggaagaggaa

SEQ ID NO: 1920701 - RNA, 19 nt, Homo sapiens
  misc_RNA (1)...(19): siRNA sense strand
ggaaggagaacgagaugga

SEQ ID NO: 1920702 - RNA, 19 nt, Homo sapiens
  misc_RNA (1)...(19): siRNA sense strand
gcccuuuacuguugacaaa

SEQ ID NO: 1920703 - RNA, 19 nt, Homo sapiens
  misc_RNA (1)...(19): siRNA sense strand
gaaacucgcggauaagaag

SEQ ID NO: 1920704 - RNA, 19 nt, Homo sapiens
  misc_RNA (1)...(19): siRNA sense strand
gagcagcuucugaauuuga

SEQ ID NO: 1920705 - RNA, 19 nt, Homo sapiens
  misc_RNA (1)...(19): siRNA sense strand
gcaggaagaaggagacaau

SEQ ID NO: 1920706 - RNA, 19 nt, Homo sapiens
  misc_RNA (1)...(19): siRNA sense strand
cauccaagauagaaacuca

SEQ ID NO: 1920707 - RNA, 19 nt, Homo sapiens
  misc_RNA (1)...(19): siRNA sense strand
gcgaccagguguuugaguu

SEQ ID NO: 1920708 - RNA, 19 nt, Homo sapiens
  misc_RNA (1)...(19): siRNA sense strand
cuacaucagcaacgaauuu

SEQ ID NO: 1920709 - RNA, 19 nt, Homo sapiens
  misc_RNA (1)...(19): siRNA sense strand
gagaagaccucggggaauu

SEQ ID NO: 1920710 - RNA, 19 nt, Homo sapiens
  misc_RNA (1)...(19): siRNA sense strand
cacgagcccuucucuguga

SEQ ID NO: 1920711 - RNA, 19 nt, Homo sapiens
  misc_RNA (1)...(19): siRNA sense strand
aagcaacuguucauauuca

SEQ ID NO: 1920712 - RNA, 19 nt, Homo sapiens
  misc_RNA (1)...(19): siRNA sense strand
gcagaagggcauugaagug

SEQ ID NO: 1920713 - RNA, 19 nt, Homo sapiens
  misc_RNA (1)...(19): siRNA sense strand
guagaauucccgaguguga

SEQ ID NO: 1920714 - RNA, 19 nt, Homo sapiens
  misc_RNA (1)...(19): siRNA sense strand
ugaucgcgcuggauaaaga

SEQ ID NO: 1920715 - RNA, 19 nt, Homo sapiens
  misc_RNA (1)...(19): siRNA sense strand
cgacagcgaccagguguuu

SEQ ID NO: 1920716 - RNA, 19 nt, Homo sapiens
  misc_RNA (1)...(19): siRNA sense strand
ccacuacguccucaaugua

SEQ ID NO: 1920717 - RNA, 19 nt, Homo sapiens
  misc_RNA (1)...(19): siRNA sense strand
ggugaucgacugucuguau

SEQ ID NO: 1920718 - RNA, 19 nt, Homo sapiens
  misc_RNA (1)...(19): siRNA sense strand
ggaacacgccaaccacaug

SEQ ID NO: 1920719 - RNA, 19 nt, Homo sapiens
  misc_RNA (1)...(19): siRNA sense strand
ggaaacucgcggauaagaa

SEQ ID NO: 1920720 - RNA, 19 nt, Homo sapiens
  misc_RNA (1)...(19): siRNA sense strand
uaacgaggccaccugcauu

SEQ ID NO: 1920721 - RNA, 19 nt, Homo sapiens
  misc_RNA (1)...(19): siRNA sense strand
cgggaaagaacaucaauau

SEQ ID NO: 1920722 - RNA, 19 nt, Homo sapiens
  misc_RNA (1)...(19): siRNA sense strand
ggauggaacaacaggauug

SEQ ID NO: 1920723 - RNA, 19 nt, Homo sapiens
  misc_RNA (1)...(19): siRNA sense strand
ggaauucgcagacucaaaa

SEQ ID NO: 1920724 - RNA, 19 nt, Homo sapiens
  misc_RNA (1)...(19): siRNA sense strand
gcacaucucguaccugaac

SEQ ID NO: 1920725 - RNA, 19 nt, Homo sapiens
  misc_RNA (1)...(19): siRNA sense strand
caaucuggcuggcuuaacu

SEQ ID NO: 1920726 - RNA, 19 nt, Homo sapiens
  misc_RNA (1)...(19): siRNA sense strand
gaagcaguacgacagcauu

SEQ ID NO: 1920727 - RNA, 19 nt, Homo sapiens
  misc_RNA (1)...(19): siRNA sense strand
ucaggucugugaugaggaa

SEQ ID NO: 1920728 - RNA, 19 nt, Homo sapiens
  misc_RNA (1)...(19): siRNA sense strand
gcaccacuacucccucuau

SEQ ID NO: 1920729 - RNA, 19 nt, Homo sapiens
  misc_RNA (1)...(19): siRNA sense strand
agacaauucuuugcaguuc

SEQ ID NO: 1920730 - RNA, 19 nt, Homo sapiens
  misc_RNA (1)...(19): siRNA sense strand
uggcaaggauggaacaaca

SEQ ID NO: 1920731 - RNA, 19 nt, Homo sapiens
  misc_RNA (1)...(19): siRNA sense strand
ggaggaggaggaagaggaa

SEQ ID NO: 1920732 - RNA, 19 nt, Homo sapiens
  misc_RNA (1)...(19): siRNA sense strand
uuccugguguucaugauua

SEQ ID NO: 1920733 - RNA, 19 nt, Homo sapiens
  misc_RNA (1)...(19): siRNA sense strand
cagaagggcauugaaguga

SEQ ID NO: 1920734 - RNA, 19 nt, Homo sapiens
  misc_RNA (1)...(19): siRNA sense strand
gcagaggcgugcagaucca

SEQ ID NO: 1920735 - RNA, 19 nt, Homo sapiens
  misc_RNA (1)...(19): siRNA sense strand
aaagagccguucaccaucu

SEQ ID NO: 1920736 - RNA, 19 nt, Homo sapiens
  misc_RNA (1)...(19): siRNA sense strand
gagacaauucuuugcaguu

SEQ ID NO: 1920737 - RNA, 19 nt, Homo sapiens
  misc_RNA (1)...(19): siRNA sense strand
cauaaagcaacuguucaua

SEQ ID NO: 1920738 - RNA, 19 nt, Homo sapiens
  misc_RNA (1)...(19): siRNA sense strand
ccaugcagcacaucucgua

SEQ ID NO: 1920739 - RNA, 19 nt, Homo sapiens
  misc_RNA (1)...(19): siRNA sense strand
uggugaagaucagcauuaa

SEQ ID NO: 1920740 - RNA, 19 nt, Homo sapiens
  misc_RNA (1)...(19): siRNA sense strand
cguccucaauguagaauuc

SEQ ID NO: 1920741 - RNA, 19 nt, Homo sapiens
  misc_RNA (1)...(19): siRNA sense strand
gaccagguguuugaguuca

SEQ ID NO: 1920742 - RNA, 19 nt, Homo sapiens
  misc_RNA (1)...(19): siRNA sense strand
gaaggugagauuuguggau

SEQ ID NO: 1920743 - RNA, 19 nt, Homo sapiens
  misc_RNA (1)...(19): siRNA sense strand
ggacggcgaagaagaggau

SEQ ID NO: 1920744 - RNA, 19 nt, Homo sapiens
  misc_RNA (1)...(19): siRNA sense strand
ucucugugacugaggauua

SEQ ID NO: 1920745 - RNA, 19 nt, Homo sapiens
  misc_RNA (1)...(19): siRNA sense strand
aaggugagauuuguggauu

SEQ ID NO: 1920746 - RNA, 19 nt, Homo sapiens
  misc_RNA (1)...(19): siRNA sense strand
gaagaaaagagccacagaa

SEQ ID NO: 1920747 - RNA, 19 nt, Homo sapiens
  misc_RNA (1)...(19): siRNA sense strand
gggaaacucgcggauaaga

SEQ ID NO: 1920748 - RNA, 19 nt, Homo sapiens
  misc_RNA (1)...(19): siRNA sense strand
gcaagaguuuucaggaguu

SEQ ID NO: 1920749 - RNA, 19 nt, Homo sapiens
  misc_RNA (1)...(19): siRNA sense strand
gcaccacuacguccucaau

SEQ ID NO: 1920750 - RNA, 19 nt, Homo sapiens
  misc_RNA (1)...(19): siRNA sense strand
cuagaaaccagccacauag

SEQ ID NO: 1920751 - RNA, 19 nt, Homo sapiens
  misc_RNA (1)...(19): siRNA sense strand
caacaggauugaguaugag

SEQ ID NO: 1920752 - RNA, 19 nt, Homo sapiens
  misc_RNA (1)...(19): siRNA sense strand
cagaagauguuuuggugaa

SEQ ID NO: 1920753 - RNA, 19 nt, Homo sapiens
  misc_RNA (1)...(19): siRNA sense strand
aauuuaagguggaggugaa

SEQ ID NO: 1920754 - RNA, 19 nt, Homo sapiens
  misc_RNA (1)...(19): siRNA sense strand
ucacaggcguggacaccau

SEQ ID NO: 1920755 - RNA, 19 nt, Homo sapiens
  misc_RNA (1)...(19): siRNA sense strand
cauccaggccuaugauugu

SEQ ID NO: 1920756 - RNA, 19 nt, Homo sapiens
  misc_RNA (1)...(19): siRNA sense strand
gaagauguuuuggugaaga

SEQ ID NO: 1920757 - RNA, 19 nt, Homo sapiens
  misc_RNA (1)...(19): siRNA sense strand
gaacgacgugaaugaguac

SEQ ID NO: 1920758 - RNA, 19 nt, Homo sapiens
  misc_RNA (1)...(19): siRNA sense strand
cugaauggccgcuacauca

SEQ ID NO: 1920759 - RNA, 19 nt, Homo sapiens
  misc_RNA (1)...(19): siRNA sense strand
uugcuugaccggaaguuua

SEQ ID NO: 1920760 - RNA, 19 nt, Homo sapiens
  misc_RNA (1)...(19): siRNA sense strand
ggacugugagcugcagaaa

SEQ ID NO: 1920761 - RNA, 19 nt, Homo sapiens
  misc_RNA (1)...(19): siRNA sense strand
aagaugcgccucugcgauu

SEQ ID NO: 1920762 - RNA, 19 nt, Homo sapiens
  misc_RNA (1)...(19): siRNA sense strand
gcuccauccauccaagaua

SEQ ID NO: 1920763 - RNA, 19 nt, Homo sapiens
  misc_RNA (1)...(19): siRNA sense strand
ccacuacucccucuauguc

SEQ ID NO: 1920764 - RNA, 19 nt, Homo sapiens
  misc_RNA (1)...(19): siRNA sense strand
gauggaacaacaggauuga

SEQ ID NO: 1920765 - RNA, 19 nt, Homo sapiens
  misc_RNA (1)...(19): siRNA sense strand
cuacaaagccacggucauc

SEQ ID NO: 1920766 - RNA, 19 nt, Homo sapiens
  misc_RNA (1)...(19): siRNA sense strand
uaagguggaggugaaugua

SEQ ID NO: 1920767 - RNA, 19 nt, Homo sapiens
  misc_RNA (1)...(19): siRNA sense strand
caucagcaacgaauuuaag

SEQ ID NO: 1920768 - RNA, 19 nt, Homo sapiens
  misc_RNA (1)...(19): siRNA sense strand
gcucugaacugggcaugac

SEQ ID NO: 1920769 - RNA, 19 nt, Homo sapiens
  misc_RNA (1)...(19): siRNA sense strand
ggucugugaugaggaaugg

SEQ ID NO: 1920770 - RNA, 19 nt, Homo sapiens
  misc_RNA (1)...(19): siRNA sense strand
gaaggagacaauucuuugc

SEQ ID NO: 1920771 - RNA, 19 nt, Homo sapiens
  misc_RNA (1)...(19): siRNA sense strand
cagauuugcagcuacgaaa

SEQ ID NO: 1920772 - RNA, 19 nt, Homo sapiens
  misc_RNA (1)...(19): siRNA sense strand
ucagccagauuugcagcua

SEQ ID NO: 1920773 - RNA, 19 nt, Homo sapiens
  misc_RNA (1)...(19): siRNA sense strand
ccucaguucagccagauuu

SEQ ID NO: 1920774 - RNA, 19 nt, Homo sapiens
  misc_RNA (1)...(19): siRNA sense strand
ugagaaugauccagaauua

SEQ ID NO: 1920775 - RNA, 19 nt, Homo sapiens
  misc_RNA (1)...(19): siRNA sense strand
gaagcuggaugcugacaaa

SEQ ID NO: 1920776 - RNA, 19 nt, Homo sapiens
  misc_RNA (1)...(19): siRNA sense strand
gcuggaugcugacaaauau

SEQ ID NO: 1920777 - RNA, 19 nt, Homo sapiens
  misc_RNA (1)...(19): siRNA sense strand
gaaaagauccgaagagaga

SEQ ID NO: 1920778 - RNA, 19 nt, Homo sapiens
  misc_RNA (1)...(19): siRNA sense strand
gcaaagauaaacuaccaaa

SEQ ID NO: 1920779 - RNA, 19 nt, Homo sapiens
  misc_RNA (1)...(19): siRNA sense strand
gaagagagaggaacuacuc

SEQ ID NO: 1920780 - RNA, 19 nt, Homo sapiens
  misc_RNA (1)...(19): siRNA sense strand
gcacuuggacgaugagauc

SEQ ID NO: 1920781 - RNA, 19 nt, Homo sapiens
  misc_RNA (1)...(19): siRNA sense strand
gaaugauccagaauuagaa

SEQ ID NO: 1920782 - RNA, 19 nt, Homo sapiens
  misc_RNA (1)...(19): siRNA sense strand
agauuaagauguucuacga

SEQ ID NO: 1920783 - RNA, 19 nt, Homo sapiens
  misc_RNA (1)...(19): siRNA sense strand
gugcuggccugguauaugg

SEQ ID NO: 1920784 - RNA, 19 nt, Homo sapiens
  misc_RNA (1)...(19): siRNA sense strand
agaaugauccagaauuaga

SEQ ID NO: 1920785 - RNA, 19 nt, Homo sapiens
  misc_RNA (1)...(19): siRNA sense strand
ggcaguacgugaaauuucu

SEQ ID NO: 1920786 - RNA, 19 nt, Homo sapiens
  misc_RNA (1)...(19): siRNA sense strand
cgaggagcauuugcacuug

SEQ ID NO: 1920787 - RNA, 19 nt, Homo sapiens
  misc_RNA (1)...(19): siRNA sense strand
gcugacaaauaugagaaug

SEQ ID NO: 1920788 - RNA, 19 nt, Homo sapiens
  misc_RNA (1)...(19): siRNA sense strand
ggauggcaguggguacuuc

SEQ ID NO: 1920789 - RNA, 19 nt, Homo sapiens
  misc_RNA (1)...(19): siRNA sense strand
gggcaguacgugaaauuuc

SEQ ID NO: 1920790 - RNA, 19 nt, Homo sapiens
  misc_RNA (1)...(19): siRNA sense strand
gagaaugauccagaauuag

SEQ ID NO: 1920791 - RNA, 19 nt, Homo sapiens
  misc_RNA (1)...(19): siRNA sense strand
gcuucacgguggacgagaa

SEQ ID NO: 1920792 - RNA, 19 nt, Homo sapiens
  misc_RNA (1)...(19): siRNA sense strand
uagaaaagauccgaagaga

SEQ ID NO: 1920793 - RNA, 19 nt, Homo sapiens
  misc_RNA (1)...(19): siRNA sense strand
cgaaggccaugcggcuguu

SEQ ID NO: 1920794 - RNA, 19 nt, Homo sapiens
  misc_RNA (1)...(19): siRNA sense strand
gcgggcaguacgugaaauu

SEQ ID NO: 1920795 - RNA, 19 nt, Homo sapiens
  misc_RNA (1)...(19): siRNA sense strand
augcaaagauaaacuacca

SEQ ID NO: 1920796 - RNA, 19 nt, Homo sapiens
  misc_RNA (1)...(19): siRNA sense strand
auaugagaaugauccagaa

SEQ ID NO: 1920797 - RNA, 19 nt, Homo sapiens
  misc_RNA (1)...(19): siRNA sense strand
gauccagaauuagaaaaga

SEQ ID NO: 1920798 - RNA, 19 nt, Homo sapiens
  misc_RNA (1)...(19): siRNA sense strand
gaugcugacaaauaugaga

SEQ ID NO: 1920799 - RNA, 19 nt, Homo sapiens
  misc_RNA (1)...(19): siRNA sense strand
uggaugcugacaaauauga

SEQ ID NO: 1920800 - RNA, 19 nt, Homo sapiens
  misc_RNA (1)...(19): siRNA sense strand
ucacgguggacgagaagaa

SEQ ID NO: 1920801 - RNA, 19 nt, Homo sapiens
  misc_RNA (1)...(19): siRNA sense strand
ggaagcuggaugcugacaa

SEQ ID NO: 1920802 - RNA, 19 nt, Homo sapiens
  misc_RNA (1)...(19): siRNA sense strand
acaaggaggaccaguggau

SEQ ID NO: 1920803 - RNA, 19 nt, Homo sapiens
  misc_RNA (1)...(19): siRNA sense strand
ggaacuacuccuggaugga

SEQ ID NO: 1920804 - RNA, 19 nt, Homo sapiens
  misc_RNA (1)...(19): siRNA sense strand
acgagaagaacuacacgaa

SEQ ID NO: 1920805 - RNA, 19 nt, Homo sapiens
  misc_RNA (1)...(19): siRNA sense strand
acgaggagcauuugcacuu

SEQ ID NO: 1920806 - RNA, 19 nt, Homo sapiens
  misc_RNA (1)...(19): siRNA sense strand
gaacacagcuggccaccua

SEQ ID NO: 1920807 - RNA, 19 nt, Homo sapiens
  misc_RNA (1)...(19): siRNA sense strand
gcagcgagcuagccaagaa

SEQ ID NO: 1920808 - RNA, 19 nt, Homo sapiens
  misc_RNA (1)...(19): siRNA sense strand
gaaggucccucacaacauc

SEQ ID NO: 1920809 - RNA, 19 nt, Homo sapiens
  misc_RNA (1)...(19): siRNA sense strand
gcaauucccuccuccucaa

SEQ ID NO: 1920810 - RNA, 19 nt, Homo sapiens
  misc_RNA (1)...(19): siRNA sense strand
ggaagagccucccucaaag

SEQ ID NO: 1920811 - RNA, 19 nt, Homo sapiens
  misc_RNA (1)...(19): siRNA sense strand
ccaaagccauccaagaaga

SEQ ID NO: 1920812 - RNA, 19 nt, Homo sapiens
  misc_RNA (1)...(19): siRNA sense strand
gagccucccucaaagaaga

SEQ ID NO: 1920813 - RNA, 19 nt, Homo sapiens
  misc_RNA (1)...(19): siRNA sense strand
accaagagcugcuuaucua

SEQ ID NO: 1920814 - RNA, 19 nt, Homo sapiens
  misc_RNA (1)...(19): siRNA sense strand
ccucgcagcucuacgugua

SEQ ID NO: 1920815 - RNA, 19 nt, Homo sapiens
  misc_RNA (1)...(19): siRNA sense strand
gaagagccucccucaaaga

SEQ ID NO: 1920816 - RNA, 19 nt, Homo sapiens
  misc_RNA (1)...(19): siRNA sense strand
uuaagaaggucccucacaa

SEQ ID NO: 1920817 - RNA, 19 nt, Homo sapiens
  misc_RNA (1)...(19): siRNA sense strand
acacgcagcucuacauaca

SEQ ID NO: 1920818 - RNA, 19 nt, Homo sapiens
  misc_RNA (1)...(19): siRNA sense strand
ggauauuuauggcuacuca

SEQ ID NO: 1920819 - RNA, 19 nt, Homo sapiens
  misc_RNA (1)...(19): siRNA sense strand
ggacgagauugaaguguac

SEQ ID NO: 1920820 - RNA, 19 nt, Homo sapiens
  misc_RNA (1)...(19): siRNA sense strand
ucaccagccugcccuuuga

SEQ ID NO: 1920821 - RNA, 19 nt, Homo sapiens
  misc_RNA (1)...(19): siRNA sense strand
cgggaagacuccaccauga

SEQ ID NO: 1920822 - RNA, 19 nt, Homo sapiens
  misc_RNA (1)...(19): siRNA sense strand
ccgaggcucugaccaagaa

SEQ ID NO: 1920823 - RNA, 19 nt, Homo sapiens
  misc_RNA (1)...(19): siRNA sense strand
agacacggauuccugauuc

SEQ ID NO: 1920824 - RNA, 19 nt, Homo sapiens
  misc_RNA (1)...(19): siRNA sense strand
gacagcauccugaacauug

SEQ ID NO: 1920825 - RNA, 19 nt, Homo sapiens
  misc_RNA (1)...(19): siRNA sense strand
gagaagcugcucaacauca

SEQ ID NO: 1920826 - RNA, 19 nt, Homo sapiens
  misc_RNA (1)...(19): siRNA sense strand
cugccuaccuguccuauga

SEQ ID NO: 1920827 - RNA, 19 nt, Homo sapiens
  misc_RNA (1)...(19): siRNA sense strand
aggaagagccucccucaaa

SEQ ID NO: 1920828 - RNA, 19 nt, Homo sapiens
  misc_RNA (1)...(19): siRNA sense strand
gcgaggagaaggaguuuga

SEQ ID NO: 1920829 - RNA, 19 nt, Homo sapiens
  misc_RNA (1)...(19): siRNA sense strand
caggacacgugcuccauug

SEQ ID NO: 1920830 - RNA, 19 nt, Homo sapiens
  misc_RNA (1)...(19): siRNA sense strand
uggacgagauugaagugua

SEQ ID NO: 1920831 - RNA, 19 nt, Homo sapiens
  misc_RNA (1)...(19): siRNA sense strand
ccacaggaaccacggcuuu

SEQ ID NO: 1920832 - RNA, 19 nt, Homo sapiens
  misc_RNA (1)...(19): siRNA sense strand
gugcagccaugcuugucua

SEQ ID NO: 1920833 - RNA, 19 nt, Homo sapiens
  misc_RNA (1)...(19): siRNA sense strand
ggccugggcucagagacua

SEQ ID NO: 1920834 - RNA, 19 nt, Homo sapiens
  misc_RNA (1)...(19): siRNA sense strand
acgagaagcugcucaacau

SEQ ID NO: 1920835 - RNA, 19 nt, Homo sapiens
  misc_RNA (1)...(19): siRNA sense strand
ggaagacuccaccaugauc

SEQ ID NO: 1920836 - RNA, 19 nt, Homo sapiens
  misc_RNA (1)...(19): siRNA sense strand
guaaggaggaggaggacaa

SEQ ID NO: 1920837 - RNA, 19 nt, Homo sapiens
  misc_RNA (1)...(19): siRNA sense strand
ggacggguuugugcagaau

SEQ ID NO: 1920838 - RNA, 19 nt, Homo sapiens
  misc_RNA (1)...(19): siRNA sense strand
cgacacgcagcucuacaua

SEQ ID NO: 1920839 - RNA, 19 nt, Homo sapiens
  misc_RNA (1)...(19): siRNA sense strand
ugauuacgcugugccugua

SEQ ID NO: 1920840 - RNA, 19 nt, Homo sapiens
  misc_RNA (1)...(19): siRNA sense strand
gcaggacacgugcuccauu

SEQ ID NO: 1920841 - RNA, 19 nt, Homo sapiens
  misc_RNA (1)...(19): siRNA sense strand
gcuaugacauguggacagu

SEQ ID NO: 1920842 - RNA, 19 nt, Homo sapiens
  misc_RNA (1)...(19): siRNA sense strand
agaaggaguuugagaccau

SEQ ID NO: 1920843 - RNA, 19 nt, Homo sapiens
  misc_RNA (1)...(19): siRNA sense strand
gauucgggcucccucuuca

SEQ ID NO: 1920844 - RNA, 19 nt, Homo sapiens
  misc_RNA (1)...(19): siRNA sense strand
gggaugcccugcuccuaag

SEQ ID NO: 1920845 - RNA, 19 nt, Homo sapiens
  misc_RNA (1)...(19): siRNA sense strand
gcaccacaccagacauaau

SEQ ID NO: 1920846 - RNA, 19 nt, Homo sapiens
  misc_RNA (1)...(19): siRNA sense strand
guacagcguggacuucaug

SEQ ID NO: 1920847 - RNA, 19 nt, Homo sapiens
  misc_RNA (1)...(19): siRNA sense strand
cuacuucgaggauauuuau

SEQ ID NO: 1920848 - RNA, 19 nt, Homo sapiens
  misc_RNA (1)...(19): siRNA sense strand
aacaucaacuuccgugaga

SEQ ID NO: 1920849 - RNA, 19 nt, Homo sapiens
  misc_RNA (1)...(19): siRNA sense strand
ccagggcaaucucaaaguc

SEQ ID NO: 1920850 - RNA, 19 nt, Homo sapiens
  misc_RNA (1)...(19): siRNA sense strand
aggaggagaugcuguaugg

SEQ ID NO: 1920851 - RNA, 19 nt, Homo sapiens
  misc_RNA (1)...(19): siRNA sense strand
ggugacaaccuuugagcuu

SEQ ID NO: 1920852 - RNA, 19 nt, Homo sapiens
  misc_RNA (1)...(19): siRNA sense strand
gggacggguuugugcagaa

SEQ ID NO: 1920853 - RNA, 19 nt, Homo sapiens
  misc_RNA (1)...(19): siRNA sense strand
ggacacgugcuccauugug

SEQ ID NO: 1920854 - RNA, 19 nt, Homo sapiens
  misc_RNA (1)...(19): siRNA sense strand
ggucuuugcugggaacauc

SEQ ID NO: 1920855 - RNA, 19 nt, Homo sapiens
  misc_RNA (1)...(19): siRNA sense strand
gaggaggcccgaagaagca

SEQ ID NO: 1920856 - RNA, 19 nt, Homo sapiens
  misc_RNA (1)...(19): siRNA sense strand
caaagccauccaagaagaa

SEQ ID NO: 1920857 - RNA, 19 nt, Homo sapiens
  misc_RNA (1)...(19): siRNA sense strand
uggcguggcucucaacagu

SEQ ID NO: 1920858 - RNA, 19 nt, Homo sapiens
  misc_RNA (1)...(19): siRNA sense strand
auaagcacaucacgugguu

SEQ ID NO: 1920859 - RNA, 19 nt, Homo sapiens
  misc_RNA (1)...(19): siRNA sense strand
gaggagaaggaguuugaga

SEQ ID NO: 1920860 - RNA, 19 nt, Homo sapiens
  misc_RNA (1)...(19): siRNA sense strand
uguccgagcguuccacuuu

SEQ ID NO: 1920861 - RNA, 19 nt, Homo sapiens
  misc_RNA (1)...(19): siRNA sense strand
gccaucggccagaagauuu

SEQ ID NO: 1920862 - RNA, 19 nt, Homo sapiens
  misc_RNA (1)...(19): siRNA sense strand
gaccaagagcugcuuaucu

SEQ ID NO: 1920863 - RNA, 19 nt, Homo sapiens
  misc_RNA (1)...(19): siRNA sense strand
gaccgugucgggccucaaa

SEQ ID NO: 1920864 - RNA, 19 nt, Homo sapiens
  misc_RNA (1)...(19): siRNA sense strand
gggcacccaugaccugaag

SEQ ID NO: 1920865 - RNA, 19 nt, Homo sapiens
  misc_RNA (1)...(19): siRNA sense strand
gcuacuucgaggauauuua

SEQ ID NO: 1920866 - RNA, 19 nt, Homo sapiens
  misc_RNA (1)...(19): siRNA sense strand
gacgagaagcugcucaaca

SEQ ID NO: 1920867 - RNA, 19 nt, Homo sapiens
  misc_RNA (1)...(19): siRNA sense strand
cuuaccacguggagucuaa

SEQ ID NO: 1920868 - RNA, 19 nt, Homo sapiens
  misc_RNA (1)...(19): siRNA sense strand
agccaaagccauccaagaa

SEQ ID NO: 1920869 - RNA, 19 nt, Homo sapiens
  misc_RNA (1)...(19): siRNA sense strand
aggaugagguggacgagau

SEQ ID NO: 1920870 - RNA, 19 nt, Homo sapiens
  misc_RNA (1)...(19): siRNA sense strand
ggaccuggagauugugguu

SEQ ID NO: 1920871 - RNA, 19 nt, Homo sapiens
  misc_RNA (1)...(19): siRNA sense strand
cggcaccacaccagacaua

SEQ ID NO: 1920872 - RNA, 19 nt, Homo sapiens
  misc_RNA (1)...(19): siRNA sense strand
agaacgcgcugaccaccau

SEQ ID NO: 1920873 - RNA, 19 nt, Homo sapiens
  misc_RNA (1)...(19): siRNA sense strand
cagccgacgucaugaagag

SEQ ID NO: 1920874 - RNA, 19 nt, Homo sapiens
  misc_RNA (1)...(19): siRNA sense strand
gggagcaugugaccugcau

SEQ ID NO: 1920875 - RNA, 19 nt, Homo sapiens
  misc_RNA (1)...(19): siRNA sense strand
caaggaggaggcccgaaga

SEQ ID NO: 1920876 - RNA, 19 nt, Homo sapiens
  misc_RNA (1)...(19): siRNA sense strand
gaccucagcggcauguuca

SEQ ID NO: 1920877 - RNA, 19 nt, Homo sapiens
  misc_RNA (1)...(19): siRNA sense strand
cacugaacaucacgcagaa

SEQ ID NO: 1920878 - RNA, 19 nt, Homo sapiens
  misc_RNA (1)...(19): siRNA sense strand
ugaccugcaugaagacagu

SEQ ID NO: 1920879 - RNA, 19 nt, Homo sapiens
  misc_RNA (1)...(19): siRNA sense strand
caagaagaaagcagaaggu

SEQ ID NO: 1920880 - RNA, 19 nt, Homo sapiens
  misc_RNA (1)...(19): siRNA sense strand
cgggaugcccugcuccuaa

SEQ ID NO: 1920881 - RNA, 19 nt, Homo sapiens
  misc_RNA (1)...(19): siRNA sense strand
gggaagacuccaccaugau

SEQ ID NO: 1920882 - RNA, 19 nt, Homo sapiens
  misc_RNA (1)...(19): siRNA sense strand
gagcuucccggcugcuaug

SEQ ID NO: 1920883 - RNA, 19 nt, Homo sapiens
  misc_RNA (1)...(19): siRNA sense strand
ggaugagguggacgagauu

SEQ ID NO: 1920884 - RNA, 19 nt, Homo sapiens
  misc_RNA (1)...(19): siRNA sense strand
guucucgccugggcaauuc

SEQ ID NO: 1920885 - RNA, 19 nt, Homo sapiens
  misc_RNA (1)...(19): siRNA sense strand
gcucugaccaagaaugaca

SEQ ID NO: 1920886 - RNA, 19 nt, Homo sapiens
  misc_RNA (1)...(19): siRNA sense strand
acauaauccuggacgacuu

SEQ ID NO: 1920887 - RNA, 19 nt, Homo sapiens
  misc_RNA (1)...(19): siRNA sense strand
ccgaagccaaggagaguuu

SEQ ID NO: 1920888 - RNA, 19 nt, Homo sapiens
  misc_RNA (1)...(19): siRNA sense strand
gcaaccucaugguguacau

SEQ ID NO: 1920889 - RNA, 19 nt, Homo sapiens
  misc_RNA (1)...(19): siRNA sense strand
aagagcugcuuaucuacga

SEQ ID NO: 1920890 - RNA, 19 nt, Homo sapiens
  misc_RNA (1)...(19): siRNA sense strand
ggaccaagagcugcuuauc

SEQ ID NO: 1920891 - RNA, 19 nt, Homo sapiens
  misc_RNA (1)...(19): siRNA sense strand
gcuggccaccuacuccuuu

SEQ ID NO: 1920892 - RNA, 19 nt, Homo sapiens
  misc_RNA (1)...(19): siRNA sense strand
gcguggcucucaacagucu

SEQ ID NO: 1920893 - RNA, 19 nt, Homo sapiens
  misc_RNA (1)...(19): siRNA sense strand
caucaucgaccugcaguuc

SEQ ID NO: 1920894 - RNA, 19 nt, Homo sapiens
  misc_RNA (1)...(19): siRNA sense strand
cagugucucugcgcaguga

SEQ ID NO: 1920895 - RNA, 19 nt, Homo sapiens
  misc_RNA (1)...(19): siRNA sense strand
ggaccucgcagcucuacgu

SEQ ID NO: 1920896 - RNA, 19 nt, Homo sapiens
  misc_RNA (1)...(19): siRNA sense strand
guacugcaacuucuucaac

SEQ ID NO: 1920897 - RNA, 19 nt, Homo sapiens
  misc_RNA (1)...(19): siRNA sense strand
gagccggaccuggagauug

SEQ ID NO: 1920898 - RNA, 19 nt, Homo sapiens
  misc_RNA (1)...(19): siRNA sense strand
agccggaccuggagauugu

SEQ ID NO: 1920899 - RNA, 19 nt, Homo sapiens
  misc_RNA (1)...(19): siRNA sense strand
caccacaccagacauaauc

SEQ ID NO: 1920900 - RNA, 19 nt, Homo sapiens
  misc_RNA (1)...(19): siRNA sense strand
gcucaaccgcuaccuguac

SEQ ID NO: 1920901 - RNA, 19 nt, Homo sapiens
  misc_RNA (1)...(19): siRNA sense strand
gaucagcgucaagaacuuc

SEQ ID NO: 1920902 - RNA, 19 nt, Homo sapiens
  misc_RNA (1)...(19): siRNA sense strand
cagaugaucagcgucaaga

SEQ ID NO: 1920903 - RNA, 19 nt, Homo sapiens
  misc_RNA (1)...(19): siRNA sense strand
cuacauacaccagaugauc

SEQ ID NO: 1920904 - RNA, 19 nt, Homo sapiens
  misc_RNA (1)...(19): siRNA sense strand
ccgcuacauuguccaagug

SEQ ID NO: 1920905 - RNA, 19 nt, Homo sapiens
  misc_RNA (1)...(19): siRNA sense strand
gcaacuucuucaacaacag

SEQ ID NO: 1920906 - RNA, 19 nt, Homo sapiens
  misc_RNA (1)...(19): siRNA sense strand
gcagauacgaccauuguua

SEQ ID NO: 1920907 - RNA, 19 nt, Homo sapiens
  misc_RNA (1)...(19): siRNA sense strand
ucaacaagcuggagaauca

SEQ ID NO: 1920908 - RNA, 19 nt, Homo sapiens
  misc_RNA (1)...(19): siRNA sense strand
ggacuagggugcagaagga

SEQ ID NO: 1920909 - RNA, 19 nt, Homo sapiens
  misc_RNA (1)...(19): siRNA sense strand
gaaccugcaugcucauaau

SEQ ID NO: 1920910 - RNA, 19 nt, Homo sapiens
  misc_RNA (1)...(19): siRNA sense strand
cguaucagcucuacacauu

SEQ ID NO: 1920911 - RNA, 19 nt, Homo sapiens
  misc_RNA (1)...(19): siRNA sense strand
uauaaucacuuguccauca

SEQ ID NO: 1920912 - RNA, 19 nt, Homo sapiens
  misc_RNA (1)...(19): siRNA sense strand
ggaauacagccuugcauga

SEQ ID NO: 1920913 - RNA, 19 nt, Homo sapiens
  misc_RNA (1)...(19): siRNA sense strand
caagauaaggcuacauuga

SEQ ID NO: 1920914 - RNA, 19 nt, Homo sapiens
  misc_RNA (1)...(19): siRNA sense strand
gaauacagccuugcaugaa

SEQ ID NO: 1920915 - RNA, 19 nt, Homo sapiens
  misc_RNA (1)...(19): siRNA sense strand
cuacagguguggaccaauu

SEQ ID NO: 1920916 - RNA, 19 nt, Homo sapiens
  misc_RNA (1)...(19): siRNA sense strand
gaagguggccaaaaucuua

SEQ ID NO: 1920917 - RNA, 19 nt, Homo sapiens
  misc_RNA (1)...(19): siRNA sense strand
gaagcauccuggcaugguu

SEQ ID NO: 1920918 - RNA, 19 nt, Homo sapiens
  misc_RNA (1)...(19): siRNA sense strand
gagcagauacgaccauugu

SEQ ID NO: 1920919 - RNA, 19 nt, Homo sapiens
  misc_RNA (1)...(19): siRNA sense strand
gaacuugccaaacuaagga

SEQ ID NO: 1920920 - RNA, 19 nt, Homo sapiens
  misc_RNA (1)...(19): siRNA sense strand
gaugugaaccucuaaucaa

SEQ ID NO: 1920921 - RNA, 19 nt, Homo sapiens
  misc_RNA (1)...(19): siRNA sense strand
ucucguagcugcguacaaa

SEQ ID NO: 1920922 - RNA, 19 nt, Homo sapiens
  misc_RNA (1)...(19): siRNA sense strand
gcacguugcugcgcgcuau

SEQ ID NO: 1920923 - RNA, 19 nt, Homo sapiens
  misc_RNA (1)...(19): siRNA sense strand
cagaaagcccagcaagaua

SEQ ID NO: 1920924 - RNA, 19 nt, Homo sapiens
  misc_RNA (1)...(19): siRNA sense strand
aaucacuuguccaucauua

SEQ ID NO: 1920925 - RNA, 19 nt, Homo sapiens
  misc_RNA (1)...(19): siRNA sense strand
gcccucaacuccacugcua

SEQ ID NO: 1920926 - RNA, 19 nt, Homo sapiens
  misc_RNA (1)...(19): siRNA sense strand
uggacaagcugaugguuga

SEQ ID NO: 1920927 - RNA, 19 nt, Homo sapiens
  misc_RNA (1)...(19): siRNA sense strand
ggacagacaagacaaggau

SEQ ID NO: 1920928 - RNA, 19 nt, Homo sapiens
  misc_RNA (1)...(19): siRNA sense strand
agaaagcccagcaagauaa

SEQ ID NO: 1920929 - RNA, 19 nt, Homo sapiens
  misc_RNA (1)...(19): siRNA sense strand
uaucagcucuacacauugu

SEQ ID NO: 1920930 - RNA, 19 nt, Homo sapiens
  misc_RNA (1)...(19): siRNA sense strand
gaagcuuucuggagauucu

SEQ ID NO: 1920931 - RNA, 19 nt, Homo sapiens
  misc_RNA (1)...(19): siRNA sense strand
gggcaaggaugggaaagug

SEQ ID NO: 1920932 - RNA, 19 nt, Homo sapiens
  misc_RNA (1)...(19): siRNA sense strand
cagauacgaccauuguuaa

SEQ ID NO: 1920933 - RNA, 19 nt, Homo sapiens
  misc_RNA (1)...(19): siRNA sense strand
agaggaacuugccaaacua

SEQ ID NO: 1920934 - RNA, 19 nt, Homo sapiens
  misc_RNA (1)...(19): siRNA sense strand
gguaugaaaggaagauuga

SEQ ID NO: 1920935 - RNA, 19 nt, Homo sapiens
  misc_RNA (1)...(19): siRNA sense strand
caacagaggcacucaaacu

SEQ ID NO: 1920936 - RNA, 19 nt, Homo sapiens
  misc_RNA (1)...(19): siRNA sense strand
gcacucaaacuaagaaguc

SEQ ID NO: 1920937 - RNA, 19 nt, Homo sapiens
  misc_RNA (1)...(19): siRNA sense strand
aaacagagaaugugguuca

SEQ ID NO: 1920938 - RNA, 19 nt, Homo sapiens
  misc_RNA (1)...(19): siRNA sense strand
gugaaccucuaaucaacaa

SEQ ID NO: 1920939 - RNA, 19 nt, Homo sapiens
  misc_RNA (1)...(19): siRNA sense strand
uaagaagucugggaagagu

SEQ ID NO: 1920940 - RNA, 19 nt, Homo sapiens
  misc_RNA (1)...(19): siRNA sense strand
gcacgaagccaagccaauc

SEQ ID NO: 1920941 - RNA, 19 nt, Homo sapiens
  misc_RNA (1)...(19): siRNA sense strand
gcucuucuccuuacuaaag

SEQ ID NO: 1920942 - RNA, 19 nt, Homo sapiens
  misc_RNA (1)...(19): siRNA sense strand
aagaggaacuugccaaacu

SEQ ID NO: 1920943 - RNA, 19 nt, Homo sapiens
  misc_RNA (1)...(19): siRNA sense strand
aauaaaugguugucgaugu

SEQ ID NO: 1920944 - RNA, 19 nt, Homo sapiens
  misc_RNA (1)...(19): siRNA sense strand
agacacagcacuucacguu

SEQ ID NO: 1920945 - RNA, 19 nt, Homo sapiens
  misc_RNA (1)...(19): siRNA sense strand
gaagccaagccaaucagaa

SEQ ID NO: 1920946 - RNA, 19 nt, Homo sapiens
  misc_RNA (1)...(19): siRNA sense strand
gaaaggaagauugaagaag

SEQ ID NO: 1920947 - RNA, 19 nt, Homo sapiens
  misc_RNA (1)...(19): siRNA sense strand
uguacaggcucccgacuga

SEQ ID NO: 1920948 - RNA, 19 nt, Homo sapiens
  misc_RNA (1)...(19): siRNA sense strand
ucagaaagcccagcaagau

SEQ ID NO: 1920949 - RNA, 19 nt, Homo sapiens
  misc_RNA (1)...(19): siRNA sense strand
gaggaacuugccaaacuaa

SEQ ID NO: 1920950 - RNA, 19 nt, Homo sapiens
  misc_RNA (1)...(19): siRNA sense strand
aagauaaggcuacauugaa

SEQ ID NO: 1920951 - RNA, 19 nt, Homo sapiens
  misc_RNA (1)...(19): siRNA sense strand
gcaagauaaggcuacauug

SEQ ID NO: 1920952 - RNA, 19 nt, Homo sapiens
  misc_RNA (1)...(19): siRNA sense strand
gggcagauggagaauaaga

SEQ ID NO: 1920953 - RNA, 19 nt, Homo sapiens
  misc_RNA (1)...(19): siRNA sense strand
acagaggcacucaaacuaa

SEQ ID NO: 1920954 - RNA, 19 nt, Homo sapiens
  misc_RNA (1)...(19): siRNA sense strand
gaauaagacccagcaccaa

SEQ ID NO: 1920955 - RNA, 19 nt, Homo sapiens
  misc_RNA (1)...(19): siRNA sense strand
agacaaggaugggaauaca

SEQ ID NO: 1920956 - RNA, 19 nt, Homo sapiens
  misc_RNA (1)...(19): siRNA sense strand
gcaucuugcugccaauaag

SEQ ID NO: 1920957 - RNA, 19 nt, Homo sapiens
  misc_RNA (1)...(19): siRNA sense strand
gaaugugguucagcucauc

SEQ ID NO: 1920958 - RNA, 19 nt, Homo sapiens
  misc_RNA (1)...(19): siRNA sense strand
cagaggcacucaaacuaag

SEQ ID NO: 1920959 - RNA, 19 nt, Homo sapiens
  misc_RNA (1)...(19): siRNA sense strand
ucuagggccugcagagcua

SEQ ID NO: 1920960 - RNA, 19 nt, Homo sapiens
  misc_RNA (1)...(19): siRNA sense strand
gaugcaggcaccaauaaau

SEQ ID NO: 1920961 - RNA, 19 nt, Homo sapiens
  misc_RNA (1)...(19): siRNA sense strand
ggugugcccuggacagaca

SEQ ID NO: 1920962 - RNA, 19 nt, Homo sapiens
  misc_RNA (1)...(19): siRNA sense strand
ccaaacagagaaugugguu

SEQ ID NO: 1920963 - RNA, 19 nt, Homo sapiens
  misc_RNA (1)...(19): siRNA sense strand
agauaaggcuacauugaag

SEQ ID NO: 1920964 - RNA, 19 nt, Homo sapiens
  misc_RNA (1)...(19): siRNA sense strand
gcagacuggcccucacauu

SEQ ID NO: 1920965 - RNA, 19 nt, Homo sapiens
  misc_RNA (1)...(19): siRNA sense strand
ccaaagagaaggcccucaa

SEQ ID NO: 1920966 - RNA, 19 nt, Homo sapiens
  misc_RNA (1)...(19): siRNA sense strand
auaaaugguugucgaugug

SEQ ID NO: 1920967 - RNA, 19 nt, Homo sapiens
  misc_RNA (1)...(19): siRNA sense strand
gaaagucaaggcccaaggu

SEQ ID NO: 1920968 - RNA, 19 nt, Homo sapiens
  misc_RNA (1)...(19): siRNA sense strand
cacaauaacccggaaguug

SEQ ID NO: 1920969 - RNA, 19 nt, Homo sapiens
  misc_RNA (1)...(19): siRNA sense strand
gaagaagccagagaagagu

SEQ ID NO: 1920970 - RNA, 19 nt, Homo sapiens
  misc_RNA (1)...(19): siRNA sense strand
gggaagagugggccaacaa

SEQ ID NO: 1920971 - RNA, 19 nt, Homo sapiens
  misc_RNA (1)...(19): siRNA sense strand
gaaugaggcagccagaucu

SEQ ID NO: 1920972 - RNA, 19 nt, Homo sapiens
  misc_RNA (1)...(19): siRNA sense strand
gcuaaauccacaccaucua

SEQ ID NO: 1920973 - RNA, 19 nt, Homo sapiens
  misc_RNA (1)...(19): siRNA sense strand
gcacucagacacagagaag

SEQ ID NO: 1920974 - RNA, 19 nt, Homo sapiens
  misc_RNA (1)...(19): siRNA sense strand
gaugacaggaggagaaagu

SEQ ID NO: 1920975 - RNA, 19 nt, Homo sapiens
  misc_RNA (1)...(19): siRNA sense strand
acaagaagguggccaaaau

SEQ ID NO: 1920976 - RNA, 19 nt, Homo sapiens
  misc_RNA (1)...(19): siRNA sense strand
gaaaagugguaugaaagga

SEQ ID NO: 1920977 - RNA, 19 nt, Homo sapiens
  misc_RNA (1)...(19): siRNA sense strand
aauaagacccagcaccaaa

SEQ ID NO: 1920978 - RNA, 19 nt, Homo sapiens
  misc_RNA (1)...(19): siRNA sense strand
gcaaggaugggaaagugau

SEQ ID NO: 1920979 - RNA, 19 nt, Homo sapiens
  misc_RNA (1)...(19): siRNA sense strand
cagagaagaguuccuguca

SEQ ID NO: 1920980 - RNA, 19 nt, Homo sapiens
  misc_RNA (1)...(19): siRNA sense strand
gagcgacuuucugcagaga

SEQ ID NO: 1920981 - RNA, 19 nt, Homo sapiens
  misc_RNA (1)...(19): siRNA sense strand
ugguucagcucaucaacaa

SEQ ID NO: 1920982 - RNA, 19 nt, Homo sapiens
  misc_RNA (1)...(19): siRNA sense strand
ugaaaggaagauugaagaa

SEQ ID NO: 1920983 - RNA, 19 nt, Homo sapiens
  misc_RNA (1)...(19): siRNA sense strand
gcuauaaucacuuguccau

SEQ ID NO: 1920984 - RNA, 19 nt, Homo sapiens
  misc_RNA (1)...(19): siRNA sense strand
gugaugcaggcaccaauaa

SEQ ID NO: 1920985 - RNA, 19 nt, Homo sapiens
  misc_RNA (1)...(19): siRNA sense strand
ccaagcugcucguuaaagc

SEQ ID NO: 1920986 - RNA, 19 nt, Homo sapiens
  misc_RNA (1)...(19): siRNA sense strand
aagccaagccaaucagaaa

SEQ ID NO: 1920987 - RNA, 19 nt, Homo sapiens
  misc_RNA (1)...(19): siRNA sense strand
agaagaagccagagaagag

SEQ ID NO: 1920988 - RNA, 19 nt, Homo sapiens
  misc_RNA (1)...(19): siRNA sense strand
gauacgaccauuguuaaca

SEQ ID NO: 1920989 - RNA, 19 nt, Homo sapiens
  misc_RNA (1)...(19): siRNA sense strand
ccuccucacugcuuucugu

SEQ ID NO: 1920990 - RNA, 19 nt, Homo sapiens
  misc_RNA (1)...(19): siRNA sense strand
acuaagaagucugggaaga

SEQ ID NO: 1920991 - RNA, 19 nt, Homo sapiens
  misc_RNA (1)...(19): siRNA sense strand
gggaucgguucaggacaaa

SEQ ID NO: 1920992 - RNA, 19 nt, Homo sapiens
  misc_RNA (1)...(19): siRNA sense strand
gaaaagaagaagccagaga

SEQ ID NO: 1920993 - RNA, 19 nt, Homo sapiens
  misc_RNA (1)...(19): siRNA sense strand
caagacaaggaugggaaua

SEQ ID NO: 1920994 - RNA, 19 nt, Homo sapiens
  misc_RNA (1)...(19): siRNA sense strand
uacaaaggccaaacagaga

SEQ ID NO: 1920995 - RNA, 19 nt, Homo sapiens
  misc_RNA (1)...(19): siRNA sense strand
gugguuaggcccaaagaga

SEQ ID NO: 1920996 - RNA, 19 nt, Homo sapiens
  misc_RNA (1)...(19): siRNA sense strand
ugggaucgguucaggacaa

SEQ ID NO: 1920997 - RNA, 19 nt, Homo sapiens
  misc_RNA (1)...(19): siRNA sense strand
cauugaaggaacacauuaa

SEQ ID NO: 1920998 - RNA, 19 nt, Homo sapiens
  misc_RNA (1)...(19): siRNA sense strand
acauugaaggaacacauua

SEQ ID NO: 1920999 - RNA, 19 nt, Homo sapiens
  misc_RNA (1)...(19): siRNA sense strand
gaaagcccagcaagauaag

SEQ ID NO: 1921000 - RNA, 19 nt, Homo sapiens
  misc_RNA (1)...(19): siRNA sense strand
cagacuggcccucacauuc

SEQ ID NO: 1921001 - RNA, 19 nt, Homo sapiens
  misc_RNA (1)...(19): siRNA sense strand
cagccuugcuacccaugaa

SEQ ID NO: 1921002 - RNA, 19 nt, Homo sapiens
  misc_RNA (1)...(19): siRNA sense strand
gcaacagcacucagacaca

SEQ ID NO: 1921003 - RNA, 19 nt, Homo sapiens
  misc_RNA (1)...(19): siRNA sense strand
gccaauaagggccaucuuc

SEQ ID NO: 1921004 - RNA, 19 nt, Homo sapiens
  misc_RNA (1)...(19): siRNA sense strand
cgaccuugauguccaggau

SEQ ID NO: 1921005 - RNA, 19 nt, Homo sapiens
  misc_RNA (1)...(19): siRNA sense strand
ggaacuugccaaacuaagg

SEQ ID NO: 1921006 - RNA, 19 nt, Homo sapiens
  misc_RNA (1)...(19): siRNA sense strand
gaacauuacccuuguauua

SEQ ID NO: 1921007 - RNA, 19 nt, Homo sapiens
  misc_RNA (1)...(19): siRNA sense strand
ggaaguaucuuugcaagua

SEQ ID NO: 1921008 - RNA, 19 nt, Homo sapiens
  misc_RNA (1)...(19): siRNA sense strand
gcaaguagcugcugcaugu

SEQ ID NO: 1921009 - RNA, 19 nt, Homo sapiens
  misc_RNA (1)...(19): siRNA sense strand
gaaguugcccuccuauaaa

SEQ ID NO: 1921010 - RNA, 19 nt, Homo sapiens
  misc_RNA (1)...(19): siRNA sense strand
gaaguuaagcccugucuga

SEQ ID NO: 1921011 - RNA, 19 nt, Homo sapiens
  misc_RNA (1)...(19): siRNA sense strand
ccacacacaccucaucuua

SEQ ID NO: 1921012 - RNA, 19 nt, Homo sapiens
  misc_RNA (1)...(19): siRNA sense strand
ccaucuugcugucuauuua

SEQ ID NO: 1921013 - RNA, 19 nt, Homo sapiens
  misc_RNA (1)...(19): siRNA sense strand
caugacggcuggccaauga

SEQ ID NO: 1921014 - RNA, 19 nt, Homo sapiens
  misc_RNA (1)...(19): siRNA sense strand
guugaucgcucaugauaau

SEQ ID NO: 1921015 - RNA, 19 nt, Homo sapiens
  misc_RNA (1)...(19): siRNA sense strand
ugaaguugcccuccuauaa

SEQ ID NO: 1921016 - RNA, 19 nt, Homo sapiens
  misc_RNA (1)...(19): siRNA sense strand
gaaagaagcaaacaaacag

SEQ ID NO: 1921017 - RNA, 19 nt, Homo sapiens
  misc_RNA (1)...(19): siRNA sense strand
gcaauaccaguagaaguua

SEQ ID NO: 1921018 - RNA, 19 nt, Homo sapiens
  misc_RNA (1)...(19): siRNA sense strand
acacacaccucaucuuaca

SEQ ID NO: 1921019 - RNA, 19 nt, Homo sapiens
  misc_RNA (1)...(19): siRNA sense strand
cccauuucauugaguauua

SEQ ID NO: 1921020 - RNA, 19 nt, Homo sapiens
  misc_RNA (1)...(19): siRNA sense strand
caccucaucuuacacacua

SEQ ID NO: 1921021 - RNA, 19 nt, Homo sapiens
  misc_RNA (1)...(19): siRNA sense strand
ggccaaauaugcagauuac

SEQ ID NO: 1921022 - RNA, 19 nt, Homo sapiens
  misc_RNA (1)...(19): siRNA sense strand
ggcaauaccaguagaaguu

SEQ ID NO: 1921023 - RNA, 19 nt, Homo sapiens
  misc_RNA (1)...(19): siRNA sense strand
gaaguaucuuugcaaguag

SEQ ID NO: 1921024 - RNA, 19 nt, Homo sapiens
  misc_RNA (1)...(19): siRNA sense strand
caaauaugcagauuacuuc

SEQ ID NO: 1921025 - RNA, 19 nt, Homo sapiens
  misc_RNA (1)...(19): siRNA sense strand
ccaaauaugcagauuacuu

SEQ ID NO: 1921026 - RNA, 19 nt, Homo sapiens
  misc_RNA (1)...(19): siRNA sense strand
cgaaacagaucuucaugac

SEQ ID NO: 1921027 - RNA, 19 nt, Homo sapiens
  misc_RNA (1)...(19): siRNA sense strand
caauaccaguagaaguuaa

SEQ ID NO: 1921028 - RNA, 19 nt, Homo sapiens
  misc_RNA (1)...(19): siRNA sense strand
gauuauacuucgucuuucu

SEQ ID NO: 1921029 - RNA, 19 nt, Homo sapiens
  misc_RNA (1)...(19): siRNA sense strand
ccugcuggcuuccaaacua

SEQ ID NO: 1921030 - RNA, 19 nt, Homo sapiens
  misc_RNA (1)...(19): siRNA sense strand
ggaccgcuaugacaucucu

SEQ ID NO: 1921031 - RNA, 19 nt, Homo sapiens
  misc_RNA (1)...(19): siRNA sense strand
ggaaaagacuaaacucuac

SEQ ID NO: 1921032 - RNA, 19 nt, Homo sapiens
  misc_RNA (1)...(19): siRNA sense strand
gcuucuagcaaguaaauuu

SEQ ID NO: 1921033 - RNA, 19 nt, Homo sapiens
  misc_RNA (1)...(19): siRNA sense strand
gcaagcaggaccucaguca

SEQ ID NO: 1921034 - RNA, 19 nt, Homo sapiens
  misc_RNA (1)...(19): siRNA sense strand
ugaaagaagcaaacaaaca

SEQ ID NO: 1921035 - RNA, 19 nt, Homo sapiens
  misc_RNA (1)...(19): siRNA sense strand
gcuaugacaucucuaucca

SEQ ID NO: 1921036 - RNA, 19 nt, Homo sapiens
  misc_RNA (1)...(19): siRNA sense strand
caacguggccuacaagacu

SEQ ID NO: 1921037 - RNA, 19 nt, Homo sapiens
  misc_RNA (1)...(19): siRNA sense strand
uggguuguaugacuaauau

SEQ ID NO: 1921038 - RNA, 19 nt, Homo sapiens
  misc_RNA (1)...(19): siRNA sense strand
gguuguaugacuaauauga

SEQ ID NO: 1921039 - RNA, 19 nt, Homo sapiens
  misc_RNA (1)...(19): siRNA sense strand
gcuacaaggagcugaaguu

SEQ ID NO: 1921040 - RNA, 19 nt, Homo sapiens
  misc_RNA (1)...(19): siRNA sense strand
gaaccucugccuuccaaca

SEQ ID NO: 1921041 - RNA, 19 nt, Homo sapiens
  misc_RNA (1)...(19): siRNA sense strand
uuaucucucugaagcagua

SEQ ID NO: 1921042 - RNA, 19 nt, Homo sapiens
  misc_RNA (1)...(19): siRNA sense strand
ugugaaagaagcaaacaaa

SEQ ID NO: 1921043 - RNA, 19 nt, Homo sapiens
  misc_RNA (1)...(19): siRNA sense strand
gacuguugaucgcucauga

SEQ ID NO: 1921044 - RNA, 19 nt, Homo sapiens
  misc_RNA (1)...(19): siRNA sense strand
aggauuauacuucgucuuu

SEQ ID NO: 1921045 - RNA, 19 nt, Homo sapiens
  misc_RNA (1)...(19): siRNA sense strand
ggauuauacuucgucuuuc

SEQ ID NO: 1921046 - RNA, 19 nt, Homo sapiens
  misc_RNA (1)...(19): siRNA sense strand
ugacuugauugccauugug

SEQ ID NO: 1921047 - RNA, 19 nt, Homo sapiens
  misc_RNA (1)...(19): siRNA sense strand
guauuuugcugacuugauu

SEQ ID NO: 1921048 - RNA, 19 nt, Homo sapiens
  misc_RNA (1)...(19): siRNA sense strand
cagcgcaacuaaguguauu

SEQ ID NO: 1921049 - RNA, 19 nt, Homo sapiens
  misc_RNA (1)...(19): siRNA sense strand
aagaagacagugugccuaa

SEQ ID NO: 1921050 - RNA, 19 nt, Homo sapiens
  misc_RNA (1)...(19): siRNA sense strand
gcuacauauggaacuauua

SEQ ID NO: 1921051 - RNA, 19 nt, Homo sapiens
  misc_RNA (1)...(19): siRNA sense strand
aacucuacauggccaaaua

SEQ ID NO: 1921052 - RNA, 19 nt, Homo sapiens
  misc_RNA (1)...(19): siRNA sense strand
gaagacagugugccuaagc

SEQ ID NO: 1921053 - RNA, 19 nt, Homo sapiens
  misc_RNA (1)...(19): siRNA sense strand
gcacaugcagacugguguu

SEQ ID NO: 1921054 - RNA, 19 nt, Homo sapiens
  misc_RNA (1)...(19): siRNA sense strand
gauaaugaugugaaagaag

SEQ ID NO: 1921055 - RNA, 19 nt, Homo sapiens
  misc_RNA (1)...(19): siRNA sense strand
cugcauguguggcuucuuc

SEQ ID NO: 1921056 - RNA, 19 nt, Homo sapiens
  misc_RNA (1)...(19): siRNA sense strand
cuacauggccaaauaugca

SEQ ID NO: 1921057 - RNA, 19 nt, Homo sapiens
  misc_RNA (1)...(19): siRNA sense strand
ugaguauuaucucucugaa

SEQ ID NO: 1921058 - RNA, 19 nt, Homo sapiens
  misc_RNA (1)...(19): siRNA sense strand
agcaaucgcuucacacucu

SEQ ID NO: 1921059 - RNA, 19 nt, Homo sapiens
  misc_RNA (1)...(19): siRNA sense strand
ccgcccauuucauugagua

SEQ ID NO: 1921060 - RNA, 19 nt, Homo sapiens
  misc_RNA (1)...(19): siRNA sense strand
ucagucagcgcaacuaagu

SEQ ID NO: 1921061 - RNA, 19 nt, Homo sapiens
  misc_RNA (1)...(19): siRNA sense strand
uuacuggaccuguuuaugg

SEQ ID NO: 1921062 - RNA, 19 nt, Homo sapiens
  misc_RNA (1)...(19): siRNA sense strand
gcaguacacgaaacagauc

SEQ ID NO: 1921063 - RNA, 19 nt, Homo sapiens
  misc_RNA (1)...(19): siRNA sense strand
ucuauuuacuggaccuguu

SEQ ID NO: 1921064 - RNA, 19 nt, Homo sapiens
  misc_RNA (1)...(19): siRNA sense strand
agaccucacugcaguaucg

SEQ ID NO: 1921065 - RNA, 19 nt, Homo sapiens
  misc_RNA (1)...(19): siRNA sense strand
uacuggaccuguuuaugga

SEQ ID NO: 1921066 - RNA, 19 nt, Homo sapiens
  misc_RNA (1)...(19): siRNA sense strand
gcuggccaaugauuugcuu

SEQ ID NO: 1921067 - RNA, 19 nt, Homo sapiens
  misc_RNA (1)...(19): siRNA sense strand
cuacaaggagcugaaguug

SEQ ID NO: 1921068 - RNA, 19 nt, Homo sapiens
  misc_RNA (1)...(19): siRNA sense strand
ggaugucacuggcaauacc

SEQ ID NO: 1921069 - RNA, 19 nt, Homo sapiens
  misc_RNA (1)...(19): siRNA sense strand
ucuccaacguggccuacaa

SEQ ID NO: 1921070 - RNA, 19 nt, Homo sapiens
  misc_RNA (1)...(19): siRNA sense strand
guggcuucuucgaggauua

SEQ ID NO: 1921071 - RNA, 19 nt, Homo sapiens
  misc_RNA (1)...(19): siRNA sense strand
cuacucuugggauuucuua

SEQ ID NO: 1921072 - RNA, 19 nt, Homo sapiens
  misc_RNA (1)...(19): siRNA sense strand
cauugaguauuaucucucu

SEQ ID NO: 1921073 - RNA, 19 nt, Homo sapiens
  misc_RNA (1)...(19): siRNA sense strand
acauuacccuuguauuacu

SEQ ID NO: 1921074 - RNA, 19 nt, Homo sapiens
  misc_RNA (1)...(19): siRNA sense strand
aaguugcccuccuauaaag

SEQ ID NO: 1921075 - RNA, 19 nt, Homo sapiens
  misc_RNA (1)...(19): siRNA sense strand
caucacggccaguucacuu

SEQ ID NO: 1921076 - RNA, 19 nt, Homo sapiens
  misc_RNA (1)...(19): siRNA sense strand
ugacggcuggccaaugauu

SEQ ID NO: 1921077 - RNA, 19 nt, Homo sapiens
  misc_RNA (1)...(19): siRNA sense strand
gccaucuugcugucuauuu

SEQ ID NO: 1921078 - RNA, 19 nt, Homo sapiens
  misc_RNA (1)...(19): siRNA sense strand
uggccaaauaugcagauua

SEQ ID NO: 1921079 - RNA, 19 nt, Homo sapiens
  misc_RNA (1)...(19): siRNA sense strand
acacgaaacagaucuucau

SEQ ID NO: 1921080 - RNA, 19 nt, Homo sapiens
  misc_RNA (1)...(19): siRNA sense strand
cagccuggguuguaugacu

SEQ ID NO: 1921081 - RNA, 19 nt, Homo sapiens
  misc_RNA (1)...(19): siRNA sense strand
aaagaagcaaacaaacaga

SEQ ID NO: 1921082 - RNA, 19 nt, Homo sapiens
  misc_RNA (1)...(19): siRNA sense strand
cuguugaucgcucaugaua

SEQ ID NO: 1921083 - RNA, 19 nt, Homo sapiens
  misc_RNA (1)...(19): siRNA sense strand
gcauuuaguugcgcuuucc

SEQ ID NO: 1921084 - RNA, 19 nt, Homo sapiens
  misc_RNA (1)...(19): siRNA sense strand
ugaagcaguacacgaaaca

SEQ ID NO: 1921085 - RNA, 19 nt, Homo sapiens
  misc_RNA (1)...(19): siRNA sense strand
gacggcuggccaaugauuu

SEQ ID NO: 1921086 - RNA, 19 nt, Homo sapiens
  misc_RNA (1)...(19): siRNA sense strand
cuuacacacuacagacaug

SEQ ID NO: 1921087 - RNA, 19 nt, Homo sapiens
  misc_RNA (1)...(19): siRNA sense strand
cagaacaaccaagcuguca

SEQ ID NO: 1921088 - RNA, 19 nt, Homo sapiens
  misc_RNA (1)...(19): siRNA sense strand
agaagcaaacaaacagaga

SEQ ID NO: 1921089 - RNA, 19 nt, Homo sapiens
  misc_RNA (1)...(19): siRNA sense strand
guauugaacgacuguugau

SEQ ID NO: 1921090 - RNA, 19 nt, Homo sapiens
  misc_RNA (1)...(19): siRNA sense strand
cuauuuacuggaccuguuu

SEQ ID NO: 1921091 - RNA, 19 nt, Homo sapiens
  misc_RNA (1)...(19): siRNA sense strand
gucugaguguuucuuacaa

SEQ ID NO: 1921092 - RNA, 19 nt, Homo sapiens
  misc_RNA (1)...(19): siRNA sense strand
aacguggccuacaagacua

SEQ ID NO: 1921093 - RNA, 19 nt, Homo sapiens
  misc_RNA (1)...(19): siRNA sense strand
ggacaggagcccaccauga

SEQ ID NO: 1921094 - RNA, 19 nt, Homo sapiens
  misc_RNA (1)...(19): siRNA sense strand
gccucuuucugcucuauaa

SEQ ID NO: 1921095 - RNA, 19 nt, Homo sapiens
  misc_RNA (1)...(19): siRNA sense strand
gacaggagcccaccaugac

SEQ ID NO: 1921096 - RNA, 19 nt, Homo sapiens
  misc_RNA (1)...(19): siRNA sense strand
gggccucuuucugcucuau

SEQ ID NO: 1921097 - RNA, 19 nt, Homo sapiens
  misc_RNA (1)...(19): siRNA sense strand
agacagaacucaucuauaa

SEQ ID NO: 1921098 - RNA, 19 nt, Homo sapiens
  misc_RNA (1)...(19): siRNA sense strand
gaauucagaugagcuaaua

SEQ ID NO: 1921099 - RNA, 19 nt, Homo sapiens
  misc_RNA (1)...(19): siRNA sense strand
gaacauuggugaucaucuu

SEQ ID NO: 1921100 - RNA, 19 nt, Homo sapiens
  misc_RNA (1)...(19): siRNA sense strand
aagcagaccugaagaaauu

SEQ ID NO: 1921101 - RNA, 19 nt, Homo sapiens
  misc_RNA (1)...(19): siRNA sense strand
caagagagcucagaaagau

SEQ ID NO: 1921102 - RNA, 19 nt, Homo sapiens
  misc_RNA (1)...(19): siRNA sense strand
gaagaaagcagagcacgua

SEQ ID NO: 1921103 - RNA, 19 nt, Homo sapiens
  misc_RNA (1)...(19): siRNA sense strand
gacauaaucucaaauccaa

SEQ ID NO: 1921104 - RNA, 19 nt, Homo sapiens
  misc_RNA (1)...(19): siRNA sense strand
gaagugaugacccaguuua

SEQ ID NO: 1921105 - RNA, 19 nt, Homo sapiens
  misc_RNA (1)...(19): siRNA sense strand
gguggaaggugaaguuuga

SEQ ID NO: 1921106 - RNA, 19 nt, Homo sapiens
  misc_RNA (1)...(19): siRNA sense strand
guagagaaauuugccauug

SEQ ID NO: 1921107 - RNA, 19 nt, Homo sapiens
  misc_RNA (1)...(19): siRNA sense strand
agaaacaacugacagagaa

SEQ ID NO: 1921108 - RNA, 19 nt, Homo sapiens
  misc_RNA (1)...(19): siRNA sense strand
ggaagaaguugaggaggaa

SEQ ID NO: 1921109 - RNA, 19 nt, Homo sapiens
  misc_RNA (1)...(19): siRNA sense strand
ggaagaaggcauugaugaa

SEQ ID NO: 1921110 - RNA, 19 nt, Homo sapiens
  misc_RNA (1)...(19): siRNA sense strand
ggacauagacaucaacaca

SEQ ID NO: 1921111 - RNA, 19 nt, Homo sapiens
  misc_RNA (1)...(19): siRNA sense strand
gcaacugucaccaucuuua

SEQ ID NO: 1921112 - RNA, 19 nt, Homo sapiens
  misc_RNA (1)...(19): siRNA sense strand
gaacucaucuauaaguacu

SEQ ID NO: 1921113 - RNA, 19 nt, Homo sapiens
  misc_RNA (1)...(19): siRNA sense strand
gcagauuuguugugaagga

SEQ ID NO: 1921114 - RNA, 19 nt, Homo sapiens
  misc_RNA (1)...(19): siRNA sense strand
gcaaagcucggacauuaga

SEQ ID NO: 1921115 - RNA, 19 nt, Homo sapiens
  misc_RNA (1)...(19): siRNA sense strand
gcagcgagcacuuaaagaa

SEQ ID NO: 1921116 - RNA, 19 nt, Homo sapiens
  misc_RNA (1)...(19): siRNA sense strand
ggacucggcugaccucaag

SEQ ID NO: 1921117 - RNA, 19 nt, Homo sapiens
  misc_RNA (1)...(19): siRNA sense strand
ccagugagcugcguuacaa

SEQ ID NO: 1921118 - RNA, 19 nt, Homo sapiens
  misc_RNA (1)...(19): siRNA sense strand
aaacaggacuuugcugaug

SEQ ID NO: 1921119 - RNA, 19 nt, Homo sapiens
  misc_RNA (1)...(19): siRNA sense strand
cagaacucaucuauaagua

SEQ ID NO: 1921120 - RNA, 19 nt, Homo sapiens
  misc_RNA (1)...(19): siRNA sense strand
gaacuagacauaaucucaa

SEQ ID NO: 1921121 - RNA, 19 nt, Homo sapiens
  misc_RNA (1)...(19): siRNA sense strand
gugaucaucuucaaucuca

SEQ ID NO: 1921122 - RNA, 19 nt, Homo sapiens
  misc_RNA (1)...(19): siRNA sense strand
cagacaauguagagaaauu

SEQ ID NO: 1921123 - RNA, 19 nt, Homo sapiens
  misc_RNA (1)...(19): siRNA sense strand
gaaauugcccuuggaagug

SEQ ID NO: 1921124 - RNA, 19 nt, Homo sapiens
  misc_RNA (1)...(19): siRNA sense strand
gaagaaauugcccuuggaa

SEQ ID NO: 1921125 - RNA, 19 nt, Homo sapiens
  misc_RNA (1)...(19): siRNA sense strand
uagagaaauuugccauuga

SEQ ID NO: 1921126 - RNA, 19 nt, Homo sapiens
  misc_RNA (1)...(19): siRNA sense strand
gaaauuugccauugagaca

SEQ ID NO: 1921127 - RNA, 19 nt, Homo sapiens
  misc_RNA (1)...(19): siRNA sense strand
gaagcggagugucgcaguu

SEQ ID NO: 1921128 - RNA, 19 nt, Homo sapiens
  misc_RNA (1)...(19): siRNA sense strand
gaaaggcagugaggaugug

SEQ ID NO: 1921129 - RNA, 19 nt, Homo sapiens
  misc_RNA (1)...(19): siRNA sense strand
gaaccuaaggaacugaauu

SEQ ID NO: 1921130 - RNA, 19 nt, Homo sapiens
  misc_RNA (1)...(19): siRNA sense strand
gaagugaccaccagaccuu

SEQ ID NO: 1921131 - RNA, 19 nt, Homo sapiens
  misc_RNA (1)...(19): siRNA sense strand
aggcauugaugaagugaua

SEQ ID NO: 1921132 - RNA, 19 nt, Homo sapiens
  misc_RNA (1)...(19): siRNA sense strand
ccgaaaggcuccugucauc

SEQ ID NO: 1921133 - RNA, 19 nt, Homo sapiens
  misc_RNA (1)...(19): siRNA sense strand
uaaagaaccuaaggaacug

SEQ ID NO: 1921134 - RNA, 19 nt, Homo sapiens
  misc_RNA (1)...(19): siRNA sense strand
ccgcugugcucuauauuga

SEQ ID NO: 1921135 - RNA, 19 nt, Homo sapiens
  misc_RNA (1)...(19): siRNA sense strand
gggcagauuuguugugaag

SEQ ID NO: 1921136 - RNA, 19 nt, Homo sapiens
  misc_RNA (1)...(19): siRNA sense strand
gugaugacccaguuuauga

SEQ ID NO: 1921137 - RNA, 19 nt, Homo sapiens
  misc_RNA (1)...(19): siRNA sense strand
caugaacccugauccugaa

SEQ ID NO: 1921138 - RNA, 19 nt, Homo sapiens
  misc_RNA (1)...(19): siRNA sense strand
gcgcaguauuggaaggaua

SEQ ID NO: 1921139 - RNA, 19 nt, Homo sapiens
  misc_RNA (1)...(19): siRNA sense strand
gaagaaggcauugaugaag

SEQ ID NO: 1921140 - RNA, 19 nt, Homo sapiens
  misc_RNA (1)...(19): siRNA sense strand
acauagacaucaacacaga

SEQ ID NO: 1921141 - RNA, 19 nt, Homo sapiens
  misc_RNA (1)...(19): siRNA sense strand
gcaguacgggaauggguua

SEQ ID NO: 1921142 - RNA, 19 nt, Homo sapiens
  misc_RNA (1)...(19): siRNA sense strand
gaaagcagagcacguagca

SEQ ID NO: 1921143 - RNA, 19 nt, Homo sapiens
  misc_RNA (1)...(19): siRNA sense strand
cacagacaauguagagaaa

SEQ ID NO: 1921144 - RNA, 19 nt, Homo sapiens
  misc_RNA (1)...(19): siRNA sense strand
aggaguacuucaagcaaua

SEQ ID NO: 1921145 - RNA, 19 nt, Homo sapiens
  misc_RNA (1)...(19): siRNA sense strand
gcagcugagugcuaugaau

SEQ ID NO: 1921146 - RNA, 19 nt, Homo sapiens
  misc_RNA (1)...(19): siRNA sense strand
ggaucuggauggcauguuc

SEQ ID NO: 1921147 - RNA, 19 nt, Homo sapiens
  misc_RNA (1)...(19): siRNA sense strand
gagacagaacucaucuaua

SEQ ID NO: 1921148 - RNA, 19 nt, Homo sapiens
  misc_RNA (1)...(19): siRNA sense strand
ugagugcuaugaauucaga

SEQ ID NO: 1921149 - RNA, 19 nt, Homo sapiens
  misc_RNA (1)...(19): siRNA sense strand
ggagaaaggcagugaggau

SEQ ID NO: 1921150 - RNA, 19 nt, Homo sapiens
  misc_RNA (1)...(19): siRNA sense strand
gagaagccgaugucaagaa

SEQ ID NO: 1921151 - RNA, 19 nt, Homo sapiens
  misc_RNA (1)...(19): siRNA sense strand
gaucaucuucaaucucaaa

SEQ ID NO: 1921152 - RNA, 19 nt, Homo sapiens
  misc_RNA (1)...(19): siRNA sense strand
ggaaggugaaguuugacua

SEQ ID NO: 1921153 - RNA, 19 nt, Homo sapiens
  misc_RNA (1)...(19): siRNA sense strand
ugaagaaauugcccuugga

SEQ ID NO: 1921154 - RNA, 19 nt, Homo sapiens
  misc_RNA (1)...(19): siRNA sense strand
gcuggaggcccuucagaaa

SEQ ID NO: 1921155 - RNA, 19 nt, Homo sapiens
  misc_RNA (1)...(19): siRNA sense strand
ucacagacaauguagagaa

SEQ ID NO: 1921156 - RNA, 19 nt, Homo sapiens
  misc_RNA (1)...(19): siRNA sense strand
gagcuggacgccuacauug

SEQ ID NO: 1921157 - RNA, 19 nt, Homo sapiens
  misc_RNA (1)...(19): siRNA sense strand
agagagcucagaaagauaa

SEQ ID NO: 1921158 - RNA, 19 nt, Homo sapiens
  misc_RNA (1)...(19): siRNA sense strand
cagcaacugucaccaucuu

SEQ ID NO: 1921159 - RNA, 19 nt, Homo sapiens
  misc_RNA (1)...(19): siRNA sense strand
gaaacaacugacagagaaa

SEQ ID NO: 1921160 - RNA, 19 nt, Homo sapiens
  misc_RNA (1)...(19): siRNA sense strand
gaagagaagcagaaacaac

SEQ ID NO: 1921161 - RNA, 19 nt, Homo sapiens
  misc_RNA (1)...(19): siRNA sense strand
gcagagaagccgaugucaa

SEQ ID NO: 1921162 - RNA, 19 nt, Homo sapiens
  misc_RNA (1)...(19): siRNA sense strand
ucaagaagaggaucaagga

SEQ ID NO: 1921163 - RNA, 19 nt, Homo sapiens
  misc_RNA (1)...(19): siRNA sense strand
guccagauccuccggaauu

SEQ ID NO: 1921164 - RNA, 19 nt, Homo sapiens
  misc_RNA (1)...(19): siRNA sense strand
caaguucugggaugaguuu

SEQ ID NO: 1921165 - RNA, 19 nt, Homo sapiens
  misc_RNA (1)...(19): siRNA sense strand
uaauggagagccagaacua

SEQ ID NO: 1921166 - RNA, 19 nt, Homo sapiens
  misc_RNA (1)...(19): siRNA sense strand
gaggaugugcggcugauga

SEQ ID NO: 1921167 - RNA, 19 nt, Homo sapiens
  misc_RNA (1)...(19): siRNA sense strand
gaaaggcuccugucaucag

SEQ ID NO: 1921168 - RNA, 19 nt, Homo sapiens
  misc_RNA (1)...(19): siRNA sense strand
gugugaggcuucugaacaa

SEQ ID NO: 1921169 - RNA, 19 nt, Homo sapiens
  misc_RNA (1)...(19): siRNA sense strand
cagagaagccgaugucaag

SEQ ID NO: 1921170 - RNA, 19 nt, Homo sapiens
  misc_RNA (1)...(19): siRNA sense strand
ccaagcagcgagcacuuaa

SEQ ID NO: 1921171 - RNA, 19 nt, Homo sapiens
  misc_RNA (1)...(19): siRNA sense strand
ggaauuguuuacgguacuu

SEQ ID NO: 1921172 - RNA, 19 nt, Homo sapiens
  misc_RNA (1)...(19): siRNA sense strand
ggaauggauccaagugaug

SEQ ID NO: 1921173 - RNA, 19 nt, Homo sapiens
  misc_RNA (1)...(19): siRNA sense strand
cagcugaguucuguggaaa

SEQ ID NO: 1921174 - RNA, 19 nt, Homo sapiens
  misc_RNA (1)...(19): siRNA sense strand
gcacguuucaugaggaaga

SEQ ID NO: 1921175 - RNA, 19 nt, Homo sapiens
  misc_RNA (1)...(19): siRNA sense strand
gcugugcucuauauugauc

SEQ ID NO: 1921176 - RNA, 19 nt, Homo sapiens
  misc_RNA (1)...(19): siRNA sense strand
gagaagcagaaacaacuga

SEQ ID NO: 1921177 - RNA, 19 nt, Homo sapiens
  misc_RNA (1)...(19): siRNA sense strand
ugaagacgcaggaagagaa

SEQ ID NO: 1921178 - RNA, 19 nt, Homo sapiens
  misc_RNA (1)...(19): siRNA sense strand
ugacccaguuuaugaagau

SEQ ID NO: 1921179 - RNA, 19 nt, Homo sapiens
  misc_RNA (1)...(19): siRNA sense strand
ucgcagagcccuccacuuc

SEQ ID NO: 1921180 - RNA, 19 nt, Homo sapiens
  misc_RNA (1)...(19): siRNA sense strand
gacagagucacccaucaaa

SEQ ID NO: 1921181 - RNA, 19 nt, Homo sapiens
  misc_RNA (1)...(19): siRNA sense strand
caagugaugcugccagugu

SEQ ID NO: 1921182 - RNA, 19 nt, Homo sapiens
  misc_RNA (1)...(19): siRNA sense strand
gaggaggccagcacaucua

SEQ ID NO: 1921183 - RNA, 19 nt, Homo sapiens
  misc_RNA (1)...(19): siRNA sense strand
aaauugcccuuggaaguga

SEQ ID NO: 1921184 - RNA, 19 nt, Homo sapiens
  misc_RNA (1)...(19): siRNA sense strand
cuaaggaacugaauuuugu

SEQ ID NO: 1921185 - RNA, 19 nt, Homo sapiens
  misc_RNA (1)...(19): siRNA sense strand
uccaagagauauccagaug

SEQ ID NO: 1921186 - RNA, 19 nt, Homo sapiens
  misc_RNA (1)...(19): siRNA sense strand
ccggagagcuauggaaauc

SEQ ID NO: 1921187 - RNA, 19 nt, Homo sapiens
  misc_RNA (1)...(19): siRNA sense strand
ucaagagagcucagaaaga

SEQ ID NO: 1921188 - RNA, 19 nt, Homo sapiens
  misc_RNA (1)...(19): siRNA sense strand
agacuccaguggugaagaa

SEQ ID NO: 1921189 - RNA, 19 nt, Homo sapiens
  misc_RNA (1)...(19): siRNA sense strand
ccaccagaccuuccacuga

SEQ ID NO: 1921190 - RNA, 19 nt, Homo sapiens
  misc_RNA (1)...(19): siRNA sense strand
gcucggacauuagaaguac

SEQ ID NO: 1921191 - RNA, 19 nt, Homo sapiens
  misc_RNA (1)...(19): siRNA sense strand
ugaggaaccugugcguaga

SEQ ID NO: 1921192 - RNA, 19 nt, Homo sapiens
  misc_RNA (1)...(19): siRNA sense strand
ccaagcagaccugaagaaa

SEQ ID NO: 1921193 - RNA, 19 nt, Homo sapiens
  misc_RNA (1)...(19): siRNA sense strand
cagaaacaacugacagaga

SEQ ID NO: 1921194 - RNA, 19 nt, Homo sapiens
  misc_RNA (1)...(19): siRNA sense strand
uacaaacgccggagagcua

SEQ ID NO: 1921195 - RNA, 19 nt, Homo sapiens
  misc_RNA (1)...(19): siRNA sense strand
cagcugagugcuaugaauu

SEQ ID NO: 1921196 - RNA, 19 nt, Homo sapiens
  misc_RNA (1)...(19): siRNA sense strand
gcugagugcuaugaauuca

SEQ ID NO: 1921197 - RNA, 19 nt, Homo sapiens
  misc_RNA (1)...(19): siRNA sense strand
aaagaacacuggagaaaua

SEQ ID NO: 1921198 - RNA, 19 nt, Homo sapiens
  misc_RNA (1)...(19): siRNA sense strand
ggagaaauaugaaagagaa

SEQ ID NO: 1921199 - RNA, 19 nt, Homo sapiens
  misc_RNA (1)...(19): siRNA sense strand
gaaagaacacguaaaugua

SEQ ID NO: 1921200 - RNA, 19 nt, Homo sapiens
  misc_RNA (1)...(19): siRNA sense strand
ggaaauggcccuagaagaa

SEQ ID NO: 1921201 - RNA, 19 nt, Homo sapiens
  misc_RNA (1)...(19): siRNA sense strand
gaagggaauugaagaagaa

SEQ ID NO: 1921202 - RNA, 19 nt, Homo sapiens
  misc_RNA (1)...(19): siRNA sense strand
gaaacaagaucaaguaugc

SEQ ID NO: 1921203 - RNA, 19 nt, Homo sapiens
  misc_RNA (1)...(19): siRNA sense strand
cgagagauaugaagaaugu

SEQ ID NO: 1921204 - RNA, 19 nt, Homo sapiens
  misc_RNA (1)...(19): siRNA sense strand
ggaauacuuucugaugaua

SEQ ID NO: 1921205 - RNA, 19 nt, Homo sapiens
  misc_RNA (1)...(19): siRNA sense strand
ggacugaccggagcaaaua

SEQ ID NO: 1921206 - RNA, 19 nt, Homo sapiens
  misc_RNA (1)...(19): siRNA sense strand
gaaaguggccaggaaauga

SEQ ID NO: 1921207 - RNA, 19 nt, Homo sapiens
  misc_RNA (1)...(19): siRNA sense strand
uuaaagagcagucagauuu

SEQ ID NO: 1921208 - RNA, 19 nt, Homo sapiens
  misc_RNA (1)...(19): siRNA sense strand
ggucaucucugccaggaaa

SEQ ID NO: 1921209 - RNA, 19 nt, Homo sapiens
  misc_RNA (1)...(19): siRNA sense strand
acacguaaauguaguauuc

SEQ ID NO: 1921210 - RNA, 19 nt, Homo sapiens
  misc_RNA (1)...(19): siRNA sense strand
guggauaaguacaaagaua

SEQ ID NO: 1921211 - RNA, 19 nt, Homo sapiens
  misc_RNA (1)...(19): siRNA sense strand
gaacacuggagaaauauga

SEQ ID NO: 1921212 - RNA, 19 nt, Homo sapiens
  misc_RNA (1)...(19): siRNA sense strand
agagaaaccugguauuugu

SEQ ID NO: 1921213 - RNA, 19 nt, Homo sapiens
  misc_RNA (1)...(19): siRNA sense strand
ggagcacaguaaagaagua

SEQ ID NO: 1921214 - RNA, 19 nt, Homo sapiens
  misc_RNA (1)...(19): siRNA sense strand
gcacugugguccugggaaa

SEQ ID NO: 1921215 - RNA, 19 nt, Homo sapiens
  misc_RNA (1)...(19): siRNA sense strand
gaagaaaguggccaggaaa

SEQ ID NO: 1921216 - RNA, 19 nt, Homo sapiens
  misc_RNA (1)...(19): siRNA sense strand
aaaguaggcuucaguccaa

SEQ ID NO: 1921217 - RNA, 19 nt, Homo sapiens
  misc_RNA (1)...(19): siRNA sense strand
gagcacaaauccaucaucu

SEQ ID NO: 1921218 - RNA, 19 nt, Homo sapiens
  misc_RNA (1)...(19): siRNA sense strand
uacacuggauuaccauuua

SEQ ID NO: 1921219 - RNA, 19 nt, Homo sapiens
  misc_RNA (1)...(19): siRNA sense strand
gaaagagaagcuaaggaaa

SEQ ID NO: 1921220 - RNA, 19 nt, Homo sapiens
  misc_RNA (1)...(19): siRNA sense strand
caagcacaauguagaaguu

SEQ ID NO: 1921221 - RNA, 19 nt, Homo sapiens
  misc_RNA (1)...(19): siRNA sense strand
ugaaauuggucccagagaa

SEQ ID NO: 1921222 - RNA, 19 nt, Homo sapiens
  misc_RNA (1)...(19): siRNA sense strand
gaaauggcccuagaagaau

SEQ ID NO: 1921223 - RNA, 19 nt, Homo sapiens
  misc_RNA (1)...(19): siRNA sense strand
gguaagaccauugcaauug

SEQ ID NO: 1921224 - RNA, 19 nt, Homo sapiens
  misc_RNA (1)...(19): siRNA sense strand
ugaagggaauugaagaaga

SEQ ID NO: 1921225 - RNA, 19 nt, Homo sapiens
  misc_RNA (1)...(19): siRNA sense strand
caaacaagcacaauguaga

SEQ ID NO: 1921226 - RNA, 19 nt, Homo sapiens
  misc_RNA (1)...(19): siRNA sense strand
gaaacagaaaggaaacauu

SEQ ID NO: 1921227 - RNA, 19 nt, Homo sapiens
  misc_RNA (1)...(19): siRNA sense strand
cgaagugggucgugccuau

SEQ ID NO: 1921228 - RNA, 19 nt, Homo sapiens
  misc_RNA (1)...(19): siRNA sense strand
agaaagaacacguaaaugu

SEQ ID NO: 1921229 - RNA, 19 nt, Homo sapiens
  misc_RNA (1)...(19): siRNA sense strand
ugaaagagaagcuaaggaa

SEQ ID NO: 1921230 - RNA, 19 nt, Homo sapiens
  misc_RNA (1)...(19): siRNA sense strand
guucagauagugauuauug

SEQ ID NO: 1921231 - RNA, 19 nt, Homo sapiens
  misc_RNA (1)...(19): siRNA sense strand
gaccggagcaaauauuaaa

SEQ ID NO: 1921232 - RNA, 19 nt, Homo sapiens
  misc_RNA (1)...(19): siRNA sense strand
agaagaaaguggccaggaa

SEQ ID NO: 1921233 - RNA, 19 nt, Homo sapiens
  misc_RNA (1)...(19): siRNA sense strand
ggacgcacguuugauguuc

SEQ ID NO: 1921234 - RNA, 19 nt, Homo sapiens
  misc_RNA (1)...(19): siRNA sense strand
guaagaccauugcaauugg

SEQ ID NO: 1921235 - RNA, 19 nt, Homo sapiens
  misc_RNA (1)...(19): siRNA sense strand
caagaucaaguaugcauug

SEQ ID NO: 1921236 - RNA, 19 nt, Homo sapiens
  misc_RNA (1)...(19): siRNA sense strand
gaaauuggucccagagaag

SEQ ID NO: 1921237 - RNA, 19 nt, Homo sapiens
  misc_RNA (1)...(19): siRNA sense strand
ucgagacguucaaagauuu

SEQ ID NO: 1921238 - RNA, 19 nt, Homo sapiens
  misc_RNA (1)...(19): siRNA sense strand
gccguaagcucaacgucaa

SEQ ID NO: 1921239 - RNA, 19 nt, Homo sapiens
  misc_RNA (1)...(19): siRNA sense strand
gaugaucccacaguaaauu

SEQ ID NO: 1921240 - RNA, 19 nt, Homo sapiens
  misc_RNA (1)...(19): siRNA sense strand
gaaaaguucugaaauuggu

SEQ ID NO: 1921241 - RNA, 19 nt, Homo sapiens
  misc_RNA (1)...(19): siRNA sense strand
cacguuugauguucagaua

SEQ ID NO: 1921242 - RNA, 19 nt, Homo sapiens
  misc_RNA (1)...(19): siRNA sense strand
uguagacgcuggcaaguca

SEQ ID NO: 1921243 - RNA, 19 nt, Homo sapiens
  misc_RNA (1)...(19): siRNA sense strand
acaaagauaugggcacugu

SEQ ID NO: 1921244 - RNA, 19 nt, Homo sapiens
  misc_RNA (1)...(19): siRNA sense strand
ggacagacaagagaacaug

SEQ ID NO: 1921245 - RNA, 19 nt, Homo sapiens
  misc_RNA (1)...(19): siRNA sense strand
ugacuggaaugguugacaa

SEQ ID NO: 1921246 - RNA, 19 nt, Homo sapiens
  misc_RNA (1)...(19): siRNA sense strand
aaacaagcacaauguagaa

SEQ ID NO: 1921247 - RNA, 19 nt, Homo sapiens
  misc_RNA (1)...(19): siRNA sense strand
gccagcagcucgugaugau

SEQ ID NO: 1921248 - RNA, 19 nt, Homo sapiens
  misc_RNA (1)...(19): siRNA sense strand
guacacuggauuaccauuu

SEQ ID NO: 1921249 - RNA, 19 nt, Homo sapiens
  misc_RNA (1)...(19): siRNA sense strand
acagagaaaccugguauuu

SEQ ID NO: 1921250 - RNA, 19 nt, Homo sapiens
  misc_RNA (1)...(19): siRNA sense strand
cuuccaggauucauacuuu

SEQ ID NO: 1921251 - RNA, 19 nt, Homo sapiens
  misc_RNA (1)...(19): siRNA sense strand
uucagaaccuguuguagaa

SEQ ID NO: 1921252 - RNA, 19 nt, Homo sapiens
  misc_RNA (1)...(19): siRNA sense strand
gauguucagauagugauua

SEQ ID NO: 1921253 - RNA, 19 nt, Homo sapiens
  misc_RNA (1)...(19): siRNA sense strand
cuaguaaccucugccauuc

SEQ ID NO: 1921254 - RNA, 19 nt, Homo sapiens
  misc_RNA (1)...(19): siRNA sense strand
gagcaucgagagauaugaa

SEQ ID NO: 1921255 - RNA, 19 nt, Homo sapiens
  misc_RNA (1)...(19): siRNA sense strand
aaacagagaaaccugguau

SEQ ID NO: 1921256 - RNA, 19 nt, Homo sapiens
  misc_RNA (1)...(19): siRNA sense strand
cgugaaacaagaucaagua

SEQ ID NO: 1921257 - RNA, 19 nt, Homo sapiens
  misc_RNA (1)...(19): siRNA sense strand
cagagaaaccugguauuug

SEQ ID NO: 1921258 - RNA, 19 nt, Homo sapiens
  misc_RNA (1)...(19): siRNA sense strand
gcacaguaaagaaguaagu

SEQ ID NO: 1921259 - RNA, 19 nt, Homo sapiens
  misc_RNA (1)...(19): siRNA sense strand
ugaggaaguugagauaaca

SEQ ID NO: 1921260 - RNA, 19 nt, Homo sapiens
  misc_RNA (1)...(19): siRNA sense strand
aaagaacacguaaauguag

SEQ ID NO: 1921261 - RNA, 19 nt, Homo sapiens
  misc_RNA (1)...(19): siRNA sense strand
gaacuuucagaaccuguug

SEQ ID NO: 1921262 - RNA, 19 nt, Homo sapiens
  misc_RNA (1)...(19): siRNA sense strand
ccuaguaaccucugccauu

SEQ ID NO: 1921263 - RNA, 19 nt, Homo sapiens
  misc_RNA (1)...(19): siRNA sense strand
gaugauacugaaacugauu

SEQ ID NO: 1921264 - RNA, 19 nt, Homo sapiens
  misc_RNA (1)...(19): siRNA sense strand
ggauaaguacaaagauaug

SEQ ID NO: 1921265 - RNA, 19 nt, Homo sapiens
  misc_RNA (1)...(19): siRNA sense strand
ugccaauuguggauaagua

SEQ ID NO: 1921266 - RNA, 19 nt, Homo sapiens
  misc_RNA (1)...(19): siRNA sense strand
gacugccaauuguggauaa

SEQ ID NO: 1921267 - RNA, 19 nt, Homo sapiens
  misc_RNA (1)...(19): siRNA sense strand
aaucaugggagcacaguaa

SEQ ID NO: 1921268 - RNA, 19 nt, Homo sapiens
  misc_RNA (1)...(19): siRNA sense strand
aguaugcauugcucguuua

SEQ ID NO: 1921269 - RNA, 19 nt, Homo sapiens
  misc_RNA (1)...(19): siRNA sense strand
ccaagcccuucgugccuaa

SEQ ID NO: 1921270 - RNA, 19 nt, Homo sapiens
  misc_RNA (1)...(19): siRNA sense strand
guauuuguccugggccuua

SEQ ID NO: 1921271 - RNA, 19 nt, Homo sapiens
  misc_RNA (1)...(19): siRNA sense strand
uaagaccauugcaauugga

SEQ ID NO: 1921272 - RNA, 19 nt, Homo sapiens
  misc_RNA (1)...(19): siRNA sense strand
caggauucauacuuuguga

SEQ ID NO: 1921273 - RNA, 19 nt, Homo sapiens
  misc_RNA (1)...(19): siRNA sense strand
uggaauacuuucugaugau

SEQ ID NO: 1921274 - RNA, 19 nt, Homo sapiens
  misc_RNA (1)...(19): siRNA sense strand
gagcacaguaaagaaguaa

SEQ ID NO: 1921275 - RNA, 19 nt, Homo sapiens
  misc_RNA (1)...(19): siRNA sense strand
gccaaacaagcacaaugua

SEQ ID NO: 1921276 - RNA, 19 nt, Homo sapiens
  misc_RNA (1)...(19): siRNA sense strand
uggauaacuugccaaacuu

SEQ ID NO: 1921277 - RNA, 19 nt, Homo sapiens
  misc_RNA (1)...(19): siRNA sense strand
ggaacgagacaaggguaaa

SEQ ID NO: 1921278 - RNA, 19 nt, Homo sapiens
  misc_RNA (1)...(19): siRNA sense strand
gggaccagguggacaugga

SEQ ID NO: 1921279 - RNA, 19 nt, Homo sapiens
  misc_RNA (1)...(19): siRNA sense strand
gaacacguaaauguaguau

SEQ ID NO: 1921280 - RNA, 19 nt, Homo sapiens
  misc_RNA (1)...(19): siRNA sense strand
auccaaaucugugaucgua

SEQ ID NO: 1921281 - RNA, 19 nt, Homo sapiens
  misc_RNA (1)...(19): siRNA sense strand
gagaugaggguaagaccau

SEQ ID NO: 1921282 - RNA, 19 nt, Homo sapiens
  misc_RNA (1)...(19): siRNA sense strand
cucgagacguucaaagauu

SEQ ID NO: 1921283 - RNA, 19 nt, Homo sapiens
  misc_RNA (1)...(19): siRNA sense strand
aaguaugcauugcucguuu

SEQ ID NO: 1921284 - RNA, 19 nt, Homo sapiens
  misc_RNA (1)...(19): siRNA sense strand
ggugaaaaccucaaaauca

SEQ ID NO: 1921285 - RNA, 19 nt, Homo sapiens
  misc_RNA (1)...(19): siRNA sense strand
uuggaauacuuucugauga

SEQ ID NO: 1921286 - RNA, 19 nt, Homo sapiens
  misc_RNA (1)...(19): siRNA sense strand
uaaagagcagucagauuuc

SEQ ID NO: 1921287 - RNA, 19 nt, Homo sapiens
  misc_RNA (1)...(19): siRNA sense strand
ccaaacaagcacaauguag

SEQ ID NO: 1921288 - RNA, 19 nt, Homo sapiens
  misc_RNA (1)...(19): siRNA sense strand
acacuggauuaccauuuau

SEQ ID NO: 1921289 - RNA, 19 nt, Homo sapiens
  misc_RNA (1)...(19): siRNA sense strand
caaaagaacacuggagaaa

SEQ ID NO: 1921290 - RNA, 19 nt, Homo sapiens
  misc_RNA (1)...(19): siRNA sense strand
ggguaagaccauugcaauu

SEQ ID NO: 1921291 - RNA, 19 nt, Homo sapiens
  misc_RNA (1)...(19): siRNA sense strand
gaugggucguuuuacuuua

SEQ ID NO: 1921292 - RNA, 19 nt, Homo sapiens
  misc_RNA (1)...(19): siRNA sense strand
ggucgugccuauuuugaaa

SEQ ID NO: 1921293 - RNA, 19 nt, Homo sapiens
  misc_RNA (1)...(19): siRNA sense strand
gaagugggucgugccuauu

SEQ ID NO: 1921294 - RNA, 19 nt, Homo sapiens
  misc_RNA (1)...(19): siRNA sense strand
ccuaagaaagaacacguaa

SEQ ID NO: 1921295 - RNA, 19 nt, Homo sapiens
  misc_RNA (1)...(19): siRNA sense strand
ccaucugccucgagacguu

SEQ ID NO: 1921296 - RNA, 19 nt, Homo sapiens
  misc_RNA (1)...(19): siRNA sense strand
ggauucauacuuugugauc

SEQ ID NO: 1921297 - RNA, 19 nt, Homo sapiens
  misc_RNA (1)...(19): siRNA sense strand
aaagauggauacaaaguga

SEQ ID NO: 1921298 - RNA, 19 nt, Homo sapiens
  misc_RNA (1)...(19): siRNA sense strand
gaacagggagaacaucuga

SEQ ID NO: 1921299 - RNA, 19 nt, Homo sapiens
  misc_RNA (1)...(19): siRNA sense strand
caaggaaacuguucaugca

SEQ ID NO: 1921300 - RNA, 19 nt, Homo sapiens
  misc_RNA (1)...(19): siRNA sense strand
gacaucaacuggagagaga

SEQ ID NO: 1921301 - RNA, 19 nt, Homo sapiens
  misc_RNA (1)...(19): siRNA sense strand
guaagucacugaagauuuu

SEQ ID NO: 1921302 - RNA, 19 nt, Homo sapiens
  misc_RNA (1)...(19): siRNA sense strand
ccacaggccagaagcguua

SEQ ID NO: 1921303 - RNA, 19 nt, Homo sapiens
  misc_RNA (1)...(19): siRNA sense strand
gagaaacaaagaagggaua

SEQ ID NO: 1921304 - RNA, 19 nt, Homo sapiens
  misc_RNA (1)...(19): siRNA sense strand
cugaagauguuaaugaaga

SEQ ID NO: 1921305 - RNA, 19 nt, Homo sapiens
  misc_RNA (1)...(19): siRNA sense strand
aaacaauccaccucucuaa

SEQ ID NO: 1921306 - RNA, 19 nt, Homo sapiens
  misc_RNA (1)...(19): siRNA sense strand
caucacagaagccgccuua

SEQ ID NO: 1921307 - RNA, 19 nt, Homo sapiens
  misc_RNA (1)...(19): siRNA sense strand
ccaccucucuaaaucaaug

SEQ ID NO: 1921308 - RNA, 19 nt, Homo sapiens
  misc_RNA (1)...(19): siRNA sense strand
ggaaaacuccccaaaauca

SEQ ID NO: 1921309 - RNA, 19 nt, Homo sapiens
  misc_RNA (1)...(19): siRNA sense strand
gcauuacccuugcacuaca

SEQ ID NO: 1921310 - RNA, 19 nt, Homo sapiens
  misc_RNA (1)...(19): siRNA sense strand
caauccaccucucuaaauc

SEQ ID NO: 1921311 - RNA, 19 nt, Homo sapiens
  misc_RNA (1)...(19): siRNA sense strand
caaacaauccaccucucua

SEQ ID NO: 1921312 - RNA, 19 nt, Homo sapiens
  misc_RNA (1)...(19): siRNA sense strand
uaccagaauuccaaagguu

SEQ ID NO: 1921313 - RNA, 19 nt, Homo sapiens
  misc_RNA (1)...(19): siRNA sense strand
uuccaaagguucugauaga

SEQ ID NO: 1921314 - RNA, 19 nt, Homo sapiens
  misc_RNA (1)...(19): siRNA sense strand
ggaaacuguucaugcaaac

SEQ ID NO: 1921315 - RNA, 19 nt, Homo sapiens
  misc_RNA (1)...(19): siRNA sense strand
cggaucagcuggauacucu

SEQ ID NO: 1921316 - RNA, 19 nt, Homo sapiens
  misc_RNA (1)...(19): siRNA sense strand
gaaacaaagaagggauaaa

SEQ ID NO: 1921317 - RNA, 19 nt, Homo sapiens
  misc_RNA (1)...(19): siRNA sense strand
agauguaagucacugaaga

SEQ ID NO: 1921318 - RNA, 19 nt, Homo sapiens
  misc_RNA (1)...(19): siRNA sense strand
caccugaaaugcucauaca

SEQ ID NO: 1921319 - RNA, 19 nt, Homo sapiens
  misc_RNA (1)...(19): siRNA sense strand
aggaaacuguucaugcaaa

SEQ ID NO: 1921320 - RNA, 19 nt, Homo sapiens
  misc_RNA (1)...(19): siRNA sense strand
ggauaugcaucuaaaacaa

SEQ ID NO: 1921321 - RNA, 19 nt, Homo sapiens
  misc_RNA (1)...(19): siRNA sense strand
caaagauggauacaaagug

SEQ ID NO: 1921322 - RNA, 19 nt, Homo sapiens
  misc_RNA (1)...(19): siRNA sense strand
gaucagcuggauacucuug

SEQ ID NO: 1921323 - RNA, 19 nt, Homo sapiens
  misc_RNA (1)...(19): siRNA sense strand
cagcauuacccuugcacua

SEQ ID NO: 1921324 - RNA, 19 nt, Homo sapiens
  misc_RNA (1)...(19): siRNA sense strand
gaagaccaaggaaacuguu

SEQ ID NO: 1921325 - RNA, 19 nt, Homo sapiens
  misc_RNA (1)...(19): siRNA sense strand
aaacuggauaugcaucuaa

SEQ ID NO: 1921326 - RNA, 19 nt, Homo sapiens
  misc_RNA (1)...(19): siRNA sense strand
ugaacucacacauagcuaa

SEQ ID NO: 1921327 - RNA, 19 nt, Homo sapiens
  misc_RNA (1)...(19): siRNA sense strand
gauguaagucacugaagau

SEQ ID NO: 1921328 - RNA, 19 nt, Homo sapiens
  misc_RNA (1)...(19): siRNA sense strand
caagauguaagucacugaa

SEQ ID NO: 1921329 - RNA, 19 nt, Homo sapiens
  misc_RNA (1)...(19): siRNA sense strand
aaugcaaacuaucugaaga

SEQ ID NO: 1921330 - RNA, 19 nt, Homo sapiens
  misc_RNA (1)...(19): siRNA sense strand
cagcuggauacucuuguua

SEQ ID NO: 1921331 - RNA, 19 nt, Homo sapiens
  misc_RNA (1)...(19): siRNA sense strand
gaacucacacauagcuaag

SEQ ID NO: 1921332 - RNA, 19 nt, Homo sapiens
  misc_RNA (1)...(19): siRNA sense strand
ucaaagauggauacaaagu

SEQ ID NO: 1921333 - RNA, 19 nt, Homo sapiens
  misc_RNA (1)...(19): siRNA sense strand
acucacagaaacagcauua

SEQ ID NO: 1921334 - RNA, 19 nt, Homo sapiens
  misc_RNA (1)...(19): siRNA sense strand
ucauacagcauucccuuug

SEQ ID NO: 1921335 - RNA, 19 nt, Homo sapiens
  misc_RNA (1)...(19): siRNA sense strand
acaauccaccucucuaaau

SEQ ID NO: 1921336 - RNA, 19 nt, Homo sapiens
  misc_RNA (1)...(19): siRNA sense strand
uguccucacucaucacaga

SEQ ID NO: 1921337 - RNA, 19 nt, Homo sapiens
  misc_RNA (1)...(19): siRNA sense strand
cagguguccucacucauca

SEQ ID NO: 1921338 - RNA, 19 nt, Homo sapiens
  misc_RNA (1)...(19): siRNA sense strand
ucagcuggauacucuuguu

SEQ ID NO: 1921339 - RNA, 19 nt, Homo sapiens
  misc_RNA (1)...(19): siRNA sense strand
cgccuuagcucccguuacu

SEQ ID NO: 1921340 - RNA, 19 nt, Homo sapiens
  misc_RNA (1)...(19): siRNA sense strand
gcugcaagaguuauggaaa

SEQ ID NO: 1921341 - RNA, 19 nt, Homo sapiens
  misc_RNA (1)...(19): siRNA sense strand
gaagaacagggagaacauc

SEQ ID NO: 1921342 - RNA, 19 nt, Homo sapiens
  misc_RNA (1)...(19): siRNA sense strand
uguaagucacugaagauuu

SEQ ID NO: 1921343 - RNA, 19 nt, Homo sapiens
  misc_RNA (1)...(19): siRNA sense strand
gauagaaucaaagauggau

SEQ ID NO: 1921344 - RNA, 19 nt, Homo sapiens
  misc_RNA (1)...(19): siRNA sense strand
gaaucaaagauggauacaa

SEQ ID NO: 1921345 - RNA, 19 nt, Homo sapiens
  misc_RNA (1)...(19): siRNA sense strand
aaacagcauuacccuugca

SEQ ID NO: 1921346 - RNA, 19 nt, Homo sapiens
  misc_RNA (1)...(19): siRNA sense strand
ccagguguccucacucauc

SEQ ID NO: 1921347 - RNA, 19 nt, Homo sapiens
  misc_RNA (1)...(19): siRNA sense strand
gaaaacuccccaaaaucaa

SEQ ID NO: 1921348 - RNA, 19 nt, Homo sapiens
  misc_RNA (1)...(19): siRNA sense strand
cauacagcauucccuuugg

SEQ ID NO: 1921349 - RNA, 19 nt, Homo sapiens
  misc_RNA (1)...(19): siRNA sense strand
ugaagaggcaguacaugca

SEQ ID NO: 1921350 - RNA, 19 nt, Homo sapiens
  misc_RNA (1)...(19): siRNA sense strand
uaaugaagaggcaguacau

SEQ ID NO: 1921351 - RNA, 19 nt, Homo sapiens
  misc_RNA (1)...(19): siRNA sense strand
ugaagauguuaaugaagag

SEQ ID NO: 1921352 - RNA, 19 nt, Homo sapiens
  misc_RNA (1)...(19): siRNA sense strand
cuucagcacagcucacaaa

SEQ ID NO: 1921353 - RNA, 19 nt, Homo sapiens
  misc_RNA (1)...(19): siRNA sense strand
cagcacagcucacaaaagc

SEQ ID NO: 1921354 - RNA, 19 nt, Homo sapiens
  misc_RNA (1)...(19): siRNA sense strand
ugaagaacagggagaacau

SEQ ID NO: 1921355 - RNA, 19 nt, Homo sapiens
  misc_RNA (1)...(19): siRNA sense strand
aacuggauaugcaucuaaa

SEQ ID NO: 1921356 - RNA, 19 nt, Homo sapiens
  misc_RNA (1)...(19): siRNA sense strand
uuaccagaauuccaaaggu

SEQ ID NO: 1921357 - RNA, 19 nt, Homo sapiens
  misc_RNA (1)...(19): siRNA sense strand
gcaccugaaaugcucauac

SEQ ID NO: 1921358 - RNA, 19 nt, Homo sapiens
  misc_RNA (1)...(19): siRNA sense strand
agaaacaaagaagggauaa

SEQ ID NO: 1921359 - RNA, 19 nt, Homo sapiens
  misc_RNA (1)...(19): siRNA sense strand
cguuaccugugcagcauug

SEQ ID NO: 1921360 - RNA, 19 nt, Homo sapiens
  misc_RNA (1)...(19): siRNA sense strand
gauacucuuguuaccagaa

SEQ ID NO: 1921361 - RNA, 19 nt, Homo sapiens
  misc_RNA (1)...(19): siRNA sense strand
ccagugagaaacaaagaag

SEQ ID NO: 1921362 - RNA, 19 nt, Homo sapiens
  misc_RNA (1)...(19): siRNA sense strand
cacagaagccgccuuagcu

SEQ ID NO: 1921363 - RNA, 19 nt, Homo sapiens
  misc_RNA (1)...(19): siRNA sense strand
aaagccagguguccucacu

SEQ ID NO: 1921364 - RNA, 19 nt, Homo sapiens
  misc_RNA (1)...(19): siRNA sense strand
aacaguuucuucagaugau

SEQ ID NO: 1921365 - RNA, 19 nt, Homo sapiens
  misc_RNA (1)...(19): siRNA sense strand
ucccuuugguggccaguga

SEQ ID NO: 1921366 - RNA, 19 nt, Homo sapiens
  misc_RNA (1)...(19): siRNA sense strand
ucaaacaauccaccucucu

SEQ ID NO: 1921367 - RNA, 19 nt, Homo sapiens
  misc_RNA (1)...(19): siRNA sense strand
ggugccagcuggacaaauu

SEQ ID NO: 1921368 - RNA, 19 nt, Homo sapiens
  misc_RNA (1)...(19): siRNA sense strand
gaggaccacugccggauga

SEQ ID NO: 1921369 - RNA, 19 nt, Homo sapiens
  misc_RNA (1)...(19): siRNA sense strand
ggacaaugaaggacgauga

SEQ ID NO: 1921370 - RNA, 19 nt, Homo sapiens
  misc_RNA (1)...(19): siRNA sense strand
gaugagaccuucgagaucu

SEQ ID NO: 1921371 - RNA, 19 nt, Homo sapiens
  misc_RNA (1)...(19): siRNA sense strand
ucgaggaccuggaggaaga

SEQ ID NO: 1921372 - RNA, 19 nt, Homo sapiens
  misc_RNA (1)...(19): siRNA sense strand
ggacaaauucaucucuucu

SEQ ID NO: 1921373 - RNA, 19 nt, Homo sapiens
  misc_RNA (1)...(19): siRNA sense strand
agucggaggcggacaauga

SEQ ID NO: 1921374 - RNA, 19 nt, Homo sapiens
  misc_RNA (1)...(19): siRNA sense strand
ccaccuagacccacagauc

SEQ ID NO: 1921375 - RNA, 19 nt, Homo sapiens
  misc_RNA (1)...(19): siRNA sense strand
gaucuccauucccuucgau

SEQ ID NO: 1921376 - RNA, 19 nt, Homo sapiens
  misc_RNA (1)...(19): siRNA sense strand
ggaggcggacaaugaagga

SEQ ID NO: 1921377 - RNA, 19 nt, Homo sapiens
  misc_RNA (1)...(19): siRNA sense strand
uggacaaauucaucucuuc

SEQ ID NO: 1921378 - RNA, 19 nt, Homo sapiens
  misc_RNA (1)...(19): siRNA sense strand
gaccuucgagaucuccauu

SEQ ID NO: 1921379 - RNA, 19 nt, Homo sapiens
  misc_RNA (1)...(19): siRNA sense strand
gacaaauucaucucuucug

SEQ ID NO: 1921380 - RNA, 19 nt, Homo sapiens
  misc_RNA (1)...(19): siRNA sense strand
ccuagacccacagaucuuu

SEQ ID NO: 1921381 - RNA, 19 nt, Homo sapiens
  misc_RNA (1)...(19): siRNA sense strand
ggaacuccuggcugcagaa

SEQ ID NO: 1921382 - RNA, 19 nt, Homo sapiens
  misc_RNA (1)...(19): siRNA sense strand
cgaugagaccuucgagauc

SEQ ID NO: 1921383 - RNA, 19 nt, Homo sapiens
  misc_RNA (1)...(19): siRNA sense strand
gaaaggaaauacuggaaua

SEQ ID NO: 1921384 - RNA, 19 nt, Homo sapiens
  misc_RNA (1)...(19): siRNA sense strand
aaagauggcuuaccaaaua

SEQ ID NO: 1921385 - RNA, 19 nt, Homo sapiens
  misc_RNA (1)...(19): siRNA sense strand
gcacauugcuuuauaaaca

SEQ ID NO: 1921386 - RNA, 19 nt, Homo sapiens
  misc_RNA (1)...(19): siRNA sense strand
gaagauggcccuuguacua

SEQ ID NO: 1921387 - RNA, 19 nt, Homo sapiens
  misc_RNA (1)...(19): siRNA sense strand
agagauaucugcaagaaua

SEQ ID NO: 1921388 - RNA, 19 nt, Homo sapiens
  misc_RNA (1)...(19): siRNA sense strand
gaaaauggcugacuuaugu

SEQ ID NO: 1921389 - RNA, 19 nt, Homo sapiens
  misc_RNA (1)...(19): siRNA sense strand
aaacaaagaugccaaacuu

SEQ ID NO: 1921390 - RNA, 19 nt, Homo sapiens
  misc_RNA (1)...(19): siRNA sense strand
acagagagcugaaucaauu

SEQ ID NO: 1921391 - RNA, 19 nt, Homo sapiens
  misc_RNA (1)...(19): siRNA sense strand
gauugaagguuguuucuaa

SEQ ID NO: 1921392 - RNA, 19 nt, Homo sapiens
  misc_RNA (1)...(19): siRNA sense strand
gauuggagcugaaguuauu

SEQ ID NO: 1921393 - RNA, 19 nt, Homo sapiens
  misc_RNA (1)...(19): siRNA sense strand
ggccauauccugcucauua

SEQ ID NO: 1921394 - RNA, 19 nt, Homo sapiens
  misc_RNA (1)...(19): siRNA sense strand
ggaccaaguuacaguguuu

SEQ ID NO: 1921395 - RNA, 19 nt, Homo sapiens
  misc_RNA (1)...(19): siRNA sense strand
guacagcacucauaucauc

SEQ ID NO: 1921396 - RNA, 19 nt, Homo sapiens
  misc_RNA (1)...(19): siRNA sense strand
gcagugagguagauuugaa

SEQ ID NO: 1921397 - RNA, 19 nt, Homo sapiens
  misc_RNA (1)...(19): siRNA sense strand
gaagguguccaugaaauua

SEQ ID NO: 1921398 - RNA, 19 nt, Homo sapiens
  misc_RNA (1)...(19): siRNA sense strand
gcagaaggauuaguagcua

SEQ ID NO: 1921399 - RNA, 19 nt, Homo sapiens
  misc_RNA (1)...(19): siRNA sense strand
gauaucaucuuuggaaaug

SEQ ID NO: 1921400 - RNA, 19 nt, Homo sapiens
  misc_RNA (1)...(19): siRNA sense strand
gugcaaguaucaaguagua

SEQ ID NO: 1921401 - RNA, 19 nt, Homo sapiens
  misc_RNA (1)...(19): siRNA sense strand
ggaaaaggcuggucucuug

SEQ ID NO: 1921402 - RNA, 19 nt, Homo sapiens
  misc_RNA (1)...(19): siRNA sense strand
gaaccacuauuuagcaugu

SEQ ID NO: 1921403 - RNA, 19 nt, Homo sapiens
  misc_RNA (1)...(19): siRNA sense strand
gcaauaagaugugagaaag

SEQ ID NO: 1921404 - RNA, 19 nt, Homo sapiens
  misc_RNA (1)...(19): siRNA sense strand
gcaauuaaacgaucagcua

SEQ ID NO: 1921405 - RNA, 19 nt, Homo sapiens
  misc_RNA (1)...(19): siRNA sense strand
ugaagaagguguccaugaa

SEQ ID NO: 1921406 - RNA, 19 nt, Homo sapiens
  misc_RNA (1)...(19): siRNA sense strand
gcaauaugcuagucuuugu

SEQ ID NO: 1921407 - RNA, 19 nt, Homo sapiens
  misc_RNA (1)...(19): siRNA sense strand
gagcauuaaugaccugaaa

SEQ ID NO: 1921408 - RNA, 19 nt, Homo sapiens
  misc_RNA (1)...(19): siRNA sense strand
caugagagauccuaauaau

SEQ ID NO: 1921409 - RNA, 19 nt, Homo sapiens
  misc_RNA (1)...(19): siRNA sense strand
guccagaguucuuuacuuu

SEQ ID NO: 1921410 - RNA, 19 nt, Homo sapiens
  misc_RNA (1)...(19): siRNA sense strand
gauagaauucgacaguuua

SEQ ID NO: 1921411 - RNA, 19 nt, Homo sapiens
  misc_RNA (1)...(19): siRNA sense strand
gaacucaggguugcuauuu

SEQ ID NO: 1921412 - RNA, 19 nt, Homo sapiens
  misc_RNA (1)...(19): siRNA sense strand
cagaggaucacauuaauuu

SEQ ID NO: 1921413 - RNA, 19 nt, Homo sapiens
  misc_RNA (1)...(19): siRNA sense strand
gcacucauaucaucagcuu

SEQ ID NO: 1921414 - RNA, 19 nt, Homo sapiens
  misc_RNA (1)...(19): siRNA sense strand
gagguguucuuuauacauu

SEQ ID NO: 1921415 - RNA, 19 nt, Homo sapiens
  misc_RNA (1)...(19): siRNA sense strand
caggguugcuauuuacuua

SEQ ID NO: 1921416 - RNA, 19 nt, Homo sapiens
  misc_RNA (1)...(19): siRNA sense strand
gagguagauuugaauauug

SEQ ID NO: 1921417 - RNA, 19 nt, Homo sapiens
  misc_RNA (1)...(19): siRNA sense strand
acaagcagcuacucaugua

SEQ ID NO: 1921418 - RNA, 19 nt, Homo sapiens
  misc_RNA (1)...(19): siRNA sense strand
auacagcaauucagacaua

SEQ ID NO: 1921419 - RNA, 19 nt, Homo sapiens
  misc_RNA (1)...(19): siRNA sense strand
gcuuacaguugcuaucaua

SEQ ID NO: 1921420 - RNA, 19 nt, Homo sapiens
  misc_RNA (1)...(19): siRNA sense strand
ugagagauccuaauaauca

SEQ ID NO: 1921421 - RNA, 19 nt, Homo sapiens
  misc_RNA (1)...(19): siRNA sense strand
ugauguagaugucauaguu

SEQ ID NO: 1921422 - RNA, 19 nt, Homo sapiens
  misc_RNA (1)...(19): siRNA sense strand
gaagacaguaaacagcuua

SEQ ID NO: 1921423 - RNA, 19 nt, Homo sapiens
  misc_RNA (1)...(19): siRNA sense strand
ggcugcagcucuccuaaua

SEQ ID NO: 1921424 - RNA, 19 nt, Homo sapiens
  misc_RNA (1)...(19): siRNA sense strand
gaauucagcacaacaguga

SEQ ID NO: 1921425 - RNA, 19 nt, Homo sapiens
  misc_RNA (1)...(19): siRNA sense strand
gaaguuucauccuaaagau

SEQ ID NO: 1921426 - RNA, 19 nt, Homo sapiens
  misc_RNA (1)...(19): siRNA sense strand
gaaagauguguguugcuua

SEQ ID NO: 1921427 - RNA, 19 nt, Homo sapiens
  misc_RNA (1)...(19): siRNA sense strand
ugauagaauucgacaguuu

SEQ ID NO: 1921428 - RNA, 19 nt, Homo sapiens
  misc_RNA (1)...(19): siRNA sense strand
gaaacaagucagcagaauu

SEQ ID NO: 1921429 - RNA, 19 nt, Homo sapiens
  misc_RNA (1)...(19): siRNA sense strand
uaggguauuugccaaguua

SEQ ID NO: 1921430 - RNA, 19 nt, Homo sapiens
  misc_RNA (1)...(19): siRNA sense strand
gaagaagguguccaugaaa

SEQ ID NO: 1921431 - RNA, 19 nt, Homo sapiens
  misc_RNA (1)...(19): siRNA sense strand
gguguuggcugaaagaugu

SEQ ID NO: 1921432 - RNA, 19 nt, Homo sapiens
  misc_RNA (1)...(19): siRNA sense strand
gaacagagagcugaaucaa

SEQ ID NO: 1921433 - RNA, 19 nt, Homo sapiens
  misc_RNA (1)...(19): siRNA sense strand
guaaacagcuuauuuugga

SEQ ID NO: 1921434 - RNA, 19 nt, Homo sapiens
  misc_RNA (1)...(19): siRNA sense strand
uaaacaaucugcugcucaa

SEQ ID NO: 1921435 - RNA, 19 nt, Homo sapiens
  misc_RNA (1)...(19): siRNA sense strand
gaacagauaccagauccuu

SEQ ID NO: 1921436 - RNA, 19 nt, Homo sapiens
  misc_RNA (1)...(19): siRNA sense strand
gacaguaaacagcuuauuu

SEQ ID NO: 1921437 - RNA, 19 nt, Homo sapiens
  misc_RNA (1)...(19): siRNA sense strand
cagaagaaaugccacuguu

SEQ ID NO: 1921438 - RNA, 19 nt, Homo sapiens
  misc_RNA (1)...(19): siRNA sense strand
ggaguuguuuauaaucuug

SEQ ID NO: 1921439 - RNA, 19 nt, Homo sapiens
  misc_RNA (1)...(19): siRNA sense strand
gaaaggauaaugaagaagu

SEQ ID NO: 1921440 - RNA, 19 nt, Homo sapiens
  misc_RNA (1)...(19): siRNA sense strand
gaacaguuacucagauaau

SEQ ID NO: 1921441 - RNA, 19 nt, Homo sapiens
  misc_RNA (1)...(19): siRNA sense strand
gucaagccaugcaaguuua

SEQ ID NO: 1921442 - RNA, 19 nt, Homo sapiens
  misc_RNA (1)...(19): siRNA sense strand
uuacauggauacagcaauu

SEQ ID NO: 1921443 - RNA, 19 nt, Homo sapiens
  misc_RNA (1)...(19): siRNA sense strand
gaauguaagucagcuguca

SEQ ID NO: 1921444 - RNA, 19 nt, Homo sapiens
  misc_RNA (1)...(19): siRNA sense strand
caaguuaucggaccaaguu

SEQ ID NO: 1921445 - RNA, 19 nt, Homo sapiens
  misc_RNA (1)...(19): siRNA sense strand
gagcagcuuucuagucuca

SEQ ID NO: 1921446 - RNA, 19 nt, Homo sapiens
  misc_RNA (1)...(19): siRNA sense strand
caccagaaauggaacuauu

SEQ ID NO: 1921447 - RNA, 19 nt, Homo sapiens
  misc_RNA (1)...(19): siRNA sense strand
gucagcaaauguccacuua

SEQ ID NO: 1921448 - RNA, 19 nt, Homo sapiens
  misc_RNA (1)...(19): siRNA sense strand
gccacugucugcagaagua

SEQ ID NO: 1921449 - RNA, 19 nt, Homo sapiens
  misc_RNA (1)...(19): siRNA sense strand
caucaucaguaauguguga

SEQ ID NO: 1921450 - RNA, 19 nt, Homo sapiens
  misc_RNA (1)...(19): siRNA sense strand
gauggcccuuguacuauaa

SEQ ID NO: 1921451 - RNA, 19 nt, Homo sapiens
  misc_RNA (1)...(19): siRNA sense strand
ggaagacaguaaacagcuu

SEQ ID NO: 1921452 - RNA, 19 nt, Homo sapiens
  misc_RNA (1)...(19): siRNA sense strand
caaguuguuucugugguua

SEQ ID NO: 1921453 - RNA, 19 nt, Homo sapiens
  misc_RNA (1)...(19): siRNA sense strand
gcaguaagcaacauuguca

SEQ ID NO: 1921454 - RNA, 19 nt, Homo sapiens
  misc_RNA (1)...(19): siRNA sense strand
gaucagcuaauaucaagaa

SEQ ID NO: 1921455 - RNA, 19 nt, Homo sapiens
  misc_RNA (1)...(19): siRNA sense strand
gcacaacagugauuauucc

SEQ ID NO: 1921456 - RNA, 19 nt, Homo sapiens
  misc_RNA (1)...(19): siRNA sense strand
ggaaauggcagcagugucu

SEQ ID NO: 1921457 - RNA, 19 nt, Homo sapiens
  misc_RNA (1)...(19): siRNA sense strand
gcaguaaaguuccagaaaa

SEQ ID NO: 1921458 - RNA, 19 nt, Homo sapiens
  misc_RNA (1)...(19): siRNA sense strand
gagcugaaucaauuuauga

SEQ ID NO: 1921459 - RNA, 19 nt, Homo sapiens
  misc_RNA (1)...(19): siRNA sense strand
aagaucugcuucaucguua

SEQ ID NO: 1921460 - RNA, 19 nt, Homo sapiens
  misc_RNA (1)...(19): siRNA sense strand
caaguuacaguguuugaaa

SEQ ID NO: 1921461 - RNA, 19 nt, Homo sapiens
  misc_RNA (1)...(19): siRNA sense strand
ggacaaacacaguauaaac

SEQ ID NO: 1921462 - RNA, 19 nt, Homo sapiens
  misc_RNA (1)...(19): siRNA sense strand
ccacauagugcaaguauca

SEQ ID NO: 1921463 - RNA, 19 nt, Homo sapiens
  misc_RNA (1)...(19): siRNA sense strand
gagggaagcaggauuuaga

SEQ ID NO: 1921464 - RNA, 19 nt, Homo sapiens
  misc_RNA (1)...(19): siRNA sense strand
ggaaguuucauccuaaaga

SEQ ID NO: 1921465 - RNA, 19 nt, Homo sapiens
  misc_RNA (1)...(19): siRNA sense strand
gggcuuuccucagagaaua

SEQ ID NO: 1921466 - RNA, 19 nt, Homo sapiens
  misc_RNA (1)...(19): siRNA sense strand
uggaaaggauaaugaagaa

SEQ ID NO: 1921467 - RNA, 19 nt, Homo sapiens
  misc_RNA (1)...(19): siRNA sense strand
aaacaagucagcagaauuc

SEQ ID NO: 1921468 - RNA, 19 nt, Homo sapiens
  misc_RNA (1)...(19): siRNA sense strand
uagcaaacacuggaaguua

SEQ ID NO: 1921469 - RNA, 19 nt, Homo sapiens
  misc_RNA (1)...(19): siRNA sense strand
gaugcuaccucugugugua

SEQ ID NO: 1921470 - RNA, 19 nt, Homo sapiens
  misc_RNA (1)...(19): siRNA sense strand
ggcgagaacuugaggaaca

SEQ ID NO: 1921471 - RNA, 19 nt, Homo sapiens
  misc_RNA (1)...(19): siRNA sense strand
caaacacaguauaaacuuc

SEQ ID NO: 1921472 - RNA, 19 nt, Homo sapiens
  misc_RNA (1)...(19): siRNA sense strand
gaaggcauacguuguggaa

SEQ ID NO: 1921473 - RNA, 19 nt, Homo sapiens
  misc_RNA (1)...(19): siRNA sense strand
guuaaggaauuccacauag

SEQ ID NO: 1921474 - RNA, 19 nt, Homo sapiens
  misc_RNA (1)...(19): siRNA sense strand
gaaggcagaggaggcaaua

SEQ ID NO: 1921475 - RNA, 19 nt, Homo sapiens
  misc_RNA (1)...(19): siRNA sense strand
gacaguagauggcauuggu

SEQ ID NO: 1921476 - RNA, 19 nt, Homo sapiens
  misc_RNA (1)...(19): siRNA sense strand
caagugaaccugaaaugau

SEQ ID NO: 1921477 - RNA, 19 nt, Homo sapiens
  misc_RNA (1)...(19): siRNA sense strand
cuccaugguuugagucuua

SEQ ID NO: 1921478 - RNA, 19 nt, Homo sapiens
  misc_RNA (1)...(19): siRNA sense strand
cauaaucacagaagaaaug

SEQ ID NO: 1921479 - RNA, 19 nt, Homo sapiens
  misc_RNA (1)...(19): siRNA sense strand
gagagauccuaauaaucaa

SEQ ID NO: 1921480 - RNA, 19 nt, Homo sapiens
  misc_RNA (1)...(19): siRNA sense strand
ugaaagauguguguugcuu

SEQ ID NO: 1921481 - RNA, 19 nt, Homo sapiens
  misc_RNA (1)...(19): siRNA sense strand
gcagcuuucuagucucauu

SEQ ID NO: 1921482 - RNA, 19 nt, Homo sapiens
  misc_RNA (1)...(19): siRNA sense strand
ucacuacccagaaucauuu

SEQ ID NO: 1921483 - RNA, 19 nt, Homo sapiens
  misc_RNA (1)...(19): siRNA sense strand
gaacugaugugguuauaaa

SEQ ID NO: 1921484 - RNA, 19 nt, Homo sapiens
  misc_RNA (1)...(19): siRNA sense strand
gaacaacacggcagugaua

SEQ ID NO: 1921485 - RNA, 19 nt, Homo sapiens
  misc_RNA (1)...(19): siRNA sense strand
caaacaagauuaccgaauu

SEQ ID NO: 1921486 - RNA, 19 nt, Homo sapiens
  misc_RNA (1)...(19): siRNA sense strand
ggacaugcuuuaaauaaga

SEQ ID NO: 1921487 - RNA, 19 nt, Homo sapiens
  misc_RNA (1)...(19): siRNA sense strand
gcaaagagccuccguaugg

SEQ ID NO: 1921488 - RNA, 19 nt, Homo sapiens
  misc_RNA (1)...(19): siRNA sense strand
caaugaagcuguuugcuau

SEQ ID NO: 1921489 - RNA, 19 nt, Homo sapiens
  misc_RNA (1)...(19): siRNA sense strand
gaaacaacauuugagacua

SEQ ID NO: 1921490 - RNA, 19 nt, Homo sapiens
  misc_RNA (1)...(19): siRNA sense strand
gccaaucgauuccauauga

SEQ ID NO: 1921491 - RNA, 19 nt, Homo sapiens
  misc_RNA (1)...(19): siRNA sense strand
gauagaaccuggacugcuu

SEQ ID NO: 1921492 - RNA, 19 nt, Homo sapiens
  misc_RNA (1)...(19): siRNA sense strand
gagacuauuucaacacuuu

SEQ ID NO: 1921493 - RNA, 19 nt, Homo sapiens
  misc_RNA (1)...(19): siRNA sense strand
gaaauuccucaucaacuua

SEQ ID NO: 1921494 - RNA, 19 nt, Homo sapiens
  misc_RNA (1)...(19): siRNA sense strand
ggaagaagcuguggagagu

SEQ ID NO: 1921495 - RNA, 19 nt, Homo sapiens
  misc_RNA (1)...(19): siRNA sense strand
cagcacauaccuuauauua

SEQ ID NO: 1921496 - RNA, 19 nt, Homo sapiens
  misc_RNA (1)...(19): siRNA sense strand
gcaugucagucguucaaua

SEQ ID NO: 1921497 - RNA, 19 nt, Homo sapiens
  misc_RNA (1)...(19): siRNA sense strand
gaagagagcaccuuauaag

SEQ ID NO: 1921498 - RNA, 19 nt, Homo sapiens
  misc_RNA (1)...(19): siRNA sense strand
aaacgacgcucuugucaga

SEQ ID NO: 1921499 - RNA, 19 nt, Homo sapiens
  misc_RNA (1)...(19): siRNA sense strand
gaaagaaagcuagaucauu

SEQ ID NO: 1921500 - RNA, 19 nt, Homo sapiens
  misc_RNA (1)...(19): siRNA sense strand
ccacugagcauauuguuaa

SEQ ID NO: 1921501 - RNA, 19 nt, Homo sapiens
  misc_RNA (1)...(19): siRNA sense strand
gaggagaaauuggugcaua

SEQ ID NO: 1921502 - RNA, 19 nt, Homo sapiens
  misc_RNA (1)...(19): siRNA sense strand
gaacuuuauucauggcaaa

SEQ ID NO: 1921503 - RNA, 19 nt, Homo sapiens
  misc_RNA (1)...(19): siRNA sense strand
aaaguaugcuguugugaaa

SEQ ID NO: 1921504 - RNA, 19 nt, Homo sapiens
  misc_RNA (1)...(19): siRNA sense strand
agagaugacugcagaugua

SEQ ID NO: 1921505 - RNA, 19 nt, Homo sapiens
  misc_RNA (1)...(19): siRNA sense strand
gagagcaccuuauaagaca

SEQ ID NO: 1921506 - RNA, 19 nt, Homo sapiens
  misc_RNA (1)...(19): siRNA sense strand
gagcagauuuguacuugga

SEQ ID NO: 1921507 - RNA, 19 nt, Homo sapiens
  misc_RNA (1)...(19): siRNA sense strand
gaaauuuauuccuggauca

SEQ ID NO: 1921508 - RNA, 19 nt, Homo sapiens
  misc_RNA (1)...(19): siRNA sense strand
aaagcuagaucauuugcua

SEQ ID NO: 1921509 - RNA, 19 nt, Homo sapiens
  misc_RNA (1)...(19): siRNA sense strand
ggaagagagcaccuuauaa

SEQ ID NO: 1921510 - RNA, 19 nt, Homo sapiens
  misc_RNA (1)...(19): siRNA sense strand
uaucagaacuugguagaga

SEQ ID NO: 1921511 - RNA, 19 nt, Homo sapiens
  misc_RNA (1)...(19): siRNA sense strand
gcagcugaguacaagguua

SEQ ID NO: 1921512 - RNA, 19 nt, Homo sapiens
  misc_RNA (1)...(19): siRNA sense strand
gaugauauuagcaagcuua

SEQ ID NO: 1921513 - RNA, 19 nt, Homo sapiens
  misc_RNA (1)...(19): siRNA sense strand
gaugaauacuugaucaaca

SEQ ID NO: 1921514 - RNA, 19 nt, Homo sapiens
  misc_RNA (1)...(19): siRNA sense strand
uaaagcagccauugagaaa

SEQ ID NO: 1921515 - RNA, 19 nt, Homo sapiens
  misc_RNA (1)...(19): siRNA sense strand
gauauuagcaagcuuagga

SEQ ID NO: 1921516 - RNA, 19 nt, Homo sapiens
  misc_RNA (1)...(19): siRNA sense strand
ggacgaagauggaguuuuc

SEQ ID NO: 1921517 - RNA, 19 nt, Homo sapiens
  misc_RNA (1)...(19): siRNA sense strand
ccaaaccacugagcauauu

SEQ ID NO: 1921518 - RNA, 19 nt, Homo sapiens
  misc_RNA (1)...(19): siRNA sense strand
agaaauuggugcauagcua

SEQ ID NO: 1921519 - RNA, 19 nt, Homo sapiens
  misc_RNA (1)...(19): siRNA sense strand
gcaccucucaguugaauga

SEQ ID NO: 1921520 - RNA, 19 nt, Homo sapiens
  misc_RNA (1)...(19): siRNA sense strand
gaauacacuucgcuuucuu

SEQ ID NO: 1921521 - RNA, 19 nt, Homo sapiens
  misc_RNA (1)...(19): siRNA sense strand
ggaauacacuucgcuuucu

SEQ ID NO: 1921522 - RNA, 19 nt, Homo sapiens
  misc_RNA (1)...(19): siRNA sense strand
gcccauggauugucuagug

SEQ ID NO: 1921523 - RNA, 19 nt, Homo sapiens
  misc_RNA (1)...(19): siRNA sense strand
cuuagaagguggugauauu

SEQ ID NO: 1921524 - RNA, 19 nt, Homo sapiens
  misc_RNA (1)...(19): siRNA sense strand
uuaaagagcccaagagugu

SEQ ID NO: 1921525 - RNA, 19 nt, Homo sapiens
  misc_RNA (1)...(19): siRNA sense strand
agagggaacugaugugguu

SEQ ID NO: 1921526 - RNA, 19 nt, Homo sapiens
  misc_RNA (1)...(19): siRNA sense strand
gcaaagagaaagaaaagua

SEQ ID NO: 1921527 - RNA, 19 nt, Homo sapiens
  misc_RNA (1)...(19): siRNA sense strand
gcucaaugcugccagagau

SEQ ID NO: 1921528 - RNA, 19 nt, Homo sapiens
  misc_RNA (1)...(19): siRNA sense strand
gcaagcagugguuuauaaa

SEQ ID NO: 1921529 - RNA, 19 nt, Homo sapiens
  misc_RNA (1)...(19): siRNA sense strand
agacauagccaaucgauuc

SEQ ID NO: 1921530 - RNA, 19 nt, Homo sapiens
  misc_RNA (1)...(19): siRNA sense strand
aaugauggcuucugaguca

SEQ ID NO: 1921531 - RNA, 19 nt, Homo sapiens
  misc_RNA (1)...(19): siRNA sense strand
uagagaugcugcagucuga

SEQ ID NO: 1921532 - RNA, 19 nt, Homo sapiens
  misc_RNA (1)...(19): siRNA sense strand
gaaauuggugcauagcuau

SEQ ID NO: 1921533 - RNA, 19 nt, Homo sapiens
  misc_RNA (1)...(19): siRNA sense strand
gauaaaguagcaucuguug

SEQ ID NO: 1921534 - RNA, 19 nt, Homo sapiens
  misc_RNA (1)...(19): siRNA sense strand
caaaguaugcuguugugaa

SEQ ID NO: 1921535 - RNA, 19 nt, Homo sapiens
  misc_RNA (1)...(19): siRNA sense strand
gcuauaugccugaaucaaa

SEQ ID NO: 1921536 - RNA, 19 nt, Homo sapiens
  misc_RNA (1)...(19): siRNA sense strand
ccaaugaagcuguuugcua

SEQ ID NO: 1921537 - RNA, 19 nt, Homo sapiens
  misc_RNA (1)...(19): siRNA sense strand
guggguagcugauuccaau

SEQ ID NO: 1921538 - RNA, 19 nt, Homo sapiens
  misc_RNA (1)...(19): siRNA sense strand
gagaaaagauguccaaguc

SEQ ID NO: 1921539 - RNA, 19 nt, Homo sapiens
  misc_RNA (1)...(19): siRNA sense strand
uuggacaucugguuugaua

SEQ ID NO: 1921540 - RNA, 19 nt, Homo sapiens
  misc_RNA (1)...(19): siRNA sense strand
uagagaagcucagaaucuu

SEQ ID NO: 1921541 - RNA, 19 nt, Homo sapiens
  misc_RNA (1)...(19): siRNA sense strand
cugaacaacuucuuccaaa

SEQ ID NO: 1921542 - RNA, 19 nt, Homo sapiens
  misc_RNA (1)...(19): siRNA sense strand
gggaacugaugugguuaua

SEQ ID NO: 1921543 - RNA, 19 nt, Homo sapiens
  misc_RNA (1)...(19): siRNA sense strand
gaagcagaacuugaauaua

SEQ ID NO: 1921544 - RNA, 19 nt, Homo sapiens
  misc_RNA (1)...(19): siRNA sense strand
guaugaagccaaacaguug

SEQ ID NO: 1921545 - RNA, 19 nt, Homo sapiens
  misc_RNA (1)...(19): siRNA sense strand
ggacgauuccagccaauga

SEQ ID NO: 1921546 - RNA, 19 nt, Homo sapiens
  misc_RNA (1)...(19): siRNA sense strand
gaacuucauggucuuaugu

SEQ ID NO: 1921547 - RNA, 19 nt, Homo sapiens
  misc_RNA (1)...(19): siRNA sense strand
guucaucuccuguuaguau

SEQ ID NO: 1921548 - RNA, 19 nt, Homo sapiens
  misc_RNA (1)...(19): siRNA sense strand
ggauuuacccuuggagaaa

SEQ ID NO: 1921549 - RNA, 19 nt, Homo sapiens
  misc_RNA (1)...(19): siRNA sense strand
ggaacuucauggucuuaug

SEQ ID NO: 1921550 - RNA, 19 nt, Homo sapiens
  misc_RNA (1)...(19): siRNA sense strand
ugaauggcaugguugaaau

SEQ ID NO: 1921551 - RNA, 19 nt, Homo sapiens
  misc_RNA (1)...(19): siRNA sense strand
gcucagaaucuuucagcua

SEQ ID NO: 1921552 - RNA, 19 nt, Homo sapiens
  misc_RNA (1)...(19): siRNA sense strand
guaauugucaugccgacua

SEQ ID NO: 1921553 - RNA, 19 nt, Homo sapiens
  misc_RNA (1)...(19): siRNA sense strand
gcagauguaaucgagcuua

SEQ ID NO: 1921554 - RNA, 19 nt, Homo sapiens
  misc_RNA (1)...(19): siRNA sense strand
ccucucaguugaaugaauu

SEQ ID NO: 1921555 - RNA, 19 nt, Homo sapiens
  misc_RNA (1)...(19): siRNA sense strand
gaaucaaaguaugcuguug

SEQ ID NO: 1921556 - RNA, 19 nt, Homo sapiens
  misc_RNA (1)...(19): siRNA sense strand
ggaauaauugcuacuauac

SEQ ID NO: 1921557 - RNA, 19 nt, Homo sapiens
  misc_RNA (1)...(19): siRNA sense strand
guugugaaauguucuaagu

SEQ ID NO: 1921558 - RNA, 19 nt, Homo sapiens
  misc_RNA (1)...(19): siRNA sense strand
caagauuaccgaauuauac

SEQ ID NO: 1921559 - RNA, 19 nt, Homo sapiens
  misc_RNA (1)...(19): siRNA sense strand
cagauuccaucccuguaaa

SEQ ID NO: 1921560 - RNA, 19 nt, Homo sapiens
  misc_RNA (1)...(19): siRNA sense strand
gagcauauuguuaaacuag

SEQ ID NO: 1921561 - RNA, 19 nt, Homo sapiens
  misc_RNA (1)...(19): siRNA sense strand
agcaagcagugguuuauaa

SEQ ID NO: 1921562 - RNA, 19 nt, Homo sapiens
  misc_RNA (1)...(19): siRNA sense strand
ggaaacaacauuugagacu

SEQ ID NO: 1921563 - RNA, 19 nt, Homo sapiens
  misc_RNA (1)...(19): siRNA sense strand
guagagaagcucagaaucu

SEQ ID NO: 1921564 - RNA, 19 nt, Homo sapiens
  misc_RNA (1)...(19): siRNA sense strand
gcccugaugccuuggaaua

SEQ ID NO: 1921565 - RNA, 19 nt, Homo sapiens
  misc_RNA (1)...(19): siRNA sense strand
gauaucugguggacucuuc

SEQ ID NO: 1921566 - RNA, 19 nt, Homo sapiens
  misc_RNA (1)...(19): siRNA sense strand
gcauauuguuaaacuagug

SEQ ID NO: 1921567 - RNA, 19 nt, Homo sapiens
  misc_RNA (1)...(19): siRNA sense strand
ugaaagacauagccaaucg

SEQ ID NO: 1921568 - RNA, 19 nt, Homo sapiens
  misc_RNA (1)...(19): siRNA sense strand
ugaagcagaacuugaauau

SEQ ID NO: 1921569 - RNA, 19 nt, Homo sapiens
  misc_RNA (1)...(19): siRNA sense strand
gagaagcucagaaucuuuc

SEQ ID NO: 1921570 - RNA, 19 nt, Homo sapiens
  misc_RNA (1)...(19): siRNA sense strand
gcaaacaagauuaccgaau

SEQ ID NO: 1921571 - RNA, 19 nt, Homo sapiens
  misc_RNA (1)...(19): siRNA sense strand
cagauguaaucgagcuuaa

SEQ ID NO: 1921572 - RNA, 19 nt, Homo sapiens
  misc_RNA (1)...(19): siRNA sense strand
ggagagugcgugugcaaug

SEQ ID NO: 1921573 - RNA, 19 nt, Homo sapiens
  misc_RNA (1)...(19): siRNA sense strand
uaugaugaauggcuccaaa

SEQ ID NO: 1921574 - RNA, 19 nt, Homo sapiens
  misc_RNA (1)...(19): siRNA sense strand
gagcaugucagucguucaa

SEQ ID NO: 1921575 - RNA, 19 nt, Homo sapiens
  misc_RNA (1)...(19): siRNA sense strand
gagucuuccuauaaaguaa

SEQ ID NO: 1921576 - RNA, 19 nt, Homo sapiens
  misc_RNA (1)...(19): siRNA sense strand
gaagcuguuugcuauaugc

SEQ ID NO: 1921577 - RNA, 19 nt, Homo sapiens
  misc_RNA (1)...(19): siRNA sense strand
aaauuggcaucucuuauag

SEQ ID NO: 1921578 - RNA, 19 nt, Homo sapiens
  misc_RNA (1)...(19): siRNA sense strand
ugucagucguucaauauau

SEQ ID NO: 1921579 - RNA, 19 nt, Homo sapiens
  misc_RNA (1)...(19): siRNA sense strand
gaauaauggcagauuggaa

SEQ ID NO: 1921580 - RNA, 19 nt, Homo sapiens
  misc_RNA (1)...(19): siRNA sense strand
gagaugauauuagcaagcu

SEQ ID NO: 1921581 - RNA, 19 nt, Homo sapiens
  misc_RNA (1)...(19): siRNA sense strand
aggaagagagcaccuuaua

SEQ ID NO: 1921582 - RNA, 19 nt, Homo sapiens
  misc_RNA (1)...(19): siRNA sense strand
ggaaguaugaagccaaaca

SEQ ID NO: 1921583 - RNA, 19 nt, Homo sapiens
  misc_RNA (1)...(19): siRNA sense strand
gacaagauccggcucaaua

SEQ ID NO: 1921584 - RNA, 19 nt, Homo sapiens
  misc_RNA (1)...(19): siRNA sense strand
gaagggaaguacuggaaga

SEQ ID NO: 1921585 - RNA, 19 nt, Homo sapiens
  misc_RNA (1)...(19): siRNA sense strand
ggacggcucuguggacgua

SEQ ID NO: 1921586 - RNA, 19 nt, Homo sapiens
  misc_RNA (1)...(19): siRNA sense strand
gaacaacugcucagggaaa

SEQ ID NO: 1921587 - RNA, 19 nt, Homo sapiens
  misc_RNA (1)...(19): siRNA sense strand
gaagagagaagggauguug

SEQ ID NO: 1921588 - RNA, 19 nt, Homo sapiens
  misc_RNA (1)...(19): siRNA sense strand
cuaaagaaccggcagauga

SEQ ID NO: 1921589 - RNA, 19 nt, Homo sapiens
  misc_RNA (1)...(19): siRNA sense strand
gaaguuugcuggagucaac

SEQ ID NO: 1921590 - RNA, 19 nt, Homo sapiens
  misc_RNA (1)...(19): siRNA sense strand
ccaagaagggcuacgauuu

SEQ ID NO: 1921591 - RNA, 19 nt, Homo sapiens
  misc_RNA (1)...(19): siRNA sense strand
ggacugaggacccguuuau

SEQ ID NO: 1921592 - RNA, 19 nt, Homo sapiens
  misc_RNA (1)...(19): siRNA sense strand
ccaguuugaucacaugaaa

SEQ ID NO: 1921593 - RNA, 19 nt, Homo sapiens
  misc_RNA (1)...(19): siRNA sense strand
uaaagaaccggcagaugaa

SEQ ID NO: 1921594 - RNA, 19 nt, Homo sapiens
  misc_RNA (1)...(19): siRNA sense strand
caagaagggcuacgauuuc

SEQ ID NO: 1921595 - RNA, 19 nt, Homo sapiens
  misc_RNA (1)...(19): siRNA sense strand
gagaaccuacuucaagaaa

SEQ ID NO: 1921596 - RNA, 19 nt, Homo sapiens
  misc_RNA (1)...(19): siRNA sense strand
gaagagccgcaucgagauu

SEQ ID NO: 1921597 - RNA, 19 nt, Homo sapiens
  misc_RNA (1)...(19): siRNA sense strand
aaauguggcugcacuaaag

SEQ ID NO: 1921598 - RNA, 19 nt, Homo sapiens
  misc_RNA (1)...(19): siRNA sense strand
acgaugacaugcuguauug

SEQ ID NO: 1921599 - RNA, 19 nt, Homo sapiens
  misc_RNA (1)...(19): siRNA sense strand
caggaccucuucucuucua

SEQ ID NO: 1921600 - RNA, 19 nt, Homo sapiens
  misc_RNA (1)...(19): siRNA sense strand
gaaagacauguuugacgaa

SEQ ID NO: 1921601 - RNA, 19 nt, Homo sapiens
  misc_RNA (1)...(19): siRNA sense strand
caaaguggaagaauuucaa

SEQ ID NO: 1921602 - RNA, 19 nt, Homo sapiens
  misc_RNA (1)...(19): siRNA sense strand
aauuggaaguucuggauuu

SEQ ID NO: 1921603 - RNA, 19 nt, Homo sapiens
  misc_RNA (1)...(19): siRNA sense strand
gcagcauccuggugacaga

SEQ ID NO: 1921604 - RNA, 19 nt, Homo sapiens
  misc_RNA (1)...(19): siRNA sense strand
uggagaaccuacuucaaga

SEQ ID NO: 1921605 - RNA, 19 nt, Homo sapiens
  misc_RNA (1)...(19): siRNA sense strand
ccacagcggccacuucaug

SEQ ID NO: 1921606 - RNA, 19 nt, Homo sapiens
  misc_RNA (1)...(19): siRNA sense strand
aauagugccugcucccaaa

SEQ ID NO: 1921607 - RNA, 19 nt, Homo sapiens
  misc_RNA (1)...(19): siRNA sense strand
ggagaaccuacuucaagaa

SEQ ID NO: 1921608 - RNA, 19 nt, Homo sapiens
  misc_RNA (1)...(19): siRNA sense strand
agacauguuugacgaauac

SEQ ID NO: 1921609 - RNA, 19 nt, Homo sapiens
  misc_RNA (1)...(19): siRNA sense strand
ucaacagccucaucuccaa

SEQ ID NO: 1921610 - RNA, 19 nt, Homo sapiens
  misc_RNA (1)...(19): siRNA sense strand
aaaaggcgcuucaacauca

SEQ ID NO: 1921611 - RNA, 19 nt, Homo sapiens
  misc_RNA (1)...(19): siRNA sense strand
ggcaagagauugggagagu

SEQ ID NO: 1921612 - RNA, 19 nt, Homo sapiens
  misc_RNA (1)...(19): siRNA sense strand
ucaagggccugaagcuaca

SEQ ID NO: 1921613 - RNA, 19 nt, Homo sapiens
  misc_RNA (1)...(19): siRNA sense strand
ggaccuugcagaauuggaa

SEQ ID NO: 1921614 - RNA, 19 nt, Homo sapiens
  misc_RNA (1)...(19): siRNA sense strand
ccacaagcggugaucauga

SEQ ID NO: 1921615 - RNA, 19 nt, Homo sapiens
  misc_RNA (1)...(19): siRNA sense strand
ggacuucauggacaccuuu

SEQ ID NO: 1921616 - RNA, 19 nt, Homo sapiens
  misc_RNA (1)...(19): siRNA sense strand
gaaccuacuucaagaaaag

SEQ ID NO: 1921617 - RNA, 19 nt, Homo sapiens
  misc_RNA (1)...(19): siRNA sense strand
ccaccuccauccucacaga

SEQ ID NO: 1921618 - RNA, 19 nt, Homo sapiens
  misc_RNA (1)...(19): siRNA sense strand
gagacaagauccggcucaa

SEQ ID NO: 1921619 - RNA, 19 nt, Homo sapiens
  misc_RNA (1)...(19): siRNA sense strand
ccaaggcugucaccaggau

SEQ ID NO: 1921620 - RNA, 19 nt, Homo sapiens
  misc_RNA (1)...(19): siRNA sense strand
gaauuggaaguucuggauu

SEQ ID NO: 1921621 - RNA, 19 nt, Homo sapiens
  misc_RNA (1)...(19): siRNA sense strand
ggaagagccgcaucgagau

SEQ ID NO: 1921622 - RNA, 19 nt, Homo sapiens
  misc_RNA (1)...(19): siRNA sense strand
acccggaccuugcagaauu

SEQ ID NO: 1921623 - RNA, 19 nt, Homo sapiens
  misc_RNA (1)...(19): siRNA sense strand
uccaggaccucuucucuuc

SEQ ID NO: 1921624 - RNA, 19 nt, Homo sapiens
  misc_RNA (1)...(19): siRNA sense strand
acaagauccggcucaauaa

SEQ ID NO: 1921625 - RNA, 19 nt, Homo sapiens
  misc_RNA (1)...(19): siRNA sense strand
aagacauguuugacgaaua

SEQ ID NO: 1921626 - RNA, 19 nt, Homo sapiens
  misc_RNA (1)...(19): siRNA sense strand
gacgaugacaugcuguauu

SEQ ID NO: 1921627 - RNA, 19 nt, Homo sapiens
  misc_RNA (1)...(19): siRNA sense strand
aaagacauguuugacgaau

SEQ ID NO: 1921628 - RNA, 19 nt, Homo sapiens
  misc_RNA (1)...(19): siRNA sense strand
ggacaccuuugagccuuuc

SEQ ID NO: 1921629 - RNA, 19 nt, Homo sapiens
  misc_RNA (1)...(19): siRNA sense strand
caagauccggcucaauaau

SEQ ID NO: 1921630 - RNA, 19 nt, Homo sapiens
  misc_RNA (1)...(19): siRNA sense strand
agccucaucuccaacaauu

SEQ ID NO: 1921631 - RNA, 19 nt, Homo sapiens
  misc_RNA (1)...(19): siRNA sense strand
gauccagccgggacugauu

SEQ ID NO: 1921632 - RNA, 19 nt, Homo sapiens
  misc_RNA (1)...(19): siRNA sense strand
ccugguacaugcaguaucu

SEQ ID NO: 1921633 - RNA, 19 nt, Homo sapiens
  misc_RNA (1)...(19): siRNA sense strand
gggaaaugcagacaugauc

SEQ ID NO: 1921634 - RNA, 19 nt, Homo sapiens
  misc_RNA (1)...(19): siRNA sense strand
uagcacaucugggaaaugc

SEQ ID NO: 1921635 - RNA, 19 nt, Homo sapiens
  misc_RNA (1)...(19): siRNA sense strand
guggagaaccuacuucaag

SEQ ID NO: 1921636 - RNA, 19 nt, Homo sapiens
  misc_RNA (1)...(19): siRNA sense strand
gcagaagaccguggaguac

SEQ ID NO: 1921637 - RNA, 19 nt, Homo sapiens
  misc_RNA (1)...(19): siRNA sense strand
caccaggauuggcaagaga

SEQ ID NO: 1921638 - RNA, 19 nt, Homo sapiens
  misc_RNA (1)...(19): siRNA sense strand
gaaaugcagacaugaucca

SEQ ID NO: 1921639 - RNA, 19 nt, Homo sapiens
  misc_RNA (1)...(19): siRNA sense strand
ggagaucgaggagcucaau

SEQ ID NO: 1921640 - RNA, 19 nt, Homo sapiens
  misc_RNA (1)...(19): siRNA sense strand
agaagaccguggaguacau

SEQ ID NO: 1921641 - RNA, 19 nt, Homo sapiens
  misc_RNA (1)...(19): siRNA sense strand
aaauagcacaucugggaaa

SEQ ID NO: 1921642 - RNA, 19 nt, Homo sapiens
  misc_RNA (1)...(19): siRNA sense strand
gcgccaguuugaucacaug

SEQ ID NO: 1921643 - RNA, 19 nt, Homo sapiens
  misc_RNA (1)...(19): siRNA sense strand
gaaaaggcgcuucaacauc

SEQ ID NO: 1921644 - RNA, 19 nt, Homo sapiens
  misc_RNA (1)...(19): siRNA sense strand
agccgggacugauuccuuu

SEQ ID NO: 1921645 - RNA, 19 nt, Homo sapiens
  misc_RNA (1)...(19): siRNA sense strand
ggccuacagugggaaguug

SEQ ID NO: 1921646 - RNA, 19 nt, Homo sapiens
  misc_RNA (1)...(19): siRNA sense strand
gcucaaugccaccaucauc

SEQ ID NO: 1921647 - RNA, 19 nt, Homo sapiens
  misc_RNA (1)...(19): siRNA sense strand
uacagcagcacaaggauga

SEQ ID NO: 1921648 - RNA, 19 nt, Homo sapiens
  misc_RNA (1)...(19): siRNA sense strand
ugcagaagaccguggagua

SEQ ID NO: 1921649 - RNA, 19 nt, Homo sapiens
  misc_RNA (1)...(19): siRNA sense strand
aaccagagcccguguccuu

SEQ ID NO: 1921650 - RNA, 19 nt, Homo sapiens
  misc_RNA (1)...(19): siRNA sense strand
gaguaucacaaguggagaa

SEQ ID NO: 1921651 - RNA, 19 nt, Homo sapiens
  misc_RNA (1)...(19): siRNA sense strand
guugaagaaugcccguauc

SEQ ID NO: 1921652 - RNA, 19 nt, Homo sapiens
  misc_RNA (1)...(19): siRNA sense strand
uguccuugguguugaagaa

SEQ ID NO: 1921653 - RNA, 19 nt, Homo sapiens
  misc_RNA (1)...(19): siRNA sense strand
ggacgaugacaugcuguau

SEQ ID NO: 1921654 - RNA, 19 nt, Homo sapiens
  misc_RNA (1)...(19): siRNA sense strand
ucgacacggucaacaaaca

SEQ ID NO: 1921655 - RNA, 19 nt, Homo sapiens
  misc_RNA (1)...(19): siRNA sense strand
ucuccacacuuucuucaca

SEQ ID NO: 1921656 - RNA, 19 nt, Homo sapiens
  misc_RNA (1)...(19): siRNA sense strand
ccaaaguggaagaauuuca

SEQ ID NO: 1921657 - RNA, 19 nt, Homo sapiens
  misc_RNA (1)...(19): siRNA sense strand
uaagcagccccacaaaaua

SEQ ID NO: 1921658 - RNA, 19 nt, Homo sapiens
  misc_RNA (1)...(19): siRNA sense strand
ucuucuagccgcuccauuu

SEQ ID NO: 1921659 - RNA, 19 nt, Homo sapiens
  misc_RNA (1)...(19): siRNA sense strand
ccacggaagggaaguacug

SEQ ID NO: 1921660 - RNA, 19 nt, Homo sapiens
  misc_RNA (1)...(19): siRNA sense strand
caucaucaagccgcuguuu

SEQ ID NO: 1921661 - RNA, 19 nt, Homo sapiens
  misc_RNA (1)...(19): siRNA sense strand
gcaggagagaggccagaug

SEQ ID NO: 1921662 - RNA, 19 nt, Homo sapiens
  misc_RNA (1)...(19): siRNA sense strand
cacaagcggugaucaugac

SEQ ID NO: 1921663 - RNA, 19 nt, Homo sapiens
  misc_RNA (1)...(19): siRNA sense strand
cggaagggaaguacuggaa

SEQ ID NO: 1921664 - RNA, 19 nt, Homo sapiens
  misc_RNA (1)...(19): siRNA sense strand
caaagcgccgucugucauc

SEQ ID NO: 1921665 - RNA, 19 nt, Homo sapiens
  misc_RNA (1)...(19): siRNA sense strand
acaaagcgccgucugucau

SEQ ID NO: 1921666 - RNA, 19 nt, Homo sapiens
  misc_RNA (1)...(19): siRNA sense strand
caucagccacagaaguuug

SEQ ID NO: 1921667 - RNA, 19 nt, Homo sapiens
  misc_RNA (1)...(19): siRNA sense strand
aagcuacaguggagagaca

SEQ ID NO: 1921668 - RNA, 19 nt, Homo sapiens
  misc_RNA (1)...(19): siRNA sense strand
uaucacaaguggagaaccu

SEQ ID NO: 1921669 - RNA, 19 nt, Homo sapiens
  misc_RNA (1)...(19): siRNA sense strand
ucaacaaagcgccgucugu

SEQ ID NO: 1921670 - RNA, 19 nt, Homo sapiens
  misc_RNA (1)...(19): siRNA sense strand
gcaugacuuuggccuacag

SEQ ID NO: 1921671 - RNA, 19 nt, Homo sapiens
  misc_RNA (1)...(19): siRNA sense strand
aauccugugugccacuuug

SEQ ID NO: 1921672 - RNA, 19 nt, Homo sapiens
  misc_RNA (1)...(19): siRNA sense strand
ugauuccuuugcagccuaa
